United States Patent Application Publication US 2019/0348154 A1 - sequence listing, part 116

SEQ ID NO: 436676 - DNA, 387 bp, Serratia marcescens
atgagtggttggctgcaaaaactgacgcatggcagtttagtgctcttgctgctggtggctattagcctaggtggctacagctcattgctatcacatcgattggatctggcacggaggcagtctgcggagcagcagaagacgctggcgcagcaggcaaagttgatcacctcattgcgcacggatgacgcccgcaatcgcgcattgatggcagaacaacaacggagagagcagcagctgcgccagcagggcgaaaactaccagaggaaatatcgtgaagcaatacagaatgatgagtgtagtcggcgtgctgctcctgtcactgttcttgacctcttgcgcggaaaggataccgccaccactggatcctatcgttctgttgccccctga

SEQ ID NO: 436677 - DNA, 408 bp, Serratia marcescens
atgagacttcaaacggagaggctgcgtgaaatcgcagaagatggctttattgaacacggtgaggccaaagccatggctgctgaactggtggctggcagggaagtaaaaccctacggttatctgcgagataatggaggtcaacttcaaatctccattggcccagagcgcccatatgatcgatctggcgaatatgcgactccgtggggtgctatttacgccaggccgactgcgctggcaagccctgtctattgggaaatgcgttactggaacagcggccataactgctggcatgactgggaacgcatcacagaagaaaaatatgccgaactgagcgttgctttcgcaacggatagcgatcacgagttccgcactttgtactctgtacaaatggaggtgatgcgtggataa

SEQ ID NO: 436678 - DNA, 999 bp, Serratia marcescens
atggctggtgattggatcaaaatgcggccgtcgctgttgaccaacccaaaggtgaatgggatagcgaggattcttgaaacgtcgccagaggttggtagggcgctgggtgtgaattttaatggcgcgatgaacgcaatcgtaactcgtaacgttatgcgtaacgtaacggtgtcgttactgctaacggtctggggtgctgcaaatgaacatacgcgtgatggcgtattcgttaatgccgacctttctgacatcgatgacattgttggcgttcccggatttggtagcgcgatggtcagtgttgggtgggctgtattcaacgcggtagagggcagcgttactttgcctaacttcaatgaatacaacgcatgtggcgaggttcgacgcagtaataatgctgaacgacagcaacgataccgagacaaggtaaaggcagaaaaggaggctaggttacgtaacgtaacggataacgttacgcataacgatagagaagagaagaatagagaagagaagaaagatagaaaagatccccccaaccccccgagaggggatgggaaaaattttgattttaattctctcaaactacctgaatggctacaggtggaaatatggcgccagtggggagaattttgcatcgagttgggtaaaccaataaaaacccgacgtgcggcgatggcggcaataaaacggctcgacgagtttcgccaggagggacactctcctgagtcagtgattttgcatagcatcgcgaatgattggaaaactttatcaccaccgttgggaaaacaatctgaatcaaagggcattgattacgatggggcgtttaatcgggtcatattgcaaaaacgcagcccggtgaataaggccgaggaaatagccagggaaaaatactcaaaagctggattgcgtatggcgaaagaatatgagtgccggatcgcctggagaagttatctaagccaggcatatcgagaaacgagtgaaataccatacacgggaggttag

SEQ ID NO: 436679 - DNA, 228 bp, Serratia marcescens
atggcagtttttactaaagagcaggtggaagcgcaaatccgtgatcagttggtgcgtgatggctttgctgatgatgtggctcgttctgccgctatgcgtggggcagatcactacagcagcagacctaacgcaacgatagccagcagcctggctattgcaaaaacgtacgcaaaaccgttgaaacgagtgaaagggaagcccaattgcaacgccaaatctcgcaaatag

SEQ ID NO: 436680 - DNA, 717 bp, Serratia marcescens
atgtggagttatcccggatgctgcaaagacctcaaaaacacgcccatgagggatgacgcccttgcgcttatttttccatttgccgatagattgctgagaaatccccagccgtttggcaagcaatttcgtcgatcccacggcatctatcgcacgaaggagagcttctcttgtcatttcgatttcaacctttgttgttatgaacaagccagattaaaccacagggttacacaacaatgcaaccatgaggttattcatagtattaaacctttgggttataattttgatatgaatgaaaaaaatgcttcaaaagagccagccattgcggctcgcctataccagttgatgaatcaaaccggagtcaacaaatccggtttggcgcggatatgtggaatcagcccacaggctgttggccgctggttcaccaaaggaacaatgagtaaagactcagcattcaagttatctgaggcatttggagtatctgtagcctggctactcaatgatgatggtgctgttgaaagccctgccataccatatccagaggtgttaagtgatcggcatcgagaacttctcaacctgtttgaccgccttccagaaagtgagcaacagaatcacatagaggctctcagaggaatggtagaaaattacgacaggctcttcggtgaacttctaaagtcgagaaatatcaaagatataattgaggccaagaaagaaaaataa

SEQ ID NO: 436681 - DNA, 822 bp, Serratia marcescens
gtgtttgattacgaagttgtggtgtgtacttacaacggtgaacgctacattgtcgagcagcttgcctcaattgtcggccagacaatctctccgcggaggatcattgtcagcccaaaagggcccgcgcataatttcctgcatgcgctttctttgacgacggcaacgaacgtctttttgagcgatcaggatgacgtttgggtaactgataaaattgaatattatcagcgagcggtcagccaaatcggcgatgagtccgtgccgttattaatcttttcagatgctgaattagttgacagcgaacttcgcttcttgagcgcttcttttttacagaatgagcgacttaatcctgatcaccagttggtgtttcctcgcttgcttttccaaaactgtatccagggtgcaactgtgatggtgaatcgatcactgcttaagcatcttcgccctagccagcatatgttgatgcatgattggtggctgggtttgctggctaccacttttggaaggttggtgttccttcctgaacgattgataaagtatcggcaacatgcgaataacgtggttggcagcagtggctatggattgaaacgtattctggcaaaatttatgcggctgccctcagttgcacatcagaatcggttagtgattgagcaggcgataagtttctatgagatatacggtggggaactcaaaaaagaggataagaaatttttggagaggatgttaagatcccgacgttttgtgctttggcagcttttcttgctaaaatgtggggttgcaagaacaaccattacgagaactatttccttgtatttcttatattag

SEQ ID NO: 436682 - DNA, 246 bp, Serratia marcescens
atgatgcagttaaccctgggccgacaccactttaccctgagcgataacgacgcgctgtttgtggccgaagctatcctgctgcaacgccagcacccggatattatcttgccggaacaccgcagcactaaacacgatgtcatccgtctgacctgccgccagggcgcaccacacctgttttgcgccgggccggtacctctgaccgacgtggtcgcccacgcccgccacgacctgcaaaccggccgttga

SEQ ID NO: 436683 - DNA, 1113 bp, Serratia marcescens
atggaaacgttgaaatacattctgatcaagctggttgattggaaaacacggcaacgcaagatccagtaccttattatgctgcttggcacggggatgctgagtgcaaacaaatatctggggcagtctttaacccttcagaaaggagatctccaattcgccctgtcgttgtctgaaggcaacatcatcacggattacctcgtcaatatcgcggctatcttcatcatcttgggcggatttatctggttgatcatcgacgcctaccaagaagctaaaatcacggtgcgcaaaaaggtagtggtgatcgaagggcgaggtctgcgcaaggtaataacaaaccccttgcataagacggcagcgaagcacttcaccggcaaaatagataggctggatatcgacattactcaacggattagggacggtgaagttatctattcgctggatacctttaacaataatatcaaaaccattgtcagtaatattgcgacccgcatcgacggtatcgatcatcaggacctgacgctggtgtacgggggcctgttgcccgtaccgttcactttctacattggggcgatcctcgacgacaatggcccggtatccgtatttgattgggacagggctcaggaagattggcaccttatcgataataatgccgacgatgaccatgccagctttacgatcacagaagaacttcaggatcacccgtcgccagcagaggacgtggtgttggccgtgtcagtttcttacctagccgatattgcgggcatccgtcgcacctttcccaattatccgatgtcgcatctgacgctggactgtatgaagtttggcaaccactggtcactatccaaacagagccgactcgcattgcaattcactgaatacgcaaaaatactgaccgcgaaaggcgcaaaacgcattcatatcgtcttagccgctcccagcagcatagcgcttaatttcggccgccgttatgacaatcgcaatctggcacaagctcttgtgtaccaatacgaaaaagatcacgctatcacttacccttgggcagttgaaattccagggcatgggaagcgcgaaggttcggtattaatgacatccaaacctgctggtacaagttaa

SEQ ID NO: 436684 - DNA, 555 bp, Serratia marcescens
atgaacgctgaacaggaatgcttcatctcggttgacgttgagacttccgggccaatcccaggagtatgcagcctgttatccatcggcgcctgtgtaatcggacacccgacagagcgcttttacatcgaattgcagccgttgaacctgcactacgatcccgaggctcttgccgtcaccggttttaatctgcatacccagataatccgcggcattgcccccgaggaagccatgaagcaatttgcccattgggtatcatccgtcaccaacgcgcgggtaaagccgatttttgtcggtttcaatgctgctttcgattggtcgtttgttaattattactttcatgcttacctcgggcacaacccctttggttttgccgccgtcgatatcaagtcgatgtacatgggagtgaccggatgtcattggcaagaaaccaaatccagccgcatcgatacccggttcaacataaaaaatcccggcagccacaacgcactggatgatgctctttatcaggcagaaatgtttataaaaatcagagagaaatctcaaggagaaagctaa

SEQ ID NO: 436685 - DNA, 492 bp, Serratia marcescens
atggtgcctgagatggttatcaaatatcacctgcaaccgctgaccatagcccagcaataccaggcgctgaaaacaagcggcccgtatgaacggcttattattaccggcaaagatcgtacgctgctttgggaagggtggctgcaaccttcattattcagccggcgctataaagtcacggtgcgttacaaccttggtacagcgcccatttgcatagtgacagaaccggatctctattcattggccggcgctaaaaccatcccgcacctctatcgaaaagataagcatatccccggagccaaactgtgcctgtttctgcccagttcgcagagcgacgacaaacgcagtgaatggcgcagccagctgaaaatcagcgatacagtcattccctgggcttctctgtggctgttttattttgagcagtggttgcacaccggccactgggaagggggcggcaaacatcctgcggccagtgaggttaagaatgaacgctga

SEQ ID NO: 436686 - DNA, 1272 bp, Serratia marcescens
atgagtacttcaaccacagtcgcaagaaatttgccgacacagaaaaaacaacgcattgccgacttactgtcgcaaattattgaaacgttggatcttaccaaaacccaatacgccaatattgaaagcgcctataacggcgtgggtcattatctttccgatggggaggatccgttgttgaaagaggcggttatctacccgcagggcagtgtgcgacttaataccaccgtcaaacccaagaacgaagaagagtacgacattgatctgatctgttatctgcctcatgccaccgaaacggattataccggtgttattaccgccattcgtcagaggctggaatcgcataatacttacaaagaactgttaagcgatttaccccgaggattccgtatcaactatgccggcgattatcatctggacatcactcccggtcgagattatcaccactataacgagcgcctgggccagcccctgtgggttgttgatgacaaaaccgactggaaagaatccaatccccggggctacgccgagtggttcgatgaaagtgccagcaaacaaccgctccgcattgcccttctcacggacacggccagccgagtcggtaccgaagccttgcttcccctgcctgaccatacggataagaagctgctgaaccgcattgtgcagatactcaagcgtcaccgtgatgagtgggcgtttgaattggatgaagatacccaacgttgcaagccgatttccgtgatcctcactacgctggcctgccatgcctacaaccaaatcattgccgaacgacgcgcctacgacaacgatctggacgttctgcttgatgtgcttgagctcatgcccgatttcattgatggcagccagggggcagttcatgtcagcaacccccatatgccggaggagaactttgccgagaagtggaaccggcgggaaaacggggaaggccaaaaacgccgtgatgccttccagcaatggcacgtggctgcgctggctacgttcaatacgctggccgagagcatcggcgaagataacctgttcttaaacctgcagaaagacttcggtgaaacgccagttgaggccgtccggagccgcctgttgaacgaagtgaaacagtcgcgggaacagggggcgttgcatgtagacaagaaaaccggcggcttgctggtcgccggtgccagcgccacagccaacgccggtatgcctaaaaacacgttctacggcacggagtcggtaagccagcccgtacccaaaaacaccttctatggtgcctga

SEQ ID NO: 436687 - DNA, 504 bp, Serratia marcescens
atgccccgcaggctgaggccagcattgtctgcggtgtgcctggcgttgatggtttggggtgcatgtttccctgtcatggcgaaaaaggccaccgcgacggtgaccgtcaaaattacgctgacggcgccgccgtgcgacattaataacaacaatctgattgaagtgaattttggcaacgacgtgatgactacccgcgttgacggcgagtacaaaaaaatgccgatcaactacacgctgcaatgccaggggggagcgtcaaatgcggtgcgaatgaggattgatggccagggggcggcgtttgacggcggggtattgaaaaccaacaaatcggattttggcattgagctgcttaacagtggcaagcgactgcccatcaatggctggctgaattttacgtaccctaatcagccaacgcttgaggcggtaccggtgaagcgcagcggcgccaggctgagcggtggggcgttttccgccagtgcgacgatgaaggtggaatatcgatga

SEQ ID NO: 436688 - DNA, 534 bp, Serratia marcescens
atgaatgggcgaaaaatgcaccttaacgcggttttgattgctggactgctggtatttagctgcgcggcgcaagccgacaacgttcgcctgcacggtgccctggttgccgagccctgcgtgatcgcgccgggggatgagaacgtgcgcctggattttggcacggtgatcgacaaatacctgtacaccaatgagcgcacccacgggcagacgttcgagattcacctgacggaatgcgacctgagcctgggcaaaacggtaaaagtgaccttcagtggcagggaaaacccgagtcttaaagggctgttggcgattgacggcggcagccgggcgtcgggtatcgcgatcggtatggaaacccaggccggccaacccttgccgctgaataaaattggcgacggataccggttgatcagcggcagtaataccctgacggtgctggcctatgtgcagggagagccgcaggcgatcgcccaccgcaccatagaacgcgggccattcagtgcaatcgccaccttcaacctggaatatgaataa

SEQ ID NO: 436689 - DNA, 558 bp, Serratia marcescens
atgaataaggctgaacgcgattggctggaagcctatagctggctggggacgcggcggaggcatgcaccgcccaatgcggatatttggcatctgcggttccattggcaagaacgtggtgaggcgctgtaccggcgagtgtgcggtggcaattaccgtttgcaaccgatgcagcttcactgccagcacgacagaagctgggtgcagtggagcgcgcaggatgcgctggtgctgaaatgggtcaccttacaggtggaaaatcacctgcctactcatcaacgctgcgttcacctcaaggggcgtggcgggggcagacagtcggtagagcaggttgggcaagcgctcacttctggcgagtacgcctttgtctatcggacggatatccgggggtattaccgccatatccgcaagacgcaggtactgagtctggtgcaacagcacattgagaacccggtgctaactggccttatagagcagtatttgttttacagcgtcgaggatggggggagatttttacctcgcagcgtggcatttgtcgcggttgtgcacttagcccgctga

SEQ ID NO: 436690 - DNA, 825 bp, Serratia marcescens
atgaaaagaacggtattaattgcagtgactgggttaatctgtctacgtgcgcacagcgcgtatatctttcctcttccggactataccactatcttttggcgtgattatattcacatcggcggcctcaccatatccgacttcaaatactacgcgggcggtcagtaccgccggtgcatgtttcaaatacaagactcatttacgtcgcccgatggtaagaacaggggaggcgcgacgtatatgtggcagaccagtgccgggaatactggaaaggatatggaatgcctcggtgtaatgtgggggccctgggacgacaaaccaacaaccgaacggaagatccgacaggcactcgagaaccttcccggtcatcctatacggaacaacggtggatctggctggtcaaatctgggggatggtaaatcttgcaaaattatagcagtaatccaaggtcccgcgggttattggggcagcaccgtaccatgtgggaaggagaaaccacccgtaaactgctcctttgatgcaccggctgtgattagtcatgcaaacgcgcaggctggagatgtccattcgtctgccaggagttccgcccgcctgtcatgcagtgggaaaagtagtgtgaaactgaaattacaatcgtctaaagttgacctgactagcggcagggactctataacaaccgaactgtctctgggcgatgatggtggggggcaggctatcgttgtagctgaccccatggcggtcatagacatcaacagtaatatcgtcgtgcagggcgcaccggcgggtgtattcgttgggtctaccgtcctgactgcatcatgggattga

SEQ ID NO: 436691 - DNA, 774 bp, Serratia marcescens
atgaatacatatgaaagtggattattagaagtagcttggtatctggctaagtatggaaaaaaaaagcctcctgaagttctgggtgttgacacatggaaagcagcaatatcactattttatccaacatttggtacaggtaagacgagaattgaattttataacagtctaaaaagccaccgtgatcgttttgattcttggctaagtgatgtacgcacaggctggcggaatgctgatggttctcctggcgagctcccgttgtctgctcagattattatgaacaaaatgaacaaactacccgagtcacttatagaacaaaaaattctatcttggctgtcgataaccccttcagaacaaaaactggctgatatattacttattcaacaagataaaagtctggatgaaacgatgaaagaacgattaatcgcttcaaggcttggacaaggtgaattcaggaaaaaatgccttaaactgttccctgcctgtcctataactggtatttcttttcaaccgctgttaagagctagccatattaagccttgggccgcgtgccagaatggtcatgagcgactggatccttataatggaataatgttggcagctcatattgatgctctttttgaccaaggatggctgtcatttagtaataatgggcacatcttaattagcactgagcttgattttgaagtacaaatacaactaaacctacctgaaaatatccctccattctcggcacagcatcatcactatctaaatggcatagagaaaatatattaa

SEQ ID NO: 436692 - DNA, 564 bp, Serratia marcescens
atgaaaaagtttgtagggtgggcgcttaagcagcccgatggctggcagaaatggatcacgttgttactggcatacacgggggcgagaagaggcgagataggaaagttggagaagtcacaaatcaaattcgatgaggatagccagcgttactatttcctgattgctgaaggagggctggggaaaaccgaaaatgctacaaggcaggtagttattcaccctaagttaatcgaatggggtttcatggagtacgttgatcgccagtggaaagagtggattttctcggaggtggtaggtactaatatgacaaagattggcaaagtatttgctgacctgcgtgatcagcttggtattccgtatcttgatgattatggacaacggtgtttactgcattcggtacgtcactcagtatgctctgctgcaatggttggatgggtgtcgaatattctgcacctacagcagacggtagaccacgagaagagcggcggcatcacaaaacgctatctgcatacgttccctctttcctcggtttcatatgtgattgatggaattaattgggagtcctaa

SEQ ID NO: 436693 - DNA, 813 bp, Serratia marcescens
atggcgtgcgaaataccccaaattgttatcgacaaaacaaaggatgttgaacaggaaaggcttactgccttaaaagaaaaagaaagttcggagcgtgatgtctatgatgcgcatttggaagatgaagatgacgatgaggatgtcgagtcaattaataaggatcttcttgatgttaatcggtcatacaaagctgttgaggtattaggccaaattataagaaacagaaaaggttctattcctattccacagcttgagaagttgggtcgagaaacctatgctataggttttcgttttttaggattttattattctataactaaggaacttaaagatgaaattatagccgaggttcaccggcttatttcagagaaaaaaaattggacaactgataaaatcgccaaagaagcaagtttattttattggacatatagctatgttatgtcattgaatgtcataaagaaaattgcgtattcagttgggcataaagatcttacagcatattacacaagtctatcaggttactttggttcagagataagtaagttagtagagataactatccagttagagtttactaagaaaattaatagaaatgatattgagtcaatttggttgttagtcaaagataatatgatgactcgtagattgcttcaagaaattatcataactcacctacatatgcattataccaatcatgaggataaagcttggatagcacaaaaactaagtatccctataaaggatcaggtttcgatgcaaaaacgtaatgcattaaaaacaccacaattgaaaattgataaaaaagacttataa

SEQ ID NO: 436694 - DNA, 834 bp, Serratia marcescens
atggaagacaacaataagactgccctgggggaagtcatagccaaagcaatggcgataaagggtattccaaagcagaagcatatcagccatacaagccgtgtactggatatcacaacagccgcagcacagaagaagatgacaggggcctctaactgggaggtatctcaactgatcagagtgattgactctatcgacatgaagatgagtgaattcttcgacatatatagttattcagtaaatgaagtacataacgcgatctggaacaatggaaagacaaatgttaaatgcaaaatctatttaacagaaattaattccaatttcccaacggagtactccgctttaaaaataaacgacgagtgggttgtgttccacactgacgatatcaaagatgatgtattattcgagtccaagcgtaatattgaaatgattcagttttatccacaaaagcaaaatataaaaaaacatcgcattgcaattcttgatgacgaaaagaatattgtggatagtcttctggaaattataggtaatgatgaatacattgtcgatccttactatgacattgaatccctggaagatagcctgaagcgtagtccttatgacgcttatattctggactgggttgttgggacgaaaactgtttttaacacaatcaaagaaatcagaaagtcagaaaataaaaatgccatgattctggttcttaccggacagctatccggaatcgttgacagagaaatagcaagtgcaataaatgattatgacatcactggaccctatgaaaagccgatcaaagccagtgtaatcaaatcactagtagataaacacttccccaagtga

SEQ ID NO: 436695 - DNA, 1686 bp, Serratia marcescens
atgctgaaggcaatcaaggcgctgctggtcggcaccccagaagtgccggccaggagcaaagcctcatcacctgcggggccagcggggtattttatgccgcagtcagccacgcagctgctgaacatgccagcccgtaaacagtgccttcagcagctgtgggagaacagtgcactgccaaaggatttgtacgagcagttctacctgcaaccacttcacaagctggtcacgctgatgcaggtgttgccggcagcgccgcagggtgagtatgccagggaaggggggttagttgatgttaccctgcagacgacgacctatgcggtgcgtctggccaaagggcacatgctgccaccaggcgcaccgcccgaagagcaatcagcccagaatgtgcagtggaatgtcgtggtgttttacgctgcgctttggcattacctgccactgttgagccagctgcagggcgagttccaaagtggccgtgcctggttacctggtctgacggtgccgagcgaaccctaccgttttcgcctcagggcgactccgtcagcccctgcattggcatcaagtcaaagtgcaatgattgctgcacggctgttgcctgcagaggtcatcgattggctatcaacattgccggcggctacacattcgttgatggcgatcgcttcccgacaacccagcgcattatctgtgatagacgacattatcctggacgcggccaggctggcgcggggcgatggtttgttcgtatcgtcttcgccggtatctatctccgacacattgaccgtagccttaccgtcggtggcgccgcctactgaaaatatcacctcttcagtacccgcagttgatttgcaaagtgcagtcagcagcaccaatacaccgctcgttgaggagccgttgcaggcggagacattaaatcagcccgaagagacagcgacggcggaattactgagctctgctttggatgcaccggttaacgataagcctttagctgagatggtcctagcgtctgaagcggtggttggcgttgaggaggatatgcaggctctgttgtcattaatggcggttgaggtgtcagcaccgacttgccaagttagccaggaagagggagacgcccctcagaaagagagccctatccctgaaaataaccaggagccggtacatgacatacctactgtaattgaagataactgtgattcgccagacgtaatcgaaccttttttatcggagagtatcgatacaagggctatttcagagcctcagcattcatcaaagaagccacagttagaagagaataacgcggaaggtaatttgattgcaggaaataatattggggattctttcctgcagtggttgagcctcggagtcaagaaagggggtatatcaattaatactatagattccagagcacatattgtcagtggcttcgtatttctctgtgtgccagatatttttcatctgtatatcaaagaaaattatttggagcgtactgaccgaaactctatccaaaaggcgtttgaaaaactgggaagacatcggatccgtaaggggcagcgattctttattggccatctttatgaaaagccagaagggatgggttcataccgtcgcatcaatggttacctgattaaggcaaatagtttatatggcggaacaagagtacccgaggacagccagttactcgtgatcccgtag

SEQ ID NO: 436696 - DNA, 231 bp, Serratia marcescens
atggtgagttctgttgaacaggacaaaatgagtctttttttatacgatagtgaaatcaccgtgataaatatgatgaaagatagaattagtaataacggttttttcctaatgtttaacatgattcaccacgccatctcttttatagtttcacatttattaatatttgggggattggtgcaaatccctaatgatatctctttttctttattcaatcggctaagctcaaaatga

SEQ ID NO: 436697 - DNA, 741 bp, Serratia marcescens
atgtactacatattgaacaaaaccttaaagttcgtccctgcaacctctgagctcgctataatcaatgaggagcaaagcagtatagtattatcgaaacccgcaaccaggttgctgcttgttttgatcggtggcgtcgatttagtgcatccacgagaagagttattgaagagtgtttgggaggattacggccttacaccttcaaacaataatttatacatggcgattagtgagctgagaaaatcattaacttccatcggtgggagtgagaagatgatagtaacaatcccgcgtgttggactaaaactagaggccagcattgacgtcaatgataaggagacagtcattacaccatcattgaaagatacggtgaaattaaaacacaaaagtaacatatcaatagctgtatccttgctattaatcatttccgcccccctcttttatatacataatacaaagcctgtagtaaggattcagtccttcgaagaatccctatttttgcagcatggcacatgcgacatatttttagaaaaaaacatgcacatcaacaacccagatgaattgaaaaaggatattattgacaagttaaacaaataccgaataaactgcaatagcgtgaaaaaagatgtatactatcattttgagcttagccgattgaataaagaaaaagagatatcattagggatttgcaccaatcccccaaatattaataaatgtgaaactataaaagagatggcgtggtga

SEQ ID NO: 436698 - DNA, 549 bp, Serratia marcescens
atgaaacgaagcgctgcgtatattgtgtcgcctttcatattgttcgtgctattaaataccctgatacaggcgcaggccgctcatcataatcaggggtgggggcgcgtcaatatgcaaggagccattattgataccgcatgtgccatttccacaggtagccgtgaacagaccattgatatggaccgggttccggtgggtgatattattcgtgacggtcagggtgccacccgtaatttcagtattgagctgattcattgcgagcttttccgaccaatttccagtttgtctgattggaagcaatttcaggtgacatttgacggtgatgttgatggggaattatttggtgtgcagggggaggctaaaggtgtggggttggaaattaccgactctcagggaaataaagccatgccgggtaaaccgatgccgctgggtgaattaatgccaggtgccatgcggctggattatttcatgaggctggtcagtaacaatcaggtattaaaagcaggtgggtatacttctgccataagattcaaacttgactattactga

SEQ ID NO: 436699 - DNA, 501 bp, Serratia marcescens
gtgaaaggtaagaatagctggctttttttggggggaatatgcctgattattttgtcgctctatgctttgaaggctgtcgccgacactgccttggtgacgattaaggtctctgtgatcgcgcccttaccgtgtgtgataaacggtgaccaaaccattgacgtggatttcggcagtgagctgctgaccaccaaaattgacggcgtcaactacctcaagacggtggactacagcctggagtgcaaagacaacaccagcaacgcgatgaaattgcaggtgcagggcagcgccacgccatttaatcgcagcgcgctgcaaaccaacatggccgacctgggtgttgcgctgacggccaacggcagtgcactgaccattaacgactgggtgaacttcacctatccggacaagcctgtgttgcaggcggtgccggtcaagcgggccggcagcacgttatccggcggggattttagtgcgggagcgacgctgatggtggcgtatcaatga

SEQ ID NO: 436700 - DNA, 543 bp, Serratia marcescens
atgaacaaagtgattttaaccctgttagtcggcctcggtgcgggcggtgtgctgaatatggcacaggccgccacaaccccggaggtcagtgtgttgtaccgcggcagcctggtggcagagccctgcaccctgttgccggaggatgaaaacatcctgctggactttggcacggtaatagacaaatacctgtacctgaacggcaggacgaacagcaaaccgtttcagctgcacctgattgactgtgacaccagcctgggcaagatggtgaagatgacgttcagcggaacggagagcctcccgctcccggggctgctggcgctggacgccggcagcgaggccaaagggattgcgattggtctggaaacccaggatgggcaggcgctgccgctcaaccagcaaagccgtgggcaggaaattaccaatggcaataatgtgattaccctgaaggcgtacgttaagggggagccggacgctatcaccaacaaaaccattgaacggggcatatttaccgcggtggcgacctttgcgctggagtatgagtga

SEQ ID NO: 436701 - DNA, 822 bp, Serratia marcescens
atgcgtgtttttctatatgctggcgtcgtgttggctgctgctatcacaaccgatacccaagctatcccgttcccgacaatgacccatgttgagatctcagactgcaagaatacctctgccggtgaatgcacccaatctgtgtattatgcggggacttccgaaatcttcgaaatgggcacgccggttaccctacccacgtcgctgtccgttcgtgctgttggggtacactgcgcaaaaggtgataaatctaaggggatcccatatagccagtgcgtctgggcgattagtgggcatgcgccgtcgacgacgaattgcactctaaaaagtttatcgtcctgggaactggcacccacaagcgcctgctcgacagcaccgacctgggggccccactccggtgcagctccaggtggtgaatgcgttatgtttgggaactggtcgatcggtgatgcgatgcttttaactccctatgggtaccatacagctgaatcagtagcaaatgggggtaatagattctgcatcaagcctctgcctccaggtacggcttgtgacgtggtccttccgccgattatcgaccatgggtctatggtaacgggaacacgcgacaccaaatacatcgacggtaaagtggattgtggccagtcaacggtcgtcaccgttgtgggatcaccgaacgtaaccttggctccgggggtctcgaccaaaatctctacatcgatgagtaccgcgaccgacttgcgcatccaatccgatatgaacgttgaggcgtccgcagtacccggagattattcagcctccgtcattgtagctgtgtctccgtactga

SEQ ID NO: 436702 - DNA, 615 bp, Serratia marcescens
gtgataacgagcatgactgtggccattcttgaccccaatcggtttctggcgcaaggcatcaagcaactcttattggcgtacttgcacggccggggcattacggtgcgttttgtcggtaagcatgacgtggggcgggccgatttggtgtttctgcccgtgagtaaaagccaaccggcattgttatgcctacagtcgtccgagccctcgcccccggcaccgatgtacatcgcgctacagtcggttccacaggtcgaggcattctcgcccgggggcacctgcgtgcgggtgctgggttgtctgggtagccgtgcccagtcaacggcactgctgggactggttgcccaggggttgcagcacttggaggatagggaggcggcattaccgcagtactgtccgcaatgtgtgaatacgaccctgacagaacgggaaatggaagtgatgtgctgcatggcgaggggaattgcccagaagcaactcacgcaacgcttgcatatcagccacaaaaccgttagctcgcacaagcgggcggtgatgcgaaaactggggttccgacgtaatgtcgaattataccactggctgcggctgggtggattggagcagataaagagaccttaa

SEQ ID NO: 436703 - DNA, 414 bp, Serratia marcescens
gtgacaaaaacacacatcgtatttcgccgttccgtattgctgtgcctgctgggcagtagcctcttgctgagtggctgtcaggccaccaaaggcacggccgtggccgttaagccggcgcctgtaccgacgccggagcaatcgctcgccgcgcgcgaggccgaggcgcttgcgctgtgccaaaaagagctggaggcactcaaaccggtggatgccaggcaataccaaatatatcagcaggaattcagtcgcctgatgagcggcgccgcgcagtatgccaatgtgcgcacccaggccaacagcggtacgcaggagaccgtggatgcgctgtaccgttacagggtcaagcgcctatgcgcgaacatcggtcaggcgttgctcaccggcttggccgacatgggggaacgggttaaatga

SEQ ID NO: 436704 - DNA, 273 bp, Serratia marcescens
atggcctggatactgggcggagctttgctggtcgtggggcttgcacagccagcgcaggcatcattccagttggaaagcatgggagtggtgttagaggaaagcgccgggcgggtgaacttcagcatcaagaacacctctagcgaaccgattttactggctaccaaagtggtagatctggacggaaaaaacttcagtaaatcgatactggtttcaccgctgatttcgtggattggggctgggcaaagccagcaggtgaactttgtgctcaagtaa

SEQ ID NO: 436705 - DNA, 150 bp, Serratia marcescens
atgagtttcaaaagtggctggcaaaacaccgcgattggcttacagcgcatggaaaattacctgctgacgaataaatatatcatgactgtcacgaatgaactggctggggcaagaagccactaccattacgacaaaaattcagccggctga

SEQ ID NO: 436706 - DNA, 1215 bp, Serratia marcescens
atgtcgaacgccaagattgaaaacctgtcagcatgggaggtttttctcatttttctcaggcttggcctgacgtcattcggtgggccggttgcccatttggggtattttcataacgagttcgtcacccggaggaaatggatcaccgaaagcagctacgccgatttggtggcactgtgtcaattcttacctggccctgcaagcagtcaggtcgggatcgctatcgggttatcccgggcaggctacgcgggcgcgttggctgcctgggtcggttttactctgccttcggccatgctcttgatcttattttcctcaagccttgtgcactttggtgacaccctgtctgcgggcgttttgcatgggttgaaagtggtagccgtcgccgtggttgcccaagccgtttggggaatggcccgccaactttgtacagatagggttcaggtaacgatgatggtggcgaccgcctgttttgtgctgctggtaccgtttgcgtggggccaggtgggggtcatcatactcgctgcacttattggccttttggttttctcgccaccgcaagatcaagataaagggaaaccggatctgctgccaatgccgattagccgcagggtgggcatggcctggcttatgctgtttttggttctgttgtcgggattaccgttgctggctgggctgttcccaggggcggtgctgtccatggtcgacgtcttctatcgagcgggctcgctggtcttcggcggcgggcatgtcgtattgcccctgttgcaagcagaggtggtgccagcgggctggttaagcaatgacgtatttctggcaggttacggcgcagcgcaggcagtgccaggtcccttgtttacattcgcggcgtttcttggtgcatctatgaacatggcgccttcaggtttgattggcggaatggtctgcttgctggcgatttttttgccctcttttttattggttgcgggggcactgccgttttgggaacgacttcgtcaaaatatccgcatgcgggcggcaatatacggcatcaacgctgctgtcgtgggactgttgctggcggcgctttatcaaccggtatggactagcgccatacacgcaccgcaagattttggtctggctcttgttgccctgttggcattgatgttctggaggcttccaccctggttggttgtgatctgtggaggtatctctggggggatattacacgtctggttttaa

SEQ ID NO: 436707 - DNA, 429 bp, Serratia marcescens
atgagcgctattacgatttatcataaccctgcctgcggtacttcgcgcaacaccctggaattaatccgcaataccggtgtagagccaacagtaattttgtatttggaaacgccccctaaccacgatgaattagtcaaactcatcgctgacatgggcatcagtgcacgtgccttgttgcgtaaaaatgtggagccttttgaacagctaggattggctgaggacacgtggaacgatgaccagttgattggctttatgctgcaacatcctatcctcattaatcgtcctgtcgtggtgacgccattgggcaccaaattgtgccgcccttctgaagtcgtgctggatatcttgcccgatgcacagaagggcgagttcaccaaagaggacggtgaaaaggttatcgatgcacaaggtcagcgtgtaaccaaataa

SEQ ID NO: 436708 - DNA, 192 bp, Serratia marcescens
atgcgtataaaaagtctagtccattggattttcgatataattcctgacttcttatttgatcaactgtccaagccaacatttgcggagacagatggagtggcccagactcagatgctgtctaacgtagaggaaataggggaggctaacgtatttaaagagtcgaccaaggggataaaacatgggagcaaatag

SEQ ID NO: 436709 - DNA, 942 bp, Serratia marcescens
atgaaaatggaacgtcaaatgaaagatcttgcggaatttgccaaggttgacaatggcaatgtcgaaattaagacagcgacattcaacttgcgtaaaattgttcatgatactgttgagcaaagcatttcactattaaacaaaagtaccgtcactgttaacgtaggggacacctctgacacgtacataaaaagcgacccgtccagggttatgcaaattattgaaaacatcgttaccaatgccataaaatatacagagcatggtagcgtgcaggtaaatgcggttgtacaggaaaagtctaaactggtcatcagggtcgaagatacggggcaaggaattcctaaagataaaattgacgccatattctcaccgtttatccgagttggaaacgacaacaaagtacccggttttggaatgggattggttatcgttcatggtgttgttaaggccatgaacgggactattaatgtgaaaagtgacattggtaaaggaactgtatttaccgtttcattaccaatagatctgtccacacctgctgagattgatgttattaccgatatcgatgacaagccattctcagctaaaggtatcagcatcttaattattgatgataatgagatggcatgcgagtccttagtatcaattcttcagcatgatttttcagttgagtatacaacgtctccagagagagcattagaaaagttatatcggaaatcatttgaccttgttttgagtgatcttcagatgcccatcattactggtgatgatctatatagacaggtaaaagagaatgacggcccaaacaaaaacacaccgtttatattcattagtgcatacaccagtgaaagtccaatcaaagacgtgggtattttaacgaaaccagtacggctaaatgacattaaaaaatccatagagtccgtattttctaacgattccattatataa

SEQ ID NO: 436710 - DNA, 687 bp, Serratia marcescens
  misc_feature (634)..(643): n is a, c, g, or t
atgaaactaaagcggatcctgatccagtatttcgtcggttttctgattctaaccggtggttttgtgtggatgtatgaacagtatttctccacaagtcataatatgaactctgcaggtcctcaagaaaattacgcatgggcgattgctaaatttacaatcaggctggcaggatttaatgcaaaaattgagcgtcaactgcgattgggtaacaatgataaagaggagttacaaaccgaacttgaccttctgttctcgagttctaatgtgctgttacataaaagtgtgtcgaccagatacttatatgaagaagcgggttatgctaaaactgtagagcaaataaatgctaacctggaaaagatcgacgttgaattaaataaaacaaaacctgattactcgatcatacttaaaagcatagaatcaattgggcaagataataaaaatctagtggttatttctgaccatgcagaagtcagacaaagaaacattattcagcaggactacatcgacaaaggtaactcgatgaagtttcctattgcgacactgtattttttgtttttattgatgcttttcatttcataccggcaagtaaagtccattaataatcaactggaatcagaaaagaaatcattcaatnnnnnnnnnncaataacaaaaacgctttccttggtgtgttggggcatgaattga

SEQ ID NO: 436711 - DNA, 504 bp, Serratia marcescens
atgcataaattaaaatcgctatcgatattattcattattgccgtgttttattcagcatcgacctttgcaaagataggcgatctctatatagatggtgacattgcaaataaaaatcataatgacggttatctgttaactgctgataattttaataaacttaaaaagtcccatataaaaactacaacatcctggactgagcctggacacgtggtggattttgaaggagtaaaattcaaggagttaataacacttgtcggtgcccgtggaaaaacgttgagaatgagggcgctgaatgactattgggtcgacatccccttttctgacgtagagaaatacgatatcttattggcaaataaaatggacggaaatccactgagactgagaaactttggtccgtacttcgtcatttaccctttagatcaattttatgatcagctcaatagcccaacatatcaggcccgtcacatttggcaagtggccagcataacggtaatagataaatga

SEQ ID NO: 436712 - DNA, 519 bp, Serratia marcescens
atgcttagcgatttcaataccgaacagcaaactctaattgagaaattatcattagttgatgatctagaaacttgggcaatttataccagacatcttgaaaaacaagtgaagaaaaacatctatgagtgtgccatacgtttgtggataaaacgtaaaatacttgatggtagtttgctcttacatcctaatgctcgaaataatttaattgagcgggagtataggccattatctattcacaagaaaatgatttgggctagtgtattagtctcttataagggggaagatagtaaggcgtattttaaaagaataaaagggaagataattaaaaaatatggtctcaaatggtggaaagatgttgatagtagaataaagccagcttatgcagcgcagcaacgtattttaaagcgtgttggtgctcttggtccgggagtaaaatactttgcctcacaaagttcgtttgtaggcagcatgttaaatgatgagcttgatgcagcattaagaatgattccagaagattaa

SEQ ID NO: 436713 - DNA, 351 bp, Serratia marcescens
ttgcacgatatcaacagaacgatggtcactgattggctcgacagggcaaaacaggagaaagctagccagacgctggctaactaccttggttgcctgtcccagcttgtcgcactggctcagaaccgctatcacgatgcgccgaaagagaatatttttacaggccataagctggatgtacgccatgatcgagaaagctacgaaccctttagcggggatgaactggctaaggtgtatgcgatgcttgatgaagagatgaaagccgttgcgttggtgggaatgttcagcggcatgagattgaacgaaatttgctctctgcaaatcagcaatatcaaaaccgttgaggaggtatga

SEQ ID NO: 436714 - DNA, 441 bp, Serratia marcescens
atggtgcgtaacagcctgagatacgtgtcctggaaggactacaaagctgtcaccagcgggctgaaggcggtttatcaggccccgaccgaagaggcggcgctgatggcgctggatacgttcgcaacagtctgggacgataaatatccgcaaatcagcaaaagctggcgtgcgcattgggaaaacctcaatacgctcttcagttatccgccggatatccgcaaggctatctacaccacaaaggcaatcgaatccctgaacagcgtgatccgtgccgcgattaagaaacgcaaggtgttcctgacggatgactcagtacgaaaagttatttatctggcaatcaagaatgcgtcgaaaaaatggagtatgccgatccagaactggcggctggcgatgagccgttttattatcgagttcggtgaccgcctgagcgatcacctttaa

SEQ ID NO: 436715 - DNA, 786 bp, Serratia marcescens
atggacgaaaagaaactcaaagcccttgcggctgaactggctaaaggccttaaaaccgaagccgatcccaatgctttttcccgcatgttgacgaagcttaccgtcgaaacggcgctcaatgcggagctgactgagcacctcgggcatgagaaaaatgcgaccaaatcaggctcaaacacccgcaatggctactcgtcaaaaacagtgttatgcgatgacggcgagatcgaactgaacacgccgcgtgaccgtgaaaacaccttcgaaccgcagctgattaagaagcaccagacgcgcatgacgcagatggacagccagattttatccctctacgccaaaggcatgactacccgcgaaatcgtcgccaccttcaaagagatgtacgacgccgatgtgtcaccctcgctgatatttaaagtcaccgacgccgtaaaagagcaggtcactgagtggcaaaaccagcaactggatgctctgtattccattgtttatatggactgcattgtcgtcaaagtccgtcagaatggcagcgtaatcaacaaagccgtcttcctggctctgggtatcaacaccgaaggccagaaagagttactgggtatgtggctggccgaaaatgaaggcgcaaagttctggctgaacgtgctgacggagctgaaaaaccggggccttcaggacatcctgattgcctgtgtggatggtctgaagggcttcccggatgcgataaacagcgtcttcccgcaaacccatacccgctgtgcatcatccatatggtgcgtaacagcctga

SEQ ID NO: 436716 - DNA, 966 bp, Serratia marcescens
  misc_feature (400)..(409): n is a, c, g, or t
atggcagcacctaaagtgtttgttagtcacgctagcgaggataaagatcgctttgtaatggcttttgctgaacgactgagggccaacggagtagatgcttgggttgataaatgggaaatccaagttggtgacagtctagtcagaaaaatttttagtgaaggtttagctgagtgttccgcgataattgtcgtcctgtcaaactacagtgtgaataaaccttgggttagagaagagctggatcacgcagtagtaaaaaaaattagtgaggggacacgaataattcctattgtcattgatagttgcgatgtcccggtagccttaaaatccactaagtggattaatgttaaaaatttcgattcctatgatgaaacttttgatgaggtcatttccactattttcnnnnnnnnnnctattttcggcgctacgaataagcctcctttaggcaagcctccagcttatgtttcttcatttgggggcagtaccagtgttggtggtcataacgccatagatagtttagttactaaacttatctgtgagacagcattggaaattggaagtcccctagttggagagcaagcatttgtcaaagatggtcagcctgttttaccaagagagcaactcaatgattcacttgagtatctttatgaacatggcaccatagaatggcatagagatctctcgggttcttttcatggtgtaggaataagtgaggcagggtttgaattatacgcaagagaccatgttgacggttatggtgaaattacaaagtcggttatctcacttatcgttaattccgaattaagaactaatttcgatattcatgctgcattgaatgtgaatatatttctaatagatcatattcttaaggttttgaatagtagtggtaagataaaggtcatgtggttccttggcgggaattgtatgattacaacagtttcttcttctctaaagcgctccttgatgtga

SEQ ID NO: 436717 - DNA, 141 bp, Serratia marcescens
atgataaatgcccaatccatgaaggtgttcaattgcagctatcaacttatttataatacttattttttcatcctgcgtcacttgcacagtatcaaaaaaatctccagagcatttgtcagtaacaagaaagaggctagatga

SEQ ID NO: 436718 - DNA, 1512 bp, Serratia marcescens
atgatcatcaataacaaaactccagtcggcgaagtacgccctagtcagttgctatggacttatggacctggcgcgctaatcgatctaccaagcctatctgtagtgacactaggtattgaccgatgggagcgagagcgctgccagccaattcaagaggcccggcttcttgctgctgtgcgaaaggtattaggcccacaagtcgaaaatttgcgaatgccaccctttcagaaaagcgagctcgttgacccttggtcagccgaggccaacataggtgtacctgttcgaccatttccccgctggatgcgctgtgtaaagtgtggcttgctatcgccctttgatgatggtctgcttgagatcaaagaggatcgattcagagccgaacgaactcgctttgttcacaaaggttgtacaggttctaaagggaatctacctgctaaggatgctgatgccgttcctgcacgttttctgctagcctgtcgtgacggtcacctagatgactttccttggcactactttgtccatggtggcaatagtacctgcaaagggacactgcgcttctttgagagtggtgcatccttacaaaccgaaaatctgtgggtacggtgtgatagctgtgaggcgtcacgaagcatggcccatgccttcggcaaagcaggtaaagaaaatctcccagcttgccgaggtcgacacccacatttggatcaattcgatattgactgcggtgaagaaccacgggcagtactgttaggagccacaaacagctggtttccgatcacactttctgcattggccataccccaatcaaagaatcctctcagtcagttgattcaagacggatggccgttatttgaagcaattacagctgaagtcatggttcccatcgttgtgcaaacactcaagctaactggtggtctccctggaatcgacaaatatagcgtgtcagacatctggtcagccatcgaaatgcatcgttctggtggcgatagcgaatttgtcggtgaagccgatatcaaaggtcctgaatgggaagtgctgacggaggccaatcctcccacggattatccacacttcatgagtaagaagatcggaacaccagcacaattcataccgtacatcagccgtgtattactacttgagcgactacgagaggtcaatgctctgcttggttttactcgagtagaggcaccagaaggatccggagagataaatgaacgtcctcagatggctagcttggcacgcaataaacctgaatgggtgccagcgaaccaggtgcatggggaaggtatcttcatccaattcaatgaaaaggctcttgtagcttgggaatcactggatgccgtcaagcaagtagacgagatgcttcgtggtggtcataccggttggcgtaactctcgtaatctcgatccgaatgaagattacccaggtatccgatatgccatgctgcataccctatctcatttgttgatccgtgaactagccctggaatgggctagttcacggatcaacaaatga

SEQ ID NO: 436719 - DNA, 3966 bp, Serratia marcescens
atgacaattaaaaaatcacctaacgcatggatagcgattggtcataacctttcaattactcacacattcgcactctacacgctgtcgctgaacggtgaacactctctgtatcaagccatttcagataatgattggatcctagtcctggacactacaggtaatatcacgcggattggacgaatcctacggatacgttctgatcttgaaaccactactatctttttcgatcgaatgttgcaggttaagccggtggtttcgatcggcataaccccattcacatttccaccaaaagacagagtaagtcgaatccaatggactgacttcattgagaccttgcctaaagagttccacacaactattgcagacataccaaagatcgaggatcaaacttacatccgcgaactgctgcaactggctgtgatggacgacttgcttggccctgctggtggccctaatgagctcatcgtcgatatgggtgtacgcgaccgctacctagttggcaaactcgccccacgtgaagcagccgaaagaggacaagagtttcctgttgatgctgaagatattgaagatgaagagtcagacctgatcgtcaaagcgaagactgcaaaggtgaactctccctcagtccttggtagcggcgaaaccgacacggcagaagagattgatgccgccagcaatcagtcattggtgcccagtagcctcggcatgactttctgcgtggatggcgacgtcgatcgggtcgagatcgaagcgcgttggggacggtatgagcgtgtgccaaatgatgaacatcaattctttaagtccaatgggcaaaaagctaaggtgtggaaacgcattccttgtggcggcaagatcgtactccccctgatcgaaggctcgatttcacacaatgctccggatagtacttcccctgaagttagagtgcagggctctattagagccaaaaatgacaatggtgatcgactgattacactcttcctcgttaatgcgcaggaagaaccggatacaaaccgtgatacggcatgggtgtttcaaccagagttgagcgttcgagcagagaaagatgctgccaagcctgccattttcaggcgcagaccggtactagatgcagatggtatggacccagagcgcgaagcacttgagatgatctaccgagatcgtgtcgagttcgccgtgggtcatggagttgcagttcatgcagaaatagcggatgacgtcaaattagccaccgaagtgcgtaccacagtgatgccacagtacgaggttcaggcaactgagactcctgggcttgagctatccgatcgtccagctatgcgagaaatggtcagcagtggtctgcttgatatgcaacgactagccactttggacattgacccattagttgatgccttgagtgtgctaactaaagactacgctacctggattgatgaacaggacttgagtgtgagcagcaaggccaagggcttcaaaacccaagcccaagcggccttagatcgttgtcaggagatccatacccgcctgcaacaaggtatcaatacacttaagcataatgagaatgctctggcggccttccgtttcgccaaccaagcgatggccacgcagcgcatacgcagcttgtatgcacttgccatgcgccgaggcgaggacgttaccctagataagttcgatgttcttaagaaccgcagctggcgtccattccagttagcttttctgttgctctcgattccatcccttgcggatccgtgtcacccagatcgagtcaaacctattgaggcttatgcggatctgctgtggtttcctaccgggggtggtaagactgaagcctatctgggtgtagccgccttcaccatggccattcgacgtatgcagggcaatctaggcgggtacgatagctcacgtggtttgactgtgataatgcgttacacccttcgtttgctgacactgcaacagttccagcgtgctacagcacttatttgtgcaatggaagtgctgcgacgtgaggcactaaataagggtgataaatccctcggaacggagccattcactattggcctatgggtcggcaataaagtgactccgggaacgactgaagatagccataatgctatcgaaaaaacacgtaacccgggtagttataatgcgggaacagcctcacccgtccaactgaccagctgtccatggtgtggtaccgagatcactcctgggcaagatgtcgaagttaaaaaggataaagctggcggccgaacgtttatctattgtggtgacaaaaaaggacgctgcgaattttccaagggaaagtcaagcaagcaactacaccctggaataccagtactggtggtagatgaagaaatctaccatcgtcctccgacaatgatgattgccacagtggataagttcgccatgatggcatggcgtggccaagtgcggactctttttggccgagttgaaaaagaatgtgagcggcacggtttactctggcctggggccaattgcacaggaaaccaccaagcattcaaaggacaaccttcagctaaagtgaaggccatcccccccatccgaccacctgatttaataatccaggatgagttccacctaataagtgggccactgggtaccatggtaggtttgtatgaaactgccgtcgatgagctgtgtagctggacgctcaacggaaaaacagtaaaaccgaaaatcatcgcctcaacggcgacggtgcgcaaagccaaagaacaagtaaataatgtatttatgcgtcaagtttcggtattcccgccacatggactagatgtggaagataacttcttctcagttcaacgccacattaaggataaatttggccgacgttatctgggagtctgctcacccggtagctcgcgcccagcaatgcttattcgtgtctataccgctttcttaactgcggcacaggaactatttgaccacttcggtgaacctgctgatccttatatgactatggtcggctacttcaactctctgcgtgaactaggtggaatgaagcgattggcagaagatgatgtgcagacacgttcttatcgcgtgcaaatgagcatggtggaacggcctgcattggcacaacgtagtgtcaacaacatccgcgaattgacttctcgtgtatccagccaggatatcccaaagtacctcgacaatcttgaggtcaagtttaaggccgagtttgataactctgcaggtaaatacgtaacgaaatggcaggagggtgatactcgcgctattgatgtagtgctggcgaccaatatgctgtcagtgggagtcgatgtgaatagactcggcctgatggcagtgaatggacaacctaagggaacggccgagtatattcaggctaccagtcgtgttggacgttcattccccggcctagtttgcaccgtactaacgtgggcccgaccgcgtgacctctctcattacgaaacattcgaacattaccacgccaccttctacaaacatgttgaggcacaatcggtaacgccattctctccacgtgcaatggatcgtggtttgacagggtcgttgctaagtcttatgcgtctgaagaataacgagttcagcccaaatgaaggtgcgggtaaattggatatgtcaaaccagagtgaactcgctcatgcaattgaagttttagcgacccgtgcaggcaatgtcgcggaagacaatacacgtaagctgttagctgaaaatgaactgaaagagcgtgcagacgaatgggccaaagaagccagtaaaggcggccgaattctgggatatgaaaagagaggtcccgataaagacaagactgtggcgttgatcaaatcaccagggcttcaagcttgggacaactggactgtacctatgtcaatgcgagaagttgagtctggtgtacgtctgattatggacaccaaatttatcaaggacgatcacgattggaaacctcgtcctgcaacgaaagacgaggattga

SEQ ID NO: 436720 - DNA, 3960 bp, Serratia marcescens
atgagtatggccagcatacacgatgattggctctcgctaatcgacatttcaggccccttccttgcagtaccagtactaaaagatgcattcccgcaagggctggaagagctagacgctgctaagcgcaaacgactgcgccaagcttacgatgagtggcgagaagcactggaacaagaagatcctcagttcagcaaattgcatttcgcgtggattgaagaagttctttcacgtggccttgagtttgatgaggatgggaaaggcgatgtactgaagggcgcagactggtgcgccgccaacttgaacacttttctccctgaccatggtgtagctctgtcaccaaatctagcaattgtcgacgagcaatgcgcgaacaagcctttgatgctcattcattcctatgcgcacgatatcgatcttgacgcaactttgaaaatagacggatgggccgctacacccacggatcgtatgattcaactgtgccgctccagggagtgtcgccttggtttggtgaccaatggcgaacgctggatgctggtagatgcccctgtaggagctgtcaccagcttcgccagctggtatgctcgactctggaaccaggagcccatcacactgcaggccttcgtgcacttgctcggtatccgccgtttcttcgtcaataaatccgaacaactacccgcattgttcgacagttctttgaaatatcaggatgaagtaaccgatgcactgggagaacaagtgcgtcgcgctgtagaagtattgatccagtcccttgataaagctgatcaggatcgcaaccgtgaactactttacaacgtaaaagaatccgaactctatgaagctgctctgacagtgatgatgcgcttggtgtttctgctctcggcagaggagcgagggctgcttcttttgggcgatgagcgatacgaagccaactatgcactttccaccttacgcatgcagttacgcaaggtacctgaagaaatcctagaacgacgctgggacgcctggtcgcgcctgctggcgatcttccgtgcggttttctgcggggtggaacatgagagtcttcgtctacctgcactgggtagctcactgttcgatcctgatcattttccttttctggaaggacgggctaaagattccagctggcggacagatacagccaagccactaccgattgataaccgcacagttttgttgttgctagaggctatccagcaattccagggccgaacactctcatatcgcgcactggacgtcgaacaaatcggttacgtgtatgaaggtctgctggaacgcaccgtaaggcgcaccgatgaagtcacactggaattggatgccaccaagaaatcacagtatccatgggtcaaactagccgagctagattcagcaagtatgaacagtactgagaagctagttgagttgctgaatgagcgctcaggtagctctgtcagccgggtgcgcaaagatctggccaaggatgttgatgatagcttggctgatcgcctactcactacctgccaaggtgacatccagttacgtgaccgtatcaaaccttatgcccatctgctgcgcactgacccttggggttatccgctagtctaccccgctggtgccttcatcgtaaccagcggctcaaaccgacgcgaaactggtactcattacacgcccaagtcccttaccgaagccatcgtcaccgagacgttgacaccagtggcctatgtcggccctgcagaaggcacaccccgtgaaaggtggcgactcaaatctcccactgaactgctcgatctcaagatctgcgacccagcgatgggctcgggcgccttcctggtacaggcctgccgctggctggccgatcgccttgtcgaggcctggatgcttgctgaagccagcggaaaggcggtgagcgtggatggtgtcgtcttggacgccttggatacctttgagcagttaccacgagatatggatgcacgcatcatcatcgcccgtcgcctaattgccgaacgttgcctatatggcgtagatctgaatccgctggcggtcgaactggccaaactatcgatctggcttgtaacgctagccaagggtcgtccgtttggcttccttgatcacagtttgcgctgcggtgatagcctgctcggtatccatcggctagaccagctcaaacagctttcaatgaccccaacaaatcattgtcatctacatctatttggccaaaatattgagcgagctgtacacgaagccattgagcttcgtcagcaattacgtgagatgcccatccgcgacattcacgatatagaagctatggcacagttgaatctaaaagctaaattgaaactggaaatacctagcctcatagctgatgcgctcgtcggggaagtattagcgttaggtggtaatactaattcgttggaggatatggttacatcgctggcgatccatgctggacagtccattaacggagatcggagtgcaactaatacgttataccaacgcactgagagcactctcgctaatgaaggaaaaggcaaacgctcaacttttcactggccattagagtttccagaagtttttactcgagcattacccgggtttgatgctattgcaggcaatcctccgtttctgggaaatcgcttatggcgtagcgcgatgggcgaaaagttgcaatggcagtgccaaatgattcttggtgcctcaccaggcaagatcgacttgtgtgtagtattccaccgccgtgccgtcgatttacttcggaagaatggctgttatggcttgatagcgacaagtaatattgccgaaggaagtgctattgaagttggccttcgagccattatcaaaaatggaaatatttactctgcaaagaaggggatgccttggcctggaaaggcagcagttatagttgccattgtcagcttcataaaaggaaaatggcaatcagagtgtatcgttgatggtctaaagtatcctcgtatcggccctcgccttacacctgagtctgcagatatttggataccgaaaaaactacataatgcgccattctcatttgctggaatagataatagtaagggactagcctttctagtgacaattgataatccgtggttcgaattgctaaaaaatgagcccgatagcctattaaggccatacataactggtgatgacattaccagctctgcattgaatcaaaccccgcgttgggcactggatattggtgatcgcagtattgaagaaatcaagaaaaggtggccaacagcaagccattttctggctaaagttgttcatccaacacgaacaccagaagcattgaatagttacaaggaactccaaaagcaatggtggaaattcctgagacctagggtaaatctgatgcaaaggcttcggaagaaggaaatatttatcgcatattccaagaacactaaatattcaattggaatgcttgccccctcatcttggatctacaccaataaggtgatgttagtcggaatggaacgtaacgatctttatgctatctcccttagcaccggatttcgttcgtggctggaaaaattcagtggcggcaacttaggagaaacgctttctctttccatcagcgaatctgttgcaaaatatccagttcctgaaaacgaagtctcccaaacaggaattattgcagcagcaagattcaacgatctcatggttcaatttagtgcaggtcatcattgtggtttaacagatgtaatgaattcggttaacactcctagcaatagtgactcaacgattttagagcttcgagaactcttatgtactatcgataacgaggttgtggctgcttacggctggactgatcttgagattatctacgacttccgagaattttgtggcggttccgtcaacgatccctggcgttgggcgccatcggaagtagtatcagctgaactaataactcgactaactgcactaaaccaaagtacctttgaaggactttaa

SEQ ID NO: 436721 - DNA, 3141 bp, Serratia marcescens
atggaaatttctaatacacctgatatccgagtacagcgaactattccagaacccggtcagttggttgaggtccgtcggcgtcaatggattgttgtggaagttacttcatctcaattgttatctgcctcagctcaacagcacgcagtaactttgtcatctattgatgaagatggtttgggggaagaacttgaagttatttgggaaattgaggtaggagcccagattattgagcgagctgggctgcccacaatcagtggccaagacgactccagcactcttaatgctttccttgacgcagtgcgctggggagctgccactaatgctaaccgaggcttcctgcaggccccatttcgcagtggcgttagtatagaagacttccaactcgatccgttggtgcgtgcaattgatatggcccgtgtcaatctcctcatagccgatgatgtcggtttaggtaagactattgaggctggattaatcattcaggaaatgctgcttcgacatcgagcccgtacagtcctgattatctgccctgcgtcgctacaggaaaagtggcggatggagatgcaggaaaagtttggactggaatttcaaatcgtcgacactcgctacatcaagcaattacgccgagaacgcgggatccatgccaacccgtggacatcacattctcgactgatcacatccatggattgggccaaaagtggcgaaggcttgagagctatgcgcgatgtgttgcccttgtatagcagctacccacgcaagttcgatctattggtcattgacgaagcacataatatcgcaccggctgctggggcaaactacgcattagagagtcagagaacgcgcttcatccgttcaatcagtcctcacttccagcacaggttatttctgaccgctacgccacataatggctataccgaatccttcacctcactgctcgaacttctggatgaccaacgtttcgccagaaatatactcccggacgataagcagctcaatcaagtaatgattcgtcgcctcaagagcgatctcgtcgatgctgacggcaatctactttacgcccaacgtaagcttgaagccttaccgatcttatacactgccaaagaacgcgaaattcactcaaaactcaatgactactgcaagagccgagaactaggtgctgagaaaaccggtagcacattcgggactgctttcgtgaatcagctactaaaaaaacggctcttttcctcccctgcggccttcgcatcaacactcgaaaaacacatcgctagtctgacttatggaaacatgcgtagtgataatagtccgatggacgatcgcatcttgcgcaaagctattcttcgtgttgatgaagattacgctaacgaccaagaggtagagaacgcgcaatctgaggctgttgaagaagcttcatgtcgagctcagccgctcacgaccgaccagcaacaaatgctgagtgaactacgtaaatgggcgcagatagccagaaaccaagtcgattccaaagctaaagccgtgctcagctggcttgataccaatctgaaaacaaacggtcattggaacgaacatcgggtaattctgttcactgaatatcgcactaccctccagtggatacatgaggtcctagccagccatggatttggtggggagcgccttgcgatcctacatggtggtatagcgcaggacgaacgtgagaaagtaaaagcagccttccagaccgctcccaaagactctgccgttcgtattcttcttgctaccgatgcagcatctgaaggtatcgatctgcagaaccactgtaactgcttaatccatcttgagatcccctacaatcccaatgtaatggaacagcgcaatggtcgtattgaccgtcatggtcaacgccagaaagaggtgttgatctggcatcctgtcgatggcgatgaaaatagccaagctagcattggaggccatagtggggacatcatccgagctctacgtaagctcgaatctatgcgatcagacatgggtagtgtcaatccggttatcgcgccacagatgtcgaagctgattgaaggatctatcagggattttgatactcgtattgcagaagctcggattgccaaaactaaacgattcgtaagcgccgatcgtgaactgaaagagcggatagcccggttacatgaccggctactatccactcaaaacgatttccatctaacgtcagaacatatcctcatggctgtaaatacgggactttctttggcaggccgaccacatttggagccgtttgctcttccggatgctccagctggttcaacattcaaaatgccagcattgtcaggatcctgggctcgttgcctggaggggctacgccatccctatactctacaaactcgccctatcacctttgaccataccgtggcgagaggacgtgacgatgtcgtactcgttcatttgaatcatcgactggtacagatgtgcctacgtctgttacgagcagaagtatgggctcgcgatgacgtgaagaagttgcatcgtgttactgtacgttcggtgcccgacacactaattgatggccttgccgtagtagttagttcaaggctggttatcaccggaggcaattaccatcgcctccacgaagagttgacaacagctggaggttatcttggggataaatccttccgccgtgaagaaggggtcaataaagttcagctatggctagataatagtaagccaatgacagcttctgactcactatttgatgacatccgtattcgttttgagcgtgcacaacacgctattctacagtcagtgaacgctaggtcaaaagaccggctcaaagatttgagtaatactcttcagctcagtaagaatcgagaattgacggacattagcacagtgcttgatgaacttgaaaaaaccatctgtaccgaattaaaaaaagatcaacaacctgagcaattttcactgttctcagaggatgaacgaacccagctcaaacgtgacaccgcagctctgaaagctcgcttttcacgtattcctgaagagcgtgaacaggagatccaagccatcgaaactcgctacgctaaactcgacgatcgtacttttcctgttgctgttaccttcctagtacctgaatctactgttcagaggggggaagcatga

SEQ ID NO: 436722 - DNA, 957 bp, Serratia marcescens
atggatccggcctgcaaatttccttatgaatcaaacaacaatgccaaatttatagaacgtgatataagcaaagtaacaacaaccgaattagatgcattgtttggcgacgctgacatcaaaattctcgctggctgtgcgccttgtcaaccattttctacctatacacaacgttatgaatcggacggtaaggatggtaaatgggggctcctgtatgagtttgcacgcctagcagaaggtactcgcccagacgtgatcacgatggaaaatgttcctactgtggctaaacaccaagtgttccaagacttcgttgaggcattgaagtgtattggctacagcgtatggtttagcattgttgattgcactcatttcggtgtcccacaaacacgtaagagaatggttttattggcatcactccatggtgagataaagatgtcttctccaacgtgtacaaaacccaaaacagtaagagaagctataggtcatctgcgcgcattaaatgctggtgaagccgctccaggagataagctgcatgttacctccacattgtcagataagaatctggagcgtattaaggcctcaaaaccaggaggaacctggcgtgactggccagaacatcttgttgccgattgtcatcgaacagaaagtggcagaacttacgctagtgtttatggccgtatggaatgggacaaaccagcaccaaccatgacaacgcagtgctatggctttggaaatggtcgatttgggcatcctgaacagaaccgcgcaatctccctgagagaagcggcaattcttcagagttttccccgtaactatgcatttattccccatgatgggccagtaagtttaaggattctagggcgcttaatcgggaatgcagtcccagttgaacttggccgagcaattgcacgcagtattaattcacatcttgcaaatgtgaatatggtcactgtggaatga

SEQ ID NO: 436723 - DNA, 1890 bp, Serratia marcescens
atgaaatcagagccgcttaccgtcaatcaactcttccagaatcgtcggcagtattgtgttccattttatcaacgagcctatgtatggacactaagagaccaatggtcagctttattagaagatattatcgataaagctgagagcagactttctgaaacaaaaccaacgcctcacttccttggggccatcgtgcttgaaccacaatccaaagacagcctattgggggtggatacgtcacacatcattgatggccaacagcggctcactacacttcagtatgttcttgcttccattcgtcttgctcttcgtgcaacaggactttccggtctggagaagatcgtattgccttgtttgcgcaacataaacgaagagactatgcgtaatgtagacgttgaacgtttcaaactttggccgacattccgtgatcaaaaagactttattaaaagtctcaacgttgactctgtcgaagctcttcgcgaggtctatccggaaaacttcacacaacacgggaccctgcgtaagtatttcagccacccaccctcactggaagcattatggttctttagtgacgcttttattcagttcataaacgcggaagggcaccctgtagcctcaaatgcggaggctttgattaatgcagtcctgactgacctcaaaatgatcaacatcaccctagaggaaggggatgatgctcaaatcattttcgaaacgttaaatggccgtggagcagaacttcatgcaactgatctcattcgcaattacatctttatgcgcgctgtaagtgacgatattgatgctgcgatgttgtatgagaatgactggaagccttttgaagatccctactggactgaaaatcaacgccgtggtcgtatttataaaccccgactggaatggttaattcacgccacgctacaggctgaaaaacgcagtgaggtggatttatcacgcctttacaatgaattccgggactttgtgactaaggatatgcctgcgcgccgcgccgatcagcaggtcgcgcttctcactcgctatgctattcaatataaagaactaatcggagatagtggtacgactcctgtcgcgcgctttggccgtcgtattgcagcctatgacgtgacgactattcatcctcttgcgctcctgatttcagtcactgacatctctgatactgaaaagacaatcatgtttaatgatctagtctcatatgtggtgcgaagagccgtgtgtgggctgacacctaagaactacaataacgttttcatggctgtcttacggcacctggctaaaactgccgtttccagtgttgagctacgctacagccttaagaatctgaatggcgaggcttctcgctggccgactgactcagaattccttaatgcctgtatcaccgcacagctttatcctggcaggcttgatacgccgaagatgcgtatgatgctgacagagcttgaaggggaactgcgccgtcaggttaaaacagaggaaccggatgctcctaaactttccagcctcgatatcgatcacctcatgcctcaacagtggttctctcactggcctcttgaaaatgggcaatctgttacggatacagaagcatcagcggttgctcagatagttcttgcaggtgcggagctgacgcctgatcaggaactggtgaggaaacggcagcaagtaatagcaactttaggaaatcttacgttacttaacctcagcgtgaatcgttccctccaacacacagattttctaaaaaaacgcgatgcttttcttgcccataccagcctgcgtttgaacgtgcctctgaccgctaaagacagatgggatgaggaacaaattctcgcccgtggtgcgttgctagggaatgccgcacttaaaatgtggccgcaagctgattaa

SEQ ID NO: 436724 - DNA, 318 bp, Serratia marcescens
atgagattgcacggagacttcagcgaactcagtaagttattcagtatttactttggtcaggattatgatctgtttactgatgccgaaacggccgagggtgtgattgacggcttcctggagcaaaatggcactcaagtcatccgcgatatcctcgaggagactaaagagtttcaggctacttatgcagggcgtatagacgaaggcatggcggagcatttttcagatgagtttgtgccagagagctggggcactaccgcggtggtgttctttgccatgttgcaacgaaaagcggaacaaaagctgggcagctttaattaa

SEQ ID NO: 436725 - DNA, 1422 bp, Serratia marcescens
atgaatgagaaaagtattgtcggaacaaccgctggtataattggcagctctgaaaattacgcagacaatgtagtcttgggggcaaccagaggtcatggatttgctgctgaaaaagcgaatcaccttaaggatgtgatgtcagggaaaaatgcaaagattgttggcggtgacaatgtcaaaaatggcgctgacagactggtggatggcattcacatacaaacaaaatattgtaattcaggctcaaaatgtatcagtgaatgttttgaaaatggaactttccgctacttaaacactgatggtactcctatgcaaatagaagtaccgtcagataaatatgatgatgcggtgaaggcaatggagaatagaataaaaaataatcaggtgccaggtataaaagatccagaattagcgaaagatattgtcagaaaaggttcattcacatatgaacaagtaaggaatattgctaaatttggtactattgaaagcttaacttatgatgcaataaacggcattaagttggctggtactgcaatgggaatctctgcggctgtttcattcgctgtcgctctatggaatggcgaagactgggataaagctcttgaatcatcttgctatgctggattaaaagtggggggtgtagcctgggttagtagcatcattactgctcaacttggcagaacaggtatagaacaaagtttgcgtggcgctacagattggatcgttcagcaaatggggcctaaagctgccgcatggattgcaaatggtttacgatcaggtaatgcgatttatggtgccgctgcgatgaaccacgttagcaaacttttgcgcgggaatatcgtcacaggtgttgtcactactctggttatatcttcggtagattttgttcgaatgtttcagggccgatgctcaggcgctcaattattcaagaatgttacagctactgcatctggagttgctggcggaacaggtggctggatggcaggcgctgctggaggagccgcattgggttcacttattcctttcgttggcacggctgcaggcggaatcatcggggggttactaggtgcgtttgccggtggtacggctgcaaatgctgcagtttcagctattctcgatgagtttattgaggacgatgctaaagaaatgcttaaaatagttgaagaagcatttggtgaacttgcttttaattatctgttaagtgagcaagaggcaaagtcagttattgatggttttaaagagaaggacgtaccagattttttgcgagatatgtatgcatcttctgaccgcccgttgtttgcaaaaaatgaatttgaaccaatgattataaatattgctaagaataggaatgttatttctctacctactgatgctcaactattacaaaaaaccgcaaaaatcatagatacccttgtagcagcttaa

SEQ ID NO: 436726 - DNA, 1032 bp, Serratia marcescens
atggacaatgacgcattgctgggtggggtgaagtcttttttggctgttttggctggtatcctcggggtgttgggggttatgaatgtattcaaaaccaccaatggtaagttaactcattggggggtattggctataggtataatagttgtttctacccttgggggcttgtatatagggtatgtggagaaggttggcgcaaagaaaagcaaggaggagggtgataggtataataaaaagttgcttggtgaagtccttaggatgaaatatcctattgagaatgtagacttgatgtactggtctgagctgccagattctgaacctgaggttattgaatttaaaaaagttattgaaggctatataaagaaaaccaaaggggcaagagggtcgctctacatggcaaaaaaaacagatattcactccaattcctcaggggttgatgggaaaccattagattataacgttgaggttggtagttcctatttgccacagagaaaattccctgtactcaattctcttctgcttgggtattcgctaagtgtttgtttaaagctaaaaccaatttctcctgattcattttatatggtggtaggggactttaggacttatgattggtgcgtcagctcctttattccggaaaagaacaccttgcaatacgatgttaaaagtaaaaaggtaatgattgtttctcgagtaaagtataataaagagtttataagttcgaatggttcaattacttcgacgattgatctttatggtgctcagatttttttcctagggagtggttggcaaaatgtcaatatgcgtgagctactgaaaaggattggggcttctcaatctagtatcgacagtacggagaaggttatgtctgtgcaaagggaaatgaaattagaatcggtgcttataaatttctcatctgataaaaaaatacacatatctaaagaaaagctgattaagtatgccaagccggagggtaatttctttgagtatttaaacttacctaaaaccgatgaaggtatgaggggtttaaattaa

SEQ ID NO: 436727 - DNA, 1299 bp, Serratia marcescens
atgacggtggtgcagtcttatcaactgctggagagccaggggtggatcgtcgcccggccgcagtcgggttactatgtggcggcgcgtccgcagccgctgccgcagccttcgcgcggcgagaaactgctgctgagcgaacaggtggacatcaacgcctttattttcgatgtgctgcaggcctgcaaggatccggacatcgtgcctttcggttcggcgtttcccgacgccacgctgttcgcccagccgaagctggcgcgggcgctgagcagcgtagcgcgcaagttcacgccgcacagttcgttggtcaacctgccgccgggcaacgacgcgctgcggcggcacattgcccaacgctatgcgctgagcggcatgcaggtcgcgccggacgagatcgtcatcaccgccggggcgatggagtcgctcagcctcagcctgcaggcggtgacccaaccgggcgactatgtggcgatcgagtcgccggcgttttacggcgcgctgcaggcgctggaacggctgcggctgaaggcggtggcgatcgccacgcatccgcaggacggtatcgatctggacgcgttgcagcaggcggtggagcagtatccgatcaaagcctgctggctgatgacccacttccagaacccgcagggcgccaccctgccggaggccaacaagcagcgtctggtggcgctgctgcgcgaacggcagatctcgctgatcgaagacgacgtctacggtgagctgtacttcagcgccgaacggccgctgccggcgaaggcgctcgacagcggcggccagatcctgcactgctcgtcattttccaaatgtctggcgccgggctttcgcgtcggctgggtggcggcggggcgttatgcgcaacagatccagcgtttgcagctgatgagcaccgtttccaccagcgtgccgacccagatggcgctggcggattatctgctgcacggcggctacgacacccatctgcggcggctgagacgcctgctggcccagcgccaaagcgcaatgcgtcaggcgatcgcccaccattttccgccgacggtgaaagtcagtcagcccgacggcgggtatttcctgtggctggaactcgacccggcgctgtcgtcgatggagctgtaccggcgcgcactcgaacggggcatcagcatcgcgccggggcgcatgttcaccaccggcgaccatttcaaccactgcttccgtctcaacgcctcatttgaatggaatgaccgctttgaagaggcgataaaaaccttagctaaacttatccgggggctggcggcggccggctga

SEQ ID NO: 436728 - DNA, 1188 bp, Serratia marcescens
atgagtaacctttttaaagatccgcgcgcctgggcgttattggccgcggccagcttgactatcatgtcaaatgcgaccatcgctccagcgttaccggggttgcaagcgctgttcgccagtcaacctcaggcggaattattgacacgcctactggtacccgctccttcgctcgtggtggcgctgacggcgccgtttatgggcgtattagtcgacaacgttggtcgaaaaaaattgttgctaatcggtacgttgctctatgcatcgtgcggtacggcaggtctatatctccctgatttatattctattctaggtagtcgattgggactcggtctcgccgtcgcggcgattatgacggcgcaatccgcattgattggcgattatttctcagcgcatatgcgaggccgttttatcggttatcagacgggtgccagtcattttggcggtttgcttttcgtgacggtcgccggattattggcggcgcatgatcctcgggcaccattttggatttatggtctggcgatattattgctgccattttttataaaggcattgcccgagttttaccatcatcgacacgatgaaaaacaacccgggaatgagttagagggtaaatccaacggctattttatcgtagcaatgatggcagtcggcgtgctgattacgatgctggtttattatgtcgttcctacgcaaataccttatcacttggtaaatcgcggatttacccatccagaagcggcgggttgggtcttgggaacactgatgataaccggtggcatatcgggcgtactttatggggccatgcgtacgcatttgggggagattgtgacgctgtcgagcggttatttgctggtggcgtcggggttcgccggattggcgttgacccactcaatcggcgggttgggcgtctcggccgggttggccggtgcggggatcggtttcgtaatgcccgcgtttatggcgaccgcgctccatgctgcgtctccaggccggcgtggcgttgtggcaggggtgatcacgtcatcgctctttgccgggcagtttttatcgccgctggtgagtcaaccgttggtatcgagatggggatataacgtcatgtttctgattttagctggtgcgttgatcgtgaccggaattgcgctgagcgccgccttaatgttgacgcggtcacgggaaaacgatcattga

SEQ ID NO: 436729 - DNA, 2295 bp, Serratia marcescens
atggcgaaaagacgagcagttcccggggttcatccctacgatgggcccgccggcggttggggcgcgctgaaagcgacggccatcgccgtgcgcacacagatggataccctggaggcgccggtaacgctgatgcgcaccaatcagcccgacgggtttgattgcccgggatgcgcatggccggataaagaacatcgatccaccttccagttttgcgaaaacggcgccaaagccgtgacctgggaagcgaccagcaaacgcgtgacggccgaattcctggcgcaaaatacagtgacctcactgctgcggaaaaccgactatgaactggaggattatggtcgcctgaccacgcccctgttctatgacgccgggaccgacacgctgcgcccgctggcctgggatgaggcgtttcaacgcattgccgccgttttgcagacgctgccgccggagcaggtggagttttatacctccggccgggcgtccaatgaggctgcctatctgttccagctgtttgcgcgggaatttggcagcaataacttccccgactgttccaatatgtgccatgagccgaccagcgttggcctgccccagtcgatcggcatcggcaaaggcaccgtgtcgctggacgactttgacagcgcggagctgattatctccatcgggcacaatccgggcaccaatcacccgcgcatgatgggcacgctgcatgagctggcgcgcaaaaaagtgccgattatcgtgttcaatccgctgcgcgagcgggcgctcgagcgtttcaccgatccgcaaaacgtcatcgaaatggcgacctacagttcgacccctatcgcctccacctactatcaggtcaaagccggcggcgacgccgcagcgctcaaaggcatcgccaaagcgctgctgcagttggatgacgaacatggcaatgcgctggaccacgcctttattgccgagcacacggaaggttttgcggatttcgccgccgatctgaagaccaccggttgggatgcgattgaggcggagagcggcctggcgcgcctggatctggaacaggtcgccgccgcttacgcgaaatccaacgccaccatcgtgacctacggcatgggcattacgcagcacaataaaggcaccgccaacgtgcgcctgattgccgatctgctgttgctgcgcggcaacatcggcaaaccgggcgccggcatctgcccgctgcgcggccactccaacgtgcagggcaaccgcaccgtcggcatcaccgaaaaaccctcggccgattttttggcgaagctggaaacggtgtttggcttcacgccgcccaaagcccacggtcacgatgccgtgaaatgcatgcaggcgatgatcgacggcgcctcgaaggcgttgatctgcctggggggcaacttcgccgtggcgctgccggaccccgagcagagtttcccggcgatgaaagcgctggaattaagcgtgcatatcggcaccaaactcaaccgcagccatttgttggtggcgaaagaaaccctcattctgccctgtctgggacgtaccgaactggacatgcaggccggcgggcgacaatcggtgacggtggaggattcgatgtcgatggttcacgcctcgtccggcaaattaaaaccggcgtcggagctgttgcgttcggaacccgccattgtggccggcatggccaaagcggtgatgcctgccagcaaggtgccctgggatgaactgatcgaagattacgacgtgatccgcgatttgatcgaaaaaaccatccccggcttcgacgattacaacgcgcgcattcgtcaacccggcggtttccgcatgccgctgccgccgaccgagcgccagtggccgacggcgacgggcaaggcgatgttttccgtattcagcgggctgcatgaggacgagacaacagcagacaaagacacgctgcggctgatcacgctgcgcagccacgatcagtacaacaccaccatctatgctctggacgatcgctaccgcggggtcttcggccggcgcgacgtgctgttcatgaatgacagcgatctgcaacgtttggggctggaacatggcgacgtggtcgatctggaaacggcgctgcccggcagcacccagcgcctggaaggcatcacggtgatcgcctacaacatctcagccggttcggtcggcgcctactacccggaggccaacgtgctggtgccgctgcattacatcgatgaggagagcggcacgccttcgtataaatcggtgccgatccgcgtgaagttgagatccaaagaggtgcgtgcggtcgatatcgcctga

SEQ ID NO: 436730 - DNA, 378 bp, Serratia marcescens
atgattgaacgaaatgaactaaaagatggattggtgtttgtgaatgaatccaataaaaatgaaagtgtcattatgaatttttattcttgggtccatattatttatggagtaattgttttttatggaagaaaaagtgaagaggaagcaagttacataattaacaatacacctatgtttacgacaccacccaagaatttcatggaggcctgtatgttaggtcatgaggatgaatattattggggtatggtaatgtcacatggtgatagatattttgagaagggttttcctcgtacagcaccggatgattattttgaatgggaggatagctatataaaagatcacaatcttgagagaaacactctagtttttaatgattaa

SEQ ID NO: 436731 - DNA, 1101 bp, Serratia marcescens
atgcctgtcccggttatacaggctgtacatgaacactatttaaaagaaattaccctcggtgggtatgaagccgcagagcgtgagcgccaatggcttggtgacatatatggctatctggcgaaattgatccaggcaaagcctgcagatatcgcgcttgtggaaaatgctacccgggcctgggacatcgcattctactctcttcccttgcgcccaggggatatcatcctgacttcgaccactgaatatgcaggcaattatataccttacctgcaacgacaaaaacgtgatggcattcagatcaacattctggaagcggatgaggacggggctgtttgtctgaagcagttacaacatgcccttgacaatcctcgagtcagattaatcagtctcccaatactgggaactcatggaggaccaatacagccggtagaaaaaatgggcgtccttgctcgtgatgctggcgtgtggtttttccttgatgcttgccagggtattggacatttacaacttgatgtccaaaaaattgggtgccacgtgttaacagcctcagggcgtaaatacctgagagctccacgcggtacgggttttttatggatggacagcaccctgagttcgaatattgaaccggtgtggcttgatcaccatgctgccagtcttatagatgagcggcgttatcatattagcgagggagcccgacgattcgaatgctgggaggcaaatattgctgacaggcttggcctgggggcggccgcgaaatatgcgctttcgttagggcaagataaagtaacgcaaaggatttttaagttggctaagcaacttcgctcaggcctgaaatgtataccgcacgttcagttacaggataaaggagataatctatcaggaatcgttacatttacagttaaaaataaaacagctgaatctgttaaggaatacctatcggctcaaccacgtcgaattaatgtctcatgttctcgatcgagttcgacattcattgacatgcgaaatcgtgggttggagtcagtcgttcgtgcatccgttcatgcgtataacagtgaagatgagatagatatcttacttaatgcccttgaaaatttcaggtga

SEQ ID NO: 436732 - DNA, 3123 bp, Serratia marcescens
atgagtttattaaaactacagcaagacgttgccattctattctacgccacgctgggcaaaaaagccgacgataacgccctgatctatttcgctaaacaacttgaaaaagggacttataatcaaagcgaactggcggatctcttcattcgttctgcggatggccgacatcgctatgataacctgaacaccgccgacaaggtgaagtctctctatcacaacgccagcggcatttcccccggcccagacactgtggcgcagtgggtaaaacaggtcgatgacggcaaatcgctcggccagttgacgcaagaactcatcacccagctcagcggttattccgggccggataaaacaaccctggcacaacagcaacacattgagaacaccatagcgaccactctctatcccgcctttgtgctggcagcagaacatgccccggcggcggcggacattcagggcatctattatgtactcggcagcatgattgatgccacagcggtaaattactggggcagcgtcctcgccggcggccaccaaaccgccgcacagatagcgacctatttcaccaccgtcaaaccctatatcacgtcgcttagccatgaagacttcgtgaagagaatattttttaaagcgttcggcgaccaggccagcgccgacgaggtgcaaaaatatgtcgcgggcttgaacgtcggcagcgaaacccgtggcgaagtcatcatgcgtgtgataacggatattcgagcagacactcagcatgaaacggccaaaagtcattttctggctgccacccatgtctatgcacctggcgagcgccccgatttgctctatggcgaaaccgtgatgtccttttacctgacggtggccggcgtttccgccgacgcgaccgcacttgacacctttagccgtttgctcgccagcgggacgtcttccgtcgagctgttgaaaatgctggccaacgcccgccaattccaggaagcggaaagctacgagaaaatctacgcttcgctgtatcacgaaaatttgagcccggcgctctcacaggccttgttgctgaaggccggcaatgataaatatcaagccagcgtgttggtcatcgagtcattccgccaggggatttccccactcgacggcgcgcgtgaacctcatccggcagatgtcgccgcctatcaatttagcatcgccaactcgctgaattacaaacccttcgccgaattatcgctctccaccgacggcgtattgagcggttcggtgaacaccggcagtcaacatccgttaagcccggcggagttggccgttctgacgcacgtctttctgaatgtgaatgcctcggttgacgttgatttcagccattcaatcaaattgcaggaagtgaccttgcaggggaatatgcccactgacgccattgcactcaactcattaaaaaataagggattctctttgcggctcaatctggacgagaacccttacttcaagatgacagaaaagattgcatttggtaccgaacgtgatgcggtaatgatttccgataaattcgatctcgccaatgccaaaatggatcttctttttggcgcagggggcgccagcctgctctggaatggcaatggcgttaaccacggtgccaacagggtcagcacgacgttcaccgcacagaacgcttttgatgcggatggcgtcatttccgccaacctgatcttgaaggatatttatctgacctcgacggcaagtggcgacaccgaaggcgtaatcaaaacgaacattaaccagtttcaattctttcctcagatcgatcttgcgggttatcgcggcacaggaaatatttatcttgatgggaaatggatcgcgacagaaggcgcaaacattttcgattatggcgtaatcaatcaaacagccagtatttataacgacagcatcccaactgtagcccatttacaacaggctccccatgcccagaaaagcggtgacgggtattactggacgggcaaccagggattaacactttcaggtttcgccgataatgtgcatgttatcaacctgccggtcttcaacacgctgccctttctcgccataaacggcaacgccggagcgcaaagcaaacttcatctggagttggcgccggtcaccgcaccaacagaagaccccttcgggccctggggcgtcagtatcggcaaccgtgccatcgagcacctggaagccggaacattgagcttcaccagccatttcatcgggcaacaactgccggaagaacttcgcttatatgccaacggttcaaaattcgcctcagtcactctggcaggcgcaaacgcgattgaaacaatacgcataggcggtataagcaaattgcaggtgacggtaaaagcagactttggcagtagcctcaaaagtattgttattgaaccgacattcaatcccggccatgaaatcatcccacgtgtcgaagcggacctgaggatggaaaaaggcggtagtggcggcggtgagttctataagctactcacctcgttgacgcatcacagcgccttcgacagcgtcattgaggcattagccggtgaacaactcactatcgactataccaacagccagacattaacgctaaaaggcaacaccacgttgaacccattgaccatggccaatgagtatgcacacgacagcaaaatcaactttgagcacagcacaatcgatgacatggtcaccatcaataccctcacccctacggataccctcaccgtcggcgacccgcatcgttcttgggtcttcaacgccaagtcatcaggcgagatcgtcatttacggtgaactgagccaaacggaacaggtcaacgcgttgtttgactcactggctgtcagccccagcgattccgcgcaggacatatttaaccaggccctgacgaaaataacgcatggcaacggtgaagccctattgcaaagcgtcggtgtggttaagctaggtaataatgcttatattattattgacaataataacaaccaaaaacttgattctcaggatattattttctcgctaggcaataaagacatccacgatatcacgacccatcttcattatcaggcgccagtcatcacgcttgccggcaacaccgccgcacccgcaacggaattagccatggcctga

SEQ ID NO: 436733 - DNA, 963 bp, Serratia marcescens
atgaagatatctgccatcgttccggcatttaacacggaaaaatacattggtgaatgcgttagatccttactgcaaaacgatcatgagaaaattgaaatcatcttgatcaacgatggttcaaccgacaaaaccggcacgatactggatagcttcgatgtaccatgcattaaagtgatccataccgaaaaccaaggccaatcggcggcccgaaacacggggcttgccgctgcatcaggcgattatgtgatctttgtggatagcgatgacaagctcgccgacaatgccttggatcgtttgactgacatattaaaggatacccaaagtgacgtcgtcttctttgagtcttccgtcttcttcgacgatgaaaaactggctgagagattcaacccaaagtatgaaagaaacggtttattgagtaatttcacctgctccggtacgcatttttttcagcaagctgttaatctcggcaattacatcgtcagtccttgcctttacatatccagcagaaaagctttaaaaaacatccagttcaaaaatggcatcgtacatgaagacaacatattcactacgcgccttctgcttgaaaatgatattaccgttcattgtgtcaatgaaaaattctatttacgccgcgtgcggcatggctcagtaatgacgcaaaagaaaggcgatgaacatatcaacggctactataactgtatcatcgaactgattaatcatcctccagccaatgccaatcaggtgcaggacgaatacaataagttcatttgtcatatggtcgattgtttcaagtacaccaatagcgacattatcgccgacctgaagggcgaactcatcaaacacaatgacattgtgtctggtgaggtagcgggattgaaacgagaaatcgatgagctgcgcaactcgacatcctggaagatgacctcaccattaagacgcatggtgactttcttgaaagggtaa

SEQ ID NO: 436734 - DNA, 231 bp, Serratia marcescens
atgggctacttttggcaaaagggacaatggcgcaggcaggcgcgtgaaggcaggcgtaaatatgtaaccgacgttgacgagatagcggttaagttgttcatatcaagttttcacgttttgatttttattgtttatttttcatatatatatttactttgtttttttatttatgaatttttgatgtttttatgttcattttttctgggtttttattttaattttaaatgctaa

SEQ ID NO: 436735 - DNA, 630 bp, Serratia marcescens
atggttaacgctgattttggcgatgcgctgctattctttgagcccagcttttgggtgagaaagggaatggaagcgtttctcattaccaggtcaaatcgaagatattctatcgatacgctgcggggattagaggcggtgttaaaagaggggaatcctcaagcggtcgttatggagttatatcatcatggcgaatatttgtatgatgtattacggttcgtgacaagggcgaaaaatgtctggccagaaacgccattggtgattttcactgccatcgaacatcccggaatattagcgttgctggcgacgaatgcgcgtatagcgatagtggcgaaggatgaccctttgcattgtctgaaagaggctattaccgccgcaggtgacttttccggctatcgttcgccgcttattcgcgcccggttggcgcattcggcagccgccttatccgacagtgaatggcgaatcctgagtatgatggttgccggtgcgtctctacgaagcattgccaacatgacccgacgaagttacaaaaccataagtacccataaacttaacattatgcgcaaattgggcctcaatcaggccggttttctgcggcttattctagccctgaaaacacgatttccctcctga

SEQ ID NO: 436736 - DNA, 297 bp, Serratia marcescens
atggccaaccgaccatcgtcctgcatggattcccagaccacccgccgcagacgttatgtaatagcctcctggcttcgtggttacgcgccgtccccgacaacggggccgttcgacttcgcagccctcaccagcgacatactcgcgctgatcgatcgctggtctccggggcgccccgtggagttgattggccacgattggggcgccctgatcacatacgatgtctgcgtcacggcgccggagttggtacatggggccgatgggcatctctttcgtgtggcccgtcctggccgcccgtga

SEQ ID NO: 436737 - DNA, 894 bp, Serratia marcescens
atgaatgacgtcatcatcatcggcggcagctttgccggcctcgccgccgccctgcaactcggccgagctcgccgccacgtcatcgttctcgataccggccggcctcgcaaccgcttcgccgaccgctcgcatggcctgctcggccacgatcacaagccgccgctatacatcctggacgaggcgcggcagcaactcgcgcgttatcccacagtcaggctggtcactgcccgtgccgacagcgtgtctggcaccatcgacgatttccgcgtcgtcacggacgataacgaatgtctaatggcacgtcgcctgatcctgagctatggcgtcgtcgatcagatgcctgacgtctcgggatttgccgaaagctggggctcatccatcgtgccttgcccttattgtgatgggtttgaagtcgccgaccggcattggggcctcgtctggtctggcccgcagtcgatgaaccaggttaggctgttccacgattggaccgacaggttgacagtcttcgctgatggtcacgatattgcgcccgatatccgggccgatatggcgcaccgccacgtatcggtcgctgatggccggatcgtcgggatcgctcgtcacggcggccataaatccactgtcaagctcgatacagcccccgatgtggcggtcgatattttgttcgcgcatccgcgcaccaagccgtccgcaagcctgcatgaatcactgggcctcgacacgctcaaaacgccaaccggtatcgccctcaaagtcgacgagcgccgcgaaaccagtatgcccggtatctacgccgccggcgatttagcaaaccccgccatggcctccgtgaccacagcaatatggcaaggtgcgacggcggggatctccgcccagcagtcgatgctggtttga

SEQ ID NO: 436738 - DNA, 717 bp, Serratia marcescens
atgttggtgtttaggatactgtcaagtactggaatttgcgtgaacgaaaaaaaacatgctcgacgcggccgccccaccaacgaagccctcggccaaacgatagtcagcgccgcaaacgaactctttgtggaactgggttttcaagcgacgacaatggacaaggttgcccaacgggcgaagatatccaagctgagcatctatcggcatttcgagaacaaggaggcgctgttcagcgctgccatcgcggccggctgccatcagttgtttgcaccacagacccttcttgaaggcgtcgacggttcggtcgaagatcaactgatggctgtgggggtatccctgcttcgcacgctgttgagatctgacgtccggagtgtcgaagccatggttatggctgacaagacgacgcaaaactcgttaagcaagctccattacgaagccggccccgccaatgtcatcgcacaaatcgaagcgctgttgcgacagttgcacacgaaggcgcttctgaacgtgcctgaccctctcgggtctgcccgcctgtttgccgcacttttcaaaggatccgatctcttgatgatcgtacgattcgatccggcgagagcagcggacgacaacgaaattgaatcctattgccggtctgccgttaccatgttcattgccgcgcacggtggcgacggccaggcaggtggatggccgaagatagctggtcggcgggactga

SEQ ID NO: 436739 - DNA, 246 bp, Serratia marcescens
atggctaagatcaagctcaccaagcccgcagtcgatacagccccctcccaagcacaagccatcgagctgcgcgactccctccttcccggcctcctctgcaagattacgccggccagtcgcaaggtgtttatgcttcactaccgaacgaatgccagcgctcgccgcaagccggccttgggcctgtccggcgcgctgaccatcgaacagacccgctcgctggcacaggaatggctggtccagcgttga

SEQ ID NO: 436740 - DNA, 1794 bp, Serratia marcescens
atgaataggcgtaatcttgtaaaaacaataatagccggaacatcgggtattttagtcggaaaaacgtacgcaacggataatattcgcagcattattccccctgagaaagaaaaagacttgcagtcaaccaatacgctctctgcaatgtctttaaaactagcgaaatatgacggcgcgaaatacattggtcgctgtccagacatcgacactttaaggaaagtaataccgcaatttcccaatcaaaaaatcgatgtcgtcagtttctatgcgacagacaccttaaaatcctccggcggaggagagttttatgcggttaaatcgaccgatcttaaagagaaaaacggcatcgtcgttcgtgtcaatgaagattggtgttggatcagacttgaatccgtctctaccaacatttggcctctggaatggttgggaatacgaataggctcaccacaatatggcgcactgaatgccaaaattttacaggagtccatcgtcaacaactatcgtgtcgaacttgtcttcccaagcggcatgacctacctgcaaccaggagtggtcaagatccccggaaattgggcgggtgtacttcgcggcagtaatacacgtaattgcattattcggccgagcgaaaaccctgacgaccccaatataattttaatagaatataatacagagaagaaattcagctgggggctgcgtatcgaaaacctgtcgtttgacggcatgaactatacactgagtgctattcgactggcaaatgtcggctacgtatatactaacaaccttcaaatatattcattcaatggttgtaatctttggttggacaaagtgcaagactccgtctttgaagccaccaatattcaagacggcggttattcaagtggcgatacttctgataatacgaagaccactcaccctgcgttattactgaccagcacgataaaaaatgatgcgtgcaacatgatcagatttaataattgtcaaattgaaaacaacaaatgcagcccttacattcgtatcatcagcggcatcggattgatgtttaatcagacccacgctgaaataagagacaaagcgatgtgggggaaaagagatttcatggaaatcgccaacgcagatgtacagatatctgaacatgcgggttctcgttttagaaatgcggtgcttattaacggctatggcagaacgacgatttccggcggccgaggcttaggcggcgatcttactgtccgtgccgaaggaaaaagaggcacgttggcattatcaaattgcttggtcggcaacataaatctctccgcgtacaacggcaatcaccagttttccaatgtggttgccgcaaatgtcgtcttaaagaataccgcaggctctttgaggtggtttggcggttcgatgaacgctctcgtcgtcgaaggttcggtgaaccccgctttaggcgcgcattttgatggcgtcctggtaacccaagatgtcacgttctccgaccctaaggatacgcctcagctttcccactcattcatcaatagcaccgtgttaggcaatatggcatttaactgtataaacggcgtgtattacgcgaacaacattgcaggcaatgagatattcggcaaacggctccgcatcgctattccaggcaatgtacgcacaatgtatggcactgcggctcccacctccggtacctatagtcaaggtgacagagtgatcaacagcgcacctgccgctgggggatgggatggttggcgatgtgtgacggcgggtacgcccggcgtgtggaaaggatacggaaaaatcgccgattaa

SEQ ID NO: 436741 - DNA, 180 bp, Serratia marcescens
atgagcgaggcgtattccggcaaaaacagcctgataccgcccgccgctttcatgcccagcatcggcgaacaatatttgttgcgcaaagtcttgcaacgcccgtttttgtcgacatgtcccggattagagttgaattttgccgcctcagcgcccatcattcccgtgcggcataagccgtag

SEQ ID NO: 436742 - DNA, 435 bp, Serratia marcescens
atgtttgattctgttttggttgtctgtgttggaaatatctgccgttctccgacgggggagcggctgttgaaaaaacatctgccacaaaaaaaaatcgcgtcggccggtatcggcgcactcgtcggtaagccggcggatgaggctgcggtggcggtggcggaagagcatggtctttctttggataaccatgttgcacagcagttgaccaaggaaatgtgtcgtgaatattcgctgatactggtgatggaaaaaagtcacattgaggccgtttgccgtttagcccccgaagtcagggggaaaaccatgctgttcgctcactggatggggcaggctgaagttcctgatccgtataagaagagtcacgaagcgtttgagtttgtatataaccttctggctgaagctgcgcagaaatgggcaaaagcattaaatcgttaa

SEQ ID NO: 436743 - DNA, 2178 bp, Serratia marcescens
atgattgataatagcaaactgggtccggctgcgggcgcaagtaatgatgagattgatttaggtcggttgctgggaacgctgctggatcatcggtggctgattatagggattacgacattctttgccgtgatcggcatcgtctattctctgttcgcaacgcctgtataccagtcggatgcattgattcaagttgaacaaagttcgggtaactcgatcctcaataacctttccgaaatgttacctacggcacagcctggctctgcggcggagattgagctgatcaaatcccgcatggtgcttggcaaaaccgtcgcagatttgaacctgaatacggtcgtcgaacaaaaatacttcccgatctttgggcagggttggaatcgtttgatggggaacgaacccggcaagatagccttgtcgcgtttgtctattccttattcatggaatgaaaaagaccttgagctggaagtgattgataaaaacagtttcgctctcagcgttgatggtgatgaattcctcaaaggcaaaacgggtgagctggtcaatcaaaaaggtgtgaccatgctggtcagcgaaattgacgcggcgcctggtacggtcttcaaagtgaccaagcgcagcgatctgatggctattaacgcgttgctcgcggcgttgacggttgaagataaagccaaggacaccggcgtgttggcgttgaccctgcaaggggaagatcctgagctggtgggtaaaacgctcgacagcatttcgaaaaattatttgctgcagaacgttgagcgtaagtcggaagaagcggccaagagcctcgaatttctgaaagagcagttgccgcaggtgagaacctctctggacatcgccgaagataagctgaataagttccgtcaggacaatgattccgtcgatctgtcgcttgaagccaagtctatgctggacagcgtggtttctgtcgaggcacaactgaatgagttgaccttcaaagaagctgagatatcgaagctgtacactaaagagcacccggcatatcgtgctttgatggagaagcgtgggaccctggaaggggaacgcgcgaagctgaacaaacgtattagcgtaatgcctaagacgcagcaggaaatcttgcggctaacccgagatgttgatgcgggtaaagaaatctacatgcagctgctgaataagcaacaagagcttgggatcaccaaagcaagtaccgtgggtaatgtgcgtattgtcgatccggcggtgacacagccaaaaccggttcagccacgtaaaaccttgattgttctgctgtgtgtggtattgggcgggatgttctccatcggcatcgtggtgcttaaaaccatgttgcaccatggaatcgagagccctgacgagttggagcagcggggaatcaacgtctacgccagcattccattgtctgaatggcagcagaaaaaagaccgtgaagtattgctgcgcactcatcgtaagtccaatacgcgcgctaactcgttgcttgccgtcggcaacccggctgaccttgccatcgaagccgttcgcagtctgcgcaccagcctgcattttgcgatgatggaagcgaagaataatgtgttgatgatttccggcgccagtccaaacatcggtaagacctttgtcagtatcaacctggcggcggttatcgctcaggcggggcagcgtgtgctggttatcgacgccgatatgcgaaaagggtattcacacacactgctggatgccaattggcaaaatggtctgtctgatattttgtcaggcaaaatcgatgcggccagcgcggttcgccctacgcaaattaacggaatggacttcattcctcgcggtcagattccaccgaatccttctgagttgctgatgcacagccgttttgccgatttggtcgaatgggcggacaagcattatgatctggttctgatcgataccccgcctatcctggctgtcaccgatgcggcaattattggccaccatgtcggtacggcgctgatgatcgcgcgcttcggtatgaacacggttaaagaactcgagatcagcgtgcgcagattcgatcaaaacggtatcgagatcaaaggcattattctgaacgccgttgaacgtcgcgcaagcagctattatggcaactacggttactaccagtacgaatacaaatctggcggtaaagacgcgtaa

SEQ ID NO: 436744 - DNA, 1137 bp, Serratia marcescens
atgaatatattaattgttaatacattatatgcaccattcaaggttggcggcgcggaagtgtctgtgcaacttttggcggaagagctggtttcaaaaggcgatagagttcgcgtagtttgtttacacgatgaaaagttcagaaagcagacggaaataaatggcgttgaggtggtttatttaccgctgaaaaatctgtactggcctttcagtaatgagcaaaaagggaagttatcaaaagtcgtctggcatttggttgacaatttcaatccaatgatgggaaaggctttctccagagagttggataattttaatcccgatgtggtacataccaataacatcagtggcttttctgttgcgatttgggactgtgtcaaaaaaaggaatataaaactcgtccatacggctcgtgattattatctctttcaccataactgtacgctgtttcaacatggggaaaatatggatgtaggttctgcagcggtccagttgacatctatggtgaaaaagcgaaaaagccagaatgtcgataggtttgtcggcatcagcaaatacatctctgcattgcatcaagataatggctttgccattaatgcccgacacagccacatctacaatccgataaaaaaatgtcatgttgccgaccaatcgtcgtcggttatccggattggctttattggccgtttgaccgcagataaagggttcaaggcgttctgcgccaaagcgttggaaatgacgataccgggtgaggtggagttttacgctgccgggcgtttttcctcctccgatgaaggccgcgccttgcaactcagggcggaggaggctggcgtccatctgttggggtttgtgccggtagaatccttcctggctcagattgatatggtttatttgcctacactctggaatgaaccgtttggccgagcagtagcggaaacggctgctgccggcaagcacgtcttcacttctttcgccggtggcgttgctgaaatcgctgaacattaccccaatgtatatcagctaagtgaatttacgttggaaaaactgcgaatcttaaaaaatgagcgcgtcgagtttgttgatgtgaatccctttgacgccgggcggttggctgcgggttatcaagaggtttataagagctga

SEQ ID NO: 436745 - DNA, 849 bp, Serratia marcescens
atgcagtttgcggcatttttcgtcgacaaatcgctggcattggcaatggggcctaaaaacctctcccaattaatctgggggcagttcgcaaccaaaacgtcgagcaaccaatttgctatcattcttttccctcgcatgtctggcttatccagggaagcggggttctttgcctctctgcttgccgtcgttttcttgataaggctgcgcgaaggcaatgtgaagaaaaaagaatatgcgcttttcgctgcaggttttctatgcagcctgtcaaaagtttcattctcactgttgatcattggcatactttaccctctaaaacggataataaacaagatcccggtaacgatcacctatgccgtatttttcttatcgctggtatcgtttgccacttatttaaacatcggcgatcccaatttttacattcctaatgagtcaatcgcacacagactgtcagcctcttatatgattcagtatatggatgtaaagagtctctttttaggctgcgccgatgattacaactgctttgacaactccaagatgggtatggtcaattatttgatctctcgtggcggcggggcaggcttcacgcctaatgttggcctgaacggcatatttattaacctgggcgtgctcggcttcatcacggcggccatcggactgcaggtaatgaacttcaaaagtttcgatctgattcttttgatcattttcacctctaccgtctcactttttacaatagatggttttgttatcgctatttattattacattctgaccgaaaaatattacgccaaaagaaaatccccaggcgaatctcttaacacctgggtgaacgcacctatatctaaataa

SEQ ID NO: 436746 - DNA, 522 bp, Serratia marcescens
gtgcggcaacgccggcaacaattcagttttatcagattaaacgcttatttgcgtacgcgtaagtcttttatcataaaaaataaaaccccgccggagcgaggtttagctatcgtgcggcggcgccgtcaacaattcagttttatcagattacacgcttatttgcgtacgcgtgagccttttattataaaaaacaaaaccccgccagagcgaggtttagctatcgtacggcggcgccggcaacgactcagttttatcagattacgcgtttatttgcgtacgcgtgagtctttttttaaattattgcaacgcgcatacgctattgttattcctgatgtcacagtgaaacgagaaataaaccctcatcaacttcaaccgcagcagtttcagcgatccatactcaactttatatccaacatcgccaggcatcccccgatgaatccctccgccgtttgcatctctttgcgtatcgtaccgtctgaacatttccttttcagggcgatcttacgcagagatatgccataa

SEQ ID NO: 436747 - DNA, 915 bp, Serratia marcescens
atggaatctgcacgtgataaacgtacccgtgagattgtggaggcagaggatctttggttgcttgatagcgttgatactgaaggttacgtatgctggggatgtggtataaccatgcatcctgctgcatgggaaaaagataaaaaagtcagagcctactttaaaaagaaacgccatattcaacatcatcatgaatgtgatgctgatgctgaaagtacagtaattcgccagggccagaaggagagtgtccgcaacatactggacagtgctccaggtttaatgccctcgggattaaagttgattgaacagcgcccggttgttgaaccaggtatcgctggtggtgaaagtaagtccagttcgacgcgttcagcatcctcagcatctggtgaaagtaattcacccgaacgacaatcccggcgccaagtgaatgctatccgtaatatttgccgtgccttcattcgcttcccgcatgaccggggaatgtcgcttaatgttcccggtattagtggtcaaatctacatgtcggcgtttaaaaagctccgaaaagaggttcaatcctacccggagccgaagatcttttatgcaccactactctggaaaaaattttctgaaaatgatgaaaaactcatcattccgctgtctggggaatggggtaaagatgaggcaggtaagcctaagccgaccagaagctatcagctccacatcgaatgggctggctggtcaaaagctaaacgtactgtggttcgtaaagagctggaggctgcccgttcagaggcaatagaggccaaaggtaaagggctgaaagataaagcttgggtcttctttattggcgagcaaaatgcagaaaatctggaaatcttctacgtcagcgattatcgactcatctgcgcgattgtaggacatatcacttatccatga

SEQ ID NO: 436748 - DNA, 198 bp, Serratia marcescens
atgcgcaaagcggtaatatccgaagcttcctattacaactggaaagcaaagtacggcgggacggaagcttcagatatcaaaaagatgaaggatcttgaggacgaaaaccggcgattcaaacagatgtttgccgatctcagccttgaatgtcggaccctgaaagactttagcggaaaaagctttaaagccagcgattaa

SEQ ID NO: 436749 - DNA, 612 bp, Serratia marcescens
atggctgaattcaccgatcgactgcgcccgctgctgctcggcgcactgctgtgcggcggcggcgcgatggcggcaacgccgctgggcgtgatcgaaggcaccaccggcaccgtcagctttcacggcggcctgctcagctccccctgcagcctgacgccggacagccgggatcaatccgtcgatctgggcgacgtcagcgcacgcgacttccgcaacgccggcgatcgcagcgcgccggtgcgttttcgcctctcgttccgcaactgcctgctgggcgcgcgcgcgctggcggataacccggccggcccgcgcaacggcgacgccggccgcctctacctgcagggagagcaggccgccacgctggtgtttctcggcgaaagcgatgtcgacaacccatcgctgctgaagctgaacggcggcgtgcagggcatcggtctgcggctgcaagaccaacaaggccaggcgctggagctgaatcaacgcagccgcccttacattctgcaacccggcagcaacaccctgtggttcagcgccagcgtggaatccacccagcgggcggtgatggcggccgggttcgccgccgtggcgcacattcaggtgatttacctgtga

SEQ ID NO: 436750 - DNA, 1092 bp, Serratia marcescens
gtgaaacagcgaaatatcaacgtcatttggcggagcctggtcgtactggcgctgctcctgacccattcggcctgggccgattgttattacagcgataagtccgacattaaaaacgatctgcatatcgatatgccttttggtgccggcaatatcaccattggcgcagacgtgccggttggtacggtcatctatacccaaaacttcaatccgtcattcagaaacgtgttcgtcaaatgcgatacgccgcagacgttcgtcgcgctggtcatggattatgacacgccgcctcatcccctatcggcatggagctccggggcattcggcaaagtgtatgagaccgggttgcccggtgtgggggtatttattgataaccacgcgttggacacgttcctcctgccgtatatttccaacggtacgcgtgtggtggaggagaacggttggtcgagcaacgtgttcaaatatcgcattcgtttaatcaagacagggaatattcagcctggtgcggtcaccggctccgatctgccctgcttgatgacacggctggggccgaccgcggcgccctttacggcgatgcggctgtgctttaccggtgcgatcaacgtggaggcgcaaacctgcaccacgccggacgtgttcgtcgccatgggcaagtatgatatgggccgctatttcaccggcaaaggcagcgtgaccgaatggaaagatgcgtctatccgcctgttgaattgcccgaaatttcacggcacggtcgaggctcagtattccgataacggcactggcagcatcagcggcacaaccggcaacagcctgacgctttcattgacgcccaatacggcggtgatcgatgacgccaacggcatcatgagcgtgaaagagggcagcggcagcgccggtggcgtaggcattcagttggggtatggggcgtcttcgccgcagagcgtgcggttctcgcgggcgattaaaattccgctgcccgtcacgacgcccagcgctttcaccatcccgctgcgggcccgttatattcagaccgagtccacggtgacgccgggcaccgccgacgcgaccgtcactttcaatatcaactacttttga

SEQ ID NO: 436751 - DNA, 2547 bp, Serratia marcescens
atgaccgactatttttgcgttgcgcgcggcggcctggccatggttgcgcggttgacgccggcattgtggtgcgccatcggtgcgttcagcggccatgccggggcggaaagcgtcgaattcgatccgtcatttcttaatgtaggccaacgtgacgcggtggatttatctcgctttgtgcgcggcgcctccgggctggccggtaaacaccgggtcgcggtttatctcaacggcgacagcatcggcaataaagagatcgagtttaagacgcgtgccgacagcagcctgtatccgtgcctgacgccggctctggtgcagggcattgcgtttaacgacgccacgttgccaaagggggccttggcgccgctggcgcaaggagaagcctgctttgatttgtctcggcagatacccgatgcgcaggtgaatttcgacagcggcgagcagcggctggatatcctgatcccgcaaatgtatatgcacaaggccgcgcgcggcagcgtcaattcggcgcaatgggacagcggcgtttcggccctgttcatgaattacaacctgaacggctataccagttcgtcgcgcggcgtggactacaactcgttttacgccggcctatccggcggcgcgaacctcggcgcctggtatctgcgccataacggcgtctatagttggacgcaaaacggcccgtctcaatacgacagcattaacacctacctgcagcgcgatattcccgcgtggcaggggcggggcgtgatcggccagtccaataccaccggccaactgtttgacacgctggcgttcaacggcgtgcaattggccagtgacgaacgcatgctgccggagtcgcagcgcggctatgcgccggaaatccgcggcatcgccagaaccaatgcgcaggtcaccgtgcggcaaggggggcaagtcatttatcagaccgcggtaacgccgggggcattcctgatagacgatctgtaccccaccggctacggcggtgatctggaggtgacggtacgtgaagcagacggttccctgagcgtgttcagcgtgccgtatgcggcggtcactcagctgctgcggccgggcgccgatcgctacgaagtcgtgcttggcaaggcagacaatgacagcctgcgggataagccctggctgtatcaggccacctaccagcgcggcctgtccaatgcgctgaccgcctacggcgggttgcagggggccgagaattatcaggctgtgcaactgggggcggccgtcggctcttcgttaggcgcagtcgggcttgacgtgacccaaagcgacagccggctgagccgcgagcggcggcagggggggcagagctatcggctcagctacagcaaaaccgtcaatgaaaccggcagcagcctgtcgctggccgcctaccgcttttccacctccggctacatggatttcatgaccgcgatgcaaacgcgcgatcggataaggcaaggcggcgaagagggcgatattttgcgcgtccgtaatcgggtgacgttttccatctcgcaggggctgacgtcggggtgggggcagttctatgtcagcggttcgctgcaggattactggaacggagaggggcgcgataagcagtatcagttgggatacagcaacagttatgacgccatcgcctatagcctgagcatgacgcgcagccaatcgagtttcggccgcgcgcaaaacaattatctgctgagcgtcagtttgccgctgggccgccgcggtgatgctacaacgccccagttgcgccttggactggctcgcgacagcagcggatcatcgagccagcaggcgaccgtgtcgggcaacgccggtgccgatcgccaattcagctatggcctgagcgcgatgaatacctctcacggtggttccagcggttcgctgaacggccagtatcgcgatcgggccgcgctgttgagcggcgcttacagcacgggccgccgctaccgcagcgcttccgccggactcagcggcaccgtggtgggccatgccggcggcatcgtgttcagttcttacggctcggagacctttgctttggtggaggcgaaaggggccgaaggcgcgggcgtctcgaactatcccggcgtgtttgtggatgcgcgcggttacgcgctggtgccttatctgaatccgtaccagctcaatgaaatcaatctggatcctcaaggggcggcgtccgatatcgagctggatgagaccacgcagaaagtggcgccatacgctggcgccttggtgaaagtgaaatatcacgcccgtaaaggcacgccgattctgatcgataccgccgttgccggtgcaccggcgccgttcggcgccgaggtgctcgacgagggcggtgccgtggttggtgctgtggggcaaggtgggctggcgtatgcgcgggtcagcaaggatcggggacgcctgacgctccgttggggcagcggcggtgccaatcagtgccgtttgggctatcggctgataccgcagcagccgggagctcgccaggcgttgcagcgttttcggctgccctgtcgcagcggcgatgggacggaaaattga

SEQ ID NO: 436752 - DNA, 624 bp, Serratia marcescens
atggtgattaacgggacgcgggttatttattccgctgaggaaaaagacgtcaccgttaaattaagcaacgtcggaaaatcaccggtattaattcagagctggatcgatgacggcgatcctcaggcaaaaccggaaaatatcaacgtcccctttattttgacgccgccgattaatcgcgttgatgccggcaaggggcaaacgctgcgtctcagctataccggcacggcattgccgacagataaagagagcgtgttctggctgaacgtgctggaaattccggcaaaaaaagcgctgcgggcggatgaaagcgcgctgcaaatggcctttcgatcgcgtatcaaactgttcttccgccctgcggggctgagcggcaacgccaatgaagcggcgaagagactgaactggtccgcgacggcggggggaatcaaagctttcaacccgacgccgtatttcgtctcgctggtgagcctgaaggccaatggcaaagagatcgaagggcaaatgatcgccccgcaatccgccctggaatttaaaggtctcggcgccgtggcggggaaaaatattggtgtcgaattcgtcaacgatcacggcgccattcatcagtttgaaacgcgggtgaaatga

SEQ ID NO: 436753 - DNA, 531 bp, Serratia marcescens
atgaaaagatcctccgcgatattgtttaccctattgggtttggcgggtcagagccatatcgccagtgccgggacgatcaattttaacggcaccgtgactgccacgacatgcgatgtgaaacttgatggtgatagtgggatcgtgacgctgcctaccgtcagcgacagccaattaagcgtgatgagctggaccgcaggccgtacggcgtttcagctgagtctgcaaaactgtcagggagcgctgaagagcgcggccgcattcttcgaggctggtccaagcgtggactccgccggccgcttgcgcaacctctcaggtacggccaaaaacgtcgtgctgcagctgcgagaagggtccggctcttacagccctatcgtggcgggtagcccaagccagatagcgaacgcgacttactacaccatcccttctaccggcatagccacgttgccgtacgtggttgagtattacgccatgggtgcggcgaccgccggcacggtggtcagcaacgtcgtctatacgctgcaatacaaataa

SEQ ID NO: 436754 - DNA, 387 bp, Serratia marcescens
atgatggaacgcaatcttttcggttttattattgataacgatattcaactggatatcgccaataaacggttggtgaaaatcaattcactgtcgccggaaaagtgggtgcattttagcgccgtcacattaaacgacgctatggtgcgtttgctggtgtttttactgcaacaacacggcaaagggcaaaggctcactaaaacggaaatattgaaaaaggtctgggatgacaacagctattcatcatccagccaaaaactctggcaaaccgtgaaagagctgcggctcagactggatgcgctcggtttgccgcatgacttcattgttaatgtgaagggggcgggttataccctaaataaccctatcgttacgcctttgttctatgagtga

SEQ ID NO: 436755 - DNA, 720 bp, Serratia marcescens
atgtaccctcaaaatcttgcaagaaccgttgtatttactgatccgaatgacgtcgaatcttttttacagtctatgaacctcagtcaaagcgatcttgcccgtattcttgaacggggtttgtctggccgctactcgaccacacagaaccaccccgcaacttctcgggggcaatacttctatggtgaaggggtaagtgcagctcgagatattcttgccccgaaagggtactcgcgattgtctcttcgaaacgttgagttgaccgtcagtgataaggttgctatttacctttgccggggctgtgatcagaccggtctggtacatggttatccggagtcacgtatggagaaagggcagtttactcgtgaacttatgggactaattcacaataacagcccggaacagggagaattagcgttagatgacagccagctaaaattagatttaggccagcttgaaggtgagagcactcccttgctcccgaataaaatcggaagagacctatggtttttactttacgatttctatgaactggatgaattcgatcgtgtaggtattcgtgcggagttttcccgtcctgtttcttataacaacaaaaatgtggttaacagcttctccactcgtttgattcttgatgttcatcaaccagatccaattgttcgtaatgatgaggcacctcagtttactcccgatatcgatcttgacatttttaaaacaggctaa

SEQ ID NO: 436756 - DNA, 1113 bp, Serratia marcescens
atgtttaattcagagcgcttatgtatagcaagggaacgtagaggcttaacacaaagggcactagctgaagctacaggattaaccagcagaacaatttcgaactatgaaaaagctggtatctttgatgctatcgctagcgatagtatggagcgaatcgcggcggtcttggaatatcccatcgaattcttcctcgatcgggatgttccttcattgactcccgaagcggtcagctttcgtgcaatgacaaagctaagtgctcaaaaacgtgattcagcacttggggcaggtaagttggcacaggaattatctgcttggattggtggacaattcaagttaccagaacctaacattcctgactgtagtttcgacggatattcagagcctgcgcgtgctgctaggacagttagggaagcttgggggattggtgagctatcaatatcaaacatagtccatttgcttgaagtcaatggagttagagtattctcacttgccgaaaattgtgttgaggtagatgccttttcgttttggatagacgaaaagccatttgttctgttgaataccatgaaaacgccagagcgaagccgttttgatgctgctcacgaacttggccatttggttcttcataagcattcaagtaacaatggtcgtcaggctgaacaagatgcggattgtttcgcatcggcattcttaatgcccgaacgtagcatcttagcctcagttccaaggatgcctacgctggatcagctcatattgctgaagaaaaactggaaagtttccttagctgcattagtacgccgcacctttgatgtaggattatctaccgagtggcattaccgtcaattgtcaatagagcttaaccgtcgtggttaccggacgggagaacctcaaggtatgcctgaacgtgagaagtcattggttttggaaaaagtattttcagcgctacgttcgcagggtatgaagcgtactgagatccttgcacaattgagattccctgctgatgaattaagcgcactaacgtttaataaccgtttctttatggaagcaatcactggtgacggtatacaatcaagtattgagcgtaagcaaccacctcgattaagcttggtcaaatag

SEQ ID NO: 436757 - DNA, 528 bp, Serratia marcescens
atgttttgtctaggcagaatcagaaaggcaattgtgtacatcagcccctgcagagccaggcaaatagccattggttgttatgtaagctatagtggtcaaaaggctaagcaggtatatggaggcattatgagccaagccagagatcaacaggcctaccagcgaggtatctgggctgcccgtaagtggagtcgtctgaaaaatgtgactatgagatgggatcggctttgcgtatctaaggtacgagagtacaggcttcctgcatggataggccatgttccgatttttatcgctctcatcgcttcggtcgcagcaatgctgttcgggggacttctcgtaaccggctgtatgctttttatttgggcgatcgcattcattcttcaaaacgcgggccaaaacccttcgagtgaagttacccaagaaaacaatagcctggaaaacccaaaaaattcatcggactatgcatacgaaagtgctgtaatgaacaacgagtatgacggggctccgtataaatctcctggcgataactga

SEQ ID NO: 436758 - DNA, 795 bp, Serratia marcescens
atgggcaagcctctcaatgaatctttctttaaatcattacttttaggtctaataccattagtgataggaactttaatattcggagtcatacttgaatcatataagggcgacttaaactttagatcggatatcatgaaagagtattattcaccgttgataaagaaggaaaggcaatgtggcaatatttcagcatcattgtctaatgaccacatccaaaaagtcaatatttataatgagttgattgatagatataatgccaatcaagatggctcaggcccaaggttaacagaagaatatagaacctatttactggccttgctcaaaaaggcttatgaatataatgataactctgataatcatcataaagaacttgttgcatgtagacaggaaatgtaccaggacttcatcaatatagcattggtgacaggaactgtagatgaatttcatagctataataataaattaaacgaatctcttacaaagtttgatgccgaattgaataacgaaaaggaaaaggttaaaactcttctttctggtttaaatatttctgaaataattaatgagttctttattgcaggggatctaaccgatgaaagattttcttcttctaaaaagactggtgaagcaataaatactgttttcaaaccattaatgtccttttttgttttcaatgcggaattggaaaggaaagttaacaataattactatgagttgttcaatagttataatgctgtattagaaaaagagattggttctcgatataaaaggaattggttagcaaaactgcttaactaa

SEQ ID NO: 436759 - DNA, 900 bp, Serratia marcescens
atgtccagattcggtaaacagctgggaaaacaacttgtcacgcttgctcgtcagggaagagggagttttaaaaccgttgctgaccgttccagaattgcagaacgtttttctgaacgtctggcaaagttgaatattcaaattcgtgatgtaaaacacatcaagacggcccatatcgaaaaatacattcatagccggcaggctgaaaacctgtcgctccgtacattgcaaaacgagatggcagcagtgcgttcaatcatgtcaactgcgggtcggaataaactggccgatcccaaccatgataaattgagtaaccaggctttagggatttcaggagctaaccgtgatggaacaaaagcccctatttcagatgaaaagttaactgctgtcatcaatcacaccttcaaaaaagatgcaggggtagcattaggtgttcagttgtctcgctatgtaggtttgcgaacggaagaaacggttcagtcagcaaaatcattaaaaacatggcgacaggctttaattaatggagacgagcgtgttcgggttgtgtttggcacgaaaggcggtcgtcctcgtgatacgaccatttttaatcgtgagaaggttttatctattttagatgcggcaataaaacattgtgatgaacacaatgggaaactgattgataagccttcattgcatacagcaatagaacggtacagaaatattgttcgtgaagctggaatgacagggaaagatgctccccatagtttgcgatacgcgtattcacgtgatgcggtgacttatcatgttaaaaatggaatgagtcgcgtagaagcagaggcattggtatcgatggatttgggccatggtgatggccgaggtcgttatattaagcaagtctatttcaaatgtgatgtggagtaa

SEQ ID NO: 436760 - DNA, 432 bp, Serratia marcescens
atgttttattctgattcgcctgaacatgctgccatcatcggttggtctggccatcgtctggtggtcagggcctttgcaggcacaggcaaaatgcctacattaatccattttgcggaggcaaacccgtactgcgggatgctctacttggcctataactatgcagccagggatgaggaggccgagcaaaaatccaccgtgaatgtcgaatgtaagacgtcgcatcagctggtctggcctaacttcgggcgccattatcaacattggttgacaggtaatttgcggatcactgacgtagcccgtcaacttaacacgcgccactggccgctggctcgagtagctatcacgactttcagtgccttcctcagcagtggtgacattgaatttgacccacagcatctgcccgatgatatcgccggagatctggcatgttga

SEQ ID NO: 436761 - DNA, 1701 bp, Serratia marcescens
atgttgaaggctatcaaagaactgctggttggaacccgggctatgtcggtaaatccaatggcaagcatttcagcctctcaatgtcctgttggttattttataccgacatccgcagagcagcttttaagcacggcctctcgccagcggtgtctacaacagctgtgggagaatagcgcgctgcccaaagatctctatgaacatttctatctgcaaccactgaagcaactcgtcactctaatgcaggtgttgccagccacgtcccagggggaatatgccagagaaggagggctggttgatgttaccctgcagacggcaacgtatgcggttcgactggctaaagggcgcatgttgcccccaggggcagcgcccgaagagcaatcggctcagaatgttcagtggaatgtcgtggtattttatgccgcactttggcactacctgccgctgttgactcagttggagggtgagcttcaaagtggcctagcctggttacctggtttgacggtgccgggtgaaccttaccgtttccgcttcagagcccccccgttagccccgaccctggccagtagtcagagcgcaatgattgcggcacgactgctgcctgaagagcttattgaatggctgtcaacacttccagcggcgatacattcgttgatgacgatagcgttcaggcaaccgagcacattacctgcaattgacgatattactctggaggcggccaaactggctcgtggcgatgggttggccgtatcgcttttgcctatatccaaccccgatacattagcaataaccttaccgtcagtggcgctggcgacagaacatatcacctcttcagtgcccgagactgatttgcaaagtacagtcagcagtatccatcctcctctcgctcaggaacaactgccggcagagacattagatcagcccaacgaaaatgcaccgttagtcacggaattgttacttagctcggccctggatgcgccggccaacgataatcctttggctgagatggttctgacgccagaaacggtggctggtgtggaagaagatatgcaggctctgttgtcattaatggcggtagaggtgtcagtaccgacttgcctagataaccacgaagagggaaacgcccctcagaaagagagcctccttcctgaagaaaagcaggggtcggtacatgacataactagtgtaattgaagatgactgtgttttaccaggcgtaatagatcctgaactattaaagagcacggtcacaacggctattttagaaactcaacatttatcaaaagaaccacggttagaagataataacgtggaagatatttttgattcggaaaatcatgttgggaatacctttctacagtggttgagtcttgggataagaaaaggggacgtatctgtcaataccataggttccagagcgcatatcgttagtggtttcgtttttctctgtgttccagatattttttatctgtatatcaaggaaaataaattggagcgtactgataggaaatcaatccaaaaggcatttgaaaaaatgggtagacatcggatccttaaaggacagcgattctttattggctatctttatgaaaagcctgagagggtaggtacatatcgtcgtatcaatggttacctgattaaggcaaatagtttatatggcgggacttgcataccaggggacagtcagttactcgcgattccgtag

SEQ ID NO: 436762 - DNA, 1185 bp, Serratia marcescens
atgatcagaacaatagcaatacgtaatttcaaatcgttggttgatgtctcgatcgacctgcaaaaatttaattgttttgtaggcatgaacagtgcgggtaaaagtactatattgcaggctatcgacttcatatcgcagcaaatgcatggatacctctacctctggttggaagatcgtggctgggagtcgaaggatctgtactcccgaacgagcaatactaaagcgttttctcaaccactgttcatagaagttatttatgatctggacggaaaatgcctcgtctggcaaggtcatttcaatcgtagccttatgcgaatgacccgagaaagtatccatatagacggagaaatgtaccttgaggttattgatgggaagtacaggacccatggaagaagctatgactcaataccttttgagtatagtggttcaattttgggaacattaaaagataacgtcatttcttctgatgttattcattttcgtgatgcgctgaaaaatatccgctctctcgagttactgtctcctcatttattgcgaaagcgttcccgttcggaaattaaaccctccggggtcggcattggtggagaaaaactttcgggatacattgatacgttaactcacgatgataaaaaaatacttcaacagatactcatcaaattctacccacagatagctggtctgagaacgtcgacgttgaaaggtggttggaaacgactgattattcaggagcgctttgtcgatgcaaacggtgatgaggctatttgcgagaccgaagccggacaactcaatgacgggttgttgcgtattttggccgtaattgctcagctagagtccaaagaagggtcattgcttctcctagatgagatcgaaaacgggattaatccgcaagttattgagctgttggtagatgctttggttaatgcaaaaacgcaagtcattgtgacgacgcatagcccaatgatcctcaattatcttgaagatgatgttgcgcgtaagggcatccagtttgtttataaatcgccacaagggcaaacgcgtgttcgacctttctttgaaatacagcgtataaatgaaaaacttcaggtcatggggcctggtgaagcattcattgataccgaccttcaacgactggcgcgtgaaaatatagagcttgatgagatgcaacaagaccttattaaggattga

SEQ ID NO: 436763 - DNA, 516 bp, Serratia marcescens
  misc_feature (496)..(505): n is a, c, g, or t
atgactgcaaaattatctatcattgtcacgtcctataacatcgaaaaatacattggcgaatgtttggacaatgttctagctcaaacgctagaagatattgaaatcattgtagtggatgatggttctaaagatagcacgccgaaaattatcgagtcttatgccgagaaagataagcgtatcattcctattttgatgaaagagaactcacctggcggggttgctaccgttgctaatattggcatggaagccgctacgggcgaatttattggttttgccgatggtgacgatctttacgatccgacaatgttcgagaagctttataacattgcagtggctgaaaatgccgatgtcgcgatgtgtaacttcctcgagtttgagacagaaaccggcatcgagaatgcgccgtatgaacctgcctgggcaacattagcgaacaaacccgtttgggatattcgcagcgttgagaacaagaagaaagttctcgaattgttgcctnnnnnnnnnnccatggcgtaa

SEQ ID NO: 436764 - DNA, 1101 bp, Serratia marcescens
atgaaaaaaataacctatcttgaaggtttacggggtatatgctgctttattgttattattgatcactgcgtcagtatctataaaccagatattagatatacatcgtttagcgatattggaggaatgctgcggcggttaattgcatggacaccattaaatatagtttacagtggaattgcacctgtttgcatttttttcattctaagcggttttgttctttcgattaagttcaataaaacccacgagggtagtgccatattcaatggcgttgtaaagagatacccaaggctggttcttcctattttagcctctatgctgatgagtgcattgctatattatatattgaagtatacaactggccatgtgattgaactcggttttattccagcgattcttgaagcggtgtatttcgcgcctttccaacatgtgcctttgcataattatgctctgtggactatatctttcgagttttatggatcttttattgtttttggtctgcttgcgttcttcggtatgcaccgtagacgactaatattttatgcattggtcttctctttcctttatgcatggggctccttttattgtctcttcgtctttggaatgattttaaacgatttatatatcgacaataaattcaaaatccatggagtgctgcgtgcacttatgtttttgatcggcattgtgctggcaacttcgccgtatgaacgggatggcgtgtatttatatggaggtatctataaatacattgaatacatttccgttggctcatatcgagatacttatcaaatgcttatgttgacaggaagtatgctgatttttatgtcgattttaggcagtagtttgagtgaaaagttgctcgaaaacaagctggcgcagtttttgggacgtatctctttcccgttatatgtcgtacatgtctgtatacttaatattattgctgcaatagcgaagagttattatggtgacatacacatgtctacgttcataatgctattgttagttaccgtatcagtgtgcctgttgctttcttactattttgaaaagtatattgacttgccatcaattaaaatggcaaatgtattcgctaaaaaaatagcatga

SEQ ID NO: 436765 - DNA, 1143 bp, Serratia marcescens
atgaaaaagatttgttattttatcaactcagattggtactttgaactgcattgggttgaaagagcgctggcggctcaggctgctggctatgaaatccacgttgttagccactttgtgggagacgacattcagcaaaagttggcagataaaggttttatctgccacgattcatcagtatctgagctgtccatcaacccattcaacttctttggttcattggccaaggtatggtcgttgctcaaaaaaattgacccagacgtactgcattgcatcactatcaaaccttgtttgatgggggggttctttgcgcgtttttacaacaaaccgattattctgggctttgtcgggcttgggcgtgtctttatggaagacaaattgtcaatgaacgtcattcgttatctgacgttacattcgtacaatcatatctttaagaacaaaaaatgcttgctggcctttgagcacgaacacgaccgcgatcgacttcttgcgctgactgaagcgaaaaaaagccaaacggttgttatcgatggtgccggcattaaccccgatatttatcactactcgctagaaatcaaccgcgaaaaaccggtcgtcttgttcgccagccgattgctctggagcaaaggattgggcgatctggtcgaggtgaaaaagcgcttggcgcagaaaggcgttgattttgtgttgaatgtggcgggaatttccattgttgacgatccggatgcgattccgctgtcgcaaatagaagaatggcaccagcaggggctcatcaattggttgggtcgttgcagcgacgtttacagcctgattgaggcctctaacgttgtcgctctgccttctacgtattcagaaggcattccgcgtattttgctggaagcgtcttcggttgggcgtgcttgcatcgcttatgacgtgggtggttgccaaagtctgattattgatgagtacaccggcagcctggtggagatgcgcaatatcgaggttctggcagagaagttggagcagttgcttaccagtccaagcaagcgcgttgagatgggcgtgcgcagccgtgagcgtatcgagagcaaattcgcctcatcattggttattgatgacacgttaaagctctatcagcgtgcgatcgcagccggaagttattga

SEQ ID NO: 436766 - DNA, 657 bp, Serratia marcescens
atgacagaagaacgcgagcaaattctaaagattttgacagcctccttagaagcgttaagaacaacacttccattaaatacggaggcagtactgcatgatcttactcggccagaatcatcggtagttcacatcgttaatggacatgtcagcggccggaaagagggagatgcattattatcaggacccgaagatgatacaggcttcctaggcttattagatccatctcagcgtgtttccagtagagtctttagtggatatacggcgacaacgatgactggtacatctttgagtagcgcaacaacaatttattatagcagtaatggtataccgttggttgcattttgtattaacgtcgatgtagatgctgtattcaaactcaaacgtgacctagtttatttgctgcatcctaacattgaagatgaagtttcccacaaaccttttgataaacttcaggataaatcattggatgaagtgctttcaaaatttagacctacaggctccgaaagtaaaatggattttagaatgcgtgtcatctcagaaatacatacactaggtttttttaagattaaaggcagcgtcaataacgtagcaaaagctctgggtgtgacgcgattcaccgtttataactacctggataaattaaatgataaagcctaa

SEQ ID NO: 436767 - DNA, 759 bp, Serratia marcescens
atgcgggctggcctgtctggcgatgatatgcggttactacggcaaaatatcgacctaatcgcgctgcgccggcagttcaacctgtcaacccgcggtgcaacactggttggactgaccggtatcgccgagcaactagggttgagcacccgtcccctgtctctggatctggacgaactcaacgcgctgaaactgccctgcattctgcactgggaattcaaccatttcgtggtgctggtcagcgtcaacggtcaccgctcggtgctgcatgatccggcgcgcggacgccgggtcataagcctgacggaactgtcacacagtttcaccggcgtagcgcttgaggcctggcctggcctggcctggcctggcctggcctggcctggcagcgaattcaccgccgacagcattcgccaccgcattcacctgcgcacgctgattggcagcgtacacgggctcaagggggcgctcggcaaaatcttttgcctgtctctggtgttcgaaaccatcaacctggtgatgcccatcggcacgcagttggtgatggatcacgctattcctgccggggatcgcgggttactgacgctcatctgcgttgggctgatgctgttcatcctgctgcgggccgccattggcatggtgcgtgcctggtccggactggtcatgtcgacgctcatcaacgtgcagtggcaatccggtctgtttacccacctgttgcgcctgccgctcggctactttgaacggcgtaagctgggtgacatttag

SEQ ID NO: 436768 - DNA, 273 bp, Serratia marcescens
gtgtccgtcatctccaaagccccggcctcaccgcaggaaatgctgacctatcagggggcgcccaaagcggcgctgaccgccgccgtgccgtactacaaggtgattgtcattccggaaaaacaggccattgcctatgacggtaaacgtctgagcctggaaaacggcatgaaagcgcaaagcaccctgtttctggaaaaaaggaggatttatcaatggatgctgtcgccgttctacgacatgaaacacagcgcgacggggccggtcaatgagtaa

SEQ ID NO: 436769 - DNA, 528 bp, Serratia marcescens
atggtgaaaatgtttaatcgttttggttgcaacttggcgctgaccggcatgttgcttttgatggtcccggcggtgcacgcggtatcgaaaatagtgattaccggcaacatcaaagcggcgccctgcgaaatcgacggcgcgaacgacacggtttcggtcaatctgggggatgatatttccgccgccgtcctggcgacctctggagcctttagcccttgggtggagttccctttgacgctaaaaaactgcccgagcaccaccacgtcggtcgtcgcgaccttcagcgggacggctgctgaggaaagcgccggtttatacaagaacgctggcggttctcgtcgggtacaaattgagttgcaaaacagccagggggcaaacctgggcaatggcaagagtatgacccagtcagttaatcgggcgacgaatgaagccaaattcaatttgcgggcgcgggcatacagcaccaatggcggttctacgcccggctcgatagagggtgtcctgcaggtcactttcgtctatcagtag

SEQ ID NO: 436770 - DNA, 243 bp, Serratia marcescens
atggaaaagtatgatcgattgtatgaggcgatttgcggcctgttgtatgaagccaaaggattggacggaacgctgctgtcggccgatatgccgctgcaacagttggggttggacagcctggattatatggagttgatgctgctggttaggcgggagttcaatattccgcttactgcggaaatatttatcgacaatcccgcgttgactctcggggaattgtgccgcgtgatggtcagccaataa

SEQ ID NO: 436771 - DNA, 1077 bp, Serratia marcescens
atgttcagtaaaattacactattgacactattgacactattgatgttattcagcggttacagtaacgcaacatgttacggcaacggcatccagtatgcgccgcctatctacgtcgatttgtcggataagctcagcgaaaagacgccggtctgggaaggcagcttttatacgcaatacagcggttcattcacctgtcagacgaggcgtaatacttttggatacactgctgtcttgtctactaaggactctagtgcgacaattctaggattcaatgatggtaaatattgggtgcgtgctgaaatcataaacgacattccgaataaggaaatccctaatcgaggacaatattcagcatctatactgaatgtccctatgaatattcgcttcagtttggtcaaaaagagcggtgtaatcgtcccgggcgatacagtccaattaaaagatgttatgtttgtaactgatctgacaggattaaatatttttcaaatagttgcatggccagcaaagcaagtagtgaagattctgacctggctgtttaacggctttagctggccttacgatcagcgcgatatgtttggacaaccaatgaccattaaatatgcccccagaagaacaacatgttctttcgacaatgccggtctctcagtgaaattacctacaatgggagtctctcagataactaggggagcaaaaaatggcctgacgccctttgtgctaaatttcagctgtaaaaatcgttataatgatggtacatccgggcaggaaattgacatgtttttatccagcaacaacttgctaccatcagataatacggttttgacagacaaaggtgctgcggctgcaaaaggcgttggcattagacttataaatatggaaaatccgaacaaccttgtatcgttatcgtattctaatatggaacgtggaatggccacttcgttatttcatgcaatcagagggggcaagctaaacgaccaattttcgatcaaaatgggggcattttattacccctacgatacacaaagtgtaagtagtggagaaatcaacacatcagccacactgaatattatttataaatag

SEQ ID NO: 436772 - DNA, 2496 bp, Serratia marcescens
atgaaccgtagagttaatggcctgtcgatattcatatttttttcattaatatctctgactaaagcatcggcgatgaaattcgacacttctctattggccggcgcgtccagcgaatccgatctgtcgcgtttttacctcaataatgacatgccggcaggcacgcaaacggtcgacgtgtatgtcaaccagagttggaaagggcggttctcgttgcagttcggcgaacataaaggcgatattcgcatcgcccatcgtgacgccgccctgttgggcatcgatatgagtagtttgtccatcggggtggacaaggggccgatccccgtccaaacgttggtgcaaggaggaagggcggacttcgatgtggggacgttgagccttaagctgacggtgcctcagtcgcgagtgattcgcacagaggccggctatgttgacgccaaattttgggatcgcggggtgcctgcgctgctgttgggttataacgccacctattaccacgtgcagtcgttgcagggcgacaaggcgtcaaacgacgatttctataccggtctggagtcgggggtcaatctggcgggctggcagttcagagacagcagcaatttccgcagcagttcgcggcagggcagcgattggcaaaataatactcgctatgtgcagcggggcttcgccgccatcaagtcgaacctgacgatgggcgatttctattcgccgggggatttgttcgactcgatccgggtgcggggcggcgctttagcttctgatatcaacatgaggcccaattcgcagcaggggttttcgccgatagtgcggggcgtcgcgcagagcaatgctctggtgaaagtattgcaaaacggcaacctcatctatcaggagaacgtgccgccgggcgcctttacgctggacaacatattgccgaccggctctgcgggggatctgctggtcgtggtcaaggaagcgaacgggcgcgaacaatcctttaccgtgccgttttccgccgttcccaatatgctgaagcagggcgtcagcaaatacggcctggtggccggtaaggtcaatcaggctaataccgactatgcgcccgctttcgtgcagggcacgctgcagtacggcttcaataatctggtcaccggttacgccggtacgatcctcagcgaggactatcgcgcctggctgctgggtagcggctggaatctgccgttcggcgcggtatccgtcgatgtgactcaggcctcgacgcatctgcaggatcgcaatgagaacgggcagagttttcgcatcgcctacagcaagtttttggacgctaccgcgaccaacttcacgctggcggcataccgttattcgaccaaaggttattacagcttcaacgatgccatctacacccatcaaggctaccgcgagcgtgacaagcgctttcacgattattggaacgatcgggatgacgatgagcttgccccgctggatttgaatacctgggacgccgttcgcgccgctcgtccacgcaacacctttaatttgaacctgaaccagaggctcgcagacgggtggggcacgctctatttctccggcacccagcgcgattattggtcggatacaaataaaagccgggaataccagctcgggtattcaaacgcctttgcgcgcgtcagttacaacatttccgcgagtcgcgtgagaaattccaatcgcaaagaagagacgcggttttatctctctctgagcgtgccgttgtcgatgttcgacaacaatgcctatctcagcaccggcttatccgccaccgactcgcactatcagcaaagcacgctgagcctgagcggcaatgcgctggaatcaaaccgtctgagctatacgctggcgggcagcaatcaaagcggcggcaacagcatggcgagcgtgaatgccgcctatcgtgccaatgcgacgaccgtgggcggcgcctacagcgagtcatctgattatcgacaatggggcatgagcgcccgcggcagcctggtggcgatcccctggcatttgctggcgtccaacgaaatgggcaacaccatgatggtggtggacgcgcccaaggccaaaggactgatggtgaacggcgacgagagcatcgtcactaacgacgaagggctggctttggtgccttacgccacgccttaccggcaaaactccgtgacattgtcggataccggcaacagttccggcgccgagatcgtcggcaatatcgccaacagcgtgccctatgccggcgccgtcaactatttgagattcgaaaccgatcggcgtcggccttatacgctgcgcgcctttaagcccggcaataagcccctgccatttggtgcggaggtggcggatcaaagcgggcatgccattggctttgtcgggcaagccagcgtgctttacctgcgcgcggaacggcaacccacgtcgttggaggtgaggttgaacgacggggtctgcaggatagaacgcccgcagatctcgatggacagcgcagccaacatttgtcgatag

SEQ ID NO: 436773 - DNA, 1161 bp, Serratia marcescens
atgccaacaggcacaataaccctaaaaaataactcgtcggcggtcaccggcagcggtacagcgttcagcacagaactcaaggccaacgacttcattgtggtaacagttggccagaccgtatacaccctcggtattaagtcggtggaatcgaacacggcgcttactctggtgcgtaatttcgatggaccatctgccggcggcttggcatggacgccgatcccctatgggacgatggtcactattacagcgcagacgcatgcctataccgcagaagcgttgcgtgggctgctactggataagcaaaactggcaacagctattcagcggcaccggaaacattacggtgacattaccggatggcagctcgtttaccggcccggcctggaacagtattacggcttcgcttaataataaattagacaagacggttgctactgctcaggaaattaaaagttctctgtctttacaaggttcccttattacaggaaaagatgcaaatcttgatgtcggcggtttctctcgttttagaaagtcagcaacattcgatgacactatctgggcacctaagggcgtcacttgtttgggcgctattggcgattcaacaccggcagtttctgtagagtgcaaatataatggcaatacgggaacatggggtggcgctagcatattttcaaggctaacagttcaaggggtaacgaaagtaatgatgatgtcatgccgacaggagatcggggtgatggattatggtttgctttcatataaagattggatggggcgatggcacgaggttaggttggaaaatactggtaacatgaacaatttaaccggtgggtggacaacaggctcggacagtagaataaaaactgacattaaaaaaattgacgatccgatatcattggtgcgtgatttaaaactctattcatttaagcgtgacggcaagtcaatgataggcggaattgcgcaagagatcgaaaagaaactgcctcatgtagtttctgaaggtggctctttgcaattgcaaaatggcgaagaggttgatcgagtaaagtctgtcgattattcaacgttgggatatgttgctattgctgcattaaatcaggcgcttgacagaattgaccgtcaggacgagataattaaaaaactcatggagaaactgcaatga

SEQ ID NO: 436774 - DNA, 249 bp, Serratia marcescens
atgggcattatttcatggattatctttggtctgatcgcgggcatcttggcaaaatggattatgccgggaaaagatggtggcggctttatcgttacagtcattttgggggtaataggtgccgtagtgggcggctggatcagtaccttctttgggttcggtaaagtagatggcttcaactttggcagttttgctgttgcagtcgtaggtgccattgtggtgttgtggatatatcgcaaagttcgcagctaa

SEQ ID NO: 436775 - DNA, 660 bp, Serratia marcescens
atggcatggggagcgctatttgttgataataatggggtgccgtgggcgacaccagatagcacgccaatgagcttaataaaaaagtttcgcctagaacgaaacggagcaggaactgatcaagttgatattgatttaagtaagcctgttgtcatggcaatgcttgcaaacacaaatttagttattgcttcaatatctagagctgagagtggaggtgtatatgttacatctaaactagccattggtaatggtgcgtacgccatagatgtttacgttttctcaacacaatttcagccaactgtgaagtttggtattaatatatttgattcgcaaggacgatgcattcaaaccaatgagacgaaagtcatgccagcaccacgtagacttggagaaccaggtagtgatagctctggctataatgtcaaagaaacacttgcgggaagatgggctgtaatacccgccgtcactggttacgttacggctgtcatcggaaatacccaaccaagacctttccagcaaccaatcacaagcttttcctattttgatggaaataacacttttgtttattccggtgcgtgggatgtgcctaatgggccagctcataacgtagtctatcacaacacaaaggattcggtttacgtgatcgatgtatctggtttttga

SEQ ID NO: 436776 - DNA, 3186 bp, Serratia marcescens
atgagactacttgaagggcaaacggtcatcaggggccgcaaaggtggcggtggaagcccacatactccggtagagcaggctgacgatctgctgtcggtcgccaaactgaaaatggtgattgcgttatcggaaggagaaatccagggcgatctcacggcgcagcaaattttcctgaacaataccccgctggcggatgatgccggcaattacaacttttcaaacgtgaagtgggagtatcgcaaagggacgcaggaccagacctatattcagggcatgccggagatcgacaacgagatttcggcgaatattgaagttaaagccgcgtcgccgtgggtgcggcagttctccaatctgacggtcgatgcggtgcgcatcaagctcagcctgcctatccagtaccagtacaaagacaacggcgacatggtcgggacggtcacgcaatatgctatcgatctctctacagacggtagcgcctaccaaaccgtcgttgatgggaaatttgatggcaagaccacctcagactatcagcgcgaccaccgcattgacctaccgcgggcaacgtctggttggtctatccgggtgcgccgcattacgcctgattcgacgtccagcaaactgatcaacgccttcaaagtgttctcttttgctgaggtgatcgacagtaagatgcgttaccccaatacggcgctgctgtatatcgagctcgattccagccagttcaacggcagcgtgccgaaaacgacctgcaagccgaaaggcaagttgatccgcgtgccggacaactacaacccggtcacgagaacctatagcggaacgtggaccggtaattttaagctggcctacagcaataatccggcctggattttttacgatctggtgctggatgaaatttacggcatgggcgggcgcgttgatgccagcatgatcgataaatggcagctatacagcatcgccgcatattgcgatgaaatggtgtctaacggcgccggcgggaaagagccgcgctttacctgcaatgtgttcattcagaaccagcaggacgcctatacggtactccgcgacctggccgccgtgtttcgcggtatcaccttctggggtaacgatcagatctacgtgaacgcggacgtgccgcaaagcgacgtcgattacgtgtatcacgtttcaaacgtggttgacggcgtattcacctatgccggtggttcgtataaaaaccggttcagctcgtgccaggtgtcttggtcagatccgcttaaccactactcggacaccatcgaaggcgtctatgattccgagctggtcgagcgctaccgcgtgaatcagatgcagctgacggcgatcggttgtacctcgcagagcgaagcgcaccgccggggccggtgggctattttgtccaatgccaaagacggatcgatttccttcaacgtggggctggatggttacatcccgctgccggcggaaatcatcggtgtggccgatcctttccgtgcgggccgggagaatggcggccgtatcagccaggtaggcggcaggaatattaccgttgaccgtccggcaaactatgctgttggcgatcgcctggtggtgaacctgccagatggcaccgcgcagagccgcacaatcagtgcaattagcgccgacaaaatgacgctgaccgtttcaacggcttatcggcaaacacctgtgccgggggcggtgtggtgcatcgacagtgacaagctggcgatccagtattttcgcgttacgtctatttcagcaaacgatgatggcacattcacgatcgccggggtgcagcatgaccctaacaagtaccgctatatcgatgacggcgtgcgtatagacccgccgccgatctcagtcacgccgccaaacgtgatgccggcgccgaagggcatcgctatcaccgaagttgaccatcaggcgcaggggctgacggtagcatccatgcaggtgacttgggagcgcgtgaagggcgccatcgactatctggcgcagtggcgcaaggataagggggactgggtaaacatcgggcgcaccagcgcgcaggggtttaccgttcaggggatctacgccggggtgtacgatgtccgcgtgcgcgccgtgaatgcggtcgatgtgtcatcgccctggggttatgccgactcgaccacgctcagcggtaaagtgggtaaacccggcacgccggtgaacctcatggccagtgatagtgtcgtatgggccatcgatatcacctggggcttcccctccggcgccggcgatacagcctacactgagatcgagcaggcaactaccgcagacggtcagaaccctctgttactggcgaacgttccctatcctggggtgagctatcagcacggccctatgcctgcgggtgtgcgccgttggtaccgcgcgcggctggttgaccggatcgggaataagggggattggacgccgtttgttgcgggtatgtcgaatgtagatgccgacgacctgatcggctcggtggttgatgactacctaaattccgaggacggcaaggcgctgctggagccgctgaaaaccagcccagaggctattttgcaaagcgtgttggcggaatacggcaccgctaaccaacaatgggccaactatggcgaaaaccgggccgggataattcaggcacagaaggtggccgctgatgctcaaagctcagttgcgcagttggaaaccgacgtcaccgccaaattcaacgatcaggaagccgccatacaggagaaaatgacggcctacgcagatgcttccggcccttcggcgatctggacgttgaaaaccggtgttaagtacaacggaacgaattacgacgccggcctggcggtggccgtgaccgtcaacggcacgcaggttgacacgcgcgttgccgtaaatgccaaccagttcgtggttataagcggtagcagcggcagctattactcgccgttcattatcaaggatggacaggtgcttatcagtcagggctttatcggcaagggctggatagaaaacgcgatgattggcgattacatccagtcgaatgattatgttgctggaaggcaaggatggaggcttgataagagtggcatctttgaaaataacgggacgggtagcggcggaaggatgattcaaagaaataattcaatcaggctatatgatggcaatggagtgctgcgtgtagcgataggcgaatattaa

SEQ ID NO: 436777 - DNA, 2928 bp, Serratia marcescens
atgacagacattgcatcgatctccctgcgcgtcgataccggcgacttgcagcgcggcaacagcgagctggataaattccagaaaactgctgaaggtgccgccggcgcggctgacggtttcaatgcctcgggcaaagagacggccaaagtatcgaaagaggtggcgcacgaggtcgaggaaacgcacaaacgggtagcggaatacagccgccgcctgcgcgagacccagaccacggcgacggcatccggccgggcgcaagaccagttgaccgaatcctacttccgccagattgatcggatcaagcagcttggcaccggcacgcaggaattgcgcgccattcagtcgcaagtgcgcgccgcccgcgccgccggcaacatcacgcaaaacgactatctgacgctcaccagccacgccgcggaaaagatgcgcgagctgaccaaagccgaagaggcatcggcggccgccaaatcgatcttcatccaaaagctgaaagaccaggtggcgacgcagaacctttcgcgggaagagctgctgcgctaccgcgctgcgcagctgggcgttggttcggccgctgatatttacattaaaaagctctccaccgctggcgacgccacgcataagttcagtttgcagacgtccgcagcccgccgggagctgggcgttatgctcggagagctggcgcgcgggaacctgggcgccttgcgtggctccagcatcaccctggcgaatcggtccggactgatcgaccagttgatgacgtttcgcggcgcggcggtcgcaggatcaatagggcttgttgcagctgcgtttggcggtctcgccattgcatacgagaagggaagtgcggaagctagagaatttaaccgctcgatcatcctgactggtaactattctggactgacgtccgatcgtttggctctcatggccgacaaagttgcggattcaaccaatagcactgtaagcaagtccgcccaggctttggcaaccctcaactcatcgggcgaatatacagcttcacagctaaacatgatcgccacagcagcgatcaatatggaacaggctaccggccaatccatagagaaaactgccgagcaattcaagtcattgcaaggtgatcccctgaaagctgtcgtggcactcaatgaccaatatcacttcctaacctcgacggtttacgaccagatcgcggcgcaaatcgaagcaggaaacacccagaaagcccaggaaattgcagagcaatcctatgcgcgcgccatcaatgagcgtgcgatggaaattaaagaagggctaggggtgcttgagtctgcctgggatggcatcggtcgggctgcctcgtgggcgtgggataagatgctcgggatagggcgagatgatccggtcgccaggctggagaaagcgcgtgcagttctcaactctccggtaacgtcttcgtcagcaaaagataaggctatgggggacatactcaatagcctggtgggtaatctgcaggcggacttgcaaggcgctcagcagcaggccgcgaacgacagaattaaagcgttgcaaaaagttgactcccttgaaaaatccatggagtcgaacgcagaaaaacgcgtaaagctccacaaggaaattaacgagcaactccgattaggctacatcacccaagagcgggctgacaaactcaatgcccggatcgatgaaaaattcaaagacccgaaaacaccgaagggacgtcagtatacggcgccagccggtgaccgtgccgacgaaaaagcgcaggccgatttgttggcgctccaggcgcaactcaaagtgctgcaggaccaccgcagcatcaatgacaccatcagccagcagcgcaaggatttgtgggctgagcaggcgaaatttgccgtactggagcaggccgctgataaacggaagctgacggctcaagaaaaatcgctactttccagcaaagatagcgtactggcacaaaaggaacggttggctgttctcggcgacgagatcgccaagcaggagcggctcaacaaactgcaggatgcctcgtcgaaatatgtcacccagatgagcgagaagcgtcaggcgctgcgtgaaagcgccggcttgagcgatcgggatgcacggcgccgcatggaagaggcacaactcgcgcaggggtggcagaatcagggcggtagcctgcaagatgacggttacaagcggcagctgcaggcggcacgtgatttttacgccgaagaggacaagctgcgagccgactggaaaaaaggcgcattgaaaggctggaacgaatatctggactcagcgacccacgtctattcctcagtcactaacgtcgccaatgctgcattcactgggctgagcgacacggttaccagccttgcgacaaccggatcggccaacgttaaaagtttcggcgtctctatgctgaaaatggtggtggacgtcatcaacaagttgttggtggcttacgccgttcaggcggctatggggtggattggtagttcgctaagtgcgccatctggcggcaataaccccggcgcagtcccgatggggctgcattacgacggcggttacaccggcgacggcggcaagtacgagccgaaaggcatcgtgcacggcggtgaattcgtgttcaccaaagaggcgacgcgcaatattggtgttggcaatttgtacgccatgatgcacagcgcccagggttacgcggacggcggctatgttggtaacgcgccaatgcacgggctcacggcggcgggaggcaattcgatcgttgttcatgcgccggtcaccatcaagcaggagagcagcaacggcggcgacgtcagcgctgcgaataccgcgaacacagcccggcagctgcaggggattgtccagaccgaaatcaccgatcgcctgaagcgcgagatgtcgccggggggattgttatatacaggacgcagataa

SEQ ID NO: 436778 - DNA, 387 bp, Serratia marcescens
atgagcgcctggctctcaaaactggccggcggggtaatgctgctcctgctggtggcgtcaatttgcctcggcggttacagctcgctgttgtcgcaccggttggagctggcacgccagcgggccgcagaacagcagaagacgctggcgcaacaggcaggactgatcaccatactgcgcgcggatgacgcccgtaatcgcgcaatgatggacgaacagcaacggagagagcagcagctgcgccagcagggcgaaaactaccagaggaaatatcgtgaagcaatccagaatgatgagtgtagtcggcgcgttgctccttccgctgttattgtcctcctgcgcgaaacggacaccgccgccgccagtcccgctcgtgctgttaccccctga

SEQ ID NO: 436779 - DNA, 837 bp, Serratia marcescens
atgaatctcgagtcggcactaaaatacttctcaccgaaatccccggcgctgggagactcgacacctgcaacggcttcggattctttaacgatcagcgatgttatgggggggctgggaatgtgccaggctcaggcgcaatttggcctgtcggcgttcttgggaaaggttggtatcagtgaggctgacaaggtaaaggcagttgttttgttggctcggcatagtattacgcgctgcgacaaagttgcagccattcgcaaactcccgggcgagaccaaggctcgggtggttcttaccctggcggcattcgccttcctagacttttcccggagtgctgccagcgagatcccatgcgacgcatgtgatgatggctttatcgaagagagaaaatttgttatgaacaagctcgcaaaggcccacgacactgtcgatagttttgcgcgcggagatttgccggcatcgattacgcagatggatggtcgggaaatgcgtgtgaagcacgctttttatgaaataacccgtacggtgtgcccaaaatgcaacggtaaggggatgataaaaacggcctgcaatgactgccgcggtcgtggtgtggccatcgacaaggaggagtcagagcgccagggagtaccggtgaggaaaccctgcaaacgctgctcagggcggggatacgaacgaattccctcgactcaggcttatagagcgatcgcgtgtatcactgaaagtatttcattagacacttggaaaaaatcggtgaagccattctatgacgaaatgatcatccagttggatattgaggagtcgtgtgccaatacggcattacgctcaacgactggatga

SEQ ID NO: 436780 - DNA, 552 bp, Serratia marcescens
gtggattcgtatctgtcatatcagtcattggttgctacaagagaaacagctgattgggctttttggtcaatgattgggacttggttttctggcgtggcaacatttatggctgtgtgcgtatcacttcacctgggattaaaaaaaccaaaagcccgcattagttgcagagttggagaagcgttaatctttgctggcccatatcaagtgaaaggcgtttccattgttattactaacttagctttaaatacagtaaaaatcacatctataaattgggtttttaaaaaggatatttctttttttcaaccgtttagttcccgaagatcaatgcaactcccccagaagctggattatggagagcaggcaactttctggattgatttagatgatgagtctgagtggatagaaaaaatagccaaaggattaaaagaacagggaggcaaaactaaagattttagatgtgaggtgagtgttacaactggcgaaagttttaccttcgagataagtgaatcactcatgaataaaattgaggaaaactacctaaaagtttcataa

SEQ ID NO: 436781 - DNA, 246 bp, Serratia marcescens
atggaaattaaagcaattatcgacaaagtgatctccgcaggcctgtctgtttttgagcacgaaaacaacggtgacttcggcagcgggactatgcacatcacgattctcggtggcgtgcgccgcgttgaattttacccatcaactggcatggtctacgccaatgcggtgaagggtaaattcaaagttgctcgcttcccaaaggctggaattaaaactgcgatccgcttagctaaaagcgggaagtaa

SEQ ID NO: 436782 - DNA, 144 bp, Serratia marcescens
atgcagaatcttcttatcatgaaagacgcgctgggcgatgagtgggaagttatccgattttttcgtctttgcgacatgaaggctactgacagcagctattctcttgttacgataagcattatttttttcaggagccaaggatga

SEQ ID NO: 436783 - DNA, 714 bp, Serratia marcescens
atgaatagaattgatggcggaaatcgcaagtttattctaatcgagtgtgaggattattgtgatcgcactacagcagctcgtgttcgcggagtcataaaaggttattcttttaaaggtaagcaaaaaaaagaactgcttactgaaaaaatcacttggtcaatatttgagaaaaaacataccgagttacttgaaaaaatcgctaaagttgaagcgaagcataataaagaattcgataagataaaaaaagatctgaaagatggcgttctaactgttaccggtgagcgaaaaatcgatgaatttgccccaggtattggtggaagctttacctattgtaccttgggcgagcccattcaaattgaaactctattgactggcgaaaaaatgccatcatttgacgcattggcacgttatgtattttatactgccacaggacgatccttagaaactgttgcgaaagcctctgctgatggttttatcggtgaaacagatctcttccgtattcacttattctaccgtcctgaaagtgaatggctgcgctctaatgaagctgcacttaacgctgacaaggttgagattatcgaaaaaaataacacgacgaaaaaacgcactatcgtttttgctgtcgctaagtttatgagccaaaaagacttaactgaaaaacgtatagagttttgtcagttaccatacgccatccatcggattatgggggcataa

SEQ ID NO: 436784 - DNA, 894 bp, Serratia marcescens
atgccaactttggattttaaaggtaagcagtttgtttattcccatcatctgagcgtaccttttcgcgagttaaaagtagaaacggataaatctttaccactagaaggcaactcaccttcactcgatgacaacctgatcatccacggtgataatctagaagcccttaaagctttgctgccaacccatgcaggtaaggtggactgtatctttatcgatccgccttacaacacgggtaatgaaggctggtgctataacgacaatgtacgctcaccgctcatgcaagagtggcttaaaaaatcagcaaatcctgttgataaagaggatctagagcgtcatgacaagtggttatgcatgatgtggcctaggttggctcttttgaaagagttgttggctgatgaaggcagtatttggatgactctggatgataatgagatccacagagcccgcttgctttttgatgagatatttggtgaagacaacttcgttgcttgttgtgcatgggaaaaaacctatacacctaaaagtaatggtagggttatcagtacggatcatgattatgttttagtttattcaaaaacatcgcagtttgtcgatcatggttggaattatcttgctaaaaatgaagagcagatcggtcgctataagaatccagataatgaccctaatgggccctggagaacatatccgttggatgtacgtacggaagatagcgaacgtcgagaaaaatatcgctatgaagttacattaccatcagggagagtagttaaaccagctaaaggtaggcattgggctttgcctgaacatgaatttatacggcagatggaagctggcgaaatttatttcggtaaaaaaggtgatgcaatgccaacggcgatattttcggcggctggctga

SEQ ID NO: 436785 - DNA, 3150 bp, Serratia marcescens
atggccgataagcaccccagtattattgccccgctcacgggattgaaagattttcagcaacgcaccgtgaattatgtttttcagcaattttatggtgataaacagcaaaatcgctttctggtagccgatgaagtgggtctgggaaaaacgatggttgcgcgcggcatcatcgccaaaaccatcgagcatttacaggataaagtcggcagtatcgacatcatttatatctgctcaaattcggctgttgcggcgcagaatattaagcgcctgaatgtcagcaatgaggaacaattttcgcactcaacgcgcctgacattcctgccaaaacaggtacggtctctgcgcaaaaacagaatcaattttatcagcctgacgccaaacaccgccctcgatcacacccgcagccgtggcggtcataaagaagagcgcgcgatcctgtatcgtattttgtacgatttgccgttggcaaaaggcgagcgtcgtgaacgtttacgcttgggtatgcttaacctgctacaggcagcagcaagccggtctggctggcattccgcagttgatcagctttctgtcgacgacattgacagggaactggcaaaagattttcgtagcaaggtgttagacgatgccaaactgtacgctctgctcaaggaggggtgcgagtatttcgccgacgacgacgaggacagcgagacgcacgattctgaactgcgctacaccctgatcggcaaactcagaagcaaactggccgaagtgtgcttatccgcgctgcagcctgatctggttatccttgatgaatttcagaggtttaaagccttactcgatggtgatgatgaagccgcattgctggcaaaagcactctttgaacaccccggagtacgcgtgctcttactctctgcaactccgtataaaatgttcaccctcgatcaagaaagcgaagaggataaccactacgccgactttatccgcacattgcagtttttgtacaacgatgacagtcaaatcaagaatattcagcagcatttgctcaatcaccgtaccgctttgcacgcctcagtaaacgcagcggagacgaaaaaagctctggaaaacgctttattgcaggttatgtgccgtaccgaacgggtaacgatgacaaaaaagttagatgcgatgacgaaggaagtctcacaaccagccatgattacgcccgccgatctttatcacgcggcggcggttgatggcgtcgccatggaagtacaagctcgcgatgtcctagaatactggaaatcgatgccttatcttttcaatttcctgaaacattacgaattacgtacccgtatggataaggcactggaatcgccttcagatgcattgcgaaaactcgtcaaatcagcaaaactacagttgctgacgaaggcaaaactggagcgctaccagccgcttgatgccgccaacccacgtatgaggatgctgtttgaagacacgctggataaaggcatgtggcagcttttgtggatgcctccttctctgccttatatgacaccaaacggggtatatgccaacaaaggcaacctaaccaaaacgctggttttttccgcctggagtgcagtacccaatgcgattgccactgtctgctcttatgaagccgaacgacgcatgattggcgccgatcccaagattctgcacagccagttcaagaaaaaagtaaaaccgctgctcaattttgcgaaatcatcaaaagatggccgcctcaacgggatgcccgttatcgcctggacgttgccgtcaccgactctcgcctgccatatcgatccacttgacattgctcgccagcatgctggcgagccgttgagtgtaaaggcagtaagggcgattgcaacggcgaaatgtgaagcgctgcttgagacactgggtaacggtgagccgggtgcgcgtgcggacgaacgctggtactgggcagccccggcgttactggatgcccaaaccgaaacgccaaattggtggcatggcgaacattactggtacaacgggccaacgaaaaatgagcccgccgaaaacttccaggaacatatcaacctgtttgcccggatggcaaatggtgagatccccctcggcccacgccctaacgatttggccgaagttatctgtgacttagctcttgccagccccggtacgtgtgccctacgggcgctaagccgtatcgacactggcctggcaaccgattcggcagagatgttgtccgccgcagcacagatcgcttctggatttcgttcgctctacaacctggcagagagcatttcgcttctacgcggcacaggggatgacacttactggcggctgacgctgcgttatggcatcgatggcaacattcaggccatgctggatgagtatattcatacgcttctggaatcaatggggttgcaatatgaacccgccgaagcgcaactggcggctattgcatcccgtattcaggctgtggtttcactgcgaaccacacaattgaacgttgatgagctcaagacgaaaggcggtaattatacttggagcgatttgtatacgcggtgccgctttgccttacgctacggccaactgcgggacgacacggatcaggccgtcgctcatgcagagtcggtaaaagatgcgtttaactccccttttcacccctttgtattggcttccacttcaatcgggcaagagggactcgattttcacacctggtgccatgcagtgatgcactggaatcttccatcaaacccagtcgatatggagcagcgtgaaggacgagtacatcgttataagggccatgcggtaaggaagaatattgccgagcattatggtttgagtgcacttcattcgctggcaaaacgtgcagatccatggacacagctcttcgcacttgcgacaagtcagcgcaaagcgggacagtcggatttgattccctactggatttttgaagaaggaacctctcgcgtcgagcgccgtgttcccatgctgccgtacagcaaagagagcattaagtttaagcggctcaagcgagaactggcactctaccggattgtcttcggccagccgcgccaggaagacttgctgttcggcctgaaacacaatggcgatgagtctttaactgatttaacacagtggctcatttctcttgaaccaccaaaggtgtga

SEQ ID NO: 436786 - DNA, 1797 bp, Serratia marcescens
atgctaaaccccaataatcgcagcttatatacttcggcactaacctctccgcccggcatggtgtttgacgaagccatcgccaccagcttctcactcgacccggtatttttactgcaggcgccggtctatttggcgttcacagcgactgacagcaatcgtgctcaggatccgctatccatttttgaagccattcgtcgttattccgaacgtatcacggtgtacgtccaaaaagggcgtattcaagtcccagcaaagctcaagcccaaccccttattcggcctgcttgaagagatgattgttgaatcaaaagccaaaggccgcggagtctttcacccaaaaatctgggcgattcgttttatcaatcctgaaacagacgaagtgatgtaccggctggtcgtactgagtcgaaatttaaccaccgattcatcttgggacctctctttgcaactggacggctaccccgtaaaacgtaagcaaagtgccaataaaacgctggtgcatttattctccgtactgcccaaacgggcgacgggaaaaatggcgaaacatcgccgggcgcaggcgcagcgctttgcagatgaactgttgtatgtggaatgggaatgtcccgcaggctttgatgaggttgcttttttcctgcctggcgaaggatacgactggcagccacccgaagcggatcgtgcggtggttatctcaccgttttgcaccgacgaggcactgcaacacatcgtgaagcattgccagcaagccgatgcgctgatttcacgcccggacactctgcttaccttgagtgaagagacgcgcagccttttcacgcgtcagcttcaccttgacgatgcagcagaagagcaagcatccgacgagagtacccctgacgacatcatcgcttccggcctgcatgccaaagcgtatctgtttgaaaatggccggggcagtgagctggttctgggttcagcaaatgccaccagcgcagcgctactggggaaaacgaactgcgaaattttagtctcgctcaaaggtaagaaaaagcacacgggtaccattgatgaccttctgagcagcgatggaatgaaaagctatctgcaagatttcgaccctgcccagccgtttgaacccgatgtcctgcgtgtagaagccgagtcccacgctgaacaggcacgtgcgttgctcgccgacgccgcattgactcttcactgtcaccccggtgaaaacaaccaaagttgggcattgtggcttgttggtgaaattcctgagctaccgggtatcgtgcaggcaactgcgtggcccgtgacggtagctgacggacttggctgtagcctgctggaccaggccgatgggaataaaagagcactcggtgagttttcagtcccggccattaccgggcttacagcgttttctctcaaaacatcgcacccggatgtatcgatcagattcgtcctcaatctgccgattgatgccttgccccccgatcgccacgcaatgattttacaaagcagcatgcagaaacaggattttctgcgttatttgttgatgttgataggcgaggcgggacagcaatccttctttgccgaaaacgcctttggcgatggccatttctttacagggcttgccagtggcgaagaattttctgtactggaagagctgacgcgtatctatagccgtgagcctgaacgcttaaaagatatcgccgcgctgattggcaatatgcgcaaaggacaaagcgacatgattccgcaagattttcttgctttgtgggccgtatttgaatcagccatgggaggccgaaatggccgataa

SEQ ID NO: 436787 - DNA, 1197 bp, Serratia marcescens
  misc_feature (437)..(446): n is a, c, g, or t
atggcatccgcgttaggttggcttgatcatgatgcaaacgcacaggccaaaacgttaaatattcttgcgctctttcaacaaaaagagagccgagatgagctgggtatcggcactatcagagatagttttgctgaacaactatttccaggaaccagcaccattcaaacccgtttacgttacatgctttttgttccatggatctatcagcgtctcgaaaataaacgcatatccgctgcaaactttggtacccaagccgcccgtgacgaaagggccttaattatccccctctccaagttcgaagaagattcggccggtacatttggtaaaaactcacgcgaaaagcttaaacgtctgcccagttccgtctactggtccgggctacgtcgctggggtattcgcgagatcctgtggtcgcaggaagaatatcatcgacgtgnnnnnnnnnnatataaagaagaaaatcgtggtgatatgggcgacaccagcttgtacaaaccagcccagagctggcactccagcctgcctgcgccaccgcccaattttcctgatgatgcaacgtttgcactaacacgccaggaagccagctttcttcgcgaccgtattcaattgtcctgcaaaggcagtctgttggcttggctgacgctgcatagcgaaccagcagatgtgagttcaccatgggaacatccggattacgcgaggttcccagatgaactcaaggaactgctgactcacgcgcggcttttttcttatacgatgcacggcgcagccctgctttataactatttgctcgccaaagagcgttcagataacgaccttctgtctcaacacaatgacaacttcgtcaactggtttactgcactcccacgcaaagaaatcggtacctggtcgctcggccgtatgtgggaactcgccgccgaaccgggctatagcattagcctaaaaacccgccgctttgtggaacagtggattgctcttatccgacagtcccctgagacattactcaccagtaaagaagcctgtgctctaatccgtgcccgcgaaatgaccctcaaaggcccacgttcgcgcttcaaaaacagacgcgctctggagcaatggggtggatatgccggaaccctgcggctggtctaccgctggcataacgtccagataatacttaaggatctggcgcacggtctcaggagagaagaatgctaa

SEQ ID NO: 436788 - DNA, 276 bp, Serratia marcescens
  misc_feature (92)..(101): n is a, c, g, or t
atgcaaaacaatcaacgatgggagtcagactggtttctacagtcactcctgaacaaccatatcgacaaactggtagagcgctattcttgccnnnnnnnnnncgaatgggatctccgaaagctgatgaaccgtatgatgcaactcgaagcggtggtcggtttcttctgggttatcgaatggacagaagaccaccactaccatgctcatgtcgtgttctggcttgatggtagtaaaactcagaatacctatacctgggcgcagcaagccggtttgtaa

SEQ ID NO: 436789 - DNA, 594 bp, Serratia marcescens
atgaaagactataaaccgcgttacgaagaacttcacaaatactaccagacctggctgaccgactttacgaagttaacggtcaggtcgggcatgtgtcaccagaatatctaccatcaccatagcctgacgatcggaagctttacgtttccgggagaggaggaggttatcgctattgttcctcagtgcctgcatcgaattatttatggcagagctgcggcatcgctgacggtcaatgatgacctgagcgtcagcttatttacccaggagcatctgctggctcatcatccgatgctggagggggttttgctgtctgagtgcgtgcgtttaaaacaacgcactctggcaaataagctcatcagtttgttccgccagttcagcggtagtgagctgcgtctgaagctggtctggctgtgctggtacgatttgatgctggggaattgccttgatgactggaccgacaacctcaggttcaaaaaagacaaagagatggatatctggatcaatgaccggcaggctgaaaaccctgcgctgaccagtctgatggacgagtatgtctgctttgcatggcggacgacagctgaaccactgagttag

SEQ ID NO: 436790 - DNA, 207 bp, Serratia marcescens
atgaccacgcatcccttacttaccgaagaccagttgattgacatggcatttattaccagcctgctgcagatgacagacaagtggatttacaagcttattaaggacggatccttccccaaacctatcaagctggggcgtagctcccgatggcggaagagcgaggtggagtcctggcttcaggaacgtgtcgaacagtcccgtaaataa

SEQ ID NO: 436791 - DNA, 777 bp, Serratia marcescens
atgatcctgagagaccttaataataaactgaaaaacactcatgagtacaataagttcgtacgggaaatgaaaaatggattattttccagcatcatcccggagacaaattttgaatggataaaggactatagctccgcttattttgcatggaatatactttcaaccatgggccctaaggaaattaatccactagaggttgatttttaccgtgaacggcctccggtcattcagcataacttattgcctgttattccggaaacgtataaggatgccctttcagtactctacaccagttttgatagctgggatgtcgatttattctttaagatcaaaacactctcatcattaaaaaatatctggattcagcgaaatcgagagttaccagaaccatttaaatggattgaccttaaaaaccataaacaatgtgcatgggcttttaaatatgttatggagcatatcaaacccgattacatgccttcatttatgactgaaatcagacaacaacaagtgattacttttctcacggcagtattgtattcctggcctgctcaccctgacactcggcgtctgatgattcaacggatgaaaaaaacatacaaccagaatttgttccgggaaaacattgctgacaaaaaagtaattaacacttatgtccagaaggatattaaagaaaagctcgatatgctggcaaagaaaaatggtcgaaaaattaacgaagagctggaagttatcattatgaatgcctggcacgatgccagatatgcagaagataaatag

SEQ ID NO: 436792 - DNA, 636 bp, Serratia marcescens
atgcaaaaatctgacggccttctggccattgagaagcctctggcttcactgccccatactcttcgcagtctaattcttaaacgccttcgtagtctcacacagtacgagccggttattggcattatgggcaaaagtggggcaggcaaatcgtctctctgcaatgccctgttccagggagaagtcacgtcggtcagcgatgtggaggcctgcacccgcgatgtgctgcgcttcaggctccgcaatggcaatcacagcctaatgattgttgatttacctggtgtgggtgaaagcgagcaacgcgatgaagaatacactgcactgtatcgccgcatcctacccgaactggatttagtgttatgggtcatcaaggctgatgatcgggcactgtcagtggatgaacacttctatcgcaaggtgatgctggcgtatcagtaccgggttttgttcgtggttaatcaggtagacaaggccgaaccctgtcatgaatggtgtaccaccgatagcacgccttcacctgctcagcagttaacgattgagactaagagaatcgcgatgcagcattcctgccgcaccatcctgtctgtgtggtgtcagcccgcacagggtggggcgtggaaacccttgtcgatactatga

SEQ ID NO: 436793 - DNA, 342 bp, Serratia marcescens
atgaaatctactgactcagagaacgatacatttctaaaatggggactgaatcgtaatgtgacaccttgctttggtgctcgtctggtacaggagggaaaccggctgcactatctggcagaccgggccagcattaccggtgaattcagtaatgcagaatctttgaagttggatgaagtattcccacattttatcagccagatggagtcgatgctgactactggtgaaatgaatcctcgccatgcccactgtttcaccctgtaccacaatggtttcacctgcgaagccgatacccttggcagttacggctacgtatacatcgccgtttaccccactcatcgttaa

SEQ ID NO: 436794 - DNA, 342 bp, Serratia marcescens
atgaaaactctacctgcaacaattccgcaggcggcgacgctatgtctgtcgcctgtggcagtctggcaaatgctgcttgctcgcctgctggaacaacattatggcctgacgctaaacgacacgccgttcagtgatgaaaaggtaattcaggaacatatcgatgccggtatatctttggccgatgccgttaattttctggtggaaaagtacgggctggttcgtattgatcgcaggggattcgactggctagaacagtccccatatctgcgggcagtcgatattctgcgggcgcgacaggcaactggtttattgaaaagaaatcgtattagcgcggcacagtga

SEQ ID NO: 436795 - DNA, 270 bp, Serratia marcescens
atgaacacacgaaacgtcaacgtcaaaaccgccacgaaggcacactcaaagagatatgggcaaccccgttgggagatcatgtttttcggccagagtgctaacggatcaattccgatgttttcacgcgtgaccgcccaaacagcagcagaggcaaaggcgcggtttatttcgctgttaaatccggtgaatgggtatttcctcggcgagccggtacaaatttcggaaacagaaattaaggaggtcaacgggggcggggaagccctgaattga

SEQ ID NO: 436796 - DNA, 246 bp, Serratia marcescens
atgactgttgagttttcaatcatcgcacccgctgcgggaaatgtacagagtggcgtgaaaaaaaagcacaagcgtatcaagcgcgattgcattgctgccaaagacgtaaattccagcgttaaagcatggagtcgtcatattgtcaaaacgcatcgtaaaggccagcgcgtgcatattccggcgctcaagggcaacgagttagggcagttgcttcgcgccctggaaatcaaacgggcatacgcctga

SEQ ID NO: 436797 - DNA, 867 bp, Serratia marcescens
atgtcaacaacgacagagaacggcgcgagcacaatagatactatcggcatcaacgacaatatgggcggcgatgtcattccttcggcagcaattgatgtcattatcgctcagcgaaacttggggttaattgaattgaaagccgcagcggaaaaacttcatgcagcactttctattttgcgcgaagcaggcagttacagctatcaactcgatgaatataccatcattgagaagctaaagagcagggcgggtttgaatgattttaaccgcacagcacaaatcaatgtcgaccgcagcatctggacgcgtctgatgaatgaaacagggatgtttacgctgatgagccaaaagcagcgcgataaatggaatgaatctctgtatagcgataaatgccccgccgtgacgctggacaatgtactggcaacattcgaggcattaaacgcaacgaaagcggaaacgtttgagcagggtttaatcgacgttttccagcggctatcgtgggattacaagacgaacaatccttgcagacttggcaagaagatcatcatcgagcggttggtatcacgattctatagagaaagttttcgcgtagaggacaggaccattcaggcagtagacgatctggccaaaatattctttatcctggatggtcaaagggtgccagatgttcgcgtgggggaaggagatcgatttacaaacttctttaacaggggagaggggatcggggtcacttgtgaattaacctattttactgtcagagcttatgccaaaggaacggggcacattgagtttaaccggttagacctggtagagcagatcaacgatatattagcgaaacggttcccgaatacattgccggccagagtataa

SEQ ID NO: 436798 - DNA, 582 bp, Serratia marcescens
atgtggtgtgaaaaatctagttttacatatatgcctgtgttaatattaacctacgttgagttaataccttacgggcctcttgcgatgatgtgtagaatagcggcagcactgatggcaatttcggttttcttcagtggtagcgtacgcgcagattgtttcaatcgcgcgggggattattaccgtatagatccggactatctccgcgccatcgcatttagagaatccggttttaacaactcggcggtcaatcacaacagagacaagacgggaaaaatcctcagctccgatcattgcgtcatgcaaatcaacaccaacactctcaatcgcttcaaacgagagtaccccttgctatcgataaaacaactcaaagataacccctgcctttgcatacatgttggcgccctcgtattaagacgcaacttcaaccaatacggcctgagttggttagcagtgggtatgtataatgccggcgtaaaaaatcggcaggagaccatatctaacagatataactacgcaatgaagattgaccgaatctataaagacatcaaaagtggaaaactaaaaccacctgctatcaactga

SEQ ID NO: 436799 - DNA, 828 bp, Serratia marcescens
atggttgtgagatttattttagtggatatcagcaataatcgagtgtcgtatagaataagagaggatggagcaattttctctgacgacacccatgctgttttacataataacctcgtagacttttttaatgaaaaagacaagagcaagatcctagctgcttatggtatagagaaagattctccttttctgtctagaggtgacacagcgcagacagttatattcagtctatttataacatgcttgctaattgccattccattttctcaaacaaaggtgctggtttggagcattatccaacctggtggcattctaattttccctttaacatttatttttctggatgctataaatgaaattttcggtagaagaaaaggcagaatatctgtaattattgcctctctatgcttaatgacttcagctttatttgtaagtctctcccttttgctgccgggagctgataactcttctcataataaattcattgaagtttatcaatacctaccgtctctacttatgacaaacgcgatttgcgtacttattgcggatagtgcaaacaacagcatctataatgctttgaaagggtattttagaggggggtttctgtggcttaggtgcaccattacgacagtagtggggcagttgatttactccgcaatatggatatccatattcttcttcggtaagataagtttagaggaacaactacactacattatatctaactatgagttcaaagttatttattctttcattgtatgcacccctatgacagtattcttagtatggttggccaagaagtttatctactcaaacacatctaaactataa

SEQ ID NO: 436800 - DNA, 588 bp, Serratia marcescens
atgcctaacaccatacaagacagactaaatgaggcgcttttagcaagagggatgacccctgccgaattagcacgcgctataggtgttggaaacggatatatttcaaaactcttggcagggtacatatcgcaaccgaaaaagaatctttctgccatatgccaagcattaagaatcacagaaacctggttgataacgggaaaggggcatgctgaactagaaccgaatcaagtccctgaagtgcgtaacagtattgtgctaaagtttgagaacagggaaaatgagaatgcccgagataactatataacatgtttatataatcatgaaattgagaagctagcagcttacatattgagcccatcagtaagcttcgaaagtgaagtggctgttattatcgataaaggcagaaaaggctccggcttatttcttatagaatttgagagcgagcttttcatatccacaagaatagataatcttgtcagtattttatggattcacaacaccggaagagacatcccagatggaaaatttaaggtattagggaaaattgttcagctgctcgaaatgaaagaggatgacatatggttgtga

SEQ ID NO: 436801 - DNA, 303 bp, Serratia marcescens
atgcaaggaaagttagccttgtacctaaagaacccgctctttttgggtgcggtagccatgtcggtacttatgctcgcgctgatgttcataccgaccacggaagcttatgccaaggattattttgccaaggctaaaggggatgtgaaggcgacattcggcgccgggagtgcggttgtctacgttatctatttcgtcgaaatgttggcggcgttatggatgttcatcaagtcgaaaagcccggcggtatttatcggtatcgttgccgttctgcttttcgttaacgtcgtaaccggcctgttttaa

SEQ ID NO: 436802 - DNA, 576 bp, Serratia marcescens
atggaatataacctgaagtcacgccgtgaccgcaatctggcgctggcgttggtgattatgcttattatcgccgctatcagcggactgctggcgcatcggctttattccgataaccgtgccctcaccaatgcgctgctcaacaaccgccaactgattattttacccatgaacgccaacaccgaattcggcttcgtcggcgaacgcggtgatgcgcgctacctgcggttgatggcgctgagcctggtcaatcttcgcctcaatatctcgagctcaactgcacaggccgcacacaagctgctgatggcatacgcctgcgaggggcaggaaaaggtgatggcacccgcgctcaccgccgaacgccgcagcgtctccatcaacgaaggaagttcggtattttacccggccaaaatcagcgtcaatgccgacaaggggattgtcgatattggcggcaatctgcagttcacctatggcatcaatgaggccaggccgattgagaagcattaccgcatccgactcgatacgcgtaatgacggcttgtgtttcaatgcctttgtggaggtgcccaatgaacagtaa

SEQ ID NO: 436803 - DNA, 726 bp, Serratia marcescens
atgaacagtaaattcgcagcgctcatggcggtctcattaatctgtgcaggcgcacaggctcaggagatagacatcaaccccaacgcgcgcgtgagcgtggccgtcagcaacagcgaccccaattacatcaccgtcaatgacgatcgcataaagggaatactggcaaccaagggcgtcgtgaccgaacagcgcgttaccgacgccggcggtctggtgtttgctaccgtacatgacaagccctttaccctgtatgtgacgaccgagagcggctttaccttctcgctacacgccacgccccgccgtcaggccgggttgtcgcttatcgtcaacaacaaggctattcgcgcaaccgcggacgccgcgacctgggaagcggagcagtcggggtacagcgcgctgatatctcgcctggtcagcggctttgtcaataacgacatgccgccggggtttgtctacaccaaaaaccggcgtattccgctttccccctcggtgcttcaggcctttgccgttcgtgaggtctctgcctggcgcggccaccgcttgcgtatcgtcaggctggatgtaagcaaccgcagtgatgcccgtatcgagctcaatgagcgatatttctggagcccgggcgtgatggcagtgtcgttctggccccagcttgatgtgatatctccgggcgtgaccgtttccgcaatcgtgctcgtgcgagaggaggaggctgcgcgtgaacattaa

SEQ ID NO: 436804 - DNA, 1335 bp, Serratia marcescens
gtgaacattaaccgctgggtaaaggggaagcagcagaagctgttcactctcattatcgccggcatcgtgctgctggttggcacgttctggtatctgaacaaggcggccagccgtgacgtcgatccgaataccgaggcttacgcactgccggccgaaccgaacctgaccggccaggtcagcaataccttcgatgaggctcagggcggggtgctggttgatgcccaacttcgcgagcaggcggccaacaaggctgtcgaggatatgaagggcattctgggggatatcaaggcccggctcgatgaggttaacggcgaaaatgccgcactcaaggcacagctcgacagcatgcagggccagatgtcgtcgctcagggcgcaggaagggcagggggcacaaccggcttccggtgccgcagctcagccgccgcactaccagttgcagcctgcgccggtaaagcgtggccagcttgacagcttcaccttcgattacagcaaggtcgatgcggcaaaaaagcccaggcccgatagtttctatgtgccttcaggcaccttttccaacgccatcattctcgaaggtgccgacgtcaacgcgtccgtttccggggaagagcacctcaagccgatgcagttcaagctgaccggcatggcgcacctgcccaacaacaagcgcctgggcaagctcgacaactgctttgtgaccgccggcgctttcggtgacgtctccagtgaacgtgcagaggtgcgcgtcaaatcgctctcctgtgtggtcggtgacaagcatatcgatatggaagtgaaggggcacgcggtgttctatggcaaggccggcatcaagggggggcccgtgatgcgcaacggcaaaatcctcggcctggccttcggggcaggcgccctgtcaggtattgggcagagcgtatcgcaggtggggcagaccgttgccggcgtgggggcaacctcaaccatatccggcggcgacgtggctcgcgccggtctggggggcggcgccagtacggcggccaccaagctggccgactactacatccagcgtgccgagcagtaccacccgattatcccgattggcgccgccaaccgcgtggaaatcgtgtttacaaaaggtttcagggcgtcgtttatcgaagaccaggaagcgagtgaacaggcggcgcaagcaggctctgcaccccacaccgcagatacgaccaccgccgcgcaggggaacagcgacctgccgccagagcttatcggcaaactcggtgacgccgagtccctgcaaatcaatgattttatcaccccgacggggccgcaaggcgccaaaccgtcaccaggagggagttga

SEQ ID NO: 436805 - DNA, 201 bp, Serratia marcescens
atgccggcgtccagccaaatgatgcatgcagcgcagaccgtttccgactcagaaaggcagtcgcttttgcaggagcaactgggcgtcatgtgtgagcagttggcagagaccaaggtcatgctgagcaggctgcaggtgatgtcctcagcctgtgaagcaccgacatcagttaaacccgtgggaggcgataaacatgagtaa

SEQ ID NO: 436806 - DNA, 216 bp, Serratia marcescens
atgagtaagtctgataccccatgccgcgatagccatttccttcttcctggttcggatggcggtctcaatacggtcatcttcggcgaatgtggcaccggggaaaccaaccagcaggacgtgttgactgtcgattgtgatatgcagcgtcgatggattattgagctgggccaggcgctacgcgccgatgacgccaccgctgaaaactgcgcgctgtag

SEQ ID NO: 436807 - DNA, 438 bp, Serratia marcescens
atgaatattcttgggatcacaaccagcccaaaatctcgccggctgtttgcgagcgactggacgcatcatcgtggcgctctggcgctgcgggttattgagcaggtgttgttggcgatgctgtttggctttcttgcggtcatgggggcgatggggatttccatgatcgcccagccggtactggacggtgcggatacgctattcaccgatcatcttgcaccagatgttctggcgaacagccttgtcgagtcaacgctaatggcactgttcgctggcacttatattctcctaatgaaattctcacgcgactactaccacgccgcagaacttggctatgtgagcatttttgacttcgatgacgatttcagccctcgggtgcggctgcgttcgctgcgggcacgtcagcaggcggtgatgcaggaggggcggaacgatgcgtaa

SEQ ID NO: 436808 - DNA, 540 bp, Serratia marcescens
atgcgtaaggctctggtgttccttcccttgctcctgaccggctgcgcaggcatgaactccgagttcgagttcgacaagcctgcgcgggataccggcgtctggatgtctcaggccgatgaaatgacctctgcatccgctggcaagcccggtaacgccggtggcaagggcctcaacctcgccggctatcggctggttgataccggcaacatccgtctcgatgtgcaaacggcacttgccggcagcgtcgtcggggcgggccggcgttatggcactgcccttgccgctcccgcgcggccgggggatgctgccgccaggcctgcactgaccggtggcgtcgtccatgcggtatcgcaggtgccggtcgggcaggtgagctgcagcagcccgcgctgctatcccgaacccgcgtcggcgtttcgccggcccgatggcgtggcccgcatctggatagccccctacgtttctcccgatgacaacgtccatatgggcgaggtcgtttataccgtcaccaagcctgccaactggcacggcgtgttgtga

SEQ ID NO: 436809 - DNA, 2610 bp, Serratia marcescens
atgaagttcgacctttccggattgaagttcaacccgctcaatattattgacgatgtcgccagcattctcggcgacaaggagaccgtgcgggagacccagaagatgctggacgatatggattacccccatatccgtgacctgctgccgttcgccgactacatgagcgaagaaaaaatcttcatcaataaaagctccatcgggtttgtgctcgaatcccaacccctcatcggggccaatgagcaggtggtcaacagcctggaggcgctgttgcaggagtccgtgccgcgcggcacgcccttgcaggtgctgatggtcagcagcggggcgctgcaggagcagattgactatggcctcaaggatttcggctggagcgggtaccgcgcggacgagtgcaacgacatcaaccggcgcttcgcgctgcatggcgcccgccacggttttcccaatgggctcgggcacccgctgacgctgcgcgactatcggctgtttttcacctgggcgcagaaggttcgccgcgtgaccgaggctgaccttattcatgtgaaggaagtgcggcgaaccctatccaacgctctggtggcggccgatatctacacgcagccggcgtcggctgacgatgtcatcggcgtaatgcgtgaactctgcaaccacgatgtgacgcgcctggcgagctatgaaaagccctacgacccgcaatccgacctgacagcgcagatggtcgataacagcacctcgtggctggtcaagcccgggtatatccggatatcgggcacggatgagcaggagcgggatttctccagccgcatggtcagcatgaacctcgaccgcaacccgcatgagcactatctgtggcagaacggcaatcttctcgccgacctggcatcgccaaccagcagtatccagtgtccgttcctgttcagcatggtgctggtcaccgacgagcaggtaaaaagccagggggaagccaggaaccgcttcctgagtctcgacagtcgcgtcaacacgccgtatgccaggtatatcccgggcgtggtgcgccaacatcaggagtggaaaggtctgcggaccgagctggacgcggggcgcacggcgctgacgcgctacttttatgggctgaccttcttctgcgacgatgatgacgacgtcatgtccaggcagacagaaaacactaagaaagcctttgcccgccagggggtgaagatggtgcgcgccgactacatgcaggtgcgtaatctgctggcgacgctgccgttcaccatggccgacggcaagctgtggcgcgacctcaaccgcaccggcgccacgcagcgcgcggagtgcttccacgcagccaatctgatgccggttatcggcgacaacaagctgtcaaacgctgggatactgctggcaagctaccgtaatcaggtggcgttcctcgacgtgttcgatgagaacctgcccaacgtcaattacaactggtacctctccggtacttccggtgccggtaaatcggtgctggcccaggcgctggcgcgtcaggtcagcgacagtggcggctacgtcgccatcaccgacatcggtgactcctacaaggcgttctgcagcagcatcggtggcgactacatcaacggtgaaaacctgcggttcaacccgttcgccaacgtcaccgacatcaagctggccgccgagcgcatacgcgaccagctgtgcattctggccagccccagcggcttgctggatgaggtgcacgagtccctgatgatggaggccatcaccgaacaatggccggaatatcagcagggcatgcgcatcgaccatgtggtggattacctcaaaaagcgccagggtgacgtggcgcggcaaagcggtctgcagatagccgggcgtatcgacgaaatggtcacgctgctcaacaagtacacgacaaaaggggtttacggcgagtacttcaacagtgaccagtcgacgctcggccacgacctgcgctttgtggttaccgaacttggcgacctgcgaagccgcagcgacctgctgtcggccgtgctgttcacgctgatgatttggtcggagaacctgatgtactcaacgccgcgcaacctgcgcaagatgagcatcatcgatgagggctggaagctgctgggcgggtcgaacgtaaaaatccgcgagttcattgaagagggctaccgaacggcccgccgtcacaacggctcctgcggtacggtgacccagtccatccgcgacaaaaacctcagtaccgcctcgctggccgcctttgataacagctcctacaagttcaccggcaaacagaatgccacggccttcgccatgtttgaaaaggaagagccgaacgccttctctgagcacgagtgggcacttatcaagaagtttccggccgcgggcaaggccaagtacagctcgtttctggtcaagattgaagaatccagcagcttccaccgcctgttgctcgatccgctcagcgaaaagctgttctcgtccaagggagaagacttcacctatcgcgaaaagcggctggcggaaggggcggatatcaaggacatcctgttcgagatggtcgagcgggatgcgaacaagcggcgtgagctgcacgcactgctgaaaatgccgttatga

SEQ ID NO: 436810 - DNA, 288 bp, Serratia marcescens
atgacagcggtggcgcgcgtgcgctggatggttcgacgtcatccggcctctgtgctgagtgcgtcgatggtggtcatcggcctgatggtagcgcgggatatgggcacgggtgaattcaccgcggccttgcgcgcgctgctggtcgccggacttctggcggccgcagggcttgcgctgcggtatcaatgggcgggcaaggggcatcaggcagtaagcctgctgcgtctggctctgggactgtgggtaatagccggcgtcgctggtctgcagtccccctcaaccctgtaa

SEQ ID NO: 436811 - DNA, 417 bp, Serratia marcescens
atgcaacatacgaagagcagcacgttgaaggggctgggtaatgggaaggcgacggcgtctcctcttgtggtgccctcccgcgaatactggctgaccgggtttatctcggtggtgtgcgccgtgctggtgatggcggcactctggctgctgctcttgcagccgcccaagctggtgaccttcgacatgaaaggcacaaccgacaggtttttgctgcaaagcgcgcgtctcaaactcagcgatgacgagcgcaccgcgctgctgcagcgctataaccagaagctcaatcaggtgttgacggcgcgggccaaagcgcagcatgaggtgattgtggtcagcgccgccgtggtggccggcctgcctgatgtgacgccgcagatacgcaaggatctcgctgccgccatgcaaggagggcagtga

SEQ ID NO: 436812 - DNA, 660 bp, Serratia marcescens
atgcgccgcgtactggttgccctttgcctggcgctgccttcgctgactcaggcggccaacctcggcacggtgggcgatatctggcccatccgggagcatgaccttttgagcattattcgtgagcggctcggtgagcatttcgccgggaaaacgcaggaacgtatccagcaggaactgcgtgaccgcgtcacggatagcgtgttgaaccccgcccccatcgagggggtgcggcgtgccgaggtcagggtggtgcggacgttcgatccggcgttcgtcgtgcaaaaagacattgccgacgacaaggggaacgtgtttgcccgcaaggggcagcgggtgtcgccgttcgacgtgctgccgaccttcaaccagacgctggtgtttatcgacgggcgcgatgccgcccagctcacctggttcaggcaacgcccacggccgggtgtcatggacaagctcatcctggtcggcgggaacatcaaggacagcagcgacgcgctggacgtgcgcgtctattttgaccagggcgccgtgctggtcaacaagttcggcattcgccgggtgccggccatcgttgaccagatgccggggaaaaaactgctgcgcatcaccgaagtggccgtggctgatgacggtcaggaaatcacaaaaggacagaacccgtga

SEQ ID NO: 436813 - DNA, 861 bp, Serratia marcescens
atgatgctgtatcaacacaagtcggctgaatctgtggcgctttctcagactcagcagaaggtgcagcagcccactgtcctccagatgaatcagttgccagccaccaattcgacacctccagaggcgtttaccccggagcaacaggccgcgattggccagattgccgcggactacctgcgtgaccatcccgatctgctggtcgagatgagcgaaaagctgcagcaacgtgaacacgatgccgaacagcggcaggcgctggatgcggtgctggcgcagcagaaggttttgttggatgcggaacaggcgccgaccgtgcgccctgacggcgacgtcaccctgatacagtttttcgactatcagtgcatctggtgctcgcgcatggcgccggtggtggaagcggtgatggacaaggacgccgcgttgcgggtggcgttccgggagtatccgatttttggtgaacgctggccgcgttcgcgtgaagcggctatccgaggagtgagcatctggcggcaacagggggctgacgcctatgcccgctatcaccatgcgctattcaagacgggacacgccgaggggcagctgacgcaggcggatatttggcaggctacgcagctggcgggggccgatgcgcaaaacgtcggcagcacggtctcaggcatcggggcggaaatcgacctgaaaggcaatgcggtattggccagtgaactgggtatcagcggcacgccggcatttatcgtgatgccaacggaaaatgccagcgccgataccacgtcggtgatgtacggcgcggtggacgcgcctacgctgcaggcggccattgcaaaagcgcgcggcaagaccgcgggcaaggcggacaaatga

SEQ ID NO: 436814 - DNA, 1002 bp, Serratia marcescens
atgaaacgccctggcatggccggtgttgcagtggcgcttgccctggccctgggcagcaccgctgcccaggcgaaagatccgacctgcgatggtcgctggatgaaccccatcaccgatatctgctggaagtgcctgttcccgatgaccatcggcaagaccgaactgtccaagggtgacctgccggataccagtaatcccagctcgccgatacagctttgtccggcgccgccgccgctttttcagcggcccggcatcgccatcgggttctgggagccgttcgccatcagtgacgtcacgcgcgcccccggctgcatggtcaatatgggcgggttttccattcccatcccgaaagtgggtaccggtacgggaaccaagttgggcgtgaataatcccggcaccttctatcacgttcactggtacaagtacccgctcatcagctggctcaacatcatcacctccgtcggctgcatgcagggcggtgaatacgacatcgcctacatgtcggagcttgatccgatgtggaaagacgactcgctggcgctgtttatcagtccggaagccatattgttcgccaatccggtggcgcaaatggcctgcgcggccgatgccatcgccgccgaggtgcgcaagccgctggatgcgctgttctggtgtgccggcggccacggctcgatgtacccgttttccggcaacctggtcaacgagagcagcggcctcaacagcggcattttgctgaccgagcgcatgaatttcaaactgcaccgccaggggatgatctgggacaccatcggtgccaaccgggcggtctgccacgagtatccgaccgtcatcatgcccaaaagccgctaccgctatcagatggtcaacacggtgcccgacgccaatgcgtgccatccgctggggcgcagcgtgatgcgctggcagctgggcaaagagaagccaaccaccaaaaagaactacggatacctgatatggaaaaaacgcaattgcgtcgtgctctga

SEQ ID NO: 436815 - DNA, 456 bp, Serratia marcescens
atggaaaaaacgcaattgcgtcgtgctctgatgccggcggcgttgatgcttgccctgggggcgcaggcagaggaacgcagcaggccgcttgaccagaccccggacgaggtcgcctatttcgtctcgttctccatccctgaaaaaagcctggttgcgctgctgcgtggcgcacagcgcgagagggtgccggtttacctgcgcgggctggtcaatgacgacatgaaagccaccgcgcaggcggtgtaccggctggagaacacgtatggcgtgggcagcgtcaatatcgacccgctgcggttcgctcactacggcattgcgagcgtgccggcattggtcaggcgctgcggcgagaagtttgacgtggtgtacggcaatctggccgtgcgcgacgggctggagcttatcgatgcgcgcggcgagtgcgccaaaacgcgcagcacccaacaaccacaataa

SEQ ID NO: 436816 - DNA, 1842 bp, Serratia marcescens
atgacaatacgacaagcgctatctcgcacactgctcggcagtctgctggcagcctgtgcagctacccctgccattgccggcgacaacgacatgaacgagggggaagccgccgctgcggcggcgctcggcggcgcacagcaaggggccgggcaggtgaagccggagcagtattttgaccgttacaccgataacccgccggaaagcggctattaccagggcgggacgcagacggataccgatatcggcgccaaagggcaacaggcgctggcacagaccgagcttggtaaggaaatgcgcaaatctttcatcaacaaccctgccgacaagattgattacgactccgacatgattaaacgcagtgacgacatccgcaaagacgcggacgtcatcgccgccggcgtcgggccaaaatgcgtcaggcaggtggtcaacaaggtcagctatacctcgcatgcgtgtgagaaggcgcaatcggtgaccgcgcaatgccacaacacggccaacattgtcggcagcgtcacgggcggcaaggagacaaaatcatttgaagtcaccttgtcggatttgccttaccagatttacggggacgcggtgcacatcaccgtgacaccccccatgagcgggcggattgtgcatgcgtcctaccggtatcccagggtggccggcaatcagcgcacggatatcagcctgctgggaacggcattgtattaccacggatggaccgagcaggccggtgccgacttttggccggcgcaaacggaactggttgccggccaggcttttgaagcctcgcatggcgacatgcaatatgttcacggctctggcggtgcgcgtattcgccaccagtctcctgtcccggccacccttcactttgacctcgaggtcgacacgcgcgtgtttacgacgcgcgtcgaatggacgcccagctgcggcgtggacaaggaaaatgcagtcatgcttcgggaatattgttcccagggcgcggaaacccgcacggtctgggataacggcgtggcgtatccggtctatcaggactgctggcagaccacgcaagactggcagctctatgagagtgatgacaacagctgcgggcgctgggagagcgacaggaactgcacggtcggcacccgccgctgcctgcagcgcgtcggcgacttttgcgtacgcgaatcgctgagctaccagtgccagcacaccgtcagcggcgaaggctggctgtgcggcgacaaattctattgtgatgatggcagctgcgcgtccatcaaggacgagaagaacaacgacttcaaggcggccgtgtctcagctggccgcgctggcggcggccggcaatgacgtggccgggctagatccggaacgtattcgcttctttaccggcaagcccatgtcgtgccgcaaaacggccatcgggttcagcaactgctgcaagggcggcggttgggggcacggtgtcgggctggcgcattgcaatgatgaggaaaaggccatcggcaaggccaaggagcgcaagctggttatcgatgtcggggagtactgctcgaaaaaggtcctgggcgcctgcctgcagaaaaaacacagctattgcgtctacgacagcctgctggcgcgcatcgtgcaggagcagggccgccagggccagctgggtatcggcttcggcagcggcaaaagcccggactgccgcggcatggtgatggccgagttcgaacggctcaagtttgaccgcattgatttcagcgacttttacgacgagctgcagggcaaggtgaaactgcccgaccaggatgcgctgtcagcgcgtatccgtgagcaaatcagtcgcaacatccagaaggggagcccatga

SEQ ID NO: 436817 - DNA, 777 bp, Serratia marcescens
atgaagctgatggaacgcacgttgtgtctggcgttgatgctgcctgcgcttatggcggcggcagcgcaggacgacgagccggcggggtatgtcgataagcccgtcaagggctggtactggtacgacaagaagacaaaaccgccgaagaatgtgccgccggcaccagcaccgccgcccgcatcacccaccgaacggcttgcgcgtatcgagaaaatacgcaaggaactgcttatcacggcggtgcttgatccgcagccggaaaacatacggcgctacaaggtggtgcaggattttctggtcaacaaggccagtgcattcagcgccacctggcagaaggtgctgctggactacccggagctggactacaacctcaagcaccccttctacaacggggcagcgcctatcgaatacgccaaagagcgccaggcgcaggcgcgcgctatcgaccaggtcaaccagcgctacggggtgttcttgttctatcgcggccaggagccgctggataacaagctgggcggcgtggtgaaggagtttgccgcgcagtatgggttacacctggtgccggtgagtatcgatggccgcatcagcgcggatctgccggacagccggagagataccggtcaggcccaaaaaatgggcatcaggcactttccggccatctacctggtggagccggggacgggaacctacgagccgctggcctacggttttatcacgcaggatgacctggcgcggcgcgtgctgaatgtcgtcaccgatttcaaaccccaagactga

SEQ ID NO: 436818 - DNA, 366 bp, Serratia marcescens
atggcaaaacgacacatcgtcgcgtcggacgtcaaccgcgacaggttgggattctggacgcacccggcgctaagaacgagcgccattgtgacgcaaggcgatctggactggtggttgcgactgcgcgccatggacgcctgggtggtgaagcttgcgcgagataatccgcgactttaccggatctgtcacgggcgcgatggctgggacgtcagcctgtgggtgccgacgccaccgccggagcgggggtggtttatgggggccatccagcagggtgatgccggtccggagtgtctctggttaaagccggtcgatgaagtgttgggtgggccgaagccgtcaaaaaatgaagaggaaatataccaatga

SEQ ID NO: 436819 - DNA, 345 bp, Serratia marcescens
atgagaaaactcacatttgtattgataacgctgctgtcagtcatggtgtatgcagaaaaatacggcgtggccgccatcaaagcgatctcgtccgagtcttcgctgttcgcgtatggcatggcgttacaggctgtttccggcgggagtccggcgtctctgcttgcgctggtgctgattgccgtcgctttggttgccgcattgcttttcgcaagcctgatgaccgctgccgccctgattgcagtctatgacctgatgttcacggtaataggatcactcatgatggggggacttgagctttggaaattggccttgccgaagctatccgggcggggaggtgctgaatga

SEQ ID NO: 436820 - DNA, 585 bp, Serratia marcescens
atgaactggctggcgtcattgtctccccctaatgccattttaggcgcggcttttttgcttttcgtgctttatagctttctgtgggcattgaaatatcacgacctcatcaggaaagcagacggaaaaggtgccaaggcagcgcccggcaaagggatgtctgcccggctgcaggcgcagggcgatgcctggcagcgcaagccgttcatgacggacagcgagcgacagtttctccgcgcgcttgaggtgcatgctttgccgctgggtttgcgggtatgtccgcaggttcgcctttgcgacatcgtcaccgtgtcggcacggtacaagtcccggagccgggagtataacgccctgtttcgtcaggtatcacagtggcactgcgatttcgtgttggtgcgtcatgacgattttaccgtgcttgccgttatcgaacttgacgacctttcgcaccctcatccggaccggcgacgtcgtgatgccatctttgatgatgttttgaagacggctggcattccctgttggcgcttgagtcgtccgaacgagtttcttgccacagccccggtgtggctgcaggagctgggcgtatga

SEQ ID NO: 436821 - DNA, 585 bp, Serratia marcescens
atgacgacgacacgtaaacgctggagcgtgctggctgcagcgctgctggtcgtggcgaccgtcgcgcatgccgggctgcgcgacgagctgcaggcgctggagcagggaaagccggatgtcttgtctctcggcgatgccgggcgcgtttcgccggcagcgggcgcgcaggggaaagacaagacggctgccgcgcccaggcgcggacgggttgactaccggctgcgcgacggtcgcagcatcaatatcgcgcagtggcaggtggtgcacttcattcgctccgactgcccgtactgccaccagttcaatccggtactcagggcggtcagcgcgcagctgaacctgccggtgtttgtctacagcttcgacggaaagggcgatgccacttttcccgacgtgttgccggccaatgacaccgtgattaacgacttctttgccgaactgccaaaggccacgcccaccgactttctggtcaaccgcgaaacgctggttgccattccgctgtcgcagggcgccatcagcgacgaggtgctgaagcagcgtattgacgagagctttgccatggcgctgcgtatgggggtgctgtga

SEQ ID NO: 436822 - DNA, 231 bp, Serratia marcescens
atggtgtggctgtcgctgtacctgccggggctggaatggctggccgccacagcgctgccggtgctccgctgggacggggtgataaaggtgcttatctgggcggccatggggctggcgctgttggcaacggtggtgttttacgtgcagctgttgcttgcaattttccgcggcgtgcggcggctacttaacaaattcggggcgagtgggagacgcagaaatgagaaaaaataa

SEQ ID NO: 436823 - DNA, 1374 bp, Serratia marcescens
atgagaaaaaataacctctacggcctgctggctgcaggtgtcttgcttgcctgcagcgcgcagccgtcgcacgccggcattcagggtgacctcaacaaattctttgaccagatgggcgacggcggcgccaacgtgacgcaggcggcggcctggcaggggcagtcggcaggctatctgaccgggggcaacctcttcatgcgcatgccggtgcgtaacatccagctgatttccgtgacgctgcccgacatcaaatccggctgcggcggtatcgatgcctatctggggtcattctctttcatcaataccgaccagctcaagatgatgggcaagcaaatcctcagcaacgccgtggggtacgcgttcgacctggggctggaaaccgtgtgcccgcagtgcaaggccatcaaggacaacctgcagaacatgctcacctccatcaacaacatgaatatttcgacctgccaggccgcgcagtcgattgtcggcggcctgtggccgaaaacccaggaagcctcgaagaaaatctgccaggacatcggcggccagcacgacatgttctctgactgggcggcctcgcggcaggggtgcggtgtgggtgacgaaaccgacaaggtgttcagcaaggcgacaccggaagagaaaaaacgcattccccgcagtcgcaacctgacctggtccaccttcgagaaaatcaatcagttcatcagcgacgaccgggagctgaaggagctcgttatgtcgatggtgggcacggtgatatacgacgaaaagggtaaccccacgttcctggcacccaggggcggcagcgaggcgctgttcaataccctgctcagcggcggcaccgccaaaatctatcgctgcaacgacaacagcgagtgcctcaaaccctcggccagcgagtttacgctcgcaactgacaaaggcatgacgtcacgcgtgcgcaacatcattcaggaggtgtttcgtaaaagccgcagtgacgccagcctgaccaatgaagaaaaggctctggtggccagtacgcgcgtcaaggtgctgcgttacaccattgactcggcatcgctggggctggatgcgacggtggtgacctcgctctcggaatatatcgccgccgatatggtgatgacctacatcaacggcctgctggacgtggccgagacggcggcgtcggccaccctcaataccgaagacgaaaacgcgcggttccgcgagaacctgctgtcggtacgcaatcagctgggccagcgcgtgcagcgcatccaggtgcagcaaaacggcgtgatggagctcgagcagaatctggggtacatgcgccagcagctctccagcagcctgaccgacaagaccctgagcaactacgagtttggaggctga

SEQ ID NO: 436824 - DNA, 2850 bp, Serratia marcescens
atggatatctgggtgacgggtaacggcagcatcatcaccatgggccttaactttgtggcgacgatggtcaataccgccggctggcgcagtatcctgtggctggccgagacgctgggcgtgctgacctgcctgattgcctttgtgcgcacgcatgatgcgaaggtgatgtttggctggggactgacgttcgtcatcgtcacctctgccttgctcacgccgcgtgccacggtggtggtcaacgaccttaaccggccgcaggagatagggcgggtcgacaacgtcccgatggggctggcggtgccgatgtggctgatgacgacggcctccatcaccctgtcgaccgggtttgaggatatcctgcacctgccggcagagcgggcctactcgcaaaccggcatgatgttcggcacgcgcctgatgcaggaatcgttcgtcgtcagactcaagaatgaggtgctggcggagaacttcaacgaatacgtgaagaactgcatcattcccgatgtgcagctcaaccacaaatacacggtcagccagcttatgcagtccagggacatcgatgccctgatattcaaaaagcccagcccgctgcgcggcatcatgttcaacaccggcacggacacggtttacaaatcgtgcatcgaggtcacccctaccatccgcagtcagatagcggcggaaagcggacaaaacggcggcagcttcctgcgactggtgcaacgcatgctgccggggctgcgcaacaataccacggtactgccgcagtacctggaagggtcatacaactacttctttgaggcaggcaagtcgtcgagcgacatcctcaagcaaaacgtgatgattgccggcatcaagcgcggcctcaacagctacagtcgctcgatgggcgacatggggtcgctggtcgacatgaactcggaaatgtcgctgatgaaactcaagctcacccatcacagcggctaccagatggccagccaggtgatgccgctgctgcatacggtgttcatggtgatgttcgtttgcctgttcccgctgatgctgctgctgatgtttatgcgcgagatggcctggccggtggtgaagagctacctcggctggttcgccagcctgatgatgtggccactgatgttctccatcctgaacttcatcgtcaacttcaccagtgcctatatgctcaagggcgccggcccgacgctgtccaacgagaaccaggtgatgtctgatgccaccaccctggcgggcgttgccggctggttgacgttgacggtgccgttcctctcgaactacctgttcacccgcatcgggcagggggtggccagcgccggctcgtatgtgggcaacgcgctgatgagcgccacggcgggggatgccggaaatgtggcgagcggcaactacagcatcaataaccagtcggtcgacaacgtcaacggcttcaagaccgacctgaaccgcgtctggcgcagcggtcagaccaccacgcagctgggcaacggcgccaccgaaacccgtaccgcagatggccagcatgtgtatcagaccggggaggcgatgtcgaaactgccggtcgacatcaacttcgaccaccatcgcgcctcggccgcccaaaagctgacgcgggagagcgaggtgcagacccagacggcgctggagggctacaatcactcggtaacagagaatgcgtcaagaatgaaacagttcagcgacaattttggcaatatgtctacagcggcgctggcatcctcaacgggtttaagcacggctgatgccaaaaaaatccaggatgctattgacgtaggtaaagcctacagtgaccgaaaccatattacgcaaacagatggctttgcggagacgcagaacaaatccagagcgtttagcgggaacgtaacgctcggggcagatgctaaaactcatgaaatccctctgatgcagtacggtaaggggagtgcgagattaagcggaaacttgacctatggggggagttcagggagcggggcccaaacctctctggatggacgcagcacgcaggatgcgggcaaagatctgtctgcgcgtgaagcggcaaccttcaatgccgggttggatgttctgcgcaatatgcaaaccagtttccgtggcgaacgcgccgataacgccgccagcgggctgttggagcaaatatctgggggcatcaacaccagtgacagtcactacaaacagtacacagacagccagtcccggacgcatgaatatcagcagatggcgtcaaataccgacacgctcagtgcgcaagcccgcagcaattatacccaggagtacgtgggttacgtgcacagtaaactctctgatgatgaggcgcgggaggtgctgaccaacaccaacagcgaggcggtgcgtatgcgccgggaagatctggcggagtcgttcgtcgaggacaagctgcgcgggcgactggactcgcactatgaccaggcggcgagccacgtcggtgacggcatacgccaccctggtaatactgcgaaggctgcagccggtgcttatcagggtgtcatgggtgaaatcgacagtaaggctcaagataaaaatatcaggtttgatacgaaacaacgagccgagcaaagctataataacattgagaatacgcagaaaacgcaggacgactacgtagacgcgagggagcaggagaacaaacaagaagtggaaaccagaaaggctggtgtggagacggcgaaacaggattaccggctgaagcagaaagctgctgaacttcatcaggctagttggaacccatggtacagcaaagatagtgattttatggacgacgcgaaagaggccataaaagaagaggatgccaaaaatgctaaggcaaagtga

SEQ ID NO: 436825 - DNA, 579 bp, Serratia marcescens
atgctaaggcaaagtgaagtgaggaatgaagtggcgtggatattaaaaagcgtcaaggaaagtgatgagctaattcctggtgcggcagagtcaattagacctgcgaaattatttctatttttttatgtgttggtgggattagtttcttttggtgtggatgcttataataaccccgacaaatatcaaatgatgtttgtggtttctttaggggtgattgtaactgcagttttaatggcgttaatcttctatggctacggtgtggcctacctaaacattccgcaagaggttagaaataaatcgaagcttattgcaattataaagaagaaggtgaagatttatttgatgataaacccaatagtatgggttgcgatttcaatcatcggattgggtaacggtggctccgcctacttggcaatggcttctattcccgtattggttctttcgttgtttgcattgaatgttgacttgtctcgctaccatattgcgggatttttcggggccatcaatgccgccaaaaaggagtttggtagccagggtgctgaaaatctgttttcaaacgttgataaggaaaaaccatga

SEQ ID NO: 436826 - DNA, 531 bp, Serratia marcescens
atgaaattgagaaattgtcttatggccgcgtgcgccgctctgttcctttcagcagggctcgcacacgctgaaacaaaggcgtttggtatcacgttaagcaagagcaagggaagcgatgtccagtcgctctatgaaggggccaagatcgacagcaatgacagcatctggggaggtaaaatctatcatatacccagtgaggatgttgagtttgatgggttggttagcttattggtcggaactgacagtgatgatgttgtcgtggccataatatcatccgtcaggaaatcaaagattgatttcattatgtcccagctgaacgaaaaatatcaccttaagaagaaggtgttgccatatgttgggaataaatacgctgagtatgcgaatgatggcgatgtaattatccttgatgcgcctcacatgtcctttgaagctgatttgagctatttgacaaatactgcaaggaaggtaatggtcgacatacagaagaagcgctccgataacaggaagcgccaggatgcttctcagctctga

SEQ ID NO: 436827 - DNA, 219 bp, Serratia marcescens
atggtgcaggtagaaattggctgcctgtgcatctttggcatccaccatcaaagcataggcacctatttcgacgtttgcagctctcatcagggcatctgccagcagtgcgccgccaataccctgaccggaataatggaggtcgacagccaggcggcccaatcggatcactggaatggcgggatatcgcggcagcttcttttgctgttgcgcggggactga

SEQ ID NO: 436828 - DNA, 537 bp, Serratia marcescens
atgatgtttgaccgagttcaccgtcattgccgatgcctgcttgtcggtttgattttgatggtctgtcatacaggcgcccaggccgccggcgttatgacgggattttcacccggcggcacggcgcagcaggtggtgctgaccgccataggcagtgcgcaggtgtccattgacatggcagcctacagctttaccagcaagcccgtcgccacagcgctgctcgccgcccaaaggctcggcgtcagggtgcgggtggtggccgaccgcaaggccaacagcaagtattcggccgtgacctttttggccaaccagggcgtgccggtgcggctcaatgaccgctacgccgcgatgcatcacaagtttatggttatcgataactgctcggtgcaggtggggtcctataactactcggtgagtgcccatgcgcgtaatgccgaaaacgccctctggctgcaggatgtgccattggttgccaccgatttttcacgtgagttcgcccgcctctggtacgagggtgagcctgttttgcggaggtactga

SEQ ID NO: 436829 - DNA, 2112 bp, Serratia marcescens
atgagtcttaatacccgcgactttacccagggcggtcaggtcctcaagtacatgattggcatgttcctgcaaatcatgaacatcgccaccttctggatattgatggcctcgctggcggtgtttgcgctgtgggtcgggttgtcgatgcgttttgagcaaatcatccacagcggcagctactggttggtcaaatgggtggtgctgccgtttcgtcagcaattcccctccggcgccgacaacaccatgacctttcactggacacggccgcaaaccggtcaggtcgtcgagttcaagttcacggcggcgcaggtggtggccgatcgctatttccagcagcagggcaatcttctcaaggaggtggccttctggggctggggtgcagccagcgtcacctttgcgctcggttttctggccgtgttctggtatctgggcggtcgcggcaagaagcagcggcagaatgagatggtcggcggccgtgagctggtcgacgacgtgaaggtggtcaacaagatcctgaagaagcacgatcggctgtcgccgctcgccctgtgcgggctgcacctcatcaaatacagcgagatgcagaacattgttatgcacggcaccgtcggcgccggcaagagcaccatgatcaacaacctttgccgccagctgcgcgcacgcggcgacaaggtgatgatttacgacaagggcggcaacttcctgccgctgttctaccgggcaaacaaggacatcatcctcaacccgtttgatgcgcgctgcgccgcctgggatttatgggacgagtgccgcacggtggcggatttcgagaacttcgccaagaccctgttgcctgacgcgccgagcggcgatcctttctggctgctggccgcccgccggctgtttgcggaagttgcgcggcgcctggccaaaatgaatgagcgcaacctgcgcaccctgatgaagaagctgctgtcggtgtcgcttgaagacctgcgcaccttcctcaaggacaccgatgccgccaacctggtggacggcagcgtcgagaaaaccgccatgaccatccgcatggtgctcaccagctatgtcaccgcgctgcgctttctgcaggggctggatgaggtgggcaaacggcccttcaacctgcgtgactgggtacacactgtggacatggacggcgacaacggctggatcttcatcaccagtgacgggcgccatcacgaggcgctcaagccgctgctgaccgcgtggctgcacatgctgatggtcaacgtgctggggttgcgcccggatgcggaccgcgagcggcgcatctggctgttgcttgacgagctgccgtcgttgcacaagctgccgatactcggcgaatacgtggctgaagcgcgcaagttcggcggctgcaccctggtggggctgcagaactacccgcagctggagacgcaattcggccgcgagggcgccgccgatatctgggacctgctcaatacccgcgtgttcggccgcgcgcccagtgcgcacgtggccaagtttgtgcaggaagagctgggtgaaaaacgtcacctcaagttccgcgaccagtacagctacggcgtcgatatcattcgtgacggcgtgcagttttccaaggatgaagtcaatgaacacctggtgagctactcggatatccagaagctggacgacctggagtgctatatcaccctgccgggccggctgccggtggtgcacatgaagatgacgcgtgagaccttttctgtcgtggccgaggcgagcgtgccgcgcgacgtcgacgcggtgatggacgaggatatcgaggcattgctggagggcggcgatacgctgcaggggttgaccggcaacgcggtggcggcgctgttcacaccggcgaccgccacgcccgtatcggaaagtaaggccaacgccggcgccgtaacgccggcgcaggacgcggatgaggccgagggacgtggtaccgatattgaagcatcggccacggcatccgcgaggactgccccgccggcgccggagaaaaccgacgtgcaaggcaatgagcaggttccgcccgagctgccggatgaagatcagatggtccgtccatccgggcgttcgccgtttaccgaaatggagcgataa

SEQ ID NO: 436830 - DNA, 5163 bp, Serratia marcescens
atgctatccgtctcagcggtcaagtcggccgccaacgccgccggctactacgagcagaaagacaactattactttatcggcgagatggccaccgagtggctcggcaccggcgccgagagcctggggcttgaagggccggtcaagggcgaggtgttcagggcggtgctggaaggccatctgccggatgggggtgacctgtcgcacatgaaaaacggcaagaacacccatcagccgggcatcgacctgaccttctcggcgcccaagagcgtgtcggtgctggcgctggttgccggtgacacgttcctgattggggcgcacaagcgggcggtggccgccacgcttaacgagctggagaagtttgcctcgacgcgcaccatgacgggcggcgtcagcgcgcttgagcagaccggcaacctggtggtggcgacatttttgcacgacacctcgcgtaatctcgacccgcagctgcatacccacgccattgtggccaacgccacgctggcggccggcggctggaaaacgctctccagtgataccagggccggcagtggctttaacaacatcctctggaaagagcaggtgagtatcggcgcgatgtaccgcgggtttatgcgcggcgaacttgaagctgccggctacctgctgcgtgacgccggcccgcacggcatgtatgaggttgacggggtaccgaccgaacccttctcgtcacggcgccaggacattctcgccgcggtggggatggatgccggcagccgggagaaaacacgggcggcgctcgatacccgcaaggcaaaggattttaccagcatggatgacgtacgcgactactggcggcagaagctgaaggatgagctcggctttaattacgcggcttttaaagcgggcgttgacgcgcgggcagagggtaaagaggtggagccggcgccgcagaccgccgcggccgcgctgctggcggcccgcacgcagcgtcaggcggcgcaggacgatgctatgacaccggcgcaggccgtggagcaggcgatagccgtcgtgtccaaaagcgcggttcgctttggtattgacgcagtgctgaccgcggcgctgggtcgcctgccgatgcgcgaaggggtgtatggcgccgtgcgcgcggaaatcgagaccgcggtggcgcgcggcgcgctgctggcagtggacggtgcgcaaacgctgtttacgtcggcggcacacgtgcgggacgagcagcgattgtctcagcttgccgcccggctggccgcggggcgggcggatacgcctgcgcctgcgcaggcgaccggcatcgtcgcgcagtgggcgcaggcaggcagggggctgacgctcatcgatgcgcgcggcggccaggcgtttcaggcagacctgctggcgcgctttggtgaggcggcggtgcaggccgggcgcgagagcgtggtggtggtggcgagccgggcagcccggtcgcgcctgaagggggcggacgtgggcacggtgatgacggtggaggaggtcgccgagcgcggcctgcccgcgtcttcgcaggtattgctgcccgagtcggagcagctgagcgtgccgcagctccatcaggtgcttcaggcggttgaccgcagtcagggggtggccatcgtgctggatacgcatgcgcggcgcgcaaccgggttcggcgccgaggtgctgcgcgccgccggcgtcacgcagctcaaaaccgccgagcgccaggaaaatgccacggtgacgctggtgcaaaaggatacggtggatgaccgccagcaggttgccgcccggcacgtggcgaagcaggcagccgccgggctggcggtggtggcgcaggcgggcaatgcccgcacgcgcgcccaattaacgcaggccattcggaccgcgctgggtgaggaaggtgtgctcggtgccacgctcaagacggttgatacgctctcgcccgtgtggctggacgccgccacgcggcaaaatcgcagcacctacaaggtgggaatggtgctggagcgggtagagggcaagcaggttcttgagcgcatgacggtggtgggcgtcagcaaggatacccacaaattgtcggtcgaggacgcaaacgggaaccgcagcggtctttcgataagcgccatcgacagccgctaccgcctctggcagaaggcatctctgacgctgcaggaaggtgagcgggtcagggcgaccggcgagctggggcatcatctgcgcgccaatgcggagctgcgggtggtcggcatcaaacccaaaagcctgctgttccgggagcgactggttgttgaggacgcgcagggcaagcgtgcgcacatcccgctgaccggtgccccgctgaagatggacttcgcctacaccgaatcgctgggggcgagccgcaaaacgcaggggcaggtggtggcggtgctggccggcaaggaggtctcggatgccacggtcaaccagctgcggcgcagcggagacgccatcctcgcctttacgccgctcttggaggcggacatcaccgccaggctcacgcacacacgcacctcggtgacggtcacgcaggggttgcaggcgctcagcggcaaagatgatgtcacaggcgccctgcgcagcctgcaacaggcgcgcctgacgccgacgaagcgcgcggtgggactggctatcgaaaaggcgacgggcacgaacgtgatgttctccgcgctgaaggtggcggccctggccgggcagatggacgaacgcgtcactccggatgtggcgctgggtgagctggcgcgacttgagcggcgcggcgacattattgacctggccaccgttcagggacgcggtgacacctatatccggcgcgagagctgggagcaggagaaaacggtgctgcggcatatcgccgaggggaagaacagcctgccgccgttggttgctaaacacaatacactcggagataacccgggccagggcatggtggaagggtggcctcccggtctgacccagggacagcggcaggctgcagagatgatactaaccagcaaggaccgctttgtcactatccagggctatgccggggtaggcaaaaccacccagttccgggtggtcgccgccgcgctggccagcctggaaaacccgccgaaggtggtggggctggcgccgacgcaccgggcggtcagcgagttgaccgcggcgggtatcccggcgcagaccctcgccagcttcctcagcgagcagtcacgcgcgcaggaaggcggtgaaaagccggacttttcccgtacggtgttcgtgatagacgaaagttcaatggtgggcaaccgcgatatggccaccgccgtatcgctgattgccgaggggggcggccggggcgtgatgagcggcgacgaagcccagctcaagccgctcgagtccggcgtgccgttctcgctcacgctgcatcgcagcgccgccgacgttgccatcatgcaggatatcgtgcgtcagacgccggcgctgcggccggccatcgaggcgatgattgccggcaacgtgcgcgaggcggtgaccgtggcactgcaggtggggcctgacatcatcccgcgcgaggcgggggcagcaataccgcagtccagcgttgtcgacctcaagacgcacggcgagtccgatgtggcggtgctgattgccgccgactatgtcggccgcacccccaaggcccgggacaacaccctgattgttgccgaacttaacgccgaccggcgtgccattaatgacgcggtgcatgaccggctgcaggcagagggcaagctgggtgagagcatcacggtcagtaccctgaaccgcgtatcgaacagccaggcggacctcggcagccgggcgttctggcaggcgaataccggcaatattgtcaaaatgaacgacgactatttcaccatcagggccgtcgatggccaaagcggcacggtatcactcaccggcctggacggtcaggacgagcgctggctggcgccggccaccctgcggcgcagccaggttgcggtctttgaggcaaaaacgatgacggtatcgatcggggagcggctacggctgaccaccaccgaccgtgaccggctgctgcgcaccaacgacatcggcgtggtgaccggcatcgatgaccgcgggcggctgcaggtgacggtcggtgaacagcaggtcagccttgacccgaacgctgcgccgggcgaccggcatatcgactacggttacgccgtcaccacctacagcgcccagggcgcctcggtggattacgtgattttactggaaggggttgagggcgcacgcaagcgcatggcggcacaggacagcgcctacgttgccctgtcgcgcacgaaagaacacatccagatgtatgtcgacgaccttgagggctggcaacggcaggtggaaaagcataccggcaagcgcgagacggtgcatgaggtgctattgcgcgccgatgacgccgcggcgcaggcggcggtgcgcgcctttgaggccgggcgaccggccggtgaaacgcgcctcgccggccggctggacgcggacatgcgcgatgcggcgcacttccagggtggcggcaggccggccctgttgtacgccgtggtcaacgaacatggccggcatcgcggcaactgggtggtgccggtgtcgccggccaccggacgactggatatcgataacgcgcactaccagggcgcggaagacggggagcgggtggtgctgcggcagggggagaaagagctccccccgctgacggcgacgacgctggatgaggcgcgcgccctgatgcaggcgcagcctgaccgggcggtggtgctgctgcggggcgacgccgtggctgccacggacgaaaccgcaagtgcacagagcgatacgccggcggctgatacgctgcgtcttgaggaagaactgaaggcggcacgggagcgcgaggcgatagccgaggtgttcggtgagcgcaaggcgaccgacctgccggatgaaaaggcgctggaagcggacgccaaaccgcaggacgaggcggcgctgctcgacctgtccggacgcgacatcgacgctatgcaggaggctgaccgcctgcgggacgcggtgcgcggtctggaagcgacggatgacaagcgcccggcgatggccaacgacgaggtcaatatcgtgcgccatgcgccggaaatcgacccgggcatgagcaaaaccaaacagaaaaccatggaataa

SEQ ID NO: 436831 - DNA, 783 bp, Serratia marcescens
atgcgaacgatcaccttactggccgccagtcggcttcattttacctcactgcagcaggatggtatcaagctgctggcgctgttgctgatgatgtgtgaccacgccaacgcggcgctgcaccttaatatcgatgccctgatgtggctggggcgcggcgccttcccgctgtttgcgctggtatgggggtataacctggcacagcggcccgtcactcagaggcaagccacgcggctgtggctgtgggcgctggttgcccagccggtttactggcaggcggtggcgccggacgccggcgtgctggatgacatgaatatcctgttcacgtttgcggtcgccacccagtgctgttactggttgcagacgaaagttgaaagtaacggaaactatgcggatgtattggcgatattgctgattatttgctggccgctctttttcccgctgggtgggtttggggcagctggattgctgttgttgatggcgtgttttcgtttctacgcaggatggccgttggcacactctcacatgtgggctgacaatctgcgtactctgatggccgtggccatttgccttttgaccgtcttgttgaatagtaatggaggggcgatcccgatgctgtccggactgctggtgtcggcggttgtgctgctggtctcgattgctctgcggccgctcggcaccgttcgcgaaaggcgactgctgccgcggcagtttttcccggtggcctacattgcgcatctggcgctcctctggacgttatcggtagggctgtcatggacagcataa

SEQ ID NO: 436832 - DNA, 270 bp, Serratia marcescens
atggacagcataacggcccggcgcgccgacggccggcgttgccggctgcggctgccagcctgctttgatgtgcgcgtgcgccggcgcgcggaggttgcctggcgagactggctgtcgggacttcgcaaggcagtacgtttgcggccacgtcgggagctgctcaagctggacgtgggtcaggggtggctgctgctgagcgatgacgagggatgttgctggacgctgctgtcgcatgcgcaatacacgcagcgtctgcagcacaggccgtga

SEQ ID NO: 436833 - DNA, 576 bp, Serratia marcescens
atgctggaaaccgtcattggatttttgaccgtgggagtgagcttatttgtggcggtgtcgtttttgccggctatccagccgcagaacgcggcgctgctgcgctgggttcgcggcggctgcgtccggccgcccggcgacgccgggcgtgacggtgaccggttttctcaggcggccagggaggcgattaatcgctttgcccgccatcaccgggttacagaccaggaagaacaggcgctgctcggcctggtgaagcgccccggcctgttgccggtgacggccctgctgcatccgacgctggtgcggtatcaacacgagcccctgcgccgtccgccgcagggtgacaggcctgacgcgtttgtgcgcagtcgccacctcgctgcgttgatggcctgcctcacggtgattgcagtgatttttccgccgtcggtgggaattgccctgggccgcagcagctactggttgtttccactgctcaacgtgctggcgttcgtcaaatgctgggcgctggtgcgggcgctgacctctgatatcggcgagctcaacctggtgatgcctcggcttgatgaacccgggtga

SEQ ID NO: 436834 - DNA, 234 bp, Serratia marcescens
atgaataaacaggaataccggctgtatctggccatgctgaaggcgcgcggcgacctggcgcgcaaggctatggacgacagcgcccggcggcgcgagctgttaaagatgcacagacatcgccgctcggaaggtatcaggacgttactgaactggaaagcgctggacgagtccgtggatgggttgttggttgacgccgcagagctggatgcgcgtgaacgggcatttggaaagtaa

SEQ ID NO: 436835 - DNA, 261 bp, Serratia marcescens
gtgacccgacgaataaagaaagccgaagacctggatgagtaccagcgcacggtgctggcgggactctatgcgcggcgcgagcttgaccagggctatcgcctgtcggcaaggcagaagcagctgatattagacgactatctgaccgagctgagcgagcctcctaacactcgccgcccgcgaacgctccactcgaccctgccgccgatggctgactatcactggcatccgccaacaccggcgcgccgcctgcgtgggcgctga

SEQ ID NO: 436836 - DNA, 972 bp, Serratia marcescens
atgcgttgcagcgtccccagaggcatggcgggcaaggtggttgcgcgtctttcggggcatgactggcgccgcaacggcgacctgcgcgccctgcgtcagacgggatatgtcccctatgccgagcgtggcaatcctcactaccaacccaaacccatgcgggtgtgcgcgcgcagtgagagccgcgaggcactgacggcactttcgctggtgctgggcgccaactgtgattacaacccggacagtgattacccgtttgaactcatgctgccgttcgagacggtggcgcagtacatgggggtgctgcacgtctacgagagtggacgcaaggcgtatgacgtggcgctcaatgcgctctcggtgctcgagcagctggagtacgtcatcgtctcgcgcggacgcgacagtgactcggggcaaaacaagccgctgcggctgtggctgacggataaattcttcaccagccggggtatcggcgtggaagaaatccgtcaatggctgaaccaataccggctttgggccatcaggaacggcctgacggagacgctcaggcagaagtacgaacgtcacctgctgcgcattaaccgcctgggtatcgacatcgagcgcaagcactcgctgaaaaaccgcctgaagcaaatcaagcgctgggtagtgagtcccgacctgcagaacctaaaaaaagaggccgaatcggccatcgagaacgaactggccagacgcaagcagaacgaacaccgccttgacaccctgctgaacgacacggccgataccatcaaacagttggccagcgccaaacggcgccagcagaacggcttctaccaggcctgggtgcactggtcgatgcagggatcgcccattcaggcgatgcagctggaagcggcgctcaagcgcgaacagccggggctgctgacggagaacccagaggcctactaccgcctgctgctggagcgcgccggcgcgctgcctacctga

SEQ ID NO: 436837 - DNA, 450 bp, Serratia marcescens
atgggcctgacagaaaaaaccgaagagagtcttgacgaactgattgaaattgcccgtgacggggcgaatttttatcgacaagcagcaaatgaagtaactacggaagaattgaaaaatttatttaaatatgcagaaaccaccaaaaccgagatcatcatagcactcagcgacaaattacactcgttaggagtgcagcccacttctgtaggtacctttagaggtactttccagcagctttacggtaagatccttgccactttcggcgatactgattatcactatgtagcagagttggaagaatcagaggacaggctcttgcatgcatttaagaaagtattgaaaaaagagaatcttcctgatgatgttataaaaaaagtgactgatttgctgcctaaagttaaaaaaactcatgaacttatgcgcagtcggaaacaaaagatgaaaaattaa

SEQ ID NO: 436838 - DNA, 378 bp, Serratia marcescens
atgagcttttttgacgaactgaaaaacaaaggtaaatcggttatcaacgacgtcgctgatgacatcagctcggcagcagacaagttgaaaaaactggctcaggacggcctgtctgacacaaaagaccaggtgaatgaaacaaaggaagaagccgcatcggcgatgaaaaacacggtcagcgatgtcaaagacgtggctgaaaaggcaggaagctcgctgtctgaaaccaaagacgacatctctgccagggtcagtgatgcagcagccggcatcgaaggtaaggcagaagatgccattcataccgccggtgagaaggcggatgatttcactgccagagcgaaggagaacctcgaaaacctctctcgtaagccagactag

SEQ ID NO: 436839 - DNA, 1626 bp, Serratia marcescens
atgttgataaatctggcgcaggcggcccccattacccctgctgacctggaggttgtcgagcagcggcagaaagccctgcttgagcaggcgcaacaacaacgcgacgacctgcaaaataccaccgacctgccgacgctccctcttcccgtgccggacagggaaaatcacgcctgtcatgatgtcaaacgcgtcgtctttcagggtgccgaacacctttcctggtcggtcagggataatctggcgtcttcctttcaaggccgctgcctgacgctctccggtatcaacaccctggtgcgggagaccaccaatgcctacatcacgcgcggctatgtcacgtcgcaagcctggctgccggaacaggatatcgccggcggcacactgaccgtggccgtcagtgaggggcgcgttgagggtgtcagccttgacgggcaggacgcgccggcgctccggatggcgtttcccggactggtcggccacgtgcttaacctgcgcgacatcgagcagggcatggagcagctcaaccgcctgccctcgcagcaggtggccatcgatatacaaccgggaaagcagccgggttattcctcggtggtcctgcgccgtacatcgacacgcctgccggtctccctgtctttcggcgccgataacggcggccagaaaagtaccggcaccgggcagatgaataccggcgtggtgctggacaacccgttgcgccttgccgaccagtggtcgctttctgcgtcacgggacagcggttttcggcatgaccgccgcagccggagcctgagcggcagcgttaccgttccctacggttactggttgttcagctaccaggctgcctggaacgattttcatcagaccgtcccgatacaggcagcgcgctatcgttatcagggcaatgcgacggtgcagcgcctgggcgtcaaccgcaccctgctgcgtgacggccgccagaagctggcgcttgacctgggtttatcacgccggcgcaccgagaacgtctttgccggacagcggttgtccaacagcagcgtcacggtagccagcctctctgcgggtctcaactacagccgcacgctggctggcggctacctgacgttcaaccccatggtcacgcacggcctgcgcgggttgggcgccacccgcgatgcgccggcggcgccctacgctgcacgcagcgaatttcgcaagctcggcctcggcgccagctacttttatccgctgacgccgtcgctctattacctgacctccgcctacgggcagaccagcgcagataacctgtatgccggcgagcgcatttcccttggcgggcagtattcggtgcgcggtttcaaggaacagtatctgactggcaaccgcggcgcctactggcgcaacgaacttaaccaacggctcgcgaccgtgccggttgtcggcgaggtatcactgaccgccgcgctcgacggcggctggctgcgcagcgaggcgcatcgggtggatggcggcagcgtggccggggcctcgctggggctggcgatgaacagcaaatggttcaatcagtcgttcaccgtcggcaaaccgttggcacaccctgacagcctgcaaccggaccactgggtggcctattggcaggccggcatcaccctgtaa

SEQ ID NO: 436840 - DNA, 5034 bp, Serratia marcescens
atggacaagccccttcatccgctggcgcgcgccgtcagccatctgctgatttacaccacggccctgacgccactgcacccggcgttcgccgccggtatcaccgctgccaacggcaatacccaggtggtcatcaagcccggcgacgtgccggtggtcaatatcgccacgccgaacggcgccggggtgtcgcacaacagctatcaggacttcaatgtcggccctcagggcgcggtgctgaacaatgccacccacggcggcaagacggcactgggcgtggagatatacagcgagcagggcaatacctatctgaagggcaagccggcggagctcatcatcaatgaagtggtcggcggcagccgttccgagctgcagggcaagctcgaggtattcggcaacaaggccaacgtgatgattgccaaccccaacggcatcacctgcgacggctgcggttttatcaacgcgctgggggtcacgctgacgaccggcaagccgcagttcgacaagcagggcgcgctggaggcgctggaggtcaagaaaggccttatcaccatcggtggcaaggggctggacggcagtggcgccgactatgtcgacatcatcagtcgcgccaccgagctgaacgggaaaatcaacgccaaaagcctgtcgctgacccagggcgccaaccgcatcagttttaaagacggtacggtcacgcccgttgccggcgaaggggccaggccgcagctggcggtcgataccaaggcgctgggcggcatgtacgccaacaaaattcgcctggtggcgacagaagacggggtcggggtcaatctgaaggacctgagcagcagagatcaagacattacgctgagcgccaacggcaagattgcactgagcggcaaggctcacagcaagaccgacctcaacatcagcgcccgggagctgcacgtcacgccgggtgccgaggtgcagggcggtcgcgatgtcacgctggccgcagcgcgcctgaccaacaacggcaagaccacggcggccggcgacatgcgcctcttcggtgaccacatccgtaatgccggcggcgatgccgtcctgctggccggcaagggcatgtgggtacaaaaggatgcgaccggcaacgtgagcaccgaggtggtcaacctgtccggcacgctgaaggcccgggacggggacctggtgatgcgcacccgacagctggacaatgcccggtatcatgcatcggcacccccgggccgcatcgaggccggcagcaatgcctacatcaatgccgatatcttcagaaacgaccagagtaacctgcgtaccggcaaaagcctgataatgaccggcaagcggtttacccattgggaggatatcgccgcgccatccggtgccgtgggacaaatccgcgccggcggcgacgtggtggcggactttaccgaacacctcgaggtgctgacccgaacaccgcatcgcggggtgcatgcccatgatgccattaccggacgaaaccttctgctcaagggggcacaggtcaacaatcacgccagcctgcgcgccgacaacgacctgacgctgatgagcgggggcggtgaactcaacgtcacccaaagtcgcctgctggccggcaataacctggcgctcaccagtctgcatgacatcgatgccacccagacagagttgcgcgcgcgcaatatcgatttgctggcaagggacggcaatatcaatctgtcgacgccggacaccggctcggttaccgagcgccggggagaagagcgtcatcacgtggttgttgactcacaccactacgccgccgacggctcgcgcctgctgaccagcctgacggccagccaggacatctcgctgcatggcctgaccatcagtctttacgacgtcctggtcagcaaggtgcgcaacttcacggcccatgcgcgcgagcagttgtacatcagtcagacggcaacggccttcgacatggacaccgcccgcctcaaacccgcaggcaaccagacgcttgacgacgcccgtcgcgccctggtcaaccggcagctggcacgcctggaccgtctcgaggcaagcggcgacatgaccctttatgcccgcgaggggctctacctggacggtcagcgcctcagtgccggcggtaacatgaccctcaccggggggcaggacattcgcctgacaaaacgcaacgtcaacggtctggacaagactctgttgccgccgagccgctacggtgaactggccgcgacggccaccgccggaggccatctgcagctcagtgccggtcgcgatattctgctggaggggaccgggctgcacgccggcaatcgccttaccctgctggccgcgcatgacctgagggcggacaatctcgcctggtcagccgtggacgaaccgggcgaatggcgtaaggacactcgctcgcgcggcgtggagctgcagggtgaccgggggctggccatctcgaccagcggcgccctgaccgtcgtcggtggccgactggcctcgggcggtgatatcaccctgacctcgcggggtgacatgcgtttcgagtcggcgcgcacccacttcaagagcgacaccaccgagcggtacagtcacaccggcacggtgctcgacagtgccggcaacctgaccctgctgtcgaccggcagtatcctgttccaggcctccaggctgctggccaaaggcgccatcgacgtggcagccgagggcggctggctgtacgcccaggcgatggaagaatcattccgctgggaggagagcagcaagaagtgcaacagcttcctgggcatcaaatcctgcagcgtgttcggcagcaagacccgggtccagaccaaggaaagcagcaccaacaaggtgacggagttcaccgccggcgggaacatcaacctgctggcgcgcaacaacgtggtgctggaagccagccggattgccactggcaagaatgcgaccatcaccagccgtaccggcagcgtcatcttccgggcagtcaggaacaccgcgttcgaaagtgtggtgaccaacggcaaggggctgttcattacccacggcaacaaggggtactaccgccaggacttcatgcttcccagcattcataccggcggcgcccttacggtggatgcggccaccggcatcacggcagacgtgaagctgaagaacgggcagacgctgcaggatgcgatagatatcctgagtcaggagccgggcggtcgctggctcaaacagattaaccagggcaacaacacgcagtggaacgtggtcagggacgcgtacgacagctgggattatcacagccagtcactcaacccggcagtggctgcggtgattgccatcgcggcctcggcggcgacggccggcagtgcgctggccattcaggcggccaacagcttcggtcagggggtgatgagttcggcggtgatgggcggcctgcaggcgctcgcggcgcaggcggcggtggcgctggtcgagaatcagggcaacatgtcgaagacgctcagggcgctcggcagcagcgggacggcgaaagcggtggcctcgaccatggtgatagccggagcgctgcagggctttgaccagcagctcaagctgagccaggcgaaacccggcagcccgctggcatcgcggctgccgacgctggactacaaggggtggagcgacatcacgacccgggtggcgggccagtcgctcatcagcagtggggtgaacacggcgatttacggggggagtttcagggagaagctgacgacggcgctgctgagcaatgtggcgggccagctgcaggcggagggcgcgcactggctgggtgaccgtcagccgatactgggagatgcgggcaaggcgctgagccatgcggtgctggccggcgtgacggcggagctggcccggggagacgcccgtggcgccgtggttggcgccctggctgccgaactggcgggtgtggtgatgcaaggcacgttgttcgaaccggcaaacatgaatgaaaaggagcgccagctcagtcgtctgcaggacgcgcttaacggcagtgaggccaaggagcagacggtcagggtgattggtgccctcaccggtgcgctgttctcgcgcacgccggaaggcgcttacagcggtgcggacagtgcacagacaacctaccgctataacatgaccgaccacatgctcatgcagtatgcgctggataaccagagagacgtgcttgccgctggtaaaggtgacgtggccgccgctaagcgggtaacggccagacgggaggcggcggctgttgtcgcaaccgtaggaggcggtgggctggtactgactgcgggggggctgacactgataggcgcggcaccggagctggtactggcggcgcgactggcgattgccggttgcaaaaccaaccccgccctttgcctgaatcaggccggtatttatgccgcagatattgtggcgccagaagccattatcggtaccggcgccttaacgaccggcagcacactgatcctgggaaaaagcgaagacggcgtgaagcggttgagccggcagctggtcaatgttaccgatgagctctacaagacaaaaacgttcaatactcagcctgttgccgattttatcaagggagagacggcggccggtgcgaattggtcgaccaaaacggcagactatctgcgggatatgcagaaggtcagcaccaaccagttggtcaaggtgtttgatccgaagcagaacgaaagtaagctgaatgtgtttggtcagcagttcgaacaggtgctgggtgcgaatgggggcaacaagacggggacgacgaaagtctttgcgacagagaagctgtctgatcaggagattatcaactatgcacaatcattggcaggcactgcagcgctgaagagggtggatacaccattagggattgtttactatgccaagaaagatggattgaccatcaaccttagggaatactcgagcagcaaggacaagacaaaagctcgctggactattgatatagtgggcaaatcaagtgttggtgacactgttggacaaaatattaagaaagttgaaataaaattcaggtga

SEQ ID NO: 436841 - DNA, 198 bp, Serratia marcescens
atgcccgtcgattttctgaccactgagcaggaacagaattacggttgttacgttgcaaaacccaatgacgtgcagctggcgcgctattttcatcttgatgagcgggatctgaccttcattaaccagcgacggggaaggcataaccggctgggaattgcgcttcagataaccaccgcccgttttttggcacctttctga

SEQ ID NO: 436842 - DNA, 1551 bp, Serratia marcescens
atgccgggtgttcagcaatttgtcgcggtgcagcttaatattccccgtccggaagtcctttcccgctacgcagaacgggataccaccctcagagagcatactgcgctgattaaggaatattacggttaccatgaatttggcgattttccctggtctttccgactgaagcgcctgctgtacacccgcgcatggctcagtaatgaacgacccggtctgatgtttgattttgccaccgtgtggctgcttcagaataaggtcctgctgcccggagccaccacacttgtacgtcttgtcagtgaaatacgcgaacgggcaaatcagcggctatggaaaaaacttgccgcgttgccggacagctggcagaccgcacgcgtgacggaactgctggacattcctgaggggcagcgaatttcaccgctggagcaactgaaaaagggacctgtcatcgtcagcggcccggcatttacagaagcgctggagcggtatgtccgtctgcgaaaccttgagttttcccggttgaattttaccggcctgcccgctatacagctacgtaatctggcgcgttacgcaggtatggcttcggtaaaatatatcgcacgcatgccagagcaaagaaaactggccgtgctcaccgcatttgttaaagcgcaggaaataacagcgctggatgaggccgttgatgtgctcgatatgctgatactggacatcacccgcgaggcgaagaaaacggggcagaaaaagcggctcaggacgttgaaagatcttgaccgtgctgcgctactgctggctcgagcatgttcattgttactggatgagcaggctgacgatgctgagctgagggagaccatattcagcagcatatcgaaaagtaggttggcagaatccgtcagcaaggtaaatgagctggcccggcctcagaacaacaatttccatgacgaaatggtggagcagtacgggcgggtaaagcgttttcttccggctgtattgcgcgacctgcatttccaggcagcgccagccggagaacatacgctgtccgccattcattatctgaccgaactgaacggttcgaaaaagcgcatcctggacgatgcgcctgaacatattattaccggcccctggaaacgccaggtgtacgatgcggatggccggatacaacgtgccggttactcgctttgtctgctggagcgccttcaggatgcactgcgtcgacgggatatctggttcgaaaacagcgatcgctggggaaatccccgcgagaagctgttgcagggggaagaatggccggctcagcggatccccgtctgccgggcgctgggacatcccaccgatggacataaaggcgtgcaacagctggcggtccagctggatgaaacctggaaagcagtcgcatcccgctttgaaggaaatgcggaggttcatatctgccatgacggtaaatatccttccctgactatcagcagcctggagaaactggaggagccaccatcgttgcatcgtctcaacagtcgggtaaggcagctgtgtagtggcacactgatactggccacctga

SEQ ID NO: 436843 - DNA, 231 bp, Serratia marcescens
atggcaaaatatttcacggcagaatttaagctcgaagcagcaaaactggttgtcgaccacggctataactacgtcaaggccgcagaggcggttaacgtcagccattcagctatcacccgctgggttaataagctgcgtcttgcgcgccaggggaaaacgccttccggacttcctctgacgcccgaacagcttgagctacgtgaagcgaagaagaaaatccaacgcccttga

SEQ ID NO: 436844 - DNA, 654 bp, Serratia marcescens
atggggcgctggttggccggtaagctgatgaaagagctgaatatcgccagttgtcaggtgccggcgcacaaatacaaacgcggcggaaacaaacacgttgaaataccgaaccatctcgaccggcagttcgcggtaaccgcgccggaccaggtctggtgcggcgacgtgacctatatctggacagggaaatgctgggcttacctggcggtggtgctggacctattcgcccgcaaaccggtaggctgggccatgtcgacgtcgccggactcagcactgacggtcaaagcactgcagatggcctggggactacgcggccgtccagcgggtgtgatgttccacagtgaccagggcagccactataccagtcgcaagtatcggcaggccctgtggcgttaccagataaagcagagcatgatccgccggggaaactgctgggataacgcgcctaaggagctgttcttcaggagcctgaagactgaatggatgccgacgaagggctacaacagcttcagcgaagcccaaagcgcgataatctgctacatcacgggctattacagcgccgtgcggcctcactggtacaacggcggcttgacgccaaacgaatcggagcgactgtactacatacagtctaatgcggtggccagtattagttga

SEQ ID NO: 436845 - DNA, 276 bp, Serratia marcescens
atggtgcgctactatggctttctgaccaatcgcaaacgtggctcgttgctgccgaaagtctacgaagcattggagatgcccccacgcgagaaactgcagaaatcagggttcgcagtaccgatgaaagcgttcctgggcaccgatccgtttcagtgtattctttgcaagagccagttgcgttttgccggcgccgtagctggtaagcatgcaactaaaatgctctctgactggctacaatggatggctaagaacggtggcttcaggcctcttccctga

SEQ ID NO: 436846 - DNA, 789 bp, Serratia marcescens
atgtttacagatcttcaaggaaaagtagcagcggtaacgggttcctccagaggaataggtgctgcactagttactcgcttagttgaagaaggtatgaatgtcgttattaattatcattcaaaccaaaaagaagcgcaggagctagccgataaacttaactccctaaaatcaggaaaaactatcatatttggtggtgatattagtgacgaaaagatagctcgcaactgtattcgcactgctatagagagttttggtagactggatttattggttaataatgcgggaatagaagttcaaagtccatctcacaaaataactgtaagtgaatggcgtaatgttattgatgtaaatcttactagtttttttctcacttccaagttcgcgcttgattactttttggagaatgagatttgtggtaatatcataaatatttcttcagtgcatgaggtaatcccttggcctacttttgtaagttattctgctagcaaaggaggagtgcgcatgcttacccaatcgcttgccctggagtatgctggaaaagggatccggatcaatgctatcggaccaggagcaataaataccgcgatgaaccaggaaaaaatggacgataaggagatgcgtttggagttggaagagcttattccaatgaaatatgttgctgaaccagaggttgttgccaatgttgccgcttggttggcgtccgaacagtcagcatatgttactgggcaaaccatttttgttgatggaggaatgacgctctatccctcattccagggggggaagggctaa

SEQ ID NO: 436847 - DNA, 948 bp, Serratia marcescens
atgaataagcacatgatagtactgtgtattttaggtttgacggcgactaatgtcgccctggctcaaaatgagaaaggaccttacgcggttaattttgatgccgatagcttagctgtcagcacctcgctgggttggcttggcggcgagtccaaagagtatgtctatgacgccgatacaggcagaaaaatcagcgagctcaactggaagatcaacaatacggccatcattaaaggcgatatttcctgggatccgtttttctggctgacgctgaatgccaggggctggactacactggcttccagtggagcgggaatggatgattatgactggctggatgccagtcagtcacattggactcactggtcaaacagtccgagtacccgccttaatcatgctaatgaatttgatgtcaatgccaaagcctggctggtaaaacgccctgattataaaataggcgcggtagttggttaccagcagacccgttttagctggaccgcttttggcggtcacttccagtatgataatggcaattacgtcggcgattttcctcgcggagaacgcggcattggctaccagcaaaaattcagtatgccgtacgtaggtctggcaggcggctatcggtaccgggatatcgagtttaacgcgttgttgaagttcagcccctgggttgaagccaaagacaacgatgaacactatatgcgtgatttgaccttccgtgaaaagaccagcggctccaactattattcggcctcggtggatgtaggttattacgtcacccctaatgccaaagtatttaccgagtttacttggagcaaatactcccagggtaaaggagggacggagataattgaccgtgtgagtggcgaatcaggccatctgggcggcgatgcagcaggcatagaaaataaaaactatagtctgacagcgggcctgcagtatcgcttctga

SEQ ID NO: 436848 - DNA, 969 bp, Serratia marcescens
atgcgggttgaggtaatggagcattatgggctgacgcagcctgttacacaggccggctattatgaaaccgcccaccataagcaacttatcaaggatatccgtggcaccattgaagaaggtcgtctggttgccatctgcggcgtggtgggcagcggcaaaaccgtcacgcttcgccgactgcagcaactcctcagagaggaaaagaaagtcatcgtggccaggtcgctgtcggtagaaaagcagaacattaaacttgccacgctgatcaacgcgctcttttacgatctgactcaggacaaggtggtccaaatccccaaacagggcgagcgtcgtgagcgggaactgcagaaactggtaaagaagggcaaacgcccggttgcgctgtttgtcgatgaagcgcacgacctgaacggtcatacacttatcggactcaagagactgatggaaaccgtggaggatggtgggggccgattgtcagtcgtgctggccggtcaccccaaattacgtaacgatctgcgccgcccgaccatggaagaaattggctaccgtaccgatatctttaccctggatggcatctccggcagccagaaggaatatattcactggctgctcagtgcctgcgtggaacactgcaaaccggaagatatccttacgaccgaagccatcgaactactggctgagaaactgcgcacgccattgcagatccagctacatctgacgctggctattgaagccggttatcagaccggagagaagccgataacggcatcgctgattgagtcggtactctcgcggcagctgaacgacctggagccgaccctgacgcgtcatggatatcgtctgaaagaaatggtggaactgtttgacgccaggccggcggaaatccgggccttcttcaacaatcagctcgacccggtgcgatcgtcagaatttcgggaccggctgctggccatcgggctgccaatttga

SEQ ID NO: 436849 - DNA, 528 bp, Serratia marcescens
gtgacggtcgacggcaccgtctatgaagtggaaccggatatggccggcaaaaccgttattcttcaatggggcctgtttgacgacgagatgttcgtggagttcgaccatgaagcctggggcccctatttcccggtgtcgggtcccgtaccccttcaccggtatcggacatttcgtcgggggaaaacggccgaacggtcggatcgtatccattccctggccgtccagatgaatgtccccatcagcgcgctgtccggcagtgatcttcacctgatcaacaattcccaatccgtcgacgaattaaaacaccagccgtttgataccacagagtctgaatacgtctttccgacggttatcgccgccaagctggccattgccgatgagctggctacgccgctggccaaactctcggacgacaaccgggcatttatcgatggcgttctgacgcaaacgctgatccgccgtgaggtccttgcccgtatcagggaacacttccgcaaccgattatcaggagcagaccatgcgggttga

SEQ ID NO: 436850 - DNA, 1134 bp, Serratia marcescens
atggccagccggcgtaaggttatccctgcggattcgttgctgcaattgcggcagcggcttgatcgtctgcccccgaaaagccctgaacgggccgctcagattgcgtctgtcgccgacctgtacggcgtttcagccaccactgtgtaccgtgctctccggcgtgacctgaaaccgcatgccgcccaccgacgcgatcatggcaaacccagggtgttgtctacctcggagctggagctgtattgcgagattattgccgccctgaaactgcgtacgaccaacaaatacggtcgtcacctgtcgacgtccagagcgatacaattattcgaagagcacggggtcgaggttggtcaggggctgatcaaagcgccacctggattgctacatcgtcagacggtggaccgttacatttcccgttttcgcctcgaccaggcccgtttattacgggaatcgccggccgtcaggtttcaggcggaatacagcaatgactgctggcagttcgatatgtctccatccgatctcaaacatattgaacgtccagaatgggttgttcccgccaaaggcgtaccgacgctgacgatattcagcgtcgtggacgatcgtagtggcgtcacttatcaggaatatcgatgcgtttacggtgaagacgccgaatcggcattgcgctttctgttcaatgccatggcaccaaaatcgcttccggaacctcatctgcaggggcgcccgaaaatgctgtatctcgacaacggccccgtggccaaaagccgggtattcagtaacgtgatgcgggatttgcatattgactggcaaacgcatacccccgccggcaaggacggcacccgcaccacggctcgcgccaagggcaaggttgagcgcccattccggacagtcaaggaagcgcatgaaaccctttaccacttccataagccggaaaccgagcaccaggccaacgaatggctctggcgttacctgacgcagtacaacaaccagcgccaccgtagcgagaagcactcccgcatcgaagactgggtggcgaatttaccgccagaggggagcgggatatgtgtacctgggagcagtaccgccgctttgcccgtgaaccggagtctcgcaaggttgggggagatgcccgcgtga

SEQ ID NO: 436851 - DNA, 564 bp, Serratia marcescens
atggccgttatgtatgggtacgcccgcgtttcaaccaacgatcaggacctggccttacaaactcaaaccctgcgcgatgccggttgcgaaattattcgtgcagaaaaagccagtggtgccagccgaaaggggcgttccgaattgcaactgttgctggactttctgagaccaggagatacccttaccgtcacgcggattgaccgcctcgcccgcagcatcaaagacctacaggacattgtttttaccctgaacctgaaaggcgtcaccctcaaggcgacggaacaacctgtcgatacacgtaccgcttccggcaaagccttcctcgatatgctgggtgttttcgccgaatttgaaaccaatctgcgccgtgaacgtcagttggaggggatcgcggcggcgaaagcgcgcggtgtctaccgcggccgcaagccctccatcgatacggccgaagtccatcgcctctatgtggatgaaaaaatgggggctaccgccatcgcccggaagcttgggattggtcgggcatcggtctaccgggctctggatgcctatggccagccggcgtaa

SEQ ID NO: 436852 - DNA, 249 bp, Serratia marcescens
atgttcgaaaaagcagaaaacaaggccaaagaattttctggtgctgctcaggagaaattgggggagttgacaggctctgcagaacaccaggcgaaaggcgctgcaaaaaaatacgcagctcagggaagtggggctctgcaagatgctgcggacgccgtcaaggaacaagttgaatccaatcctgcaggggcagcaattgtcgcaggtctggcgggtctcgttttaggtttcctgctgggcagaaaataa

SEQ ID NO: 436853 - DNA, 972 bp, Serratia marcescens
atgacactggtttcaaaactaaagaaagtgttgaagaaaaaagaagttgctgccctcgtggcttctgtatgcctaatggcatactcatccggcgctaatgcttttgcttgtaaggatgctacaggaaaaataattagttctagctctggaggaggggcaggaactttcactgtttatgctaacttaacgcctagcgtacaggctggtcagaacctcgttgtagacctaaactcaagcataagttgtcgaaatgaacttccacaatcctatattgactgggtggctttaaatgacggcagcgcctatggtggggcgctggaaaatttcacaggaacggtgaagtattataattcaagctatccactgccagttactaatagaaccaaagagaccgcatttacaaccagttcatatcagccatggaatgttatgctatttctgaagcctatttcagcggcgtcaggagtattaattaataagggtagtttgattgccagattaaatatgtataaatattcaacaaaccctcaaaccggtcaacaaaatggcacaatagaccgtttcacatggaatatttatgctaataacacagtggtggttcccactggtggttgcgacgtgtcatcgcgcaatgtgacggttaccttgccggattaccccggcacggctgctgtaccgctgactgtccattgcggacaaaaccaacagctggcttattatctgaccggcacaactgctgatacggcaagcaccatatttaccaatacgtcatcttcaaatccggctactggcgttggcgtacaactgtctaaccgtaatggcattgtagctaccaataagaatgtctctctcggtacggtcggtaccagtcctgtcagtctgggcctgacagcttcctatgcacgaaccacggggcaggttgtggcaggcaatgtacagtctatcatcggagtgacgttcgtttacgagtag

SEQ ID NO: 436854 - DNA, 2250 bp, Serratia marcescens
atgaagaaaaacaaaactgattttatttctaacggaagtaatgataagacaatctctacagttgaaccacactatgaagatactgcacccgtcgagaaggtaattaaaccccttgcgagtataagtcccccgggagcggaacccatgatgccgggttctgataagacacctaaaaatagaaacgagaagctcaaacagttagataattttcggtctgatcctcaggaagagtcgctgcgcacgaatcagggcgtgaagatttccgataatcagaattcactaaagtcaggaactcgcggctcaaccttgcttgaagactttattctgcgagaaaagatcacacattttgatcatgagcgcattcccgaaagggtagtccacgcacgaggtgcgggtgcacatggttattttcaggtctatgaatcgctagcctcctataccactgccgaattccttcaggatcccagtgttaaaacacctgtctttgtgcgtttttctaccgtccagggctcccgaggttctgctgatacggtaagagatattcgaggctgggcaacaaaattctatactaaagaaggcaattttgatctcgtaggtaataatacacccgtatttttcattcaggatgcgattaagttcccggactttgtccatgcggtgaagccagagcctcataatgaaataccccagggtcaaagcgcgcatgatactttttgggattatatctcactgcagccagagacactgcataacgttatgtgggcaatgtcagatcgcggcattccccgtagctaccgtatgatggagggattcggcatccatacctataaaatgatcaatgctgaaggccagtgccactttatacgtttccattggaagcctgtatatggcgtctcctctctaatatgggatgaagctcaattgctgacaggccgcgatccagattttcatcgccgtgagttgtgggagtccattgaagcgggtgactatcctgaatatgaactcgggttgcagataattccagaggaagatgaacataaattcgattttgatatacttgatccaactaagttgatcccagagtctttggttcccgttcatctcgttggaaaaatggtattgaatcgcaatccagataattactttagtgaaaccgaacaggtagcattctgtcctggtaacatcgttccaggtatagacttctctgatgacccactacttcaggggcgactcttctcttacattgatacccaaatcagccgattgggaggagtaaatttccacgaacttcctattaataaaccaatttgtcctttccataaccatcagcgtgatgggatgcatcgtatgagcatttctggaacagccaattacgagcctaactctataaataacaattggccaagagaaacccccccggcaaagggcgggtttgcaacctacccgcaaccaataaatggtgaaaagactcgcagaaggagtagcacttttgttgacttctattctcagccacgtctattttggctgagccaaagcaaagtggaacaaaatcatattgtcggagggttcagtttcgaattgggtaaggttatgcgcccttggatacgtgaacgtgtggttgatcagcttacctatattgatcaccagttggcccaatctgtcgcagataatcttgggataagattgagccaagaacaattgaagcatccattacctggccccgtcaacggggtatctaaagatcgttcattaagtatgtacgatgggcatcatcagatactcaaatcacgccaagtggctattcttgctgccgatggtgtttgtggggaatctattgataatattatgaaaacccttaaaaaacatggtattcatggaaaggtttttgctccgcacttaggtagaataacttctctgcaagataatgaaatagagatcgacggtaccatagaaggcaatccatctgtgatggtggatgccgttatcataccggaaggagaaggcagcattgactccttgatgaaaaacggcaacgccaaacattacgtgatccaagcatttaaacatctgaaagcgatagggctgcaaggcaaagcgtttaagctatatgatgcattgccgttgcccaaaccagatgaaggtattatcgtgggggataaggctgcggatttggctgaggcattttgtaatgctatgaaaggacatcgtatttggtccagagaaagcgtagcacaggaaattgctggctaa

SEQ ID NO: 436855 - DNA, 681 bp, Serratia marcescens
atgaagatcaacaggattgtcgttatggaatactatggttatacacttgttaagtttataacaggttttgttattgtaattactcatctaaatctatcgggtaaaactcagctttcccagatgacccccgtagacttcatcggcaatttcgtgctgggtggaattattggtggtgtgatctatagcgattcaatacctatgcatcaatatgtactggtactctttatcggcgtatttcttatctcgttattgaatgcattaagtaagcgcatacacttttttcgcactgttactataggtcagccaataccgatcatcaaagagggtcgctttcttattgatgccatttcgagtaaaagaattaaaattgatatattgaatgtctcctctcaacttcatgcgcaagggatcccatccttccaggaagtcaattatgcgcagatagagcctaatggtcaaataacggttgtatgcgatggcgccaagatgccttcagttatcgtaatgaaagatggtaaggccaggattgctgaactcagttcgatagagaaagatgaagcatggcttgcctgtaaattaaaggacgctggtatagatcctcacgcggtttttcttgcggaattttggagtggaaaattaacttttatattaaataacggcgaggttaaattctctctttaa

SEQ ID NO: 436856 - DNA, 1035 bp, Serratia marcescens
atgaaaatggaaaatgggatggttgttgaaaaaaaaatatcatggggtagcgtaataggcggtgtgatcactgtattggccgtgtcattactgttgtcaacgctgggtacaagtcttgggctttccattgttgacccggcttcggacgatccggtaaatggagcgggaaccaccgttgccgtctggtctgcaatctcgattattgtcagtcttgccatcggcgctttcgtcgccggtcgtctggcagcaaatgatggtctcattcatggcttcctggtgtgggctacagcgctcattgttgctgcagttctgggaaccttgttggttggctcagccgttaagatgactggtaatgcgctcggtgccatagcttctacctcaggtagcctgctttcaggtgcaggctctgcgcttggaaacggtgcttccggagtggcaaatgtgggaaaaaatctctttgaccagctggacatcgacacaaaacttgagccggaaaacctaaaatcggatgtggtagcagcattgaaaaagagcgatataccttcgttacagccagaatttatgcagcagcagcttgatggtgctaaaacggatttgagtgatgcgattaaggctttcttcaaccagcctgatagcaatgacgctatcgtacagaaactgattagtaagctgaaaaagcgtgcggatgcaattactcaggatgtcaaccaggactcattgaaaaaagcgctgagtgaaaacaccgacatgactcctgcagaggttgataaaacagtcactaacttgatcgatactaaagaaaaaacagctcaaatcgttaagcaacgtctcgatgaagcagaagcgaaaattaatgaggcgaagcaaaagtatgccgagcttaaacaggaagcccgtgagcaggctgccgcagctgcagatgcattggcgcgtgcggctctgtggtcattctttgccttgcttcttggtgcaatcatcagtgcgttggccggattgtggggcgtaaagacgaatgcccgtcatattcgaagctga

SEQ ID NO: 436857 - DNA, 225 bp, Serratia marcescens
atgagaaaatcgctaatgtacgctgcgaccgtcattttttccatcatggccctatcgggatgcacacgttcaagttatgccatctatacacatgacggccgtactatagtcagtaaagttaaaccggcccaaaccagcgcaggcttggtaggctacaccgatgctaatggcgtcaaacagcaaattaaccagtctgaagtgaaagaaatttcagagatcccataa

SEQ ID NO: 436858 - DNA, 234 bp, Serratia marcescens
atggataaacaggaataccggctgtacctggccatgttgaaggcgcgcggcgaactggcgcgcaaggcaatggccgacaacgcccggcggcgcaacatgctcaaagcgcatcgtcaacgacgctctgacgacatcaggtcattgttggcctggaaagacagggatgtctcagttgacgggttactggccagcgatgaggagttggaaactcgtgaacgggcgtttggcaaataa

SEQ ID NO: 436859 - DNA, 846 bp, Serratia marcescens
atgtttcacttattagtcagttatgcagggtggaatgatgagcacggttggcaggacaactcgggatcgctcgatttagggcgttccatcaccaacgcgcatacagatccacaactggttgaacggtttcgccccaatggggagttttctctggcggaaatcacacaatatccggctctaattatgacagaactggaaggaaggggagatccttttgctagagtgggtaatattacgaacgttaaaaaagcaggtcgtgaagtgataataacataccgtctcgcccctgcgatcccacctatatcaacccaagaaataataaacttcgcacgcgagctcggactgactgatttccaattaatccatacacattggtccgtaaatagtggtgatttattcaaagttttattcagaaatagtataggagccatccctaaaccagacgtttttaatattgaccatatttatcatgttgaacaacaacaattgtccgtcatgatgccatttgctggaaatttcactcctgtgtatcaggccatacagacgatggcagccgatatgggcatggtctgtaaccgcgccgatgatatatgggaccatcaacacattatgcaggacgtggtttcgctcatttgtaaatcttcagtggtaatttgtgacctgtcgggaaagaatcccaacgtgttttatgaggccggcatcgcacatgcgctaggtaaacaggttatccttattacgcagcatatggatggcattccttttgatctccggtccgtacgtgcaattcaatatttacccaatggggaaggtattgatgcaatgataaaaaattacgtccccgagtaa

SEQ ID NO: 436860 - DNA, 630 bp, Serratia marcescens
atgattatctctgtactgaaccagaaagggggagttggcaaaaccactctcagcgtcaatattgctgcccgtctggcggcggatggcgcacgcgtattgctgcttgatgccgatcctcagggtagcgccctggattgggcggcagcacgggaagatgcgtccgctttcccggtgctggggttgccgcgcgccacgctgcacaaggatatcggcaagttcacccaggattatgaccacatcatcattgatggcccaccccgcgtcacggatctggcccgttccgccattatggcggcagacctggtggtgatccctgttcagcccagtccgtatgacgtgtgggcggcacaggaagtggtcacattgatccaggaagccaagatttataaagaaaaccttaaatctgtatttgcggttaatcgtaaaatcgtaaacactgcgattggccgtgatgtcggcgaggcgctgtcgacgtatgaaacactggtgctgcaagccacggtgtcgcagcgggtgatcttcgctgaagcggcggcggtcggtaaggccgtgttcgagctagagccggattcggcggcgtcaaaagagatcggcgccctggttaacgagattttggagcaatatgtatga

SEQ ID NO: 436861 - DNA, 243 bp, Serratia marcescens
atgagtgggaaaaaagtgactttcggtgccaagccaaccaaacctgcacccaatgcggatgcctgggtggaaagtcgcgctgtcgaagaagcgccaccgccgccggtcgagaaaatgaagcgactcacgattgatatcccggagagcctgcataaggccatcaagtctgcctgtgccctgaggggcaccaagattgccgatgaggtgcgagagttgttgtataacaaattcggaaaagagtaa

SEQ ID NO: 436862 - DNA, 498 bp, Serratia marcescens
ttggtcgacgtcaccgtcattcccgacgacgacatcatgcagcaccgccgcatggcgatcctcgaactcttgcaaaagcacgtgcgtcagcgcgaccttgccgagctgctcgaccggctggtcacgctgctgctgacggggtacactaccgatgaacaactgatctcgctgctcagctacatgctgcaggtcggcgagacccacagcccggccgcgctgctaaaacagctggccgagcgcgtaccgcaccatgaggataaaatcatgacgatcgctgaacgactgaaagaagaaggccgtgcgcaggggatcgccatcggcatcgagaaaggcatcgagaaaggccgtcaagaaggacgtcacgaaggacgtcaagaaggcgaacacctggcggcgatcaagatcgcccgcaccctactggccagcggtctcgatcaggccacggtgatgaatgccaccggccttaccgccgacgagctggcgcagatccgccactga

SEQ ID NO: 436863 - DNA, 366 bp, Serratia marcescens
atgagcaaacccaccgcctccccacacgatgccgtgttcaaggcgttcctcacccacccggagaccgcccgcgacttcctgcagctgcacctgccgtcaaacctgctcaaggtctgcaaccttgacaccctgaagctcgaatccggctcctttatcgaagatgacctgcgcgcctgctactcggacgtgctctactctctcgatacggcccgcggggacgggtacgtctattgcctgattgagcaccagagccggccggataaaatcatggccttccgcctcatgcgctatgccatcgccgccatgcagcgccacctggaagcgggccacgagcgtctgccgctggtgataccgctgatgttctaa

SEQ ID NO: 436864 - DNA, 327 bp, Serratia marcescens
atgagcgaccagccagctgcgccagagattatcgaagacgagattatcgacaccggcaccgaagagtttgcccacgtggtggccatgctggtgctgctcgagcccggcatgtcctacacccattcggtggccctctctcccgactatggcgccggccaaatcgtccaggacgtcaacagcctcaaaaaacgcgcccgccgcctgctggtgccggccatgcatgccgcagccaaacgctcgggccaggtctacaacatcgagagcagcctggtgctctatccgtcaggtcgcctgttcgcccaggccatcgtcacccgcagcaggtaa

SEQ ID NO: 436865 - DNA, 405 bp, Serratia marcescens
atgtttggcacggtgaaggaaatcagcgcggaactgtttcgggaataccattacgacgaaccgctggcggtgctgatatgggatacgcagtcgctatggtatgcgctggcgaagtacaaccccaccaatctggatgtgctggccatcctcgagtccattggctgcatggcgattgatgactatcaacgcagcggtatcggccagcgtgatatcgaggcgatgatggtgtccatccaggaggcccgcgacgccacgccgtgcgtgagcgtcgatgcgcaggcgctggaaaccgtggtgtcactggcggcactggcgatagatgccgatgacccgctcagcaaggaaggcgaatttatcgacgatatggccgccattgagaaagtgcgcacggcgttgagccgttaa

SEQ ID NO: 436866 - DNA, 741 bp, Serratia marcescens
atgttttctgtcttcaatgaaaatccgaccataaccgaaacgctccgggagtatatagacagaaaattgtccttatttggcaagttggaatatgcctatacggtcgtcagcaaaaaaaagccgtcagacgttcttataatttccacttatcctgatgaatgggttgatctctaccgcaccaataattttcaactcacagatccggtgatattgactgcgtttcgacgtacgtctccgtttgcatgggacgaaaatattacactgatgtctgacctgaagttcaccaagatattttcgcttgccaagcaatacaatatcgccaacggtttcacttttgtgttgcatgatcatatgaacaaccttgcgttgttatcggtcatcattgccaacaacgaacaaggtgagttggaatcacgactcacttctgagcgtggggtcatgcagatgttgctgatcgatatcaatgaacagatgtatcgtcttgccggggcaagcgcatcctgcggggaaaatcatatggatagggtaaaacccatatttaccccgcgggagaacgaagtgttgtattggtccagcatggggaaaacctatggtgagattgcctccatcgctgggatatctgtaagtacggtgaagtttcacatgaacaatattgtttccaagctgggagtgagtaacgcccgtcaggcgatccggctgggggtcgagctggaacttatcacagcgacaacggccaggtaa

SEQ ID NO: 436867 - DNA, 675 bp, Serratia marcescens
atggataaaaaagcaatggaatcacagcccctgaccatacacgatggaatgcttgaactgtttgatgtcagctatgatgagctaaatataacccactccaatgaactttaccggcttagaaaaaaaaccttcagtgaccggttgaaatgggatgtggcatgcaatgccgatctggaatttgatgaatttgataatcccgctacacgctatattcttggtctgtacaagggacagctgatctgcagtgtgcgttttattggcctggaacagcccaatatgataactcacacgtttcgtgcttgttttgacacaattccgcttcccaacgacggcatagaatccagccgattctttgtcgataaggagcgggcacagcaacttctcggcggacgctatcccatcagccagatactgtttttagccatgatcaactgggctcgacacaacgatcgccacggtattcacaccattgtaagtcgctcaatgctgacgatactcaaacgttcaggatggcagatcaagacgcttaaagaggcttttctcagtaagcgggaacgcatctatctggtatttttaccgacagaagcaaaggatcaggaacagatagcgtcagggctcatcaacggattcgactaccctgcggagtcagttattacctggccgttgtcgctgtga

SEQ ID NO: 436868 - DNA, 585 bp, Serratia marcescens
atgtcacgcgtttttgcttactgtagagtgtcaacacaggaacagaccacagaaaatcagcgtaaagagattgaagccgctggattttccgtctggccccagcgactgattgaagaacaaatcagtggttctgttgcagccagcgaacggcccggttttaccaggctactcgatcgtatggagacgggcgatgtactgattgtcaccaagctggatcgcctggggcgaaatgctatggatgtcagaaagacagtggagcaattggcgacttcagatattcgtgtacattgtctcgcgctgggtggcgttgacctcaccagcccggccggaaaaatgaccatgcaggtgatctccgctgtcgccgagttcgaacgcgacctcctgattgaacgcacccattcaggtattgcacgggcaaagacagctggaaaacgttttgggcgcccaccggcattgaatcatgagcaacataaactggtggtagaacggctgaatgctggccacagcgtagccagtgtcgctcgtgaatttaaaacatcaagacaaacaattatgaggattagaggctcagcaaacaatggataa

SEQ ID NO: 436869 - DNA, 1689 bp, Serratia marcescens
atgaatattggtgcaagctcagataccctgcacatgctcggtgaatttgctgagtttatgtatagaaaggatcgctttactgaaggagaggaaattaggactgcaaatgaagttcttgttcctttattactggggcgttataaatctaaagatggtccacaaaaaaattacgaaccttcagattatgtcgaaacatttaatttcttgagggcatataatacattgaaagatgcagtgttttattcatatgccgataatgaagttgttgcatggagtatggaaaataacaacattaaggttactttaaatgacgattcaattttaaggcaacatgcttcggaatttataacttttagtttgaactcacggtgcgtgccttacgatcaagcacaggctaatccagaagaactccttcaaggtacaaaacatttcgacttgagtaaccctaatgtagaaaaggcttttgctgctatagagagcattgcggactggaaaataaagttttatttttcttatatacctgaagatagtgatgtgatgcttgatggatataaatattctacattcattggcatttacaaatccttgttaatactagcgttgtacgaacgatatttttccaaagcaaataatgtttcgggagtccttacctataaggaagatgagcttttggggcaagctatgcaacaatatccagaagaaaacccagtattggtgaaaaagatattccaagatatagcagtgtcttcaagatcaacattcaactacataccgtcagaaaataagtatctgctaaaccctacttgtttttcactagtagatggtatttcaaacatgctgaggaattttgccaagaataatccagatagtttttcgaacaacatctctgaaataatgggtaaaggattagttaagaagattaggtcaaagttcgagcaatataccaactacaaattgtttagcgatgtgaaactagatgaatatgatcctaaactgccagatatcgacttattagcaatatcttatgagccatcactcgggtttcatgtttttgttggcgaagtgaaaaacaatttacctgccgtgtggggtaaagattacctcaaagccaaaggagtaaagggatttataacaaaagccatatcgcaaatagagaatataagcagcttcttgaaaacggatgatggattaaaattgattcataagttcgctgttaaagcatttccgagcctagacatagaccatcttttcccacatggaatatgcatcgttgttgatacaataataatttcttctcaaagcacagggatgtttttccccgaaaacactattccaattatagatggggatacattaggtcatatcatagatgaaagtgatggcgatactaactatatcctgttccacctaagaggacatagtaagtttattgatgaatgtaccaagcgtgcaactgaggaaatatctgttggtgattacaaaatagaatatgatataatttctctggataagttttacggcctcgccaagaatgagtttgtgtctgttggtgctattgaaaagctagagaaagaatctttggatttgggatatacaatggcaggttcgttgagacacttaggtaatgaagagtatttcatgaatagcgaagattggccgaaaaacatatctctttttgttatccactaa

SEQ ID NO: 436870 - DNA, 579 bp, Serratia marcescens
  misc_feature (534)..(543): n is a, c, g, or t
atgtactccgccaatgcaagaaaattagccaagttatctattgggagtcctgatttttggatcagatatcttggtgctagtatttatttctcagggttgagtgagggggcaagttttatcacaacttatgttggacataatgctaacgatccctataaattggcaaatatcatggaacatgacctcaaaggcttggcagtatcatttaagggtaaatatctcaaagatctctttgtaagacatactacagccgtaaaatctcagcaggaaagaatagagcgccgacaggttgtaataacatcgcaaacaaatactgtgaatttaaattcctctcctatcaaaaatctaaatactggagaacgatatgttaataaaccagtattgcgtggaaaaaaagttttagttattgatgatttctgcacagaaggaaatgctcatgaaacagcgagaatgtatttaaaggcagctggagctgaagttgtaaatatttcatggttgaagtttgttaatcgagatgtagccgtttgcgagccnnnnnnnnnnatcattgggattggccacaataattcctacttctga

SEQ ID NO: 436871 - DNA, 984 bp, Serratia marcescens
atgactgctactgatatagctcgatggaacactgaaagcgctgctttgctggtgctatcagaaatccgtggcgttagttattggactctgtacaaggttgctcaaaaaggaatccgtttcagagatgttgtaacttgctcaacattatcaaaattcgaatcaatccttggagtgaaattacatcgcgcgccatattatttgactgagaataattggtcgacttttcgtgatggaatgatttctacggcgaaaaaccttttaacacactttcatagcaacggttataaattaattcattatggttcttcagattacccggagaagttgaatgatttaaatgatcgcccttactggatttttgcgcaaggcgatacttcgttgcttagtaaaaaatgtgttggtgttgttggtacaagaaatccaactgctcttggactttatttaacacaagcagtggtctcgcaatttatagcatcagattatgttactgtaagtggcttagcatatggtattgaccaagccgcccatgaagcatcaattttatttaaaataccaacaatagccgttctagggacaggtttaaattctaattatcctagaagtagcgttgaactgagggagggaattgtaaataaaggggggcttatacttacggaatatctcccgcatcaaaaaccaacgcaagaaaattttgtccggagaaacagaatacaagctgctttaagtgatattttaattcctgtcgagtggaacttgaaaagcggaacgtcacacacggtgcgaaatgctgcccagttgaagagaacgatactttgtccattactaagaggtgaatctgttcgggaggagattaaatactctcaggacgaatactcagcaataatattggaaactcctctggcgggatttaatgacgtgatggagttgattaaagaaaaaactgctaatagattacagcaattatcacttctgggagatgaataa

SEQ ID NO: 436872 - DNA, 1020 bp, Serratia marcescens
atgaataccaagacgatgaaagcctttacctttaaacgctatggtaaatcccctgagttgggcttcgatgaggttgattatccctcacccggcgctgatgaaattctggtcaaggtatgcgcggttggcctgaacccgatagacaacatgattccaaccggcatatttaagccgattttgcattttaagctccccgctacgttgggcagcgacttgtccggggttgtcattgccgtggggagtcgtgtgacgcgtttcacgccaggcgacgaaattttcgccagcattttcgataaaggagcggggtctcttgccgaattcgcattagtacatgaaagcgccgcagcccacaaacccgcgaacctggattttgttcaggcagcgtcgctccccatggtgagcctcacgtcctggcaagcgctgatagagcgagccgggctgcgcccaggtgataaagttttcattccggcaggttccgggggaattggcagtatcgccatccaactggcgaagcacctcggtgcactggtgggaacgacaacaagtacagacaacgtcgagtgggtgagtcatcttggcgcagacgaggtgatagattataaaaagcgcgcattcgaaaatatgctaagtgactacgatatcgttcttggtactctcagaggtgatgcgattgaaaaatccactcaaattcttaagcccggcggaaagattgtttctctcatcgggccgttggatgccgctttcgcgcgggacagacatttaaacatcctcctgcgccttgtatttgccctgatgagccataaaatcatgcgtctctcaaaaaagcgcgggctgacctattcatttctcttcgttcgccctgatggcgagcaacttacccaaatcgccagactgatagaggcgcgacacatcaggccggtgatcgacagcgtgtttcccttcgccaaaacaaaggctgctcttgactatcttgctcaggggcgtgcgaagggtaaagtggtcgttaagataccagagtga

SEQ ID NO: 436873 - DNA, 411 bp, Serratia marcescens
atgaaattttctcaattggctatgctgacctcggcgttgtttttcatcctggccacggtatggatgtttttcccgcaaccgctcttaactcagtggggaattgaaccgacgcccggtatcggcgtgatctgtcgccgcctggccgcattttttgtggggctcggggtgatgtgtttattcgctagaaatgcagaaccttccccagcccgctctgcattggccgccggtatcggcacgatatttattgtttcagccatacttggcgtcgttgaatggcgcgaaggacgtgtcagcgggcagatcctgtttgctgtgtttatcgagttattcctggggccagcctttttactcagcaaccgggccaccaagaaaaatgctattggcaaacaccacagggtaaataacgaatga

SEQ ID NO: 436874 - DNA, 819 bp, Serratia marcescens
atgacaaaaaaacgtgtagcgctggttactggcgcttcctcaggtatcggcgaagcgtctgcccatcaacttttagccgcgggttataccgtatatggcacgagccggcgcggaactcatgcgggtgcgcatcggtttccgttgctgacgcttgatgtaacggatgacgcttcggtaagggcggccattgaggaattgctgcgcctggaggggcggatcgatattctggtgaacaatgcgggttttggggtcgcgccggcggccgcggaagaaagttctgtcgaacaggccaagcgtattttcgacaccaactttatgggcatagtcaggttgtctcgggccgtgatcccccacatgcgccgccagggctgcgggcgcatcattaatatcggttcgatagtcgggctcgtcccgatgccgtatatggcactttatgcggccagcaagcatgctgtggaagggtattcggcagctctggatcatgaagtgcgcacgcagggcatcagagtttcagtcattgaacctgcctacataaaaacgcagtttgaagccaataatatagagccggatgcaaagcttgaagagtatgacctcaagcgggccaagctggagaaagtggtcagcaaggcaatggctgaagcggaaagtccggaggttgtggcagaggtggtcgttaaagcggcccagactttacgcccaaaagtgcgctacacggcgggaacgctggccgcaaagctgaattttattctcagattcgcgcctgcatcattcctggataagctcgtgcgcaaaactcttcagcttgatgccaaggagtaa

SEQ ID NO: 436875 - DNA, 339 bp, Serratia marcescens
atgacggtgtatggcgcgaccaaagcctttgtccttttcctgtctcagggaatgcatctggagttgtcgcctaagggcatttatatccaggcggtgctccctgccggcacttacacggaaatttgggatcgtgcgggtattgatatcagtcgcgcgtccaaaatgatggaggtggatgaattagtggatgcagcgctggtcggttttgatcgccgtgaactcgtcaccatcccgcctttacataatgctgcccgctgggatgccctcgataccgcgcgccaggctttgctttcggacatcaaacaggctgaagccgcggagcgatataaaacgctttag

SEQ ID NO: 436876 - DNA, 183 bp, Serratia marcescens
atgacccgtcaggctgtatttcaaccctataaacgtgggtctataacattggccaaccatagtgtgatggcaccgctggcgcgtaaccgtgccggaacaggtcttgttccgcacgaactgacggcaatctattacgcgcaaggttacaccgattgtccgtcgctgaccgaggtcagcgagtag

SEQ ID NO: 436877 - DNA, 549 bp, Serratia marcescens
atgaaagtgtcaaaagagcaggtccgtaaaaaccggatgcgcattgttgaaacggcatcagaactgtttcgcgagcgcggttacgacggcgtcggcgtggcggaactgatgtcagcggcaggcctgacccacggtgggttctacaaacactttggctctaaggctgatctgatggcggaggcaatgagctgtggctttatgcgtgcaacagaaagtacggcaggtgaggatcgggaaaaatttgtcgaaaattatctttcccggccgcatcgcgacaatagggggaaaggttgcgtgatgtcggcactgggcatcgatgcggcccgtcagtctgagcctatcaaggaagccttcgcggacggaatggaacgccaactggccgttttaggcaatgaacatgaaacgcgcgctgacttgatcgctaccttcgcgcaacttgtcggcgccttagtgctttcccgtgcctgtccggataattcagccctggctgacgaaattctggaggtgtgccgcacgcgtcttctcagccaggactcccgtaagaactaa

SEQ ID NO: 436878 - DNA, 261 bp, Serratia marcescens
atgcgtttgacgtctgctgagtgcctgactggcttggaaccacgggcggcgttcgcggtcaatgagatccatcgccactgctggagccataaaaagtttgccgcatgcgccgggtatgaaggaataggggcgctttatttatcgacacagcacagaaaaaacgacaaaaacgcctgctgcccatccaaattagttcttacgggagtcctggctgagaagacgcgtgcggcacacctccagaatttcgtcagccagggctga

SEQ ID NO: 436879 - DNA, 1281 bp, Serratia marcescens
atgaataggcaagcttttacctcatacattttagaaaaaaatctattagcacgcgaaaaatttcacttaaagtcaaaatatggagtgagtgcctcttccctgttatcgcaaagtgctttgcttatagcccatgaaaacttccgatcaggtgtaaaagttaaagtattttccctacaaggaaaagccgtttactcaaccgcctgtttgagggagaaaatcatacttagacattgcgcaagcaatctacatcaagctatggggttgaacttaaagcaacgacattctattattgatgaggtaaaaacttatttaagagaaggttcaaaatttaaaatatacagacttgatataaaaagcttcttcgagtcaattaactttgaacttttaatggaaaacatcgaggggaatataaacatttcgagacacactagaaatctagtagagtggtatctaaaaggttgcaagaaaaaacatcaaaacagtggattaccgagaggacttgaaattagccctgtactctcagagatatacttaatagatttcgacaattttataaaaacacatatagatgtgttatattattcaagatttgttgacgatatattattaataaccacatcaaatgaagatgaaagtgaatttctcaatttcataaacacatctttgccaaaaggcctagaaataaattctgcaaaagataaaaaatcaatttcaccaataataacggagagaaagcaaggctctaatccaaatggaacggagttacactcattcaattttcttggttaccagataaagataataaacacacatgtaaccaaagggagccctaaagcaacctatagaactataacaataggattctcagaaaaaagattaaagaaattcaagacaagaattagccgagctttttatgcttataacaataacaatgactataaaatactcctcgacagaattaagttcttaacatccaatagagaaataaaaagacaagtcaagggacagggtaaagtaataaaaagaaaaatatccacggggattttttatagcaattcaaaactagacccaaactcatcgcatttagatgaattagataaattcctttttttctgtatacagaacaacacatccagattaaataaaagtagaaaaacaccgcttactaatgctcagaaaagagaattactaaaaaacagttttaaatctggatttattaaaagaactcacatttcatttaattacaaaagatgtgctgagatgatgaagatatggttatga

SEQ ID NO: 436880 - DNA, 276 bp, Serratia marcescens
atgttaatcgtcaaatggactgacgaagcaaaaacgggtttatacacgctgcttgcctttatcgcggagcgaaacccacttgccgctgaggctctgttgcaacgcattgaagagtcggttatcccgttagcggaacatccttatctgttccggccaggcagggtgaacgggacccgtgaaatggtcgttcatcctaattacattgtggtttaccgcgtgctggctgcacacattgaaatagtgggtgtcctgcacgctcgtcaggaatacccttaa

SEQ ID NO: 436881 - DNA, 240 bp, Serratia marcescens
atgaatcacgatactttaaagaacaccatcgcaacgcttgaaaagctgcgcgatgctcactgcagccaactcgatgctggcgctctggcagagctggaagatgtattgcgtcagttacgcatacatcgtgacagcccggtaagaagcgggttccggtttgacgatatcgtcttccgggcactgcgtattattgacgttgtagttcgtttgatcacaaacattgatgattggatgaaataa

SEQ ID NO: 436882 - DNA, 2340 bp, Serratia marcescens
atgagtaagctgttgttccgtctggcggcatggcgtgctcgccgtcgcgcgaagcctaatgctgatatggtaaggaacgagcagccggacggagggattggggctgaagctccgattcggacagcatctgaagatcgccttagaaggtccggattcgcggctcgtatagccgacgtgctttcggagcttagtttgcgcgaaggccgagtattcgctattcgtgggggatggggcttcggcaaatcatcactgaaaaaccttatcaccgaacggctcgatgccaagagcagtggagcagactggctcgactttaacccatggcaatggggagacggcgacgcaatcgcccgcgcgctatttggccagatagcagatcgattgggaggcgagcattcgaaggcagcactcgatcgtgccgaagcactgcgacgctacggagcgatccttaccggggtcagtaagcctcttaaagaagctgggagttcaggccttctaatctcgacggtgctaacaaatgcttcggttatagcgatcgcgtcggctattggatatgaccttccgacagttgcaaaggttgcggctgttcttgcctttctctcggtcggagtacctcttctcggacgcgtactatcgtatctcgggcgtgaccatagcggcgagtctctcgacaaggtacgtagagcgcttgaggctcgtcttcgcgaacttgaccggccgctggttgtcttcgtcgacgacattgaccggctcgagcctgagcagatcagaatgctgcttcggcaggtaaaggcgaatgctaatctaccgaatattgtttttgtgctcctgttccagcccagtatagtagaacgagcgctagatccggttgccgacaacgacggtcgagccttccttgaaaagatcgtgcaggctagctttgatttaccagccgtaccgacatctttcgtgcatcgtatgttcgaggaagaactctctgaaatagcgggcccatacgcgactgaggccaacgggttctctcagagacgctggggtaacgcttgcattggctgcattcagcccttgcttcgcaacatgcgcgatgcgcgtcgtctcatctcatccattgctgtacacatgcccctgcatgtggttggcgacgtgttcgaggtgaacattgtagacttcctgcttctggaaacactccgggtcttcgaacctgacctccacgatgcactgttccgtgagagaggattggttctccaggaaggacgcttctcccgtgatggccgacggaaggtagaccaagcagcggctaaggagcttcttgagatcgtctcagaggagcgccgcaatatcatttgtgatgcgcttaaagacttatttcctcccctcgaatgggcgtatggggggacaaactatgcagacggcttccagcgccggtggttgacggagaaacgagtatgcacttcgcgctacttcccacgttactttgaactccagacgacagtcggagaaatatctgaacgccgtttcgttgattttctcgatgcaacagcgacagaggacgagctctttgctgaaatcgcggccgtcaaagctgacgggctgctgaattcactcgttgcgaggctcgacgaatccgtcgaccgattaccaaccgagaacgctgctgttctgctcccagggatgttcggacttgctgaaaaactcgcaggcacgaacagcggctctttcgactcgtcatatgtagcagcatggcgagcgacaagttggtacctgaagcggattcctgaggatgttcgaggcggtttggctcttgaagcactccgtaaaactgaagcgctatcagttgcctcaatcctaatccatctcaacgatcccaccgatcggaatgagggcgagagtagagcgttcgagccagcgttagatctcaacaccgttgtggcaatgaagactgaatggctacggttgataaggatccgcgcagcagacgacgacgcgctgattgctgaaccggatctcatatcacagctctatcgctggaaaaactatacagattcaatggacgaaccccgagagtgggtgaggaaaacaattcaaaccgacctgggcttcgcaaccatggtcacacgcctgatgagccgaggtacgagccatacctacggtgatcgcgtctccacgcagcacaacagtttcaacaaagagacaattgacgattttattgacattgatgtggcgaaggccaagtgtgatacgattaatcccacccagttccccgagcacgaagaggccctgcgaacgctgcttagatatcttgaaaagtggcttggattgaggacaaacgacatttccgatttctaa

SEQ ID NO: 436883 - DNA, 279 bp, Serratia marcescens
atggtgatgtacgaagtgatttgtcaaaaagatctttattctgaatgggttgtgcgcagtagtctatactggatgactccgcttgcccagtggaaactctgtgaggatatatcctcttggacaatctcttttgaaagcgatagccccgaatgcctctatgaattcgagaggctgctgaatgattacactttgcgagaaaagttacatcataaaacagggactttgagagattctattgtccataaagtgcttcgtagtatcgatgaaaggctttcgtaa

SEQ ID NO: 436884 - DNA, 1164 bp, Serratia marcescens
  misc_feature (1143)..(1152): n is a, c, g, or t
atggataagttgggcgtaaatgaaaatgaaatccgcctgaaaacgtcagacaaggacgaactaggcgatgatgatttgctcagtgatatgtgccctgtgaagtacatcattacgaaagatgcattgcgtgaaggctgggattgtcccttcgcttatgtgttgacagtgttatctaagatgactgcaagaactgcgattacgcaaatgattggtcgggtactgcgccagccgcatgcgcgtttaacgcaaaaaccaagcttagatgaatgttatgtctatacctttgatcaagacgtaatgaatgccgttgccggtgttaaggaaggtttagaagaagaaggtatgggagatgtggcaaatcaggtcaaagcctctgaagctaataagcctgccacagcagtgaccaaagaaactttattgcttagagagcgttttcgctctttacctaaagtatttttgccgagagttttacatcgagataatcgttgtgaagacggctacagattatttgattacgaaagagacgttttaggtgacatagattgggagtcttttttatacctgaatgccgataattttcagttagtcaatgacaagttacaacgtaccattgctcgcatcgactacaaaatgtcaaaagataaccaaggtgaattggatttagctgacccagtgcaagaaaatatagtgtttgatgccaatgtgggattggatatttcctatatggttcgccagcttactgatgttatccccaatccgtggcaagcaatgcggatattaacgcacactttagacatcttgcgtgataatggcgtcactgaagagtcgttgttcaccaatcgccttgaattgctcaaggaaatgaagcgtgatattaaacaacaggttgttcaattgtcggaacaagtcttcagggccaagttggaaaagggagatatttctcttcgattactcgcatccgacaatgacaaactgaattgggaactggcgcaaacgttagaagtaaatatcacggagcatgagcaagtgcttcgtcgcaaagacggctcagagctagaaagaagcttgtttgagaaagtgtaccaaaatggacttaataccctagagcgagaaaccgcctggtatttggataaacaagaatcnnnnnnnnnngtatcgcggtaa

SEQ ID NO: 436885 - DNA, 855 bp, Serratia marcescens
atgactttctggctggatgacgaggctattcagacctggtatgagtcagcaataccttcatcacgggggagacctcaacgctattctgatcttgccatcacgactgtcctggtgattaaacgcgtattccggctgactctgcgggccgcacagggctttattgattccatttttgccctgatgggcgttccgttgcgcagcccggattacaccagtgtcagtaagcgggccaagtcggttaacgtcagttttaaaacgcccactcggggtgaaattgcacacctggtgattgattctaccgggctgaaggtcttcggtgaaggtgagtggaaagtcaaaaagcacggtaaagaacgccgtcgtatctggcggaagctacatctggccgttgacagcaaaacacatgaagtcatctgtgcggacctgtcactgaacaatgtgaccgatgcagaagctttcccgggtctcatcaggcagacctatcgaaaaatcaggtcagccgccgccgacggcgcttacgatacccggttatgtcacgatgaactgcgccgtaagaaaatcagcgcactcattcctccccgaaaaggcgcaggttactggccgggcgagtatgcagaccgcaaccgtgctgttgcgtatcagcggctgagcgggagcaatgcgcggtggaaatggacaacggagtataaccgtcgctcgatagcggaaacggcgatgtacagggtaaaacagctgttcggtggttcactgacgctgcgtgattacgatagtcaggttgcggaggctatggccatggtacgtgcgcagaacaaaataacgaaggctggtatgcctgaaagtgtgcgtatcacctga

SEQ ID NO: 436886 - DNA, 888 bp, Serratia marcescens
gtggccgccagagagtggcatgccagcaatcagaaatggtctgcagcgcatagcgctcgtgtattgaaaagtctcgaagataatctctttgctgccatcggtaagcggaacatttcggaactgaagacccgggatcttcttgtacccattaaagcggtggaatcatccgggcgactcgaagtcgccgctcgattacagcaacgtactactgccattatgcgctttgctgtgcagagtgggttaatcgactacaactccgctcaagagattgccggtgcggttgctacggcgaaaagacagcatcgtgctgctcttgaactgaaccgtattccagaattacttcatcgcatagatcactattctggcaggccgttaacccgactggctgtcgaactcacgttgttagttttcatccgttcaagcgagctgcgttttgctcgttggacagaagtggattttgaaacggccatgtggacgattccgggagagcgtgagccgctggagggggttaaacattctcagcgaggttcgaagatgcggacacctcaccttgttcctttgtcgcggcaggcgttagccattttggaaaagatcaaaagtatgagtggaaaccgtgagctgatcttcattggtgatcacgatccgcgtaaacccatgagtgagaacacggtgaacaaggctctgagagtgatgggctatgacacaaaaaaggaagtctgtgggcatggtttcaggaccatggcttgtagttcactaatagaatcggggttgtggtcgagggatgctgtagaaaggcagatgagccatcaggagcgtagctctgttagggctgcctacatccataaagcggagcatctgggggagcgcaggttgatgctgcagtggtag

SEQ ID NO: 436887 - DNA, 279 bp, Serratia marcescens
atggctctgagtgatgtgaaagttcgtatcgccaaacctgaagcaaaagcttataagctgactgacggtgaaggcatggttttgcttgttcacccgaacggctcaaaatactggcggcttcgctattgctttggcggtaaagagaagatgctggtgttggggaaatatcctgaagtttcgttggcagatgctcgggcacatagggacgaagcccgtaagctattagctaatggtgtcgatcccagtgagaacaagaaagccgttaaggtagagcagtag

SEQ ID NO: 436888 - DNA, 471 bp, Serratia marcescens
atgaacctctacctgcgtttgatctggatcttgctctcttcactgtggaaaccgcgcatgtcgatggatgcgctgaccaaccaactggcgacccgcgtctggctgaatgacatcgatatcaacttgcacatgaacaatggccgctatatgacggtatgcgacctgaaccgggtcgatctgtttattcgcaccggcctgctggcgctaatgctcaaacgacgctggtcaccgatcgtcagtcaacatacgatggactataaaaaagcgctgcggccgttccaacgctatcgggtcagcatgaccattacccattgggacgaacgctacttctatgcgacgcatacgttcagcatcggcgaacgaatcgtcgcgcagggcacttcacaagcagtgattttggggcaggaaggcgtggttgcgcccgaggtggtggtagaaagcgttcgacaatatcagcaggcccgaacatga

SEQ ID NO: 436889 - DNA, 669 bp, Serratia marcescens
ttgcggcaaattttggccaacatcaccatgtttcaaacggctttacacgtgaaagatattgtcggcgtatattggacgctgtttattgaactggtcttttacatcatgtgtgtatttgccttcattctggggttactcaacaaggtaagattcaattttatttctgcgcttgtcatgtttcctgtcgctctgccgcttgcattgtcactcatgatgtttggcggtttatggcgttcatatttgttggaaggcgatctattcgctaaaaaacaggcgatttactatatcgcgatttttgcttgcgtcattccgctagtcagtttctattcctatggttcggagcccgggcatacgatgagatatactttgacgtattatttcagcatgctgctgttcatcctgttgacaacgcggctaaaaattcataacaaattcatggtgctcatgggtgttattagctactctatttatctgattcatcctagcctgttgattgtattcgaacatctgacagctaatttcgataatggcgctcgctatttttgggggagcgtcggggcgactttaactttgccggtttcatatttggtatacaaatatatcgagttgccatcgatccactttggcagaagagttaagtccagcttggtcaaagcgatgcctctctga

SEQ ID NO: 436890 - DNA, 1026 bp, Serratia marcescens
  misc_feature (669)..(678): n is a, c, g, or t
atgattgttgttaatgcacgatttctcacacaagagttaacaggggtgcagcgctttgctgaacagattagcctggcgctacgggaactacgcgacgatatcgtttttgtttcacctggtgacataaagaatacgaaggctgctgagtcgctcaatgtaaaggtggttggacatcgaaccgggcatcaatgggaacaacgagacctgccaaaatatctgaaagccaatggcaatccattgttgatcaatttagggaatactgcgccgctgtggtataagaataaggtcgtgactcatcatgacgtgacttataagaaattcccgcagagctattctagaaagtttcggttgatgtataacctgctgattcccatcatgctaaaaaacagccgtgcactattgaccgttagtgaattttctaaaaaagaaattacgacggcttatggttacaatccgaaaaatacctttgtgatcgccaatgctgtatccgatcttttttctcgcagaagtgtcgagagtgccagcaatactgatgagcgttttctgttggcggtttcttcgcctaactatcataagaactttcatggtttattggccgctttttctgccgcatgtcaaaatacggatgttaaacttaagattatcggtggaaagaataagaatttttcnnnnnnnnnnttcttagggcgagtcaccgatgaagagttggtggcgatttaccaacgcgctttagcgtttgtttttccttcgttctatgaaggctttggtattcctccattggaagcccaagcttgcggatgtcccgtcgtttcgtcgaaccaggcctccttacccgaagtattggcggatagtgccctgtattttaacccgtataagcatcaggaaatggttgatgcactgaatagaattatcaacgatgaatcgttgcgcgaacagctcaaagagaaagggtacaacaacatcggtcattattcctggcttgaatcggccaagaagttggaaaatattatcactcagttgagatag

SEQ ID NO: 436891 - DNA, 1416 bp, Serratia marcescens
atgagtaatatttatcctgtaattatggctggcggtaccggaagccgtttatggcctctttcaagagaattatttccgaaacagtttttagcgttgtgcagtgaattttccatgttgcaaaccacggtcaacagacttgatgggttggagatatcaaacccgctggtgatctgcaatgaagagcaccgttttattgttgcagaacagctgcgacagattactcgtttatcccacaacattattttggagccggttgggcgcaatacggcaccggccattgcactggccgcgttgcaggcgaccgctggcggcgaagatcccttattgctggttttggcagcagatcatgttatccagaatgaggaagcattccgtacggctgtattgcaagcggtgccttatgctgaagcaggaaagctggcgaccttcgggattgtgccgaccggtccggaaacagggtatggttatatccataaaggtgaaagtattgatggggcgcttgcctctcgggtgtcccgctttgttgaaaaaccgaatctgtcgacggctaaagagtatcttgccagcggagaatacttatggaacagcgggatgttcctgtttaaagccagccgttatctcgaggagttgaataaatttcgtccggatattttggctgcgtgtcgtcaggccttgctgcatacggcgccggatctggattttgtccgtgtcgatcgcgaagcctttattctttgcccggatgagtccatagactatgcggtgatggagcagacagcggatgccatcgtggtgccgttggatgcggggtggagcgatgtcggttcctggtcggcgctttgggacatcagtgcgaaagatgcaaacggcaacagcacctttggtgatgtgttgcaacatgattgttcaaataactatattcgtgccgaacataaattggtcgcaacggtaggtgtagataacttggttatcgttgaaaccaaagatgctgtgttgatctcgaataaagataaagtgcaagacgttaaagagatcgtcaatcatctgaaacgtggacagcgttcggaatgcaagcagcatcgtgaggtctaccgcccatggggcaagcatgacgccattgcgcaaggcgagcgttttcaggtacgtaagataacggttaaacctggcgagaaactctcattgcagatgcaccatcatcgttcagagcattgggtggtcgtttctggtaccgccaaagttataaaaggcggtgagacgaagtttgtaactgaaaacgaatctatttatattccattaggtactgaacactcattagagaacccagggaaaattgcattggatttgattgaaattcaatccggctcttatttgggtgaagacgatattattcgcattgatgataatggaaaatacaaataa

SEQ ID NO: 436892 - DNA, 900 bp, Serratia marcescens
atggcttcgctgttaaatacctattgccgggaaacaacttcatggcggttaagccctgccagagaattgcccccctatgtggatcctgttattgcccgatggttagagacgtcccctgatactcttgttcgcttatcagaaatttacggttctccgctcaatattgtttggccgcataccgtggagaataatggcaacgatttgtgtgccactgggcctgcaaaaacaatacgttttttgcaggagttaattctgcagggggcgcggattgttgtggattcagtcgaggaaatggacgatctcatggaggtagctaaacgctggaaaagcccgacaggccggatcagtatactactgcgccttcgccccgcgttcagccataccagccgttttggtatgtcatcccgtgaagtgagtgccgtgcttcagaaactcgagacctgtaatcccttaaaaatcgatggcttccatttccatcttagtggctactcgcccgtatccagagttaacgctttttttgacactttaccgttaattgcctgcgcccgtagtcttggccattccccatgcattatcgatatcgggggaggattgcccgttcagtatgtagaggggaattgctataaggcatggctatcctcacaaacgcaggaaaactatcgtactcgacgggtcccggatgctttctatccctatggtggcgatataaacgctgagcactggctcactcagtttcttggcggcgcggaccctgcgggtaaaagagtctgcgatgcattaatcgatgaaggattaacggcgtatgtcgagtccggcctcacggtgattccggatacgttatttttgtcgagggaagtagcttcagtgcatgcgaaacgtggtttaactctgaattcctaa

SEQ ID NO: 436893 - DNA, 270 bp, Serratia marcescens
atgcaggtcatacgtattctgggcaacaccgcgctgtttcgtggctatccggcggcaataagaaccgatcaggggccggaattcaccagttgcgcactgaatcaatggacctttgagcactgcgtggaactgcggcttatccagtcgagcaagccgtctcagaacggatttattgagagttttaacgggcgatttatagttgagtgtatgaacgagtactggttgagtgatattgttcacgctaggaaaatgattaatgactggcgatag

SEQ ID NO: 436894 - DNA, 3444 bp, Serratia marcescens
atgacactgatgcccaatgaatctgagaattttagagcgggccgagacctcttgcgaagacactggattgaagcaactcccttagtagcggtctgggggcagacagtgggatggtctgctagctaccccgatccaattttagaacgtagctttaagcatacttctcgagaagggaatacatggaagtcacttctcactaatactgctctttcagatgatttctatcattggcttgctgagcgatttttatatagggcagcatcacaatttactatagaagcaagccgtgctccatggtgcgcaatcttcacttcatcaattgataacgggttagcaaattgtcttgctggaaacggccgcgaacctgaaattattttacaaggaaaccctgcccctcgttatttacgaaatagtcgtcgcccacccttttattatctttttgggcaatcaggccaacacctagcttcgttagctccaccatcaacaagacaggccttgaaaatacgtagcagtcaacatgctaatccaatgttgcgccgattattcgaaaccgtaactcctttaggattaatcgttattgatggatatgacccaaataatgattggctaaaagcagatcaacttctcgccgaaatatctgaatcaccaacagaaggggttttgtggtgtggtcaggaacctgacttttcaaatgatgaaaaatttatctacgatgatttggttgaaaggcgaattattatacgctcccccgaaacaataggggaaattgttaatggactaattcaaagtaattctgtacctgagacgttaagctgggatgatcctgaagtagtaactttgaaaaatgggcgaattgtaagaaccaccccaaatttgcgtcttatgactaaggcctctgccaccttaattgatgattcttgggttggtgtattagacccgttttctaagatcgaaacagatgtagcatttgaagttttccattcgacatcttcaagctttagagctatcacagaaggtgttcgccgtgggtttgctattgaacgtggatttgaggatttactttgtaaaaaggttgaacaagctttagaacaacatcatacagcatcatctatcattctacatgggcaatctggtgtaggtaagacaattgctcttgcccgcctcgccgtttatgctaaacataaaggatatgcggttttatttattaatcgccaaatacctcaagcatcagatttaagtactttcctcgcagaagtagatcatgaagatggtgttacgttattattggtcgatacaatgtctgctgtgtcaagatatgatgaacttcttcgttcattacgtagtgttggtcatcgcgttgtagttgtaggctcctcataccgcctcgaattagaggggaaaattcaaagcagattcatagaggctaaagcattacttaataaagatgaacaagatcaactcattaaattggctagcagttttattcctaaattagtaaatactataaaaaaagaaacttctaatcaatatgttctagcagggttttatcgactcctcccaagtagtagaggtagtctctccgctgggctaacaagagaagttgatagtactcgaattgatttacgaaaccgttctaagttgacaactactgtccaacttggaagtgttgctcaagcgcttattaatgctggctaccctactaataatttaactcaaaaaatgacgggtgacaaaaatatatcagaagaatcatcggaagccaaagctattgatctcgtaatgattagcagtcggctttttaaagccgtgccacttagcattgtccttcgtgcaataagtactgatgagaagatgtacggttcatttaatattgataatatgttagccttaatccgtaaccaagatcttttccgctggatttatgtcgatgaacaacagaccgacattcttgtacaggcgcgcctgcaaattgaagcacgtttaatctgtgaaaatcgttttggtagtgctaaacgtgaagctgatgcactatgctgtctaattttagccgctacacgtgctggatctgagtcaaatgacgaaacgtcctatattgcagatttggttcacgcggctggtcctgatggtccagagggtgagcgttatagtgaaagctatgcttcaatagcccgtgctctaactaaacttcgcgaattaacggggatacctaacgctcgcctaatgttgcaagagtcagtgcttcgtcgtcattatttaaggactcaaaaatcaatagaccaatctcagaaaattgagctattagatgaggctgtaactgtcgttgatgaagctttgagtcggatcaatgacaatggcaataatggaatcattgcttctctcaaaacgattgacaatctttggaatgaacgggctgctacatacggttttgtggctacagataaagttcaaaatggtcaaaacgacgtagcttacgctgcttataaagcggctcatgaagctgctatgctagctaaagccagacgggattcatctttttctattgacgtttcattatggatacctataggcatacttcgccaaggccaaaatctcacggaaattcagagattagaaatttctgctgatctcagttcaagtattgattcagtcgacgaaagtatgttggatgcaaatcagtgggaaaaattccagtcacgccgcatggatgccggttcaacaatgggagattttgctatatcagacgatgcctttaaacgccttgatgaggccggatcaaccgcaggctattttattcgcgcacgcgaattggcaccagatatgcatgttaaaaatgaacctacggcagaagatataataaaggctcaatcctgtgtggtatatcttcgcagtaattatgacaaaattaataaagatgagcgttgtctgaaactacttcttgatatggagtgggcaagtcgcacaaaaaaatggttaatgcgaggtctgagacaaccattcccaacagatattaccacaaaaaatattatacaagatattgtagggaatttggcaacgtttggtgaagaaaaactagccactaaatatagatatttgcgggcactaactacttggcttgaaggcaatcaaaagatgagtaatcttctgtgggctgaattgggggcggagactcagtttgctgattcacaacgtgtttctgtacgacatgttttgactgatgaaacgggcaaccctgttatgtacagaggcgttattgaaaaacaaattggggtaggccgctactctgtccgtgtagaagagttgggaatgcatatcgattgtattgctagttacttccctaatgtagatatttctatcggccgtattattacaaactttgttatcgcctttaattatcgaggtccattagctgaaccccttagtggactgaggagggtaatgcaatga

SEQ ID NO: 436895 - DNA, 744 bp, Serratia marcescens
atgagtttttcagaactggaagctgctgcgaaaaagtttactaacttaatcaacggggatttggaaattgaattcattcaacctgtgaccttagtgactccatcatctccgctggatcaattccatttcatgcagttggttgtatggtgctatggttttttcttcgaggcagccaacgaagccttgaaggaatgtaaagctcttatgaaacaaggtaatcctcagcatacaaacgaattcgaacaaggccatcgattagtcaatcaattgagaacatataaagttcataacttaccacctagcaaaactaacaattacacacgtaaatgtgttgagacttggttagctcaattcaatgaagatactagtaggcaccagcgagcttgtgaaaacctatacaatacagcgttatcaatgattaattatgctactgaagcttggataggtgcgactcaagatcctaaagatgctaagcagttatttaagcgtgtaatggacgcatttgaaaataattgggctacccacgagttatctcaaattgcttatgaaattgcagaagaaatcaatctatctggatttgatgcaaaggaattctgtaattgtcaccttgatgaatggcgtaagactgccggttgcttctttaatagagaatcagctgaagcaggtatccggcgaaccattcgattgacgatatacaatttatttgggcagagtgcttacggggttataagtaccaaacactaa

SEQ ID NO: 436896 - DNA, 375 bp, Serratia marcescens
atgagttatgctgattcaaccaatccgaacgcccctgtatccatgacagataaatgggataaaacgttcgccgagagccagaaagtcgatcatcgtaaagtctcgttccagaatcgatatggcatcaccttagtgggcgatctttacctgcccaaagatcgcggcgatcgcaagctggcggcgattgcggtcagtgggccttttggcgcggtgaaagagcaatccagcggactgtatgcgcagacgctggcggaacaaggtttattaccctggcgtttgatccctcttacacgggggaaagcggcggctatccgcgaaacgtcgcctcaccggatatcaatacggaagatttcagcgcggcggtggatttcttag

SEQ ID NO: 436897 - DNA, 888 bp, Serratia marcescens
atgtttataaccaaagtcattgaggagctgctcgcctgggtggaagaaagtgggttcaatgagaagcttaccgttgagatgctgtcagaaaaaagcggatattcacgcgggcatatccaaaaagcgtttaaagatgaaacagggatgactttcggaagctatgtgaggggcagaaaactcattcgcgccgcatttatgttgaaagcgacgaacctctctatttccgatatcgttaaagcgctgaactttcagtcatatcaatcctttgaacgggcctttcgcaagcaattcagaacctcgccgatgcagtatcgaaaaagtaaatcgtgggacgtgtcctccgccatcccattgctgtttctcgacggcattcccgagcatcgctatgtgcacctgccaaaatttttcgacgattcaggggatggcgttgatgcagagatatatcacttccatcctgcggtttccgcgctgcgattggcggcaattgataacatgaaaaaaacggatagcggcgtgattaattttttcaattttggcgcgagcatcaggaaagagaattacgtcagcatctatttgaagaccctctatatttctgaagaagactgtcttggcaacgtgcttgcctccctggccgacgcccagggaaaaaaagacatgcaactttttgcagagttcagttttgatggcgcaagcgatgaggcgcaaaaattcacgcaaagcatctacaccaaatcattcccgataaataaagttggcatgatcgatcgctttctcattgaaattatcacccccaaaggcggcgatagaatagagatgaagacctatattcccattgtcttcccgatcaaacacagagagaaagaggtagcgccagggccagagcggtaa

SEQ ID NO: 436898 - DNA, 2370 bp, Serratia marcescens
atgcaaaaagcgcataggacacgggacgggaaaaaatacctcctgtggtttcttgccgggctgatgttcatcatcggtctggctatctgccttctcggcgccagattggccttcgtcggcggaacgttttatttcttggcgatgggtctggcgatgattatagccgccagcctgattgctcgccgtcgtcgcagcggcataatcctgtacgcgctcgccttcaccgtctccctgttttgggccattgccgatgccggctggcattactggccgctgttctcgcgccttttcaccctcggtgttttagcgtttctttgcgctatcgcctggccattaatgcccggtcattcgatcaacaaaggcccagctttcagtttagcggcgttcctcgccatcggactaggagtcagcttcggatggatgttcagtttccaacctctggtcagcgcgacgaaaaccatccccgtgtttccggtaaccgccgacaagcaacagaagaattgggaacactggggaaataccccttacggcgatcgcttcgccgcacttgaccaaataaacaagcagaacgtttcccgattgcaggtggcctggacagcccataccggcgatatccccgcgagcaaaggttctggtgcggaagatcagaatacacccttgcagatcggcgacacgctgtatgtctgtactccatacagtaaagtgttggctttagatgtggataacggaaaagaaaaatggcgtttcgatccgcaagccgcctcgccgaactggcagcgctgccggggcctgggttactacgagaatcacgccacaccagcggtaacaaccccgagtcgcccacccgcgctctgttcgcgccgtttgttcctgcccacgattgatgcccgactcatcgcccttgatgccgacacggggaaattgtgcgacgcctttggcgatcgcggtaccgtcgatctcggtagtggcatgggcgaaatcaaaccgggctattatcaacaaacctccacgccgctggtagccggagacgtcgtcgtcgtggggggacgcgtagcggataacttttccactgacgaacctcccggcgttgttcgagcttatgatgtccactccggcaacctcgtgtgggcctgggatcctggcaatcctgaactgcgcggcctgccgccggaggggcaaacctatactcgcggtacaccgaatgtctggtcagccatgtcctatgacaaacaattgaacttaatctatttacccacaggcaacgcgacacctgactttttcggtggcactcgtagcgcactggacgataaatacagctccgccgttgtcgccatagacgccgctaccggtaaagtgcgctggcactaccagaccacacaccacgatttgtgggacttcgatctgccatcacagccactcttgttcgatttgccgaacggcaaaggtggcattacgccggttctggtgcaaaccagcaagcagggcatgattttcatgctcaaccgtgtaaacggcgaacccgtcgcgcaagttgaggaacgccctgtaccggcggggatcatcaagggtgaacgctattcccccacccagccgtactcagtgggaatgccgatgatgggcaatgaacaattgaaagagtcggatatgtggggcgcaacgctgattgacctgctgctatgccgtattcagtttaaagaaatgcgctatcagggcattttcaccccaccgggtgaagaccgcgcccttcaatacccaggatctctgggggggatgaactggggcagcgtctccgtggatccacacaataaccttatgttcgtcaatgatatgcgcctgggattggcacattatctggtgccgaggaataaggttccaaccaacgccagcggcatagaaatgggaatagtcccgatggaaggcaccccgttcggggccatgcgagaacggttcctctccccgttggggatcccctgccagaaaccgccgttcggcacgatgtccgccgtagacctgactagcggcaaattggtgtggcaggtccctgtagggacagtcgaagatactgggccgcttggcatcagcatgcggatgcctatccctatcggcatgccaacgctgggcgcgtcgctgtcgacacagtcaggtctcctgtttttcgccggcacgcaggatttctatttacgcgcctttgataccgccaacggtaaagagatttggaagtcgcgcttgccggtaggtagccaatccggcccgatgacttacctctcgccgaaaaccggcaaacagtacattgtcatcaatgcggggggcgcacgccaatcacagatgcgcggtgactacattatcgcttatgcgctaccggacaagtaa

SEQ ID NO: 436899 - DNA, 1377 bp, Serratia marcescens
atgtcgggaaacaacgcaatcaatgttcgggcgctgatcgacgaccgcccgttaggcaaatggcaaaagatgatcgtgctgctcggcttttgcatcattgctctggatggattcgatatcgttatcatgggatttattgcgccagagcttaaggcggattggcaaatcactaaccgcgaactggggctggtgatcagcgcggcgctgattggcctgtcgctgggcgcgatgctatccggaccattgtcagacagattcggccgcaaagtcgtcatcatcaacagcgtattcttttttggcgtttggacgctggtgacggcgttttctcaaaatatggagcagatgatgttatttcgcctgctcaccggattggggctcggcgccgccatgccgaatgtcggcaccctggtggcggagttcgcgcccgcccgacgccgcgctttcttgattaccgtggttttctgcggcttcacctttggcgccgccttgggcggattcgccgcgtcctggctgatgccgcgcttcggctggcatgccgtgctgctgcttggcgggatcttgcccctgctgttcgcgcccgtgctgatggcggcgttacccgaatcggtgtgtttcctggtggcgaaacgggcagatcagggcggcattcagcacattctggcgaaactggcgcccgatcgcgattttcgacattctaccgtcgttctgcccccgccgggccaggtctgcactcatccggttaaactggtagtgagcgcacggtaccgcttcggcagtttaatgctgtggggcgcgtattttagcgcgctgtttctgtactacaccttaggcagttggctgccactgctgattaaagacagcggtttcaacatcgcgcaagcggcggtcatcaccgcgctgtttcaggcgggcgggacattaggatcgctattttccgggtgggtgatggacagatccgaaccacatcgcgcgttggcgtcgatttatgggttgggggcgctgttcactctgctgatggggatggcaatgggttaccccctcctgatgggcggctgcgcgatggccatcgggttctgcatcgggggcgccaacaccggcatgaacgcgttgtcggccagcttttaccccaccgaagcgcgagccaccggctccagctggatgcacggcatcggccgtttgggcgctatcttaagcgcgctggccggggctgaaatgctggcgctcggttggagcttcagcaccattttcgccgtcctggcgcttcccgccctgctgacggtggcgatgatcgtcgctaaacggcgtcatcaggcgcgtcaagcgacagagcatcaatataccgcctgctttgacgcgcgttcaaatgacattcgctga

SEQ ID NO: 436900 - DNA, 1896 bp, Serratia marcescens
atgaaacgttctatcgcgacggtctcggtatcgggttcgctgccggaaaaactgcgggctatcgccgccgcaggctttgatggcgtcgaaattttcgataacgatctggtctactaccccggctcaccggcggaaatccgtgagttgtgcgccgaactgggcctggaaattttactgttccaaccgtttcgggacttcgaaggaggctcgcgcgaaacgctggcgcagaacctttcccgcgcggcgcgcaagttcgaagtcatgcagcaactgggctgttctcgcatgctgctctgcagcaatgtctcgcccgacagcagcgaagacatggccacgcaagtgagcgatttgcgcgcgttggcggagttggccgccgagtatgatattactgtcggttatgaagcgctggcctggggacgtcacgtgaatatgtggcgcgacgcctgggcgcgcgtgaaggccgtagatcatccggtgttggggatcatactcgatagttttcatatcctgtcgcgcggcgataacctcgatggcctcgaggacgtgccgcccgaaaaaatcgtgtttgtccaactggcggacgccccgctgttgaagatggatgtgctcgcctggagtcgccatttccgctgcttccccggccaaggggagctgaatctgacccagttcatgacccaactttccgcgcatggctatcgcggcgcctggtcgctggagatatttaacgatggtttccgcgcctcgccggtgctccccacggcccaggacggtttccgatcgttgttgtggctggaggagcaaacctatgactggttggccaaacagcctctgctacccaacgccatggcctcgctcatggaacgttccttattccattcgcagccgcatccgcccttgctggcgctggagtttatcgaatttgccgtctcgcacaacgacgggctggcgatgggccaatggctgacgcagctgggattggttcacgccggcgagcaccgctccaaaagcgtcgccctctatcgcaacggcaaagtgaatgtcattctgaatgcccagccggaaagtcaggccagcggctattatcacctgcacggcatttccctgtgcgccgtggcgtggcgggtgcgcggcgtagcgcgtttactgcaacgggcgcaagactacgggtacgccatctggcaaggagaaaccggccccaacgagcggcaaatccccgcgctgtgcgcaccggacggcagcctgatttatctggtggaagcggacgaagatcccaagaacgatatttatcacgctgattttcatctgactcatcgcagcgcgccgccgcccgcgctgcaaagcatcgatcacctggcgattgcgctggcggatgaatcgagcggcaactggatcatgttcctgcgcagcgtgccgggttttgtgcaggacaacgagtgggaattgcccgatccgctgggtttggttcgcagccgcgtcttgcgcagccccaacgacgccatccggctgccgctgaatatgtcggtgagccgggaaacgcaaatcgcccaggcgctaaccgcctatcagggcgcaggcttgcagcacgtcgcctttggctgcgaggatctgttcagcatggtgaaagcggcgcaggcgcgcggattaaaaacgctgcgtattcccgataactactatcacgatctcagagcgcgtttcgatctcgaccccgctttcctctcacagctgcaagcgggcaatgtgctctacgatcgagacgatcagggcggtgaattgctgcatgtctacaccgtgccctatgaaaaaggccgcttcttcttcgaacttctggagcgccgaggcggctaccgcggctttggggccgccaacgccccggttcggctcaccgccatgcattaa

SEQ ID NO: 436901 - DNA, 2220 bp, Serratia marcescens
atggagcttaaactaaaaaacatcacaagttataagaaagatagtttcacaaccttgaatctttccaaaaaaataaacatcatatatgggcataacggctgtggaaagtctaccatatcaaactttttctacaacactaaaaatacagattacaatgaatgcgagtgctctttgttggaaaacttccgtccactagtttataactcgaagtttatagaagacaatttttataacacaaaagaacaaaaaggtgtatttacactaagcaaagagaatgccgacatagaaaggcagttgttagaaaaggaagcattaagaaaagagctcggcgagcaatacaaaaacaaacaagaaataatttcaaaactccaacaagaaagagataacaaagaaacagacaccattgaatctgtatgggtaaaaacagaggcagtgagagcatctgatttaaaaattttaatgagaggccaagtaggaagtaaaagagtattctttacccaagtaaaaaaaacgcctagaatacccggtataaatcttgagtccttagcaagcgagtatagcgaactattaaaacataaaaacaaagaaataccattaataccttccttaacagtatttagcatttcgagagaagacagtgagctgttatcaacccccattatcgactcaagtaacagttatttatctgaaaatatcaaaaaacttcaaaaccttgattggataaaaaaaggtaaggagttttatataaatggaaaatcctgcccattctgccaagaagacactataacaacagagttcaaagaggcaatagagtctatttttgatgaaacttactctcgtaaagttgaaaaaatagcgctattcaagtcagcatatgaaatggcaacggagcagcacctaaaaaaaatagcacaggacatagcttcttgtgaaataattgatgaaaaagaaaaagaagtgaccatttcccacatcagaatattagagaaaaacgccgataaaaactcaaaattaatattggaaaaaataaacaacccatcgacaaatgtgatattaacaaatgatacttctactgaagaaaaagtcatctcctatatagatgcgtacaatgaaaaaataaaagagataaatataaaagttaacaagttcaaggaaagtgaaaattcaataaaaaacaaagtatggggagcaataagagatttttgcaaccatgaacttgagttattatcaaaacatgatgaaagacatgaagccaaccttggaaaagaaagcgcggagttgataaatatatccagcaaaggcgaagaaaacaccattaaaataagagagcttcgcaatcagatatctaacatcgatgcgaccattgattcaataaacttgcgactaaaaaacttagggatatatggattcagcattaaaaaacacaataaaagtgaagataaatacatcatatctcgctctgaaacagttgaaaaccaagatgtatataaatccctgagcgaaggagagaaaacattaataactttcctttattttttggagtgctgtaaagggagaacagataaaaatgactcagatatgcgaaactctttcattgtaattgatgaccctatatccagtctttctcaaaattatgtttacgacatcgcatccatcattcaccatgagatcataaaaaatgagcatgcaaataaagtattgatactcacgcacaacctttactttttccatgagctcataaaattagcgcccaaaagcaaagaggacaggaaatttaaacgtgattactaccttgcgagagtaaccaaaaatgaattcagcataattactgaaatagataaaagcagcatccaaaatgagtaccaatcattatggcaggtgctaaaagacgctaaagaggggcgggttaacagaataataataccaaatatcatgagaaatatattagagtattactttgcttttgttcacagaacagatgctttacaggatgagttaataaaccttgccaatgatgataacaacagcgatttccgagcattctaccgatatatcaacagaggttcacactctgatgcaataaatattaccgacatgggggatattgacccagaaaaatatattgggcagttaaagaaaatattctcaataactggccatgaaaaacattacttaaaaatgatggacgctgaagatgaggaggaggttgttaccgcttag

SEQ ID NO: 436902 - DNA, 1053 bp, Serratia marcescens
atgaatgtcattggcgctttcagttctgatagtcgtgagcagtataaagctgatatatataaagttctttgcctgcctaaatatgaggtcgtgcattttcgatataaagaaaaatatattgaaaattaccttattgtgcaacaagcggctttagatggctgggatgtggttatatttttgtcgcaaggtaattctttgtcggatcctaaagcacaaagtgatttaaaaaatatctccgtgaggaaagctagaataataagtcttaaatggagtaacgatactgaagtttatcatgttcgactgcaactcttagatttcattaatgttagtatagatgctgttgatggcgaagatgagcttaaagataaatattttaagagaataaacattacggagtcggatgagggtaacacatggaagtcaagggtcgaagcagtcaaaaattcatttcaagggatgagcttttttaatattcaaggaatatatgattctagtaataaattattaaagccgaagtacaataaagacagtcaatcttgcagctatgatttatatcatgataataaatatattataaaaatgtcattgggtaatcctagcgctgcaaacacaaagttgcaattggattataacgcaagcgatattatcataacgcacagcaatccaatcgaaagctctgttgaatatgatgatattaacattcctgtcaatgttaagacaatacctgtttttaaactttcaacatttctttcaataaaaataaaaactcaaaaagatgtaaaaaaccataggattgggagagttttaaaatggaagggccgacttcatgaacgcaactttgatgaatatgtaataacccaagagtttaatttgaaattgaattttttaaaagctgctggcttcgggcttttgacactgatagctgtggttggggcaaagattgcttcagacgaaaacttcgttagctttattccatcttttaagcttgtattgtctggtgttctagtattcatttcagcttcaggtttattttatctttttaacaaaaaatag

SEQ ID NO: 436903 - DNA, 165 bp, Serratia marcescens
atggttcccgttttttattattccaattgcaacgattatcaaaacgttatcaaaataagttatcaaaattacctttggatatattttgctattatttattatgtaattgaattttttatttattttagtaagatattgatagatgtaatctatacgtgcttttga

SEQ ID NO: 436904 - DNA, 321 bp, Serratia marcescens
gtggatattaaacagaaagtcaaaaacatgacgctggaagagaagatcgggcaaaaaatcatgctggattttcgctactgggatcagaacggtagcagcaatcaggatatgaccgttcccgatgcagccattggcaagctgatcaccgataaccacataggtggggtgatcctgtttgccaataatctgaaagacaagcagcagatcaaaacgctgacggcctggtatgccgcgatgaaaacgcacgccggcgttcgtttgtttattggtacggataacgaaggcggtaacgttttccggctgccgcgcggcgacgattga

SEQ ID NO: 436905 - DNA, 702 bp, Serratia marcescens
atggtgcgaatcgtcgtttggcaactggcggtcatcggccaaggcctgacgtgcggccgcaaggcggctcatgacggtgccgattggcaccgccagcactttcgccgcttcccggtaggacagcccttcgacatacaccaaaaacagcgcgttgcgctgggccgccggcagccggtttacgcgccgcatcacttcattgagccagactggctgttcaccgttgtccgcatcgccaagctcttccgccgccatgcagccttgcccctggcgaagatgctgggcgcgaacttcattgagccagatggagtgcaggatggaaaacaaccagcgatccaggtgagaaccgggggtgaattgcgcggcgcgttccagcgcacgcacgcaggtcgcctgcaccagatcgtcggcgatatcccgccggtgcgaaagcaccagcgcatagcgccacaggcgggagagatagtggccgagttcatcgcgtatcgcatcgccgctgatagtcacctccgcaggcgcgtcggatcaagattccgggtggcggtcgatggctgccgccaaatcacggtactcctcgcacccggtgccgcacagcgactggatcacctgcagctgttggcgcgccaggtcgggccgccctttcagcatataggcttcccccaggtactcgcgcactttggggtatttcggatcgagggcgactga

SEQ ID NO: 436906 - DNA, 1014 bp, Serratia marcescens
atgagtattgatcattcctttttgattggtactgatggtgtgaatgatttaaagttaaatatatctggactggattctgattctcgagatgtatctaatttgagctttaatttttttgcacattgttcgaatacaggcgcacctagatttacttgtcaattagagattggtcacttaagatcattatatagatacctttcacaatatagtgttatccgtgaagacacctccaactctacgggccgttttgttgaggttgacagtaatcatcaagagattatgcagttattagaacatgcggataacacttcacttgttttagctcttcagcacgtgattagtaatcggcttactaatgacgatataaatactattttaggaagaaaagatgctctaaatgaataccaaggaatgtatggcgatcctgataacttcaatgagcctcattggcaaagattttttgaaaggaatgaatggatatttggctatggtctaaggtacaaatatttaagtattctacaacgtgaggctcatttatcgcatacagatttaaatggttccaatgacgtcatcgctgattttttaatgtcagatgcaagatttactaagatcgtagaattaaaaacacctcagactaatttatttgtaaatagacaaaatagagcggactcttggaggctatcgagtgaactgacagatgcggttagtcagattcttgctcaaaaggccaattgggaaattgagagtcaaagggataattatacggctgctggtgagctaatttcagagagaacacatgatgctgaatgtatactgattatcggaaatttaggctctattgagggtagtgaaagagaaaaggctattaaaagaaaaactttcgagctttacagaaggaacttaaagaacattgatattatttgctatgatgagcttctcgaacgagcaaggtttattgtacgaagtgcagagttacttgaagatgcgattggtgatgctttagctcctgagtaa

SEQ ID NO: 436907 - DNA, 657 bp, Serratia marcescens
gtgaaattagatgggttagaagtatttcaagagttagttataaaagtgagtattgacctatcatcagctcgtgaaaaaatcctcagcaaggttagtgcaccttggattaatatgatagaagaggagcgggaaataagaggtgcggctattgatgatgaggatgttatcgttttttcaagagagtctttcgataatgtagatgagtcaagcctaatactttggcaagatggcaatggttatcgtgtcgcgaatatagttccaaaaaatgtaggtgatttaggtattaaaaaatataactcaatacttcgtgatttttacgaaaaaatcatttacccgttggttaaagaagaagggttcaatgttactatttcatcaaacacacaatcacttgatgattggttggatgagccaactgcgaattctttaaatctattttcaagaatggcaaacaaatacacaggtgcttcacacccactagatgaacagcgctggtatgatttcctaattaatgctcataaatcctctgcttcattagaggcggggcagttatctcgctggttgattgaggttgatagttggcctgatgaaatagctagagagttagctattaattatgagttcgctagaggtttactgaaaacttacgacgaaaagtaa

SEQ ID NO: 436908 - DNA, 705 bp, Serratia marcescens
atgatgactaaaaatattgattttagaaatctagctggaatgggaaaacctattttattcttagacacttgctcttttcttgatattattagggatataactagagaaactgtgacaaagagtaatgttgaagcaagttttcacttgctaaaaaaagcagaggaagatcagggtcttatagtattaatggctgaacaagtgatgcatgagctaaacgataatgaatctcatgtggaaaatgaggcaaatagatctcttgtgaaatttaagagccaggcgattcgtgtaaatgatgtagcctctttgtttggttctcgaaacaatttagacgtgggacatctcgatacacatgtagttagagcaaagagtatattaaaaagatggaaagatgtatcttatttgattcctcaagttgagagtattccacaacgtgccttcctaagggtaatgagtgcccgaacgccgtcacgaaaagggaaggaatcaatgaaagactgtgttgtgacagaaagttatctagatattgccgctaaattgcgaattttagggttaacgtctcccatagtttttacttcatcaaatacaaaagattactattcacctaatacgcccaaattatcagatgatattaatgatgatttcaaagagttcaatatcgattatgctccaaacttcggggcggctaaatatcttttaggggtttaa

SEQ ID NO: 436909 - DNA, 801 bp, Serratia marcescens
atgcgcggctttgaaaacaacgtattcccttacatcggtaaacggccaatcgatcaaatcgccccgttggagttgcttaccgttttgcaaaagatagaaaggcgtggtgcactggagctaacaagtaaggtcagaaggcgctgtggtgaagttttccgttacgctgtagtaaccggtcgagctacctataatccggcaccagatctggctagcgcgctgaataagcctaagaacggtcattaccctttcttaactgaaagtgaattgccagagtttatgcacgtactcaataactaccaaggtagtaaactaacgaaatatgctacgcaactgctaatcctaaccggcgttcgcactatagaactacgcgctgccgaatgctcagagttcgattttgagaatgcattgtgggaagtgccaaaagaacggatgaagaagcgccgtcctcacctggtgccgctttcaactcaagctttagagatcctggaaaaactaaaaatactcacagggcgttattcgttgctgttccctggccgaaacgatgcacgtaagccaatgagtgaagccagcatcaacaaagtgatcaaaatgctaggttatcatagccgagctactgggcacggtttccgccatacaatgagcaccatcttgcatgaatatggctttgagagcgcttggattgaaatgcaacttgcgcatgttgataagaactctatccgaggaacttacaatcatgcgcaatatttagaaggccgaagaaaaatgttgcaattctacgctaacaacatattaaacccctaa

SEQ ID NO: 436910 - DNA, 297 bp, Serratia marcescens
atggcggtagcggaagtccgggaagctctggccggtggagtatacacctttgtctaccgaacggatattcgcggctattaccgacacatccgtaaacagcaggtgattaatcaactgaaatggcaggtggccgacccggtgctgttcgatatgatgcagcaatacgtgcattactgcgccgaggagggcggtgagttttataccccgctcagaggcatctaccggatagataaaatactgagacatgactcatgtgaaacatttcctttatgttgtggtgctagtactccggcgtaa

SEQ ID NO: 436911 - DNA, 228 bp, Serratia marcescens
atggcaaacaagcacttaacccaatcaccggtaggtgagtttgttatgtttgccagcgatgatggcgaagtgcgcgttgaatgtcgatttgagcaagaaacgcgagcgaccatcgcgtttctttatcaagtgactccccaggcgattacgcaacatatcaaagcgatctgcgaagaagctgaacttgaacaaaacgcaacctgtaagtcttacttacaggttcaatag

SEQ ID NO: 436912 - DNA, 1497 bp, Serratia marcescens
ttgaacgaagtaactatcactctgagtcagcttgaaaaccatctttgggagtcagcaaatatcttaagaggtcccgttgatgctgctgattttaaaacatatattttcccgctacttttctttaaacgcatctgtgatgtatgggatgaagaattcaaagaaattcttgtcgaatcgggtgatgaatccttggcacattttcccgaatcccatcgttttcagatccctgatgattgccactggaatgatattcgctccaaagcggtaaatgtgggggctgctctccagcgggctatgcgtgagattgaaaaggctaacccagagaccctgtacggcgtttttggtgatgctcaatggtcaaataaagaaagactttcagatgctttgcttaaagatcttatcgagcacttttcaaaattcccatttggtaataagaacatcaactctgatctacttggtgatgcgtatgaatacttgatcaagaagtttgcagacgcaacgaacaaaaaagccggggagttttataccccgcgaagcgtcgtccggttgatgatcgacatgctctctcctgaggaaacggataccatttatgacccagcctgtggtacaggcggtatgctattagcagccgtacagcatgtgagagagaagcatggcgatgtgaaacgtctttggggcaagctctttggacaagaaaaaaatctgacaacatcatctattgcccgcatgaacctgttcctgcacggcatagaagactttcaggtggttcgcgatgatactttacgtaatcccgcttttttcgatggtgaccaacttgccacattcgattgtgtgattgccaatcccccattctcacttgaaaaatggggtgatgaactttgggtaaatgatccctttgggcgaaactttgctggtcttcctcctacaagcagcggcgactttgcttgggttcagcatatggtcaaatccatggcagaaggctcggggcgaatggctgtagttctgcctcaaggggcattattccgcaaggggacagaaggtagtattcgccaaaagctattacaaatggatcttattgaggccgttatagggctagcccctaatttgttttatggcaccggtttagccgcctgtattctggtattgcgtaagaaaaaacgtgcagatatgagtcgtaaagtcatgattgcggatgcctcccggttattcaaacgcggtagagctcagaactttttggaacctcaacatgctgccgaaattttacagtggtataaaaatttcagtgatgttaaggacgttgtacgtattgtagacttggcagacattgaagctgaagactggacgttgaatatttcacgttatgtcctgcctccttcgcaagacgatattccttcacttccggatgctgtcgaagcgttcaaaacggcgcttactcgttgtcgcaatacagaagagcgacttgcccaggtcatggacgaagggggatggttgaaatga

SEQ ID NO: 436913 - DNA, 999 bp, Serratia marcescens
atggctttagctcattgcatttgcccaagttttatttctgcacatattggagatacaggggtttttactggtgtcttcatgggtaagtttttgcaatctcaggatcagatcatattagatgatgatggtgagttaatgtgcaaatacgttgagagtatccaagatgatcaatcaaaatacgaggtttttaaagtttggcgaatgttactagaaaactcgagtaatggaaagctgttactaactcatgttaatgaaactgatagtacatctcatttaatttattcgctaataacaagttcagcaacaacgtttcgtaaaaatataattacaagtgataataactcctatgctgaatatattggtgagttaaaccggcagagggttaacttactaaacttacaaaacttagacactacggtggtacagatggtaacaaaaagagaaattaactatgatgattttgataatgatttgggctggattcttcaaagattgattagacgctactctcgatctcatagtgaggatgaaagtaatgattttttgagagatatgctactttcaaaacattatgaagttaaagatcagtctcgagaaggggagtcatcctccggtcagcaagcgggggagctagatttattaatcgaaagtgatcaatccctttttagtattattgaagcaatgcgcttagagaatgtaaatactaattatattaatacccactataagaagttgcttaaaaattacaatccgctaatggtaaaggtaacattcttagtcagttattatgagggggctagatttgatctttggtgggagcgctatgtacaacatatatcatctatagaaaacgcacatcttgaattggatgacgcttatcagataaatagtatagagcgcatcgattcgccgtatttaggattgaagaaatgcatacatcatttttattatggcagtgagcattttgcatgtatacactatggtgtaaaatgcaagtga

SEQ ID NO: 436914 - DNA, 1677 bp, Serratia marcescens
atgctcaaaagtttttctggaagaaattacaaggcatttagtgaatttgagctatcactaaagcccttaacaattttgctaggcgcaaatagttgtggaaaaagtgcgctaattaactcttttttaatgttatcacagacattagatgcaacatcattttccgagtcagcgctacgattgaatggaaataaagttggtatgggagaggcattaaatttagtgaaagataaaaagccagatacaatgttatctttcagctttacatttgatgatgataaagaattaaaaaaagagttagatagtataaagcgtgattctacagaggctcactttatgattgtgcgctacatggcgcatttgtttaggcaaaataaagatatatattcatcattgcaaaagtcactcgatgaaattgaaagtatctatgttagcagcgataggttcaatacgaatcagttgggttcaattgctgataaattttgcactttattaaaagtataccgtaaaataaaaggcgaactaaaaagaaatcggtatgcagcagatcctattcaagagtttatggataatacgtctctgaaaaaaataagagattgtctaaccaagctattacctgtttcagtcaataaatatgcagcaagtcgcatagattatgacttcaaatacaatggcgggtctaagaacttatcagttaaaaaaataagtcttgttaataaatttgaagaaataatagcatctatttcaatagatggaaggaataaaatttctatcacatcagatatcattgacgatactattttaagaaactctaaaaaggacataaggtcattattgaatcctgattcattttacctattcaacattaattattcacgttatacaccgtttgtatttttcagtgactcgccaaatccagtagcatcatttttctgtcgaatggttcatgtttcactcaaacggttagggcatgagttttcgggaactaacataaaccacgtaagtcctttgagagctttcccgcaaagatattatcttttagataagtctatacagcatactcaattgaatgcattagatggaactgagttagctgaagttcttaaaaagaatttatctattcgagatgaaattaacaagttgcttgctgaatttagcatcgcaattgatgttgaaaaagtaaatgatattattcacaaaataacagttaatcaggatgctgttaatttagagttaactgatgttggttttggcatatcgcaagttttaccaatacttgtacaagcatttttatccccaaagaactcgataacaattatagaacaacctgagatccatctccatcctaaaatgcaggcttggcttactgatgcactaattaaaattgctttagagggagaaaagcgttttttgattgaaacacatagtgatgctttagttcgaagggtcagattgagaatcgttgatgaagactgtcagttaacagaaaaagatgtagcaatatatcatctagaaaggaataagattaaaggttttacctcattaaatataataccgatatcatcagatggggatattacttggccgaaagatttcatggatgtagagattagagacacacttatgatccaacaatttaaaatgcagaaaagcataaataataaaaaagggatccactaa

SEQ ID NO: 436915 - DNA, 2286 bp, Serratia marcescens
  misc_feature (2225)..(2234): n is a, c, g, or t
atgttggatttttcactaacacaaaaggggtgggtcttgccgattgtccttaatgcgtttccactgaaagtccctgaattggagttgacatttgtccagataccctacgacaagacgactctagatagcctccgatcctcccataaagtgacgcacgtcttccggcgtcagggtgacaatattcagatcttttcgagtgatggtacgttccccaaatctggtacaccgcagacactgcaactaaaggataatttgggaaccttttgctctctggttaaagatggtctgctcaagcacttcgctgggttgggtcgaactccttgcggcttcaatcctatcgaggtggtaagtgccaaaccaaaagacaatcttttagcctcaattcttggtgaagcttatcccttaaaaattttcgccaaatattcaatcgatacccgtactgtccagggccaaccgtgtcttataattgattgcactacacgtcgtgtagtaaaagagaactgcctgtttttcctaaaaaccggattcaatattattggtcgctacgtcgtcaccgagcaggacgacggatttagaaaacttttagggtttgtagaaagctgccacgaagggagaactctgagtgtcattcgtcccgacggccaagcagttcatgctgaggcgaaagacgtttatctcgaagctagtcgagcgaattttgacgactacatcctttatacgcatggtacgaaaaaagactccattgtcgaacgtattcggcaatccgtttccattttcaacggaggcgagaataaaaaagaccgcatcgacgcccttaagagatatatccaagcgacaaacatctcgctgctcgatggaacgcgtatcgaaatagaggatccatccgacattcaaaaagattgtacacagatgcaaaagccggtgttcgtcttcaacgataacggtgaagcagattggacggagaagggtcttacacaaaatggcccctatacaaaacgtaccttcgataggaacgatccatcaatctgcgtgatctgcgcccaacatgacaaagggcgagtcgagcagttcgtccgtaaacttctgaaaggcatggctaatagcaaatatttcaaaaatggccttgagggcaaatttgcacttggaaccagtcgtgttgaagtgttcgaaacatccacagacagcgtcgatgcatacaaaaatgccatcgaagctgcaatacgcaaaaaagctgatgacggaggacgttgggatctagccctcgtacaggtgcggcagtcatttaaaaaactcaaagttgctgataatccttactatcttggtaaaagcctattttacttgcaccaagttcctgtacaggatttcacaatagagctgctaacgcagtctgattattcactcggctactcgcttaataacatgtcactggcctgctatgcgaagatgggtggagtcccgtggctactcaaatcatcgccaacactatctcatgaacttgtgatcggtattggcagtgcaaacatagtccaagaacgtggtgctcataatcagcgcattatgggaatcaccaccgtattttcgggcgacggtagttacattgtctcgagtacatccaaagccgttgtaccggaagcttactgcgacgctctaacctctgttctggccgagaatatagaaaaaatacaaaggcgaatgaactggcagaaaggcgatacgattcgcttaattttccatgtacaagtcaaaaaattcaataaggaagagattcaggcagtccgtgcggtaatcgacaagtatagagattaccagatcgagtatgccttcgtaaaaatctcagagaatcacggactccacatgtttgactcttcaacggcgaccatgtcgaaaggacgcctggcgacacatcgcggaaaaacgtttaagatttctaaaaacgaaatgctggtttacctgatcggccaacgtgaattacgacaagaaacggacggtcatccacgtggtgtgatcgtcaacgttcataaagactcgaccttcaaagatattaagtatttgagtgctcagctctacagtttcgcatcacactcctggcgtagttacttccccaatcccatgccagttaccatcacttattccgatcttatcgcccataatttaggatggttgaatcagcttccgggctggagtgactcagtcatgattggaaaaatagggcattcacaatggtnnnnnnnnnnttcctatagagaaagaaaacgtttatcagctacgcgactattttcacagtaa

SEQ ID NO: 436916 - DNA, 966 bp, Serratia marcescens
atgactcaactcctggctccacaggtaggggaatcgatctacgatcctacctgcggcaccggcggtatgttgatttcggctctggacgaagtgaaacgttccggcggcgaatatcgtacgctcaagctttatggtcaggagcgaaatcttatcacctcttccattgccagaatgaacctctttctgcatggtgtagaggacttcgaaattattcgtggtgatactctggccgaaccaaagcatattgaaaacgatcgcctgcgccagtttgatgtcattctggctaacccgccttactctatcaaacagtggaacagagagtcatggagtagcgatccgtggggacgtaacctgttcggtaccccaccgcaggggcgtgctgactatgcctttcagcaacatatcttagccagcctgacggaaaaagggcgcagcgctgcgttgtggcctcacggtgtattgttccgtaacgaagagcaatcaatgcgtgccaaaatggttgaacaggactgggtagaggccgtgattggcctgggtccaaatttattctacaactcgcccatggagtcatgcgtactcgtctgcaaccgcaacaaacctgccagccgacagggcaaagtgcttttcattgatgcagtacgcgaagtaactcgcgaacgtgcgcaaagctttctaaccatggcacaacaacagcgtattttgtctgcataccaggcatttactgacgagcccggatttgccaaagtcgccacgttggcggatatcgacgctaatacaagcaatttatcgatcccgctttatgttaagcggtctactggtacgtctgctaccgatgccaatggtgagaccctgtctttgaaaggtgcctgggaacagtggcaaagtgacaggcatactttttggcaacaaatggacgcgctggttgattcactagatagcctggcgacgacgggagattcgaaatga

SEQ ID NO: 436917 - DNA, 1890 bp, Serratia marcescens
atggggacgctttctgtatttatagctgaagctctatttggtgggattgtgaagtctataggcggcaagatcgctgaaactgggatgagcaaagcaaaagctataagcaacaaaatattaatcgcatttaatgatgataagatagtgaatgattatgtttcaaaagcgattcataaaatattcgtattcagaactatgactggtggtgatgaagatgtttatttagatgatatatatcatccaatgacgattgtcggcaaggtaagtagattaaggaaagttataataaaagatagggtattgatagatgatgaaggatgtagtgcaatagtcggacttgctgggcaaggtaaaactacaattatgagaaagttgtttctcgaggaattggttaggggggagagactacctttctttatcacgcttagacaatttgattatacatcaaaaattggatgtgaggatatattactagatcatttaaattccaatggcattcagtgtgaaattagtgatgtaatcaacatcctaaaaacaaaaaaagtaattttttattgggatggcttcgacgaaattgctgagtcccaaaggaattatgcattaaagatgatttcgtctgtttatgataaatataattgctcatcacttgtcaccaccaggccagatactgagattactaggcatccgggagttttcttatatggggttggttttttatcttataaggatgtttgtgagataataaagaaaactgtgaggcagaaagatgccggtgagttgataattaatgcatttaaaaccaaaagatttttaagggcaaccattagaacccctatattagttgacgttttgatagtaacctctccatcattgagtgatgaacctaactcgattggggattattacgatcagttattctccgctctgatatttagacatgactggaataagaactttaaaagagagaaaaaaacaactttaacaaataaaaagttagaagaatgctttagcttattcagcttttttagtctgatggaatctcggagtgattttactttggaaaccatgcacaagatattcgagaaagtttgtaagattaagaatataaatttatcagaggaacatgtttgtgctgacatagttgatggtaccaacctgataactcgtgatggatataataactacatttatattcatagaacaatacaagaatacttttcagctaagtgtatttcaatgtttggtactgaacaaaaacaggcatttttaacaaagtatgcaaaagtagaactgaataaaataaatccaaccctcatgtcaatgctgaaattcatagatcaaagtgctttttatagcaactatttgattccgcttcttgagcaaaatgatgtgtttttagatggacgagtaatagtaaaggatagggcttatgtggcacaggaaattagccagaggatgattggcattgatgattctgcagttatgtcgataacgaaccctgaacatttagaaaataatggttttaagaatttaaaatacatcaactttgccgcttttttaacaggtttaaaacatggtgaagaccccacctatgattatcttttcgatcgtgaagataaaataatagagttttcgagagatacttacgggaaagaaaagtttacagagaatgttcctggtgaaatatctctgcacggacttaagtggattgaagctaacaaacttagagagatattacctgattttgatgagggttttataaatgctcactaccattattatttgagtttaaccagtgctcttcagaaaacgattgatgaagagtacttgaagaaactggaaagcgatggattaatatcaaatatgctagatgacatggaatttaagtag

SEQ ID NO: 436918 - DNA, 681 bp, Serratia marcescens
atgggaaaagatttaacgcggtatgccgccagcaagagcagaaacgagacgttcaacaatggagagtttttcatgatgcttctttttaccaagcgaaatcatagctcgatttcttgccgggttaaaaaggctggaaagagcattactgtcaaactcttcgagcatattaacgcgcgcgctcatctcatcaacactgaggctatgcatttcgttaataagcgaaagatatcgctttgcctgctgacgcgcagcttcggatttctttccatgctgaaaggcaactcgaataccactaataattgcgactatagcgccaaacaactgactgagcgcgctgttagcaaaaataccagcgccaagaataagcatcacagcattagccgtaagatcaattctgcggttaatggttgctgtcatcacctccagccaatagccgtaccaaatgcggaaacgcaaagtatattcagtcggttgttgtgccataaagatttactcctcgtcatcatcctccggtggctcaggtttatgcaacacgtggaagtcatcggatttatcgcgagattgcgaattgtcattgtcgcccatagaggctccttcttgtggtgggtggttgtcatgcccatgttcctgccagaacgtggtgggcatggcgaagataccacaacgcggccgggcgcgtaa

SEQ ID NO: 436919 - DNA, 2805 bp, Serratia marcescens
atgccaagaaaaacaaaatcttacttggataagatggaactagagaaaacaacaaaaaaaagcatcaaaatttatgtttacacgttaatattaggattatctttgatattactggcaaaaacccttgagtttccatatcaatggctatatacgaccccatcatacattaacaactcccctttatcatggatttcaagctcatgggcttcagttttaggcattcatggcaccatagcagcactatctataaccttcatggggatgtttgtcagccaagttgcttcgtctgtagaaaacagttttgagtcagtgtgtagaattattttattaaggaaaaaaaactttctaaactttagcatggatgcagtatgtggattaattttaggtgttttttttatggttatcggtggtggtctaatccattactctatatctatggcaatatctatttacttcataataacatacatgagaatgtattatgagctatattcagtaacagaagacaaaaatgctataaatgagatattgttcgatgagttaaaatatcatgggaattcttatcatgaatctaaaatcgaaagcgaaaaaataaacaaaaatttcaaaaaattcatagatacaaagaacaacattcttacagactataaatatgactacatcactgaagaaataactcaattaagtatttttccaaaatcaaactcactagtaatagattcttttcacgaaggtaacctcgacgctttagataactatttagcatccattgataaaaatataaggctctatctaagaatttcattcctacatcctactattaattatgatacgtacatcacaacaacaaaaggcattaggctgacagaaactgagattgatgagctatcaataaaagtggtccaatgctttaatataaaaaataaaaatgtcacctacgaatcattcaaaatgttggaatcatctgttgtcgaaaatatttaccatacactaatcactggcaatgaaagatccttagactttggtgcgttagcattatcgttactatcatcaaaatccaatcacattgaaataataaaacatttagaccaccttgtgacctccagcggaagaaataatcatatagaaatatcaatcttagaggagtttttcaagaagctatatcatataaaacttggtgaaggaacaataaaggatgatatatttgtcataagttcaataattgacatgtcaatttacatatatgaaaaagataagtatgaaactttcttcaaaaaagtaaaccgtttgatatctcacagaacgaagtatggtgatgacgagtttaacaatccttacttggaatactatatcacattaaccattagacatatttccaatatgtattataaagcatttgaagaaaacacacgctatctgaccaatgagttaaagtatcttagcaaaaccagaatggataaaaaattaaatgacaggcaaaaaaagctaatatcctgcatgagagaatgcatcgctttattaactgtcaggtttgattttttaatgagcaaagacagtaatgaaaactataagatcgaattagagaaaataacgtcattaattaaacagtggtcaaacccttcatttattgaagaaatctatttcctccaagaaacctacgacacattatttagtatacctagtgatttttcaagcctccgtgctgaaatgaccctcagagaaacaccagatggtgttgctacatgggtgggggcaaatcatagcttttataaatcaattgctattttactttaccagctccctataaataaaaatcaccttggtttgacttttatatcagacaaaaatcaattccttcagagtacaggaataacaacacaaatgcttggcagtattattgattatgtaagaacgagagatttcttactgatggtaaatgctattggagaaaacaaggaattagaacagaacattaagtcgaaaacagagagattagctgaatcacttgaaaaaataaaaagtgaaataacaaccataataacaaaaaatatcgaacatgcagaacttgatatggagctaatctcacaatatcaaaatgaggtcaaagacagagcaacagagcaaataaatgaattcatcaatattgagaaagcagaaaaaacaatgaaaattaaggatggcgttgattactgcggtcttattgacaagcgcgagctcttgccatctatagatggagttcatttctcaatgaatacagaaaaccatgctataagagccgtgttcagcctgataagaaaatccctaaattatattaataatgatagtgtcgtcattgaaacaatccacgacacagatagattagaaaataacaattatataaccattgaatatatggttaaagacagagtaaatacatataaattctctaaaggactacgtatgtatgacaatgacgggcaccttggttttgaaaagtctggtatgtattatctgaatttggataaagaacttgacgtaaaattaaatcccgatgagccagtgtcaactaaaataacatcgataaacaataaaaacattgatggtttatatgaaaaatttgcacttaacaaagatgatgaaaaccttctgcttcgctcagaaatagagataacattcaatatattcatcaataaaaaagaaagtaccacgctacttttcctttctgaagaaaaatgtaaggaattaaatgaaaaagaagagcggcaataccaacaattgataaaaacaaacagagattcgattgataatacactacaaagccagtag

SEQ ID NO: 436920 - DNA, 1197 bp, Serratia marcescens
atgagcaaattaaaaggttttctagctgtaaatttcgacacaaaaatcaaattttataatttttctcatgggaagaaacttttaaatagggaaaattatccattgaatgtaattgataaaattaaaaatattgtaaggagtggatgcaatataaatggtggggattttgttttgtattctctttttcacaataaaagttttggtatcactcagagtgaattttcttcgaagatacactcaatggaaaatatactatccatgcacataagcgccttaaactcaactcttcagaagagatacagtcaagctcttccacgcggagttaccgataatattggtgagtcgattggtatgttagttatttctcattgttataatatagcagacgctgattgggatgtcataccggaaactaataaaaaaaagactatggattttaaactggcaatttctaattctggtttagtaaaccttgagacgaaagggacatctgctgttattttatcattgacaaaaccttataaagacatctgcaaaaagaaaattgctaatcctgtgactcctggtaatttcaattatggaacaataactactattgataccaaagagatttgttgctatctaattgatcctcctggtaacgatgaagaagtggatcttatctacctaaggatcgttagtaggctacagtactatcttcgagtgttaaatataattgcgccagaatctgagttaataaatattatcgatgaaagaataaaacagcttattgataaagaaatagactgtagagataatgtaaaacttaaacctgtaaaaagggcgtcctttaactattcatcaggtaatatgccaacttacttttttaatgcttactatgatgggagtttaaatggaggttttggtggaagatgtttctttgttgattcaaataatttgttgtttttgggggtgagtaacaacttgttaattgaaattgttaatcaaagtagtgatcagattgcgagggaccttgtctctgacggtgaatattttgaagttagtatggatatacctgataatgctctgcatcggaaagatgagaatggtaaaaatatcgtttcagaagaacgcttttataacacaaatgaaattttaagagctgaaggtcaactatattttaagaatggaatagtaataggtattctaagctattaa

SEQ ID NO: 436921 - DNA, 729 bp, Serratia marcescens
atgaagactgaaaataccgtttatcaaatatttcagacagcacgtgacttgcctaaaaattacgtggaaagaccacatgttgacaatttatttattgaaactcttcttcagcaaaaccatattgttatatatgggagctccaaacagggcaagacatcgttacgtaaaagacacttggaagagaatgattctgtcgttatttcgtgtctaaacgcatggtcgataggagatctacaacttgcaatccttaaaaaggttggattcagtctcgaagacacaagtggtttgaaaaaagatggttctgtaaaattaaaattcaaagtcccgtttctcgctgaggcagaagtaggtgcaggtatagctaaagaaaaaaaacacaaagattattcaattaatgctaatgataccaacgatgtgattgatgtcatcaacaatgttggttttgaaaaatttattatcctagaagatttccattatcttccactacaaactcaaaaagacttttcaattagtttaaaagcatatcatgagttatcaaaagtatgctttataataataggtgtatggttagagaacgacaggataacatctgataacggtgatcttacaggtagaataacttctatcaacgctgatctttggaaagataaagatattcaaaatctatttataaagagcgaaagtttacttaacattcaatttgacgataaattcaaaacatatttttag

SEQ ID NO: 436922 - DNA, 867 bp, Serratia marcescens
atgtcgctggccttcctgccggacatcaaaaccgaagcgcccggcgccagcggcctgccgctgttctatcgccacaaacccgacaccgccgcgcgcgacatgcccggcgccaccacccgcgattacctgaccgtctggctcagccagtgggtgcgcgattacggcatcgacggttttcgcgtcgataccgccaagcacgtggaaaaaccgacgctggcgctgttgaagcagcgcgccacggcggcattggcggcgtggaaagcggatcatccgcagcaggcgctggatgacgcgccgttttggatgaccggcgaggcctggggccacggggtgatgaaaagcgactattaccaaaacggcttcgacgcgatgatcaacttcgacttccaggaccaggcggcgcaggcattgggctgctttgccgacattgatgccacctaccggcagatggccgagcggctgcaggatttcaacgtgctgagctacctctcttcacacgacacccggctgttcttcgccagcgacgccaaaggctcgctgccgctgcaacagcgggcggcgaacctgctgttgctggcgccgggcgcggtgcagatttactacggcgatgaaagcggccgcccgctcggccccaccggttccgatccgctgcagggcacccgctccgacatgaactggcgtgagctgctgggggaaaaagccccgatgctggcccactggcaacggttggggcagttccgcgctcgccatccggcgatcggcggcggcgtgcaaaccccgcagccacacgccgcctactacgccttcagccgccggctcggcgacgataaggtgatggtggtgtgggccggcgaacggtcacaataa

SEQ ID NO: 436923 - DNA, 189 bp, Serratia marcescens
atggcgaaggtgatttttagtaacaccggaattgaagaagaacatcagattgactttgaggttcgtgcgggacaagcaataacgcttattcgtgatggtgtgagtaaaaaatacattgtcgatattgtctctgggcctatttatgaaagcaaatgtcatcccacccttattagagtcagagaaacgtaa

SEQ ID NO: 436924 - DNA, 129 bp, Serratia marcescens
atgatcaaccgcaattttaacacagtcgttgtcgataccatgcgcgtggctcctaccgtgcaagctgttcgcctcaccttctttgcccgcctgcgcaaaatcctctgccagaaaggccacccgctctaa

SEQ ID NO: 436925 - DNA, 240 bp, Serratia marcescens
atggagcgcgcggaaaatcccctgcgcctttcaagccgcagcgttgttggccgcagatcattcgcaccagtcacttacttaagtaagctcctggagacgaatgactttgccgcctggctgcaacttgaaattcgttgggggataagtttgttattttatcccgatgggaagctgaagctggcgcgccgggcatcgccggaggacggccagcgctgggtcacggtcttgcgtttggtgtag

SEQ ID NO: 436926 - DNA, 3300 bp, Serratia marcescens
gtgagtcgatcagaatacatttatctaattaagtgtacttcttggctagctaaattcctctcccgcagaggattgaagcaaccagaccgccgcccattatatgaataccacgcaacgagtgatgagtatgatgagttgaagcagttgttgagagctatagggctacccgatggctacaggagtgataaaggatatgcagccagcttcacgttattctgctcagagtggtatagaagagattatgaaagggagtgtggatgggcatgggagcctatttataagactatcggtatatcagcatcttcatcggaaatggggaaaataattcctaaaggtctggatggatattggggacgtcctgtgcggttttacgatacagaaagacggaattttttaggatccctatttagtgaaggcggtctacctttcaggttgctaaaggaatctaatagccgctttcagtcgatgttctctctcattctcaatcaatacgatcaggcccaatcttctaacatttcaacgtttgctttagttcatgcggcggtagaaaaatcatccctgccagtcgttttcaaagaggatacttcagttgagcttattagtcggatggctgaacagttagtgtctcttgtgcaaatttatgacctgagtaaccacaccgaacccgtaaaagagcttgatcgtgttcatcctaagtggcgggacagcttccccgttccgcttgatgatgatacggggaccagtttccttaatggacttttacgagcagcttctactgaatccaaacctcgccttcaaaaaaatagaacaaccctatgtcagttcttatggtcagagaatcatcctgaagctttacagtcgcttatttctcttccagaagagctgagtttttcgattgatagtgaaccttctacaacacgtttcgagcttgccatctatgaagatggtaacgaaattgcgagcctggggcctgcctatgcaacgctgagtaattcacaggcgaaaatgagagttcgtaagcgtgaaattaagttttttcgaaaaaagcccgctgccagcttatttattgtggcgagagcaggagggatgcttgtcggaaccagactgttggagggaagtgaggttgccgttggcgatgtgccattagtttttgtttttgataaaagtgaatggttgctacaagggcaagcatcttgcagtgtacgtggcagtcatgtgctcattgtattgccaaaggatggttgtctggcctcagagctcgaggattatgaaaccgatttttcggctttgggatgccgcgctctgattgtcaaaggacgcctggatatcctgattgaaggcagtgaaacgtatcggataaagacaggaagagagcagattatccagacagggttctctttccaggggaagcggttaaactggacaagctacccggatgaactcttccttggtgttcctggcatttcccaaaattctgagaatctattaacgcatcattataaacgttttttcaacggcacatttatagataattgtgatgtgcaagagaaaatgggtgctcagtttgtttcagtacgtaacgagaataatgaaacgttactgcgcaagaaaataggtattctccccaatgattttggtctgaagacaaaaaatggagaaaaagcaaacgaaggctccatcattattactaccaaacatccttgcttgtatagtttgaaagaaaaatcattggagattgataggaagcgattaccaggtagtacagaaataatgatgaaaactgaggggattcctccagcatctattttattacaaataacgccaaaccttgctgcaaatcctattgttatttctctccctttccctgcccgaggttgccttgtcttcgataaagacgacaaacctctatcaaaaaatttaacgattaacgatcttctgggagccagagcataccttttcggaaaaaatggtgagcctacgcgataccaacttgaactgcgtttacgctcctgtagtggaatgcaggcatggtatgagtggtgctatagtgcgggagaaatcccggtagagcttactttatacagcttaagagagcatattgacaatttactttccctggagaaagggattgatcaaacggtggatatgcgtattgagggcggaggtagttcctttacctggcaaatcaggcgctataaatatagccttgagtatgatcgggaaatgcagcttcttcttactaattcagtgagcaatcgtacggggcaggtcccttcccccgttattatgttactcagtgagcccgaaagaaaagcaataccacttgtatcgagaatgagcgaaggtgtaccggttggtgaattcgaattaaattcgacaatacagaataatggcccatggctagttgttcccaaaaaaggtgaagaagcttcatttcggccttgttacattgcaggtgagccggtaatccaaagcgatactacggcaatacagtccctgcaaaaagcgacgcagctttttaatcctcgggcggatgtaaataccattacgttggttctggaacaaatggcaagcgaccctgcacattcaggttggcagttcttacgtaacttatacgatcagtttggatatttaccgatggctacctttgaggtatggcgtgccttggtccagcatccacaggcattggcaatgtcactgtttaaatttgagatgtccattgattatctcagccgtattgaaagcgagtttcctgttttctgggagtttttgcctatcactgaggttaaacatgccgcgatgcgttttcgagcgtttctgacccatagaggtgctccggaggaaatgcagataaagttgctgggtcgaatgttccagcaattagggactgcatttccaacttatgccagcgaggtgcaaatatggctcgagcagggaagattaccaccagattttccgacacaaatgataaaaggcatcattcatgagtggtatcaggaactcttacgtgaacatggtgaatctcgttggccagagtttggcgggccgggtcttttccgttggtacacgtcgcaacaagatcctgttatagagatttcacccgataccagctaccgatattctgttactttgctccctatatttgctgccgctgttgcctgcggtaaaacaacatttgacagcgtttttgaaaataaacctggtgccgtatttttcttaagacaagtcagagattttgactcgcgatggtttaatgccattttccagtattgcttattgcgtaatgtggctgaaaaataa

SEQ ID NO: 436927 - DNA, 1404 bp, Serratia marcescens
atgaaacagcctcagtttcccaacgaatggagtctagtacaaattgaagacattcttgccatgcaagaagatggaaagattattcatcagggctggagtcctcagtgtgaaagggagcccgcttcagaaaatgaatggggtgttctgaaaacaactgcaatccaggatggtttctttttggataatgaacacaagaagttaccggagactaaaacacctaagccacgtttagaagtgaaagctggagatctattagttactaatgcagggcctcgttccaggtgcggtatcatttgcctagttaagcacacgcgaaacaaattaatgatttcggggaagatgtacagattgcgtttgcctgaaaaatttattatccctaatttcattgaggcttggctcaggacttcctttactcaaaatgaactgaataacagaaaaaccggaataagtgaaagtgggttaaacatgactcaatctcgcttttcaacgctaccagttccccttgcctcattttatgaacaaaaaatcatcgccgaaaagctcgatacgctgctggcgcaggtagatagcaccaaagcacgtcttgagcaaatcccacaaatcctgaaacgttttcgtcaagcggtgctggtatcagcagttaatggtaaattgcaagctgaatcctccagcaatgaatgttgtactatagattcattgtgcctcacctcatttgatggcccattcggttctaagttaaaaacatcggattatactaattccggtataagagttgttagattagaaaatatcggtcatttagaattcaatagcgaaaaagaaacttttatcagccatgaaaaatataagagtttatacagcaatacattgaaagagaatgatcttattttttcttcctttgttgatgaagatgtaagagtttgcctcataccacaaagtgaacaaatattcatcaataaagcggattgtttttgtttaagagtaaacccatcattagcatcaccacattaccttgcactcgttttggccagcaaaacctcttatgagcaaataaaggaaaaagtacaaggtattacacggcctagaataaatcttagaacgctacgctcattaaaatttgatattccagatcttaaagaacaacaagaaatcgtccgccgcgtagagcaactcttcgcctacgccgacactattgaaaagcaggtcaacagcgctctaacccgcgtcaataggatcacccagtcgattctggcgaaggcgttccgcggcgagcttaccgcccagtggcgtgcagaaaacccggatctcatcagcggtgaaaacagcgccgccgccctgctggaaaaaattaaggccgaacgcgccgccagcggcggaaaaaaaacctcgcgtagaaaaaactga

SEQ ID NO: 436928 - DNA, 1512 bp, Serratia marcescens
atgccacaacggaacaacgggatcgcctacagttatgttcgtttttcaagcaagcggcaagaactgggtgacagtctgcgcaggcagacagaaatggcggaagaatacgccatcaaaaatggacttaatctctccagcaaaaacttccaagaccttggtatcagcgccttcagggaaggtaaacgcgcctctctggttgatatgcttgccgccattgaagaaggccagattactgccggatcaacaatcattatcgaagcattagaccggctttcacgtcgtggcatcgatgctacgctggaaacggtaaaagagattctacgcaaagacgttcaggtagtcagcctttccgatggtttgctgttaaccaaaaacagtctgaatgacctacaaagtgtcattcgcatagcggtagctgccgatctggctcacaaagagtcagaacgtaaagcgctacgcctgcgtgaaaccaagggacaacaacgcgaagcagcacttagcgggaaacctatcaataaaatcctacctttttggctacagcgtaccgaagctggttatgccttcagcgataaggcaggagtcgccaggcaaatcgttcagctcaagcaagaaggcaaaggcagcaatatgatagcaaaaacgctcaataagctgggtattgccggagtccgaacggcacaatggaatcatgcctctataaccaaaatgctaaaaaatcctgcgctgtacggtgcttatcaaacgggtgaaacaaccaaagacagagaactgatcaagctagaactggttgaagcgtactaccctgccctgatcaacaaagaagaatggcttttgctgcaatcagaccaaagcaaatccaaacgaggacgccgtagcgccaataatccttatagtggcctattacgatgtgaatgcggtggcgcattagtaaaaagacagcacacagtgaagggaaaactatacgtttatcatggttgcttaaatgccaaagatggccgctgtacgcaaaatatttcaatcaaaggattagatggcgcactaaccactattcttggccggttagagttcaagaagaaacaaacactgagccaatccattcatcaagaaaggcaacagcttgaagctcgcattaatgatctgaatagtaaattgcaagtgctggatgacatccctttatctgttattaaaagcatcgggacaatggaatccaggctaaaagagattaccgaccagatagcaaaggatgagcgtgagcaacgtggtatagaagccgttaaaagtgagaagctctccagcattacggatggtttggaacttaaccttttactgaaacgcgttttaaaaagcatcactgtcatccgctcaggccgtggttgggcagtaaaagttctccatctgtccggccataagcaaaacttcctgatggttgatggcgagatcaagtttttgagcgataccattgcattgcaaaaactattggctggatttcgtgagaccacagagaatagctag

SEQ ID NO: 436929 - DNA, 573 bp, Serratia marcescens
atgctgatagagtcacagcatagaattgactgtgttttttcagatgtgaacatttctggttcgataccttttcaaaaaagaccggaggcacagaaactcatcgagaaactcagcgccggtgataccatcgtcattgccaagttagatcgtggttttcgcgatactgctgattgtttgagcaccgtgaaatggcttcagcaaaagaagattactctcaagatccttgatatcgcacttgatgtgtcaacaccgatcggcgagatgattcttaccatcatggcttctgtcgctacatttgagcgtaaacgtatcgcagaacgcatcaaagacggatttagcaatggtcgccataatggtaaagcttacggctataagattgaggctgttcgtcaaggtatagctaaaaaagcgtctgtaaggcaccaggaagccacagaacgctaccttatgattaccaatcaccttaaggataaaatcgctcagggagccactgaggctcaaatgctcactcatctaaccaagataggcttacctatctcacggacaacattgcgtcgagccttaaatcgctga

SEQ ID NO: 436930 - DNA, 240 bp, Serratia marcescens
atgactttagaaaaaggaaaaggcactaacgaggccgagctaatcgcccatatagttattcttgagggtattatttcagttttaccaaaagaaaaggctgagagcgtaaaaactcacgccatcaaccatctcaatcacagaatcgaacttgagtccgcaaaagaatcacccagtacattagttattgatatacttgaaagtgcgaaatcaaaagccatcaacttattcccaaaaggctaa

SEQ ID NO: 436931 - DNA, 159 bp, Serratia marcescens
atggtattacatcaaaaatctgagaagttgaaaaaagaaactcctgatgttaaaaaggcggcccaggataaggccgcaggaaaaatcttctttatgccaatttcaggaagcatcgataatattgatgatattctcaataatgtgctatcgagctcctaa

SEQ ID NO: 436932 - DNA, 2949 bp, Serratia marcescens
atggccgatgtagctactctggcggtagcgctgcacctgaattccgccagttttaaatctcaaattgtcgattcattcagaacggcagaaaccgcgtcaaaaaactttaccggcaaggcgcagcaggaaagccagaaaaccaccgaagcgctgacccagataggcaatcaggcgaagcgcacgggtggtcagcttaactcgttgagtggtgcgctcagcgccagccagggcggcttcgaagggctgcgaagtgtgatcagcggcctagccggtgggagtaacattgcggtcagcacgctggccaatacgttaatcccgacgctcgatcgcactttcatcggctttaagggactgaccagcggctgggaagcccaacgcgaagcggcgaaggctgctgcccttgagtttaacaaggcggcgcagggccagattgaacaggcgcgatctgcacgccagcaggcccaggcgcagtttgacgcggctaagcgtacccgtgaacaggcgcaagcctcccgcgagcaggcgcaggaaatggcgcgcttctacgcggccaaaaatcaggaaaaccagctctacggtctttcggtcagctaccagaaagagtatgccgacattcaccgcaaggtgcgcgaggctgatctcgccgaggtcagcgccaaggaaaaaatggcgcaggcatcgaaagcggtactggcggcagatattgccgaagcccagggcaaaactaacctgatttcttccctgaaccaaatcagtgtggccaacaaggaagtttcctttacggcgcgcgcggcagcggtaagcaccaacctgatgaaaagtgcgttggcgctgctgggtggcccggtaggcttaagcatcatggcggcggttgccggtgctacggcattgtataccgcgttccaaaaaggggaggcagagaccaaggcatataccgcagcgcttcaaaagtcagggcttcaggccattatgacggtgaatgatctgcgcatgctgacgatgacgctcggcggcacagagaatgcggttaaggctgtcaccagcgccgccggcgcaggattcggtggcaatatgctgtcggacatcgctgaaaccggcacacggatgaacgagctgggtatgtcatccgatgatcttgtttcgacgctatcaagcctgagtggtgaacctctaaaggcaatggaggcgttgaccaatcagggcgttcagctcaacaccacgtttatcgatcatatcgccacattgtccaggcagggcaaaaccagtgaagcgacggcgttacttcagcagaaataccttgatgatgtgaaagccaaagtcaccgagcaggagaacagcgtcagcggcttggcgtctatctggaagtcgctgaaaaatgaagtggcgtccgcgttcgatatcatcggtcaggcacacatgaaaaccggccaggcgcaggcactggcacagggcgttaagctggatatcagcaacgataccgctattgaggtgaagaaaaccaacgaagagctgtacaagcggcggcaacaggaacaggaagccgcacgtaaagagttaaagctacagaatgaagtctccgctgcgattaaggcgggggctgatcctaaaaaggaacaggcccgtctaacggggattgtagcggctcagtttaaggccggaaagctgacggcagacgaatatgcgcaggcgttgaagggcattaacaagcaatacggcgaaaagtccaaaggggctgcgtatagcgatagtgaaggcgtaagacgcctgcaacagttgcagcaacaatcttcagtgttgcgtgctcaggtgcaagattccgacaaactgacagaatcgcagaaaaagctggtggccttcgatcaggagattgcagggcttcagggtaaaaagctgaccgccggtcaaaaaagcctgttgtccatgcaagaccagatcagggcgcaattaaccgagaatgtggcgctggaaaaggcaaaccgagaaagggagattggcaaaaaactgttggaacaaacccgtagcctggtgatggaaacggccgcgaaacagcaggagtatgccaaccgaaatgctcagatgaccatgtccactgacgcctacgatcagatggtggctgagcagcaaatccggcagtcgttccagcaacaccgcttgcagctggacaaggaagtgacggacaaaacgtccgagcagtacatgcaacagacggccattctcgccagtgagcagcagaggcaacttgatattgtccgcaatgctgcgcaggaaaaagcagctatcgagggcgattacaccgcagggctgaaaaagggaatgatggattggtctgccaatgccggtaacgtttatgggcaggtgaaagacgctaccacccgaacatttgacggcatgaccggtatgttggccaactttgtcaccacaggcaaagccagttttaacgacttcgccaagtctgtcctgaccgatctcgccagcatgatgatcaagatggcgatgttcaacgcactgaaagccggaatgaacttcttcgcaccctccggcaatgacccagggcaagtaccgatgttcgccaacgccaaaggcggcgtttattcgtcgccgtcactgagtgcatacagcgggcagatagtcagcaatcccaccatgtttgcgttcgccaagggtgctggcctgatgggcgaggctggcccagaggcgatcatgccgctcaagcgtggggcggacggttcgctaggtgtgcgggctattggtatgccacagcaggctgctgctgtgccgaacgtctacatcaccattgaaggcggcggcaatgtgaatactcaggccgatcagggctgggaagagtttggcaagcagatgggcaacatcgccgcgcaggaaagccagaaggtcatcaaccggaacctgaagcccggccagcctatctggaaagcaatcaaggggatgtaa

SEQ ID NO: 436933 - DNA, 360 bp, Serratia marcescens
atgacccagaagaaaatcaacctcaagaccgcgctgcttcaacccaccaatacagcggtgccgcacacgctgtttggcgtgccggtgcatatccgccgcctgaccgccggtgaactgatggattacgatgaagggctaggaaaggcacaggcagagagtgaccaaaaggcagcaacactgctgggcgctcagttgatcctctctgcactggttgacgagcagggtaaatcagtacctgcgtctgatttgccttcaccggcagaactgctggccgctcatgataacgcggcgttatttgatgcaatccgcgctatccagagccacagctacggcacgctggaggaagccgaaaaaaactga

SEQ ID NO: 436934 - DNA, 405 bp, Serratia marcescens
atgatcagcataaacgttacgggccttgattctctggagcgccagctaaaggcgatgggagatgaagcggttaaggtattgcgagatgccgggcgagcggcgctggagccggtgctggaagacatgaaacagcatgccggttttgatgagagcagcaccggtccgcacatgcgggacgacataaaaatccgcagcacgagccgcatgaacgatcctcgttatttgacggtaatgacattcaaggtaggcccgagcaagaagcatcatatgaaggcgctggcgcaggaattcggcacggttaagcaggttgccgcaccgtttatccgcccggcactcgattacaacaaaacccgcgtattacgcatcctggcggcagaactccgctacggcatcgaaaaccggtag

SEQ ID NO: 436935 - DNA, 843 bp, Serratia marcescens
atgcaagtaaagaaaatttcatttcttgggttaccgtcttcagggaaatccacatttctagccgcactatggcacttaattctaacagatgaagtggagtgccctttaagcctcaatggctttacaagcgattatccctacttgaatagcattcatagtcattggatagatggaaatcctttacatagaacatctatggaatcagagcaaattgcagaattaaatctaatccaggattgttcaaaagaacagtttacacttttgatacccgatttatcaggtgaagagttcgaactgcaactatcgcgtaaaaaagtcaaaacaaaaacctttgaaatgataaatgaagcaactggaattgttttgtttttaagtgcggataaaaaagatggtgatgtttattttcatcaggtagggaaaagtaaaaaaataagaaaaggcaacgtagagaatatgagttgggattatcatctaattcctactcaggtaaaaatagttgaattgttacaaacactgatgtcgtttccatttgttaaggagtcatatagaatttcgtttataatttccgcatgggatgtggtaatggaaagggaaataacgcctgacacttggataaaagaagaatatccactactccaacagtttttagaaactaattcgaaatttttcctagctaaaatttatggtgtatctgcccaaggtggagatcttaatgaccctaagaaaaaacttgatttaacatcaatgtatactgcgagcgaaagaattatatgtcatgatggcaataatttaacgcatgacattactaagcctctaatttggataataaatggcaatgattga

SEQ ID NO: 436936 - DNA, 270 bp, Serratia marcescens
atgaagaaatgcattttgccacttttagtggcattcccaacaactgtcttggcatgggggccagcagacccgtttaagtaccctgacgagtacacgaacccttataaccagagtgaatggagcaaagctgccccatacgaaatggctctcttctacaacaacaatacagatcagttctcaatggcattccgcgctcttcgtagcgatagactcatcagattctcgagtggggatacgcagaacaacgctgaaaactgcaggaaaccgtga

SEQ ID NO: 436937 - DNA, 147 bp, Serratia marcescens
atgccggtgcagtcggtttcaggtatctgcgccggcatcatcgacgccaggctcgggcagagtcactgcccgttccgctatgcagggttcccgctgagtgggagttcgcccctgcgaataacgttctttcccgtcaaatatcagtga

SEQ ID NO: 436938 - DNA, 1401 bp, Serratia marcescens
atgaccgattacatcagaaatatcattaataatcaggccataaccccaccgatgacgctgatccgtggcgcgaccatactgagcatggatgagaatgtcggcaactttgagcgaggtgacattcttatcacgggcacaaccattaccgccgtggggcagaacctgaacgcagagggtgcgcatatcattgatgccacgaacatgattgctatgccggggatggtggactctcatcgtcactcatgggaagggcaattgcgccgcatcaacccgaatgccacctgtctggacgactacagcaacgccacgcacttctcgtttgcaaaatactatcgcccctccgatatctatgtgggtaacctgctgaccgcactgggcgctattgacgcaggtatcacgacaatcattgataattcccataacagccgcactgctgcacattcagacgcagcggtagaggcattgcttgacgcaggtattcgcgccatccacgcttccggtgcgccggtatcaggtgactgggacagagcgcactggccgggtaactggcagcgtctgcaggacaagtatttcaagaaccatcctgagggccttgtttcccttggtgtaatggcccagctggagcctgaattgtgggccgaagcccgcagacttgggctccctatcgtcactgaattctttggcgcggaaatgggttctgaactcaagtcactgcaccagcaaggacttcttggcccggacaatattttcaaccactgcacggcattgccagacgagggatgggagatcctacgcgaagccggtgtccgggtgaacgtgtgtccgcggtctgatgcgcactatggtattgaagacggcatgtttgccatcgaggcggcacaacgtcacggcatcacgccaggtctgagcgtcgataatgaaacgtcctacagcaccgacatgtttatggaaatgcgcgtggcattttacctgcagcgagtgatgggcatgcataagcgacagcactgctgcggtacagagcattcgctgacaacgcttccggcagcgcaacttctcaaggctgctacggtcgatggcgcttactgtgcaaggctgcaggataaagtcggcagcctgacgccaggcaaacaggctgacctgatcctgattaatgccggcgacattaacctctaccccaacgggaatgcctttggcacggtggtacatgcgacagagcgcagcaatattgataccgtcatgattggcgggcgtattgttaaacagaacggcatggtcgtgggcgttgacagagcacgcctccatgcagcgattgatgaatcgcgtgaacatctgtttgccgccgctgggtataaacctgacatgtttgcagaaaccttcctgcctctggagctggcgcactga

SEQ ID NO: 436939 - DNA, 891 bp, Serratia marcescens
atggatcgtattcaggcaatgcagatctttatgcgggtggctgaagccggcagttttgtgagggcggcggaaacaatgtcactgccgtcctcaacggtaacgagttcgatcaagggtctcgagaaatacctgcaggtacgcctgcttaaccgtacgacgaggcgggtcagcctcacccctgagggatttcagtatctggcgcaatgccgggaaattctctcattaattgagcattctgaatccagcttgacggattccgtcaaacggcctcagggaaggttacgcgtggatatgcctggcggcatcgccaatttcatcgtcatgcccagtctgaaagacttttaccgtcgttatccggatatctatctgatgattggggtgagcgaccgtcaggtcgatctcgttcaggagggggttgactgtgtgataagaacaggtgagctaattaactccacgctagttgcccgtccgctggggcggttacgctgggtaacatgtgcctctccggactatctgagggaatacggcatcccccggtctcctgaagacttatctcagcatcgtgcaatccactatttttctggtcagcaccgtcgtaatgacgaattacgtttcatgaaggggaccgagactatttccgtatctgtcagcggacaaggggccgttaacgaaacaggactgtatattaaaatgtgcctggaggggttcgggctggctcagttggccgggaatattgtttctgagcatctgcagcaaggcacgctggtcgaagtgatgtccgactggcaaccaccgtcagttccggtcgctttgctttatcctcatcagcgctttctatctcctgcagtgcgcgcgtttgctgactgggttgccgggcttttcctgaagtga

SEQ ID NO: 436940 - DNA, 582 bp, Serratia marcescens
atgagtaacattcttattatcaatggcgctaaaagttttaactttgccagaggtgagctaaacgaactgtatgtcaacaccgcaaatgaagtactgagccagctcggacacacagtatccgttacgaaggcagacagcaattttgatccacagaacgaaatcaccaagattcttaacagtgatgttctgatatatcagatgccgggatggtggatgggcgagccatggacggtaaaaaaatggatcgatgaagtctttaccgaaggtcatggttctttgtatgaaagtgatggccgtacgcgttctgatggctcaaaaaaatacggttcgggtgggcttcttcagaacaaaaaatacatgctgtccctgacctggaatgccccactggaagcttttaacgatcctgagcagttttttgagggcgtcggcgtggacggattatacctgcatctccataaggccaatcagtttctgggtatgagaccactccccaccttcatcacaaatgacgtggtcaaatcgccagatgtggaaaatgaaatccgtcgtttcagcgatcatctgatagcgaccttttcctga

SEQ ID NO: 436941 - DNA, 1191 bp, Serratia marcescens
atgtcatatatcactaacaagtggcgcactgcggcccttgtgacgggaattcttttcatcgccattaacctgcgagtcccctttacttcgatagcaccggttttaaagctcattcaggatcactttcaactgagtataacgtccgtaggatggcttaactcattaccgttatttgcctttgctgtgttttcacctgtgagtgcgattattgctcgaaaatttggtctggaacgtacactgttcggcgcgctgatagtgatttctgcaggtattctactacgttcagcaggtagtgtgtgggcgctatacatcggaacgatgctcataggcaccggtatcgcgctggggaatgtcctgttgcctggccttatcaagcgtgactttgccggaaacgtcgcatcattgacaggcgcatattctatcacaatgggagccgcaggtgccgttggctccgctattatcattccattgtcccagcaatggggctgggacaatgcgcttgccctgttagtgatagcgcctgtgcttgccctggttttttggtccccacaattgagcaatcaccagaagcacaagctctcaagtcctaatcagcacaccagtgtctccgtatggacatctcccctggcatggcaggtcacactgtttatgggactgaatgcaatgccattttatgttgcggtaggctggctgccagccattcttacggataatgggatttcacctgaaaaagccggagccgtacacgggatgcttcagttcactaccgcaattcctggtctaatgctggcggctacgctgcgtcgtctgaaggaccagaaaatggcggctgttgttgtcagtttgctttcgggaatttctcttataggaatactgtacgcgccgggcctgtcgatgttgtgggctgccattctgggattcggctgcggtgccagcatgatgctgggcctgacctttgtcgggttacgtacaacaaatgcaggtgatgctgcagcactgtccggcatggcgcagtgcgtgggctatcttatggctgcaatgggtccccttttgctgggtaaggtccatgactggtacggtggctggaccgttcccctgctgatgactgccgcaatcacggtggccggagcctgtaccggcctggcagccggacgaaacgtctacctgcaacctgcgacatcagcgggctaa

SEQ ID NO: 436942 - DNA, 795 bp, Serratia marcescens
atgccaaaacataaaaaagtagtttcgtcgcccgatgaatttgactctgacatctttctgcagccagcggttgccctttacgctgcaccggcgcaagagtattccggcataacgccgcatgcacaccggaaaggtcagcttatcctgtccttacacggtgcagtgagttgtgaagttcaaaatgctctgtggcttgtccctccccgacatgccgtctggatacccggaaatacgcctcaccgatgtcgtgtaacaaataatgcccgaacctgttttctgtttatagaacccggggcggctgtcatgcccgaaacatgttgtactattgccgttacgtctcttgttcgggaacttattctttatcttgccgagcaggaacccccttattccgctggtagtaagacggccaggctggctgctgtgctcctggaacaagtgccagacgcaccggttgacgcactccacctggccatatcagaccatcctaaaataaggcaaatggctgaaacactttttgcggatccgggagacaggacgactttacagcaatgggcttcccgccttgcaaccagtgagcgctcgttggccagaatggtgcaatcagagacgggaatgagcttcggacgctggcggcaacagttacatttgatgattgccctgaatgagttggctgaaggtaaatcggtacagaacgtcgctggcactttgggctatgactctgtgagtgccttcatcaccatgttcaaaaaagcgttgggtaaatcgcctacacagtattttgcttcgctaaattaa

SEQ ID NO: 436943 - DNA, 273 bp, Serratia marcescens
atgattgatttcaagtctatgattgagaaggaaagtgtttacgatgtggtatctttctttgctggttctacaaaagggatcggttatccacagttagataatttctttgttcgttaccgatttgatgttgtaggaaatggagaactattgaaagtttttgaagagatgcgcggtaatggggctgttgagtggggagaaaaaatgctcgttaaaaaaggccctaactggaaggaacccaaattcgtgaccgagaaaaaatacggtattgagtaa

SEQ ID NO: 436944 - DNA, 1128 bp, Serratia marcescens
atggctgaacaaaagaaaaatgcccaggtacagagtggcgtcaacgacgacatcaccgaactaaagtcgctgactacactgcggaaacgggtcatcagcgacggcgaaattgtctccaaatctgccaacggctttcgactggccaacggcaacaccggcgtgatgttgcgtaacgacggcaaggatttttatgccctgaccacaccaaccgggcaggcgcaggacgggcagtggaacacgctgcgccccttatcgttcaatctgacttccggtcgggtggcactgcgcaacggcgtagatatctccggcggggcgatggtgtcacataatgctggcatctccaccgcgaccaccggcccagccccgcttatcaacgggcaggtctatgatgcggccgccgtacataccgacttcaccagcggcaatgtcaccacggccatgctaatggggtcacgcgtggtcgccggcaaggaggattatggtctgctttcttaccgcgactggcagggaaactggaatgaactccaggtcagggctaatgcggaactttctgtgggccaactgactaaacgcaaccccgatggatggatttggattagcggaaacaagaataataacaatgccgagcgggtgacgaacgggctacatctgcagggcgccggcgacctgttcaccaatctctaccactatgaacgtatcggtcagcaccatttcatgggagttcatgttggtaatggtggtgccaatggctggtacgaatttcgtcatgatggtaacgcttttgccaacggtggctggcacagcagttccgacgcccgcatgaaaacggaaatcacccccatcgacggcgccctggataagctggcccatatcggcggttacacctacctcaaacagggaatgcaggaagccggcgtgattgcccaggaggtggaagaggttctccctcaatccgtaacccagactgagctaaaactcaatgacggcagtgtgctgaaagacgcccgcagcatcaatatcaacggggtggtggcgttgctggttgaagctctcaaggaagaacgtaaagcccgtatcgagctggaaacacgactggtaacgctggaaaaggcactcgcgcagaaataa

SEQ ID NO: 436945 - DNA, 1380 bp, Serratia marcescens
atggcgaagcgtgcccatattatcgttatcggcggtggtttcaccggcgcggcgctggcgatccagctggcgcgcggagcggtggatgtcacggtgatcgaaccgcgcgcggcgccgggctatggcgtggcctactcgaccaccgaaccgacccaccgcatcaacgtcccggccgatcggatgcagctggcggatgagccggcgggggattttgaccgctggtatcgcctgggcggcggattggtggccgatccgcaggcgttgtggcgcgacggtaaagcctatccgcagcgcggcgccttcggccgctatgtcgaggaacgtttccatcaggtggcgcagtcgggccgggcccgcttgcggcacctgcgcgatcgggcgctgcacctgcagccgcaggcgcagggcgcgaccgtcatcaccgccggcggcgaacggctgtggggcgactatgtggtgttggcgaccagccatccgccgcccgcgctgccgcggcagatcgccccggagctggcgcgcgatgcgcgtctgatcgccaatccctgggcggcggaggcgctggacgaagttgaacccggtgaggcgttggcgatcgtcggcactgggttgacgatggccgatgcggtggcggcgttgcaccgccgcgggcatcgcgggccgattaccgcgttctctcgtcatggcttgttgccgcgtgccaatgccgaaggggtgtacccgacgtggtcgtttaccccgccatccggactgcgtgacggggtgcggcaggtgcgccttgaggtggcgcgcgccgctcggcaacgggtgccgtggcaggcggtgttggacgaggtgcgcgcccaggggcagcgcctgtggcaagcgttgacgccgaccgaacagcagcgctttctgcggcatttgcgcgcctattgggacgtgcatcgctatcgccttgcgccgcaggtgagcacgctgctggcggagcaacaggcggcgggcacgctgcaggtattggccgctcgtttgcgtcgagcggagcgaacgccgcagggcgtaaggttgacgattctgccgcgccaaggcgcagagcgggcgctgcaggcgcagcggctgctgatcaccacgggcccggcccatgccggcctgatcgccgccagccccttgctccgttcactggcggagcagggggcgctgcgcgccgatccgctggggctggggctgtgggtcaatgccgacagccaggcgatcggcggcgacggcctggccaacccgcgcctgctggtggccggcccggcggcgcgcggccgcttcggcgaactgatggggctgccgcaggtggcggaacacgccgaaagcgtcgcgcgtcatctgctggcggagatcgccgccggagggtga

SEQ ID NO: 436946 - DNA, 132 bp, Serratia marcescens
gtgcacgacacccggttcaccgggtgttttttcatcggggggttctcattgatgctgcgccgctacctgttcgagatcattctgaccgccctgatcctctgtggactgatcgccgtctttttttatctgtag

SEQ ID NO: 436947 - DNA, 342 bp, Serratia marcescens
atgagcatagaacgcgttcagcgttttctggccgagcacgcaccggagacgacagtgacggtgctggcaaagaacaccgcaacggtggcgctggcggcagaagcctttggcgtgaaggcgcgtatgctgccggcggaagaggttgaagcattaaccggctatccgcccggcggcgtttgtccctttgccgcaccggaggcggtgaggatctactgcgatcatagcctgcgcgctttcgatgaagtgcttccggcaggcggcagcgataactccggcgtgagaattgcgccacagcggctggccggcatcacgggagcggagtggattgacgtgacggggtaa

SEQ ID NO: 436948 - DNA, 2880 bp, Serratia marcescens
atgcagcaggtgaacagcaatgaacgggatatcgccctggttggcatggcctgccgtttcccgggtgccgaggacatcgaaagctggtggcataatttgatcaacggtgtcgaatccctggttcgcgtcgataacgatcgggatgatgccgtcgacaagggatatattcccgtcgccgcgcctgtggccggcgacatatctcgctttgatgcaggattcttcggtattagcgcgcgcgatgcgctgctgatggatccccagcagcggctctttttggaatgcgcctggcacgcgctggaaagcgccggtgtgacaccgggagaacttgaggataccgggctgttcgccggctgtagcagctctgactatttacgtcaggcgcaaggatccgagctactcgataaactcaatccttcgccgttcgagcggcaaataatgagcgataaagattacctcaccagcagggtggcctggcatctgggcatcggggggccggtgtgcaacgtgcaagccgcctgcgccacttcgctggtggcggtatacgaagcggtccacgccttgcgcagcggccgttgcaacctggcgttagcaggcgcttgtaccctaaggatcccgcaaaacgacggctattttgcgcagcaaggcatggtgttttccaccgatgggcactgccggccattttccgcagatgccagcggtacggtattcggcagcggcgtcggtgtggtggtgttgaagcgcctgagtgatgcgctggcagccggcgataacgtcgtcgcggtgatcaaaggcgtggcgatgaataatgacggcgcgcgcaaagtcagttttaccaccaccagtttgcatggccagcaacgcctgctgcgccaggcgatggacgatgcccggttgacgcctgaggattttcgcgccatcgaagcccacggtacgggcactctggccggcgatcccatcgaattcgaggcgctgaacggcgttttccgagagcatacgacacgacgggggttctgcgccatcggcgcagtcaaggctaacgtcgggcacctggaaacctgcgccggcatggcgggattgattaaggccgccctgcaaattcagcatggctggctcacgccgcagatcaacattggctcaccgaatccggaaatggcattggcggagagtccgtttgagtttatctgttccgctcaacggtgggatcgcgaggatccgcgccaggccatcggcgtcagcgcattcggtattggcggtacgaatgcgcatgtcgtactggcgaggccgcctgtcatgccgccggcgcgaacagcggcctcattgtcctccaccgtcgtaccgatcagcgcacagtcagaacaggcctggcatcggctggtaaaacgctatctgcagcgaccgcacggcgaaaacgacgaacgcttggcctggagcgcgcaaagcggaagaaagtcgctgcgctatcgcggcaccttgcagatagacgatcggggcgcgttgagcgtgaaagaaaacatgatggatacggggaaagggcgcttgtcggtagttttccaattccctggccagggaagccagtttatcggtatggccagcgatttgatggcgcaggacgcgaccttcagaaaactgatgaacgacaaactgcagatagtgcaaacgcaagccgcactggatctctcggcgttatttaccggagaggccgcgcccgagtcgattaacgataccgcgttgacgcagcccgcgctgatcgccgtcgaaatctccgtggccgaactgctgatgcattacggcgtcgagccggattgggtcattgggcacagcctcggcgaaattgcggcggcctgggccgctggggtgttctcggtgcaagaggcgctggttttcgccgctcatcgtgggcgtcttatggccgggttgccgtccgggatgatgttggcggtagagctgagcgttcaacaggttcagccctggttgagtcatcagctatcgctggcggcagaaaacagtgatgacggctgcgtgctgtccggcaccgctgaagccattcgcgcttgcgaacgccagatgcgagaccgaggcgtgcgatgcaaagccttgaatgtttcacatgcgtttcattcgaccctaatggatcccattcttgacgagctggccaatattgcgccgccgccgcgtgaatcggcgacgggggtacgttacgtctccgccttgctggcgaccgaagtcgaatgttcggcgcttgacggccgctattgggcgcgtcatgcccgtgaaccggtcaattaccaccgcgccttgcagcagctaccgcagcgcggcaagacgttgtttatcgaagttgggccgggttcgacgctcacggcgttggttgcacagctgaaatccgccggttctgtgaccgcggtgcgaaccttgccgcgtcgcgacgaagcgcagaatgaaggcgccgtatggatccaggcgctgcaaaaaatctggcgcgccagcgtcaacgttaactggcgccgcctgtggcaactgccgccatcgcgcatcgcattgccgatgtatcccttcgatccggcgcactggtggttgggcgaacgggacaggcaggggccgcaagccgagcgaacgccggcggcaacaagtcagtcagatcctcagatggcgcgtatctggcgcgtttggggggatgtgaccggcgtgaaccccgattctaaccactgtgacttttttgacgccggcggacagtcgctgatggcgctgcgcctgctggcgatgttggagcaagagtttggcaaggcaatagggatggccgattttcttaagcggcctacgccgtggggcattaaacaacagttggaccaggctggagcattcgagcaagattctcattaa

SEQ ID NO: 436949 - DNA, 771 bp, Serratia marcescens
atgaccgaccctgatttcaacctgctgaccgcgctcgacgcgctgctgtcgacgggcagcgttgccggcgcggcgcgacgtctcggtttaagcgcctcggcgatgagccgcaccctcagccgactgcgcacggccaccggcgatccgctgttggtgcgcgccgggcgtcatatggtgctgacgccttatgccgaaacgctgcgcgaacgggcgcgaaacgcggcattcgaagctcgggcgcggctgcgctttgcgcccaagccggagaaaagcgaccgccccctgcgtgaaggcctggtcgatctggagattggcgtgctgggcgaaatggggccggaaatccgcctgcaggcgctgtttcgcgaccgcttcgtcggcgtgatgagaagcgcgcacccgctggcgcagcggcccaagataggcgccgccgagtacgccgcctgcggccacgtggtggcctcgcgcagcgggcgcattctcgggccggtagacgccgcgttggcggagttggggctgatgcgccagattgccgccgtggtgccgagctttccggccgcgctggcggtggcgcaagcctcagacctgctggcgctgttgcccgcctcctttctgcatgctcatccggacggcggcccgctgcgcatgttcgagctgccggtgaaaacgccgcccattaccgtctcgcaaatgtggcacccgcgcctggacgctgaagcggagcaccgctggctgcggcagttggtgttggccgtttgccgtcaacgggcgtag

SEQ ID NO: 436950 - DNA, 1626 bp, Serratia marcescens
atgaacataaaactgacacttggccgcggggcaaaacctgcgcccgcgctgccgcgcgcgtttggcttcggcaaaagcatggggttattaagcggcgtaatttgcgttatcgcgctattttctctgctgcaattgttttccaccgtatttatttccaatattctgtgcgacgccaagattaacctggtgacgggcgacgccttgcatcgccagcaggcggcgatggatcgcgccaggctgtggctgctgacggccagcgataccctgaaccgtgcgggcatttactatctgcaggataaagccaccggctccgacggcagctggcatagcctgctggatgaatcgctggcggcgttgcaggcttcagagcaggccttcgcccggtttgagcgcctgagtgcgacggcgcccgaggccgctgacgccctgaaaggcagttatcgcctgttctatgacggtctgaaggagcaggcgcaagggctgcaacgcagcgacagcatcgatgcgtttttcgccgtgccgatccaggcttttcaggcggatttcaacgagaagtatctcgcttatcaggcgctgaacgaacgacgcggcgatgacgtcaacgtgcggcaattggcggcgctggagcaggccaaaacctatgcgctcggcgcgctcgctgcgttggcgctgatcgccttgggcgtgtggttcggcgttgctcgttgggtgatcgcaccgttgcaaagggcgatcgcccacctcaacgtgctggccgccggcgatctttcgcggccattgccgcctgaacgggcggttaaccgcgaaatgcgtcagttgcaaaccagcattggccacatgcaaaacggcctgcagcggctggtgagtgaggtgcgcgatgcggcgagtgggatcctgaacggcgtcgggcggctggcggacggcaatcgacagttgacggcgcagtcggcgaagcaggacggtgaattgcagttggcgaccgagcacgtgcagcagttggcggcgcgggtggaagaaaacggccaatacgcgcagctggccaatcaacgcaccgaacaggccaggcagtgcgccggcgacggtgaaaagatgatgcaaaccgtcaacgtctcgatgcaagggatcgtcaaccaatcggccgagatgcgcggcattgtggcgctgatcgacagcgtggcgtttcagaccaatattctggcgctgaatgcggcgatagaggccgcgcacgccggcgttcacggccgcggtttcgccattgtcgctaaagaagtgggcctgctggcgcagaagagcagccattctacgcgcgatattcagcagttgatcaaccgctcgttgcagcaaatcgagcaggggtcgcaagcggtagagctgctggcgggcaacttgcgtcaaattatcgatctggtgaacacgtttagcgcactgatgggggagatctcgctggcgtcgctcaatcagggggagagcattcaggacgtgacggcgcgcatcgccgggctgaatcaggtggcgcggcaaaccggcgccgtggtgaacgcggtgaccgaggcttcgcagttgctgcagggcgaatcggaacgattggaaaaagcgatggcgcgtttcaggctgccggcgcaataa

SEQ ID NO: 436951 - DNA, 1323 bp, Serratia marcescens
atgggattctcatcgaaaaaattcgcagactattttgttatcacctatctggtagtaatttcaatcagtggggttatcaatatcgtcgctcacaatacgacgcgcctgatactgctttataaagatgtctattcattggcattaccggcgtttttgctgctttatctggcggccaataagagtagaaccggcccgggttttagaagctacctactgctgtttattggcatggttatgctttccctgtcatatgttcttatttctattcttaacagcaattttaaaattggtaacgtcgttacgcaattccgcttcgaattgtttacctattcgtcgttgctggttgccgcactcttggtgtgtctagagcctgaacatcgcatgaaattgctgatgaggctgattaaagtttacgtcatagtcaccgttgtcaatgctattttcgccatactggaaagcgtgttttctggtttgctttatgcgctgaccggggtaagtcctggattgcaatttacgcaagtgggaaaagataatgggctgattttacgtaccgcaagcggattctttagggcgataggtctttttagtagtccttttacactatctgagtttttattcttcggtctcatattaagtccatttgttagtaagaaaaatcgcttgagatatatattgattgtctcggccggtattgtctgttccacatcgaaaacagctataattatggccggtatttattttggctatctgtttgttcgtcgattcctatcgttgaaagccagtttagccagtgtggtgcttgtatgcgtggcattgtcatcattcttctacgcaaccatgacggacatggggatctataaatctatctattcaagcgataataattatgcagagcaaagcattctggaaaggatcttactgattgaagaagtgagaaatagtgacacctattcaatttttaccggagcaggttacggcgttaacggtaatgccgcggtcggtgatgatgctgcgctgccgttggacagtatctatatcttcttgctttccaactatggcggagtgggaattttcatcttcttacttgctgcgtcaattattttactgaaactgtataataaagtccgctatggacagttctacacgggcgtgttcctgtattggatgatttcgctatctatcaacttagtttataacaacccgattactaattatccagggtatgttttctcgattattatttctgctttgcttttgtcatttagacaagatgagttttctaaggtggctgatgcccaaaggctccaagcgcagacacgataa

SEQ ID NO: 436952 - DNA, 1221 bp, Serratia marcescens
gtgaacgtacatttgcgtcactaccccaaaccgacagacaactatctgtcgttaatcaaggagtatggctttacttctttccgagccggctatttgtggggattggtagagcgaacacccggtacgatgaacgtcgcagatccgttgactaaggaagatgatgcttatcaacacggtctctctcagtatgggttgaattctttactcattctcgcctacgggaataccgcctataacgcacctgactaccccacaacgcctgcggctatcgatggatttgccaattatgcatactggaccgcaaagcgctttaaaggaaaggtaaaatattacgaagtttggaatgagtggacggtgggaaccggtatgagtaaaaaaacggccattcctccgccagaagtgtttgcagagctggttaggaagacatccgccgccgtaaaacgcgcagaccctgatgccatcgttctcgccggttcgcttaatcctctggggccggcggggctaagttggttcgaccaattgatgaagctaggcatacttaatgatattgacggtatctcgttgcatccttattcctaccgtttgccggacttagcgttaagaacgccagaggataacctcaacgctatcgataaatttgagcaaagggtgaaagccttcgccaagaaaagcgtccctgtttacattacagagatgggggtgccgacttacaatggccccggtggattaagtgatgctgctgcggcgcaatacgttgttaagtatacgatgttggctaaatcgcgaccgtatatcaaaggtatttggtggtatgatctcattgatgatggtgacaacccggcaatcaatgaacatcggtttggcttgctaaatcgacaggaacaaccaaaagctgccgcattggcttacgaaaaaattgccaaggtagcgcgcgatttcaccgtaagtgactacaaagcatcgtctgacggcgtgataagtattgcgttgaagggcagcggtaatcagtatgcgatgctctattggcaaaaaccgcaagtggtgcaaccttcagctcaggcaaatggtttgagatcattaatcagcagcgcgccagtacagaagacgaaagagtctgccgcccaaccgttgattgagttaaacagccagaaaactgtgttgcaaggagatactcccgtgttgatgttatccgataagcctatctcatcgccgacgcgttaa

SEQ ID NO: 436953 - DNA, 765 bp, Serratia marcescens
atggaaacgcggcgcgaagaacgtatcaaccggttagttcaggcgttaaaacgcgctgacaagatccacctgaaagaagccgccgcgctgctgggggtctcggagatgaccattcgccgcgatctgagcgccgagccggcggcggtggtgctgctcggcggctatgtggtgaccgatccgcgcagcaacggcgtgaccaactacttcgtttccgatcaaaaagccaaacaggtcacggagaaacggcgcatcggcctgctggcggcgccgttgatcaatgaaaacgacacggtgtttttcgactgcgggaccaccaccccgacgatcatcgacgccattgccgacgaactcaccttcaccgccgtgtgccattcgctgaacaccttcctggcgctgcaagacaaaccgaattgcaaggtgatcctgtgcggcggcgagttcaaaccgaacaactacatcttttccagcgtcggcggccgcaatgagctcgatcacatctgcccgaacatcgcctttatctccgccgccggtctcagcctgcggcacggcgccacctgcttcaacttcgacgagctggagatgaagcatcgcgcgatggcgatggcgcagcaaaagatcctggtggcggatcacagcaagttcggcaaaatcaagccggcctgtatcggcccgctgacgcagttcgatcgggtgatcaccgatcgccagccggacgccgacttcatggcgttcttcaacgataacgccatcgctacccgctattga

SEQ ID NO: 436954 - DNA, 693 bp, Serratia marcescens
atgtttcgagcttcagcactggtattcatcttcgcgcttgtcgggtgcgatttttcatcatttcatttaggcaaacaatctgatacacggcagccactgagcgaggcattgctaaatttacctgctgatatcaagaacgatattgcctatgaggcaataactcatggcaaaaagaggggtgatattctcgtcatgacatttcaaagcgccaaatacggttacttgagactgtcgaatgaggatatttcatggcatgtcgagactgtcaataaaattctccatttattgagtacggaagagtgcgcaacggtcatgttgtctgccaagatcacccccgatgtgataaagagtttcgatgcggctttattacggcttgacgcaaaagaacgggcgaagttcattgatcaaaccattcgcgcatttagagccatcattttggcttctccgccagaaccgcaaatagattttgaagtattcactgatgcgtactctcgatttgtcagcaaattgtcttatgaaaaccagatgggcgtcgtctatatcagtgactcttataaggaagaaaaaagcaccaggccacttgatagcgctgcgatttgtcgcgccggacgggcgttatatgaacagtacggcgaaatgaaacttgatgaacggccgttgattgcgagagcgctggtgaaattcttttggtaa

SEQ ID NO: 436955 - DNA, 519 bp, Serratia marcescens
atgttagtgataacgattatcacttcaaccgtttgttttgcgggggtatccgccgcgagcgcggtttttcgctgcggcgtgcggcaagccagcgggacatccgtggcggcttgcggcgtgtggcggcaaggcgtgcatgctatccctatgaatttgttctttatcctgcatcaccgtacccgcactccccggtggcccgtcagcgatacagcgccgcggtgcgttgccgatctaaacattcatagaaaatacctatttctgcattctgtctgtcgtaaatgtgcgtttatcggcattttgcgccgcggcgcaaggcgcggcctttttaagttaaagtttagtcgctctgggttaagttgggccgtcgatggccttttacccccatggaatgaaaaaacgccgccacggggattgatcggcaacgcggcagtttatatgataatgattatcattcaatttgaatttgagcgcgaagccaatgactctttcgatcaacgcatggttgctgggcaagattga

SEQ ID NO: 436956 - DNA, 816 bp, Serratia marcescens
atgaatgacacgttaaatgaggctataaatgtagccaaagaacgcatgagtggtcctttaggatatatatccatatcatttcttgcttataactggtcttggttttactatcttatattcagcaataaacctgcagaatttaaaatatcaaccgtaattcattcatttcccatatattctggagttggatatcctgttgcattcggaattgcaatggctattaccatgccatttattcttgcggctttcagactaatcacatataaagcagagataattataaagaaagcagatagtgacgcaaaaagtttcgcagatgaatacgcagcagataagaagttaacgcttgccaataaacatcatgaagcgacaacaaagatagcaaacattgaagatttgaagaagcaaaggcagaacctgctcaccgagataaccaatctacaggagaaattagaagaattacaacactcagaagtccaagcaagaagtgagctacttattgcaatgcaagaaagtaaggacatgacgtacgcaaatcagagtggtgcaatttatagaggtaaaatcagcgcactggaagatgaagtcaacaccaaatcggaatggaatattttatatcaaaatgaattagaaaaaaacagcaaaaccttgttggaaaacagaaccgacttggtctcactgttaagtataatcaagagaaaaccaagctggaaatacggactaagtaaaaaagaagttgagagaattttatttataacggaaaaagttaaccattgttttactgataaaaaaatagtgaatgatagtaaaaactaa

SEQ ID NO: 436957 - DNA, 756 bp, Serratia marcescens
atggcagaagaaaagaaaaatgctcaggtgattaacggcgttaacgacgatatcgcggaactgaaatcgctgtctacgctgcgccagcgcgtggtcagcgacggtgaaatcgtctccaaatcggccaatggttttcggctggcaaatggcaataccggcgtgatgctgcgcaacgacggtgaagctttttacttactgacaacccctgccgggcaagctcaaaacggacaatggaacaccttgcgtcctttcgctttcagcctggcttccggcagggttgcactcggtaacggcgttgatatttccggtggggcgatggtatcgcataacgcgggcattcgggcggtgataactgggccagcgccgctgatcaatgggcaaatgtactctgcgcctccggtatataccgatttcaccagcggcaacaaaaccaccaccatgatgatgggctcacgggttgtcgccggtaaagaagactacggtttgctttcgtaccgcgattggcaagggaactggaacgagctgcaggtgagagcgaatagcgagctttctgtcgggcagttggtaaagcgtaacgccaatggttggatcgtggccgcaggtaacttcgacactaataataatgccgatcgtattaccaacgcgatgcgtatacagggcaagggcgatctgtttgccgacttttatcattatgaacgcatcggtcagcaccactttgtggggctgcacgtggctaacggcggggcgcaaggatga

SEQ ID NO: 436958 - DNA, 3576 bp, Serratia marcescens
atgggcaccggcaacgcgctttcacccataatctctgaacaagccagaaaaaaaggcagctacatcattgtcagcctgggtgatgattgctcgccgtcaggaaaggcggatcgactcaaagcgatgatggatgcagtaaaagatgatcctaacaaaagcaatcttcatctcgatttctacgaccgttccaaactcattcaatggctgcgccaacatccatcagtaatgctgtgggtaaaagggaagcttgggcaaggatattccgggtggcaaccttacggagcctggagcaatccgccccaaggtgttacagacactttaatctcagccccgggtgtaaccattactttaccgtcgggaaaggggcaaaaactcaaaattgatgaagcaattagcccaatgcgagaacttatccgttcgacgaataaggcggttcgtattacaggattatctggtgtcgggaagactcggatcgttcaggcgctctttgatgaaactgttggaacagatgcgcttgaccggacagtagctatttatgttgatactggctttgagccagtaccgtcggctacagcaatgcttgataagctgatcgctgaggagcgacgagcaattatgatccttgataattgtccatcagaactccatgcttcgcttgccagcaaggtatcagccgcaggaaaagaagtaagcctcatcacaatcgagtacgacattagggatgacaaaccacagacaactgaggtcatccatattgagacagatggtccagaggtggcagagcaacttcttatccgtcgcttcccttctattggtcagaataatgcccgtcgtattgctgagtttgcagatgggaatgcaagggttgctttggctatagctgagagaggggaggaaggcgagagtttggctctactttctgatgcgcagttgtttaatcgcttgtttgaacagcgtaatcatcctgatggtaatttacgggagcaagctgaaatattgtcactggtgtattcattctcggtatctagtccagatgctgctaccgatgaactggaaatattaggggcgctctttgggtattccagaacccagttatttaaagccgttacgaagctgatggaacgtcatatcgttcagaaaagatctcactggagagctatcttacctcatgccattgctaacagattggcagtatccgcactcgacattattcccgtcgatcaacttagggcgacttttgaagctccggattgtgagcgtttattaatgtctttttcgcatcgcttggggttgttgcatgaccatcctgttgcgaaagaaattgtagaagcctggcttcagcctgaagggatgttaggaagaatagccgagttaaatgatatttcgttacgaatacttgggtatatcggaccggttgcacctgaagcattgctcaacaggattgaggccgtactctcatcatctgatttcaaaggtatggaaccgggctacaatccgcagcgacgtagtattctgcgtcttttacaaatgatggcatacgaaccgaatgcctttgaacgatgcgccaggcttcttattcaaatggcagaggacgaagccgataataataacttggattctgctcgaaacatggttccaaggtttttccaggcgtatctgtctggtactcatgcatccctaagtcagcgtattgctttaatgaacgaatgcattgcatcaagtattattacgcgtaaatctttgggcttaaagatgctgtcaactgccctggatggcccacagtggtcagggtttggggttggtgagtttggagctcgaccaagagactatggatacgaacccaactatgatgagcttgtcgaatggcgcagcgcctttattggcgtcattatccaattagcggaatccggagatccggagcttgaaaggcctgcaagatcaatcctggctgacaaattcaggggaatttggtttcaagaagcaatgcgagacaaactcgtcgatgctgcccgtacattaaatgctttaagtccttggggggaaggttggaaagccgttcgttcaacggtctattttgactataccaagcgtagcgatggagatgatgttgagccgttgccggataatcttgctgccttagagaaggagttggagcccattgcgttaattccaacaataaagacatacgtgttgagtacaaatcatgattattgggcactggatgcggattttgatcatgaggactccgataaatataccgcagccggaaaacgacttgaagctaaagcacttcaattgggacaagactttgccttatcaaatcatgtacttgaggagttaggagcagatttgttctccatcggtggaatgccttatcgtactgtctttggtcgaggacttgctcgaggggcacatgatctacgtattggctggcagcgacttgttgaacaaattgaaaaacaaccagatgctaacaaagactttggagttattggggggttcatcgaagaagttgactctgtcgatccaccattagcacagaagtttctcgaccaatgtgcacagcatcctgaacttcgacaggtattggttggcttgcatccttgggggaaatttacagtaaatgatttggaccgctgcatgaagcatttggatgatccagacattcgcccttttatgtatgagccaattctctggcgagaccaatacgccaatttaccgagagtccgtttacttgatcttgctaagtgccttctaaataaagttagcggcgacgatgttattttggatgcactatccatgaagcttcatggtaaagatgaatctacagatacgctcggtgcagactttcgattaatcggtcttgcagcagctatccagaggattcaaaacagcgacagagaccaagggggaacaatcgattatcgcatggaacaagttatccatgctgcattgcgtttcgatggtaatgaggcaaaaaaaattgagtggttggacacaattttcaatgtcattgatgaacactatggatatttttttggattcgagaagactatagcaacaactgttgcgttaatgcctgaatcatttctcaattgcatttttgaatgcaccgaggaacagcagcagagaagacagttctttattcgtcgtggcggtttacgccgttctcctcttgcagatgtaagtactagcgtcttgattgaatggtgccgcgccagaaatgatcccagtgtttgggctgccattgcggctggtgtgactctctggtcaaagaatgatgaacagaatgtactaaccctacacgaagctgctatagaactgttagaggcctctcctgagccattagttgtgctggagtcttttgctgagcgaatcactccatcctcctggactggtagcctggcgaacataatgcaagctagatcaagcgccatcggtgcgctgagtaaacacgagcgtccagatatcgccgaggctgccaaaacagtttgtgaaaaaatgagtcattggctcgaacgccaaaaagaacgtgaacaaagggaagatagtgaaagggaacagcggtttgaataa

SEQ ID NO: 436959 - DNA, 639 bp, Serratia marcescens
atgtcgccagtaaaaccacgcacggtaaaccttgaacagcgtaacttatcatccgtttttggcaccctgaagaagctgaggcacaggccagcgcctaacccactcgccgggctaccgacattcaaaatcgcagaggatgaattggcattcttggccttggacgaaattaaacgcctgcttgatacctgcgctgattctcaaagccctagcctattgatgatcgcaaaggtatgcctagctaccggcgcgcgatggagtgaagccgaaaaccttcaaggccatcatttatcaaaataccggatcacctataccaaaaccaaaggcaagaaaaaccgaactgtaccgatatctcaggagctatacgacgaactacccaaaaacagggggaagctgttcacgccatgcagaaaagcttttgaacgggcagtgaaacgggccagtatagacttaccagcgggacaatgcactcatgtgctacgccatactttcgccagtcatttcataatgaacggtggaaacatacttgttttgagagatattttgggtcattctgatatcaagatgaccatggtatattcacacttttcaccagatcatcttgaagacgcagtttataaaaacccactcaactttttataa

SEQ ID NO: 436960 - DNA, 1743 bp, Serratia marcescens
atgaaaacgcagaaatttgtaagtgaactttttttagaaaatgggcagtttattctagttggcctaactgggagaactggttctggttgtactacagcagcaactattttagaaagtaatgaaacagtatttcccgatgtggataaattaactgatttttataatggtttagatttgcagcgttataagatagttaaggatttcactgagagtcattgggaggcattttactcaatcaaggttagtgacttgctatcagtttatttgttagcaatgtcacatactgaactttcacacttcatcacgtcgtcaactaaagatagcattgatgaagataaattgaacaagatacttaatgaaggagcattttcaaaaacacaacttagaaaaataaggacggatatcttaaaagcacttattgatcatggtcaagaattagatctcgataatctagatgtatctaacataagaaaaacattgcatttggttaggtttttcactaataacttcaaaaaagaacttaatgagataaatacaggtctttatgtatcaacttatcaggctgctggaaaatctgttagacggcttggtgaaataaaaacaaattatgaaacagaagaatttgatccaaaatcggtatttcatttgcctgaaactatcaatagggtcattaagctaattagaaaaagccaagatggtaaggcattagtagttattgatgctatacgtaatccatatgaagctaaattctttaaagatagatatgctgcattccatctggtatcaattaatgctccggatgagcataggaaaaaatatttacagaagctacacaaattttcatctgagcgcattaaacacattgatgatattgagtcaggaaaaggagataaagacaatcaatataaacatttaacgaatcctaatgtaactaaatgcatagaaatttcggatatacatctttataatcctaaaaatgagtttgataacaataatatacttaaagcacaacttgcatggtatatcgctctaatgaagcatcctggattgatcactcctacagcgatggagcgagttatgcaggtcgcatatactgttaaattaaactctggatgtatatcgaggcaggtcggtgccgttgttacagataatgataattcaattaaatcagttggttggaatgatgtggctaaagggcagataccatgttcaatgagatcgctcgatgggttgatcaatgattttgattcgaaagtatatagctcatatgagcgaaatgatgctctttttagaaagaaagctaaaagtaatttaataaagtttagagcgattgaatcaagttctgaaatttttaaaggacgtaatttgtcatattgcttcaaggatattcataatagtcttgatgatgataaaaaagggaatcaggtccataccagagctttacatgctgaagaaaatgcctttttacaattatctaaatatggtggcgttggtgtgcaaggtggtaagttgtatactacagcaagtccttgtgagctttgtgcaaaaaaagcatatcaactagaggtcgctgaaataattttcattgatccttatccaggcattgcacaagatcatattattaatataggtaataatccacctaaattaattcaatttagaggggcaattggtaaatcatatcatcgattatatgaacaaattattcctatgaaagatgagttggattatttatcaatgtaa

SEQ ID NO: 436961 - DNA, 327 bp, Serratia marcescens
atgacgggtaaattaagcgttcaaacggttctgtttgaatatcatggacaaaaatataaggtcttcctggcatgcgataaacggcatgttgggtgcaacgaattaaatccgttgtattttttagatgccaacagacactttgggaccctaattaaggcgggttatcacggtgatgatgtatcccctgtgctttatattgggatcggttatcaggaggggggcgatattaaggcggctcgcacatttgactatacggcgagcgctgcagcttcgagtttcttcctgggcgcaaacatccggcggtggcaaaagattatgcacgcatag

SEQ ID NO: 436962 - DNA, 1770 bp, Serratia marcescens
atgacagttcgattgaataaagtatcaataactaacttcaggtcttgcaaatacaccgaagcttttctaaggccatatacagcattggtcggctataataacgcaggtaaatcaaatattatattggctataaaatggctcttagatggctccctactaagcgatgctgatatgtacgacccacaaaatccagtgcgagtagagggagtcattgaagggattactgatgatacgctgacgttacttagcgaagaaaatcagcaaaaaattgcaccattcatcatagataaaactttgaggtttgcaagaaagcaggacagagaagttgttgatggtgataagttaaaagtcaaaaaaacacttgaggtttttgatggtaccacatggaaaaaaaatcctggtggaatcgatggcgctatctcgaatcttttccctgaaccaattcatattcctgcgatgtctgatgctgtagaagatgcaaccaaaaataaagccggtacaacaatcgcgaaaatattagctgcaattgttagcgaaataaaaaaagaatatgaagtaaaattctctgaaaacatctcggaaatcggtaaatatcttgctcatgatggttctactaggttggatggtttgaacaaaatagacagtggcgttagtcagaaagtaaatcagtttttccccgatgtgagtgtgaaactacactttcctacccccactctggatgaaatattcaaatcaggaaccttgaaagtatttgaagaacgagctggttcctcaataatgcaagacatcagccgattcggccatggtacacagcgttcaatacagatggctttgattcaatatttagctgatattaagaaaagaagcgatgatacaaaaaaatcaaacactcttattttcattgatgaaccagagttatacttacatccatctgccataaactctgtgagagaatctctggttgctttaagcgatcttggattccaagtcatcatctcaactcactcggccagcatgctctcagcaaaacatgcctgcaatgctatacaggtctttaaaagttccgaaggtactatagcccggaaaaccatttcggaaaaaatacaagaattatatgaggcatcctcaccacaacttcactctgcatttaccttatctaattcatcatttttcttattttcagaagaagttttattagtcgagggcaaaacagaaacgaatgttttatgcgcactttataaaaaaattagaaacaatgaactcaaccctaccaagacaagtattgtagctgtagatggcaaaggtagtcttttgaaaatggccaatgttatcaattcaataggtataagaacgcgaatccttgccgattgcgattttctatcaatactactgacaacctctcataatgaagtattaagtagtgaatgcgatgaattactctcatctttaaccaatttgtctgatccacaaagcttgcaacttactaaccccattatttctatagactcactaaaaagcagttcaagcaaagactttataaaaatctgcaatcatcatgaagtaaaagcctcaatcaaaaaaattcatgataaattaaagagtgatggaatatatatttggaagtcaggggatattgagcaagtatacggatttggaaaaaaacaaagcgaatgggataatttattagattgcttaagcgatgatgaaaaagaggtccgtgccattattaagaactatgatgaaatggaagatttcatcttatggatttga

SEQ ID NO: 436963 - DNA, 555 bp, Serratia marcescens
atgttaaatgacgcattgatacgtaaagagtttgttaggaagcatataaaagatcgctcgataacttttcatgaactggccgtgaaaagaggtattgctattgcagatatagttacgattaacagttttgctcattgctatgaaattaagagtgatgttgatagcctgtctcgtttgccatcacaagttaattcatttagtgatgtttttaagaaggttacattaatcacaaccttcaagcacttgactaaagctcaatatattataccttcttggtggggagtgatcgttgcaaagcaagtaaaggatgaggtagtatttaaatatgtaaggaaatcaaattcaaacccgaaggatacatcatctaatttgctgaagttattatggaatgatgaacttaaaagtattctttcctcaaaagatataccttttaataaaggttttaatcgagatgagttagtggatgttatcatcaggaactcatcttcgaagtttataaatagtgttttttttgctaagatgaatgaacgtgtcaatcaatctcatcataaataa

SEQ ID NO: 436964 - DNA, 1065 bp, Serratia marcescens
atgaaatatttcattttcttaaagacaaaaagaggcgatttcaatacagtaaaaacattaaactccaaagacatgagtattgtccctgtttttgatttaacagcaaaagtcactggaaatacgagcccagatattttaaagaaacaagaagattttctctccaacataacaaaacactgggattcaaataaactattttttattgatcacaatgatataagtctaaccttgcgacacaccgatggttctcatccatatggtttttatcataaaatattatctgccggtttcaatttgggattagtaactggcatagatagggatgctcaataccaatcagaggttattaatatattgaaaaactttaagaacacacgtgttcttataaggttacatatcgatgacattacagccttgcggataactttatcagaaatattagacctgcactcggaattaataaaacacactaactttgttgattttgtagtagacaatcgaattatcaaaaaagatgacgttttaaatttctcaaaaagaattgaaaacttcgtactggcaatagagaaaagcagaatagatagcttaatgatagttgcatcttcatcgttccccgcatcaataaaagactatgttggaacgggttctgttgagttaattcctttgcttgagttgaaattatgggagttagtttctaacttagaaacaaattatgttagcttgacttatggtgactatggagttgtttccccagactttatggaaatatcaactaaaaatggaaaaggaattccaattgtccctaagataacatacaccttagaaagagattatattgtaagtagagggaaaataacatctcaacacccaagaggatataaacaatataaagacatggctttatatttcacttcaatagcagaattcagaaatgacttctcatttggtgaaaaatacattagcagaataagtgacatgacaactaaagagagtgggaacccgactacatggataacagcctgcatgagccaacatgttaactttatttatgatgagattgattga

SEQ ID NO: 436965 - DNA, 903 bp, Serratia marcescens
atgaaaaaaacaataaactttgaattttacgatgaaatcgaagatagcgtcccaaccatttcctcagggaatgaattatctcacatagaaaaattcgccaatcttattttttggattgatgaaaacaagaaacacataccagtaaaggaacttattaagagagaagcaatttcagaagaacaagaccacgaattcgaggtttttaaacttctttctcgggccgagaaaaataatgcaacacctttattcagagcagggaacctccctcagagtgataaaagaaacgttttaataaccatttggcagggattgattaacaaaagagcaaaggatttgaacaaccttcctaaatatcataacaacgttgataagaattttatttccgaactaataaaacaaagcaaagatatatctctcctccccagcattagtggttaccttcacagttttggcataggtttaattattgagccaactttgccaggattgggggttgatgggttagtttatagagataaaaaaggaaaccccattattgcgctttcgctaagacataaccgattagataatttctggttcacacttgcacatgaactttcacatgtagcattgcattacgaacttctagagaatgcaattatcgaagatttggatcaaaccaatacatctgagatagaggatgaggccaattactttgcatctgaatccattattagcagttctatttggcgaagatgtgaattccgcagaaaacaaactgatgatagtctaaacgaactagcaaaaaaccaaagtatccacccgatattattggctggtaaattgagaaatgaaaccggaaattatgaattatttagcaagctagttaacaaatactcagtcagggagattttattaggatga

SEQ ID NO: 436966 - DNA, 630 bp, Serratia marcescens
atgctgtgtattgattctggaacaatttattctccgttaatgaaaaaagaatacaaatacagtacattccatagagcaaatgatacgtaccttcaggaagttttaaatttttgggtggcagagtctcaaaaggaaatactcaccataaaggaatcttgttctgacagaaatgaatttataaaaaaaataggtgaaaaaaacatctatgattacttttgggactgggaggaaataataagaaaaccagatggttattcactggaaaccttttatcttactgcaaattgcaatgacaagaatgtgcaagggatattacacgcatattttcctgaaccatcaaaaatcgcagctgggtgcaatatagtgtacattgacaggcttgcagttgcaccatggaatcgtcaaatactaggcgagcagaaactatttaaaggagttggcagcaggctagtaatcgcaatttgtgattacagcaagcaaaacggcttagaaggttgcctggggcttcatgcgcttcctgcagcagaacctttttatagaaacttcaagatggttgattttggaattgacactacacatgaagggcttcgttactttgaattagataaagagcaagccggggttttatga

SEQ ID NO: 436967 - DNA, 279 bp, Serratia marcescens
atgggctatgacactaagattgagatttgtggtcatggcttccgagctatggtttgttgttcattaattgagttcggtttatggtccaaggatgcgttcgaacgtcagataagccatatggaacgcaattcggtgagggcgacgtatatctacaaagcgggacatctagatgagcgtaagctgatgttgcattggtgggctgattttctggatgctaatcgggaaagagcgattatgccgtttgattatgcgaaaataaattggggtaatgacgtgtga

SEQ ID NO: 436968 - DNA, 3234 bp, Serratia marcescens
atgaaactgatccataattctggtacaaaccgcgttatcgacctgattaggccccatattaagcgtgggaatcaactcggctgcgtaactccttcgttctccttatatgcttttgctgagatgcgtgaggcgttgtctgttcttgaacgggtccaatttatcttatcacctggtgataaagcgctcgacttcctcggagaggaaggtgatcggagtgcgcgcaactgcctacagacacgttggctagccaatcaatgtgcgaaatggataagtgagaatgttgagcttcgccgcgcgcttgggccagtacctcaaggcactattgtaatgcgtaaacctgatgctacccctgagcaagtggttctggggtcgttcgcatttacgactgcaggccttggattaacgccaggtaacccgttgagcttgattcaggcttcagaatcttccagcgaagcagccatcttatctcagtggtttgatcagcaatggctgagtttgcaaggtgcgtttaatagtgactcaactgagggagacaatgatcgtgatgcagtagttgcagctttgcagttcattggtgaacatcgtgatccattgactatttactctctcatattgcacaacctatttcgtgatagcgaggatgaaatggacgaagagcgcatcgtcaaatccgctaccggtatccgaaatacagtggtctggaaaaaactcttcaaattccaacgcgacggcgtggtaggtgctatcgacaagctcaaccgttttggtggttgtatcattgccgatagtgttggtcttggtaaaaccttcgaagcattggcgattattaaatatcacgagttgcgtaatgaccgagttttggtattggcacctaagcgtttgcgtgataactggacgctctatcaggctaatgacaagcgtaatattcttgccgctgaccgcttcaactacgatgttctgaaccataccgatttgtcgcgtgacggggggatatcgggcgatatagacctttcacacattaactggggtaactatgacctggtggtgatcgatgaatctcacaatttccgcaataagactgcacacaagggtaaggaatcacgctacgatcgtttgatgcgtcggatcatcaaagaaggtgtcaagacccgtgttctgatgctttcagctacgccggttaataaccgcctttctgacttacgtaatcagatagccttcgttactgaaggtgacgataccgccttacaggatcacggtattgccagtattgaagccaccactcgcaaagctcagactcagtttaatcgctggttggtaatggatgaacatgaaaaaacgccgtccaaactggtggaaatgctgggtttcgactatttcacgttgcttgaccacttaaccatcgctcgctcgcgacggcatgtggaaaaatattacggcactagcgagacaggtcgtttccctgatcgtttgtcgccgataaatatcaaggcggacgttgatcttgcgggtgagttccgttccattcgcgatattaatctggaaatccgtcgtcttacgctggctagttatgcaccactgcgttatatcctgccacacaagcaagcagcctatgatgctaagtacagcacgcagattcgcgggggagaaagttttttccgccaggctgaccgagaagaaagcctgattaacctactacgtgtaaatgtgctcaagcgtatggaaagttcggtgacgtcatttgcgctgacgttgcaaagacagctcagggatgtggaaacaacgttggcccacattgaatcgcatactggcgagcttgaggaaatcgatatcgctgatgtagacatagatgatcctgccttcgaagctctattggttgggcgtaaagtcaaagtattgctcggtgatgttgacttgattcgctggaggcaggacctggtcgaggatcgtaaccgcttggctaccttgctgtcggcagctaaacaagttaacgcagaccgtgatgctaaactggccgcactgcgccagatgatcgaagataaatgccaccatcctatcaatagcggcaacagaaaaatcatcgtcttcaccgcattctcggacacggcaaactacctttatacgcagctcgcatcgtgggttaagggtaatctggggattgatgccgcgctagtaaccggtagtgcaggtatacagactaccttgccaggtttgtgcaagagcatgagtgatgtattgtctgcttttgctccacgagctaaggagcgcccggaagagcttatcgctgagggtgaaatcgatttgctgatagctactgattgtatttctgagggccagaacctacaggactgcgattggttgatcaactatgacattcactggaatccggtgcgtattatccagcgttttggtcgtatcgaccgtattggttcaccgaatcaatgcattcagcttgtaaacttctggcctaatatggagttggaagaatacataaacttggaacagcgagtcagtggtcgcatggtgctgcttgacatatctgctacaggtgaagaaaacctaatcgagcagcagtccggtaacccaatgaacgatcttgagtataggcgcaagcagctactcaaattgcaggatacggttattgatatggaggatctttcttccgggatttctattaccgacctgaccctgactgactttcgcatcgatttggcaaagtacctgaaagtgtatcctggtaagctggaggcccaacccctcggggcatatgctgttaccaccagtttggatgctgaaattccaccgggtgtaattttctgtttgcaagcctgtgtatcggagacgcataaagtccaagctgaacgggtaccatcagagtatccactggcaccatattacctggttcacgtaggtgccgatggtaccgtattgctaccttatccgcaggctaaacgtatcctcgattgcttgaagcgccttgctcttgggcgtgaacttcctgacgatgcggcctgcgcacgctttgacaaaataaccaggcatggcgaagacatgctttatgtccagaaactccttgctgttgcggttgcctcaagtgtgggtaaaaatgaagaacgggccgttgccagcttattcaagcctggtggaacccatgctatcaagggggagtttgctgggatcaatgattttgaggtagtggcgtttatggtgatcttgccagagagtcagacagcatga

SEQ ID NO: 436969 - DNA, 807 bp, Serratia marcescens
atgaaggggattgacgcgcagctcgttatccaagcgttgggccttccagatagctgtagggtggatcagcgagttcctaagaaattgctgcttgaaaacggtgtttttacaacgactgataagcgtctgatcgctgataacatcgcagagatccagtggatcgcagcactcaagcccaacactgttggggtgccagactaccgggatatgcagcgcgaatacctcgagatcgcggtactggttatgaccttaaagggggaggtaaaatctacatatcagtctcgtttggctgagttagtgcatcgtgccgtgccttatccggtgctgctgcaacttattgacgagcatacgcagacactttttcttgcgcataaacgctgggcgcagaacgaggtcagcaaagtcgtgcttgaaggcggcttggtatctgtcgcactattcaacgctatgtcagaagctactgtgtctactcattttacatatccggaagtcgagcaagcctttatgcagtctctatcagtcacacgtcaacctcaggccacgctgtacaccctttaccaggggtggatagattgtgtacgggcacttctggctgctcggttgacaggaagctaccgaatgacgacgactcaggaacaggcagaggcacgtcggcaagctttggccgattacgaacggcttgaaggcgaaattagtcgcctgcgggggcaagccataaaagaaaaacaaatggcacgccaagttgaagtgaatcttcggttgcaagcactgcaggctgagcgtaaacggatcgaaaaatatctctaa

SEQ ID NO: 436970 - DNA, 2124 bp, Serratia marcescens
gtgaaagcctcagaaactaatctgcttaagtttttacgcaagtctccacagttcgttatccctatctaccagcgtaactattcgtggacggaagctcagtgccaacagctctggtctgacttaatgcgcgcaggttgtgatgaggatatcgacggccatttcattgggtctatcgtctatgtggagcgcggtctatccaccgtgacaactcaggaagcactgttggtcatcgatgggcagcaacgtctaaccaccagtactttactgattgcagctttagctaatcactttgaaaccaagcaacttcccgagctactcgacagtttttccgctcgaaagttacgcaattactacttgcttaatccagatgaagacggtgaacgtcactataagcttatcctgtcggaaaccgacaaagaaaccctgctggcaatcctgaaatcaacgccgatgcctatggacgtgagttctcgcattgagcagaattacaagctcttccaggcgctgatcgaaaagcatcagggcgagctcgaagctatctgccaaggccttgccaagttactcattgttgaagtgtcgcttgatcgtactcgggataacccgcaattaatcttcgaaagcatgaactccaccggtcttgagttgagtcaggctgatctgattcgtaattacatcttaatggggctagagccaaagcttcagacggagctctatcagagttactggcggccaatggaaaaggcgtttggtcaggcggcctacgtgacgcattttgatccttttatgcgtcactacctcactgctaagacgggagatattccgaatgtgcgtgatgtatacattgcctttaaggccttcgctcgctcaagccaagttgataccaccgtacttgtcgccgatatacatgcttttgcaagttactactgcgctatggctcttggagcagagaccgcgctaccattaaaacaagctttccatgacctgcgtgagctcaaggtagatgtagcttatcctttcttgctcgatgcttatcatgattacaagatggctcggctgacagcagacgaattggtgagcatcgttcgtttggtggaaagctatgtgtttcgacgtgctatttgtgctatccccactaactcgctcaacaaaacctttgccagcctgagtcgctcgttgaagaaagatcgctacctggagagcgtccaggccgcatttttgcttctgccatcctatcgtcgcttccctaatgatgaagaattccaacacaagatcaaacaacgagatctgtataattttcgtagtcgaagctattggttgcgacgcctggaaaatcacggccgcaaggagcgaattgtgctggaggaatacaccatcgagcatatcctgccacaaaatgcggtgttgtcaccggaatggcaagcagagcttggtccagattggcaaaagatccagcagacgtggttacataccttgggcaatctaactttaacgggctacaacagcgagtacagcgattatccattcgcctataagcgtgaccagattaccaatagcgaaggtaataatataggctacaaatacagtgccctcaatattaataaggggctgggtgaactgagtcggtgggatgagaatacaatcaaggcgcgtgctgagcggcttgccaaagtcgcaacccaagtatgggggctaccattgctggatagtagcgtccttaatgcctatggccccaccgtaaccaacaccgtgcaacaatacagcattgttgaccatccatatcttgccaagggctctgtaagcgccatatttgatgccttgcgcaaagcgattttagatttagatccatgcatttacgaagaatatctcaaactctatgttgcctacaaagcagagaccaactttgtagatgttgttccccaagccaagcgtttacgcttgtcgcttaacatgccgttcaacgagatcgatgaccccaaagggctatgcaccgatgttacaaaccttggccgttggggcaatggcgatgtggaaattggattatccagtttagaacagcttccctacgtcatgggcctgattcggcagtcctttgatcgccagatgggtggcccacaggatgtttga

SEQ ID NO: 436971 - DNA, 1890 bp, Serratia marcescens
atgactatgaagaaaatcgacatcaacaacccagaggctcagtctgctgatttggtagctggcaatattgcacagcttaagattctgttccctgaactgattaccgaagggcctgatggcgttgctgttaatgtcgatgtgctgaaagcattagtgggtgacaaaagtgtcaatgacgccgacgaaaaatatggcctcaactggcatggcaaacgccgcgcacgacagctggcgttgacgcccagcacaggaaccctgcgtccatgccccgaagagagcgtggattgggatactactcagaatctgatgatcgagggggataacctcgaggtccttaagctcatgcaaaagagctatgccgggaaggtgaagctgatctacatcgacccgccttataacaccggtaaggattttgtgtacccggataactttcaggacaatatcaaaaactatctggagttaaccgggcaagtagaaggtgggcagaagatcagcagcaacactgaagctagtgggcggtttcatactgattggctgaatatgatgtatccgaggttgaagcttgccagaaatctaattaaggaagatggtgcgatttttataagcatcgacgagaatgaagcagcgaatctcctgcttatcatgaatgagatttttggtgaggaaaatttcgtactttcagcgatttggagaaaacgtgtctctccagcaaatgatgctaagtggtttagttcagatcatgacttagtcattgtttatgcgaaaaataaagatgtttggcgaccaaataagttaccaagaaatgctcaacaattatctaactacaagaatccggataatgatcctcggggactatggaattccgcaacatacacatgtaacaaatctaaggatgagcgacccaacctcttttatgctattcgaaatccaaatactggtgaagatgtttggccgaaagagacggctgtttggaagtatggcccggaggtgacagctgcacagctggcagataatagactgtattggggggctgatggacaagctgcatttccaagagctaagctatttctttcagaaatggacgatgtagtgccacgttctgtttgggattatgaggatgttggccatacgcaggaggcgacaacagagttaaaggctttgtttgatggaagccaagtttttgattctccaaagcctgtgaggcttctaaagcggattcttgaattatgttgtgactcaccagatgatttggttcttgatttttttgctggtagtggaacaacagggcatgcttcctattcacggggggggtctgaaaatcctgtgcgttttattttagttcagttgcctgagccattagttaataactcttttcaacgtatctccgatatcaccaaggaacgtctgcgccgctccgcggccaagatcaaagcagataatccggaatggcaaggtgataccggttttcgtgtcttcaagttggagcactccaatattcgtgcctggaaccccgatccggtaaacctagaagccacgttgctcgattatgaggatcatctactggaagatcgtagcgaagccgatgttctatacgagttactactcaagcgcggccttgatctttgcgttcctatcgaacagcgtactatcgcgggccgtgaggtgtattccgtcggtggtggtgtgctaatggcttgcctggcagagcaaatcagccgtgagcaagtggaagctcttgctcaaggtatcatcggttggtatcaggagttggcaccagctggtgataccacgtgcgtattccgcgacagcgcttttgctgatgacgtagtgaaaactaatctcgccgccattctggaacagcatggcatccagaacgtgcgcagtttgtga

SEQ ID NO: 436972 - DNA, 3033 bp, Serratia marcescens
atgaaacttcatttcgaacctaacctcgactatcagatgcaggccattgaagccgtatgcgatttgtttcgtggccaggaaatttgccgtaccgagttcactgtgacaatgaaggccccacagtcgggtgtagatttacttaccggaacgcagccagagcaattgacattaggtgtggctgagtctgatcttggcgttggtaatcggctaaccttgctcgatgatgagctgtacaaaaatttggctgatatccagtttcgtggtggtctgccgccatcagaaacattaacctctggtgacttcactgtggagatggagacgggtaccggtaagacctatgtttatctgcgtactatttttgagctaaacaagcgctacggttttagcaagttcgtgattgtggtgccttcggtggcgatcaaagaaggtgtctacaagaccctgcaggtcaccgaggatcatattaaggggctctatgccggtgtcccttttgactattttctgtatgactccagcaagcctgggccagtgcgcaatttcgccaccagttcgaacattcagatcatggtagtgacggtaggtgctatcaacaaaaaggatgtgaacaacctctataaggaaagtgaaaagaccggcggtgaaaaaccgattgatctgattaaggcaacacggccagttgtcattgttgacgagccacaaagtgtagatggcggtctcgaagggcgtggaaaagaagcgctggatgcgatgaacccgctgtgcacgttgcgttattcagcgactcacgtgaataagcatcacatggtatttcgtctcgatgccgtagatgcctacgaacgaaagctggtcaaacagatcgaggtagcttctgcaacagtggaagacgcgcataataaagcttttgtacggctcgtgtcggttgccaacaagcgcgggaccattagtgccaggatcgaactggatgttaccaccgccagtggcgtgaagagacaagagttgaccgtttccgatggtgacgatctggagcaacttgccaaacgttccatttatgcggattttcgcgtcggtgagatcaacacggccaaggggagcgaatacatggaactacgctaccctggtggtgaagtgtttttgaaacaggggcaagctcatggtgatgtggatgcattggccgtgcagcgtgaaatgatccgacgtacgattcgcgaacatctggataaggaaaaacgtttgcgtccgttgggtatcaaggtattgagcctgttcttcgttgacgctgtagacaagtatcgacagtacgacgcagacggcaatccagtcaaaggcgattatgcgcgtatcttcgaagaagaataccgccgggctgccaaattaccgtcctatcagagtttgtttgccgagattgacttgaactcagccgctgaagaagtacataacggatatttctctagggacaagaaagggcgctggacggatactgcagagaataatgcaggcaaccgggaaaatgccgagcgtgcttataacttgatcatgaaggaaaaggaaaaactgctttcctttgacacgccgctaaaattcatcttttctcactctgccctcaaggaaggctgggataaccccaatgtgtttcagatctgtacgttacgtgacatacagagcgaacgtgagcgtcgccagaccattgggcgtggactgcgtttgtgcgttaaccaacatggagagcgggtgcgcggtttcgaggttaataccttaaccgtggtggccactgaaaactacgagcagtttgctgagaacttgcagaaagaaatagaggcagaaacaggcatacgttttggcattgtcgagcagcaccagtttgctgtcatagccgtggttgatcccgatgggcagaccgttcccttggggattgaccaatccaaggtactatgggagcacttgaaagcggctggccatattgatgccaaagggaaagttcaagactctttgaaaaaggccctaaaagaaggcactttggtactaccggcagagtttgaggcacaaaagggccaaattgtcgatgtgttgcgtaaggtgtctggccgtcttgagattaaaaatgccgacgagcgtaagccagtgtcactgcgcaaagccatctatctcagcgaggagttcaaggcattgtgggaccgcatcaagcatcaaactacctatcgtgtgcagtttgataataccaagctaatcgccgactgtattagcctcctacaaaaggcccccacgattgtcaaagcacgcctgcaatggcgtaaggctgatatcgctattggtaaggccggtgttcaagcgacagagaaagctggagcttcaacggtagtgttggatgaaacagatcttgagcttccagatattctgacggacttgcaggatcgtacccaactgacccgccgtactatcattagtatcttaactggaagcggacgtctggatgatttcaagcgtaatccgcagcaatttatcgaattggccgccgaaactataaaccgctgcaaacgcctggccttggtcgatggtatcaagtaccagacgttaggtgatcagcatgtctatgcgcaggagttatttgagaaagaagaactcaccggttatctccagaacatgttaatggatacccaaaaatcgatatatgagcatgtggtgtatgactcgaccacagaacgagactttgctgacgcattagagaaaaacgacgcgatcaaactttatgccaaattaccgggctggttcaaggttcccactccgctgggtagttacaatcctgactgggctgtgctggtagaggaagatgacgcacagcgtctgtatttcgtggtggaaaccaaaagtagtctgtttgccgatgatctgcgggacaaagagagcgctaaaattgtatgtgggaaggcgcatttccaagcccttgcagtaggtggaggagcgcttggcgagaatccggcccgctatgtggtagcgaattccattgatggtcttttggcagaggcgacaaaggattaa

SEQ ID NO: 436973 - DNA, 552 bp, Serratia marcescens
atgttcgcgctgttggtaaggatcttacgacgagcatcgaggtttatggaaaagagtacagagttagactctcaagaaagccagcaagagcctgaagacacctgctcacaatcaactgaactgattgataagattgagcatgagttagttgaaaaccctgtagttctcgaacgacttcttgatcggccgcaagttatggcgatggttagccgaacagcatttcgcggccccctaccacctcctgcaatgctgcgcgagtacaatgatattgtgcctggcgccgccgagcggattttggaaaggagtgagaaagagcaggctcatcgacatcgggtaaccgagaaatccgttgatggggctatcagaaaggatcgccgcggtcagtggatggcatattcaattacattgattatattggctatagcgaccgtttttgccttgaaaggacaaactgtttttgcagggaccctaatcactgttgacttgatcggattagcctctgtcttcgctattggtagaatttcaaaatcatcatctgacactgaagactaa

SEQ ID NO: 436974 - DNA, 1182 bp, Serratia marcescens
atgcctttgactgacgtaaaggtgcgaacagcaaaaccccaagacaaaccctacaagctcgctgatggtggtggtctatacctattggttaatactaatggctctcgttattggcgtttgaagtaccgcgttatggggcgagaaaagctgttatcgataggagtctaccctgatatatccctagctgtggcgcgccagaaaagagatgaagcaaggaaagttctcgccgaggggaatgatcccagtgcggtaaaaaaggcggaaaagcaagcgaagaaaatagcggcggaaaacacctttgaatcgattgctcgtgagtggcacaaagctaaagctgaccgttggtcactgcgttaccgcgatgaaatcattgataccttcgaaaaggacattttcccctatatcggattacggcctattgcagaaattaaaccactagagctgttggaaactctcaaacgaatggaaaagcgtggtgcactggagaaaatgcgcaaagtgcgtcaacgctgtggtgaagtatttcgctatgcgattattactggtcgtgcagagtataatcctgcccctgatttagccggtgctttagccgtacataagaaacaacacctcccatttttgacagcacaagaactgcctgagtttatgaaagacttagcaggatatacaggtagcatcatcactaagagcgccacctatttaataatgtatactggagtcaggactcaggagttgcgttttgctcgttgggaagacattgatcttgataaagcaatgtgggaagttccggccgagcatatgaaaatgcgtcgccctcataaagtgcccttatctaggcaggccatatccctgctaaagcaactcaaaccaatcaccggccattatccacttgtatttattggtaggaacgatccacgtaaaccgattagcaaggaaagtattaatcaggttattgaacttctgggctataaaggcaggcttaccggtcatggttttagacatactatgagcactatcctgcatgagcaaggttacgactccacttggattgaaatgcaactggcacatgtagataagaatgcaattcggggagcttataaccacgcgcaatatctagatggacgtaggaaaatgatgcagtggtatgctgattatttatctgggatggatgtaggtttttaa

SEQ ID NO: 436975 - DNA, 831 bp, Serratia marcescens
atgagtccttttaaaataaagaatacagattatcttttgcgtgatttttatcaattaacggaagctgctgagattatcggttgtgatgtaaaagatatactttggttctcgcttaaaaaagggatagaactttgtatggagttctatgatgatgaacttgaggtatctaatggacttgattcagatattgaaaatgcgcaattgcttactgagataaaatcattaaaaaaagatgaagatggatattatgttttatctgagagttgtacattaagacttcatcctgaacaggaaaaatatgatgaaaatggttttttgacttgttatataaaagggttttttgccatcaatgatgagtataaagaacatctggttaagcatgaaggtcagccagatgaatggccggagtattttattccatctggaaattccaatcttgattttcctgtaagattgtttgttaactatgatgagagagaaaattactatttgttggatacattatggattacaaaaaaacaaataggttttttcttaagagaagttgcagagcaacagaaacctcagaagtctgagaagaattatcaagctcaatcggaggctcagaaacagaaacatgcagtacctcgagttgaagtcctcatggccatcgttgctttgtatcaccgagatatgaatttaagaagagaaagccctaccgcaatagctgactatctttttcttcacgcgagagatttctggccagagaagggggtgccgccattgagttatgacacgatcgttaatcttttacggaaaagcatgagaaaaggcgggttaacatttcagtaa

SEQ ID NO: 436976 - DNA, 354 bp, Serratia marcescens
atgcgtgagtttccccagcacggcgagcgctatcgccatcagcaaggcagaacggtgcgtatcctgagcctgtatcgcgccgatgaggcaacggcccgtaacaacccggagttcgcctatgaagtggtgtttgagtatgacctgtccggcaacgtgacctccatgccgctgccgtggttcagcgaggtgtaccgcaaaatcgccgatgcgccgcgcaaccttgctccccggcctgccgccggtcagtcgccgctccagctgcacccgtctgtaaaggtggtctacagccgccagtgggagacacgacggccgacgccggagcacgacgacacccattattcccgcttcctgtaa

SEQ ID NO: 436977 - DNA, 2682 bp, Serratia marcescens
atgaccaagttagaacagaccaaacaggccgcccgcggccgctgggacgttatttttccgctgctgggggtcacggtaccccctcacggtcagcacggcccctgcccgtcgtgcggcggcaccaagccgtttcgcatggacgacaagaacggcgacggccgctggatttgcacacactgcacacacggcgacggactggacttggtggcgaaggtcaacggcctcagcctcggtcaggccgtcaacgaagtggccgacgtgctgcaactgagtcaggtgcagcaacagccgcccaagcccgccagaagaaaagccgtcaaaccggcaccggcggtggccgacacggtagcgcagtggctggccgcctgcacagaggggcaaagcgagtatctcaccggcaaggggtttgccagcctgccgcagccgctgaccaccacggcccgcaaaagcggcggtgtggactttccgccggggtcgctgctgctggcgctgacggacatccacggcgccgtgacgggcgcgcagttgatttctccgctgggtgataagcggctgttgccggggacggtgcaaaagggggcatttatcgccctcagtgcgtccccacagagcgacgcgccgccgacgcaggtgattatcaccgaaggctacgccaccgcgctgacggccgctcagctcgccgcaggctgggtggtggccgccatctcggccagcaatctgccgaacgtggcacaggcggtgcacgcccgctggccgcaggcccgtatcgtcatcgccggagacaatgacttctacgacggcaaagagaacaccggcaaagtctgggcggagaaagccgccaaggtcgtcaacggctgcgtgacgctgccgccgacccgccataaggcggactggaacgactttatgcaggaaaacggcccggtgcgcgccaaggaggcatttaacgaagagctggtgcaactgggtaagtcggcggtgaagctaccgcagggctttcggctgacgcaggaatacctgtggtttgacaagcaggtgcagaagtcagacggcgacaccgaaatccgcaacatcaaaatcagcaacccgttgcgggtgacggccatcacctgcgacgccgacggcggcaacttcggccgtttgctggaatgggaggacacctacggccagccgcgtaaatgggcgatgccgatggagatgctgagcggcagcggcgaagagctgcgccgtatcctgctggtcaacggcctgtcgtacatcagcaccaccggcgaggcccgcgcccggctgatggaatacatctccctgtgcaagccggagcgcaaagtcacctgcgtgaataaaaccgggtggcacggcgatgtgtatgtgttgcaggacgaggtgatcggcgacggtgcggaagcggtgatactgcaaaccgccagcgtgcagggcaaagattttcgcgtggccgggacgctggacgactggcaggagcagattggccggtactgtgtcggcaactcccgcgtggcctttgcggtcagtctggcatttgccgcgccgctgctacgactggtgggaatggacggcggcgggtatcacctcaagggcgaatccaccgacggaaagaccaccaccatgaaggcggccacctcggtgtgcggtggcccagactactggcacacatggcgctccaccggtaatgcgctggaaggcaccgccagccgccgtaacgacgcagcgatgatgctcgatgaaatccgggaggtggacggccgcgaggccggaaacatcgcctatatgctggcgaacggccaaggcaaggggcgggcaggcaccgatggtgagttacgcgcccgcaagcagtggcggctgttgttcttctctaccggggaactgtcgcttaccgagcacgccgcccgtgccggcgaacggacgtttgccgggatggaagtgcggatgctccagataccgagtgactccggcaaatacggcgtatttgaaagcctgcacgggttcgacagcggcaaggcgctggcggagcattttgaagttgctaccgcgacggtgtacggcacgccgttccgcgcctggctgaaagccctcaccgccgacctgaacggcatgacggccagcgccaaggtgctgatgaaggaatacacccagttgctgatgccggataacgccggtaatcaggtcgggcgagccatcaaccgctttgcgctggttgccatggccggggagctggcgacgcgactcggcatcaccggctggccggagggggaagcgctgcgggcaacccagacctgtatgcggggatggctggctgaccggggccacagtgccaatcaggaggacattgccgcgctggagcaggtgcgcaccttcttcacggccgggcagttcagccgctttgccgactggcataacgagatgaaccgccccggcaacatggtgggttggcgcaaggtggagaaaggcaaccatgcccggcaggtggaggcggtgacgacgttctatgtgatgccgtccggctggaaagaaatctgcaaaggctatgatgcgcggaaggtggcaaggttgtgtgcggaagccggttttctggttccggccaaggacggcaaaatgcaaacggccacccgcccgccagagatgggcgtcaagaagctgtatgtcttcaccagtgacgtcttagggtaa

SEQ ID NO: 436978 - DNA, 231 bp, Serratia marcescens
atgatgcgctgtcctttctgccgcagcggcgcacatacccgaaccagccgctatttgacggaacagaccaaagaggcttattaccagtgccagaatattgactgctccagcacctttaagacgcgggaaagtattgagcatgtgatccggcaacctatacccccggaaactattccgccgccggaacaccgaacgttgaaccgttacgggaataataattgtctacattga

SEQ ID NO: 436979 - DNA, 1005 bp, Serratia marcescens
atggaagatatcgataagttgaagggtattgactggtcagaattaatagttgctaaccatggctggattgagaagcatctgcatgtacatccgattaatagtgaaaagaaaataactgctagattttactctgtaccctatgctggtcttcatcaagaggttttaacacttgctggcaggatagctgattctatagagcattatgtttttgatgaggcatcattagccgagatgcgcaaggaagggatcattccttttcgtaaagctgcggagtttttcggtgatacgaaccctatagtagatggtaagtatggtgaactgattctatatgcattatctgagtttgttttaagaactcctatggtaacacataaaataacatcgctaactaatgttaatgatcaggtcaaaggtggagatggaatattttttggtgattatggcgggcggctatcaatcttgatcggtgagtctaagatatatagtgatttttcccaggctttagaaagtgcttttgattctttaaatagattcaatgaggcgtattctggctctgctttgtctcatgaaatgtttattgcgaggtcgaatatatcaaagaactttgatattgacactctggatttgatctataaggctttcaccccaggaactgaattgtataatgaatgtgtaaagactcatccggtactcattatttttcaggatgaatatcttgaaaaaattcaagtggactcaatgacaaagtctgatgctgaagctcttttttctgcgtggttagaaactaagagaaatgaaatatgtcagataattagctcgaaatataagcgatatccaaaaatggctagctatattttagactttttcttaattcctatgaccgatgtctctcattttaaaaagaccttatataaggctattcatgcaattgagtttaaagaaccagtaaagaaaaacaaaactaaaagagtagttaagactacagggacaaaaaagaaaaactag

SEQ ID NO: 436980 - DNA, 264 bp, Serratia marcescens
atggaccttaagaatgatattactgaatacagcgaagctgaatttatttcattattgaaagaaatcttcaaagagaatgttgctgaaacagatgatcgtctagatattcttctggaacacttcgagaagattacagagcatccagaaggaacggatctgatctattacgcaccatcggatgctgaagcaacccctgaagcaatagctaagagaataaaagaatggcgcgccaaaaacggcaagccaggtttcaggaaagcctga

SEQ ID NO: 436981 - DNA, 546 bp, Serratia marcescens
atgattattgtcagcgaagtactcggtaatataagaaaggatgctatattgaaagagcggcttaagggaacacatcctgattacctgatactggaacatacccaattaaaccgggaatgccacagcaaatcgacccatggcggtttaaagctgatcatatatatgagagatgaacaacagctggaagatggggacgtattaatctgggatgatgaaacaaacaactcggttattgtgaaagttatttttcatgacgtgatggtgattaatttacaacggctgctttctgccagctcagatatcgtcatacatcatgccttcagccttggccatagactcggcgaacgaaaactgcaggccataattaaaaacaacctggtgtatgtacctatcaccatcgccagcaatacgatagacgccatgatgaaaaagaacagttttcaaccattgtcatattggtatgtcaacggggatgatattacctctctcttgacaattcatgaaatagatatcctgtttgttaggttgccgttaacaaataaataa

SEQ ID NO: 436982 - DNA, 378 bp, Serratia marcescens
atggcaattaataaaaatacatttgttaatgacatgatactatggatagaaaacaatctgggggagcgtctggatatcaataccattgcaaaaaaatccggttacagcagataccatattcaaagaatgtttaaattacaaatcgggatcaccatcgcacaatatgtcaggtcacggcgtattaccgaagccgccttcgcactgagaatgtccgacaagcgaataatggatattgcattggatttcggttttgaatcccagcaggtctttacacgcatattcaagaaacagttaacaaccacaccaggtgagctgagaaagaataaacaactgaatcatcataagctgcgttattcattatacatcccggagcgataa

SEQ ID NO: 436983 - DNA, 585 bp, Serratia marcescens
atgggtaatataattagagtctctataagagatgaggatggatgcttctctcaagggcttaaatatgctctgattaattatttcgcaatgtgtggtaaaaatgtcatgttcgttgaaaagctgatgaataatatctgtacggacctggttttttcctcattacccatgaaccggagcgcacgttattgccacctggccttgcagtcgtatacgaataacacattgttcttttccatcagggataaaaagagcccatatctgtcgcagagatcggcatgttctcttgaggccggggttttataccgtgatgaagattgctcggtactttttcatatgctggatcatgcgttatctttgagacattacagcaggagcaatgcgccttgcgcatggtgcaagagcggcaggttgacccggcgtgaacacgaagtgctgcgctatctgcgtacgggtgcgacacaaacggaaacggcggagcatatgcggttaagcgttaaaacggtgaatgcccataaacaatccgccatgcgtaaaatggaattaaagaaaaagcatgattttattgattggatcttaaacgcttaa

SEQ ID NO: 436984 - DNA, 525 bp, Serratia marcescens
atgtacagaataagaaccctgttattcggcttgttgaccgccgcagtaatattgccggcggtggcggataatatgaaattccatggtgcgctggtggcggagccttgcgtgctacagccgggggacgaggatgttcagctggatttcggctcgatagtggataaatacctgtattcacaccagcgcactcagggcaaggcgttccaactgcggctggcggagtgcgatatcagcctgggcaccctggtggaggtctcttttgacggcaggcaaagtgccgccctgccgggcttgctggcggtggatgtcggaggtcaaaatgccggggtggcgatcggcattgaaacgccggacggccagccgatcgctctgaataactcggggagtggttttcccttaaacgccggtgacaccattatcaatctgcaggcttatgtacggggggagccacaggctatagccaaccgcagtattatttacggcgcatttacatcggtggctacgtttactttggcatatccttga

SEQ ID NO: 436985 - DNA, 1002 bp, Serratia marcescens
atggctgaggaaaaaaataatggaaggtttggccttcgtaacctgacagcacggcgaacgagcttgattaattcatggaagtttatgtcgaaatatttagtatcgctgctttttctatggagctcggcggggttatgtaattggtttcctgaactaaccgtgctgaggatggataaaaccaccgtgacttttaatggagcgctgagcggtgtagggtatagtcaggatccggtaaatcctggttgcgaatatgtaaattatcttaaaaatggtcagccgctaccggatatctactatcaaaatgaagctacctatacctgtatggtgtctttgtattctaggatggtaatacgtgaagacttgcaggggcaggcagtctggcaagggatagggaattgctgtgctgtatcatttaaactaacgtacaagcaactctatgaaaataacgttttgactatgggcgattttattcgagttgcctatgcatctggtctgattaaggaccagatatcaggtcgtacgtggaatgctgtgttcggaaatcctaataatcagtgtttttattgggggcttagtcgtggatttacgaatacttttgttgaactttcgaatgatgctgcctgttatcgcgggcagatagtacatccttcatgcgatattaataatacgattattattgatcatgggttggtgagccaggacgtgataaagagcgggggcgcttccgccagtgttaatgcttttctcacttgtgattatgcagcggatgttatcctccgaaccaatgttgcctcagatctcaagcttgagacgagtacggggcgtggaggcatgacatcgaaaatttttgtcaatgggcactctttactcgtcagcggcgggctaaaaatacatgcaccttctggcaatacgcccttgaagataacttccgtattgtcggggagcggaaatccggaaggggaatttagaggaagcacggtgctggttatcagtatgccttaa

SEQ ID NO: 436986 - DNA, 492 bp, Serratia marcescens
atgaaacggttttccgctattattgcattacttcttgcgacagaattaatctgcacaccggtgtttgccttaggcgtagacgtaaactttaaggggacgttgatcgatccccccgcctgtacgatcaataatggcggtatgattgatgtcaatttcggcgaacgggtcggaattaaaaaggtaaacggcgtaaactatcggcagcgcctgaattatcaattgtattgcgcaccgacgccccataaatgggatctggttttaacactaaaaggtaatgcggcggtttttgatgagctggcgatacaaaccgatcagcaatacctcgggatccgtctttatataaacgataacgcgtttaagccggagagcaaggttatcattgaccctgcaaacccgcccatactggaagcggtcccggtagcgaaattgggtatgccgctgacagaaggcgcatttctggcatcggcaaccttactggccaactatcaatag

SEQ ID NO: 436987 - DNA, 498 bp, Serratia marcescens
atggtatgtagcgtaaggaagtctcggctaactaaatggttggggtatttagcgttattgatcgcctttaaagggcaggcgaacacccatctcgagataaaagtgatcgtgtctgttccaccgccttgtattgttaataacaaccgccctatcgaggtgaattttggcgacgcggtgatgacgacaaggcttgatggtaatcactatcgaacgccgatcgactataagctaacatgtggagggcagaagagtaatgccatgcgtcttcgcttacggggaaataacgccgattttaataaccaactgcttgcaactgataaatctggcttaggtattgcgttgctaaataatggggtgagtacgcaggttaattcattattcaacttcacctacccaaatttacccgtgctggaggcagttccggtaaaacaagatggggtcgcgttgactgcaggcaagtttaccgctgctgccactctggaagtgttttaccagtaa

SEQ ID NO: 436988 - DNA, 663 bp, Serratia marcescens
atgcaacggagcagcaagaaacaggcccactccctgccgggctatcgcgattggcagtactacggggtgctgagtgcgctggcgctgatggtgccgctcacgctgggcacggtgttgtggctgttgccctctgcgcaggcgcagcaggcggataatgggtacaccgacggcgccaacggcatattacaggtacgcggagcgttgaccgaaagcgcttgccggctggatatggtctcggcccggcaggatatccaactgggcgaggtcggtaccggccgtttgcagcaggtgggggaccagggtacgccggtggcgtttgaactgcggctgaaagactgcctgcgcagcccggccggcagccgggataggcgtaccggcggcctgatctgggctgcttatcaaccggcggtgacggtcagttttaacgcgccggccgatgccgacagcccgcaactggtcaaggtgcagggggtttccggcctggcgttgcgcatgacggatccgcaggggcgcgatattcgcctgggcagccgtggcgcgccgctgttgctgacgccggggcagaacagcctggcttatcaggtggcaccgcagcgcacccgcgctccgctggtggccggtgcctatctggccatagtggattttcggttgagttatgactga

SEQ ID NO: 436989 - DNA, 777 bp, Serratia marcescens
atgaaacagattaacaccgtgcgtagtaagagcctgaacggcgccatcatgaccggcgctttgctgggaactctgttggcacagcaggcacaggcggcgatcgcgttggatcgcacccgggtgatttttgagggcggccagaattccgtcagcctgaatatcagcaaccagaacaagcagttgccgtacctggcacagggctggctggaagatgagcaaggcaacaaactccaaagcccgttggtggtgttgccgccggtgcagcgggtggagccgggcaaaccgagccaggtgaagatccaggcgttgccggcggcgaagatgctgccgcaggatcgcgaaaccctgtactacttcaacctgcgggagatcccgccgaagagcgacaagccgaacactctgcaaatcgccttgcagacgcgcatcaaactgttctatcgcccagccgctatcaccccgacacgggcagagatggccacgccgtggcaggagaaactgacgctgagcaaacagggtgacaagtatcaggtgaataacccgacgccgtattacatcactattgtcgatgctagcagtaaaaaagatgtggtgggcgcgaagggttttgaaccgtttatggtaccacctaaggggcagacgctgctgggcatcaacgccagcgagctgggaagtagcccggtgttgacgtatatcaacgactacggtggtcgcccgcagctggtgttcaactgcagcggcagcgcctgccaggtagcgcctgagaaaagcaaatcctaa

SEQ ID NO: 436990 - DNA, 2532 bp, Serratia marcescens
atggtgttttatcctgcacggaagcgatttcgcttacagctactgagggtctgcatttgcatggccatcggctgtgcatcgccgctggtttatgccgatgacggcatccagtttaatatcgatgtgctggatgtgaatgaccggaaaaatatcgatctgagccagttttcgcgcagcggctacattatgccgggcgcttatagcatgtctgtacacatcaataagaatgagctgccggagcaaagtgttaacttttatccgccggacgatgatgccaaagacagccgcgcctgcctgacgccggcgctggtggaaaagctcggcttgaagccagatgcggcgaagagcctggcctggtggcatcagggcgaatgcctggatatcgccagcctgcacggcatggaggtgcgcggcgatttggccaccgcctccctgtacctgagtattccgcaggcctatctggaatatgcctcgccggactgggatccgccgtcacgctgggatgaaggcatcccagggctgctgtttgactataacctcaacggccaaacccagcgccagcagcgggatggttcgcagagttacagcctgagcggcaacggcaccaccggcgccaacctgggcgcctggcgtttgcgggtggactggcagggccaactgaaccaccaggccggttcggaaaaagccacgagcaaaaagctcgactggagccgctattacgcctatcgcgctattccgtcgttacgctcgcgcctgacggtgggggagagctctctggattcgggcatgttcgacagcttccagtttaccggggcgagcctggtatcggacgacaacatgttgccgcccaacctgcgtggctatgcgccggaagtggcggggggggccaaaaccaacgccaaagtcaccatcagccagcagggccgggtgatttatgaaacgcaagtggcggcagggccgttccgcattcaggacatcagcgattcggtcgctggcgagctggacgtgcgggttgaggagcaagacggcagtgtgcaggaattcaaaatgaacaccgccagcattccgtatctcacccggcccggtcaggtgagatacaaactggctgcaggcaagccttcggactggcaacaccgttcgcgtggtcccttgtttggtaccggggagttttcctgggggatcagcaacggctggtcgctgtatggcggcgtattgagcggcggcgattataacgcggcttctctgggtatcggccgtgacttgacggtgctgggggcgctgtcgttcgatgccacccagtcgcgggcgacgttgccgcagcaggatggaactcttaccggcggctcgtaccgggtgagttactcgaagagctttgacgagctggacagccaggtgaccttcgccggctatcgcttctcggaaaagaactttatgagcatgagcgagtatctcgacgcgcgctattacggcagccggatgggcaataacaaggagatgtacaccatcacctataaccagcagttccgcaacatcgggctgagtgcttatctgaactatgaccaccagacctattgggaccggccggccaacgatcgctacaacctgacgctgtcgcgctatttcgacatcggccggttcaagaacctgagcctgtcgctgtcgggctaccgcaaccgttacaacaacagcaacgacgacggcatgtacctgtcgctgtcgatgccatggggcagcggcgctaacgtcagctacagcgctgcggtgaatcgcaacgacaccactaaccgggtgggttattacgatcggctcgacgagcacaataactaccagttaaatgccggcagctcgcgcaaaggcgccaatttgggcggttatttcaaccatgaaggcgatatggttcagctcagtgccaacgccagctatcaggaaggcagttacagcgcgctgggcttctccgcacagggtggcgccacgctgaccacgcagggcggtgcactgcaccgcattggcatgccgggcggcacccgactgctggtggataccggcggtgtggccggggtgccggtgcgcggttatggcagcactgtcgataccaaccgcttcggcaaagcggtggtgaccgacgtcagcaactactatcgcaaccaggccagcatcgatctgaaccggctgggcgacaacgccgaggccacgaagtcggtggtacaggccaccctgaccgaaggggcgatcggttaccgcaaatttgatgtcatcgccggggagaaggcgatggcggtgatccgcctggcggacggcagcactccgccgtttggtgccacggtgatgaatcagcgcaaacaagaaacagggatagtgaacgacggcggcaacgtgtatctgagcggcattcaggccggtgacaccatgacggtgcactggagcggcgcggcgcagtgcgccatcagcctgccgaaaacgctgccggataccggcgccctgagcaacctgctgctgccgtgccatgtagtgtcggcagcagacgcgaagtaa

SEQ ID NO: 436991 - DNA, 546 bp, Serratia marcescens
atgcagaaggccttggtgaaggtagtgtctccttacatattgaccattctattattgggttgcaatgcgcaagcggcccagcatcctcaggggtggggacgtgtcagtatgcaaggtgccattattgataccgcctgtgctattgccgcaggtagccgtgctcagattatcgatatggaaacgattcctgtttccgatattatccgtaacggacagggaatagttcatcagttaactatcgagttaatcaattgcatattagcgcggcctgactctacattgccggactggaaacacttccaagtaacctttgacggagagagcgacggtgagttatttggcatccagggagaggcaaaaggcatagcgctgcaaatagctgatgaaaatggaaatctcgccgtgccaggaacgcctttgccactcagagatatctcacttggtactatgcgtatgaattacgtcatacgtttagtcagtaataatcagccgttactggctggggcttattcttctgccatacgatttaaactggattattactga

SEQ ID NO: 436992 - DNA, 549 bp, Serratia marcescens
atgaaaatgaacaaaatcatgatggcagcagtactggcttttggcgtaacttctgtcgctcacgcagcagtaaaagatcagggccacggtactgtaaccttcaccggttctattattgatgcgccatgctcaattactcctgaatccgcagaccagaccgttaacctgggccaggtgtccaacatcgctctgaaagacggcggcaagtctacgccgaagaacttccagattaaactggaaaactgtgaattaatcagtgctgacccaggcaagaataacgcagttagcgtgaccttctctggtgctgcttctgcagttgatactgaactgctgggtattaccggcaccgctaagggcgcaagcgtagccattaccgatggttctggctctctggtcaaactgggcaaggcctctaatgcgcagaaattgcagaatggcaataactccctgagcttcgccgcttatctgcagggcagcaaagcgtcaggtgcagtgattaccccgggcgaattccaggcggtagctgacttcactctggcttatcaataa

SEQ ID NO: 436993 - DNA, 738 bp, Serratia marcescens
atgattttcattattaatagcaacgtggtcttcaatgaaaaagaaagcacgttagaaagggttaatgatacaagtagtaaagtatcattgcttaaacccacgggcaggctactgtcactgttcgtcaggagtaataacctgctgattagccgtgaacagttgcttaatgatgtatgggaggattatgggctgaaggcatcaaacaataatttaaataactatatctcggggctaaggaagtctctgtctcagttaggtgaggaagatattttgattacctatccacggcaggggtttaaatttatggcgcaaaccattaagcgcgaggatatcacaatgtcggatacggcatcagacataaatgcaccacctgatatcactcccgttgtgaataataaaccaggttgccgttggccgtggcggccattggcctggggcattctgatcgttctggcggcattaactgccgggttaatctataaaaatcgcgctcagagtagcatgaccctatcaggagaatataaaagctgtaagatatacgcgataaaagacaaccaaacccctgtcgatgacatcaaggaaatgatttatcacgcgcactacaactgcaatatcaaagctaatatttattattatggagagatgaaggagaacagccaggcgaccaactcatcgctgatggcttattgcccgctagatacccgcaagccttgtgaaaatcgctacattaatcaataa

SEQ ID NO: 436994 - DNA, 486 bp, Serratia marcescens
atgaaactaaagacgtacattaatatccagagcgttttttttatcttggttttgctgattgcactcagcgtcacgctattttccacctatcgattggcgatgaaaaaccgcgttccagagtgtaaggccatcaagacctcgttcaccatggttggaagtcgaaggtttgaaaaagtgttactgatcagtatcgttccggtgggctggcataagtttaacgtgttgctgaatggtaacatcagcgatggcgacaagaagtatgcgatttcacgtatgatggtggcggactatacatttcgtgatggttactattatatcaagatattggagaatattcgccatgcgagagacagtaccgcggatgcagagcttaaccggcagttgccggcaaaaaacagggtatatttgatgcgtattgaaaaggtaagcgacaatagctatatcttcgccgataaccatgcgcctctgtttgtctgttctaaatga

SEQ ID NO: 436995 - DNA, 813 bp, Serratia marcescens
atgggcgttaatcagtttatcgcgcagggaattatgagatacataattaataataatattaaatatcatgaagatagatcggagctgatctcgctgcacgatgatattccgccgattgtgctgacggccacgcttaaccgcttgctttccgccctggtgcgcaacaataacctggtgctttcccgcgaaacgctgctgatgcaggtatgggaggtacacggccaggttgcttccggcaacaacctcaacaacaccatttcgatgctgcgcaaaatgttcgcttcacttggcgaggaggagattatcgtcaccttgcctcggcagggatttatgttttgcgccaaacagctgaacaccattgatgatgaatcgagccttgacgataagcccgctccggctatagccgttgagccaccgccatcaaagcgcggctggttgaaacgaaaaatactgctggccgtgttgtcggtcgtcgcggttctcacgctggcgtgggccatgttttctccggaacatgcatcgattacgtacaaaagtatcggggtcgtggataaatgtgacatccgggccatcggcacctatcacctggtgaagcaggcctacgttaacctgccaggcattgctgcggacattaagcgtttcgggctggattgttcattgccggcgacgatctactattacagttcaagtacgctgcataacaatagagatatctataattcagtgtcgtttgtggcctattgtcctgccggcttgcaaaaaaatcctgtttctgaatgcgaaaatttctatgaaactaaagacgtacattaa

SEQ ID NO: 436996 - DNA, 174 bp, Serratia marcescens
atgccgctgttgccccctgagtcggtattcgctccctgtgagcagccgcagttgcagggggagacctggggcgatgcggtaagctatgccctggcgttacaaacctcgttacacatttgcgccggccaggtggagacgctcaacgcctggcgcgccacgctgccgccgcgctga

SEQ ID NO: 436997 - DNA, 2037 bp, Serratia marcescens
  misc_feature (1991)..(2000): n is a, c, g, or t
atgtatcaaagaacttgttatatattacaatctagagcagggaatattgtttcaacaaaacatctcccaagcataatttcagatgggaagtataatagtgattttggttcatttatgaactttgaattagtaggaaagagaattagcttagaaaaaaaatttaaagatgaaacaaaaatttactttactgactttcagaagaatctttggctttctttggtgggtaaggataatctagcaatatctgcacccacatcatctggaaagtctttcattattaaaaaatatataattgagctaactagcacatatgatgaaggcgagtttatatacatagtcccttcaaaagctcttataaatcaagttagtaatgagttatcgaaggcattgatggggatagctacagtaataactacgtatagagatattagtgagaaccataaaaaagtcatatatgttttaacacctgagcgttgcttaaaattattacaagagaaaacatcaaaggaaccgacggttgttttctttgatgaagtgcaaaatattgaagataatagtagaggaagtgtatatgaaaatgttatttacaggatgactcagatttggaaaagtacgcaatttgtaatggctggcccatatatagagaatttgaaagcatcacttgggaaaataactgatataaaaatagttgaacaaaaaacatcagctacacctgtgttacaaatgaaggttgtacttacagtatctccaagaactaaaacagtaggttataaaataattagcccgtcaggaaatattatagacagcgagtttaatctaggtaaaggattgtactcaaaactaactgggcaacgaggtattgctttatcacatatcatttctatgtttaatagcgaagatcaaaatataatttactccccgagaaagaattatgcggagaattgggctattaaaatctcggaaggtgaatctgttgaagagattagtgataatgatcgtataaatgatcttacagaatttttgtctaatgaaatacatccgtcatactctttaattagaactctaaaaaaaggtgttgcctttcatcatggtggacttctcgatgttgccagaatggaagtagaggacttatacagtgaaggggtgattaataatattgtatgtacctcaactttattgcagggtgtcaatctaccagcagatagaataattatcttatctccgaaagtaggaaactatgaactaactcaatttgagtttttgaatttgatagggagagctggaagaattaactcatctttatatggggagattttctgtatagatgtcaaagatgaggagtggggtaaggataaaatattaaacaatgaaaagaaagaaattaaatcctcagtgcttcgtaagattgacgaaaataaagaaagtgtcataagttatattgagttaccgagagcaagtatcattgcccaaggtggtgatgaaaaaattattccgctcgtgtcgtaccttcgcagtcaatatctagttgatgagaaacatttttctaaaattgtcagcaataccatcttgagtgctaatgaactggcattactaacaagtaggctgaagaaatgtagaagttcactggtcataccgatggatctactatataaaaatcagtttatcgatccaattgagcaaaatgagctctataaaatgatacagtcagatggagtaagtaagtggttgataaataaataccccaatagcaaggaaggtgtttcagatgaatatgctgaatttgaagttatgtcgtattatcatcaatatagaagtattattcagaggttaaatgatattttcgatatcgagggtgaagtcaagggtaggggtgatggagtttttagaaagttctatgtcagttataaaaaactggccaatgactcgcataaatggatgcaaggtaaaaaatatagtttctttatcgaggatacattatcgaaaaaatttannnnnnnnnnaaacaaaagaataagaatatcgattataaaactatag

SEQ ID NO: 436998 - DNA, 1338 bp, Serratia marcescens; identical to SEQ ID NO: 428148

SEQ ID NO: 436999 - DNA, 321 bp, Serratia marcescens
atgaatcgcttgcgggactatttgcacgagcacatggcggataatcccagcctggatgaacttgctcttcagtgcggcctggaccgtttccgcctgactcgccagttcacccgggctttcggccagtcgccgcacgcttatttggttcggttgaggctgcgggctgcacgcttgctgttggcgcagggggaagaaccggcgcaggtcgccatgcaggtgggttttgccgatcagagccatttgggccgctggttccagcgcgcctaccgattatcgccggcggcctatcaacgccagtgcacaaacgttctataccgttga

SEQ ID NO: 437000 - DNA, 804 bp, Serratia marcescens
atgtcaataagtcagtttatctctaaatctactgtgagaattgaatgtgatgtagtcggaggcggagtctcggttggtacgggattttggtttggtttttcatctacagaagacccaggcttaggcatacctttgctcgtaacaaataaacatgtgatagctaattccactaccattcgtatcagatttaacgtttcatctgctacgaatccacacttaaagttttatgacgcaacgataaataattctagagaattcatacagcaccctgatcctaacattgatatttgcgccctacctataattaattttataaatgagttaagtaagcaagggcttacagtcgacaattttttcttcacggatcgaatgtttcttaaccagcatcacgttaccccagttgaagaagtatttatgacaggctacccaaacggtttatgggatacagtcaacaacaggcctattacaagaaagggtataactgcatcttcagttcttgaggattggcagggtaggcctgaatttatgattgatatggcctgttttggaggatccagtgggtcgccagtatacataatgaatgaaggcggttttggatcacctgatggctgggatgttggaaatagatttatctttttgggtgttttatatgctggcccaactcttgatgtaaacggaagtattaacatagtagatgttcctacagtagctacaccagtagttagtacaacattaatgatgaatttaggtctggtgattaaggccgagcagttgaatggtctcaggccattgctaggaatttga

SEQ ID NO: 437001 - DNA, 339 bp, Serratia marcescens
atgcaagctgctgaaactcattatctggacaacggttacaccttccatattccacctgtatcataccgtcgccgcgtctgcgtgccgcttctgatggccgtcgcgccaggcggtaaatcaaaagcgaaacatatgttggtattcaatggttcatgggtaaccgaagcgaaagcagaaggcgcgattttcctcgacggtggctcaatgccagcaactgcttgtaactcgtggaacacatacatcgaacctaatcagtctgtctcaattcaggcggttagtgaaggttctaatggtggctatgcactgccaagcattacggttttaatcggacaagattga

SEQ ID NO: 437002 - DNA, 1350 bp, Serratia marcescens
atgtttaatcttatcgtaggtggcgagccggaaatttatgatagatggcctgtatttttaaatcagagtggttcggaatcattccctttatctcgaatgctagaggcgacaactgagaacatccgtcttaaactcactccactgaccaataaatcactctcattaattgaaatactgtcaacagtgtttatgacagaggaatatatacatcacgggaagaggtgcatttcactaagggttgggtacatttccaatttaaggtataactctaaagagttaacctatgattatgaggtgatgctaagctatgatcatatacaacttgaaaaacttaacgatagagatgtattatcagcttttggcccatatggattacatcgaagtcactgggctataaaagacattacattaagaaccttttttaaataccttggaattgactttagagataaagttagaaataagagtgaaaatataacagaactagtagatgaagcaacatctgatgttatcatagatagtgttcagaagtttttacagaaagttttagattctaatcatgctgaaaatcacgaggttttttacaggggtcactctgatgcgtcttatcagttaacaccttcattatttagaaaaactgcaagtggcaaatggagacacttagaagaagaggctacgatggtacgtgagatactcactgcaagaccagccgaatttataaatgacaacagaatgttagataaacttgtgcgcatgcagcactttggccttccaacaagacttttagatattacatcaaaccctttgatagccttatactttgcttgcatcggagttaaatttagcaataaaaaagaaattgatggtcatgtgatctcattctcaacaccaagagaaaacattaaattcttcgactctgatacagtcagttgcgtagctaatcttgcaatgctctcccctgcacttaaaaatgaccttgacaaacttataaatagcaaaggccgactacaaaattctcattcatgcttgaagttattacaccacatcaaggaagagaaatcttattttgagaatagaataaatccagccgatcttagccgtgttatatttgtaaaaggtagggttagcaatgaaagaatatcttcacagtcaggtgcattcctattatttggtcatggcgcagtattaccagagttagatcctgcatttggggtaaagaggattgtcattagaaataaacttgccatcctcgatcaactggccaagttaaatattaccgaaggcactatataccccggaattgaacgagcaatatcagaaatatccaaaaaatatgccacttataattaa

SEQ ID NO: 437003 - DNA, 840 bp, Serratia marcescens
atggcgaactcattcaagcagatgaagaacaacggaacgcttaagcggactgactccggaatgttcatcaagctggctgatattcacgtccaggaaggcttcaacaagcgcgtagacgatgagcgcacacaggccgctgatgatgacctgttcaatcacctgtcatcaggaaagccggttcctccgcttgaggttcgcccacgcgatgaaggcggtgtttggattgttgagggccaccgccggcaccgcgcatatttgcgttgccgtgacgcgggaaagcccgttgattggatagccatcctgcctttcactggtagcgacgtggagcgcatagcgcgcatcatgaacagcaatagccagctggcgcttaccccatacgagcaatctcaggtggtaaaagagctcgcaggcttcaacctatcaccagatgagattgccgcactggtcggcaagagccgcgccacagtcgataagctgcttgccctcacccaggcaaatcacgatgttcagacgcttgtcaaagatggcgccgttgccgtcgatgccgctgttgatcgcgtaaaagagcatggcgagcaagccggcaaggtgctggctggcgacgtcgaaaaggccaaggccgcgggcaagaaaaaggtcacaaaatcctttatcgctccaaaattcagcgcgccaaagtcccgcaagctcgtcacgctcttgtcccaggccgaagtccgtgaaatcaacggccaaaccgcttacatccttcccgccggcactcagcttgatgtgctcgccattctcgatgaataccgatccaccagcggtaaggagaatcccgatggttcagagatataa

SEQ ID NO: 437004 - DNA, 429 bp, Serratia marcescens
atggttcagagatataaccctgattacgtcatgcatgcggctcgctttgcgccgtttgcccgcgaagctgagcacggtgagttcgttaaattcttcgactatgaagttttgaaggctgagcgcgatgcgctggctgtggagaatgcggcgcagaaggatgcaatcactacgcatagccaatctacgcacttctgtgaactttgcgggaaagatgatccgtgcagcacagatgacgtttgctatgcgctcaaggaaaccccagtcactgacgcagcacttgcagctatccaggcacgagcgaaagctgaagcatttgccgaaatcattgagtttatcgatcggcgtagcgggcttgctgaaatgaaaactccttgggatttgtcttctgcaattgttgctcacatcgccgagctgcgggaggccaaatga

SEQ ID NO: 437005 - DNA, 894 bp, Serratia marcescens
atgaacgtaaccgtcaattcatacttctgcggcgccggcctgatggatatcggccttatggatgccggcatcaaggttaaccaggcgtttgagctggacactgacgcatgcaaaacctaccggcacaaccttggcgaccacgttaagcagtgcgatatcagccaggaattggttttcgagcaggatacctgcgacggcatggttttcacgtacccatgcacgaaatactcgacgatcggcgatatccacggcgtgcgcaccggtgatgatttgttcctgcatgctctccgtcacttcgcgctggcaaagcctgagttttacgtgatcgagaacgtgccagggatgcgcgcatttcctgtcgtgatggaggcgatgacgcgcatgccggactatttcatccaggtattttgtcctatcaagtcagagaactggctaccacagcgcagaaaccgattaatcattatcggcacgcgccgctcattctctgtacgtccacctgagaaatataaaccgctgacgctggcagctattttagaggacgatccgcaagtaaccctgccatcagctatcaaggcacgaatggaggggaaatatcgcgacctgccgattatcagtgaccccttgcgcggtgatatcgcccccacctgcgttgctcattacgcgaaagataagagtacgcggctggttgccgacaagcgcttcccgcatggcgttcgcccttattcgaagcgtgaatatgctcgccttcaaggcgtacctgactggttccacttcccggtatctgacacagctgcgtacaagcagatcggcaatggcgtcagcattcctgttggtgtgtgggttggttcagagatgatccgctatatggggcaagtgagaggtattgcagcatga

SEQ ID NO: 437006 - DNA, 534 bp, Serratia marcescens
ttgagcactacgtcgatacagtattcgcaggaaattatggattttgtatcaaaaatcatcatcccgctagttgtagcagcattcgcagcatatttttctaccaaatttgctctgaataagttctacaaggaaaaatggtgggaaaagcgtctggaagcttttacggagatcatcaatatcgcgtatcgagtcaagatgaccgatgattactttctggattgcgaacatgaagaaatggaggtatccgactcaagctttaagcggcatcctaaagacatcgaggataagttagtagccgaatactggcacgatcttcaagaacttgaaagaatcgcacaattggctgattttacattaaccgtaaatgtcaagattattttagaccaattcgtaatagcgagaaaaaaaataatgaatgactgttacgacgatgctcttagcgatttagaagcatctgacaggaatttcgccctttcaaaaaagttacttggtgacttagtggtcgaggcgaaaaaagagttaaaaattcattaa

SEQ ID NO: 437007 - DNA, 648 bp, Serratia marcescens
atgacctatcaactcatctatgcagatcctccgtggagttacggcaacacaatcagcaatggcgccgccggcaatcactacagcacgatgagcatggcagacctgaagcgcctgccggtatgggctatcgcagctccagatagcgtgctcgcgatgtggtataccggcaaccacagccaagaggcgatcgaactggcagaggcctggggattcagcgtcagaacgatgaaggctttcacctgggtgaagctcaaccagcacgccgaaattcggttaaacaaggcgctggagcagcaaaccatcttcgacttcaccgacttgctcgacatgctcaacgccgaaacccggatgaatggcggcaactacactcgcgccaactccgaagacgtactgattgccgttcgcggccagggaatcgagcgcgccagcgcatcggtaaagcaggttgtgttcagctgcctcggcgagcacagcgcgaaaccctgggaagtccgccggcgccttgaactgctctacggcgacgtgtcacgaatcgaactattcagccgtggcgatgcgcctggctgggatcattgggggaatcaatgcccagtaaacagcctgcaccttcagccggcagtgttcagcaaaacgcactccgatcagtag

SEQ ID NO: 437008 - DNA, 261 bp, Serratia marcescens
atgaaaaagttaatgccagcgatcttattgatgataggtgggtgctcgagcgcgccgcaggcgccgtcctacgttgaagtgaaagtgccggtggccgtaccatgcaaaacggtagacgttgcgcgcccggcgttcgcagttgaccagttgcctatcggtgctactatcgacgtccagatgcgagcgctgcgcgccgagcgtcaccagaggattggctacgaaagagagctgatagctgccaatgaggcgtgcaaaaactga

SEQ ID NO: 437009 - DNA, 249 bp, Serratia marcescens
atgaagaggtacagctaccctaccggcaggatgctggagaagaacatcaacacgcgcgaagggatcgcgggattagctaaggattcactactggaaaagctactgaaagagctagatgcggacggctcagagatcggcggcgctatgctggaactgaatgctttggtgaactacgtcacacaaaacgaaaaattaaaggaagaaattaaaacccattcgaattttattacacgccagcttgaaaaataa

SEQ ID NO: 437010 - DNA, 1113 bp, Serratia marcescens
atggatgatctttatataatgaagcacataaaagaattagatggcctccgggggttgatggctttatgggtggtggctgggcacgcctatgaagctattccatcaatgtcaaaggcaataccaataacgttaatgaatgattttgctgtggatgtttttatagttttgagtgggtttgtaatattcaactttcttcataaaaacaaggtttcatataaaacatatctcacccaacgagcaatgaggttattccctatttacttggttgttaccgcattaacaatatcaagcatttatttttacagggatattttagaattttctccattatccccttcaacagagcatcgcatttatcaagttgatacatatcttagcaatcagattgctcacttcataccgcacttattcttgattcaaggcttagttccagagcgtatacttccacttgctgggacaacaatagttggacaggcgtggagcgcctctgttgagtggcagttctacttgattgctcctgtactatttattttttttggtaagctttttaaagctccaacaaccagatcatttttgttagctggttcatttatattggtgatgatacttctgagtaaaatccttcacaataaggcatttgctggtggcagcatgtctgcattcctaatagggtttatttcatttttcttttatcgtgacattttccctagcataactttatcaaagttaaagatagttgcattctttgttattacttcagcattgcttcttatgaagaaggattcgattgggttcttaatatggttctcgacgttcttttctgtactaataagcataaagagtgaaaagggaaacataataacaaaggctcttgataatgtagtaatgcaggtgattggaaaggtttcttactctgtttacatggttcacatgcttgtgatttacttcactttatatgctttcgttgagcttgatataactgttggtgttagttatttaatgttggtgcctctttcaattttactttcattgttggtgtcaatgtttacgtttaagtttgttgagcatcctatgatggttcttggaaagaggttaacccaaaatcctgcataa

SEQ ID NO: 437011 - DNA, 984 bp, Serratia marcescens
atggctattaaaagcactaacgcgctgacgctgactgattgggcaaagcgcgttgacccaaatgggaaggtagcagtaatcgttgaactgctgtcgcaaaccaacccaattttgactgacatgctttatgttgaagcaaatgaagcaaccgcccaccagaccactgtgcgcactggtttgccagaggcgacttggcgtttgctgaactatggtgtgcagccaagcaagtcaacaaccgcacaggttaaagacagtattggcatgcttgagtcctatgccgaagttgataaaaaactagcggatctgaacggtaacactacggaattccgtatgtctgaggatcgggcgtttattgagtcaatgaaccagcagatggcggaaactcttttttatggcgatacgtctatctcgcctcagagattcaccggcttatccgctcgatacaatgataagagcgccaaaagcggtcaaaatatcgtagatgctggtggcactggatcgaatcttacctctatctggcttgttgtttgggggtcagatacggtgcacggtattttccctaaaggtggtacagctggcctgagccatgatgacaagggacaagtaaccctggaagaccctcagaaaggtaaatacgaaggctaccggactcattaccaatgggataacggtttgaccgtccgtgattggcgctatgccgttcgtatcgccaatgtcgacactaccaagctgggcgctgacgacggccctaacctggcaactctgatggtgcaggctctgcatcgcatccctaacctgcagatgggtaaggctgctttctacatgaaccgcgatgcggctgaatacctggacattcaggcaactgaaaaagcctctctggcgatcagcgttaaagaaaccgaaggcgtgtggtggacttcgttccgcggcgtgccagttcgcacctgcgatgctctgctgagcactgaatcacaggttcaataa

SEQ ID NO: 437012 - DNA, 300 bp, Serratia marcescens
atgatgactcgcgagcaactccaacagcgccacgctgacgatgtgaagaaggtgatggcaacagagagtggccgccgttttgtgtgggggcttcttgaacaagccggcgtgtttcaaaccacgttccgtacagacacaaacaccacgatgtttcttgaaggtaatcgtaacgcagggctggctttgttcaatgacgtgttcggcatctgcccggacttgtatttaaagatggccgccgaggccgagaaagacagagaggctaatcatggcaacacaacgccagaaattgatccggaatga

SEQ ID NO: 437013 - DNA, 474 bp, Serratia marcescens
atggacaataagctgagcgaactgagcaagcctgtggcgactgttgacgttcaacgcggccgcccggatggaaatatgtttggcgttgcatggagttcggcaggccatgcgatgccggatggcccgcacttcctctactcgcaagagtacgtctccgccctgctggcagagctggaattcgaaaagcagaacaatgctggcgttgcagggatggtcgaggattacgaaaccaagctggaagcgaaggataagcgcatcgccgagctggaaggtagcgctacgttgctaacaaatcagagggatctttggtacgggaaagttcaggatttggaagccaagctggcgacgccggtgcggttgaaaaaggtcgattccagcaatgttccctatgccggtgacggctttaatgctgccgttgattattgcgccgaccgcgttcgcgccgctggcttcaccgtagagggggatgagtag

SEQ ID NO: 437014 - DNA, 276 bp, Serratia marcescens
atgagcaagctgacaaagattttcgttaccaaatacgcgctgagttccggaccattctcagtgatggcagaaacccaaaacgaaggcagcatggcttcgtggaagggggatggttactggaactacgcgcacgggaaagaattctggctcaccgaagaagaagcgctggccgactgcgagcgtcgccgcaaagccaagctggcatccatcgacaagcaagtcaaaaaactgaaggcgatggcattcactatcaaggagctggcagatggacaataa

SEQ ID NO: 437015 - DNA, 192 bp, Serratia marcescens
atgactaagcgtaagagcaacagagcggtgccacacgtaaatcaaaattggccaaagtgccatttcaaaacaatgacgctgcatgagtctgattccgacatgagtggaaatagtgacggttttcagtgcgattactgcggtcatgcgatcgctttggttgagtggattaagacccaggagaaagcattatga

SEQ ID NO: 437016 - DNA, 1047 bp, Serratia marcescens
atgagcgaagaaaaacaactaccggctatcagcataaccgaagagatggcgccagcaatttataaaccaaacggcctggatcagtttttcgaacagatcaaagaggcggtggcaaatgaagtgccggacctgtcaaccaagaaagggcgcgacaggatcgcatcactagcggcgcaggtttccagaagcaagacagcggtcgagaagccagggcgtgattacctccgccgcctgaaagaagcagtaaaacctgctgagcaggaaattaaacgatttgttgatgcatgcgatcagcttcgtgacgcagtacgccttcctcttaccgaatttgagaatgcagaaaagcaacgcgttgccgacctgcagcaacgactgtcagcgcttcgtgaaattgccaacgttgtcgatgagtttggcaacgtcccaccagcggaagagatagcggcaaggctggaatcggttaaagcaacagcgatagatgactcatggcaggaggttacggcagaggcaggcgtagcaaaagacgcagctatcaccaagttagaagtggctctgaaagcggcacggcaacgcgaggctgaagcgaaagagctcgagcgcctgcgcattgagcaagccgaggctgcacagcgggaacgagaagcacaaatcaaacgcgaagcagaagaacgcgcgcgcagagaagcagaagaaaagagccgggcagaactcgaagccgcggccagacgagaagccgatgcaaaggcagcagccgaacgcgcagagcaagagcgcattgcagcagaacaacgtgctgaacgcgagaagcaagaagccgttgaggctgaacggcttcgggcacaaaaggcagagcaggatcggattgctgcagagaaaaaagcagcggacgaaattgcggctaaatcggcagatgttgagcatcgtcgcgccgttaatcgctctgttgttgccgatttggtggcggcgggagtgcaggaagattgcgcgaaaaaatgcgttgaagcagttgcacgtatgcaggtgcagcacatgaccattaactactga

SEQ ID NO: 437017 - DNA, 987 bp, Serratia marcescens
ttgaaaaatcaaacactcctctatccttctggaagttctggcggtggtaatcacacaaaactggaccgaatacccttaacgtccagtgacgacaaaagcggcgctttaatacttaaagatcccttggccggatttgtttatactggtttcctctccacaaaccggctgatacggatgaacaagatctaccactacaccgacctaaacggactccaaggcattgttgaaaatcattgcctgcgggcgaccaacctgtattttctcaacgacgaagaggaaatgcatcatggcatcgcagctttcgaaaatgcactcaaccatctaaatgaagaactgagccaggaaagcattaaaatccttcgtcatacacttgccattcaccgattaaatcaggcgaggcataattataatatttcattctgccaaaagtctgatctgcttagccagtggcgcggctatgccgctactcaaggggtatgtctggagttcgacagtgataaattagaaaacgccctcgactaccaagattatcaggtattatcacgtggggtgttttatactagtagaaattccacgctggaagcgaaagcagaaatactcacctttctaaaggaagaaaatattattgagataagtaaagagaataagttatttgaatatacaagtgcatctcaactagtaaacaggttgacgccgtttttcaagcacgatagttttaaggaagaaagcgaataccggatcgtaatacagcctaatataaagtctgctccagttaaattccgggtaaaccagcacggtctgattccctatcttgaagtaaaagccagacaagacaatgcttttgacggacgactgccgctagaaagtgtaaagatcggcccctgcaaaaaccgggaatttatgaagcagggtatcgagttcctgctcaactacaacggctataagaaaactgagctttcctttactgatgtaccttttcgggtttag

SEQ ID NO: 437018 - DNA, 513 bp, Serratia marcescens
atggcagttgagtgggtagatgtggctgatagtactgtaaaaatcgggctgggctctgtaatagcgcttctcactacttgcgtgacccttaaggtaacccataggcatgaatttaagaaggagctaatagcacaacgcaggaaagaactggatgtaaaaactgagcgttatatcaattttttatcccgctcctggatgatgttgcagaagcataagtttgcctcttttcagcaggatagccacgattatattgagtacatccggctgcatgaaattatttcggtcaccgccgaaaatgacattcgaatccatgcttataacgcattttcgctcgtcggtcaggctatcacaatgggtacagctgaacgcatcgagaagaaacccatccatgacaaggctcaagaagctttacagatttttcaggtcaccgttaattcagagctaagaaaagaaaaggaagctattgaaaaatcaaacactcctctatccttctggaagttctggcggtggtaa

SEQ ID NO: 437019 - DNA, 840 bp, Serratia marcescens
atggatacgctggtacagcagaccgtcaacggtttgatgctcggcagcatctatgcgctgatcgcgctcggctacaccatggtgtacggcatcctgcgcatcatcaacttcgcgcatggcgacgtgctgatggtcggggcgctcagcgcgctgtcggcgatcggcgtgttgcagcatcattttcccgcgctatcgccctacgccacgctgctgctggcggccctgttcgccatggccgtctgcgccatcacctcgatggcgatcgaacgtctggcctatcgccggttgcgcaatgcaccacgcctggccccgctgatcagcggcatcggcgtctcgctgctgctgcaaaccctggcgatgctgatctggtcacgcaatcccctgatgtttccgcagctgttaccgatggcgcccatcgccctgaccgcaggcagcgccgagcatgcgccggcggtgatcaccggcactgcgatcgtcacgctggcggtggccgtggcggtcatggccggcctctggctgctggtcgaacacagccgtttcggccgcgccatgcgcgccacggcggaaaacccgcaggtcgccggcctgatgggcatcagtcctgaccgcatcatcgttctgacctttgcgctcggcggcatcggcaacctgcgcggcgcgatgctcggcggtttgctgctggggctgttcgaatcgctgggcaccggctatctcggcgagctgaccggcggcgtattcggcagcaactaccaggacgtcttcgcgtttctggtgctgatcgccgtactggttttccgcccttccgggctgttgggcgaacgcatcgccacgcgcgcataa

SEQ ID NO: 437020 - DNA, 276 bp, Serratia marcescens; identical to SEQ ID NO: 75986

SEQ ID NO: 437021 - DNA, 183 bp, Serratia marcescens; identical to SEQ ID NO: 11598

SEQ ID NO: 437022 - DNA, 1053 bp, Serratia marcescens; identical to SEQ ID NO: 11597

SEQ ID NO: 437023 - DNA, 1395 bp, Serratia marcescens
atgatctcattggtaaagtatggcctgttgttgtggctgtggttggcgctgggcttgccattcgtattttcaaaaaattctcttcaaaagcggtttgaatttcactcaggggcactcgttgcccctttattaaagcgggttactatgaaaaggaaaatattaattctttccgctgtcctcatttctcctttttcacatgctgagtcatgggaaagcattactaaatccacttatcaaagctctgcctacgctgaaagtaagcaaataaccaatcaggatggctctaagtcaacggtttactatattgatgctgctatgcaggcctccgcttgtcagggtgctaaatccagtgctcagagtgtatttactcaggttaaaccaacttatgagggtatctggcctgattctgaattccgtcttgtttttactggtgattgtacttacagcgattcaccagggcagaaggataaatattggtctttaacggcttatattgttggtgatattcagcgttctgttcctgatgaaaaacctactgacccgacaccagaagaaatttgtgaagcgaagccgccagaagaaggtgtatttaataatgttgattcatatgatggtggtcgttatatctactataacggctgtgaatatgaggctactggtgtcattgtttgtcagggtgatggtactgtttgcgctgcaacatggaagcctacaggtactgtagctgacccctctgataaaccctcaaccccccaaaatggtggtggtgagtctggcggtggtgagtctggcggtggtgagtccggtggcggtagttctggcggtggtgagtccggtggcggtagttctggcggtggctttagtggttccagtctttctaaaggtgatattcagtctgctatcgaaggtgcttcacccaaaatagccagcgatattcatgataaattaacggagaaagacacttcatcagatgataaaaaaaatgccgatgaacaaactaggaataatataaatcgtcttgacgattccattaacaatcttacgcggggggctggccgttttgctgacccttcaggtggtgattctcgttatggaaagggcgactctgaattagatggcgcttctactttggctgattctgaattgggaattgaaaaggattctcacggtgctttatgggaagcatttttaaataaaggtgctatgctgcctaatttacccaatggtaacggctgctctgattttattatttttcccggagaggtttatcagattgatattggttgcgataaattactgactattaaagatgttctttcatgggttttttattgccttacgttctggtatgtctttacttctttaacttcattgcttcgcaaagggggtgagtga

SEQ ID NO: 437024 - DNA, 1095 bp, Serratia marcescens; identical to SEQ ID NO: 11592

SEQ ID NO: 437025 - DNA, 1266 bp, Serratia marcescens; identical to SEQ ID NO: 11591

SEQ ID NO: 437026 - DNA, 234 bp, Serratia marcescens; identical to SEQ ID NO: 11589

SEQ ID NO: 437027 - DNA, 909 bp, Serratia marcescens
atgatgtcagcactctctaccggcaaagactatggcggattccgtcgcgctttggatctttctgccgtcatactcgatcccctggcgctgtttaatgcgtacaaagctcgagtaagtgacgatggcggcacaattccagatgaagctgggtgtcttgcacgcttcaacttcttgcttaacaacggtatgttcgaccgcgccacgttttgcgctgcacccgcgtttggtttgaaagttgatgcatctggtaatgttcaaaccgtttacaacttgctcggcgcggacggcgatttaatcgcaggttcgcaaggcacaccgccgatacccatgacttatgacgcaacggcgcgggcggttatcattcaaatcacctccaatggcggctggtacctcaaaagccgggcgagcttggtcatacagaaaagttcgacttatttgattgcaggccgcatgagcgatctcaatcgcgccgacaataatggtattactgccgggtataatttgaccggcctgccgatggcgtacctgcgcacaatgattaccaatggccaaaaagatacggaagcgtggcgttacggaacgcgcgatagtggatggccagcaagtaccggcgtcgcactcaatgcagcaacgaacatctatgctgactatgtaccgtcggctggcctattcaaagtcgcgcaaggggttattgatgggtatgagaaaggcaaaccgttttcaagctcacaaccggcagcaacgggtaaattggcagacctatcaggctctacagccccgatgttgattggtgggacgcaattggcgaataatatcgttagcccttgttacggcgcgttccaggacatgctccatttacactcggccagtgagtctgacgcaatcctcgcatcaagacttggaatttga

SEQ ID NO: 437028 - DNA, 2370 bp, Serratia marcescens
atgttccatattgacaacccaagcggcgtagaagtaatgccaaaagttagcgatgttgaaagcaccagtattcgctattttaccgaagaaaaagacaaggcgtcctaccctggcgcagactggtttaatatcgtcatgcttgagctgttaaatattctcaagctatcaaatgtcgcaccagacaagtttaaatataaccaaatcgcaacggttattgtttcattgataaatgaacggctttcggcgcaatccagtgtatttgatacggttgaggaaggactgagtaaaaccgaaaacggacaatattttagtgttccccaaggattggatagcgaacaatcgttcaaatattatcagaacgacaacggtactgcgttactcattactgacgcgcccagctcgaactccgtcaggattttgaatgactttatggttgcgctatcagccgaacaggtatcattgcagagcactacagaacccctaaaccggtatagttctgataaatggcaatggatattatcaagcctgcgggggccgtcggaaaccgcactcgcgcttgataatgattttgggttatgggttgccgggctgaactcaccgttacaggattatgttgagcagcttattcccaaaaatatggcgagtcgttatcaaaatttgcagttcgcaatcgttgcaaaaaacggtactgacggcctgctgacaattaatgacaacggcgacattcgcatcgtcggcaccgacgatgttctgcaagaccggctggcgaccatttgttcgactacgttctcacgcactgtcgtagggttccagcacgtcatttttgctgccgatctgaaaacggctctattcgctattgatgacgatgggggcgttcacgtcccaggaattgatggccctctccaagacaacctcggcgagtctctggcgtcaatcaagacggtcggcggggttccagcggcagcgtggcacggtgatattgtgtggtcagagcgtccggtattaacggcgcaaaagctgtcagcatcaggattcgtattcagttacatgccaggcggcgaggcaactgcgggggctggtgtgatgtatgtcccgtccctgcgtgaaatgcccgttgacgctgaagaatcacatggtggtggttcagcgggccaatcgctgaatctttcagccgatttagccggttcaaacattgtcaacaggaaccctgcttttcgtggccgcttattagcgggtgcgcgaggcaaaccggaaggaaataatattaaccctgtgacggttgatgatgtctcgacgatgaatgacatgagcgacccctcatatcgtcaggggaacattctgccaatgtataacgcattgatggatatgggggtaggcaatatcgtctttatccatgccccgtttgccgccggtggtcgctcatttgtgcaaatcagccgcggtacagttccctatgagaacggcctgaaatacgtgaaaatggctaaatccgcctctgatgcagtgggtaagcgctatgtattcaagttcctcggattcgagcatggcgaaactgattccgataatggcgactgtcggaatccgggggactatcttgcgaaagaaatcgtttacttccccggtattcaaatcgactttaaagccatcacgggccaagccgacgacttcctgatagttatcggacaggttggcagccggattaacacaaaggccggggccgtcgatgaagaaggcaaccctacgggcgaaagcgtcgttgtccagccgtattctgtgcctgccgttgatcagcttgcctatgtgcgtcagaacccagccacggcgattatgtatgggcctaagtacatgctgaactggctctataacgacaactcgctcagtcatctgaatgcaaaggggaaagtgcttcaaggcgaatatacagctcaggcgattcactggcatctgtataacgcagagaaaaaaggcacatggacggggctgaaggtaaaaagcctcactgtctctggagccattgccgatctgctctgcgacgtcccttacgcgccgatcgttattgataccacgttcatcgctgactgcctgaatcgtggcattagcctggaaaaacaatcggcatcggttcaaagcgtcaccatcgttgacggtaacaccattcgggttgagtttgataaagctccggcatcagatgattacatgctgattggttttactaataccgcgcttagttcaagtggccacgtgtatccacttacatgcttccgtgattcgtcgccggttaaatcccgatggattatgcgaaataacgccccattcccgttgtacaactggctgtgccttgatcgcctgccaattaatggagaactttaa

SEQ ID NO: 437029 - DNA, 1878 bp, Serratia marcescens
atggcaaagcgccttgatactgaaatcatcatcaatctggcgggcaacttgaccgcaaaggcacgccagtacggggccaacatgtccgagttcgcccgccgtaacgagcgggccatgtccgtggtgaaggccaccagtgcagcagcgggtcgtggactggatgcgctcggtaaccgttacacggggataatcgcgggctttgcgggtagcgccatgctgagggacttcgccaccaccgaccgccgtattactcgcatggggctggctgcagaaaagacacgcaaagaaatggccgagatgtacagcggtatgcaagattcggcgatcaagtttcgggtcgatgattctgaagtggtgagcgctattgagaaggtcggcaccgttaccggcgacattgatttcggttacaaaaaccgcaacatcatcgcaccgtcgattgctgcatccggcgctgatggcgaaagcatcggcgctctgttttcacagttcaccaaatttaatctgggcagcgaaaaagaaaccttacaggcaatggatacgcttaatcagctcggtaaggaaggcgcgtttgagctgaaagacattgccgagcgcggtgttaaagcgttctctatgtacgccgccgcaggcgcaaccggggttaaaggtatcaagggtgttggtgtggcgttggagagtgctgttgatgccacaggcgacacaacaacggcttccacagcggttgaaaacctgatccgtgacttacagattccgaaggtcgttaagacgttacgacagaatggcatcagtgtttacgacaaagaagggaaaatgcgtcatttacccacgctgatgggggaaatagcccaaaagtcaggtagtaaaggtgcagagaaacagaatgctcgattgcttggcgctggttttaatcaggacagtatcctgctgttaagtagcgtgacgtcaggcaagggagcggagaatctcaagcgctacaacggcgtggtggccgatgggcaagggattatgaaagatgccgagtatgcgtctaaggacttcacttccgcgatgtcgtcactcaatacgacctggcaaaagttttctaacaatcaccttgctaagcctgtgcaggaacttgctgacgcgatcaactctgttgaccaagacactgtccagaactggctagagatcggcaaaaacgttgccatcgtaaccggaggcctggtagccgctcgtaaagcctttaagctcggtaaaggtgcctatgattttcttcgccccggcaaaaagggaatgcccaaagatatcaccgacgccttcggctccggcgtgatgccggtctatgtcgtcaacatgggagcgggtggactcggtggtggtgctcccggctctgccaagggtaaaggtctgcccggggggattgggggcgccgcagcggcggaagcagcactgggaggggcgagtttctggggactggctcttcgtgcgggcactggggcgggtatggtctacatgcagaacgaggcggcacagtgggcagccaaatccctctatgatgccagcggtgtcggtgagtgggctaaggggtcttcattccgcaactgggtggactcctcagtggacaaatccccactgccagaaaatccttccatcggttccgtctggaaggagatcactgactgggtaacctcagcccctgagattcatgacccgtcaccctgggcctccctccagccacagaaccagaacccgacctacccgatggtaccccagcagcttcagggcagcattgaggtgacggtgaaagatgaccgggtacaggtcaccaaggtcaatgtgaatgcgcccggcgtcaccctgagtgccgccagcggcgtgcgtaatgtggagcaagactga

SEQ ID NO: 437030 - DNA, 201 bp, Serratia marcescens
atgaaaccatttaaagctcgtgagtttaatgaaaagtacaaagtcggcagcatgtttatttaccagtcctgcccgattttacgcggtggtccgattgtaaaaacggtagggccagccagggatttcaaagtttcaggcacggtggttgagataaatcaggaaccttatttcgttaaagttaccgcgctgaccgcagcttaa

SEQ ID NO: 437031 - DNA, 213 bp, Serratia marcescens
atgaccaacaagaagtttatggaaatgaaaatatctttctttttgaccgatacgggacttatcaaacaagaaattgatgtttcccatgctcagggaacaaacactaaggaatttagcgacgcatatatgtctgaatttcctgatagtcaaaagcatattattgccgcagtaattaaaaagctcggcggtaaaaaaatgaaacgtcttcactga

SEQ ID NO: 437032 - DNA, 222 bp, Serratia marcescens
atgagtcggctttctccagaacagagaaatgaccttttgaatcatgcaattatacatggcgtaacaagcctgttgccaaacacatactcgcaaagagcattgtctatcgcgcaactgattgagagcctgtcggaggaagaccagagagagatattgcagctcattgaggctaagaaacttggtgcattattagataataacccgaaacgtaaaaaggcgtaa

SEQ ID NO: 437033 - DNA, 555 bp, Serratia marcescens
atgactaacaaacaagacgcaatgaacgctgtaaatcgtgcaattggctttatttatgccaatgcgcagctcgacaccagcaaggctttaatttgtgagcttcaatcctcaataagttttattgaagacttggacaaagatgaagccaagagtgaaatgaagctggtaattaattgcgaaggcatcgatgaagatgccattagcaagtttaaagcggcatttgtagcaggcttgcgcgatcaaaagacactgtttgtcggtgaatgggcgttacctaatgaaccgctgaaaactgaagccattaaacaaattattgaggaaatagaaaacctgccaaaacgaatgaatgctcctgaagagggcggatgggttgttgataataaagcggctgaattaaaagcagcaatcgacagccacattttacaccgtggttcgcttgagtatgttcgcagaaccgcagcgcaactcggtgccgtagcggtaaaagtgctgatgaatattccttgctcctatcgcgatcgcgaaaccatagccggagcaccacgcaatggctga

SEQ ID NO: 437034 - DNA, 219 bp, Serratia marcescens
atggctgatcagatcgatatggcacaggaacggcaccagctgattcttgagtctcaaattgccaacgcccgcccgcagcaatgcgggccttctgctttcacctgtgaaatctgcgacgcgccgatatctgaagcgcgccgcgccatcgtccatggcgtaacacgttgcgttacctgccaagaaatccatgaagccaaagcacggcatatcaaggggtaa

SEQ ID NO: 437035 - DNA, 861 bp, Serratia marcescens
atgacaccacaacagcaagcacagcaatgtttgaatagaaattgtctggttttggatacagaaaccacgggccttgatgataaagccgagatcatcgagatagccgtcattgacgccactggcaaggtacttctgaacacgctggtcaagccatcaaaacctattccggcagaagctaccgcaatccatggaatcactgatgaaatggtaaaagatgccccaacatggccggaggtcaaccctcagctgtgcagcttaatcagtggaaaaactattgcgatttacaatgctgaatatgatatccgtctgcttgagcaaacagatcgcatctggaaagtaacgccgaaaattagcgtaacgccacagatcgtatgtgccatgcatgagtatgccgagttttacggccagaaaagcgagcgcggcgggtacaaatggcagaagttaaccgccgccgctgaacagcaaggcgtcattattgaaggaacgccgcatcgcgctctttcagactgcctgaccactctcggcgtgattaaggcaatggcggccgaaggcaaagcccccgttacgctaagcgctcaatcagccgtcgatactctccgacaactattcacagctgataccgacgcaatcaccgagctggtcgatcatcgcgttgaatgctcggaatacttcgccgggctaactacagctacagtaggaaaacgcgccgatggcgctcatgtcgtgggcctaatcggcatcattaatgcactgattttccctgaagttattgccgctgaatatgatggtaatgaactgatcggtttctccgttgccgacatttccgcagaaggggcgctgtatgaacagatccgcccttaa

SEQ ID NO: 437036 - DNA, 261 bp, Serratia marcescens
gtgaaaaaacaccacctgaagatccacccggaacacctcgccgccgtcaactgtggcgcgaaaagagccgaattccgtattaacgaccgtgactttgccgtcggcgatctgctgagtctgaacggctatacaaagtttggtcacctggaagggtttaccggcgagcacatctgggtgcgtattacccacatcaccgacctggccgaatgggcgccgggttacgtgatgctgagtatcgagcgggggccgttcaaatgctga

SEQ ID NO: 437037 - DNA, 1131 bp, Serratia marcescens
atgaaaaaacacatagatagcgccgatggactacgaggtactgcatgcattgctgttgttttgtctcacctaattctcacattttttccttttatgcatggtggtaattcatatcataattggtttgaggttctagtatttaattcaccatttacctttttctattcaggcacatcagccgtatatatttttttcacacttagtggcattgtattaacttccagccttgaaaaaaacataacaggtaaaaacacaataccttcatttattgtaaaaagatattttagacttatgcttccagttttagcatcttgtttgctaggattctttatttttagcaacttctctgttgatacttcaggtgtatcagagtgggcatctaaccttggcattgaaaactacagcttttatgattccatttataacggtttcataggtacttttatcaatggtggttacaataagtataactgggtactctggacaatgcagattgagctggcaggctcttatataataatggttttagttttaattgcgattaagtttaaaccagaaatctatctttacgttgctattttattctatttgctggcaatataccttgataacaaccctattttaattggtgcttcctgcttctcttttggatcatttatccatacattaaagagaaatttaccaacaagagtaatggttccaacttttgctattgggttatattttgctggcactcacttcacatcttattcttactcgcatatttttcattacattgataacaaaccgtggttccaagagtcattatacgttatttcaggcatcatgataacgctatgtgtaatccgcaataacacattatcattaatattttccaccagagcactcagagagttaggaaaaatatcattttctctttaccttgttcacctacctataatttacgcaattggcataccgtcattcaattggattttcagcaaaacaaaaaactattcatcttcatcgttaatggcaatattggcaacaatgttactatctttgtttacagcgaaattattccaactcctaattgatacacccgcaataaatatatcaagaaaattaccttcgattatatttaaacaataa

SEQ ID NO: 437038 - DNA, 783 bp, Serratia marcescens
atgcaaaaagtaggaaacactaccgataccgcagatgcaaatggcgagtataccaatggtaatgttgctcaggggataccccctacaattattaatgctgagatgttaaatacatttcagagggaaatggtcaatgtcgttgaagggtctggtctagagttaaatccagcagataattctcagattcttaaagcgattcttcttcttgtagggcgagggcggcttttaggtgtaaaaacttttacgcaaagtggggtttataacaaaccagaaggcgtaaatagtatatttgttaaagtttgggctggtggtggtggtgggagcggaacttacacatcagatcaaggtgggtttggcggaggaggtggcggatttgcatcaggctatatagatgttgcatcttctagctcattgcctgtggttgtaggatcaggtggcaatggtgtgaatgcagggggagcgggtgatggcggcaacggtagcccatcgtcgattggagggatatcatgctcgggagggagaggtggttcttcccaaaataggacgcctggggcaggcggggttggaagtggtggttctgttgaaaacaccacatcgcagcaaggacagggctttataaataatattggtggtaacggtggagcttcgcgcgagtcatttggtggcattgctggagagtcacctaatggtggaataccggggggtggagccgcaggggcaacaacagggtttagaggcggagatggtggtaggggacttgtaattattgaagaatatagctga

SEQ ID NO: 437039 - DNA, 786 bp, Serratia marcescens
atgcaacaatcaacagctgtaaatgtagcaaagacagcgcacattgtcgatcctgatattctgccagttatggagtggggtggaacaagagtcgtcaccaccgaaactttggctaagggttatgggtgccaagaaaaaagtatccgcatgaatctagctaacaataaggggcggttcgtggagggaatgcacctattcacgttatcaggcaacgagttacgcgaatttaagaacagagccaatgatagtggctctgttggtaagaatgcccgttcgcttactctttggactgaaaagggtgctgcccgtatgtccaagatcgttgataccgatgaagcatggtcattcttcgagaaactggaggattcatacttcagacctcgcgaatccgttggcttgccattggactacgagcacgcacttgaaaacctgctggcaaaggttaaagaaaatcgcatagttacggaacaacgcgatcgtgcaattaaggagcggcgctggattggcgagaaacgcgaggccacggcgatggcaactgcatcggtagccgtgcgggagaagaacagacttgctgagcgtcttggagaaggaaagaattacgctgccattatcccggtggagaagaaaaccggtgaaaagtttaaatggcagccgcttcgcaagtggtgcagagaaaacgacgcagtgccacatagcgtcgaagacccccggtttggcacagtaaaatcgtggccacgggaagcgtggatggcggtatatggagtagacctccgcaagctgttttaa

SEQ ID NO: 437040 - DNA, 621 bp, Serratia marcescens
gtgaaattacaattgaataacggcgaaacccggctgtgcgcgaacactaaccgggtctctatgtcagtaactttgcgagaaaccaacatgaacattgtagcgaagaccgatcttaatttccatggtgtgattttgtctccggtaaccgaagtgccaggcacatggttaacggcatcccaaatcggctacgcgctgcagtatgccgacgataaggcggtacaacgcatttactcgcgacacgctgatgaatttacagacaacatgacaggggtggtcaatttgaccaccccaagtggaacgcaggcgacacggattttctcactgcgcggagctcatctgatagctatgttcgcccgcactcctgtagctaaagagttccgtcgttgggttctggatatattggatagagaggcggcccgaatgccggagaactcacctcttcaccgatatttcgtgaaagtcatcatcagagataacgtgtttggtgctgatgttgagcttctgggaaaggctgatacgttcaaggcgatcgcgcgtggacttgccacagacttgggttttgagccaacaggttttataagtcgcagaccagcgacggagaaaatgatgcggaagcattag

SEQ ID NO: 437041 - DNA, 174 bp, Serratia marcescens
atggagcaaaaggcagttaacagcaagctgatgtcgtatcgcatgcgtcctgaaattcgtgaattcgtggatcgtaacgcggcgaagacataccgatcagcacagggaatgatggactacttgatgaatcgtttgatggaaatggagaggaagggtgaaattacaattgaataa

SEQ ID NO: 437042 - DNA, 912 bp, Serratia marcescens
atgtatttttgcatatcacaacatcacaagttagatttgactatattacgcacatatcgatgtgtcaatgtgattttttatggtgcacatatgaatattgatgactcattctacaaaagagtagccgtagccagaacctcgctggggttgactcaatcccagctcgctgaggctgtcggtgtggtaaggcgtcaaatagctgcttatgaagcaggaaactcgaaaccgcgtgaaggggttttaaaaaaccttgctgccactctcggtacatctgttgaatggctcagttctggtaatggtgtagggcccgacgttagcaacataaagcgaacggtaacggttagagagatccccctactttctcactcgcaagccattaggtttagtctcggtgaagcatcagaagtctcaatccttgactttatcccagctccaaccactaccggggaggaactatttgccttaaaaattgatggcgattcgatgatggcaactgatggcatcagttttcctgatgggatcatagtcacctttgacccaaaaatacatgcgactagtggttcttttattctttgccatttgaatgacacaggagaaaccacattcaaacaactaataactgatcagggaataacatacttaaaaccgcttaatcctgagtatccaacgataaagccaagcgatttctatatcgctggcgtagctattcatgctcaattttttgtgccagttggtaggtctagaccaaactctagggcgatcgcaattgaagcactcaatgagaaaaacgaaataacaaaaaacaaaaacttaaacaataaaatcaacgcactggagaataaaatagacacattgattaacttaatcacctcaggcaacaatgcgattgatacatctaatcgcaatgactag

SEQ ID NO: 437043 - DNA, 396 bp, Serratia marcescens
atgagcttgtggaatgcaattttattaggttcggtgtttttcctgttttctgttttttattcttttaagaaagagccgtcagtgctcagatctctcatgaggtttattgcggtagcggcaatagtggttgcatcatattatgggtatgtgtttaaaggaatgatagaccaatcaagaaactgtaatgataaaacagagtctttctacgagagtcatggggaactctgttatagtgttgtaaatataaaggagattgcaaataaaaacgccaatttagaagttaataaattcatcattattaatgataaagtggctgttattaacaccccgttaaatgagcagtacgaaataaaatatgttgatggtgtagggttgaaaactagattgctaaattga

SEQ ID NO: 437044 - DNA, 1833 bp, Serratia marcescens
atggcgaattcgttcgattttgaattgactgcaagcgatcaagcatctgcgtctattcagcgtattgaagaggcagtaaagaaccttaacccgctgctgaaaaaaacgcgtgatggtcttgctcttggcggacaggagtcaagagacaagttagatagcctgggcagtcagtttgatttattagccagaaacgcccgcagcggcgtccagttcatcggcgatttggtacctccgctgaaaatggtcgggggcttaacgctggggttgggcggggcagcggtcgctatcaacgccgttaaaaacaacctcaccaatttcgccaacgcgggataccgcatcgacaccatcgcaaaaaacatcagcatgaccactgacgcctttcaggaactaactggcgccatgatcgagaatggtagtgagcgtgaggcggcagaaagttccattggtaatttgttcgagaggtcaaatgacgcggctcatgggcgaaataatgaatttctggccctccttcagcaagaaggtattggaattagcctgaccaaagaaggcctagccgatgtaggcaagttgattaatgacctcaaccgcgccatacaagctctccctgctgggcagcaagcgctgtttgccaataaacttggcctttcgcccgagcttctcagctatctgcgcaacacgaccagtgaagttcaaagactcaaggatcaagcccgccgggatggcctgatatttaccgagaaggatctgcagaatgccctagcgttcaagcagcagcttaaccagataggtgctgcttacgacggcatgctgatgaaaggtcaggcctggctgggccagtcggaaaccttgaccgcttcagttgaccaactcaagcaggtcgtcaccaatggtctggacagtacggctatcggttcgatcctgacgtttaacagcggcgggaaacaggccgatgttttgcggcaggctcaaggcgatgagaaatttaaagacacgctgtcatggaaagagaagctggatttaaaactgggctatgcgtcagaagatctgatcaagaaactgaacggatattataaaccggcctggcatgtagagaaggtcgggaaacaactgcaaaatgatttagaacaagttatgcatcccctaccacagaatgtgagcaaccctatagatcaggcattggggaatacacctgagcagcagcatttgtttaaattagagacaaaaaacaacctcccgccggggttgttggatagggtctggaatactgagtcatcgcgagggaaaaagcttttttcctccgccggggcagaaggcccattccagtttatgccacctaccggtagagattatgggcttaataatagatctgaccgaatggatttctataaatccagcgatgcggctgcgcgttatctgtcagacctgttaaaaagatttgatggggatgtgagaaaggcagttgcggcatataattgggggccaaatcgagtaagtgataaagggcttgcaagagcaccgcgggaaacccgtgattacttgcaaaagattatgcctggattaccgatgttctaccctcagggtgatggatcagattctggctattcacgagcatcaaaagacaacacctctcggattttcagcgggccaggacggcagggggattcatctggagcaaatcaagatttgttgtcagccataacatcgttaaataaaaccatgcaagacagcaagatgcagattgagttaacgctagttgatagtaagacgggcgagcggcgtactatcgttggtaacgatggggctcgggtatcaacctcaatgaacttccagtag

SEQ ID NO: 437045 - DNA, 216 bp, Serratia marcescens
atgttagagcattacttcggttctgatttaaaatcgagccctgagcaaaagaagcgtttattagcggtccaagcagcattggaaatagcgaaatcctccgcttcctcgtcagtagctgccaacagggttgataaagtagaatacgatctgaagagtgccgccgctgagattgaggggctggcggacgcgattcaaacagcactagataaattataa

SEQ ID NO: 437046 - DNA, 537 bp, Serratia marcescens
atgctttctttggacgagatcggccaatctgtaaggaacaatcttcaactcattatcgattctcaacggcttaagttagctgtagggccaatctcagatcaggactaccgaattctaactggtggttttggtgagttagaatgggatgtggggttgtgtgattacggaaacgaccctaaccattttgagttttgcgtgaagctggtcaaagatgctgttgaagcggttccgtcaggtgtgagcttgagtgtttatgggataacagacagagttttccgaattcacatgatagagcgctttaacagggacgataaggaacacccattgaaaggccgaatggtgctccttactttgatggcggcgtatctgttctgtatggcagtggaagccgacagtgttcaaatcgttgagcctgtacgagagctcattgaatactacactagctttgggtttgccatgacagagtgtggctacatcatggttgcagaagttgccactcttgaaagagcttttgaaaaattctacgaaggtgtctaa

SEQ ID NO: 437047 - DNA, 678 bp, Serratia marcescens
atgagccttgcagaaagggtacgaactaggcgcgaagcgcttggtattactcaaacagaacttgctgatctggttggtattcggcaacagtcaattgcaagcattgaaaatggtgagacaaaaaacccgagaaaaatatttgaactgtctcaagctcttaagtgctcaatgcagtggctaaaaaccggtgtccaagagtcgaatgcgacgcctttggacggtatttcactctggacagacgatgaagaagaagatgaagatgatgtctacctgcctttcttcaaagaggctcagttagctgcggggaatggtagagtggtagagcttgactgcgagggtagaaagctaaagttctcactccgtagcttaaaaaaacttggagtaaagcccgaagaagcggcttgtatgtcggtctggggtaacagcatggagcccgttctccctgatggagctacagtcgccatcaatactggtaacagggagataaaagacggaaagatctatgcattggatcatgacggtatggcacgggtgaagattttgtatcgcctccctggtggagtgcgtctacggtcattcaacactgatgagtaccccgatgaaatatatatgggtgacgatagcaacaaaatcagggtagttggtgcagtgttctggtatggcgtcacaataagttaa

SEQ ID NO: 437048 - DNA, 339 bp, Serratia marcescens
atggcacacgtaaacacagcacagcagatccagcaattcaaaaagatagcgccggctatcgttgaaaacttaaaagcacgtgtaaccagcgcaatggaatccgatgaaatcatgaaagccattcacgaagaaatcctgaacttcttcgttaaacaacaacagatagctgttgaatatatggctttcaccgaagtccagcgcgcacaattttccgccctgatgtataccctgcttgaaccgttggcaggcgcatttaaagggaaagaaaaccctaaatactccgcctatgtagccgccacgggaaaagctggagcacttaatttcatggtgaacgcataa

SEQ ID NO: 437049 - DNA, 633 bp, Serratia marcescens
atgaaagagcgcccagtgattttcaacggcgagatggttcgcgccattctcgacggccgcaagacccagacgcggcgcgcactgaattggaagcgtcagccgtacacagagatggccgagcgtgatgatggctcgttgtggccgtgggcggaagatggagagcgtggtggtgatatctggttctcctgcccatttggcgaagttggcgatcggctgtgggtgcgcgaaaccttagccggtcactatctcgatgatgaccaaattcaggacatcaaagacggcagagacaaagcggaggacctttgcgaataccgcgccgattactcagatgatgctgactgcgctggcggatggacgccatcaatccacatgccacgctgggcctcccgcatcctgctagaaatcaccgccgtgcgcgttgagcgcctgaacgatatcagcgaagaggatgccagggctgagggcgtggcgccatcgcaacacatcatcacgccgccagaagcgctatatcgcgttgggttcctgaagttgtggcaatccatctacggcgaagaaagctggagcgctaatccctgggtgtgggttatcgagttcaagcaggtcagcgctagggaggtggagcgtgaggcatga

SEQ ID NO: 437050 - DNA, 351 bp, Serratia marcescens
gtgaccaataagctgagcgaactgagcaagccggttggctatttcatcgagtggcaggatgaagagactggcgaaaaagaatggtgcgaatgcagcaagcaaaacggtgagccactctactcgcaagagtacgtctccgccctggataaggtggctcaatattggattggagagtctgccggatggaagaagcgcgccgaggacgcagagaagcgcatcactgaactggaacaggcgatgcgtcacatccacggcgcgttattggatatcacagtaccgagagtggccatagctaaagccgcagaattgggggttgaacacgcagctatgaaggagcagagcaatggataa

SEQ ID NO: 437051 - DNA, 189 bp, Serratia marcescens
atgacattcaaatataaaaacttggcccaccaggcggccgaagcggaacgtcacgcccgtttttcagatgcggctgaactgtggcgccaggctggtaatgcagcgcgggctgtagacgtcgtctgggttaccgcccgcatagagttttgcgtcaaagcggacgcgcgctgctggggtaacgctcaatga

SEQ ID NO: 437052 - DNA, 588 bp, Serratia marcescens
  misc_feature (176)..(185): n is a, c, g, or t
atgattaatcaggatacgaaagctgtaatcgacagaatgctccttgcctacggactcaagacaaagctggcgctttgcgaagcacttgatatcaccgctagcgctttggctaaccggcaactgcggaatgcgtttcctgctgaatacgtcctcaagtgcgccttagatacaggggnnnnnnnnnntacaggggcatcgttgcgatggctgacgtacggtcaaggtgagatgtttgagcaaaacgttgttacagccccctcagccctagctgtacccagcaaaacactgtctggtcggaaactttacgatggtgataccctactattagataagggatttctacccgatggtataaaaaaaccattggtagtactaagcaatgatattcagcatattgccactcaggactatgatgaaatctatgatggctattgggtaattgatatcgatggtaatataagcattcgcgaattagtacgtactccgggaaacaaagtaactgtttcagataacaatcattcctttagctgccttgtgagtgagctcaaagtcatagctagagttattctaatctgcacccctgtataa

SEQ ID NO: 437053 - DNA, 198 bp, Serratia marcescens
atgcgggaagttaaaaaggatcgtattgaggcggcacttaaagggcaaattacaactgcaaaacagcgcactcgactcttaagagtaatgcaaaaatctttaggcaaagaagttaaaaaaatgaggttgaaaggagtcccaatggaggagattaagcaagtgatcgatgcttttatatgtctaggtgaaataaaatag

SEQ ID NO: 437054 - DNA, 1059 bp, Serratia marcescens
atggatagttacgacgacggtctgattcataatagttggttttcggaaggtggtttccgaactaaaagtttatcactgtcagtggctaacgttattgagcggctaaataatgaacgattggatattaagcccgattttaaaagtcactatgaatggcctatttcttggtctagtaaactaattgagtccgcgctcattgggttcccctttcaaaatatcttttgcgaagagactcgctacggtgagttagttatacttgatggtgctcaaattattaactccttttataaattcagtatgaatgagtttcgcctgagaggtttgacaattcgaaaggatcttaatggggcatctgctagagatatatcgtatagggattataattttttgatggatcggtttttattgaacttcttagttattccatatgatacacataatgttttgaagtatgagttctgcaaacgcatcaatataaagaatactcgtttttctgttcagtcagcaagaaactatgcatttcccaaaatggctggttacctcactaccatgagggaagaattaaagcataccattgactttacattaaaagcaaaatactcaagagatatttttaaagcagattcagaggtggatcaattttttctattcattagtctgattgttttcttgaagtttgatattatagttgtagatgatgagcatattagtataggtgaattacttgatcaaacggctcaaatcctagaacaagggagggctactgatggcctgacagaatatgtttcgagtgagctaatcagactagccaactgttcagaagtattcgattttaatataacttctactagagaatcgactattttctatgctagaggttcctttgactctaaaaagatatccatggatttttttatacatattttccgtttgcatttgaatggagagtatatttccaataaatatattcttgagttatacaaagatattgatgtagtgccaagttatttggatactaggaagagttttttttccgtgtttcatgagagtatgagatga

SEQ ID NO: 437055 - DNA, 1284 bp, Serratia marcescens
atgattaaaaatatagttatcaggaatgtaaagtgttttccaagcgttagctttgatatggcaccattaactattttttgcggggctaattcagcgggaaagtcaacagcaatacagtgtttgttgatggcaaagcaaagttatgacgctcataaatttcttgaaaagaaaataaatcttactggaccttttttttccgttggtcatgtaaaagatttggtttctcaaaatatcaacggtgaagatttatctatattaatagatgactgtaagttggaatccgtgccattaattagtgttgatccaacttcatattcattgccattaaaggataatgagataagacataagttctttgatagtcctttccattatttaaatgcatataggttagcccctcaaaatagctatgatgttaattttgattcagataaaattgactttggcatctatggtcaatatgttattgctgagctacataagctaaggcataaaccagctattaatcaggagttagcgagaatttcagtagagttaacccgtaagaaagaaagaaagaataactttgttgattattcagagccaacctctgtaggtaacgtaacggaagactcccctgagttttataatctttcgaaagataacgaagaggttaattttcaatctgttgaaaattaccttgaaaaaagcaaagtgaatactgctgctgcactgggtgaaaataaaaaaaacaagttggcagttaataatgaggagtatagcctcgaggtcgctttaaaagagactatgaagcgaatttgcaaaggttttgatatagaaacaattggttatgaagaactcgataaagtgtccaacagtttcggatcaaatgaaacctcgtatgcagttcgtcctattaacactggttttggtataagtaatgttttgccaattattgttgcaggcctttgcacgccaccaggtggtatcttgatagtagaaaacccggaggttcatcttcatcctgctgcccaatctgaaattgctaattttctcgggcatgtatccaaatgtggtgtacaggttatcatagaaacacatagtgatcatataattaatggtgtcaggatttttggaaaaaataacactcttgattctgaccatattataataaacaatattcgaattgaaaaaggaaatagagtggttacgccaataagaatatgtgaggatggtgggctctctgatattgatgatggtttttttgatcaggctgaaaaggatttgatgaggcttttcgaatga

SEQ ID NO: 437056 - DNA, 798 bp, Serratia marcescens
atgaaattatatattaacgattgttcatttcaagggcaagcaaaaagcaaagatgaggctgttgatatattgatggaattagctaaggctttccatttttgtaaaacttttgcgtgccctaagaaaagctctattaatgaggaaatgaaaaacaaaaagatatggggagataagacgataatagagctttttcatgaaatgaaaggagtaaaagattcacaaaagaaacaagcaatactgcaggtcttttgttctaggccacactataacagtaagaaacatacgggggcgaatacaataaagtcatctgttggagatgatttaaaaggaacctgtttcgattctgcggcaatttccaaatgtggcgccatagtcgtttctgcatcgaagtctgaaaattattctgaaaatacaattgaagtcgttagcagcatctcaggtcaaagaaagattattaatgtatgtgagtacgatgatgcaaaaaatctgaagtggatatatgaagcaaacccgaagcacggcaaaaagccaaaagatgtcggtcggttcataataagtcaaatggacttgagtgatgaagacgcacaagctgctttaacaaatggggtatatataaacaaaaaggttataagtaagtataatgatagatggtattgcttcccttatcattcaaaaccatactatcacggttatatgattgagtttaagtctaacgaaaaaatccatggtgaagtgattagaatattagaaagggtttcttttgaaaaaagagggcagatcttccacggttattgctaa

SEQ ID NO: 437057 - DNA, 807 bp, Serratia marcescens
atggcaataaatgaggagacgattacagaaataatattgcttggcattgctgattttcatagtggtcgtgatttggaaatccgttcttatactaaagctgaagaaggtagggggactaattcaacaaaaggaaaggctactggggctgattggtctttttggttttgtgataatcatggtaaggggatagaaatccgtatacaagcaaaaaaattatttaaatccggtgagtatgacagtttaaatggtagtggtagtcaaataaataacttgataaagaatagggggctcgcgataccgctgtatgttttctataattctaatttagagtgtctttatcgtcatgctgattatctgttttatcatgatttcccattctatcgtgatttggattttggatgtacttatgctccagtcactgcaattccgagtaaaaagaaaccaagcccaaaagatattactgttatgtttccttggcattacttggtctgcaaaaagagttgttcatcgtttcggcttggttcgtgtgatgtggttaattccgagagtttacctcaaagggttgcctcagcagttaagtctgcttatgaagctagctttctttttggaaattcagaagcttcttcagagaaaataaaagaaactattgctgaattttcgtttgagctgagggatgttacgcctacgtgggttgagtcattagaactgcaatctgatgattcaagtgtcaataagaaaatagagttgtatttaaaagaacatgggttacgtggagtatgtgtgataaaggaaataatgcctggctag

SEQ ID NO: 437058 - DNA, 987 bp, Serratia marcescens
atgaataatagtttattaacatatacaggcagtctcttacttgatgggagatacattgtttcaccctatggggtaagtaaaagttcacctggtggtaacatatctccattgagtaacgctatagttcataataacgcgatcaataaaatatcggtagactattcaaatgtaaaaagcctgactatcatcaacggattgggggtgacgctgggtgattctgtagtcggtatatctgcactacatgcaataaaaaaaataaatccaaacatagtcatcaaagtcattcgaccagagaactgtccaaattacgttaatgaaatctacacactcacagaaaatataataactgaaatccatttcatgccatttgatatttccaaagcagcggaggcagaactaataatagacataggaaatcaactgtattgggaagattttaataagtgggaaatgcacgatttctttttaaggaaccttggtctcgaacgtaatttcactccgattgagataaaaagcaactcatggttaaaaaatgcccctcttaatgacatcaacctgggtgactatgtactcttctgccctcacgcaagtacaaaaataagaagcataccgcaacagtatcataaaaaaataatatctgaattaagcgataagtttaaggttaaagtctttgggtttagtgatgttcaccatgaaaattatactaacatttctgagctatcaacgagcacctctcgattcgcatccataataaagcatgccaggcatctctatacatgtgactccgcagccttacatattggtgctggttttgacataccaaccacgtgtatatttaccacagtgaagcccgaatttcgtagtctatactatactcattgtgagtctgtttatatcggaaatgacaaaacagtagggatccataatagtgaagatatcaatttaattaactcaatatgtaaagaatttgaggtttattatgcataa

SEQ ID NO: 437059 - DNA, 303 bp, Serratia marcescens
atgaacgtatggacttggaagggtaaatactttggttacatcgaaagcggacgtctttggacagctgccggcaaacacgttgggaacgttcgtgacgacatcatttatgggaaaaatgggaactatctcggtgaggtaaggagtaacaatagacttatcacccatcgttcaaaaaaaagtcgacgtgtatccactttcacacctctaagcaatcgcatcggtcgggggtgctatgcgggttatgtgggttatgtaatgatttccggttatgaggatttcccttcctcagagtcgttttcctag

SEQ ID NO: 437060 - DNA, 234 bp, Serratia marcescens
atgaacactcaacacataaaaatccttcgtatgtctagcgttgtcaacaagataggtgtagcccgttctaccatctacgactggattaaccccaagtcaccacgatatgacgccacattccctaaacaacgtcgcctgggcatgcaatctgtcggctggcttgagtctgaattggatgagtggttgctgaaacgtcatctggcatcatcaactactattgccgaacgaccataa

SEQ ID NO: 437061 - DNA, 3216 bp, Serratia marcescens; identical to SEQ ID NO: 230507

SEQ ID NO: 437062 - DNA, 282 bp, Serratia marcescens; identical to SEQ ID NO: 25056

SEQ ID NO: 437063 - DNA, 537 bp, Serratia marcescens; identical to SEQ ID NO: 199626

SEQ ID NO: 437064 - DNA, 1011 bp, Serratia marcescens; identical to SEQ ID NO: 25053

SEQ ID NO: 437065 - DNA, 831 bp, Serratia marcescens; identical to SEQ ID NO: 96578

SEQ ID NO: 437066 - DNA, 492 bp, Serratia marcescens; identical to SEQ ID NO: 199232

SEQ ID NO: 437067 - DNA, 246 bp, Serratia marcescens
atgtctcttcctgagctgaatcacaggattttggtcgcagcaaaacgcaatggttgggtcacagacgaagagtttaaccgtacacgtccggtactcaacctagaaaacaacatagccgaacgcttggcctcaccagagctgggctctgacctcaaacaactatctcaagcgagcggcgataaagacaactttgtgccaccggaacaactcatgaagtacatccgggacaaattacaggagaactaa

SEQ ID NO: 437068 - DNA, 1434 bp, Serratia marcescens; identical to SEQ ID NO: 25045

SEQ ID NO: 437069 - DNA, 552 bp, Serratia marcescens; identical to SEQ ID NO: 230523

SEQ ID NO: 437070 - DNA, 279 bp, Serratia marcescens
atgaagggcgttctcaatgaactggaggaagagtacaaaaagcgagaagaagaagaaaaagaaaagcgagctcaggctgagcgaataatgagcgacatggaatcctgcggtgtggacatcggcttgctcaacgaaatgttcacgagcagatcagaacctgataatgctaaatattcaaaagacggagtttcgtggagtgggcaaggacgtcgcccggatgctttcaaggggttgggagctgtcgagctggagcgctaccgtatcccacagaagaagtaa

SEQ ID NO: 437071 - DNA, 435 bp, Serratia marcescens; identical to SEQ ID NO: 199234

SEQ ID NO: 437072 - DNA, 1065 bp, Serratia marcescens
atgttgagacgagaaaaccaaggagatttgttcgatgaccaggtggtgttgccatcactggagtcggttcttaccggtatatcttccagtcagcgttgtgacgatagaacaacgtacttctcagcgccggatgtggacttgagtttgtacgaccacatcattgtttgcctgtctggaggcaaggactcgattgctgcgtacttgcggctggtggacatgggtggtagttcgttgatggattgggccttcatgcgtgattactgtcgtcagctcggggaagaactgggtgtcccaatgtacttctcgtggcttgagggcggctttgagggcgaaatgctcaaagacaatgcctatagccacccccatcgtgtagagacgcctgaggggcttctggtgctgcctagagaccataagcgctctaagcctggtacacgccttcgtttccctcagcaatcgccatcactccaaacaaggtggtgttcatcagccttgaagatcgatgttggccgcagagctcttaataaccaggagcgcttcaaggggaagaagatccttttcatcactggtgagcgccgggaggaaagtgcaaacagatccaagtacaaccagcttgaggctcatgcctgtgacagaagatatgggaagactgcacggttagttgatgcctggaggcccgttcttcattggactgaggaagaggtatgggaagtaatcgagcgtcaccgcattctggccccagtcccttatcgccttggttggagccggtcttcgtgtatgacctgcatctacaactcacagcgtatctggtccactatccgtcactactggcctgaacgagctgggaagattgctcagtatgaacaaacctttggtgtgacggtatcaagaaaaaaaatcgacgtaatagatttaggttctgctgttgcgccgatacagattagtgatgttgaggcattggagcaggtatccagagaggattacacgctcccgatttttgtgccggaggggcagaagtgggttctccctggtggcgcatttggccgagaggcctgtggttctgattga

SEQ ID NO: 437073 - DNA, 474 bp, Serratia marcescens; identical to SEQ ID NO: 199235

SEQ ID NO: 437074 - DNA, 429 bp, Serratia marcescens; identical to SEQ ID NO: 199236

SEQ ID NO: 437075 - DNA, 360 bp, Serratia marcescens; identical to SEQ ID NO: 199237

SEQ ID NO: 437076 - DNA, 447 bp, Serratia marcescens; identical to SEQ ID NO: 229184

SEQ ID NO: 437077 - DNA, 519 bp, Serratia marcescens; identical to SEQ ID NO: 199238

SEQ ID NO: 437078 - DNA, 858 bp, Serratia marcescens; identical to SEQ ID NO: 229187

SEQ ID NO: 437079 - DNA, 192 bp, Serratia marcescens; identical to SEQ ID NO: 199239

SEQ ID NO: 437080 - DNA, 528 bp, Serratia marcescens; identical to SEQ ID NO: 229189

SEQ ID NO: 437081 - DNA, 294 bp, Serratia marcescens; identical to SEQ ID NO: 199241

SEQ ID NO: 437082 - DNA, 303 bp, Serratia marcescens; identical to SEQ ID NO: 25011

SEQ ID NO: 437083 - DNA, 351 bp, Serratia marcescens; identical to SEQ ID NO: 199243

SEQ ID NO: 437084 - DNA, 549 bp, Serratia marcescens; identical to SEQ ID NO: 199244

SEQ ID NO: 437085 - DNA, 195 bp, Serratia marcescens; identical to SEQ ID NO: 25008

SEQ ID NO: 437086 - DNA, 336 bp, Serratia marcescens; identical to SEQ ID NO: 199248

SEQ ID NO: 437087 - DNA, 498 bp, Serratia marcescens; identical to SEQ ID NO: 25003

SEQ ID NO: 437088 - DNA, 933 bp, Serratia marcescens; identical to SEQ ID NO: 199251

SEQ ID NO: 437089 - DNA, 393 bp, Serratia marcescens; identical to SEQ ID NO: 229203

SEQ ID NO: 437090 - DNA, 195 bp, Serratia marcescens; identical to SEQ ID NO: 229204

SEQ ID NO: 437091 - DNA, 1185 bp, Serratia marcescens; identical to SEQ ID NO: 199252

SEQ ID NO: 437092 - DNA, 429 bp, Serratia marcescens; identical to SEQ ID NO: 199253

SEQ ID NO: 437093 - DNA, 564 bp, Serratia marcescens; identical to SEQ ID NO: 199254

SEQ ID NO: 437094 - DNA, 570 bp, Serratia marcescens; identical to SEQ ID NO: 199255

SEQ ID NO: 437095 - DNA, 1245 bp, Serratia marcescens; identical to SEQ ID NO: 199260

SEQ ID NO: 437096 - DNA, 273 bp, Serratia marcescens; identical to SEQ ID NO: 25136

SEQ ID NO: 437097 - DNA, 636 bp, Serratia marcescens; identical to SEQ ID NO: 25135

SEQ ID NO: 437098 - DNA, 675 bp, Serratia marcescens; identical to SEQ ID NO: 25131

SEQ ID NO: 437099 - DNA, 501 bp, Serratia marcescens; identical to SEQ ID NO: 25128

SEQ ID NO: 437100 - DNA, 657 bp, Serratia marcescens; identical to SEQ ID NO: 25126

SEQ ID NO: 437101 - DNA, 618 bp, Serratia marcescens; identical to SEQ ID NO: 25125

SEQ ID NO: 437102 - DNA, 315 bp, Serratia marcescens
atggtgttaggtttcgctgagacatctgccagctatatttcccacgatgacctgagcgccactcgaagctatcaaaaccctgaggctgttgatatggcaaaaggcctggggaccttgaaagacgtccctgatttcctctacgtcattacagacgtaaatgccaacatggctgacaaatgcaagcgcgtctgggagcctcaatcactggctttaagccaattgattgttgagctggtggcactgcgtaagacgaacaacaaaggtagctacgaacaagcgctatcccacctcgattgttcaatattcacaaactaa

SEQ ID NO: 437103 - DNA, 2193 bp, Serratia marcescens
atggacctttatatctgcgagaagccttctcaggcaaaagatttggctggcgtaatgaaggcctcccaacgaggtgatggatttctccatgatggaggaaaccgcgttattacgtgggcgttcggccacctgctggaattgtatatgccagacgattatgacgaacgctacaagtcatggtcactggagaccctccctattgcaccagagtcatggcggtacaacgttcgcaagagtgcgttcaaacagtacaaaattgttgagggactggtcaaaaaggcgagcaccatctacatctcaacggactacgaccgagaaggtgaggctatcgcccgttcgcttctggatcgattccgctactctggccctattcgccgagtttgtttgacggctctcgatgagtcaagcatcaagaaagcgctgaacaacgtaaaggatggcaaggatacggtctcactctactacgccgcattggcacggcaacgcgctgactggttggtaggcatgaacgtgagccgcctctacacagtgctggcccgagatgtcggcttcaaccacactcttcacgttggcagggttatcaccccaaccgtcgctcttgtttgtcaacgggaccgagagatcgccgatttcaccccctcaccatactggactctgggtgtgaacgtgtccgtacagaatggacagtttgccgcccaatggataccaccagaagagtgcagtgacgagcaaggccggtgcgtcaataaggcctatgccgagcaggtagcctcccaggtcaatggtgccaatgctgttatcagcaaagcagaaaccaaaccaggtaaagagtcagcccccctccccttcgatctaacgtcgctgcaacaatacgcgagcaaacgatggggatacacagctcagcaggtactggatgcagctcaagctctgtacgagacgcacaaagcgaccacctaccctcgtactgacagtcgttatctacccgagagccaaaaggaagacattccggacattctccaggcgctcattttgtccgatcagaacgtctctgggctggtggctggcgcagatcctcatcgcaaggccagggtattcaatgacgccaaagtgaccgcgcaccacgcgatcattccaacaccggccagaacagacatcagtgccatgtctgagatcgagttcaatctttacgacgccatccgtcgtttctacatcgcgcagttctacagcgagttcgagttcaccaaaacctccatcgaggtgcagtgtgggcgtcacctctttgcgtccgctggtaagacacctaccaaacaaggctggaaggttttgtttgcttctgatagtgaaagcagtcccaaggacgagggggaagacaccgacgcgccggttgaacaagagaagctccccagggttagccagggcgaacctgccttgctgaatggggccgagctggcaaacaaaatgacgcggccagcaccgcacttcaccgaagccacattgcttgccgcgatggagaacattgcccggttcgtgactgaggagaagttcaaacaaatcctcaaagacacagccggtttaggcactccagcaacacgcgcaagcatcatccagggcgctgttgataaaggctacttcaagcgtcagaaaaaggtactgcttgcaactgataaggctcatgcgcttatagcagtgcttccaccagccatcaaatcacccggcatgactgcggcttgggagcaggagcttgagaaagttgcctccggctccgggaacatgtctgtcttcatgaagcagatttccacctggatctgccaaatggttgagcagctcaaagtggccgcaccggttctgaccaaagaaggtggcgcgatggctaaagccttcgagggcgcgaagcctccttcacacgaatgcttcaactgcggtggagagatgcaccggatcaaagggaagaacggttttttctggggctgccagaacgaggcttgcaagaagacgttcccagacaaccgagggaaacccgagaaacgtatcgcggcggaggattgtccagactgcccagattgcggtagcccgatgcgtctcaggaaaggaaaagcccctggcaagaaacgagcctctaagttctggggctgcacagcgtatcccgattgcaaaggcactatgcccttcaaaaagtcggactttatggattga

SEQ ID NO: 437104 - DNA, 618 bp, Serratia marcescens; identical to SEQ ID NO: 25121

SEQ ID NO: 437105 - DNA, 2973 bp, Serratia marcescens; identical to SEQ ID NO: 25120

SEQ ID NO: 437106 - DNA, 1866 bp, Serratia marcescens; identical to SEQ ID NO: 25119

SEQ ID NO: 437107 - DNA, 546 bp, Serratia marcescens; identical to SEQ ID NO: 25118

SEQ ID NO: 437108 - DNA, 630 bp, Serratia marcescens; identical to SEQ ID NO: 25117

SEQ ID NO: 437109 - DNA, 447 bp, Serratia marcescens; identical to SEQ ID NO: 25116

SEQ ID NO: 437110 - DNA, 378 bp, Serratia marcescens; identical to SEQ ID NO: 25115

SEQ ID NO: 437111 - DNA, 663 bp, Serratia marcescens; identical to SEQ ID NO: 25114

SEQ ID NO: 437112 - DNA, 144 bp, Serratia marcescens; identical to SEQ ID NO: 25113

SEQ ID NO: 437113 - DNA, 366 bp, Serratia marcescens; identical to SEQ ID NO: 25112

SEQ ID NO: 437114 - DNA, 282 bp, Serratia marcescens; identical to SEQ ID NO: 25111

SEQ ID NO: 437115 - DNA, 627 bp, Serratia marcescens; identical to SEQ ID NO: 25110

SEQ ID NO: 437116 - DNA, 918 bp, Serratia marcescens; identical to SEQ ID NO: 25109

SEQ ID NO: 437117 - DNA, 1317 bp, Serratia marcescens; identical to SEQ ID NO: 25108

SEQ ID NO: 437118 - DNA, 579 bp, Serratia marcescens; identical to SEQ ID NO: 25107

SEQ ID NO: 437119 - DNA, 384 bp, Serratia marcescens; identical to SEQ ID NO: 25106

SEQ ID NO: 437120 - DNA, 2829 bp, Serratia marcescens
atgaaagttgctgggctggtggggcaggctgtgagcattggtgaacaacctgtcgaatacagcctgtacctgttcagtggtgacggttccaaggtaaaagttgggtctggctctcagaacctgacggtaactactgcctatggctctgttggctacaccccgattgatgacattgctcaggtgaatcgcgtcattgaagattttgatgtgaacttcaagcagagcaaggggccagactgttctataaccctcagcgcagaccgtgcgaaaaaagaggccgcgaacaaggctgttggtagtgcaagccgtgcctgtctgttcgagtggcagcagatccccgatggattggtccaagacccgttatcggaatcaccttcgctctctggttcattggcctccaacggcgttcatccactggggtggcgggtaagtattttcacccgtaacggcactagggtgacgttgaacgacgagactttcaatgtcgaagcggttgacccaccagctccgaccgttgaactagcctccgactacaacttcaaagacaacatctacttggtgccgatgacaggtaactacctgggtgatgccattatcaactctgaacgagctgatctggatattgccatatcgcgcaactcggatgttcttgagtctgagaccttcactccgggatggggtgccaccaataaggtgtatcgccgcatcaataccgatgagcgagcgttgtgggaggagaccacctacaaggtgaacgcggcctacaacaaggtgcctgatgtgaagactgaggttgtctaccgggctatctctgcaccttctgacagtatccgtcctatcgttgaagttaaaggtgataccgcgattgacacccaggcattgccggttagggttctcatccgtgatcagtacaaacctgatggtgactatgacgctaacacgatgggggtgtggaaagtacgcctgatccagcaaaaggcctacaacgagacggttgcgctcactgattatgcggaagcatcgaacggtgaagctcagttctcagtagacctgtctggtgtggatacttcctccgtccgtatcgctgctgaggctgttctggaaagccctgttgagggttacaaccgcacagagttgtctatcagacctgccttcttgacagtgcttcgcggtggtgccatcggtgctggcgtggaggctcgcaagttgtctggtgaagctccgttcactgctgtgttcaagctatctttggacgaccgtcaggatctccgggctaccggccaggttgtgtgggaaaccagtaaggacgacggtaaaacctgggagcagttcatcccagaagatcgatacaagtatcagcttgtgaagaccttcgacaagggggagtaccaggttcgggccaaggtggtgaacgtcaactcaggtgcggaaaagtacaccgaagcggtcagtgttgtcgcttacgacaaacctgatattgctgttatcggcccgaccacgttgtttgtcggaagtgaaggcaagtacacagcgaacctgacgttgaacgatgagccaatctccggtggcaatgccattgttgagtggtctactgacggtggcaaaacctacgcgcagacaggggatagcatcacgctttcgagcgatgaagaaacccgataccgcctgtgggctcgtgtgcgctctgccacggcaccggctgatgacggctatgcctatgaagttgcgaaaacggcggttgacttccgagcagtgaaggcacctcgtccttacgtgacagggccgcgagttattgagaccggtaagaagtatgtgttcaaagccgaaaccagcctgccttaccgtgggatggacgtgaagctgaacgggttcttcacgctgcctgatggctcgattgtgcagggtgatactgctgagtacgaaccctctgacactgacctcaatcaggctactgtagaaacgaagtacaccacctggatcgaaggataccgagatcagggtgcagaggcttcgcatagcctacgctcccgcgtttggcagtatgtatggccgagcttcggaatgcaggttaggaagaacgcagacgtggctcctgcgacgatcaccgcgtcagtgcggccaattgccttcaacggcaagctggaagagccgacctacgagtgggagttgccggaaggcgctgtgattcaggatcagcggcaggatattgtccggtcctttgtgatcaatgagccgggtgattacaacatcaaggtcactgtccgtgatgctcgcggccatgagaccgtgatcgagcaaccgctcaagatcggccaggcagcgccctatgccattgacctgcaatactctggctcgaacaaatacgagcgtgagcctctggatgtgctgttgcgaccgtacatttctggcggccacccacgcgaccgtatttcgactcgtgtttattcggtagatggtacaccgttggaaagcagtggttactacggcagagcaactctgggcgctggtgagcacagcatcaagctgaaaataacctcagaaatggggcatgaagctgagggcgaggtgaacatcaatgttgcagagaacaagttgcctgcatgtagcctgagctcacgagagaccgttgggtcgtggatcgtctatgcgaactgcgaagataccgatggccgcatgaagtcctacgaatggaccattgccggtgagttgcagagcatcagctctgatcgagtgactatcagcaagggcacctatgaaacgatgccgaccatctctctggttggggtcgatgactctgggggcaaatccgaagctgttaccatgaactaa

SEQ ID NO: 437121 - DNA, 708 bp, Serratia marcescens; identical to SEQ ID NO: 25142

SEQ ID NO: 437122 - DNA, 2448 bp, Serratia marcescens; identical to SEQ ID NO: 49841

SEQ ID NO: 437123 - DNA, 318 bp, Serratia marcescens; identical to SEQ ID NO: 25062

SEQ ID NO: 437124 - DNA, 531 bp, Serratia marcescens; identical to SEQ ID NO: 25063

SEQ ID NO: 437125 - DNA, 1266 bp, Serratia marcescens; identical to SEQ ID NO: 25064

SEQ ID NO: 437126 - DNA, 672 bp, Serratia marcescens; identical to SEQ ID NO: 25065

SEQ ID NO: 437127 - DNA, 1008 bp, Serratia marcescens; identical to SEQ ID NO: 25066

SEQ ID NO: 437128 - DNA, 2796 bp, Serratia marcescens; identical to SEQ ID NO: 25067

SEQ ID NO: 437129 - DNA, 861 bp, Serratia marcescens; identical to SEQ ID NO: 25068

SEQ ID NO: 437130 - DNA, 642 bp, Serratia marcescens; identical to SEQ ID NO: 25069

SEQ ID NO: 437131 - DNA, 321 bp, Serratia marcescens; identical to SEQ ID NO: 25070

SEQ ID NO: 437132 - DNA, 186 bp, Serratia marcescens; identical to SEQ ID NO: 25071

SEQ ID NO: 437133 - DNA, 969 bp, Serratia marcescens; identical to SEQ ID NO: 25072

SEQ ID NO: 437134 - DNA, 909 bp, Serratia marcescens; identical to SEQ ID NO: 25073

SEQ ID NO: 437135 - DNA, 528 bp, Serratia marcescens; identical to SEQ ID NO: 25074

SEQ ID NO: 437136 - DNA, 990 bp, Serratia marcescens; identical to SEQ ID NO: 25075

SEQ ID NO: 437137 - DNA, 1011 bp, Serratia marcescens; identical to SEQ ID NO: 25076

SEQ ID NO: 437138 - DNA, 1278 bp, Serratia marcescens; identical to SEQ ID NO: 25077

SEQ ID NO: 437139 - DNA, 1797 bp, Serratia marcescens; identical to SEQ ID NO: 25078

SEQ ID NO: 437140 - DNA, 540 bp, Serratia marcescens; identical to SEQ ID NO: 25080

SEQ ID NO: 437141 - DNA, 501 bp, Serratia marcescens; identical to SEQ ID NO: 25081

SEQ ID NO: 437142 - DNA, 885 bp, Serratia marcescens; identical to SEQ ID NO: 25082

SEQ ID NO: 437143 - DNA, 2454 bp, Serratia marcescens; identical to SEQ ID NO: 25095

SEQ ID NO: 437144 - DNA, 204 bp, Serratia marcescens; identical to SEQ ID NO: 25096

SEQ ID NO: 437145 - DNA, 219 bp, Serratia marcescens; identical to SEQ ID NO: 25099

SEQ ID NO: 437146 - DNA, 585 bp, Serratia marcescens
gtgcgtcctaaccaaaaggaatgcactatgtctaactttgaacaagctctggagcgtactgacggtaaaacactgattctcagcaatgggagtaagtgggcaggccaagacccggacagtattcagactttactggatgtcctgggtgacaacgttcttgacccgatgtttgagcagtatcactgttatcgcccatacccgtttgaaccaatggtgaggacggggcgaaatggcgaaatgttccagccttggcttggggcagcctgcttctttgggaacttcctgactgtctctcatgttttcaacatcatcacgaaagatgacggtgttgttgaggccttaacagaggcgatccggaagaatatggcgactgaacagtaccagcagaatgcctatgagcgttatgccggttggttctacgctgaaaccagcgaagggttaaggctagtctctccaagtgaggctgccgacatccgagctggcgcagtttcaaagctgcgttacccaagaaacttcgaggttatgaaaactgcggttctcaaaggtcctcgatttgatactgaattaagccgcaaggcttcttaa

SEQ ID NO: 437147 - DNA, 852 bp, Serratia marcescens; identical to SEQ ID NO: 25101

SEQ ID NO: 437148 - DNA, 435 bp, Serratia marcescens; identical to SEQ ID NO: 10324

SEQ ID NO: 437149 - DNA, 543 bp, Serratia marcescens
gtgagttttcgttccactgagcgtcagacccctacaagcgtggaacacatctacgccgcaggcgactgcaccgaccagccgcagttcgtctatgtggcggcagcggccggcactcgcgccgcgatcaacatgaccggcggtgacgcggccctgaacctgaccgcgatgccggccgtggtgttcaccgacccgcaagtggcgaccgtaggctacagcgaggcggaagcgcaccatgacggcatcaaaactgatagtcgcacgctaacgctggacaacgtgccgcgcgcgctcgccaacttcgacacgcgcggcttcatcaaactggtggttgaagaaggcagcggacgactgatcggcgtgcaggcagtggccccggaagcgggcgaactgatccagacggccgcactggcgattcgcaaccggatgacggtgcaggaactggccgaccagttgttcccctacctgacgatggtcgaagggttgaagctcgcggcgcagaccttcaacaaggatgtgaagcagctttcctgctgcgccgggtga

SEQ ID NO: 437150 - DNA, 363 bp, Serratia marcescens; identical to SEQ ID NO: 39670

SEQ ID NO: 437151 - DNA, 237 bp, Serratia marcescens; identical to SEQ ID NO: 10330

SEQ ID NO: 437152 - DNA, 708 bp, Serratia marcescens; identical to SEQ ID NO: 10331

SEQ ID NO: 437153 - DNA, 1269 bp, Serratia marcescens
atggcggcggacaccccacggattccagaacaaggcgtggccactctgcctgatgaggcttgggagcgtgcgcgccgtcgtgcggagatcatcagtccgttggcgcagtcggagacggtcgggcacgaagcggccgatatggcggctcaggcgctgggcttgtctcggcgccaggtatacgttctgatccggcgtgcccggcaaggcagcggcctcgtgacggatctggtgcccggccagtccggtggaggtaaaggtaaggggcgcttgccggaaccggtcgagcgcgtcatccacgagctactgcaaaagcggttcctgaccaagcagaagcgcagcctagcggcctttcaccgcgaagtcactcaggtgtgcaaggctcaaaaactgcgagtgccggcgcgcaataccgtggccttacggatcgctagccttgacccgcgcaaggtcatccgccggcgggaaggccaggatgccgctcgtgacctacaaggtgtgggcggcgagcctcctgccgtgaccgcgccgctggagcaggtgcagatagaccatacggtcatcgacctgatcgtggtcgatgaccgcgaccggcaacctattggccgcccgtacctgaccctcgccatcgacgtgttcacccgctgcgtgctcggcatggtcgtcacgctggaagcgccgtctgccgtttcggttggcctgtgcctcgtgcatgtcgcctgcgacaagcgcccttggctggaaggactgaacgtggaaatggattggcagatgagcggcaagcccttgctgctctacctagacaacgcggccgagttcaagagcgaggccctgcgccggggttgcgagcagcatggcatccggctggactatcgcccgctgggacagccgcactatggcggcatcgtggaacggatcatcggcacggcgatgcagatgattcacgacgaactgccgggaacgaccttctccaaccctgaccagcgcggcgactacgattccgaaaacaaggccgccctgacgctgcgcgagctagagcgctggctcacattggcggtcggcacctaccacggttcggtgcacaacggcctgctccaaccgccggccgcgcgctgggccgaggccgtggcgcgtgtcggcgtaccggccgtcgtcacacgcgctacttcgttcctggtcgattttctgccgatcctccggcgcacgctgacccgcaccggctttgtcatcgaccacatccactactacgccgatgggcactgttgcaaatag

SEQ ID NO: 437154 - DNA, 705 bp, Serratia marcescens; identical to SEQ ID NO: 8686

SEQ ID NO: 437155 - DNA, 705 bp, Serratia marcescens; identical to SEQ ID NO: 8686

SEQ ID NO: 437156 - DNA, 441 bp, Serratia marcescens; identical to SEQ ID NO: 191886

SEQ ID NO: 437157 - DNA, 861 bp, Serratia marcescens; identical to SEQ ID NO: 19455

SEQ ID NO: 437158 - DNA, 1545 bp, Serratia marcescens; identical to SEQ ID NO: 23311

SEQ ID NO: 437159 - DNA, 1515 bp, Serratia marcescens; identical to SEQ ID NO: 52478

SEQ ID NO: 437160 - DNA, 786 bp, Serratia marcescens; identical to SEQ ID NO: 16905

SEQ ID NO: 437161 - DNA, 564 bp, Serratia marcescens; identical to SEQ ID NO: 62449

SEQ ID NO: 437162 - DNA, 1542 bp, Serratia marcescens; identical to SEQ ID NO: 30088

SEQ ID NO: 437163 - DNA, 840 bp, Serratia marcescens; identical to SEQ ID NO: 6027

SEQ ID NO: 437164 - DNA, 2466 bp, Serratia marcescens
  misc_feature (2350)..(2398): n is a, c, g, or t
ttgagtaaagctggtattcagtctaataggggggatggatatcaaacgttggtagcgtttgactgggctttgaccgtgttatccgatcctgattatcaatggttagagacagattcagtgaaatggctggtcgatgacgttgtgatagggcggactgacggtacaagaatttgttgtcagtgcaaaaaaaatcaaacaggatttcgagcgtggtcattcaccgatcttaatgatgagctagaaaaggccattaaaacgcttatacaagatcctactacgacagtcagattttactctcgtactccttttggtgagctggctgctttgcaagaatttagtactaatttcccagatgaaagtgcttatcatgctgctttaaaagagacaaaggtacatgaggcgataaatagaaaactcattgaattaattgcaacaatatcttctaattttaatggttatgagtttttatccagaacaaaatttgttactagcgatattcatgaacgaatgagagaaactctggaagagcgattgcaatatttggtgagtaattctgttgcagcttttaattcgctttggacttgccttgattaccaagggatgcgagtcgctgacacgcaagataataaactatcatcttgctcgcgtttaaccaaagccgaccttataaatcttctttctcaatcaggttgtgttatttctcctccggcagatattcaatctatttttaattcattcagaaaaacatcatccattggtcgttcatggcaacgagatattagtggtcatcgtattgatacacttctggtaagtgaattaattgaagctatcaaaagcaagagccattccatattagtgactggagggccgggttcaggaaaaacgtgtgttctacttgaattgcaagagaaactagagcagttggcgcaatctggtagtattatgttacctctattcattcaatcgcgagagtttgctgatttagaaactgcacaggaacggcaatctctagggttagacgagcaatggattgaaaagattgcgcgtgtagctgacagctatcatgtaatagtcataattgattcacttgatgtgcttgctatagctcgagaacatatggtgctaacgtattttttagctcaaatagatcagatgtcattaattccaaatgttaccgttattacggcttgcagagagtttgatagacattacgatagacgtatatctcagcgctcatgggataaagagtttaagtgccaggcattagattgggaaggtgaaatcaagccgttgcttgaaaaattctcaattgactcatcaaccattgataacacaacgcgacatttaattagcaatccacgtgagttagctctatttataaatcttgctcaaagaggtggcagctttaacatagtgactagccaagcgctagctcaacggtatattgattccattgttttgactaatcccttgctaggtgatagagggaaaatagcgcttgaaaatatggctacggaaatgttaaagcttcgtaccctgtcgataccaacccaacgatttactgcttcagttgatattcgtagaatgttacttagccataatgtgttgcatgaaactgatgataataaattaacatttgggcatcaaacgttacttgatgtattagttattagtagagcgattcgtcatggattgactttaagtgattttataaaggatctcccaccagtaccttttgttcgcccatctattcgtagctttattgcacagcttgtcaatgaaggaagacaagagtttagaaaacagttacgaacggtacttactggaacttatgcttttcatatacgtcgcctagttgctgagtgttttgctgagcaattacctcaagatgatgattggccaatgttacgtgatttacgtaatacgcatcgagacgtttttcaggttatttatagcaaagcctcacaagttgaatggcattatttttggttaagtaatcttgttccggttttaaaagctatgcgtgatattgatggtatagaaattcatacttaccgtattgcacattggttaaatctagatccatcaggtgttattgatttttggatggaaatattgggatctgattggatagataagtcaaaattgataaataagattgctgtttctatatcgaatataaagaaagatcatgcatatttgatgtctccgctattactggagctatttaaatttccacaggaagaatatagctttttaggcagagcccttgctcgctgtgttgctgcaggggggatcgatgatgcggtgctttgggattacatcattgctgatgttaaagatgaagacnnnnnnnnnnnnnnnnnnnnnnnnnnnnnnnnnnnnnnnnnnnnnnnnnaaataagcttaagtgccgaccgcacgaatttggtgataaggataatgaattcctttcaaatagaatga

SEQ ID NO: 437165 - DNA, 2148 bp, Serratia marcescens
atgattaattctattactttgttagagcaggctatatcgacaattgaacagtggagccaagtacggagttatagatatgaagaaaaaaataattatcgaagtggttttctaaatggaacttctcattatgatgatcgcagaatgagtgattttgagcataaagatagtcaacgtgtcctgatggatgctttagaagttgctattattcatcatgctaatatcaattctgagtggtggcaaaacaatcgtgaacgtttatgctttaatctggaaggatcgcttcgttactttgcattgttagcgtgcattaattctccgctaactaatcttgacatatcctctcgtttgctgtcgaaatcggatttattagagtctgagctttcacatgaactgggcactttagtgcagaaagtttttatccatttgagctcagaatcccaagacgcaatacaggttataatacttgctctttctcagagatatgctgatttccctgagtataggcaatatatgcttaaagatcaggtcaagtttattatttgtataccgtgctatttacgttcgccgtcatgtgtaagtatttttgatgaatatagtcgttcaaactggccacttgaacataaaccagatgttaatggatggtgcgggatagtaagagctccgttctcatttgaagtttttaataagattagcaatgaaggcgttctcagtcttcttgagcactataatgggtataggcgagactcatttagcgatatgttaattggtggagaggagcaagtcgctcagcaactgagtgaggcatcttcaagggatccattacgatttttgagtttgttatcttcttactggcaagatataaatgaaaatttccgaaataatattatgaatggtattgcgcgttatttgaattatcgttatggcaaccttcggcaaaataatgactggaaaccgattaatgaacctaatattgatattttagttagcaatactttagatgaactggaacgacattctgtctattggcggcaaaaccgctctgcttccgaagtgctacaagggtgctcacatgtagtaaaagatatcaataatgcggaaagaataacctttttatctattccctatttagccgtggaggaaagagatcctatctcaggagatggtgtcacttttattggtataggtattaatatgattcgagggcatatcgctgatgcccttatggttatggcaataaagttacatgaagaacatatttcttggcctgaattattgttaccgacactacaccaatttgctactaacgagcatcctgcagtgcgagctgtagtattacgccgtttacctcatttacagcatattttacctgaggttggttgggtggtatttgaattaataatgcgaaaaggtagcgaacgactttgggatatggcagaacgttgtctctattatacctatcatcatgagctcgacagagtttccccatggttaaataagattgtatctgaaggtattaaaggcggattgcaagcgtggggaagaatatctgcattggctgtattgtcagaaaaaatagaaagtcgtgattttatcaaacaattaaaagaattaagcgatagtgatgcatgggaaggtgctgtcgatgtttggacacatcgtgagaattttcaacggcatcaggatttatgtcttgctggtttggatgctgcgttaagtgatgataatcaatattcctcagaattaatagcgtcaatgggtggtatttttagagggaaagagccggttattattttacccatgcaagtgttagagcgttatttttcattagtatttacgagttcagagtcatcgaaaattgatttgttcgattttggctcgtggttaaatattgtttcatgcatagaaccattgtatgcattgagggctacggagatttatcttgaatatgctcgtacaacaaaagtctatttacatgattacaataataatttaatgcagctattgactcgtttatttgcacaagcagaagagcaggaagaatcggatggcggagaaatgctatatcgagtggttgttttgcaagacactatgttggccttgggtgttgatggggtgagtacatggttagaggccgctgagagagcataa

SEQ ID NO: 437166 - DNA, 1005 bp, Serratia marcescens; identical to SEQ ID NO: 236913

SEQ ID NO: 437167 - DNA, 1059 bp, Serratia marcescens
ttgaatcaaagtaaagatggatatccacagggcccattggtacgagctgtgtgggactgctgtgatgagctttatgataaattgggccgagctccatcccgacaggaacttaatgatgaaatcggcaagcgcgaaccccatcgcgtaggcattagcacacactcacgccaatggggagagtggatgcgtcatcataatttctcaacatttgtggctgatgcaccaggtatcatccctgaagaaatgctctatccacaatatctccgtgtatggtatgccgtaatacaactaaattccgcttctgctgcagatattgttaagtggatccggaacagcaacgcgcccttgaaagagactgagatccgcattcaactggatgcactgactgtcaatagcaactctcggtatcgatatcttggtagccgtaaaagtgctcgtactgacctaggtaacccatacgacgttttatttcgtactggaaaactacgaaatacacggtatgaactttatgcccaagagctgcacggtatatgggatattggcgatgatggcagaacgccagttcagattgctgtcccaaggtcatgtgatcggttagtgctcgaagcgagagacgaagtattcacggaactccctgaggatgaaggtgacatccgtctaaaggctctgcgtgaagttattgttcgggaaggacaacccgtatttagacgaaaactcattgaagcttatgagggcagatgtgcggtaacaggctcttcgatccaggtgttacttgaggctgctcatatcatcccttatgccggtgcctggcatacccgcgcccagcacggtttgttactcaaaacagatattcatactttatttgaccgtggtttgctctggattgataccgaattgaaaataaggatatcagaacagttagctgggacagaatatgcagagttagatggacgatacctaaggttaccaaaagataaaaaagattggccgttaatcaatcatttgataaatcatcggcaatattggagtgaaaaacatgatgacgatgaatgctcttaa

SEQ ID NO: 437168 - DNA, 1308 bp, Serratia marcescens
atgagtgagatgtttgaaattgcatatgcagcagccacaaataggctttgtctatttaccggaacaggtttttctaaggaggtgtctaatggtgatgccccaacatggaaaggtcttctcgaagaactgtgcggcattttaccaaatgcagataaattaaatatgtcactttttccaaaagaaaagtcatcacctttaagcctagaagaaacagcgcaaataatctcaataaagctggcagctcaagataaggacattcatgaagaagttgctaagattatttccaagatacaattaggtggtggtaatgaggaagttgagtattttttttctaaccgttctttccgagttgtaacaaccaattatgataagttagctgaaagtttaacatgtgaaaatacttctcaatcaattacaccggggttaccgataccaagatcttctgcgaatgttaaagtctatcatgtacatggttccatagattctccccaaaacatggtgatcacatcagaggattactttaaatttataaatagtgattcatatttttctcgaaaattaagcactgttttgtatgaaaacactgttgtgattttggggtattctcttggggatacaaacctaaaagcaattattagtgattataaaggtttttctaaaagtcatgtggttggctcgaatatatttttgatttctagatcctcaatcgaccaaaatgtgaaggattattattttcactgctacggaattagagttttagatgcccttgaaattaatcttttctttaagaatttaaacagggaaataccgaaagcagaaagaatttctgaaatgtctttaaagtccatccggaaagttgtatatgaaaatcactcattcaaagacacgtacttaaagctcgaagactcattctatcagattatttctgcaattgctgctgaagggctgagctggaataatacaatggtagtagcaatgattggcgatattattgaaacaaaaacaaatttaaccaacgagcataatgcctgggaacaatatgaacatctagctcgttggctaatttacctcggaactatttttgaagtgcataaaacttcaatagaggcgaaataccttgatgcagtactacgctcgatgacaacaatgagaaaagattactatattggatactcttggcatgcataccgctcttggaagaatcgttggccatctatgattgtgtcaaaccggatgctaattaaaaaacacattgaggagaataccacatggcctgatgctctaaccatagtaaacgatattgattaa

SEQ ID NO: 437169 - DNA, 804 bp, Serratia marcescens
atgatcgtatcaatcaaatcaagaacgaaaatcgttaatccaagcctgccggttttgaacctgtcgcctgaggaagagtttattttacgtaaaaggccgtccgcgtggatctcttctgcgaatggtctgctgtcagatgatggaacaaacgttaagcttattctggatcgaggtgggaacccgaattgggcgccgctgttgtcaaatatgccgcgtaaagctgtgtcgaatggcaagccaatcctgaattttggcgcacctgggccaacaaacaacggtgccgtcatttcgcaaaatgcctatgaggcgttgccagccaatggtgtgatgaccgtcgcggcactataccgaatgccatcaggcaatactggcggtaacctgttcgggaataatgcagcagatcctaaccgtctgcgcgtacgctttggggaagatggttacgttggtaacgcgctttggattaaccacggcgccacgtcaccaatcactgatgcaaactatccaatcaacaccacgctgtcatttcgcgataacgtgtggcatacggcattaatcgaaattaacccaggaatgcacagatgggagcatgacggcacattgctgcagcaaaagtctgttggtgccattccgttcgccacaaccgatagtcggcggcttgtcgttggtagtgcgggaaacccgatttcaatcggctatattggcgacctggccgagctgttggttattcccactacagtggatagcgtcaccaagactgtaatttactcgtggctcaatgcgcgcaaagcaagtttgacggcatga

SEQ ID NO: 437170 - DNA, 519 bp, Serratia marcescens
atggacgaaaaattcaatgagctaatggggaatggttttggctctgatttgtttgctagatactacaaaatgcttgaagaagaaagtgacagaggtgcagtacttattgcctctggcctttttgaagaggcgctccaagagataatctcaaagcgtctattaccgtcagttaccaataaagatcctctatttggcagtgagggagctccgctttcaacttttggagcaaaaattgaaatggcctataggttgggggttataaacgatggtatcagggagttattaaacaaattcagaaaaatgagaaatgaatttgctcacaatatatataaagcgtcgttcactgaaactgatgtgaaagataggttgcgagcaatcttcaaatcagcagaggaagttcactcggcgattctggataaatttgacatcccacctacgccaaggcaagagtttaacgtatttttcgccggacagatgatggctctaaagatacgggctgaggtgattaaaccactgtga

SEQ ID NO: 437171 - DNA, 3333 bp, Serratia marcescens
atggctaatgagacgcgagaaggaaacatcctttatcaggttgagatggatgtacagggcttgttggttggtcagcggcaagtaaatgcccggcttgatgaaatggaaggacgcttcaactctacagggaaagcagtaggagccacagaaaaagccttctcgtctttatcgcgcgttgccgtcagcctgtccgccgctctatccgtccagcaagtggcgcaatatgccaatgcctgggtagatgtgaacaacaagctggtaaacgccgtaagaccaaccgagcagttggcagatgtaacgcagcgggtttttgacatatcccaagagacgcgttccgggcttgaggccacagcaacgctgtatggtcgacttgagcgcgcaacgcgaagcgcaggaaccagtaccgaagacctcgcaaaactgacaacgacaattaacaaggggctagtggtttctggtgcaacggcagaggaagccagctcaaccatgatccagctgtctcaggcactcgcctccggcgttctgcgcggtgaagagttcaactcaatctcagagaacggatcgcgcttagcggtggctctggctgactcccttggcgtaactgttggccagctccgcgccatggcagccgaaggtaagctagctacggatgttgttgtgaaagggttattgagccaaggtgatgtgattgccaaagagtttggaaaaacaactcaaacaatgagtcagtctttgcaagttgcaggtaacaatttgcagaagttctttggtgaaagctctgcggttcaatccggggtatctgtattttccagcgctatagtaaccgcaagtgagaatatagacgctcttagcattgctttaacactggctgccgcggttatgggaagccggtatgttggcgcactaactatggcaacggccgctaaggtgaaggagttggcggttactaggcaagcaattttagcagcagcagatgatgctaaggcaagcgcgttacaggcggcatcaaagttgcgtgttgctgaagcagctaaagtgcaggcgctagacgaggttcgaattgctcagctgatgcgtaattccgccctaactgctgatgtcctttctgctgcagaggcgaggttatctgctgcgagagttggcgcggccgctgcgacagaaaattacaacagggcattagtggctaatgcttctgctcaagcgactgcaaatacagcagctaggaacgccagccttggcgctgggctgctaagaaatggcctggctttacttggagggcctgctggagcggcaatgctggcaggttctgccatctactatttttaccaaagtgctcaaaaggcgaaacaagagtcgatggattttgctgataagcttgatgggctgattggtaaaatgcagaaaatgagccaaacacaacttgaagcggagatcgttaatactgccagagctattagggggcaatctgacgcgatagatgatcaagaggctaaggttgaagcactgaccaaacgtgtaaatgactataaagtatcgataaagatttatggtgaatctgaaaggtctgttcgaaacttgcgagatgctcaagaggaactgactttagaaactgaaaagttagaagaaatggagcgtaaaaactccaggactaaaagcgctctcaatctacttcaatcgcagttgaatggcactagaagggagggtattgatttattgcggcgtgacagtgagcaaactggaatagctgctgacatgatgaatcatcttggtaatgctattaacttcgccagcagggccaaggacaaattcaactcgcaaagcctaatcgttgaacggcctaaaaacgttcaggactatctggacaagctgaatgatcaggttgagattcagagcgaacttaacgacaggaagcgcgcccagcttaaggcagagaaggacatcagaacactcggcggtagcgagcaagacgtcatgctggcacgcgaaagggctggtgcagagttcgatgcaaccaaggcaattcaggagcagaagaaggcgactaaggaaggaatagcggagggaaagaagtcagccaaccaggctgaaagtgttgctcagaagctggcaaacctaaaacagcagtctgagcttgcggcggactcaacaagtgagcttagccgagagcaggcgatcctgactgcacaacaatcgctgggtaaaggagctacacaggcccagatcgctgaggctggtgcttacgctgccaaaaagtgggacacagccaacgctatcaaggcgcaggcggccgcagagaagctcctgccagaagccaaagagaatgccagctacgcgcaggacgtgaaggatttaaacacggcattatcggccaaaaaaatcagccaggagcagtacaacaccacggctgagcaactggagcaacagcatcaggttaacttggcaaaaatccgggctgaagccgtggtcagtcctcagcagcaagctgccggcatggttgacccagtgcagcaacttgccaatgaaaacgcgcaaaagctggcgttgattcagcagtttgagacggctggtattctccagcacggacaagctatcgcacttaaaaatgctcaggacaccacctatgagcaagcgcgattcgatgccatatggaacctctggaagagccaagaccaggtaaatggcctgatgggtacggctattgactcactgagttcgggaaccgcaagcgctctgtcaggcatcatttccgggactcagtcggctggggatgcgatgcgcaacttggcggctggcgctctcaatgccgtgctccagcagttgattcagatggccgttcaggcgttactcgtgagaactattctcggctcatttatgggcggtcttggcgctataccaagtttcggctcaatatcatcatccgtcggaagcgttggtgcgggtgcgggaactggcgctatggggatggggacgaactggcagagctacgtttctggagccaggaagagcggaggcccggttgcatccaatgggctctaccgatttggtgaaggcggtaagcctgagttatatcaatccagtacaggcaagaactatctgctgcccggcgagggtggcaaagtgatcagcaacaaggacatgcaaggcggtggtgggatcgtcgtttacaacaacattcagaactacagtagcgcgatggttgattcacagaccacgcagaatcccgatgggtcattgacgatagaaaccatcattgctgacattaacaatggcggcccgatagaccaagctttcacccgcaatcatcacgcaccaagaaaggcgaccgattcatag

SEQ ID NO: 437172 - DNA, 525 bp, Serratia marcescens
atgggtgtgaaaaaaataatgctggttgcgcttcttggcttgcttggcgggtgtgattctaatctggatgtttttggcattaaactaggcggcaacatagaagatgtaaaaaaggatgggttaataaaaaaagttgatgtaataccatctgacaagcaccttatatatgccgagctatcctcagtgccatcacctgatgctggaagtgaggcgagctattctttgcaagcgtctgacggatcaatagtaagtatttcggcaaatattcatgacagcaacggttctcgttacgctgggattgtttcatttgtgaaaggtaagctaggtgatgcaattgcaacagaaagtgatgttattaatgaaccttctgtcaatgctagtgtttacgtatgctcgagaacaaaatcttgcccaggagtgaaatacgccgtatttagaaaaggaaccaataacgctctagtttattatgacgaaaaagagacgaatgttcttttttcatccgatgctataaaggatgctctttaa

SEQ ID NO: 437173 - DNA, 303 bp, Serratia marcescens
atggctagagatgaaccaaaagtaaacgttagactgccccaggagctgaaagataggcttcatgcgttggcggcgcagaacaagagatctgttaatgctgagattgttgcggccatagagtttgcctgtagaagagcgtttggcgaggtaactgaaggggatgaaggaacagagattatcctgaatgaaggcgactccctggtacttaagtctcagattgacaccctgaaaaaagttgtcgaaacagagcgtaaggtggacgagatattagcggcgctagaaaagtttaaggtgaatcgctga

SEQ ID NO: 437174 - DNA, 894 bp, Serratia marcescens
atgaacagtatatcaattcttgaagcagttaacacttcgtctgtccagttccatggacaaccgatcatcactgctatggccgccggagtggcctatgtggcgatgaaacaggttgtagaaaatatcgggatcgattgggctgctcagtttgttaagctgagaaaccaaaaggataaattcaactgttgtgatatcccaatggttgctgcggatggcaagattcgcaatctgctctgcatcccactgaagaagctcaacggctggctgttcagcatcaacccgtcaaaggtgcgcgccgacatccgcgacaagctgatcgcctatcaggaagaatgcttcaccgttctgcacgactactggacaaaaggcgccgccgttcggaagtcaggaacaaccgttgatgagagaacaccactgcgcgatgcggtaaacatgctcgtcagcaagaagcacctgatgtacccagaggcttactccatcatccaccagcgcttcgccgtagagagcatagaggacttaacgcctgagcagatcccgcaggctatcgagtacgttcatcgcatagtgctggatggcgaatacatcgaaaaccaaccagagctctcgctgccaacaccgcagttctcagaagaggaaattctgagactatgccgaatgtgggtatgggccaacagagcgagaaagatgtgcaagctgatttatccgtcgctgcgcaacatggaatcgcgcttggccggaaatttctacgacctcggctttgagacttactggatactcaacgaaagccggaagattctctacagagaagcctccaacgtcgcgagcgaaacctatagatgcgtctcccatgaaaatagagacaccctgttatccaagctctctcaggacatataa

SEQ ID NO: 437175 - DNA, 300 bp, Serratia marcescens
atgaaaaccttacgttgcatggcctatcagcagaacggggtgtttgtcgccgcctgccttgatttgtcgctggcagcacaggcagataccatgcaggaagcaatgaaaaaattggatgcccaagttaaagattatcttgaagaggcgttctctgaaccagcttacactaaacagcttttgaaccgcaaagcgccgctctcgatgtggctaaagtactggaacatcgctttcagaattttctttagcaacaagcaagggccgagcaagttgttccgcgagccgtgtgaggctactgcatga

SEQ ID NO: 437176 - DNA, 528 bp, Serratia marcescens
atgcggtgctccttacttgatgacaacgcgcaggagttcgcctgctgccgtggtgtatgcgcgatcttcttctacgtatgcgcggacagactcgccttctgctgcggccttaactcgaccattgacgatagaaagaggctggcctttggtgtaggtgccagcagcagcaggaacgttgaaaaaaacgccaggggttggatggaatgcaacaacccaatcaccagccttaatgacgtcatctacggttttgcaccgcagatagtcatagttggctacgtaaaggatcgcggcttcattgccgtctaccgatgcagtaaatttcttcgtggtgttatcgaagaagccgatcgtgccagggggtgtgtcggcggccgcggcaccttcacgatgcagttgtggattggcgaagataccgcctgcgtgaattacatgtttcccgtctttagccattttttactccggcatttcgctgaaagtttgagaggagttaacctgacgcagcatgccgttcaggccgatagaggttga

SEQ ID NO: 437177 - DNA, 747 bp, Serratia marcescens
atggttactaaaaacgaattacgcgaaaagtttgcagagcggcttaagcttgcctgcgatgaggctggcgtaaggcttcatgggcgagcagttgatatccaagcagctcttaaaaagcgcggcattgctgttaccacaactgctgttgggaaatggctgaatgctgaatccagtcctgaggttgatcgtattgttgctctttccgaatggcttggagttagggccgaatggctcgaatacgggcgcgggaacagtagggatagcgcagtaattcagcttgatgatgacaacgatgatggttcaacgactgaccccatagatgatgatgagtttgtcgaactacctctcttggatgtgcgattctctgctggggatggcacatatgacatgattgaaaaggcatcatctaccttcacctttaggcgtcaattcctccatgacatgggagtttctgcatccgcagcaaagctggtgaaaatttcaggttccagcatggagccacgcttacatgatggcgatatagtgggtatcaacactgatgacacccggatcagagagggcaagacctatgcgatacgacatggtaatttgcttcgagtgaagatactgatggaacaccctgacggtggagtaactatccgttctctcaataaagacgagtacgatgaggagcacctaaactaccagcaacgcaaagagcagttggtggttctcggacgagtgttctggtcatcatccgcctggtaa

SEQ ID NO: 437178 - DNA, 627 bp, Serratia marcescens
atggttcagagatataaccctgattacgtcatgcatgcggcgcgatttgcgccgtttgcccgcaaaaatgagcatggtgagtacgttaaattctccgactatgaagccttggtatcagaacttgccagcagccggcagatcaacgcccaaacgctgcaggtaaagctgacaatggctgaagccatcaaagagctgactgctcgagttaatgcgctggctgtggagaatgcggcgctgaaggatgtgttggaaaacatctgctgccgagacaacgagcctgaataccatgattgcggcatgggatgtggcctagaagaccgcgggataaccgaccgctatgcagccatggctcatggttgggagtcagctatggagcgggtttatgaagaagttatcccgttcattgaggatctgcctgaaaccccagccactgacgcagcacttgcagttatccaggcgcagggggtggagaaggcgcaggccgttgtttctgcttgtcgtgaaaacatctgtcccggtggcttatctgaaaatcgtcagtatgaagaatcgatagttcaaccgcatttagacggtattgctgacgagttggaaaatctgattatcgagctgcgggaggccaaatga

SEQ ID NO: 437179 - DNA, 279 bp, Serratia marcescens
atgccagcaaatgaactgaagcttcagagcggtagaacctatcgcggaaagcgcccacgcaacgcgatgggtttggttaacgacagaacgatcctgcatatcggcgccaccgccgtgcaatacgacagcccatcagtttcgttcggccgacattacccgtcagtaagccgtgagaagtttctggcgtgggctgagcgggatgtgactgaagagttgccgccgggcgagttcgctacatggcctattggcagcgctagggaggtggaacgtgaggcatga

SEQ ID NO: 437180 - DNA, 390 bp, Serratia marcescens
atggacaataagctgagcaagccggtggcgtggcgctaccgttacacgaagcccggcattactgattcacatggcgaagcctgggtcggtgactggaaatttgtcactgatgaagttaactgcaacccagcgccaaattaccaaaaatgcgccctctactcgcaagagtacgtctccgccctcattcagcgagctgaacgcctcgactcgatgctaaccgaatcagtgcaggcgctgaaagcagcagagctgcttaacgcagaacttgagcaggcgatgcgtcacatccacggcgcgttgttggatatcaccgtaccgagagtcgcgatagccaaagccgcagaattggcggttgagcacgcagctatgaaggagcagagcaatggataa

SEQ ID NO: 437181 - DNA, 660 bp, Serratia marcescens
atggataaattcagcgaactgaaagcggccgcaatggccgcaactccggggccgtggggtgttaaccgagcaggcaatacgattgtcagcaaccagtcccatccggtggcaacgctatccgatgcattccaccggcaattagctggcggcggcgttggtcaggatgctgaattcatcgctgcggctaaccctgcggttgttatcgctctgctggcagagctggagcgctacaaacagtacgcggaagaacgcgatgcagagaatgaaagtttggcgctaacggttggacgcttgcgcgtagagctggaagcgaaggataagcgcatcgccgagctggaagctgtcagagtagacgcctcccatgtgttcaaagaaatcggctacgagctgggctgcaatcccgacaacgagtcgatcatgatggctatcgatgacctgaagaaagataacacgtccctgagggaccagcgcgcgggattggtacaagcagcgagcgaactgggagccaagctggctacgccggtgcggttgcctgacatacgccaatcatcttccggcgacagatatcaatggtctgatggtgcgcataactaccgcctggatgttatctcaatgcttcttggtgctgggttcactgtagctgtagaggggaatgagtag

SEQ ID NO: 437182 - DNA, 315 bp, Serratia marcescens
atggtgcataaagtgtatatcgccggccctatgactggactaccggaatttaaccgccctgccttcttcagcatggccgagcacgtcaagtgctctggtgaagtgccgctcaatccagcgaccctacctgacggacttacgcagccagaatacatggatatttgcatagcaatgatgcgatgcgccacgaaggtgattttcctcgatggctggcagaactcgctgggtgcgcgcgctgaaatggcgctggctgaaaaattagggcttattatcgaacatcaggcgatacctcatgataacgatacccgacgataa

SEQ ID NO: 437183 - DNA, 378 bp, Serratia marcescens
atgaccaatttcgaaatcattgaatggctgattaaagatggcggccagtacacccgagagcagcatatcaccctgcttcaacaaaacttcccagagttggatattaccgaatcgaaagtaacctctatccgccaatcaatggctacatctccatttgttaaagcagtcatcgaagatgtgaagccgcaaggcaggaagataaaagtcatttcagtcgatccagagtacaaacgctattcgcgagctcgcgttgatcgtccagaggtagtggctaatgcatggctgaatgaggaaccacgctcagttgtcgagtgcatcaagcgtgttaaatggtttaaccagctgcttgccccagtaacccaccagcgcgcctactga

SEQ ID NO: 437184 - DNA, 135 bp, Serratia marcescens
atgccattgcccgcgttgcgcggtttacccaagacgtatgagtatgcgcagggcttcggcaaaatgccatattaccggcttatctggcaggcgtatttgggttctgtcgcgagcgtccctctccccaacacatag

SEQ ID NO: 437185 - DNA, 303 bp, Serratia marcescens
atgtcattaataaaaagcttctccgtcagcaatggcgatatgttctatattaggcataacaccgataattttacgatcattgattgccatatcaaccgcgataatgcagagagcatcatcgcagatataaagaagcaggctgccgacaagggaataagccgttttatcagcacgcatccggatgaagaccacttcggcggaattgagcttcttgatgccgcattcaagatatacaacttttatgtagtcaagaataaggccatcaaagcggaagaaaccgtttcctttaaaaaaatattgtga

SEQ ID NO: 437186 - DNA, 252 bp, Serratia marcescens
gtggccgagctggtcagtcagcagggcaataaccgaggcaaacgatgcctgttgcacggcatcggggcgatgtccgccgaggtcgagggtgtccagcaggtcaaggaacagcacgccagtggcgtgcgcatgctgaagacgcagaaaatcggcgtgcgggatagggtaatgggtatcgcggtaatagcggtcggccagggtgttcatgctgccgccttaaccggcagacgaccggcaaaggacaacacataa

SEQ ID NO: 437187 - DNA, 192 bp, Serratia marcescens
atggctacgaccctcaccccgactcaccctacattctgctatttgtttgcggccgtacgccgttctgcgctgaccgcttcaccgcgtatcgtgcgcaccgtggcggataccgaacgcaacgcccgccgcgtgctggcccgtgattatgtgttgtcctttgccggtcgtctgccggttaaggcggcagcatga

SEQ ID NO: 437188 - DNA, 246 bp, Serratia marcescens; identical to SEQ ID NO: 431105

SEQ ID NO: 437189 - DNA, 264 bp, Serratia marcescens
atgttgaccgtttccactcccaccccatccaccccgtcgccggttattcctggcggttacaccccgcgcgagcgctttattcgattgccggaagtgctctacaccaccggcctgtcccgctccaccgtgtacgagatgatgagccgccggcagttcccggcccaggtctccctcggcggtaaaaacgtcgcctggctggcctccgaggtcgagcagtggatggatgaacgtatcgctaaccgtcatcagggggccgccgtatga

SEQ ID NO: 437190 - DNA, 3840 bp, Serratia marcescens
gtggcgatcttcgatatcaataaagatgaattactcggactctcagatactcttttggaagagttaattgctcgccttgctgaagccgaagtggcggtctgcggtcatagcccggcgcgggtgcgctggtcgggatcgatcaacgcacctgatggtggaattgatgtccacgtgcaggtgccggtcgaacagctcaactccgggtatattgagcgaccggataccgtcttccaggccaaaaaacataggatgcgcagggcagatattctgcgagagatggctccttctggcgtcctttctcccatgatatccggccaggccacaaaggggggaagctatatcattgtcagtctagatgaggactgttcccccactatgcttgccgaacgcgtcaaggcgatgtatgaggccgtcaggcatactccctctcacccaactcttcatctggctttctatgatcgcgcaaagttggctcagtggatacgacagcatccgtcagtaatgctgtgggtaaacagaatactggggcggggttattccggctggcaaccatatggagcatggagttgccctccagagggggcggaagataccctgataaccgcgtccggtatcacgatctcacctccgtcagaaaaaggtcatcccctgagtattaaggatgccatcgggccgatacgccagcttatccggaccactcgtaaagccgtacgtattactggtttatcgggcgtcggtaaaacgaggattgttcaggccttgtttgatgaatccgtaggagccgatgccctggaccacaccctggcggtttatgccgataccggtgacgatccgatcccttctgctgcagccatgctggaacgcctcatcgctgaccagcgcagcgcaattatggttcttgataactgcccgtctgaactgcatgctgccctcgcggcgagagttacctcggtggggagcaggatcaagctaattaccgttgagtatgatattcgggaggacaaacctcagaccacggaggtgatccacatcgaggcggttggaccggaagtggcggaaaaacttctgctgcggcgcttccccggtatcggacagttgaacgcccgtcgaatcgcccagttcgctgacggaaatgccagagtctcgctggccatcgctgagagagtggatgagggggagtcgttggccgttctgtccgatgcacaactcttcgacagactttttgaacaacgtcatgagcgagacgagggattacgggagcaggccgagatactttcgctggtatactcgttttcgagtgacttttctgaaacaggcgacagtgaactggagatccttggcacgctcgcgggctattcacataaccagctgtaccgtacgctcaagaagctgaccgatcgccacattcttcaggccaggtcgcactggcgagccatcttaccccatgctatagcgaacaaactggcagcctccgcgctggatagctttccggttgcgtttctcaggtctacctttgaagtgccgggacgggatcgcctccttatgtcatttgctcaccggctgggccttttacacgatcatccggtggcaaaggagattgcggctgcatggctccagccggaagctatgctgggtaacctgctggcattagaggacttgccggctcgtatgttggagtacattgcaccggtggtgcctgacgttctgcttaaccggattgacgaggtcctcagggccgcagactttaaaggccgggaaagacattacgatccccgctggagtaccatcctcaaccttttgcaggcactggcctgggaaccttcatacttcaaccgttgcgccagccttttactgcaaatagcggatcatgaaatagataagactcgtcaggagaatgcgcgggacagactcacattgttctgtcaaccctatctgtcaggtacacatgcctctctggagcagcgaattgcgcttctggaggagtgtcttacttcaggtttatcacagcgtcgcactctggggctgaaaatgctttctgccggacttagcggttcgacgtggacaagttcgggtatatatgagtttggtgcccgcccgagggattacggggcagaaccagactatgacgcgttgatggcgtggagatgctcgttcatcgagattgccgttcgtgtcgggaacgccgatgatatgcatcttgccaacggtgcgcggacatttctggcaaatgcactcagtggcctgtggcgtgataagaggatgggctccgtcctcgttgatgccgcacgtacattgcatgtccgtcttccctggggggagggctggaaggcgattcggacaaaactgtactttatgcggaaggagcctcaggtatcgtccgtgctgcttgaaactcttgatgctctggaaagggagctcagaccgaatgatttgctttccgctatccggctttatgtcctgagtaaaggccactataactggatgcttgatgacgaatttaaccgaagtgaccagaaacgatacactgaagcagaagagcgactgatggccagagcagagcaactggggcgtgagtttgccacttcaatactttgtctttctgacctgagacccaatctgttctcttctgaatggatgccttaccggagcgcattcgggaaggggctcgctgagggaaccgcgaatccccatgaagtctggcaattacttataaaagaactggaacagaactctactgaaaataaagatttttctgtgtttcaaggctttatcgaaggcgtggatcgtactaatgaagtgctagcccatgaatttctggatcactgcgctgtgcatccttcactctgtcgagttctggttaatttgcatccccagcgagattttacagaaaccgacctctatcgatgtatgtcggttctgaataaacctgatactcgtatagttatgtttgacgccattctttggcaaaaaaaatgcctgcatttgccactaacccgagtgctcgaactggcagaacgattgttagccatagaaaacggcgctgaggttattttgaatgggctagggatgaggttacatgacaacaaagcgacagaggacatgcctggcccggaactccgtcaaatcggtctcagggcagccattcaggttttacagaaagagactgatcggggcggtttcgttgatggctttatggcatctgtcgtagcggcggcattgcagtttgacagtcatgatgggctgacagaaaactggctggacgcagtcttctcagcgatcgataaacattatggttacatgaatgattaccttaaaaccattcagacaacggtgacactcataccagtaccgtttctctctcgtctctttgctgattctgaagctcaaatatgtatgcggttgttcttcatgcgtggcggcatttcggatactccgctgctttctggtgttggcatagaaatcgtgattgactggtgctacaggaatgagaatcccaaggtatgggcatatgtgccgcaggggttagaactctggtcaagtagtactgacacaagcaggactgctttgcgcgagaacgccatcaaattcctggaggctgcacctgaaccttcagtggttcttgagtcttttgctgaattaactagtccgtcaagttggagtggcagtcttgcaaacatattacagtcccggactgacgctttcggtgaactcattgcacacgagcgggatgacatttcaaaggctgcaaaaaagatacatgagagattgatacttatgattgagcgtcaaagaattcgagaacagcagaaagatcgtgaaagtgggcagcggtttgagtga

SEQ ID NO: 437191 - DNA, 156 bp, Serratia marcescens
gtgtggggcgtggtgaccggggtgatcatctttaccgtcatcaactacggcctgacctatatcggcatcaacccgtactggcagtacatcatcaagggcagcatcattatcttcgctgtggcgctggactcgttgaaatacgccaagaagaagtag

SEQ ID NO: 437192 - DNA, 186 bp, Serratia marcescens
atgttaagcttagtgcaggtggtggaaaaagaaaaaaatgaaaaggaatcagttggttccgaagccaaccgcatgccttataacaacaataacaatgttgaatgcttagttaccagaagaaataataaggctttatccaaagctagggataaggttctaaaggctgctaccaaattaaattggtag

SEQ ID NO: 437193 - DNA, 1512 bp, Serratia marcescens
atggcagatactgcagaaaatattatccctgtaaaaacagaattcacttcaaatagtgatagcatccacgatattaaaggtagaagatcacaagagttaattgtcggtttatgtggtgctataggctcaggaataaaaagtctaaaagaccaattactacattgcctaactcaaaatggatatcatgttgaacacattagaattagtgatcttatttctgattttggaaaggtaagtactattcatttagatagttaccagcgttacgacacgctacaaaatgttggtgacactctaagaaaagagcatggtaactttatctgcgcagaattagccgtgctttcaattcaggagcgaagagaagccatttatggtggtgaatcatctgaactaacaaaaaatacaaagaaaaccgcctatatcatagaccaaatcaaacatccgtccgaagttgaattatttaaccaagtttataaaagtaatttctacttagttggacttttgagaaccgtatccgaaagaatacaaaacctaaaagatgaagcaataggtaatgataatatttcgaaaataattgagcgagatagaaaatcaaaagaaaaaaatggtcagcaagttgaagaaacactacaactatctgattattttataaaaaatcttgacacagacgttatgagaaggtcagttcaaaggcttatagatctcatccatggcgttaaccatattactccgtccaaagatgaatccggaatgtactccgcttattccgcctcgttaggatccgcttgcctttcccgccaagttggtgcatccataatggatatagagggtaatgtgatcgcaactggccgcaatgatgttcctgcttttggtggtgggttatatacgtctgaaagtagtaaagataaacgatgctttaataaaaatggatgtcataatgataggcacaaagcattattgaaaaatgaaataaaatcaatccttcaagaaaatggtttattaaatgccaatgagcttgcagaaacaatcatgaaggaaactaaagcgaaatatcttatagaatattctcgcgcagtacatgcagaaatggatgctattattgcattagcaagaaatactaacatcggtacaactggaaacagtctatactgcactacatatccttgccatgtgtgtgctcgccatattgttgctgccggaattaaacgagttgtttacattgaaccatacgaaaaaagtttagccctccaattacatgacgataccatctgccaaccagaccatgctccatcacatgataaagtcttgtttgaaaattttgagggcgtcgcacctaaaaggtatgcaaaattcttcgggtataataggaaaaggaaaaacgctaatggtaagcccataaattatagcattgaagagtcttaccacgtagatacccaataccttgatagttatggtgagtatgagtcaaaagtaataagcaacatacgttcaaaattcaatcttggaagttga

SEQ ID NO: 437194 - DNA, 258 bp, Serratia marcescens
atgatcaacagccgccgctgcgcgcggcagcgtcggctggacaaagaggcaacatgcccgcaggcggggcgaaaggcggttttagcgcagctcatcacagcagagggcgtggccgtaaacagaaaaaccggctgccagcgtgagcagaaactgcgtaaggcggcgatggcgattgctgttcatcagtgcgatatcctgtcgtatgagaagtgcaacgtaggggatatcctcaccgatcgccctggcgagataaaataa

SEQ ID NO: 437195 - DNA, 933 bp, Serratia marcescens
atgttttatacaatgattaataaagaaacactaccactacacgtcgctgacgaaagtgcggcaattaatcttatggatagcttcctaaatataatcagaagcatcatttcggttcgtaatgatgtgcatatagaaaacattactgacatattaagtcaagctattttagagggaaaaagcattcatcaaattttcaataggggaccacacagggataaaatactctatttgcgaaaactggcttctaacatgcatatagatcacgaattatttttaccaaaccacaacgaggatgaacagtggctatcagcacggtgctcacaagctgaacatgctcgtgattataaatacattatgctgtattatctaaatggcttactcataagttttcctaacgaaaaaaataacttttcattatcaaaggtaatgctaaccttgtgcgacatttatgacaataagagagaactaggagaaatagataatgtaatgattagtaaaaatacgaagataaatataaatgagataattaaatcctctccgtcattaattcctgagttatataaaaaagattacaacacctatgcggagttatttagaaacatccgtttcttagagactgcaaaattaggaattgaagcattcaaaaatgatagtgaatcattgaaaaatattttttcatgcttaatatcaatagattctgccatacgaaaatggagagactcggactcaataaaccctacattcggaattaaaataacacctgagcatgaaggaagaaaaaacctttgtaagttcaaagacgatattgatggtaaagaatatattttcgactcacatgccagatttacaccaaacgatggaagaatacattttctatacaaaagcaaatcagataaatgcgtaattgcctatattggtagaaagctaaattag

SEQ ID NO: 437196 - DNA, 1104 bp, Serratia marcescens
atgattaaggaaatacatttaaaacaatttaaggcatttaataatgaaaaaatagaactaaatgttctcaatattctttctggattaaatagcagtggaaaaagcagcctattacaagcaatatcattactatctcagtctattgaggatatagatggaaaaacatgtattaactcttttattttagatgggaaatttatcaaccttgggacaagcaatgacatcctgaatgattttaacattgatgatgaaatttccattcgcattgatacagactcagaaagaataatttgcaaagcactacatagccctaactctaaaagtttaaaacttgaaaaaaatgtagagataagaaatgatgggtttgaattaaagaatattatcttcattcctgcaaacaggatcgttccagaaaacctctacccaatgccatctcagcagcataatgacagaaaatattttggaaaaagagctgaattttcaatagattacttactaaatcatcaagacgcatccattcatagcaaactgattatagataaaaatattactgaggggttgcttgatcagaccaaattctggttacaaaaaattagcccaggagtatcactaaagttaagtaatcttagtaacgcagatagtgtaatgcttggatttgaatataactctccaatatttggctcaacatctatacggcgcccctcaaacgtaggttttggactaacatacttattacccgttatagtcgcatgtttaagcgctagcaaagaagatatccttctaatagagaatcctgaagcacatctgcatccaagaggacaagcagcaatgggagaacttttatgccgagttgctagttcaggagtacaggttattgtcgagactcattcagatcatgtattaaatggagtaagggtttttataaaagagcacactgaactgctaatgaacgaaaaaacctcttgtttattcttcgagtctcatgctgaaagctctacattaaaaatatctaaacctgtaatagacaaacatggcagattaaataactggcccgtaggtttctttgacgagtgggatattgcgctagacaaattactgggatga

SEQ ID NO: 437197 - DNA, 1194 bp, Serratia marcescens
atgagcaacaagaaaactccaaaagaagagcatacaatagatagtctagaggaacttaactcagcaggcagaggcactggccttgaagctgaagctgatgaaataagccaaattactgatgtttctgaaccctttgacccagaaaaaattgatgttgatacgagaagctttacaatagacttactacttagtcgtcttcgttatggcgagttatcccttcaaccagattttcaaagacgaagtgatttgtggtctgattctaaacaaagtcgattaattgaatctattatattaaacatccctttaccaaacttatatttttcagaagttagccaagatgatttagctgttattgatggtgtacaacgactgactacaatctgtagatttgttgaacacacctacggggggaagtataattttcagccattgatattgacgggaatggaatacttaacggagctcaatggtaaagctttcaaagatttaccaagatttatgcaacgcaggataacggaaacgcaaatagttgtacatgttataaaaaaacagacgcccaaagaagtaaaattcaatatattcaaaaggataaacacaggtggattgaccttaagcccacaagaaattagaaatgcgctctattcaggaaaagcaagagacattttgaaatcaatggttgaaacaaaggaatttttagatattacagaaggaaagatccagtcagaaagaatgggtgatcatgaaatcgcattaagatttgctgcattttatagcaatggctataaaaattactcgggaaacaacctagatgcctttctaatgaaaaccatggatgaattacaaggcctaacgaagaaagatgaaacagccttaataaaagcctttaagaaaggattaattaatgcacataaaatattcggtccctttgcgttcaggaaatattcaggtgatacaagacgttccccaataaataaatcaatatttgaagttcaagtaactctgtgtgctaacctaaccgcaaaacaagttaattccttatcaaaatccagagagaaaatcctaacgaatttgcaaaattcattaattgaagataaaacattctttaatgccgtgactcaaggaacaggactaaaagaacgtgtcattaataggttttctgaatttgaaaaaatcttagaggtaaaaaatgattaa

SEQ ID NO: 437198 - DNA, 624 bp, Serratia marcescens
atgcaggagctactgaaaatcggaaattggattttatcaacgttccaaaatgggactttaaatgtcatggcgctaggctccatctttcttatttttagatggctttttcgcgatatttcctcaatgaaactctttgggttgatgtcagatcgttatcgtaaaatgctggttgctgagaagaaaaacggtattgcggaaaaagagtgtgcggagattgttgattttgaaataaagcgtacatcgattaaaaaaattattggaatcagtaattcacacatacagaatgaaatgattaaaatcatcatggactcccatgagttactgggtcccaagtacttcagtaaatttaattttttcttgtcattgaagaatgggaaggtctttatcgatgaggagaaaataaaaagaagatataaagatgcattctggatgatgctgttttcattttctttcttgatagcgtcctttcttaacctcagaagcgatcctctttttggattcgcgctttttgttctctgggggggatttcttttgatatcaatcgctgcattccctccatcttgcgggcttagaaagaaagctcaagaacacatagatacctattattcagattctgggcggtaa

SEQ ID NO: 437199 - DNA, 858 bp, Serratia marcescens
atggctgcccacccgccccaggcccgcgcccgcgcggcgggcgatgcggttcagctggcggctgtccaacgcccgatcgcaggcgatgatgatgatgaccgaaccggcgtccacctgcggcggcggatccgccaacagcttacccagcgcctggccgacgcgcacgccgctcagcgtcagcgagtcgagagtgccgaagttggccaacaccagcacgccgagcgtggtgccgagccccgggcaatagcgcgaggcggtgccgatgccccctttcaagccgaaactgctcatgccgcgcccggcgccgacgctgccgcgcgcaaagcgggtggaatggttatccagcgcgctgaagacgtgttcctcacgcaccgccatcgcctgaatatcgttgaggtagccgtcgttgcactccagcaccagcgggttgatggtggcgctgccgcggccgatctgcgggtagcgccggcagctgcgccgcaccatggcgttgaacagcgtgccgaccgcgaaggtgttgctcagcaggatcggcgtttgcagcacccccagttcgttcagctgcaccagcccaagcggcttggcgaagccgttgagcaccgcgctgccgcacggcagcggctggttgaacagatcgcccggcggcacgatggcggtgacgccggtctgacattcgccgtcggccagcgtgtgatgcccgacgctgacgcccggcacgtcgcacagggtgtcggtcgggccggccggataacgcgcgcccggcaggcggcggtggcgccgccaatagctcagcagattatcgaggctttgttgttcaaatgcctggctgtctgtcatggttccctcatccgccgttag

SEQ ID NO: 437200 - DNA, 990 bp, Serratia marcescens
atgaaatcaaaaaagatttttcaattagatgagcgaaaactttcagaccaatggttatttaaactggcgatattagcgccattaattgcatctatttttttatgtattcccttatggttagaaacaagcattgacctctcagccaaaggttatgataaatttctcagcctatataaacttcctattggtacattatcattatctatccccttagttgctattgtcgctcatatacacagaacaattcaaacagcagcacaaattgaaacaactaaaataaaaaacacaactgatagttttttctcacatcataaattcatgatagaagcatttagtaagataccaagcaagaaaataaccatatctaatcaagaagttgattatgaaataaaagacccctaccatctatacgataacttatttaatggttcttcatacgaaaatggtatcattgccacattaattccagagattaaagcaagaattgaagaaagtctagaagaaacaaatgaatcattaattaaagcaagggatgactttgacaataaaaaaagcaaggtgcttttacttataaaaattgaaatggcaattacctcaattgagtccgcaatttcgttagaaagcaaaccaaccaaaaacaacagtctcattatggcaaaggatgaccatggcacggtcaagatagtaacagagttcttagatgaactagaattaaaagaaaaattagaccgcttgttattttttgcaaagaaagtgtttcaaatattaaacatccatcttaaaaccgaggatgagttagaattttattcaattataaaaactcaaaaccactgtttttttaatgaagccttcaacgatacagttcctacgaaattaaacaagaactttggcatgtcaattaacacctcaaataaactagatcgagagtacgaacaatatttaattaatttagaagaactgaattttgtaaattcccttgtgaacgattaa

SEQ ID NO: 437201 - DNA, 573 bp, Serratia marcescens
atggaatttaatcagggtgcaaaagcagcaatcgaaaggatggttgaggcctacggggtaaagacaaaacttgccttgtgtgatgcgttaggtgtaactgctagtgcactatctaaccgtcaagtccgtgattcttttcctgccgagtatgtgctgaaatgtgctttagacacaggggcatcattgcggtggcttacctacggccagggtgaaatgtttgaacagaatgttgttacagctccttcagctttagctgtaccaagtaagagattgcttgggagaaaacttcacgatggtgaaacactcttattggataaggcatttcttcccgatgatatcacctctcctataattgttgatgatggaactactcggtatatagcgactcaatcctatgctgacatctacgatggtacatggcttctagatattgatggcaatattagtattcgcgagttagttcgtaccccaggaaataaagtgaatgtctctgatacaaagcactcatttgattgccaaattgaagatttaaaggtcttagcgaagattttagtagtttgttcacctgtataa

SEQ ID NO: 437202 - DNA, 1506 bp, Serratia marcescens
atgacccagaaatggctaatactttacgtcatcatcttaatgtacctccctgtttctatcgatgcgacggtccttcatgtagcagcaccacgcctaggggttactctatcggcgactggagaacaattattgtggatcatcgatatctattctttagttatggctggcttattacttcctatgggcgcacttggtgatcgcattggttttaaaaggttagctattcttggttccagtgtcttcggcttggcctctcttcttgctgctttagcgttctcagttacaagtttggttgccgctcgagccttcctcgctgtaggggcggcgatgattcttcctgcaacactttcggcactacgacatacctttaccgaagaaaaagagaggaactttgcactaggtatttggagtgcagtcggcacagtaggtgcagcaatgggcccactcgtcggcgggtttttgatggaatatttctattggggttcggtttttttgattaatctaccaatagtattattagtattgattgtcacagtatttttaatgccaaatcaacctaaaaaaccagagaagacatggaaaatcagacaggcattggtgttaatttcagcaattttgttgctcgtttatgctgctaaaaatggaattcgtagcaattctataccttatgtaacattagtgattgcgtttattggagcaagtctactgtttctatttgtgcgatatcaactcatagttacgacacctatgattgattttagaattctaaatcaaagagaaatcgctgttgggattgtaatggcattggttgctatgattaccctagtaggttttgagctattgttaactcaagagttacaattagttcttggaaaaacaccgcttgaggctggattatttcttttgccgttgatgatcgctagtggtgtttctgggccaatagcaggcagattggtgacgatatttggtttacgcttagttgctagtcttgggatcttcctgagcgctattagtttcatgattttagcttacactgacttttcccaccagaccatattggcctggaccggtatggctctgctgggatttagtgtagaggcttccatgttagcttctactgcagccataatgacttctgtaccgaaggaaaaatctggagcggctggtgcactcgaaggtatggcctatgaattaggggctgggataggagttgcaatatttgggttgctactttcaggaacatatgtagctactatcgttttgcctgccgagttgcctatagatatgatcgttcaagcacgcgcgtcgattagtgagacagtccaggttgtacaaaaacttgataatgatgttggggtgcaacttttacatgcttcgagagttgctttctctagctcacacaacttagtactaggaatagctagtagtatattgctcgcattggcagtaattatttggttcattctgcctaagcgcctcagaagccaaataccccatgcatcttaa

SEQ ID NO: 437203 - DNA, 582 bp, Serratia marcescens
atgagttatctcaaacgtgaagagcgccatgctgccattctggaggctgccgtacgtgttacactagctgaaggtatcatggcttctacggtgagacgcatagctgctgaggccggaatggcaattggacaagtgcaccatcacttttcatctgtgaagcagttgcgtgctgaggccttcttgctattgactcgcaagtccttgtatgatttttatctaaaatgcaaagacttacctgccactgaacgtcttaaactggcgttgggttatccaatggatgaggatagtgtacgggaaacgcatttgtggaatgaaatgatgctgttggccgagcgagatacaattatgcatgaggcgtatgcaactgcgatttccgattggcatcacgctgtgacaaaagtaatagccgaaggtaaaactgcggggtcttttcgcgctggagcaaatgtagatgatatcgcctggcgcttgatagggttagtatgcggtttggacggtttgttatcatttaatcgaactagtatttctgaagcagagattatgcgtcatttgtcttctgctatagaactagagttgctctaa

SEQ ID NO: 437204 - DNA, 486 bp, Serratia marcescens
atgcaaagacacgcgattgattcaggactaccgatacatcttacattcgtgctgaaaatcgggctgataatctcggccgtttactatacggccaaggcggcgtatttggtatggggcctgggcgatataggtgtggggttgatggcgtggctgacaataatcgccattttgctactgcgcgaaacggcgtttacttgcctgaagaattacgaagcgcaactggtgaagggagaagatccagtgtttcatccggagacgctggggattaagcgggcggactactgggtgggtaaccgtactgaggtgaaccgaatacgtgaagctacgggaagcattgatgagaaagtgggactatccggcaaacagcgcctgcaagatgcagccaaatttcaaaatttgactgcgtatacaaactggctacggccgttttttacgtctatggttctgactcagcaccaaaaggtaaagggaagtgtagagcgttag

SEQ ID NO: 437205 - DNA, 129 bp, Serratia marcescens
atggcaagacaaaccaaacctctctccgttaaggaaatcgaatctgccaaacccaaggaagcggactatgtgctctatgatggcgatggccttgagctactgatcaaatccagcggaagtaaaatctga

SEQ ID NO: 437206 - DNA, 549 bp, Serratia marcescens
atgcgaacggccagcattagcctttcaacacgatgtctattcatgtggcaacttctgaccatcacccgccctgctgaagcggctgaggctcgttgggaagagatagacatagaggcacgagaatggaagattcctgcatcacgcatgaaaatgaaccgcgaccacactgttccattgtcagatgaagcaatcgcagttttggaaatgatgaaaccattaagtggcaatcgggaattcattttcccaagtcgtttgaagcctactaagtcaatgaatagccaaacggtaaatgcttcgcttaagagagcagggttcggcggtatcctcgtgtcacatggtctgcgatctattgcaagcacagctcttaatgagcaaggctttccacccgatgtgattgaggctgcgcttgcccatgttgacaagaatgaagtacgtcgagcctataaccgaagcgattaccttgagcagcgccgcccgatgatgcagtggtgggttgattttgttatggctgcggatcgtggaagtatgattgagggtagggtaggataa

SEQ ID NO: 437207 - DNA, 810 bp, Serratia marcescens
ttgaacagttggcctgagtttgcacactgggacagttattcgcgattcgcacgctacgttagcacggtcaatcgttacatcttaagtgaagaacagagaacattccttgatacggttcttgagacgattaaggggcgtgatggtgaactgaaagaaggacatgtgttctatcgggcacagcttgggatagatctgtgtgaccagactgatagtgatggtaactggattggtgagaatatatggggtttcggagcttcacgtatgaagcctcttactgaccgagctagggaaggacgtgcaaattcctcgggtatcccggtgctatatgtaggaacgacagtgaagactgcaatttccgaggtgcgaccttggattggcgctgatgtgtcggttgctgtgtgtaagctcttgcgtccattgcggactcttgatctttcacttggacatggtcagtcatcactttctggggctatattaagacacgtgctgggcggacgagagccaacagcactggagaaagagaaagctgtctggattgagatagataatgcattttcaactcctgtcacacagtcggatgaccgcgctgattatgcgccgactcagatactggcggaactgtttcgtagtgttggctatgatgcaattgcatacaagagtcactttggagacaacgataagcaattgggatataacattgcgatctttgacttaagtgctgttgaatttgccagttgtgccccttatcaggtaaaagcaattcagattgagttggagcagatagggaacgcttggtacaaatcttcttaa

SEQ ID NO: 437208 - DNA, 1992 bp, Serratia marcescens
atggctccagacacagttggaaccaagcagggaggtgatgccatgactaactcacagatccttgacggcaatgatcgcgatgcaggggtagtagaagagatctgtggctaccttacagatataccaccacgtaactacttcctttttgcaggggctggttctggtaaaacacgaacattggtggaagttttacgtcgccttactggtgtgatcgagcatgagagggggggacaattggcacggtccctgaagatgtatgggcgttcgattagagtggtaacctacaccaaaaatgctgtctctgtaatcaacggacgtcttggagacaatagcttagtcagtgtgtctaccatccattcattttgctgggaattgattagcgggtttaacgatgacatccgtgaggctcttattgcattaaaagaagcacaacttgctagacacactgcagaggcggaagcaaaaccgagaggtattactgcagcaaaacagcgtgaccttgacgaaatcgcgaatgaaatcgaggatcttcggacaactgaagtattcaaatatcatcccgatcgcaatacatatgggcctggcgcactaccgcacaattacgtactcgatgcgacagcttggttgcttcaaaataagccaacactccaatccattctcaaagatcgacatccaatcatactgattgatgagtcgcaggacacgatgaaaggtgtactggactccttgatggtgcttgccaaaaaacgggagagagatttgactcttggtctgctgggagatcatcgacaacgaatttatatggatggtcatgccgatcttccaagcattgttccggaaagctgggcaacgcccgagttacaaatgaatcatcgcagtcaacgacggatagtcacactgattaataaaatctgggaaactgaacttgaaggcaggacacaaccaacaaagggttcagcacaacatccccgaacggaaaaagctggtgggacggttcggttcttcttgggggatacatcacgaagtccagaagataaagtgcttagtgaacgctggtgcgctgagcgaatgtatcaaattagtggtttagcagattggaatcaaggaaaatatcagttgcttgcgcttgagcataagcttgtcgccactcgtggctcgtttcttgatgtttatgaggcaatggttctgttagatcccaacgctgcagcaccatctggcagtggggacaataaggggccttcaacagtacaaattttgcttaatgagctggcacatttagaagcctgtgtcagtaatgaaggaattttgaatgagtttaaagcaaccgaggtttttcgccgttatggcggtttagacaatatgcctgaggactcagaagtaagagctgaacgtactgatgaaatgcttgaggcgatagtggtatttgcaatggcttgtgccaaccctgagtcaacggtcgcggaggtattagcaccagtcttaagtgcaaaactatttgaagtagaccatcgccttcaggaggcttatgccgacaagtcaccagccccgcaagctcctggacgaggtgaggatgagtcaaagcaaacaagaatgcgtcgtggatggtgtgcactatttgctgcaccatggaaacaacttaagtgctatcggaattaccttgctgggatttcagaactcgcaacacatcaggtagttaaaggctctgagttcaagcatgtaatggttgtaatggatgatgctcttgctggtggaactctcattaagtacgacaaattttttggtggtgtggagctaagtacaacagataaaaagaatgcagagtttggtaaggagacaaccatcgaccggactttacgtttgctgtacgtgacttgtagcagggcgcaagaatcgctagctttagtgctttggtcgtccgatcctgatgcagcaatggctcgaatcaaggagagcgaatggtttagtgaagaagaggtacagatcataccttag

SEQ ID NO: 437209 - DNA, 2310 bp, Serratia marcescens
atgtcagaagcagctaccaccatgtcattatcgggacagatatcactaaggtttattgagctttcccaattccgccgactaggcaaggtccaaatggacgttgacccaaaaactactatcctcgtcggcgctaacaatagcggcaaaacatcaattctggcagcgctgcgccacttccttgctgatggctcaccatttggtgctttcgacatcagtatttctcaatggccaaaattgcggggacttgggagagcttgggacgcattagaagaagatccgtctacgtcaggcgcatccgaagatgaatggggagagcaacttggaaccttactttcggcgatgccaactctggatctatggttcgatgctaaggcaggtatgttccactatgtctccccgttcttgtcaaaattcagttggaagggtggcggggtaggtgtccgactacgtctggaaccggctacgaacattgaggatctgaagcagttggcttggaagtatcacttagcgagaatacctgtgaaggatatgggaaaggattcacttgcgtggccaattgatcttcttgatttttggctacgagaaccttctctactcggtcaagttcgggcctataagttggatgccgataacaatcctttggacggaataaagacctatgttagccaagtaatagatgctgattctagcccaattgatcgtaaacatctgcagaaactcataaaagtagactttgtggctgcacagcgtggccttggtagtgaggaagctgattcccggtctgcttctggcccacatcgcataggtttattctccaatcagcttctcaaatttgctcgacaacatctaaatgtggcagcaacaggtcatgggcaccgagctgacctcataaaagctgttgctgaggcccagcaggaactagataaaaagattcatgaggctattgggccatcggtagaagaggttaaagagcttgggtaccccggcttgcatgacccccaagagattcgtttccgcacgcgcatacagacagccgaattactcgaccatgggacagctgttcaatacagcatgcagaaggattcattagaggagcttctccctgaatattccattggactaggttatcagaatttacagtcccttagttaccaactagtttctttcaaagctgctcgcctaaatcctgaaaagggcgctccagcacctgttcatctggttatgattgaggagcccgaggctcatttgcacgtacaggtacaacgtattttcccgggtaaggcacataaactaatcagtcctaacggtagcgatgagtcaggtcttaaaagccaattgattatcagtactcattctagtcatctagcacatgctgagaattttgaccggctacgatatgttcgccgcattgctaagtgtgaagaacaaaacatgcctaccactgaggtggttaatcttgggcaagtttttggtgatgataaaacgacccgtcaattcgctgaacgttattttcgcgttcaacacacagatcttttatttgccaatgctgcaatctttgtcgagggggttgctgagcgaatgctgttacctcttttcattgaaagagattttgcaacactcaacagccgctatctgtccttccttgatattggtggcagccatgctcatcgtctaagatctctcgttgaaagactccgtattccaactgtaattattactgatatcgatccagttgaagaaagaccaggtaagcctaaaaaaaatggggacccgactacaaccttagttgctgtagctaataccggacaacccggactgcaatgtgggaacccgactcttcgcggatggcaccctaagctgcaacagcttgaggatttcaagaacccgaaagatgagcatcttgtctggaacgaaattgccgaatgttctgtacgtttcgcatggcagttgcctgtagccgaagctgatggtcaatggccaagtacttttgaagactccctaattattagaaatatcccttggtttaagcaacttattaatgaaaaagtcgatggcgatgggaagcaaatcaaaccgccaaagggcgcgctgggctcagtagcaagacatgtcgctgaaaatgataatattccagaactgctcgcggctctgcacaaattaatgcatggatcttttaataaaggagattttgccgcaagcatctttgaaatggttgctgcggatgagccgataatctgtcctaaatatatcgaggacgcattggaatggctccagacacagttggaaccaagcagggaggtgatgccatga

SEQ ID NO: 437210 - DNA, 783 bp, Serratia marcescens
atgaaaaaaatactctttttatggttgttgttgcacgttccacaggcgactgccagttgggaggtagatgcacaatactcgccttctcaaaataggtttatcgtgaaagtaattcggtgggatgagtacgatcctgctccgaatccattaaaagattgcagggggcttgataactgtaaactggcttttacgtactctaaccgctcacatactatatctacttttggcgaagtggatatgtctgaggcggcaggtttagagacgatgggagaattagcccaggtattcgcacggaaaggttttatcaataaggaagccaaatcgcaatttggcctatacgcggagccttgtctgggtttggcttatcctttgtttagcactggagggaaatcttttgttcctttgcccggtggcgagtttgaatgctttgcaccacaaatagatccaacctattgcaggattgccgattcttatatcgagctgaatcacggcacgatagacactaattcagttaatggggatgttgcagcgaagcaatttcgcgttgactgcaataataaatttagcttggctatcatcgctgtagataaaaatggttccgtctctcttggtggtagcattatcagtcatcttaaagtaaatggtgtcgatattggttctggttatttcgaccggattggccctgaagggaaaaccctcacattgacgtcaacattaagcgggtacagcggtggcactggcgattttcaggggtataaggtcattatgctgacccttccctga

SEQ ID NO: 437211 - DNA, 174 bp, Serratia marcescens
atgacgcggctcagtttggtcaccgtgatagggttgccgccgactgttgcggataacctgcagctggagaaagcgctgggcgtgagcggcaagccgctgtcgctgacgtcgggtggcaatgccctgaaatgtaaatgtgaaaatcgccagttcgatagcgagaagaaaaaatga

SEQ ID NO: 437212 - DNA, 654 bp, Serratia marcescens
atgaccgggaaacagacggcgcgcgattgggcgtacctttgcggcgagttgcgttattacgccgtattgggcggactggcgctgatggcgccactcagcttgacggccctgctgtggctactgccgcctgcgaacgccgtggataactggcaggtggacggcgccggcggcgtgctggaaattcgcggcgccatgaccgagagcgcgtgccggctggagatggacagcgtgcggcaggagatctggctgggggaggtcgcgaccggcaggttagagcagccgggcgctcgtggtacgccggtggcgtttgagttgcggctgcgcgattgcctgcgcggttcggcggccagccgggatgaacgcaccggcgcgcggagctgggcggcggatcagcctgcggtgcgggtgagcttccgggcgccggccgatgcggacaacccgcagctggtgaaagcgcagggcgtaagcggcatggggctgcgcctgctgggggcccagggtgaagacattcgcttaggcagccgcggcaagccgctgtggctgacgccgggcagcaatgtgttgaactacagcgttatggcggaacgtaccggtgcgcctttgtgggtggggagttttgatgctgtggtggattttagccttaattacgattaa

SEQ ID NO: 437213 - DNA, 546 bp, Serratia marcescens
atgaagaggataagtaaagcggcggcgtggcgaggggttatcggcgcggggttgttggtcagcgcgagctggagttgggccgccgccgacaatatgcattttagcggcgcactggtggccgagccttgcacgctgcgcccgggagatgaggatattcgcctggagttcggcaccgtgatcgataaatacctgtacacccatggccgcaccgccggcaaggcattcagcctggtgctgcaggactgcgacatcggcctgggcaactcggtgaaggtgaccttcagcggcgctgaaagcggtgcgctgccaggtttgctgaagccggatggcggcagccaggcgacgggcatcgccctggggctggaaacggcggcgggcgcgccgctggcgctgaacaaaccgagtgagggatatgcaatcggcaagggcagcaacagcctgcaattgcaggtttatgttcagggagagccggaggcgatagcgcagaagagcatcggtctggggacattttctgccgtggcgaccttcggtttggaatatgagtag

SEQ ID NO: 437214 - DNA, 498 bp, Serratia marcescens
gtgaatattataccgaatttagcatgcgttctttacctggccggcgcgtcctgcctgttgacgatgggggcggcgcaggccgccactacggtgtcggtcaaggtgaccgtgttggcgccgctgccctgcgtgctcaacggcaatcggccgatcgaagtgaacttcggcgacgaggtgctgacgacgcgtatcgatggcgaaaattatcgtacgccagtcgactatgaattcacctgtaccaagccggaaaagaacggcatgcggttgctgctcgccggaacgggggcggggtttgatggcaaattgctgcagaccagcgtcgacggcctgggcattgcatttttaaacaacaggtcgcgcatcgcgctgaacagttggcaaacattcacctttcccgatatgccgacgctggaggcggtgcccgtgaagcaagcgaacgcagcgctgccgacgggggagtttacggcgtccgccacgttgcgcgtcgattaccaatga

SEQ ID NO: 437215 - DNA, 804 bp, Serratia marcescens
atgttaaagcggtttttttttccttttttaatttatttatattctgttgatgccttttctgttgcgtgggaaatgaaaacggaatatcggccggttaatgcgacctacggctattttgtcgctaaaattgttgcctgggatacggaggataaagcgcctaatcctttatatggctgtgttggcgggcgcgaatactgttatctggcgttcactgtgaataatttcactttcttaaatgatgttttaatacctaatgatacaacaagcaaaacattaggtgagttgggggcgaattttatccgggctggccttctcaatcgggagtatcgcagtagagactattattatcctggtaaacccagttgtatttactttggttataacgggcagggaagcaatggctcatggactgtctattggtttcccggtggcgaacagtgccgagtgccggagatcgtacccaacgtttgcgaattgcgtgagccgatggtggagctggatcatggcatgttgcgggctgaaatgattaatggcaatacggtagaagctaaattgacggtggcttgcacgtttaatttcaagataagagtgatgagttctgatgagtctggaacagtttatttcaacgataaaaagcagttccgtagtgagttgaagctagacggcgttaatgtgggaaacgggttgctggttacggcgccacccgaaggaaagactttaacattgacgtcaacgctggcgggatatgacggcagcgtgggggagtttcacggttctaaaagcatcattatttccttgccttaa

SEQ ID NO: 437216 - DNA, 531 bp, Serratia marcescens
atgaaactgaataaaattatgctggccgccgttatggcatttggtgtttcttctctggcgcacgctgctgaccagggccacggtaaagtgaccttcagcggttctatcattgatgctccttgctcaatcgcgcctgattctctggatcagaccgttgaactgggtgcgatttccaacgtggcgctgaaaagcggcggtaaatctaccccgcgcaacttccagatcaagctggaaaactgcgaactgtctgataataagaaaagcgttgcgctgaccttcagcggcgcgaagtctgaagctaacgacaagttgctgggcatcaccggttccgccaagggcgcgggcatcgccatcactgacggcgctggtgccaacattgaactgggcactgcttctaaagcgcaagcgctgcagaacggcgccaacaccctgaccttctccgcctacctgcagggcgccagcgcttctaccgcggagatcaccccgggtgagttccagtctgtagccgacttcacgctggcgtaccagtaa

SEQ ID NO: 437217 - DNA, 867 bp, Serratia marcescens
gtggcccagcgagagcggctggcctacatcgattttcggctctatttcttcggtgagatcggtcgcccagatctgattgagcgcttcggcgtggctccagcaggggcgacacgcgatttggctttgtaccgggaaatcgtgccgcataacatcaccttcgatggtagcaataagatctatcgcatcgggcaggcgttttccccgttgttcaaacacgcatcgcagcgtgttctgtcggcgctggctttcggctttggcgatggcgtgaacggctcaatgcaggcgctgctaccatgcgaatcccccgcagccctgtgcatccccaagatggatgtgttagcagcgatttgccgagccatccacgccaagcgacctgtcgccatccgctaccactcgatgagcggcggcgagtccgaacgggtaattgtgccctttgccttggttgataccggcctacgctggcacgtccgggcctttgatcgcaagagtagagagtttcgggatttcgtcgtcacccgcatcgaagcaccaacattgctcgacgaggagccacaggccaacgaacgacaggataacgatatccaatggacgcgcatcgtcgagctggatttcgtgccgcacccgaacgttgatcggcccgatattatcaagatggactacgggatgacagatggttcgatcaaaatgcgcgttcgcgctgcggtggtgggctatatgttgcagcgctggcgggtagactgctcacccgatcattgccttcgcggaccggagtaccggttatggctcaaagatcatctcgcaatttacggcgtaaaaaatgccttactggcaccaggctatagcgccactaagaaggctgactattaa

SEQ ID NO: 437218 - DNA, 3279 bp, Serratia marcescens
atggaactgatcgacaatatcaaccgtctgctcggagacgacctaaagcagacgctcaaacctggtgctcgcctgaagatcgccgcctcctgcttttcgatgtacgcgttcgaagcgctcaaagcagagctggaaaaaatcgacgagctgcaattcatctttacctcgccgacgtttaccgctaacgaggttaccgacaagattcgcaaggaacgcagagaattccacataccgaaggctgaccgcgaacggagcttgtacgggagtgagttcgaaattcagctgcgtaacaaactgacccagcgcgcaattgcaaaagagtgcgcggactggatgcggcgcaaggcaacattcaagtccaatcgcagcaaggcaccgatgcagcaatttacttgcattcaggctgctgccgcagatactgcctacatgccactgcacggctttaccgccgtcgatctcggctaccagcagggcaacgctgtctccaacttcgtcaacaagatggacgagccgacatttacggcgacctacctcagtctgtttaaccagatctggcaggaccccgagaagctggaggatgtaacggcgcagatctgcgaccacattgcatccgtctaccaggaaaactcgcccgagagcatctacttcctgatgctctacaatatcttcaatgagtttctggacgacattaacgaggatgtcctgccgaacgaccgcacgggctatcaagacacgctcatctggaacaaactcttcaattaccagaaagatgctgctaccgggatcatcaacaaacttgaaagctacagcggctgcatcttggccgacagcgtgggtttgggaaagacttttaccgcgctggccgtggtaaagtattacgaactgcgcaacaagtcagttttggtgttatgccctaagaagctggcggacaactggctgaactacagccgcaacctcaagaccaacatatttgctcgcgaccggttcaactacgacgtgctttgtcataccgacctcagccgtacgagcggtgagtcgttcggcacaccgctgaatcgcatcaattggggcaactacgacctcgtcgtcatcgacgagtcgcacaacttccgcaacaatgacgcctataaggacaaggaaacccgctaccagaagctgatgaacaaggttatcaaggagggagtgaaaaccaaggtactgatgctttcggccaccccggtgaacaaccgcttcaacgacctgcgcaaccaactggcgctggcctacgaaggcgactccgaaaacctcagcaagaagctgcgcaccggcaagacggtagaggacattttccgtagtgcacaggccagctttaatgcgtgggcaaagcttccatcggaagagcgcacagcgcgggccatcctggaatcgttggacttcgacttcttcgaattgctcgacagcgtcaccatcgcacgttcgcgcaagcatattcagaccttctacgataccaaggaaatcggccaattccctgagcgccgcaaacccttgtcgttccatagcccgctcacgcagcgaacggatgtgatgagcttcaacgaaattttcgagcagctgtctttactcaagctcgctgtttacgcgccgatcagctacatcctgcccagtcggctcaagaagtacgaggagatgtatgacactcaggttgcaggcaaaggcaagcttaagcaagtcgaccgcgaaaagagcctgcaggcattgatgacgaccaacctgctcaagcgcctggaaagctcgattgagtctttccgcttgacgctccagtccctgcgcgcgaaccacacgaatacgctaggcaagatcagcactttcaatcagactggcgacctcagtggcattgacagcagaataaatgacctgaccgaccagttagaaaacctcgatgcggacgacgacttgcctgatattggcgacagcgagattggcggcaaggtcaagatcagcctcgccgatatggacttaccttcatgggagcacgaactgaaggtcgatctggaaatcattgatgccttgctgacgtcgatgaacaagatcacggctgccgatgatgccaaactgcagcatctcaagacactggttctgaagaagatcgcagcaccgctgaatcccggcaacaagaaggtgctgatcttcaccgccttcgccgacaccgctgactatctgtatgccaatttggctccggaattgctggctacacataccttgcacagtgcaaaagtcaccggcaaaggggcaccgaagagcacgttcaagaagagctatgacttccaggaactgctcaccctcttctcgccgcactcgaaggagaaagccatcgtgctgccaaatgaggaggcagagatagatgtgttgatcggcaccgattgtatctctgaaggccagaacctgcaggactgcgactacctcatcaactacgacatccactggaaccccgtgcgcatcatccagcgcttcggccgtgtggatcgcatcggctcacccaacagcagcatccaactggttaactactggccagacatctctctcgacgagtacatcaacctgaaggaacgggttgagagccgaatgatgattgccgatgttacagccactggtgacgacaatgtgctgagcgcccaagccaacgatgtgtcttatcgcaaagagcaattgcgacgtttgcaagaggaagtgattgagctggaagacctgaaaaccggagtgtcgattactgatctcgggctcaatgacttccgaatggacttgctcaactatgtgaaggtcaatggcgaattgagcaacgtgccaagcgggatgcacgccgtagtgcctgccaagccggagatgggcctactcccaggtgtgatcttcacgctacgcaaccggaatccaagcgtcaacgtcagtcagcacaaccgcctgcatccttattacctcgtctacattaatcgcgagggggaagtcattcacgatcacaccgaagtcaaacgtttgctggatctggttcgcacttgctgtaagggacaagcccagcctattacagatgcctgtctcctgttcaataaggaaacggccgatggccgcaagatgcagatgtattcggacctgcttggcaaggccatccgctcaatgatcgaggtgaaggaagagaaggatctggacagcctcttctgcagcggaaagaccaccgcgttggtcaatactatcgtcggactggacgacttcgaactgattaccttcctcgtgattcaggaggccggatga

SEQ ID NO: 437219 - DNA, 690 bp, Serratia marcescens
atgagtcagtctgcgcgatttgagtcgaataccgcgttcattaactatccgaagcaggctgtctttggtcgtaccctgccaaagaataagatctacgaacacagcggcgctaatacaaggctgaaggacttgttcgtcgagcaggtggagcaaatcgtctggcaatacaagttggccccagaaacgatcaacctgcccgccaggctgggagtaccagagcttcagattttctcaattcagctcaagacattggaactgaatatggacgttttgcgttgcatcgatggcgcggtgcagtttcccgtcatcttcgagctgagctttgatgagcgaacaaaggtgatcgctgcatacaaacgccccaatgagtcagacgccagtcgttgggtcttgagtgactactttgccacagcctggttgccgagtgactatgagcgcaccgtcatgcccttagcactcgacctgggcggcttgtatgagcaggtgcttcaccgtctgatccccatgcctgcgcgcccacaagaaactcttgctgacttggtctcacgcgtggaactggttgcagccaagcagcgtgaggttgagaaagctgccagcagacttgccaaagaaaaacaattcaaccgcaaagtagaaatcaacgccgaactgcggatgttgaaaatagaactggaagagctcaaacattga

SEQ ID NO: 437220 - DNA, 1881 bp, Serratia marcescens
atgaagattcaatccgttcgcatcaagaactttcgggcactcaaagacgtcacgatccccttcgactccgtcacgacattcattgggccgaacggagctggcaagtcgacagtgctacgggcactcgattggttcttcaacggcaagcccggttcgcttacagaaaaagactgcttttttggagagactgacgaagacatcgaggtgcaagtcacgttcgcagatctcaccgaaaaggatcgggaggcgcttggtaagtacactccagagggtgccaccacattcactgcgtggaggcgccattcacctgacgggactgatgtgctttctgcaaacgcaaagggattcccagagttcaacgccatcaaaactgcaaatggcgtagccgcaaagagggagctttatgccaatcttagagctagtcgcccagagctggaactcccgacagccacaaccggcactgccattgaacatgcaatgactacttgggaagcggcacatacagaacaacttgtagacgcccccgaatcacttcagaccaactttttcggtttcaacagcagcggcaagatgagcggccttttcgattttgtgttggtgactgcagaccttcgcgcaagtgaagaatcaatcgacggaaagtcgagcatcattggacgtattcttgagcgttcggttgatcgtgcttcggctgatgaagagattgcgaagatcgtcgaggaatcacgaacacagcagcaaaaagtgtacgacgagaaattcaaagcgcaacttgatgttatgacgactcagcttaatgccgtcgttgcgtcctactcaccgggtcgggcagtcactgtttccccggcagatgtggagctcaaagcccccaaaaccacgttcgaagtagccgtgctcgatggcacaaccgaaactgcggtagaacgacaggggcatggttttcaacggacgattttgatctcggcgctccagctcttggcacagtccggctctgcatcagccgacggagtcatctgcttagcaatcgaggagccagaactctttcagcacccgattcaggcacaggcgtttgcaaaagtgctccgctcacttgtcgaagaccccgacaagtgcatccaggtgacgtatgcgacacacagcccttatttccttgaggcccgccattttgatcaagttaggcgattgacacgatcatctggagagactccaactgtgactatccactttgcctccgttgatgatgtgaagaccagactgctccagatagtgaacgctgatgttgtcgaacgtcagttagatggcatcgtttcagatcaactggctgtagcgctctttgcccatcgcgcttttctggtggagggtaccaccgagtcatcggtgttccacggtataggcgacaaaatatcttttggtgcgcttgaagccgctggcatttccattgtccccgttggaggcaagacgtcgatccctcttgtccatgccatcctgtccgcgctcggtatcccggtttatgcgcttttcgatgctgacagagcatgtgaggcacgagcaaaagccaaaggaaaacagcaaaacaagatcgatgaagaaattgcaaaaaacgcccgagaaaaccggacaacattgagatacttcggcattgctgaagaggattttccggaagctgtcgtcggcgacacagtcgccatttttgaagaccatctggaatcatttctcgtagccaactggactgagtggctaaccgcctgcagtgaaatcgaggctgccacaggtatcagtctctcgaagaatcaactagcataccgcacggcgacactcaaagccgcaggagcggtgccagagatgctccagcaaatcttagccaaggcaaaaggagaatga

SEQ ID NO: 437221 - DNA, 1410 bp, Serratia marcescens
atgcatgaaatcatctgcccccattgcggcaaggctttcaagattgatgaaactggttacgcagacattctgaaacaggttcgcgatgctgactttgagaagcagctacatgaacgccttgagctggccgagacggacaagcaaaatgcggtcgaactcgctcaagccaagattaccagtgaattgcataaggctgcttctgcaaaggacgccgaaattcaggcactaaaggctaggctggatgcaggagaggttgcgcaaaagcttgctgtcagtgaggcgctgaacgcggtagaaaaagatcgcgatgcgctggcaaacgcgctggaaaaagcaaagcaagagaatgaaactaaagctcaactggccgaggcgaagcgattaagtgagctacggcaagccgaggccaccaaggataccgtgattcagagtctgcaggccaagcttgcagcgggcgaagttgcacaaaaactcgcgctcaccgaagcggtcagcgtggtgacgaaggaacgtgacgaactcaaaagcggactagatcgagctgcactggaaaagcaacttgccgagactgcactcaaagataaatacgaaacacagctcaaagatcgcgatagtgagatcgtgcgtctgcgggacatgaaggcgcggctgtcgaccaagatgattggggaaaccttggagcagcattgcgagattgagtttaaccgtctccgagccaccgcattcccaaaggcctacttcgaaaaagacaacgacgtgcgcaccggcagcaagggcgactacattttccgggacatggatgatgcaggtaccgagatcgtctcgatcatgttcgagatgaagaacgaaggtgacgaaacagccaccaagaagaaaaacgaagacttcttcaaggagctcgacaaggaccgcaccgaaaaaggctgcgaatacgccgtgctggtatccctgctggagcccgacagtgagctttacaacgccgggatcgttgacgtgtttcaccgctacccgaagatgtacgtcgttcggccacagttcttcatccccataatcacgttgctacgcaatgcggcgatgaagtcacttcaatacaagtccgagttggcgctggtgaaggcgcagaacatcgacatcacccaatttgaaacccagctcgatgacttcaagaccgcattcggtcgcaattggcgtttggcttcagatgggtttgaagaagcggtcaaacgcatcgacgaagccattaaggatcttgaaaagaccaaagaagccctgcacaagtctgccaacaatctacggcttgccaacgacaaagctgaagacctgacggtcaagcggctcacccgcggcaacccaacaatggccgccaaatttgccgagctcaaacaccaaaacaattctgacgccgaataa

SEQ ID NO: 437222 - DNA, 1944 bp, Serratia marcescens
atggaaaagctaaaaatgcattcacccaatctcacgcaggacaacatagcccgcattcgcgatctgtttccaggttgtgtcaccgaagccaagggcgaggacggcagcgtgaagctggcggtggattttgacctgttgcgccaagaactggctgagtcaattgtcgaaggcccacaggaacgctatcacctgaactggccgggtaagcgcgaggcattgctgacggccaatgcgccaattgccaagactctgcgcccggtgcgtgaagagagtgtggactttgatacgacgaagaacctgttcatcgagggggataaccttgatgcactgaagttgctgcaggaaaactaccttggcaaggtcaagatgatttacatcgacccgccctacaatacgggcaatgatttcatttatgaggatgactttgcagaagaaacaggcgattacttgcgccgatcaaatcaaaaggatgaagaaggcaacaggctggtagccaacacggcaaccaacggccgctttcattccgattggttaaccatgatgtactccaggattcgtcttgcgaaccggttgcttactgatgatggcgttctctttgtgagtattgacgacaacgaagcccacaaccttattgcgatttgctcagagatatttggatctgaaaactttgtggcccaactcgctgtacagctaaatccaaggggaaggcatcttgatcgcttcgtcgccaagacgcatgaagcagttctcgtattcgttaaagatgggctgaacggcgcatcgattcaaggcctcgaaaaagaagggcgaatggttgaggaatacaacaagaaagatgataaaggcccttatcgactacttggattgagaaaccggaaccaagctttcaacccaacaacgcgtccaaaactctattattcgctgtacgtaaataaaacaacagggggagtttccctaagtaaagatgaggcccaccagattgaggtctggcctgatgcgcccaatggagtaaaaacatgctggacgtggggtaaagataaggtatcaaaagagggggggcttctttgtgcggaacgaacaggtgacgaatggcgcgtttatcgaaaagactacttgcacagcgatgatggcgaggttgcaaagacccttgtgaagtcgctctggacagacaaggaaatcacgaatgactacggcagaaaagcgatcaaggatctttttggctcatctgtcatggattttccgaagtctccagaactcatggcgaagcttattcgtatcggaagccattcagactccatagtcatggacttcttctctggctcggcatctaccgctgaagcggtgatggcggtaaatgccgaagatggaggaaatcgaagattcatcatgattcagttgccggagcaagcaagcgctgattcttctgcctcaaaagcaggttttgcttcgatagcggatatagggaaagagcgtatacgccgtgcagggaataggatacttgaaggggaagtaaatgacgcatggaacaaggatatcgggttcagaaccctcaaaatcgacctctccaacatggccgacgtctattacacacccgacgcgctggacaaagccaagttcgatctgtttgtcgacaacatcaaacccgaacgcacaccagaagacctgctgtttcaggtaatgctggactggggtgtcgatctggcgctgcctattgctaagcaatccatccaaggaaaagaagtgttctttgtcgatggcaatgcgatggccgcctgcttcgatgccagcggcagcatcgacgaaggttttgtgaaagagctggccaagcatcagccgctgcgcgtggtgttccgcgacgcgggctacaagaacagcgcggtcaagatcaacgttgagcagattttcaagctctcgtcgcctgccaccgaagtgaaatgtatctga

SEQ ID NO: 437223 - DNA, 3072 bp, Serratia marcescens
atgaaacttaaattcaaacatcagccctatcaggctgccgccgtgcaggcagttatagatatttttcaggggcagccaccggcctctaatgcggccatgagctatcgccttgaccctggtagtaccaaaaacggcatggatgatctgtttgcggtagataccggttttaaaaatgctgagctcacactcaatgaggttgccttgcttgataacatccaacaggcacagcgccagcaaaacctaccgttgtcggagagcttggttaaaaccaaggtggccaagctaaatcttgatatcgagatggaaacgggtactggcaagacctattgctacattaagacgattttcgagttgaacaaacaattcggctggagcaagttcgtcatagtggtaccgagcattgccatccgcgagggtgtcaccaagtcgttggaaatcacggccgagcactttcaggagacctaccaaaagaaggctcgcttctttatttacaactctaagcagttgcaccatctggagagcttctcctccgatgccggtatcaatgtcatggtgatcaacgtacaagcgtttaacgctaccggcaaagataatcgccgcatctatgaagcgctcgatgattttcagtcacgtcgcccgatcgatgtgatcagcgcaaaccgccccatcttgatcctcgatgagccacagcggatggagggaggcaagacgctggattccttggctaatttcaacccgttgatggtgctgcgctattccgctacccacaagaccacacacaacaagatccaccgcctggatgcgctagatgcctacaaccagaagctggtgaagaagattgaggtgcgcggtatctcggtaaagggactggcgggaaccaatgcctatctctatttacaagccatcgaaatctcaaacaaaaaaccgccagtcgcggttgtggagttcgaacagaaactcagcagtggcaacatcaagcgcgtcacccgcaagctgggcaaaggtgacaatctgtttgtgctatcgaacgagctggatcaataccgcgatgggtttgtggtatcggacataaatgccaatacggacaccttgagctttaccaatggcgtagagctgacagtgggtgatgcgaccggtgatgtttccgagatagcgctgcgccgcattcagatccgtgagacgatcagggcgcactttgataaggagatggagctcttcgataaaggggtgaaggttctctcgttgttctttatcgacgaagtagccaggtaccgggactactccgctaccgatgaaaaaggcgagtacgcaaaaatctttgaagaggagtacgctaagcaccttcaagaggcctttgataatgggtttatggagggggatgccccttatgctaaatatctacgccgcattgcggccgataagacgcacagcggctacttttccatcgacaagaagagcaagcgcctcaccgatcccaaggtcgctgcgcgcggtgaaaatgcgggcttgtcggatgatgtagatgcttatgatctgatcctcaaagacaaggaacggttattatcactagctgagccggtacgttttatcttctcacactcggccttgcgtgagggctgggataacccgaacgtgtttgttatctgcacgctcaagcatagtgataacaccatttcacgccgccaggaggtcgggcgcggcctgcgtttgtccgttaatcaaaatggtgatcgcatggatcacccgtccattgttcatgacattaacgtactgacagtcgtggccagcgaaagttacaaggacttcgtaacagccttgcagaaggacattagcgagtccttgtcagctcgtccgcgtgtggcggacaaggcctacttcacgggcaagatgctgaacacgaacgaaggcccggttacggtctcggacgaccaggccacggacattgagttttatttgatccagaacggctacgtcgataaaaaacgcaatatcacggagaagtaccatcaagacaagaaagacggcacgcttgaggcattgccggatgaactactgtcctatgcagagcagatattccagctgattgatagcgtattcagcgaaagccaactcatgcaggtagaagatggtcgcaagcccaaaagactgcagcccaatgccaactttgaaaagcaggaattcaaggcgctgtgggggcgaatcaatcgcaaggctacctacaatgtgctgtttgatgatgttgagctagtggacaatgcgattaaggcgcttaatgacaagaatgctggattgcgagtgacgccgttacaatacactattcaacgtggcgagcaggctgatacggcaacttacgatgacctcaaaaagggcaatgccttcgagctgaaagttaccgaaacagaatcgcaaaacgcctccatccactccgctgtgcagtacgatctgattggcaagttatcagaggggactttgcttacaagacgaaccgttgccgaaattcttaaaggcctcaatgctgacgtcttcgcacaattcaagagcaatccggaaagcttcattgccgaagccattcgcttggtcaacgaacaaaaggccaatgtcattatcgagcatctggcctatgacacgttagaagacaagtttgatttggacatttttaccacgggccagagcaaacaggatctcagtaaggccgggaataaattgcaaaatcacatttatgactatgtacttaccgactccgcgattgagcgcaagttcgtcgaagagttggataccagcaaggatgtggtggtatatgccaagttgccacgtggttttctgatcccaaccccagtcggtgattacaaccccgactgggccatttccttcaaagaaggctcggtcaagcatgtgtatttcgttgctgagaccaagggctcaatgtcgtcactggatttacggcctgttgaagccaccaagattaaatgtgcccgtaagttctttgatgagattaataagaagtttgctccagaaaacgtgaagtatgacgtagtggatagcttcggtaagctgatggaagtggtgaagtaa

SEQ ID NO: 437224 - DNA, 1035 bp, Serratia marcescens
atgttaaaaaaaatcatttttgagagtaagtgtgtctatttaaaaacatcattgttttttcttcttactatgtgggtccagttagttaatagtgcttcatctgactatgtctcagaatacaatggtacttacttaaagtttcttgcatcagagggagataatgatctgccccgattgaagatgacaattttcaataaacagttaccctctatagttgttgatacaggctccactggtattgttatatccgccaatgcaataccgtcattgaatgacttaccttcaaagcctggtaaaatcatatataatagctctggccgtatcatgctgggagtatgggttgaaactcctgttattattagcggagataatggagtgagcatatccacaaaatcgcttcccatacttgctgttagtgaaatagcatgtcttgaaaatgcaagggattgcactcctcaaaaaaaaccaagagatgtatatatgatgggagtaggatttgcacgggaaaacagcatgcaaaaacaaagtacgcctgatacaaatccatttcttaatacaagagaaaataattatcataaaggatatattatgacccgtcatggggtataccttggcattacagataaggatgtaagtagaaatttctcaatagttaacctaattccatcgaaagatatagttggtgaatggaaagccccatctgcttgtataaaagtttcaacgaatatatcagagttttgtggtagtgcgcttgttgataccggtgttaaagacatgtttctaactcttccaggatattttagtgacagcggggagcaactttccccaggagatgaaataacaattaaattaagctcggaaatacaatacactgttgtttatgatggtgaaaaaaatgctacatctccggcgaggatatttcttaatacaaagcgagctactccatttgtaaatactggtgtgaactttttaaatgactttgacatactttatgatgcggacgctggactatttgggtatcgttatatcaaatag

SEQ ID NO: 437225 - DNA, 969 bp, Serratia marcescens
atgagcgtgtcaaatcaacgttgtgcaggcatggatgtttcaaaaggaactctggatattgcaatcagcaatattgccagccagttcactgtaccaaatggaactgacggttttactcaaattatcggagaattaaagaaaaatgagacaagattgatcctcatggaagcaacaggaggactggagtcaggtgtggcttgttatcttcaatcagaaggctttgacgttgtcgtcattaacccccgtcaggctcgagattttgcccgtgcaatgggctatcttgcgaagacgaatcgtattgatgccagaatattgcttcagatgtcggaagtgattagccagcacccagaacgggaaaaatacatccgtcccttgcctgatgcacagaggcagattctggcagcgatggtggtcagatgcagacagctaacagtcatgcttacagccgaacgaaaccgattacacccctcgcatcctcagagttatgaaagcattagatcaattatttcggtactgaagagtgatctgactcgcattcaaggtgaaatgtcgattcacatcaagagccatttcagtgagttatctgatctactgagtgcagttaaaggtattggggctgcgacagttgctgtattgctggctgaagttcatgagcttggttcgctctctcgacgtgaaattagcgcccttattgggggggctcgagtaaacagggattccggtacgatgcgcggtcgccgaacagtattcggagggcgagcttccgtccgtacagctctctatatgtcagccctggttgggacgaggcacaaccaggtaattaaagagttctatacatgcctggttgccgcaggaaaatccaaaaaagttgcactgacggcctgcatcagaaaattgctgaccatcctgaacgcaatgctgaaaaagaatgaagcatgggatccgatgtatcaccagcctgcttcgtag

SEQ ID NO: 437226 - DNA, 264 bp, Serratia marcescens
atgggtacaccacgatttacacctgaatttaaggaagaagccgtccgtcaaataacggaacgcggttattccattgccgaagtatctgaccgtttaggcgtttctgcacacagcctctacaagtggctacgggctatcaagcctgataacaacgaacagcatgcccgggatttactggaagccaaaagcgagatccagaaactacgggcgcagctgaaacgcaccgaagaagaacgggatatcatgaaaaaggccgcgcggtaa

SEQ ID NO: 437227 - DNA, 885 bp, Serratia marcescens
atgtcaaacaaagtaaattttaaaacggcttcatttttgtttagtgtttgtttagctttgtcggcatttaatgctcatgctaacaaaagtgatgctgcggcaaaacaaataaaaaaattagaggaagactttgatgggaggattggcgtctttgcaatagatacaggatcgggtaatacatttgggtatagatcagatgagcggttccctttatgcagttcatttaaaggttttttggcggctgctgttttagagagagtgcaacaaaaaaaactagatatcaaccaaaaggttaaatatgagagtagggatctagaatatcattcacctattacaacaaaatataaaggctcaggtatgacattaggtgatatggcttctgctgcattgcaatatagcgacaatggggcaacaaatataattatggaacgatttcttggcggtcctgaggggatgactaaatttatgcgttctattggagataatgagtttaggttagatcgctgggaactggaacttaacactgcaatcccaggagataaacgtgacacttcaacgccaaaagctgttgcaaatagtttgaataaactagctttggggaatgttctcaatgctaaagagaaagcgatttatcaaaattggttaaaaggtaatacaactggtgatgctcgaattcgtgctagtgttcctgctgattgggttgtaggtgacaaaactgggagctgtggggcatatggtactgcgaatgattatgccgtcatttggcctaaaaatagagcaccattaattgtctctatatatacaacacgaaaatcgaaagatgataagcacagtgataaaactattgcggaagcatcacgtattgcaattcaggcaattgattaa

SEQ ID NO: 437228 - DNA, 879 bp, Serratia marcescens
atgaaaaatcgcataccacttaatgcattacgtgcttttgaagcatcggcacgttatttaaactttactaaagcagggcttgaactacatgtaagccaagcagctgttagtcagcatgttcggactcttgaggcaatccttggggtaaacctgtttaaaaggctacctcgtggtttacaactcacagaagaaggtctgcatctattaccgatgattaatgaagcatttagcatcatgggctcagcgctggaacggtttcacgaaggaaaaattcgcgaggtaataactgttgctgtcgtaggaacgttcgcagttggttggttactaccaagattgagtgggtttacaaaaagttacccatggatagacatcagagttattactcataataatgtcattaatttggccgctgaaggaattgatgcagcaattcgtttcggtcatggtttttggcaatcaactgaaaactataagttgttttccgccccgcatactgtgctatgccctccgaatgttgcaaagaaacttaccacccctgaggatatgaaagattatcgtctactacgtacatacagaaaggaggagtggagtagttggttcaaggctgcaaaccttaagccctggccggtaactggaccaattttcgattcttcaagacatatggtagatgcagctaaaatatgtggcgacatcgcattagcaccatataaaatgtttatacatgaaatagaaaatggttctctcgttaaaccttttgatatagaggttgatttgggaggatattggctcactattttaaaatctcgttctaacattgagctaaacaatgcattaaatattttcaaaacatggttactaaatgcctcccattctatctaa

SEQ ID NO: 437229 - DNA, 909 bp, Serratia marcescens
atggcaacgattgacctttcacagctgcccgcgccgatcgtcgttgaggtgctggattatgaagacattttggcagagcgtaaggcgacgctgatttcgctttacccggaggaacagcgggaggccgtcgcgcgcacgctggcgctggagtcggagccgatcgttaagttgctgcaggagaacgcctaccgcgaggtgattttacgtcagcgcgtcaatgatgccgccaaagcggtgatgctggcatattccaccggcgaagacctcgaccagctcggcgccaacttcaacacgccgcgactggtgatcgccccggccgatgagagcaccattccgcctacaccggcagttatggaagcggatgaagactaccgcctgcgcctgcaggatgcgttcgaagggatgagcacggcgggatcggccggttcctaccgttttcacgcccgctcggctgatggcagggtggctgatgtgacggcaatcagcccatcaccggctaacgtgaccgtcaccgtgttgtcgcgggacggcgacggcaccgccagccccgagctgctgcaggttgtccgcgacgcgctgaatgatgaggacgtgcgcccggtcgccgatcgcgtcatcgtgcaagcggccaaaataacccgctatggcattgttgccacgctgtttctctatcccggcccggaggttgcgccgatcctcacggaggccaaacaacgtttgcaaaattatgtactgaccatgcgtcgcttaggccgcagtatccggcgctccggcatcatcgccgcgctgactgtggaaggtgttgagcgtgtcgaagttgctcaaccggtcgccgacatcgtgctggataaaacgcaggcgggttactgcaccggcgtgaacatcaccccagggcgcgccgatgactaa

SEQ ID NO: 437230 - DNA, 630 bp, Serratia marcescens
atgaacaatcaacacgacattttgcgcctgctgcgcaacctgatccgcatcggcaccgtgagcaccgttgaccttgataacggcctgtgccgcgtcgaaaccagcggcaatcttaccgactggctcaactggttaacctgtcgcgccgggcgtacccgaagctggtcggcgccttccgtcggtgagcaggtgctgatctttgcgctgggtggcgaactcgataccgcgtttgtgctgtgcggcattttctccgatgacttcccggccccgtctgcgtcggcggatgcgctacatatctcgttccctgatggcgccgtgatcgagtacgaaccggaaaccggcgcgctgagcgtgtccggtattaaaactgccgacgtgcaggcgtcggagtccatcaccgccagcaccaaagtagtgatcgttacggctgacaaaatcacgctcgatgcaccggaggtggtctgcaccaacaaactcaccaccggcacgctggaagtgcaaaaaggcggggcgatgcgcgggaacatcgagcacagcggcggctcgttctcgtcgaatggcgttgttgttgatacgcacacccacggcggtgtccagaccggcggcgggaaaacggggaaaccaacatga

SEQ ID NO: 437231 - DNA, 1062 bp, Serratia marcescens
atgagaaataatttcttcacattaataagagttaaaagattactccaaaaattaaaagatgatttaactgagctagcaataatcagtgacattggtgacagcaagtcatcatatgcaaaagcacttttagactcattcatttccgagccacagtcgtgggatgattgcacccagtacaacattgaaattattggtgagttacttgctcaagcaaaaacaaacattgaagacaaaaatgaaagattggattatatattagcttatggatttagattcttaattgaaagaagcttaagcaaagatggggtactctcaccatactttttggaactcagagaattcgttgcaaccaataaagataaatttattaaaaatgcagaactacagataacctatgcactaacctcaatgtcattcgatatttttaaacataaattcacttcgagcgacattgtaacaatggaaaacttcattgccgcccacaaaagtaataatgagcaaataaaatcatggagagacgaactagacatccgtaaaaaagaggtgtcagatttaaaggaaacattggacgcacaaaaaaacgcttataatttcgttggactatacaaaggctttgatgatctcagcgaagagaaaaagaaagaagaaaaaaccgcatccaatatacttttaactcttgggttcgcaatattcataccaatcatcgcagaactttactttatcctttccaaaggagacacccttacaacctctcacgctttaataacaataataccatcaacatcacttcttttaatcttgatatacttcttcagaatcgccttgcatgattacaaatcactaaaaacacaaataaatcaaatagaattacgaaaaagtttatgcaaattcattcagagctatgcgcaatattcttcaaaaataaagaaagacgatgcttccgcattagagaggttcgaaacaataatattctcgaacattgtcatgactgatgacaaactcccttcaacctttgacggaattgagtctattgcaaatttaattaaatcgacaaaaggctag

SEQ ID NO: 437232 - DNA, 447 bp, Serratia marcescens
atgagcgagcttaacccctttgacacccggctagccgggctgattgccaagctgtcgccgcagtcgcgtaagtcgctggctgttgccgtgtcaaaacgcctgcgcgccggtcaacagcaacacatcaaacgccagcaggcgccggacgggacaccctacgcgccgcgcaaaactcggcttcgcaacaaaaagcgcctgcgcgatcgggcgatgttctccaagctgcgcacggcccgttatctgaaagcccagggcaacagcgatgcggccgtggttgagtttgtcgggcgtgtgaaacgcatggtaaacgttcaccattacggcctgcgcgatcggccgacgccacacagcgaggcggtaaaatatgaggcccgcccgttgctgggattcagttcgggagatattaaaatgatagaggatgctattttagaacaagtggccccctaa

SEQ ID NO: 437233 - DNA, 237 bp, Serratia marcescens
  misc_feature (108)..(108): n is a, c, g, or t
atggcaacggaggaaaagcgccgcaccgggatcacctttgcgagcgactttaacaacaacggctcttacgatttcagcgtgtcgctgcagttgaccgagcgtgtagtngtccgcgaacagggcggcgcactacacgttaagcacctgccggagccgccgttaccggtggatgtgacgcggccgatgcagctctttgttcatggtgaattagtgagtgaatggcatgagcgagcttaa

SEQ ID NO: 437234 - DNA, 972 bp, Serratia marcescens
atgcgaacatcttcccacgccgaaaacaggtttttcaggtcgccgtcgaggttgtccaccttcactcgggcaatctgggccgtagccccttttgactgggtgacggtgctgtgtttttcgctcagcttgccgttaccggcggcgtcaatcagcttgatagcgcctttcatcgcctcttcgccgaaaatgactttcaggtattcggcctgctgcgcggtgccgagcttgttggttttaaacgagccgttaattttcttgaggatgttcgcgatcggcagcatgttccctttgccgtccttggtttttacgcccaattctgacaacgcatcagccgcctgcccgacgggcgcctgtaaccgcgtaaatatcgcactggccgccgtaccggccatagaccccttgatgccgttatcggccaacacgcccagcaaggcggtggtgtcctcgatactggccccggccgcctcggcgatcggcgcgacgtacttcatcgcctcgccaaaatccatcaggttactgttcgagctggtgaagcctttggtcatcacgtccgcgacgcgctggatctcgtctatcggcatgttaaacgccgattgcatgttggtgatgatgtcggccgcgtcggcgatgtccagatcggaggccagcgcgagatttaccgtcgattctgtcgatttcagaatggcatcgccgttaaagccggatttagccaatacggattgcgtgcgggcgacgtccgtcggcgaaaacgcagtggtggcgccaatatcccgcgcctgctggcgaatggcggccaattgctggtcgttcttcgatagcccgagcgtggcttgcgtgtctgacatctgcctgtcgaactgcacccccggcgcaataaacgccccttcagcgaccagcccggcggtagcgatacccagcccggccgcgctggtattacggacagccgcagttgccgattgcccggcccggtaa

SEQ ID NO: 437235 - DNA, 1401 bp, Serratia marcescens
atgaatgaaaatgttagtgcgttaaaattgtcgctggatacgttaaaaaataatattgatgctttaaaaatagaaagcataccttttaatagtagaggagactattattaccctgcatttgcagtggatgatctttggaatatacttagcgatttatctgaggatattgataatctggatagtttagaaccaagtgaaagcgagattgtatgcataaataatgtcatatcaatgctgaatgccattcagccagctagtttggaacacataaaaaatcaatcagcaagtgtatctagtccggctattttgagtttaatatcaacactgcttgttgcatcattttacattggcaggttcttctctattgatagacttaaagatcgtaatttattaccgaaaaacataattcgtaggttgaatagttataaagagaatttagtaaagattgaatcttcaacaacggatatagaaagtaagataaatgtaattaatgaggcttatgaagctgctgaatatttaccgacgtcattaatatcattaagagaagcaaatgccgaagttgtgcggttgaaagatagctcaaaagaaatgagtgatgacatcgcatcttgcaaaagtgattctgagaagttgcatctaaagtcaaaagaatatgaggaggaaataaaagtattgttgagtaatgcgaaaaacgaggctaaagattatttggatggcttagcagaagaggctagagcctatattgacaaatgcgaagaggcttttcgcaccaccacttctaaaggtctagccggggcatttgaagataaagcacgaaaacttaacgaaagtataaggctttgggtcattgggttggctgtagcgctgatccttgggtctgttgttggttactttaggttggaggctcttggtgcatatttagctgatgcaaacttttctttattcaaaattacaattcagattgtgatgtcggttatgagtataggtgcgccattatggtttgcttggcttgcaacaaaacagattggacagcgatttagattggctgaggattatgaatttaaagcttctgtttcgaaagcttatgagggctatagaagggaggctgtggatttagatggcgactttgctagcaggttattcggtaatgcactaacgcggttagaggaagctcctcttcgctttgttgaagagcaatcccactcatcacctataatggaaatgttaaactctgatgcattcaaaaagttcgtgaatgaatctggaacatctatagattctgtgctgcgtaagtccggtttacgtagagatgcaaagaaaggtgaggggaaaaaggaaaagcccgcggaagagaaaaaggcggatgagcgtaaactagcggaagatagtatggaagactaa

SEQ ID NO: 437236 - DNA, 1026 bp, Serratia marcescens
atgagcaaacgcaaaggccgcaaggcatttatccccccggcgccaaccccggtagcagatcagaagcaggagtttgaggcgtttacctttggcgagccgtccgcggtgctggataagcgggaaattctggattacatcgagtgcacgaccaatggcaagtggtacgagccgccaatcagcttcgatgggttggcgcgcagcgtgcgcgccgccgtgcatcacagctcgccgatgtacgttaagcgcaacattttggcgtcaacgtttatcccgcaccggctgttaagtcagcaggagtttagccgctatgcgctggattatctggtgttcggcaacgcctatttagaagagcgtcaaaaccgcctcggtgcgccgctgcaactgaaatcctccccggccaagtacacgcggcgcggtgtggatcgcggctcgtactggtttgtgcaggactggaaagaggcgcaccgcttcaagaccgacagtgtttttcacctgattgagccggacatcaatcaggaactgtacggcctgccggagtatctcagcgcgcttaactccgcttggctgaacgaggcggcgacgctgttccgccgtaagtattaccagaacggggcgcacgccggttacatcctgtatatgaccgacgccgcgcaaagtaccagcgacgttgacagaatgcgccaagccatgcgcgacaccaagggcttagggaacttccgcaatttgttcatgtacgcccctaacggcaagccggatggcattaagattttgccgctatccgaggtcgccaccaaggacgacttttttaacatcaagaacgccagccgcgacgacctgctgagcgcacaccgcgtaccaccgcagatgatggggattatcccgaacaataccggcggtttcggggacgtgaaaaaggctgctcaggtgtttgtgcgcaacgagttaacgccgctgcaagagcgcatgaaggaggtaaacgactggatcggggaggaggtgattaaattcacaccttacaaattatag

SEQ ID NO: 437237 - DNA, 474 bp, Serratia marcescens
atggtggccgggggcaagttccgcgtgctcgagcgccaccagtggcagggcatgaactttgccgatcaggcccaaaagattaaagaccttaccgaaaaatattgcgtggagtacatcggcatcgatgcgaccaccgtcggccaaggtgttttccagttggtgcgcgagttcttcccggccgcgcgggagatcaaatacaccccggaaatcaaaaccgccatggtgctgaaggcaaaagacaccatcgggcgcggctgtctggaatacgacaccagccacaccgacatcaccgccgcctttatggcgatccgcaaaaccatgaccgccagcggcgcgcgctccacctacaccgccagccgcagcgaagaagccagccatgccgatgtcgcgtgggcaatcatgcacgcccttctaaacgaaccgctgaccgcaggcagcggccacagcagcccgaacattttggagttttactga

SEQ ID NO: 437238 - DNA, 1218 bp, Serratia marcescens
atgcgcaagcaaactcgttttaaatttaatgcgtttatgtctcgcctcgccgaactgaatggcgtcgctaccggcgatctggataaaaaattcagcgttgagccgtccgttacgcaaaccatcatgacccgcgtacaggattcctccacgttcctgacccgcatcaatatcctgccggttaaggaaatgaagggagagaaagtcggtttaggtgtgagcggctccatcgccagcaccaccgacaccgccggcggcgatgaacgcgaaacggccgactttgccacgctggacactgatgactatttttgccagcaggtgaactacgatttccacatccgctacaacactctcgacctgtgggcccgttatcaggatttccagacccgtttacgcgatgcgattgtgaaacgtcaggcgctcgaccgcatcatgatcggctttaacggtactcaccgcgctaaaacctccaaccgcattaagttcccgctgctgcaggacatcgcgccgggctggttgcagaaataccgcgagaacgcgccgggtcgcgtgatgaacaaaatcgtgggtaaggacggcagcgtggtgtctgaaaacatccgcgtgggcgccggtggcgattacgccaacctcgatgcgctggtgatggatgccaccaacaacctgatcgcgccgtggtatcaggaagatcctgagctggtagtgatctgcggtcgtcagttgctggccgataagtatttcccgctggtcaatcaggaacagcccaataccgaagcgctggccgccgatctgatcatcagccagaagcgcataggcaacctgcccgctgtgcgcgtgccgtacttcccggcggatgcgctgctgattactcgcatggataacctgtcgatctactggcaggaagacacacaccgccgccatatggtggagaacgccaagcgcgatcgcatcgaaaactatgagtccatcaacgaggactatgtggtggaggattacgcctgcggttgtctggtggagaacatcgagctgttagcggccaaaccgaccgagccaaaaaccaaggctgcactgctgaactctgatgatgacattaaggcgtttgccggtgcccttgttgaagccgtaaaaggtgccgctgcgccagcggagcctgccgctgataccgaggtgaaagccccggaggaggcaccggcagacgacaaagcgaaaggcggtaaataa

SEQ ID NO: 437239 - DNA, 516 bp, Serratia marcescens
atggacttccagcggcgcggagaactcgacgttctcgtggcggcggctgaactccagcatgtcagtgccgaggctcgccgggtcatcggtgacggccaacccgaccagatacgacttgccggtcttggcgaaatcgcggcggatctccatcgaggtgaacaccttttggcccgcgccgaccatagacaccagatcggcggtcggggccagactggcgtacagcgcccacttgccgtgcaacagcggttcgtccggctcgtcgattttctcggccttcagctcaaccacgccgccgtaacgacgaaaatagccatccggcaaaatccccttgatgtgctccatgttgatgcgggcgccgtacaccttcgggctgtaggtcgcggccatctgctgaatatccgcagcgccgatctcgcgaccgtcaacggtgtcgccttcaacgccgatgcggaaaaacttagtaactttctttgccatgtaaacggctccggttgtggtgattgggttcggggctag

SEQ ID NO: 437240 - DNA, 513 bp, Serratia marcescens
atgaactcaatcgctaaacgctgcagtgtggccgccgtgctggcgctggcggtgctgctgccgcaatttagcgcgctgcagatctctgaggccgggttgcgactgctggccgattttgagggctgtcgtttatcgccgtaccagtgtcaggcgggcgtctggacaagcggcattggccacacggccggggtaaagcccggcaaggttatcagcgagcgccaagctgcagttaacctcatcgccgacgtgtatcgcgtggagcgcggcatagggcgctgtatgcctgtcacgatgccgccgccggtttatgacgcggtggtgtcctttgcctttaacgtcggcgtcacggccgcctgtggctctacgctggccggtttcatcaagcgacaggactggcgcagcgcctgtctgcagttgccgcgctgggtgttcgtcaacggcgtcaaatcgccggggctggaacggcgccgggcggcggagctggcccactgcctgatcggggccgcgccatga

SEQ ID NO: 437241 - DNA, 210 bp, Serratia marcescens
atggagcgcatcacctcatttttagcctacgcggtagcgatgttcctcgcgtggatcggcaagtattcaccgcaggacatcgcctttatggtcggcgccgccgtgggcgtcggcacgttcctcgttaactggtactaccgccgcaaaagctaccacctgttgaacaaattgggcgttagccggagggtttacgatgaactcaatcgctaa

SEQ ID NO: 437242 - DNA, 345 bp, Serratia marcescens
atgatgaataacacactgaaaattgacggccatacggccgtcatcaacttcgaccctgaaattgaaatgttccggggcgagtttgtcgggctgaatggcggcgccgacttctacgcctacagcgtggacgagctgaagaaagaaggcgcgatctcactcgcggtctttctcgatgagtgccataaagacggcatcgagccttacaagtcgtacagcggcaaagtaaccacccgcctgtcgccggaacgccatcaggcgttggccattgccgcacaggccaccgggcagtcgattaatgaactgttgaatgaaggtgttgatctggttatcgaaaagcattcctga

SEQ ID NO: 437243 - DNA, 531 bp, Serratia marcescens
atggcggcggtgtgtgtcttcctgccagtagatcgacaggttatccatgcgagtaatcagcagcgcatccgccgggaagtacggcacgcgcacagcgggcaggttgcctatgcgcttctggctgatgatcagatcggcggccagcgcttcggtattgggctgttcctgattgaccagcgggaaatacttatcggccagcaactgacgaccgcagatcactaccagctcaggatcttcctgataccacggcgcgatcaggttgttggtggcatccatcaccagcgcatcgaggttggcgtaatcgccaccggcgcccacgcggatgttttcagacaccacgctgccgtccttacccacgattttgttcatcacgcgacccggcgcgttctcgcggtatttctgcaaccagcccggcgcgatgtcctgcagcagcgggaacttaatgcggttggaggttttagcgcggtgagtaccgttaaagccgatcatgatgcggtcgagcgcctgacgtttcacaatcgcatcgcgtaa

SEQ ID NO: 437244 - DNA, 282 bp, Serratia marcescens
atgaaaatcagcaattacgcgattggtttaacactgctttgcctgctgacgttgcccggctgcaccagcgccccggcttcaccggcgccgcggattatctacgttggctgtccgaaagtgagtctgtgccaaatcccggccagccgcccggcgactaacggcgatctgagcaccgatattcgccagcttgaaaacgccttggcggcctgcgcggtgcaggtcgaaacgataaaacactgtcaggaacaacacgatgttaaaaccgcaacagctccgcgctga

SEQ ID NO: 437245 - DNA, 336 bp, Serratia marcescens; identical to SEQ ID NO: 430498

SEQ ID NO: 437246 - DNA, 210 bp, Serratia marcescens
atggagcgcatcacctcatttttagcctacgcagtggcgattttcctcgcgtggatcggtaagtattcaccgcaggacatcgcctttatggtcggcgccgccgttggcgtcggaacgttcctcgttaactggtactaccgccgcaaaagctaccagctgttgaacaaattgggcgtcagccggagggtttacgatgaactcaatcgctaa

SEQ ID NO: 437247 - DNA, 180 bp, Serratia marcescens
atgatcgcgcgctttggtatgaatactgtgaaagaaattgaagtgagtattagacgtttcgaccaaaacgggattgatattaaaggtattatattaaacgccgtagagaaaagggccagtagctattacggtggttatggctattatcaatacgaatataagtcgtcagaaaaagcataa

SEQ ID NO: 437248 - DNA, 570 bp, Serratia marcescens
atgagaaaagaacacgaacgttctttacctgatgatagaaaagaaccgattatcgagcggatctttgctctggtagagcgctacccttcacggaatgaagccgcaaaagcttggggtattaatatcaatacgttacagaactactataagagacgggaattagcacctacacctaggcatcaactacttgaagtgattgccaatcatgagggtgtatcactcgaatggcttactgatggtattggtgaggctccggtgaacacaaagaatgaacacaaaaaagaacacacctcaaccgaggtcgttgatcctgatgcaagacttgccactttgttttcgattctgtcagatcgcgaaaagcaatccctgtttgaaatcattgttcgcaaaggggttgatacagtgttacgtcttagtgatgaacggaacatcaagttgcttcaatgcaatgatatggaaaaggaaaaattcttggctggacttgaagggaatatcaaaaaagaggcacttacacatagtcaggacgtagtagcatcgagcctttcaaacactggtaagaaggccggttaa

SEQ ID NO: 437249 - DNA, 249 bp, Serratia marcescens
atgagccgaaatgaagatctgaatgccgactggcatcctgagaccatcaaagccgagatccacaagcgtggattgtccttccgggcgctctcccttcaggctggatacagtaaggattcgctgaagagcgtgctgcgcactccctgcaagccctaccaacagatcgttgctgacgctctcggtgtaacaccggaagctatttggccgagccgttacacaacaaccagttacatcaataaggcggtctga

SEQ ID NO: 437250 - DNA, 2094 bp, Serratia marcescens
atgttctttgttgctaaggagttggtcggtattccaggcctgccaaaaacggcgaaaggcatcagagaagcgctgtgccgattctctgccggttcagagtcacttgtgcgcaagcgtaccggcagcaaggctttcgaatatcacatcgattgcctgccggatgttgcgcagcaatcgctgcgggcacgccagattaaagaactgatgaacgattccgcaaaagaacttccagcggcgaaacctcagtctccggctgcaccccgtgccaaaggcgctgacgaaagtaaaatcgcggtctatcgtaagtgtccggcgttgctggagcagaaactgaacactctgacggcagcccaacgccaaaccgctgatgcccgtatggccctggttgttgaggtgatgcgtctcggggatttgccgggattcagccgtgccaaagctatccgggagatcgtgcgtcaagctcaggcaagcgagttgcctgaacgcctggctaatgcggccgccgccgcaaatgccaagaaaggaacatcacgctctctgagcgaaatctccctcaaacgctgggtggcagacttcaataaaacgagttctgccgctgagcgcctgctgttgcttgctcccggtaagcgtcaagtcgttaaaccggaggaaatcaagtggttgcccgagttccttagcttctatcgccgaccggatgggcgcggcattcaagaagcctatgatgatttcgcaaaggagtgggtcgagcgatatcaggatgatctcctgatgcgcgctgccatcccctcttatgatcaggtgtgctatgccatgaataagttacctgttgtcgtcaaacaaaaaggtcgcatcaccggcagtgaattccgtcagtatgaggggtttattcgccgtgactgggagtcgctgccggtgaattacgtctggattggtgacggtcacggcatgaaaatgaaggttgcccaccctgaccacggcaacccgttctctccagaggtgacgttcattttggatggtagctgtcgctttattgtcgggtggagtctggcactgtcggaaagtgtcattgccgttgctgatgcgctgcgccacggcatcaaaaatcacgggaagcctttcctgtactactccgataacgggggcggtgaaaccaacaacaccttcgatgctgagctgaccggtattttaccccgcctgggaatcgatcaccgcctgggtatccccgagaatccgcagggtcgcggcatcattgagcgactcaaccgctcattggctatgcgcatctcccgccagtttgccacctattatggcaccggcgcagaccgtagcaccgttcgccgcatgacaaaggccctgcaatcggcaacgaatgccgccaataagggtaaagaactgagcgcaaaacaagagaaaaccctgcgtgatttgccgtcatgggaggcgctgattgatgccattgaggctggcgtggagtggtacaacaaccgcccccacgactctttgcccctgcgtggtgatggcgaacacttcactccggcacagttccgtcgctacaagttggaaaaagaagccacggcgatcgagtggctgtctgacctggagctgcgtgagatgtttatgccacagattgagcgtcatgtaagccgctgcgaagttcggttatttaataacttctattactcacccgagttgaacaatgaacacggtaatcaggtgctggtgaattatgacctgcatgatgcctcaaaggttatcgtccgtcgcctggatggttcgtttatttgcgaagccatttgggatggcaacaaacagcaggcattcccggttactgccgaatatcaccagcgtcaacaacgtatcaaagggatgcggcagcgtggagaagagaaggtccgcctggctgaagctgagaacgtgcatacgctggcagcaccggcagagcaggactggcttccaggcaatgtctataaaccggtgcgacgaacagcacctgtgatgctggcagacgtggaggatgctgagtacagcgaagatgaatatctcaataactcgctagatattcttgaatcaaataagcgcaagaacgcgatttaa

SEQ ID NO: 437251 - DNA, 948 bp, Serratia marcescens
atgtctgaagtgaatattactgatattcgcgaggctgtccgcaacctggtggatggtgagcgcgtaactttcgcccgtatggcacgtgaaatcggcctgtctaccagtgtggtcagtggctttatgaataacaaatacgccggggataatgaccgtgtggaaaaggctattcagcgctgggtcgagaagcaacacactgtagccgaattgccggagcctccgcgctttattgagacgccgaccgtcaagcagatatggacagccttccgctatgcacacctgacggaatgcatcggcgtggtctgcggtaaccctggcgtcggtaagtctgagtctgcgcgggaataccgccgcagcaacgacaacgtttggatgattaccatcacgccagcctgtgccagcgtgcttgagtgcctgaccgagttagcctatgaactgggcatgaacgatgccccgcgccgtaaggggccgctggcgcgtgcgctgcgtcgtcgcctggagggcacacagggcctcatcatcatcgatgaggccgaccacctgggtgctgaaaccctcgaagaactgcgactgatgcaggaagccacacgtgtcggactggtgctgatgggaaaccatcgtgtctattccaacatgaccggcggcaaccgcaccgtggagttcgcccgtctgttctcccgtatcgccaaacgtgtcgccatcaacaaaaccaaaaaggcggatgtggctgctattgctgatgcctggcacatccatggtgagaaagagcgggagttgctgcaacaaattgctcagaagccgggagcactgcgcatcctcagtcattccctgcgccttgctgctatgaccgcccacggggccggtgagtccgtgaacgaaagctacatcctgaaagccttccgcgatctggatttggatgttgatgtttccaccctgttgagaggctaa

SEQ ID NO: 437252 - DNA, 213 bp, Serratia marcescens
atggaaaacgtgaaattcctggagatgaagatccgcttctatgtgacaaaggacggagccatcaaacaagatattgattcgaagtttatgaaaactgaaatggctaaggaatttagcgaaaaatatattaaagcgtttgtggagttacaaggtggcttggttgcggatatttccaaagctgtaattggaaatgatacgaagagttttcactga

SEQ ID NO: 437253 - DNA, 918 bp, Serratia marcescens
atgccaacacctaatgcagaaatcttacacgctatcagcaccacactgagcgccgcgtacaccaaagggcttaacggtgcgcagccgcagtacctgcaaattgccacagtgataccgagcagtggcgcgtccaacacttacgcctggttaggtgattggccggagatcaaggagtggattggtgagcgccagttcgctgagttggctaagaacggttacgtgatcgtcaacaagacgtgggaaagctccgtcaaggtcaaacgtgaatcgattgaagatgatcaggtgggtcaatatggcgttattgcgcagcgtattggccaagatgttgccattttccctgacaagctgactttcccattacttgttaatggattcagcaccttgtgctacgacggtcagaacttctttgataccgaccatccgatggcaggcagcacctacagcaacattgtagggactggtgctgaagctggtgaaccatggttcctgatcgataactcacaagtgctcaaacccatcatcttccagccacgtcgtgagtttgatttcacagcgctggacgattacagccgggaacataccttcaagaacaatgagttcttgttcggtgtggacggccgttgtgaagctggttttggtttctggcaaaccgccgtggggtcgcgcgcgccgctgaacgtggcgaactatgaaaaagccgtggagatcctccagggtatgaagaaagacaacggcgtcccactgggtatcaacccgactgcattagtcgtcggcaaatccaaccgagcggcggcgaagaagctaatcgacgccatgctggtcaatggcggtgactccaacatctactacaaagacgtggatattgtgaacagcccgttcatcgtgacgcctgctgcgccaccgtccggcggctaa

SEQ ID NO: 437254 - DNA, 885 bp, Serratia marcescens
atgagtaatttctctttctccgacaccgaccaggcattgtgggtctatcactttgacagcactggggtatttattggcagtggcttgatgaaggtgccagccggtactggcttacccgccaataccaccatagagccatgtaaacctagcgacggtaagacgggggtttggaacggcgcgagttgggattatgtcgatgataatcgcggtctgcgttactggaataaatatggcgtggggacggttgtactttccgtgaatgaaattattccggcggacgccatttatattgagccaccgaaaaaagaagccggtcatgttgtaatttaccaggatgaccattggcaggtcattcccgacaataccggcaaaaaatattacgaccgctacggcacggaatataccgtgccggatgcctggttcgagctatcgccggattgcaccatggaagcgccccccgagcctaagaccggctatgccgtctactggaacggcctggaatggggctacctggaggactttcgggggcaaaccgcttacgtcaaagagaacggcaccgccattatcgtggctgacctcggcccattggcggaacagtacacctttgaccgcccggcgaccccgtatgacgagtggattgatggcgcctgggtcaccaatgctaaggcgctgaaggtgcagcaagtcgccgatgccaaagcgcataaaaatcggctgtgggttgaagctggcgacatgattggtgcgttgtcggatgccattaaatacggcatggcgacagaggaagaaaaacgccaatttgatgcctggtcagaatatcgcgtactgctcatgcgcattaatccagacgatgccccagatattaactggccggtgaaaccgtaa

SEQ ID NO: 437255 - DNA, 2211 bp, Serratia marcescens
atgttccatatcgataataaaagtggcgtaactaaaatgcctgacgtcggtgaggtattaagcgatcaaacgctgttcttcaccgaggaaaaggataaggccacctggccgggtgcatcctggttcaacatcattcagtctgaattgctgaatatactgaaagcggccaacatcacgcccgagaaaggcaaactcaaccagatttcgacggccatcattcggatgcgtgagaccggaaaaatctacgacagcccggaggaaggcgtagacccgattggcggagtaccgaacgggtattactacaatgtcctgtcgccaaacgataagctcgtttatgcgatgtacaagaatggcaatggcaccccggtgtatatcggcaagacgacgccgagtggcgaatttgtacaatccatcgcggacatgatccgccaggcagaaatcaacgccgacgtcacccatgacctggtggacgcggatgatttttccctgtggcgtctctattcaaacggggtttttggcaccctaaaatcgttgctggcaccaggcggcatgttcctggaggacttttccctgttccaggcgacaggcaacggcgcgttgaaataccaagacccggatgccttccaggttcaaatcatcgaccagcgtggcgtggtcgctccagacgccttacaaggctatggtaagtttgccactgagcatacaccggatgcctggctacgccttcaggatgcggatgccttctacaaagacgtcatcgacgttaacggcaactggatcggcgaaccagcaccggagtcagtctttgacctggtggcacacgacgcgcagaacaaggcttattcccagtcggttcgtgaccgttacaacgccgacattcaacgtcttgtgtcagccctgaaccacctggttatctacagccagagcttgggaacccaacaagagggttggccagccctcagcaaagcaccaacagaaggctacgacaacctgatgttgggagatagcgtgcgccctaaaagccgaacagcagctgagtttgctccactgggtgatgcagtattgaaaccgctgaaagcagttgtacagtccggtgacggcagcgcacttctgagtgatgagcaggtggcggccttgactccaggggccggaaatgaaggtgaaggtggtgtggcgctggcgaacttcttgcgcaaattgtggctgcaaaagaattgtctggagcgtgacccggcgcgccgcttcgtggtctcaagtaccggcgtgaacggtcgcaccattgaagagctatccaagggggccaaaccagagttataccagcgcccactccaggcggtgacgcaggttaaggcgctcgccgatcagcttggcgttagctactccatcgccgcattcctttttatccaaggcgaatggaactacaacggcacacgcggcggtgtacagaccaagacggggtatcggggaaagctggatacgctgtttcccaatatgacccgcgatatggccttcggcactgcggggcaatcatctcctccggccatctttatgtatcagaccggcggcgcgtacacggtggacaaatacgagctgggcattggcatggcgcagtgggagttctgcaaagagacgcctaatgcgtatctggtgactccggcatacccattcccagacaagggcggtcacctcaccagcaatggttatcgttggatggacatgcagtttgcaaaggtgatgcatcgtgtgctgaacgaagggcaaggctgggagccgcttggccctatccgtatcatccgcatcggcaaggtgatttatgtgctctatcacgtacctagcccaccgttgcagttccgcccggcgtatgtagctcgggtaccgacgttgtacgctgacaagggattccgcgtcaccgataccaccgacaatgacgtgccgatcgaggcggtggagattgtggccgacaccatcatcaaaatcacccttgcgagcgaaccgatgggggcagccaagctgtggtacggggataaaaccgtccataacggcaatggtaacgtctttgacagcgatacgttcgcgtcgctggcaaattacgaatatcaggcaggttccggccaatacgctgatgaaaacattgctgacctggtcggcaaaccttatccactgaacaacgcatcggtacaattctgcatgccgatcgagacgggagaataa

SEQ ID NO: 437256 - DNA, 744 bp, Serratia marcescens
atggtgatggtactgaaatccaatgtgtccggtacgtctatcgtgcgtcctgacggctggaatccgccgttcacggtgaacggcctgaagtacgccaatatcttcggtcggggtaacctgaccgccaatcttgcccctggcggcgcatcagccatcgcgcacggaaacccaacgcaaaaaggtgaagccttcgagttttcgaccagtaactaccttgatactcgtgtgccaacaagtgagaaagctacgctgattgctatcgcaaataacaccgaatcgacagcaactgcccgttgcttctttatctcaagcttcaatggtagcaccgatgccggtaaatcactggtgatgcaaggtgcagcaccgccagcgctctacatgtattcacattacaaaggtacagacgccaacggaaacccgtttaacaacgcttacagcgtagggatgaatacacgaagcacagaccgtagtcctgcgttcttccacggccgagacaaggggaatgggctaacaatcggtgacttgaccaacgaccaggtgaaaagcttaacgccaggccttccaatcgtctcgttcgccaacccagcccgtacatatctcattggtaaaagtaatgttgaaggctctccgaagcacctcaactatgcatcgttgatttatgaccgagcactgagcgacgaggagttgatggaggtttacatgtactttaaggggtactacgggcgacgagggatggcgatttag

SEQ ID NO: 437257 - DNA, 639 bp, Serratia marcescens
atggataggtttgcaattttattcggttctgtctctagagggacacataactctaacagtgatatcgacatattgcttttgaatatagatgaaaaccaagcttcacaatttattgatttttcagcacttcctaaactggttgtaaattatgtttgctataattcaatcacgttcaataaatattatttgaatgggagtcttttcctattccatgtatttaatgaaggaaagctaatatatggggatgcaaatgaatgggagagagtgactaaagggtttaaggttaaaagagaatttgattcagagataggaagagttaggcttgatgcttctgtatatagcgacatcaatttgttctccaattattacatgtcggcaatggcgaatttttacccgataattaaaaatttctgtatatttaaattggccagtgattctatttatgagtttgataaaaatacatcacttaagatggtgtgtaggaatgctgaggaatacaagagattaagtgtgttgagagggtgttatgacgttttttatagaggtctttccatagataatatcagagtggatccggcttccagaattgccggagatatattaaccgaggcgtttgagtttgtgagtgactatgattaa

SEQ ID NO: 437258 - DNA, 930 bp, Serratia marcescens
atggataatgaacagcagtttttctgggttaaccacagaaaaactgaaaaggtagaaattagtgaagggttcatttgggccccgaaaacgaaggttaatggtcataaaaaccaaacttacttaaacctcactgaggtaagacctggtgatctaatattttcatatgcgaaccttaaattaggggcagtgggtaaagcattgtcttccgcatatgacttcgagaaacctgatgagtttagagactcagatgaagtttggttaagagacggctggcggattgacgttcaatttgaaaggctgcaagcaccgatcaggccaaagcaatttattgcacaaattcagcctcttttgccgaaaaaatactcgccacttcaaaaagacggtaatggtaacgaaagttgctatctggccaaattagataatgaactaggtgaattattactggagctctgtgacaggaaagatttggtttcaattgacgactttactgagtttgaggagattgagaaagatatccttgaaatactgagtgcaaaagaattaccagaaacaatgaaagaagcgcttgtgaaagcgcgtatagggcaaggtttttttagacaggaagttttaaaactttatccggcatgtcctgttaccggtgttacaatgccacagttgctaatagcaagtcatataaaaccctggagagagtgtaataacaaagaaaggttggatcccaataatggaattatgttggctcctcatgttgatgccttatttgataagggatatataagcttcacaaatgatggggttttaatagtaaaggctgaccgagaagtggttaatgctatgtcaatacttggacttactgatgtagataaagtaacgatttcagaaagttcgcatgattatttagattggcatagagcacactataaattttga

SEQ ID NO: 437259 - DNA, 180 bp, Serratia marcescens
atggtttcgattatttcgtttatgacgtcccgcaaccgcatcctgaaattcaggaaatggatgaacctcaagcgccgcaaggcttggctccgaatcctgaaaatcaggaaacggataaaccaccgtatcctgaaaatccgtatcctgaaattcagggcattagtaaagacggatctttag

SEQ ID NO: 437260 - DNA, 183 bp, Serratia marcescens
atgagccagcaaaccaccacacaatccgtagaactgatatccagccttgtaggcaagaagttgggcatcgctgggcatgaggcccggcgtttggctatcacagggactctgtcaggggtaacgcaggcgttttattcgcgggaaagtgacaaacatggggcctctgcttcgaggtctgagtaa

SEQ ID NO: 437261 - DNA, 360 bp, Serratia marcescens
atgaccacaatttaccagccagacgacggaacggcaggggccacgatagcctcaggtgtccggaaggagcttttggggcgtaagaaggtaggcaagaacggcctgccgttctcagctgtccgtgaagaccagatcaaaacccgttggacagaaagcgaagcggtgacgatcaaaagcgccgccagcgcgatgtcgtcaaatcccgccgttgaaaccaacgttgccgcgatccggggtttcctggctatgtttgccgaagcgcccgaaatgctggtgcacgttcataacgaactgaaggccgccggcctgccagttcccgaatggcttccacttccacccaccaaggagctgtcgaaatga

SEQ ID NO: 437262 - DNA, 657 bp, Serratia marcescens
atgaccagtacccttggcgagcgagtcagtaaacggcgagctgatttgcaaatgtctcaagaagaattagccaagaaagctggcgtctcacgcgttgcaataagcaaggctgaactcggcatgaccaaaaatttcaatggcgacacccttttcaatgttgcacgagctttgcgatgcgatcccgagtggcttcaaacgggtaaaggaactattgaaggccgcacttctaatattgatccagagccacaatacacgccctatagacacccagtattaaattggcagtcagtattgcagcagattgaggggggcaaagaaaaagctgaaaaatggctggaaactactctgaacgtaggtaaagatgcattttggttgaaagtagaaaccgatgccatgacctctcctataggactaacgattcctgaagggatgatgatactcgttaatcctactgacagtctcacttctggtaatttagttatatttaagaagtctggaactcgagaaatatttttcaggaagtatgttgaagaggccggtgatcgatacctcagaccgctaaaccaaaactactcaatgattaaaatagatgggcagtacatgcctgttggggtggttgttgatgcgaaatggattctgcgagagggcaataaataa

SEQ ID NO: 437263 - DNA, 621 bp, Serratia marcescens
atgtattgcaataaatgcggtggcaaagtcgaagttgacgacaaattctgtagggcatgcggaacatctacctactcgacaaaaaaaattggtgagcaaaatccatggacaacgtcaaatccaaccccagcatcacctgagaagcaattcaaagcagctttgatagaagcgccagaagaaaattcagctaacaaattaattaaaaagtggggatatagaataataatcctcgtggttgctggaatggcagctgtgattgcaaaacctttagggcagatgctaactgataaatatcaaacatcaaaagtttgggaagatgcccctgtagagcttgagaaagtcaagaaatcgatgggattgccaaaaaggctggatgaatacactactttaagcaatatgttcataactggacatgaactccactatgaatatgttgtaaatgacattcaactagatgaaggtaagaaacctgaaatcgctaaaattgctcgagacgcgttcaataaggctctatgtcaaaacgtactaattaccaagtttggcggtatttctgtttatacgtataaatttcctaacgatgacataacgtataagtttacgaaatctgactgtagctcctaa

SEQ ID NO: 437264 - DNA, 180 bp, Serratia marcescens
atgtacggacttttcttcctgctctgtatgagcgggcagcccgagtgttaccgttttgatgggtatatctacccggatgaagtgaactgccacctcgatattgatgataggaatttgccggcagcagattatgtatgccagccagtcgatgcggttgcactgatgtcgggggccaaataa

SEQ ID NO: 437265 - DNA, 345 bp, Serratia marcescens
atgagtaaatcactgatttcgcgctgtatccggcgctggaatgtgcgtttcaaacccatctgcaactctaaagtatctccttactggagaaagcgcgaccttaagcgatatatccgggagagcgcctttaccactgcggctagcatggttgaagaaatggctgagggaaacgccaaagtcgattttaacggtgaatcatgtgggtggagccctgagttttcagcattctataaccaacatcgtgaacaatatctgaaagaggctcgcgatttcctcaatgaagaagtcaatgttgatgagatagacgtatatatcgaaagtgaaattgactgttggaatgactga

SEQ ID NO: 437266 - DNA, 288 bp, Serratia marcescens
atgcaaaaatacgacaatctggatgatttgtggtgcgagtggggaagttacgtttcaccaataatggctttcttggatagtaatgatccgatagtaaccggagttaagtggtcatttgagaaaggctatgctgactggcatcagaacaatacaagtgtgaacatcctatttcgaggattcgatcccgggcaaggagaaatagttggtataacaatatcctcccatagcgaggactcggatgggcagatctccgtcaagcacactccaaaacgtataatttctgattaa

SEQ ID NO: 437267 - DNA, 132 bp, Serratia marcescens
atgagggcgcaagcgttgaagcatttgaacgagaaatcgtcgagggatgggggggggagtctgatacaggaaaaggcgatcttttatcgcaagctgaatataccgtactgcggttcgcagcatcaggaatga

SEQ ID NO: 437268 - DNA, 690 bp, Serratia marcescens
gtgctggtgctgtggttgggcggtgttttgcgttacgccagccatgccggctccaatgatgcccgctacaccatgctgcgcgatacgctggcgatgatcgccgaaaagccaatccttggctggggttatggcagttttgagtacagctttcagcattttcgcattaaccaaacgccgcccacggcggtgaccgaaatcgcccgtcacccgcataacgaactgctgctgtggtgggtggaagggggcgtgattgcgctatttggcatgctgctgttggtatgggcgggtatcaaactggtggtgcgtgttcgctggcatgaccagcagacctttgcctgtggcaaagcatcggcgggtgaggcactggcattgtgtctggcgctgctaccgattgcgttgcatacccaaaccgaaaacccattttacctgtcggcgtttcactggctggtattcctgttgctgctggccatgctcgacaggcgggtcagtccgcgccttggcaccgacgcggggttgaaacgctggcgatggccgatgctggctttgtcactggcggcgttgtttattatggcgaccgggttttacagcggactggtgttgacccaggctgagcgtaatggattccaggatatgcgccgtgtagaagcgatgccggcctgggtaatttggacacaggccgaaagagtatag

SEQ ID NO: 437269 - DNA, 312 bp, Serratia marcescens
atgacctttgataatatttttttcttatttatctttttgttttttattccgctggcgatatatatcctcaaccctggtgggatgagattggcgttgccattgaatttactggcctatggcggagaggccttattgatgggggcagcaccgttgcgccggatggtgataacgccggcctgtcgcgccatatttgtcgcatgttctgtgctggcgctgccggttatctttacccgtccagaatggcaaagcactgttatttggcggctggctggcttatttgtcggggcggcgttctatttctcctggctgtag

SEQ ID NO: 437270 - DNA, 435 bp, Serratia marcescens
atgaccaaggtcagtgagtctgacgctccggggttaacgggattcacgattatatttatcagtgtttgtaaccacggcgggaatggcttgtattacgaaactcacggtggcgtcggcacctcgttgatatgcgccgtggaactcccgggggaggttgatttcccggcattgtcttataacgatgaacggattatcaatggctacgtccgatgcagtggggaggggagtgcgcttgtccgggtgaccgtgttaggatccgacgtcgaggaaattgcgcctggagtgactatatggacccgtaccgagaactccccggcttcagttaacggcgacagcgtaccggtccctgtgcgtctctctgttggagccaaaaataacagcggagagccgggtgtgtataatggctatttcatatacgctgttgattatgattaa

SEQ ID NO: 437271 - DNA, 1017 bp, Serratia marcescens; identical to SEQ ID NO: 422308

SEQ ID NO: 437272 - DNA, 1191 bp, Serratia marcescens
atggctcgtgatgaatctgaacgataccgttttattgataattctgaatggaatgaaaatttttctctttctgaatccgccttgttgaccaaaatactagaaatacatgaaaatattgataaggaaagattgcaaggggggcctcataaggccccggttgatttttttaccccactaataaaaacaaaaaacaaactatctcctcttttcaatgagttggtatctaattcattatttgcttctgcaaagaatattattgaacccatgatgcgttggtatgaagatgcagatggtaattttgtagagcaatttcagacaacaggttttaatcaacgaatatgggagctgtatctattcgctctgttgactgagaatgatataacattcaatcagaaagaagctattcctgactttatttgtgacagctttcaaggtgaattttgcatagaagctacaactgtcaacccttcaataatagagggtaaagatgaagaattgccacaatatcacaacttaaaagatttggaagatataaagaataactattatcctataaaatatggaagtgctcttttttcaaaacttaagaaaaagtattgggaaaagccagtttgtaaagataagcctttagtttttgctatcacagactgtctcagtcctgcttccggtaaggattccagggcatcattaccatattatctttatgggtatagacatgaggccaaagtagacgatagtgggagtgtgacaatagttcctgttaagatcgaagagcatacttggggaaaaaaagtaataccttcaggtttttttaaccttccagaagcggaaaatattagcgctgtgattttctctaatgatgcatcatttggaaagttcaatcgtatgggacttctaaatgaatttgcacctgaaggttcagagatgattaggacgggatttagaattaatcatgatgtcaatgcaataggacctcaatcatttagcctggaagtcggctctccttcctaccatgagcaatggagtgaaggtctagaggtttaccataatcctaacgctttacatcctctatctaggaatttatttcaagaggccgcgaatcattatttattagctgatgggcaaattaaaacatatctaccagactttcatccgcttggttcaattactaaagtaaaacatttagagtaa

SEQ ID NO: 437273 - DNA, 1230 bp, Serratia marcescens
atggcaatttcagacagttaccttaaggcttgcttgaacaaagagcgggataaggttgaggaaaagtctgatcgtgatggtctttgggttcgcgtgtccaaaaaaggtgcagtaaccttcttctaccgataccgcttccttggcaagccagacaaaatgacgttgggaagctatccagcgctaagcctcaaggcagcacgtgatgaggtagaaaagtgggcatctgtcctggttggtggggataatccaaaaattaagcgagacctggagagaggtaagatctccacgcgatacacgttcgaggagttgttccgtgaatggcatgggatggtgtgcattcagaaaggaaatgaggctcaggtattgcgatcgtttgaaatacacgttttcccccgccttggtaagtatccagccgcagagctaacggttcataactggctcacactcctggacaagatggcaaaggcctattcggaagtgacacgccggatcatcagtaacggcaagcaatgctattcttgggcagtaaagcgtcagttggttacagtgaacccgctggctgaattgacgggtagggacttcggtctgaaaaaggggatgggtaagcggacgctttccagggatgagatcgcgctgttctggagggcctgcaacgaatgccggatgagtgtcagaaacaagctaatgctgaaactatgccttttctatggctgccgtatctctgaactacgcttggcaaaggttggggattttgacttcgtggagggtgcgtggaccgttccgcctgaaaatcataaaactggcggaaaaacacaacgggcaatagttcgcccgatcatcgctgaaatagttccgatgttgaaagcgctaacggaaatggctgtgggagagtatcttttttcaagcaaacaagatgttccgatggcacctggtaatcacctgagcctaccggctaacctgcggctcttcatgattaaggcgtatgacgaaaacgtccctcatttctctgtgcatgatctgcgccgcactgcccgcacaaacttttccgacataactgatccgcatatcgcagagataatgctaggccacatgctgccgggggtttgggcggtgtacgacaagcacacctacctggatgaaatgagggtggcgtattcgaagtggtgggcaagattgatgagtattactgaacctgatgttattgagttcaagccaaggtctgccggataa

SEQ ID NO: 437274 - DNA, 384 bp, Serratia marcescens
atgactaactatcaacttctctgttttcttcaagaagatggcggattttatgacgtcaaagggcacattgacttgctcaaaagcacatttcctgatgctgagttcgatgacatagacattaaaaacctgcgaaacatcatcactcgttcaacatccatcgctttcgaacggcgctgggcggaacgctcaatgaaaattaaggttgtttacgtctcccccaaatatgccaattactccaaggcagcgattgggattggtagaaaacgcgcagcgccgaaatggacctaccttgagggagagcatcaagaaaccgtaaacgtcatcttacggcgtcaaacgttcgatcggttactgagtgaatgccgtggacaaagcccgcgatga

SEQ ID NO: 437275 - DNA, 576 bp, Serratia marcescens
atgaatagccaactcatccccgtcttcaatggtgacataagtaacgaatctaccctgctttgtgatgcccgagaactgcatcggcatttagaggttggcaaacactttgcttcctggattaaagagcgtatcgctgagtatggtttcgttgagaatcaagactatgttttgatttcccagattagggaaaccaaaacaggcaggggcggagatcgccgcagcaaggattaccacctaaccctcgacaccgccaaagagctcgccatggtcgaacgtaacgagaaaggccggcaggttagacgctactttatcgagtgtgagaaacgactgcgcaataacgttgtaaccacgcagcaaaatcaactcacggcccccatatccccactgaactgtaatatcatggtcagcattgaaaatggtgttgccgttcgaacaatgctgataccggcgggctggtatgtagggagcattgatgattggatgcaatcgatgaaagacaatggagccataatccttcggaatgaaggtgagcaaaaagaatttgcaaaggacttcgtaatacaacacctcggctaa

SEQ ID NO: 437276 - DNA, 270 bp, Serratia marcescens
atgactgtctttgctgtgatagcgacagacgaccaagaaaacatgaagaaagccgtctcggaaaaattctctactcagcaatttcttgaagttggcgacagtctttggttgattgatagccaatgtgccacaaccagagacttaaccatgctgctgtgtggtgaggataactcagcggaacttagctctttcattgtactgccagtcacctcgtactttggactgcataataaacttgtttgggaatggttgaacgctaaaggactataa

SEQ ID NO: 437277 - DNA, 417 bp, Serratia marcescens
atgagtaagcggattcctcttgatggcgatcaggttgcccctagagacgacacccaagtagcgggtggcggagagtcgaggcatacccagcaccagtggatcgtccaatctttcaacgaattgaaagaggacagtaagcatatgaatgatcgaatcgaccaggtttatacgcacctctcggatgctaagaacgacgcttcgctcgcatgcgctgtttctcgcatggagatgactctatcaggcatagagaagaagatggagtccctggatgcaatcgaaaagacaatcgacaaaacgaaaattgcagttggcattggcacgactgtaatcgtcgcttgtgctggcataacttggtttgtgttcggcaactacctggggaaaatcctcgaggttctaaactctatggtactgaagtaa

SEQ ID NO: 437278 - DNA, 195 bp, Serratia marcescens
atgagcatattcatcggcgtgattcgcacactaatttttgtagcagcagtgcttctggtttctgccatgaaattcactgtggcaggccctttcggttacttcaccgcaggcgtgttactcagcctctactgctggttttttctgaaggtgctggactacctgaaggattatcggatggagggaagctgtgattga

SEQ ID NO: 437279 - DNA, 141 bp, Serratia marcescens
atgagagacgaggacttagaccgttgccctgcatgcggcgaggatatgtgggctggcaatgaacagtgcaaaacatgtcagtgggaaaaggatatggaagacgcccatggcggtgacagcgctagggaggtggagcagtga

SEQ ID NO: 437280 - DNA, 1242 bp, Serratia marcescens
atgaatgctgtctcaattatcgtaccaacagatatatccgcaaaaatccgagaaatagaaacagcatacgcagcatttgtcgaagaatatcgtatacctgacgatcatattatcgtcgttaactactcagccggtaaagactccacgacaacactcgctatagcacaccacctgttcggaaacaaagtgcgtgccgttatggctgatactgacaacgagcacgagctaacgatcgagtatgccaaacatattcacgaacaaatcggctgctcccctatcgagatggtgaaacgcatttacgcagatgtagattttgccaaacgtcgcgcgaccgtgaataagaactggcgcaagaaacaagcaatacgcatgggggcttatcgtggcgtcatcatgccttccctgagccgttcagacacgaaatttgggattgcatggcaaagaacagctgaacggtggggcgtcgaatttgatacaccgttagaagccgcgatgtccgttttacacccgtcagggaatagcttcttagatgccgctcttctgcacggaaaatttccaatgctgcgggatcgcttttgtaccgatgagttaaaaatccagattgcctttgatgccgtaatggcgccactgctgaatgacggcgaggtcattgttcaatggtctggcgtgcgtgctgatgaatccagtaagcgtgccggatacgcaaggtttgactccgatcggcgcgatccaaactacctctacaatttcctccccattcactcctggacagcagcagaagtatttgcattacagaagcattttgggatccaaccaaacccgctttatctgcaaggtgcagaccgcgtgggctgcatgaactgcgtgctgtgtaacaaggaggagatcgcacaaaccgccgcacgctggccagaacacatcgagaaacacagacaatgggaagaaaaagtgcggctggttagtcgttgggttcactggatgagcgtcggtacattccggcagacctggttcaagcagtttaaacaaccgttcggttctgtgccgcagatcggacacctgctgccagaagttcagattctggattggtcatcgttttatggcacacgtgctggcatgggcgcacctggcgttgatgatgttgttgcgtgggcgaaaacaggccgtggcggcaaagtgtacgacatagtgcgagccagtattgatgccaatgtttgctcttcccgttatggcctgtgtgagtga

SEQ ID NO: 437281 - DNA, 297 bp, Serratia marcescens
atggcctgtgaatgctttaaaaaaacaaccgcacttttcaaagagcgcatttctgcaaagattggtgaatcacttggtgaaattgaagaggccaatgttgagcactctttatggaatttcagtgggggtgaccattcacctgtagcaatgaattttaaattccgctactaccgcaaacgtaaaaacggcgagcttgagtctcgccaaaccaaagcagataccctttgcataatgagctattgccctctatgcggcactaagtttgaaggcaatgaaaattcacgggaggcaaaatga

SEQ ID NO: 437282 - DNA, 849 bp, Serratia marcescens
gtgaccaattcgtttaataagatgattgatgagaaaatcatcaagcgtggtaagaccggctttttaatccaattaaaaaacattcacgtcaatcctgaatttgatattcgtataaaaaacgaacgctatcatgaggctggggaaaaattatatcaatatatgttggctggggggaaggttcctccgcttgaagttatcccccgggatgatggcggcgtgtggattattgaaggacatcgccggaatgaaaacttccatcgcctactcaatgaggctggtcgccccgtagattggatacgtattgatccattcgaaggcaataacatagagcgaatcgcgcgggtaaggacgagcaataatcaactaccaataactgattatgaagaggcgctattggtcagggatttgcaaaacctcaatttgcacgctgacaaaatcgccgaggtcttacatattccccgctataaagtcgacaatgccctggtgctgctctccgccaattatgacgtacaccaattggtagaagaaggtgacgttgatatcccactggcggtacagcgtataaaaaaacatggtgaaaaggctgggcaagttttgcagaaggatgccgaaaaagccaagaaaaaggggaaacaaaaagccaccaagtcaacagcaatcccacaattcagcgcaacccgcgcccgccggctctgtgaactgctctatgatgctgcgccaatggttcgtgaagaaggtgatgttctgctgctccttccagggacaaaagaggaaattaacaccatcctcaacgagtaccggcaacagcatccccaaactttcgatgatgaagaacggggagataaataa

SEQ ID NO: 437283 - DNA, 153 bp, Serratia marcescens
atggctagcctgcgactggtagccatcgcccttctgctgtttttggttgtgacggtcgacttcacaagccggctgatgtcgatggttgctgatggtgtattagtggccggcattatcgccatcgcgtggcccatgttgaaaagcaaagaataa

SEQ ID NO: 437284 - DNA, 426 bp, Serratia marcescens
atgtttggaattttcaagaaaaaagcccgtaaagcagttgttgaagtgaagaaaatggaaaaccgcgatgcggtcgaggcaacagtatggggtgcttactctatcgcttatgccgatggtacttgcgacgctaaagagatctccgtactggagaaaacaatcagcgccctgccagctttcgccccgttcgccggtgaaatcgcccagatgagcagcaatattcgtgctcgctatgaagcatctccacgcagtgcaaatgcacaagccattcgtgaactggaagacgtagccggcacacctgatgccgtcgacgttctctgcctgtgtctggatgtagccgatcaggatggtatcggtgaagaggaagagaagcagttgaaaaaaatcgctcaagcccttcaattgtcgctggatcaatacctttaa

SEQ ID NO: 437285 - DNA, 210 bp, Serratia marcescens
atgttgcagcgaaacacctcggttattagccagggtgccggcccgtgtattccgctgataggtgagcgctaccgcgatgagcgcgggcgcatgattactgtgacggcttccagttcgctggaagtgacctttgagcgcgacttttatctggagccttgcgtagtgccgctttggcagtttgataagcagtttaagagagtggctgtatga

SEQ ID NO: 437286 - DNA, 1083 bp, Serratia marcescens
atgaactgggctaagaagataaagacaggcaagtcatcggcaaaatccgttctgacgtggttggcggacatgtgcggccctgatcactgtgcatttccgtctattggcgcattggctgaggcgacggagctggacaagaaaaccgttcagtcgagtttgcaatatctcatcgctattggactgattgaagataccggcgaacgccggggaagaacgaaccaaataccggtatatcgccttgttggtattgaagaaagtgttgccgatgctgaacacacccaaaaacgggaacattaccaaaaacgggatcgttcgaaaaaagcaggaaacgatcccaaaaaagggattgtttgtaacgaccccgaaaacgggaatgttaccgaaaacgggatcgttcaaggtaaggcacccgaaaacggtgttgttaacgccagtgaaacgatcccgtttttggaaggtaacgatcccgaaaacgggatccggaatctatcaggaatcttaaaaccaaaagaaataccccccatagccccccagaccgaacaaccggtagagaactttgccgacttggcgggagaggtgttggattttctgaattcaaaaatcaacggcagaaccccgaagcgtgccgacaccttgcgagaaatcaccgaacggctggcagagggaaactctgtggatgagctgaacctcgttgctgaacaccgtgccagccagttgctgaacaaccctgagttgggccacatgcttagcgccagaatgattttcgacccaactcgctttggggggtatctggcggcggcgaaagcgtgggatgtaaagcgagtcaaaaaatcggcaatggtggccgctgtagaacaacagcgccaagagccgccggcgggcgatgtgccggagattgattttgatgactcattcgctcggctgttcgtagaggggcttcctccagaaaacccagcagaaaaatcagcgtggcaacacgttcaaaaatatggattcagcgcgaatgatgaagatggtgcacgccgtgaatggcgcgtcattctgactcgcgcttatgccaagacgagagggggtaaggcgtga

SEQ ID NO: 437287 - DNA, 633 bp, Serratia marcescens
gtgagcaatatccctaaagcccgctactgcaaggtctgcaaggcaaggttcaagcctgagacgatttttcagtggtggtgctgtgaagagcacaaggccgattacgccgtgatgttggtcggcaaacagcgagaacaacgtgccaaagcgcagcagcgcaaactggataaagcccagaaagaggaacggaaacagcttcgagctcgcaagcaggcgctgaagacgaagccaaaatggaaagcagaggcccaggtggcgtttaaccgttatgtccgcatcagggatgccggcaagccatgcatcagctgtggttccactccggcacagaaatttggcggcacgatggattgcggccactacagaacaagagggtgtgcggcgcatctggcgttccatttgcacaacgcagcagggcaatgtgtgcgttgtaaccgtgaccagtctggcgctcagaaagcctttgagaagggactggttgaacgcatagggcctgaaaaggttgaggcgctgaataataacaacgcgccgcgcaccttcacgattgagtattaccagcgcattaaatccatattcacacgtaaggctcggcggttggaaaagcgccgggcgaatcaacttgaggtagcagcatga

SEQ ID NO: 437288 - DNA, 837 bp, Serratia marcescens
atgagacttgaatcaatagcgagatatttttcacctaaatcacccatgctgaatgattcaacacccgcaacggcttcggactcgttaactatcagcgatgtgatgggggcgttgggcatgtgccaggctcaagctgagttcggcctggctgcgttcctgggtaaagtaggcataagcgaaacggataaggtgaaagctgtagtgctgctggcaaaacatggcatggcgcactgcgacaaggttgctgcaatccgcaagctgccgggagaggtaaaggccaaagtggtgctcacgttggctgtgtttgcgtatatggattactgccgtagtgctgccagtgaggtgccctgtgatgcgtgtgacgaggggttcatagaggaacggaagtttgtcatgaataaattggctcaggctcacgacacgtcctatagctttgttcgtggagacctacccgcgtcaattacgccaattgaaggccgggagatgctggtgaagcacatcttctatgatgttacgcgcaaggtgtgtccgaaatgtaacggaaagcgagtcatcaagacggcgtgcaatgactgccgtggccgctgcgtggtggtcgacaaagctgagtcagaacggcagggcgcaccagtgaagaaaccatgcaagcgctgttctgggcgggggtatgagcgcatgccatcaactgatgccttcagagccataagcaaccttaccgaaagcatatcattggatacctggaagaaatccgtgaaaccattttatgacgaattgataaattgcttggaggtggcggagtcgaatgctgatgtggcgctaaggatgaaaacagaatag

SEQ ID NO: 437289 - DNA, 975 bp, Serratia marcescens
atggctatttataagttttacaacatccagcttcttccgatagataaagatgtaaaagaggtagggcatgaaggatattgtcgtttattccaatcagttagtgatctggttaaaaagtgtaaattagaaaaacaaaagcttagttcaattgcggtgtcaatgagaggggacatgttttttgctccctttgatgtgacgagttatgagtacccaggtttaaacgacaataaagttattgtgtatggctcattcctaaagtttgatgatgttaatgaactagtggatacaaatagtggtgagactgaatttaaatccaaaggaaacacaagtagcaagcgctataatttggagtttgtatttgatccttataagcatattcttgctattaatgatacaagaggattgccaaccagaaagccactaatttccgcattgatgcaaatattagatagccatgcagttaatttgtttgaaagccattgcctggaaatcgaagaactgacctctgctgattccattagcgagtttcttaatgctcctaaaaaaggttataagaactatgagggtattgtaacgttttcaaactctgactcctttgatgatggtttggaaatggagatgcttgtagatgcagaaaaagaactgaaagataaaaaggtagctaaatgggtagttaattataaaagctttcctaagtcggttatgaatgatcttcctgtgcaagcaaaagttcaaatggcccttgctacaaaatatgggaatgctgaggtttcatatttggatgagcatggggcaaggcagaaatatcaaatggaagactatcctgtgagagaaaagttagttgaaaaggatattcgtgggagacgaaatagggctatggaaataaaaaacctgattataaaagccataaaaagaacaaggttgaaatttagcgcgataaaagaaaataataatttcctagataatcgagactga

SEQ ID NO: 437290 - DNA, 582 bp, Serratia marcescens
atgaaaaccaagatgtataaattgataagaaaaatacctgtgtttggtgccatttttcgcatcgtcaatgcttatgcttatgagggtaagatcgagtgtaacaaatgtattgctcctgctcgcatgtggtggagtaggattttaaaaaagatgacctatgtgatcatttttgttgagttattatttctaataagacagggttcagtggctagtttaacatgggaaccagcagatgccatactatctgtgtttccaagtatcctcggttttggtattggtgtttttgccttgatgtttgtaatgcccaatagttttgttcaatttataattgaaagaagagagaaattaaagtttggtcccgaaatagtgccagttgacatggcatacccacttgttgtttttacattagtaatggtttgtgcggttttaaacaaaatgtttccgagcgatttatttaagtttgttagtgctttttctttcttttatggattagcaatggctcttgaattaatttcatttctatttaacgcctcgtatttaattcaaaaaataaattcaagtgaaaaaaataaccctcgatga

SEQ ID NO: 437291 - DNA, 435 bp, Serratia marcescens
atgaaaacaagcgctagcggtagagagttcatcaagggtttcgaatcactgcgacttaaggcgtacccagacccaggcaccggcggcaagccttggacgattggctggggccataccaagggagttaagcagggggaccgcatcacccatgagcaggcagagcaattcctctctgatgacttggccgtgttcgagctgacggtaaacagcgctattaagcgtccaatgacgcagaaccaattcgacgcgatggtatctctggcgttcaatatcggcggtccgaacttcgcacagtctaccttggtgaaaaacttcaataccggtgatgtgcagggtgctgccgaccagttccctcgttggaaatttagtgatggcaaggttatgcctgggctggtgaaacgtcgtgcggctgagcgtgaaatgttcttgtcatga

SEQ ID NO: 437292 - DNA, 555 bp, Serratia marcescens
atgaatgtaacaaaggcacaactggcggatctcttcgaagtttcaacgcgcacgatcaccacatggcaatcgcaaggaatgccggtagtggccggcgaggggaacggcggtaaaggcggggaaaatacctattcgacaaaggacgttattacctggtacgccgaccgcgaggcctcgctagaaaacgagatattgcgtaaagagctggacgccctgcagcaaagcggggatgaggccttgcagcccggcactatcgattatgagcgctaccgtttaacccgcgctcaagccgacggccaggaattaaagaatgctaaagactccgccgaggtagtggaaaccggcttctgcatgtttgtcctgtcaaaggtcgcgggggagattgccggcattcttgacggcattcctctctcaatgcagcggcgctttcctgaactggaaaatcggcatatcgaatttttaaagcgggatgtggtgaaagccatgaataaagcggctgcgctggatgaaattcttccggggttgctgaatgagtatatcgaacaaacggattga

SEQ ID NO: 437293 - DNA, 696 bp, Serratia marcescens
atggaaaggttaaatcgtgcccgtactgctcaacaaataaagtcaggtgttataaatagtcgagacgatgaattatcgttgtcaatctctaaactgccacctaccgataaattaaaactctctgctttggttcctgtagttaacaatggggtgactgaggcagcaaaaatacaagacatcactgatttactgggtggcggggggcctgttgatatcacgttagaccctagtgcgaataatctgctgagtaagagtgatgcgggacttctgttagaccgttacaaggccccttgcgtaggcattactggcacgtatgtaagtaccggtgcggggcctgattttactcaggataacgcgtttagtgagactggggggatttggcgagtcaagaatacggtaatgcttagccgggtgccaagtacggccagcggcgcggtcatcattgatatcaccttgggtaaaataccgtgtgacacgtcagggataccattgcaatacacgttaagcgtgggatcaaaaaataaaagggtcggaggggtttggcgtcagcattctatcatgatattggctattgttggtgctcccgttaaattaatggatgtggcgtccggcgctttagaggattacaaggaagggattgcgtggaatgtcagcattaaatatacgtttggggacatggccccgtctattccatag

SEQ ID NO: 437294 - DNA, 765 bp, Serratia marcescens
gtgaaatggtgtttggttaatatgagaatatcaaattttgaagatttgaagattgagttgaataagacaaaatctgagagcttagacttccttagtaatataaagcaaataaatgattttttttcacaagaggacgatgagcagaaagaagatatgtttagaattatatcaataccaatgatatattcttcttgggaggggttttttaccgaaacaatgtccgtttgtttgaattctttaaagctatcggatagggaggcctttaagtattctccggaaataagggccctttggcttcaaagggaacctttctttaataaatatatagacatgataaagaatatatatgacattgattctcatagaagcatttcccatgctggacctcagtttaaaaagaaggtaactaaaggtactttcaaactaacaagtgaagtaattaatcatattgatggattcaacaagagctctttgtctgactgtgatgtgtctgaattggttatgacattctccaatgttaatgacgccgttgttaaaatcaattttgatgccattggattagactattcaaaccttgatctttctcagttaggtgaagtggttggacttcgaaattctttaggacatggtgagttcaaaagtaaaatccctccgagaaaattcaactctttaataagatatatagagacattgattaatgatttgcatactagtgctgaacattggttagataaactagaagatgaggttacaaagcctgattaa

SEQ ID NO: 437295 - DNA, 1116 bp, Serratia marcescens
atgacaaaagatgttaatgagcttctaaatcagattgatgaaaaaagggatgaggttgttactgactcatatacggtttcttggcgtgaggttattaatctctataaagataatgaaataacaatctcaccagattaccaaagactttatcgatgggataatgcaagacaaagtcagtttatagagtcattgcttctcaatataccaacccctacgctttttttctatattgacacggatggtaagcaagaggttattgatggtttacagcgagtaagcacgataattcgattctttagtgaggaaatttttaagaaagatgaaattgaacatgcaagagcagatggttcacacaataatttgaaaaatccaactgagttagaagacacacctataataactacgttgtgtggttggactgcaaaagagcttccagaaaaagtaactagaactataaaaaatgcacgtgtgaatattgttatattggagcaggaaaccaaacctgaaacaaagtacaatgttttcaaaaggttaaacaggtctggtgtgcgcttaagtgatcaggaaattagaaactgcatggcgagattagcaggtaatgattttgctgatcgtttaagaagattggcagaaattgaaggcattatagaagcgttgggcttgaatccagaaagtcagaagtctcaaggtgtagaagaggcattgttaagagttatggcttcattaacttttgctgacaaatttaaccacagcgtatcagagttcttagatgagtttatgttccatgctgcggctggcaacgttattgatatcaactttgaattgaagttaaaaagaacttttgatttaataaatttggctcatttatccgggaaagcgtttaagttttggaaagatggccagcctagtgggcagtttagtaccaacttactagatatcgtagcggtaggtatatttaaaaatgttgataatttaacacctgctgaagtgaatagaaagtttatgatactcatgaatgaaaagaatgatgagttaagagagtgtaccggagccggttctaacacgagagtaaaactcaataagcggatagcgcttggtgaaatggtgtttggttaa

SEQ ID NO: 437296 - DNA, 1188 bp, Serratia marcescens
atgtggcatccttactatgcggggtattctgagtcattcgttttatctgtactaaagtcagaaaagcttgcgcaaaacgctgttgtattggatccatggatggggagtggcaccactggactggtatgccaaaagcagaatgttaattgtattggggcagatattaatcctatcatgagtcgttttgcagcagcaaaaaaccacatgataatagcggagctgaatgcgaatggccttgttatattggatgatatattaacaaggtatatcgtaagctccagaaggttggcaaagaaaataaagaatagccatattgcaattgctcatctgaagaaaatatttgagagcataagctctcattttgttgaggaaacaccctcattggaaatggattctttagcttctttttattatggggtgctgtttttcacctcaaggaagtcattggatatcaattccggttcaaatccaacatgggttattgataaggaacttgaaaataaattaattaatgtggatttaattggtgattttaaatctaatttcatccttatgcggcaacagttaaatgattatttttatggcgtagacacaaaatcaaactataaagtcttaaacgcagattgtaaggcgttgcctattggtgatgaagaaatagatatggtaattacatcacctccgtatttaacaaggatagattatgctgcatcgacaaaatttgagctgcagttgacatttgggcaagaaggttatgaaagtattagaaagagtagcatgggaacaactactgtcccaagagtagctgatccttttaatcctcaatggggggagatttgttctggagtattagagcaagttgtcgcgcatacatcacgggcatcagatacatattatataaaaaataaattacgctattttagtgatgcatattctgctctgcgtgagatatatagggttcttaaatgtaatagctccgcatacttggttttgcaaaactcgtattataaagagattgaaataccgttgtatgatatttactgtgaaatggcttgtaatatcggatacacatcaagtgaagtggttaaagaagaaaaactacgaactagtttagggcagattaatcctaaatcatcattttatctaaaagataaaatttattacgaaaagataattaaggtaaccaaatga

SEQ ID NO: 437297 - DNA, 246 bp, Serratia marcescens
atgatgcgctgtcctttctgccgcagcggagcacacacccgcaccagccgctatctgacggaacagaccaaagaggcttactaccagtgccagaatattgactgctccagcacctttaagacgcgagagagtatcgaacacgtgatccgccagccattaccgccacaaccgctcatggcgccggtgtcaccgccaccacagcagcgaatgctgaaccgctacggaagtcaccaccacgtacattga

SEQ ID NO: 437298 - DNA, 750 bp, Serratia marcescens
atgaccaccaagaccccgcttgtcgcactgtctgaacgcttgttgcagcaacaacccggctttgatgacgcacgtagcagtttttacaaaaagaaagcggagctgaatgatatccgtcaggtcattgcgaccacacacgataagaaacgcgcagcggaagagcaggccgtcatggacgacaaaggctggcgtaagcggttccgcaaagcaaaaggcgaactgacgccggagatgcaagacctgcatacccaacgcatcatcaaacgtgaactggtgaatgaatacgacgggctgctggccgaactggaagatgataaggaagaggcgatggttgcggtctgcaacgccgccagtgcttatgaccagaagcaccgtgcgcttttgcgcacctactccgaaatgacgctggaggttgcgctggatcaagcctcaatcctgatccgcgcggttgctttacgactccatgcccagtcgcgtctcggccacgatgaacagcagttccataacaacaacctgtgcgcgcgagatccacacggtgtcgtgatgcaggaagtcatgcaggcactggtcgaacgtgccgctaatttccacctgagcacggagagtgaccctattcttgaggcgattggattgtacggcccggatttcagtggccttgaccagaggctaattaacagtccggccgcacggatcaaactcggcaaggaaatcgctgcccgcaaacaagctaaagcggaagaagaggaataa

SEQ ID NO: 437299 - DNA, 162 bp, Serratia marcescens
atggccacgctcagccgcacagaactcgccgaacttaatgtgttctccatcatttgccgcaagaaaagtttccggttggcggccgtggagctcggcgtcagcacatcggctctcagccacgccatgcgttcgcttgaagagcgcctcggcgtaaagctgtga

SEQ ID NO: 437300 - DNA, 192 bp, Serratia marcescens
atgattattaactatatcttagagaatgataaatacttcattggggtgattatatcagcgctaatgataatgttattctccattttctcattcaaaattataagtaagattaaaaatttaataacaaagcctggttttatggtttttattacggctatattttcaattttcatttataagctttgtaggtaa

SEQ ID NO: 437301 - DNA, 1005 bp, Serratia marcescens
atgaagctcattgttaattgggatgatcaccgacactcagcactatttttgatgaagtttttcatgaaaattagttatactaagaagcttccctcttacttcattcgaaactatgaaaattattgctgcggagtgagcattttgactgagctgtctcaatggatattaggggtcgcagcttcagctgggaccctaggttttattgcatacatgatgcggtctactctgggccgctttttcacaaaatcagttgaatatcagttcgataagaaatttgaaaaatttaaggctggtatcagaagtaacgaaaaagagttagagcaaatcagatctttcttggttttagctcgaagagaacgtgactcgacgcttcagtttaagcgttttgaggcagcagaagctcttatgcgtttacgccaagcactttatgaattaaaaatgcttgtggagtatttaagttttcttaatattgatgaggttatgaaaaatggcgatgatccaaaaatcactgccttcattaatgctttaatcataccaatcaatattgatggaaagcttaaggcatatagtgaaatagacaaaaccttacctgagctatatctaagtgaatgttctaaaaaaacattcgaaatatacaaaggcatcattttaaatgctgtggctacaatgaaaattcttagcattcctttaaggaataaaccagatttaattaaaagagacagtctcgttaaaaagataattgaagccgtaccatcgtcaaaaggtggttttgaaaagtatggtgatagttacgcattctattggctggattatttttactcagaaacattgaacgaacttcgcaatgaattactgggtgctgctaatatgaccagtgatacagaagcagctacacgcctggttgtggactctttccgtgcacagacagagcttcgttcatctctgcaacagtatgggctttcagaagcattacttaaatcagatgccaatgttgaggtaggttaa

SEQ ID NO: 437302 - DNA, 1197 bp, Serratia marcescens
atgatatcagatgaatttattgcaattggagtgggatgtggtgatgcattctttctccgaaggaacgaaaataaaatattagttgatggtggaaaaagtaaagataaattcccgaatctattattcactaatactggagagaaagaggttgatataataatttgtacgcattgtgatgcggatcatgtcaacggtttgttaggttattatagatctaaaaggtcaagtaaagaactatggctgccaggaagttggagccatagattggatgacttaatcgaagaatcgatccccttcctatttgaattatataaaaacattatagattacagttcagaaatggaaatttcagatacaactacattacaggatataggggattattacagcaagcatagttcaaacaatgatcatgatttagacaaaaaaccagaagcaaacaacagagataaaaaaacaaaaaaagaaaatgatacagatatttcaagaaggaaagaacacctagacaaaataaagtctgcaatcaataccctttccaacgcaaaagaagttaattcacgcattccattcatcgttcctaaaagaatgaaaaacagaaaagacattgaaaggatctttaaagcagcgattgagtctgcagctaacattttagaattggcagctctagcatacgaagcaaattcaaaagttcgatggtttgaatactcagaataccaagctgaaggcggtgaagattacttacaccccgttaattcagtagaaatattagcatatcaaaaggatatcactgccttatgttacttatcgctgacaaaagcaaatgtagaaagtttagttttttattcccctgatgacaaatcagattgcggcgtcttattttccgcagattcaaatttcacatttaaacaatcgctaagtttcatacaaccaaactcaattattacagccccccatcatggatccgaacacaatataaatacatatattcagctagacaatcacatagggaatgataatatatttgtaagaagcgattcaaaatcgaatagcagaccttgcaaggaatatgtctctttattgcagaataaacactgcactatatgcaataccaatagaaataacaaaaagacaccaataaaattcattgtcgcgaatggaaaatggatgactaccaataagctttgctcatgcacttaa

SEQ ID NO: 437303 - DNA, 1023 bp, Serratia marcescens
atgcggcagaaagagtacaactaccgtctgatgcaggagcaacgcaaccagcgcctgcagaatgaaatgccggtggtgcagacgctttacaaacagctggaggaaaccggcaaatttgacccgcaactctactcgcagatctctacggacaacccgctgaatccggggcgcttctttggacaggatgccatcaacaacgtgatggaagtgaaccgcgttatgccgaaggtactcgccggcgagatgaactacaacgatccgaaggtcatcaagctgatgaatacggtgttgtcgcctcatattcagcgcggtattggtgaggttgacccacagactggcaagaagattgtcagtaaggagctgggacatattggcgtaagtgaggatggtaaattcatcattcctggtctgaaggtcaaatatgacgatggcaccaccgctgagaaaccgatgactgaactaggctctgctgacgaacgcgacaaccaaattgcccatatgccagtagctcgattcatggacgagatccgcggctacggtcagatggttggtcagattaaccagcctgaccgagcggcattcctcaataacatggtcaacccaccggataaaacagccacccgtgaagaggcgaaaggactccgtagggatttgctggatgtgggcaaggcgcgtgctagagcactgtctgaagcgatggataaggatgcaatagctgggatcaatgctcagtatgatctgttacagaatcaggtgctggaaaattacgggcagcctggcaagactgccgattcctttgaggattttgcgaacgaatatcaaaaagaaaacggagctccccctgatcctaagaatggtcaagatattcagttctatcagcagtggaaagctcttaagcagagtggttcagtagctcagtcctttgcaaaggatcagccactggcctcagcatcgcgacaagtggctgatagccacaccgcccaacaattgcgtgagttccgaaggctgtcgcagacgaattga

SEQ ID NO: 437304 - DNA, 255 bp, Serratia marcescens
atgccgatcggtatgcgcatctactcactcgatattgtcagtgaagctttgggtgccggcgtcacggtagcgattaagtccggcgcaaccacgctggtagctgctggcagtcatgctgcagcagtagcgaaagtggtaccgattgtgccgtacagcacagtcaccagtggcgagaagattaccgcaacgctttctggcggtgatgccgccggtcgcctgatggttaatgttaaatatgtagcgaccggctactga

SEQ ID NO: 437305 - DNA, 1029 bp, Serratia marcescens
gtggacatcgataatttaacgggtaatgagacagcagaggaaattgaagcactgctggatagtatgggtgaggtggagatttcagacgcacccgtggttcctgccggtgctgaaaagcctggaatgcagactgccgcgactgttgaacagattaaaacgggcgagactgaagtcacaccgacgccgggtgaaactgttgagcagatcggagctggcactgcaactactgaagagctgccgaaaggtatcgctactcaggacggcaaacacgtcattccctatgccgtgttggaagctgcgcgagctgagagccgtcgtaatgctgaaagccagcaacgcgcgagtattgaactggaacaaaccaagcgccagcttcagatgcttacgcagcaggttaaccaagcgggattgaccccagcgaaattacctgaagaatcacaaatcactcccgaacaactggctaagattcgtgatgaattcccggatctgtccggcgtgttcgaaaccttggtgcagaaaattgattatctgcaaaaggcgaatccgggtgcgcagactgcaccggttgaatcaacaggtaatccggttactgatgcgctgaaggccacccctgaacttgaaggatggcagtcagcggatccagatcgttttagcctggctgttcatctcgatgagaagttgcaagccgaccctgcatggaaagacaagccgttaactgagcgattcaacgaagtggttaagcgcaccaaggcggcttatggtgagagcgttgaggcgcctcaaactcctgccaccgttcaagttgcacagcctaccgctgaagagctccaaaaattggcagatgacaaattagccgcggctaaagcttctgccgcaatcccgacatcaccgtctgatctgggttcgccgagtacgcatcaacctacgctattggagcaagccgctggcgctgatcatcagcagttgacggcaatgttctccggcatgagcgaggcgcaaatcgacgcgctgttagagcagtcgctctga

SEQ ID NO: 437306 - DNA, 810 bp, Serratia marcescens
atggcgttaatgtaccactactgctcaccgcaaacatttctacaaatcatggaaaaaaatcatctttggctatcttctatgaaaaatatgaacgatttttctgaaggcctatgggttaaggatgcgtttcataaggctgttaccgaattaaggaagttatatgggcatgagtggggttgccaagtgcatgataatttcattggtaactatatgccaagatatatctgctgtttctcaaaggatggagattcactaagtcaatggcgagcgtatgcccaggatggagaaggcattgccattggtatagatgatcgtgaacttagcattaataaacactcattaactccgaatttagaacctttaaaaagcttagctgtagaggatgttaagtacatgagtgaaagcgaaattatagaggatatcatacggttttctaaagatttgaataaaaaaacaccatcaaaaaatgacgcatatttggttgcgaaatatgctattgataattcgataatagtaaaaaaccctgcttttaaagaggagaaagagcgaagggtgatcttttcatatgcacctagcattggttatattacaagtgatggtagaagcagcaatcctttaggtgaaataaaatttagaatttctaatggatatcttacgaatcactttgaatacaacatccctttaacagccataaaagaaatagtgttgggcccaaaaaataagttttcacaatatgatattgatttgtttttgatggcaaatgcaagatatgatgttaatgtaaaacgctcatccgccacctaccgataa

SEQ ID NO: 437307 - DNA, 624 bp, Serratia marcescens
atgttgaaaagaactcgctcattgtatgaaaactgtattaggcccgaactgaacatttattcagtcggtatgctttttatgttcgcgatttctatgctgctgcttcttttcggcttcttgggtggagctgaattcgtcgcctttattatagcaagcgctgtactggctataataattaaaatgctgcctgagattagtgagttctctttggccggcaatacggttaagttgaaacaaaaattggatgaggcggaagacttaactgaaagtttacggaatcttaagcgaattaccttaaacaccatgattgagttgattatgagacatccaggggggttcggaagcgtttttataactgatgaacgaattccagactttattgatttctataggcaggttgaaggcactgagtttgagcgtgatttagctgaaaaaattaaagagcgtgcgcaaatttttgaaagtgtactggaacgtgaagtgagtaattatcatacacatgcggcggtagatgaagtgcacagaaacgactaccgagagaaatatgaagaggataaatcgaatttgaaggttataaaatcgattttggctcggttgaaggacctattgccatcagcaaactaa

SEQ ID NO: 437308 - DNA, 813 bp, Serratia marcescens
atgaccaacgcaatagaacaactcataaaaatgcacgatccgcgctgtgtaagcgcagagtcaatgaatgtaggccgtggacgcgcttccctgaccagggagcagatcctcggggcattagctgcagtacagcaccggcattcagtcggccttgacctgctgatgtccaagtaccgcaacgattataaagcggaacagcgggtacgtgcagcgatcaatgaatgggtgcatcaacgaccacatcctgaacgcgcgacggcagcatgtcagttagccctcagtatcgcgcttgagcgaaaccttccagcccaggtggcgtacattgcagcactacttcgccgatatggcccgcgaacagcccaaacgcggaaaaatattgaagcgttgcaatccgagattaaagcgctggagaaacggcgcagccaagcacagatcaccgatattgaatatcacgaggttggcttcgaaattaccgatataaccaaacggattgagcgggagcgggcagcacttcgagcttggtctgaacaacacgccgctacaaccaatatatgcccacgttgctccggtaccggccgcatgattaggcagcatcctatagagtgcgaagagtgtggcggtaaaggcaagattccggccaatatggaacatctgcgtaagtccatgcgtatcataggggctgaggtagagcctggtgaatgggcaagccgttataccgagttggtgaaacagtgtatggattggatgttcgtcgaagaatcaaatgcgattggtgtactatcagatagaattgctatggaaaaaggtgagtag

SEQ ID NO: 437309 - DNA, 645 bp, Serratia marcescens
atggaatcaattagcagtgaaatattcaacatcctaaaatatttacttccggggtttgttacggcttggatcttccatgcttttacttcgtatccgaaacaagcccaatttgaacgaattatccaagctctaatattcactgtatttattcaaggtggagtggctgcattaaaattcactttaatttacttaggtaaatactattcttttggcgcttggagtaataacgtccatctcgtttggtcatacgctgttgctgtaattttcggtttcacatttagcacatttgcaaacaatgatcgacttcacagtatacttaggacgctgaaaatcacaaaagagacttcctatcattgcgagtggtttggcacattcaactgtaatgagtcttttgtaattatacacttgaacgatgagagaagaatctttggctggccgaccgaatggccatctgatccaaccaaggggcacctcgttttaatgaatccaagctgggtgctgcctgatggctatcaggatatgccaacagtcaaattgatgatatttaatatttctgatattaaatgggttgagttcctacaagacactccaggagtagattatgtcgaggaaagcaccgacaccaccaccgtatcaacaaattga

SEQ ID NO: 437310 - DNA, 273 bp, Serratia marcescens
atgcacacagccaacaatccataccttacccgtccaccgatggatgctctgattgacatgaagttcattacgactgactgtcttttaagcgacaaatggatctaccgtctcatttctcaggaacgatttcctcgtccgattaagttaggccgtatgtcacgttggcgtgcagccgactattatgattggcgcgataatttagaaaaaaaatcttcttctgaatacgataaacaaaggttggcagcaaataagatcagacaggggaaacattaa

SEQ ID NO: 437311 - DNA, 855 bp, Serratia marcescens
atgaaagagctaataacgatatatgaggcggcagaaagcagcggcctgtcaattaatgatatatttaatagtgctattactggtgaagtaaatatacttactagattagaatctaaccaatattcaatttttgatgtggagttttctggaaatatagaagaattagatgcatggttagacagttcatacattgacaatgttcattgtttaactaaatcatcggggttcactgaattaaaaaaaagcccaagtgattggtgggatgatgggccaataataacttctgaaaattgtgataagcgttctttgaaagaacgagtaaaaccaaatggacagaatgttatctatgttaatgctagtatttctggagtgtggagactgacggaatcatatattaaaaaatgtggtactctgggatacaaccctcgagcgaacttcactcaccttcaaccatatggtgaacttaataatttaaattttttgcgtttatattctaacgattttgaaggttgttgcaaaattgatgaactatatcttactgaaagtgatttcaatatcattattgaaggcgcgttagatgggaaaagattaataaataaaaagaaatacagttacagatctcaaaaatcagctcaaattgagcgacatgcggctaacagagagcgcgtgttgttggcagctatttcattatataagcgcttcccggatgaatgcagtaaaaatccctctcgctggggatcgctgctatgggataagcggtttgagtactggagtgaagtaggtggggcaccactgtcaaaagatgaaattatcaggttacttagaaaagcagtgaagcctcctcttataaaataa

SEQ ID NO: 437312 - DNA, 1716 bp, Serratia marcescens
atgatgaaaatcaataaactatacacgcaaccagaaacatttaccccggtacgttttttttccggtataaatttaattattggcgaaccaaacccaacatcaaataaaaccaatggcgtcggtaagactttacttattgagtttataaatttttgtttactaaaagaatataagtttagccgtatatcaaagataccctcttctagctatccttcagaaacaactatttgtcttgatattgaaattaacaatattgattacacaataaaaagaaacattaagaatcataatgaacccacaataacttatttaggatgtgagaaaaaatttgataacctgcaggacgcaagcgactttttgacaataaaattattcagtaacaatacaaccggtgaaacgccatcttttagatctatgatgggaccactaatacgtgatgaaggttcagagtttaaatctattgttgattgttatgatacaaacataaaagccccggcaaacttaactcctcacttatatttttttggattaaaaataaaaaattataaagaggccaagaaattaataagtgaaatagacaaatcaacgaagattaaaactaagttaaaaaatgatatcgagctgctgagcggagtaagtgtatccaaagctaaagctgagctcaatgaaataaactctcaagttgaaacaattaattcggagatggagtctttaaataacaatgcatcttatgatttaattaaagatgaagtaacaaacattgaaatatcaatcgattcattaagaaatagaaaatacattttaaaaagcgaactaaaaaaaatcaacttactcagcggcgataactatataaatgactctgaggtcgttgacatctacaacaagttcaaaaatggtttgggaacagctttaagtaaggaactatccgaagtcatctcttttaaaaaaagcatagaccacttccaaagcaaaatccttaatgaaagaaagagtgtaataaataacgaaatcgttgagatcgataaatctttaaaatcagccacatctatgtacgcagaaaaaatgaaaaccctagatgcctcaggttcgttaattaacttaaaacagcttattttaactcatcaaaagaaaattgaagagcagtccatgctgtctgccatgctgaaaaagtacaaagctgaagaagatgaaataaagcataagaagagtgaaaagtcagcactaattgtagatattgacttagacattgctaataacaaaacaacaatagatgaattccaagaaacaatacttcttatgcatgagtatattttcggaaataaaaaagggtattttgaaataagtacaaatgagaaaaaaagcatattggactttactttaagaattgatgatgatggcagccacagcaacgagagggagaaggtttttttctatgatatcagtctgttacttacagaaaaaacttttgaaaatcatccgggtttattaatacatgataatattttcgacgtagataatgataccttaataaggagccttaattttctcgcggaaaagtcctcgtgtctaaaagattgccaatacatactaacgttaaacagcgataaactgagtaaactcgataagaaaaaactaaaattggatataaatgaatttaagagagtatctctaacaaagaaaaaccgcttcttagggcgagtttatcaacaaaaataa

SEQ ID NO: 437313 - DNA, 345 bp, Serratia marcescens
atgatttatgtcaatgcgcgattcttaacgcaggatttgacaggggttcagcggttcgctcaggaaatatgccttgcgctgagtaagattaggcatgatatcgtttttgtctcgccaccaaacattattcaccacgatatcgcgtcgcaattgaatgttcaggtggtgggtaagaaaagcggtcacttttgggagcaggtagagcttcctgcttttttaaagaaaaataaaagcccgcttctaataaatctttgcaatacggcgccgatcttttatcgtaataaaattgttactcatcacgatgttatatataaacgctatccgcaaagttactcaattttctaa

SEQ ID NO: 437314 - DNA, 669 bp, Serratia marcescens
gtggttcgacaagcaggtgcagaagtcggacggcgacaccgaaatccgcaacatcaaaatcagcaacccgttgcgagtgacggccatcacctgcgacgccgacggcggcaacttcggccgtttgctggaatgggaggacacctacggccagccgcgcaaatgggcgatgccaatggagatgctgagcggcagcggcgaagagctgcgccgtatcctgctggtcaacggcctgtcgtacatcagcaccaccggcgaggcccgcgcccggctaatggagtacatctccctgtgcaagccggagcgcaaagtcacctgcgtgaacaaaaccggctggcacggcgacgtctatgtgttgcaggacgaggttatcggcgacggtgcggaagcggtgatactgcaaaccgccagcgtgcagggcaaagattttcgcgtggccggtacgctggacgactggcaggagcagattggccggtactgtgtcggcaactcccgcgtggcctttgcggtcagtctggcatttgccgcgccgctgctgcgactggtagggatggacggcggcggttatcacctcaagggcgaatccaccgacggcaagaccaccaccatgaaggcggccacctcggtgtgcggcggcccggattactggcacacgtggcgctccaccggtaa

SEQ ID NO: 437315 - DNA, 330 bp, Serratia marcescens
atggaaatagggcggaaagtcaaaatagatttttccaagataaaaacgctggatgatttttatactgagttgtctggtttatttgggtttcctgatttttttggtaggaatatcaatgcattaattgattgttttttcagtttgcgctatccgcaagatgaaatgacgaagattcatgtagcagcttctgagtatttattaatggagcttcatcatttctctttagcatcagaggaaataaaggaaacattaatattcactattgaaaatgtaagcttaaaatgcaaagaaaaaggccaggagccttcgattgttttattgttgaggtag

SEQ ID NO: 437316 - DNA, 861 bp, Serratia marcescens
atgggatgtcaattatgggtgtctgatgtgacagggaaacgaagaaatggtactgatttcgagtcattgaaaagtatctttatagactcagtgacagcaaaggcgatttgtgaacctctacatgcttgcaggttaacagatcatgcagctgatgtcagaagagttcttattgaattagactttgatagtgccggtgtgatagatgctaacgaaaggatcattgggtacataaatagagatgaactaaacgatgggttaatatctgaacaaatccaagaaataaaggttggtttattaatttctgactcaactccaatagctgacatagttcacgaacttaaggaaagaaaaacactattcgtaaattacggaagtaacatatcatatattataaccagagcggatttaaataaaccacctgtaaggatattcatttttgggatgatatctttgcttgagatgcatttgaacttttgggtttcgcatttttgtcccgaagaacattgggatagatctataccgccagaacgtatcgcttttgcacaccagaaattgcaggaagcgaagaaaaatagtgaaaatactgagttaacccttgttaattacttacagttctgtgataaaaaagaactactcagagattcacctgcttttattagtgagctagctgtatcgaaaagtcaattaaaagactatttgcgctgggctgaggggatcagaaatgatattgcgcatagccaaaactctatatttacaaatattgggatagagaggctaagcgatgtgattatttttattgagaagtttttgaatcggtcggaagactatttatcctacttgaaaaaagtcgacgtaacatag

SEQ ID NO: 437317 - DNA, 741 bp, Serratia marcescens
atgctccagataccgagcgactccggcaaatacggcgtgtttgaaagcctgcacgggttcggcagcggcaaggcgctggcggaacattttgaagtagccaccgcgacggtgtacggcacgccgttccgcgcctggctgaaagccctcaccgccgatctgaacggcatgacggccaatgccaaggcgctgatgaaggagtacacccagttgctgatgccggataacgccggtaatcaggtcgggcgggccatcaaccgctttgcgctggttgccatggccggggagctggcgacgcgactcggcatcaccggctggccggagggggaagcactgcgggcgacccagacctgcatgcgggcatggctggctgaccggggccacagcgccaatcaggaagatattgccgcgctggagcaggtgcgcaccttcttcacggccgggcagttcagccgctttgccgactggcataacgagatgaaccgccccggcaacatggtgggctggcgcaaggtggagaaaggccaccatgcccggcaggtggaggcggtgacgacgttctatgtgatgccgtccggctggaaagaaatctgcaagggctacgatgcgcggaaggtggcaaggctgtgtgcagaggccggttttctggttccggccaaggacggcaaaatgcaaacggccacccgcccgccagagatgggcgtcaagaagctgtatgtcttcaccagtgacgtcttagggtaa

SEQ ID NO: 437318 - DNA, 558 bp, Serratia marcescens
atgatgaaaatcaataaactatacacgcaaccagaaacatttaccccggtacgttttttttccggtataaatttaattattggcgaaccaaacccaacatcaaataaaaccaatggcgtcggtaagactttacttattgagtttataaatttttgtttactaaaagaatataagtttagccgtatatcaaagataccctcttctagctatccttcagaaacaactatttgtcttgatattgaaattaacaatattgattacacaataaaaagaaacattaagaatcataatgaacccacaataacttatttaggatgtgagaaaaaatttgataacctgcaggacgcaagcgactttttgacaataaaattattcagtaacaatacaaccggtgaaacgccatcttttagatctatgatgggaccactaatacgtgatgaaggttcagagtttaaatctattgttgattgttatgatacaaacataaaagccccggcaaacttaactcctcacttatatttttttggattaaaaattataaagaggccaagaaattaa

SEQ ID NO: 437319 - DNA, 960 bp, Serratia marcescens
atgataaagagcatggagtatataacgaatataagtaacgggttagcatatttatcgaggtgtgtggaagctcgctcatcattaaatcttaacgacataaatattcattctgaaaacttttacaaagacttgtttaacttgatctacgattacaatttaaaaaacctcaacagcattaatcaaaatattgcatctatagatctagcagatgaagaaaaaaaactgtgcattcaggttacatgcacaaatacaattgaaaagataaaaagcaccgttgataaattcataaaagagaatttgcatgaaaaatatgaaactttacaggtactaatactaacaaaaaagaaaaaatacaaaaccatagagtatgggaaggacggaatctacaaattcaacattaaatccggcgttattgattaccgagatgtattgagacacatccaaaatttaacatctgaaaagcagttcgaggtaaagtgttttctcgaaaaagaactgaatctcaaggaaacagataataccccgaaagaagttaagactctcatgcatatgataaagatcttaagtaatgacgatcatccaaacgctggaaatggattcgctgaaaaacctgatcctgagaataaaatatataaaagattttctgagcattcaagtaccataatagagaagtatactaggttagcacctatgtatggagatatattacaatgtataagaaatgaaagtgatattgggctgataaagcaaaaaaagatggagatcttcttagaaaaacagagtaacgaatttttaatagcagaacataacaatcctctacttgctcttgaaaaattaaagatcttttactgcaataaagtatcacttattgataatgaatacgatgattcagctatcgagttctttttagttgataatctttttcggtgcactgtttttcccaataaggctatcgcatga

SEQ ID NO: 437320 - DNA, 567 bp, Serratia marcescens
  misc_feature (539)..(548): n is a, c, g, or t
gtggttattgcaagattaggtttgaatgttaaaaagacgattatgttgggcgacaatgcacacagtgatgttgctatgtcgacagccagggggctgtttgcgcatcatttgcctgtggatcaacaccgatatgatgagagcctactggcggatcgtgagcgccttgcggtggagaacaaagttaatcgggtgatcgctgaagataatttcagctttaactgggtaagtagtgcaatttatttattcacgcgtcggctctattggtctttggtgataaaccaagctaaaaacgtttatttttttgcaagggaaggcgagtttcttcaaaaggcgtttgacaaatttcaagctagtttgccgaaaaatttttcgcgtattactagtcattatatgtatgtgtcgcgtcgagcaacctacttgccttcattggggcctctgagtggcagcacattcaacaagttattatatcagtatggttcatgtagcctgactgcctttttgaaaagcattaatctcgatgattatgtatctgagcttannnnnnnnnnagaatatctatctcaatga

SEQ ID NO: 437321 - DNA, 2199 bp, Serratia marcescens
  misc_feature (2186)..(2195): n is a, c, g, or t
ttggaaataaaaatttgggaaggcggattacaggcacaagaactgaatgctattgaaaaaataaaatcgacctttagcccaccaccgccaaaactgcctaacaatggcaaatcaatgcaagaacaattacgtaacatatcaggttcaagcatgtttccctggaaaggatatgctggctttcgatttgtagatgtgaatagtggatacgagggtgaattcgacttagtgattgttactcattgcaatgtgctaattatcgaattgaaagattggaacaatgggaaggttacttccagcaaggataactggtacaaaaactctcgcttaatggggcgttccccagtaagcattacccgcaacaaaaagtttttattagataataaaattaaacgtgaaagacatcgattcactaataaagatttccctccttcagttgagtttcttatcgtcatgactggtaacgcgaatttctcacaattaccggatcatgaacgacttcacacactaagcttagatgattttcttttattatccgacaaaaaaacattccaaaaaaagttcagaccacatccagctgcacaagtattaaacaaagattttcatgtgtttgacgacttattcaatattaatgcaacagcacctaaaccaattagcgttggtgggtataaatcaaacacattaatatttgatgagcacccaacaaagctttatcgagagttcttggctatttcagaagtatctaggcaagatgaggcactgttgagagtatgggactttagtaaatttctcggagttaaaggaggcacaccagaaggaaggtatagtattgtctctcgtgagcgtgaagttcttggttatattaaacaccaaaaccatgatctctataaacactgtttacgttctttaactagcatacataaagaagatataacaacagaattcaatgaaatatttgaacttcccccgagccataatcgttttaatgaatttattgggaaattcggactcaacttttcagattccgatcgtattaacttagttaagttgttgatggcgaaatttgctgatttgcataggataaaaatagcccacagggatcttgcagatcatagtttatggatttcaccaggtaaagaaattgccttatctaattttatctcggcatatcaccaacccataggtacagttggtgactacagaagccagttgtcagttattggtacaaaacccgataatgaactaactccattccaagaagatgttaaatccattggtattatttgctggcatatactatctaatttgagaatgtctgagattagtttagaggaaatgcaaaagaaactctctgcctccacattttggtatagtgaaattttaatcaacgccatcaatgggaagtattattgtgacgcaggagagctttttgatgctttaaaatcaatagagccaaaacttgataactattttgacttcgatgattctgaattagaaccatttagaagaacaataaatcactcgaggcagtatagagatgatgagtttatagttgaaacagatgagaaggaagtctatatctcaggcgatctcatagttaaagcctggctcaatataaatcctactaatgatgagccattactaggctcaaaaatagtacactttctcaaacgtattgaacgtattgcatccataaaccctccttatataccttgcattagagaatatggcatagcgacaaaatcatctagcctctttcttgttactgacaaatgctctggagatttttttgatactgtgcaagtgacgcaggatgaaaaaataagtattataaataagttgatagctgcaattgaacaccttcatggattgggcatttatcatggcgatttacaccctaaaaatatcctagtgaatggcgaaggcagtgaaattcaaatcataattattgatattcctgacttttgtttagatggtaatgaacctaaaagccctcgctattgtccagaacaatttgacagttgtactggatttgaaagagataactttgcagttatgaggttaagctgtgagttactcggtatcgagtggggaggtaattctgaacactttaccgagctagctgattgtataaaaaatgaactacaagaccgtgatgctgggttcaaaggtttacttcgttttaaacnnnnnnnnnnataa

SEQ ID NO: 437322 - DNA, 555 bp, Serratia marcescens
atgctctatgagcattataaatgtaatgttgaaacgcttaaagcagctgctaacaaaagggatttaatgttccttatgctaattttgtccattatgcttatagcgatccaaagtgtgaatgctgaattcattaatggactattagtcagcgtaggcaagctcgatgataaaaggctccctggaaacgcattactgttggtaacctttgcattggcttcatttgttttattcatacgctatacccaagcatgtttctttatagatatgcaatataaatatttacacacaattgaaacagaattaaattcgttattcccagatacacagttgtttacttttgaggggctattttacaaaaatagcaacagcttttacagaaaggctgtttcatttttctataagcgagctttttcggttattttgatttttttcttgattgtgaaaatgatgtatgaattagatgggaaaacccattttgatatttatttttatctcaatggagttgtttttattacctacttgatatatgtgtttatttatcttttcaaaaggtga

SEQ ID NO: 437323 - DNA, 564 bp, Serratia marcescens; identical to SEQ ID NO: 436692

SEQ ID NO: 437324 - DNA, 774 bp, Serratia marcescens; identical to SEQ ID NO: 436691

SEQ ID NO: 437325 - DNA, 762 bp, Serratia marcescens
atggatgaactcttagatgctgttaccgagctagtttgtctggtttctcctgaaaagatacaagcgatcgctggccgaattcgacggactgaagcctgcaaggctctgctggtactgccaggtgcagtaggaactcccaaggcaagtaacgctattgagagactagcaattgcatggcaaaacaccatggtcagttcagatgaactagcatctatgcttcttgctgcaagccatgtttactttaaagttagctctgagcaaagtactgaacttgtatggactggtccaacaacaccttttgtatctgttcgccgtacagagcaagtgctgctacaaataatcaatgcggcaaaacagtctttatttattaccagctttgttgcctatgatgtgtcgagtattgtgaatgaattgaatacagctatagagcgtggggttaccattacaatgttgctggaatcttcacaagagcatggtggcagtatcaatattgatataatcggtaagatgcaggcgcttatacctggcgcacaggtttacgcctggaataataaaaacaatgaattttcagaaggtcgtgtgcatgcgaaagtgattgttgccgatggtcgcacttgttttattacaagcgcaaacctaactgggtatgcaatggagagaaacattgaagcaggagtactcattactggcggagggattccagaagcccttagtgatcatctgtactctcttataaacactaatatcattagtctgatttaa

SEQ ID NO: 437326 - DNA, 195 bp, Serratia marcescens
gtgatcctgcaagggatccccaaaccggctaccgccgaattgggctttatgccgggctttaaggacagcttttccgatcggcaggtgacggcgctggtgaattatctgcgccaacgctatgccggcgacaaaccggcctggcgcgacgtggaggcgcaggtggcgcggctgcgcgcggagccggggaatcattaa

SEQ ID NO: 437327 - DNA, 1953 bp, Serratia marcescens
  misc_feature (715)..(724): n is a, c, g, or t
gtgatcgctggcctgttgcttagaaactttaaaatatttagaaaccagcactacatcccaataatgcttgagaacagctccagttatttcattggtgaaaatggcgtagggaaaagctctgtacttttggcacttgataacgtacttaacggaacggatattaataaactagatataaacaatgaagctagaagtcaagggttcgagactagggaaccatttattgttccaatattcattattgagaaagataaaataaaaagaaacccagtaatgaacaggattcttgaagtgattagctcaatcacttgggatgtaaaacctgaagattttaattctctgcaaaagagtttagcagaaaagtttacagaacataggaaaaagctgtccaagtatcataataaaagaactcattacctcatcccgataggtttcattaaagagaaagctactgatatccccattgcttcaatgtcaatatttgaatcaatagagaaatacaatgagaaaatagaagaattgttcaccgcagagttaataccatggttaaaaaaatataactttgacgatgtgaaaacaagaatactcgcatatataaaagattactataattatatatacatccctgcagagattactgttaatagctattcaaaaatcgaaggggagttggcacaatcgttacttggagatgacatacaatcaaaaattgagnnnnnnnnnnaatatatagagagtatatccgagcttttagataactcatacagatttaaaaaaccttcacagcgacaaacacaatttactcaaaggcacatgataataaagatcattgaaacatatttcaatgataaaatattacatcggaaaaaggaaggaagagacactccaataaataatttgagttcaggtgagaaaagaagagcgctcttagatctggccactgcattcctaaaagcgaatcctagcaaagcaattaatcaaactatttttgccattgatgagcctgagttatcattacattccaccgcttgctttgaacaatttgaaaagataaaaaaaatctctgagctagatatacaaacacttgtaacaacccactggtatggttttcttcctgctgctggcttgggtacggcgatctatatatccccgaatcaaagcttggtgaaatcactcaatttaagttattatagagacgaaataacctcgttagtcaaagactcaaaaggtagttatctcgatactctcgaagtaaaaagcaatcatgatcttgttcaatctataatcgcatccattactacaaaaaacaattacaactggttgctctgtgagggtcgaacagataaaaaatatcttgagtatcatatggatgctataggcatcaaaaacctaactgtcctttccgttggaggttctttcgcactaaaagacatttacagttatcttgtaatggctcttaaagacagaaagaaaacgataaaaggaaaggttttctgtttactcgataccgatcgagcgtatgataaattcaaaagttctgacgagattccaaatttattaatacgaagaatattattaacagaagacagatcgagagtcgaagttttaaaaacaacggacaatagagtcagccctccaactgaaatagaagatgcgttagaaggggtatttttccatgaagccatgatgtctttgaaaataaaaggcgatagcagatttgactttctcgacaatatagagctattagattctgaagtttcaggagggatattagatctaacaacaaaacagtctaggataattcaagggtattttaatgaaaatggaaataaggaattattctgtgatgagtattgtgagattctccttgattgtgatgaagccaggacaccaaattggctgcttcagattgcccattttttctgtcccgatatctatgatcgcttgctctaa

SEQ ID NO: 437328 - DNA, 426 bp, Serratia marcescens
atgacaaagaacgcgcaacgcatcctgtatcggctggccccctgggcgctgccgctggcgctggtgatcctctggcagatcgccgtcgaaaccggctggctgtccaaccgcattttgccggcgccgagcgcggtgctggccgccttctggagcctgagccaaagcggcgaactatggcagcacctgagcatcagcagccagcgcgcgctgatcggctttgccatcggcggcagcatcgggctgatcctcggctttattaccgggctgtcgcgctggggcgaacgcctgctggacagctcggtgcaaatgatccgcaacgtgccgcacctggcgctgatcccgctggtgatcctgtggttcggctgttatgagtcagtaagaatgataaagagaaataagggaatttgcggaaattttcgggaatag

SEQ ID NO: 437329 - DNA, 222 bp, Serratia marcescens
atgagaaaggttatcgttttcttcaatggtgatgccccatatttaattaatgtaggggtgcatttagcgtcactacgacttgcatatcatgatgaccaacatgcggacttgccgattcgtaacgctctaattaacagtgagcatggcgagtgcgcttatgtttcagatcgtgaagtagaatttgccgaaattaaagaggcatttgagaagctggcaaaatag

SEQ ID NO: 437330 - DNA, 1263 bp, Serratia marcescens
atgaatggtattgcgcgttatttgaattatcgttatggcaaccttcggcaaaataatgactggaaaccgattaatgaacctaatattgatattttagttagcaatactttagatgaactggaacgacattctgtctattggcggcaaaaccgctctgcttccgaagtgctacaagggtgctcacatgtagtaaaagatatcaataatgcggaaagaataacctttttatctattccctatttagccgtggaggaaagagatcctatctcaggagatggtgtcacttttattggtataggtattaatatgattcgagggcatatcgctgatgcccttatggttatggcaataaagttacatgaagaacatatttcttggcctgaattattgttaccgacactacaccaatttgctactaacgagcatcctgcagtgcgagctgtagtattacgccgtttacctcatttacagcatattttacctgaggttggttgggtggtatttgaattaataatgcgaaaaggtagcgaacgactttgggatatggcagaacgttgtctctattatacctatcatcatgagctcgacagagtttccccatggttaaataagattgtatctgaaggtattaaaggcggattgcaagcgtggggaagaatatctgcattggctgtattgtcagaaaaaatagaaagtcgtgattttatcaaacaattaaaagaattaagcgatagtgatgcatgggaaggtgctgtcgatgtttggacacatcgtgagaattttcaacggcatcaggatttatgtcttgctggtttggatgctgcgttaagtgatgataatcaatattcctcagaattaatagcgtcaatgggtggtatttttagagggaaagagccggttattattttacccatgcaagtgttagagcgttatttttcattagtatttacgagttcagagtcatcgaaaattgatttgttcgattttggctcgtggttaaatattgtttcatgcatagaaccattgtatgcattgagggctacggagatttatcttgaatatgctcgtacaacaaaagtctatttacatgattacaataataatttaatgcagctattgactcgtttatttgcacaagcagaagagcaggaagaatcggatggcggagaaatgctatatcgagtggttgttttgcaagacactatgttggccttgggtgttgatggggtgagtacatggttagaggccgctgagagagcataa

SEQ ID NO: 437331 - DNA, 1005 bp, Serratia marcescens; identical to SEQ ID NO: 236913

SEQ ID NO: 437332 - DNA, 309 bp, Serratia marcescens
atgttcggattctttagaaagaaaagacctgaaactgagcccgggcaaggttcctcaatcacggcaaaacagtttattgcgctgacgctgagtgatgaaaagttgtctatgcccgtctatcttccggggatccgtaacgaagatgattgcgaggatattgggctaggtcctctcattatatctggaatgtggatcgtgccgttggcacattcagcctctctgttaacggtaaaacgattggtcacctccttgagccatttgtgccccgagataaccccgcatatgttgagatccgtgatgaggaaatga

SEQ ID NO: 437333 - DNA, 834 bp, Serratia marcescens
  misc_feature (774)..(783): n is a, c, g, or t
atgatcaaatattatgtgctcctccgtgctatcactctatcgctgaccctcctaggatgcaccgggggcgcgcacggtgcgtttgtgttgtctgttatcgagccgcccgagtatccgggggcgtacttctcggctgtgatcgttgggggcgacgaacacgacgcccgccccaatccttgctacggggcgcgtgggtgcgacattcggtttttcaccataagcgcgtcgtggctgccgaacgggcgaccggggtataccaccaacgacgatgatgttgccccgtgggggatccagacgtgggagtaccctaccattggcgaatggtggaaaaatgtgcctgcctcacgtcgggcgcgggtcggacgggactggctacctctcgaacacggtacggatgcttgtgtggtgctggccgcgacgtcttgggccgcaccgcagatggacgaggggacaataatgtcaaactgcgcaaagggggtggtgcaagcgaaaagttgcagcgtcgctccgccgagcattgatgtgaagatagagtggagacagggcgaaacaaccggagggtacccggtgtcaggcgtgtcgatcttgtgtgacagtgatgcaaccgtaacggtgggaaccaacacgggcgaaataatcccgctgaacaacgatacgcgcaccactgctgtcctcgattggggtaatggatacggtaagcccggccgatacacggtccgtggcggggcgccgacgcctctgccgctgatggtgaaactcgccggcatggcgacnnnnnnnnnncccgcgggcgtgtacggcggggcatcagtggtgagtatcagctatcaatga

SEQ ID NO: 437334 - DNA, 708 bp, Serratia marcescens
atgcagccgcttaacgctgcgccgcagttgccagcgggtgcgggtaaacaacaaaaaatcatccatgtatcttgcataaaaggttccttcctgcgcattaaaatggttgtcaacgtggtgcaacaagctgccgccaatcaacgggctcagcgcacagccccgacagatgccgtttggcggagtataaaactcaccgccgtcttcgacgctgtaatgcacgtattgctgcatcacatcaaacaacaccgggtcggccacatgccatttcagttgattaatcacctgctgtttacggatgtgccggtaataaccgcgaatatccgttcggtagacgaaagcgtattctccgctggccaaggcttcccgcacttccgctaccgaagccacactaccgccgtgcccgcgcaagtgcaggcaacgagccggttttggcaacaacggttccgccagcagtgcggcccacttcaatatcagcgcatcctgcgcacaccactgcacccacctgcggccattgcgtcgcaatacctgcatcggcgccagtcggtaacgcccgttttgcagttgctgccagagttgcttctcttgctgcgcccagtgaaagcgcagatgccagatatccgcagtgggcggcgcatggcgacgacgttggcacagccagcgccaggcggcttgccatgccgttccgcggttattcatactccaggctaa

SEQ ID NO: 437335 - DNA, 621 bp, Serratia marcescens
atgagcaaactgacagacgaggcctgcggccgtgattgccaaatcaggatccccgacatctgtaaccgaaacccagagacaaccgtcgccacacattaccggctggccggcacctgcggcacggcaataaaaccagatgacacgcaggccacgtgggcctgcagcgtctgccacgatgaagttgaccgccgcacgcgccttatcgacgcgaacgacgcatcgactgatgcacgccgaaggcgttatgcgtacgcaagaaattttgagaaagggaggaaagctatgaaattggatatgtacgaagtgctgtctcgttggggcgtgtgggcgcgagaaagtaatgacattgattacttgccaatcgctgcagccttcaaggggctactacctcatccgtccaatggtaaactgtcctgctgcgacgggtgtgtggcaagactgaagcagtacaagccggatgagtacgacctggtgattgcgcaccatgtttatggaatatctttacgcaagattgctagggtgcgtaagtgctcagatggaactataaggaagcacatgcagatagctgaagggtttataagtgggtgcttagccatgcttgaggtgaaaattaatatttaa

SEQ ID NO: 437336 - DNA, 579 bp, Serratia marcescens
atgtttaatgtcttttctcacttattaaaaccatttggttaccttttcataaaaggaattagtggtaagcacgcttatgattggtatgcccctgcttttataaccctgctttcggtactgtttttttacttttccgatatcactgcaaatgaattacttaaagatggcggttttgttaagtctgtctctgggttcatctcaaacctacccggtttttacatcgctgcactcgctgcaatcgcaacctttaacagagaacaaattgacttccctctcattggttcgaatggaactccatttattaaaatcaaacttacgaaggaaaatggaaaagttatcaacgctcaagaaaaacttactagaagattatttttatgcatgatgttttcattcctgacggcacttagtattagcattgtgatgtttaatgcctttgccactccgttgataaacacgattaaaaatgacaaggcaagctggtgttatattattgtcttcacgtttttatcttggcaaatgttagtgtcaacctttttcggtttatattatttaggtgaccgcatccacgtcaatcaataa

SEQ ID NO: 437337 - DNA, 1029 bp, Serratia marcescens
atggccacattggatgcatttagcagagttatcacgcatcattcagtcacagttgatacaaaattccgaactcaaaaaattgatgaggacactaagtcaagttgtacttgcccagtaccaacaatgcatgagctctcatcattgatacaagctcagaaaggcatgaaacatagctatgaaaaaggtgacgtaattctcactttgcaggatgtgaagttatacactaccagagatgataaagctgcaactcaccttgggttattgatcaatgcagtagataaaaatggaagtactacggtattaaaaaacatcaaaacaaatgctcgaaccgaaattgctccaaaacacgatgaaggggaaggttatgaagtttcatctcatgttgtcatatcattagatggcaatatgaggagttacgatatgagtttcatgcccatccctggagtgtctacggcaagaattaatggcttcttagatagagtgctgtatgaggtggcaaaaaaaaacgaggggaaatttacatctaacacagtgaccaatgttgtctcatcttcgactaaaaaaccaatcaaggttttatacaaacccgtgtttgatataagtggaaaattggatcaggaacttttcaataaaataaataaagaaggtctttctgatgtaattctattcaaaaatgaatatagaaccattaacgctcctgatgtaaatgcagctattatccctaaggaaagcacattaagactagtcccgaaccatggttcaaatgatgtagttggatggttgcgctcaatatcaaattacttcaaagatgatgagcatggtgggtttgatctaataaaaataaagttcaaagaacctgagactggtgcaataagacaagctgatttccaaacctcaaacattaagcttgatagtctagaaaaaacatttatcaaaaaaagtgttctgaataatttttcatcgcgcttaatggactcttatgatactcttaacaaagagtttgtagttaaaatcatacaaagcatgtga

SEQ ID NO: 437338 - DNA, 171 bp, Serratia marcescens
atgaaaatgaacgacagctactcgaatgctacctattggctcgcgggcatacttgcctttttcgccgggttaacgctgcaggactggggtttcatcattggcctggccgtcagtatcgccttgggcatattgaccaatactttcagaacgcgactagcaacgccacgttag

SEQ ID NO: 437339 - DNA, 240 bp, Serratia marcescens
gtgagtggcaacaaccaggtattggcgattaatcatactgacaatgcggccaaaggcgtcgggttgcagattctgcgcaacggtgccccatttgatttaggcaacaaaattaatgcattagatacaacgctgctcggccagaattcgctttcttttctggcaagattttaccaaacggaggcgaacataacgccgggagacgtgagcgccatcgcccaattcaccgtttcatatcgatag

SEQ ID NO: 437340 - DNA, 1770 bp, Serratia marcescens
atgagcgtagagaaactgattaccgatcatatcgatatctggtcctcggccctgcaaactcgctccaccgccgggcgaggcagcaacggcaaaatcgacctctatggcattaagaaactgcgcgagctgattcttgagctggcagtgcgcggtaaactggtgccgcaggatccgaatgatgaaccggcgtctgagctgttaaaacgtattgctgccgagaaagcagagctgataaagcaggggaagatgaaaaagcaaaagccgctgccggaaattagtgaggatgagaggtcgtttgagttgccgagcggttggggatggacttctttgtatgaaatttcagagatcaatccaaaaatagacgttgctgatgatgaacaagaaatttcttttgttccaatgccatgtgtttccacacgttttgatggtaagcatgagcaagaaatcagaacatggggtgaggtgaaaaaaggttatacccattttgctaatggcgacattggccttgctaaaataactccgtgctttgaaaatagtaaggctgtcatttttagtggtttaaaaaatggtgtgggggtaggaactactgaattgcatgttgcacgtccttgtagttctgaaataaatcttaactacatatttcttaatattaaatcgccaagctttctgagtgtcggcgaatccaaaatgactggttctgcaggccaaaaacgtgttccgaaaagtttttttgaaagttatccgttaccattccctccacttgatgagcaagcccgaatagtcgaagtgttttcccagttgatgactatatgcgataaactggaacagcaatttataaccaatctggatgcccatcagcaactagtagaaatcctgctggcaacgctgaccggcagccaaaatgccgaagaactcgccgaaaactgggcgcgaatcagccaacatttcgacacgttgtttaccaccgaagcgagcatcgacgcgctgcggcaaaccattctgcaattagcggtgatgggcaagctggtgccgcaagatcctaacgacgaaccggcttctgaactgcttaagcgtattgagcaggaaaaagcgcagctggtgaaagaaggcaaaattaaaaagcaaaagccgttgccaccaattaatgatgatgagaaaccgtttgagttgccagaagggtgggaaacagtttatatgcaagatataagcgagttaataacagatggtacccatcagacgcctaaatatacagaaagcggtaggccatttgtttctgctcaatgtgtaaaaccattcaggtttatgcctgggaattgtcgatttgtttctgaagacgattatcaacaatacatcaaaaataggaagccggaattaaatgatattttactgtcacgagttggtgcaggtattggtgagagtgccgtcatagattcagatttggaatttgcgatatatgttagtactggattgataaagccaataaaaagaaatattaattcacattatttagtgttatggctgaattctccgataggaagaggattttcttcaaaatacacatatggcaaaggcgtatctcaaggtaatttaaatttgtctttgatcaggtcttttttgatttctcttcccccaaggctagaacaagagcggatagtctcgagagttaatgaattattttcaatctgcgacactctcaaatcccgcctgcaatccgcccagcaaacccagctgcacctggcggatgcgcttaccgacgccgcgttaaactaa

SEQ ID NO: 437341 - DNA, 1305 bp, Serratia marcescens
atggcacacaaaagaataacaaccctcgcgccaaaacgtttggttaagctgattaatggtgtaatttatttttctgccgtgccattttcattctcgcatatggccatggcggaggagcagttcaacacctccttcatccatggtgatgacaatattgctcaggtggcggcgctggccagcggagacgatattttgccgggtaaatacccgtttgatatctatctcaacggacagcgtgtcgatcaccgcgagatagagttcaagaaagaatccaaagactccccggtagcgccgtgcctgacggctgtggactaccaggattacggcgtaaagctgcccggcgatctgaccaccgccggtgccgagcaatgctacgcattgccgcaacagatctccggtgccaagctgagctatgacgctgccgtacagcgtatggatctggaagtgccgcaggtgtttctgatcccgcgcccgcaaggcgccatttcgccgaaagtttacgatcgcggcatcaacgccggctttgtaaactataactttagcggcacccataaccgctacggcaacaaccagaacgacaagacttctgactattacttcctgagccttaacaatggcctcaatattggcgattggcgcctgcgcaacaactcgacgctgaaccagcagtcgggtgccggcacgcactggaagaacatttccagctgggcggaaacggatatcgtttctctgcgcagccgtctggtgatcggccagaccaacaccaacaacaacgttttcgacagcatccagttccgcggtgtgcagatgtccagcgccgacgacatgctgccggaaagccagcgcggctatgcgccggtggtgcgcggcgtggcgacgaccaacgcgcgcgttgaggtgcgtcagaacggctataccatttacagcaccaacgttccgccagggccgtttgcgctgacggacattttcccaagcaccctgagcggtaacctggacgtgacggtcatcgaagccaacggctcgagaacctctttcgttgtgccattctcctcggtgccgaacatgctgcgcgaagggatttggaactatcagctgaccgccggtaaataccacgacggcaccagccgctatcagcctaaatttgtgcagggcaccttgtcgcacggcatggcgtatgacatcacgccttacggcggcgtgctggtggcggaaaactatcgttcagcggtcgtgggcctcggtaaaacctggggaactggggggccgtctcctttgatatgtcctattccgacaccaacctggtga

SEQ ID NO: 437342 - DNA, 690 bp, Serratia marcescens
atgtctcagttggttcacgattgtccccgctgtggtgccgagcatattacctttaacgttaaaggtgagttgctcataggatttcgttttggttggcaagaaaattttgaagtttattgtgagtgtttacactgtcatacaggcacaatttttcatgtggccaagacagagtctaggtttaatggtgatgaattttaccctgaaagaattcatggggttattaatgacttttacagggttatggggcatattacatctaaagattttgacgctgatgaaccgcctgagcatcttccggaaaacatagagaaagcttacgttgaaggggcgaagtgcatgactataggatgttataatgctgccgccacaatgtttaggctatgtcttgatttcgcgacaaaatcattagtccctgataatgataagggagggccaccggctaaggttaaaagaagtttgggtttaaggatggagtggttgtttgataatggagcattacctgatgcattccgagagttagcggattgtattaaggatgatggtaatgatggtgctcatgaaggaatattagatgaggcatcagcaattgatttgcaagagtttacagaaactcttttagagcggctttatacggagccagaaaaaataaagttggctaaagcacggcgagcacaaagacatgctaaataa

SEQ ID NO: 437343 - DNA, 567 bp, Serratia marcescens
atgcacacacaggaaaatctaagatccttacacgatgaaaatttccttcgatataagaaacacttgcatcttgagttagatgttacatcaatcatactcaagggacatcttttcgttgaagagttattgacagagatattgaagcttcattgtcgcgatagcaaacctattgaaaacatccaactaagcttccaccacaaactaaagcttgttcaggcgctttttggctcccatttatcagggtttcaataccctgaaaatatttggcctgtattagatcatctaaatcagctgagaaatgctttagcacatcagatcgattcgccaaaagcaattatcaagttgaactcctttgttttttccttttgccagttagttaaccaagaggtaaaagttaaagttactgaggaaattccactcttagataagtctttggccaataaactaatccacataattttctctctactaggttacttagggtgcattcatggtgttgcttacttaaacccaccatctatttcccactcaaatgcaacagtgaaaatacctgacgcgattgattaa

SEQ ID NO: 437344 - DNA, 1008 bp, Serratia marcescens
atgcaaattgataagcgttgcttagaagatggcaccattaatctggtgtctgtttctggtggtaaagatagccttgctcaatggttattagctcgtgaggctggcgctgaagttctggtggtattcgctgatactggtcacgaacacccgcaaactatggagtatctggattatctagaaagcaagttagggccgattcgtcgtgttaaggccgatttctctgatcgcataaagggcaagagagaattcatagctgagcgttggcctgtgacgctggtaactgagtgcgggtatactgaggcacaagccgccacaattatcgaactggcgctaaaaacacttcacccaaccggtattccatttcttgacctctgcatgtggaaagggcgcttcccttccactaaagctcgcttttgcactttcgagttaaagcataaccctatacgtgatcagattgtcattccactactggacaaatacgacgaagttattagttggcaaggtgttcgtgcagaagaatcttctgcgcgtgctgcattacctgtttgggaagcggatgcggacaatacccgtggcctgaacatttaccgcccgattcttgaatggaaacacgctgatgtttttgctatggcgaaacggcatggcatcaaaccaaatccattgtacgaacaagggtgtagccgggttgggtgtatgccgtgtattcacgctcgtaaatctgagctggccgagatattcagccgctggccggaggaagttgcccgtgtagcggaatgggaaaaactggtggccgcatgttcgcgccgtggcaattcaacgttctttccttcgacgcaagatcctgcaaaggcagaacgccggattgcatgcattacagtggagtctcacggaattgaaacctaccgcgattgggctatgactacacgcggtggccgccagtttgaccttgtggccgcgatgaatgatcgcacagcctgcagcagtatttacgccggtgtatgcgagtga

SEQ ID NO: 437345 - DNA, 585 bp, Serratia marcescens
atgagcaaacacctaaacttcacttttcctaaatcaacctcagagactctcgatagagtcgtgtccgcctacggtttcagcatgaaaatgcagcttgccgaacacttgggcattgccgccagcagtctatccgctaggtacaaacgtgatgtttttccagcagatatcgtcttgcagtgtgcgttggaaactggaactagcattgaatggctggtaacgggaaaaggggttagttttcgggatgtcaaatcagacacactaaatctaattagaaaaaaactaatcaacggtcagctgcatgacgctgatagcgttctgttcgacagagggatattccttgatccaaacaatctcccctctgcgcctatgtgcttgatccacgggagcactcagtacattgttgatgagcagtacgacgaggttcacgatggcttatggctggttgaaatagaaggcaaggtaggcatccgcacgcttacacgcataccggttaagaaagtgcgcattagcggtcatggagccgcttttgattgtgatattgatgatataaccgtgcttgggcgcgttatgctgacggtggaataa

SEQ ID NO: 437346 - DNA, 225 bp, Serratia marcescens
atgtctgaattaaaatatagtggcaaggtaaaaacatttgattcgttcaaaggatttggtttcattacaagagataaggggaaagatgtttttttcttttatgaagagatctctggtgaggataaattccttaatataggagatgaggtggattttacaattgaggataaacctaaaggtccaagagcctataatatttcagtgcgtaacagcaataattcataa

SEQ ID NO: 437347 - DNA, 1173 bp, Serratia marcescens
atggacaaaccctattatcctcaccaacctatatcgacaattgaatcactggctaggtgcttaggtgtaactacgattacacttaattctatatcatctgctattgattcatcttacactgaatttgtcatatcttctaaaaataaagagcgaacagtttatgagcccaagtttgaattaaaaagaattcaaaagagaattaataatcgtatttttgagaaggtagaattcccaaggtatttgcatgggggcataaagagtttagagcataaaagggactatgtagagaatgctaaaatgcactctaatacatcagttgaaactataattggtttagatgttaaaaatttttacgataatataaaaaaagaaagagtgtatattatatactcacagttcttcaacttccctcatgaagtttctgagttactaacacagctaactacttataagaacaaagttccacaaggtgcctgtacttcatcttatctagctaatcttattttctttaactctgagtacggtttggtatcaaagcttagaggaaagaaaataacttatactagattgcttgatgatgtaacaatatccgcagcaaaaaaaatttctgatgaagaaattactaaagtaattcgagatgtttctgctctctttactaagcatggcttgaaattaaatagtggtaaaactagggttcatcatgataaatatgctgccgacagttttgaagttacaggactatgggtcggaaatatagctccgaaaactagacgtcaagagaggagatatataagatcccttgttcatgcatgtgaaaatgaatatcttgttgataaatactcaagtgattaccatgccttatggaataaaacctctggtctagttgctaaactttatagactagaacaatcgaatcataaagcattaagagagcggcttggtaaaatattacctctatttgatgatgtcgcaaaaaggaaaattattattgattgtaaaagcatgttaaaaatagccccttgcagtcttaattacggcaagttaaaacgattgaatttaatatattctaaattagggatcctttctaggaattataagtgtgaggctaagttatggcgcaaaaaactcaaggctcattttgttaagcatccaaagaaatcggaggtctggtga

SEQ ID NO: 437348 - DNA, 3981 bp, Serratia marcescens
atgggcatattggttaaacaacgaggtggtcaggaacaagacgttaatcccttgccgcaccagcgccgccgccaacgcctcggcttccgtcaacacttccggcgcaatgatcgccagactggcgccattcaacagggctccccacatttccagcgtgctggcgtcaaacaccggattggcggcgaaagcgaagcgatcgccgcgttcaaacgacgcaaaacgattgttgatcgccagccggaggatgccttggtgcgtcaccatgacgcctttaggcgtaccggtcgagcccgaggtatacatgatgtaggccggcgcgtcgccggcgcgaggcaccgccggatcgtgggtcggattctgccgcagccgatcgatacgcaggcaggcgatctcgccggctatctcgcggtcgatatcgcgatcgcacaggatcaacgacgccccgctgtcgccgatgatccacgcctgccgcgcaacgggcaggtgcggatcgagcggcacataagcggcccccgccttgaggatcgccagctgggcgatgaccagagaaacgctgcgttcaagcgacgtggccacgcgatcgcccgggcgcactccctgtgcgatgagttggtgcgccagttggttggcgtgggcgttcaattgggcgtagctcaggctgtcccgatcgttcaccaccgcaacggcgtccggcgtgcgctgcgcccactgttcaaacaggacgtgggcactgctctgcgccggataaacttccgcggttcggttccagccgtacaacaacagttcgcgctcggcagccggcagcagatcgagatgcgacgcaggctgcgtagcatttgtcgccatcgcccgcagcacctgcaccaggtaaacgccgtaacgttcggcggtagcgcggtcgaacagcgccgtggcgaagttcagcgtaccgctgatttgctcgtcgcgctccgccagatcgagcgtcaaatcatacttggcgatctgatagcccaactcggcactctcggcctgcagcccaggcagcgagatatcgcgcaccgagccgtcctgccaggccaacatcacctggaacagcggggtataacccaggtggcgcggcggattgaccagctccaccacctgctcgaacggcagatcgcgattttcccgagccgccagcaccgcgtggcggatccgcgcgatcagcgtcggcagatccggatcgtcgcgaagatcgatgcgcagcgccagcgtgctgacgaagaagccgaccagcgattcggtttccagccggccacggttggcctccggcgtaccgatcaccagctcctgctgcctggccatgcgcgccagcaccaggctccaggccgccagcaccgtcatgaacaacgtgccgccatgctgccggctgaactgccgcagcgcctgcgtcagctcggcgtcgatcgcgatcggcacctccccgcctctgaaagactgcaccgtcggacgcggccggtcggtcggcagcgtcagcagcgccggcgcatcgctcagcgtttcgcgccagtattgcgcctgcgccgccagccgctccggcgtcagatagcgacgctgccaggcggcgtaatctgcgtattgcagcggcagcggcggcagcggatcggcatcgccgcgacgcaaagcgccgtacaacgcccccagttcacgcagcagaatgccggtcgaccaaccgtcggaaatgatgtgatgacaggtgagcaggaacaggtgctcctcatccgccaggcggatcagcgcggcgcgcaccagcggcccctgcgtcaaatcaaaaggcgcctccgtcaggcgctgcgccagttgccgcgcctggctctgagcatcctgccgcccacgcagatcgtgaaccgtcaacggcagcgcgtctgccggcagaatgtgcgcctgcggctgcccctcgacggtgacaaaccggctgcgcaacgcttcgtggcgggcatagagcgcatccaggctctgccgccaggcgggcagatccagctcgccgcgcaggctcagcgccaggggaatatggtaagtttcactcaggccttccaactgcgtcaggaaccacaaacgctgctgagcaaacgacagcggcaacgcggcgccgcgtggcatagcctcgatcggcggcagcgcctcatcggttctccgcagttgctgcgccaatgccagcagcgtcgggttggcgaacaggacctgcaacggcagctgccattccatctgctgcagacggttggtcagacgcaccgccagcagcgagtgccctcccagttcgaagaagttatcgtggcgcccgacccgctccacgttcagcagctcgcgccagatcgccgccagcagcgtttcgtgttcaccctgcggcgcttcatacgccgcctggctctgcaccccctgcggctccggcaacgcccgacgatccagcttgccgttcggcgacagcggcaacgccgccaccaccacccaggccgacggcaccatatagtccggcagcgccgcgctcacatgctgccgcagcgcgcccgccagcgtctcttccgccacgtccgcggccggcaccacccacgccaccagccgtttgtcgtcgcccaccgcccgcgcatccaccaccgcttcgcgcaccgccgggtgcgtcgccagcgccgcctctatctcgccgcattcgatgcggaagccgcggatttttacctgctgatcgttgcgccccaggtactcgatgtcgccgttcgccagataacgcgccacgtcgccggtgcggtacatccgcccgcccggcgcgaacggatcgctcaagaagcgctccgccgtcagttcaggccggttcaggtagccccgcgccacctgcaccccgccgatatacagctcgcccaccgcccccagcggcaccggctgcccgcgctcgcccagcaggtagatgcgcgtgttggcgatcggccgcccgatcggcaccgacacccgctccgcctcccgcgaacagtgccaggcggtgacgtccaccgccgcctccgtcggcccatacaggttatgcaactccgcctgcggcagccggcggtaaaactccgccaccagcgtcgccggcagcgcttccccgctgcacatcacccgcaccacctggccgcagcgcgtcgccgcctgcccgtccgccaggaagctttgcagcatcgacggcacgaagtgcagcgtggtgacgccatactgttcgatggcgcggctcaggtaatccggatccttgtgcccttccggcttcgccatcaccagacgcgcgccgaccatcagcggccagaagaactcccacaccgagacgtcgaagccgaacggcgttttttgcagcaccgtgtccgccgccgtcaggccgtaggcctcctgcatccacaccagccggttgaccaccccacggtgttcgttcatcgcgcccttcggtttaccggtcgagcccgaggtgtaaatcacgtacgccaggtgcgacgcctgcgcgcgcggtgccgggttctcggcgctcagcgtctccggcgacgccgcctccagcgccagctgcggcgtcgcaggctcgcccagcgccgcccggccggcggcgtccgccagcagcagcaccgggtcggcatcctgcaggatgtactgcaggcgttcgcccggataggccggatcgagcggcacataggcgccgccggccttgaggataccgaacagcgccgtcaccatgttcaggccgcgttcggcgcacaccgccacccggctgtccgggccgacgccgcgcgctatcagcgcgtgcgccagccggttggcgcgggcgttcagctgggcgtagctcaggctttccgctccgctcaccagcgcggtggcgtccggcgtgcggcgcacctgctgctcgaacagcgccgccagcgtctgatccagcggatagtcacgctcggtgcggttccagccatgcagcagatgctcccgttcggcgggcggcaacaaatcgatatgggatactga

SEQ ID NO: 437349 - DNA, 525 bp, Serratia marcescens
atggagccacaacaggaaggtatcacgcgggcgttaacgccgggcgaagtcaatctggcacgctcggtgtttggcagcaccattttctatcagagcgtgttggttcactgcgacagctacctgccgtttgggctgcagaatcagtacacggcgatgagcccgaatggggagttgtactttcgtaggtcactctatgaaagagattatgcgaaccaggatcctgaagctcagcatctttttattcatgagatggcacacgtttggcagcaccagaagggcatgtgggtacgtacccgtgggcttctcagttgggcggtaagttatcaatatcggcttgatcaacctttgctgcgccactacagcatggaacagcaggcatcgataattgcggactatttcattctcaagagatatgggacgaataccttcttccgcttgccaaacaggaaactcatcgggatagtggacagacggacattgtcacaatttcaacccatcatcagaagcgcagggctgccgctatga

SEQ ID NO: 437350 - DNA, 645 bp, Serratia marcescens
atgaaaacattaaatactaatgaagactgcccgtctgaattatatatatttgttaatttcaacaacccaattactttcaacaatattcagacagtaggctcaattagctcatcgggagttcaagctgccgctatgggcgcagatatgctggctaaatatattaacgatgaaattgattatctgccatttttaccaaaccctaatgtatctcccgcaatatcaatgtaccagatgaatgtactcaacaactatagagcagagtataacgcggaacttgccagaagaagttcgttcaagacttatccatctcggctatcggcgctttacgctttcgcagactacgagacctgtgtggaggttagcagaaagtatggttggtctctcgacactatcagaaagtttcgattgatagagatgcccccccttacgcgggttgtaaaagttaacatggaagtagtatctctgatcagacacgcctacagcgtttcaggcttcagttctgatgaggaagtatggcaacattattgggctggaaatgggaacattgagtttgaactgccaggaagagatttacagcgtcagcgctatgagagtggtgttatctgggaatatttgatcgagggaactctggagagaattgattaa

SEQ ID NO: 437351 - DNA, 192 bp, Serratia marcescens
atggctacgaccctcaccccgactcacccgacgttctgctttttgtttgcggccgtgcgccgttctgcgctgacggcgtcaccgcgtatggtgcgcaccgtggcggataccgaacgcaacgcccgccgtcttttggcccgtgattacgtgttgtcctttgccggtcgtctgccggttaaggtggcggcatga

SEQ ID NO: 437352 - DNA, 201 bp, Serratia marcescens
atgcagcggaagcaacaggtcgccgggctggaaggtgataccgccaacgcgcagcggttggccgtgcagagtcagggtttctgcctccggccagcctttggcgctcaggtaggcgttgccgggctggagccgggctgtatccaccagagcctgtgcctgtcgcgcggcattgcgctgggcctcggccttgtcttgtggtga

SEQ ID NO: 437353 - DNA, 849 bp, Serratia marcescens
atgccactagaagaaaatatcgcagctcttgagattgttggttttccaattgatgatgattgtgtcggatcaaaatggaaagtcgagaatgaagatcagttagtacgccttatagctatagttgttatggggcaggctgctcaggcagcccatattattgacgaattgttaccagcagcccctgcatttacttttgatgaactaaaacaggaagcagtaataaagttcactgttcagaatgtggctcaaaatccacgaacgggctaccccagaattcagagggatggcttgatatttgaaattatttcttggatagctgccaaacaggtgtccggtgataaatgttttcttaaagatccgcacacgagttctacatctcaaggcttagatgggatcatgatagagcttaatgaagatggtagtgaaatactcaaatccaccatttttgaagacaagtgtacggacaaccctagagatacatttacgcagaaagtaatacctgggttcttagatcggcacggaaacacaagaaatgcagagctgattgctgccgctgcaacccttatccagttaagtggagttagtaatgttcaggcgatgtctatggttcgaaaagttattgataactcaagcaggcagtatcgagcaggttttgcgttatctcaggatttcgatacggaggaagcccagaaagcattgtttaaaggatatgacaaaattaaggatataagtcaggagcaacgcattggtgcaagcctcattgtagatggaaagttaagggattggtttgatgcgttggcaacaaaaatcattgcttacatagaacagttagatgtggagcagcattaa

SEQ ID NO: 437354 - DNA, 3195 bp, Serratia marcescens
atgtttgatccagaaacagcgtcactacttcgatccgctcccgagtttcctgatttagcccctgaagacctgccacaactcttaacgagccactatgcgcagattgtctctatgaggcttggtggagaagaacaatccagccaggaaggtggctggacattagatcgtattgcagacacctatgagctagtagtttctatcaataacgatccatctattaggcgatcctctgcatttgttgctgcgagtgctcagcagttgatagcaaggagagaggaattactggaagaagaaattgctgagagcgaaaatgtaagtagggatcgtttagcacctgaaattgcggctgtcctcctatttcttgcggctgaacaatacgcagatgcccttgaagccgcatccaaggtaaaaatcgaaaaggaagggcagcattatcttgttactgagttagtcaggcatatagtagatttagctaaaggtcggctgacagatattgttaatagaggtaatgaaagagtaggatttgttgtagagcagggtagtaatgttgaattttcagcctttatcgcattggttcagtctttagtctttggcatagaaaatctatcaaaagtaattttaggaattggtttagacgatacccacatccaacctcccaaagcgatttttgaacatgtcaaatcactagccgcttcaatcaagaaagatgctctagcatgtggagtagaattcacgtttcctggcattactcacctagcatcattactaaccgcaacatatgacgggatatctgagtctgcgctcactaggctggagccgcctcaaggctctgggcctgaattttggcataactggatagcattccgagcaaaaaaattcccatatatttggcctaatcacagaaaagctcttgcagatggcttccaccacaatggaacgtcctctgtaatggttttgccaacaggagcaggaaaaaccactatctcctcaataaaaatcgctagcactttatcacagggaaaaaaggtaatatttcttgctccaactcatgcgcttgttgaacagcttaccgtcgaccttcaagatatgttcccgcaagatattctaggctcgacagtatcaagtgattttgacttgcttttccaggttggcgcagttctcccagaaattgaggtaatgacacctgagagatgcttagcaatgctttccttctctcccgaatcctttgatgatgttggcttattagtatttgatgaatgtcatttgctcagcccacaatcaggaaagattcgtagatcgctagacagtatgctttgtctgctggcattcaatagaattgccccagaagcggatactctttttctctctgcgatggtgcaaaacggagaagaatttgcaaaatggattaatcaactaacaggtagaggttgtattagtattgacctgctatggaagccgagcaggcaggctcgaggagttgtaatttacgcagaaaatgacgtccaattgataagagaaaatgcaaaaaatgtacaatcgcgtcttgataatcaggccgggacccgtgccgcaaatttaagagtggctacatccagagagttggtcataaatccttatgccatttggggcttgcagcacaattggctagatttggaaaatcataaagcaatctgtactttcacaaagctaacacaggataaagttttacttagcggaaagctttatcgaaataacatatccattactcctaatgtaaacagtgttgcttcaaccttggcagtgacaagcgccaatagccgacttaaaactattgtgtttgttaaccaaaagtctcatgccatatccactgctaaaagtatctctattgcacttggggcaaacattgttccaactgaagatgaaaatcgtagatgggatgccttggagttagagcttggggggcttgagcattcattgctaagcaagggaagcgctgcagttcctcataacgcatctatgctacgccttgaaagagagctgtccgaacgtatgtataaacgtgcagatggggcaatggttatcgtggccaccccaacgttagctcaaggtcttaatcttcccgcacaaatggcaattttggcaggagataaacgtgcggaaaatgatgggcgccaactattggaggctcatgaattattgaatgctgctgcacgagcaggtagagctgggcatcttgcaaatggaattgtattgcttgtgcccgagcctattatggtattccccgaaaacaaaagtttaaataaggatgtagtaagtaaattacagtcattaattccagaagatgataggtgtgtagaaatttcagacccaatatctagggtgttagatgaaatctctaatggcaatactgtagatcgtgatgtgatgtaccttgttaatcgccttgcaaccctaaatgattctgagaacaatgaaatttcattgtttaatcttaaatcttctttcgctgcatttcgatataggaggaataatgaggagcaaaaatttgatgcgcaattagtcaagttagaaaatcttgtaaagcttatagatagcgatgaaatagatcggtctttatcaattctcgcatcacaaagtggattgccaccacttgtactttcacgtctaagggccgcgattacacacaacgccggggctttaccaacgtcgattaaagaatgggtttcttggctatttgattggtttaaagctgatgcagaagcaaaggaattattactttttgatgtaaaaatgtcagtgcttggggctactggacgaaataagaatggtgatctgtcagatgacgtcctggatgcgttatctccaggaatattttcatggttagatggttcaccactaaagaatgtggagattgctttggggggaaacccggattcagataattcaactgcaaaagcgtgcccacgagcaaggaaattggtaggcaccattctaccaagaggtctttcttttgttatgggactggtgacacgggttgtaactgaaattaatccgtacgacagccaggagagcctatctccagaagtagtagaggcactaagtacagcaatccgtttgggttatgatactcctgaaaagctagctttctctattgcaaatccggctattttgtctcgtgttggagttcatcaagcctttatccaggaaagtagttaa

SEQ ID NO: 437355 - DNA, 1038 bp, Serratia marcescens
atgagtatcctctttccacccaagctggttccgggagatgttattggtgtaacagctccatcttctggcgtacctgaacacctgcatcccaggttggaactcgccatcaaaaacctaaagaaaaaaggtttccaagtacgcgaaggaagctgcttacgctcgcagcacaagaataaaagttccactaaaatttctcgcgctgaagaattaatgacttatcttactgacccagaaataaaagctgttatgcccccttggggcggtgatctggcgatggaattgcttgatttgattgattttgaactattagctcggtctaaaccaaaatggtttgtgggtttttcagatctgagtacacttcattttccactggcaacgatttcgggctgggctactctgcatgggccaaacctgatggatcttggcgctcaaaggttagatgccaccactcaggctgtatgggagattctggaatcgaatcggggaacagtaataaaacagcactcttcaacagcattccaggctgatgaaaatcaatggggaacagcgtcagatgaaggtttcaatctgacccaaaaaacacagtggaaacgccttgatggtgttacatcgtctctcacctttagtggaaaactgattggcggttgcctcgaaataatatcgagattagcaggtacacctttcgggaatttacctttattcaaggcgagcaatagcgctcaaggagtaattctctattttgaaagtgtggaaatggctccctgtgaattaactcgcgcattaattagcttacgattacagggttggtttgataacttaaaaggtgttcttataggtagaagtgctgcacccgacataagcgacccgactaaacataattatctggatgcccttaaagccgtttttgaaaatgttgccgtgcccgtactgtatgatgttgatattggtcatatacctcctcaaatatcactggtaaatggagccgatgcgacagtgtttttcgcagaaaatggtagctccgtaattcagcagctttag

SEQ ID NO: 437356 - DNA, 783 bp, Serratia marcescens
atggataagtcacgtttcagcggccaggtaatggcgataaccggtgccgctcaaggcatcggcaaagcggtggccgaacgcgcggctcgggaaggggcgagtttggcgctgatcgatcgcaccccctatctggaggaggtcgtagccgttttacgcgaacgcggcaccgatatcatcgccctgcaggccgatttggagcactgggaagaagcacgcgaggcgctggatcaggtgcaacagcactttgggcgcgtggatattatggtgaacaatgtgggcggcaccatctgggcgcgaccatttgccgactatgcgccgcaacagattgaggcggagattcggcgctcgttgttcccgacgctatggggttgccgcgccgcgttgccgcatatgctggcgcaggggagcggagtgatcgtcaacgtttcttcggtcgccacgcgcggcgtcaatcgcgttccctattccgcagccaaaggcggcgtcaacgccctgacccaatcactggcctttgaatacgctggagccggcattcgcatcaacgccacggcgccgggcggcaccgaagcgccgccgcggctgacgccacgcaatcgcgaatctccgacgcagcaggaggaacggtggtatcggcaggtggttgagcaaacgctcgacagcagtctgatgcaccgctacggcagcgtcgatgaacaagccgccgctattctgttcctcgccagcgccgaagccagttacattaacggaacggtgctgccggtcgccggcggcgatttgggatga

SEQ ID NO: 437357 - DNA, 1026 bp, Serratia marcescens
atgtcttttaccgttgcccttaattttgaagacggtgtcagccgctttattcaatgcaatccgaatgaaagagtactcgacgccgcctaccgacaaaagatcaacctgccgatggactgctcggacggcgtatgcggcacctgtaaatgccactgtgagcaaggagagtatcagttgggcgatgactacctggaagaggcgctgtcagagcaggaagccgcacagcggcgggtattgacctgtcagatggtgccgctctcggactgcgtcattgaggtgccgatgccctcgacgatgtgtaaaaccgccagcgaaatgtttaccgccaccgtcacctccgccaccgccctgtcggacagcgccatcgagttctgcctgacgctggatgatgagcggggcatcgcgttcctgccgggacaatatgtgaatatcgacgttcccggtagcgtggtcagccgcgcctattcgttcagttcgccgcccggtagccggcaactctcttttctgctgcgtaacgtgcccggcggcataatgagccgttatctgactgaacaggcgagacccggcgacgcgatccgtctgcgcggcccgcagggcagtttctatttgcgcacgccggtgcggccaatgttatttctggccggcggcaccgggctggcgccgttcctttccatgctggaacatctggcactcggcggcagcaaacagccggtgcatctgatctacggcgtcacccatgaccacgatctggtcaagctggaacagctggagacatatcgccggcgcctgccgaatttcagctatctgagctgtgtagccagtgaggtgtcgctgtcgccgcataaaggctatgtcacccagcatctcgacgaaagcctgctcaataagggtgacctggacgtgtacctgtgtgggccgccgccgatggtggaagcggtgcttggcgatttccagcgacgcgcctttatcccgaatagcttccattatgagaagttcgcccccagccaggccgatcagaggagttga

SEQ ID NO: 437358 - DNA, 498 bp, Serratia marcescens
atgagtacatgtaacctgcaacagcgggtggaacaatttctgtaccgcgaagcacgcctgctggatgaccggcagtgggatgactggctggcctgctaccatccgcaggtcgaatattggatgccggcctgggctgacgacgatcgccagacgacggatccccacagcgagatttcgctgatttattacgccaatcgcgaaggcctggaagatcgcgtttaccgcataaaaaccgaacgctcagccgccagcagcatgccggagccgcgtacggtgcatcttatcagcaacgtggagctgttatcctccggtgcggaacaggccgaggtgaactaccactgggccaccttctatcaccgctacaaccacacggacacttatttcggctcaacccgtttgtggatagatcttaccggggatgcgctgcaaattaagcgcaaaaaaattcgtctggataatgactatatcaatcatgttattgatatttatcatctttaa

SEQ ID NO: 437359 - DNA, 1377 bp, Serratia marcescens
atgcattcattattgaatccgacaatatccaagctgaaagaaaaaataaatcacgctttaattattgataaagaaaatggcatatatcagtgcaatcgcggtatttttaccgatgaggcgctgtttgaactcgaaatgaaagccattttcgaaggcaattggatttatctggcacatgaaagccaaatcgccaactcaggcgattattacacgctcaccattgggcgtcagccggtgatcatcacgcgcgacaaagacatgcggctgcatgccatgatcaatagttgctcgcaccgtggcgcgatgttggccagccgcaaggccggcaataaaagtaccttcacctgccccttccacggctggaccttcaataacgccggccacctgctgaaagccaaggacgagaaaaccggcgcttatcctccctgtttcaagcaggacggctcacatgatgtgaagcagctgccgcgttttgagtcttatcgcggatttctgttcggcagcctgagtgatgaggtgcaaccgctggaggactatttgggcgaaacgcggcagatcctcgatctcatcatcgatcaggctgagagcgggctggaagttctgcgcggctcatcctcctacaccttcgacggcaactggaaactgcagatggagaacggtgcggacggttaccacgtcagcgtggtgcactggaactatgtctccaccatggcgcatcgggatgccgccagcggcacccaaaccatggacgccaactgctggtcgtcaaaaaacgacggcggagcctacggcttcaagaatggtcatctgctgttgtggacccgggtgctgaacccggagtcgcgccccatttatcggcacttcacccgtttgaacgacgcgttcggcgcacaccgtgccgacctgatggtgaaccaaacccgcaacctgtgcctttaccccaatctgtacatcatggaccagctttccagccagttgcgcgtagtgcgcccgattgccgtcaataaaaccgaagtgaccgtattctgctttgcgccgaagggcgaaaacgccgacgagcgagccttgcgcattcgtcagtatgaggatttcttcaacgtcagcggcatgggtacgccggacgacctggaggaattccgcgcctgccagctggggttcaacgccggcaacatgccctggagcgatctgagccgcggcgctacccgctggctggagggccaggctgacgacaacgccaaagcgctggggatcgtgcctgacatgaccggcccccgcccggaagatgaagccctgtatctcagtcagcatcatcattggcaaaacattctgctgcgccagctggagcgccagcaacgaaacgacgaggtggcgcaatga

SEQ ID NO: 437360 - DNA, 930 bp, Serratia marcescens
atgtctatatccttcaatcaacgtcaagacattatcaaattgctggaaatcagcagcggttttactaatgacaacggtgatccgcgtttcaaaaaaatcatgcatcatctgctgggcgatatttgtcagctcatcgatcgctatgatatttcccctgaagaattctggcaggcgatcaactatctgcacgtcttgggcgaacgtcaagaggcggcgctcctggccgccggcttggggctggaacactacctcgatctgcgcgacgacgagcgcgagcgccaacaagggctgagcggcggtacgccacgcaccatcgaggggccgctgtatgtggccaatgcgccagtgagcgccggcttcgcgcggatggatgacggcgacgacgacggcgaggtgatgtggctgcacggccaggtcaaaggcgccgacggcaagccgctggcgggggcggtggttgatatttggcacgccaacacgttgggcaactactctttcttcgataaatcgcagagcggcttcaacctgcgccggcggataaccaccgacgccgatggccgctacgcggcgcgcagcatcgtgccgtcgggctacggctgtccacccgacgggcccacccaggctttgctcaatcgactggggcgccacggcaaccgtccggcgcatattcatttcttcgtctccgcaccggcgcataaacacctgacgacgcaaatcaatctcaatggcgaccgttatctgtgggatgacttcgctttcgctacccgcgatgagctgatcgccaacccggtgaaaatcaccgatccggcgctggcggcaaaacgcgatctgcccggcccgcataccgaagtgcagtttgattttacgctttatgccgcggcggaccgcatcgaacagaacagaataaatcgccctcgcgcgctgcaagattaa

SEQ ID NO: 437361 - DNA, 291 bp, Serratia marcescens
atgctattcaaagttgaaatggtcgtgaaattaccgctcgatatgcctaaagcgctcgccgacgaaataaaaacgcgcgaaaaagcatattcgcaaaccctgcaggcgagcggaaaatggcgacatctttggcgcgtagccggtagctacgccaatgtcagcattttcgatgtggaaagcaatgccgagctgcacgagctgttattcgccctgccgctttacccttatatgaaaattcgcgtaacggcgttatgccgacacccgtcatcgatccgcgacgatgacaaataa

SEQ ID NO: 437362 - DNA, 1116 bp, Serratia marcescens
atggaacttcgcattgaacgcatcgacagctggctggtggatattcccactattcggccacacaaattgtcgatggccacgatgggctgccaaacgctgacgctggtgcgcatgacctgcgccgacggcctgatcggctggggggaagccaccaccatcggcgggctgagctacggcccgcaaagcccggaggggatcaagtcggcgatcgacggctacctcgcgccgctgctgagcggcaaaagcttcagcggtctggcgccgttggttgcgttgatgaatggccaggtccagggcaatacctttgccaagtcggcgctggaaaccgcctttctcgatgcccagggcaaacgcctcggcctgccggtcagcaccctgctcggcggcgcgctcagcaacaccctgccggtgctgtggacgttggccagcggcgatacgcagcaagatatcatcgaagggcaacgcctgttggcggaagaccgtcatcgcgccttcaagttgaagatcggcgcccggccactggaggaagatctgcgccacacccaggctatcaagcaagcgctggggccggagatcagcattcgcgtcgatgttaaccaggcctgggatgccgccaccgccgtacgcggaatggcggcgctgcagcagatcggcatcgatctggtcgaacagccggtgccgcaatgggatcgcacggcgttaatccggctcagtcagcgcttcactctgccgatcctggccgacgaagcggtggccgacgctcacgacggttatgcattggctgcgggcggctttaccggcgcctacgcgctgaagatagccaaggccggcggcccggcgcaggcgctgaaactggcgcaggtcgcacaggccgccggagtcggcgtctatggcggcaccatgctggaaggcacgctgggcaccgtcgcctcgctgcacgcctggtcgacgctgaagctggactggggcagcgagatgttcggcccgctgttgctgaaagacgacgtggtcaccacgccgctgcgtttcgccaacggtcacgtcagtctgccgtcaggcccgggcctgggggtcgatatcgatgaagacaaactgcgcttttatcgacgcaaataa

SEQ ID NO: 437363 - DNA, 762 bp, Serratia marcescens
atggatattgaatatcgcctcgacggcccggccgacgcaccgctactggtgctgtccaactcgctgggcaccaccttcgagatgtggcaaccgcagttggcggcgctgaccgaacgctttcgcctattgcgctacaaccagcgcggccacggagccaccccgttggcgaaagcgccgctgcaactgcagcagttggctgaagacgtcatcgccctgctcgaccatttggatgcgccgaacgcccatttttgcggcatttcgatgggaggattgaccgggctctggctcagtcgttatcaccccgagcgcatcggacggctggtggtcgccaataccgccgcccgcatcggcaacgccgaaggctggcgacaacgcgcgcagcaggtacgggaacacgggttggcgccgatcgccgccgcctcacccgcgcgctggttctgcgcggcattcgcgcagcgccaccccgagcaggtggctgcgctggtggcggccctggcggccggtaatccgcagggatacgccgcctgctgcgaggcgctggcgcaggccgacctgcgcgccgaggttgccttgatgacgcggccgatgcgggtgattgccggtgagcaagatccggtcacgacggtggcggacgccgagtttttagtcgccaatgcgccactcgccgatctgcggcggttgccgacatcgcatatttccaacatcgcctgtccggatctcttcaaccgctgcgttgtcgagtttcttactgaaaaggaatga

SEQ ID NO: 437364 - DNA, 1203 bp, Serratia marcescens
atgaatccagcttatctgtgtgacgccgtccgcacgcccttcggtcgcctcaatgggagcctggccggcatacgcgccgacgacttggccgctctgccgttgaaagcgctgcaggcacgccatccgacgctcgactggagccaggtggacgacgtgttgttcggctgcgccaatcaggcgggggaagacaaccgcaatgtcgcgcgcatggcgctgctgctcgccggcctgccggtgcaggtgcccggctgcaccatcaatcgcctgtgcggatccagcctggatgcggtagcagctgcggcgcgcgccatcagaaccggcgagagcgagctgatgatcgccggcggcgtggaaagcatgtcgcgggcgccttatgtgatgggcaaggcggaaagcgccttcagccgcacgatgaagattgaagacaccaccatgggctggcgttttatcaacccacagatgcaggcgctgtacggcgtggacacgatgccgcagaccgccgaaaacgtggcgtcgcaattcggtatcagccgtcgcgatcaggacgccttcgccctgcgcagccagcaacgcaccgccgccgcacaggaaagcggcttttacagcgaccaactgatcgaggtgcttatcccgcagaagaaaggcgagccgctgaccttcaaccaggacgaacatccgcgcgccaccaccttagccgcactggaaaaactcaggccggtggtcgccccgcagggcagcattacggccggcaacgcatccggcctgaacgacggcgcctgcgcgttgctgctggccggcgagcgcagcgtggctcgccatggcctgcggccaatggcacgcatcattgccagcgccgtcaccggcatcgaaccggcgatcatgggctttgcaccggcggcggcggtgcgcaaagtgttgcatattgccggcctgaccctcgaacagatggacgtgatcgaactgaacgaagccttcgccgcgcaagcgctggcggtgacccgcgagctgggactgcgcgacgatgcgccgcaggtgaacccgaacggcggcgcgattgcgctcggccatcctctgggcgcctccggtggccggctggtgatgaacgccgcctggcaactgcgaaaaacgcgcgggcgctacgggctgtgcaccatgtgcatcggcgtcggccagggcattgcactgattatcgaacgggtatga

SEQ ID NO: 437365 - DNA, 681 bp, Serratia marcescens
atgagcaaactgacccatcaacagctggctgagcgcatcgcgcgcgatattcccgaaggcgcctacgtcaatctcggtatcggcattccaacccagatcgccaactatctgccggccgataaagagatcttcctgcacagcgaaaacggcattctcggcatgggcccggcgccaacgccgggcgaagaggacccggaattgatcaatgccggcaaacaaccggttacgctgctgaaaggcggctgctttttccaccacggcgactctttcgccatgatgcgcggcggccacctggatatttgcgtgctgggcgcctatcaggtctccgaacgcggcgatctggcgaactggagcactggcgcaccgggggcgattccggcggtcggcggcgcgatggatctggcgatcggcgcacgccaggtgtttgtgatgaccgaacacctgaccaaaacgggtgaatgcaaaatcgtccgccaatgcagctatccgttaaccggcgtcggctgcatcgaccgcatctacagcgatctggcggtgatggacgtcactccccagggactggtggtgcgtgaaatatttgccggcctgaccccgcaacaactgcaggacgtcaccccggtcgaactgactttcacccttcaacacggggaaccgcgccatgaatccagcttatctgtgtga

SEQ ID NO: 437366 - DNA, 687 bp, Serratia marcescens
atgatagataaaagcatggcgtccgcagacgccgccgtcgcagatattccggatggcgccacccttatggtcggaggattcggtccggccgggcagccctacgcactgctggatgcgctgatccgtcgccggccacgcgcgcttacgctgatcagcaacaatgccggtaacggcgattttggcctggcggctctgctgaaagccggctgtgtgcgcaaagtggtgtgttctttcccacggcaggcagattcttgggtgtttgacgacctctaccgccgcggcgagttggaactggagctggttccgcaaggcaatctggcggcgcgcatccaggccgccggcgccgggatcggcggtttttataccccgaccggctatggcacccaattggcggaaggaaaggaaacccgcgagatcgacggccgccgatacgttttcgaactgccgctgaaggccgacttcgcgctgatcaaggcagaacaagccgaccgttggggcaacctccgctatgacaaaaccgggcgcaacttcgggccgattatggcgatggccgccaactgcaccatcgtcgaagtcaaccatatggtgccgttgggcgaactggatccggaaaacatcatcacgcccggcatcttcgtgcagcgtctggtgccctcttctccccgtgcagcccagctttcggcttaa

SEQ ID NO: 437367 - DNA, 834 bp, Serratia marcescens
atgagtgaagttcctgaatttggcaccgaagaactgcgtcggctgcaggagatcggtgatttaagcaacgaccagtacaagggcgatcctaattttatggcctcgctggccagagggctggaggtgttgcaggccttcaagccacagtattcgcagatgtcggtgtcagagatcagtcaacaaaccggcattccgcgcgcagcggtgcgccgttgtttgtataccctacgagcgctgggattcgtgcattgtcccgatgggcgccactatcgcttgctgccgcgtgtgctaactatcggtcacgcttatctttcctcttccgagctggcgaaggcggcgcaaaactcgctggactatctcagcaaattgcttaatgaatcctgctcggtggcgacgctggatggcgataacattttgtatatcgcccgggcctcggttaaacgcatcatgactatcgatctggggcgcggcagccgtctgccggcctatgcgacgtcgatggggctggtgttgctcagcgcgctggacgagggagagctggaggattatctgtcgcgggtcactttcgaaccgctgaccgagtttaccgtcacctgtgcggagcagctgcaggaacagttagccagagttcgcagacaggggtatgccatcaacgatcaacagttagagatcggcctgcgttccattgcggtgccgatgcattcacgcaaaggcggggttgtggcggcaatgaacgtcggcgtcaatgcgtcgcagatctcggcggcggagctgcgcgaacgagtgctgccgcagctgcagcgcacggcgatggagctggcgctgctgctgtag

SEQ ID NO: 437368 - DNA, 177 bp, Serratia marcescens
atggtgctgtcaggtttattgaatgcgcaggtgaccgtttattattacgtgattagtagggttattattcgaggccggtcaatgagcacgaaaagcgaatccagatggcgtctgatcagtattttaatgttggcgctgctggcggtattaattggcgttctggttaaactggactga

SEQ ID NO: 437369 - DNA, 1164 bp, Serratia marcescens
atgataaataaagttattgaagggtatttaccgcagctcacggcgattcgtcatgatattcaccagcacccggagcttggcttcgaggagtttcgtaccagcgatttggtggcggactatttgagttcgtggggctatgaggtgcaccgcggattggcgggcactggtgtggtggggacgctgcgggtgggtgacggcgtgaaaagcctcgggctgcgcgccgatatggacgccttgccgctagaggaaaacaacggcaaaccctggagcagcagcgtagccaaccgcatgcatggctgcggccacgacgggcataccaccatgttgcttggcgctgcgcgttacctggcgcaaacgcgcaatttcaacggcacattgcatgtgattttccagccggcggaagagacgctggatggcggtgcgcgcatggtggaacaggggctgttcgaacgcttcccctgcgacgccattttcgccatgcacaatatgcctgggttacccgccggcgagttctttttccagcacggtccctttatggcttcttcggatcagattgtggtcacgatacaggggcgtggcggccacggcgccatgccgcatttgaccgtcgatccggtgctggtggcgtcgcacattgtcattgcgctgcagagcatcgtatcgcgcaataccaatccgcttgaagcggcggtgatcaccgtcggcagcattaaagtcggtgaggcggctaatgtgatccctgatagtgcggaaatgaagctcagcgtgcgatcgctggggcgcgaatggcgaacaacgctgttaacgcgcattcctgcgctgattcaggcgcaggcgcaaagcttcggcgccacggcaatcgtgaaccacatcaacggcgctccggtattggttaacgatgaggctatgacgcgcttcgcgcatcaggtggcgcagcagcagtttggcgccgcgcgcgcgcactacggcgctaagccgctgatgggcagcgaagatttcaccttcatgcttgaggcgcagccgcgaggctgctatctgctgatcggcaatggcgacggtgaaggaagctgtatggtgcataacccgggatacgactttaacgatgaatgcctggcggcgggcagccattattggggcgcgctggcggaagcgtatttaaaataa

SEQ ID NO: 437370 - DNA, 1137 bp, Serratia marcescens
atgcgtgaattaagaaaaatggcggcgtttacgctcttggccgtggcctgtctgacgatcatggtcggttgcgtgatcgttcccggtttgacggagatcgcgagccagttgggcacgccttccgcggccagttggctggtcaccgtgccgtcgttgggcgtggtgatatttggccccttcgccggacgttttattgacaaggcgggcgcttacgcggcgctcagctgggggctgttgttgtatggcctgcttggggcgggggggctgttgcttcgcggcttttggccggtgatgctcgaccgcctgctgcttggcggcgccacggcgatcgtgatgtcagccggcaccggtctgatttctgctttttacagtgggcaggcgcgcttgaaaatgatcgcttcgcaaggcatgtcgatcgagctgggcggcgtcatctttctgtttatcggcggactgttggcgacgctcggctggcgctggcccttcctgttgtatcttgtcgcctgggtgttgctggcgatgcagttgctgtttgtgcccaaaccccagtccgatgtgggcgaatcagacaacgttcagcgcggtgatgccatttccaccggcgccggcagattaaccgcggtctatttttccgctgtgctttccatgatctgcttcttcaccgggatcattgtcatcccgcagcatttccaccacatgaatatcggggcggcgcaaacgggatacttcctgtcgtttatctcgcttatcgccgtttttgccgccgcgctgatgcccaggttggtggctttactcagagacaacggcgcgcttggcgcggcgtttgtctgttatgccgcagcgcatctgctcttcgcctctgcgcacggcactgcggcatttgttgccggcggcattctgatgggatgcgggttcggcttctcggtgccgttggttaatcatatgaccgtagaacaaagctccccccgcacccgggggcgaaatctggcctatttatcgatggcgattttctccggccagttcttgtcatcctttatggcgttcattcccggcagttcatccgccgttttcctgggagcggcgggtatcagcatcgccacggttttggcgctgacgcttgcgcgcagattagggtaa

SEQ ID NO: 437371 - DNA, 342 bp, Serratia marcescens
atgtcagcgcgcatcatcacgatcccaacgattgatatattgctggaggttgaaagtctgccggcgttggatagcttgaatgacaggatgcgtgacatgggatatacgccgcgtggcgagaacggcattgccggcaggcgttacgacatcaagggaaacggcaaacgcacgcatcacgtgcatgcatttattgcgggaagtgaacaggcgatcgggcatttggcgttcagagattatctgcgcaagcatcatggtgttgctcagcaatacgcggcaatcaaataccaggcagcagaagactgccggcaaaacccagcggcttatggccggttgaaaaactaa

SEQ ID NO: 437372 - DNA, 129 bp, Serratia marcescens
atgtatattatgttaaatttaatcactggagacgtaccgggtttagccctgcacattatctcccgcctcaccttcaacgctatccatccctctgacatcccgttttaccgccaggcttactgccactag

SEQ ID NO: 437373 - DNA, 381 bp, Serratia marcescens
ttgacctgttttgcagagttgctgaatctaatccagatgcttgaagttgaactgcatcggccaatggtgcgccgcgatccgcggcgcgtcgcggcattgctgcatgaagactttgaagagattggtcgttcagggctgcgttatgacaaacgccaaaccgttgcggcgctggaaatggaaactgaacatccgcagatttttgccgaaggttttaagctggcgcaaatcagcaaaggcgccgtgttgctgacgtataaaagttttcagcgtgatgcgcagggccacgccgttcgttgcaccgaacgttcatcgatttggcttctgacagccaaggcaggttggcaaatgcggtttcatcaaggcacgccgactgatgagtga

SEQ ID NO: 437374 - DNA, 663 bp, Serratia marcescens
atgcccgatcggtcactactctttttttatggtttagtctttgttgcattaatttattttattgtgaagttcaagaaggaaataaaaagcaaagatgggttgataaatatagcttcctctctagttatcggcattgttataattttcttattaaattcagacctttctggcactagcattctgattgccatattttcttttattgcagcaggctttttttctttatgtgttgccatcttaatcaaggatgtatactcaacgaaaaagtatatattagctgccataaagcgaataaaaacggaaaactcaattgatttcaaagaaatgccaaaattcaaaagcgacattttttgctataaaaaatcttggtatgccgtctactcaccctctctaaattcacttgagataggtgttaatgcgtttgatgacctacctgtcattggtaaaaaattcaccgtgcgaacgttatctaaacgcgcagttacattcgttccggaagcaatccctaatgaaatcaatgatgatactgaactattcggccagctggtaatgttctgtgaaatatctgcaaaaaatcagattttggcagaaaattatattgaagccataaaaaatggctcagctacaccctggcttatctcagtgccagatgaaacgccataa

SEQ ID NO: 437375 - DNA, 924 bp, Serratia marcescens
atgaaaaaaaccagactgctgttgatgttagcctgctcgctgtttgtcgtgaccgctcaggccaagagctatcaggtcggcgtggcgctggccaatttcgatctcaactttgtctccatcctgcgcagccaaatggcgcgagaactggctgcgcaacagctgcaaggccagttcgtcgatgccaaaggcgatgtcgccctgcaggtgcagcaggtagacgatctgattaatcagggcgtggacgccattatcctcaacccggttgatacgcaaggcgtccagccgatgatagcggccgccaaacgcgccgctatcccccttatcttcgtcaaccgcaaacccgaagtgccgctgagcggcgcgacggcctacgtcggctccgattcggcgctcagcggccgcctgcagatggaggccctggcgaaaaaaatgaattaccgcggcaacgtggcgatcctgatgggcgccctctccaacgaagaaacccgcgaacgcacccgcgcggtggaggcggtgatcgccaaacacaaagacctgaacgtggtagagaaacagaccgccaaatggcagcgcaatgaagcggtcgacgtggtctccggctggttgctgaacggcgtaccgatcgatgcgatcgccgccaacaacgatgagatggccatcggcgcgatcatggcgctgaagcaggccaaaaagaacggcgtactggttgccggtatcgacggcacgcccgacggcctgcaatttatcaaaaatggcgacctggcggtgaccatcttccaggatgccaaagcccaggcgatcggcgcggtgcaagtgacccgagcgatgttggatcgcgccaaaaccgagtcttacaactgggtgccttatgccaccgtgacgcgagaaaactacccgcaatttgcacagatgaaccagaaataa

SEQ ID NO: 437376 - DNA, 1176 bp, Serratia marcescens
atgttaaatggtgaaagaagcatccctcgcccgctgcgttgggcgatgatcggcggcggccgcctcagccaggtgggctacaagcatcgttccggcgcactgcgcgacaataccgcctatcggctggttgccggcgcttttgatatcgacgcggcgcgcggacgtgagtttggcgtcaatctcggtgtgcccgccgaacgctgctatgacgactatcaacagctgctgaaacaagaggccaaccgcgaagatggcgttgaggtggtgaccatcgccacccctaacggcacccactatgaaattacgcgcgccgcgctgaatgccggcctgcatgtcatctgcgaaaagccgctgttctttaccacggcggaggcaagagaaatcaaggcgctggcggcggagaaaggcctgatcgtcggggtgacctacggcttctccgggcatccgctgctgatgcagatgcgcgccatgatcgcgaacggcgacatcggcgaaatacgcatggtcgaattgcagtacacccatggcttcaacgccaatgaaagcgcggacacgttcgaggcgcaaaagtggcgcgtcgatccgaaaatcgccggcccctcctttgtgctgggcgacatctctacccacaccttctacatctcacagctggtcatgcccgacatgaaaatagcctccctgctgtgcgatcgtcagagctttatcccttcccgcgccccgctggaagacaatgccatggtgctgatgcactacgaaaacggcgccgtcgggcgcatgtgggcctccgccatcaacgcgggcgcgatggacagccaaagcatccgcgtggtgggctcacgcgccagcctgcaatggagtgattccacacccggcgaattacgctatgagatccaggggcggcccagccagacgctgcaccacggcatgccctatctggacgacagcgcgctggccgaggaacggctcggcgcattgcataccgaagggctggccgaatcctgggccaatatttacctcaagttcgccatcgccatcagcgccagtcagcgcggcgatcggcagacgctggccgcgctgatctatccggatatcgatgccggattggaaggcgtgcgctggattgagaactgtgttcgttccgccgacaacggcgccacctgggttaattaccaataa

SEQ ID NO: 437377 - DNA, 918 bp, Serratia marcescens
atggatatcaccgcgattgccgctcagtttgggttggatgcctcacagccgccgctcagtctttatccctatgcgccggtttataagataggggaacatgtgctgaaacgtacccgtccgacgacggatgaagcccatgcgctggcggcgtatctcgccgagttgcgttatcagggtgtagatatcgtagtgccgacggcgtgtccgcaagagatggagggaagcatgtgggtagtttatccctttatctcgggagagaaatatgcaggccgcgatgaacagatcgtggcggccggcaggctgcttggtcgaatacacgcgctgtctccgacaaaccataacgccgggctgacgacctatgacgagtacgcgctgactgaagaagacatcttggcggatctggatgtgatcgccgaccatgcggctgggcaggggattactctcgatatcacggcgttcaaagcacgcatgctgcagattgccgaacggcagatggcgctgaaagaacaggctcttccttgtgtggcgacgccctatgactttaaagccgataacttggtgtatgtcgcgccggataggccggtgctgatcgatcccgataacgcgctgtttttaccgcgggtatttgacctggcgttggcgctgctgctgttccacaataccctggcttcagcccccggccgcgtcttcagcgtgtgggaatggcgactgttcttggcgggttacggcgagtctgtcacgctgacggccgatgaactgcagggctggcatcaggcagtggaacatctgtttctcgacgaagtgctgtggctgatggcggactttgccgatggctggcgcgatccccggcagacggcgctgttcgtctcgctgttcaagctgctggataatctttccggctacggattaacaccgtaa

SEQ ID NO: 437378 - DNA, 600 bp, Serratia marcescens
atgaattttagtttgatactttacagatataatactgctctggatagaggcagaaaaacagtacaattatcaattgcaataatgactatttggatggcgttatgtgtattcgtttttaaaattgttgatctttcattcaataagggtgacttaaacgccagtattcatgttgactttgactgggatgtgttttcttcatgggggatcgtgatatttattacattgattggtgccgtgttccatggattccatgcgtctaatgctgaattaaaaaatgcgaatgcaataatagacgacttatttatatccgaagataaagatatggacaaaaagttaaccagtctgaacaatatcgccagcgagcttgagcgttattgtatcaaagcatctgcgctgaatttgatttcatttatgcttattttcttcagtttccttcatggttatctatcaattggagaaataatccaagggcttagggagagtaattacctggctttgatagtcgtgtctgtatttatattggcttttgttgcatattatcatgatgtgattgtttttcttaatgaccgaaaacgaaagcgcaacaaagaaaaggtgtaa

SEQ ID NO: 437379 - DNA, 957 bp, Serratia marcescens
atggcaacggacagactgggcgacatgcgtttatttgccgaagcggcggcatcgggcagcctttctgccgccggccgcaaactcggcctttcccccgccgccgccagcgcgcggttgttcaagctggaagcggcgctgcacagtaaactcttcgatcgcaccactcgccgcctgcgtctcactgaagaagggcgcatttatctgcaacactgcaccctcgcgttgcaggcgattgccgacggcgaggcggctctgcaggccagccaaagcggcgtgtgcggtaaacttcgcctctcggcctccgccgatttcgggcgcaaccttctcaatcagtggattgaagaattttgcgccgaacacccccggctgcagatcgcgctgacactgtcggactccctatccaacctgctgcaggacgatctggatatcgccattcgtttcggcgcgccgcgcgaagaaactctcatcgcgcggcgcctggccgctagccgacgcgtgctgtgcgcctctccggcgtatctggcgcaatatggcgagccgcgcacgccggccgatctcaccggccatcgttttatcgtactggtgaccgcagccggcccgctgaatacgttccatttctccctggacggccaggcctggagccacacggtgccgctggagagcgcctgggagaccaatgacggcgcactggcgcgccagtgggctttagcggggcacggcatcgcgcgtaaaaccatctgggatgcggcggacgatatccgcagcgggcgtctgaaagtcattcttcccgacttcatcccgcatgaagccgggatctacgccgtgtttcgccgcacgccctatcagccgccgcgcgtgcgcctgctgttggatttcttgatcgcccgctttgcggccgccagccaatcgccgccgcttcatgtccccccccgcaggatgagtaaccacgctcgttaa

SEQ ID NO: 437380 - DNA, 1212 bp, Serratia marcescens
atgaatgttcactctgtttccaccgatagcgataatgcgcatggcgcgctgctgccgctgaaagcattgctggcgctgacgatgagcagcttcatcgcgaccgctaatgagactgtgccggccggcatgctgccgcagatagcccgaggcatgagcatcagcgaggcgtgggcggggcaaatggtgacgttgtgcgcgctgggcgccggggcggcggcgatcccgctgacgttggcgctgggcgggtggccgcgtcgccgactgctgctgttggcgatcggcatctttttgatctgcaacgcggtgacggcgttgtcaccctgttttggcgtgacgctgggggcgcgctttttggtcggcatcgctaccggggtgacgtggagtctgcttgcgggttacgcgcgccgtctggccatcgtctcattgcaagggcgggcgatggcgatcgccatgctggggatcccgctggcgttggcgttgggcgtaccgatgagcgcctggcttggtgaactgttggattggcgctggatttttgcagtgctggcgagcttgagcgcgttgctgctagtgtggatccggctgacgctgcccgaattttacggtcgccgaacgccaggcaatgcgcgtttgcgtgaggttttctgtcttcccggcgtgcggcctatccttgccgtattggcgtgttggatcctggctcattacacgctgtatacctatcttgcgccctatcttgccgcgcgcggcctggcggccagggtggatttggcgctgttggcgttcggcatcgccgccgttgcgggcattgcgctgaccggcttatgggtggatcgctggctgcgtgcgctggtgctgttcagcctggcggccttcgcgttggtcgcgctggcgtttggcgtgaacggtttgcccgtcggggcggtttacgttggcatggcggcatggggattgagtttcggcggtgcgccgacgctgttgcagacatcactggcggatgcagcgggtgagcatgccgatctcgcccagtcgctgctggtcactttctttaatctggctttcgccgtcagcggcgcgttgggcggaattctgctggcaaacgtcggcgctaacgccatcccgtggatggttttttccctgttgctggtggggtggagcattgcctggggcagtgcaaagcgcggcttcagcgccgaacgccgcgccgcggcgcgctga

SEQ ID NO: 437381 - DNA, 684 bp, Serratia marcescens
atgtcttgggtatgccctcattgcaactttgcagcgatagtaaagaaagaggactttgtttcaagcagcctcgatctgaaatctggtaacacaaattatacttatactgtgcacggcattacatgcccaaaccctgggtgcatgaaggcaactcttaatcttcaaatcagtgaatttggttattttcacggtcaaaaagccactgtttctggtggttctaaagttcttcggttgatcccttctaatcaaaaagatagagcaaaagcctatcctggttacataccccaacctatccttaacgattatcaagaagcgtgcagtatcgctgacttatcacccaaagcatcagctacccttgcaaggcgttgtctacaaggaatgatccgcgatttttggggagtgagtggtaagagtcttcaccatgaaatacttgctatcgaagacaaggttgaccctgtcgtatgggaagccattttagacgtgaagagcattggcaacataggtgctcacatggaaaaagacatcaacctgattgttgatgtgagcgcagaagaagctgatcttcttattgagatgatagaaatgctgttggatgactggtatgtagctcgtcatgagaaacagcaaaaactacaacgtattaaggaagttgcagcggaaaaagcagaggcgcgtaagggctga

SEQ ID NO: 437382 - DNA, 900 bp, Serratia marcescens
gtggcaacatctcttgtccatcagttacaagcggaagcagtggatgactcttcgagcattagtggcttacttatgaaagcaaagttagtcgcatctaagctcgggctgaatgacataaccgaatggatcgattttgaattaaatggctacccatctcgcgctgaaactccttcttacagacgtttttcatgtcgtcctcaagcgttcaatccttatgtcggatggataccagttgatttaggagggattcctgagaagattttgtacgaattcacaacagtctatttgcaggaatcaatttcaaacgtagaaaagcatgttgcggactctgggcggttggaagtacaaatgccgcacacgctaactgaaatgctatacattggtcatgatagagactctagattcaaaatctcatggcgattcagtgcatttgctttgagcggagtattaacgaccgtaaaggggaaaatcctcacatggtctctggatctggagaggcaagggattctcggtgaaggtgtgaatttttcattaagagagaaggagatagcaagcatggttttcaaaaatgacttcaatggtgctgttatccacaataacggtgtgatggcatcacacactgctgatgttaatcaagagaatacaatgtccgtgggttcgtcctttgaatcgttgaaagatgaattaaaaaaactgggaatcaatgatgcggagatagaagaacttaaagtcgcgattgaaagcagtgaaaaaccgctaacagaagtgggctttagccaaaacatttctaattggatcgctaaaattgcaggtaaagcaatgcagggaggactaaaagttggcggtgctgtggcagttggcgtgattgcaaaactaatcacaacgcatcttggcgggtga

SEQ ID NO: 437383 - DNA, 3054 bp, Serratia marcescens
atgaatttcatttcattacaacaagatacagccattattttctatgcaatcatgggccgatatgcagacaaccaagaattgacatactttacaaggcaaatcgagaaagcgttatacgacaatgtatatttggctaaccagcttattgactctcccagtggccatcttcgctataacggcttaactactgtgcaaaaagtagaatatatctatcataatgcgaccggccaatctccttcaccgaccaagttggacttgttagtcaatcaagtcaacgcgggactctctttaggtcagttagtcagtaacttaattaacgacactcgtcattacatcggcaacgaccccactacaacagctcagcaaaaacacatgttcgagactattaacgctacgctatatccaacaccagcgacctcggctactagtgctgcagctgacgtacaagggatttattatactattggcagtctatttaatgctgatggcgtcaattattggagcaaggctattgcggatggacgggttagtgttaattatgtcgctaataactttgtagaatcacgagcatggttgctttcattgaataatgacgaattcgtcaagagaatatacaagtgcatttacgacttaacccccgatactacaaccgtagctaaatacacctcaggtctaaataacaatagcgaaacacgaggcgacgtcatcatccgtttaatgaccgacgttcgcaatgatgtagataacagtattgccaaacaaaactttctaaaagccacgcacgtctatggctctggagaattcacgccattaaagatgcaagaaaatgtagcggtattattccaattactgacgacaactaccggattagatgccagaggacttgacagttttagtagaatgttagacagtggaaaatctgaactagcattattgacacttcttacgcagtctacctcacattttagttccgcctcagattttagttcactttatatcaaactatatggccaagctttaactaatgagcaaaaaaacgttatattgcaacaagcggagaacaacgccttacaggcgacattaaatattatagaggcatatcgcaatgggaaatcaccattgaatgatggccctctcccgctaaccaaagacattgccacacttgaacaacagataggcgaaaaattaggttaccaggagaatggaaaaatcacactggatcgagacggcgcattgattggcgatattaactcagggagcattcatagattatcacatgccgaaattggcgtccttaactctgcttctctggatgttaattatgccagcgcaatcgatcttagatttgcaaaatcattaaaaaacttaacattacaaggcgattacgccgccaatgccattgttattaactcattgagtggaagatcgataactctttacctcaacaaaaacaatctgttaaatgcagacaatatcattgagctcaccgaacttgccagtagccgattgatagccgatcaactcaatattgccgactcgaaaataaatatgagtctcagtggaaacgaactcactcgattgctatggaatggcaatagtattgcagggggagcaaacgctatcgataaagagtttctggcaacgtttttagccaagtcttcttcttcgcagagcagtatttctgctaattttatcagcaaaaacgtatacttgacatctaacggcggcaatggatatgacgccgaaattataagtaatataaatcagtttttgtattttggcggtatagaacttggtggttatcgtggtacaggaaacatctatcttaatggtgagttaatctcaaccgagggaaaaaatatttttgatttcggtctattaaaccaaactgccaaggtctatggcacttatcctcagccaataaagattctggctcaaggtgaactaccgaaaacacctaccgatggaggtaaagccactggctcttcgggattaatcttgtccggtatggctgatgatgtaaaggtaattaataccagttggtccagtatgcttacgataaatggggatgcctctgctagcagtaaattgacgcttgaaatggcaaaacacctcgtcgatgatgctttcaaaatcaacataggcgctaataatggcggatggattaatgcaggagaaataaatataattagtcaagataaaacgacacaagaaagtctgaaattagagtcaagtggaaacacaataaatacaatttcactcgggggaagcgataacaatatatcaaatatcacagttaccgccagtacacgactatacctaaccattaaagaggattttagtgatacgctgcaatccatagaattacctgaaaatgatccacgccacaatgccgtcattgatcttttcctcgagaaaggtggtagtggtggtggcgctttctattcgcttctgtcttctctaaacaacatatccccttacgagcatgtcattagcagtctttttggtaacttattggatatagaaaccttcaacggcggtaactttacggtacatggcaatacaatcattggaaactcaacaactggcgtgcgaaacgtatccttcgaaaatagtaatatagagaatttggtcaccttaaatagatacagttacgatcaaatacatgctgggtcagctgatagaaagtggaattttgggccgaatgaaaaaggtaacattgaaatttatggtaacattagtcaacctaatcaaattaatacgttatttaattcattggcaataaataacactgatcgtgcgtttgatgttttagccaaggcaatgtcaaaaatcaccaaaggtgccagtgaaaatagtttagctgaggtgggcgcagtgggaatgggtgacaacatctatgttattatcgacaaaaaccacaatcagaaattcgacgaaaatgatactgttttttctatcgcaaatgaaaatatctattcattagcaaatactcttcattatcaagctcctacaattgatcttaacggttttgcgccggactattttgcttaa

SEQ ID NO: 437384 - DNA, 1017 bp, Serratia marcescens
gtgaagctgctgcgtgaagaaatcgcctggcgtcagctgcgacggggagcatgggtgttggcgccgttgctggccctgagcctggcgacaggcaatgccaactggctgaaggcttcggtggtcaccatatcgctgtttgtcgtttgcgagcgtcttgaactggcgccgctcggcgtggcgctgcatgcggcggcattgctgctgctctttatggcgctgctgtgcgccatgcacacgccggtcatcttcattttggcgtgcgtgttggcagcggcggcggcggttgggatctccgcgttcggcggcaagctgcgatccctggggaattttatttttattccggctctttatctggcgtgtgaaaccgctgaaggtggcgccggcgcgccattagcccaatgcggctgggcgctgctcccttttctggaggcagccgtcttgccggtgctgatgcttgcactggcggagcaccggcggctagcctggttgtcgacgagtgacagcctgcatcattatctccagctgcgccgcagcgatgagcttggcgctcgcgtggcctgcggcgaggctttgctcgccgtaagttgtgccgttgcactgtcggcggcgatcgttgagtggcaacacctcgattacgggcaatgggtgatctggtcggccgtcagcgtgatcagcggcgatatggccggtacgcgcaacaaactccgccagcgtgcgtcaggcgcattgctgggggtgcccgtcggtattttgctgggcagcctcatgccgcatggcaatgtgggttatgaactgctgagcgtggtgacgatgctcaccctggtgtcttttcatcgttataccttggggtttggcgcccgttgcgcctgcatcgcctgcgcgttggtgattgccggaaaagcgccgtcgatcgccgcagaaagggtggtcaatgtgttgctgggcggtggcatcggtctgctgttcgctttggcggtgcacgcggtgttgccgctcaacgccggcacccgccaatag

SEQ ID NO: 437385 - DNA, 1200 bp, Serratia marcescens
atgaacaccgccaccacccacggcgcaccgtccgccaacgtcgtatttctgctggccgccggcgccggcctcagcgtcgcgtcaatctattacagccagcccatgcttggcatgatgggcgccgatttccacgccggcgtcgccgatgccggcatggtgccgacgctgacccagttaggctatgcgctgggcattttactgttggcgccgctcggcgaccggtacgatcgccggcggatcattctggtaaaaggcgcgctgctgacgctgacgctgttactctgcgcttttgctgcctcgttcccgctgttgttgctcagcagcctggcgataggcctgaccgccaccgtcgcgcaggacattatccccgccgccgccacgctggcgccggaggccagccgcggcaaaaccgtcggcgcagtgatgaccgggctattggccggcattttgctgtcgcgggtgttcagcggcgcgatcgccgagtacgccggctggcgcagcgtctacgcgctcgcggcgctgggcgttttgtcgatcacgctggcgatctggcgcatgttgccgcgtcttcgccctcataacgcgctgagttaccccgcgctgctgcgctcgctgggacatctgtgggccgagtatcccgcgctgcggcgcgcaacgctggcgcaaggctttctgtcattgggcttcagcgctttctggtcaacgctggcgttgatgctggcggagcgctaccagatcggcagcgcggccgccggcgcgtttggcctggcgggggcggcgggtgcgctggcggcgccgttggcgggcagtctggccgatcggcacggccctgacgtcgtgacccgtatcggcgcgggactggttctggcctccttcgccttgatgtttctgctgccgctgttgccgctcccggcgcaactggcgctgattgcgctgagcgccgtcggattcgacctgggcatccaggctacgctgatcgcgcaccaaaccatcgtttacggtctcgatccggcagcccgcagccgattgaacgccctcttgttcaccggcgtgttcatcggtatggcgaccggcgccgccctcggcagccgcattctggcaagcgcgggctggccgggcgtcgtggcgctggcgacggcggcgggggccgtggcgctgtggatccgcagcgggcgcaaaacggcgcgcgtagtggcctga

SEQ ID NO: 437386 - DNA, 1293 bp, Serratia marcescens
gtgcagcgcgatgccgttggtgatggcggtcatgccgaactcgcgcacgccgtaatgaatgtaattgcccgccgggtcaacgttcagcgctttcgagccggaccacatggtcaggttgctcggcgccaggtcggcggagccgcccaggaactccggcagcaccttgccgaacgcttccagcgcgttctgcgacgccttgcggctggcgatgttggccgggttggcctgcagtttttccacgaacgctttggcgtcggctttccagtcggccggcagctcgccgttcatgcggcgcttgaactcggcggccagttccgggaaggccctggcgtaggcggcgaacttgtcgttccaggccgcttctttggcctgaccggcttctttggcgtcccactgggcgtagatgtcctgcgggatttcaaaggcggcgtatttccagcccagtgcttcgcgggtggcggccacttcggcggcgcccagcgcggcgccgtgcacgtcatgggtgccggccttgttcggcgaaccgaagccgataacggtcttgcacatcagcagcgacggcttgtcggtcaccttgcgggcttcttcaatcgccgccttgatggcgtccgggttgtggccgtcgacgttgcgcaccacgtgccagccgtaggcttcgaaacgcagggcggtgtcgtcggtgaaccagccgtcgacgtggccgtcgatggagatgccgttgtcatcgtagaaggcggtcagtttgccgagcttgagggtgccggccagagagcagacttcgtgcgagatgccttccatcatgcagccgtcgcccatgaaggcgtaggtgtggtggtcgacaatgtcatggccggggcggttgaactgcgccgccagggtgcgttcggcgatggcgaagccgacggcgttggcgatgccctggcccagcgggccggtggtggtttcaacgcccggggtgtagccgtactccgggtggcccggggttttggaatgcagctgacggaagttttccagctcgcgcatcggcaggtcatagccggtgaggtgcaggaggctgtaaatcaacatggagccgtggccgttggagagcacgaaacggtcgcggtcagcccagtgcgggttagtcgggttgtggttgaggtagtcacgccacaggacttcggcgatgtccgccatgcccataggggcccccgggtggccggaatttgctttttgtacggcgtccatgctgagtgcgcggatagcgttggcaagctctttacgagaggacatgttttactccaggtcggataa

SEQ ID NO: 437387 - DNA, 138 bp, Serratia marcescens
atgaagatattcaataaatttgaattaaaagtagagaaatacgccggtccgcagaaagataaaaaaatcatatatttcaataaattaataatatcagtgaatagcatgacattactgccacacagatccaatttgtga

SEQ ID NO: 437388 - DNA, 231 bp, Serratia marcescens
atgaaatcccactggataaggcgtttattgacacccccaccagcctggacaggcagagcatcggttatcttgggcctgctggtgtttgtggtgttgagcgggctggatagcctgggcgtggatttggacggctggaaacgctacgtgatgatcgcgggcgtggcgggtatttgctatttctttgccggatatattgataagcgcattccgcgcaaatcctcgccaatgtag

SEQ ID NO: 437389 - DNA, 999 bp, Serratia marcescens
atgagctttgtgattgatgccgatgaatgggactttaatggactgacagaagaacaatttcactataggatagacaatattcttgagaggatagctgttgcaagagaacgaaacgagaatgtattagtagggaacactttgcaatcaagaagtgtatttaaaaatatggatttatggtcttttttatttgatcctcccgaatttgaaatctctcaagaaataaaagaagagttaacatcattctttaatactgttgaatattacgaagataattctcaatcttggcctcctggttttttggaacacgatgttcttagcaattctggtgagaaacttggtttggatttgtcatttatttattttaatattcaagatagacagccatttgcgtgcctaacgtttaactctttggactcaattgaagcgatatcttctaataaaaaaataataataccatatgtaagagatgagtgttctcataggggtttttggcaaaattacgcacttgaaattatgcgagatacccaagaaaactttcaatttctttcaccacatgcatatccagatattttttttcgtgatgaagtttgggggcaactacatgattttgatggaggatacaattcggttaaggctcagttgaaaaaatatctctcagcattagatagttacggtgcatgggtgtttaatacaccgccaccgcttctcaatccccaagatacagccatcccgattgtagagcaaactccgtcgaaacaactgatacaagaacgtttccaagggcttgcactaaacatctctccggagaaccctaatgtttacgaacatagaccatcacgagaagccagagagatagttttagaaggtaaaaaattatattgtgagtggcatgctaaacttgaacttcatagaaatagggtgcatatacacccccctttgcaagagtctaatggtaaggtcatagttgctatatttcataggcatttaccattgccataa

SEQ ID NO: 437390 - DNA, 1131 bp, Serratia marcescens
atgattgaatcaattactataaaaggtttcaaaagattcaaaaaagagcgttttgaatttaagaatttaacaattctagctggcctaaatggctcaggtaaaacatcgctaattcatggtttgttagttgctagggaagctgcaataagccaagataaaaattccgtaaaccttaaggaaaaatacggtatagagttagggactgctgaagatgttttaaactgggatagtagggaacaattcagttttgatattctacatgattcaaaaaaactatgtagctggactttaattcctccacatccattatctctttacttgtctataagtaagaaaatggttgacgatggccttcctgtttcgctactcaataaatcaagagtatttacttatctttgtgctgaaagacttggccccagaagtatgtttgaactgtctccaactccagagcaagaattagaggttggaataaaaggtgagaattgtgcacaaatcatttcagccttaggaagttttccacttaatgatagctcccgattacatccagatacaaaaatggatgaacctgtttttttaagttatcagttagaaaaatggttaagtgaaattgcaaggccagtagaaattaaagctaataggcctataggcgctcatatcgctactttaagcttcaaagcaattggaggagaatgggtgcaggcaacaaatatggggtttggtgtttcctatgctttgcctattatcttagctggattgattgctcaaaaaggaggcgttattttagttgagaaccctgaggctcatcttcatcctgccggacagtcacgaatgggggtttttctaagttggttagcaagcaaaggtgttcaagtcattttagaaacacattctgaccatgttttaaacggggttaggcgttctatagcggaatataattatattaaaagcgacaatgccaatgtattattttttgactcatctgatgcacaagtaagtatcaagtcactggagtttaactctttaggggggatgtcaaaatggccacagagcttctttgaccaataccagatagataccgctgcattaggaagattgagaaggagagtaagtaaaaatgagctttgtgattga

SEQ ID NO: 437391 - DNA, 1185 bp, Serratia marcescens
atggcgcgagagatttctaaagaacaactcccacttctatatgaaacgcatcaagtagtggaagatgaagattcatatgacactgactttgatgtccagccttgggatcctgacaaaatcaggatttctactaagcatttctcactcagggaagtgatagaacaaataaaagacaaagatatagacttgtcgccggatttccaacgcgattatgtatggagtgcgcggcagagaactaggttaattgaatcgattttgctgggaattcctttgccagcgttctattttaaccaagaaagtgatggttcctatcaaatagttgatggcgtgcagagactcactacagtgtctcttttcatggatgatcaacatactcttacaaagtcagatattgaatatcttacccatcttgatgggtttacttttagtaagtttggacctttagaatcacggcgtttcagatcgactcagatagttgtccatgtaatagaaccttcaactccacctgatattaaatacgatatatttagccgggtaaataccttagggagtccgctcaaaccccaagagataagacatgctatgagccaaccacgctcaagaaaatttcttaaggatcttgttgaaagcgaagaatttgataaagctacacaatacaatttcttcaaggctactaatgatggaaaagtgcgtgatagtgctcggatgagcgatagagagttagcgctaagattttgtgcatttaaatctactagtttggatatctataaaaaatattctgggcttgatcgtttcttagttgatgccaccaggtttttagatggaaagataactgatcattgtgagccactttcagatagtgatctgaagttattaaacaaatcatttaaaacggccatgcgaaacgctaaagaggttcttggggaacaagccttccggcgtattgagcctggaaaaagaagggggccaattaacagagctatctttgagtcacaagcaatagctttatcaaactatactttgaagcaggttacagaaaaaaaagaagagataaagaaaattctcattggcctatttttggaagaggactactcaaaagcagtaacagtaggtacaggtgcacctaaagccgtccaaattagattggaaaagccacagaaagctctgaagagaatattaaaatga

SEQ ID NO: 437392 - DNA, 1971 bp, Serratia marcescens
atgctttcttcttcacagaatttcagacatgacatcaacgggcttagagcctgggcagtgatcgctgtcgtactttttcatttcggcatcccgggttttgccggcggctttgtcggcgtagatgtattcttcgtcatatccggtttcctgatgatgcagatcatcattaccggcctggaacaagatcgtttttcactttggcgcttttacctggctcgagcccgtcgcatcattcccgccctacttgcgctctgttcgaccttactgtgcctgggatggttctggttaccaacgctggattacagtcaactggcaaaacatgcctttaccgccatactcttcctgtctaacgtgaagttttggaaagaagccggctattttgacagcgtatcccatgaaaaatggctgctgcatacttggtcgttatccgtagaatggcagttctatattatcctgccgctggcccttatgttgatatggcgattggggggcaaaaatggcttcatgcgcttcatcattttagccggcgcggtctcctttggcttatcaatcatcatgtcttccctcgcgccctccgccgggttttttcttatcccatcccgagcctgggaaatgcttgccggaggaatcgtctggcggttaacgcaaaaccgaacgctcagcggaaaaagacgtatttatacggaatggcttgggatgctatgcatcgcgatagccatcgtgggatgtgatgccagtaaaccctggcccggttacaacgccctgttgccggttatcggcgccatgttggtgcttgccgccggccgccaggattcccccttgacctcaaaccccgtcgctgcacgtctgggtgtttcatcctactctatttacctttggcattggccgattgtggtgctgcttgtctacaccaatgctcaatccgagatgaaatgggtagttgcgggattactggccagcgtgttgcttggcgagttgtcgcttcgtcttatagaaacccctgtccgcaagtggctttcaaggcaaacaacgcgtcaatcagtgtgtacaatcggaatcgctaccatgctggttgctgcgctgtgtgtcacactgtttaccgttaatttctccggcaggttaccgcagcaaatcgatctgatcgccaacgaaagtaccaacatgctcgccaacagagatgaatgcttcgccaagtccggcttcagctcgccatcctgtatctatggaggcgaaaatattcgggttatcatcgttggcgatagccacggcgatgcgatgatctctgcagtcgagtccgccctgccaaatcaaactgatgggcttctcaatctcacttatgcaggctgcccaacgctcttcggagccaacgttgttcccggcgcgcttgacgataatattcagtgcagcgcattcaatcagtggataaaagaaaaactatccacgctggacaacaatatccccgcagtcgtgattaaccgaaccagtgcttacgccttcggccagcaaattgcgggcgcgaagctgaaccaaccctcggtgtatttttcgaaggtatatcgtacccctgagccgggatttttgtccgagttcaaaacttcactcgtcgacactctgtgtgaaatggctacagaacggcaaatttatgttgtgcgtccggtgccggaaatgctcgtcaatgtgccaaaaacactgtcgcgcctgctgagttttggcggttcagagcccgacatattcatctccgaaacagattaccgacaacgtcatgcttttgtctggcaagctcaagatgaagcggcgaaaaaatgtggcgtaaaaattttggatccgcttccttacctgtgcgaagacggcaagtgcgcgggaactcacaatgggcggcccatctattttgacgataaccatcttagcgaatatggcaacaaacttctggtaccgatgttcaaaactctgttctcatcagcgtccaaataa

SEQ ID NO: 437393 - DNA, 1533 bp, Serratia marcescens
  misc_feature (1504)..(1513): n is a, c, g, or t
atgagcatcacggcgcaggtaagtatcgcgcaaaaattgggcttcacctcccaccagaatgctgttccgatgttacgtgagcttgtcttgcataacgaatccgatcaaacctaccaaaatctaacgttgcacctgcaaacagcgccgtcggtgctggaagcaaagcaatggaatattgactgcctgctgcctggttcatcgattgatattcgtgagcgagatgtaaggctcaatgcggaatggctggctgaacttactgaaagtgtgatttgcgaagtcacgttaactttacggcaaagtgacaaagagctcttcacgcttcattatcctctcgaggctttagcgaagaatgaatggggtggcaatgcaatgtccgaactgctgccctctttcattatgccgaatgatcctgctgtagatcgccttatcaaagctacatctgatgtcttgcgcagtgctgggaaaaaagatgcgttggatggctatgaaagtaaatcccgaacgcgcgtgtgggaaatggcttctgcactatggacagctgtttgtaacctgaatatcagctatgcactcccccccgccagttttgagcggaacggtcagaaaattcgcacacctggtgcaattctagaaggtaaagtcgctacctgcctagatacaacgctattatttgcctctaccctggagcaaatggggctcaatgctctggtaatccttagcgaagggcatgctttcgctggtttctggcttcaaccgcaagagtttgcacaactagttactgacgacgtatcttctgtccgtaaacgtgttgatttaaaagaaatggtagtgtttgaaactacgttggttactaaagcacagcctccttcctttactcaagctttcgatgaagccttaaagcatcttactgaagaggagtttcacgcagccattgatacccgtcgcgcacgtatgcaaaagattcgccctctggctctggggagcactcgcttagaaagtcggttagattcagaaccgaatgttcgacatggctttgaagatgcaccagtacttccttcttttgaacttgacatagagatggaaggtacgaaagatgccgctggccgtctcgtacagtggcaacgtaaactactcgatttgacgacccgtaaccgcttattgcatttaccagacagtgctaaaagtattcgactgatatgcgctaatcccggttacctagaagacaaactggcagagggaaaacgaatccgtattgtctcattacctgacctcgagttgggggggcgtgatgcggaattatatcgccagcaaacaaatgcagacctccgggaggagtatgcccaacaggctttggagcgtggtgaagttgtatcacctctcgaaaaagaacgcctggaatcatcacttattgatctgtatcgaaagtcaaaaagcgacttggaagaagggggagccaataccctgtttcttgcaattggtttcttgaaatggaaaaaatcagctgaannnnnnnnnnagatacaagaaattacttag

SEQ ID NO: 437394 - DNA, 900 bp, Serratia marcescens
atgaaaaaaagcatgcattatctgatggcgatggccttttccttgagcttctccacgcaggcgaagttagacccggcgcagccgttgtctagcgctccgccatactcgctgtttgaagagtgggcgcagccgatagcgccgttccagatctttgagcaggtgtattacgtcggcacgagcaacctgtcgtcggtattgttgagcacgccgcagggattgattttgatcgatgcggggttggagagcagtgcgccgggcatcaaagcgaatatcgaacggctggggttcagcattaaggatctgaaatatatcctgaacagccatgcaaggctcgatcaggccggcggcattgcgcagctgaaacgctggagcggcgcgaggctggtggccagcgcggccaatgcgcggcagttggcgttaggtgggcggcaggatttcgcgttgggggatatgctcactttcccggccgtgcaaacggatattgtggttgccgatggcgacagcatcacccttggcggcctgacgctgaccgcgatgatgacgccggggcatctgccgggcgcgacgtcgtggttgaccacgctacggcataacggcaagccgtatcgctttatctatgctgacagcctggctacaccggattactacctgatcggcaacaaaaactatccgcagctgattgaggacattcgcggcagtttcgcccgtttggcacgggtgcaggcggatatatttatcgccaataaagggacgcgtttcgctttggccgacaaatggcggcgtttgcaggccggcgatacgcaggcatttatcgatcccgcagggctgcagcgttacgtgcaggagtcacagcaggggtttgaagagcagctgaaacgacaggaaaacgtcaaacgctga

SEQ ID NO: 437395 - DNA, 903 bp, Serratia marcescens
atgaatattctacaaatggacatgaatctgctgaaagtgctgtatctgctgatggtaacgggttccagccgtaaaaccgccgagcggctgggcatcagcacctccgccgtcagtcatgcgctggctcgcctgcgggaagtgttggatgacccgctgtttcgccgagaaggacatcgccaggttcccaccctgtttgcactgtcgttgaaagacaagttggcgccgctgttctcctcgctggacagtgaaatgttcggccaacaaccgcaggcgccgcgtcgcttcacgctggtggcgccccccgctctgcaccctattctgttgcctttgctggcggaaaagggcgccgcttgccatgccgatattcactgccaaaactttgaacgacgcgcctggcgcgaagagctgcttgaggggagcgtcgatctggtgctggcggtgggcgatcatcaacaacgcaccagcgcactgcattatgaagcgcttgggcgcactcgcctaattgcgctgtatggcccgccgctatacccagtcctgcaagataaacgcgcgctggccttcagcgaactggcggattacgcgcattattattgccatccgtggccacaaacggaaaacgagctggatcggcagcttgagcgccaggggttgcaccgccgcattgccctgaactgcgccgactacgcacaacttccaccggtgctgcgccgtgcgccgttgctggcggtagtgcctcaaccatggtttaccgcccagcccgacaagcacgggttaagcgcgctgccgattagcgataacctggctatcggtcaccttttttctcaataccgaaaaggcgagccggagtggcgaaagcggctgatttccgccatccacgccgagctgcgacactactaccgctaa

SEQ ID NO: 437396 - DNA, 630 bp, Serratia marcescens
atgaaaaagagactgttgcaaaataaattatggccaataagcgtatttagcctgttgatgtttttttccggtcaacttattgcctcgcctgctgctgagttgaaagtgtccgggaaaataaagcattcaggatgcaccgttattgccggtaacgatggcgtttatgattttggcaccgtgcgggaaggcccccgggggaaggtacagagattgccggccttgaaacaaacctggcaggtgcgctgtgagggcgatgcttacctgacgctcattccgatggataaccgctctgccagccgcaacgggtcggacctgagtcgtttcgggctgggtaatacgtccgatgggaactccattgggtattttatgttgggcctgtctcgttccacggtgaacagtgttccggcagctttgcgcgcacataatgcggccgggacttcaccaggtagcgaagtggcgttgatttccggtgagcgtaccgattggttgctggcggattcgacgcgagcctttggtcgtacttataccatggatatttcggtgacgccggttctggctgccgacattcccactgccgataaagtggagctggacggttcggtaacgttgaattttgtttttgggctctga

SEQ ID NO: 437397 - DNA, 642 bp, Serratia marcescens
atgatgaaaaaaacagtaatctctgcaagcatcgccgcagtcttgatgatggcgaatcaggtttctgcggcatctatgtcaccagagctgaaggtcaaagggcaaatggcggtaccgtcttgtcaggtatccattgttaacgatggcgttttcgatcttggcaagctgtccaatgcgttggtgagctccacgacagccaccgcgctggctaaatcgcaaaaacagttggtcgttgactgtgaagccgaaacctttctgaatttcaccgtggtcgataaccgcgaaggcactgccagcgtaacgggcagcgccaactttggcctgggtggtgtcaatggctccggcaaactcggttattataaagtcaatgcccttaatgccgcagttaacggcgtttcttcagcactgtacagcgttcagaaaggcgccacgacattctctaccgtcagttcggcctatgtcgataaaaacaacgtcacgggttgggcaaagtcgggtaatgttcaaaacagcggaagactcttctccgtaatgctggaggttgaaccttatttggcttcttctaaagacatgaacggtcctattaccgatagcgtaaaactggatggatcttccacccttaattttgcgtacggcatctga

SEQ ID NO: 437398 - DNA, 639 bp, Serratia marcescens
atgaataaaattgcgttgcgcatgatggtagctgccacgctgcttgttaccggggggagtttggccgccggcccgagcgcggaaattaaagtagtgggtgaactgatagcgccgacctgtgaggtcaaactccctaacgagggcattttcgattatggcagcatcagccatacgagaatcagcaaggacaagccggttagcctgggagttaaaggcggcagtaccatggaggtgaaatgcgatgctgaaacaccgatgacttttaacgttatcgacaaccgtctgggcagcgccagtgagacaggaaaaacctttggcctcggtaacgtcaatactaccggtaagctggggttctattcgattcaggcctatttccctcagattgatggggtgactggcagattgttcgttacttcagacacgtcgatcacttcacctcaaaccgtggttaatcttgagcacggtaagcgtgtgggttgggcctcagcttcaggcaatacgttagctatcggtaaaaacttcaccgctcagctgttggttgaagccttcctggccaaaagcggcgatatgcacggcggggtgagtgaagacgttagtctggatgggtctaccacgctggagttcggcttcgggctgtaa

SEQ ID NO: 437399 - DNA, 2370 bp, Serratia marcescens
gtgtctatcaggcaaagcgcatcggcactgctgtttctgttggtctggccgatgacgaaaactgctgcctccggattcgatgtcaaaaccctggcgcaactggggtataacgcggacatcgctgcctttttcaataccgctcggtttttgccgggcgtacaccgggtgatgctggaggtcaacgcggcgcagcgctaccaggaggaggtgcgcttcgactctgaaggtgagttatgcctggatgaacggctagcacagacgctgcgtttacgggttgcgtcgcctccaggccgctgcgaacgtcttgagacgtattggccgcaggcggtggtgagggtatttcccggcgcctttcgggtggaaataaccctgccggaggtggcgttcgacccggataaattgcgtaccgagcagtcaggtggccatgcgctgctgctgaactacgatctttacgccaaccgccgccaggggcgctacggcaatcagcagacgctgcaggcgatgctggagccgggcatcaacctcagcaactgggtactgcgcaaccgttcgagctacagcaacgacgagaacggtagccggctcgaggtgtacgaaacctcggcgagcaaagattttcctggctggggtgcgtttgtgcagctcggcgaattcagtgccggcggcgtactaagtggtaacgtgccgctgagcggtgggcaactggcgtccgtggatatcggaggacacaacgctgcactgacagtgccgctgcagggcagcgttgtgaacccggcgacgttagaggtcaaacagcacgggcaactgatattccgcaccctgctaccagccgggccgttttcgctgagcgagttggggccggtgatggccgggggggaggcagaggtcaccgttatcgaaaccgacgggcggcggcaacgctttacggtcacgcccgatacaggcgacccagcggatcgctcgggcggctatcgtttggcggcagggcgttatcagccctacgggggcgaccattatggggcatcgccgccagcgttgctgctgggggagaaggcgttccgtctcggccaggggcagataacggtgggcggtttgttggctcatacctataaacgactgggctggcagggcagtttgggagacgacggcggcaactggttatcgggcagtgctattttcacccgtggccggcagcctggcgcgcagctggagacccaagggcaggtggctatggggcggagtctggcgctgtctctgtcgtcacagtaccgcacggaaggcttccgggaggcggacgaagggctgctaaacccgtcctcagtagaggcagagacggcacggttgcgctacagcggcgggctggcactttcctggcgggccctgaacgccggcgtgctggcttactcactgtcgcatgaacgctattaccgcggcagccggcgcagctggacgcatgcactggcatatggtgcgagcctgggccgggcgacgttaagcgttaacctacagtcttccgcttatgatcgtgctgcggtctatgccgggttgagtctgccttggggggggggcagcgttagcagccggttgcaggcgcggcgtaacaagcaaatgacgctgggcggcagttggcaggggccgttgagcgaacggctcaatggctatctggacgtgacgcgggacgcggacggtgactatcagagcgccggcaacctgaacggcgagacgccctatacccggcttgggttgggcgcctcgcgcagcgggcaaggtagcacatcgctgtcgctgtcgtcgtcgggagggctgggggtggccaacggcacctgggtgacgtcgccgcagcgcatcggcgacaccttcgcggtgatgaaggtgccaggacagtccggtgtgaaaatatcgggcagcggcaatggcgtcacggatttcgccggtgacgcgctgctgccggtgctgatgccctacatgccgctgcgtgctcaggtcgatacgttgtcgctaccgctgaacctacggctggacagcacggatgcggcgcttgagctggcgcgcggcaccgtggcggagaggcgctttcgggtgaccgaagtgcgccagctgctgctgactttgcgtgatgaaagcggcgctccgctgccgaccggggcgtcggtgtacgatgaacagggccaattgttgggcacgctgataggcgaaggcaacctgatgctggtgaacgacgatatcggcaaggcgctgcgggtgcggcgtctgaacatgaacgaatgcgtggtgagttacgcggtgccggcggcgttcgacccgtcggtgttgtacgaagagggcgatggcgtctgccgtgcggtgggcggctcgtccgataatggatga

SEQ ID NO: 437400 - DNA, 684 bp, Serratia marcescens
atgacgataaaacggagactggcgcaactgctgggcgggctgtggttgacgctggggctggcgcattccgccggggcgtcgtttcagctggagagcatgggcatcgtgctggaggagaacccggggcgggtgagcttcagcatcaggaacagctcgtcggagccgatattgctggcgacgaaggtggaggatttggatggcaaagggttcagcaaggcggtgctgctgtcgccgccgatagcgcgcatcgaggcggggcagagccagcaggtgaactttgtgctgaagccgggtacggcgctgccgcacgaggtgatgctgaaggcgtcgttcgaggggatagggcaggcggtggacaacagcgcgcggatgccggtacggcagagcatcgggctgattctgcagccgaaagcggtggcggtgagcaagacgccgtgggacgacctacggttgagcgcaggagccggtcggctgacgctcaccaacggcgggttgcacgtggtgcggctggcgccgcagctgacgttgcagccgtcgggcaaggtggtgacgctggagaactactacctgatggcgggcgagacacagacgctggcggtggaagggcagccgacgtcggttgtcatcacgccgctgagccgctatggcttcaagcaggatgcggtgacgctgacggtgaagtga

SEQ ID NO: 437401 - DNA, 1068 bp, Serratia marcescens
gtgattcaatcagaaaacaagctcctacaggatgtggtgtcgacccttgaaagcatccttgaagctaggattaaaaaatggagcggcctaccgggcgacgacggtattgattgtgtgctggaggtcaggggtattcagggggtctggatcatgcccgtagaggtaaaaaaacaggcttacccaagggatatcaggcaagcaatctggagaattgaggagttctgtcagaaaaatgccaatgagcctgatattgtcccgatttttgtcgctgagttgatcagtgagggcgcaagagaaatgctcaaaaagcatgatgttggatattatgagatgggtggcactctctttatcaagcataaacagtcaattatcgatatacaaaaaccccgcaaaagagcagcgaaacgcgggagtggcgatctgttcactggtgcgagggaaatggtcgttcatgcattacttcagtcaaagggaaaatggttctcaggtgaagaactcagtgagcgttctggaacttcagcatacacggtttctggtgttttaagagagctggaaatgagagagtggctggacaaaaccagtgagggcggtcgttcacagcgccgcagactggttaatcccggcgctttacttaatgcctggtcggaggccaccaggcaacgggaaaatcgtgcactctacgggtatctgtttgcaccggatgcagtggattgcgtcagaaaaattgaacgcaaggttagtcacgcagacggtgacatcaactgggtgctgacgggtgccttgccggcaaatcaggccacgccattactcacgggcgtaaatgtggcagagattatcgtccccctcggaagtgcggagctgtttacccagctgacgggtattaaacgcgcggaaaagggctacaacgttgttgtacatgaatgcgcccccgctgccctgcaatttataaattatgaaaacaacatccccgtcgccagtgacttcattcagtacctgtctctgctggatggtaaaggaagaaatgctgaacttgctgaacagtttcgccgggaaattctggagatataa

SEQ ID NO: 437402 - DNA, 924 bp, Serratia marcescens
atggtaatccacaccaaaccgaaagacagatccggatactcagccattaacacggaaatgtgtgaacgggtattagtcactttattgaccaccttcggcaccatgaaaggcacgctccgcctgataggcggactcgtcccgcgctatttgacccccgcgcaggcacctcaggtgcctgaacattatggtacatctgatgtggatatcgtgctcaacctacaagtgatcgctgaaggggagaattatgcctctctgcacgatcagctggttgaaagaggcttcagaaaaaactctgatacaaacgcatggcgctgggagttccccattcccgatggttctcccgtattggtagagtttttacagggaagcaatgctgacggaaaacccggcaaggaagtcccgatagacggcgaggcggtttctgctctcgtgatcccctatgctgaaatgtcatatgaatggttcgctgagaaagagatctctgcgatgctctttggggataagggccagggggatgcggggattgtatttgaaactatacggtttgcggatgaagttgtgttcatcctactgaaagcgatttcgtttcataaccgcaacgaacccaaggatgcagctgatttgatccatgtgatgcgttacgccggagaacctgaagacattgcagagaaattccttaatcgcataaaaagtggaaaacatcagacagcgatcgagacgggactgaatgcactgcagaaatgctttgctgaaggtaataacaacgttgaaggctacctgctgacgggccccgtgcgttacgggcagttcatgcatggtaccgatgaaaatttggaaaatgagaggctgcaggagcagcgtttcgcggctgcactagtaacggaagttctgcgcctcatagatgatggccgtgatgaaacttag

SEQ ID NO: 437403 - DNA, 813 bp, Serratia marcescens
atgaatattgatgaggtttatatcaaagaattatctctccagttattacccctactgatctctggagtggcatggtggtttttacgttggttaaagggatatgattcccgacgacgttgccagtttgatagcgtcagcgatgtaaaacgcgtgtccgtcctgtcacgtattcagaaattgcgggatgcgccgcagagtggcatgacgttgctgcaaattaaagcgctatatgaaagtattgggatccgcctgccggtatgggtggcgcatcaactagtggactatttgggccgtggaccggtggcattgaacgaccttgcgttgaacagtttcttgcgtcgtacttcgcttacagctagcaaaaatgaagacaacaaagtatttgcccttgatgtcaaccagttgtgtaagcagcgcttttttgtgctgatattctttgtcgtcagtgcgttggctatcgcttacggtgtctataccagcgtgcttccgttgggggcaagcgaagccactgccagtaatatatttttgttttcattattctttttcgcctatttgttcttggcgttgttcgttgtggcttggtcaattaatgaatggggaaccctgcagcatgccaaggctttctggctgaagtggcagccccacctgtatcagaacgaagcggaatatcaggcgcattgtcagcatgcgtgcaatgttgcggcacaggaaaacgtacctgatatcactttggagaccgttgctgatttgccaccggccgaaaagccacagcgtggatggctgatgcgtaggctgggcaagaaagataattaa

SEQ ID NO: 437404 - DNA, 327 bp, Serratia marcescens
atgcgttgtttggaggtggggatgagaaaattatcagaaatatcagcgttgctgaaagaaaaacgcattgagttgggctggagccaaaaagactttttgatgaagattggcatgactcaacagcaatatcagcgtgttgaatcgggcagcgatatgcggatgagcacgctgctacggatattggcggcgatggatttggaatatgttatcgtgccgaaaaggtctgtccgtgatgtggagtgcctgctgcaacagactgtgagtcatgcaccagaagtgagtaacttacagaatttcgaagaaaaactgaaagatctcgaggactag

SEQ ID NO: 437405 - DNA, 1395 bp, Serratia marcescens
atgaagcttatatttctcaccctcattttaatgctaagcggatgtgtggccaatgcaccatttcgtacttccgatgggaaaaactgcgaccactggagagggtgtggcagtaactatgagacacacaccggctatgatttggggtttatcgaatttagtgagcgcggccatgattttgctccacagcaaacagcgcagcttttatcaaatatagcgcgtatggaagagaaagaagacgttggtgtcatcgtgtttatccatggctggaagcataatgcatccgtacttgataaaaatgtaaaaaacttccaaaaaacgctctcctacgttgctgccccaaggataataggaaaaagaaaactattggggatctacattggctggcgcggaatgagctttcatggcgcagagcttgaaaacctcactttttgggatcgtaaatccgtggcagaggaggtgggccgcaacggagtaaaagattttctcatcaagctggagtcaatcgttggtaaaaataacaataattttatgctcacagtgggacacagctttggtgccgatattttactttccgctttgaacgataacctgctggagagaatgagaacagctgaaaataatagtacattgaaaccctttggcgacggcttgattcttttaaaccctgcggtagaagcaaaccaagccctccttttaaaagagagcagcatgagactgggcgctcaaggaaaacccatgccgtcactgatgtatgtcatcagttctcgcgctgatatccctaccaacgtggcattcccggtaggtcagttttttggcaaaaacataagatggtcacaggtagagatagaaagagattacttcggggtaaaatataaaataaaagagcaggatcttgacgatataacggtaggcaactttaaaatgtttaccacgggttacatgtataataaagaacataccgtgagcgacaccaggacatctcagtaccatattcccgcgcaaatatcaaaaaaagaagacctgttagacattgagcaattgataccggaagctatcaattccggcattatcggaccatggaaatttaattcttattgtacccgtaccctgcaccagaaagaacaatatcaccatgatagactcccttgtttcgacaacgatcctatagatttcatttcagtacctgattcttttatctctaaccacaacgatatattcaaccggaatgtaataacattactaatgacaatgacaagccaatccctcagcaataaaaaaggtagaataacgaaatactgtcaaaaaacaggagggttttcattcgaagattgttttaactactactacttaataaatgaagatttcacagttaataagcattcaaaactctattaa

SEQ ID NO: 437406 - DNA, 198 bp, Serratia marcescens
atgctggagaacggattcgccgtgttcgggtttatcgatttcccctgcccggtcaataatctcgaggtgaatcagttctttctcgccgcacaccgttattcatgcattgcgttatcggccatgatggtgattcatgtatcggcggtgataaaacaccactgcttcgtcaaacggactattctgcgccgcatgttctaa

SEQ ID NO: 437407 - DNA, 738 bp, Serratia marcescens
atgcgtccggtaagaaaaggagtttcgcccaatgataacattgattttgatgattacaaaaaagcttttcctcacctggtcgggcgtatcggcagttattgcagttactgtgaacgccgtatcgctaccaatttagcggttgaacatattcagccaaaagatggtcaatatggacatccggggctgacaggcagatggagtaatttcttgctggcctgcgtaaattgtaattctaccaaaggtgccaaggaggtcattctcgcaaacttgttgctaccggacagggataatacgttcttcgcgtatgtctattctgctgatggtaaggtggctcctgcaacgcaactttccccagaacaacaggtgatggcccaaaaaacattgtcccttactgggttggataagaagatcagccagatccttgatgagaatggcaaggctgttgctctagaccgggaaagccagcgcatgcaggtatggggacaggcgcaaactgcgttggcagatgttaactctgccccagataatgagcgtttgaagcactggatcattgaagccgccaaggcgacgggtttctttagcatttgggttaccgtatttgctggcaaccctgatatgtgtctgcgttttatcgcggcgtttgagggaacggctgaaagtgggtgctttgacgctgcaggcatccctgtcgtgccgtcacagaaccctgacggatggcagagtggcgctaaagcgtga

SEQ ID NO: 437408 - DNA, 1317 bp, Serratia marcescens
atgaaaatcaatcaaatttccttagcaaattaccgatgcttcgcacaaggaacattccaattccatccagaattcaatcttattgttggtgtgaatggcacaggcaagacggccttgttggaggcgctctctgtggcactttcaacctggctattgggcttccggaataaacctgataatagctcgttgtctaaagacgatgctcgtctcagctatcaggaaattgatggtagagtgaaaacaacccagcattggccaataaccattggcgcgcgtggtactgtgtttgagcagaatatcggttgggaaagatcgaaagagagtgagagcggtaaagttcgtcatggtaaagccggtgatttgatatcgatagccaaagaggcagataaaaagcttcgaggtagcgagactgttaccctccccctggtggcttattatggcaccatgcgtttatggcaagaaccccgtaggctgaaacaggaaagtactattcatgggcctggcgctttaagccagcaagagaaaacgagtcggttaacgggctatcgccatagtgtggatcccaggatttctgtacgtaacctggtgagttggtttgctaaagaatcttgggttacctttcaaaatagcggtgaggaatcagtcagtcttcaggtggttcgtgatgccattttaagctgtgtggatggcgctcaaagattattttttgatgccaagcgtggtgagttactttttgatattactgcacatgcaattcagccctttgctaatttaagcgatgggcagcgctgtatgctggccttggtcgccgatcttgcccaaaaggctgtcgggttgaatccccatcttggctctgatgtgctaagagagacttctggcgttgttttagtcgatgagttggatctacatctgcaccccaaatggcagcgccgggtgatcgaggatttacgtcgcacatttccatcgatccaatttatatgtacgactcattccccattcttgattcaatcattgcgctctggtgaagagttattgatgctagatggtcagcctactgcagaacttaataataaaacattggcagatattgccgaagggattatgggggttgatgactcagaaaccagtattcgctatgcggaaatgaaagaaacggccaaaaaatatctgaccatgctggatgaggctgaattggcgccggcggcgaaactggagaaatttaaacggcgtttatcagatagcatagcgccttatgcggataaccctgcttaccaagcatttctcgagatgaaacgtgccgctaaattaggggagtaa

SEQ ID NO: 437409 - DNA, 1092 bp, Serratia marcescens
atgacacaaaaaaaccgccaggttatttggcgcggcatcgccttgttggcgctgttgctggctcaatcggcgtgggccgactgttattacagcgataagtcgagtatcaagaacgatctgacggtcaatgcgcctttggtgaccggcaatatcagtattggcgcagatgtgccggttggctcagtgatctatacgcaaaactttaatccctcattcggcacagtatgggttaaatgcgatacgccgcagacgttcgtctcgctggtgatggattatgaaacgcctccgtacccgttatcggggtggagctcggcgaaattcggcaaagtgtatgaaaccggcttgccgggggtgggcgtatttatcgataatcactcgttggatactttcacgctgccgtatatttccaacggtacgttagtgaaagaggataatggctgggcgaataacctgttcaagtatcgtatccgcttaatcaagactggcgacgtgcaacccggtaccgtcaccggcgccgctctgccctgcctgatgacgcgggtgggaccgaccgcagccccctttacggcgatgcggctgtgctttaccggcgctatcaacgtggaagcgaaaacctgcaccacgcccgatgttttcgtcgccatggggaaatatgacatggggcgacatttcaccggaaaaggcagcgtaaccgaatggaaagacgcctcgatccgcctgatggattgcccgaggttttacggcacggccgaggcccagtattcggatgacggtactggcagcattagcggcgcgaccggcaacagtctgacgctttcgttgacgcccaacacgtcggtgatcgatgacgtcaatggcgtcatgggcgtgaaagaaggcagcggcagcgccggcggcgtaggcattcagttgggatatggagcctctttacctcagagcgtacagttctcgcgggcaatcaccgtgccgctttctcctgcaacgcccacgtcttttactattccgttaaaagcccgctatatccaaaccgagcccacggtcacgccgggtgccgccgacgcgaccgtgacctttaacatcaattattattga

SEQ ID NO: 437410 - DNA, 2586 bp, Serratia marcescens
atggggcgaatatcggccgggcgtgacggggaaaataacatgagcggatattttagctttgcgcgcgcgggccgccatggcgcgtggcgtttaacgccggcggcgctgtgcgtgctcggcgcattaagcggctcagcctgggccgaaaacgtcgaattcgatccgtcatttctgaatatgggtaatcgcgagcatgtcgatttgtcacgctttgcacgcggggcggcggggttgatcggaaaacatcgggtggcgctgtatatcaatgaagaagccacaaccaatagagaaattgaattcaaaacgcgcgccgatggcagcctgtatccctgcctgacgtcggacatcgtcaaggctatcgcgtttaacgaggccgcgttgccgaaagcggcgctggcgccactggcgcagggagaggcatgcttcgatctgccgcggcaaatccccgacgcgcagatgaactttgatagcggcgagcagcggctggatattgtgataccgcagatttatatgcgtaaaaccgcgcgcggcagcgttgatccggcacagtgggacagcggcgtcgcggctctgtttctgaattacaacctgaacggctataccagctcgtcgcgcggcgtggactaccaatctttttacgccggtttgtccggcggcgccaacctgggcgcttggtatctgcggcataacggcacgtatagctggatgcaaaacggcacttcgcaatacgacagcatcaacaccttcctgcagcgcgatattccgctgctgaagggcagaggtgtgatcggccaggcgaacaccaccggtcaactgttcgatacgctggcgtttaacggcgtgcagctggccagcgatgagcgcatgctgccggaatcgcagcgcggctatgcgccggaaatccgcggcatcgccagaagcaacgctcaggtgaccgtgcggcaaagcgggcagatcatttatcaaaccacggtaacgccgggggcattcctgattgacgatctgtatcccaccggttacggcggcgatctggaggttacggtgcgcgaagccgatggcgcgcagagtgtcttcaccgtgccctatgcggcggtcactcagctgctgcgaccgggggccgatcgttatgaagcggtgcttggcaaggccgacagtgacagcctgcgggaaaagccctggctgtatcaggctacctatcagcgcggcctgtccaatgcgctgaccgcttacggcgggttgcagggggcggccgattatcgggccgtacaattagggacggccgtcggcacgtcgttgggtgcggtggggatcgacgtgacccaaagcgacagccgcctgagccgcgagcgacggcaaagcgggcagagctatcggctcagctacagcaaaaccgtcaacgaaaccaacagcagtctttcgctggccgcctatcggttttccacctcaggctatatggatttcatgaccgccatgcagacgcgtgagcgcatggctccgggtgagggggataacgccgttccgcgcgccaagaatcgtctgaccttctctgttgcccaagggctggcgtcgggatgggggcaactttatgtcagcggctcgctgcaggattattggaacgggtacgggcgtgataagcagtatcagttgggctacagcaacggctatcggtcggtcgcctatggcctgagcgcggcgcgcagcaagacgagtaacggcaaggcgcaaaatagctttttgctgaatatcagcctgccattggggcggcgcgacaaggcgggcgcgccgcagctgcgcctgggcctggcgcatgacagcaacggggcgaggagccagcaggcgatgatttccggcaatctcggcgctgccaatcagttcagctatggcctgagtgcgatgaacgccaaccgcaatggcggcagcggctcgttgaacgctcagtatcgcagccagagggcgctgctcagcggcgcttacagcgcgggcaaaggctatcgcagcggctccgccgggctcagcggcaccgtggtggggcatgccggcggcgtatcgttcagttcttacggttcggaaacgttcgctctggtggaagcgaaaggcgccgaaggcgccggagtttccacctacccgggcgtcgctgtcgatgcgcgcggttatgcgttggtgccttatttaaccccctaccagctgaatgaaattagcctggatcccaaaggcgcagcgtccgacgtcgagctggaagagacgacgcgcaaggtcgcgccttattctggcgcgttggtgaaagtgaaatataacgcccgtaaaggcatgccggtattgatcgacaccgggtctgcgggcgtgccggcgcctttcggcgccgaagtgctcgacgaaagcggcgccgtggttggcgccgtggggcagggcgggctggtttatgcgcgcgtcgctcaggacagaggcggtttgcgggtgcgctggggggcggatcgcaatgcgcagtgcgacttgaattatgtgctgatgccgcagcagaaaggcggtcggccggtgttgcagcgctttagcgcgccgtgtcgcagcggcgttggcgcagaacgatga

SEQ ID NO: 437411 - DNA, 705 bp, Serratia marcescens
atgagcaataaagctcgtgttttttcgtgcgcgttttttttggccgtgcttgcctcttttcccatgatggcttccgccagcgtagtgattaacggtacgcgggttatttactcttcgtcagataaagaaactacggtgagattaaataatgtgagcaaatcgccggtattaattcaaagctggattgatgacggcgatccgaataaaaaaccagaaaatatcaatgtgccttttattttgacgccgccgattaatcgcattgatgcaggcaaggggcagacattgcgtctgagttacaccggtgcaccgttgccggcggataaagagagcgtttactggcttaacgtgctggagatcccggccaaaaagcagcttacaggcgatgaaagcctgctgcaaatggccttccgttcgcgcatcaagttgtttttccgtccggatggacttagcggtgacgccaatgaggcggcaaagcagttgagctggtccgtgacgccgggcggcgtcaaggcgactaacccgacgccgtattttgtgtcgctggtcagccttgctgccaacggcaaggaaactgaggggcaaatgatcgcgccgcgatccgcattggaatttaaaggcgtcagcgctgcagcgggaaaatcgttaagcgtcgaattcgtcaatgactacggcgccgtcaataaattcattgctttggttaagtaa

SEQ ID NO: 437412 - DNA, 546 bp, Serratia marcescens
atgaaaaagtcctccgcaatagtgtttaccttgctcggcctgtctggcttggtcggccaggcgcaagcggccagcaacgggacgattaactttagcggcgccgtttccgcgacgacttgcgatgtgagagtcaacgggcaggcagccgatggcaacatcacgctgcctgtcgtcactcaggatcaactgagcgtgatgagttggaccgccggccgcacggcgtttgagctgaaactgaatagctgccagggcaccctgaaaacggtggccgcttattttgaggccggcccaggggtggactccagcgggcgtctgcataacctcaccggctcggcgaagaatgtcgcgctgcaattgcgtgaaggttcgggatcattcaatccgatcgtggccggcagcccaagtcaaataacgaatgctacctatcacactatcgcttctaccggtatggccacgttaccgtatacggttgaatattatgctaagggcgcagcaagcgccggttcggtagtgagtaatgtggtgtattccctgcagtacaaataa

SEQ ID NO: 437413 - DNA, 387 bp, Serratia marcescens
atgatggaacgccatctcttcggttttattatagatcacgacattcaactggacatcgccaacaagcgattggtgagaatcaattctctggcgccggaaaaatgggtgcactttagcgcggtgacattaaatgatgccatggtgagcttactggtttttttattacaacaccatggcgacggtcggaaattcaccaaagcggaaatattgcaacaggtgtgggatgacaacagttactcgtcatccagccaaaaactctggcaaaccattaaagagctcagattaaggctcgatgtgataggtttgccgcacgacttcatcgttaatgtgaagggggcggggtatacccttaataacccagtcgttacgcctttattctacgagtga

SEQ ID NO: 437414 - DNA, 639 bp, Serratia marcescens
gtgccgatagatgcctttcccaccccgtttgatccttcactgacttccacccgggcaaaaacctaccgtttgttgctggccagcgcgatgacgctgtatgacgaaggggcgtttccttcgatcaccgaactggcggcgcatgcgcaggtatcgcgtgcgacggcctaccgctattttccgacccagagtgcgctgattagcgccgtggtggcggaaagcctggggcctattctggaatggcgcccgcaagacgatgacgccctgaaacgcatccagcagttgctgactttcgcctatcctcagatggagcggcacgagggagcattgcgcgcggcgctgcagctctctttgcaacagtgggcgcacgcgacgccgggcgagaaattcgtgcgcggcaaccgcaagcgtctgttggcgctggcggtggaaccgctgcagggcaaactgccgccggactctctgcagagagtgattcatgctttctcgctgatttacggctcggaggtgtttctggtgctgaaagatatctgggggctggagcttgagagcattcaggacgtcacgcaatggatggccaaagccattctgcgtcaggcggaagaggacgcgacgaactgcaaaaaaacatcagcaggataa

SEQ ID NO: 437415 - DNA, 528 bp, Serratia marcescens
atgaagaaggtttttggcggtcttggttgcacattggcgctggccagcctgttttttttggctagcccgatggtacacgcggtatcgaaaatagtgattaccggcaacatcaaagcggcaccttgtgaaatcgacggcgcgaacggcacgatttcggtcaatttgggaaatgatatttccgctgcgaccctggctacgtccggcgcttttagtccctgggtagaattccctctgacgttaaaaaactgcccgagcaccaccacatcggttgtcgcgaccttcagcgggacggccgctgaggaaagcgccagcttatacaaaagcaccggcagtgctcgccgggtacaaattgaattgcaaaacaaccagggagcaaacctgggcaatggcaagaacatgacccagccagttaaccaggcgacgcatgaagccaaattcaatttgcgggcgcgggcgtacagcacccatggtggttcgacgccaggttcgatagacggcgctctgcaagtcacttttgtctatcaatag

SEQ ID NO: 437416 - DNA, 204 bp, Serratia marcescens
atgaagaaaatcaatctgtctgaagcggaaaacatcgtcggcggtactttcgtttgttccaaggaatttgcttgggtgggaaccggcagcaacagaacctgtaacctggtgaaaacctgcgcggataagttcggcggtgtgcaaaagtattatacgccggcacctgctgcgagctgcccgactaatccaaccacgccaagctga

SEQ ID NO: 437417 - DNA, 234 bp, Serratia marcescens
atgcagactgacggttccccgctcgcgggcgcctcgcggcggctgatgtattcaggcgtggcgatgctgctcattctgttgatgctgtcgtttcgcggcgatgtgcacagccctgctcacaaaggcctgcatgcttccggtttgcagcggggccatcaggtggcggtaacggacgcctccggctgcgcgaaatatcggattaaaaagctgctgcgtcgcctggctcagctctga

SEQ ID NO: 437418 - DNA, 5079 bp, Serratia marcescens
atgtccgtaaaacagtatgaaacctatctggcaaaaacctttattgaatgggtaggtggcatcattcagcctggcgagcgctaccagttcaaatctcccgatcccgataatgccctaaaactctgggaagcattcgtctctctggcgaacggcaatcggctggaaattgcgtcagggcaatatattgattgcctcccctgcaatggtgttcagcttattcctgtactgcatggtgctgaggctccagcattcacagaaaactacatttctcatttgcgcgatgaagttgcagggcgcagcggcatttttgcccaaacagcgctgttgattattcacaacagtatgctcgataccctgattaacagcacgaaagacgtggcggcaccggatgctatctggtatccacaaactttcagtcatcaactggaaaagctcattaccaccgacagtaaccgttcggaattgtcccgttgtttgctggaggatcaactggcgacggtactggatgaaggcgcgaccgtatttggtttttcgtcgctgtatcgcctgctggatgatggcaatcttgatttctccgagcttcatctgtttaaagatgatgaactactgaactatagccagaagcagctacgcacccgactgaatgaaaaccggaaattatatcgccagatagaagatagtgttgaacgctacagtggacagctggagaatgtgctgcctgagtttagttcaaaattcattcaggagcatttttacgataaagatgactggcgtgaactcgatttctccgactacaggaaagagaaagaacagaatagtgaacaaaagctggtgctggaaaacgtctccgtcgaaaacggcgaggtttggcaacgggcgaaaagcgccagtaaggcaggcaaacgtgacatcagcctgctggtgcaggtgcagccagggcaatcaaaggctgagctggagttcagttttcagggtaatgatcttcaggataaccagataaagattgcccataatcgtcagttaaagaatgcacctttctggcgcaccagccgggcgggcggcaagacttcccgcattatggcgtcggtgccttttgatgggtatccctgcttctttagtctcgaactgaccaaccgcaataattcagctgaagagtataaatttcgcctgttgttggtcgagcagggacaattctggctaaacgatattcagcactgttaccgtatcgagccaggtaaagatcaaataacccttcaactggaagataacacgctgcgtattgcagagtctggcaacttgatatgtacgttggatgacgagagcgaagacatcgactgccagcattatgctcaggtgaattttgagacgctggcaaatcaaagtgacctggttcagtttgcgctcgtttccggtgattcccgtctgtcgtttaacatagaggggccaggagcagaagaagggctaacgttaccgttgctttttgaccaaagtcgtttcaataagttgttcaaagaagagggcaatgcaacctggaaccgactaaaagggcgcatcatactcgataatactgaacacaaggtcgtaggtgtacgccagcagttgttgatactggaagcctcattaattgagcaacgtctgctaggtacgggaagtgacgatagtgagtttgcgctggatgaacttcttgccagctaccccgatctccataacgcctatgagcagttatttgcctactatcatcgtcgtaacaccctaccgagtctggtgtcgtggtcagcggaatatcgcacattggtcagctatattgttactacgtttgaacagtcactccagcaaatcggcctgagcagagcgctgacagcgcaggagaaacgtcttctccatctggggatctgccgtaatgatagccatgagcgtctctcacctctgcacccattagtgctggcctaccatctacaactggcagaagctatcgttgcggagtcggaacagaacgattcggcttcatttgccacactaccgccgatcactcttgatcgcctgatggtttccggattaatgccgtttgtttaccacagtgagcatgaatacgcgcaactacagccggtggaagaaaaccgcttctggattgacgcagttccccagcggcaggtcagccatgactacgttaaacgtctggtaaaagacaaactcaatgagttcacggacgcttacgcccggttgttccagagcgctgaaaacagtgcgttgattatcaatgccattaatcaagggaatgccaaagaactgtttctgggattagtagaatattttaagcaagaaaaagagcacgctatttcggtgcatgtgaactgttacgatgaacgtttgctacccaatatgttcgatcactttgccgaaagtggtagctatgagcagcttaaaaacgatctcgatctgaacagcggcgtatggcgggcagaagccgatatgctgattgacctgctgcgtagccggttaacgttcagcaagtttgtcctgccgtcagaaagcgacaagctggcctatgcgcatctggcatttttcaccaatacagcacctgtggattgccgccagatccgcattgaagatgcatccagcggggtattgtgtcatgggttgatcgctggggaaggtgccgaaacgcagggggatgcttactttaccgcctttggactgcgagatgtggatactgagtcttattgcgccctgcgtcttgccagactaatcggctgcctgtggcaacccgcacgtcaaagcaacagccagtatcatggacaagggatcggcctggccgtgagtggcaattttaaacagctgctcaattactcttacaatagcgcgctctggaccaccatcattgatcctaaagtcaccctcgactttttcaccagtcagaaagatgtggtgcttatccactattctgaccagtacaccagttgcgcaggctacgatgccgtcacagtcacgaagcaggttgatttgttcctgcggttgctccagacaggaagccagtcagggcaacctgctgttgatagtcagcatttgctggctgaatttaatgcctttaacggtgaatggctgctgaaaatgctgcgctccagtgaaagggagcgtaaagagaaacacggcattataggcgcgtacaaatttgtgcaatccatgttgcaccagtccgatatttgctggattccgctatcggtggccgaaatgatccgcgtgtccggcaatgtcgggctgaaaatgaaagagactgatttatcgagaaatttacagggttatcgtaaaggtgccatctctgatgatgtactctttgtgggattcaaagaagaccgcctctatctgttgccgctggaagttaaaactggggcgcgaccggactacagctatgcaggccaacaggctcgtgagttgaaacgctacttacagcaggacattctggaaccacagacgctggcatcacagctgtaccgggcgctctttatacgtcaggtgctgatgcaggtggagaaactgcgcctgtatggagtgctggacagcgacaaactggctcccttgctggatcgacgcgaatggtggttaacgggtgactatcagttaggtgagttgaccgactatgcgaacggcttcgtcgtggcgcatgtggacagcgcaacctgcttcgatctctcttataaagagacaccggagaatatcttacagattgaaatcccttattcactgctgccttcgctaattgctgcgcaggggaatgaactaccgctggcggaacgttatcgggtgccggaaaaataccggcttaagccagagtgtgatgccactccgtcacaacccgcagttgtggtagaagtcacaacgccggctactgcacagtccatttctgaaccggagtcgttacagcctgctgtaccggtggcgacttctgataaaagcgatactccattacggatcctgtttggtcatgatgctgcgcgtcagagcccgttacattgggagccaaccaacaccgcgaagttcatgaataccaataccggcattattggaacgatgggcaccggtaaaacccagtttactaaatcgttggtcacacagttgatgcgtaatcagtcctgtaacgttgatggcaaacctattggtttgctgatcttcgactacaaatcagactatgtggatgaggcttttcttgatgctacaggggccaaaaagtacaaattatttaagctgccttacaaccccttgtctctgtttggtgacacgccaatgctaccaatccataccgctggtgggctatcggaaacgatggcaaaagcctatgggttgggccataagcagcagctcaaattagaaaatctaatcttagaatgctacgaagctgcaggtatttcgccggaagatccgacaacatggtcaaggactgcgccgacaattgaagatgtatggcagcgcttccttgatcaggaaaaggttgaagaagattcgctttacgcagcactttctaaactggcgcgttacaagatattcgagaccatcccggagaagatgaccagcttgtacgaattgattgacggtgtcaccgtaattgagctggctggctaccccccagaagtgcaaaatctggtggtcgcgctcacgctggatctgttttacgcacagatgcaaaaacgcggtaaacctgtggtgcggggggattatcgtcagcttaccaaaatgattctggtggacgaagccgataactttatgcgtcaggatttttccagcctccgtaagatccttaaagaaggccgtgagtatggcgttggtgcgatcctgtcaactcaggagattactcactttaagaccggggaaaataattatgcttcctatattttaacatgggtgatccatcgtgtttctgagattaggaatgcggatattaaggcggtatttaacgtcgatgataaaggtgagcaggagtctttgatgggacagattcggcagcttgagaagcattttagcctgtatgtggatggggataagcgggttaataagatgcgtgatcgggcgttttgggagttgatctag

SEQ ID NO: 437419 - DNA, 1323 bp, Serratia marcescens
atgtaccctatcgcaaatgagttaaaagtgggtaacaatcaactggatagttacctgcctgtgcgcaataaaaataacgatattagctggcaattcgtcaccggtctggtccttagctacgccctgaaacgcaaaatcgaagcttacgatcccgaacaattccgtgaagattgtaaaacacatctgcaggagctgcttgatgagcctgcattctggtccgtgctggaacggatgtatttttccagtcaggatattttccgtgtctccccactttttttactgttccacgcccagtttaatggtgaaaaaataagtgccggttcaacggcagataaacgacttggcacgctatttgccaatttgatgggagatttcagcctccgttatcccatacaggacagactgaacttcatcgagcagcaaatgctgaataagctcaatgaaaaaataaagctgttggggaaaggaccgtttgccgaagagcaaccgtatctcccgtatatggtaacgtgttttcagtctgatctggcatttctggcagaacatcctcagtaccttttacaggaattgaccaacaccctacgtttgtacgcttttagctggtgcgctcaactggctctcaatctggacaactggcaggatggcgaaccacaaagcaaatcactgttttttattcttgatagcgaaaaagccagctccgaacgggaaaaggtgaaacgttatggttataagctgttcgctagccagagcgaaaaactgttcccggttctctctgcacttgaggttttgcagtggggaaaaggacagaaaaagcgtccgttatggcagatttatcaagatactctgaatgattcagattcatctgcccgagtacttaatgaccttaacgtttatttgcaggattttattgtggatcgaggcctcccgcttcgtgaacgcgcaacaaacctggaaaatgccttcaaacagctcttagccgttgccgtagagcagtttcagggtaaaaaaactgaccgcgccacggtcaatcgtaaatacgttaacgagttggaaaaccagatttgcactgacttcattcaggtccgtggtcgggcaggaaaagtgctggtgctgaatcaggatcgtcttctgttactgaccaatctcactgtgggcaaaaatgacaaactccgcctgcatgaactgctgcgtggttttgaacagcgcggtttttatcttgacaaccagtcggcgcaaacgctggtggcgttttatgaacgcatgggaaatgtagagcgaatgagtgatagtggagacgccgtgtatgtccgtaaaacagtatga

SEQ ID NO: 437420 - DNA, 384 bp, Serratia marcescens
atgcaaaaagaagagttctttttgggtgagtttggtggggtaaaaataaccgcaccggtagaggtgaagcctgattgggatgctatccgtaataaacatacggctcatccaactggcttcgatgtctatttaaaggtggggcgaaatccactgccgcatatccatatcgggcttaatttgttcgaattactggacaagttgaataatggctatcgtccgaataaatacgataaaaatgccatcgtgttactggatgaaattgttgagttgatcgcggagcaggctaaatccagcagcgaaatcaaattttatgatggcagaaaacgggtttatcgtgcaaaggcggatgacgatatgatcactattagcggtatggagggttag

SEQ ID NO: 437421 - DNA, 1152 bp, Serratia marcescens
  misc_feature (1128)..(1137): n is a, c, g, or t
atgagcgcaatcacattacgtaaagcgttgggtgtacttgcgaagtcatcttcgttttccgtcaccaccgtgacacaccgtcagaaggatgagttcgaccagttaaaggaacaactctttgttaaacaagaaattgaaaccgaattacaacgctatctggatgttgctaaacccggtgaaatcatttttttgtgcggcagtagcggggatggaaagtccgaaattttaacccgctgtcagtcagatccgcgttatcagaggcgatttattttccatctggatgccactcatagttttgcccctcgacaatcagctattgatgctttgaatgagttatttgctaatcatcatcagcagtcatctccattgctcattggcatcaacaccggaatgcttgccaactttgcccgagaaggtgctgaatgccataaggtgatccggtctgcaattgactcatttttatcagggcagcaggatgcaagccgtccttatcgtaacgagaattgttctttttttgattttgaacactatcctaaattccagtttaacgaaaataaaaactattcatcatttattaaagccttattagataacttaactcgagacgatgataacaatttatttcagtttatctttcggcgcgatgagttaattaatccagatctaaaagaggtcgcaaactttaaattgctttgcatgcctggcgtgcagaatgtattaattacgcagctctttaaagcgcggttgattaaagaccagtttgtcacgacccgaacgctgctggactttctgcatcatctgttgatggggcctggctacttatttgataatctcttcatcggtgcagaaaatgatctgattaaaaaagtttccgattttgatcccgccagattgcacacctatgaacttgatcagtttgttttgcgctatgaactgggactggttgacgctgatctcgatgattttttagccgcacttgagccgttgcacattaagtttgatcgccagagcgttaagcccggtgacgcaacctccttgatccggcttttctggctgttgcagcacgagtcgttgggtaatgattatcatcggagattttccgcgttctttaacgaatcgttgtttgannnnnnnnnnctggcatttgcatag

SEQ ID NO: 437422 - DNA, 363 bp, Serratia marcescens
atgataaaaagcatcggcagtgcggccggcttaatgggaacgataaaagcgcgcgccgagcttaactcagcggccttcagcgagatgctggaggcagccgacgacaaggtgcggcaaaacaaggcgcatccgctgtcgcgcattaccgcgcagacggtgcaaaacatgacggcgctgttcgcctgcgtgccgaaagcggctgccactcacactgcggcgccgggagcactctcgttcgaacagcgggcgaccctggcggaaagtgccgatctgctgcaaatgcgcacccactatctgcggatggcgttgcagttgcacaatccgggcaaggcgctcaacgcgccggcgttgctcaagctctga

SEQ ID NO: 437423 - DNA, 2061 bp, Serratia marcescens
atgccgcacgcaaccttattagctcagttaaaagcgcggttgggtgagccgccggacatcagccctttccccccgcaagaacttggaaagctgtgggcggacattcaccgtctggcgaacgatgtcgagcatccggagttcaggacgctggcgtaccatatcaggcaacaaaccaaaacgttaggcaaggttcccgcctttgataacgctaccgccattgacgttttgcgcaaccttgtttgttgggaagacgcggtactttgcattgccggcttgacggcatcgccatcgccggcgctggccacagagctgcgccggatcctgactacgggcgccccgcaacaaaaggagccggccttctgggcgttacggcgttacgaagcccacgtattgaccagatataccgatgatgagattcgctcgcgcctgcagcaggccgtgatgacgcagcacgcccaggacccgtatgtgttaagtgagttcgccgtgctctctcgcctcagcctcgccggcgccctgacgctctgccagtcgcaaaccgcctactatcaacctcagtcgctctacgacgacaggaacgacatgcagattctgagcgacgagcctgcctatatggatttcgcccggaccgcgttggaacaggcgctcaggcacctcggagccatccggcgggccgagctaccctataaggccgactgcgccttctcagtcgatgacgcgcatattattgcccgggcggctcgcattacggcgtggcgagatgagcgctggttcggtccgttgatcgaacagctattgccgcaggttgccgttgcgcccaccatggccaagaccgcgccctctcaggcactggccatcgccctgggacattcaattcaggcggcacccacgccggaaggtgtcaaggcactgcgctatacgctagagtcggttcgtcatgccgggattaaaaagaaactggggcgcaatgtaaaacccgcagaacgcaacctggccgaacgccccgatatggcgctgaaattaagcggccaactgcccgccgggaaaaagcaaaccgccatgctcgcatcttgcctcgaggccagtatgtggctaggcagtgagttcacctatcatgactggcattcacagttgcacaactctccggccggcgcgccgttagcgcattctctgatttggctggctcgctgcccgggccagcccgaccgcgtatttgtgccgctggacggcgctctggacgctcacgggcagcccctggacttgccgaatgacgccgagattctgctgtggcatccgttgatggcggatgaagatgaacggcaggcgtggcgcacattcattatctcacgtcgcatcgcccagccgttccgtcaggcctaccgcgagtattacttccgctccgccgatttttccgggtatttactggcacttcgcccactgttgggccttgcccggcagcaaggatggcatatcgacgccggcggcgtgggccttgcgcgccgcttcggtgagtatcaggcgctgttcgccgtgaatgccaaactctatcctggagccgatggctggggagcgtcaggtgcattgacggtcaatcggcaaatcaacgggcagtgggagcgtatcgcccccgaggctctgccggcaatcacgtattcggagatgtgccgcgccgcagatctgctaatcagccgcacggcgttagcggagggcgatgccttggcctccggcgcttcaccgcaacagcgggcgcgtcacctgagttatctgacggaaacctctaacatcgctaacctgcgccgtgaaacgctacgccacattttccaccagcccatcgccgcaggcaggctcaccgtagaaacaaatcatcttcgcatcgccgactatgcgttgcatctggcgacgggccgagtcacccgcgccggcgcaccggcggaattaccgtcaaccccaaaatcgggcggcaagtcgccgatcttttggctaccatacgatgaatccatcctgagtaccatcgtcgaccgcgcagagattttattggccgcgacaggcagcgccagctga

SEQ ID NO: 437424 - DNA, 1164 bp, Serratia marcescens
atgttgaaatttaccaacggtctgttttcgcgactatgtttgctttctactatggctgtaacggcaagccaagccgcagcagctgcgactaacttaataccgcaacaacagccgaaagaagagcgtgcggcgctggtcatgatcgagttcgtcaatgagtggctggatccgcaaggtaagttgcatggtttgatccaggacaagcgatcgctcgcccgttcccaggaagcgggcaaacgcgccctggaggctgctcgccaggcggggatgccggtcattcacgctacgctgcaactgtcgccagactaccgtgaactcgggcgcaaaccatttgggctacgcggcgccatccccaaagccggcacctggcaaaaacaggataaaggctggcagttctatccaccattcgctccgcgatcaaatgagtttgtcatcagcgggcgtgcgggtgccagcgcattcgccgcctccgatttggacaactatctgcgcgggcaaggcattacccggctgtacctggccggttacgccacccacgtctgcatcgagtccacattacgcgccgcacacgatctgggctatgagccagtgatcctcagcgatgcgacggccgctttcaccgctcagcaacagcaacacgttctgaacgacgtagtgcatcattttggctgggccatgatgacacaagcgtttatcgaaactctgtctttcgacgatcagacagcgctgaaagcgagatccaccaactccccggagcccgcacaatcgctgcgtctgctgacggccccaggccagaaaatccccggcgtctccggcgctgcgcaaacacagagtggcctgctgtttctcagtggccatgtcccagtaaccgctgacaacaaagtccctttagggctggagaagcaattggaattggcattcaagaatttgaacgacacgctgcagcatgcaggcagttcacccgaaaatattgtcagaatgacgctgtacgtgcgcaattatcgtcccgaacagttggccacaattcgcaagatccgcgatcgttggctcaaagggcatgaacccgccagcgccttgatcggcgtagaaactctgttccgacaagatgtgctggtcgaaatcgatgcggtggcggtacccaccgcgcctcaaaccgcagtctga

SEQ ID NO: 437425 - DNA, 894 bp, Serratia marcescens
atggatccattcagtgatatcagcacctttgtcagagccgccgaagccggtaacttcacgcgcgctgcacgtgtgctgcgtattacgccttctgcggtgagcaagtcggtggcgcgtctggaagcagaacttggcgtgaaattattccaccgctcaccgcggcagatcacattgaccggcgatggtgaagttttcttcgacgtttgtcggcaaggcatgacggccattgaggacgcacgcagtctgctgggggggagcgcccaaccgtggcgcggaaaactgcggatttgtgtaccggtgagttttggtcaatgcgtggttgcgccggcactcagcgagtggctggttgcccatccgggactagatatcgagctgacattgaccgaccgacatgttgacatgacggccgaacgtttcgatctggctgttatgttgggcgaagtgccggattctcgtctggttgcgcgcgctttgccgccacatcgtttccagaccgttgcggcgccggtttatctgcagcagcatggtgcacccagtttccccggcgatcttggcgaacatgcttgcctacgctatatcatggccaatagcggccagtttcgtacctggacattctcccgatccggggaagcatatcgccactttcctatcggaccactggccagcgatcacgtcgccgtgctgctggcattggctgaaggtgggcagggcattcttcaggcgccgcattacgttgtggcaccggcgttagctgcaggcaggcttgtcaccgttctgaacgagtttgacagcgttggcgcgccgttgtctgttgtgtatgaaaaggcgcgtcatgcttctgcccgaaacagactggctgttgatttcttactcgaactcggtagccggctttag

SEQ ID NO: 437426 - DNA, 936 bp, Serratia marcescens
atggaagctaatttttgggagggttcacctggtcttttttatagtagggatgatgttttgacagtattggcgaacagttacagtaaaagggaatatcaattcgagtggattagagattctttgcatatttcggtgacacagttcttactacactccgatgcttttaaaatggcattgcaactaggttccaatataactgagcagtctaatactataagaaatgagctaaataaagacgtggggattttaattggaactctaaacgcagaaaaggaaagtataaataaagactttgacacaaaaaaagaagaggtttcagagttattaaatgacaaggaagaagaattgcgcaatattttggaagagataaattccaatattaaagggatagatgaggttagagaacgattgagtagttaccattctgagtttaactttgtaggtctttatgctgggttcaaagaattaaagaagagtaaagatgaagagttagactcggcaaaaggcagttatcatctcgccatgattattgcaataatgttaccgttattaactataggggttcatatattattccctggactagtgaatggaaaagctttagttgaatgggtgtcgtgggctgccccgttcgctgcaatagaatttcttatactatattatgcaagggttatttattcggaagttaagtcgttgagaacgcaacttgtacaaataaatttaagaggagcgctatgccaattcatagaagaatatatgaattatagaaagaaaatgaaaaatgagaaaggtgagctgaatgatgcagcgttggataaatttgattcattaatcttcagtacaatacaaatggacagcgataacattcctggagctctggatggggttaatgctattgctgagttggcgggcaaagttttagcgaaaggaaagtag

SEQ ID NO: 437427 - DNA, 1317 bp, Serratia marcescens
atggggaagcacgggttgatgcgtctgcaaaagcagttgcaaaataaggcgatcctcctgggttacgtgacctcacgagttcatctgctgctcgatgggcaagcaccgggcatgatcaccgtcaacgtccaatatggccgcgttgggcaattacgcctgaaggccggcagcagtgaatattttcatcccggttttactttcccaatcgtgtcgggcgaagtgttcaatctgcgacgtgtggagcagggcgtggaaaatattggcctgatcccggatgtcgacagcgaggttcgcatcgttcccggcagtttgccgggcgaaagtgatattgaggtgtttcgccggcaagataaatattggcgcgttaccgcatgggcggacgatgcgggagccagttctaccgggcgttatcagacaggcggcgcgttatatctcgacaacccgagttcattgaacgatgtcttatacctgtcgctggcgggcagtgtcttagccccacacgatcgaggcaatgagagccgcgcctggttttatagcctacctttcggattttggaacttcagcgcattgggcggggagagccgttaccatcagacgattgccggcagtgcggtgagttatcgctatcatggccgttcaaaatattggggattgcaagcgagctacactctggcgcgagggatgagcgataaaacctcgttgaatgctcagtggctgcagcgtgactatcgatattatctgaatgataccgaaatcgcgttgcagcgtacgcgcttgaccagccttaagttaggtgcgaatcattggcgctatggctcccgcgcacggttggcgttttccgccgatgctatcgccaacatcagggaagaaagtgagactcttgaaccgatgttgaaactgggagccagcgtgttgaaccctttcaacttatctgaccatcgcctgacttactttgcagaggtgtcggggcagttgggtaaagcacagcagccaatccaggataaactatttattggcgatcgttcaactgtgcggggttttcgtggcgacgataaactgcttggcagcaacggtgggtattggcgtaacacgctgttgtggcaatcgaagccacttcaaccgtatgtcggcgttgattatggacaattagccagacagcagggggagggcgggaggttgatggggagcgttatcggtttacggttgaatgaggggcgtattgacgctgacattttcgcgggcgcgcccgtgattaaacccggctatttgccggccgatcgtctggtgttggggttttccagtcaactcagcttttaa

SEQ ID NO: 437428 - DNA, 1563 bp, Serratia marcescens
atgaaaagatcatttattctattatcgattgtcgctttggcggcgcaaagcgctaaggccgaaatcgtcccacaaacgggggcagtcaatcagaatggtcaggttccggtagtaaacatcaatgcgccgaattctgatggcgtatcgcataatcgttactcgcaatttgacgtgggctctcaaggtgcaattctcaataacagcgtatccggcgcgcataccacattggcaggggatgtggcgggcaacggcaatctgggcgggcgcagcgcgacggttattttgaacgagatcaattccgccaataaaagcatacttaacggtatggtggaggttgcagggcaacgtgccgatgtcgtcatcgcgaataaatccggtattacctgcaacggatgcggatttatcaatgctggtcagggagtgctaaccaccggcgaactgcaatttaaaaacggtgtttttgacggctaccgcgttgaacagggaaatatcctaattgatggtcagggcatgcgtaaaggcgatgtcgattatactgcaatcctggccaggactgagcagatcaatgccgctattcacgctaatgacttgttggtttcagccgggaaaaaaacgatttcttcagatttatccaaaacaaaaaatgtgagtttttctctcgataagccggccgtcttgctcgatgtcgccgagcttggcggtatgtatgccggcaagataacgctggtcgctactgaaaatggtgtgggggtcaacggcaccggcacgttggttccggtcagtatcgccaatcagggcaaaatacaggcgcgtggcgatgtgtctgtcatggcggatgtgctgaacaacggtggagcgatggttgctcaggaacaattgagcgtaaacggaggcaccttgaacaaccgaggacgtatggaagccgataaggcggcgtttacctccgtggtgttcagtaatagcggtgacatacgcagtcgcagcgggaatatagcgctggcggtgaacagcttcagcaatagtggcaagcttcaggcggctggcgatctacatcttagcgccacccagttgaacaacgtcggtttgttgcgaacagaggagggctcgatggtgctggccacctccagcatcaataatgctggtcagatcgctgcggcgaaggggatgcatatcagcgccattcaactgagcaacattggcgatgtcaaaactgaaaacggcatgatgacggtaaggacgaccagcctcaataatactggaaagatccgagctggaggggcgctgcagatcgatagctcaaacgtattgaatatctttaatggcgttatcgaggctcagaatgagctcggcattcaagggtcttccattgataactatggccgtctcgcttctctctcctcttcggttaacctcaatagtttgcgtttcaaccagcgtggcgaagttgcggcattcggcgatattcgctcccacggactgatttttggcaatcacggaaaaatgacttctgaggccggaacagtgacgcataacggtaaagtcatcaaaaacgccgtgcgctga

SEQ ID NO: 437429 - DNA, 672 bp, Serratia marcescens
atgaagaaacaacgtttgagcgttgccatggcggttctggcggcgggcctgttgctggcgggctgctcgtccaaagtcacccaaacgaatcaatattcggggttcctgccggactacagcaagctgcaggaaaccagctcgccaagcggccataaaacgctgcgttggatcgatcccaactttaaagagtcgaattatcgcggcgtgtatgtcgctcccgtggtttattacccggcggctaaacccaccgcccgcgtcagccaacaaacgctggacaaaattagaaactataccgaccaaagcgtgagaaaagcggtggccgagcgcactaccgttttgaataacccgacaggttcccgcgtgctgttggccaaagtcgcgattaccgccgtgtctgccgaagatgaggatatgaaattctatgaagtggtgccggtagcggccgtggtggccagcaccatggccgccactggccaccggacgcaaaacaccacgctgttcctggaagcgcagttgatcgatcaggatagcggtaaaacggtgctggaagtggtgcgcaagagttacggcaaaaccgtcaacaacgacagcgcgccagtcacggaacaagaagtcaaagcggcgatcgatgacatggtcaacgacatcgtcacgttcccgaaacagggctga

SEQ ID NO: 437430 - DNA, 354 bp, Serratia marcescens
atgctcccgaatcgaatggtgctaagtcgtcagactgaagaccagctcaagaagttaaaaggatatacagggattacgcccaatgtcgctgctcgactggcatttttccgctcggtggagagtgagtttcgctatttgcctgagcgggatagtaagaagctggatggctcgctagtgctggataaaattacatggcttggggaaacactgcaagctacagaactggtgttaaagatgctttatccgcaattggatcagaaggcgatgattaaggcgtgggcggcgcatgttgaggatgggatttcggcgttaagaaattatcgctctctaaaagactttgcatttggggtgtaa

SEQ ID NO: 437431 - DNA, 1437 bp, Serratia marcescens
  misc_feature (1388)..(1397): n is a, c, g, or t
atgcagcagcaggagtatgttgaacaactcggtgcactggtgcacaacgggacgtatacagcagagcgtccggatgaggccgcagtagaactgacctttacctacaaccaaaacggccatgagactgaattcaccgtcacgcgtagctggaagaaaggaaagaaagaccgtctctctttgcagcaggatggacaaccgcgtagtgaactcagttatgaccagtgtcaggggtttttgaatgaattaattcctcacggtgttgccgatcttttcttttttgatggagagaagattgcagagttggcggaagatgaatccggtaatattctacgtacagcggtgcgtcgtttgttgggactggatctgatcgccagactgcaaaatgatctgatgatttttgtcaaacgccagcaaaccgcacagttgggtggctcccagcaacagcaggttgaagcgcttgagacaaagattagaatgcttgccggtcaggcagagaaattgctggaagaggccgatttcgttaactcgcggattgaatttttatcccaggacattattcgccatgagggattgttaaatgcgcaggggggggcatttgcccaaaccaaagcacaggaaaagctgaaagttgaaacgctgttaaaagaaaaagaacgtttggaaaaatcgttacgacaggaatgcgatggatcgttgccctatgcgttagcacctaatacgttgtcgcggttgctggaaaaaattgccaatgaagcacagatcaagcaggcgaaaaattttgagacggagttaaatcaatttttaacgcaactcaaaaatgatatcgcgttccgttccagcagtgagagtagtaccagagccattgctaccgaagctattaccaataatttggacgcatatatggcagccaaaccaaaaggtgatttgctgtttgatatttctgaacgtgaagccggtatgctccagcagtccattgagcaagacagcaaaaaagcatggcagcgttttgatatgtaccgccaacagttagcggatattgaacaacaactggagcaggccgcagctaatattgctcgagccccggaagacgagcaattagtggatctctttgcagcattacgtgagctcgaccataagcgtgaaaaacagcggcaaaaataccgctcactgctggaagaggctaaacggacaaaacagcagcaactggactatgttcgtcaggtacagaaagcacatgacatcactcgtagccaacatggtttgagcagcgcattaaaaaatgcgcaggaaaccattaacctgctcgattactacagcgatgtactaacgcaggcgcgagtgaaaaaattatctgctaactttgaaattgcctaccacaagctggctcnnnnnnnnnnctggctcgtaaagaggatttacagcttaatgcacacataa

SEQ ID NO: 437432 - DNA, 1086 bp, Serratia marcescens
atggctaatattgatgcaaattattgctactcgttcccagctatacgtggcattcaggctggtcgccctttctacatcgccacgtgcccgatgcgcatcatccccaagatattcagctttgatgaaaatgacgtaccgcctgagctacgtgcgcagcgcacgctgaataaatcacgcatccccgaaatggttcgttatcttctggaaaacccaaaagattatgtgttttctgcactaacagcgtccatcgctgttgacgtccagtttgatgagcacccaggtacaaacaatctgggaacgttatgtgtgccaatggatgcacaaatcctcattaatgacggccagcatcgccgtaaagcaattgaagacgctttagacgctcgcccggaattggggcaggataatattccggtgctgttttttgtcgatgaagggttaaaacgcagccagcagatgttcgccgatctgaataaatacgccattcgccccagcccgtcgctggcgtctctatacgatcatcgcgatgccagttcaaatctggcacgttacctggcgatgtccatagagccgtttgttgggatgacagaactggaaaaatctggcatcagtcagcggtcgaataagttatttacgttgagcagcatcaagcaggctacccgcgcattgttgggcaaagatcccaaagagaacaactttgaggaatgtacccaaattgctacccaatattggcaagctatttttagcgtgatgccggattggcagctggcggctaaaaaagaggtttcaccggttcagttacgacaagattatgtccacgctcatggcattggattgcaggcacttgggcaactgggatataccctgctaacggattatcctgagcactggccggagaaaatagccgcacttaaaacttttaactggcgcagaaacaacccggatctcgtcaaacgtgcgatgcagcacggcaaactgagtaaaaccagtacggcgatccagctcacctgtaatgcgctaaaaaccgcactctcaatccccctcactcctgaagaacaggagcttgaagctcaaatggttgtctcatga

SEQ ID NO: 437433 - DNA, 1608 bp, Serratia marcescens
atgctgaaaaatatgaaaatagccacctggctgatgttgatgctgttgctgctgggcttgatgcccatgggaaccggcgccatcgccttctatttcatgcagcaaaacggcaacagcatcggcaggatgagcactttctccgacgaggaagcggcgctgaaccgcagctggcgttccttgctgcaaacgcagacgctgatcgacaacctggcgttcgagcgtatggcgcagaccagcagagccgatattcagcagggcattgatgaggcgcgcggcgagctgcgcggcgccgatgtcgctttcaatctgttctgggatacgccgggcctgacggtatcgcgcccggagctgggcgaggcgatgaaaaaggtctacctggcgcagcagagagtgctgaagcaagagttgacgctgctggccgagacgccgcaggcatcgttgattgaacggctgcacgccatggcggccgagaagcgtcaggtgcgccaacggttggacggccagtttgccgactacatgcgggcgacggtggttgctcaccgtctggcggtggaggaggcggagcagactcagaaagtgttcgcccgcctgctgagcggcaccctggcggcgatcctgctgctgctggtcgccgtacagcgtgatttccgccggcgcctgatcctgccgctgcgccagattgccgaacatttgcaaaaggttgggcgtggcgatctgcgcagcaagatcgtggcgcgcagcaacgatgagattggcatgctgttcgccagcctgcaggcgatgcagcaggagctgagcgccaccgtgcagcaggtgcgtgacggcgtggagtcgatcaaccacggcacgcatgagattgccgtcggcaacgccgatctctccagccgcacagaagaacaggccagcgcgctgacggaaaccgccgccagcatggaacagatcaccgccacggtgcggcaaaacgccgataacgccaaccaggccgccgggatggtcaatcagaccgccggcattgcccgcaacggcgaaacgctgatgaccagcgcggtcgacaagatgcgggcgatcaacgacagcgcgcgtcaggtgggggatattaccagcgtgatcgacggcatcgccttccagaccaacattctggcgctgaacgccgccgtcgaggccgcgcgcgccggggagcaggggcggggttttgcggtggtggccggcgaagtgcgcaacctggcgcagcgctgtgcgacttcggccaaggagatcagcagcctggtcgacggcgtcaccggcgatatcgccgccggcgtgcggctggtggaacaggcgggtgagacgatgaatgccatcgtcggctcggtgaaccaggtgacgtcgctgatggataacatctcgtacgcgtcgcaagagcaaagcaagggcgttgagcaggtcggggtggcggtgacccagatggatcaggtaacccagcagaatgccgcgctggtggaagaggtggcgaccaccgccgtcggcgtggaggagcaggcggccctgctggcgcaggcggtggcggtattccaactggcgggagagccggcagcgtcggcttcggcggccggtgccggctgggtataa

SEQ ID NO: 437434 - DNA, 1329 bp, Serratia marcescens
atgtctcaggctaatatttgtgtcgtggatatcaatccaataatagataatgcgaaactgaataatatgcaccgactcacggtgttatggtgcgcttttattattgtttttgacggtttcgatcttgctgtactgggtgtggtccttcctgagctcatggtgaactggggcatcactgcggctcaggcgggtctgctgggcagttataccttagtaggcatgatgctcggcgcgattttattgggtccgctctcagataaaataggaaggaagaaaaccattagtttgtgtattatcacctttagcttatttacttttctttgcggctttagcgttaatgccagccaattcggctggtgtcgttttatcgccggcatggggctgggaggcgttatgcccagcgttacggccctcaccagcgaatattcacctaaaagtaagcggagcctgatggttgggctgatgtttagcggttattccatcggcggcatgctcgcggcgctgtcaggcatttatttgatcccggtcgcggggtggcaatctatattttatattgccgctttgccactcattgttttgccgtggatgttaagccacctgcccgaatcggcggcatttctagtgaaaaccgaacagcatgaccgtttaaaacgccttttggaaaagatcgcgccagactatatccatcaacccggtacgaagtttatcagctcttcctcggcaggtataaaagcgggaaaggcgaccctgaaggatctgttcgctgaacgcagaggcttaagtacgttgatgttctggctggttttcttcatgtcgctgtttgtcatctacggcatgacctcctggttgcctaagttgatgttgcaggctggctatccattaggctccagcctgtcgttcctgtttgcgctgcatctgggcaccattgtcggggcgttgagcagttgctggctgatggaccgaatgaatggaagacgtattcttattgggtattttttgctgggtgccgccactttagtgttgttgggtactcagacgccggtgtacatcctgtattcgctgctgattattgcaggtgcaagcactattggtacgcaaatcgcgatgagttcctatgtcgcccgtttctatcctggaaccatgacttcaacgggtcttgggtgggggttaggtattggtcgcattggcgcgattctggggcccttcatgggcggtgtattgattgatagtgaattgacgctgcagcaaaactttatggctttcgcgctgccgtcgctgctggcagcggtctgcctgcttttcgtcaatccgcgcctggcggcatcctga

SEQ ID NO: 437435 - DNA, 918 bp, Serratia marcescens
gtggagctgcgtcatttacgctattttatcgccgtcgcggaagagcagaatttcagccgggcggctgagcggctgcatatcagccaaccgccgctcagccggcaaattcagcagttggaggcgagcctgggggtgaggctgtttaaacgcggctcgcgtccgctggtgctgaccgcggccgggcgctttctctatgggcacgcactgcaattcctggcgcaaagtctcgaattgaagaccatgacccagcgcgtggggcaagtagagcgcccgctatcgctcggttttgtcgcctcaacgctctatgacatcctgccgcagctgattcgccgtttccgaaccgctcaccccgaagtgggtctgagcctgcatgaaatgaccactctggaacagacccgggcgctcaaggaagggaaaatcgatgtaggattcggccgcattcgccatgaagacatgcatatacgccgcattatcctgcgagaagagcctctgatggcggccttagcggccgatcacccgctggcgcgttcggagggattaacgctgcgcgccctacaggcggaaacgctgatcgtttacccgcaaacgccgcgcccaagctttgccgatcaggtgctggcgacctttcgcgatcgtgcgttagtccccagaaaaatcatggaggtgcgggaactgcaggtcgcattggggctggtcgccgcaggtgaaggcatcgcgttggttccccactgcctgcacagcctgaagcgcccagacgtggtctacaacgtattgaacgaacagcgcctggtttccccgatcatcatgagcatccggcagttggatgaatctgaagatatcaagacactgttgcggatgatttacaccctgtatgacgaacaaggtattgcctacatcaagcctgaacggcaagattga

SEQ ID NO: 437436 - DNA, 288 bp, Serratia marcescens
atgatgagaaaaaaaatcgcattgctgggttgcacactgctgatgtgttcgcagctggcgcaggccgggctggtgattgaaggcggtctcaatggcaatagcggcagcggtggcggaacttccgttgacgtgagtattaacggcagcactaacggcaacaacggcaccggtgtaaacgttggcggttcgcaaaagccggattctagcgccagccaactgcaaaaagacatttacgcgtcaatttgcgccagcccgtttatgaagaaatacgcttcgatttgccaataa

SEQ ID NO: 437437 - DNA, 879 bp, Serratia marcescens
atgttaaaggacagcattaagttgcgatttatactggcgctgaaagtggcagccttgctcttttttccaatcagcgccgtagctgattggaaaacggcggcagaagtggagcttatacccacactcacgccagggcaggggccggcggttcaggggatctggagcgtttatattaagcaatgggataccaatgatctcaggcctaaccctatgtacggttgtaccagctgcgcgctccatctgcggtatcgtttgccttggtcgggagggggctatgatgttaaggtatttggtgacttcggggacggctggattagagacagcaagacgcttggcgaattggctcagagggctcaacaaaaggggtgggtcggaccgaattcgcctcgatatatcgttaactcaactagcggttggggactgtgtacttacttgcaatactctgaccatgcagtgatacaaggctcaattcctggcggcaccatagatgcagacggctatgctacttgtgatgcgcctgttgtgctccctactcagtgtaatattcgcgaaccccaagtagagattcgacatggattggttgcgccagacaaagttaacggcagtcaggcttcggcacagattaccgtttggtgcaatgaaacttttccggtgcgtattgtcgcagcagaagcgaatgccactgactttattcgcctgagtaaagccagtaacttccgtagcatcgtaacgatcaacgggcgacccttttcaaaaggtgcccttattgatgccgggccggccggtacgaaagtcaatctgatctcaacgctggctaattactctggtgaagtgggggattttcaagggagcgctacaattgtggtatccattcaatga

SEQ ID NO: 437438 - DNA, 552 bp, Serratia marcescens
atgggaacatttaatatcgtaatagatgatgagaatcgctattttgctgaggggcttcgactcagtattgaaaagtatgcgcagaatcgcaataaatccgtcaattttttatcaccggacggtgaggggcataccgacatggttgttgcttcttctctgcggcgtgcgcagcgctggcgcagggcgaatctttcaggcgcaccgtttatccttaccgttaaggaacggcctgttttagctgcgagggggatctctggcgtgctgtaccgaacagataatcagagcaagctgtttgagttattgtctgaagcattgtccggttctgcgttcccggctaccgctaagcggcaaatcttaaccggcagagagcggcaggtggtcggttatcttcgtaatggattcgatcaatcccatactgccaggttgctggggttaagcgtcaagacgattcatagccataaacgctcgataatgagaaagttaatgttaactcggcatcatgagtttatttattggttattgcttcatagtgatgaatatactgaaagttga

SEQ ID NO: 437439 - DNA, 525 bp, Serratia marcescens
atgaaaaagacagcgttagcgatggctctgctgtgtatgagccacaccggttggggagccccgcctacggtggcggttaactaccgtggtgagctggtggcggagccttgcgtgattccccctggagaggaaaatatcgagctggattttggcacggtgattgataaatatctttatctcaatcagcgtacggcggggaaagagttttccctacagctgacggagtgcgatctcagccttggcgaaacggtaagcgtttccttcagcggtacggaaagcgttgcgctgccggggttgctggctatcagtagcggtggtgcgagcggcatcgccattggcctggagaatgtttcaggtgagctattacccttgaatcagccttcggggaaactgcgactacaggaagggagcaatagaattacgcttaaagcttatgtgcgtggtgagcctgaggctattaaaaacaagagtatcgccagaggagaatttgtcagtacggctacatttttacttgattacgaataa

SEQ ID NO: 437440 - DNA, 819 bp, Serratia marcescens
atggttaacacgttagccagatcaaatatagtaagacgtttttttatattactgctcttatatacttccggcgcttgggcggggtggagtgctgacattcgatattcccccagagaaaaacagtattttgccaaagtcacctactgggatactggcgatgtcacgccgaatccaatgtatggttgttcttatctatgtagcgtcaccttttgggtagtagccgctgggacgacgggtaatgaaatgaacgaagtgagtttcccaggactcacgaccagcaagaccatgggggaactggcgcaaagctttgctaattcagggttctttaatagggagttctatagtcgacaaggctttcctgcccaaaatgtatgtgtcttttttggctattgggggaagattcctggcggaaacggaagctatggggcagctcgttttcctgggggaatgcaatgtgttccgccggtggttgatccctcctattgtgacctggcggaaaaagagattgagctgcgccatggcgtgctgcgcgacgaggaggtgaatggtcatactgtcagcacctcgctgcatgtgacgtgcagttccaaatttccggtgcgaattatgtcggcagacagagtcggcagcgtttactttaatggtgggaaacagttccggagtgaactgaaaatagatggcgaggatttaggtgaagggaaagtcgttcaggcaacgccgcaaggggtgacgttaaccttaagctccacgctgatggggtatgatggcagtattggggtatttcagggctctaaagcgatcattgtttctttaccgtaa

SEQ ID NO: 437441 - DNA, 489 bp, Serratia marcescens
atgaaaaagcttggcatagtttgcctcatcctattgggtatcactgctcgagaggggatagcagcggaaaacatgagtttcaaagggacgctacgcgaggatgtgccctgtgagctcaatgatgggcaaccgataaacgtggattttgaaacggtgggcgttaataaaatcgatggggagcgttacaagaagtcgttttcggtgaaggtgagttgcccggcggaattcgatgttgcctataagatttactatgtcggtcaacccagtagttttgatacggcggcgttggccactaacgtcaaggggttggggattaaggcgcggtggcaaaaaaatggcgcttttgttgatcttggcgtcggcggtgcgattaacggtctggctgatatggatcttaatttccaggtggtgcctgtccggaaagtgaatacggagctggtgccgggtgcgttcaatgcttccgcatcgttcctgcttaaatatgagtga

SEQ ID NO: 437442 - DNA, 516 bp, Serratia marcescens
atggcgcacatattcaacccggccggtagttgcagcctttggcgcaatgcggcgatgtgtcttctctgtgtgggaatgtcaccattggccaatgcggcgaccactgtaacggtcagcgtcaccgtactggaaacaccgtcttgcgtgattaacgacaataaaaccatcgaagtggacttcggcgagatcctgacggtcaaggtggatggcaacaattataagaaatcggttgattatacgctgaaatgttcgggcattaagtccaatgccatgcagatgaaaatccaaggcggtgcgaccgcgttcgatgcttccgcgctgcggactaatatcagcgacttcggggtggcgtttcgttctgatgggaagccattgcccattaatagctggctgaagttcacctactcgggtagtcaggctccgccattagaggccgttccggtaaaaagagcgaatgcgaagctgcccggcggtgactttactgccggcgccaccttgctgctagcctatcaatag

SEQ ID NO: 437443 - DNA, 663 bp, Serratia marcescens
atgcaatggatgagcgagaaactgagaaaacacctgccggagcgtcacgactgtcggtattacggcaccttgggcgggctggcgctgatggtgcccctcaccctcggggcgatgctgtggctgatgccggctgcgcaagggcaggtggcggataactggtacaccgacggcgccaatggcgtgctgcaggtgcgcggcgcgctgacggagagcgcctgtcggctggagatggaaagcgcgtggcaggttatcagcctgggggagataggcaccgggcgcctgcagaatattggtgaccgcggcgcgccggtagcctttgagttacggctgagagactgcctgcgcagcccggccggcagccgggattcacgcaccggcgccttaacctgggccaatgatcaaccggcggtaacggtcactttccgcgccgggcaggatgcggataatccgcagctggtcagggctcagggtgttgccgggttgggattgcgtcttaccgacagccgtggacaggatgtgcggctgggcagccgcggggaaccgctgctgctgacgccggggcagaataccttaagctatagcgtggcgccggaacgcacggcggcccgtctggcggccggagcctatcgcgccacggtggattttagcctgagctatgactaa

SEQ ID NO: 437444 - DNA, 759 bp, Serratia marcescens
atgaaaaagaactttaccatgagcaaacatcaattgctgaccgccgcgctgttgggcgcgctgctggcgccgcaggcgcaggccgctatcgcgctggatcgcacccgggtgatcttcgacggcagcgaaaagtctgtcagcctgaatatcagcaaccagaacaagcagttgccatacctggcgcagggctggctggaggacgaaaagggcaacaagatccagagccccctggccgtgttgccgccggtgcagcgcgtggagccgggcaagccgagccaggtgaagatccaggcgctgccggcgaccaaacagctgccgcaggacagggaatcgctctactacttcaacctgcgtgagatcccgccgaagagcgacaagccgaatacgctgcagattgcgctgcagacgcgcatcaagctgttctatcgcccgtcggcgattgcaccgcagcagaatgccgcgccatggcaagagcagctgacgctgagcaagcagggcgacaagtatgtggtgaataacccgacgccgtattacgtcactttggtggacgcaggggccaggaaaggcgtggctggcgtgcaaggtttcgagccgttgatggtgccgccgaagagcagtgcgccgctcggcgtcaacgccagcgcgttgggtaacggcccggtgttgacctatatcaacgactacggcggtcgcccgcagctgagctttaactgcagcggcagcgcctgccaggtcgtgccggaaaagagcaagtcgtaa

SEQ ID NO: 437445 - DNA, 2532 bp, Serratia marcescens
atgtttttttctcctgcatggaagctgtttcgtcctcatgcgctaagtatcggtatatttctggcgttagcgcatttaacgccaaaggcagaagccgaggatggcattcagtttaataccgatattttggacgtgaacgatagaaaaaatatcgacctgagccagttttcacgcagcggctatatcatgccgggcgcctatgccatggtgattcatcttaataacaatgaattgccggaacagagcgtcagtttttatccgccggatgacgatgctcagggcagccaggcctgtatttcaccggcgctggtggaacagctggggctgaaaccggatgcatcaaaaggactgcgttggtggcatcaggacgagtgtctggatatcgccagcctgaagggcatggaggcgcgcggcgatttagccacggcggcactgtatttgagcattccgcaggcctatctggaatattcctcgcctgactgggatccgccgtcgcgctgggatgagggcattccgggcctgctgtttgactataacgttaacggccagactcagcgccaggagcggagcggtgggcagagtaacagcctgagcggcaacggcaccgccggcgccaacgttggtgcctggcgattgcgcgctgactggcaggggcagctcaatcaccaaaccggcagcggccagggtaccgatcagcggctggactggagccgttactacgcctatcgagccgtttctgcgttgcgctcgcgcctgacgctgggtgaggactacctcaactccggcctgttcgacagcttccgtttcaccggcgttagtctggtgtctgacgacaacatgctgccgccgaacctgcgcggctatgccccggaagtggtcggggtggcgaaaaccaacgccaaagtcaccatcagccagcaggggcgggtgatttatgagactcaggtggcggcggggccgttccgcatccaggacatcagcgaggcggtctccggcgagctggacgtgcgggtggaagagcaagacggcagcgtgcaggcgttcaagatgaacaccgccagcattccatacctgacgcgccccggttcctggcgcttcaaaatggcggcgggcaagccttcagactggcagcatcgcagcaatgggccgctgttcggcaccggcgagttttcctggggggtgagcaacggttggtcgctgtacggcggcggcctgttcggtggcgactacaacgcggcttcgctgggtatcggccgcgatttgatggcgctgggcgcgctgtcgttcgacgccacccagtcgcgggcgcggctgccgcagcaggacggcacgctgagcggcggttcataccgcctgagctattcgaagaccttcgacgagaccgacagccaggtgaccttcgccggctaccgcttctcggagcaggactttatgagcatgagcgagtatctggacgcgcgttactatggcggccgagtgggcaacaacaaggagatgtacaccatcacctttaatcagcagttccgggatataggcctgagcctgtacctgaactatgaccaccagacctattgggatcgaccggccaatgaccgttacaacctgacgctgtcgcgctatttcgatatcggccgcttccgcaacctgagcctgtcgttgaccgggtaccgcaacaagtacgaaaacaccaacgacgacggcatgtacctgtcgctgtcgctgccgtggggccagggagccaaccttagctacagcgcgacggtaaaccgtcacgacagcagccagcgagtggggtattacgatcggttggatgagcatagcaactatcagctgaacgtcggcagcgccagaaacggcgccaacttcagcggctattacagccgtgagggcgatgtggcccagttgagcgccaacgccagctatcagcagggcagctacagcgcgctgggcttcagcgcgcagggcggtgcgaccttaacggcagaaggcggcgcgctgcaccgcatcggcatgccgggcagtacccggctgctgctggataccggcggcgtggccggggtgccggtgcgtggttacggcagcaccgtagataccaaccgctggggcaaggcggtggtgacggacgttaacagctactaccgcaacaaggccagcatcgatctgaaccaactgggggataacgccgaggccaccaaatcggtggtgcaggccaccctgaccgaaggcgcaatcggttatcgcaagtttgatgtgctcgccggggagaaggcgatggcggttatccggctggcggacggcagcacgccgccgttcggcgccacggtgatgaacgccagcaaacaggatacagggattgtgaacgacggcggcagcgtctacctgagcggcatccggccaggtgaaagcatgaccgtgcactggaacggcgcggcgcagtgcgccatcagcctgccgcaagcgttgccggctgacatgatgagcaacctgctgctgccgtgccgggcgttgccggccaatgagccagaggcgtaa

SEQ ID NO: 437446 - DNA, 621 bp, Serratia marcescens
atgcagcatgcgggcttgcccgcatgcttttcccgggattcgagcggtggaaattctgtgaatagggaacattcaatgagttattttcctgcaaaattaatgcttccttgcctattgtccttaatgttaatcgcggataacgttcaggccgctcgccccagtcaaggatggggacaggtcaatatgcaaggagccattatcaataccgcctgcgctattgccgccggcagtcgggaacagctaatcgatatggatgtcacaccggttgcagatattattcgcgacggcagcgggggcgctcgttatttctccattgagctaattaactgtgttttatctcgggctgagagtaaattgccggactggagtggttttcgggtgacttttgacggggatgccgacggggagttatttgagatgcatggtggggcaaaaggcatcggattgcaaatcgtcgatgcagaaggaaatattgcccacccaggaaacccattgcccattcgagaaatattgccggaaagaatgctgcttaactaccaaatgcggctggtcgctaataatcagccactgcaggcaggggagtattattctgcggtgcgttttaaaatggactattactga

SEQ ID NO: 437447 - DNA, 558 bp, Serratia marcescens
atgaaactgaataaaatcatgatggcagcagtattggctttcggcgtaacgtctgtggctcacgcagcggtaaaagatcagggtcacggcaccgtaacctttaaaggcgcgatcattgacgcgccttgctcaattaccccggaaaccgtagaccagaccgttaacctgggccagatttccaacgtggcgctgaaaaacggcggccagtctacgccgaaaaacttccagattaagctggaaaactgcgagctgaacgctggtgatgcaaatggcgttggcaagaataatgctgttgctatcaccttcaccggcgcagcttcagtagaggacgctaagctgctgggcattaccggtaccgctaaaggtgccggcatcgccatcaccgacggttctggcaaggtgatcgagctgggtaaggcttcttcagcgcaagcgctgggtgatggcaataacaccctgagcttctccgcctacctgcagggcaacaaggcttctaccgctgttatcaccccgggtgacttccagtccgtggctgacttcaccctggcttaccagtaa

SEQ ID NO: 437448 - DNA, 756 bp, Serratia marcescens
atgattttccatataaataacaacgttctctatgatgaagatgagaacacattgtcgcatattgataatgcggcaactaaaatagtcttacttagacccagcgccagactgttatcactgttcatccgtaacaataatgtgttattaatgcgtgaaaggttgcttaatgatgtatgggttgagcatggtcttaaggcctcgaacaacaatctgaataactatgtatcagggttgcgcaaatcgctggcgcagttcggcgaagaggcgcttattgttacctatccgcgtcaggggtttaagttcaccgcagatatcattcatgaagtaaataacaatgaggaggtaaaaaaaccggaaaacaatcaagaaggagatattgaagtcagtaagatgactaagaaagaagcgcggcataatagcgtcaatagcccattcaggcgccttctgctggcatttttagcctgcctggtgccgtttgccgctatcgtgctttatcaaaacgccacccgtatcagcatgtatcctttgggcgactacgaccgctgccaaatatacagcatgaattcggggagcggccacttatccgaaatcaagcgatttatccagcgcgctggttttaattgtagaagtaaagctgacgtgtattactatgataacattcgtgatgaagcgtcgcagaagggcaaagagctgttaaccttctgcccgcgagaaaaaagcagcccgtgtatctacaattatatcgacaaagaatag

SEQ ID NO: 437449 - DNA, 465 bp, Serratia marcescens
atgaaacgatatggttacgcgattgcggcgttactggctatggggggctgcgccgttgccggttactttttatttttcagaccgcaaatcccggagtgccgggcggttgaacatgtaactgacaacattgccggccgcagcattggacgcattgttctgataaatgtggttcccgacggcccgcggcgcatcaacatattgttgaacggcagagcctatgatggcaaggatcactatgttatctcacgcactctggttatggattatcggcggcagggcaataactatacgctgtgggtgaaggaaaatatcaagaaaccgcatgactcgataaggcttgaggattttaatcggcggttaccggtggaaggtatgcaaatacactggcgtatcgagcaaattgatagccggcatttcttgtttgccgataaccatgcgccgttatttgtgtgtgctacaccctaa

SEQ ID NO: 437450 - DNA, 801 bp, Serratia marcescens
atgagatacataattaataataatattaaatatcacgaagatagatcggaattggtctcggtgaatgacgatatcccgccgattacgctgacggccacgctgaaccgcctgctctccacattagtcagaaacaacaatctggtgttatccagagagacgttgttgacgcaggtgtgggaggctcatggccaggtcgcttccggtaacaacctcaacaacaccatttcaattttacgcaaggcgttctcttcgcttggcgaggaggagatcatcgtcaccttgccgcggcaaggttttatgttcaccgccgcgacgatcaaaaccgcggacagccaggcgcccgcagaggagccggccccggagatgggccaggatgtgggcgccccccctgaggtaggctccgtcgctgtacgcagctatacgcgtttcaaagccgccggactggcggctttgctggttctggcgttgggcagcggtatttgggcgtggtgcgatgcaggttatcagccgatcagcacgatcgacggggggcgcatcgacagctgcagcgtgcgccttatcaccacttatcataagccggcaatcaacaaggtcgatttggatcatctgcgcgacatgctgaagcggcggccgcagattcactgcaacgaaccggcgacgctgctctactacgacacgcaaacactggtgccaaacggttccgggagaacccgaacgtcctatttctattactgcccagagtcgcaaatggtggataacaaggtgcaatgcgagagtttctatgaaagctggggcctgtaa

SEQ ID NO: 437451 - DNA, 327 bp, Serratia marcescens
atgacgggcagtttattcatctatgacgaacatcacgccatgatcgctcaacgtggggacattaccttggaaggaaaaacctacaaactggatagaaaaataaactttgatataaagaggttggatcacgggttttacatgaccacccaccgagaaatcagcaaagatcccgacgataacgcgccgcatgaactgatcaaagaaatccccatgctctctctcctcattaagaatggcgttttttcgatgcgtaaagtgcgacaggatgcgtacatcgttcatggcgtgcttttcccgatcacgatatgccatagcagaatgctatag

SEQ ID NO: 437452 - DNA, 207 bp, Serratia marcescens
atgacctataaccaaaaaatctggttgggggttttgctgctgtgcaccctgttttggggggcagtgataagcggcgcctgttcgctgtataatcggacagatcgcctcaatgcgcaccaggcgcagagcgagttcgccgcccgccacagtctgccccactgcccgcagcaaagcgttcaggcctccgccgccccccggaatgggtag

SEQ ID NO: 437453 - DNA, 780 bp, Serratia marcescens
atgtgtgaagatttaatttcaagaacgaagtgctttgtctttaatggtcaaagatacagagtctttatctctcaccgcagggggactggcggtaatttgaacccgctgtatcttttggatgctaactcccagttttcggtcgtgacggaacgtaacaacagaaaacgcgatggggatattctttatatcggcattggctatcaagacggggtggatatcttgaaggcaagaacccgtgattatacggttccctcaggagagaaagagtttgcggaggggggcggagcggcagcgttttatcaatttattgccgcatgcgttaaaccatggatcgaagcgcattatcctgtcaacgtagaccagcaaacgctggcaggccactcgcatggtggtcattttgtgttgtataccctgtttaatcatcctgatgcatttcaaaattatttagcggccagcccatccatttggtggggcaatggggcgttgattcctgacggcaagttaaccattgatgagcatgtcaatcaggtcacgctgatggtgggagagtatgaagaaaaacttcatccccaaagtaatgaaacagagaaaatgcagatccttagaatgaacgccacgcctaatctgcgagccagaaatctggcggagaagttgatcggtaatgaacagcgctgtagctttgttttttgcaccgggcggcgccatcccggcgttattaaggattatgcacaggtggcaaacctgatcgctgggcatcgtccccagaatgacgggctttag

SEQ ID NO: 437454 - DNA, 969 bp, Serratia marcescens
atgcgaaaggacaagtcctccttatttaactggtcaactgccggcatgcttgcagaagagcggctgagtgaatttgatcgcctgctgaaacaaagcctgatcagcgttacaaccaccatcgacgatcactcccgcttctggtgccatctgtcaacgctcaaggccgggcaattctccattactgacattaatggttcagccaaacgctcacagcgtgacagaaagaatattctacgtagcgccagcgacgaataccacctcgtgtatgccggcgccacatggcgatttattaatcgatacggccaagagatcaccgtgcctgcgggaagcgcaatcttgctcgatacgcgcaaggaatatatttcacttttgccggagggtttccttaatcgcacgctggctttgcctgctgaatggctcaacacctgggtcgccaatcccgaaaaaatgatcgaacaaaacctgagcgagctttcaggctgggggaaagtattagccgcctatctggaacagatttctccgccttatctgagcacaatcgactttcaaccgccaatgatattggatcaaatcggtatgctgctctcgctgctctatcacgatttggttagcgaagatgccttgtcccgcaaatttagccgcgatagaaattatcagaaaatcgtggaaagtctgcatcaaagacacatgaatttagttctgaccgcaacggatatcgcgcgagaggtcggcatttcaaccagaacattacaccgcgtgatggccaatcaaggcaccagtttcggccaggcgttaatcaactaccgcgccaactccgcattacgtatgctcaataccgaagaatttgacgaactctccatcgcagatatcgccaaacgggcaggctttgtcgatgtttcacacttcaatcgcgtgtgtaaaacctattttggcgagtctcccggcaagatcaggaagaaacgcccttaa

SEQ ID NO: 437455 - DNA, 459 bp, Serratia marcescens
atgtctgacgaatttaacggaaagatcagcgagcgcgtcgttcgagaaattattatttggattgataataacttaggtggggatttgagtattgatgccatatccagaaagtcaggttattctaaatggcatctgcagcgagtgtttaaaatgcgggccggtatcaacctgggcggttatgtcagagagagaagggcgctctttgcgtactatgctttgacggaaacggatataccaataattgatattgcttttatgttaggcttcaatagtcaacaggcatttagccgagtgattgataaaacattcacgctttcacccggtgttattcgtcggttaagcagaaacggcacggtttcttttccggcattgattaataacagccattgttcaacgacctccatgaatcccgccatgcgggtctctgccatggagggaatgcgtaaattattaatatag

SEQ ID NO: 437456 - DNA, 624 bp, Serratia marcescens
atgtcaaagaaatatgttcgccttgataaaaatgatgccgctgtgctattggtcgaccatcaaacggggttgctttcactcgtccgtgatatcgatcccgacaaattcaagaataacgttctggcgcttgccgatctggcaaaatacttcaatttgcctacggtgttaacaaccagttttgagattggcccgaacggcccattagtgcctgaattaaaagaaatcttccccgacgctccgtttattccccgccctggtaatatcaacgcttgggataatgacgattttgttaaagccgtcaaagccaccggtaaaaagcaattgattatcgccggggtcgttacggaggtttgcgtcgcatttcctgcgttgtcagcgctagaagaaggttttgatgtatttgtcgtgactgatgcatcgggaaccttcaatgaaatcacgcgtcattccgcatgggatagaatgtctcaggccggtgcgcagttaatgacctggtttggcgttgcctgcgaattgcatcgtgactggcgtaatgatattgaaggcttgggcaagctgttctctacgcatattccggattaccgtaacctgatgaccagttttgataaaatgaatgggaagtga

SEQ ID NO: 437457 - DNA, 1425 bp, Serratia marcescens
atgaataacaaattcagtgtgatgttcaacgcgattgccatatctctgatgacctgcggtatggcctatgcagcggatacttctcactcgccgaaaggggaacaagcggttgttcaaacggcagaacctttcaaggcccatgttttgattaatgggcttgatgcgccctgggacatgatttgggggccggatggcgacctctgggtgacggagcgcaaggctgcgtcaatcgttcgtatcaacccgcaaacgggtgaaaagcaggtggcgatcaagattgacggcgtgcatgtcgggccgcagcatgaaggggtattggggctggcgctgtccccgaacttcatgaagccgggaggggataactatgtctacgcctcctatacctatatgaatggcaatgacgagcacgcaaaaatcgtccgtttcgagtacgacgagaaaaccaaaaaactggggaatgagaaagaaattctggcgggtttcccggcaggcaacgatcataacggcgggcgcctgcgttttgggcctgatggcaagttgtattacacgatcggcgagcagggccacaaccagggtgccaatttctgcaagaaaattgacgctcagcgaatcccgaccgaagccgagctggctaaaaaagattattcctcttacgccggtaaagtcattcgcttaaatgtcgacggcactgttccaagtgataatccggtgattcacgggataaaaagccatcttttcacctacggtcaccgtaatccgcaaggtctcgttttcgtcggcaatacgctgtacgccacagaacaagggccttcatccgacgatgagttgaatatcctcgaagccggcggcaactatggctggcctcatgtcgcaggctatcgcgacgatcaagcatatgtttacgcgaactactccgaggctaaaaattgcccgtctctgcaatgggatccgaaccatatcccggcgggcgtaccgatccagaaagagaccgaatggagcgcacctgatttcaaagcgccgttgaaaaccttctttaccgtaagagaagggtttacttataacaacgccagttgccagggcgattcatcctatatgtgttggccgacaatcgcgccttccagcattgcgtattatcctgagaatggcgtgataaaagcttggcgcaactcggttattatcacttccatgaaaatgggggcattgtaccgagtgccgttaaatgcggataagaaggatgtgcagggggatgtgattaaatatttccacaccgcgaatcgttaccgtacggtgttggtgagccctgatacgcggaaaatctatgtagcgacagataattttggcaacgttatggatgaaaccaaccatcctacgcacgatcacagcaaccccggttcgattctggtctttgaatataccgggcagtag

SEQ ID NO: 437458 - DNA, 756 bp, Serratia marcescens
atgacgcaaccacgccccctgacgccgcaggcatttgaagcggcgctgcgcgccaaaggcgcttattaccacattcaccacccgtaccacatcgcgatgcacaacggcgaagcgacccgcgagcagatccagggctgggtggccaaccgcttctactaccagaccagcattccgatcaaggatgcggcgatcatggccaactgcccgcagccggaaacccgccgtaaatgggtgcagcgcatcctggatcacgacggctacggcggcagcgaaggcggcatcgaggcctggctgcgcctcggcgaggcggttgggctgcagcgcgacgccctgctatccgagcagctggtgctgcccggcgtgcgtttcgcggtggatgcctacgtcaacttcgcgcgccgcgcctgttggcaggaagcggcctgcagctcgctgaccgaattgttcgcgccgcagatccaccagtcgcgcctcgacagctggccgcagcactacccgtggatcgacgccgccggttacgactatttccgcagccgcctcggccaggccaaccgcgacgtggaacacggcctggcgctggcgctggactattgcgataccgttgaaaagcagcagcgcatgctggagatcctgcagttcaagctggacattctgtggagcatgctggacgccatgagcatggcctataccctgaaccgcccgccttaccacagcgtgaccgccgcgcgggtctggcacaaccagaggctggtgtaa

SEQ ID NO: 437459 - DNA, 279 bp, Serratia marcescens
atgacgctgaatcctgaacacaccccggtattccgccgtggctaccgcctgcaatgggagccggtgcaaaacagccacgtgatcctctacccggagggcatggccaagctgaacgacagcgccgccgccatcttgcagctggtcgacggccacaccacgctgaacggcatcattgcccagctgaacgcccgcttccccggcgccgaagggttggcggacgacgtgctggagtttttccagcgcgcctacgaacaaaaatgggtgaccttccgtgactga

SEQ ID NO: 437460 - DNA, 687 bp, Serratia marcescens
atgcgcccagccgtagaactggcaggtcgccagctcgacgtcgtcggcatccagctggatcgccagttcgatgatgcggtcgatctggccgatattatggcgatgcaacacgaagttgagcaccatcggatagccgagcgccttgactgccctggccatcgccagcttctgctgaaacgccctggcggaacccgccagcgcggcgttcagcgtttcgtcgctggcctgaaaactgatctgaatatgatccagcccggcgtcggcgaaggtttgcagtttcttctcggtcaggccgatgccggaggtgatcaggttggtgtaaaacccgagatcgcgcgcggcggcgatcagctcgggcaggtctttacgcaccagcggctcgccgccggagaagccgagctgcacgctgcccatcgcccgcgcctggcgaaacacctctatccactgcgcggtggtcagctctttttcctgcgcggcaaaatcgagcgggttggagcagtacggacactgcagcgggcagcggtaggtcagctccgccagcagccagaggggcggattcaccgccggcgcacgtggttcagtcacggaaggtcacccatttttgttcgtaggcgcgctggaaaaactccagcacgtcgtccgccaacccttcggcgccggggaagcgggcgttcagctgggcaatga

SEQ ID NO: 437461 - DNA, 723 bp, Serratia marcescens
atgcgcggcaataaaaaaaccaacacgcgttcaaaaacgttgttggccgttgggaaccctgcggatttggcgatcgaggcagtacgaagcttaagaaccagtttgcatttcgctatgctcgaagctaaaaataatgttctgatggtctgtggtgcaagcccaaatattggtaaaactttcgtcagcatcaacttggccgcggtcattgctcaggctgggcaacgtgttttagtcattgatgctgatatgcgtaagggctattcacactcattgttgaataccgattggcataatggtttatctgatatcttatctgctcagaccacgatggctaacagtgtccgcaaaacagaaattgaaaacctggattttattccgcgtggacagataccgccaaatccttcagagttgctcatgggggcacgcttcaatgagctgattgattgggcgagtaagaattatgatatcgtgatgattgatacgccacctattctagcagttactgatgccgctattatagggcacagggcggggactagtctgatgatcgcacgtttcgcatccaacacggtcaaagaaatagaggtgagtattcgccgctttaatcaaaatggcatcgatgttaaaggcgttattctgaatgctgttgagaaacgggccagcagctactatggtgattatggctactatcaatatgagtatcgttcaaacgataaagcatag

SEQ ID NO: 437462 - DNA, 153 bp, Serratia marcescens
atggcctcccaggaagagccattgctgaccagaatgaagaacgctatcgagctggtgggcttgctcaacccttcacaagcccgacaaggatttctgggtgtactagtacaactcaacacccccgccgataacgttcccgaattttcgctttaa

SEQ ID NO: 437463 - DNA, 690 bp, Serratia marcescens
atgagttattctgatatttcgcatgcagctcgtaaagctcttaaagccattgatgaaagtgaactggaaaaatgtgtcgataaatgcctgtatgaagaacagtcttattatcttcaggggcttagactctatgattgtggaccctatgtcacgcagcaattattttgctttgaaaaagcagttactgcacttcggatatccaaatcatccaaaaaacacgaagaagcaagatccgcagccctgaaagctggtcgtgatctgaccgctgcattttcgcaaatgagggcaggggtttctgaggttgaggcagaagaagttacatttagtgtcgatgagcaaaattttccgccaacaacgttcagtgaacgcctttctgttcggataagctacagctggcgaatcgatcagaatgcagactggcagttcggaaatattacattctcttaccttgctgtagaacagccaagctatttttccgtcgagccggcacgcaagattagcgttgccagacaaaagcaggaaaaacaagaagatttgtaccggacttgggagcacctaaaagcaatatgtaaggaatctgtccataactatttgaaggatgggcgagatggctcgcagatcccaaagactttcacggttaaaagtctgaataatttcggggcgaatttttgggatcgtatcgatacttag

SEQ ID NO: 437464 - DNA, 966 bp, Serratia marcescens
  misc_feature (939)..(948): n is a, c, g, or t
atgttagagtttagggttattgaaagaggtgggtatattcctgcagtggaaaaaaataaggccttcctacgggcagatggctggaatgattattcatttgttacaatgttttatcttactgtctttgatgagcatggtgaaaaatgcgatatcggaaatgttaaaattggttttgtcggtcaaaaagaagaagtaagtacttattcattaatagataaaaaattcagtcaactccctgaaatgtttttttccttaggtgaaagtattgactattatgttaatctcagcaaattaagcaatgattttaaaaataaccttcttaaagctatgcaggatttagtagtacgtccaaatcgattagtcgacattgaaaatgaaagtgtccttaacacctcattacttagaggggtcactctttcagaaattcatgggcagttcgcacgcgtgttaaatggtttgccggaattgtcagatttccacttttcatttaacagaaaaggtgcttccggattcagtgatttaactataccttttgaagtggcggttaattcaatgcccagcacaaacattcatgcttttatcgggcggaatgggtgtggcaaaacaaccattttgaatgggatgattggtgcaatcaccaatccagaaagcaatgagtattttttctctgaaaataatagatttatcgagtcacgaatcccaaaaggatattttcgatcgcttatttcagtttcgtttagcgcatttgatcctttcactcctcctaaagaacaaccagaccctgcaaaaggtacacaatatttttatattggacttaagaatgctgccagtaatagtttaaaatcactagacgatcttcgtctggaattcgtttcagcatttattggttgcatgagagcagatagaaagagacaactctggcttgaagctattaaaaannnnnnnnnncatcagtctcatttctaa

SEQ ID NO: 437465 - DNA, 891 bp, Serratia marcescens
atgaaaaaactacctcctccagcgagaacttatagcgaaatgcttaataagtgctcggaaggtatgaagcagataaatgttagaaataacttcattgctcacttccccgcttttttgcataaagaacagcaatatagggcattaagctcaacaggtcagttatttacctacgctaggacacaccctcttgcacctacaaccttggtagttggtaacctaacaaaggttaaattagaaaacctttatgaaaataatctccgagataaaaacaaacccgctagagaatattacgatgacatgctagtttcatcaggtgaaaaatgcccattttgtggtgatataggacagacaaaaaatatcgatcattttcttcctgttgcacattatcctgagttttcggtgatgcctattaatctagttccgtcgtgccgcgactgcaatatgggggagaaaggtcaagttttcgcagtggatgaggaacaccaagcgattcatccctatatcgacaaggatattttctttcgtgagcaatgggtgtatgcaaatttcgtttccggaaccccgggagctatcagtttttatgttgaatgcccggcgacctggcggcaggaagacaaacacagagctattcatcatttcacgcttttaaatgttgctaacagatatcgcttggaggcaggaaaacacttgagtgaagtgattactcaaagaaactctttcgcaaaagttataagacaatttagtccaatcgccacctctcagcagctacggtcggcatttattgaagcaaatctgaaacctattatagatttgaatgatttccccaattattggaaaagagttatgtatcagtgcctggcaaactcagcagagtttttcagggggatctag

SEQ ID NO: 437466 - DNA, 423 bp, Serratia marcescens; identical to SEQ ID NO: 25058

SEQ ID NO: 437467 - DNA, 630 bp, Serratia marcescens; identical to SEQ ID NO: 25117

SEQ ID NO: 437468 - DNA, 2796 bp, Serratia marcescens; identical to SEQ ID NO: 383589

SEQ ID NO: 437469 - DNA, 276 bp, Serratia marcescens; identical to SEQ ID NO: 56212

SEQ ID NO: 437470 - DNA, 393 bp, Serratia marcescens; identical to SEQ ID NO: 115961

SEQ ID NO: 437471 - DNA, 270 bp, Serratia marcescens; identical to SEQ ID NO: 120045

SEQ ID NO: 437472 - DNA, 141 bp, Serratia marcescens; identical to SEQ ID NO: 131154

SEQ ID NO: 437473 - DNA, 792 bp, Serratia marcescens
atgagggaagcggtgaccatcgaaatttcgaaccaactatcagaggtgctaagcgtcattgagcgccatctggaatcaacgttgctggccgtgcatttgtacggctccgcagtggatggcggcctgaagccatacagcgatattgatttgttggttactgtggccgtaaagcttgatgaaacgacgcggcgagcattgctcaatgatcttatggaggcttcggctttccctggcgagagcgagacgctccgcgctatagaagtcacccttgtcgtgcatgacgacatcatcccgtggcgttatccggctaagcgcgagctgcaatttggagaatggcagcgcaatgacattcttgcgggtatcttcgagccagccatgatcgacattgatctagctatcctgcttacaaaagcaagagaacatagcgttgccttggtaggtccggcagcggaggaattctttgacccggttcctgaacaggatctattcgaggcgctgagggaaaccttgaagctatggaactcgcagcccgactgggccggcgatgagcgaaatgtagtgcttacgttgtcccgcatttggtacagcgcaataaccggcaaaatcgcgccgaaggatgtcgctgccgactgggcaataaaacgcctacctgcccagtatcagcccgtcttacttgaagctaagcaagcttatctgggacaaaaagaagatcacttggcctcacgcgcagatcacttggaagaatttattcgctttgtgaaaggcgagatcatcaagtcagttggtaaatga

SEQ ID NO: 437474 - DNA, 1260 bp, Serratia marcescens; identical to SEQ ID NO: 25685

SEQ ID NO: 437475 - DNA, 792 bp, Serratia marcescens
atgagggaagcggtgatcgccgaagtatcgactcaactatcagaggtagttggcgtcatcgagcgccatctcgaaccgacgttgctggccgtacatttgtacggctccgcagtggatggcggcctgaagccacacagtgatattgatttgctggttacggtgaccgtaaggcttgatgaaacaacgcggcgagctttgatcaacgaccttttggaaacttcggcttcccctggagagagcgagattctccgcgctgtagaagtcaccattgttgtgcacgacgacatcattccgtggcgttatccagctaagcgcgaactgcaatttggagaatggcagcgcaatgacattcttgcaggtatcttcgagccagccacgatcgacattgatctggctatcttgctgacaaaagcaagagaacatagcgttgccttggtaggtccagcggcggaggaactctttgatccggttcctgaacaggatctatttgaggcgctaaatgaaaccttaacgctatggaactcgccgcccgactgggctggcgatgagcgaaatgtagtgcttacgttgtcccgcatttggtacagcgcaataaccggcaaaatcgcgccgaaggatgtcgctgccgactgggcaataaaacgcctacctgcccagtatcagcccgtcttacttgaagctaagcaagcttatctgggacaaaaagaagatcacttggcctcacgcgcagatcacttggaagaatttattcgctttgtgaaaggcgagatcatcaagtcagttggtaaatga

SEQ ID NO: 437476 - DNA, 435 bp, Serratia marcescens; identical to SEQ ID NO: 10324

SEQ ID NO: 437477 - DNA, 522 bp, Serratia marcescens; identical to SEQ ID NO: 232255

SEQ ID NO: 437478 - DNA, 627 bp, Serratia marcescens
atgccatttgatatttccaaagcagcggaggcagaactaataatagacataggaaatcaactgtattgggaagattttaataagtgggaaatgcacgatttctttttaaggaaccttggtctcgaacgtaatttcactccgattgagataaaaagcaactcatggttaaaaaatgcccctcttaatgacatcaacctgggtgactatgtactcttctgccctcacgcaagtacaaaaataagaagcataccgcaacagtatcataaaaaaataatatctgaattaagcgataagtttaaggttaaagtctttgggtttagtgatgttcaccatgaaaattatactaacatttctgagctatcaacgagcacctctcgattcgcatccataataaagcatgccaggcatctctatacatgtgactccgcagccttacatattggtgctggttttgacataccaaccacgtgtatatttaccacagtgaagcccgaatttcgtagtctatactatactcattgtgagtctgtttatatcggaaatgacaaaacagtagggatccataatagtgaagatatcaatttaattaactcaatatgtaaagaatttgaggtttattatgcataa

SEQ ID NO: 437479 - DNA, 1005 bp, Serratia marcescens
ttgcatgttgacaacaaactattatcttgctcagaaaatttagctaaagaaaaattccagaaggaattttataaatatctcgacaaaggctatctcaaaggtgttagaactgaagggaccgatcgcccaagcatatacacaatggatgcagtaaacaaattaacaaaagacgctcttagattaacttgcaaattctatgttgatgtagatggaagacctattgaacgagaagatttcgatctattagatgattccgctgatattcatgaaatgataacaaaaaccctaggtcataataaaagaccatccaatatatcgatgatagctacagctatggccaactttgaagatacatggactaagaaattttttaacgatttctctatcagccccgcatcttttgctattgcatccgctgaatctctagccaacttacaaaagcctaaaatactggtaggaccattatattccaattcaaattggagctttatatcgagtaagatccaaaaatacattactaatagaactacatcagaagacaaaaaaacaaagcaactagtatggttagctccatctgatccttattgggggaaatcatcacaaatcatcgactgtttaagtgagttagagaatctccagctgacaacaggtaaaaatcctgagagggtatttacgcctaaattataccttcctctatcaagtcctgcagatagaaggacattaagcaaactggtttatgattttagagaaagtgctaatttaaactatggtgttgctgaaggatttatggatggtaatgtcgaagttttatacttagaaaatgaatttattgttgttttctatcatattaacttccctgaaagtttacctgtcacattgccagtaggttttataactgaagataaaaaaaccctcaacaaaatctctaagttggtcgaagagtatatagacagctcaagctctcatgacaaaccacataattttggccttctaaaaaacctctaa

SEQ ID NO: 437480 - DNA, 1227 bp, Serratia marcescens
atgtacgatgacaaaacaatagcttttgcgaagaagcaagagcaaaaactgattgatgcgctgggacatagccgtgagcatactgatgtcagctctgaagcccgaaacagagatgattaccagcgagactatgcacgaattctttactcatcctcattccgacggcttcaggggaaaatgcagctttttgaagtagatcctgagaaatttaaccgaaaccgcttaacccacagccttgaagtcgcacagatagcacgcagtattgcatcagatcttaaattgcaattccccgttgttgttgagctggcagcactggcccatgatattgggaaccctccattcgggcactcaggggaaaaaaagcttaacaacttatctgctgaaatcggcggatatgaaggaaatgcccaagcgcttcgtatcttgagaaaactcgagaaaaaatatgctcgctgtgcaggtttagatctcacctaccgcagcttattgtctgtcatcaagtatccaaatacaaaatccacttcagataaattcatttatgatgatgactatgccttctatacgcagttgctgaaagataaacaactaggcatgaaggcgggtgaaaaaaccattgatgcacagattatggatctcgccgatgaaatcgcctatgcagcgcatgaccttgaagatgcgttgagcaggaacatggtgactatcgaagatattgagtatgaatttctcaagtcaccagactacaacgttgctcttaaacacttcaatgagattgtcagtacgtccaagaaaactgcatctgaggcaacattactgaagtcatcagaagaatttgccataatttttcgaaaagagctgacgtccaatatcgttaaccgcttggtcatggatattggcgtcgttgaaagtaaaaatggttatgaagagcttgggtacaaaacgttacaggaacttgctgaaggtcttaaaaagctgctcttcagagtcatcatgcgcaaaagaaacatactgacttacgagtttgaaggaaataagatcatcagtgatttatatgcgttttataattccggtgacaactataagtttctgtcacctgagctcaagtcttcgttatctgaaacagagccgaatgagttaaaaaccaaaaaagcgcgggctgtggttgactacatttcaggcatgatggacacattcgccgtcaaggaatgggaaactcattgtaagaaataa

SEQ ID NO: 437481 - DNA, 267 bp, Serratia marcescens
atgaaagtagaaattaacaacgctaccggagaaaaccagactctggaagtgacatctcttgttattaagctgagtaatggcgaaacaatagaaattagcgaagagaaacaagagcgacccacgcacctatcggaaggaataaccatatggggaggccgaatgccccgggaaaacgccagccttgaggaacttaaagaatcaacccgaatgctgggaatatacccgctggctgctaataccctgcatctttatcctttgaagaaataa

SEQ ID NO: 437482 - DNA, 900 bp, Serratia marcescens
atgttcgatcacctccccccattgcagactctgcgcgcttttgaagcaactgcccggctctcaagcatgacgctggcggcagcggagttgcacgttacgcatggcgcgataagccggcaaatccggaagctcgaagagcatctggggtttaagctatttttcaggctgacacggcagataattctgactgagcaaggggctgaatttcaccatgtggttacccgtcttttgagtgatttagtgagggagtctgagcgtctgcgtggaagaaacctgataaagagtttacgtataagtacaacggtttcatttgccagtaagtggttagcaccgcgtctcaaccggttcaggcaaagatatcctgaatttgatattcaactggatgttactgacattaatgtggatcttaatgatggtcaggtagatgctgcaattcgttacggccttggcaattatcgatatgttacgtctgaacgtatatttgatgaaacagtcacccctgtctgtagtcccggttttcttgagaaacataatggtctgaaagagataaaggcgcttttaaactgcgttcttcttcatgagtacagaatgcaggcgaactggcaggcatggtttgagatggccggagaaaaaaatttcagttgccatcaggggcccttatggactcttggcagcatggcgactgaagctgctatacgtggtgaaggtgttgctctgggacgtagtattctgattgcagatgatgtagcggctggaaggcttgttgttccgtttccacagtacaagcttaaggctgaacggggttacgatttaatctatcgtccagatgatcaggataaatttaaaataaccattttaagacaatggctcactgaagaaatgagtttgctaaaagattga

SEQ ID NO: 437483 - DNA, 327 bp, Serratia marcescens
atggaaagtttatttgtttatgggacactcggtcctggccgacctaatgctcatattcttgaaaatatcggaggaacatggcaggaaggccacgttggcggctctttattagagaaaggctggggggcagagatgggttatcctggaattgtactggatgactcaggtaatcgtgtacagggttttcttttcacttcagaggatttgcataatcactggcacactctcgatgaattcgaaggggcagagtatgaacgtgttccggtagaggtaaccacatctaccggtgagacagtgcaatcatgtatctatatgctcaaagcataa

SEQ ID NO: 437484 - DNA, 933 bp, Serratia marcescens
gtgacggtacaacgaaaaccggttgacacatatgccacactggtcatgacctcgctgtgtatagtctggggaattcagcaggtcgcaattaaaggcgtagctgatgaaatttccccggttctgcaagtagcaatcagaagtggagctgctacgggccttatatgttttatgatgattcttaaaaaaacgccactcagaaattttgctaattgcttagttcccgggggagttgtgggtatactttttggtttgcaattcctgtttgttgctgaaggcctgcgatacacctcggcatcacacatgtcagtattcctttatacagctcctgtttttgctgctatagggctacagttttttagatccgatgaacgactgtgcgcaccacaatggttagggatagctattaccttttcagggatttgtgtcgcgtttctgtcaggtaaggctccggttagtagctccagcctgactttgacaggagacatgatgggattacttgcaggactttcatggggggccactaccatagttgtcagatgctcttctcttggtgagtctcccgcctcacatacactcttctgtcaacttgcaggaggttttctacttttatcaacttattcatacttttctggccagaatcactttgaacctggtaccgtcgggattgccagtttaatattccaaagtgtaatagttggctttgcgagttatttagcctggttcagtttgatgcgcaaatatatggcatcacagctcggcgttctttcattcatgacgcccgtatttggagtcattacggcagtattttttttgcgagaacaactacagtcagggtttattttaggaacgatactaatcctgagtggcataagtatagttagcggctggtcctggttcaggtcgagattgttaacggtgtttgttaaaaaataa

SEQ ID NO: 437485 - DNA, 633 bp, Serratia marcescens
atgtacaattctctggcaggggcgatgtctgctgttcgcttacagcggacctcaaggtacttcaggcagtccgctctgtgccagaagcggacagtcggaatttgtgaaaataaatatccgaagtgcctgacaggaatgtgccaggccggaagaattgtaaatctgtcaggcaaggtcacctttaaatatcagcaactctctttgagcagctttgagggcatactgacgtgcttcctgataggcagggtcttcataacatgccgttgccagctcataagatggaaattccacgataagcagtcgggctgcatccctggattctttcagagccggaggtgtgtcagaaggattaatcactgcctgatatttctcagcgatcggtttccacaggcggccatattcagcctgcgcattctggtcagtgacgtcagttccaattattacccagtagcctttcattttttttctctccatccatcagtgttgaacgtgtgttttcgcagtgcgaccgtggccggagccgttgctgacagatccggcaggttattttgccagtcgggctattttttcagtttgcgcgtgtgctcccgggcggcggcatcatgtccctgcccggcagatggattccactga

SEQ ID NO: 437486 - DNA, 798 bp, Serratia marcescens
atgaaagtgcttatcgtttttgcccatcccgaatcgctctcttttaacggtgcgcttaaagacgcagccgtagaaacgctgaccgctgccggtcacgatgtccgcgtcagcgacctctaccgcatgggctggaaaagccagctggatgcgagtgatattcccggcgagcgcgctgacgccagtttcttcagtgctccaaaagagcaggaaaaaatggaggccacaaccggcgccacgcctgacgtcaggggtgagcaggagaaaatgcagtggtgtgacctgatgattttccagttcccggtgtggtggtttggcatgccggccattctgaaaggctgggtcgatcgcacctttacgcgcggttttgcctataaaagcggacgaaaatacgactctggtattttcagaggcaagcgtgccatgatttgtgccacaacgggcacagcttcttcgctgtacgaaccggacggcgtggacggggagatcagtcatattttctggccgatacataacggcattttccattacgccggcttcgacgtgctgccgccgtttatggcgtggatggctgataacacatcgcaggaatgccgggaaacatatctggcgcagtgggctgaacggcttcgccatattgaccaggaaacgccgttattctttcacccccgggaagactataccgatgagcagcgcctgcgccccggggtcgaggcgaggagcggctttcagtggaatccatctgccgggcagggacatgatgccgccgcccgggagcacacgcgcaaactgaaaaaatag

SEQ ID NO: 437487 - DNA, 957 bp, Serratia marcescens
gtgacgcttaagagaagcaatgcggacctgcgggcgggcgggataatgacggtgctgtgcataatatggggagttcagcaggtcgccatcaaaggcgtggcgatggatatatcgccagtcctgcaggtcgccatccggtccgggtttgccgcactgctcgtgtggatagtgatggcctgcaggggggagcctctgcgccagtcccggccgtatctgacgcccgggtgtatggtgggggtattattcgcgctggagttcctgtttgttgcagaggggctgcgctttacgtcggcatcccacatggccgtattcctttacactgctcccgcctttgccgccatcggtttgcagctttttcatcctgacgagcggctggtgccggctcagtgggcaggcatttttatcgcctttaccggcatagcggtggcgtttctttcaggcagcagcggcaccggcgacgtggtcaggatactcaccggggatgctatggggctgatggctggcctggcatggggagccactacggttgtggtacgctgcaccgcgctgagccaggcaccggcaacgcatacgctgttttatcagctgagcggcgcctgcgctctgctgtctgtctacgcgctgttcagcggccagcaccacttccggcccggcattacagccggactcagcctgatttttcagattttcattgtcgggtttgccagctatctgacgtggttcagcctgatgaaaacctacctggcttcgcagcttggcgtgctgtcattcatgacgccggttttcggcgtcatcgccggcatgctgttgcttggtgaagaacctcagcccggttttttctggggtacgctgctcattctcagcgggatcgtcattgtcagcggctggccgtggttcattacgaagctgggtcgtgctgctgcacctcaccgttcatccacagggagaaatccatga

SEQ ID NO: 437488 - DNA, 798 bp, Serratia marcescens
atgagtctgacagcatcatccgggccaaagagaaggctagtttctccaccctttacccacgagctgccggctcccgcctggttcagggttgcagagatgccggccggagcaacttatccggtgcattcacatccttgggcagagtttgtctattctttcagcggcgttatggaagtcaggctggaggccgatcatctcacggcaccggcacattacgggatatggctgccgccgggggtggtacacgaggggctgaaccgttattcagccacgcactgctcactttatctgatgcccgaactctgcgacggcatgccagcatcaccctgcgcgcttgaggtcaacgccctgacgatcgccatgcttgaacacctccggctgcatcctctttcctcgccgctttctcaggaaaaccaccggctccttggcgtgctcagggaccagctgaaaaccgcgcagtgctacaggaattttcttccctacactgatgatcctttgctggcgtcagttctggaaaaacttgaaaaaaatccggcggataatacctcgctggcagagctggcttccctgtccggcacaaccataagaacgctgaatcgcagatgtcaggaatcgctgggcatgccgctgaatgagtggcgtcagcgaatgcgcgtggtaaaagccattcgcttactggaaaagggagcaaaagtggaaagcgtggcctttgaagtgggttacaacagcgcatcagcctttatcgccatgtttcaccggcagacaggattaacgcccgggctgtcaacctgttcatag

SEQ ID NO: 437489 - DNA, 432 bp, Serratia marcescens
atgacagacacaaaaaatacccgcttcgacgatgtagaagatatcgcgcagcgtctggcgtccggccacacttcgcgtaagtctctaatccaacaggctagccgcttccgtaagaacggccgccacgatctggcgaacaacattaaagaggcgctagctcttgagttggaccagtacccgcagtttacggcgcaagcgttgcggctccaagagcgtgcatctcagatgaccgcacaagaaaagctccagctccgcgttactttggatttccacggtagccgcgacatcctgaccgatgttcttgtcgcttggcaaagtctcttctcagcacgtgggatggagatcagcacgcaggacgtgtttaccatgatggccctgaacagtgccgcagagtttgaagagttgaccggcgaacctatcgcacgtcagtaa

SEQ ID NO: 437490 - DNA, 207 bp, Serratia marcescens
atgttgggagaacgtagacacaacagcaacacaggaaagaatgaattcgttatttcctgcaatgtatccttgacgcaggcattgcacgccatagcagcggccaacggcgtttcagtacaatccttgatccgtgacggtatccgccacatcgtaaaaacttactcagaagaggccaacaatgaccacagcagcacccgcagcaaataa

SEQ ID NO: 437491 - DNA, 930 bp, Serratia marcescens
atgaccacagcagcacccgcagcaaataatgtagcaacacctttcgttaagtcttacaccggtattaagtcggtattgagattcaccactaaagaaggccagacggtagagttcaagcaccacgctaaggacgtttacctatacctgttgggctgggaagagaacaaaggcgtctctgagatttatccgtcccgcagccggatcgcagaggaaaccggctacagtctcgactctgtgaaacgcgcccttaattttctgaaagaacacggtttcattttcgttgggaaaaagattgttcactcagttatcgcgggagttcgtaacactcaagaggttaacttgtacacggtcgccagccttcaagaggccttggcaattatcagtggtgaagggaaggggaataaaaatgctgcaagccgtccagctagagagggtaaacctcagctgcatgttgtccaagaccaagaacaacctaacgatgatcacggcggcgacgctggggatcatgtgcagcatgatgttactgattcagaacagcccgatgtaattaatacaagtgagtcaaccgaagtaaccgaactgcaaaatgaaggggtaagcgttgatagtattcttcctgttgatgactgcgatcacgatgatagcgacgcggtgacagctgccgagcctgaccagttggatcagcaaatgattgaagccgagaaggttggattagtgatcgacatggtggaggttatgcgcttttgtcgtggagaccgtgagaaggccgccatgcggttgcgtggtgagatcaaggcaatgcacacccgcaccgagttagaagcacagggggccgcacaggcctcggattgggcatctaacaatgacagttacgatgatggttacagcattgatgatgattggaacccggaggacggcgatgcgtactga

SEQ ID NO: 437492 - DNA, 582 bp, Serratia marcescens
gtgattgagatttccgcagcagaacagcaacgcattgatgatctagccttacgcctgaccaacaagccgctaactaaaacgaatatccgagcgctgaacctgtcacccgctcaagtggatacggtccgacgcgcctgcatctggggctatgagccgcacgaagtggtagcgatgtacccttacgccacgttgtccttcgtgttagaccagcgtaagaagtttaaccacaagctgcgccgacgcttccaaatctcacttaactgtaagatcgccatgtgtcactgcatgagccgcgacggcaagagcaagcgagagattgcacgcctgttggaagtaaacacgcagacggttaaccgctggctcactgatcaccagtacccgaccaagcttattgagcagattcgccactggtctgtgatcctcgaatctctccacgggccgaaaccgcttaacgtttcaagcccaatctataagccaacccgcaagacagcaaaacaggatgaaaagagccgtaacattgtgactaaagagaggcaggataagcaggattacaagcatagattacaggcagttggtcattaa

SEQ ID NO: 437493 - DNA, 999 bp, Serratia marcescens
atggataaaagatatcaggttttcgttagctctacttttactgatcttgaggatgaaagaaaacacgttattcaaacactaatggaaatggattgcatccccgctggaatggaactgtttcctgcaattgatgaagaacagtgggagttcatcaagcgtataattgacgattgtgattattatcttctgataattggtggtcgctatggttcagttgctgacgatggactaagctatacagaaaaggagttcgactatgctgtgtctaaaggacttaaagtaatagttctggtgcatgaaaacccaggtcagttgccagtaaataagtcagaattaaacccagattcgcgagagaaacttgctaattttatagtaaaaacttctgagggtcggttacgtaagacatgggccagtgtaaaagatctgcctgggttagttgccctcagcatgactaaaacaataaaaacatatcccgcaactggttgggttagagcaaacagaattagcaatgaagctagtttacaggagatacatgaactgcgcaatgccaataaagaattaaaagatagacttgaaaaaatcacggaaagcaatctgaaggaagatgaattagaattggctgatatgaaggattcttataagttcgaatgttactcttataattccactcggcgagaagatgaggagtggtatgcggaaatgtcttgggaagacatttttattttcatatccccccatttaattaagtgtccaacagaggctgatgtaagtaggatcttaggggcggaggctcaacgtagaactttttccccgggcactggtgcgcgtgtttcagaaaatgatttgaatattattggtatgcaatttgaagcttatgaacttattttaattaagtttttgccagatgattcaggtgtcacgagtcttctttggatgttaacggaaaagggaaaaagagaaatgctaaaattaaagactgtaaagaaagtgagaaattag

SEQ ID NO: 437494 - DNA, 168 bp, Serratia marcescens
atgatgcagggttgcctgatgctgaccgctcaggagccgctcccagctccatcgtccgagccggagatcatgtgtaggatctgtaagttctccgcccgcaagcagaagctgctcacgcagcctatcgaggcgatcggcaagccactaactgaatggcgcataaagtaa

SEQ ID NO: 437495 - DNA, 213 bp, Serratia marcescens
atgccgcaagtgatctttaatgaagagtgggttgttgaagataggcttaaagcaaagacgggccttagcgatcgacaaatagaaaaatatcgccaagggtgttggatcgagggggtgcatttcaagcgggttgcatccagtggccaacgagccgtgcgcggagtcacctggtacaactacccggagattaacaagatggttcaggatgcgtaa

SEQ ID NO: 437496 - DNA, 438 bp, Serratia marcescens
atgaaacagaacttgatagacgcattagagggcattcgtggcggcgcagatatttacaatcgcttcctcgcaatgcaattacgtgaaattcaaaaaaatcaccctgaatacatcaccatttgcgaaccacaagcttatcacggtgatggctcggatcaagtacctttctttggtgcaattaccaccaaggcagggaatgattatttagatgaagttaacaagtttgattctatgcaagcaagggtagcgcaggataagtattgcaaagaaaataacgcacctcattttgccccctatgatggaatctgttttcgttgcaaaagagatatttatctgaaaatcgataacggtacttacatcaccggaatttccgttcgtcgcgccggaactgaattagtaaccggctgcccacactgcaaccgcagttactgcgattag

SEQ ID NO: 437497 - DNA, 243 bp, Serratia marcescens
atggccaatttttcaagagcacagatcgaaacgcagatccgcgcccaactggtgcgcgagggaattcccgacgacgtggcgcgctcggctgccggccgtggcgccgatcattacctgtccagcccgaacgcaacgatcgccagcagtatcgctatcgcaaagacgtacgcaaagccgctaaagcgggtaaagggcaagccggatcgcccgcatgtacctgggcgccgtatggggcgtcggtga

SEQ ID NO: 437498 - DNA, 900 bp, Serratia marcescens
atggctaattcatggttgcggctttggcacgacatgccaaacgacccgaaatggcgaacgatagccagaaaatcgaagcaggggatcggcgatgttatcgctgtgtacctgcacgttcttgttaacgcatcaagtgccagtgaaacgactggtaacgcaggtgtaacgcaaggaagcgcaaccgaacgcgggaggataaaaaatctgtgcgctgacgacatcgccagctctttggatctcgacattgagcaggtagagcaaattcttgcagcaatgcaggggaaagttcttgacggtgattttgttaccggatgggcaaagcgacaacccaaacgggaagacgactccgccgcgcgtgtaaaggcttttcgcgagaagaagcgggcagagaaagcagcggcagaagggaaagaaagcagcaaagaaacgaccggcaacgcaggtgtaacgcagggtaacgcaccagataaagatccagatacagatacagatctaaaagataaaaccactctcttagatcgcgcaggcgcgaatgattcgaaagctggtgattcggcggcgccggcgttcgaggatgaaaattggttggacgaacccaacgataaattcccgatgaccgccgactggcagccgtcgcctgatttccagcagcgggctgcactgtggaatcgtgctttggacgggccagcgccgggatataccgctggcgaactggcaggcttcgtagcgtactggcagcccgaggggcggcggcatcaccaggtgcagtgggagaaaaaatttgccgacagcgtattgcacgagcgcaagaatgcgccgaccggcaaggagcgccacccccgccggggacgtttcgagccttcgggcgaatacggcgaaaaaccgccgggatttaactga

SEQ ID NO: 437499 - DNA, 237 bp, Serratia marcescens
gtgaaaaatagcattcaggacctggtcaatcaccagtttgccatgcttgaaacaatcaacgatcccggtctgactggcgaacgcctgaaagaggaactcgatcgtgctgaggctgttgtcgatttatcgcaagcactggtttccacgtatcgggtggtgatcgatgctcaacgcaatatgaacggtgggacgttgcatactctccctgctattttgggggtcaccgatgagtcgtaa

SEQ ID NO: 437500 - DNA, 639 bp, Serratia marcescens
atgagtcgtaaattattcactgatgaacagttactttttctgaaaaataacgctgaaggaatgacaagccatgagctgaccgccgcatataatttgcagtttggtgaaaataggtcgcgccacacgattcgttcaactctttcgcataacgggtggatcggcaaactcagaccagcaggggagtatactgatgcccagctcagctacctgtatgcaaatcgagataaaccctatacgcagctggtggagtccttcaatcatcgtttcggcgataacagaactgccaacggaatcaagaacgctctggagcggcgcggatggcgttttaaccatgcaggcggaaaaacgccaaagaaaaacaaggcgcaggtgatcgtggttgctggaaagcacgtccgcctcgatgtgtacgtgtgggagtgcgtgaatgggccagtcccgtcgggatatggggtgatccacctcgacaacgatatgcgcaacaatgcgatcagcaatttggctgttgctccgctgattgttcgctcaatgtttgtgaaagccggctttgacagcgtgccggcggccttctcgccggcgctttatgcatcgttgattctaaaaacggcggtaaaaacccggagacggagggtttactga

SEQ ID NO: 437501 - DNA, 609 bp, Serratia marcescens
atgaacttgctggcagaggttgctggagttcttgagcagctttactaccacggacacactctcgacagtaactggtcaaagggggttagggcttacgactgggtccggagccatttgataaaaaatgaaaagaatatctctggcctgagtatggtaactaaggggttagattttgttcttgccttgaataaggtacctcttcaattttccaaggactgtattgctgctccgaagaaaaagcatcgtctgttacgcaacaaagctgaatttgagcagttaagtctttttggggggagtgagccagaggctgaacaggatataacatggcgaattctggctgaaccttacctctcagttctgtcagatgatgacattgacgatgatgaagaaataaccttgcctcgctggattgttgcgttggttggcttcaactcctatggcgcagcagttagtgaggttcgatacgagccagtcgcgtcgattccgcctatgtccgtggattcttcagatctaccttctgaaactgatattgaagagcctgatttgcggaaacgcaagaaaggcgaagatgatcaggatgtaaaagacaatggcacatcaagtgattaa

SEQ ID NO: 437502 - DNA, 1116 bp, Serratia marcescens
atggcacatcaagtgattaactttgatgatgattatcgcggggataagctcaaactggctaggatggccaggggcttttcttgcgaggaattagctgacaaaataggaaaaacgaagcaattcgttagtaagttagaaaaaggtgcgaaaccgacagagctgcttcttgatgagttagcgaaagttcttgatattcgcccggaatttttatttacagagcgcaagtatgccctggaaagcgatctctgtcactttagaagcaaaaaatcgcggacgcaaactttaaccaatagcgtgctcgctagggccgaaatcttgaacttactgatttctgctttagaggatgaaattcaattaccggatcttaatattcctgacgcatctagtgctgaaatttttagtatgaatgatgtggaaagaattgctgaagaatgccgcagatgttgggggcttggtattggaccgatatcttcaatggtgaagcttgcagaaaaagtgggggtaattgtaactcatgttacgggggttgatgatagagtggacgcatttactgtccacaatcggcgcccagtaattattaggaatgatgcaaaaaaaagcatgtgtcgtttccgttctgatattggccatgagttggggcacttggctatgcatgaaggaattgtcactggtgataaaaaaacagagtcacaagctgatcaattttcgagtgctttacttgtacctagagtgtctttcataaaagagttcccgcgtatccgtggtaaacagtttgattggaatgccatgttggcgtttaagcttcgttggaagattagccttcggatggcaatttatcgagcgacggctttaggtttactttcgcaagagcaagcgcggcgagggtatattcatttgaactcaaagggatatacaaagagtgagcctggagatgaaaatatcccattggaagagcctactcttctatccaaagctatagatatgttggacgattccgcttggatagagattcttcaacgcacaggattaacggttgaactcgttcgagagttgtttggggttaatcgaccgctgagagatgttaaaaccttgtttcgagtggttgtaaataattga

SEQ ID NO: 437503 - DNA, 195 bp, Serratia marcescens
atgaacaaagtcgtacttatcctgaaacaaattaaagaactggcacgcttcgctgaagaggaaggccagccgttctacaccattaccaccggcactattccagcgtttgaggctgaggatggcgcggttcctgagtacaacggcctgatcgcctactcggattcagaagagcacagcgttctgcaattggcctga

SEQ ID NO: 437504 - DNA, 264 bp, Serratia marcescens
atgtcctcatttgaagaacgtcttgccgctttagaagaaagtaacaatgatcttaaattgcaattacatgctgccaaggtcgcaatcaccactctctctgtttgcatgaatggactggcaggagataaaggggctctggcttctgcgtttgaagagggaatgaaagctccccattggcaaaacttcgaaactgatgaagaacgccgttatcaggaagaattgacaaaacaaatcctcccgctcttggctgccaaaactaattaa

SEQ ID NO: 437505 - DNA, 192 bp, Serratia marcescens
atgaaaatcattactcaagtcgatattcaatcagtcttcatgacaaaggaagactgcgtcattactggtaagtacggcgaagagcatcgattcaaaagcagtgagatttcttgggcacattccattaagcccgggatgacgtacaccaagtacgaagatgggcaccagacactgacggtcaatgaagggtaa

SEQ ID NO: 437506 - DNA, 912 bp, Serratia marcescens
atgaaaatttcacttgtagttcccgtattcaacgaggaagaagcaattcctcttttctatcagtctgtccgtaagtttaagccttttgagcatatagacgttgagatcgttttcgtaaatgatggcagctcagataagacagaaaaaataatttcttcgctggctattaatgaccccaaggttaaagcagtgaactttacccggaatttcggaaaagagcccgcactgtttgctggcttggaagctgctaccggagatgccattatcccaattgacgttgacctccaagatccaattgatgttatcccccacttattaaataagtggcaagatggcgcagacgtggtattggccaagcgtatggatagacaatgcgatggcaggatgaagaggaaaacggcagagtggttttatcgcgttcacaataaaataagtaaaccagctatagaagagaatgtaggtgattttaggctaatgactcgggaagtcgtagagaatattaagttacttccggagaggaacctatttatgaaaggtatccttagctgggttggcggaaatgtcgcaattgttgaatactcgagagccgagcgagtcgcaggaaccagcaaattcaatggctggaagctttggaatttggcaatagagggaatcacaagtttttccaccttccctcttcgggtttgggcatacattggattttttgtcgctgcaatttcatttatgtatggcgcatggatgattatagataaggttatttggggaaaccctgtggctggttatccttcaattattgtttccattcttttcctcggtggtgtacagcttataggcatcggagtgcttggggaatatattggtagaatatacatagaaactaaacgccgaccacgttatataataaagaagtga

SEQ ID NO: 437507 - DNA, 957 bp, Serratia marcescens; identical to SEQ ID NO: 432837

SEQ ID NO: 437508 - DNA, 147 bp, Serratia marcescens
atgcagcagccacaccgcaaatgcggcgcggtacgcaattcacaagcagagctcggggaatcgcaggcgaaaaaaaacggcgccttaaaggcaccgttttatattctttacaagcaacaacgctatgggcagtcagtcagcgactag

SEQ ID NO: 437509 - DNA, 540 bp, Serratia marcescens
atgacggttttgccaacacgaatcctcctgcctgacgagcttggtgcgtctttaaggccgctggcacggggtgacgttgatgcctggtcggcgtatttgagccagcctggcgtcacggaacataccagttggggcgacgtcgggccggcgaatctggcgcagcttgtttcggattatgccgcaggcaggggcgcgcttcgttgggccattgtggattcgaatgaccgcttgctcggcaccgtggggttgaacgagatatcccgtgagcacggccgggcggaaattgtttacgatcttgacccacgccactgcggcaggtgcctggcgacggccgcggcaagggacgtcatacactgggcgcagactgcgcagggcctgcaacgcgttcaggctacggttcttgatagcaatctcctgtcgattgccgtcctggagcgcgtgggtatgcagcgtgagggcttaatccgtcaatatcgccgagtgcgtggtcaggcccgtgattactggatgtacgcggccattttgcgcgcagggcattga

SEQ ID NO: 437510 - DNA, 210 bp, Serratia marcescens
atgatcgacgacaataggtggattcttgagttgcacttgctggtgctgtgccgcggctaccaccgctgctgcatcaaggtcgaagagatcctacacaaactcatcgggatgttgggattccactccgtaggatacgagtacgtctgtgggaaagtcccgttggttgaaggtcacgatcacgctgacaccgcagtggatggccgcagctaa

SEQ ID NO: 437511 - DNA, 651 bp, Serratia marcescens
atgaacacgttcaaaacaaaccaagaaaacagcgcccagaaaattgacgtaattgactcatcagaaaccgccaaaatggctgcatacgcctatgcggtgcgaaacggtatggacccggcctggttgtgcgaatttgcctccgcaacgttcacaaccaaaattacaagagacgattttgaaataagcctgcttcactttgccacaacaacacacaacgcaacagagacgtggcaatcgcacgctgaccaagcgtggcaattgcatgtcaactgggcaatagaaactctaaagcacattgcaatcgttcacacagcgggactagcaggatgcgcagcgttactggctactgaaaaaaactttaggaactgtacaacgctccttggagccctctgcttcagtcttggacttctttttattgctataacgctccatcttggttcaacagcgtacttaaagcgagcacaagaccaccatgacagagcaaatagcgtgcgcaactcaacatcgtgggaggcatacgttgcggctcaatcctcataccaaaaagacgctggcaagtgctggactcaatatgcacaaatcacgggctgggctgctgctagtttcgctatcattggagttggtttattgatcgcaaccttgtcttcatag

SEQ ID NO: 437512 - DNA, 1371 bp, Serratia marcescens
atgccgaatccacttatggatcatttcagactgcggccgatttcagagcctgatattgataaggttgttgaaaatgctggggggaaacgagcacatccggacgctgatcgccgagagcagctcggagccgactatgtgctgggtaactgcgttatagagttaaaggcgctcgatgatgaaggtttagcaaaaccagaaagacaagccaagcttgctgctttgttccgcccccttaatcccggtaaaccagttgtcgttttggatcgtgactctttaccttcatccgagcagagaaattttgatcgaattctagaaggaccaataaaaacggcaatcagcaaagccagaagacaactcaaacaatctcggcttgagcatgaagaaacagcgacttcaattatttggtttatcaataacggctacaccgcgctcgatcatgatgcacttctcaaactgatcgctcatcgagtacgaaatgacactaatgaggttgatggggtcattatttcgggctgctacttccacagcgattcctttgacagctttttcctgtggccctttgagtacctgcccatcaatttgaacaagaattttccagagtccgacgatttgcgtcgtgcttggaacgacctcgctgataggagcatgactgctctcatgcaacaggctccggggaagcaagaggtaaaggggccggtggtagacactcaattcgacattgataacgtcacttacgtcaagccggcgccgccaatcggagggaaatcagaattctttcgtaatggccgcccaagattgaatagtacaggaataacgacatctccttctgtgggattggtttttggcgatctgtcacttgggcaatggacaacatttcatgagaacctaccaaatgcgcaatggctttggacaaactatgcggaatggaagctgggaagagcagatgcagctaaacaggcaacagataggcagatttttatctcgatcccagtgaattgggatgcttgggtcaagtgggttggacagtcaagagcgcatcagcatttgacaacgcatcattatgcaagccacatatttcaagaaagaatgtccgtacttctaaacgaagcaaaagatatagatggggtaaaaactttacccaacaggtacatgcttattattaccgaagaaattgggcaagacaaaggcaacgacatatcccatgctgccattgttgtagaaaattcagacggaacccaagattttgaagaaatcttttccaatcaaaggttgttccatgaatatgcaatgatgctgggctgcgcacatgcgattgccagaaatgttgaagtggtcagatggcataagaacaagacttatgcatggatctga

SEQ ID NO: 437513 - DNA, 1290 bp, Serratia marcescens
  misc_feature (317)..(326): n is a, c, g, or t
atgtggaaaaacccttcgctggatttcaccaataattgcgttgaaaacatattccttcgaatacggatgtataagatgtttcataaaatcgctcagtctggaaatggatgtacctctgtaataatagatatgcccgctgaaacttacataaaacttgtggaaaaaatttacaaggatgaacaaggcggacttcccggccaacgcgctgctcttaagacgaaaacagcgaagataattcgtgaaaggatggtggcggatatatcgaaaggcgcctcattaccacctttggtggtcggggttctgattgaatcggaggnnnnnnnnnnggtttacgatgtgcagaccagtcacttaaaaagtagggaggatatgctagctttagttgaaggcgtagatctttcgaggttatcgattatcgatggcatgcagcgaaccactgctatcctagatgcctcgcaaaaatctggctttgatggcgttagtgatttgcgtgtggagttttggctctcggatagcgctaacaatttaatatacagaatgctagtgctgaatacgggacaggttccgtgggacatcgcgcgacagctcgaggctatctataggccacttctagaaaaagtggagacttcagttgcaggaacaattaaatttctttcaaaggactctgggcgtcgatcaggactttcggcaagcgaattcgaatcggaggacatcgttgaacttcttctaattttttcttcgaggaagcgtgaactgaaccttaaggatcggatcgcacaggactttgtccgattggacatgattgagtcttcgtcgcacgtcgatgtgatgcggtattttagtgaagctattttgcttcttagtaaattgaattttgccttttctactttcgaggcagagtcaactcttagtgaaaccttgaagcggtactcaagcggcaaagaggttttccgagcgttcccgccaaaagctggcttcatctcagcgcttgcaatatatcttttcggcaagcctggtatagagacagattgggatgccgtacctggaaaatttgaattggtaaaagccaatcttgagcgtcttattggctctattcaaaatgcgataacgccgaatgagaaggaagaggtgctctgtcttgaagatttggaagagaggatcactgcacatcgagtggcagcatctcaggttggacgtttcgaacgagaatattttgaaaaagctttcggcgctctttttgaagatggggagactattcggaattttaaaacatgctggtacgcatattga

SEQ ID NO: 437514 - DNA, 1710 bp, Serratia marcescens
atgggcattcagtggaattcttatatatctgctgctatcagtaagctatctgaactagtatttgcagaagcggatattgaacttcgtaccactccagtgcctaattcgcgaatgcaagcggcaggtctacttgagcatttgaaattagacgttactagcccaattgttataggtgataggggactattggtcgctttgtgcacaaataacgagcgctacattgttttatatcgacgggatcgtagcgacatcttggcgcaaatgatgaatcaatcttatcaagaacgcaatattgaagcttttgaatatgtcgatgcgttcttcttcttcttagttaaggaatttgatattccattgccgccgaacgttacgaagaatgacgttgagacgagtattagcaaggaaaaaaatgttgcgacaattgactttgatgatgtcgtcaatttccatggttctttctttgcatggaaagttgaagggtctacatcttccgtagagtttgtagacttgctgacgtcgcaagtggatggacaacattgcatagggtttacggagtataatccagcatatggaattgatcgcatcaatatgcttgaggttctcgatttacgacagctttgtcgcgctgtcattaacccaatagctatcgctactgataaagaaatccgtcaggcggacctgattttgccaatgccggacctactgggtaaagcgctgatgagtatttcaccaagcagggacgatttggtattcggtccgggtggcgggatctgctttaaatttatgcagggtggaagtgagttcttggctttatctctaaggaatttctatgattttgaaattggacctgttttaagtgctttaacagaaataggggtcaatgaagtagattttgaatattcacacttcttgtcattcgtgcttacgcatgggcagtatcttgatgtttcccgggaacgcttgtctcacccgaaagagcttgagaacaaactcgacgtcaaggatatattttcttgtacgttggaagatatagcctcggtctatgaggatgttcgtgtctttgaactgagtcaagcgtccgtttcatcgttattcgcagtccttagccatttggcggcgcggtttagaagtgcgcgatcgcccttcgttccagtccagataattgatgtttctcagcgtctactgcaacttcagaacgctccatacgaaaacatatacttatctctttcggccagtcattggaagcacgctttcattgagatatatcgagtgcttgagggactttactattttggttggatgcatgggatcaagcagacttttggcagtaattatgcagagtatgatctctatttaacgcttcaagatcagctttcttggaagtataaggaaaggacgtccattgcaaagttgtttgaaatcgtgccaagggttgtactatcgccccatgatcctgtaagtatcaagtcgttgagtggtcgctttgaaaatcagacagatattgcggttatgaataagttcgctcacttaatttattcgattcgcaactctaatgtgcatcaaggggagtccgaagacggacaaaccatagaggtcagcgctgattgctggcccaaactgacatactgcttatttttgattgttgagcacctttattccgtctatcaggcgggcatgccacggcctcccacaccacaagagcccggttag

SEQ ID NO: 437515 - DNA, 3003 bp, Serratia marcescens
atgattcctttagctacgcaacaagaggtcggcgccttaattatcggcattttcgggcgtttgccaacggcggcggaaatcgattactacgacagcgcatttgatatcggcagccaaccgcccgcctatatggccagtattttaatgagccaacccgatgccgcttggatgagcggccaaagcgaatatgacattctcagccaggtttatttctccgtttacaataccgctcccgatccggattacatcaatgccttgctgcagcaggggcatttcaacagcgctgtcgccagcgttgtcatcgaactcttcaactatctggaggacgatccggtgatgctggcgcagcgtgatgcgctcgatcagcgcattgcagaaggtttgtatcccggcactgcagccgatgccgccggcggaagcggcgacgcgcaggcgatgttttatctgctgcgagcgccctggcagaccgatgaaattgcccatgacggcaagctgctcaatcaggggggcaatctggcggcgttggcgcagagcaagattgccaccctgccaatcaacgatctttccgatcatgacttcattttgcatctgttcgctcagggatttgaacggccaccgacggctcctgaacttgccacttaccagcaacggctggcggagggcgcgacgcgtggcgatctgctggtggatatgattgcgcagttgcgcggggtggtggcgccggaagatgctgcggctcaacagcatttcaatgcggcgggccaggaatattcgccgggcgaactgccggcgaccgagtatctggagcagatagcggcgctgttccgtgcattgcccgaacgggcgatggacagcgcctcgctggacaattggagcaagacgctggcctccggcacgttgagctataccgaattggtcacggcccttctggcgacgccggaatttcaggcgcaggtcggtggtttgcagggcgacgactttattcagcacgtctatcaggcggtgcatggccgggcggcggatgaacagcagctggaacactatcgggcattgggcggcgacaaggcactggtcacgcaggcggtgattgccgatctgatcaatgcgccgccggcaggtgacgttcagtatgaacagtggatgttcgcgcgcgatgtcggcgccagcctggcgtataaaacgaccgcttctctcgccaccagcgagggcggcggcaacgcgtcgggtacggtgaatacgcatgctcaccatacgctgagcaatgcggaaaccgccgtgctgttcagggtattcctgcatgctgacgcggacgtcatggttgacctgagctatgcctcgcagctttcttatctgatcgtcaatggcgacgctgcggcggatatctggctgcataataatcctgcggctcggtatggggtggacatgacggtaaacaatgccaatgtgataatgcatggcacctatggcgacgatcgggtgcagctcacctcgcaggccgacctcgccgccgcccaagggcacttttatctgaacaacggtaatgacagtctgctgtggggaggcaatgccgatggcggcgccaatcatgtggggtgggtgttcagcgccgatggcggtaacgggcacgatattttgtccgccaacctgatcgtcaaaatgacctcgacgctcgatctttttggcgcgcgcatcagtacggtgagcagcaacgccgccaatttcagtcatttcgaacagatagatatggcgggttatatcggccaggcggaagccacgttgacgcaaatcggttggaacggttacagcacgaaagcgctggcgacgagtgctcatgtgtttgactacggggtattgagtggcaacgccaccgtagagggaacggacggcgggacgatcgtacagagctgggcggcgcaggcgcttggccgtgagggattgctgttgtccggccgggcggataacgtcaaggtgattaacgccaatgccgatgcggcgcgccttgaaatcagcggcatcggcgatcatgcggacagccggctggagatagccttccttgagaatgccaccgatcgtttcgacctgttgttctccgggcgcggtaacgccggctcattggcgcttgactcgcatggcgatgaaaacccattgacgctgatcgccgtcaccaccggcgcctggggaaatggtgcgctgacgctgacggggcaaaatgatcaggtgcaagacattacgttgtccggcggcgcgaatttcaacctgacgctgaccgaggggtatactcaggtccgcctggttgacgcttcggccttcgccggtaatgggttcaccctgacgtcctctcatggcggcagcggtgacggcacgatcattcaaatgttggattcgctgccgttaagtggtgacgcgcaggccaaattggcgccgctgctggaagatcttgggctacagggcgaacagctgctggtcaaaggcgggggaggcagcgatcaatttaacgtgctgggagacacgacgatcgtagccggcgcagggaaaagccacgtaacgctgcacagcagcacggcggcgtcaggcgtgacgttaaaagacttttcgctgacgcagggcagtatcgacgatgtgctctcaggcctgcggatcgttcatggtaccggcggcggcgcgctggcagattatggcgtcagcgatgcgcaaggcgtggaggcgagaatcggcgccctgacggccgaacaaggaagcagtgccagccagctgttggccgcgttgctcgatctcggccagcccggcgcgttgagcgccaaggtcggggtcagtagcgttctcggcgggcaaaacagcagctatctcattgtcgataacaatgatgaccaccgtctggatgaagcggacagcgtcatcctgcttttgggacaggatcatcaaagtttgctcaacgaactgcgctatgttccggaaatcatgctcaacggcacggtggttgagccggagccgctggtcgcgtaa

SEQ ID NO: 437516 - DNA, 741 bp, Serratia marcescens
gtggaacataaaaaaaacaatgacgaggccgtgttggcggtgatggacgacatcatcaatacgtttgatgagtatgtcgtctgtttttcgttcgcgactaagggcatcgcgcaacaggggaaagaactagcaaaatactcctttgaaaaagggcaccgtatctggatcgggtcggatgtagcaacaaatccaaagatgcacgcaagaatagacacggtggagtgtattgagaaatgcaaaaaagatggctatttctccaacgagttagcaaaatccttgctaagtatcatgtactccctgtgggatgaggtttatcgccaccggctcgctaaagttactggcttagatgctcagtatattgaatgccctttaatgggagacttacgcaaaatccggcactgcataattcataacaagtctattgtgccggacaacgggattcgatttgaagcgctagagtggttactcccaccaggagaggaattggtggtgacctacaagatgttcttggaacttaatgatggcatacgaggggacaaaatgagaattcagggctggagaattccaccgctgatacaggaagttatgccacaaatgtctgaaaaagagagaaaagattttcatgcgttcttcaagaaaccggaaaaccgaaagaataatgtcgaatggccaggtttgggaaaatttttaggccgaattaaatactatcagagcaaaaacgatagtagccccaaagcctga

SEQ ID NO: 437517 - DNA, 177 bp, Serratia marcescens
atgaacttagatgctaaaatgcttaaacagcttcaactgaaacgagctaggctgattgcttctggtgaccttagtaagcctcgcctactcagtgatagcatcgatatggatgaggttgctaagcaaatgaaaaatacagataaaaagaaagccaaacctaaatatttagtagtttaa

SEQ ID NO: 437518 - DNA, 591 bp, Serratia marcescens
atggcgcaaataaaatttgtaataaaagataagtttgatagcaacgacccagtatttaaaactctgacggatactatctctaactataacaacgtaaataaactcaagttaataatcaatataacttataacgaaggtggtgaagttgctattatgctcgcttttgtagcaacaattgagaaagcagtgttgaataattcaaaccttactatcgaactaagatttggtggttttgctatgagcgccgccgcttttgttttttgctattttgtattttatgctgacattccaagagtgagagtgctatccaatacacgactatctgtgatttatcataagccccggatgaaacaaaaaaacgtatctaactttatttttgctaatgatccagttaaaatcaataagttaactaaacaacaacagatagaactaataagttatacaaatcagtttgatgatgtctgggactctgtagtagcaatctatgaaatgggtgggggagcatttgatccttccttgctaagttcgtataatggtaacggtgactttgcattcacactctcaaatcgagtgtttaaaggagggtattaa

SEQ ID NO: 437519 - DNA, 1185 bp, Serratia marcescens
  misc_feature (287)..(296): n is a, c, g, or t
  misc_feature (818)..(827): n is a, c, g, or t
gtgcagcagattcaggaagacctgccgcaggaaaagcaagacaaccagcaggatccggaaggcaagaaagcagcgctcaatggcatcatcacagactataacactcgctttagcaccaatcaccgtatcggcgattttgatctctactatcaggatgtgcaaaagcgcatcaaggatcaacagtatcccaataccgattttcctgcggcgcaaaaaattgacattaccattgtggtggacatgctgctcacgggcttcgactccaaatacctcaacacgttgtacgnnnnnnnnnngatcgacaaccctcgcgaaatctggctggtagatcctgctcccaaagttatcgacaacctgcaaagcgccacccagaagctggcagacttcatgcaatcacagggcgtgcccaatgctcctgaagaggtcgccaatctcagaggcgatgcggctcgtgcgcagttcgttaacctgttcaaggaagtacagcgcctaaagacccagctcgatcagtacaccgatctctcagacgaacaaaaaacacagatcgagcaaattgtaccacctgctcagttgcaggggttcaaaggcgtgtacctggagactgcaaaacgcctgaaggagcagcaggatcgtgaccaggcgccacccgaagtacaacagcttgatttcgagtttgtccttttcgcctccgctgtgattgattacgactacatcatggatctcattgcaaaactgacacagcaaaagcctggcaagcgcaccatgaaccgggaacaactcatcggtttgatccaatccgatgccaagttcattaatgnnnnnnnnnngcgtgaggatattgccgagtatatccgaggtctcccagccaatgaggcattggatgaaaaacaaatacgcgatggttttgatcggttcaaagcagagaagaagaccctggaactcgtcaacattgctaaccgtcatgggcttgcgcccgatgccctacaaagctttgtagatgaaatcctgcgccgctgcattttcgacggtgaaaaactcaccgactttctggaaccactcggactcaactggaagagtcggagaataaaagagttagcgttgatggaagacttgacaccactgctgcacaaacttgcccaaggccgagagattgctggtctagcggcttatgaggaggaacggtga

SEQ ID NO: 437520 - DNA, 1281 bp, Serratia marcescens
atgactggaaacgaaaaacgcccgttgataccacggttgcggtttccggagtttcggaaggcaagcgattggaaccctggtttattgggagagttatccgaagttgtccgtggtggctcccctaggccaattgacggcttcctcaccaccgcggcggatggccttaactggcttaagatcggcgacgtggacaaggaggctaaatatgtcacgcaaactgcagagaaagttcgccctgaagcactaaacaagactagggtcgtcaaccctggagctttgattctttccaattcgatgagttttggtcgcccttacattcttcaaatcaaaacgtgtattcacgacggttggattgcaattacaaacattgccaagcaagctgatcgggattttctctactacgcaatctcagcacctggtagccaaaactacttcattgataatgcagcagggagtggtgttcagaatctcaatgcagacattatcaaaaacctaccagtctgtttcccctccaccatatccgaacaacaaaaaatcgccaattgcttgtcctccattgatggactgatcacggcggaaatacagaagctggatacactcaaaacccacaaacaggggctgatgcggcagtttttcccccgcgtaggagaaagacacccccaccgccgattttcaagtgaaggtgattggatagtagctagcttgcctgaagtcgtattcttccaagaaggtccgggaattatggcggttgattttcacagcgaaggagtgccgcttgttaggcttgcaggcgttgggagggctaatgtcaccctagatggatgcaattacttggatcccgaaaaagtatcgcaaaagtgggcgcatttccgtcttgaactcgatgatctaatcatttcaaccagcgcaacctttggcctcacctcaattgtcacagagatagcggcaggtgcagtcttttacaccggactaattcggcttcgaccgagcaatgaaaaattaacccttaactacttgaaagcctttctgggaagtccgcattttggtcaacaagccgcatctgctgcagtggggggagggataaaacacttcggcccgactcacttgaagaaaatggagattccgattcctccaatggcagaacaacgaggtattgccgactgcttatcttccatcgacgaactggtcgtagcccaaagtaagaaggttgagcttctcaaaacacagaagaaaggcttgatgcaacagctattccctaagctcggtgaggtgaggatatga

SEQ ID NO: 437521 - DNA, 1251 bp, Serratia marcescens
atgagtggcattcgcacatacgaaaaccttcgcaatttagtgacccggttacgcgacgatcttaatcaaaaggaaagcgtttctcagaaaagtattatcaagaacccggcaactatacttctcatctacgcttacaaccgaaccggcaaaacacgactatctatggagttcaaggatgccggaaagcgaaaatccaagaagaacccggagggaaaagcagatactctatattttaatgcctttacggaagatctttttacgtgggaaaatgatttggatggcgacagcgtacgctatctgcaactaaacaataaatccaagttcttcaaagctctggatgaacttgctttagatgaggcaatcgctggctttcttagccattacgccgactttgattttgatattgattatggggattggagggtcacttttcgaaaaggcgaagaagaaaacattaagatatcgaggggtgaacaaaacatttttatttggtgtcttttcatggctatttgcgagcgcatgcttgatggacatgaatcctaccaatgggtgaaatacctttacatagatgacccaatttcttcccttgacgacaacaatgccgtagctgttgcctgcgatcttgccaagcttttccgccgcgcagccaataggaaaggcaccaatggtgagtctgcaccaattaagattatcttttcttcccatcacgctcttttcttcaacgtgatgtgcaacgagattggcagatcaaaggagggagagcccaaagtgacccacaaacggtactttctacaccgtcccaatggccacacagtatatacattgcgtgccacagatgatacgccgtattttcatcatgtcgccactcttgctgaactacaacgagcagcttttcaaactgcaggaaccctctatacgtttcacttcaatgcgatgcgcagcatcatggagaaaacagcatcttttttcggccactctgatatctccttttgtcttaaagcacttaataatgaagacgatagagtgctctataaccgagcactcaatctccttagtcacggtaaatacgccatacacgaaccaactcaaatgggcgaggataccaaagagctttttcgccgaatccttagagattttgtatccgaatttcaattcgctctcccggatattttaggcgtatcagctcaggagcctgcgccagtcacaccacaaaaattagctctgaaaacacaagagcaggaaatgacatga

SEQ ID NO: 437522 - DNA, 1608 bp, Serratia marcescens
atgaccgagtttgaaaaacagaaattaggcaagacactctggacgattgctgaccaactacgtggcgcaatgaatgcggacgacttccgtgactacatgttggctttcctgttcctgcgctatctgtcggataactacgagattgccgcacaaaaagagctgggatcagattacccgctgcaacgtgaggactcagtctctaccccattgcaacgctggtacgaaagcaatctggaggatgtccccgagtttgagcaacagatgcgccgtaaagtgcattacgtgatcgaacctaactatctgtggggcagtattgctgagatggcacgaatacaagatgctacattgctcagcacgttgcaggaggggtttaaatatatcgaggaagaatccttcgccagtactttccggggactgttctcggagatcaacctggcctccgacaaactgggcagaacctacgccgaacgaaatgcgcgcctgtgcaagatcatcgctgaaattgccaaaggactgagtcaattctctaccgacagcgatgcactgggtgatgcctatgagtacctgatcggccagttcgcagcaggctcaggtaaaaaagctggcgagttctacacaccacagccgatttccagtattttgtcggctattgtgactctggatagtcaagagcctgctacaggtcaacgctcacacttaaacagcgtactcgattttgcctgcggttctggctcgttgctgttgaatgtgcgccatcgtatgggtgcgcatggtatcagtaaaatctatggccaggaaaagaacatcaccacctacaacctagcacgcatgaacatgctgctgcacggggtgaaggactcggagttcgagattttccacggtgatacccttctcaacgagtgggacatgcttcgtgagactaatccgggcaagatgcctaagtttgatgctgtggtggctaatccgccgttcagctatcgctgggagccgagcgaagcgctgggtgaggacacacgattcaaaaaccacggcctagcccccaagtcggcggcagacttcgccttcttgctgcatggatttcacttcctgaagcaggacggcgtgatggcgatcatactgcctcacggcgtactgttccgtggcggtgccgaagcgcggatccgcactaagctactcaaggatggtcatatcgacacggtgattggattaccagccaatctgttcttctctactggcatcccagtatgtattctggtgctgaaaaaatgcaagaaacccgacgatgtactgttcatcaatgcgactgagcacttcgctcctgggaaacggcagaaccatcttctacccgaacatatcgacaaaatcatttccacttaccaattccgcaaggaagaaccgcgttactcgcgacgggtggaaatggaagagatcaagaagaacgagttcaacctgaacatatcacgttacattagtacggcggaggttgagaaagaaatcgaccttgctgctgtacatgccgatctgctagcagccgaacgtaagattatcgaggccaagaaacttcacaatcagtatcttgcagaactggggctgcctttattgccgtaa

SEQ ID NO: 437523 - DNA, 1344 bp, Serratia marcescens
atggagtttccagcaagtctaaaaggaagatatgcatatcattttacttatctaggcaaccttgaatcgataatcgaaaatggactattgtgtacaaacttaaaaaatgatcagaatataactcatcataatgttgccgagcatgggatacaaggaagaagaagcactatgcaggtaccgtgttctaatgggaattttgttcacgactatatccctttttacttttcaaaaagaaactccatgcaacttggggtaattaataaaaaaaatgtagaccaagcgtttcttatttactttgctattcccatagaaattattgtacaaaatgctgatgttgtattttcagatgcttcagcaaacacagatgtgccgccaaatttttataattcccaatcactaaatatgcttaactctttaaactgggatgctattgatagaaagaaatggtcgtgcccgtcagagaggtatcgtcaacagaagatggcagagttacttgttcccggtagcattaatatctcagaattggatcacataatagtttggaataaatggattaaggatatagtagtagatatatttaaaaacaaaggaatagaaccacctaaaattaagtatgatgaggatcactattacataaacttttacgatggcaaaagaaaatcaattgtgactgggccatactttttaaaaaaagacatggaagaaataattgaaaaaatatataaaagcgataacaaaatcaataaatacaaaagccttcgtgatgctttagatgcaattaaaaaagacttctcttcaataaaagaacttgatgatatagacgggttaaaggccagctattggccgcacactgatgatgttggcacgcatagcagaaaagtttcgggtgctctcgaacagttccatgaatataatggactgtctgatgcggacaaagaaattgttcttattgccgcatatctacatgatataggtaaagggccaaagtctcgctgggggcaagatggaatgaccaaagctgataatgaccatgctgcaaaatccttgcctatgttaaagcgaattcttactgaagatattggcggactaagtgaagaatctgtaagaaagatagtaacattagtaacttatgacgacttgattggtgacatcgttgtgaagggccgagatgagaagcaattgattgatataatcaaagatgaaaatgacttgaaaatgctcattgctctatcaaaagctgacatgaatgcaatcaatcctgaatgggtgacaacccacagtaaatcaatagcggatttagaatcgagagtactgtgtgtgattaggagtaataacatatgttag

SEQ ID NO: 437524 - DNA, 1131 bp, Serratia marcescens
atgttagagtttgttaaaggaaacttctttgattttgatgccgatattagagttaacacagttaattgtgtaggtgtcatgggggcgggggtcgctctagccttcaaaaacaaatatcctgagatgttcaaagagtatgtccgtcaatgcaaggctaatgaaatattgcctggaaaacctagcgtatggaaaaaagaagacatgttttcgaaaggaattgagattataaacttccctactaaggaccattggcgaaacccatctgagtacgaatacattgaaagtggtcttatctggctttctgactacgtaaagaacaaagaaggtttgacgataacactaccagctctcggctgtgggcatggcggattggattggaaaaaagttaaaaaacttattattcattaccttgcagaaacgaaaagtaatatcttggtttttgaaccagaatcttcaaaaaatgctgggagagtgtcatccattacatctaacaaacttgcagaccttgaaaatttaggtataggtgtaataaggaaaaatgaaaaatcttacccgccggggttgattcgctatacagaaaaagacctctggattttcggtagagtaattagagagttcgatatttctttgatctcaagtaccaaacctaatgaacaagaaaaaaaggtcgtcctaaaattaatagaacattgtaaaattaaccgccttagtattttgtttggcggttcttcttttgataagaaaatggccttgcactctattagacaaggaattgaaactggaatttttttgccgagcggaatttcattctcagcagaaaaaaatcgggaaaaaggtgctacggataacatatctattctttcattaggtgatccttttaaatcatttgatagaaaagcctacatgccgtctgttatgggccgaatgtttatctgcaaatcagttatttttaccactgaaaggttgaaatggctagaaaaacagaagagtgaaattataagtggtgggttaaaatcgtatttcataaaatacgaaaatcttcaagaggaggatttttttgctgctatcaatataaacgcaaaaccaatcaaaccatttgaaggtgagcagatatcggagatcaacctctga

SEQ ID NO: 437525 - DNA, 612 bp, Serratia marcescens
  misc_feature (30)..(39): n is a, c, g, or t
atgtgtaattttagtcgccctctttgtggnnnnnnnnnnatagcttatttcttccagaatcctcttaaggaatattttaatgcaggaaaacattttttatttagtgataatttaacttcggcatcattgaaggataagaaattgctagtaaatttaatgtcaaaaggttatgttttcagcagtaacgatttgctagaaagagtcgggagttattatgctaatacaatcactatattaattttcttttgtacttttgcgtgcgtatttgcagttttttatataaaaatgaataccgaagatcgctttgatcagacaattaaagagaaggttgtctatttctttaataatgaccgagggttttcagaggaaataggtcgtttaagtaattcggctgcatcggatgcggttagttctgaattagaaaggatgatgttagatgatgatattgagcaagttaaacaagagatgagcgatcagatagcatcattatctgcccaaatgcaaagtctgcaagaggctgtatcattactatcggcggaaagtgatcctgatttacagggcgatgctgaggaaattgcgatggcccatattcaaccgggaagtaggggataa

SEQ ID NO: 437526 - DNA, 1317 bp, Serratia marcescens
atgaagtcacgtaaggactttaccgtcttcgaatatgggcacctgattagcgacaaagacagtggccgcataaataatgcggtttctctgcctctgcagctgtttgagtggcttgagcaacgttgcctgaaagatgacgcggataacactcaccgtctgctcacccttggaagtcgggggggcgtaaaaacgctgcaggtaaaaaactatgctggtgttatctctcttccgggtaatgcgtttattgaagtgttgccaaaaacggggcggcgtgatgagaacattgatattgcacgtcagcagcttttgatgatgctacgcacgctaaaatcatttcgccatatagccacttcagcatccagagtccgaacctcaaagatgccgttgatggatgtttttattcagcagtttatcgatagcgtacagcagattgtgcgccagggtctaaagcgtgactatttacaccagcaggacaatctgccctggatgaaagggaagttacgggtctccgctcaattaagcaaaaactgtgtgcgtcgggatcgctttcaggtggagtttgacgattacagcgccgaacgtctggaaaaccggatactgaaaaccgccatcgataaaatccgccgtcagatcagtaacccgcagctactactacaagttaactctttgcaggtgcactttgaggatattgcgcctgtcggtgatgcccgcatcgccttcgaccaggtacatctcgaccgacatatgcgtcactatgaacttgccttagcctgggcgcggctgattttgatggggcagtcgcctcactgcatgcagggcgacgccaacgccatttcactgctctttccaatggaagctgtgtttgagtcttttgtgactgcgtggatgcgtcatcgttatgacgataactggcacgtggaggcacaggtggattcacacaccttggttcgtctcaacggcaacggattatttaagcttagacctgatatccatctacggcctcgtggggagaattgggagcagacgatgatttgtgatgttaaatggaaaatggtggagagcggaaaggcgacgctcgaacagtcgcaggctgacctctaccagatgctggcttacggtgtgaactatcaggagggaataggagatatgctgctgatttatccttcgcatgagggttttagtcagccattacctcatccatatgaattcaaccatcaaaaggataacccgctgcgtttatgggttgtgccatttttcattggcgaaagtttgcaaagttctggtctgcgtttccctgatgggaaaacattgatttaa

SEQ ID NO: 437527 - DNA, 2064 bp, Serratia marcescens
atggttcaggattcgtcggcattggcccctttctttcgttctcatatcgcaaaaaacaatcaatacaacccaaactggggcaagcactatcgccaacttgtagaacagatccaagctgaaaagcccaacttctctgctgagacgattcggcagatttggtacgaacgtagtaatggcatttccagcctcagacagggtggcatgtcccagttagaatttgaaatggcgcaaaaacatctgctcgctctaacccatcagatggcagaggagtgtacgcaggagaactatgaccgggtgattaagggtcttgttaaacttaaaacagatgggatattaaacaaagtgtattgggctctttgccatcgtgcttttgccgcgctctacccgtcgaaaattaccaacgtcgtgaatgtcagcaactttttcaccagttacaactattgcaataaccattttcaacttggcctttctgaggatcaggagtggttcgcccgcaaccttgatctcaagaaagcgttgcaccgagcattgggcgatgatgtcgatcctatcgaactgaatatgtcgctctggcatctctacacgcaggtgattcagaagaagaatgatattgggttaatcggtagtgagactgccttgccggaggacgggcaagacgaggagcttaccactccgcaactgccaaaaaatactatcctctacggacctccaggtaccggtaaaacttaccgtaccatcgagctagccgtacgcgcctgcgaaccagcagcctactcgctgcaggaaggcaaagaggagaacgaaaaacgccgtgagctgaaaaagatttataaccgcctgattgctgaaaagcgggtgcgctttatcaccttccatcagagttttggctatgaagaatttatcgaagggctaagagcagagaccaccgatgatggcaatgtacgctacgaaattaaagcgggcatttttaagcaaatttgtgaagatgctgcttttggtcacgccggtgttcagcagaagcttgacgaggcgcttgctcgcctacaagaacgtttatctgaaagtggaggcattacccttgaaacgctgcagggcaaagccttccaactggcttacaagagccagaccacctttggtatcttcccgtcgcaatcgaaaaaagaggatttagggcagggctacaatgcttacctcaagaatatcagtctggtttaccaaaaccctcaggcaaaggtacacaatccttcatatgtacgtagtatccttaattacctcattaaacaggaaggtttgccttccaacccacaggaatctgtatctgaaaaacggcaaaactacgttctgattattgacgagattaaccgtggcaacatctccaaaatcttcggcgaactgatcaccctgatagaaacctctaaacgtgccggggaaccggaggcgcttagcgtgatgctgccttactcttccagctcgttcagcgtaccgaataatctctatttaatcggcaccatgaacactgctgaccgttcgctcaccgcactggataccgccctgcgtcgccgattcgagtttgaagcgatgctgccggatatcacggttctgaaagaaactgttgtcaaaggtattgatctgccacgtttactgcagaccttgaatgaccgcattgaggtgctgtacgacagagaacatacacttggccatgcctttttcatcccagtagttcaggtaaaagaggacgaagacctggcatttgaaaggctcaagcggatcatgcgaaacaaggtgctgcctctgttggaggagtacttctacaacgactggcaaaaaattcgtatggtgttgggcgacaatcagaaaagcggaaacccgcagctacagttcgtgtgcgaggtgaaagaccagaaacagtttgccgatctttttggcaataacggaactgaagatctgcatgatataggtgccagtttccatctagcccctgaggacgacaaggtttgggataatccgctcgcctggcaacaaatttatgcgccacataaaggtaacccggtgagtggggaatga

SEQ ID NO: 437528 - DNA, 504 bp, Serratia marcescens
atgagtggtataaaaatctggaggaggggggggctgccagaaatcagcgaggaaaacattctggccacctttgagcatttgcaccacagtaagggggaagtgttcgagcgtggggtggtcaacgtatttaaggggctttcatgggattataaaactaacagcccatgcagctttggcaaaaagatcatcatcaataacctggtcactcacaatcgctggggttttagcctgaactggggctggcgtcgtgaccaactgacggatctggaacggatgctcttcctgttggatggaaaacccattcctgacaatcgcggtgatgtcacgacccggctaatggaacatattcgcgatcatccgggtaggcagttgtatgaagatggtttcttcaacattcgttactttcagaagggaaccgcgcatctgacattcaagcgtccagagctcatagaaaagatgaacgacatcatcgcaaagcactatccgggaatgttggggaaatag

SEQ ID NO: 437529 - DNA, 711 bp, Serratia marcescens
  misc_feature (133)..(142): n is a, c, g, or t
  misc_feature (686)..(695): n is a, c, g, or t
atgggttataaatacaaggcgacgatgtactactctgatgaggatacagagcagtttctcagggaaaaggcaactaagcctaatggaaagaaaagtgcttcgcagtatctgtattcactcgtaacgctggaannnnnnnnnngaatgtatcctccgtacacatatatccagtggcgtgagattagcggcccgttgtctttcccatctatcactgttttgcgcacaaatgaagcatctcaaaaaaggttcagacacaaggacctgatggaggcgattgacagagaaattgataaggatgttgctaacgtatttctgagaatacggccgtctttctataaagacggtggttttctggtaattataaaatcagaagttacctgttattatagtgatgaggtaacgggaggtagctattgccgtggtttttatagagtcaactatggcactattcatgtcagtgagtatgaatggaaaaaatggggaggtagatatgattttgaaaatatcaaatatataaaattcagagatctttttaatcccagtaaaaataagcacgcaggattatgtcaggtggcggagagggatccactggatacatctggtgcattttttatacctgtacgcaaaatagccaaggtttttccatcagacagactccctgtccctttgataaagggtgctgatannnnnnnnnnaaccagaatagggtga

SEQ ID NO: 437530 - DNA, 3663 bp, Serratia marcescens
  misc_feature (2403)..(2412): n is a, c, g, or t
  misc_feature (3585)..(3594): n is a, c, g, or t
atggaaccgaaaaaacttgcaacccctgattataaagtaaacagcaagcgggatgcgacggacagtattcgtggttatgtgtaccaaatataccaaagtgtgcttgcttggataaatcttaaggacgacgaagtactctttctcgaatgtgcagaagattttgatatttatactaaccagaccattacaagcacacagattaaagatttaacaagcaaactaacacttaggtcagcagatgtggtcgctgcacttaacaatttctggtcactgcagcaagacaatccacagcatgacatcaaactccgctttctgaccacagcgatcgccgggtatgaaaaaggcgcaccgttgggaccggagcagaaagggttggaatactggtgtcgttgccaatctaacaaggcaattataccgccattacgtaactttctaacgacacttcaattatctccaagtctacaggaatttcttcgctcgtcttctgatgaagcattacatactcagctgatcttacgcataaactgggacctggggaccagaaataaacatgccttacaactcgccatcgaagataagctgaagatacatggccactattaccgaacgaacacacattattcatgccaagcactatcgcatctcatcaaacatgtagtagatcttcttagcataaaagggcataaacctctttctagggctaattttcttactgaatttgatgtagcaactactgaatcgattcccaaaaatcttctagaaactcttagaagtaacagttcattgcaacagcttgcaaaaaataatgattctgacaaccttactcggctatggaataccccctcccccctaactactcctctcccagtagttgaaggagctcttcatcgtcaagcattgcttgaaaaaatccataatcatcttttatcattccgcgtaatttttcttcatggaagtagcggcacaggaaaaacaaatcttgcagcaatgctagctgctacatcaagcgagagatgggaatggggtggatttcgtggtcatcgcactgaacatattcgagaagcccttgcccgtgcagctctagaagtcaacatccgtaaccatccctcttttttaatcctagacgatctcgatttaagcgacattaccaactttgaacatcagctgattgctttgatctttgccgtaacccataacaatggtatggtaattgtcacaggacagaagcgacctcctttgtccctgttcccagcgttatggattccgtctaatagtgaacaggcaatcccatattttgatcgccaagaaatcaacgaacttattatccttcatgggctcagtgaatctaatagagttaccgaatgggtacacaacatctatgcttcgacgcaaggccatccgcagctagttcacgcacgcatcagaactttaagcaaccgaagatgggaggtaacagaagaagatttctacaatcccgaagatattgaacgcattcgtttagatgcacgtaaccgtctcataaagatgtttccttcagatgcagccagaatactggcctatcggctaagtgttatcaccggacgttttcatcgtaacttagccttaactctaggcaacacggtacctcctgtgagtttatcaggtgaaatctttgatactcttgtcggtccctggattgaaaaagagggcccagatctctatcgtatttcccccttgttaaccggtgcagctcagagtgttttctcggatagagatgtcattgaccttcatcttaatgttgctaatggtatcctcagccaaaaaactctaaatcaggacgacttatcagcagccttttggcatgcttattcagcgaaagataaagcacttatatttcatctagcaagcgtgataatcagagaaggtgaacaagccatgcgttatctccgtgaaccaatgttctggttttcggaagtagaattgttgcctggcaataaaattatagatgacaatttatcatcggaactaatattacgtttactacagtttcgacttaatgcatcactgtcaaaacactctaacgctttgataaacattcagattattgaagagatcgttgctaatggaaaaacaaaagataaaagtaaatttttttcagccatggcatatacgcttattctaagtaatctggacgtgcatattccagcgactacagttgtaagattgctagataatctgatggatgagagtatcgaaaccatttcagataaaaaatttcgtaaatcatctgacgaaaccaatatccctgatatttccagcgcagcaagagacttatttttattccaagctatccgagtaaacggcttgaaagatcttatggagttgatgatcgctcttgacaaggttgacgaaaacaagcgaagnnnnnnnnnntgctggaaagatgttgaagcaatctcggctaatgcacaagaatccctgtcagtactacgtttcactgagtccaaagcccgtgattggaatgttaagaggctttctatagcctgttacgcagtaatagcttctatctatgatgaatacgctgacgcacctgaagatgctctcaccgtcctagatgaagcagaaaaaatatttggtgatgacgcccagcttatcaatcagcgtgcaaaagttatgttcagattggaacgctacaaagatgctcttatctcgttcaaaaaagctctggccttaccaggacttgataaagtcaattatgtaacctcctgtcgtgatgctggtatttcagctgcaaaattgaattattggatgtgctcgtcaaagcttttccaacagggtgctgaaacagccgatcagagcaatattcaaaaactaatggggattggccttgctgccgattgtgcagtttctttatggcatgcaaatcaacctaaagagagtctatcacttcttgctgatgtgctagatagcttagaaagtgtagatccaaaggaagagcatctggcccaccaccttcacgctacgatcagacatgttatttcttggatccattttgccgctcgtggatatacagacagcagtcttgtcactccgttacccggtatgtgcagcaatccacacccacatgaaaatattgttgaccatcgactcgtcgacataagtggtgtgtgggagttactggccacaacagaatcttacttgtcactgggtgaaactattgcactgcgagcaaaaaacaaaaaaaatcttaatttacctctacacattaggatttatagggggattttggcattagaaacgacgttacgtgataaggcctttgaaaaattaatcccagcactgcttaattaccatacaatcaaccacttcagaacaactttagaaacaagtagtattgacttatactccacagaagaacttcccaagttaccagatggctattggggtaatgaagccccctggactttgaactgccaagtgattctagcggcaacaattatcaattattccagcgtccccctgcaagagctaccttttagctcttggcaaaatgaattagcagttcttgctcgtccacccatgagctttagtaagttcatacgtgtnnnnnnnnnntcttgcatggtgaaactcccgacgcagataatctctatcagttggcagcgggagctttatacgagctaa

SEQ ID NO: 437531 - DNA, 318 bp, Serratia marcescens
atgagattgcacggagacttcagcgaactcagtaagttattcagtatttacttcggtcaggattatgatctgtttactgatgccgaaacggccgagggtgtgattgacggcttcctggagcaaaatggcactcaagtcatccgcgatatcctcgaggagactaaagagtttcaggctacttatgcagggcgtatagacgaaggcatggcggagcatttttcagatgagtttgtgccagagagctggggcactaccgcggtggtgttctttgccatgttgcaacgaaaagcggaacaaaagctgggcagctttaattaa

SEQ ID NO: 437532 - DNA, 189 bp, Serratia marcescens
atgcccctcggcgtgctcacttttgacaatcaatttataagacagtgttctaatattgaatgcaagaaccaatgcagagaatccatctctgatcttatcttgtatcagcctgtttctataatgattagcgcccccgcccagatcatgatccaggaaaaagataactttctctcgttctttcggatttaa

SEQ ID NO: 437533 - DNA, 3189 bp, Serratia marcescens
ttgatacttatgcaagataatcatgacttatctttgttgatcgggtgctttgacatggaatttctaagtgaatatttgattaatcagattgtgagtgggaaagctatattatttttaggtgcaggagcatcattaggtactctgtcacaagatggaaggtttaaggggttaagtggcaatggattgagagatttaatttgtgacgagttcttgtcaggtaagtctaaaggcaaaaatctaagctatgttggcgcagtgactaaagacttagccgggatgatccctgttcatgagctaattaagaaacataccaatgatctcgtccctacagtggggcacgaattgattacaaaaattcgctggaaagcgattgctacaacaaattatgatgagttagtagagaaatcttataaggagaataagaatgcaccacagactctgaaaagggtggttggtgacagtgatgatattcaatctattctctctgatgaaaattctgttccattattgaaactacacggttgtatttccagaataaatgatcacaatcttcctttaattctttccagtcatgactatcataaatttaaattaaacagaatctcattgttttcaacgctcaaagaacttgcttatagtcatacaatcgtattttgcggatatagtatctctgatgagaatgtaagggatcttatctttgatgttagtgaagtaacaaatgaaaggcctaaatatgttctagtagacccgagcctagaaaaacaagatataatgtattgggcttctaatagattcgaatgtttacctcttacttttgttgagtttatgcaaaagttgagtgaacattttacctctcccggttcggtactcagcgcacttatgcctgatacaaccacgaccatcaataaattcattgcgtctcatgaacgaccgagcgaaaaattaagccagtatatagaaagagaactatatcacattcaggctggtttaacttcagagtctgttggaccgaataagttttacagaggaaatagtcgtgggttcagttggttgatgaatgattatgatgtttcgagagaaattgttgattctattcttgaagatactgtttttgatatccaaaattcagaaatgcaaaagtctttattttttgttgttaaaggatatgcaggtagcgggaagtcagtatgcttaaaaagaacggcgtgggaaattggagttacatacaataagccaactttcttcctcagtgagggcgcggaaattagaaaggaactcatttttgaagcaagcttgttaattaaagagaggatttatgtatttatagatgatattttggattttggcgacaaatcattagatctaattaatgaggccaaaaaattcaattatcctataacatttattacatcaggtcgaactaatgagtggaatactcaaggcgagttgtttgagcaagaggtaaatagctcatttgatttgcttgacttgaataataatgaagttgagagcttgcttcataagttaactagatataattgtttgggatatttgggaacacttgctgaatcagaaagatttttgtatttaaagagcaagttgaacaatcaacttctagttgcactgcatgaggcaacagaaggtaaaacatttgaagaaataataattgatgaatatgaaaatatatacccacttgaagcaaaggtagcatatttgaatgtttgttctctacatagatttgatataggtgtaagggcgggtcttctctctagaattgaaggtgttaattttaatgagttctataaaaggctaatggctccattggagaatatagttaatgttacctatgacttcagagttggtgattacgtttataaaagtaggcatcaacatatagcaaatattgttttcgcaaaaatattgccaactgctgaggaaaaatcacaacaaattataaaaataataagatacttgaatgtaagctacgatactgataatcatgcaatatcgcagatgattaaggggagagtgttggctgaggaattcactaataaatcattagtgaacaccatctttaatgttgctgaggatgctggtattcatccttcggtgataaatcatcaacgtgctgtttttgaattgcatcatcctgggggagatttgagagctgctcttagctatattgttaaggcagaagaagatccaggaaccctcttaaaaagaacccttcaacacactaaatcaaacatttacagacgacttgcattgtcatcaaatattgatggtgagaaacgaaaactaagacaggatgcattatctattttgaatcgttcgctatctggaaccagagactctttgccatactttactaagggtcaaattttatttgaagaaattaaggagcgtatggatttcatcaaggataacaatattgaaagtgatgatgaagttttaaatgaattaacaaagctaatggagtcaaatcttgagagggggcttcaactattcccatcggatgataagttgttgatgcttgaatctgattattctaagtttattaaagatacccctagagctttgaaggcacttgaacaatcatttaaaaaaaataaagatagtatttacacggctgttcgcttggctcggtcctattactctattaataggaggcctgatgccgttaatttgttgcgcaataccatttccaaccacccaataaataaaacacttcattttgaaattgccaaacttctcattagtataaatgaatttgataaccgagaagaaattttaacgcatcttaagagaagtttctccactggagatacacattatgaggctagatatagttatgcaagacatgagtatctatatggcgatatcacgaagtctaaaaaagagttttcggaactcgcaaaaataccttaccctccatcaatgctgaataaagtgcgtggggaaatgaaagattcagaaggaaataaaataacttatcatggaactgtttcgagtgttcatggatccttttgctttatacaatgcatcgattttcccgaaaatatttatgtacactacagtgcattaactgatagctcaaaatggtcgaatgtccttcctggagcgaaaatatcatgttttatcgggtttagttttaggggagtagctggcagtactatgtctataatgtaa

SEQ ID NO: 437534 - DNA, 591 bp, Serratia marcescens
atggacaagtatgatgcaagtaacgatcattattgttatcaagatacagtcacactgaaaaacaagctcgatattagagatatggaggaacttgaaaaagcagaaagagacattactgttataacagcgcaaagaatagtatttagccgccccccctacgatctagaatatatgcaacatcttcactttcaacttttttcagaattatatgaatgggctggggaactgcgtagcgtagatatttcaaaaggagacacacggttttgtaatacaggaagaataactgctgaagctaataaattactcactaaattagaaaatgacaattggctatcaaatatgtctaaagatgagttctgcgacaaagttgctgaatattactgcgaatttaatatgatacaccctttcagagagggtaacggaagagttcaaagggtgttatttgatcatctatctttagctgccggttacgatcttgattggggagatatagatcaaaatgaatggattcaagctaatatagaaggtttttatgtaaactatggaccaatgtctgaaatatttaggcgcatagtcacaatttgcgcatga

SEQ ID NO: 437535 - DNA, 1944 bp, Serratia marcescens
atgaaaaatataaaccaacacatagaagattacattgacaattattataaattaactaaagagcctggctatgccattctcctaaaaggaaaatggggaacaggcaagacatggtttataaaaagaaccttatctaaatataaagatcatgctaaaaaaaaagacaaatatctgtacatcagcctttatgggatgacaaattttgatgacattgataacgagtttttcaagcaattgcaccctgtactttcctccaaaactatggatgtagtaggtaaagttgcgaaagggctgctaagaacctctttaaaaattgatttggatggccataattcagtaaacgtgtcgcctcaaatgcctaactttgaattaccagacttcttgaaggatacatctgaattcctaatagtttttgacgacctcgaacgcgcctcaattccgttagaaagcattatgggttacatcaaccattttgtagagcagcaaggcaggaaagtaattatcatagcaaatgaagatgaaatatttgacgcagatgaaaagacaaaaatcaaagaaactaagaatgcacagtcagcctctggaggcgatacgaaaaccactgcataccgacgtataaaagaaaaactcatcggtaaaacattcgaagtgaaaccaaattttgatggtgctttaaaaaacttcattacagaaataggtagcgatacggccagggaatattactctaaaaaccttagggtcatttccgacatctatcatgagtctgaatataaaaacctaagacatttaaaacaagcgctttgggattttgaaatattactttcccacctaaataagtcctttttaaaaaattatgaactattgaatcatttgcttaagctgtttttaatcctttccttcgagattaagtcaggtaatttaaatgtggaggacattccagatttcgcgcacttacaaatactgacgtacaaggcacaatccgacactgaaattagcaattcagttatttataaaatatctcaaagatacacaaatgaagtcctaaatgatttcatttttaaacattcaacatggattgatattttagatagtagcatttttaatacaatggatattaatgatgcaattaatgaatcaatatacataagaacaagcgagactcctaggtggttggtgttatggaacgcccggcatattactcaagaagaattagatgaaaccttacagttaatcaaggaagacattaactcgcacagcattaaagaagcaggtatcatcctacatttggcagggatatatctttggctgtccgatgaaagcataatcgaaaacaccaagcaggaaatagtcgatactacatgtaactatattgattatatggcgaaggaaggcctattaacaaaagactcattacaagatgttcggtatagagaaaccgagtcttggggtggtcacggattcttcgaaaaagacacggaagaatttaaaacaattagtgactacttagcaaaaaaaaccgatgatgcattaattagtgagtatcctgttcatgcagaaatgctagtcaatttaatgaaaaccaatgctcaacaatttttccaaaccgttatatttagcaataactctgaaaacaaatattatgacctgccaatcttttcacacattacgccaaaatcattcgtagacgctattatggccacacctgtcaatatgagaaaatatataggaatgactttttcaagacgatataaagactcattcggcaggccactttccgatgaggtgaattttttacaaggagtaatcgccatacttaaaaacattcgacaatctaaccaaggaaagcttttaggattccaactaggtgaattgatcgactatggttttagccgtggcttggagcatttaatggcttccaatccttcttctgaggacaagtgttaa

SEQ ID NO: 437536 - DNA, 837 bp, Serratia marcescens
atgaaattacttattaccgatttggataatacactgtacgattgggtaagtttttattcccaatcatttagtgctatggctgaggaactatcaaaggagataaatattcctttagatatacttttgtccgagtataaggtcattcatcagaggtttggtaattctgaaaagccgtttgctactctagagttgccatctgttatttcttattttgggactagtgataagattttattacaaaaaaaactcacgcgagtattttcggcttttagctcaaagcgtaatcatacattgaaattataccctactgtcagggatactttaaatatattaagggagcgtggtgttaagattgtcggtcatactgaatctttagaatataattctttgtatcgactttataagcttgatgtgattgatttttttgatcacctttacacaattgaagacaatcacaatctccaccccaatcctaaaaacgcaaaagttattccagtaaaagatgattttattataaggttatctagtgctgagtctaagcctaacccaaaactcctggagcacatctgtctcactgaaaatgtagatatcaaagatgcggtatatgttggtgactctattactaaagatatatcaatggcaaagtctattggaatgaaagctgtttgggcttgctatggtcgtcagtttgctcccgagctatgggaaatcttagtgaaaataacacactggactgataaagatgttgaaagagaagagcaactgaaggaatcattttcaagagttaaaccggattattcaattaatagttttgcagaaattttggatctgaagtga

SEQ ID NO: 437537 - DNA, 1650 bp, Serratia marcescens
atgaaagagacttacattttcaggttccgtgatctaggaaaaagtgaaggatttaccatcaaccagcataaccaaattgctcgtgaggaaggggatgtttggtggggatggtgggcaaaatctggtgaggtctttccatcacaagaactaagaattgctgccgaaaatctcacgaaaatatatttctttgattcagggcgactaaaattctatagggccgaattaaaagaagtctgctcctcagctgctggggatagcaagaagaaggctcctgataatggtagaaaaacaccaaggtattataatgaagatgagttgttaggttggttaaaagtttctgaagtttgtgaaattcatgataatgatgatgttctcaaaaccttatcctatattccattagattcattatttgccacctcaaaggatttagatgaacagcttttcaataaagttgttttttcagtaactgaattaaaagaacaagatagaacaatttggaaggttagacctgctattgatgctgatcttcagcatgaattgttagcatcccattatatcccttataatttcaaccaaaaatatagccaaaaaaaaggggagtttataatctggctttcagatattcatttcgataacggaaaaggcaagcatgcgtttccagcgcaagataatgatcaacagaaatgtttatcttctcgtgtagtagagttggcagacaaatatagcaatggaaataaatgtgccggattggctatttcaggtgatttgacttggcaatcacaggttgagggatttgagctggcttcgaaatttatcaaagatgttagttcttctcttagccttacaccggatgatataattatttgcccagggaatcatgatgttggtttggtttctaaaaaagaatattttaaaataatgggaaagcctactactgatactccatgggtaactcttgcagaaaactatcataaaggaagcaaagaaaactatataaaattttataaagatgttttccaaagaaaacctgaagaagatctctcgcaaggaagaaagtttttattgggagggcacaaaatagttgaagtggcagccttgaattcatgtgttttacaacaagttaaagattcatttttgggtatggggtttatcggtgagaaacaactcagtaacgttgcggaatctatgggatggatgaacaaaagtggagagtatatatctaaaaaaagtggggtcacaagaattgctatgctccatcatcacctaacttcaattaatgaggccgaagatgcctatttggattcaaaatatagtgttacactagatgcggagagattgttgcgttgggtggtgaaacataaagttgactatattcttcatgggcatatgcatagaagtagttgtattacaataaaaaaaatactatctccattagaaccagtatcggttttaaatcctgaacatactttccaaattgtttctttgggaagttcaggggttgctagttcagaattgccaaatcaagattgtgctaactattcatgtataatggatttttctggtgaaaagctagcgttcaaatttttcaagctcgatagacagaacggagcaaatgaaacggcaacctatgctattgaaggtttatcatga

SEQ ID NO: 437538 - DNA, 3123 bp, Serratia marcescens
atggactttattgacaaacagattctcccgccaaagtcgtgggagaaattcgaagatttgactcgtgcattgtttgccgcagtgtggaggtctccccttacgcaaaaaaatggtcggtctgggcaaaaacagcacggtgttgatgtctatggaacgccacaggcaacacccggcataaattttggtgtgcaatgcaaagggaaaaacgaaggttatggggccaaggcgactatcgtggagttcgatacggaactcatcaaggccgaaaattttaaaccacagcttggacactggacatttgctactacagcgcctaatgatgcgcgacttcaagaacatgcccgcctagtgtccgaacaacgcgtgaaggaaggaaaatttcccgtagttgctattggatgggatacgattcaagcgctgctatctactcatcaggaagtgatcgaagaaatctatcccgaacatgcaagcgatctgcctaaaatcatggcagctctgcgcgcgttaccaagttccgaggagctcgatcagatccggcggagcctcattgtgttcgcaccaagatcatcagtactcaatattgaagcatcagtttggtctgaggttaagttcgaaaagcctcgtgatcttgggcctgctctaatgggtcgtccactcgggcctgcagatgtcgctgcttgtcccattcttccggaggtagctctactgactgcagacctggagcgcgcaggaactgctcgactagcgggggtaccgggagctgggaaatcaatctcaattcttcaagtggcacttcaaatgtattgtcgcggctggcgtgtcctaagattagccgacccaattggaaagataccttcttttgatgagagtctgaaaccgacactctacatcgttgatgatgcacacctgactcgcccagcattgcttcgtgagttggaagaaagggccactgcatcgcgatgggtattaagtgcgtacacgatttccgaagataagagcggctttccaggcgccatccatcttgatgctaagcgagcggttcgggttattgcgaatggttttctggcttcccgcgaagcaacacttgccgctgttcgtcaagccgatgatcgcatcggcgatcggcctggagatgagcagttcgatctacgccttgatcatgcagcggagaaagcgctttatccctggcaattctgtttcatccttggaggaggatggcgtcgagcgaatgcaatggcaagttctgcgcgcgcagcaggcgctgacgtggttcttgcagctgcggcaattcgacagttggcatcacgtgatgcgcactgttcgcgcgaaatgttgttgcggttagtcggggacgagttgtcgaattcagatggaaatgctgcgattgattggcttgtagcgcaacgatttttactgagtttcaacgaccttcgctgtccacaccagcgtcttgccattgtactcctggcacgtattctcgacggacagacagccgaagagcgccagacaattgcagttatgctcagaacagttctgaccgacattcagatgcctctcagtggcctaagtgttctacttagcgaactttcgttagctggcgaatttgggatgtggcgaaggcttgtacagcccgcatggcttactcccgctttagaacgctgctgggtagcgacagaaccacttgatattcggcatgcttgctggttactgaataatttgcatagctatctgcccgatgagatggaaacgattgccgatcatagtgagactcttgcagagtggatacaggcggcgccggaaggtgcatgctatgcgattggccgcgtgcttaatcatgtactcaatactaatagggcacttggtgaaaacatcgtcatgctagttgatccacgcgcattagcaaaggcgatcagtgctgctgccccgttgcatgcgggtgagattgccgatctgctttcgatgataggtgcttgtagagatgatatgtggaaggcatgctatctcgaacacattgatcacgatgcgtgccttcgcattgtgtcacagtggccgcaagatgcctacctatcggtcgttgccgatttttgcgaacatttctgctacgtcgaatcagagttcgggttcactttgatcgaagcacttatcccggccatcgccgatcgactgcgtgccgctccgcaagagtctttccacgaactaaacgatatcgtgtggaacgcgttgcggctctacgatccgcttaacatctatgttggcaagttggcaccgtcccgaagaatgcggcaggtggggcgaaaaatctgccgttgctggtcgcccaaggatctcgcgaactctttgtcgcgcagtacgcaacgaaacttccaagctgccgcagggcttcttagcttcatgcataaggcctcgccaaagcagttcgaggagacggtattagcactcaattggagcgagatcgaccaagcgataggctcggattgggcggaaaatatcggcgatgcgagaatgctgctcggagttgcgcacatcgtaccagcagcgagactcgcaattcaggatatgattgcgcgcaatgagccgcgtatcgtcaacatgtcgacgcatctcgcagccatcgcgccggctagcgcgttacgtcatatagccgcaggcagacgcattgcactcagccattggggtcacgtcgattggcaactgggagcattagttttggcgaggattgctcagtcggagccaacactggtttctacatttcttgaaccgcactacagtgggttagcagaggcgttatctcagcccagccccactttttacaatgaggctctgatgcttcttcgtctcctcgtgcaagtccagccttcaggcttaattcgagtgctggatcaaattgatgtaaacagggcaacactggggtggcgtaatgcacttcgcgggcaggataatagtcgtgagcctggcgcaaaggctcaggttcggcaggttgcgtctttgctagtccatcatgcgatggatcgtagtgatgcattgggagagttagcccgccgacttcgacgtgactttccccgccaatctatacctttagcaaagactattgagtccattgatttaagcgagccgattgaatga

SEQ ID NO: 437539 - DNA, 2295 bp, Serratia marcescens
atgcagggtgcgctgaacctgagggcggtagcgtatattgattccagttactcggagacctctgagatgagtataccccccggaagcagggttgcaggaaacgatacccccatttcacaaaaagaagaagatagctacggctttgccgatctagcggaaaaactggcccacagtatcatcagattggaccggaaaatcagcacggtcattggtatcgagggaaagtggggagcgggtaaaaccagcctgttgaatctgctgctggaagaaatgagctcccgggcacctgtgggtacccatgtactgaaaatatccccttggttaaccccctccggagatggggccgtcgaggctctgctcctgcccgttgcggcgatactggacgaagaagaagcaaaaggatattcgcgttggcgtaaaatctggcataaatgtcggaaagcgaaagcctccccgctggccgttaacatgctccgttacgcgcagcatgcgtcaggtcggctagcccccctggcagagttcgctggcaactgggttccgggggccggtatcgtggccggtaccctgaaaaccgtttctacagccgacctctccacccgacgccaaactactgctgatcttcgagctgatatcgagacgaaaattgcaagactagagttgaattttattgtggtactggacgatcttgaccgcctagagccaggtcaggctgtggaagtgttgcgcttgatccgttcggtagctgatttttccggatttcactatgtcatgtgctacgatccggctgttcttggccacgccgttgaacgggggctgggtgtcgcggatggtaggctctacctgcagaaaatagttcagttgtctttcaatctcccacggctggagtccttcgacctgcgtcgcgagtttctgactggggccaataaactctacaaagaagtacatggcatggatccagattatgcactggcccgggatctcaagtcagtgacggaaaccttcggtgcgatgcttatcactccccgtgaagttaggttggtattgggcagcctagcctttcgctatgagagcctccgagaatatatctggtttcccgatctttgccttctccaactgctgcgcgtcacatttccgggcctgtatagctgggttgaacattatctcactgaatacgccccggtggcatcagggacaggacgggttacagagaaagaaaatgctgcaatagtgaatgagcttcgtgagttgctatcgtcgctacctgcagtgtctccgctgtccgtaatgcaattagcaagttggctacccggtgtagagggcttagatgaaaattcgataaaacttttttgcccggtaccccagtcaatacatatagaaaatgagactgcaaaacgactgagaagcggcttctactggcgctattatttcgcctttacaccaccgaaggatgtacttcctcccgccttttttgacaacctgtttcgccttgcgggtaatatcgatgataatactgaactcatcaagctcctttacgacaaaatggtcgacaatggcttttcctcgcgcacgtggtttgaacatattttggatagactcacccccggaatgctcaaacgggctacgcccgtggagtgtcgcggcttactgggttttgtctttcatcatggggaaaaaatcatcaaccactatcgtgcacgtggaaactggctgtctttcggggaatttggtctgacggaattaaccgaccacctgcttcgccgccttattgatgacaatcgtcaagacgcacttgattttctggctgcgtatctttcggatgaaaagactttcaactggacgatcccttacctgcgtcaccagctttggcagaacggtttggcaggaaaccgacctgcatatgaaaaagacaagatactaaccgacttggagctaagggcactttgtgcaacaactgcggcctggcttgaaaaccctgataacaaggcgacgatctggcaacagaaagacttgtctcagcttatctatgcctggagggaaatcagttcaccggaggcggttactgcgtggatagcatccgctaccctagctgatgaggattttctgcaggtacttctctggctgagatacgacggtatcagcagcgccattggccgttaccagggattacgtctgagcgatgctgctttaatttttggtgaagggaactctgtttcagagcgtttggatagaatcgaggaggaaggacacttccctgaacagatccgacttattcgggaggctgtcgctcactcgtag

SEQ ID NO: 437540 - DNA, 219 bp, Serratia marcescens
atgaaggggcaactgcacatgctctccaaaatacagttccgctggtggagcgtgccactggcggtgctgcttaccgttgcgctctttatggcgctggatagctggggcctaacccaggagatgagtggcttgttgcgttcgctgctcgtgagcggcgtcagcgttattttgctgtatggcatcaaccggatcgccgcaaaacaaacatccaaccgctga

SEQ ID NO: 437541 - DNA, 903 bp, Serratia marcescens
atgaaacaacttgatccttattcaatcgttatagctttaaatcatttatctgatgtagttaaccagacaagtcagtcaaacataatcaaagattatttaatgcccattctaatcgtttttttatcttcaggaactgcatatctcattgcacaaaagggattcagatggcaagaaagtgcgaaaaacgaaaaagaaaaagctgacacatcaaataaactgctatcgttgtttcaattaatgcaagggttactggctgctataaaggttaattaccaaaacgaactacagtccaaccctattcaaagagcaatggttatccccgttctggcagagcgtttccctcatatggatattgagatggaaaaattgatacaggttttatatacaactccaatagatcaaaaagaagagccgtggtcaaacatatcctcaataatgtcaacgctaagtaattttaaccagttggttgaaataataaagacacgcaacattgtagacgaaagagtaagatctaaactcgcggataaacttcaacatcctcatgaagaaatgaagactcagagaattattgaaattgctggtcatgcggagtgcatgaggctagtggatttaacagaaatgctcatactttttgttgataatcttattattacagtggatgattttttaaggaattaccctacgatatctacacgagtcataaaaatggagtatctaattaattacactgtgatacaagactatagaaatgactctgagtcatttagcttattgataaaccggtgtgttgatgtagattttgccgttcttgctaaaattatgggattgtcagagatacaggtcaagaagaagtatactgataaatcctttatgataacgactaaaaaacatcttcatggttag

SEQ ID NO: 437542 - DNA, 2055 bp, Serratia marcescens
atgacaaatataaattttgaagaaatatctaaagattgctctaaatataaaactaaaagattacttaaagcgataccatttttcaatgaaaacgaatccgttcgtcatttagtaaaattcgaaacgcagaactttaaaaattttcaacctcataatcataacaaaagacaggaaagagatcgattttttgaggctctgataaataatattaaatgtgataccacggttaagcatttgtctaaactcctctcagtatttaaaacatctgagattattatcgatgaaataaaaactggtttaaaagcgttgccactgatggaagaaaatattcagacattatgctgggccgtcatcaaaaatgctttagaggaaggttatcacttacaagaaatgatggaaactcactcatctaaaattggggaaagtggagctccattcactctaaatcaaaaaaatattttaactgataatggaacctcgatttcccctgattctgccttagataaaatagttagttttttaacactgactctgaaaatgtttgcgtatgaacataaattaacaaggtctgaagacattataattcctgacatgatagatgttgatgagtctttggttaataacgcctcatcaattttctattattctttagcatggaacgacttgatcacatgtactaaaagttgtatttattttgacaacgacatacaaattgcacagcctgatgagatcccagaatttttgaaaacagatggtgtcaccactgctgttatcttcaatcgtactaaagacaattttgaatatttcgatacaatctctaatgaaagattgtccagacggttaagccagaatttctttgaagcaatttctaaattcaggtttgaaaagagactcccatcagacattagtaaatggtctggttctttagacgctcacccaataacacttgaggaatatccatatttaaattctttgatggaagcactctcaagccatgacagcaaggacattgttttaggcttaagtttacgcgaatgggtaagaggatattctgtaatctcatatttatcacaaaatgcgaaacataagattatttatagcaagaaagagattactagtgtactaagattaggtggtttttccgaattaaaagcagatattttcataaaaagcatcacgtttggaaatgatagccgagatatatatgactcgccactaattcaaacatcaaactcttcttatttattattcacgccagcatatacagcgcctcttatcagtaacataattctttcgaaattctcctctaaacaagccgatctttcaaaaaaaggttatgggtttgaaaatgatatgatagaaactctaaataaacataacttggttaatcgtcatttcaaatttaagcgggggttagaagaatatgaatatgatgctgtatttttacttgacgacaaagcatttgttttggagtgtaagaataccacactatctggaggctctttaacaagagcgtttcaaaaaatagaattcattgcagacgcagcagcgcaagtgaaaaggcttgttgatggtttagtatcaaatgcagaagtatttaaggagcagttcgggaagaatataaatgactatgaattagttcctgttgttatgaataaccttccattttcaatacctggaaaaatcgatggtgtttatgttactgactcatcagcttttagtagactcattaaatcaagatatatagatgttggtataattagtcacgatgacacttatcaaattggcaatcagaaacatgttttatctatgtgggaaagcgatactctaactgctgctgatattatcaatcattttgaaaacccagtgcaacttcttgattttttagaaaataagaccatgaaaaaatacccattaagagtcagtcaagacaaaatattcttcaattttgtatacgagacctgttacgactccatgagtaacaaacaaaaagaaataatagaagaaaattacccagacctgtgtttttcttcaaaaaaacgcgaatataattaa

SEQ ID NO: 437543 - DNA, 165 bp, Serratia marcescens
atgcctgataatattgaagtgcctaaagaaggcttgtatgtatccacaattcctggtggagaacgtttggttgttgttgatgtaaacgtggtagaggatgactatgatgaagaaggtgatgaaaacgatatgtcagcgccaagttgggaattcgactccacttaa

SEQ ID NO: 437544 - DNA, 3393 bp, Serratia marcescens
atgacagagcaaaacggtggtggaattctttatcaagttgagatggatgttgcagggttgctggttggccagcggaaagtaaatgccaggcttgaagaaatggaagggcgcttcagcactacaggtaaagcggttggttccactgaaaaagccttctcgtctttatctcgcgttgctgtcagcctatccgccgctctatctgtccagcaagtggcgcaatacgccaatgcctgggtagatgtgaacaacaagctggtaaacgccgtaagaccaaccgaacagctggcagatgtaacgcagcgggtttttgatatatcccaagaaacgcgttccgggttggaatcaacggctgcgctttatggccgacttgagcgtgcaacgcgcagcgcaggaacaagcgctgaagctctggcaaagctgacaacgacaataaataagggcttgattgtctccggtgcgaccacgcaagaagcaagctcaaccatgatccagctatctcaggcgctcgcctccggtgtgctgcgtggtgaagagttcaattcaatctcagagaacggatcacgcttagcggtggctctggctgactccctgggcgtaacggcaggtcagctccgcgccatggcggcagaaggcaagctaactacagatgttgtggtgaaagggttgcttagccaaggggatgtgattgccaaagagttcggcaacacgatccaaaccatgggtcaggccttccagatcgccgggaacaacatcactaaattcatcggtgaatctacctctgttcagtcaggtttgaaggtattcaatgatgctgttgtctctttaagtgaaaatgttgatgttgctgctggtgtggtcacggcttttgctgtcgtgctcggcgggcgatatgttggctccttggcgatggctacgcaggcaaaggttagcgacatgcttgcttctcaggctcacgcttctgcagtagcagctgacgcagcggctgcagcgaatgctgctgcggtaacggcaagaaaggcattgttagataaagaggctgcgttatcgtctcttgcactggcacaagcagaatacaacgttgccaaggggacgaacgcggaagctttcgcgttgcaaaatctcaatacagctaagtcggttgctattcaacggtcagctgtgtttgcggaggcgcaattagcacaggcggcagcaaccacgacagcaacgactgcagcagcggcggccactactaccattggcggattggcgagaggtgctctgtcattaattggaggaccggcaggcgcagcgatgattgctggtgcagcattgttctatttttaccaaaaggcacaacaggcgaagcaggaatctattgatttcgcggacaagcttgacggtgttattgccaaaatgcgtaccatgagcaatgtgcagttggcagcagagatagacaaggcggccaaatcgataaatgtccagtctggagagctcaagaataacgaagctcgcctgacggatctcacttcaaggctgcaaagcgctaaagccgcggtggctggtttgtcggagggtagccttttttattcagatgctctgtcaaaggtaagtgagttagaaagtgagcacatccaattaactgccaaggttgaggcagagcaaagtaagctgagccagacaattagcaaagccggtatcttgcgggcgcagatgaacggcgagttcaggcagggtatagaccttttgaaacgagatggccaggaggcaagcgttactgctggtctatttggtcagcttggtgatgccattaactttgcgggtagggctaaagaaaagtttaactcgcaaagcctcatagttgaacgtcctaaaaacgttcaggactacctagataagctgaatgatcaggttgagattcagggcgagctaaacgataggaagcgagctcagctcaaggctgaaaaggatatcaggtctctcggcggtagcgagcaagatgtactgttagcacgcgaaagggcaggcgctgagttcgatgcaacgaaggcaattcaggagcagaagaaggcaaccaaggaagggatagccgagggcaagaaatctgccagccaggcggaaagcgttgctcagaaattggcaaatttgaagcagcagtcagaacttgcagctgattcgacaagtgagttaagtcgagagcaggcgatactaactgctcagctatccttggggaagggcgcgacgcaagcgcaaatcgatatggcagccgagtatgcagccaaaaagtgggacacagccaacgctatcaaggcgcaggctgcagcagagaagctcctgccagaagccaaagagaatgccagctacgcgcaagacgttaaggatttaaacacggcgttggcggccaagaaaatcagccaggaacagtacaacaccactgctgagcagttggagcaacagcatcaggttaacttggcaaaaatccgggctgaagccgtagtaagtcctcagcagcaagccgccggtatggttgacccagttcagcagcttgccaacgagaacgcgcagaagctggcattgattcagcagtttgaaaatgatggcacgttggcgcatgaccaggccttagcgttgcgaacggctgcggatcgtcagtatgagcagcagagaacagaggcgcagtggcagctattgagccagcagagccttggttacgacatgctgacgagcgctgttgatgcattctctggtaatgcctccaacgctattacagggctacttaccggcaccatgtcagcacaagaggcaatgcggtctcttggcaacaccatcctgaatagtgtgataaacagcatcgttcaggtgggtgtggaggcgttgaaaaactacatcctcggccaaacgcttggcgctgcctccgtggcgtcatctgtgggtatggctgcaacaacggcttcagcctgggcgccggcggccgcaatggcatcactggcaactcttggcgctaacgctgctccagcggctgcagggataacctcaactgtgggattggctggtgggttggctttggctggcgcgcgctataacggcggccctgtgagcgctggcgcgatgtaccaggtaggtgagcgcggcaagccagagatttaccaggcgagcactggtaagcagtacatgatccccggtgacaacggcaaggtgattagcaacaagcagatgaccggcggcggcagtgcggcgccaaccattattatcgaaaactactcatccggcgctggcgtaatggatacccaggccagcaaaggtgctgatggtaacgatgtggtgcgcattgtgctggctgatctgcagcagggcgggcaaatcagccagggtatatcccagtatcaccaggcgcctcgaaaagccactgaatag

SEQ ID NO: 437545 - DNA, 315 bp, Serratia marcescens
atggcggcagcggcgtattgggtaattattttacttggcctcgtagttggcgtgttaactctgattgtgagttatgcggtgatcagtgagaaagacgagcagaaaagacagcagggattgaagttaatcataggcgtggtgaagaagaaaaatttgctgcgtagaacggttgactggatctgctttattgtaattgcttgttccctgtcgtattcggggtgggtatttaccgcagtctgctatgtcgtggtagccctgattgttaaattaatgctgtcaatcgcccgcgataacgtcaaagaatgtacggcgtaa

SEQ ID NO: 437546 - DNA, 159 bp, Serratia marcescens
atggcaaggcaacgatcatccctgagtctggatgatgtcatatcgatcaggacgctcatcggcatcggcatcagcaccaaaaccatcgcagagcagttccacacctcaaagcaaaacatccaaagcataaaatcagctaaaacttggaggaaggcatga

SEQ ID NO: 437547 - DNA, 216 bp, Serratia marcescens
atggaaaaactatcagaccgactcaagcagaagaggattgagctgaagctgacacaatcccagctggcggagctggcagggacaaagcagcagactattcagcaggtggagtctggccttacaaagcggccacgatttcttcttgagttagcgcaagctcttaactgcgatcctatctggttgttgtacggaaattctggcggaaaagccgcataa

SEQ ID NO: 437548 - DNA, 696 bp, Serratia marcescens
atgagtatcgctgaccgagtaaaactaagaagaactgaacttggcttgacgcaagcggacttggctgtgcgcgcgaagacctctcagcaagccatacagcagcttgaagacggtaagactaagcgccctcgctacctgccagagcttgcatctgctcttggttgtgacatcaagtggcttattagtggaagtaacccgccaaaaggtgacgaactcgctccgatcgctgagtgggaaggtgttgacgcctgggatagcagtaacactctccccaaggacgaggtagaggtgccatttttgcgagatattgaactcgccgctggggatggaagctataacgaagaagactataacgggttcaaattgagattctccaaagccacgttgcgccgtgttggtgcaagcacagatggtaaaggagtgctctgcttccctgctcgcggtaatagcatggagccaaacattccagacggaaccactgtcgcagtaaatactgatgataaaaagatcgtcgacggcaagatctatgcaatcaatgagggaggctggaagaggataaaaatcctctacagggtaggaccggagagagtaagcatcaggagctttaactctgacgagcataaggatgaagagaaaaacctgacagaaatcgagattattggcagggttttctggtggtcagtgctggattactag

SEQ ID NO: 437549 - DNA, 999 bp, Serratia marcescens
atggctgatgttattgataaccacgacgaaccaaatggcaaagcaaaaggcggaaaagccagagctgcaaaaatgacaactgcagagaaaaaggctgcctcattaaagatggttcaagccaaggctgagttagcagcgatgcctaaggttattgcaggatccaatgatgagccgcttaggatcggggaaattgaactagagtgttacgttcttgatgatgaaaataagacgcgcgttttctcccagaggggattagcttcagcattaggttgggactcaagtcaagctgccgcgcgactggctaactttaccgagggtggatttttaaatccatttgtaaacaaagagataacggaaattcttcgtggcgcgctgaagttcaaaaaccctcatactccaggttacatgattggttatccggccacaattcttgcggatttatgtgacgcaattctctctgcagatgctaaaggtgtacttaaaaagggacaggaagaactaagccgcagggcattgctgctggttagaggctttgcaagggtgggtatagttgccctggtagatgaggcaacaggttaccagagaatcagggaaagggactcattagcaaagatactagaagcctttgtagcaaaagaacttcaaccttgggttcatacatttagtcctgattattacgaacaaatgtgtcgattaagagggatcccataccctccacaaaaaagaaattttccagcatatttcggtacgttaaccaataagatcgtttacgacagactagctccaggtcttcgagaagagctcaaggcggccgcggctaaaagcaaaaagagcggcaggctgcatcagcatctaactcaagaaataggtcaccctaaacttagagagcacttatcttcggtggtgactgtgatgaagctgagtaccgattatgaagatttcgagagcaagtttgaagttgtacaccctgagttgccaaaattacaaccccctaaatag

SEQ ID NO: 437550 - DNA, 249 bp, Serratia marcescens
atggcaacaatcatcatcaaggcagccaaagaaaacgccaagcagcgcaaataccgcaagcaaggtgaatttctggcaaagaaagacgctgaccgtgagttggcgaagaaaatcagcaaagcctgggcgaagttaacccgggttgagttaccggcacagaagcctgtttatagcggctcatgctgcttgccagaggtggctatgttcgcagccgggcatcgcaaatcaaacaaaatcaccgcacgttaa

SEQ ID NO: 437551 - DNA, 258 bp, Serratia marcescens
atgtttgattttagcttcgacgacttaaaggccagtgtgtttgtggaaagccgtgacgctgcaatggcttatcagtatggcgcggctgaaatcacccccggcaacaatacaatatcaagtaaccaggctatagaactaatacgaaaacttgaccgacttcagcgcggcgtaccgaagtatcagcaaaaaagatggaagtcactgcgcaatcaattcgtttttgcttttggtccagaaatggaagctcgcaccaagtga

SEQ ID NO: 437552 - DNA, 171 bp, Serratia marcescens
atgagcaaatttccacgcgtttattactacgcttcacgcaaaacaaaatttatcgagatcactcacgcgccggttaacggagtaagcaccaaggagactaaatcagtgagcagtaaggtggaggcgcgtcagatagttaaagagataaacggcgtcgcttggaacttttaa

SEQ ID NO: 437553 - DNA, 252 bp, Serratia marcescens
atgcgccctcttctggtgtggcgtggttattggattgacgagggttatgtgatgagtgaatggattaagtgcgaggatgaccttcctcagcatgacagtaaggttattgcttttaccagttatggacagatgattttcgacatgcactaccagtgggctaaatacgaccatgacggatggatgacagagaattcacaatggagcggccatgtaacccactggatgcccatgccagagccacctgctgactga

SEQ ID NO: 437554 - DNA, 969 bp, Serratia marcescens
gtgagtgagtcaaccgatttaaccgttatcgaaattaagccggaacaagctccggcgctgtacatcccaaatggcctcgatgcttatcttgagcatatcaaggcaagcgtaaatgaagctccagacctaagcactaagaaggggcgcgatcgcgttgcatctttggctgcacaggtaagccgcagcaagactgctgtagaaaaaccaggacgtgaataccttaagagacttaaagaggctgtaaagcctgctgagcaagaaattaagcgtttcgttgatgcatgcgacgcacttcgcgatgagaccagacgcccattaactgaatgggaaaatgagcaagagcggatcaagcaggaagaggaagccaagcgcgcagctgaagagctagcaaagcaagttgaatcagatcacgaaatcgccctactgcttaatgagaaatacgaccgtgaagtagccgaggcgaaagcagaggctgagcgccagcgcatcgcccacgaggaagagttgaagcgccaagcagcagaacaagcccgtatcgaagcggagcaaaaagcaaaagccgaacttgaagctgcagcgcggcgtgaagctgaagcacaagcagcaaaggaacgcgcagagcgcgaagccaaagaggcagcggagctagctgagcgccagcgaattgaggcgcaacagaaagctgagcgtgacaagcaggaagccattgcatcggagcagcgcaaagcacaggaagccactgataagctgaagcgagaaactgaagcgaaagaagcagctcggctggcagaagagaagcgtattgctgatgaagccgcgaaacgggccgcagatatcgagcatcgaaaaacagtaaataacaaagctttggcagatttaatcgctgctggtgtacctgaagactgcgccaagaaatgtatcaccgctatcgctaaaggcgaagtgtctgctattcgcattacctactaa

SEQ ID NO: 437555 - DNA, 138 bp, Serratia marcescens
atgattttcgcaatcgcgggaggcgctcgcatgggtgccttccagttacatgaatccctactcgaaatcatcacccgccggatgcgctgcattggccggtggttaaaagacactcttaatcaacgaggcgagccgtaa

SEQ ID NO: 437556 - DNA, 201 bp, Serratia marcescens
atgaagatgacattcgtatgcaccgagtatcacgccaaggcaggacagcgacaaggtgaggttcgcattgaggcggacggcgtcgctttgttcggtcatgtcgatgagaagcagatcatgcctcagctcgatctcaagcctgtgttcgagtggcttgcagagaatggatatacggtcacagaaaataaggcggtcgcatga

SEQ ID NO: 437557 - DNA, 1017 bp, Serratia marcescens
atgaaagagcgcccagtgatttttaacggcgagatggttcgcgccattctcgacggccgcaagacccagacgcggcgagcaatcagcgatcggcatctgcacctgatcgacgtagcttcacaggtaggcgaatgctacccgctggagtccggcatcgaccacgccaacagccagagctattaccgcgaacattgcccattcggccaggtaggcgatcggctaatcccagcaatgtacatcccatcactcgatagaagatattgcgcagatgtgttcggggatatttggtcgcgggctaattcaggtggcgaatggaggcgactttctggctccgccaacagcaaaggatatttaacagtaactccggcgagcaatgggaagtacaaaaccaggtcagttcatgatttggtttcggaggcttttcttggggagcggccgaaagggatgcaaattagacaccttgatggcttccagagaaacaatgcccctgaaaatttggattatggaacacaggagcagaactggtcagaccgactcgttaatgggctatcccttggtgaagatcatcacaactccaagcttacgacagaaatcgtaaatgatatccgtgaatctcaactcagccagagagccctctccgttaagtatggggtatcgcaatcaaccatctggtcagtgcggaacgctaagacctggaatgaaaacccagtagctaacccacctaacatgccgcgctgggcatcccgcatgacgctggaaatcaccgcggtgcgcgttgagcggctgaacgatatcagccaagaggatgctcaagctgaggggatggagcttactgggtgggttccatcttactcaaatccagacaatgcagggtttgatgagacattcactccatatgacaactttgccatgttgtggcaatccatctacggcgaagaaagctggcgcgccaacccttgggtttgggttatcgagtttcgtcgtgttggcgacagcgctagggaggtggagcagtga

SEQ ID NO: 437558 - DNA, 285 bp, Serratia marcescens
atggctaagcgtaagagcaacatcatcgaaagcgcgtgcagatgcggtgagcctatcagcatagaaattaactgcactcagcggatatgtcgggcggataagaagcgccctttctatccagatgagagtgtcgctaaaaaattggctgggctgaacgttaacttgaaagattacccggagaacggcatcaccgtgttctgctgtcgtagttgtggtgcgagcgttgatgaaacagttccgggagctgaatttgagcgggccgaggcccaggagaaagcattatga

SEQ ID NO: 437559 - DNA, 330 bp, Serratia marcescens
atggacaataagctgagcgaactgagcaaaccggttggatttattgagcaaagcgggatggattatctgcggtctggtgaagatgctgatatctggcctgacggtggccgtggcgatgatatcccgctctactcgcaagagtacgtctccgcccttatagacgaaaattcagctgcgaaaatagcgggcgttaaagagtttgcagctgaaatgatcgcgagtgctgacgatagcgataactcattgcctgatgatgtgcgagatggaatgcgcagggctgctgcgttcgccaatatgtttattgacctgcgtggggtgcaacatggataa

SEQ ID NO: 437560 - DNA, 324 bp, Serratia marcescens
gtgaccactatcgaaatgattagaaatctagcgcagcgtaacagtgtcgtcgctagtgctgatgtgctggcagttttcgcagagctggaagccaaagatgcgcagaatgatatacgcattgccgaggttgaaaaacgactgaagcaacgcgaagaggaagcggaatcgcgcatcgcagcactgaaaaacaagctgaccaagccggttcagttgcctggtaaaaccagtgatttagatagctgggatggcggttgggatgcttgtcttgaggagtgtgccgaagcaatccgtgccgccggcttcaccgtagagggggatgagtag

SEQ ID NO: 437561 - DNA, 705 bp, Serratia marcescens
atgacacggacactaacgactgagcggttgaaagcgctacttgatgagctgaaatcttggcaatacggctatgacccagtagacgacaaagagcaatttgacatgctggcaacggcagaatgggcggtaatcgaactcctggctaaccgggatgcgcagccggtggcatggtcaacggtattcggcgacaagcgagcggttactgttcatgccgacactgctgaagtttggaatagtgatgggctgcaagtgcaatctctgtacacagccccgccagcgccagcagtgaacgcatcgccagattttgagtcgtggtttgttgaaaaatataagcagccagagcgcctgatgaagaatgaagatggcgcctacaagttctctggcgttcagatggctttttctgcatggagtgatggccgcgccgcaatgctgaatgtctccttcattggtgagggagacatggctcaacctgtaagtagcggttacaagttcccggatggctggatagcttgcagcgagcggatgccagaattggataagcgagttctgctgtattttggcagttacgacggccatatcgaagatggctgtatcggtgatgatggcgatgggccatatcattacttctttgatggcgattcactgcagcaagagcctacccattggatgccattacctatagcaccggagggtgggaatggctaa

SEQ ID NO: 437562 - DNA, 345 bp, Serratia marcescens
atggctaagacagcggcagaacgcaaggcggcgcaacgcgaacgccaacgaaaatccggcgttgttccctttgaactcaagctggatcagcaggaaatcgatatgttacgggaaaactgcgcggcccgccggccgcaacgtgaaccatacgatatggacgagtacataaccatgttgatcaggaaggataacgccgatttaaaaaagcagctggcagcacggaatgagcggtgctgcggaaagtgcaaagacaaactacctggggatcctgcagggtgttatttcctcggtgattctgaatgctggcaaacctatgggtggcacgagacgaaattaacagtgtga

SEQ ID NO: 437563 - DNA, 252 bp, Serratia marcescens
atgtcgcgaaaatcgagctttccgtctgcaaagcgggcggcaaccaggtggaatattccaaatatcgttctcgaagacgtgctggtgacgcaaaccgattttaacggtgtcggtcaaaatgatgcgatcctggttgattacgccttccaggcgtcaaaagtcaccatgagttactgggaacaaggcagcagcggcactaaaggcgcggaaagcaaatctggttgggatatcaagcagaataaagagagctaa

SEQ ID NO: 437564 - DNA, 2994 bp, Serratia marcescens
atgctggcgcctgccgatatcgctcgcgcagacgatgccatttttgacggcgactcaaaaattaccgaatcattggcctacaccggggacgtttacgtcggccgtaatcaaagcggcaacctgctgatcgagaatggcaagatcagcgcctataacatcaatatcggccggatgttcaacggccaaattcatgacagcctggtcacggtccgcgggccgaacgccgagctgaacgcggtgaacgatcagttcgtgctgcgcggcggcctgaatctggggcggggcactttgcgggttgaagacggcgcgctggccagcgcgaaagagatcgtggtcggcgccacccgcggctacgacagccaccttatcgccaccggcgccggttctcgcgtcaccagcaattttctcagcgtcggcaccgacttaggggcacgatccacgctggcgattgaagacggcgcggtgctgaacaccgcctttgacgcgcgcatcggcaatggcagcgggccgggcgagaccgatacgctgagcccgaaagccacggtcacgggggccaattcccaatggaacgtcggccgcgcgctcacgctttacggcgatctggacgtgttgaacggcgctgcggtcaacgtcggtaatattcaggtggcgggcgtctcgggcgcgcgtaaaaccgccgagctgacgatcgccggcaacggctcacggtttaccagcggcagcagcgtcaacgtcggcgattacggcaatggcgtgttggcggtcatggacggcgggacattctccgccggcggcaacgaagtggtgctgggcaagaccggttccggttctaaccgcggcgcgctgattatcggcagccgcggcaacatggataccggcaccgggttgaccgagccgacgctcggcgcggcgggcgctgcaggcactatcgatgcccagacggcgatcgccctgcggggcggattgttccgcagctatgtgtactttaaccataccgacggcaattacgtcttcagcaacaagatgagcggcgaaggcgaggtgatcaacaccgccgggcatacgacgctgaacggcgatctctctgagctgcaggccaacgtcaccgcgcgcggcggcaagctcatcatcgccagcgacattaacacccagaaagaagacgacatctttgagatccaaaccctcggcgccgagaacggcggcacgctgatcctcaacgcgacggcgggttccgacgtcaataacgggcagggttacagcagcgccgcctcgatcaaggccggcggcacgctgggcggcaacggcacgctgggccagaccgagatccagtccggcggccatatctcgcccggcgacggcaatatcggcacgctgacgctgaaacgctacctgaactttatcggcgaatccttctatgacgtcgatatcgccggcgacggacgcagcgatcaactgctggtggcgggcaaaaccaccatcagcgatcaggccaaagtgcaggtgacggcgctggatccgcaaaccagctataaaaccggccaaagctaccgcattctgacctcggacggcggcattgaaggccagttcgcggcggcggtctccaagtctgccttcctcgatgtggcgttgaaccacagcgccaacgccgtggatctgaccatcgcgcagaaagacacggggggtgaaaaccctggcggcgagaatccgggcggagaaaacccgggcggcgagaatccgggcggggaaaacccaggcggtgagaacccgggcggtgagaacccgggcggagaaaacccgggcggtgagaatcctgggggcgagaacccgggcggggaaaacccggggggcgagaacccaggcagcggcaagccgggcattttccaaacggtggccgaaagcggcaaccagtggaataccgccggcgcgctctcgacgctgacgcagagcggcccttcgctggcgctgtacaactcgctgctgctgctgagcgcgccggaagcgcgcgaggcgttcaatcagctgtccggcgaagtctatccgtcgatgcagtctaacctgatcgccggcagcacccagctgttcaacgtgctgaaccagcgcatgctgcgcctgttcgacaacgacagcctgccggtaccgccgttggcgatgtcgctggtgcaaccggcgcaggcgcaaaacagcggcgtctgggggcagaccttcagttcctggggcagaaacagcggcaacggcaacgtgggcaagctggatggcaacaccaccggcttcctgttgggggctgatcgcaaactggcggaccataacgtgcgcatcggcggttacttcggttacagccgcggcgactacgacgttgacagccgccgctccaaggccgataccgacaactaccacctcggtctgtatgcggccgggcagcaggatgcgttctcactgcgcggcgcgctgggttacacctggcacaagattgaaggcaagcgcaacgtcgatttcagcggcttctcggatcggctgaagtcagattacgacgcgaactcgctgctggcgttcaccgaagcgggttaccgtttcggccagccggagatgaacgtcgaaccgttcatcaacctgagctatatccgcctgcataccgacagcttccaggagtcgggcggcgcggcggcgttgagcgtgcgcaatgaaacgatgaataccttctactccacgctcggggtgcgcggcgtgaccgaactgccgaagaacgtcagcctctacggctcgctcggctggcagcatgcttacggcgataagaacacctcatcgcgcatggcgtttgccggcagcgacgcgttcgtcacgcagggccaggccgtggatgacaacgtgatggtgggcgatatcggcgtgagcgtgaaactgtcgcgcgccgcgacgctggatgtcggctatcaggggcaattcggcgccgatacccgcgttaattcggtcaacgccaacttgcgctggtcgttctga

SEQ ID NO: 437565 - DNA, 195 bp, Serratia marcescens
atgactctgtaccggcaacaccctggctcccgactgtttcgctttagtacgggcaaatataaatggtcaggcagtatctgccattatgctggtcgcgaggtggaaggcatacgcggcgttctggccgtcttcgctgagcgccgtcaggatagcaatggtccctatgtcattcttcgcagtgtcactctcaattaa

SEQ ID NO: 437566 - DNA, 2109 bp, Serratia marcescens
atgttgcactgtattaatcccgaagcctaccaagtggatgaagcccatctgcgagactttaccgaactggtaaaaaatcgtgaaaacctcggcgggatcttctcggggttagtgcctaccgtctcgaacgtcagcttacgccgtaatctggaaacactgcagcagcagttcccggaagatacgattctgatgacgctctgccaacaactcatcccgcttattgggacattttcaccaaataccccggagcgcgaagaagggatccgggatattcgccggcacctaggggaaaactatcgcattcatcatcgtatgttgcgaaaccgccgtcaggtttcactcagcttcgatgaaacgaaaaacctcaatctgaaccttctgtttcccgggctcaacggagccacagagtgtcactggcattgcgatgggttagcgttagacgagttgattgatgagtatcgttccttatcttcactgccacagaatacgcagtgggcaatgaatgaagactcatacctcttatggatcgacgatctcctgtcaagcccactctgcgtcatgcaacgcgctaaagtgcatttgggtgaatcggaacgcactcaggaagaacgagacctattagaacacattgtttctacatcaaaaaatgaacttaaggtaattgataacaagctagccatcatcctgaatgagtggctgcaaaagaatccaacaggaaaagccatcgtcttctgcgatcgtccggatctagcccaacatctggcaataaagctcgagttactgctggagtatccgcaggagcgttatcagtcgggtcaccccctgatgtacctgaaaaacggaagccccattcgggtcctaatttgtgataaaagcggcgaagatggtctgaatctccatggaggtctgcgactggccgttcattacggtttaccgcgctcttgcagtcgcattgaacagcgccttggtcgtctgaacaggtacagtgcaaacctgaaaggtgtaaaacccgttcagagtctgatcctgaaaaaccacgccgaccgtggagtacgcaacatatgggccagcattctgaaagacagcattggcgtatttaataacactatcgccagcctccagttcgtcctcgacaattatctggaaaatgcgtggcgaaatgtctacaaagaagggccggtgacccttgaacgtattgccagcgaattccctggcgaacagggtattttggccaatgaaacgaacaaaattaacatgcaggaaaaactgctggcgatggatgacgagattgccgaggcagcgatttttgcgcaacagatcagcgctgacgatcatcttgcggtagcgcaatgtaatacgctgaccaactggatcacgcgtgcactgcgttttcgcgctaccggtaccgcagaaaaaggcatcaagtttcagtttgaactctctgaccgcagtacagggacgctagttgattttaaaacctttctcaccacctgcatgcttagcttcgataaagaaggcggcaacccgccgtcaacgcatctgatgagtgctgaacgcattccatctatcgacgggacaaccgtttatccattgcggtacggacagccatttgtcgatacgatctggcaactattaaatttagacgccaggggcagttctatggcgatactgcgggtgatccccgggcaactaaaggaacccaattgcttcttccaatctacctggcttgtcactcatcaccagatggaggatacctactcacaacgccgcatagcagatgaactgtcccccccgcgtattgtgcaacattggctttcctctgaaggtaaaccagtgactaatccacaggttctggaacttctcaatggcgaatacgccaagcacgacacatcgcagaaattctatgcggatatgaatctgcgccctaacctctggctagaaattgaagagcttatttcaccgagctactggaaagagatggtggagcgagtctatgccagtgatcgggaacaacaacaaactaccctcggtgatcaggccggactccagttaatggccgtcaaagccgtggtggtgtgtagcaaaaatctactggaggaaatcgcctga

SEQ ID NO: 437567 - DNA, 2481 bp, Serratia marcescens
atggaagaagagtggtcacgcctgcagcaggcactaaacacctgctttagtcaaggggtcacatttaaggatggcatcgaaaatcagtttctgaacagactaattcagatcatcacagatgcctcggcaggacatggtgatatatttgccggctacgccgatgcattacgagcggctcatgcgagcggtattagcgcgccgttgctccccctgccgcctgaactgaccgacgttccagcacctgagtggggcatgacaaagtcgcctgcaacacaacaaattcaactagctgaagaggcagacctagcgctgaccagagccacctatctgcgtaaaatccgcaggaacttactgcgcccggagaccgatcctgcgctgaagcgcctgctacccgaggagccctggctgactcattatcagggattcggtcaacaggccgctattcggacgctactgacgtctgatgataactgtacgttgctggtgaacctgcccaccagttgcggtaaaagccttctcacccaactccaggtgctcagcgcaccgacaaacaccctcacgctggtgatcgtccctaccgtcgctctcgctattgagcaggctgacgacatgcaaaagctgcttcgtggtgccgaccaagatcatggtgggagttatgcctgggtcggaggacaagatcagcccgcacgtcaggcgattaaggaaagaatcaaagcgggaacacagcgtgtgctcttctgttccccggaagccgttcgctcttctctggttcctgtgctgtttgagctttccagactgaatatgattggcgcaatcgtcatcgacgaagcgcatttgatcgatcaatggggcgcggagttccgccctgactttcagctgattgcccctatgattcgctcactgaaagcccagggaaaatgccgttttcgtacactgctactttcggcgacgtacagcaaaagcactcggaacattctgatcgagcagttccatgatgaaaatagcgaactgattgaagcgtcagctaatttcctacgcccagagccggaatattttgtgcatcatgaggcaaatgaaaacacgcatcgtcagcgggtcgaacaactgctgatgaccttaccccgcccgctgattttgtattgcaccacacgcacagatgcggaaatgtggtctgtccgtctgcacgaactaggctactggcgaaccggcatattccacggacaaattgacacaaacaatcgcaagaaattgatttctaaatggaaaaatgaccaacttgatatcatggtcgccacctcagcctttggggtaggaatgaataaaaaggatattcgcagcatcatacatgctgccattccggaaagtatcgaccgttattaccaggactgcgggcgcgccgggcgtgacggtagatcctgccaagtgcaccttgtatggcataaggcgcaaatgaaaacggcaaaatcactggccgttgagacgctgattggcgtagaaaaaggctttgcccgctggaaagcgatgtttgatgatcgcaaagaaagtccgatcgctgactacatgatttcactaaacatcaagcccgttcatattgatcaccagggcgataaaaatgaagcttggaaccgtcggacattgctgttaatgcaaagggccaaactcatcaaactggtctttgatgatccgataattcctgacacccttcgagataatctggatgacgacaacacgcaactaagtgaatggttcgaaagctactacaaccacgttcatatccgtcactgtgacgatgcgcattattcagaagcgcactggaacacccatgtggagaagatccgtcagtccgagttgaataaccgccgggcagcctttacggtaatggaaatgtggttggaggatcctggcaaatcgctgtgtaaaattctgcagaaattctatgaatatcaaaaccatcctcccgagttaacctgtggaggttgtccggggtgtcgccacaaagggaaaggggcattttcccccactgtgggcacagatgtacaaattatacgttccgagccaaagaaaaaagcactcttcgtaggcaccgaaaagaaagtgtattacaacgaaaacatgaagttgcattcgttgttaacggaacttcgtgtaacgttgcggtcactgatcacctctggcgaatatgtgtttattcgtgcagacaggcaagtgttcctccagttagagaacaacctggactcgctttcgcacttctggagcgcacagaaaatgacaacgcctgcatcggatggaccagagatcgtgatcatccctaacaccgccgatgcgttcccgaatctacccgtgacgcgttttgagcgaattattattgcacctgagcatctcgccgatcctcagttcccacatcgtacatggtgcgaaagcgcaggtaatgcgctgtcgctggacacgtttatcaggcaacttcaacatgtcaataattaa

SEQ ID NO: 437568 - DNA, 876 bp, Serratia marcescens
atgtcaataattaataacgcaggtgctgggagcgtcctggtactccttcctctaattgaacgcattctacaaagcgcacaggaaccgttgtctcaggacactctactcgcccgttatcgccctgataacttgccagctaacgataacgcgtgggggaaattcacagagaacttgagtttctggtgcaaccagggactatggccgatgcgcgacggaataatgttaccgcttgaagaaaacgcacgtccactggcgcatcgcctgcttgcctgtgcgattgattcttgtcgcgaaaaaggcgttgccaatggcaatgaatgcgaaccgttatggcgggtactgagttgtctgttgagccttcagcagcattcgccaggaggtcaagaaccgctctccccgccaatcatcacaaaaaaaatacacaaatggctaccaggtgaaaaggtaaacgaaaacaccgcgaagttagtaagagactttggccgttttctaggttttctcgagctaatgccggacggaaattatgtcaccgaccccacccgggccattcaatgttttctgccaataatctttggcaacacacgcactcttcccgccaaaatcttcatggcaaacatggcggaggtcatgccgatgatggacggcgggcagttcagaaactccgttcatgatgtgatgcagcaggaaaaagactggatctctccggaaggtgacaatatctgcaccagcacatccattgcgctactacgacttgaaatcagtaagcgcattattctcaccaccggcagtgatgatgaagacgcctcctcactccagttacccgacggcaaaattcgacgggttagccaaatcacgctgagggaggatgcacaatga

SEQ ID NO: 437569 - DNA, 3198 bp, Serratia marcescens
atgagcatgatggagtactggccgtccagggaaaatatcgttcaatgcattcgcaatgaagcggaagaattagaggatcatgtgcttctggccgtgcatgaaccgatgctactgacccgacgcgacgtcaatgaaaatcatgaaatattgcgtgacgaagatctgttccagcagttactcattacggagcgtgccatccctttaattggccgttcgggtatgggaaaatcgcatctggtgcgatggttagactgcaggttcaacatgtacctgacggaaaacggccagcgtgcacaatgggaaattgtccgtattcccaaaaactccagtctgcgacaggtacttttacgcatcctgaaaaatctgacgggagaatttttcgacaacgcacgcacgcgcgttaatgaagtgacggaacaatatcctgcgaaagatctggcagacctgctgttgaccatgatggcccatcagttgcaggacatgcaaaaagcagtgatggaggaaggtaaaacactgcaggcacaaggtaaagacattccatcagaccgactcgcctatatggaaaccatcattgaagaggtagagaacggtatctgcgatctgatcacagacgctaacttcaaacagaatctgctgaagcctgagcactgcattttcaaactggccagtcggatgagtaatggtctggaggaaggagaagaacatcatgataaatatgaacttctaccggaagacctctattttgtttttgagcctgacgatttatccgcgcgtgcacgtcgctacctgaatcattctcaattgcacgagtcagaccaggtagaagcgcgtgctcgtgcggcgcgcgtgctcaatgaagccatgcatgcctcgctgaagtcactcttcaaacgcctgttcaccttcaatgggggttcttttcaggagcttttccaggaaatccgcaaggagtttctgcgactgaatcgtcgcttggtgattctggtggaagatatggcggcgatctccgccatcgaagatgtcctgatcgacagcctgatcgaagaagcggcgcctggcggcgtgcaaaccctttgtccggtccactcagtgattgcagtcaccgacaattatcccggctataaacgtcgccaggaaacgttaatcacgcgtgctggctacgagtggatcatcgagaacgtcgataaagacaataataaagatcgtatagtctcgctctgcggtcgatatctgaacgccgcacgctttggctctgaggagttaaaaaatcgtccagagcaaggtaaaccccagtggccacctgtctggcacagtgatgatatacccaatgcactggaagattttggttattctgccaataagaaattcccgctcttcccgtataaccgcagtgccattctggcacttgcgaataagcattgccgcgacagcagcggcgagttgatttttaacccgcgcacaatcattaaccgcatcctgttagatattctgcgtgattgcagaacagaagcggaaaaaacacagttcccgccaactcatctcgctggaattaatgccgttcccgagatcgaagacaagatttcacagatggttgtcaatcgggttggcagttcggtgacgcttgccgccatctggggatatggcattgattcctttgatgagctatgcggaaaactgccgggcagcgtagcgagtgcctttggcctcgatgaactttccgcgcaactgactggcaaaaaccctacgaccgaaccggtaacaaagaccgcacgcgaaatggcgggcaaaactggcagcacggcggcgggtaaaaagcttgacgatccggagttaaaaccaaaagaagaggcaaaatctaataccaaatccgaattgccgtttattagggcggtccgagcatgggtgaatgacaacgtcattctgccgcaggatgttgcccgtgatttgcgtgcggcactgaacgcctgttatgaaattcatgcgcagccagagttgttcggtatgtcttcgcggccaccgctgaaagaggggcgttttacattgatttcactgccaaaagcggcgtcggatccttcaagcattataacgaatttttactctgagcaagacctgaccgacccttcccgacgggttgatgtgtataacgccgcggtaaccttgttacgtatccagcattacaccggtttaaagcaaggctttaattatcccgaggcgcaggaagactacactcgttatcaaaacttcattcagtggtgggtacctcaggctacggaaagcgctattaatcacttccgggcgcgtaacttacgggatgcgctgaaaaagcatctgcaaaaagctctgctgcttggtctggtgaccgggaaagaagaaccggcggagatcgtcaataccctctgcctcacccagaaaggagtcggaagaaccgaagagaaaaatatcggtcgaacgctggcgacctcaccttccgagatctgtttcagagggattgaggcgaccctgcatccgcacgccagcgccagagtagccgaagccagggtgcaggcgctcctaggatgggatgatgccagaaaagcgtggcttgagcaggtagctatcactgagcaaggctcaggcttgggctccagtcgagcgattgatgctgatgtaatattttccgcacttaaaacagttttaaaacagccacttggagcagaaattgaacgtgcggcactctccgttaaacaggaacttgccagcacactaaataatgttcagctctttgccaacattaaagatagcgacgatttcctcagccaactgaacgactggcagacgtttattgagactgtgcgggccgaacactaccccaccggtggttctcagtacaagccatcttcgtggctgttgggtgaaattgaagccctcagaaccgacaccgaggagagtctggcgactttaatttcattactctccattgaaaaagagaaagatagcgcgagattgtggctggagatctgtcaacttgacggtgactacgtttcaagaatcagcagcgtacttgctcaatggcaactggtacaacctaagattgcgttcgcactccaacagatgaacgccaaaggggatatacagcaactgactcttgctctgagtagagtgaatgaccgtttgaaaacacttgcgagcgatatcatcgcctctggagtcgatcaatga

SEQ ID NO: 437570 - DNA, 849 bp, Serratia marcescens
atgaccaccttgcgccaacaactggctgaaatgcaaaaagaactcgatcttagcgttcaggctggtaaggcatcacaaatcatcgataaatgtaatctggtatacagcaaaactaacaccattgccgataagtttgcattgcttaaacagcaatatcccgcccagcaacaactcccgcagggcattgcagttacctggaatgacgagcagcagagcgagctgatcgccgccgcgaacagcgtcaaaagtctcaagttacagtggggacgctggctgaaaaaccagtcggtaaacaatcccggcgaggaagaaaaccttgcagatcagaaagagtcgccacagaactctctagatgagacgccagtcgcgtcagaggaacctaccgcttatgacattatccaaaatgattccttgacccattgtgtcagccaactcggtaccctacacaaggccctgagcaaagaactaaaagatgcctgggatgtatggctggaagagttacatcagcaggttcatgtcgatgacaagacactgaatttccaaaaaaatgcgaacaaatttgacgatatcgcctccgactatgagcgtcgacgtcaggatttcgaaaacttaacgcagtgccaaccagtaagcggtgaaaagattgaccaaatcaaagcactagccgaaaaactaaattccttgcgcggcatgatgaaaacagactggcctgacgtggtgcaagtatttttcaatagcattaatggcccgcagagtctccgcccgacgttaagtgccctgacgcccgaggtgcttgagtggttaggggatgaagagatgctggatgagttcgtgatcacaaggaaatag

SEQ ID NO: 437571 - DNA, 4437 bp, Serratia marcescens
atgtctacggctgatttgtcccacctgcaccaggcgctggacctgctcgaagagcgggaagcggaactgctggtctggggtgatacggatggcgcgtttacccatgccgatatcatctcactctttacccggcacctgccgtacgaagatgccgagtcgttactggcagagttgcagaatgctgccatgctcttcagcgtcccgaccagcaaaggggaggcgcactaccgcacgcgtatggcggaatcggtccacttgttccgacaccagcgtcaatggttccgtgatcaaccgcttcagcgagcccggacgttggtcgccgactaccgtttcgtccgtcgcccgcgcaactatccgaagcgggaacttccggcgcaaacagtactgaacaaatgggttgatgttccgtggatgaacgaaattaaacgccaagcgctttcccgactgatcggtgacttttctattgccggttttcaggaacgctcaaccgaacgtattttgcgtgcttggcactttcatagcaatcatgctcacgcgaaagaagccaccgggactattgtctgtgcaggtacggggagtggtaaaacgctggcgttctatctcccggcgctcacttcgctccttaatgatattcagcgcgacaacgcacagcgagtcaggacgctggcactgtatccacgcaaggaactgcttaaagatcagttcatggaaacctggggcaaatgtcgtgagctcgacagtcaggccctgacactggcaggacgcaagattcgtattggctcttttttcggtgacaccccattcagccatcaatacgcaacaaaagataaagacaaggatatgccctttgatttactccgttgcaccacgccaaaatgtccgggacaaatgcactggaaagcagaagatatcaaattgaaaagagagattcttcgttgtagccactgcgatcatagcgtagacagtgacgaagtgatcctgacccgcgtctcgttaatgaaaaacccacctgacatcctgtttaccaccaccgaaatgctcaatcagcacctcgggaacaaccaagcgaatcaactatttggcattggcatcggcgtaacaccgccgccggtagtcctgctggatgaagtacacacctatgtggggaatactggtgctcagacggcttatctgctgcgacgctggatgcaacttgcacgcagtcgcccccattttgtcggactgtcggcaacgctgagtgacgccgaacgattcttcgctgacctggtaggtgcgcataaaaaacatgtagctcttatcgaaccgaagatccacgaaatggaagatgaaggggctgaatatctactggcattacgcggcgatccggtttcacaaacagccctcctctcaacgactatccagaccagcatgctcgcccggcgtattctggatacgaaaaggaaaaaatcgcgcggtacatgggggcaaaaaaccttcgttttcaccgacgatctggatgtcaataaccgactttatcatcaattatgtgacgctgaaggttggcggtcgcgcggtcaatacttattcgttgcaaaaccgccgctggccgctcagcgtctggaaacactgcaaaacagccatgcgctgactcaggcaggacagaactggcgtatcgcgcaggatattggtcacccacttgacgaaaatgaccgggccatcgtcgcccgaacgtccagtcaggacgtcggggtcgatcctagagcggaaatagtgattgcaaccgcgtctctggaggtgggctttaacgatccctccgttggcatggttattcagcataaagcgccacgtaacgttgcctcctatttgcagcgtaaagggcgtgccggtcgttcaagaaccatgcgtccgtggatggtcgcagtcctgtccgaatttggccgggaccgtgtcgtttatcaacgctatgaagaactcattaatccagagataaaaggacagtcgttgccgatgggcaacattcatatccagaaaatgcaggcagcaatggcgacacttgactggttgagcatgaagatccctggaagtaatatctggtcattgctgaataaaccgcagacaaagccagagtctctcgaccatcttgatcgtatgctccacctgattaccgccgtgagcgaacaacattcatggcagcaggagttggagaagtatctgttctatgcgctgcgcatcactgacgagcaacttcagcgcgtactgtggtcgcctccccgttcgatcatgatggagttgctgccgacattaaaacgacaactcaccacccaatggtcgcggatgggccaacctgaggcagaccgttcgacgggacgttccccgcttccggcctttattccttcagcgctattcagcgaactcaatctgccagaactggagatccatctcgagcggaagttcaagaagcgtgaacatttgccctttattcagggtctgaaagagtttgcgccaggacgcatttctaaacgctatgccgtttattccgacaatgaagttgactggctgattccggacagctttgttccggtaatgaactgcgtttcaaatgttgattttgaaattgaacaagctttcggcgatacttggcagccagagtgtgtcatcgagtgtgaaggtcagcctcctattagggtcattcgtccgatgcaggtgcttacgcgcgcgctacaattcgagcaaaatctcaccgagaaaagcaactcgcaactgtgctggcataccctgtttaaccctgacgatcaggccgatccgctccccattcctgctggcccgtggatggacatcctccgctccatgacattctttacccaccagaatatgacacctctcgacatcacgcgttacgccacccacgcaacagcctcgttacgcaataaaacaaagcaacaggcgcatgtgaacttcaggtgggtcgaccatggcgagcctgtcggtgttggcgtacggcagtgggtggatggagtccggctcagatttacgcttccgcccactctgctgcaacgcctccggcatgacccggccattcagcgcgcactacgaactctctatttccagcatcgaatcaaacatgaaccacgtttcgaatatgacacgttcaccgctgactggatctacgagtgctacctggctgcggttacgcgggaattggtcacgcagtcgtctctggcagacgctatcgcggaattaaaaaccccggacggccaacgtagactggctgatatcgcggactctctcttccaggcagagaatatctttgaaaatagcgaggatggtgaaaacgacgccgaaagccaggaactgcagcaacatttgcgcagcctgtttaaagagaccgacatccttaacatggtagacaagcacagcgcgatcctgactcaggatctcagtgatgatctcgatttccagaactggttacagtgcctgctgacaacgacctttgccggagcggtcaaacaaaccagccacctgttactgccggatgtcgatgagcgcggtttgctggtggataccgaactcaacgacgaggtactggacgtctggctgaccgagtcagaacccggaggttgtggcatcattacccgtctggaagacgtttttcatcaggatccagtctccgtacttaatctgtttattcgtagttttgccgccagcgactacgagcagatcgactacgacctgttcgagatgctttcgcgacttccctcttccaacgaactccaaaaggccttgaactcaatacgtaatgccagcaaccattcgcagcgccgtgaggccaacgcccacctcagaactctgctgaaggcacaaggatttgcactcagtcacagttttatgtcagtgctgcacacgcggatcctacgcccgggcagccgggcgtcacatgatgcgcagatgctgacatatctcatcgcatggcgggacctggaaaacaaagccggatacgaaattgctctgaatatttttgcccatacccaggcgacgcaagaactgcctggcgccagtgtgactaaagtttttgagcgtttttgcaaaattcagggaatgctctggcagcgaggtaatgccatccgtcagtcggttctcagctattacaacccctttaagtccggtaacaacctgactgaacgactgctgctaagctcactgtttcaacaaacggcgtgtatcatcagcatcagtgagagcgactggttagcacagttacatcacgccattacccaacacggctttgcagaattgcatgtgccgcgagaggctcgccatcgtattgtcgaagtgatctctctgatacaggtgaccccgattgagtacttcggtttgcatctctacccccgcgagtccgccgtggactatcaggatggcaatctggtgttacgtattgaactggccgaagcgctgctgtaa

SEQ ID NO: 437572 - DNA, 531 bp, Serratia marcescens
atggaagaacaacgacaaattttcctgcatggcccactgggccagcgacatttgcgggaaattctgagcgcacagtttagtggcctaatcctctatccggaactgatctggctgatctcgccgtggatgagcgacttcgatgtaattgataatcgaggcggtcagtggagttttcttgatccttcttggggcgcccgaatgattagctttcaggaattactcgctaccgccgtcaacaatggctgtccgctacgcatcgtgacacgtgaagacacgcgcagcgtggtctttatcgagcgactactggcgcgcttatcacccgaccacgacatgcaatatatatatcacgagaacctgcacgccaaagggatgctgaccaaaaacttctttctgaaaggctccatgaattacacctggagcggcgcaaatctgaacgatgagcatctgctgttttcaaccaataatacggttatttcagatgccttgattgaatttagcggccagtacacctttggagacacccatgactga

SEQ ID NO: 437573 - DNA, 2166 bp, Serratia marcescens
atgactgatacttctcaatggctgtgtgacttctttggcgacggaaatttactgaagctggacaggctgctggaaaacgttgaaaacgcctaccctgcggacttaaaagccgtcttactgccgctctacgagagcgcaactgacgctcagtggccgattattctgccctggtgcgatgctcatcgctgggtattttttgccgcagcagaaacggaacgcaccacactggaactcagcaatgtgctgaatgctaggctgggctctgccgatgttattgccgacagaaaggtgactttagtcccggcgcaaggagcgacgtcgctatctgaaacggctctgctgagacactgcccggccggatttatacgaatcgaattacttcccacaaaacagaaggataaaccggcaaaagagcgggtcttcgctgcgctcaaagacgttataacactgtttcgtgacaggccatcaatagtacgtactgtcaagcgcccctttgggcggatcttgagtgattttattctggcaaatagccaaaaagacgaaaccacaagcgacgctttactacaggaactgcagaacaatggcgcgctttcgcggcgcaaccttatgctgctcgaactccagcaggcaggtaagttggacaggtgggacacgctgctgaaccacgattcgcttgtggatttggtgcggggacgcattcctacaactctaatgaggatgctgctgaaagcataccagcaagtctattttacgcccgacagccacgggtatccgcaggcctccccggcggctcttcgcccgcaatgtctggcactacatcctctgtttacgcagatgcctttcttatcccaggatgacgctgacatagttgcgtggaaaagttgggccaccggtgtgatgcttattggagaggtcgacctgctcaacgcgttgccagaacgtctgaaaaccgactggctgagtggattacacacttgggccagtcgaccgttcaacgttgtgagtccgccagatacgacagcgacggcgtcggtcccggatacattgcaacagcttgccgcatatctgcaagcctccctgacagcaacgcaagaagagattaccagctacgcgcaaacactccacacgctggatcagcagttgatggagcaggcgatggcggtgccgctgctgaaaacactcattgaggaaatccgccatctgagcaatccgcaaatcgtgggctgggatatctgtttctcccgactgtgtcagtcagaagtcgatagtaacaacctagtgcaactggtcgcgctagaaagtgaaaactggcccgctgattcgtttcatgaagcgacgatgctccagttactatcaagtcaggttccaccagacgcgttcccaatcctgcgtaacgtgatgcctgcctttattgaatggcttgaacgtcatcaactcagtctgagtagcacgacgtggctgaagtggttggatgttcttgcgatggagcaaagcgtcagtcaggcggacattaagctggccgcgatggcgacggaccggttcctacaaggctccgttagccaagaagcgtaccaacagtccggtgccatgctggaattgatcgtagaacgagccagttctttccgcaacctgtctgcgttgtgcgagttaatcgaactcttccttgatgctccggtgcaggatctggcgacactcacctcgctttggctcagagttcagtcttttgtaggcggaatatgggcacgactggatccgactactcgtactgttatgcgcaacttggcgacaggagtgctaggggaaggtgcagagagcgtatttccggctgagaaggatagcggtacggcagatgcagaagatgagttgccagacttatccggagccagagtagcgatttatagcctgacagaaggtgcagcgagacgcgcgaaacagatgctagaaacgctgttcgccgggatcagagtggagatctgccatgcgcacacggcaaccgataagctagttaatcaagcgaaacaggctgattacttcatattttcagcaggcagcgcaactcatcaggccttctacgcagtctcagcgcagcgcagagatttaatctatccgacaggtaaaggtgcggggtcaatgctgaacgcatttattacgcatgttcagaagtag

SEQ ID NO: 437574 - DNA, 219 bp, Serratia marcescens
gtggccgtatttggtcaattcacctatacctcagtagcgttaggccatcagttcacctctcctttcgcaataaaagcgcaggtcaaagacggaaaaatcgtttatttccagtttatggaagacacctatgcttccgcggcttcattccgcgtcagtggcgagtggacaattcagcatcataaaggggaagaaaacaaatttaccgtgggtgtaaaataa

SEQ ID NO: 437575 - DNA, 153 bp, Serratia marcescens
atgtatcaggtcaactttctgccttggcgacaacgccgcgatcggcgacgcggctatttctggttgggcgtgctgatgttacaggtaacggcactgctgctggcgctgttcctggtcgccggccaattgcgtcaccaacaggcgctgcggtag

SEQ ID NO: 437576 - DNA, 315 bp, Serratia marcescens
atgagctacttccggcaggagcacggcataacgctccaggattaccgggttgattatccgtggtgggagtggggtgaaaaccgctatctggataactggcatgcctgcggctttcgcgagttcgatggcccgccacgctcaggcgacatggcgataatgcaggtttcggcgccggtggccaaccacgccggcattctgctggcagatggcctgttgctgcaccatatgtacggcatgctcagccagcgggtgccttacggtggttattggaaagagcgaacggtgaaggtgttgcggcacaaagcgctgatgtga

SEQ ID NO: 437577 - DNA, 159 bp, Serratia marcescens
atgcaggtttcggcgccggtggccaaccacgccggcattctgctggcagatggcctgttgctgcaccatatgtacggcatgcttagccagcgggtgccttacggcggttattggaaggagcgaacggtgaaggtgttgcgccacaaagccctgatgtga

SEQ ID NO: 437578 - DNA, 723 bp, Serratia marcescens
atgatcgtttattacctgcaaggaaggactattttaataccagcaaaaaatcagcgaatcattttaaggaataaagaattgaagctctggcattttcttattgagcaatgccctaatatatcatcaagaaaagatctcggtatacatatatgggaagggcgttatgtgacagatttcgccatcaaccaaacgataaattcattaagaagaaagattggcgatacatcacgtgaaattatcgttaccgtccctaaaaaaggatatacgattaatgcagagagggtcattataaaagttgatgatgaaaccgagttaatacccaatacgggcactgacacagtggaacaggtgagcaattcggataagtattcagaacataaagaagagatatcgcctcaccgactcaagatgactctcgaaactcgggaaacagcatcagagaaagtgatatccaaacgcaagaaagtaaagagaatcatgctgatgatagccgtattgatatgcagctatattataggcgtttggttttcagtaaaaataaatgaagagaaaaaggaagaggccttataccttgatggatacaggattcactccattggcgatcgcatagagtattttcacggtgaaaaaaaaaccgtttgttatcgaatgaagagcaatataaatgacaataaaaaaagagaataccttacagaaagcacgacgtgtaaaaatgaaggttaa

SEQ ID NO: 437579 - DNA, 633 bp, Serratia marcescens
atgtctaattttcaaatttgcaactcggatggctcattggtaatagacagtgagtataaacatactcttgttgctgagcacaaggtgccaaaattttacccgcctgatttatggggtgataccatatttggtgatcttcataaattaagctgcttagctattaatgaactttcggttgggttgctgtattgggctcggctatccccaggcgcttggtgctggccaggcgctaaatacttcacagcgggaggtgttgagcttattgctacatcgcataatatcgcaatgcagtccggatatttagatgtattctctgctaaatctgagcttatatggaccgcaaaatcagctagtgatatgccacgagtacggagcatagttgaggtaactagtgcagtagacaacgggatacagtcagtaccatctagttttagcccgtggtttccaataaattgcatgccagctgacttatttgaaagcgaagtttctacacaaaatgcaggtattttagttcgatggacagggatggaacttcaactgacgtggctaaaatatcggactcagacatattcggagcgattttctggacgaggatatttgaagtttcctattgcaacgttcatgaatagataa

SEQ ID NO: 437580 - DNA, 750 bp, Serratia marcescens
atgaccaccaaaaccccgcttgtcgcactgtctgaatgcttgttgcagcaacaacccggctttgatgacgcacgtagccgcttttacaaaaagaaaacggagctgaatgatatccgtcaggtcattgcgaccatacacgataagaaacgcgcagcagaagagcaggctgtcatggacgacaaaggcttgcgtaagcggttccgtaaggcaaagggcgaactgacgccggagatgcaagacctgcatacccaacgcatcatcaaacgtgaactggtgaatgaatacgacgggctacaggccgaactggaagatgataaggaacaggcgatggttgcggtctgcaacgccgccagtgcttatgaccagaagcaccgcatgcttttgcgtatctactccgaaatgacgctggaggttgcactggatgaagtctctatcttgatccgcgcggttgctttacgactccatgcccagtcgcgtctcggccacgatgaacagcagttccataacaacaatctgtgcgcgcaagatccacacggtgtcgtgatgcaggaagtcatgcaggcactggttgaacgtgccgctaatttccacctgagcacagagggcgaccctattcttgaggcgattggcttgtacggcccggatttcagtggccttgaccagaggctaattaacagcccggccgcacgaatcaaactcggcaaggaaatcgctgcccgcaaacaagccaaagcggaagaggaggaataa

SEQ ID NO: 437581 - DNA, 492 bp, Serratia marcescens
atgaagaccgcgctcagtaagcgcttttggcgttatagctacgctctgttgagtctcgtggcggtgttaggctgtggcatttccgcgtattttctgtttctcaaaccggggatgcccgagtgtcgggcggtgctgtacatgagcgatcagatatccgataagttgatacagcgggttttgttgctcagcgtagtgccggatgggccccgaaaggcgactttgttagtgaatggcagtctgtttgatggtgacaggcgttatgtcattgatcggattttagtggtcgactatcagaaacaagggagtaactacaggctgcatttgaaagagacaataagaaagcctttggataatttggagaaagaagactttaatcgacgattgccgatgtccgcaccggtattccattggcggatagagcgagttgatccgcggcactatctttttactggtaacaatgccccattttttgtttgtgccactgcagcttga

SEQ ID NO: 437582 - DNA, 2019 bp, Serratia marcescens
atggttatgaaaaaatttaaaatcactttagataagaaagatcactttagagccttactaagtgacactcttccattcgatacacccattatattttccaacgacggactttacgtaaacacgattaaaacagaaaaaaactcagatattatggagtacggtccaattcaagcattttacgctaaaattataaacccaatgagggatattgacaacgcaaacaagctatctagaaaaaagaaacaaagctcgccgtacaaatataaaatagtaaaagatagttataactttagagtattatcattaatccaccctcgctcacagataaattattgtgagttttataaagaatactcacctataatatttcataacgtatctaaaagtaaattttctattagaaagcctactaaagtttctagttcatttttcataaaaagtagcgatattagtggtaaatataaaaaatccaatgttaatctaaaagaatcagagctcactcagaaatactctgcttcgtacttttcatatgatggatacaatagactatacaagtttttcaatagcataaaattctatgaatatgagaaaaagtactcaacaatgtggtccctagacgtctcacattgttttgatagtatatatacgcactctatttcctgggccattaaagaaaaggaatatatcaggtgtcatttagaatatccaagccagtttgttcaggaactagatacactaatgcaacgaagtaataataacgaaacaaatggaatacctattggctctgagttcagtcgagttttttctgagttaatatttcaaagaatagacttagatatagaaaaagaccttaaagaaagatttaattgggagtatggcattgattacatcattctacggtatgttgatgactacattttattcacgcatcatgaagatcaagccttagaaataacaaaaactgttagtctaaacttgaacaactataatttacaccttaacaatcagaagctagttaagttacaaagacctttttgtacaaagaaaaccagcatgatcacaagagtaaacgaactactcatgtctttagaagacaagattatttcagaggcaaatgagatcattaaaataaagaacataaaattcaaacacatactttacaaagaatttataaataagacaaaatctatttgcttagagaatagctcaaattatggtgaaatatcctcatatattatatcatcactttgctatctcgctgaaaaaataactaatcagtatactttagaagaaattaaaaaatacgatgagatggctacaactataaggttaaaagatgccttgtttattattagcgacctaataatattttattatagcgttcatccaaatatttcatcatcctacaaaacagcaaaaaccataatattattagatgagtatcttgggaagataaatcaagactatcaaaatatattcagaacaaaagtcacatactcagcagagaatctatacattccactgggaaaagtcgctcccacaaaaaaagacaatgttgcaattgaaaaattaaactttatattatctacgactttttttggcgataattatttgattggaatcaaggcatttcaagatatattaaatggcgaggaaattgactactttactataatttcttgccttttttattttagaaaaagacattcttatcaaaaaataaagatcgagctagagaaaataattaagaagaaagtaactaaaaaggtagatctgctacagaactctcaacaagcgcacctttttttagacgtaatgtcatgtccatttgttactgaaaaaacaaggcgtgaaatctactgtgattttttgaagagaaattatccgacaatgactagaagccatgtagaaatacaaaatgaccttcagattttgttgtcaacctattggttcgtcaattggtatagtcacgatctattaactatgattgaaagaaaagagttgaaagtgacttattga

SEQ ID NO: 437583 - DNA, 168 bp, Serratia marcescens
atgtattttgatccttataataatcaagatatggttaatgccctcgaaaatatcattcagaatagtgaaatgcgagaggagttaaaaaacaaaggatataaaaacattctcaattactcttgggtcgagtctgccaggaagttagacggcatcatcaataaattataa

SEQ ID NO: 437584 - DNA, 159 bp, Serratia marcescens
atgcaggtttcggcgccggtggccaaccacgccggcattctgctggcagatggcctgttgctgcaccatatgtacggcatgcttagccagtgggtgccttacggtgggtattggaaagagcgaacggtgaaggtgttgcggcacaacgcgctgatgtga

SEQ ID NO: 437585 - DNA, 1284 bp, Serratia marcescens
atgtcaacctatccaactggagtagagagccacggaggctctctgcgtttgtggttcatctatagagggaggcgggtaagagaaaacctcggcgtccctgacacagcaaagaacagaaagctagccggggagcttcgctcctcagtctgctatgcaataaagactggctcctttaactatgccgcacagttcccgcagtcaaacaacctcgctaaatttggtttcgtcgctcctggcataactctaggcgaggttgccaagcggtggctggagctgaagcgcatggagatcagcttaaatgctatcaatcgctatacctcaaatattaaggttgccactgagatattaggggcagaacggcttatttcggcaataacacacgaggacattttaacgacaaggaaggaattgctcactggctatcaactctgcggaaaataccagaaaacacgatgtgtgaagaagggacggacggttaggacggtaaacgtttatatggcatgtctttccggtctcttcgagtttgcagccagaaacggttatgttgaaaagtcaccatttgctggggtagaaccgctgcgcaaaagcaagtctgagccagatccacttacacgcgatgagtaccgtaggctgctcgaggctgttccatcagagcagataagaaatttgtgggtgctcgccgttaatacagggatgaggcatggtgagattagcgcgcttgcatgggaggatatcgacacaaaaaattggacaatcacgataagccggaacatcgcgatgaaaggccatttcactccgccaaaaacagacagcagcattcggacaataaaccttactgatgcagcgatacaggcactaaaaagtcaaatggaatacaccagacttgggaagcagcacaaggttagtgttcatctgcgcgagtttggcagaacccgtattgatgaatgcacttttgtgtttgttcccagactgacggcgaggaatggaaaaggaggggattggtatgggccaggctcttttgggtctacctggaacttcattttaaagagagcggggatacgacatcgcaaggcgtatgagtcgagacacacatacgcatgctgggcattgagcgccggagtgaatccaaacttcatcgcggcgcaaatgggccactcgtcagcacagatgctttacacagtgtatggcaagtggatgagcgacaataaccaggatcagctgagcattttaaacgcaaacttcaagagcaatgccccacagatgccccaagcatcttttaagtga

SEQ ID NO: 437586 - DNA, 219 bp, Serratia marcescens
atgataacgatacccgacgataacgaaatcatctcgcgcctcagcatcgccggttctacgccggattctgtcgcaaacctcctacgctgtgccggctacaacggcatgacaggcaaagccatccgccagcgcttgatgaagctggaaaaagaaaaagccgttgagaaagtccgccgccctggcatccgatccgcgtgctgggcgccaatcaccaaataa

SEQ ID NO: 437587 - DNA, 825 bp, Serratia marcescens
atgacacagacactaacgacagagcgccagcagtttgaagagtggcttaaattccacagtgacgaagaagagtgcacaaatcttctacagcgaaatagtgctgggacaaattacctccatcctcatacagatttggcatggattgcatggcaggcatcgcgcgaactcctggctaaccgggaggcgcagccggtgtctagcgaatgcgatcagggcgtctacgcaaacggcactagcgcatgccttgtggacataccgaaggaaacggccgaggtgatttgccggggaatttcccaggcgactggatgcaaggttgactggcattacatcggcggccgagttcacatcaaggctctcgccccgccagcgccagcagtgaacatggcgccagattttgaggcgtggtttaacagtccagaggcaggtcttcgcgtggttaacttccacatccagcacgaactacagctgaaggcatgggacgcctgccgcgccgcaatgctggctcaacctgtaagtagcggttacaagttgaactctccggaaattccggatgtttggatagcgtgcagcgagcagatgccggaagttggcgagcttgactggagaacagcgttgccggttttggttaaatgcgaaattggcgtaattccagcgtactacggctttgcctatcatgaaggcgagcagtgctttggcttcatggagtcaatcaagtttggtgacgcctctggatctggccctgagcagcatgaaaataggctgatgatgcacgttacccactggatgccattacctgcagcaccggagggtgggaatggtgcataa

SEQ ID NO: 437588 - DNA, 198 bp, Serratia marcescens
atgcgtgaactcatcgcggtagctgtatacgtattcgggttcttcgtggctttttacatcactgcacgcaacggagacgatttctttcaagttatggcgcaatcatttctatggccgattctcctatgcatactgccttttctatggatgtttcttgggatctaccggctgtacgagattattaagggggatgcatga

SEQ ID NO: 437589 - DNA, 561 bp, Serratia marcescens
atggacaataagctgagcgaactgaaagcggccgcaatggccgcaactcctggtcgaattggtgaccgcatcgatggctctgggagtatcaaatatgaatgcactggctacgatggttcgttggttctgcgtaccgatcacaaagatatggagtatggattcgtcggtgataatgctgatgccgatgagctgtttttcaggctgtgcgtgccggatgtagttctcgaactgctggcggaaaacgagcgcgttgcccgtgaacttgtcgctaggaatggggagatcgaagggctgaaaaagagagctgccgaactggatacccacaacgagtgtctgctcaagaagaatgcagacttgactcagcagaatatcaagctgggtgagcggctggctacgccggtgcggttgctgggtgagatgttacttcacgattgggagcaccgcgttgaacggcaggccgctttcgagcacaggaaaatagcgtgggacgcccgcctggcagaagacaagaaagcaatcctggctgctggcttcaccttcaccgtagagggggatgagtag

SEQ ID NO: 437590 - DNA, 222 bp, Serratia marcescens
atgaaagcatccgaaatagatgatcgtctctacagcgaggctgttgaatttgctcgcctgcacgcatcgatcggcgtcgtggctattcagcgacatttccgcatcggcttcaaccgcgcagcgtggctaatcgaacgcatgcaggaagaaggcgtcgtaaccgctcctggctggaatggcgttcgtacagtgattcatggaggtagtgatgccagcaaatga

SEQ ID NO: 437591 - DNA, 255 bp, Serratia marcescens
atggccgacatttcgctcgttaagataattgaggacttgaacgaaagggtttccaaactcagctcggaaaacctggcattccagcaggcgcttacagccattgttgctgctatgcctgtagagcaagcctctttagcgaaaagacatcttgaagaggttattgagtatgttgagaagggcggttcagctggcgctcttgaagcgctagaagctcagaaaccgatctatcaaatgattttccttcacgcgaaatag

SEQ ID NO: 437592 - DNA, 822 bp, Serratia marcescens
atggatgaattcggcattgatgctgagtgttatgtattgaatgacgaagataaaacagtggtcgtttctaaagccggactggcaaggctgcttagcctaggcggtcatggagcccatgttgacaggctgttaaatgctcaatacatggctgattacgtcgatccgattttattggaaaaaatgaaaaaacctcttatttttcaatggaagcccggcggatcaggattggggtttacgggggctcaggggtacgacattacggcaattggtgacattgcaaatgcactaataaaagccaatatggccggagcccttccaaaatctagagaagacgccgccaagcaagctcaggcattagcaaatgcatcgatgaaagccggccttaaggggcttgcatatgcaattgccggctatcgaccagaagtacaagaggttatcgacgcattcaaagcttttgtgcgcgaagaggccaggcagtatgagaaggagtttcctgacgagctatatgaagaatggtacagactgtatgggttgaataggccagaaaaagggcgaccgataagatttggtcagctaactaacatgcagatttacatccccctagccaagagcaagggcaagatattagagcagataagggctagtcgtgacgaaaacggaaaacaatcggataaactacacctgttcctatctgaaataggggttaaagccctgcgccagcatattggtaaattgttaggcgttgccgcgatgagcgataacaaggaagaatacgaagccggtatagaaaaagtgtttggaaaaatgaagtcagaactttag

SEQ ID NO: 437593 - DNA, 171 bp, Serratia marcescens
atggacgactggcggaaatacctgagctacgttcgcgacaactgtcgctggatgttcgaagagcgtcagaaccagcagcgcgggactgtttggcacaagaagggatttgacttcctgctgaacgacaatgtttatctcaaagttcgtgagggcgatcatgacgaccgctga

SEQ ID NO: 437594 - DNA, 1407 bp, Serratia marcescens
atgacgaccgctgattaccgtctgccaccgagcagcatcgagtcagagcaatcagtgcttggctcaatcctactagacgcgcagagcgaccgagttcagcgcgttttttctttcctggcacctgaaatgttctacagcccggcgcactcagtgatttaccgcaccgcacgtgagatgaactccaagagcagcgttatcgacctgatcaccgttgctgaacgcatggagtccactggagagattgaccgagttggcggattcgcctatctggccgaactatccaagaacacgccaagcgccgcgaacattctggcatacgccaatcgcgtgaaggattgcgctatggagcgtttcgctattgagcaggccaacaagatgctcgaggtgttctatcagccatcagcgatgaccactgccgagaaactggaacacatgcaagcgctggcgatgcacaccgccgacaaatctcgatctggttctgtgcgtggcgcagtgccatttgcggaggctttcgaatcctgggtgaacattgtcgaaaagcgcctgagtagtgatccgtcagcagttggcatctcaacaggcattccatcgctggatgaattgctcgctccgaaaggcttggtgaatggttcgctgttcgttgtgggcgcgcggccaaagatgggtaagaccacgctctacatgaaaatggccttgcattgcgcactggaagagaacaaaccggcgatcgcctttagccttgaaatgccacaggagcagctcgtcgagcgttcgctttcccaggcatctggagttagctcgtcaaacttctacctcgacggatacgacgacacacgattcgcaatggcgtcagcaaaggggctgcaaatcgctcagagcggcaatctctacatcgatgacaccccagggctatctctggctcatatcgtcgcagagagccgcaggattaagcgagagcgcggaagcgtagggatgattctcgttgactacctgacgctgatgaaagccgagaaggcagagcgtaacgatctggcatacggcatgatcaccaaagggctaaagaacctagccaaagagctgaactgcgttgtcgtcctgcttacccagcttaaccgcgaccttgaaaagcgaaccaacaagcggccgcttccaagtgattcccgcgataccgggcaaatcgagcaggactgcgattactggctgggaatttatcgagagggagcttacgacgagaacgccaatcagcaagataccgaattgcttttgcgcctcaaccggcacgggcaaagcggagttgttttcgtcgagcagcgccatggtgcgatttacgactgcgatcagcttcaggcaaaaatgcgtgcatctgaagctgaatcccggccatcaaaacagaagggcggtttctga

SEQ ID NO: 437595 - DNA, 315 bp, Serratia marcescens
atggataagctacgcgaagagatccggaagcagtttgaaatcgagtttaagcggcagtattgcaatgtgccggcatcaataacaaaacttatgctggaattgcacaatcatggaacagaagaaaatccagattgggggtaccactcgattgatgtgcaaaatgcttgggaatggtggcaggccagccgagaaagcatcgtggttgagcttccaaggccatcatgtgtttatgccgaccacagctatccggcgtattcacaaaagcaggttgaggatttactcagctctatcggcctatcaatcaaaggggagtag

SEQ ID NO: 437596 - DNA, 255 bp, Serratia marcescens
atggacgacattttgaaattctcaaacgcgattttctctctcatcggctgggcttacatcatgtccaaggctggcggctgggttggtgagacattcgctaaacaatggtgcaagcggcgcaaggataccaagcagcagaaggcagttgatgctctgtatgatgcctatcagcttggagacatcgagccagattgcacgattaaactgacaactaaaagcgggctgacaatcatgatgtatcgcacggagaaatga

SEQ ID NO: 437597 - DNA, 444 bp, Serratia marcescens
atgcaaaagcaggtcttctacttacgaagccaacagatacgccagaacctgaaaaacttcatcgacagccttccactaaatccagataaacccctcgcagtaatcatccaagagccaaccagaagcctagagcaaaattcacgtttatgggcaaccttgcgcgacatcagcgagcaggtagtttggtatgggcgaaagatgagctctgagagctggaagtgtgttttcaccgctgcgctgaagaagcaagaaacggttcctggcattgacggtggcttcgtcgttctggggcaatcaacaagcaagatgacagtcggcgagatgcgcgacctcatcgagctgataaatgcgtttggtgctgagcacggcgtcaagttcagcgatgaatcccggctcgctatcgagtgggctaatcgatatggcgacaagaaacaggtggcatga

SEQ ID NO: 437598 - DNA, 549 bp, Serratia marcescens
atgagcgactatacgggaagtaatacaccggttgagatacgcgatctatggcggaccccactagagctgtatgcggcgctggatgctgagttcaattttgtgggtgatgtggctgcaagccacctaaatcatcttcatccggcgttcctgaccaaggaagatgacgcattgtcagcagactggtttgattctttcggagctggctatctgtggtgcaatccaccatatagcgacatcactccatgggttaacaaggccattgaagccgcattcaatggtaatggcgtggtcatgctggtgccagccgatccctctgtgggctggttcaaacttgccagagagcacgcaacagaaatcaggttcattactggcggccgcatatcgtttgtaagggcagatacaggagtaccggtaaacggaaataacaaaggttcgatgttaatcatcttcaaccacatgcgccgcggtgccggactgacaagctttgtagatcgggatgggcttatgaactatggatcagcatcgataaagttggggatggcatcatga

SEQ ID NO: 437599 - DNA, 384 bp, Serratia marcescens
atgaatacctcattcggcttccgcacgatagcgatcggcctgttgctggtggcgctgattgttgtcagcaggctggcattttacttccacagcaacgcagtaaaggctggcgagcaggttaagcagcaggaaaagacgctggtgcagcagcagtcactgataacagcattacgcgagaacgccgcccagaatagctcgctaatggcagaacagcaacggagagagcagcagctgcgccagcagggcgaaaactaccagaggaaatatcaggatgccattaaaaatgacgagtgcgcccgccgcactgctcctggtgctgttcttggcctcctgcgcggaacggataccaccgccgccagagccgctcgtgctgtttccccctga

SEQ ID NO: 437600 - DNA, 492 bp, Serratia marcescens
atggctaaccatattctatctgaatatttttcatatgacccgacatcaccgtcatttcttagatggaaaataaatattggtcgaagaataaaagcaggagaccaagtagggtccattagttcttatggttattaccgaacgaagcttaacgggaaagaaatagccgctcatcgcgttgtttggcaactccacaatggagagataccagagggaatgcagattgatcacattgacggaactagagtcaataatgatattagcaacctaagacttgctagcgtctcagaaaaccttcaaaaccaaaagctcagcaccaagaatgcgaccggcattaagggcttgtcgtggtgtgcaaggtatcaatactggcgcgggagtattcagaagcacgggaagaggattgagcggtgctcaaaggataaagccgttatagaaaactggctgatctccatgcggaaaaatctacatggagagtttgctagacataaataa

SEQ ID NO: 437601 - DNA, 552 bp, Serratia marcescens
atgctgacaagcgcgagaaattctctagatatctcatttcttcatgaatgctttgattgcgatttttcttcagggatactcacatggaaaaagaggccggttagccaccataagaacgaaaactgctttaagcgatggaatgcaaggtttgaagggaagaaggctggatgggttggagtcaatggctattcttacatcacaatagataataagaagtatctagcgcaccgcatcatctgggctttgaagtatggagcttggccggaggaagaaatagaccacatcgatgggtgtccggggaacaatgccgcagccaacctaagaagcgccactggggcggaaaataaacggaataaatctttgcagcgcaataataaaagtggctgccatggggttatctggcataagcgaatgggaaaatggcatgcaagtattcagtttaatggagagtattttaatctcggttttttctcagaccttggcgccgcagtcagggtaagaaaagatgcagagaaaaggtttaattaccaccctaatcacggtacgcggtag

SEQ ID NO: 437602 - DNA, 174 bp, Serratia marcescens
atgcaagatgtactttataccggacgcaagaacgatagcttccagcttcgactacctgtacgtatgaaagaagaaatccgccgtatggcagagatggatggtatctctattaactctgcgattgtgcagcgcttggcgcggtgcttgcgtgaggaacgggcgaatggtcagtaa

SEQ ID NO: 437603 - DNA, 2691 bp, Serratia marcescens
atgtcagagcaagatggtggaagcctggtctatcaggttgatattgaaacggccaaaatgatcactggcagtcgcaaggcttctattgttctcgaggaaatgcagcgccaaacagggaaagcctcgaagtctgtcgatgccttatcatcctctgcggataaggctggcaattcaatggggggcttgaaaaccgtcctgactggggtggcaagtgcaatctcggtttctttaataattgactatggcaaagcttttttaaccgtagccgataacatcactcaactgcaggcgcgtatagcgcgtttaacaagcgacacatcaacagccaaaagcacctttatggggctagcggctatagcttcaaacacaggtgccagcctgaaggatacagctaaactctgggaaactatgactgcgtctctaaaagagactggcgccacaaactcacagatattggcacttaccgacacattgcagaaaattggccgagttggcggcagttcttccgaagagatggcaaatgctttgaggcaatttggtcagtctattgcttccggtacggtgagggcggaagagtttaactctattgttgagcagatgccggagcttgctcgtcaaattgcggccggtcttggcatgactggtggtcagctaaggcaagcgatgctggaaggcaaattaagtgctgaagatgctatcaacgcgataatgaagcaatccgactctctgaatgaagagtttaaaaagctgccgaggacgatggatcaggcaagcaataccctgacgatttcattgcagatgctgataggcaaaatgaatgaaaccgtaggggcgagccaaacaatggtcacgatcattgactccataagttctgcgattgataggctcagcggcaagacagagacggcggctcaacgtatatcagacttaacttctactgcagagatgtatgagcgtagagcaagaacgtggtcatggctgggggtggatggttggtctgaacagaacaaggcgctggctgtattaagtcatagggctgctactttggttggtgatcttgattcagttgctcaggcgtcggcgagggctgcagctggtcaaataaagttcaataataccggatctaataataaacaagatgcgctaattaagaagtcggaaagaagtttagccctatccaagcttgaaggggaagccagagcaaggctggccgctcaatatgcggctgaggatgccgggtttaagaaagatgatccgcgcacaaagcgcatggaagatgaagcagcggcaacataccgaaacatagaggcccagaaaaaacttaagtctgaaacaaaatctagcgcgacagcagctgaaagtgtggctcagaaggtagagaatctaaggaagcagtctgaactagctgcagactcagcaagtgaatggagccgcgagcaagcgatcctcaatgcccaactatcactggggaaaggagctacacaggcccagatagctgaggctggtgcttacgctgccaaaaagtgggacacagccaacgctatcaaggcgcaggcggccgcagagaagctcctgccagaagccaaagagaatgccagctacgcgcaggacgtgaaggacttaaacacggcgttagcggccaagaagatcagccaggagcagtacaacaccacggctgagcaactggagcaacagcatcaggttaacttggcaaaaatccgggctgaagccgtggtaagccctcaacagcaagccgctggcatggttgacccagtgcagcagcttgccaacgagaatgcgcagaagctggcgttgattcagcagttcgagactgagaaaggggtaatcacccaacgcggtcttgagttgatgagggcggcgaatactcagtacgaacaacagcggatcgcggcacaatgggagatattccgcaatcagaacgcagggaatgaggcactagctgcgtcactggatgcactcggcggcaacgcatccaattccttcactggcattatcaccggcagcatgagtgcggaagaggcagcgcgttcgcttggttcaaccgtccttaatagtctggtgaatgccttcgtgcagatgggggttgattgggttaaatcggcagttatgggctcaacagcgcaaacatcagctattgctgccaccacggccgcgcaagttgcgggaacggctacgacgacagcagcgagcaccgctgctgctgctgcaaccacaacagcctggacgccggcggctatcgttgcctctatcggttcattcggtggtgccgcagcgattggtatcggcgcagttgttgcggctatggcgttgtctagcagcctggcagggaagcgtaagaatggcggccctgtaaggtcggggagcatgtaccaagttggagagggcggtctacctgaaatttaccaagccagcacaggcaagcagtacatgatccccggtgacaacggcaaggtgatcagcaacaagcagatgactgccggcggcagtgcggcgccaaccatcatcatcgaaaactactcatctggtgctggggtaatggatacccaggctagcaggggggcggatggtggcgatgtagtgcgcatcgtgctggcggatctgcagcagggtgggcaaatcagtcagggaatatcccggtatcaccaggcgcctcgaaaagccactgaatag

SEQ ID NO: 437604 - DNA, 2301 bp, Serratia marcescens
atggctaccacaccaactacaattccaatccctagtgaatcggtacaagattttaaattcaacgccggaaaagtagaccagatagtaaattcaaatgctaacacttatgttgataggtttggaattgaaagatatacatgggcaggggcattagcaaatattgctccgctcggccatccttggactgagtctgaagcaaatgcagctattgcatctggtgagattccacttgatgcattttattttgtatggtctgacaatgtaaatagtatcgctgatgtttggcagaatgttggaggagtgccaacaaaaacagggaaaagttatccaagcaccgaatttgttaaagaggttaatgatgttgccgagagtgcaatgtcaggtgttgatgaattcaatcttttacgaatgtattacacgctaaaaggtagtgaaaaattcccattttatgtaggtgacggtactgatggtgctttagctatagacaaagatcgtgggctatggcttgccggtctgcagtcggcaattcaggattatgttaatcagttaattcctcgagtggtcggtgcatattacaaaggactatcgcatgtaataacagacatcactgggaaaaaagcattgcagtatttcgatgctgataatgctgcgtggtttgccggtttaagtgagtctctacaggcgcacgtcagccagttaattccgcgcggacaggccgttaagtatcgtgatactgcacatgtgtttacagatgagactggcaaggcaggttttgggagaatcaacaagaagggggaatggtttattcctggggttgatggccccttgcaggatgcgataggcaaaacaagtgcaactattgagatggtaaatggtaaaccggctttgtactggaaaggtacaaaggtatgggatgattactatgctactagtgccaggccaatatcagaaagcgcagcactattcacgtatgaaaatgaagacggcaccaatggttcaggtttgctgttcatcccaagcattcgtgaaattccagtaactgctgcatttattctttgctacatctgtttagggcaaagcctcggtgcagcatttgacaagccaggccaaaatattcgcgttgtcggcgctgacccattgctacgcggtcgctgtttgtctccgtcaggccgcgctgacgggaacagcgcgccagttaaccaggccgatttagaccgtatcacggacatgggctacaacattgaccggcaaggacacaacatcccgctcgcaaacggcctgatgtatgaaatgcgtgatgcaggcatgaatctgccgacgattattaatgcgccatgtaatgctggcggccagccgctatcaggtatttctaagggaacgttcgcctacacgaagagcctggcaatgttgtcacgcattactgagctgtcactgtcaatcggtaagcctctccgcaacgacttcatcttgtttgagcacggggagaccgataacgacaacggaaattgcccaaccccgggtagttatctgtcattgcttggcccgtattttaatgactgtatcacggacttcaacggcatcaccggcgccacaaccggcccgattatcgttattgaccaggttggtagccgcatcaataccaaagccaacgatgttgatgatgagggtaacccgattggcgatccgatagttgttcagccgtattctgtcaccgcaacagatcagctcacatatgtgcgtcagcatagcaactctattatgtgcggcacgaaatactggctcaactggctgtataacgacggatcactgtctcacctgaaccaatacggcaaagtgcttcagggcgaagctattgaaaaggcggtttattggcacctgtatgacccgactaagaagggaacatggaagggaacacgggtgcagagtatcgctgtcaacggaaacgtgattgacgttaagtattatgtgccgttcccgcccttggtcatcgacaccgaatttttgggcgattgcgctggaaaagggtactccctggaagcagggagtgcgtcggtagtatcggtggcggttgtcggcggtgatactgtccgtctgacactcgaccaggcgccagcgaccacagaccacttgctaatcgggttcacaaacaccacaccggcaaataacggaaatatttacccgctggtgtgcgtccatgattcatcgccgtgggtatcacgttacatcacgaaaaacagtaatccggttccgctctataactgggcaaccctcgatcgcattccattaactggggagttttaa

SEQ ID NO: 437605 - DNA, 240 bp, Serratia marcescens
atgggcagcatcaccctagccggccggcagatcttcattctcaacgaaaacgacagatacccagagccacagcaaaacagcccaccgatgttcgcgatacgcgaagacgaggaaggccagcactggctttatgtgtggcacaagagccgctggccgctcgtatcagaaacgccattcgaaacagagggcaaagccgttgatgcagcactcgcattcgactttgccacgctttacaaatag

SEQ ID NO: 437606 - DNA, 192 bp, Serratia marcescens
atgacgattgaaaacccgacaatccggcccgatcacggcggggcgcctgccaaggcgccttcgctcccgttgctgttttccgcgttgctgctggtgatgctactggcggcgctggatcaaaccattgtctccaccgcgctgccgaccatcgtcggcgagtttggtgggcttgagaaactgtcctggtggtga

SEQ ID NO: 437607 - DNA, 945 bp, Serratia marcescens
atgaaaggattgatgttagttaaggctgcacgagcactcgtaaaaactaatggccgctatagtgaagctcagggcattgtgaatgatgagaaggttgctgcttatctgggaaaagcgttggtatctggtgctacctcccatggtaatccattggttacaaccgatatcgttgcgcgtgagtttgcagaatacgcttttgctcagtctgttcccggcaagttaatggccagggcgctgcagctaccatttaagacaaaggttggctctatcagcggtatcggtgcagggtgggttaaagaggctacggcaatccctgtgaggaaggggaaggtagatccatctgaagagttaaagccttttaaaattgcatcactggtcgttgttactgatgagttgcttcggctcgcgacgaacggcactgacttggcgattcgtaacatgatggtcagcgcagccgtcagggaaattgaccgtaaatttctctctaccgatgctcaagttgaggaattatctcccgccggcgctctccttggagcaccaaacgctgatgactacaagactctgattgagacgcacgttaacaacggaaacagtttggctggatcttccctggtaatgcccattacatctgttttgagtattaccaatgatcaaatgcgtcaatttgatttgctgggtatttccatcttgccaagccagtacgcaaccgggctatcactcattgacccagcgaatatgatgatcaacgtagagggagcaagccttttgacggctaaagaaggatcggtagaaatgactgacgagcctttaaataacacgtccgggcctgtaacttccgagctggtaagcctctatcagacgaactcagccgctatcatgactacgattttctgtggttgggtaaacattggcaaaccagtaaccactctatccactggttcgtaa

SEQ ID NO: 437608 - DNA, 228 bp, Serratia marcescens
atggttcacaacgaagatgaaagccatcttgtcgcgatgctcatccaaatcatgccgaaaaatctctcaataaagatgaaagaggaagcagcaaaaatgcttgctgagagcatgcaaaaagaggcggaaaggcaatctgagctgaccggcttgaagaaggagttgatcatggatgctgcgcttatggttatgaccaagcaactccagaggcaagagactctacattaa

SEQ ID NO: 437609 - DNA, 162 bp, Serratia marcescens
atggcgttaactgaccgggatatatcgatcattaaggcgatcactgaggaagtgaaagaggtgatggctgagaaaaacaaggcgcttgaggaatgccaagagcgcattagcaagctggaaagcgaggtcgaaggcctgatctcattgctgggcgaacaataa

SEQ ID NO: 437610 - DNA, 216 bp, Serratia marcescens
atgacgaccaagaaagcaaagagcatcagcgtgatgctggacggtgagatcgttgtagcactccagcaaatgcagcagggcgttatcacgaagatgaatcaggctggtgtgcatggtttagccgccgttccatcactgggttacatcgctcgtgcgttaattcgttctcgccttggcatcaaaggggaagaaggcgacgacgcctatacagaataa

SEQ ID NO: 437611 - DNA, 1386 bp, Serratia marcescens
atgacagtgcaattagcagcggttgaatcggtatcagacgcattatttacgtgcgcctacctttggatgcagggacgcccatacacgcgtaatgatctggataaggcattgcatcagcatcgagactcatcgacgcgctacggtaagctggtggcgaaattgaaccagctacacagcctcacctatgaggagctatgcgacgccggttatttggatactgatagcgatcaggctatcgagcggcggcgggctttaatgaccgaggagatcggtaaggaagaggtaaaggcttggctcactgatagtcagcgcatacagcgtgtgtttgctaaaggtgagatttccggccggcgtacccgtttgccactgtcgaaagggtctgagggcttcaatgctcgccaagaatacatcataaagcatttcctgccagcacagtcgctatgcagcatctacgggcccagcggctcatacaagagctttctggccgtatcgtggtcatgccatatcgctgccggtatcaattggtcaggtaaaagcgtatcgcccggcgccgttctctatgtggttggtgagggtggtgtaggggttccgcgtaggattaaggcgtgggaacaggtgaacggcatgacgttgaacaacctgtatctggtaaaccggccagtgttcccggtcagatctgccgaggttgacgaagtgatccttgctgcaagacagatagaagccgagtgtggccaccctgtccggctggtggtgatcgataccctggctcgctgctttggcggcaacgatgagaacgacgcccgcgatatgggggcattcattgagggttgcgacaccattaagcagaaaaccggcgctacggtgctggtggttcatcactcaggcaaagatgaggcgaagggggcgcgggggtcaagttcattccgggcagcgctggacgcagaatttaacgttaagcgagagggggagggaaaagccctgatcctttcatgcacgaagatgaaggacgccgacgaaccagagaagaaagcctatgacctgagaccggttgatctgtacaccgatgaggatggagaaaatattggctcgctggtggtgcgggatgtgccgagggatgccaaagatattgatcctgagttggcgactgtgaccaacattaaggacaaccatattattttatggggaactattcgcagtaggaaagagcgtggtgatagttgtactcgtgctttggtacgtgacgatatgaaatcgatgggtatagacgtcagtaaaaatttcagccgctggcttggaaagctgattaaagaaggtctggtagcagtagatggcgaaaatatatcaattatttccaagtcaaaaagtgagggagaaagtgaggagtag

SEQ ID NO: 437612 - DNA, 369 bp, Serratia marcescens
atgatcagtaacgtgaaatttaacgaactcacctcacgcgttgagcagctggtggggcgcattgatgaactggaaggtcagatcaagtcactgacagcaactcaagggggagagatcccaccgggaatgagcactatcaccacgctggcggctgaatttgggatatcgaccaaaaaagccgaggaactggcgcagaatacaggcgtgatgatgtaccggcagaagagcggcggtttcatcgctaatgatggcaagttcagagaggcggctcgtttggtgcttcgcagtgcaaagcgtaagtacggatcggcctactggtatcacccgctgttgggcaaattccagatgagcggaggtatccctaaatga

SEQ ID NO: 437613 - DNA, 216 bp, Serratia marcescens
atggacaatcagcactccacgaacgaccgcataatccgtgaaccggaatgcagaaaaattaccggcctctgccgaatgcaacgctacaacctggaaaagaaaggcatgtttccgacacgacgccagctcggtgggcgatcggtgggctggatacattctgaggttcaggaatggttgaagttgcagccaaagtcaaaaattggcaaagcggcgtga

SEQ ID NO: 437614 - DNA, 705 bp, Serratia marcescens
atgaccaatatcgcgataccaacgagactatattacccattaagcaaggcattgaaagaattaagattttgtgctgatgacgaaaacgatattattcatcttggcgcattaggcgctttagaagtttgtcattatttcaaaggtggcttcaatgtttattctattagtgatgaaaaaggggcagttgaagataagagtatagggcttggtggtaggtattgcagcttgaacatttctacaatggaatatagtaatttatcaattcttaatgggttgtttaagcttgatatttcaattttaagagattttgagtttagtgacggaaaacaggtgtcagatattacagttacaacaccaaataataatataagtaaaaaggttaagttttcatttgtcgataaggttatgattgataaggaaaagatgtatattacggcagatgaaataactaggttgactggtaaaaagataacgttagtgaaaggaaaatcatttgtagaaccagattcaccaaagacaattgcaaaaaaatcagaaatgatacctgcgttactaagaatgattcctgagctaagtgatgttgatattgatacggagtcaccaagtaagattaagaatataatagaggcaatagcagcagaaaagggaattgatatgcccccagtgcaccaccagacctgggaaaaatatcttggtaggaagtga

SEQ ID NO: 437615 - DNA, 1179 bp, Serratia marcescens
ttgctagacggttcccgagaaaaagaaattttgatggcagacggcgacggcttgagcatccgggtatcaaaatccggggttataagttgggtatttgcttatcgcatcggtggccgtggggcaaaactggagcgcctgaagcttggtaactacccagaaatgagcctgaagcttgccagagagaagcgggaacagtgtcgcacctggttagctgacagcaaagacccaaagcaccagttaaatctaactgctgcaacagccctcaagccggtgacggtgaaagacgcccttcaatactggatcactgagtacgctgaagataatcgcgccaacgtggagcgccacaaagcccagctcgcaaagcatatatacccatacatcggcgctatgccactctcgcagtgtgaaacccgttattggttggaatgcttcgaccgggcaaagaaaaacgctcctgtggccactggctacgtttttcagatgtgtaagcaggctctcaaattctgccgagtgcgccgctatgccatcagcaacgctctggacgacctaaccatacccgatgtaggcagtaagcaggataaaggcgatagggaccacacagacgatgagataggccagatctggcaggcttgccagcaactgaagtttacaccgtactacgccgccctgctgcgcttgctggtggtgtttgggtgccgttctcaagaggtgaggctttctacctgggctgagtgggatctaaaaaagtgggtttggacggtacccaaggaacacagcaagggaggcgcaaaaatagtgcggccggtgccggaagaaatgcagccattcatcacggagctgcatagccaaaataaagacagtggtttattgctgggagagttaaagcaatctagcgctgtcagcgcctgggggcgtctggtgtggaaacgtctcggtcacgcagaaccatggacattacacgatatcaggcgcacgttcgcgacaaagttgaatgatctgggtgttgccccacacgtagttgaacaactattaggccacaccatgcccggcgttatggcggtttacaacctaagccagtacatgccggaaaagctggtggctttgaatatgtggtgtgagcgcttatccctgctcgcgggcgaaaatgacaacgttattttattgcaggtaaaaaaatga

SEQ ID NO: 437616 - DNA, 1983 bp, Serratia marcescens
atgagaaatatcaactcaataataatgagactagctaaacgagctgaaaaattacaaactgagcatctgatcaaatccttcgttgatgttggccctacatatacattactttcaagcacagataatcaaataatgtttggacggagagggaccggaaagacacacttcttagcagtgctcaacaatgaaatatctaatcgagggattatcagtgtacctattgacatgcgattaataggctcaacaggagggatattttcagatcaaaacatccccctaagtgaaagggcaacaagactgctttcagatactttatgcaatattcacgaggttattctagattatatatttgaaaacgaaatagataaaacaacagagataacggaattattgaacaattttcttgaacaagcaaccgcattaaacatagagggtacatctgaagaggaaattggttcatccaataacatatccaataatttctcaatcaaatcaaatgcatcattgaaaagtatttccgcaggaatggaactcacaaaaggcactgccattgggagctcagaaagaataaaaaccacaggaaaaagaactttaagaattcattttaactcaataacaaaaaaacttaacgacattgtttcaatgctacctcataaggagctttggatattaattgatgaatggtcagagattcctttagaccttcaaccttatcttgcagaacttttaagaagaatattatacccaattcctaacattactgtaaaaattgcagctattgctcatagatgcaacttcatggaagtggacatgaatactggtgccagcattggtatagaattaggttcagatgcttcatctgtgataaatttagatgaatacatggtgtttgataatgatagcgatgctgccaaaaacttctttaaaaacctacttcatcgccatgtttgtgctattgataaaaactcaatctgcgatcgagagcctaacctatttataaatgatgtatttactcaaacttcggcttttgacgaatatgtaagagcagttgagggtgttccaagagatgccataaatattatttcattagctgcgcagactgctttagcaaacaaaatatctatttttcatatccgtaactccgctcaaaaatggtttcaggtcaacaagcatgcagcccttaacagcaggccagaagccgtgtcactacttgacagaataataaacgaagttattggacatagaaaatctaggggcttcctaattagccatgagaagaatcataaactgatagattatctatatgacatgagagtaattcacgttcttaggcaaggtgtttccgcaaaaaatgcagtcggcaaaaagtatactttatacacactcgactatggttgttatgttgagctaatgtcctctaagaatgcacctctgggacttattattgaatcagatgaaaatgatgagttacagtatatagaagtcccaaaatctgattatagatcagtaagaaattcgatattagacttggaagaagataatggtcaacttaggctaaatctttttacatcaacggaacatcttcaattgccaaaccatcaaaacaaaacaaaaaaatcagttgaaaggtctattaataaaaatcttataaatgcaataccagaaaatattggtacactaaagatctatggaactatatatataccaataatattggtttctttagttctaagaaaagcaaaaggattcaagaaaagcaatgcgtcagaattaacaaaaataattaatgagcatatgtcaattaatattaacaggccaaagatatctgcaaataatatgtctagagaattaagaaaggatagtatcctgaagttatcctggcttaattatcatgagaatggtaggcaaccactattctctctaaatgaaaaatggagtgagtcctgggaggagtactttaataactcagcacccacaatttaa

SEQ ID NO: 437617 - DNA, 1518 bp, Serratia marcescens
atgacaccgccaaccaaaattgatacatcaagtctacttaccatattgggcgttattgctgctgtatgggcccttattacgccaaacgctcgactacgtttaaggttctgcctagcgtggtgggattgggtaattgttgggtttgcattcttactaagcaattatttggtgtttgcaccggctttaaaatcactagacttatattttagctttggcccctggaaatggggattagatagttcaagtgccgtatacctgatatcactcgcagttgctatttacattttatttcgcttaaaaaaccctaaactctcaattggaagaacagggatatttctagagttagtggaaaatttgcaccttactaaacgatacgacgatctggcacaattgttggcacctcaactagaaaaattaatatcaataattgatagacctgtgaagaatcgactttgtgataagatagctaacaatctccgcatctctaatcgcgagacagctgctgaacatgcacatgaagcattgttaaatattgtctcatcacctgaacttaccaatcactttgcacttgcgcacccatccctctgccttgagttaatcaagatcgagccaatagttcgttctgactttacttctaattttatcagtgcattacttggttcacctaacagtcgtctatatgttgagcttaaaaataatcttaacgttagtcgaggacatcgtttattgattccaaaaaacaaccgtatattacattttttcttttccaatgctaagtttgcagctgatttagcaatataccgtgatatcggtgactatctctactggaggttagatgaagatgaaaaaattattgctgcacttaataagtctttaggttcctattacgatgcttcaaaatataaatgtcctatttactcaggtgtcacgctgtttgaaattatggttcatgaaggtattcaccagggtcttcaggatcatttatggttgcattactattcatattttgcaaggaaaattataaagaatatgaataggcaatcggatgaatatagtggtgaatgggaaacaccttttcacttccttctctgtcatttatttatcgtcgctacagattgggcagaacaatgcgaatggatagatgaaaaggagattcctcaagaaaataaagaaatagataatttcgatcttcattatatttcaaaagaggctaccaaattacttggtgctatgctgcagttggttatgcctaataaaaaactcaccttgaaatctagaaaacatattcttgatatagttgtatcttgttatattagattgaaaaggaataaaaaattaaaagacgtcgctgactcattattaattttcaccactagaggcgaaggtaattcagcaccgccgcattatcgtagagaacttctagaaatattcaatacccttgatgattatcgattaagaactgatgccccggaattccgagcagctatagagtctgctattcaagcaaggccgaattag

SEQ ID NO: 437618 - DNA, 735 bp, Serratia marcescens
ttggatactaatagtccattaattgaagtcgagcagaacacttcagatatatatattccgttgcaagcctggttcgaggggagaaaattcctttcacacagattttcgggccaaaactgtagtgataatccatcaagtgattgggggacttggttatcaatacaggaatgctgtcctctccatcaggtcaatagtcttaactgggtcggactgcatgaagctaggaaaaatacagattcattcttggggaatgtgaagagtgaatttaatggaaagcttcccatttttattcatgaaaaggagagggtgataatcgaaaaaaaaatcggcattcctcccaaaccctcattaccaatctatttaatatcatgctctgatatggatgataccaatgaacacattgtttatgtcggaaaaaccgttaactccaaaaggtttattggcggtcactcggctgccttaaagttgctagatcccaaatataataatatgaaaaagaggatatatagagccaccccatggttttatgatggaaaagactatatttcactggattggattagtccgacatcattagctatagaattacttgactttatagagtctcatcttatttacaatctcaagccggaactcaacacatcgaagaaaaaaaatgaagatacacgttattctttttatcttcacattcagaactttttatcaacaggctttcttgatgatgagtttatttaa

SEQ ID NO: 437619 - DNA, 1305 bp, Serratia marcescens
  misc_feature (1266)..(1275): n is a, c, g, or t
atgactaagtataaggcgtatccagagtataaggattctggggttgagtggctggggattgttccgagtcactggaaaactgtatctatatccagattgttttccagggttaagcgaaccggatacaaagataaagaattgctttctgtttatcgggattatggagttgtgccaaaatccagcagagatgataacaataataaaccctcagaagatttgtcaccttatcaattggttgaggaaaatgatttggtgatgaataaaatgaaagcctggcagggttcaatcgcgatttcagagtatgaggggatagttagtccggcatactttgtttatcaacccaataagattatttttgaacttgcgcatctaagatatgtgcattacctacttcgtaatcctatctacgttactcaatatttgagccgttcaaaaggtatacgagtcaatcaatgggatctagatcctgatgagtttagaaatattgagcttctgcttcctagcaagaatgagcaggaaaaaatatacggttttctcgatcacgaaaccgcaaaaatcgataagttgatcgagaagcaacagcaactgattgaacggctgaaagaaaaacgtcaggcagtgattagccatgccgtcaccaaagggctaaatcctgatgtgccgatgaaagattctggtgttgaatggttgggggaagttcccgagcattggcgagtcagtcgagttaagaattttacaaaaattgaaagtggacatactcccagtaaaactaaatcagagtattgggtcaattgtatcatcccatgggtctcattgaatgactcaaagcagttaaaagatgttgattatattgatgatactacctataaaataagtgagctagggatggctaattcatctgctcatttgttacctgctcgtgctgttgtttttacacgtgatgcatcaataggactcagtgctataacaacaaaacctatggcggtatcgcaacatctgattgcttggctttgtaatgagagatttgtcgtccctgagttcctgcttcttgtgttttatgcaatggaaaaagaatttgagcgttatactttcggcgctacgataaaaacaataggtatggataatgttagagggctgagatcagcatttccaccaattgatgaacagcataaattgatagaatgggcatttaagaaattagaaaaaattaaattttccattaataaagtagaagatataatttcccttctccaagaacgccgcacnnnnnnnnnncgcccttatctccgccgccgtcaccggtaa

SEQ ID NO: 437620 - DNA, 534 bp, Serratia marcescens
atgatattatcaattaaagcacacttaaaagactttctaaaaaatggctatataaaaaacgttaataagagggagcttgataattctgaaggtgtcggactagatctaacagtcaataaactgtatataatcaatgatgaaatagcatttttaggaaaggactatagaaaaacaccttcagctacagagttgttaccaaacaaggatgggctttacgaaataacaaaaaaatacgcctatcttgtcgaaactaaagaagtcttcgacctcccaatgaacattttctgccgtttctatccacggagcactctatttagaagcggcatacaatttcaagcaagtatactttctcacggatataatgggccaatgatttttagcatcaacaatactagagatctgagtttttttattgagaagggtgctaggttttccactgctgtattcgaacttgtcgatggtgaatcaaatccttatgctggccaatggaatggtggccgagtttttcaaaaaaacagtgagcgtcaagtctaa

SEQ ID NO: 437621 - DNA, 660 bp, Serratia marcescens
atgagtattatccatttaaaaagcagaacaacaacgaatagcaatgacttcgaacggaataagaaatccttcaacagtaaattattcttatgctatgaagatgagaggtcgaatcctaatagaaacaatgttcacatagatgaattctctttagatttaacgctggggaactcatggaatgagaactactcttataatgataaaggcctatttattattgaaaatggaaaaatatcaataccggcacgaacctctgttgtggtgaccgtaagagagacaatgaaagtaccaaataatatatttgggattgtaatgtctactggtagcatattcttacaagacgggatacagtcaccaagcgcaaaaatagagccgggttatagtggcacgcttaaattaaggctggttaattactctgcaaaaaaagtcgaactaacgaaaggtcaaaaaatcggatctgctatatttttccaaacagatcacacccctgactttattgaagcatcaaattcagaaagcacaaacattccaaaaaaaggaagagtaaaaagagcctggaatatatttaagcaacagtggctatcctatggcccaaattttatttcaatgctaatctcagtagttgccattatatttacaatgttaaattatttcaaataa

SEQ ID NO: 437622 - DNA, 2337 bp, Serratia marcescens
atggcttttaatcttactagaatgacagtctatgctttaattagtgctcttgaagaagacctccgcgctataataaaagataacttagttagcgtagacaacccttttagattgataaacatagagttagagttgagggctagagggagagtagaaagagatattggtgagtatttgaatgaaatagactttagcgatcttgttgactactttgatcttggtgatacatatcaaacaataaacgctaattcatcatttttccctgctcacatttcaagtatggtgaagaaaaatacaaaaaaacttgatgctatagttcctataagaaatagagtgatgcatattcgtcctttggacgtagaggattttccttctgtttcatctttagcattgaagctagttgaggaagatgaaagtatatggaaaaatactaaagaaacatttgaaaaaatagatcataatccaagttttgtattatctttagatataaaatgcctcgaagaggatgattacaaccacaacttacctttgcctgattttgacgaaacaggattgatcggtagaagcgaggatgtgaagaaagtaaaacagctatgtttaggtggttttcccgtcatatcaattgtcggtgagggcggggttgggaaaacggcattggcattaaaagttgcttatgaactcttggaggatccaacgtctccttttgatgctatagtatgggtgtcatcaaagactacacaaataacagttaatgaaataaaagatatcaaaggagctatatatgactcattgggggttattcaggaaatatccaatcaagtggtaggtcaaagtcctgagccaataaggttagaagagataatagagtaccttgcgacttttaaaatagcgttgttcatagataacttagaaacaatccttgatgataatataaaaaattttgttggctcattgcccccaggaagtaaaataattattacttcaaggattggattaggtgcctatgagtatcctgttaaattgcaagggattgatgagtcatatgcatcccaattgttaagaatgcttgctaaactaaggggcgttgactgcctctctaaactggatgaaaaagttttacgagggtatgttaatagaatgcataggaaccctagctatataaaatggtttgttagttctgttcaaacaggtctttcacctgaaagtgtattgcagaattcgactatctttcttgagttttgtatgtcaaatgtttatgagtttctatcaaaggaagctcagcatcttaccgcagctatgcaatgtgctccagggcttaaagatatccctgagttggcttatttgactgatttcgactcattacacgctcaacgggcaatacaacagttaatgtctacaaatatgctttctcagtcatcaaaaatcaaaggggctagtgttaaaacaacttatgaactttctgagttagcaagatcatacttggggaaacatcataaaccatcacaatctttccagaaaaacatcagagagaagagaaacaaactaaattccatatttgagcagcaaatgtcggttagaacaagaaataaatatgatgtaaataatataaagtttagagataagtctgaccgtgtgattgcaaaaatgctttctgatgcacaagcgaatataaggaatagctcacatgataaggcatatgaaatcttggttgaggcacataggttagcaccagattattttgaggttgctcgagtcatggcatattttcaccagaaaagtggcaatttgagtgatgctaggtctcaatatgaattggctattgtattagctcctgatacacctcaattacattattggtttggaaggttcttattacacgaagaagagaatatcgatgatgcgattgcacaatttgaaattgctcatgagattgatgatgagtcgattgaagtatctcttgatcttgctcgggcttatttattccaacataactttgatatgtgtagcaaaattctcaataaattagaacctataattgagactgcgggggatcatcaatataaagtataccttgatactgatattcaaatattctatcgcatggcagataatttttctcaaaatgggagtttcgaaaaatcgcttgaatctcttgagaaaatgaaatttgcatttaatagcctccctgaaaaatttaaagacagatatatccgacggaagctattaaagtgcgagtttacactaaataagataacaaaaagctgcaccgatccagcaataaaattgcaagtggagaattttagagattggattcagcaggaaacggctttattataa

SEQ ID NO: 437623 - DNA, 1701 bp, Serratia marcescens
atgactacgcagaaattgtgcgcgggtgcgccctcacgcgaatcggttacatggcacagccttaactgggctaagtgccaccgtgaagtgcgaaagctacaggtgcgtatcgtaaaggcaacacgggaaggcaagtggggcaaagtgaacgctttgcaatggttgctaacccactcgtttagcggcaaagcgatggcggttaaacgggctaccggaaataagggaaggagaacccctggtgtggatcatgttctttggtctacgcccaggagcagatttcaggctattcggacactaaagagacgaggatatcgggcacttcccctgagacgaattaatattcctaaaaccaatgggaaactgcgaccgctgggcataccgacaatgaaagacagagcgatgcaggcactctacctgctggcacttgaacccgtttcggaaacaacggcagacagatgctcatttggatttagaccagaaagatccacggccgacgcgatagagcggtgcttcaagctgttcagtcgaaaatgttcgccgatgtgggtactggaaggtgacatcaaagggtgtttcgataacatcagccatgagtggctattgagcaatgtgcagcttgatagtcagatcatgagacagtggctgaaagcgggatacatcgagaaccagcaaaattttctgaccgtttcaggtactccacaggggggaattatttctccaacactggcgaatatagcgctagatggccttgaaaaggtattacagaaaatagctaagactcgctggatagatggaaagtgcttttgtccaaaaattaatcttgtacgatatgctgatgactttattattaccggctcttctcaagagcaactggaaaacgaagttctcccgttagtcagggaatttatggcaatacgaggtctaactttgtcgccagaaaagacccatatcacgcatatcaacaatggattcgattttctgggacagaatattcgaaggtataatgggaaactcatagttaaaccatccgccaagaatatccaaactttccttaggaaggtcagggctacgattaaaggcaactggatgttacgtcagatcaatctgataggactcctgaacccgataatcactggctggaccaattaccaccgtcatgttgtgtcctcgaaagcgttcaatcgcgtagattttgaaatctggcgttctttatggcgatgggtaactcgtcgtcataaaaataagtcgaaggggtggattaaacagcgttactttcatgttgtgggaaaccgcaactggacgtttgcagcgctttcagacaggaaatatcctgacggaaggccagcacttttaacactgaggtatgcgtcggataccaaaattatacggcaccgacaaatacaaactgatgcaaatccatacgaccccttctgggaaatgtattttgaaggacgaatgagtctgaaaatgcagagctcactaaaagggcgaaataaactcatcaatatgtggctgcgacaaggaaaacgttgtcctcattgtcgtcagttaataacacccgactctggatggcacatacatcatatagttcgtcgggtagatggggggaaagatgtgcagtcaaacctgctcatgctgcatccagaatgccatacccaactacattcaacctctattccaatagtgaaaccggcttcgtaa

SEQ ID NO: 437624 - DNA, 615 bp, Serratia marcescens
atgcagaccgaacctgaagtactcattgaccctacggagatcatttgctccaccagcattgaacgtatcgtcaccggacgtaacgctgcgttggcgcaaattgagatgctcatccagcaacttaccgatatctcgatgctgacccgcagtatcggcggcaaaaccgccctggactgggccatgaagcaggactttcgctgcggttgctggttaatggagaaatcagaaacggcgatgaaagccattatccgcaatctcgatcgcggtatatggcgtgatttaatgaagcggtcagggatgcttagcctgatggatgcccaggcacgcgaccagtggtacaacagcctggaaaaggatgacattcctgccatcaacgaagccaatatcctcagcacgtttgagcagttgcatcagagtaaaggtgacgtatttgagcgtggcgtgatcaatgtcttcaagcgtttaagctgggattacaagtcgaacgtgcgatgcgtaggagcgattctgccgctctctgctctgcttatcattgtccgactgaccattgtttggtcagagagtggacctgctgcacgaccagcagtagcttcaggggacatgcattgctggtaa

SEQ ID NO: 437625 - DNA, 330 bp, Serratia marcescens
atgaaccgacacaagctgcctgccagtatgctgctcactggtatccagtgcagcaccgcccatatcaccgacgacgataacagccggctgtatcacgcctcacaccagttggaagactacggcaacggcgaatggtgccatttcaccggtacggggtacctgatacgactcaatgcctggcggcatccgacactgcgacttaaacgattgggtttatccaaagactgccgtcggttaatgattaccctgatgcgacaacaccacatcaccttcctgctactggatgcggcaggcgacctcctgcccgggtttgccacgtttgactggtaa

SEQ ID NO: 437626 - DNA, 369 bp, Serratia marcescens
atgcaaacagtatcagcatccccaaaacgggaggctcagctctgcccgtcacccgttgccgtctggcaatccttactcgcacacctgttggcacagcattacggcctgaccctgaacgataccgagttcagcgatgataccgtgattcgaaaacacatcgatgccggcatctcgctagccgatgcgctgaattttatcgtggagaagtttgacctggtacgcatcgaccgtcggggtttctcctgccgcgaacaatcccctttcgtcaccgccatcgatattctgcgcgcccgacgggcctgtggcctgatgacccgatgtggttaccgcgccattacgcagaccctccaggggaaaaagcgcccatga

SEQ ID NO: 437627 - DNA, 477 bp, Serratia marcescens
atgatgaacatgaacacccgccccttcccgggggatgctgctaccgacaacactgcagacgcacacactgtacaggccatccaggccacacccgtgccggatgagcagcgtgcagcattctggctgcaacattttggtaacataccgcaatggtttcgcatcgagtcacccatattttcctggctcgaccttctgtgtaaggactaccacggcgattattgggacttttacaccctcagcaacggcggggttttcattaccccttccaccgaaggtgggtatgtcctctttaacgcactgaacgggaatggcgccactgtgggtcatgaagctgctggcatcatcgcctgcctcatcacctacagccaccatgcctgtcgcacagggaacgatgcgatgaccgagcactattaccgtctgcgggattacgccctcatccaccccgaatgcagcgccattatgcgcatcatcgactaa

SEQ ID NO: 437628 - DNA, 822 bp, Serratia marcescens
atgcaattagccagccgctttggtcgggtgaatcacattcgccgtgaccgtcccttaacccgtgaagagctgatgcactatgtccctagcgtatttggcggagagaaacacgcgtcccgctcagaccggtacacatacatccccaccatcaccctgttggagagcctgcagcgcgaaggctttcagcccttcttcgcctgccaaacccgcgtacgcgatgagagtcgacgggaacacaccaaacacatgctgcgcctacgccgtgccgggcaaatcacgggccagcaggtgcctgagattattttactcaactcccatgacggctcatccagttatcagatgctaccgggtctcttcaggggagtatgtaccaacggcctggtgtgcgggcagtcttttggcgaggtccgcgtgccgcacaagggtaacgtgacggagagggtcattgaaggcgcttatgaggtcctggagatatttgaccgggtggaagagaaacgtgatgccatgcagtcactgctattaccgccgctggcacagcacgccctggctaacgccgcgctccgatatcgttttggcgaggagcaccatcccatcaccgcctcacaactgctgtcgctgcgtcgccgggaggaccagagcgacgacctgtggacggtattcaaccgggtgcaggaaaactttctgaagggagggctgagtgggcgaaccgcgcagggccgtcatacccgaacccgcgccataagcggtatcgacggagacgtgaagcttaaccgtgctttgtgggtgatggctgaaaatatgatgaccttcttcggtaaataa

SEQ ID NO: 437629 - DNA, 357 bp, Serratia marcescens
atgattaaaagcgcacttgccgccgcactgctcgtcggtagcttctctactcttgccggcacaaccccgttgtccgtgagctctcaggcaacgtacctcatcaataaccgcaaccttcccgtttgggaactgacgctgaccagcctggaaaacgacattacccttcaggcactcacgctaaaccggggcaactgcctgatttccatggcaggacggggaaaaaatgtgaacaaacggctgagatacggtcagacactctctttcacgactcccagtaacggtagtttcagtcaatgccgcccgctggagctgacggtacagaccgacaaaggtgactttacctttaactggcaatag

SEQ ID NO: 437630 - DNA, 498 bp, Serratia marcescens
atgaaaatgacagctcaattaaaaagtatcgtcagcgctctgctgttaagcaccgggttgttgctgtcatgtatgaacgctgcccaggctgaaggtccgcgctgcgcaaagccggtcttttatgcgcagacgctcaaccataataaagaagtcgaaatctgcattaataccccgtacgtgtcttattccttcggcaaaaccggggcaacaaataaagagatggatatcactgttccagcggccagcgccacttacgcgtaccagagcaatcaggtcatcagtattcaggaattcactgtgcgaaacggcgaaacccgctaccaggtatctgccggaacaaacgatgagggtgagccagtagcttcactttatgtatttaagggtgctccggacaccggaaaactgctggcagagataaagctcgcccctcatacgctggtgaacaacatcagccacgcattggcggatgaaggtatctctggatcaggcagcctgtaa

SEQ ID NO: 437631 - DNA, 555 bp, Serratia marcescens
atgttgaaaccttatccacttctcaagcaagacacctacgcctggtgcttatcccttggtcttccggttatctgggggctttctgctcttttcctcccacagaaggtggcacttggcctttatatgctgtgctccctggtctgggtgctgctcgaccgactgagcttgatgaagcaggagattacggccccttcactggggtggttcttgctgccgatggtttatctgcgtcaacgtgacgagcgtcaggggaagccctggcgcttgttacaggtatggctgatttgcacggtattgtcagccgtggccggtaatcattttaaaaagcagtcaggcaccgaacaacttgcacagagcgcctgttctactgttacccagatcatgcaacgggaaggtattgatgaacgctgtattcgcgtaacggatttaaaggaagaggtcagcgggcgtttttatcgggcacaggcactgatgaacaccggtaataaggagtcaatgaccattgaagtcagaggccaaaatatttatgtcgtattaccggaactgggggaatga

SEQ ID NO: 437632 - DNA, 885 bp, Serratia marcescens
gtgcccgacaatgccgaacgcgccttatacaccctgaaacaacatatttatcttcttcccggctcgcttgcccacaccgttcttgaacgactacgccaatgtattcactacgagccgacgatcggcatgatgggcaaaagcggggccggaaagtccagcctttgcaatacgctgtttacgccaccacctgccagtgtcagtgcaatccaagggtgcacccgtcaggtacagcgttatccgttccgcctcgcgtcgcaggctttgcacatcgtggattttccgggtattggcgaatccccggctctcgatcaagtgtatgcacggctataccgacattggttgaataaactggacctgatcgtctgggtactcaaagccgatgaccgcgcctggaatgacgacatccgttgttatcggcaactggtgtcgtacggtgccgatccggcccggtttctgtttgtcctcaaccaggcggataaaatcgagccttgccgagaatgggatgttgtcaatcatcaaccttctttacatcaacaagataacctgcaggaaaaggtggctcaggtgaatgcagtgttttcgcctgttcatcccgtgttagcggtctctgcgccggaggggttcaatattgctctgtgggttgaagccctgattaccgcattgcctgataaggccagcagcggggttacccgtcagcttgaacctgcgtatcggacggagaaggtgaccaccacggcacagaagggctttacgcgtgtggtgggtgatatctttgatgacagtgtggaagccctgctggcgtcacacacactaagaaagaggttacaacagttgcgctctcggctcctctccctggccaaattgctctggcatcatttcttttaa

SEQ ID NO: 437633 - DNA, 633 bp, Serratia marcescens
atggcgataaattacgcgagctggggccctctgaactcgaagtatgtggcacgcattcaagacaccttacgcaaggccctgaatgaatacccaagaacactggtgctaagaattgacctcaggctaccggataataacctcactcatgaatatgctctggactctacgcttatcacccgctttatcgtctctctaaaagcacagattgacgcggatttattgcaaaagaaaaataacgggaaaagaacctttccctgtcgggttcgttatgtctgggcccgagagtttagtcaaagtgggaaaaaacactaccatctagctttattcttaaacaaagatgcgtatgcctacctgggtaattacatccccaccgaagaggggtatacacataacctgggtgtcatgattatggaagcctgggtacgagtattgaatttacaggatgacgatgattatcagaaatactatccgctggtgcatttccctaaaccaagctatgcccatctgaataagaccagtaccaattttaataatgactatgccgcagtcattaatcgagtttgctatctggccaaggaatacagtaaagacagctcagataaacaacgaaattttggctgcagtcagtactga

SEQ ID NO: 437634 - DNA, 216 bp, Serratia marcescens
atgacaaacctcaataacataccagatctgatgaatgataagctggtggatatggtcttcatcaccgaatttaccggattaagtaacaagtggttctacaagctcattcaggagggggagttccccaagcctataaaaatgggcaggagctcccgctggctacggagtgaaatagagaagtggatgcagaaacgcattgttgactctcgggggtaa

SEQ ID NO: 437635 - DNA, 1632 bp, Serratia marcescens
atgagtatgtcgaatgaaatcttttacgcatccggactttggcattctgtgtcacaactgcctcagcaacaacctccgcagaccccacttcaagtacacccttatccggtggatgcattccctcctatattgcgggctgtgatccaaacattgcatgaagaaactcagatcccggtagaactgataggcaatgttgtcctggcagccgcttcgctcgcatgtcagtctcatattgaggttattcctacacatactaatcaacctgagccatgttctctatattttttgaccctcgctgaatcaggcgagggaaaaacgacgatcagtaaacgggtgatgcgaccgttccatacctttgcagaaaaaatgaatcaggaatatcaggataaactggatatatataaacatgaacataacgtctggaaagtcaaaaagcaggcttttgacggtcttctgaggagcgcgattaagaatggagaagatagtgaagacgaggaaagtgacattaaatatcatgctaaaagtgagccaaaaaaaccaacatatccggtgatgatttatgaagatgttacacctacagccttcattaaaggggtaagtgagtatccggaagcgggtttgttctccgacgaggcaagcatattttttaaaggatatctgaaaaataatcttgggctgctcaataaagcctgggacggtgagacttacagccaccgacgcaccgaaggtgaaaatcatgagattaaggcatgtctgaccatttcattaatggcccagccgagtgtttttgaggattaccttaaaaaacatggtgagctagccaaaggcagtggttttctttctcgattcttgtatgctaatacaacaagtacaatcggtcaccgtaacggaaacacccatttcgatcagtctgatgaggcgctgcgtggattacatgaaaggatttcggtactgttagatattcagaggacacgcttttatgccaataaaaataaaaagaaagcactgacgctgacggatgaggcaaaaacgctgcaggcaaataagcgctctgaggttgagggtaaaattggccttaatcaggaatgggagcatatccgagatatggcatcaaagtcaggtgccaataccatcagacttgccgctatattcacctttattcagagtaatgaaagcacacagatttcttcggagacccttgatggggccatgaaaattgtagactggcatcttcatcaagccagtatgttattttatccgaagtcagagcgttaccaatttgagcaagatgtatatgagctatttgcatggttaaagaataagttctttcaagggaacgctcttccgattcaaataaatcacgtggaaaggttcggtcccaatcgtttacgtcgaatagaaaaattaaaacctgtccttgaacaactcatcgggatgggacttgtctgtcttattcgtgccaatctcaattccgccatttttatctcagcacctcgtcaaaataatacaggctggtatatccctcaggaattttatgccaatggaggaaaccctatcattgcatcatttcaaaacgttcggggaaaatatgacgccaattactttaatcgatccagattgttatactcttaa

SEQ ID NO: 437636 - DNA, 174 bp, Serratia marcescens
atgaaaaagtcactattcaccgaagagcagattgtctttgcccacaagcagcctgagctggatacgtccgtgccggacgtctgccgtaaactgggtatctctgatgccaggtgtaagaaatacggtgggatttccccttcagagctgaaacacatgcggcagctcgaaaaataa

SEQ ID NO: 437637 - DNA, 4002 bp, Serratia marcescens
atggattttagcacgctcgagaatattccccttacggatgcgcagcaagggatctggtacgcctcccaagcaagccactcttccagactctacgcaactgggcaggtcctgcatctgcgtggcgagattgatcaagccaaattgctacaggctatcgaacaggctttgcgggagtttgaagttctcaatcgcagcttcgtcacagtggagggaactccatcttttggcccacaaccccccaatgcgcgcgttgtactttgtgatctcaggtttcaagatgaccctgagatgcttgcacggcattcaatggagcaaatcatccatcaggagttagggccaaattgcctgcatcaccatgagcatcgcctgtatgtactgggtgagcacgaagcgttatggttttcccgcatacaccacatcgccttcgatgcctatgcttatgcgttgttgcatcgtcgagccggtgagcattaccaggctatattggagggagacagagcggcaccgtgccgttttgctacattagatacactcagtacagacgatatagcctacaggacgagcccgcaatatacgaacgatcaccaatactggatacagcgctgcgcgcaaatgccagcgccgacttttcttggtacacaggtgcaagaaatggcgttaagcacgttggaaattgaaattcccatcgatgctgacctgtcattgacgttagatacgttttaccaaagtagcggattcggcctgtccgatgtgctactcgctgctttcgccagttatttttcttgttgtctggcgggagaacgcaatctgctgttcggattaccttgtatgggacggctggatgcctatggctcacaggcggcactcactcgcagcaatatcctgccgttgctgctggacttgccaccgaacgccaacttccaggatgtttgcgccgcggtaactcgcagccggcgcaaattactcgcacaccaacgctatcgcggtgaatggatcggtagagcgattggcagagtcggcgatgctttccccctttacggcattgagctgaacattttaccgcctcccgttccgctcgattttgcaggattacacgctatagtcaaacatgttgccactggtcccgtacgcgatctcaatatccatttggaattaggtgcggatttgcgggcacataacctgcgtttaatcgccaatgcagcacggtatagtcacgcagaattgcaactgcatgtgcgtcgactgctgcattggatcgctcggataatcgaagcccccgccttacctttgcgggaactgcccttgacgacgcaagccgaattggcatcaatcgctcagtggaacaataccccccatgaactgccagcgcgcaatattctcgatttattcatcaggcaggttgaggccacaccgcaacaacttgccgtactcgacgaaaccggcgaattgacctatgccgaattagagttacgctcgcgtcagtttgcactagttcttgatcaccatctgcaaggtacgcgcggcaaagtgatcggtgtcgcgcttgaacgcagcgtggcattggaagtggtcctgctggctattttgcgcgccggtgcaattattttaccgttgtcgctcgagcttcccgtactacgactgcaaaaaatgttaaaacaagctggcgctgttttgatgatatccgacgatgctgagcgcaatcgactgcctgccgaatatccactgctcgacattaaatcgctacatgcgctcgcggaatgccagggtgatgcgccattgttgatacccatcgaaaaatacggggagaaacccgcttatattctgtttacctcgggctccagcggcgaacctaaaggggtaatggtcggtcacttggcgctggccaaccgcctgcaatggatgcaggctgagtattcgttgcggccaacagatcgcgtattgcagaaaactccggcgactttcgatgtatcgatgtgggagttcttttggcctttgatctgcggtgccactctggttatggcgcggccagccgggcatactgatcctgcttatctgctgagctgcatcgctcagcataatatcaccacccttcattttgtcccgtcaatgctggcgctgtttcttgacgccgtagaacgccgtccagaggcttccccactgctcagggtatttgtcagcggagaggccctgtcaccagaattggcacagcgatatcagcggttgctgaccgctcccttgcataatctctatggcccgactgaagctgccattgatgtcacttaccacgctttggggcacagcggcgagaagcgcagtattccgatcggccgtccgatttggaatacctgcatccacatacttgatgcatgtggcaaagccacgcctgtcggtattgcaggcgaattacatattgaagggatttgccttgcgcacggttatgtcggccaacccacgttaaccaaggagcgtttcatcgtcactgccgacggcaggcgcctttaccggacgggcgatttggcacgctggcgcctagatggtgaggttgactatctgggacgattggatcagcagataaaaatacacggacagcgaattgaattggaggagattgatgcggttatcggtaaacacccgcaagtccttcaggcctgtacccatacacatgaagggcgaatcatcgcctatattgtttccaatagtgccaaaccggatgagaagggcttgctggcgctctgccgcgaataccttcctgtctacatgcagccgcaacgtctgatttttcttgccgaactgccgctaagtcgtaacggcaagctggatcggaaagcactgccggcacctccgccccaacctaacgaagcgggcggcattccctctggtcttatcgaacagcggctgtgtgaatattttgccgacgcgttgcaaatccccgtggtggtacccgaagctaatttttttgaactgggcggcaactcgctgagcgctgtcgatgtcgctgccagaataaacgccggtctgggctggaaaatcaccatcgccagtatttttgcccacccttctccccgggccctggctgagcacggtccggaacacgcgccggacatgcttgccccgtccctgttacttcggcctgacccttatgcaaccgggaacacattaccgacactgttctgcatccacccggccggtggcatcgcctggtgttacagcgggctggcacgttttctcaaaacaccgtgcgaaatagtcggtttgcaagcgcaggggctgacgccgggcagttgcatcacgccgtcgatggatgtgatggctgaagaatacgccaatcgtatacgcgctcatcaaccagaggggccttattggctcatcggttggtcggtcggcggcatgattgctcatagcgtggccgcacgacttgaacgtcaggggttgaaagtcgagttattggcgatgatggacgcttatcccagcgatctgtggcgccgttttgcttttgaaacactgagtgccaaagaagaagaaagcatggcactggcggccttgctctttattgccggtattgcattgccctttgatcgcgacttgccctcgttaatcgtaccgaaaggcgaagtgctcgaacgtgcgcaaacggtcgaactgttgcgaaaacatggaaatgccttggccagtctggatgattgcacgctcgatcggcttatcgacgtcgttatcaacagccggcgcctggtcggctgttcggatcatgacaattaccacggagacgtgctcttctttacggcggcggcacctcgggccgaggactggttggatctgggggcctggcgtcattacgtgcatgggcgcattcaaaacattgacatcgattgcgatcaccccggcatggccagacccgaagcactgcgtgaaatcgccgcgcacctggatgcgacttttgtacgtttcgtcaaacagtcatctgcgccagaatggaaaacagcagtggagtatataaccaaatga

SEQ ID NO: 437638 - DNA, 1569 bp, Serratia marcescens
atgagccatcccccttcacttgcagacctcactgcaaacttggtgccgttcgccgctcatcaggccacttcttctctgatctggtgcgctgcggatgtcgacgacggcgaagcgctgcgcgagtcgtgcagctatctggccgcacctaacttacccggcaccgtcaaaatcttccaggcggaacgctacggaggcagtggcattcagagtaacggcggtggcgcccgttgcggttttgacggacgctatcaagtcaaggggatcggcgccaaccttctggttggcgagggctctgactggcaccacaccaatggtgcgctcggcgccaatcaggcgatttatgaagcgatgtggggcgaaatactggcgcagtcgctgccttatggcgcagtgcgtacccgggctgttttgctcaccgacagctacatcgacctgggattcgaacgcgccagagggcgttcccgccgcgcgctgttggtgcgcgagccggtggttcgtcctgcgcacttcgagcgggcaccttacttccggccgcaggccgaatatgccggacagctcatgcatgatgctcaccgtgtcaggtcggtgatccgtctgttgccggccagcttgccgacaccgccagcgggattcagcaaagaagccgcttgtgatccgcaacgtcgctgcctggagggattatgtgaactggccaaacgacaggcgcggcagatggcattttgccgcacgcgcttccttatgctgacaacgtcaccttccaacatagcaatggacggtagggtgctggatttcaacgggctcaccagcctgttccccagcgatcatcgttatgattttgaatatcagctcaagcttgcgcagttgatgagagaaccggcaatccttctgcaggggttgtccgatttgagcttgtatctcggcaagtatctgtttgatcgcactttcactgtatttgcacaacaacagctggatgcatgcttctggccggcctatcaggacgcctgctatcgcggatatttggcattgctggggatccccgcagaccttctttcgccgacagagatgcccaatgtgttggagcagctggtaaacagcttcgtacacctgatgagctgccgcagcaaatcgctgtactgttcgtccgataccgcaatagatgagtcaccgttggaacgtttggtgatgacattgatccatcgcagccaggggcagaaagttcccgattgcgatgacttattgcgcgatgttcatttttcccaaacgttacgtgccttcaccgaagccaatcactggttggtcgaaacctgccgcatccaaggtattgatgtcgctgacatccagaacaacatggcacagcaagcttgcctgaggctgcagccacgggcgtgtttgggcaaagtgcggatgcttaaagacatcgccgaactgctggaaacgtatggtgatgacgccccgctattgcggcaagcattatccgccatggaggcaaagatattggcattcgccaaaggagcattcggctgtcagccatcattcagtcacgttgccagggagcatggaaaaacatga

SEQ ID NO: 437639 - DNA, 456 bp, Serratia marcescens
atgacattgtatattcgggaaacggcaggcggccgtgaagaatggactgcctatgaacaacttggttttgccgtaagctgtatgttgcataaccgcaactacagtctttaccctgttctcagccttcaatattggacagagttcgccatacaacacaaacagatcaagtttctttttgatacgcgcggccaaccgttggcctatgtcacctgggcgtatttggccgaagataccgaaacgcggttgcttcatgagccagaattccggctgcatccttccgaatggaacgaagccgaccgggtttggatcctcgacttttgttgcaaacccggtttcagtcgcaaggcgattgagcgtttcattcaactcagtccgtggggcgagggaccagtacgttggctaaacagaaaaaagaaggtcatgaccctaccgtctaaacgcttacccaaagagtga

SEQ ID NO: 437640 - DNA, 1278 bp, Serratia marcescens
atgttgtttcgtaaggacgcaattgaaaataggaaaatgaagtggcgtgggcgtgcgattttgctcccgggtatccctctctggttaatcgtgttggggtgcgtattcttcctctccgcatttttgacgttcgtcatcacaggaaattatacccgtcgtattaacgtcagtggagagatcaccacctggccacgtgctgtgaatatctattcaggggtgcagggtgttgtggttaaacagtttgttcaggaagggcaaaccattaataaaggcgaacctatctatcaaatcgacgtcagcaaaagcacacgcagtggtgtcgtcagtgataatcaacgccgggatatagagaatcaactcgtccacgtagataacatcatatcgcgattggaagaaagcaaaaaaaacacgttgagttcccttgagaaacaacgttcacagtacagtgaggccttcaaacgttcatcagatattataaaacgggcggaggagggaataaggataatgaaaaacaacatggaaaattaccgtcattatcagtcaaaggggcttatcactaaggaccaactcaccaatcagatcgcgttgtattaccagcaacaaaataacctgcttagcctgagcgggcaaaacgagcaaaatgccttgcagataaccagtttggaaagtcagattcaaacgcaggccgctgaattcgacaaccgcatttatcaaatggaattacagcgatatgagttacaaaaagaactggtgaatacggatgccggcggagaaattattgtccgtgcactgtcagacggcaaggtagactcgatgagcgtgactgtggggcaaatggtgaatacgggtgacagcctactgcagattattcccaagaatataaagaactactatctggtcatgtgggtccccaatgacgcagtcccctatattgctgtcggtgacaaggttaatgtacgctatgaggcctttcccgccgagaagtttggtcagttctccgccacagtgaggaccttgtccaaaacgccggcctcaccgcaggaaatgctgacttatcagggagctcccagaagtctgcaagttgatgccattccctattataaggtgatagtaaaacccgataaacaggttattgcctacaatgggaaatcgctgccattggaaaatggcatgaaagcacaaagcacgctgtttctggaaaaaaggaaaatttatcaatggatgttgtccccgttctacgacatgaaacacagtgccacaggaccggtcaatgaataa

SEQ ID NO: 437641 - DNA, 2097 bp, Serratia marcescens
atgaataacggtagattcaaatccctcatcagtcaactcgatatgcacttgcaccagcgcgttcccgttgttcatcaaaccgaatcctctgaatgtgggctagcctgtctggcgatggtctgtggccactatggcaagaatattgacttgatatcactgcgccagcagttcaacctgtcggcacgcggtaccgcattggtcggcgtcaaagagattgccgcgcaattgggcatggcctcacgcgcactgtcgctggatttggcggaaattagcgcgctgaaaacaccttgcattctccattgggatttcaatcacttcgttgtactggtcagcgtgaagcgcaaccgttttgttttgcacgatccggcccgcggccgcagaacggtgggactagccgaaatgtcgcagtgcttcactggggtggcgctcgaactctggcccggcagcgaattcaccgcgacagaagtgaaaaatcgcgtgagtctgagaacgctgattggcagcatctacggtatcaaacgtacattaaccaaaattttttgtctgtcgatagtcatcgaaaccatcaacctggtgatgcctataggcacacaactggtgatggaccatgcgatcccggcaggcgatcttgggttgttaaccctcatctgtgtcggcttgatgttttttatcctgttgcgggcaagtgtgggcatggttcgtgcgtggtcctcattggtgatgggaacactcatcaacgtgcaatggcagtctggcctgtttaaccacttattgagactgccgttgggttattttgagcggcgcaaactgggcgatattcagtcacgtttcagctccctggatacgttgcgcgcaacatttacgaccagcgtggtcggcgccatcatggacagcattatggtggtcggcgtactcgtgatgttggtgttatacggcggttggttgacctggatcgtgctgggatttaccgccgtgtatgtcctcattcgtctgttgacctacggatattatcgacagttatcggaagaaacgctggtcaggggggctcgggccagttcctattttatggagacactgtacggcattgccacagtcaaaatgcagggtatggccgaacggcgaggtacgcattggcttaacctgaagatcgacgctatcaattcagggataaagttaaccaaaatggacctgttgtttggtggcatcaatacttttgttgccgcttgcgatcaggtgatgatcctgtggctcggaaccagcctggtgatcgataatcaaatgaccatcggtatgttcgtggcgtttggggcatttcgcgggcaattttccgatagggtcggctcactgacaaattttctgctgcagctgcgaatgatgagcctgcacaatgaacgcattgccgacattgcattacatgaacgtgaagcccaaaaaccggatcgccacgttgctgctggcatgcatccagtggccctggaaacgtgcaatctcagctaccgctatgacagtcaatctacgccggtgtttagccatttggcccttgacattgctccaggggaaagtgtggctatagtcggtgcttccggtgcaggaaaaacgacgttgatgaaagtgttatgcgggctgtttgaacccagttcgggacaggttaaggtcgatggtactgatatcagccagttaggtataaacaactaccacaagatcatcgcctgtgtgatgcaggacgacagattattctctggttctatacgggaaaatatttgcggatttgccgaggaaatggacgaatcctggatggtggagtgcgccatggctagctatatccacgatgtgataatcaaaatgcccatgggctacgaaacgcttataggagagctgggtgaagggctttcgggtggacaaaagcaacgtatttttattgcacgtgcattatatcgaaaaccaagaattttatttatggacgaagcgacgagctctcttgataacgaaagtgaacggttcgtgaatgtggctattaaaagactgaacatcacccgggtgattatcgcgcatagagaaaccaccttacggacggttgacagggttattactttataa

SEQ ID NO: 437642 - DNA, 135 bp, Serratia marcescens
atggtattggtactgtttgttgttgtgatactaatgtttgtcttagggaaagagaatgacattctcttaaatgatgcagatgctattcctttctctgtatcaaacggtatttttatgagtttttacctaggatag

SEQ ID NO: 437643 - DNA, 525 bp, Serratia marcescens
atggaactgaggggtaacctgaaaagcgcggtcaccaaagcctgtcgctacgatccggagctcaacccgtcctaccagcaactggcggaacactatcaggtgacggtgatcccggcacgaccgcgaaaacccaaagacaaacccaaggtggaggttgccgtccagatcgtggaacgttggatcctggcccgccttcgacaccagatcttcttctcgctggctgagctgaatcactgtatccgtgcactggtgaaggaactcaacgagcggcccttcaaaaagctgccggggaaccgacgggaagccttcgaaaagctggataaacctgcgttacggccgttgccggcacaaccctggcgttatcatctccagatttttgctacagtgccactgctcctcgccgtttacggcgggagcagtcacgtttacatattaactaccactttttgcggacgaaaatgcactacccgaagtaccaggaccgccgctagcaccgccaccaaacatgcttccccccccatttga

SEQ ID NO: 437644 - DNA, 2013 bp, Serratia marcescens
atgaaaaagtttaatgatgttattttgtatggtggcgactacaacccagagcagtggccaaaagaggtatggaaggaagacatgtctttctttaaagacgccagtatcaatactgccacaattaatgttttctcttggactacactccagccatcggaagaaaaatattccttcgatgagttggatgagattgtagatctattaagtaaagataatcataagataataatggcaacatcgactgcatctatgcctgcatggatgtataagcgctatccagaaatagctaggactgacttttatggaagacaacacaagtttgggcacagacataatgcatgtccaaatagcttggtttatcagaagtacgcatctttactggctgaaaaattatcagaaagatactcaaaaaatgaaaatatcgtatattggcatataaataatgaacatgcaggtgagtgctattgcgataattgtgctaaggcattcagagtgtggttaaggaataaatataaaactttggataatttaaacaaggcatggaatatgactttctggagtcataacatcttagactgggatgagattctaccaccaaatgtactaaccgaacaacgaaaaagcttcaatacaactgattttgctggtatttctattgattacagaagatttaattcagatagtgtgttgaatactatcgtaatggaaaaaagtgctattagaaagcatgataagaaaacgccggtaattaataactttaaagggctgtacaaaaacttcgattatttcaaatgggctaaagagctagatgtcgtagcttgggataactatcctagatatgatacaccaatgagtttagttgccatgactcatgatttaatgcgaggaacaaaaggtgagccattcttattaaccgagcaaacacccagccagcagaactggcagccatataactcattaaagaaaccagggcaaatgagggccataagctaccagacattagcacatggtgcagagagtatactatactttcaactccgcaggagtatcggaggttgtgagaaattccacggtgcagtaattgagcattcgggaactagtaatactcgagtatttagagaggttgcaacgctaggaaacgagctgaagtcccttggcggtaaaactattggatcgcgaaatgaaagtgatgtaggcattgtttttgattgggacaactggtgggcgctggaatatacaagtggcccaaacaaagatcttaaatatatcgatcaagtacaccattattatgattacttttacaaaaaaaatatctcagtagatatgatctcacctgaaggtatctcttctaagtataaagtaattgtcgctcctgttttatatatggtaaaagagggggctgcagaagcattagatttgttcgttaagcagggtggtacattggttatcacttacatgagtggtgttgttgatcaatccgataacgtccattgtggtgggtaccctgggccattaagaaaaatggctggagtatgggttgaagagattgacgcattagcaccagaacaaaacaatatagtcaagtttaacgataatgagcaacatgaatgctcaatgctttgtgatattattcatcttgaaaatgcaaaagagatagcgagctacaactctgatttctactctggaaccccagctattaccgttaataaccacggtaatgggaaggtgtattacattggaaccatgttgagtgaggatgcaaaatataaggtttttgatattattgcaaacggagcatcgctgacccctgtagttggcgagaatacaaaattggaagttacacgcagacatggtgttgattgtgactactactttgttatcaactttactagtgatgaaatcaaactaccttctcaattttccaataaggaagacatccttacaaacgagattgttgatgctagtgttatattgaaaccatatgatgtttatttgtttgaaataaaacattga

SEQ ID NO: 437645 - DNA, 1311 bp, Serratia marcescens
atgaatgctaaaacaaaaaaccttggaaaacttggattatttagtgcggttatatatggaataaactccattattgggtctggtatatttttattgcccggaggtctgtattctcatgttggtcctttttctgtatttataatattcattgatgtattgatagttctgtcatttgctctttgttttgctgattgttcaaaatattttgataaaaatggcggcgcataccaatacgcaaaagaatcaatgggagagtttgtagggtttaatgttggtttgcttggttggttaaccaacatgattgggtggggggtaatggctgttggcttttcaaatttagtgctagctttcattcctgatttaaaactaagtaacactgaattagctttatctttagtatggttgtttacattgcttaatatgcttggtattaatatggctaaaaaattaaccaatgtactcaccattgcaaaattattgcctataataatattctgcgttgcatcgctattcttcataaaaaaaggtatatctttgggtaacttcacaccattagttcaacttaatggtagtgactcattggtatcatctattggattgagtactattttattattttatgcgtttttaggattcgaagcattaccagcaatagcaggggaagtaaaaaatccacagaaaaatgtagcaaaggcaatatttattacactaatttgtgtttttgttatatatggcattgttatatctgggactattgcaatcttaggtgatgatatcaaaaaccaaaatagccctgtgcaacaagcagcaatgatagcgcttggtccaatgtggttttctattatatctataggtgcaataatttctattgtagggttgaacttctcatgtgcaattctaacgccaagatatgggtcggccattgcagaggatggtgttatccccaagtttttaacaaaagaaaataaatatcacgtccctgtttgggcttcattactttcagcaagtattgcttcgcttattattcttagtgggacgttttcacagttagctgagttggctgtgttaatgttttttattcagtatataccgacaccaattgcatctatggttatgaggaaaagaaggggggaagttgatgggtttactatgccacttggcaatgtaatcccaataacagcgctggtctttagtgctattataatggtgacatctcaggccaaaaatataatttttatggtttcatcaatgattctttcaagtgttatatattttttgattaaaaaatttaaaaattcgggtaaaagttga

SEQ ID NO: 437646 - DNA, 429 bp, Serratia marcescens
atggaagtggggcgcgtcaacaagacgctgtaccttcttaattatattgatgatgaagattatcgtcggcggatcctgacgcaactcaaccggggagaaggccgccatgctgtagcgcgggcgatctgctacgggcaacgcggtgagataagaaagcgctatcgtgaaggacaggaagatcaactgggtgcgctgggcctggtcactaacgcagtggtactgtggaacacgctttatatgcaggaagcactgagctggatgcgcattaatggagaagaaaccggggttgaagatatagcccggctgtcgccactgatgcacgggcatatcaatatgctggggcattatacgttcacgctcccggaggatattttaaagggagaactgagagcattagattttaacttaaacagcgaattatcttattag

SEQ ID NO: 437647 - DNA, 549 bp, Serratia marcescens
atgagctttgtcacgccggtgaaaacggtaaattccgggcctaacagaaaatattttggttccgggcgtggcatcacctggtacaacttcgtctctgatcagtactctggattccacggcatcgttgtccccggcacattacgtgattccatttttgtgctggaaggccttctgaagcagcagacagggttgaatccggttgagatcatgacagacacagccggtaccagcgacattatttttggcctgttctggccgctgggataccagttttccccccggcttgccgatgccggtgaagcggtattctggcgggtggataaatcggcaaattacggtgcactggatgagctggcgcgtggttgtgccgatctgtcgaaagccgaggatcagtgggatgagatgatgcgaaccgtcggctcgcctgaagccaggcaccattcatgcttcagaactcattcgctctttgctgaaaagatcgcgcctatcagggctggcacaggcgatcatggaagtggggcgcgtcaacaagacgctgtaccttcttaa

SEQ ID NO: 437648 - DNA, 294 bp, Serratia marcescens
atgacccaacgtagacaaaccaaacgccgtttttctcccgagttcaaactagaagccatcgagcaggtgactaaataccaacagcgtgctgttgatgtcgctctagccctggatttggatcccagccagcttcgtaaatggtccgtcagtatgaagccgagctccagggggggtacgcctgctggcgtggctgtgacaccagaccagcgtcgcatccaggaactggagaaacaggttcgccgtctggagatggagaaagagataattgaaaggggtgttgcgttgacagattga

SEQ ID NO: 437649 - DNA, 549 bp, Serratia marcescens
atggaggcggatatcgactaccagccctcacgtaacctggaccgggcgcgtatcgcccagctcagccagaacgagtggatagcgaaaggccagaacctgttgataacgggtccctgcggctgcgggaagacctacatgggatgcgccctggggcacaacgcctgccggcaggggtacagcgtccggtactggcgactgagccgtctgttaccggagctgatgcagagccgtgcggacgggagttaccagaagcagctgtcgatgctggcgaagacgcaactgctgatcctggacgactggggtcttgagccgctggttggcgctcaaagaaatgacctgctggagctgatggaggatcggtacggcaaaacgtcgacggtggtaatgagccagctgccgacggatgagtggtatggaagcgtatgcgataacacgctggcagatgcgatcctggatcgtctgatgcacaacgcgcaccgtctggacatgaagggcgagtcgatgagaaaacggctgtctcaggttgaccaaagtgaacagaagagttaa

SEQ ID NO: 437650 - DNA, 510 bp, Serratia marcescens
atgaaaaagtcacgattcaccggagagctggttgtctttgccctcaagcaggtcgagctgggtacgttcgtaccggatgtctgccgcaaactgggcatctccgatgccactttttacacgtggagtaagaaatacggcgaaatttcctcttctgaactcaaacatatacgccaactggaagagggaaatctgcggctgaagaggctggttgccgatctcagcctcgacaaggcgatgctgcaggacgtgctggccgggattggggacaccttcgccgggcataaaaagctgcccgatgatgaactcaaccaagcactggccgcagcggaaaaacaggtggcggccgcccgtgacaaggtgatgtccgggcaggggaaaaaaggggcccagtacctgagcacctttaaaccggataaacaggcccgacaaactgaaccgccccggtttttttggagagtttttagtccgaaagctcaggctgccagatcattatttgcactggaagcataa

SEQ ID NO: 437651 - DNA, 309 bp, Serratia marcescens
atgtctggaaaaaaaagtatactgctgttgatctgcgcgttgttgttaggtctgggaggagggtacattgctagcaatatgaccgtatcgaaatataacaccatcaatgcgacctgcactctgcttaatgtcgcggtagacaatcatattttaagccctgaacagataattaagcttggacaactgacaaaagaaaaactgggagatgcacaggcagccaaagtattcgaactcagcaatgagcaaataaagtccgcttccagcatgtcaaactgctctcagttcatggttggaatgagtcagccctga

SEQ ID NO: 437652 - DNA, 1428 bp, Serratia marcescens
ttgattcattcaaaacgacaggctgccggtctggttatcggcacccttttgtttgcgatgtctgtgccggtttattcgatagggattttagacgcatattcgctggcattagaaaaggacccgaccttccgggcggctataaaagagaaagaagcgggggatgaaaacgaaaatatcggcagggcggggctgctgccgaaggtatcgctgaattaccagaattcgccgcgtaactggcaaacccagaaatatccgcaaagcgacttctttggcaacattacggaagcgacgcggcgccagcagtaccgcagctactccagctcggtgacgctgacgcagccgctgttcgattatgaggcctatgcgcgttataaaggcggcggggcgcagacgatgatgtcggatgagcgctaccgcggcaaactgctcgacctggcggtgagggtgatcagcacgtatgtcgaagtggcctatgccaaagatcaaatcgccctggccgaggcgcagaaagcagcctataaagagcagctggcgttgaacgatcgtctgatgagcgcgggtgaggggactctgaccgacgtcgccgaaacacaggcgcgctacagcctggcagaggcgcaggtgatagaagcgcgcgacgcactggacgctgcgcagcgtgagctggaggtgatcataggtgtgccgttgaatcaattggatgaactgcagagcttacggccagggcaattcaaggtggcgccgctgatcccgtcgaagtttgaagagtggcaaaagatagccctggaaaataaccccgtgctggccgcctcgcgccatggcgtcgatgcggcgaaatacgaagtggagagaaaccgcgccggctttatgccgaacgtgcaactctatgcttcgcattcggaaaacgactccagcagcgataacacggttaaccagaaatatcgtaccgacagcatcggggtgcaggtgagcctgccgatttactctggcggcggcgtggcggcttccacccggcaggcggctgcgcgctatggccaggcgatggccgaaatggacacgcaagtcggcacgacgctgaacgatctgcgcaagcagttcaatttgtgcatcagcagccgtgccaaactggcggcctacgaattggcggtgaagtcggcgactatgcaggtgacggcgacccggcagagcatgttggcgggtcagcgtgtcaacgtcgatgtgctcaatgccgaacagcagctctacagcgcccaacgcgatttggcctctgccaaatacacctatatcaagtcctggatcaccttgttgagcgattccggtaccttggacgagaaggatgtgctgcgcgtggcgcagtattttgtgcatagtagctctgaccatcactatgctcgtgatgggagcacgcgggtacctccccggaggtga

SEQ ID NO: 437653 - DNA, 1332 bp, Serratia marcescens
atgtctacgcatattggcgagccgcatgactcgtactcagaacagatcccgttggatgagcgttgttatacccgcctggggtggttggcgctgggagtgggcgtgttcggcttcttggcctgggcggcgtttgcgcctctggataaaggggtggcgtcgccgggctcggtaaccgtttccggcaatcgtaaaacggtgcaggctccggccagtggcatcatcaaaaatatcgcggtgaaagacggcgataaagtgaaagccggcgaggtgctggtgcaactgagccaggtgcaggcgcaagcgcaggtcgattcgctgcgcgatcagtactacaccaccctggctaccgaagggcgcctgcttgctgaacgggacgggctgggcaatgtcacgttttcctcgatcttcgccaagatcaaggatcagccgcgcgtcgcggagattattgcgctgcaaacgcagctgttcgcttcccgccgccaagggctgcaaagtgaaatcgacggttataagcagtctatggacgggatcagcttccagttgaaaggccagcaggactcacgcgccaacaaacagatccagctttccagtttgcgcgaacagatgaacagcatgaagcagttggccgcggacggatacctgccgcgcaaccgctacctggaaattcaacgccagttcgccgaggtgaacagcagtatcgacgaaaccgtcgggcggattggccaattgcaaaagcaactgcaggaatctcagcaacgcatcgatcagcgctttgctgattatcagcgcgaggtcagaacgcagctggcgcaaacccaaatggacgccagcgagttccgcaacaagctgcaaatggccgatttcgatctgggcaacaccgccatcacctcaccggtggacggcacggtggtcggattgaatatcttcactcaggggggcgtcgtgggagcgggtgaccacctgatggacgttgtgcccagccaggcgactttggtggtggattctcgcctcaaagtcgacctgatcgataaggtgtacaacgggttgcctgtggatctgatgtttaccgccttcaaccaaaacaaaaccccgaaaattccgggaacggtcacgttggtttccgccgaccgtctggtcgacaaaaccaatggcgaaccctactaccagatgcaggtcacggtctcgccggagggcttgaaaatgctcagtggcgaggacatcaagccggggatgccggtggaggtgttcgtgaaaacgggatcgcgctcgctgctgagctatctgtttaaacctattttggatcgcgctcatacttcattaaccgaggaataa

SEQ ID NO: 437654 - DNA, 1767 bp, Serratia marcescens
gtgcacccatttataccgcgcaacgaaattgcggatgttatacgtacacgcagcaaagtcttctggaccgttggtatatttactgcgtttattaacctgttaatgctggttccttccatttacatgctccaggtttacgaccgggtgctgccttcgcgcaatgaaatcacgctgttaatgctgacgctgatcatgctgggtatgttcggcatgatgtccttgctggaatacgttcgcagcatggtggtgatccgcatcggcagccagctggacatgcgcctcaatacgcgcatttatacggcggcttacgaggcgaatttaaagaacggctcgtccgatgccggccagatgctgagagagctgaccaacgtgcgccaattcctgaccggtagtgcgctgtttgccttcttcgatgcgccctggttcccgatctatctgctggtgattttcctgtttaacccttggttggggttgttcgccctggtgggctccttgctgttgatcgccctcgcggtgatcaacgaagtggtgtcgaagaaaccgctggcggatgccagccggctttcaatcatgtcaggcaatctggccagcacgaatttgcgcaatgccgaagtgatcgaagctctggggatgctgcctaacctgaagggacgctggttcggtttacaccagcgcttcctgaatagtcagcgtatcgccagcgagcgggcatcgcgggtgacatcgatcaccaagtttgtgcgtttgtcgctccagtcgctggttttgggtctggggggctggctggcgatcgatgggcacatcacgccgggcatgatgattgctggttccatcttgatggggcgcacgctggcgccgatcgagcaagtgattaacgtgtggaaaagctggagttccgccaagctggcttatcagcgcctggtgcgcttgctggaacagcatccgccgcgcggtaccggcatgtcgctgccgcggccggaaggggtggtttccgttgaaggggtgaccgcgacgccgccgggctcgaaggggaacgcggtattgcataacgtcagtttcgccgttcagccgggagacgtgctggggattattgggccaagcgcctccggcaaatcgacgctggcgcgtctattggtcggcatctggccggtcagcgaaggtatcgtgcggctggacaacaccgacatctaccagtggaacaaggacgagttggggccttatatcggttatctgccgcaggatattgaactgttcgccggcagcatcgcggagaacatcgcccgcttcaacgagctggactcggagaaagtgattgaggccgccaagttggccggcgtgcatgagctgatcctgcgctttcccaatggctatgattcggtgatcggcaccggtggcgccgggctttccggcggccagaaacagcgtatcggtttggcacgtgcgctgtatggcgatccgtctcttatcgtgctggatgaacccaactccaatctggacgatgccggtgaacgggcgttgaaccagaccattacgttccttaaacagcgcaataaaacggtgatcctgattactcaccgcaccaatctgctggcgatgaccaacaagctgttgctgttggttaacgggaacgtcaatgcgtttggcccaacgcagcaggtattgcaggccctggcgaatgtgcaaaaagcgcaggtgcctccgcaggcggtgcgtgcggtgaactccgagccggatgaaggcgatatccctaaaactcaaactaattaa

SEQ ID NO: 437655 - DNA, 1470 bp, Serratia marcescens
atggataatgttttgaatggaaaagaaacgggttggaacagtgttaacgacctgatccactatcatgaccgcggaaatggtttgaacatatataataagccatcatatgatattaatgcggctggtcagcagatatctcggagtgagcaaacatggaacggggtccatgtgactggcaaagaagcgaccgtgacttactctttccctaactgggattacggtcagaagaacttaaattctaatttcggcgtcaaaaaccaagacacaggtctgagtgaattcactccagaacagagggaacaagcgaaactttcattacaatcatgggcggatgtagctaatctcaattttattgaggtttctcccgatgcacattcaaatatcacctttggtaattttgaagatagcgggcaagcatatgccataaaaccccaatctggggcaggtaatgattatcgggggcataataccgatgggcaaagttggtataacattaattataactatgccgatacacgcgacggcgtgtatgcaaacttacatccagaactgggcaattacggccgcctcacttttacccatgaaatcggccacaccctagggctggaccatccgggcatttataatgctggtaaaggtagcccaacctatgccaacgccacctatgccgaagatacccgtcagtttagcgtaatgagctattggaacgaatccaataccgggggagataacggtggtcatttcgctgccgcgccacttgttgacgatatcgcggccatccagcatttgtacggcgccaacatgaccacccgtaccggcgacaccatctacggctttaactccaataccgatcgggatttctatactgccacggacagcagccagaaactggttttcgctgtctgggatgcggccggtaatgataccctcgacttctccggctattctcagaaccaacgcatcaacctgaacgaaggttctttctctgatgttggcggcctgaaggggaatgtttccatcgcggccagtgtaaccatcgaaaacgccattggcggttcggggaatgacgtgattgttggcaacgtcgccgataacgtcatcaagggcggtgctggcgacgatgttatttatggcggcggcgggcaggaccagttgtgggggggtagtggcaacgatatcttcgtattctctgacctgaatgattcacctacccagtcccccgatataatctgggactttgagtcaggcaaggacaagattgatctgtccttctttaaccacggcgataaaggcagtgacttcattcattttgtcgaccatttcagcggtcaggcgggggaagcgctgttgtcctatgatgcacagagcaatctgagcgaattggcactcaacatcggtggcagtgccaatccagatttcctggtgcacctcgtcggtcaggctgatgttgccaccgactttatcgtataa

SEQ ID NO: 437656 - DNA, 123 bp, Serratia marcescens
atgtcacttatccgaaaagccttccaacgactgcattatcccgtcgatattatcgcccaatgtgtgcgctggtatctggcatactcggggtttgagggccaatggaacgaaaacgtacgttaa

SEQ ID NO: 437657 - DNA, 651 bp, Serratia marcescens
atgaacaaatcgcgctttgcattcacgctggcctgctttgcgatggttctgctcatggtgggcttgaccttttacccctggttgttaaccgataacgccgattttgtgcaaacaggtctgatgttgccagttctgtatctccttgaattcttggttattgtaccgttatatgttgtctgttttagaaaaggacacaccatgggcatgggggaagtcaacggacggttattgattgcgttcatcttgttcattctgctgacccaatacctgggcgcctatattttggggatcaggaaagcagaaagctggatgattgaacaagaagcggtgagaggcgaattattttgggcaaacacgctcctgctggtctttcttgttccagtttacgaagaaatggtgttcagaggatgtcttttcagtgggttgcttcaggttttcagaggaaatatctacctttctgcgctcacgacgtcaactgtctttgccattctgcatacccagtactcggatatacgcacgttcgtgatcctggcgctggtgtcgctgcttttgattgcggtacgtattgtttcgaagggattagccatgccgatactgctgcatatgctgatgaatggttttatcataatggtcggatattatttttcttga

SEQ ID NO: 437658 - DNA, 219 bp, Serratia marcescens
gtgacaaaattttggcgggttcccgcttacaaccccgaaatcgccgcctatgccggccagcgcgatccgcgcaccacccagatatacctgcacctgtccggcaccgatctggcggccaaaatggccggggtgctcgcggagcaggaccggcgcgtcgccagccaggtgtttggctacccgcccaatgtcccatgccgactgaaaatcgccccccggtga

SEQ ID NO: 437659 - DNA, 768 bp, Serratia marcescens
gtgctggcaaattggggcataaccagtaaaacccaggacggtgcctttgcggctggcgtcgtgtcgggtatcccggttgaaatcaacgatacggtggatggtctggtcgccgtagccagtaatcctcgtgaggccgcggatgcgttgatagccctgataaagaatgatgatcgcttctcgatcatcagcaagagtgtgaaacaggaatacctggggcgagtcgaagcattcaagacgaagtatgaacacgcaggcatcgacggggcttacggtgtcgggctggagtttggtaaactgacgatggccgggctgggactagttgcaggtgcggccggtgccggcaaactgggcgtcaagataactactaatagcatcaaggcgctagagaaaacaacggtaaaagatctaagggcacttggacttactcaagagcagcagacgataataaaaaatgccgaggggatctctactgcgaaggctcaccaggcaaccgctcctcgcgatttgaatgaacaggtgttatggaatttggtgaagcaaaaccctgaaaaaggggtaggattggatctgaataaagatcccaaattttctactgccgctgggttcaaaaaaatgcaagtaacacataggcttcctgacggtgattcgattactattcactatcagtataatacgtatactgggaaggtatacgatatgaaaattgctacaccaaaacgtaatgatttgcagccaggtccatccatcaaggaaaataaaacgccatga

SEQ ID NO: 437660 - DNA, 645 bp, Serratia marcescens
atgggtagttccaatatcgatctcactttcccgatgcttgagtatggggcctctgaaacgccttgggaccttagaccgctgctgttttgcggaggcgcagcggcaaaggtaaagtttgtggcccgccagatcgcccaaggcgagttcggtagtcccttggcggaacgtattgagctggtgaaaaggttacatgaacatatcaccggcgatcttgccggcggcggtagccgcttctcggtgcagaacaagataggtgcgttgcggagtttctttgcctggtgcgatttggaaggcggtaacctcagcctcgacacggtggccgacactttcattcgttgggctgagcatttgttacatcgttatcgggttgagcacagcctcagtgaggggacgttatacgatctctccaggctcacggcgacgatgcttgaccgggcattggatcgccaggcgagtttgagcaagagtacgcgtattcgcaagccacgcggtaaaggcaaggtgcatacgagcaaaacggataagcagggcctgcaagatacctttacattcggacatgtcctgactgatatatgcaatgccctgacccgggaagcaacgatacccacttatcacacagccctggggtacaaaaaatcaccttaa

SEQ ID NO: 437661 - DNA, 753 bp, Serratia marcescens
atgagttggagtgaatataactatctaattttactggtaataactcatgtccatactcgaacatatttcctttacatcgatgagtcctttttacacgttactggcatcgatgccgttgagtcattcgaagactttggtcggcgcgttcgtgataccgttctgcagcaaacaggactcacctgcggcattggcgttgcacagacgatgactttagccaagctggccaatcacgctgcaaagacctggcctgcaacgggtggcgttgtcgatttaacgaaccgcgacaggcaacggaagttgatggggctgctgccagtcaacggagcttggggatgtgggcgccagttgacgaaaaagctggccactatggggatcacgacggccctgcaacttgcggacagtaaccaggcgctgatacgccggacatttggtattgtgttggaacgcacggtgcgtgaactcaatggagcgccatgcatctcgatcgatgcgctgccgtcaaaacagcagatcatcgtcagccgctcgtttggccagcgtatcagtcagctgcaggacatgcaccaggcggtatgccagtacgctgagcgcgccaccgagaaacttcgtagagagcggcaatattgccgctctctacggtgtttttgcgagccagcccgtttgcccctcacgaaccctattatgcgaacagcaacagcgtgcggcttatgctggccacccaggatacacgtgatgtcgtggcggcggcagtga

SEQ ID NO: 437662 - DNA, 333 bp, Serratia marcescens
atgctggccacccaggatacacgtgatgtcgtggcggcggcagtgaaagcgcttgaagccatctggcgtgacgggtatcgctaccagaaagcgggcattatgttgaacgatttctgcgataagcctggccagatcgatctgttcgacgaacatcctccacgtgccgggagcgagcaactgatgaacgccatcgatggcataaatcattctgggctgggtaaggtttggtttgctggccaagggataaataaagcctgggcaatgcgtcgcgaactactttccccgtcttacacaacacgactgagcgatatcccgaacgccagattgatgtaa

SEQ ID NO: 437663 - DNA, 183 bp, Serratia marcescens
atgtttagaaggatgattaataggtttagtaagggggtagattatgatacggaattcgcctctgctgtaaaacactccagaaaatggaatcttgaagtgcctgagatcaagctgagtaaaactccatttctgactggggataaaagtgaagctgcgctcaaggtaattcaggatattgcttaa

SEQ ID NO: 437664 - DNA, 1041 bp, Serratia marcescens
atgatgaataagttaatcctgcaggtcagtgatcttaaccggccctggagagggaacgacccttttttattctgtgcttatcatgtggataattaccctaagggtaatggtcagttaggtatcgacgccaaattactgaatgaccgcccgctaggaagtgatttcagccacttacatggatacagtatgtatcatggcagccctgtgccaggttttcctgtgcaccctcaccgtggctttgaaaccgtgacgatagtacgttctggttatgtggatcatgcagattcgctgggtggcacagcacgatatggcgcaggagacgtacaatggctcactgcgggggcgggaatacaacatgcagaaatgtttccattagtgcatacggataaacccaatacattggaattattccaaatatggctgaatttaccctcatataaaaaaatggcaccgcctgccttcaaaatgctgtggtcggaaaatatcccccggtacgtcagcaatggcgctcacgttgatgtgatagccggacaatttcaaccttttgataacagtgacgcattggagccgcaatccccaccagagaacagttgggcggctgatacccagtcagaagtggctatttggtctgtttctcttcagccaggctctgctttaactttgcctgctgcccgacagaaaaacaatcagaggactctgtatgtctttgatggcggcggtttacaaattgattcacaggctattggtgcgagcaagtgggtccaggttgatgcattacagccattaccgatttctaatcatgggcagcaaaacgtgcaattgttattgctgcaaggagtaccattgaacgagccggtcgtcgctgcaggtccttttgtgatgaacacggaggatgagatccaccaggctacgttagactatcgacgtactcgatttggtgattggccatgggctaatgacgaaccaacgaatggcgatagtgagcaacgctttgcccgctatcctgggcacgtagaggtagacacaccaccattgaagtaa

SEQ ID NO: 437665 - DNA, 948 bp, Serratia marcescens
  misc_feature (174)..(183): n is a, c, g, or t
atgcgaatgctaaaagtagaaggctataccgaactcaatcaattaggtgtgactgaaggacccaaacctgctgtacaaccgggtgaattattaattcgcgttgctgcagtcggcgttaacccactggattggaagttacttattggcagtatgaaaaacgtcatgccgaccccnnnnnnnnnnccgacccccttcccgtttattcctgggtttgagggttccggcgttattgacgctattggtgaaggggttacggggtttgctttgggagacaggatttatggtcgctcccgcgccatggcggcagagtatgcggtgatgcgcccagaaatggtggctaaggttcctgataacatcagtttacttcaggctgctgctatccctagcggagcgcaagtggcttattctgcgttgcataatgttgctgaaatacgggccgggcaaaaaatacttattcatggggcttctggtggcgtgggccaatatgctgtccaattggctgcgctggcggggggggaaatatgggccactacgtcaccgaacaatgttgataccgttaagaaggccggtgcccatcatgtgatcgattaccagcaacagtcatttgaagatatcgtacatgatatggatattgtcttgaatatcgtcaacgatgatttggaaaaacgctcttggtctactttaagtaatggtggcttgttgattagcttattacgtcagcctgtgatccccgaagatgcagttcagaaaaataaaaaaggtcttttcatgcagggccttcagggctcacatatgggaaccattaatcaacttgtgagtgcaggtcagatacagccccaactcgacgatgtgtacgatttagctgatgcggccgctgcttatacaaaaagcaggattgggcacgtacgtggtaaaattctgctgcgcattacacccgagctgacataa

SEQ ID NO: 437666 - DNA, 609 bp, Serratia marcescens
atgcatcttttacacattgattccagtatcctggctgaccattcagtcagtcgcgctctgtctgctgctgttgtcgcacagatggaggcaaatatacctaatatcagtgttacttatcgggatttagccacagagactattcctcacttttccagggcctatttggccgcagctcagcagggggagggtcaacacgatgttgcactgcaaaaagatcttgcactgggtgcactggtgttggaggagtttcttgccgccgatattattgtaataggggttgcccagtataattttagcgtcccgagccaacttaaagcctggattgatcgggtagcagtggcaggtaaaacattccgctataccgataaagggtcagaaggattagttggcaataagcgcattattcttgcggttgcccgaggggggttctatggtcaggggtcacccactgaaagttttgaacacaccctgagttatctcaaaagtatactggctttcttcggtattacagatcctgacattatcactgctgatggcgttgctattagcgctgagcaacgtgaggtctcagtatccggagccttggagaaaatcgcgaatttacagtaa

SEQ ID NO: 437667 - DNA, 525 bp, Serratia marcescens
atgccaaaatctcgcaaactcccggctgcgctgggaattcatctggatgtcaccaaccgcctgtggcgcacagccatggatcaatcggttaaaatgatcaacctgacgcgtccgcactggctggcgttgagtgcaattgccgatcttggcgatggctgtaccttaaaagacatctcgttgcatctgaacgctgaagtatcgaccatgtcgcgtgcgttgctgtttctggaaagaaatcagctgattgtgcgcgatatctcgacggaggacaaacgtgctaaaggggtgcgaatgattcaggctggccagaaaatgctggcgcaactggaccattccagccagcaggcacggcatatgctgctcaatggtgtttctgctcaggatctagacgcgttttaccgcgtgctgttcggcattaaacgcaatgcaatcgcgatgcttgagcaagagaatctgttgccagaagagttcgcgttgctggcggcagagttggcgaataccgccgatccggattgcgaatcgtga

SEQ ID NO: 437668 - DNA, 1335 bp, Serratia marcescens
gtgaacgcccgctggccggttgttcagggggggctgtgcgccattgcgctaagcgtttttggccactcggctgtcgctgaggatgagcagatcatcgcccgcggcaaatacttagccatcgctgccgactgcgccgcctgccatcgcggtgccactggacatgatgcgccttatgtcgggggttatgcgatagcctcaccgatgggcaatatcatcgccagcaacattacgcccgccaaagacgccggtattggcgattacagcgagcgggattttcgacgcgctctaactgaaggcattcgccgggatggtcaaccgctgtatccggccatgccttatactgcctatcagggattgagcgacgatgatctgcacgctctgtatcgctattttatggccggcgtcgccccagttgaacgtgcagccccgccgactcaattgtcctttcccttttcctggcgctatgccattcacggctggaattggctatttctgaaaaagacggctgtcgatgaaggcgaaacaaaacaacgcggacgctatctggtggacgtattaggtcactgttctgcctgccatagcccgcgcaactggatgatggccgaacggggtgagcgctatctggcaggcggtgaggttggcggctggatagcgccgaatatcacctcggatcccatcagcggcattggcggctggagtcagggggaactgatggagtatctgcgcaccggtcgcaatggcaaagcgcaggcggccggcggcatggcggaggctgtggagcatagcctgcgtttcttgagcgatgacgatattgcctccattgccagctggcttaaacaaacgccgccaatagccactgttcaacggccgaaagccgcctatcaatatcaggggggcggtgtcggtaacgccgcgggcgctgcgctgtataccgccgcctgcgccagttgccaccgccttggcggtgaaggcgcttacggcggccacttcccttccctgaaccataactctgcggttggccgtgagcaggcgaacaacctggtgatggtcattttgcacggcgtaaaacgccagagcgataacctcgagatctggatgccgggttttgccgacagtctcgacgatcggcaagttgccgcgcttggtaactatatattgcagcaattcggcaatccttccgccaaagtgacgccgacgttggtcgcggaactgcgcgccggcggtaaaacgccactgtcgatcagactgttgccttatttgttgtggggtggtctgttgttgattttgctggccgctggcgggcttatacaggcgaaatgtcgcgcgaagcgctga

SEQ ID NO: 437669 - DNA, 453 bp, Serratia marcescens
atgaagtttaatctgaacggccgcgaggtcgagtttgacggtgaggccgataccccgctgctgtgggttatccgtgaacattttaaactgaccggcaccaagtttggctgcggtattggtgcctgcggcgcctgtactgttcacgttgacggcatggcagtgcgctcctgctgttatccgctgcagctggcaatgaaccgcagggtggtgactattgaagggttgtcccccgatcgtagccatccggtacagcaggcctggattgccgaagacgtgccgcagtgcggctattgtcaatccggcatgatcatggcggtcagtgctttgctggcggagaatgcgcagccgagcgacgatcagattgatgagcgtctgaccaacctttgccgttgcgccacttatcatcgtattcgttcggcggtgcatcgcgcggccggcaatgggggggaatga

SEQ ID NO: 437670 - DNA, 2241 bp, Serratia marcescens
atgacgatggcgctcagccgaaggaccttggtaaaaggcggcgcgctggccgttgccgcgatgctgctaccgatatcggcgcgaagtgtcgccgcggtgatttctcagaatacgctgccgccggacgcccaacatgagttgaacgactggatttggattgatcgcgacggccagatagtgatcggcgtgtcacagtgcgaagtcggtcagggtatatacactggcctggctgaggtggtggcggcggaaatggatgccgactgggagcgggtaacggtgaaatttgtcaccggtcgggatgcctatcgacaggttgccgggggtgaatctttcgcgcagttcgtggctgcttccacctcgatgaccaagttttatcagcgtacccggttggcgggtgcacaggcgcgggaattctttctccacgccggtgcgaagcacctttctttgcggtccgagcagtgccgcacggaaaaaggttgggtgttggatgccagtggtcgccgacgggtggcctatggcgagttgttgcactatgcagcaacgttacctctgaaccccaaaccgcggctgaagagcgacgaacaggaaaaacagagcatcatcggtaagccgttgctgcgggttgatacgccggaaaaagtcgatggcagcgctatctacggcattgatatcgttctgcctgacatgttgatcggtgtgccctggatggtgccggatctcagcggcaaaattatcaccgtgcgtaatgaacagcagatacgtcgcattccgggcgtggtcgatctggtgctaacccgccagtggtcgatgaataatatggttgggctggaccacgatatgtcgctgaatacggtagtcgtggtggccaaaacctattggcaggccaagaaggcggcagacctgctggaggttgactaccaatctggggagggggcgacgctttccagcgctaaaattgcggcggagaaccaggccatgctcgactgcggtgtcttggcgcaggcagtgaatcgcggccaggcggcggcgttgatccaggctgctgccggcggtacgaagtggcatgaggcgcgttacagcgccccctatgtggcgcatgccactatggagccctgcaacgccaccagtcattataccgccagccgcatagaaacctggggcccctttcaggggcaggatatggtgcgtggcatattggcgaaaatgtttgcacttaagcccgaagacgtggtggtcaataccacctatctgggcggcagttttggccgaaaatacctgccggacgcggtcatgcacgccactgccgcttcaaaagccgtaggcaagccggtcaaggtgatttatccgcgcgagatagacattcgccatgaatattatcgcccggcctgcgtcagccactatcaagcgctgttggatgaggagggttatccgcaggcgttatgggctcgctatgccggccagtcgctgttttggcagatgcggcgcgaaacggtgcacaaagcaggcggttgggatgaaagcatggttgaatgcgtttatagcacgccgtatcggatccctaacctgaaggtggaggctggcatcgtcgagcagccggtgtcattgagctatctgcgtggcgtgggcagcgtcgccagcctgtttttccttgagagttttatcagcgaactgagcgttaaggctaatattgatgaataccactatcgtcggcgtttattgcagggtagccccaaggcgctgcgggtgctggacgccaccgctgcagcggcggattgggaacaaacgcctgacgcgggtatctataaagggatgtcgtgcaatatctgggttggccgtgataacgccttcaccacttacgtttgcttggtggtcgaactacgggttaatcaggggaggttgcaggtaattcgcgccgtatgcggcatcgactgcggtaaggcgatcaatcccaacctggtgcgtgcgaacgttgaaggaggcattggttttgcgttgaccacctgtctgaaaagtgagctgaacttcgaacggggcggtgtagtggaaggtaatttcgatcgctatccgctgattgctatcgctgagatgccaaaggttgaggttgtcgtgttagacagcagacgcgaaccgcaggggtgcggtgaagtttctaccgcggtggtggccccggcaatagccagcgcattacataaggcgacaggcaaaacctatcgtgatatgccttttcctcgttggttttaa

SEQ ID NO: 437671 - DNA, 966 bp, Serratia marcescens
atgtctacggaatcgagggcactccactgtcgcggaaaggttatttaccgtaaaaagtttacccgaccaaagctaattgaatttctggcaacatgtccggcaacaaccatcgcgatggaagcctgtggcggttctcactttatggcccgtaagctggcagaattggggcattttccaaagctgatatcaccacaatttgtccgaccatttgttaaaagcaataaaaacgatttcgttgatgccgaagctatctgtgaagctgcatcgcgtccatctatgcgtttcgtacagcccagaacggaatctcagcaggcaatgcgggctctgcatcgtgtccgtgaatccctcgttcaggataaggtaaaaacgactaatcagatgcatgcttttctgctggagtttggtatcagcgttccgcgaggtgctgccgttattagtcggctgagtaccattcttgaggacaatagtttgcctctttatctcagccagttattgatgaaattacaacagcattatcactatcttgttgaacaaattaaagatttggaatcccagctgaaacgaaagttggacgaagatgaggttggtcagcgtttgctgagcattccctgcgtcggaacactgacagcgagtactatttcaactgagattggcgacgggaagcaatacgccagcagccgtgactttgcggcggcaacagggttggtacctcgacagtacagcacgggaggtcggacgacattgttggggattagcaaacgaggtaacaaaaaaatccgaactttgttggtccagtgtgccagggtattcatacaaaaactagaacatcagtcgggcaaattagccgactgggtcagggagctattgtgtcgaaaaagtaacttcgtcgtcacctgtgctctggcaaataagctggccagaatagcctgggcactgacggcacggcagcaaacttatgaagcataa

SEQ ID NO: 437672 - DNA, 375 bp, Serratia marcescens
atgaaaccgacgctgtcgcgtgaacttgcactggatgcgctggtgatggccgtctggcggcgtaaacctgccgaaagcgtgatggtgcacagcgatcagggcagccagtacggtagtgatgattggcagcggttttgccggagcaataatctgaccccgagcatgagtcgccgtggcaactgttgggataatgcagtggcagaatcgttcttcagttcgctaaaaaaagagcgtgtcagaaagcgaatatataaaacccgggacatggcccgggcggatatattcgattacattgaagtgttctacaaccgtacccggcgccacagtcatctcgggggcgtcagtcctgaggctttcgaaaaggcctcgccgtga

SEQ ID NO: 437673 - DNA, 894 bp, Serratia marcescens
atgattaaacagtgttttaacaaccattttcgcctgtaccctgtcgagaacctctcgccatcaagatcgattccggttaatgtcaggtccagcaataagtacaaacaaatactgacatcaatagctgaaataggtttaattgagcccattataatttttatttcggacaacggagagcataaagtcctcgacgggcatttgcgtatcgaagctttaaaagacctaacaatcacacatgcccattgcctcatatcaccggttgaagacacatactcttataacaaacgggtaaatcacttgaccatactgcaggagcaaaggatgctccagaaagctgtggaatctggtgtatcagtcgaaaaattgtgtgctgttcttgggttatcccagggaattattaacaccaggctccgtatttccgaagggatttcaaaggaagcgctcgcgttactggctgataaaaacgtgtcgcagaacgtcttcgatgtcctaagaaaaataaagccccacaaacaaatggattttgtgacaacaatggtaacattgaataatgttacaaaaaaattcgctctgtctatgttacataccttacctgctgaacatttggtcaggaaaccggataatgctcccgaagataaagatatggtcaaaacgcttgcgcgacttgaaaaagaaatggccgcacttcaggttgaaacgcaagatatccagaatgaatttgcagaaaataatctcaacctgatggttgtgagatcatacatagcaaaacttctcagtaaaaatgagattattcactggctttatgataacaaaagtgagtatctggacgtcttgaagaaggttctgggggttaaacatcttaacgaagttcaatccgggcaacattctgcctga

SEQ ID NO: 437674 - DNA, 867 bp, Serratia marcescens
atgtctgatgaaaaagttgtacttatagaaacaaacaaaatactggtcgttaaccctcgtcaacgggatgaattcactcataaagagattaaagagaatattcgtcaaattggtctgaagcgccctatcaccgttcgcagaatcgttcacaatgaatatgaatatgccttaatctgtggccaagggagacttgaagcttacattcattatcaggaaacatacatccccgctatagtaaaagacgtcaatgaagaaacaggccacctgatgagcctcactgaaaatattgccagaaggaaaccccgggtaaccgagcttctggacagtgtaaggcagttaaagaagcagggattgactgacaaggaaatcggtgagcgactgggatatgtaatcagctgggtccagggcgtaagcagcttgctagaaaaaggtgagaaaaaactattggccgcctttgaggccggcaatattcccttgtacctcgcggtagagatatcccgggcgaccgatgagtcgattcaggattccctgacagaggcgttgctgaatggcactatcaaaggtaaacacattaacatcatcaagcgaattattgacaatcgaaaaaatggaaataaaggttcaacgaataaaatgtttactacccggcggtttcaaaagaaatattccccagaggagctcgctgtaatgtatcaaaaaaactcagatgaacacaaagaaattcaggctaaagcgagatattccagagaaacactcaggctggtaaaagaaatattcagacaactcactcaggataataatttttgcgaattattgagtaaaaacaacattactgacatgcctgaaatattatcccctgcacggtaa

SEQ ID NO: 437675 - DNA, 885 bp, Serratia marcescens
atgttcaatgatgaaggtaaaccagaattagtcatcgcctctgagttgaatcgccggcaggtccttgctgaaaatggaagctgctggagcagagcaaaagtacatcagatcctgaccagtgaaaaatatataggggacagcgtttataacaaaacatctttcaagctaaaacaacagcatgttgtcaatccagaagatgaatggatacgttacattggcgcttatactcccattgtcgcggttgaaaaatttaaccgggctaacgaaattatcagagcgcgtactgcacgactatcagaagatgagctgctcgataaattacgaacactgttgagaaaaaaaggcagattatcaggcattatcattgatgaagaggaacttcttccatccagcagtatttatcgctctcgttttggaagcctcttgcgtgtgtaccaattaatcggctacaccccggagactgattacacatggttaaaaaccaggcagctgcttaatgagttcaacgaccggtcaacccaaaaaattatcgataacatcagtcatgaagggggatggataagcgatacaccagcaccgggaatacttcacatcaatgatgaatttactcttgccatacagtccgcacgctgtcagcgagtcggccctaaaagacttcggtggaaaataaaattcagaacaattttttctcctgatatcagcatcgccgtcagaatggacagctcaaatcagtccgctgttgattactatatttttcccgcgatagatattctctcagagaaaatatcattacaggaaagtaacccttaccaacttgacctgtatcgttttgatagcttaacccccttttatcgactaataagacgaaccaaattaaaggactaa

SEQ ID NO: 437676 - DNA, 237 bp, Serratia marcescens
atgaacaaaatacgtttaggtgcatttgcggggatttttgccgtcttggccatcatttttttcttcatgtttgcggggcaaatgacgcaaaatggggcatggacatccatgcctgcactagccttttcaataattagtgcggcagccgccgtagtgatgcttatcggctatgttttgtctgggcggaatcagaaaagcaatggtgtgcatcagccacccacggagtcaggcaaatag

SEQ ID NO: 437677 - DNA, 1260 bp, Serratia marcescens
atggcactgactgacgctaagatccgcgccgctaaaccagatgaaaaaccctataagcttgccgacagtggcaacatgtttttgcttgttcaccctaatggctcccgatactggcgactccgttatcgattcctcggaaaggagaaaaccctcgcattgggtgtctatcccgaaacatcattatctgaagcccgggtaaaacgtgatgaagccagaaagttgatcacagaaggtctcgatccctgcgaacaaaaacgtgttaagaaatccgggccagatgttgctcatacgtttgaagctgttgcccgccaatggcactgcagcaataaaaagtggtctgagtcacacagcgagaaaacgctcaaaagtcttgaaacccacatatttccattcatcggatcgcgagatatcaccacgctgaaaacacccgatcttttgattcctgttaaagcggctgaagcaaaagagatttacgagattgcttcccgcctgcaacaacgtatctcggcaattatgcgatatgcagcgcagtccggtatcatcagctataacccggcggttgatatggcgggcgctctgactaccgtaaaacgtcagcaccgccctgctcttgccctggaacgtacctctgagcttatcaaccgtattgaatcctacaaaggccagacactgaccagccttgcgacaaaactgacgttgctgatttttattcgttccagcgaactgcgttttgcaaggtggcctgaaattgattttgaaaaatcaatatggacgatccctcccgaacgcgaacctcttccgggtgttaaacattcgcaccggggttctaaaatgcgcacgccgcacttagttcctctgtccagacaagccctggaaatcttgcagcaaatccacactatcagtggcgagcatacgttggtctttacgggtgaccataacccatggaaaccgatgagcgaaaatactgtcaacaatgcattgcggctaatgggctacgatacgaaagtagacgtttgtggtcacggcttcagggcaatggcctgcagctcactgatcgaatcaggattgtggtcaaaagatgcggttgagcggcaaatgagccatcaggaacgtaacggtgtccgggctgcgtatacccataaggcggaatttctggacgaacgcagactgatgctgcaatggtgggctgattttctggatgcaaatcaagaagacgtcatttctccctttgagtatgcaaaaagtaatactgcccggtga

SEQ ID NO: 437678 - DNA, 966 bp, Serratia marcescens
atgaaagaattgtgcgtatcaaaaaaagaagtaggtcgcgctggtgagagagttgttgctagctatgttcaaaaaataaagtataacgaacaggatgtaaaaatactacatgattggagaatgctgcatctttacccattaaataaagttaagtattatttaaatagagaggcggttagggtcaataagaatgcattagtttcctcaagaataaaaaggctaccatctattgttgcaaagttatccaggtttcctgacatgagactacacaaaatgcaagatcttggtggatgtcgtgcaattgtcgataatttaaatcaagtttacgagttggttaataatataaaaagattgagaacaaaacacgaaatatatcatatagtctattcatttgttaatgataaatacatgtttttaaatgggttgcgggttgaggttcaaataagaacagctatgcaacacagttgggccactgcggttgaaatggttggtttattcaggaaggaacagctcaaatctagttttggtgacattgaatggttgcatttttttaaattggtttctgagcttttttataatattgaaagtgggaaaactaccgggagttatattcgcacgtcagaggagttaaaagtactttctgaaaagctgagggtttttgatatgcttagcgcatataataaagctgttcatataatcgatggcagtgaaaaatataaagatggactttgtgttattcttgtagatacgaatagcaaagaaataaaaattagtggctttgatagttcaagtcactctaaagcttcaaagttttatttcgagcaagagaaatactgttctgataatgaaggatgcgaggttgcaatggtttcagtatcatctattggtgatttgaaaaatgcatatcctgcatatttgcttgatacaagaacttttttgaataatttgggacggtttgttttttga

SEQ ID NO: 437679 - DNA, 927 bp, Serratia marcescens
  misc_feature (5)..(38): n is a, c, g, or t
atgtnnnnnnnnnnnnnnnnnnnnnnnnnnnnnnnnnncgacaatacgctaaatgtgatacctaaagataacgaaaagatcaaaatttttggttatcgatgggataatgatttttccgaaccgcggaattatgcaatagatcttgccacaggaccctattgtattgttattgatgctgacgaatatctagctgagagctgtctaaatggatttagagataaaatatattcactattttgtggagaggaactaaccctatatgcgccagctatagataacatgaatggctctgtattaaggaataatgcaaggatttttatgaaaagggcctctttaagatataaaggatttgttcatgagtatctttatgaagataattatactataaagtacacacctgaaattatattaaagcataccgggtatttagaacatagagaattagagggtaagaaaaatagaaacttacgccttttgaagcgtcagttggataagacaccaacagaactaagatggaaatatttcatgcttagatatttagaatcacatgataaacaatttgaagatattctcaatgagtttggtaggttatccctgccttacaatcgtgatatcgaaatatatgcacttaacgtaaaatcgagactgataacatacctcttagataaatctaattttgttgatgcatattttcatgctgatgagcttttcggaatctacaaagataaaaatagtttcttgcttcattttatttctctctacttgatgtcaacccaacgttaccataatgatatgcttaatttgagagaagagctcaataacattactaattatcctcatgacgagttcataattgaaactatagatgaggaagctgtgtcagcaatcatgaatagttttctgctagactttgattacataacttga

SEQ ID NO: 437680 - DNA, 363 bp, Serratia marcescens
gtgaataaaaatgagattttaaaagagctagataaaatagagagtgatatagggtgtaaattccctgtattatataagaaatttttatcggaagaagtgggtgattctgacgcatatgaactcacaaagaaaaatggagaggctctctatatatttaattataaagatctagttgaacgtaatgatacatatgctattcaagactcggtgcctgactttttattgatagggcaagatggtgatttgggttattttataaacctaagtgatgatagtgataagatatatagcttagacctaggtgcgcttggcagtttggatatggatgaagaaggaaaagatctttacagtttacgtatgtaa

SEQ ID NO: 437681 - DNA, 630 bp, Serratia marcescens
  misc_feature (602)..(610): n is a, c, g, or t
gtgaacaaactgattatcgctgcggcggaagagggcactggcaataagtacctgattcagcatagcgcgggctccggtaaatctaactctattgcctggaccgcccaccaactttctcggctgcatgataagcaaggcgagaagcaattccactcggtgatcgtggtgacggaccgtaccgtgctggacgaccagctccaagacacgatctaccagtttgagcatcaagatggggtggtcggccgtatcaataacaaagaaggcgacggttctaaatcagagaaactggctagcgcgctggaaaactcgcagccaattattatcgttaccatccaaaccttcccgcatgtgctgaaggcgattgaaaatagcgtcagccttaagcagcgtaaatatgcggtgattgctgatgaggcgcactcttctcagagcggttctacggcgcgtcagttgaaagaagtgctgatgacggaggaaacggatgacgatgcggtgatgacctcggaagatattctcgatgccaccgtcgccgcacgtaaaggcagcaacaatctcaactactatgcttttaccgccacgccaaaagccaaaacgttggagcnnnnnnnnncttcattctcgatgtcctga

SEQ ID NO: 437682 - DNA, 1155 bp, Serratia marcescens
  misc_feature (1090)..(1099): n is a, c, g, or t
gtgagtcgatcagaatacatttatctaattaagtgtacttcttggctagctaaattcctctcccgcagaggattgaagcaaccagaccgccgcccattatatgaataccacgcaacgagtgatgagtatgatgagttgaagcagttgttgagagctatagggctacccgatggctacaggagtgataaaggatatgcagccagcttcacgttattctgctcagagtggtatagaagagattatgaaagggagtgtggatgggcatgggagcctatttataagactatcggtatatcagcatcttcatcggaaatggggaaaataattcctaaaggtctggatggatattggggacgtcctgtgcggttttacgatacagaaagacggaattttttaggatccctatttagtgaaggcggtctacctttcaggttgctaaaggaatctaatagccgctttcagtcgatgttctctctcattctcaatcaatacgatcaggcccaatcttctaacatttcaacgtttgctttagttcatgcggcggtagaaaaatcatccctgccagtcgttttcaaagaggatacttcagttgagcttattagtcggatggctgaacagttagtgtctcttgtgcaaatttatgacctgagtaaccacaccgaacccgtaaaagagcttgatcgtgttcatcctaagtggcgggacagcttccccgttccgcttgatgatgatacggggaccagtttccttaatggacttttacgagcagcttctactgaatccaaacctcgccttcaaaaaaatagaacaaccctatgtcagttcttatggtcagagaatcatcctgaagctttacagtcgcttatttctcttccagaagagctgagtttttcgattgatagtgaaccttctacaacacgtttcgagcttgccatctatgaagatggtaacgaaattgcgagcctggggcctgcctatgcaacgctgagtaattcacaggcgaaaatgagagttcgtaagcgtgaaattaagttttttcgaaaaaagcccgctgccagcttatttattgtggcgagagcaggagggatgnnnnnnnnnntgtcggaaccagactgttggagggaagtgaggttgccgttggcgatgtgccattag

SEQ ID NO: 437683 - DNA, 1008 bp, Serratia marcescens
atgggcaacagaatgtggatgatccgcggcgatggtggcaagctctatgacgattttcgcgataagcaaattgtaggcatcggttggtctcagctggctccattagtcaaacccggcctgtcccgagctcagttactcgccttataccaggaggcagatccattaacaaagctgggaactgcgcgttctggcgcatcgcaggtctggcgttttgtgaatgagatccaaaagggtgattgggttattacctattcgccagccaaccgtacttatttgctaggcaaagttacttcagatttccaatatcatcctgaatgggtggaagaggggatgggaatcgctcgacaggttaaatggaatactcaagaaattgatcgcgatcgactgtctgtagctaccaagaacacactgggttctacgctgacggttttccagcttccagaatatgcgctcgaagagcttttacaggataagaaacccactatagatgtgattactcagaatccagttgcgatggatgaagatgaggtcgtttctgatccgcttcgcgatatggaaatgctggcgtttgagggtatcaaagatcgtatcaactctcttgattgggacgagatgcaaaatcttgttgccggagttttacgcagtatgggctataaaacgcaggtttcacctgcgggagctgatcggggtaaagacatcatagcttcacctgatgggttcggttttgaaaatccgcgtattatcgttgaggtaaagcaccgcagggaacaaatgggaagccaacagatccgtagctttattggcggtcgccataaagacgatcgcgggctttatgtcagtaccggtggttttacaaaagatgctcgctatgaggccgatcgttcgacgatacctctgacgctctggacacttgatgatctcgtccgagcgcttattgagaactacgagcaagttgatatcgagaccaaactcttggtgcctctgaagaaaactttcctacctgcctga

SEQ ID NO: 437684 - DNA, 441 bp, Serratia marcescens
atggatacacacaaccctgagttcgctgagcaggcagcaattactgcctcggtggtccctgacgagctacgcatcggcttctggccgcagcactttggctccatcccacaatggataacccttgagccccaaatcttcggctggatggatcgcctgtgcgctgattacagcggcggcgtctggagcttttacacactcagcaatagcggcgcatttatggctctggagcctgacggtgagaaatggacgttgttcaaccctatgaatggcaacgatgcggagatgagcggagaggctgccggtatagttgtctgcctgatggcttacagccaccacgcctgccgcaccgagtgtgacgctatgactggacactattatcgcttacgcgactacgcgctaaaccatccggaatgcagcgccattatgcatcttatcgactaa

SEQ ID NO: 437685 - DNA, 876 bp, Serratia marcescens
atgcaaaaaactgacggccttctggccattgagaagcctctggcttcactgcctcctactcttcgcagtcttattcttaaacgccttcgtagtctcacacagtacgagccggttattggcattatgggcaaaagtgggtcaggtaaatcgtctctctgcaatgccctgttccagggcgaagtcacgcctgtcagcgatgtggcggcctgcacgcgcgatgtgctgcgcttccggtttcgcaatggcaatcacagcctgatgattgttgatttacctggtgttggtgaaagcgagcaacgtgacgaagaatacaccgcactgtatcgtcgcatcctacccgagctggatttggtgttatgggtcatcaaagctgatgatcgggcactgtcagtggatgaacacttttatcacaaagtgatgctggcgtatcagcgccgggtgctgtttgttgttaatcaggctgacaaggccgaaccctgccatcagtggagtgttgccgataacctgccttccccggctcagatgtcgacgattaaggcgaagcgaaatgccgtacaacagcagtttctgccgcatcaccctgtttgtgtggtgtcagcccgaaccgggtggggtatggaatctctggtagataccatgatgtgcagcctgcctgaccgggccaccagcccactgacaacacaactgcacggaaggctctgcaccgagccggtaaaaaagcaggcttgtgagagctttgggcgtgcagtaggtgaggtggtgagcaccgcggaatcatcatcttttctgccagcgcctgtaagggctgtgattcggactgtgcgggaagctgtggtgaccgttgcccgtgccgtctgggactggattttcttctga

SEQ ID NO: 437686 - DNA, 573 bp, Serratia marcescens
atgcaatacaaacaacgatgggagcccgactggtttctgcagtctctcctggacaaccatatcgatacactggtagagcgctattcctgcctgcgggcactccgaatcgatctgttctatcagaaccataccgctaagttcttcctgcgtgatcatcgacaacttgaatgggatgtccgaaaactaatgaatcgtatgatgcgactcgaaacggtggtcggtttcttttgggttatcgaatggactgaagatcaccattaccacgctcacgttgtcttctggctggatggcagtaaaacccagaacacatatccctgggctcaacaagcaggtttgcactggagtgatatcactgagcaggaaggctggtatcaccgatgtgagtttaaagagcattacacggccaatatcaatattccggtgcgttacagcgatccgggtagtatcgccaatatccggcaggtgctggcgtatatggccaaagttcaacaaaagcaggggctgccgttgtttggttgcaatgaggtccctgagcgaccagcaaccggacgaccacgcaagactgacttctaa

SEQ ID NO: 437687 - DNA, 2388 bp, Serratia marcescens
atgacggcgaattatcagcatctaaatatttccaaagcccctcttcagaacgaccgacggacccgcagagtcaatatgcctcgtattcgcagaggcgatttacgtcagcatgggcaaatgttattgaaccagctccagactctgcgcccgatgctgacgcaggtaccaggcagcgccgctgatggtcgatatatactcaagctgaactacagcggcacgatgaacttttcggcattgatacatcatggcgtagagtttgttagtcaggaaaataaacaagtttgcgtagtctttagtgacgagcaagggctggctacatttgcagaacatctgtcatccctcggtctaggtaatacagaactaacctacaaacagatcctggaggcgcttgacggtattgagggctggtcggcggaagatcgcaaaagctgggctcttcggcgttatggttttcctgtagcggaacgctttaaactggatgtggagctctggcctatcgaagttgcgcatcatcccaaacgtatcgatctgtatacacgttttgagcactggttacaggagcaggatatttccaggcaggataaagtcaatctggacagcctgttaatataccgggtcgaggtttcattcgcgcaagcggaacacctattagctcatcgggacgttaggtttattgatttgccaccatctagtggcattagttatcaacaaattaaccgggacatcaatacacttccagctcgcctaagctcgccagcggaaaatgcgaccaggatatgtattctggatagtggtattaataccaaccatcctttgttaagcactgccattgctgaaagcgccagctttattcccgatcaagatgcgtttgatgaacaggggcatggcactgctgttgccagtattgctttgtatggtgatgttgaggcttgtaaccagagcaatttctggcagcctcaactatggctgtataatggaaaaatactgaacgagcaggctgagtttaacgccgaaactattgaagctacgcttgcagccgctgttgcatattttaccgatctcggctgccgcattttcaacctgtcattgggaaatgctaatgctccctacgacggcaaacatatccgcgggattgcgtatttattggatacgttgtccaggcagtacaatgtactatttgttgtgtctgcagggaattttgcaggtagtgatgaaccgcctgtgcctcaaaacagctggcgggatgagtatcctgattacctattgcatgaggcaagcgttatcatcgatccagctcctgcactcaatgtactgacagtgggcagcatcgctaggcataacgcaacgcacgatgcacaacgaaggcctgaggatattcagcatctctgcccggcaacagaaaatcaaccttcaccttttacccgtcatggtccatcaataaaaggggcgtttaaacccgacgtgatggcacacggtggcagtgtcgcttccaatgtgcggcaagggcaatggcaggcgcatatgcgtggtttgggcgtattaagttgccatcaccagtttcagggcactaccctgtttaaagagctcagcggtaccagcttcgccgcaccgtatattacgcatctggctggacgcctgttaaatgaatacccggatatgtccgccagtatgttacgggcaatgctggttaatcatgcatctgtccctcaggcgatgacgcaggctttcccgcaggagatgcgagaaagttataaaaatgcacctacaacgaaaaaccgcgagatagaacgtgaggtaacgggttacggcatcatcgatgaagatgctttataccgctcttcagaatatgtggtggtcatgcgatgtgaagagcaaatagaaaataacgcccaccagttttttgagctgcccttccctgcttcttttttaagatcacagcgggctactcgtgagatccgagttacccttgcttactcgcccgctgtgcgtaccacccgactggactataccgccacgcggatcagcttccggctggttaatggtcgctcgctggatgaggtgcaggccagttttaatcaccagacccagagtgaaacggaaacccgctccgatgatgcccaaactaaccgggttgtatctgctcaacagcgggaacgcggtacggtacaatcatcagtatggactttccgtcagcgtaacccgaatgaaaaatggtttatcgttgtaacccgtcaggacagagattggggcgaagcattcagcagcgagcaggagccttacgcactggtagtgaccgcgaccgatcgtgataacgaacaggctcagctttatacacaaattcaggcgcagatccgtgaacaggaacgcgcccgagcacgtattggataa

SEQ ID NO: 437688 - DNA, 1767 bp, Serratia marcescens
atgaaaattgactacgaccattatttaaatgaagaacagattgaagcatgtttttcccccggaaatgtactgcttgtagcatgtcccggaagtggaaaaactagaactcttatttatagaattgcttatgagctcgagaatattgatgagcataaatatgtagttgccattacctatactaacaatgctgcagatgaaattactgagcgaattgaacaccttggtgtcgatactagccaattgtggattggcacaatacatgcgttttgtttagaatggatattaaaaccctatggtatatatctagatgaactcaggtttggctactcaataataaatccatatgactctgaattagttattacggagatgtgcaagaaatacaataacccgaaaatcagattctttgattgttcttatcgtttgtcgaaaggtactgtctatttacaatgctctgacagaaataaacatagaaacgttggcttgttaattggtgaatatcatcagcacttgaaaaaaaatgaccaaatcgacttcgagattttgcttaaatactcatgcgatttaatatctaaatatcctgagatatctaaaaacttatcgtcgttgtttaaatctattttagttgatgaataccaagatactcgagatgtacagtacgatattttgaataagatttttatggctggtcaaggaagaactaaaggcttctttgtgggagatcctaaccaagctattttcacatcattaggcgggtttccaattgagcacaaagagttatgtgaaaaatcaggtttggattttaggctgctttatctctctgttaactatagatcgtcaccaaaaataatagagtttttttctggttttaaagtttttgcatctaaaatcaatccgtgtctcgacaatgattcgataggttttgtgtcatatactaatgcagtgaataaatctaaattagcttctgagatcggccggattcttaatcatgtgatttatgaaaagaaaatagaacaaagagaaatatgtataatatgccctcaatggatacctttggctagtttgaccagagaattatctggattatatcctgattttaattttgatggtccagggatgtctccttttggtagggatatagataacttctggtacaaattatgcaagctggctttaacaattcctagcccagaattgtatatgagacgaatgcgctggtcccgtgatgttattaatcatttatctagatgtggatatgtttacaatcatggggttagagattttttacgattaattaatagcatatctgttgatcttgaagatggtattgagtatctggagtcctatttcaaagaattctcatctaggatgggaggggatattactagttatcaagaaatacaagaacattataactcattctttcagtccgctagagatagggttggcagactaaaagaaaagaatattacagatgtagatacgatatcctattttaggagggtttttaagcctaagggaggggttgttatatctacggttcacggagcgaaaggtaccgagttcgattgtgttatttcctatgggcttattgaggggatggtgcctttttttgcagacccagatccactaaatagtgcaaataaaacattgtatgtaattgggtccagagcgaggaaatatctttttatgatctcggaagttgatggtaattcctcaccaactcgtattttggataaatatgattttgagtatgatcaattttaa

SEQ ID NO: 437689 - DNA, 2142 bp, Serratia marcescens
atgcatatctcgaaagttgttttagtcaattatagaaatttcagacatgaaaaattcttattcgaaaagggagttaataccataattggagagaatgggagtggtaagagtaacttatttagagcaattagaattatgttggatcaaaatctaataagatctgcatacactcttaatgaaaatgatttccatagaggtatatgtaattggaaagggcattggataataatcaatgttgaatttgaaagtattgacgaatcagagactattttatcattattgcagcataatggaacggttataccttcatcccaacctagcaaggctacatataatcttatttttaggcctaagtataatattcggaaaaaactatctgagctgcctataggggatatagatggcttaaatttaatcttaagtgacgttagcattgatgactacgaaactattttcacgggacgaagcgaagctgatttttcgaatccagatgtatataaatctatcgtaggtgactttgatgctatttcatttcctaaaaagatagataataaattaattggaatacaagttccattacaactttctgtctctaaggaaatctcatttaattttataaaggcgctaagagatgtggtatccgagttcaataacaacagactaaatcccttattgaatctgttaagacataagagtgaaaatgtaaaacaaagtgattatagttctattattggcgggattaaaaatctcaatagtgatattgagtctcttggggacgttgttgacgttcgtaataacataagtgatacattaagagaaacagtgggggagtcgtattcccctaaatcaatggctattaaatctggtctacctgaggatgcagagaatttacttaagagcttaaatctatttgttggagagtcatcagatggttatatgggagatataaatgagttgagtcttggtggggctaatttaatatatatagcacttaagattcttgagtttaaatataaaaaatcaaaaaaagaatcagcaaactttcttcttattgaagagccagaagctcatatacacactcatattcaacgtacattgtttgacaatgtgaactatgatgatactcagataatttactcaactcactctactcaaatttcagaggtgagtaatattgaaagagttaatattttatctaaacacgatagtttttgctgtagctatcaaccttggattgggctaagtgaaactgaaaaaactcatttgcaaagatatttagacgcaacaagaagtagtcttttattttctaagggggttgttttagttgaaggagatgctgaagagattttaataccaacgctgattaaaaaatccttaggccttactcttgatgaactagctattagtataattaatattggaagtactggattcaaaaatgtatctaatatttttcatgataaaagagtcagaagaaattgtagcatcattactgatttggataaggctattagcgaaactgagattttagatgaagataccgttaaagaagtagaatataaaaactccatgaagcgttcagaaaaaaagggagaggaaaggaaagctattttggataaatatacagaaaataatgattatgtaaaagccttctatgctgagcatacatttgaagttgatttcatatccgcaaggaattcgtttgaggttgaaaaaactattgatactgtttatcaacgacaacatgaaagagatattgctcggaaagaaattgatcatgacgaagttggtgtttatgggcgacgcgttttaaagatggccaataagtatggaaaaggatggtttgccctcctcttgtcggatcatataaattcaataacgtgggttcctctctatatagttagagcaatattattcgctaaaggaaatataacacagtccttgtgcctgagaattattgaatatagacataaagagttctcaaaattctttccggaggatgagaaacttccaatagtccgagagtgtctggatttaatttattgcgggaaagagactttccataatttaaagcaaactcttatagataatgcacttgataacatattctctgaaattttgcgggtaacaaatgaaaattga

SEQ ID NO: 437690 - DNA, 1026 bp, Serratia marcescens
gtgcaaataatatctttattcaatcataaaggtggtgttagtaaaaccacaactacttttaatatgggatggatgctagctgaacttggtcataaagttttgatagtggatgcagatccacaatgtaacttgacggctttaacgctaggttattcaactgcagatgattttgatgttatttataaaaataatccaaattgtgatatttacacttgtattaagccggttgttgacggttctttaggtaaggttgttccagctgatccaattgtcacatctaacccacagttaagcttattatgtggcaatatatctttgtcagaaatagaaactcagattggggttgcattgacaactagcactgctattccggctattaggaatattccagggagcataggggcgtttttgcgagaaacaggaaaaaaacacgattttgattacattttagttgatatgagtcccagtgttggtgcattgaacgaatgtctactgatgtgtagtgactattttattgtaccgacatcaccagactttttctgtgctcaagctattaaatcacttgcaaaggttattcctaggtggaatagtgaaataaatggtttccgagatgagggtattttatatcctttccctgtggaaccaccaaagtttattgggtttatttcccagaaatatcgtccgcgaaataatcagccggttaaatctttccaacgatggattgatgttatcaagggtgaggttacaaatacattgataccttctttaatgccatttaatatgtcgatatctgaggaggaatttattaatggtagctcgtcgaaggagccgtttaatttggcaaacatttctgactttaactcgcttatagcgcaatcacagaagcatagcacacctgtatttgctctatcagacgcgcaaatagaacaaaatggagtgattcttgaaacaatgaaagaaagcagagaggattttaaaaataacttcataacattggcaaattctgttgctaatttagcaaaataa

SEQ ID NO: 437691 - DNA, 633 bp, Serratia marcescens
atgttagttcctagcgaattggacgaagatgtttatcctgactgtagttggactcacattggatataaagattatttaaaaccaaacaagtacctacaagatgcaattgatgatttaaatgcagggaatgaaagaaggcatctaaataactcgataagaaatgcaaaatctgccttgcatatgaaggtggatattctttgcatctccttcggtggatttgatttttttaaaaaattaaaaagcttcccaagaaaaatggattttttggaaagcattggaattgtcagaccaagaataatagataaaataaacagactaagaaatgaaatagagcacgagtacagagatgcaaccctcgaagaagccgaagattttatagatatagtattactattcattgaggcaactaaatacctcaactcgcgatttccaagcgacagtgattttcatggtgtagcgacatcaaaagaagagtatctaagaaagatcgcttgtaattgggataatggagagttggttttttatctttctaagaaagactcaggatacgattatagtaacaaatacattttaaaagtaggtgatgaaaaatatgctcaatgggtaaaatatataattgaaaattgggattga

SEQ ID NO: 437692 - DNA, 1689 bp, Serratia marcescens
ttgcttagtaaaataagaatagaacgatttaaaaatattgttgacattgagatcagtttaggtgggattaatattttaatcggttctaataatgccggaaagagtagtatacaacaagcaatacaatttggtgtgtcgattgctcaatctactggtcagcaaggagcaagatgggccgaagaaaggtgcccgtcatccctttcaagcgaatcattaatctattcacctttaagagatattgatgctttagctcccaatggaaaacttcaaacatcactagatcatgcaattaaaatcacatttgaagagcaaacaagctcggttatcacaatacggaaagggaagaataggaatatagcgacctccatagagggaaaaatcctgggggaacatcttcagaatattgaaaatccatattcaatgattgtaccaggccttgccggcattccctcgtttgaagagtatagaccgccatcagtcgtacgtaaagcagccgcgaaaggagattcaaacagtgtattcaggaatattcttttacttctatcaaaagagcaggaatcatgggtatcgtttaaacaaaaatttaatgcagtttttcctgattatgaaataagcgttgcattcgatccaaacgtagacgagcacataaatgcattagtaacaatcaatgaagtatcattgccaattgactcctgtggaacaggtattttgcaagcaatccaaatattggcttattactatctatataagcctaagttgttaatactagatgagcctgactcacatcttcacccaaacaatcaaagaaccctagccattttgttaaaagaacttcaccaagagacggattgtcaaataattatctcaactcattcaaggcatttctttgaagctctaaaaaatgatgcaaatgttttctggataaacaactcttctctagttaaaaatactgatgacgttgagaggagtattttattagaaattggagctctcgataagggcgatcagctaaggaacggggagataccttgtatcttattaactgaagatactgatgtagaatatatcaaagttattgctgagtcatcagggtttttggatggcgaatatcaagtttggtcatatcatggatgttcaaatataaatattgctcttgcgttgaattcttttataactgaacatgcgccggggactacagtcatcgttcacagagaccgtgattacatgacagaagccgagatagatcaatataaattaagttttcaaaatgtaggcgtcaaggtatttgttacgagtggaaatgatgcagaaagtcattttgtgaacgagactcatatcaatcaactgtaccctgttttaacaactgagcgaattgcagaactaatcaatgattgtcttgctgagcgaagagatgcaatactcgaaaaatatattaatacaatatacaaccgccgtttgcaggaatcttatcgtggtggggaaaaaccagacgcagggaggatctccctacaatgcactagagactttgatggtggtaaccgtaattttatgcatggtaaaattgttgaaaaggcactaaaaaataaactccagcaagaaattggacaaaacataaatttatgtagagtaacagatgcaattagcgttccaacgttggttgccgttgctggtgatatttggcgtgattaa

SEQ ID NO: 437693 - DNA, 2280 bp, Serratia marcescens
gtgatactcccggctctcggtatcgccttgcagccgaacggcaagtcgcagccgtgcccaacctgtggcggtaaagaccgctttcgcttcgacaaccaggacggacgcggcacctggttctgtaatcagtgcggggccggtgacggcctaaacctggtggaaaaagccctgtcgctgtcagcaaaggccgccgccgaacaggtggctgccgtgatggggaatagcgccaacgctctgccaccggccgctgagactggtcattcaacgaaagataaggccgagtctcagcgcaaggccgcgcgacaggcacaggctttagtggctgccgcgcaacctcagaccggcaatgcctacctgagcgccaaaggctttccggaggtggacaccctgaccctgcacggccagccgctgcgcgttggcggtatcaccttccggcccggtgacctcttgctgccactgcataacgccgggggcgaggtggtcaatgtgcagctgattaacgccagcggcgacaaacgcatgttggcaggcgggcaggtgaaagccgcctgccacaccctgagcggcccggacaacgcggttatctggctcaccgaaggctacgccaccggccttaccgtacaccagttgaccggtgaaacggtgtgcgtggcgctcagcgccaacaacctggctgccgtggcagagcagctgcgcagccactacccggatgcacggctgctgctggcggccgataatgaccgcagcggcaccgggcagacccgcgccgccgaggcggccacactctccggtggcactccggcgttgccgcccacagagggcgactggaacgacgtctactgtaatcaggggattgaggccacgcgcacgcagctccaggcgctcagccagccgccgcagcccagcccgttcgacacgctgagcgatgctgacttaaaagccatgagcgccagcgagaaggccgggctgttggctgaacactacggcaacaccctggcggtgccgccggtaggggaagagctgtgccgctatacgcgtggcgcctggcaggtgctgccgcaccggcaactgagccgggagattgccgcgctgttccagaaggtgcgcgcgccgttctccgccgccggtatcaacagtattctggacaccctcaaactgatggtgccgcagatgggcgacccggcccgccggttgataggctttcgtaacggggtattcgataccgtgagcgggcagttcagcgcccaccggcaagagcactggctgcgcaccgtcaacagcatggactacacgccgccgcgcgccggggagaacctggccgaccatgcgccgcacttctggcagtggttgacgcgggccgccgggggcaatcacgataagcaggcgcgtatcctcgcggcgctctttatggtgctggccaaccgctacgactggcagctgttcctcgaagtgaccggccccggcggcagcggcaagagcgtgatggcggccatcgcccggctgctggcgggagtcgataacaccacttcggccaccattgataatctggagtcagcgcgcgagcgggccagtgtggtcggttactcgctgattatcctgcccgaccaggagaagtggagcggtgacggggcgggcatcaaggctatcaccggcggcgatgcagtcgccatcgacccgaaataccgtgacgcctacgcggcgcatatcccggcggtgatactggcggtgaacaacaatccgatgcagttcagcgaccgcagcggcggcatatcgcgccgccgcgttattttgccgttcccggaggctattgctcccgaagaacgcgatccgctgctgctggcgaagatcaccgaagagctggccgtgattgtgcgtcacctgatgcagcgctttaccaatccgaatgacgcccgcgcactactccaggcgcagcagagttcggcggaagccctggaaatcaaacggcatgccgatccgctggtcgatttttgtggttacctgacggtgctgggtaccccggaagggatgatgatcggcaatgccaacatcaccccgccgaacccgcgccgctatctgtaccacgcctacctgtcgtttatggccgcacggggctatcagcacgtgatgaacctgacggcgttcggccaggcggtgccgcagacgctgaaagaatatgagcatacgctgctgaaacgccgcaccaagcagggaatacagaccaacctggtattgagtgaagagtgcgaagcggactggctgcctaagtgcggggcggtgtga

SEQ ID NO: 437694 - DNA, 4704 bp, Serratia marcescens
atgttggcctggcaggacggctcggtgcgcgatatctcgctgcctgggctgcaggccgagagtgccgagttgggctatcagatcgccaagtatgatttgacgctcgatctggcggagcgcgacgagcaaatcagcgggacgctgaacttcgccacggcgctgttcgaccgcgctaccgccgaacgttacggcgtttacctggtgcaggtgctgcgggcgatggcgacaaatgctacgcagcctgcgtcgcatctcgatctgctgccggctgccgagcgcgaactgttgttgtacggctggaaccgaaccgcggaagtttatccggcgcagagctgtgcccacgtcctgtttgaacagtgggtgcagcgcacgccggacgccgttgcggtggtgaacgatcgggacagcctgagctacgcccaattgaacgcccacgccaaccaactggcgcaccaactcatcgcacagggcgtgcgcccgggcgatcgcgtggccacgtcgcttgaacgcagcgtttctctggtcatcgcccagctggcgatcctcaaggcgggggccgcttatgtgccgctcgatccgcacctgcccgttgcgcggcaggcgtggatcatcggcgacagcggggcgtcgttgatcctgtgcgatcgcgatatcgaccgcgagatagccggcgagatcgcctgcctgcgtatcgatcggctgcggcagaatccgacccacgatccggcggtgcctcgcgccggcggcgcgccggcctacatcatgtatacctcgggctcgaccggtacgcctaaaggcgtcatggtgacgcaccaaggcatcctccggctggcgatcaacaatcgttttgcgtcgtttgaacgcggcgatcgcttcgctttcgccgccaatccggcgtttgacgccagcacgctggaaatgtggggagccctgttgaatggcgccagtctggcgatcattgcgccggaagtgttgacggaagccgaggcgttggcggcggcgctggtgcggcaagggattaacgtcttgttcctgaccacctcgttgtttaaccaatatgcccatagcatcgccgcgacgctggcgcagttgaaatatctgctgagcggcggtgaagcggcggatccgcacgcctttgcccgcatgctgaaagaggctgggccggtacggttgatcaacgcttatgggccgaccgagtgtacggtgttcgccacgacggccacgatcgagcgagtggatccatggcagcgtttgcctatcgggcggccgatcggcaatacccggatttatctgctggatgagcacgggcaaccggtgccgctcggcgcgaccggcgagatctacatcgccggccccggggtggcgctgggttatctcaaccgcgcagagttaacggcagagcgattcctggcggatccgtttaacccaggcgagcggatgtatcgcaccggcgatctggcgcgctatctgccggacggcaatatcgactacctgggacgcaacgatcggcaggtgaaaattcgcggcttccgcatcgaatgcggtgagatcgaggcgcgagtggccggtcatccggcggtgcgcgaagcggtggtggatgtcctcggcgaagcggacaataagcgactggtagcctgggtggtgccggaggctgacgcggctcgccagacgttggcggtgacgctgcgacagtatctggcggggatgttgccggagtttatgctgccggcggcctgggtggcgctggatacgctaccgctgacgccgaacggcaaactggatcggcgcgcgctgcctgagccgcaggaggacgcctacgtgcgtgaggtttacgccgaacctgaaggcgaacttgaaacgctgctggcggggatctggcgcgagctgctgggcattgagcgggtcgggcgccacgataacttcttcgaattgggcggccactcgctgctggcggtgaagttgatggcgcagctgcgccgtgtcgggctgagcgccggggtgcaaacgctgttcaccgcgccgacgctgtcaacgctggcgcagacgttggtcacgcagcaggaagtgagcgtgccggccaacggtatcctgccgggctgcgtagccattacgccggagatgttgccgctggcgacgctgagtcagccggagatcgacgcggtggtggcgcaggtgccgggcggcgtggccaacgtacaggacatctacgccttgtcgccgctgcaggaggggattttgttccaccatctgctggcggaacggggcgacccgtaccagctgtccgcggtgctgcgtttcgacagccgtgcgcgcctggacgcctggctggcggcgatgcagcaggtgatcgatcgccatgacattctgcgcaccgcgttcatcacgcagggcgtgtcatcaccggtgcaggtggtgtggcgcaaggccgagttgtcgctgcgagaactgcggctcaatccggaggagggcgagatcggttcgcggctgacggcgttgtttgatccgcgccgcgtgcggcctgatctgacgcgcgcaccgttgctgagctttgtcgccgcacagggggaagaaggcagttggtgcgtgctccagcagtggcatcacctgatcggcgaccactcgaccctggcggtgatgcaggaggagatcaacctgatcctggccgggcgcggggacgaactggccaaggcaccgccgttccgcaacgcggtggcgcaggcaaggctcggcgtcagcaaggcagaacacgaacggttcttccgcactatgctggcggatatcgatgaaccgtcgctgccgttcggcctgagcgacgtgcatggcgaagggcgggatatctcgacggcgcacctggccttaccgcctgcgctcaaccaacagctgcggcggcaggcgcggcggctgggcgtcagcctggccagcctgtgccacctggcctgggcgcaggtgttggcgcgcgctaccggccgcgatgaggtggtattcggcaccgtattgttgggccgcatgcaggccggagacggggcggaacgggcgctcggattgtttatcaatacgttgccgctgcggctggatgtcaacgaggtcggcgcggaatcggcggtgttgcaggcgcacatccggctgagcgggctgctggcccatgagcatgcgccgctggcgttggcgcagcgctgcagcggcgtcgccgcgggcacgccgctgttcagtgccctgctgaactaccggcataacagcggcgaggataccgcattgccgaccggcgtgtcgctgctcgatagccaggaacgcaccaactatccgttcgtgctgtcggtcgaggacggcggtgattcgctgggcctgacggcgcaggtcaggcagccgattgaagcgcagcgcgtgtgcggctatatggcgcaggcgttgagcgcattggcgcaggcattggagcaggcgcctcagacaccggtctgtgaactggaggtgatgccggatgaagagtatgcgctgcagctgtgccgctggaatcatacggcggaagcttacccggcggatacctgcgtgcacgaactgtttgaacagcaggcgcggctgacgccgcaggccatcgctttgatccaggatgcgcaacggctcagctacgcacagttgaatgcgcgcgccaaccggttggcgcaccggctgattgagcgcggcgtacaaccgggcgaccggatcgcggtgcggctggcgcgcagcatcgaactggtctgcgcccaattggcggtaatcaaggccggggcggcgtatgtgcccatcgatccgcaactgccggccgcgcgtcaggcgtggatcgccgatgacagcggcgcctgcctgatgctgacggacgccatcggcgacgaggagatcccgcagctgacggtcgaggatcgcgaagctgaagatcataacggtaacccggcgttgcgcgtgtcgagcggcgcgacggcctacatcatgtatacctccggctcgaccggtacgccgaaaggcgtcatgacgccgcaccaggggatcacgcgtttggtgcgcaacaaccgctacgccgcttttgacgccgacgaccgcattgcctttgccgccaatccggcatttgatgccagcacgatggaggtttgggccgccctgttgaatggcggtgcgctggtggtgatcgcgccggaggtgatgatggaggccgagcgtctggcggccgaactgcaacgccatcgcatcaccacgctgttcttgaccactgcgctgttcaatcagtatgtgcacagcatcagtggcgcactggcgcagttgaaatatctgattagcggaggggagaaagaggatccgggcgcttatgcgcggttgttgcaagagcgggggccggtgcacctgatccatgcctatgggccgacggagaccaccacctttgcgacaacggcacgtatcgagcgggctgaaggggaggcgcgcttgccgattgggaaaccgatcggcaatacccgcgcttacttgctggacgcccgcgggcgtccagcaagtaagcgcgggtattgccgatcggtttcccaatcggcaagcgcgcctccccttcagcccgctcgatacgtgccgttgtcgcaaaggtggtggtctccgtcggcccataggcatggatcaggtgcaccggcccccgctcttgcaacaaccgcgcataagcgcccggatcctctttctcccctccgctaa

SEQ ID NO: 437695 - DNA, 921 bp, Serratia marcescens
atggtaaatatgaaaaacactcttttttttggtaatggaataaatagactttctgaaaatcacgtcacctgggatgatttgctggataatataaaaggtatcaacaaattcgaaagcgggcagctgccaaacactatggtgtatgaacgaatatttctggataaacacgtgccagatagaagcgaaaaaaaagatgagcttgaaataaaaaatgttatagctaacgggctgcgagagcaaggaccaaatgaggttcttgaagagttagcatcattacccattgagcattatcttactaccaactatgattacgctttcgaaaaggcacttaacatttcgccgataaagctcagttcagaagacatctatagtctgagaagaaagaggatgtacgagtcagagaacgatacaaaatttctctggaatatacacggtgaaatagataaccctaaatccatcatgcttggattagatcattattgtggttcagtgagcaaaatcgatgcatatgttaaaggtacgtactcacataagataagtggtgatgatgttactgttaaacccatgttagacaaactaaaggatgcttcattttgtcatacgtcctgggttgatctatttttctcaagcaatatccacattctcggtttttcattagactacagcgagactgacatctggtggttgctaaataaacgagcccgatttttatctgaagcaacaataaataacaaaatctatttttacacccattatattagtgatgagaagaaagggttgcttgaagcattcagtgtcaaagttattacaattgaagtaataggccataacttcgaagatatgtattggtctgcaatcaagaaaataaatgcaaacatcaatcaggatacagcaaaccaacaaagtattagttcatgttaa

SEQ ID NO: 437696 - DNA, 594 bp, Serratia marcescens
atgataaaccttctcccaatagggaaaataatatcaataattgccgttatctatgcgactgcctgctgtttgattttatggggcgtatatgatgaaaacacaactttagtgacagccctatcagttgcatctggaggttcgtttcttcttaatactattttaatatcaatttttttctttgggtggcgaaagctatggcaatggttccctaaactaaatgacctactattccctgatttgaacggaacctgggatatggttattcattgggaatggaaagataaaaaaggcatatcccacgcacaagcaactataaggcaaaattttcttagaattggaatggatgtcgaagctgacgactccgattctcagacgttggtggctaaacccaaaaaggataccgaaacggggcgagcagcactctactacgtttttttaacaacccccaagcataaagcaggttttgctgcgcaagatccttacagaggcacagcgattctcaagctaaaccttaatggtaaagaagtgctaaatggaaactacttcacaagtcgtaaaacagtaggtcattacgagctgacacgcattgactga

SEQ ID NO: 437697 - DNA, 723 bp, Serratia marcescens
atgaatcgccggatttttttggcaagggtatatcaacctgacaacagtatttttggtaaagagatgaatccgacggtcgtgttcagaggatcaagagcgccagagttcccggagggaatcggcagcgccgccaaaaaggcccttaagggcgatttgtcaggaattaaaaatgtgaatgactggataaataatggtgctcaggggatgggggcgaactcagattattataagcaggcggttaaaataggattacaagtaaagaactcctccggcgtcgatatttctggtcattcattgggcgggggaatggcctcagcagcatcaatgaccagtggaaaacccgcctggacgtttaatgcagtcgggctcaacagcggaacaattagaaaatacggaggggaggctcttggttcagccaagaacatacaggcctatcgagtggaaggagaactgttaaccacgttacaggaggttaataacgaaagtgattatgagcttataaaaaatgccctgcccgatgctttgcaaaaaccctggggcacagcattgcctttcaccttgaaagagtggtcatcactggcgatacctgatgccgccggcataccacacactcttgccggtgggacaggaaccttgctcgataaacacggtatagaccagacaataaagttgattgaagaccagaaagacgatgatatcgccactatcagggggagaatatga

SEQ ID NO: 437698 - DNA, 942 bp, Serratia marcescens
atggataatttttcacggcatgagcgtttggcaaatcgtattgcgctgattttattgcagctgtttaaggaaggtgcggtttcgcgtcgtgagttggctggtcgctttaaagttacggagagaaccatttatcgtgatctaaatcgcctgggcgagtttgtcacgtgctctaaagatgggatctatcgtatcagcatgcaaaatgaggcagaagacaaacttcctacgttagatagtctgagtgaaaaaacgggcctgagggaattactgccgctgtcaggggagggttcgttacgaaatatactcacggcaattgaatataaccgcattaaaatattgccaattcctccagaagcattgagctctgagtttcaaaaaagcactttttccagcctggacaaagccataaaagaaaatttggtttgcgttattcactataaaggaaaatccagaactctctatccgtaccgtttaatgaatttaaaaggagtatggtatctggcagcaacggatgctgaattaatggttaaagcctttcgagtgagtgcgattgaatggctggatatcaaaaaaacaacgttcactccagacagcgatattcatgactatcttgatagcgaggacgacgcctggtttagcataaataaaatggaagttatggttgaagtctttcccgatattgcttgctactttgagcgacgaaatatattgccacagcaaaaaattatcagcaaatcacaggatggcagattaattgtcacaacgctaattgcacatcgggaacaactcttttctacgctacgattctggttgcctaacgtacgaattctatcgcccgtgactgaagctaatgcgtttgtcggacagctttctcagtatattgcccaacttactcaagaaaatgaccttgtaaccgataatgttttccaggataacgtctaa

SEQ ID NO: 437699 - DNA, 1416 bp, Serratia marcescens
atgatgcacgatcgcaaaaaagctgtaacgcagtcgattagcctctgtccaatctggccaatgcaggctgccgaaaaaattggacgaatggttggtgaaataaaccaggctaacaatattatgtcaaccatctcttccacagcgcaaaacaatgcgataaaaggcggttttgctgcggaaacctggcatgcagaatccttcaaccttgatgccattctaaaagataaagatgtacgcgcttttacggatcagtttaagaataccccgttggggaaaaatcatcaggttcatgacattttagttatgaagagcgatgagcaattagtaggggcgcagcttaaatatttccgcaatgccgaagagacacaaaaagccttccgttccaccaaagatggtgttcatcaatatcagcacagcgatgtatttatcggcccggccgatcaaattgatgggatcaaggattcagcccaacgtaccatacttaaaaaccaacaaaagcgcccggttgtatcggattcggcagaaaaagtgcgtgataaaactgccgcctccattaaggctgaaggggttaaatcggcgccgcttagcaaacgtgaggcggaaaccgtcggggcggggacacaatcgggtaaagatctgcatgataaaatgcaggccggatatcttaacaaagcgaccatccaacaaagtgtgcgcgctgcgggttctgcggctgtgatcaccactgtcattgcgggtagcattaatacattccaatatgtgcgacaggttaaaaatggtgaaatcacggttgaacaagccaccgtccagatcctgcaaaacaccgtcattgctgccggggatagcgcactgaaagccggggttgccactgcgagcgtcagcatcgccgcacgctccttgcccggtttgtttgcaggtactgtttttaaacgtagtctcgccaatggtggtatcgcgggggccgcggtttgtgctgtggatgttgtacaaaatgtggtgctgtttgctgccgggaaaattacagtacaggaactagagtctcgtacaggtaaaggtctcttccagacaggggctggtgtggctggtgcatctattggtgcggtagtgggagcgcctggcgggccggttggcatgctggtaggaagcctcattggcggcttgatcacgacccttggtatgaatatcgctttggataatcacatcgagaaaaacttcgaacttaccctcgtcaatacagaactggtagtgagtaatggactagtaatgcgtgatgcgctgagctatctgcatcaatcacaaatctattacgccgacttccataagggcctttatttatctgaaaaaaatttttccagccagataaaaaccatggaagcgcaaagtcttcgcttaaaaaatataattaataatctgtaa

SEQ ID NO: 437700 - DNA, 3192 bp, Serratia marcescens
atgactgccgagcagcaacaacagattttccatcaacctttggaagtggctgaacagaaagttgtcaatgatttggtcaggcagcacaaagcgaacgcggcgcttacacaacagttggcattggatgcctcaaagttgatttccagtagccagaatcggttacaagaccaggcgagtagtggttttttcaaacggttccggggggctttaagcggaaaaaataatgagaatgatctgctaaatcaatcagatactatccagatgcaaaagttagcctggcattatctgatgcaactccagcagcaaaacctgatcaattcccagagcattgccatcattcgcaataatttgggaaccatgaatgaatatataattgaaacgcgagattttctcgagcaggcaattgataaaatcaaccgccgactcgttcatgtggaaaacaatacccgatttaataactggtcgttagatatcgaagcgaataaacgtcgctataaatcctacccagataatattctggtgttaagcctggcctatgattttatgcgcagacatcaggatgctgaactggtgacggcagatatcaattatctgatcgtgacgctcgagaaattaggcgttaactgcgatgaagaagtgcgcctgcttgatttcattattgagcttatcgaccagatagatattatcagtatcgatcgataccgttcgctcatcgagctttcggtggatgaacatgaaattgactcacattttattcaaatcaatatatctggtatcggcttcaacgctctctattttctttctgaacaatatgaaaagatcgtttccctaattgatgatgacgcgttgtgtaacagcgatgaagcacgtgagaagctgatatccagactgtttggtgaagcattctcaggattatcaaccatctatagcatccgcgatctgattagcgaagtgattggcggtagtctggtaactattgatatctatcgggatattaatggattaaatgccactgcacttgaggatacgcaggatgaatcagcagagacgttgacgctggtttcagctttgccggatattcatcagcacagctttctggacactacagacagcgaagagaaaaaatctctgtatctgcttttactcgcactgagtattgaaaatactgcctcgctgactaggcaggggcatgagtttctggcgcttcttggggaatatgctggttgttctgccgtagtgggcgatatcacgagtctggccgatagtccttataaatatcaggaatatcagcaggcgatgttggaactgctagccgatgataatgcgcgctacacctggctttttgacgtattcttcttactgatgctttgtggcaaaaagattgaaaatccacaggtgatgcgcgtactcagcacgctgaaaccggcgcagtttaaagacgtttttcctcacatgcaggtgctgcttcaggaaaataacgaagcgaaactgctcaccagcgcagcgaaactgacttcactgacgcagggatggattaatattttccgctatcgcgagttgcgatttaaaaatcaattctcggaggagataaagcagcttagtaccgccagtcttgcgtgcactatgctgagctatgacatgctgaaagtgacgatgaaattcggtgattacagcttcttccttgggtcgtttgatgatgatagcttcttgggaaaaatggggggcgctgtcggtggttctgcctttgcactgggaagaaaatcgtgtctctctgacgtaaatgatttacgtaaaaaggcccgtgagttcctttcgtcaaattcctcagccttgaataaggccaatggtatcacctctcgctggggggggccgacgtttgaatatgacaatcaaatcagttattccgattatgagattgataactctgcagaaaatgaagactggtatgatcaaatcagtaaatatcaggcgcaaattgacgattcactcacggccttttcaaacgcatgttccgatgctgccgaacagcttgaattgtttgccggcggtgagtttgatcgctcagtcattcgcatcaaagaacagaaacatatcgagtggctacggcagaaagaacaggaaaaactcgataagcaatctgttacggtgatgaaaggtggcaaagaacactgctttcggatcgagtggcaggatatcgaaaatcctccctgcgacccagagaatattcgtcatatcaagacggatggtcaaatttggctaatcgttgataatgatgaatgtttttatcgtagtgaggatcgactgagctggcagacggttaacccggatccagtagagaaaatacgttatataaataaaatcatcattgtggaaggtatctgggtgattttctccaactccgattctggattctattattccactgatgccctgacctggcagcaaagccagtttccggatgtgccgaatacctgggattttagagtgactgaagatctttttcattttaatgacctttggttatggcggtttacggagcgtaaagagtatcaatataaagaagaaggttttttcttcgattcgacgaaaacatcgacttacgataagccggttgttttttgtaccaacagtctcaatgcgaaatggcgtcgttacgaagatacgccgagttttagcgaagggattgaaatacaacgtcttttttcactgccgggtatcaattgtttactgtcatttagcaaatatgactggcattatttatcggtgaagaagcgccctgacacagaatctattattgaatatcatgtaccgggtaaaagctggcgaaattgcacctggaatggtgagaaggagttctataacgatattgtggtaacccggatgaatgattcgctaatgtgcttttattcccgttatctgctgacttcagataaaggctatgaatggaaacgacacgacagcgagctacacgtcgccgactgcttccacttgtcagaaatcagcctgttcccgtccagctataaccggcagatgatttatctaagccatgatggtgttgatttcaaagaactcatgatggatgagggggactggcaatatcttgcggctaacgaacaaggattgcttagcgtctattcgcctaactctcacgaaacattcttgcgtttcgggacctatatctggctgtcttag

SEQ ID NO: 437701 - DNA, 1095 bp, Serratia marcescens
atgactgaagaagaacgccttgtaaatttatataaacttgtaacaaactacaatttgagtgagcaccaaaaatcattaccatcatctgaagataactctctacaatggtttaaaagttttaagtttcttcatccggcatcttgggctgcatctccccaaaaaatcccatatattgctgccaccacacttatagattcgtactcatgcttacctcgccgacctgatatggcattttcatatctttggacagccatcaacaacagctacaacgatttattactcaaacaaaacactagtggtgataggctgacagataccaaggggattgataattcattagcacttatctccagttttcttaactcaaaagttgataataaagcaatacttccagaagaacatgagagcaaaacaattaatgaaattatggtggaattcgtaaaacgtttgccagataagaacttaaacttcttagggtcttatattttaaaaggcatggctatatcaataaaaaacagcgaggatactctacccagcattagaaaaatacatatatcatcttcttatcaaactttcgaaaaaagatttaaaacgatccacaaccatctatattggaattatggaaagaaatactcaagcatttgtaccatttctgaatcaacagataaaactagtgtagactttggtattaaagatgaggaaaaatcacgaatgataactcgtgcagtgagaaaagaacttcagcgaattttagtaaataatccagaactcgatcagttcgatgtcgccggaaacagcactccgaagaaagcggcgtttacgaatgatattgataaattagagtttttaatattcggtttgttgtacgcatctaggaataataatattcatggtaatgtcgcatcacgcttaaacagtatctttgcaaattcaaaaaccattaccgctgcaacgtggaactttttatttggatacttctatctttcgctacttttgctagccctaaagcacattgaacttgatgacttagacatccatttatacaacgttaaactacttaaagtcaccaacaaagattctccagtagtgagttaa

SEQ ID NO: 437702 - DNA, 525 bp, Serratia marcescens
atgagcatgtcagcattacaaccgcagatagttaaagcaatgaaaccaaaacatggaaaggattggatgttagtccgtggagacacggttttcgtccgctttttagctcaaaatgatgatggtagttcttttgaagtgcaaacaccaacgaggcccgaagagagaattcgcataggggatggtttgactatcgggtacaagctgccagtaaaccagaagctccttttttcggtcgccgagacgttagcccaagaaaatcatcttcaacctgagcataaagtagaccgctttcagaataattgcatctccatgttttccattactatagatcacggcaaaactatacaagatgaggtcaacgaggaatgggtcactcgcttctttgagctcttcgatgctcatgggatttcgacgaatactggcatggtcgatatttattctgacctatgtgttgaggatggcgaagacgtttatctgagtgatggtatgtacatgcgcccgaacgggacaatttacgaacgttga

SEQ ID NO: 437703 - DNA, 654 bp, Serratia marcescens
gtggatacattagaagttgttagcttgctaaataattctttaaaaccaataagtgtaaaccttaactctgaaaagggctggcttgattatctctcagtgttagcaccaatggtaattggtgtagtagcactaatcattacagctatatcaaattacatgacactaaagtcgcaaaaagttaactctacaaggatagccaaggttgaaattgcgacaaagttaaaatatgagtggttaagcaatgtaagaacgatttcagctaaattagctggggagcttgatcttattgcacatttaagtgttaggatgagtaatgtagaaattcaatatgaacactttaaaagtgacttaaaaagtgacttaaaaagtgatgctggtgagcttatacagagaagggctggcttgtatgaggacttggccgagaggaagagggtttcttccgttatgtgttacgaaatcctcacctatcttaatgagagtaaacataaaagtatatttgagactataggggagctatcagtgattttaagaagtgaaggccgagttagagatcatcatggcttttctaatacgctgggtaagtttattcagcagattcattcgcttctagatgacgagtggaaggaactattaaaataccccttgagagattga

SEQ ID NO: 437704 - DNA, 264 bp, Serratia marcescens
gtgctttcccttggcggtatggcccggtttatcagttccgcgactgaaaatgctgatgcgcaatacactgcattcatcgccaagctgacaaacaaggttggcgatgtaaccgaagccacgctgaccggttcccatgtgtgggggcattcgattctgacggtagacggcccgaacggctgcgagcgctggaaaacgcaaatgatcgtgaacgtgtcgaagctgggcaacatgttcaatcaatggccgacgcgaaaaatcaaataa

SEQ ID NO: 437705 - DNA, 213 bp, Serratia marcescens
atgcaaaccaataaccagcgctgcgaacactgcggccaaacgcgcgacgtagagaaaagagcagtgagcatccagcgctacgaagacggcagatataaggccgtgagaatcctcgtctgcgccgatacctgcgcgccggtgtacgtcgtccgccagaacatcagaacactgcagcgccgcctgcacactcagcagcggaggccaacatggtaa

SEQ ID NO: 437706 - DNA, 489 bp, Serratia marcescens
atggttcagagatataaccctgattacgtcatgcatgcggcgcgatttgcgccgtttgcccgcgaaaatgagcacggtgagttcgttaaattctccgactatgaagttttgaaggctgagcgcgatgcgctggctgtggagaatgcgtacatgcgcgaagcgctggattctatccgcatctacagcagcgacaccttatcaggcccgtcagattccgttccagacatggctgtatggttgcgcgagggcgtcgagcatctgcaccaagtttcaaccatcgaaaccccagccactgacgcagcacttgcagctatcgaagcgcggtcaattacagcggcgttggattcatgctctgagtatctcgatacagactgtgtaatggacaggcttggaatcagttatggcgatgcagaattacgatcaatcggggcgatggaactttgcaacgcactgaaatctcatgccgccaacattcgggaggccaaatga

SEQ ID NO: 437707 - DNA, 636 bp, Serratia marcescens
atgccagcaaatgaactgaagcccgcgctgacacacagcgaactttgcctgattgccgagcggttcctgcgcaacaacggcttcaaggtggcattcaatgatcgctttgttgccgctgtatctaccggagaacagcctgacgcaatcggcttccgtaatctggcctcctgcctgatcgaagctaagtgctcacgcggtgactttctcgcagaccgaaaaaagcgattccgcattcaacctgagctcggcatgggggattggcgcttcttcatctgcgagcccgggctgatccgcgtcgaggaactgcctgaagggtggggattgctgaacgcaaaaggtggacgcgtttataaggttcacggctggccgggtaacgcgatgtggtgcacgaacaagaacaagccgttccgcgccaacaagcaggctgagtgcgattacatgtacagcgcactgcgccgcatgcagatacgcggtcacctgtcagaggtttatgacgggctccctaaacagattggtgacagcgctagggaggtggagcccgaaacggcaacatgtcccggatgcggaaaacgtggcgagtcaaatcagaaagacggcggattttactgctacggcagtgaccgttgctgtccatag

SEQ ID NO: 437708 - DNA, 381 bp, Serratia marcescens
atgactaattacgatctgattcagttcctcatcgccgacggcggtttctatatccgtgatgagcatatcgctatgctgcagaagaaatttcctgatgagggaattaccccggaaaggatttcaaatctgcggttttctctcacaagctccccatacgttaaatgcgaaatcacctatgtgaaagctaacgtccgcgcactgaaggttttgtctgttgatccgctgtaccagcgttatgcaaggaaaaaaccaaggggagcaatcgcaaaacttaccgacagctatttactcagtgagcctccggaggttgttcgcagaatccaactcatgcagctgtttaaccagttgcttgcccccgtaacccaccagcgcgcctactga

SEQ ID NO: 437709 - DNA, 1080 bp, Serratia marcescens
atgaaacaagatttagttggtcgtctagcgtttatagatacatctgcatttaaagcaaaaaactatcagttccataatcactcattgaaaaaattaaaagactacagtgatgatgaaaaaattaaaattttgacgacctcaattactattgcagaggttcgatcacatttcccaggattagcaaatgatgccattagaacgattgaagaaaccagaaagaaggctaaaattcttaggaatttacctgaaaatcctataagtggtgtttttgataaagggttaactgacgagatcataatttctacattgaaccaaagtttcgataattttttaaatggtgacaatatcgaaatagttccaattaactccgttgatagtgaatctgtttttaaagattattttgaaggaaatgctccgtttagcacaaagaaaaaggatgagtttccagatgcctttgttttacatgccataaacaatctatccaaaaaaaagacttatccggtatatatagttagtgccgatggtgatatgaaaaatttctgtgatggtgatcgtctaatccatttagatagtgttgatgctcttatcgacctgatcgttagaaatgatgatgaggtgaaagagccagttaaattagctgatgacttgtttgataaatttaaggaagagattgtaaagcgggtcgcggataacttattagaggcatcctatacagttgatgatgaagatgcttatgatgtgaaactcaataatgtaatggttgaaggtaaaaatattattgagttagatgacgagtcagttgtttttgaggtcgaattggtggctgatatagaggcggcaacaagtgaacctgactatgaaagatcagcttttgatccagaagatcaacgttatgtatttactttttacaatgtaacgcgcagaaagttcctccttaagacgtcaatcacagtgaccatttggtttcctgaaaatgttaaagcagcagcagaattaggtgatattgaaatggaaagtaactttgatttagatagtattacctcccagcttctttcttttgaagagaaatggtttgactag

SEQ ID NO: 437710 - DNA, 300 bp, Serratia marcescens
atgtcaagcactctaggcgacaaagtgaaggcgatccgtaagagcgaaggggtcagtcagagcgaattttgcgaaataacaggcatttcgatcagcaccgtgaagaagtatgaaaccggcttgatagagcctggtggtacgaccttgatgaagattacgagcaatgcgcgtttcaaaaaatacacgatgtggctgatgacaggggatgtcgcgccggaaatcggacagatctctcctgctctctcccctgatgggcacgacagcacatccaaccaccaaaaaggccagaaggctggttaa

SEQ ID NO: 437711 - DNA, 810 bp, Serratia marcescens
atgatccgttcctgcctgaagtgggccggcggcaaggccggcatcatcgacaccctgcgccagcacctgccatcaggtcaacgtctggttgagccgttcaccggctccgccaccgtgtttatgaatacggactatgactcctacctgctgggcgatatcaatcctgacctgatcaatatgttcaacaccataaagcgcaccccgtcgcgctttatcagctatgccgcctcactgttcagggatgagaacgatccgacctcctattaccagttgcgtgaggacttcaacaagtcgggtaaccagttctaccgcgccgttctgttcctgtacctgaaccgccacggctacaacggcatgtgccgctacaaccaacgcggcggcttcaatgtgccatatggcaaatacaaagcgccctacttccccgccgccgagatccgtgcattcgccgagaaggccgacaaggggcttttcctatgcctggattttgaagagtgcatcgagatggcaaacgatggcgacgtcatttactgcgatccgccctacgtccccgtctcgaaaacagccgatttcaccaactaccacaccggcggctttaacacttccgaccaatatcggctgatgtatgccctgcgcaaagcaacccgccgcggttgccacgtcgtcgcatccaacagcgacaccgcggaatcgctgaagatttacggcgatttcaagatcacccatatcgaagcgccccgcgcggtcagctgcaaagccgaaggccgccagccagcgcgcgagatcatcgcaactatgagggcatccgcatga

SEQ ID NO: 437712 - DNA, 288 bp, Serratia marcescens
atgaagcgctggagtaaaaatgaagaccaaacactgaaagacagtgccaaaacccttgccgtaaaacagattgctcacttactcggcaggactccaaaagcggttagcaaccgtgccaaccttatcggcgttggcctgaaaaaaagtggtgacgcgtatcacggtcggaagtatccagaggcggatattgagctggcgcgcagactgcatgaatcgggcatgaaattgaggttgatagccgaaaaattagagatcccatttacctcactaaaaaattacttctactaa

SEQ ID NO: 437713 - DNA, 897 bp, Serratia marcescens
atgagcgaaataattagcagcataatgaatggaataaaagagcgtacatctggtatttatggctatttagcaacatcattaattttattcaactggtcaaatatttattttattttgtttagtaaaagaaccgccgaacaaaaaatagtcactctatacttatcatttgattggctttggaatttttgtgttccctttattattggagttatattatgcctactaaccccacttttaaactcggcaataaaacatgtgcatagaaatgccatatggtggagcaaaaggctagacttcaaaaatgatacttattcacaagatcttgaggaaggtcgccgcttaaaattagaggaaaaacgaaaagaagcaaaagaattagatgttgaaataagtaaattactactcgaaatatcaaattcgaaaagtgaattggacttttacatcaataaacatcatgagttgaaatctcaggaatccgctattctagcaagcatagcagataagacagatcaatttcaaaaactagaaataaaaataagcaaagagcgacaagaacacattaactttatggagttaaaaaaatcacatgacaatcttatagctaagtatggtgagctagaatctcattgcttatcccaagaaaatagacttctcggaataataaaagctataattgatgctggatatattccggagcacacggaaaatattatacatgctgaaatagccagaacaggagtaataataccgtcagacaacccattaagaaaaacccctagagaatggaagaataaagttgatattgatggggaggatcgcacattgaaaggcagacggccagagtatttagagctaccttcgagagtcggtgtggagcgagacctaaccaatgaataa

SEQ ID NO: 437714 - DNA, 1032 bp, Serratia marcescens
atgagtggcattggcgatattaaagatgatgtagttataatatttaaagaaagaattgccggaccaataggttatgtgattttttccttcgtcgcatataactggtcatggttttattttctgattttcagtaaaaaaaccgcagaggataaaataagcatcataaagaatgacttcgatttacttcacgggattgggtggcctttagtattcggagcagtgctagccattagtacacctttcataaaagtaggtatgattcacttaactgctttagctcgtaaacttgaggacaaaaagaattatcaaataaaaaacttccttgatgattatatagaaggcagcaagcttgaacttataaaaaagaaacaagagataacagaaagagaggcaaaaatacatagcctaattgaaagaaaaacgaatatagaaagcgaaataacgaaagccactgatattcttgatgagttaagaaaggaggatagagagtcaagaaccaatttaaataatatcagaagggagtctgactctttgcaggcaatgattgctgaatataaagtaacaaatgaaggcttccgtgaactaagagaaaagataagtttaaaaagcaacgaggttgtgagattaaaaaaacagctggttattttaaaaaacaacatagcccaaattcaatcatatttatcaggtgatgtgaattactttgagatgctatctcaagatcaggtttaccactttaaaaaagcactaacagacatcaatgaaaaaataaaatcattagacgacggcacttatgaaataatacagttcacacaggattatgatggaccaggtgaagaggtcaacatttcaactttgaggtcattccttaattggcaggattttgtgagcctgctagaaaaaaacaacttaccaacagatggatttatatcaaggccagatacatcgacatcaattagattcaaaagagtcctaactgctcaagaaagaaatgaagttacatctttatatagggaatacttagagaaccactaa

SEQ ID NO: 437715 - DNA, 1914 bp, Serratia marcescens
atgaaacagctggaagtgatgctatcgctggtcgacaagttctcgcgccctctcaagatggccggtggcgagttgacaaatttcgccggcaaatcacgcgcagccttcgggcagatggttgccggcggcgccaccttgtggggcgtcgcgcaatcgatcatgggcattctcggccctgctgacgaactgcagcgcgcgctcgccgaggtgaaatccatcggcgtggccgacaccgcactgaagaacctcagtaacaccgcgatcctgttcagtatgaaatacggcgaatccgccgccgggttcgtggcgtcggccgcctctatcgcgggcgcgatcgatggcctggcggataaagagctgcgcaccttcaccaccgcgggatcgatcctggcaaaaggcacccgtgccgacgctgacaccattaccaactatatcggcaccatgtacggcgttttccagaaaacggccgacgcgatgggccgatccagctgggtggaggtgatgaccgggcagacggccgaagcagtgaagatttttaaatcggacggtaaacagatgtccgatgcgttcacctcgatcggcgctaacgccaccgccgccgggatcggcatggcggaacaattcgccgtgctcggccaactacaggccaccatgagcggcagcgaggccgggacaaaatacaaagccttcctgcagggcgtcggcaaagcccaggcagtgctaggtctgaattttgtcaagcaagacggctcaatgaagggcattgccgacatcatgggcctgatccagcaaaaatacggcgatatcaagaaagttgctgactcggatttgattaagaaagcgttcggctctgatgaggcggtttccctgattaagctgctggcgcagaacgtcgacggcctgaaaaacaacatcgaccaaatcggcaaaatcaagggcatggacaacgccaaaaagatggctgctgacatgaccaaccagtttgaccgtctgctgcaggtctggaaaggcatgcgcatcgccgtgggcggcgcgctgctgcctgtcatcaatccgctgctcgaacgtatgtcggacatgggaacccaagtcgccgattggctgctgaaatttaagaatatcgcgcgctggataggctacgtctctatcgcgctcacgtcgctggttgccgtctttgccctggcaaacatcgccgtcgccgccggaaaattcctgtggatgggcttcctgatcattctcaagctgctgcgcccggtgctgttgatgctgcgcctggccttcttcctgaccggcctcgccgccaacttcatgggcctgccgatcacgctggtgatcggactgattgcgctgctggtcgcggctgtctgggccgtcgtcgcctattgggatgaactgaaagccgccatcatggacaccgccgcatttcagtggttgatggggatcgtgatggtggtcggcgccattttccgcgtcacctgggcgatgattaaggcgggctggcaggacgtggtcagcttcttcaccggcctatcgcccgtgcaggcgtttaccgactttaaaaataccatcaccgacgtcttcaagggactgtgggactacctgaaaaacagattcgcgcaaacctacaactggatcgtggaaaaactgaacatgatccccggcgtcgacatcgagatgaaaagcgtggcgccagaagcgaccccagccggaagccaacccggcagcgctccgctgctgaccggcgcgaataccgtttcaaccgggcgcggcggcatcatgggccaggtgagccagtcaaccaacaacagcaacagcgccaaaacgcagaacatcagcacggttaactttaacgtgtcgcagccgctaaccccgcaggcgctgcaagaaaacatggagctatacgggcatggctga

SEQ ID NO: 437716 - DNA, 537 bp, Serratia marcescens
atgcacgatttctttttaaggaaccttggtctcgaacgtaatttcactccgattgagataaaaagcaactcatggttaaaaaatgcccctcttaatgacatcaacctgggtgactatgtactcttctgccctcacgcaagtacaaaaataagaagcataccgcaacagtatcataaaaaaataatatctgaattaagcgataagtttaaggttaaagtctttgggtttagtgatgttcaccatgaaaattatactaacatttctgagctatcaacgagcacctctcgattcgcatccataataaagcatgccaggcatctctatacatgtgactccgcagccttacatattggtgctggttttgacataccaaccacgtgtatatttaccacagtgaagcccgaatttcgtagtctatactatactcattgtgagtctgtttatatcggaaatgacaaaacagtagggatccataatagtgaagatatcaatttaattaactcaatatgtaaagaatttgaggtttattatgcataa

SEQ ID NO: 437717 - DNA, 156 bp, Serratia marcescens
atgcaactcgaacaaaacgcgaattggcagaccaaagcgcgcggcgacaacgacagcgaatatcagatttaccttgcctgcgctgacgacggcaaaggcaatgaattcatgaccggcaagccgctgaaaacctatgacgagtggctagccagctaa

SEQ ID NO: 437718 - DNA, 267 bp, Serratia marcescens
atgatggctacgcagatttctatgcagcaactgaagtcgatttatgagcagcacggtgcagacgtatctgaacgccaactgcgggacacgctggaacaatgcaatgagcaggccgacgtagtttacaacgactacaacggcaacccgttgccgccacggactgccacagaatgggcgcattggtttgcacgcggcgcggcggaagaacaactctgcgaagggttggcggctgatgatttccagcgcaacgcctacggcttcgattaa

SEQ ID NO: 437719 - DNA, 195 bp, Serratia marcescens
atgtgtcggatgacattagccgattacgccaagattcatggccaggcaaaaacagccagtgactttggtgtaatccaatgtgcaatcagtaaagccattcgcagtggtcgcgatattttcgtgaccattcatgacgatggaagcgttaaaggggaggagatacgtcctttccccagccataaaaaagcctcttaa

SEQ ID NO: 437720 - DNA, 2541 bp, Serratia marcescens
atggtatatgatgatgaagacctagagcttgctaaggctcaggcaagagaaatatggaagatgcttgattatgttagaggagcatcacctatatctagctatcgttcacttgcgtattcaatatttttcattcgctatctacaatctaatacaggtcagcactttgaagcgccaaggttcgatagttttaatgctatttccaattattcttatgaactgataaattgtgccgttcaacttgggttcattaataatgaagtatctggttttctgtgtgattacttagagaagacactgcgattattcgaaaatattgatgaatcttttgttcgccatgcaataaaagatggcgtgatgagtaaacatcactccatagcatcgctttctttgtctgaactagatttactctttgcagaaaatgaaggcaaatcaggtggtgaattttatactccaagagacgtaaacaacttggttgcagcaattgggttgagttatcaaccaaaatcaatatgtgacccgttcgcaggagcagggaatactgcattttcttttgctgatatagattataaaatagttactattgatactcaagaagttaacaaggatgcttactttaaattgataataagcagaattattaggggggtaaaaggtagagactattttggtgactctttatcgcaaccaacttatcagcaaaataaatatgatctaatcgtttcttttccaccttttggaatgaaaatcccgaaggctactcgggataatattcactataaagcgcgtaataattggctagatatagccggaaatttaccagaaagtagaagtgactggtttataactttatcaatgctgcaggccctttctgagggaggcaagctattagtcggtatgccctctggggctttaacaagaggaggctcggaggctagggttcgccaatatttggtctctcatgggattatcgaacaagtaattctactgcctaaaaatatccattactcgacgtctatctcaaccgtgcttcttgtcctcaattcaggatcaaacataacaaatagtagaggagttaaatttgtcgatgcctcacttttttatgagcctactcgaggtagaaatgttctcacgccagataatatcaatgagatcgtggaagctattcatagcgatggccgatttagtattagcttgcatcgtagccaaattgcagagagagattttaatttagatccttcactttatgtacgtaaagatctaaaggttagtgaagttactgtaaaaaatttcagaggttactctgaatttaaagttccaatgcatccttgcttgactgtattagttggggagaatggtgcaggtaaaacatcaatactagaagccctagcatgtggtcttggtccttttcttaccgctatgcctgacgcaaaagggaaactgataaaaaaatcagatattcgtatagattcaaaagggattgctagctatgcccggatatccattgaaacaacatcaagtctgagctgggatctcgtggcaaaagggaaagatgtttctgaaccccctaaaataggaacaacggcactcaccagttatgctagtcatcttgtagatagtcagtctgaattcccactgattgcttattatggaactagccgtgctcttaattctacaaactctaaagttgcaataaatccattcgagaaagaagttcgtggagaaggttatgactctgctctggatgccaaggtcaactacggaatcataaaaaactggttttcaaaaattgaagttgatgagcttagaaaacgtgatgaactcaaagaccacaaatttattcaccctgctaagagacttgtttccgaaactgtttaccagatcgtagaacgagccacgagcttagaattcgacaaggatagtaatgatgttgtggtgcattggaaaaatgaaaagaatgaatacgtaaagcttacattggagcaattgagtgaaggttatagaaatatggttgcacttaccattgacttagtgagacgcgcttatttactcaatccaactagttctaacccattagcagtgaacggaatagtcttaattgatgaaattgagcttcatttgcacccgagatggcagcagaagattcttaatgatcttactcacttgtttgagaaaatccagttcattgttacaacacatagtcctcaggtcctaacaaccgtaaaagccgattctattcgtattgtttctgccgatgcagtcgaagcgaaattagtaaaagggaccagtacttacggatctgaaagttcaagaatgttggaagatgttttaggtggtagcattaggcctcaacacattgaaattgttaaaaaattaaatcgttacactaaattggtagaggccgaccaatgggatacagatgaggctttagagctcaaaaaagttttatacgaatggggcggacagacagaagcggaacttcaaagactagaaacagatattcgtattcgtgagttcgagcgtgacaatgaaaataatcaataa

SEQ ID NO: 437721 - DNA, 789 bp, Serratia marcescens
atgaaaataatcaataagggtgtggagcccaatcgattcggtgcattcagagctgcccaccctgatgctttatgggagagagatgaggactcaattggagaggctttccgttgttgtagtgcaagatatcaggaaactcagcaacaattacgagcggatcaaggtaatttatgtgcatattgtgaacaggatttattgtctggaactaatggggcactagatgactgtcgaattgagcattttcacccaaagtcgaaacgagaactaggagagcctaattgggggctggagtggagcaatttattagcagtttgctgtggtggaaatcaaagtagagttgttaatcctgaggagagatttgatattgagccagaaaattattcttgcgatgtaccgaaaggtaataaaattttggatcaaattatcttaaaccccctgcgattacctaacttaaatatttggaggttcagtcgttctacaggggagatttctgtaaatgagaagttgtgtttatcactagggctagatgtcgaaatggcacaccaaacaattgagaaattaaatttgaactctccgcgcttaatgagattcaggaaaactgttatggataacctcaataatctgattacagaaagtttgaatagtgggaaaacagtagaccaagctgttagttctattgccatatcaatattccggagaaatagagcaggtgactggccatctttttttagtactgcaaggttttatctaggccagcaggctgagcttgttttagctcatccaatttaa

SEQ ID NO: 437722 - DNA, 567 bp, Serratia marcescens
atgagtctattaaatgctgtactccaagaaattgccgatgttgttggctgtacaaggcaagatgttatttatcagttgatctccgattatgctatccccgaatggcgtaggatgagaatggaaagtgagaatgaagtaacagatattgttgatgaaaataacggtgtttcttatttcctcttaaatactaataaaacaaatagcaccgttgaccataacatcattctggagcaaggaattgctgccactttcgaagatgattatatagggaaaataaatagaataaaaaaaggggatgttgttttcttatacgaatcaggatcagggattgtggcatatggttttggtagtggccagaatattgacgagcctaatcctgaaaaaatcaatcataattcaatgcgatatcaggtgttatctgatttttctttgttagataagcctttgtctgcaagagatgtaaagcgagtgctcgaaaatgatatacctttcgctcaaacactgtcacgagttacaaatggtgaagtgttatatacatatctaaaaaataaaattaatctagcataa

SEQ ID NO: 437723 - DNA, 477 bp, Serratia marcescens
atggggcgtcgttatattggcattgagcaaatggattacatcaacgagatcaccgtgccgcgcctgcaaaaagtcatcgaaggcgagcagggtggtatatccaaagacgttaactggcaaggggggggaagttttgtctatgccgaactgatggagctgaacgcatacttcgtgcatgaaatccagaaagcgcagtcctcagaagaactagaaaaactctttgccgtgatgaaaacggaggcacatctcaattatcaggtggcactggaaaacgtgctttccgcagagtacgaggtggacggtattttccgtcaagtcgcgttcagcgagctggaactgaatgagcagaagcaactcctgattgaaatcctcgataaaaatcagctctacgtgaacgcctcggatatggacgactccgacctgaatatctcagagagcgataaagcctttacccgcagcttctacggtaaggagtga

SEQ ID NO: 437724 - DNA, 2631 bp, Serratia marcescens
atggcgaagaaaccgatgtcagccggcagcgagaagctgctgtttaacaagctgaagcagttcgatgaaccggggctgttccaagataactatcagacgccggattacgttcaggcgaacctgaaggacgcgctgcgcccgtatcagcatggggcgctccgttacctgcattacacgcagcgcaagcgggaagaggcgctgctgcattaccggcatctactgtttcacatggcaaccggtgccggaaaaacgatggtgatggcgggtacgatactctatctgtttaaagagtacggatatcagaacttcatcttcttcgtacataccgacgcgattattcagaaaacccgtgagaacctgcttaacccgctgtctccgaagtacctgttcagtcaggagctggaaatcgatggggaaaaaatcaccatcgcccccgtggagacgttcccgtccgtgccggagcgcaatacgatttaccttaagctctcgaccatccataaaatgcacgatgagctgaacagctatcgagagaacagcatcacctatgaggatttgaaagaaatcccgctcgtgctgctcggtgacgaagcgcatcacttcaatgccggcacaaaagccaaaggcaaagcgaaaacctcaccggagaacgaggagcagtcgtgggagcgcacgattgagaatatcctcgccctgcgaccggataaccgcctgttcgagtttaccgccaccattgaccttgcgaataaagatatcgggcagaaataccgtgacaaagtagtgtaccagtatgacctgaagcagttcatgtcagatggttactcgaaaaaagtcatgctgctcgaagctaaccagaacgacagtgacaagatgctcgatgccgtgctgttaagccagtaccgcaagttgacagcggcggataacggcatcgccggcttcaagccggtcattctgttcaagtcaaacaagattgccgtgtcgaaagtgaaacaggatgaattttcgcaactgattgccgcgctgacgccggagagcgtcagacgtcatctagcgaataaaaaagtacagctcagctctgacaccagtatctggcataaggtgatacagcgttacgctaacagcgatttggtgacggttatcgggcaaattcaggaggactttaacgacttcaatctgctgaacgtgaataaatcagacctgctggaagaaaaccctgttttgctgaacacgctggaagaagtcgataatccggttagagccgtttttgccgtggcgaaggtcaacgaaggctgggacgtcctcaacctctacgacattgtccgcatcagcgaacaggcgagcagcagcaaaaccggcacggacagcgaggcgcagcttatcggtcgcggcgcacgctattatccgttccgttatgacggtaagcggagcttcactcgccggtttgataacagcgcgaaggatttaaacgtgctggaacaactgcactatcacaccatcaatgaaccggtgtacatcaaaacactgcacgcatcccttgagcaggcggacattgacgtgcatcaggatggtggcggcacgattgaacacgccagactgaaagaggactttaaaaagtccgccatctatcagacgggtaaactgtatttcaacgaagtggaagaaatagagagcagtagccgcaactgggaaacgtactcactggaaacgcgctttgaaataccgtatcagaccgccggtgaggagtcactggacaacctgacaggggcaataggcggcgtcacgaaacctgaatcgctggtactggatgagcgtttttaccgcaaggcgatgcagagaatccgcttctacgagctggataacctgcaacgctttttcccgaagctgaccggtatccgtgagttcatccgcagtgaagcctatcttggcaagttgaaaatcaccgtcaccgtgccgcagtctctggatttctctgccgtgccggcaaaagaaaaactgcacctgctggaaaccgtcctgctgcgtatatcagataacgtgcggcgcaatgaccagaaggtgaaaggcacataccgcttcatcagccagccggtgaaggacgttatcaaggactacagtctgcacattgactcttccgtgataattaaccagaaaatcactgccgtgcagaccatcggtaaaaaatggtacgtgtatgacaacgcgatactgaatcagcttgagcatcgtctggtgaaaatgctggaagcctttatgccgaagctcagagcccgttacgacgatatttatgtactgcgtaacgacgaacagtcaacgcgctttaagctcactgagttcggcggcgtgcgcggctttatgccggacttcattatgatactggcgcgccatgcggataacgcttactggcaggtcttccttgagccgaaaggggatgacagattgctggatgacgcatggaaagagaaaatgctggaaaccctgaatgacagggatcgcattgtgattgatgaaaatgaggacgtcagactggtcgggattaaattctttgccaacagtcagatgggggcatttgtcaacgatatgcaggataaaattaacgatggtgagccactggaaacctcatcactgctgctttga

SEQ ID NO: 437725 - DNA, 333 bp, Serratia marcescens
atgatggcggtctggcgacgtaaaccggacagcgaggtcatcgtgcactcagaccagggcagccagtacggcagcgacgactggcaacggttctgtcgggccaataacctagtccccagtatgagccggcgtggcaagtgctgggataatgcggtggccgaatcgttcttcagttcactgaaaaaagaacggatcagaaaactcatctataaaacccgggatctggcccgagccgatatcttcgattacattgaagtcttctataaccggtcccgacgccacagtcacctcggcggcgtcagtccggaggcgtttgatagggcctcgtcgtga

SEQ ID NO: 437726 - DNA, 2088 bp, Serratia marcescens
atgaaagctaaagaagcaaaattactcgattttctacgcacagccccgcagttagttatacctatctatcagcgtctttattcttggagtttgaaagagtgtgagcagttgtgggacgatattattcgctgcggtaaagatgaaagtaataacggtcattttatcggttcagtagtgtatattgagcatggcctttattctgttacgtcacagtctccgttactcataatcgatggacaacagcgtgttactacagcctctttgttaatcgcagccttagctgaggctgtaggacaagacgagtttatcgaggggtttaatcaggaacaactacgcggattttatttgaccaacccgctgttgtctggcgaaaaacgttataaattagtgttgtctcaaacggataatgcaacgttacgcgctattgttgacaggaaatcgcagccggaagcttactcgatcaggattaaagaaaattttgagtttttccaagataaattgaaaaataaagagttacaggaaacagtatgtaaaggacttaacaagcttattgtggtcgatatttcattgcagcgtggttatgacaatccacagttgatttttgagagtatgaactcaacagggaagaagttgagccacgctgatttgatcagaaactacattttaatggggctggataacgaacgtcaaactgagctgtataatgactactggcgaaaaatggaactgctttttggtcaagaggcttactcagaacagtttgatttctttatgcgtcattatttaacggttaaaaccggcgagatcccgaaggttgacgacgtttatgagacattcaagcaacatttctaccggagtaaacagtcagttgattccgttgttgctgatatttaccaatatgcggtgtattattgcgccattgtactcggggtagaaaaagacaaaaaactaaaagaggtattccaggacatccgtgaactgcgtatggacgtagcatatccacttattttagaactgtataatgattaccagggtgaaaagctacaacattctgagttcgttactgttttgcgattaatagaaagctatgtttttcgtcgggcagtatgtgctattcctaccaactcaatgaataaaacgtttgccggtctcagtaaaagtttcaaaaaagatcgctatctggaaagtgttcaagcggcatttatgatgctaccttcatatcgtcgttttcctaatgatgacgagtttaaacgagaaataactcatcgcgatctgtataattttagaagccgtagttattggctgaaaaaatttgagaattttaatcacaaagagcgtgttcatgtcgatgaatataccatagaacatatcatgcctcagtgtgataataatgtggagaaagtacctttagtatggcagaagacgctcggtaccgaatggcaacgtgtgtgggaaacttggcgccatacgataggtaacttaacgttgactggttataactctgagtatagtaataaatcctttactgaaaagcgcgacatggatggtggatttaagcacagcccacttcgcttgaatgagggattatccattgtagaaaactgggacgagcctgcaattcaagctcgagcaaaaacgatggctgagaaagccagtattgtatggccttcagtggatctgtccgtagaggttcttaacacatacaaatctgaagatgaaatcagtcgttcctacagtattgacgatcatccacacttagcaaaagaacaggtgagtgtgctgtttgaggtatttcgaaaagcagtattagcacttgatccttgtgtatctgaagtgttccttaaactctatattgcttataaatccgaagttaattttgtggatgttattcctcaggctaagcgtatattactttctctaaacattccgatttcggagctcgaggatcctcgaggtttgagccgagacgtgacgaagttaggccgctgggggaacggtgatgttgagattgcttttgaaaataaagaagatttaccttatataatggcattggtgactcaagcttttgaacggcagatggaaagttag

SEQ ID NO: 437727 - DNA, 954 bp, Serratia marcescens
atgattactcggcgtatagcttatgcttattatgatccaaactgggacaaacggatccatggtattccactacttatccgtaatgaagttgaaccacttgactatcaatcagttatgaaaagtcatttaatttgccctcaatgctacgaacccctcataagagtaccttcagatcctgaatcgtctataatgtccaatggccgagacgctttatttcgtcatttgccagatcctgatgctcctttctgcttacttagaagcgggtccgttactgggaagcgttactctaacgaagaagaggccaagaaagctgttgaggacgaggaattaatcgttatcaatggatttttgcaagagaagcctgagaatgatcctcgtgaacctcacaatggtgacgaacagccgattgacacctactatgaaagtaaagatggtccgattgtcaatgtccctgtagcacgacataatggccaaacatttaaattacccagcaaaataacaagcattcaatctctttgtaccaattttagaaaaaactattatagggagatattcgttgttgatgagtcaggtcactctcttcgctatcttttctgcgatactttaaaggatgtcaatcacataaataatgaagttgaaatccctaacttttactttggtcagatttctaaaatagacaaacacattaatcattcaaccatttggattaaattagcaactccgaggaactatgccgattttagagtgagagtcccgaataaagtcgctgagccaagaggtattgtttcaggtaaagctgaaaaccgcatagtggtgttctatgcatcaattgaatcagtaggaacaggatattggaccaaagaacttacctggggcgaggttgcacttttacctgacaaatacaaagattttcttctgaccgattatgaaagaaaactaaaaaattataaataa

SEQ ID NO: 437728 - DNA, 1503 bp, Serratia marcescens
atgctagcgtcaaagacaaagtgggacagctctaaaaacgaaaaacataaagtcatcgacatgaaaaaaaataattttgaattgaattgggattggtcaaaaagcatcgatgtgctttttgatgatgagtatgagacattgccaccagaccaattagaaagaaggaagtacgctgagtatctttacttttatttaaaagaaatgggaagtaaagataatacagttataaacctaaatgccgagtggggagctggtaaatcttttttcgttaagagaatgtatggctcactaaaaaaccatcatccatgcatatacattgatgcttggaagcaggatttttcagatgatgcttttcttacagtattttcatctttaatttctcaaatagagaagtactctggaaagattgatgctcgcttaattagaacaatggagtctattggtagattcacaaaaggagttattcccgaaatactttcaggattaataaacagatacggagccattgcaaaacttaaaaaggaattgaagttttggggtgagctaagtttcaaaaaaggctactcagctccaatatttattttcattgatgagcttgatcgttgtagacctgactatgcaatttcaatattagaaatagtaaagcacatatttaatatagataaatttgtattcgtagtggccactgatacagaccaattacagcactcggttaagaatgtgtacggccttgggtttgaagctaatgactatctcagtagatttttccatagaagattttcacttaagtccccagatttattaaacttagttcatcaaaaaatcagcttaagaatcggtgataatttcattggcagtataaaaaacttgattcctattccatctagcaccgaggatttatcatttaatattagccaaatattcaactcatatcgactaaacctaagagactctctgagaagccttgatcgtttcttagatctcattactagcaagtcatttaaaaagaacatggattacatttctcttttaatcctcatgattatgtatgataaagatagcaactcatttaaccacataactaaaaaatcagttaggcatgataaaactgaagctacattatcatcctcaccatgttataaaaagcactatacaaataagatagagttaatcattgacaactcagaagaaaacaccaccattaaccacatgtggagtgagggatatagaagaggcaatattttcaaaaaaaccacaatatcaacaaccatatataatttcatgacaatattctgttcgtttttagacgatagggcaggagaaataaaattattagagatcggtcaacctaagtatctggcagtcagaaatgcgcaatctatatcttcagaggaatatataaaattttatatgggcgcaactctagcagtagctgagaaaaatagtgcttatcatgggaatgattatgccaactttatcgaaatggcgacagcctttgattaa

SEQ ID NO: 437729 - DNA, 573 bp, Serratia marcescens
atggaattcaatcaagacgcaaaagctgctatcgaaaggatggtaaaggcctacggagtcaagactaaactagctttgtgtgaagccttaggtatcacggctagcgcccttgcgaacagacaaaaccgcaacgcttttcctgcggaatatgttttgaaatgcgccttagatacaggtgcatctgtgcgttggttaacgtatggtcatggcgacatgttcgaccaaacagtggttgcagcgccgaatgcgttagtagttcccagtaaaaaactttccgccagaaaattacatgatggggaaactttcctattggataaaaattttctccccacgaacataaaaaatccgattgtagtaattgatggaacaactcaatacatcgcaactcgtgcctatgccgaaatctatgatggtacatggttgatcgatattgatggcaacattagcatccgtgaattagttcgcatccctggaaataaagtaaaaatttcagataacaaacactcatttgactgtctggttgatgagcttaaagttatagcaaaaatattaataacttgtatatctggctga

SEQ ID NO: 437730 - DNA, 165 bp, Serratia marcescens
atgccagggcgcggcgcgttccagctgtccggccagctgcaacaaccgatcctcacggccaaaaccggcgacaaactgcatgcctatcggcaggttgtgctgcgcatcctgggccagcggcaccgacatcgccggtacgccggcgacgttaaataccgggggtga

SEQ ID NO: 437731 - DNA, 1257 bp, Serratia marcescens
atgatgaaattgagcgaatacgtgagctacgatgcgctgggattggccgaattggtgcggcgtggcgaggtcagcgcagcggcgctgcaacaggcggcgcgggccgccgtcgaggcggtgaacccggcgattaacgcggtggtggaacactgggagcagccgccggaacaagacgacgggcctttgtcgggcgtgcctttcctgatcaaggacatcgccatcagcatggcaggcaagcgcgttgagctgggcagccggttggcgcagggcagcgtcgccgccgccgacagccatctgatgagtaatatccgccgggccgggctggtgacctttggccgcaccagcacgccggaaatggcgttcagcaccaccaccgaggccgtgctttacggtgccacgcgcaacccctggaacctggatttcagcgccggtggatccagcggtggcgccggtgcggcggttgccgccggtatggtgcccatcgctcacgccaccgacgccgccggctcgattcgcgtaccggcttcgtcaaacggggtatttggtctcaagcctacgcgcggtcgggtgccgcatggcccggtgatggatgaggtcttcaacggctttggcgtccagctggggctcagccgcacggtgcgtgacagcgccgcgttgctggatgcgatgcagcgtcctcacgttggcgagccgtattacacggcgccgccggcgcacagctggttatcgcaggtgacgcggcaaccgggcaggctgcgcatcggcatgatgaccgaggcgtggaacggcggaaaaaccgagtcgaacatcgccggcgccacggcggaaacggaggtgttattggcggcgttggggcatcaggtcagcgaaacggaaatggcgattggcgtcagttggcaagagttggtgttcgccaatgcgcaaatctggtgcgccaatctggtcggctgggtcgatggtctgagccaagcgagcggacgggccatttcaagcgaaacgctggagccggaaacgctggcctgctatcgctacggccaggcggtcagggcggtggatatggtgcgtgcgctcgaggtacgcaaccgggtgactcgcgcagtcggcgcctatttccagcaatacgacctgctgctgacgccgacgctacccgacctgccctggcggcttggccgttatggcgcgaatgcggcgaatatggacgggctggaatggacggcgcatttgttcgatcattcaccgttcacccccggtatttaa

SEQ ID NO: 437732 - DNA, 2682 bp, Serratia marcescens
atgaccaagttagaacagaccaaacaggccgcccgcggccgctgggacgttatttttccgctgctgggggtcacggtaccccctcacggtcagcacggcccctgcccgtcgtgcggcggcaccaagccgtttcgcatggacgacaagaacggcgacggccgctggatttgcacgcactgcacacacggcgacggactggacttagtggcgaaggtcaacggcctcagcctcggtcaggcagtcaacgaagtggccgacgtgctgcaactgagtcaggtgcagcaacagccgcccaagcccgccagaagagaagccgccaaaccggcaccggtggtggccgacacggtagcgcagttgctggccacctgcacggaggggcaaagcgagtatcttaccggcaaggggtttgccagtctgccgcagccgctgaccaccacggcccgcaagagcggcggcgtggactttccgccggggtcgctgctgctggcgctgacggacatcaacggcgccgtgacgggggcgcagttgatttctccgctgggtgataagcggctgttgccggggacgatgcaaaagggggcatttatcgctctcagcacggccccactgagcgacacgccgccgacgcaggtgattatcaccgaaggctacgccaccgcgctgacggccgcccagctcgccacaggctgggtggtggccgccatctcggccagtaacctgccgaacgtggcgcaggcggtgcacgcccgctggccgcaggcccgtatcgtcatcgccgcagacaatgacttctacgacggcaaagagaacaccggcaaggtctgggcggagaaagccgccaaggccgtcaacggctgcgtgacgctgccgccgacccgccataaggcggactggaacgactttatgcaggagaacggcccggcacgcgccaaagaggcatttaacgaagagctggtgcaactgggtaaatcggcggtgaaactgccgcagggcttccggctgacgcaggaatacctgtggttcgacaagcaggtgcagaagtcggacggcgacaccgaaatccgcaacatcaaaatcagcaacccgttacgagtgacggccatcacctgcgacgccgacggcggcaacttcggccgtttgctggaatgggaggacacctacggccagccgcgtaaatgggcgatgccgatggagatgctgagcggcagcggcgaagagctgcgccgtatcctgctggtcaacggcctgtcgtacatcagcaccaccggcgaggcccgcgcccggctgatggagtacatctccctgtgcaagccggagcgcaaagtcacctgcgtgaacaaaaccggctggcacggcgatgtgtatgtattgcaggacgaggttatcggcgacggtgcggaagcggtgatactgcaaaccgccagcgtgcagggtaaggattttcgcgtggccgggacgctgaacgactggcaggagcagattggccggtactgtgtcggcaactcccgcgtggcctttgcggtcagtctggcgtttgccgcgccgctgctgcgtctggtagggatggacggcggcgggtatcacctcaagggcgaatccaccgacggcaagaccaccaccatgaaggcggccacctcggtgtgcggcggcccggattactggcacacgtggcgctccaccggtaatgcgctggaaggcaccgccagccgccgtaacgacgcggcgatgatgctcgatgaaatccgggaggtggacggccgtgaggccggaaacatcgcctatatgctggcgaacggccaaggcaaggggcgggcaggcaccgacggtgagttacgcgcccgcaagcagtggcggctgttgttcttctccaccggggaactgtcgcttaccgagcacgccgcccgcgccggcgaacggacgtttgccgggatggaagtgcggatgctccagataccgagtgactccggcaaatacggcgtatttgaaagcctgcacggcttcgacagcggcaaggcgctggcggaacattttgaagttgccaccgcgacggtgtacggcacgccgttccgcgcctggctgaaagctctcaccgccgacctgaacggcatgacggccagcgccaaggcgctgatgaaggagtacacccaactgctgatgccggataacgccggtaatcaggtcgggcgggccattaaccgctttgcactggttgccatggccggggagctggcgacgcgactcggcatcaccggctggccggagggggaagcgctgcgggcaacccagacctgcatgcgggcatggctggctgaccggggccacagcgccaatcaggaagatattgccgcgctggagcaggtgcgtactttcttcactgccgggcagttcagccgctttgccgactggcataacgagatgaaccgccccggcaacatggtgggctggcgcaaggtggagaaaggcaaccatacccggcaggtggaggcggtgacgacgttctatgtgatgccgtccggctggaaggaaatctgcaagggctatgatgcgcggaaggtggcaaggttgtgtgcggaagccggttttctggttccggccaaggacggcaaaatgcaaacggccacccgcccgccagaaatgggcgtcaagaagctgtatgtcttcaccagtgacgtcttagggtaa

SEQ ID NO: 437733 - DNA, 255 bp, Serratia marcescens
atgctgcgattgagttcctgcagcgttttctgcaggtcctgcggcagcgccttcacctctttactggagatgatgtcgttcagcgacttcatggtcttctgggtcgacttcatggttttctggctttccgccagcgtcttggtcgcttcgttgatcatcggattgagcggcatcgcgttgatcttgtccagcgtctgcatcagtttttgctggatctgcgccaggccaccgctggcggtaggtatcagcggataa

SEQ ID NO: 437734 - DNA, 999 bp, Serratia marcescens
atggcggaagagtacggcattctgactcgcgcgcaaaatgggaaaatgattgagttcaactccgggctgcgcatgatcaggcaggtttatgatggcccgattaacgttaacagacgcgatggcagcgcatggacgcccttgccggatatatcccccggcagcgacatcattcttttgccaatggagagatactattgggagatggataatatctgtgacctgaccggctactcccgagaaaataatggcgtaaaaacgtggtctgatagctatcgtggcggcaaccccaattggtcatttcgcgctaaggtgtttgaaacattaccgcctggtgatccgcccgattatggcatacttatgacagattcagttcagtttgcaacactgggtaaatcgcaggtttcatatattacacatatggaagaaattaactttacgggatattggcgcatacctgatggagttcaggggcgtgaaaattctgttatctatgttagctggtacaatgcaaacgatgaattaacaattatgccggatggggatggtctatatactgacgcaatacgtggttggaggattatcaacgacggtcacggcgccaccagtgacggcattagtgctacgatgcgaatatgtgttgtagcgaccgtacccaacttgcagatgcctgattatggaattgctatctggaatagcgctggggacttggttttcactacgggttacacgccagtttcatatagctcctatcaaattatgaatggaatgggttctattgaaacgggattatcccgcccgatggctccagtgctgaattatggatttttgggtgagggaacggcgaactggacttatcttttctatctcggcgtaggcatgcaaggtggcagagtttatggtcgaaaaggtgcaaagtttggtgaaggtaaaaacctaatcggaagaacaatgacgctgaatcaccgcatgataattttggactcggacaaatatttctaa

SEQ ID NO: 437735 - DNA, 627 bp, Serratia marcescens
atggcttttattaatgtctcagtgagaacggttaaattccatgggccgatggttaaactttttggtagagagtttaagtaccgggcccttactgttcctaaagcaattgatgcaatgaaaaatctgctcccagggtttgagcgctatttgcttgaagcacataagcgcgggttgactttttctatctttgttggaaaacggaatgtgagcaaagatgaattggaattaaccaaaggagatgatgatattcatattgtcccgatgataattggaagcaagagagcagggctatttcaaacaatattgggtgtagcactggttgctaccgctgcatattttacaggaggcgctgctattggaatgggggcagggtttgccagtgctggaacgtggggttcagcttctttggtcggtgcttcgttagctcttggcggtattgtccaaatgctctctccgcaaatgggcgggctacgtatgcgccaagaccaggacaacaagccgagctatgcctttggcgggcctgtcaacacaacggcacagggtaatcctgttggtgtgctatacggtacgcgtgagataggcggagcggttatatccgctggcatctataccgaagaccagcaataa

SEQ ID NO: 437736 - DNA, 705 bp, Serratia marcescens
atgaaagagaaaaccatagcggccattatggcgcacgccgaggctgagtatccgcgcgagtgttgcggcatcgtggcgcagaaatcccgcgttgagcgttactttccctgccgtaacctggcggataatccgaccgaacagtttcacctgtcgccagaggattatgtagccgctgccgagtggggggcgatcacaatgattgtgcacagtcacccggatgccaccacacagccgagcgaactggacaaggcgcaatgtgacgcgatggagttgccctgggtgattgccagctggccggagggagacttacgaacgatcatgccgcgtggggaattgccgctggtaggccgccagttcgtgctggggcatacagactgctgggggctgatcatgagctatttccggcaggagcacggcatagcgctccaggattaccgcgttgattatccgtggtgggaacggggcgaaaatctctacatggacaactggcacgactgcggttttcgggagttcgacggcccaccgatgccgggtgacatggtgattatgcaggtttccgcaccggtggcgaaccatgccggtattctgctcgaagacggaatgctgttgcaccacatgtacggcatgcttagccagcgggtgccttacggtggctattggaaagagcgaactgtgaaggtacttcggcatagcgaaatgatgtag

SEQ ID NO: 437737 - DNA, 456 bp, Serratia marcescens
atggctgataaaacgtcgccagagtacgccatgcttccggctggcacggttgttaagtggggcgctgtcggcgcagcaccgacggccatgaaggcgctggttaactgtaaggctgtgggcgagatggggcagaccggcagttttgtcgattgcacgacccttatcgacaccacaaagcaatttatctccgacctgccggaaggcgcggagaagtcgatcgggtttattgacgatccatccaataccgattttgcggcgttcctgaccgcagcggacaaccgtgaaaccgttcagttctatgttgagctgccgaacggccgcacctccacctcgatcctctcgctgtccggctggaagatgaacgaaatcaccgctccggcgagtgaagtcattcagatcacggtgcaaggcaagcagaacagcaacacctggggagctgtggccccaaaggtgtga

SEQ ID NO: 437738 - DNA, 483 bp, Serratia marcescens
atggaaactatcgtaccaatcgtaattgtactcgcgatcattgctcaagcaggtatgtacgccagggcggttttcctgcggcgtcgtcttatgcttgaccgtgttattaatttcattgaacggcctgatgctagcatccgtatgaaggatgttgcgcagaatgcatttgaggatgctctgtgggtaaaactgccgatacacatgatgaattttactcgcagttgccacgagaatgcagcgaagcgtgaagaggttagagagattgtcgctgagtatgagaaagaagaagagctctatgaggatgctcgggaagaacttggcgaaatcattaacctgatgttcttcatcaactggaaatttaaccgaatcatttttgagtatgctcgctggagaaccccacgttcttcttcaccagttaagatcactgacgatcaggctcaagagcgctacctgatggggttcagaacgggtcatcagcactga

SEQ ID NO: 437739 - DNA, 282 bp, Serratia marcescens
atggcaaacgagaacgcagcaagttggggcggcgaggtggcaaaggtattttttgctgctaatttagagttttatgacaaaaaccctatcgttgcatcgacgggctatcttctgctgatgagttctttaccgttgtttctgatcttgaggtttgcctccaaaatgaaggcgctggacaacgccaaggttctcggcaagctaaggattgagcttgagaaagaagccttgaaaaaagacgtccctcaagaagtgatcaacaacacaactacagcaggtggatga

SEQ ID NO: 437740 - DNA, 420 bp, Serratia marcescens
atgagaataaagctgattactgatgcaaaagctagtttaaaaaaaattggtgtctcagtaaaagacacggatttttctctggttaatgtgttctcaagcgacgaatatgagctatacataaaaaagttatgggaaacaataaatagctttaaggttaaaatgattgtattccttgatgatgactattatgtggataacgtaagtgacaaaataaaaagtataaaaagagctgtgggtaaaaacggtttgatggaactaaagaaaaatgtaattaaaaaagaagatattatttttaataatagaaactattttattgatatggttgaggttagtgatgatgtgagccttctaactgtgaggggatttataaagcaatatatagtggtggtggggtttatttattcttgcaggcggatttag

SEQ ID NO: 437741 - DNA, 762 bp, Serratia marcescens
atgcttgctgaaagtgaattaaataacgagttaaggtcaggtaagatattcgatctaactaacgctaatgtatcaaacttcaaggtgcaaccctcaagtattgatttaacagttaaattaattcatgtccccggaaataaaaaaataaaaaaatcccatgaaatctatccaggtgaaactattattctggaaatcaatgaggtgttttcactgtcaagtgagatttctggcattgtttttccaaaaaacactctttcaaagaatggaataataatgacgaatccaggtcatgttgatccgggatataaagggattcttactttatatcttgtgaatatgtctaaggaaacgtttaatctaagagagaatgattctgtcgcgagattattattatttaaaacatcatcagttacgacagggtataagggcgggatcgttacacaagttgatgaagagcagttgagccgtatggataaagatttcgcaggattaaataagcgaatgaactgtgcacttagaaagaagttggcaaaatggtctgtccaactttttgttgttgttgccataattcttgctattgttggcatggcggtgccaatagcattcacacttacatcatcatatttggataatacaaaagaattaaagcaaatcattaaacaacaaggagataaaattgatgatttaaataaagaaattgcaagtctacatttacgggattcaaagcaaagtgctacaattaaaaaaacatctgctaagtga

SEQ ID NO: 437742 - DNA, 780 bp, Serratia marcescens
atgataaaaatagctgagttatcattgagatgtatatctcgccctagttttgaacatgaagttttcaaagactttctcaatgaaaatggccttacctgggttcaaaaaggagacgcaactgatgctgagcatcttgttgaagcttcagggagactgtgctacatgtcttttggggagttcaaacaatccccgagaaataacgctgaatatataatgaatttgattgatcaaggacatgagagtgttcttgaacatctaaattggacctttctgattactggtgtttcaagggcctttactcaccagttagttcgtcatcgtgcaggtttttcttatagtcagttgtcccaacaataccacgacgaatctgatgctgaatttgtagtgccaattgaagtaaaaaacaatcctaggctttttgattcatggcaggaacatgttaagtcctgtcttgacttgtacaagtcttctcttttagatataaagagtaaccaggatatggatgggaaatctaaaaaagaaaatatgagggcactgagaagtgcatcaagatctatattgcctaatgcaactgaaacgaaaataattgttaccgccaatgctcgtgctattcgtcattttttaaacatgcgaggttctttagatggtgatcatgaaatgagaatggtgtccgagaagatatattgcgtagttagtgaagatgcaccggcattgtttcaggattttagggttttaaatgaaaaaactgatgatgtgaaagttgttaaacgtatgaaatag

SEQ ID NO: 437743 - DNA, 1056 bp, Serratia marcescens
atggctaaccctacagttaaagaaattaagcaggtctgggaaaaagttgatctgttggaagtattcaaagatgtggatgcaggcgtgtatctcttgcaggatctgggaatcttcactagtgcagcgtccggcactccaaaggcccgtattaccgacatcgtcgcttctcaggcgcgagagctagaacagacggcccgatttggggaggactccaaccacttggtagagcctaagcctttgccttacgatatggaaattccgcatacatatcagtcggccacggtttccagtgcggactggcaaggtatcgtctcccctaccacaggccagcagaaaactgttgatgagtgcgtagccgataagtctctgtacatgttgcaagattacaagtacacccgtgagaagagcctagcccgtgcgatcttcgaaaaccgcgctatcgcgaaacataccgacggcggtgactttaatttcaccgatgttaccggccatgctcgccaaacagataaactgattgttggcccgtctaatgctggaaccaacgacatggtcacccagtttagccgtttcgctcgcaagctgcgtaaggtctacggccgcgcacgctctcagcaactgggcttctatgtattctgcggcgctgagctgtatgacgcactgaaaaccaataccatgtttaccgcactggcaatgagcaatggtgttgacgctggaaaaccttctgggatcttccagactgctccgagcattcgcggatatgagtcgttccagtggaacgagtttacatatgtgttggtagacgatgaagagctatacaacgttggcactgacggagcggttattgttcctcgcttcaactcctcggctaacccaatgcgctacgtctacggtccggcatctcgccaccaagagcttgcccgcgccgccacccttccacgtgtgacctatcagactgtggatgagtacggcgttattactcttcatcaagagttctcagcgatcgacatcatcctgcgcagcgatatgctgatggacatcaaactagagaagcaataa

SEQ ID NO: 437744 - DNA, 363 bp, Serratia marcescens
atgcaaaaactgcaatcattcccgatcacccctagtgacgtgatcgttgatcgtgctggggaattgttctccaagactgagctgaagaacgtaaccctgccggctgacgtattcgtagctgacattctggacgctgcaactggcgctctgtatgccgctggcggtactgaccccgttatctgcctgagtgatctatctgccggtgataagaaaaccgtcgtaatcgttgatcggcatgtgctggtgtccgatgcattccttcgcgccgccgatgaggccgctaagaaagaagcattggagaatatgcagaagtcaggcgtgatccgtcttaccaataattccaaatactacaaattcgcataa

SEQ ID NO: 437745 - DNA, 432 bp, Serratia marcescens
atgattgagaagaaaaacacccgattcgataacgtggacgacatcgcccagcgcctagcctctggtcgcacttcacgtaaatccctgacgcaacaggccagccgcttccgcaagaacggccgccacgatctggcgaacaatatcaaagaagcgatgagccgcgaagttgatcagtatccacagtttacggctcaagcgttgcgcctccaagatcgcgccgcccaaatgacagcagacgagaagatgcagcttcgggttgctttggattttcacggtagccgcgacatcctgaccgatgttcttgtcgcttggcaaagcttcttcagcgccagagggatggagattagcacttcagacgttctgacaattatggcgctagaatccgcagccgatttcgaacgtgtaaccggcgaacctatcgcacgtcagtaa

SEQ ID NO: 437746 - DNA, 210 bp, Serratia marcescens
atgaggtacgccgcagaccgtagagagttggaacggcgagacaagcgccaatctcgagatgtgacctttaacaaagagttgaaagaacgcctagaggcgaaagcagcagcggaaggccgctctgttcaatcattaatccgcgaggccgtagccttgtatttagtttcaggagagactgacaatgatcacagcagcaccagcagcaaataa

SEQ ID NO: 437747 - DNA, 921 bp, Serratia marcescens
atgatcacagcagcaccagcagcaaataacgtagtaaccctgaataccgatattcaaagcggcaacgtcgcagcattgaacaccgttatgatgttggaatcatacaagggggttaagttcacccttgaaatgaaaatgacttacaacctgatcctaagcttcacccgaaccggcaagcgtgccgagtttagtcagtcgtatcttgcagcctatttgtcatgctcactctctacggtgaagcgtgcaatggcaactctgaaagaattggaactgatcgctgccgacccagacaaccggggaaggggagacgtagacttgctagaagcgctgccgatcgtggtggagttcgcgaagtctgccgaggtgaagagagtaaataaccgtaagtcaaaggggaataaaaatgctgcaagccgtccagttggaaaaggtaaacctcagttgcatgttgtccaagaccaagaacaacctgacgatgatcacagcggcgacgctggggatcatgtacagcatgatgttactgattcagaacagcccgatgtaatgccagaaccaaccgaaacaaccgaaccacaagatgaaggggaaaccgttgattgcattcttcctgttgatgacagcgatcgcgatgatagcgacgcggtaaaggagtcagagcctgaccagttggatcagcagatcgccgccgcaaacttgcacggcgtacagtacgatctgaccgagatcatgcgccactgtcaagggagccgtgtaaaggccgctatgcggcttcaggctgagatcggagtaactcaccgccagcgcattctagaagcacagggggccgtacaggtccaacctgaggcatctaacaatgacagttacgatgacggttacagtattgatgacgattggaacccagaggacggcgacgcttactaa

SEQ ID NO: 437748 - DNA, 621 bp, Serratia marcescens
atgaccagcagtaaatttggccccctgaaccctgactatatgagtcgtattactgaagtcatcaacaaagcaacacaagcccacgccagaacatccgttttcaccttcgtactcagactgccagagtaccgcgatacaggtgacagtattgcctgtgcccctaatctgaagaccggattaatggaacgcttcacaggcgcgctgagggcacgtatagcagcccatcaacaacgacgtaaacgggaaaagtctcaggtgtgtccaacgaacctgagatacgtctgggtacgtgaggtggggagcagcgctaaatctcactatcacgcagcgatattcgttaacaaagatactttcaatggtttaggggattattcgaaggaagagcataacctggggagctacatctgcgaggcctggctaagtgcattaggtctactcgactttcctgagtacagaacgttggtttccttcaacaacacgccacactatctggagagtcttcgggtggaccgctttgggcaacagtacctgggattacggagacacttgagctactttgccaaagaacataccaaggcctacagcaaggaagaccgttcatttgggggaagtgtcagataa

SEQ ID NO: 437749 - DNA, 2973 bp, Serratia marcescens
atggcaacatcagaacaacagatcgaacatgatctgatcgctaagctcagtgatctaaagtatacctaccgtcccgatatccgcgaccttgcaactctgaaagccaacttccgagccaaatttgaagcgcttaaccgggtgcatctgactgacagcgaatttcagcgcctgattgatggcattattacgcccgatgtctataacgcggctcagatactacgaaatatcaacagtttcgagcgcgatgacagtacgccgctgaactacaccctggtgaacattagggactggtgcaaaaatgatttcgaagtcatcaaccagttgcgtattaataatgacaatagccaccaccgttacgacgtaatactgcttatcaacggtgtgccagtggtgcagattgagctaaaaacactggccgtgagcccgcgacgtgccatgcagcaaatcgttgattacaagaccgatcctggcaatggctatggtaaaacgttgctgtgcttcatccagctctttatcgtcagtaaccgcagtgatacttggtactttgccaacaacaacctgcggcacttcagttttaatgccgacgagcgcttcctgccggtctatcagttcgccagcgaggacaacaagaagatcactcagcttgaccgttttactgagaagtttttggcaaagtgcactctgggtcagatgatcagtcgctacatggtactggtcgccagcgaacagaagctgctcatgatgcggccataccaaatttatgcggtcaaagccattgtcgattgtattcaccaaaattgcggcaatggctatgtttggcacacaactggctcaggcaaaaccctgacctccttcaaggcctctaccctgctaaaagacaacccggacatcgacaaatgcctgttcgtggtagaccgcaaagatctggatcgccagacccgtgaagagttcaaccgcttccaagaaggctgtgttgaggaaaacaccaacaccgaaatattggtgcgccgtttgctgtccgacgactacgcagacaaggttattgtcaccactatccagaaattgggcttggcattggacggcaccaataagcgcaactacaaagagcggctggagccgctgcgtaaatctcgaatggtatttatcttcgacgagtgccaccgctcgcaatttggagacaaccacaaagccatcaaggactttttccccaacgcccagctctttggtttcacaggcacacctatttttgaacagaacgccaactatcagcaggtcgaaggccagcaggccagctaccgcacaaccgacgatttgtttcagcgtagcctgcatgagtacaccatcacccatgctatcgaagaccgcaacgtcttgcgttttcatgtggatcatttcaagcctgagggtaagaagccgcccaagccaggcgaaaagatggccaaaaccaaggtcattgaaaccatcctggccaagcacgatgcagctaccaatgggcgtaaatttaacgccattctggctaccgcgagtattaatgatgccatcgagtacttcgagttgtttagcagcattcagactgagcaagtggagcaagatgctgaatttcgccctttgaatattgcctgcgtattctcaccccccgccgagggtaataaggatgtgcagcagattcaggaagacctgccgcaggaaaagcaagacaaccagcaggatccggaaggcaagaaagcagcgctcaatggcatcatcacagactataacactcgctttagcaccaatcaccgtatcggcgattttgatctctactatcaggatgtgcaaaagcgcatcaaggatcaacagtatcccaataccgattttcctgcggcgcaaaaaattgacattaccattgtggtggacatgctgctcacgggcttcgactccaaatacctcaacacgttgtacgtggataaaaacctcaagcaccatggactgatccaggcattttcgcggaccaatcgcgtacttaacgacagcaagccctatggcaacattcttgagttccgccagcagaaaacgtcagtagacgaggctatcgcactcttctccggcgagcagatcgacaaccctcgcgaaatctggctggtagatcctgctcccaaagttatcgacaacctgcaaagcgccacccagaagctggcagacttcatgcaatcacagggcgtgcccaatgctcctgaagaggtcgccaatctcagaggcgatgcggctcgtgcgcagttcgttaacctgttcaaggaagtacagcgcctaaagacccagctcgatcagtacaccgatctctcagacgaacaaaaaacacagatcgagcaaattgtaccacctgctcagttgcaggggttcaaaggcgtgtacctggagactgcaaaacgcctgaaggagcagcaggatcgtgaccaggcgccacccgaagtacaacagcttgatttcgagtttgtccttttcgcctccgctgtgattgattacgactacatcatggatctcattgcaaaactgacacagcaaaagcctggcaagcgcaccatgaaccgggaacaactcatcggtttgatccaatccgatgccaagttcattaatgagcgtgaggatattgccgagtatatccgaggtctcccagccaatgaggcattggatgaaaaacaaatacgcgatggttttgatcggttcaaagcagagaagaagaccctggaactcgtcaacattgctaaccgtcatgggcttgcgcccgatgccctacaaagctttgtagatgaaatcctgcgccgctgcattttcgacggtgaaaaactcaccgactttctggaaccactcggactcaactggaagagtcggagaataaaagagttagcgttgatggaagacttgacaccactgctgcacaaacttgcccaaggccgagagattgctggtctagcggcttatgaggaggaacggtga

SEQ ID NO: 437750 - DNA, 594 bp, Serratia marcescens
atgctgaggaaattgcgatggcccatattcaaccgggaagtaggggataatatggctattctaagaagaaaaactgctaaccctagtgatagtaaatctattgctgcagctaacttgactaatccagaatctgtgattagattagcaagtagtatgggtattaccactgttccttttgatcttgatacttttatccataaattaggaattgtactgaatagggttattatggataacgatatttcaggaaagctagaaaagaataaaagtggtgtttgggaaataagtgttaatgctcttcatcatccaaagaggcagcggtttacattggcgcatgaattaggtcattattttctacatcgtaatcaaagtaatctatttactgataaatctttgtaccgtgggaaagatatgaactcaatggaatatgaggctaataattttgcgggtgctattttaatgccaaaagaagagcttatctcattcatgcaaaaatccaatgatatcgataatgttgctgatcattttaatgtttctgcacttgcagctaaagtccgagtagaaatggtaaaaaggaattattatgcctactaa

SEQ ID NO: 437751 - DNA, 780 bp, Serratia marcescens
atgcccgacgatccagcttgccgttcggcgacagcggcaacgccgccaccaccacccaggccgacggcaccatatagtccggcagcgccgcgctcacatgctgccgcagcgcgcccgccagcgtttcttccgccacgtccgcggccggcaccacccacgccaccagccgtttgtcgtcgcccaccgcccgtgcatccaccaccgcttcgcgcaccgccgggtgcgtcgccagcgccgcctctatctccccgcattcgatgcggaagccgcggatttttacctgctgatcgttgcgccccaggtactcgatgtcgccgttcgccagataacgcgccacgtcgccggtgcggtacatccgcccgcccggcgcgaacggatcgctcaagaagcgctccgccgtcagttcaggccggttcaggtagccccgcgccacctgcaccccgccgatatacagctcgcccaccgcccccagcggcaccggctgcccgcgctcgtccagcaggtagatgcgcgtgttggcgatcggccgcccgatcggcaccgacgcccgctccgcctcccgcgaacagtgccaggcggtcacgtccaccgccgcctccgtcggcccatacaggttatgcaactccgcctgcggcagccggcggtaaaactccgtcaccagcgccgccggcagcgcttccccgctgcacatcacccgcaccacctggccgcagcgcgtcgccgcctgcccgtccgccaggaagctttgcagcatcgacggcacgaagtgcagcgtggtga

SEQ ID NO: 437752 - DNA, 1176 bp, Serratia marcescens
atgctcactgatacgcaatgccgcactgctaagccgaaagaaaaactctatcgactcaatgacttcaatggtctctacctcgaagtgaaacccaacggcaaaaaggcatggcgctatcggtttaaactcaacggcaaatccagcatgttcgcgttgggtgagtacccaacggtcaaacttgccgaagctcgcgaaaaatgtgagcaagcgcgtaaacaagtcgcgaatggagttagcccgacacaggctcgccagttagataagatccgcaaggtcaacgacgcatccaacacctttgagctgatcgccaaagagtggttgcagatgaaagactgggccgaaatcaccaaaacgcggcgactggatatgcttgaacgtgtggtttttcccgccatcggtaagctccctgtcagagagatcactccacaccatatacttaaaattcttcaggaaaccgctaaacgaggagcaccaacagttgccgctgaagcccgtcgcaccatttcatcagtttttgagttggcagtcgcgacgcttagagctgatagcgatcccgtatggcctgtgcgcaaggcccttccggctaataagacacagcacaaacaggcactaaatcctcagcaaatcggaaagttactaagctgttttgacaatagtcgtggctcgtatcaggttaactattgcatgtggcttatgtggtggacattggcgcgtcctgcagaagccaccgaagcagaatggacagaattcgatcttaataacgccctatggaccattccggcagcgcgaatgaaagcccgcagagaacacgttattcccctacccttccaagctgtcaaaatgctcagaacactacaggggttaaccgggcatcggcagcaccttttcccgggcagagataatccgctagggccaatgacatcgcactcgctgcgccagctacttaaaagcctcggatggagtggcatttatagtccccatgctacccgaactacaggaagtacgcgtttaaacgaaatgggctatcgacctgatgctattgaggcccaacttgcacacgctgataccaacaatgttcgtcgcacatacaaccatgcaacttatcttgatgagcgaaaggctatgatgcaggaatgggcagatatgttggacaaatgggtagcagaattcgagtag

SEQ ID NO: 437753 - DNA, 1389 bp, Serratia marcescens
atgaccattaattcatcacccatagcatcgagttcaccgtcacgtattcacccggctggccttctttcaatcgggctgggcagcatcctgagctcactggacttatttgtcgtcaatcttgccttcccgtcgatcagccgaagttttcccgaacaccccgaggccacactgtcactgattctgacgatcttctcagtctgttttgcctccactctggtgctgagcggccgttttgctgaccggtacggccgacggactattttctcggtaggtctggccctgtttggtctgtcgagcctgctctgcgggctggcgcccacgctctggatactcatcgccgcgcgggcaatacagggggttgctgcggccatgctcatcccgacaagccttgggctactactgggtgcatatcctcaggagaagcataagcagatgatcgggttctgggcagctaccggctcggttgcggccgcggcgggccctgtcctgggtggctttctggttcaggcggactggcatctgattttcttcatcaacgtgcccatcgtgattggggctctcatctgtacccgatacctgaaagaaagtgcaccgcataccgggcctgcccccgatattgctggaagcgtactcctgacgtcaggaatagctctcctcaccgccaccatagctcatacttcggaatgggccacccacaaagccgctattttcgcgggaagtatgggagccatcgtcgttctgacggtatttgtgtaccactgcctgaaatcctcccgtcctcttctcgacctgagtctgttccattcccgggctttcacaacggcaacaataggcatgggatgtttttatatgagttttgccgttatgttacttggcggcacgatgtttctgacccaggcatggcacctgaccgccgcacaggcaggtcttgcttttgctgcgggacccggcaccgccgttgtcgcctcgctgcttatcgggagggtaaaggccactccacagaaccttgctgtcgcaggctccgtactgtacttcctgagtggactctggtggtttttaacgctcagcgaccataccgataatgcctggttactgaactatttgcccggactgattatgaccggactcggtgcgggtatcgcgcagacgggctttatggcaggtgcggtttccgggcttccggcccatatgtattcgacaggaacagggctgatcaacacctcacgccagattggtgcggcgatcggcgttgcgctttttgttgctctaagcggtaaagctgctgcacccgaatccttccatgcagcctggctgctgatgagtctgtgtggccttattgcggcgctgtcggcgaattacctgcgccgcaaaatttccccgaaaaagtaa

SEQ ID NO: 437754 - DNA, 450 bp, Serratia marcescens
atgctcttaaatcccttttgttatctgatcttgatatgggcactggatatgagttctccctgctactgtaaaaatctgcgtgatttcacacgtaagatgaccgcgatttacgatgccgagctggatgcctatggcatcaatattgctcagtattcgttgatgaggctggtgataaacaataatcccgtaagccttacccggctcggtgatatcgccgggctggatcgttctacggtaggacgaaacgtcaccgttctggcgcgtcagggctggttgcaggttgaccgtgatggtatggacaaaaggcagcagcaggtctctatcacccctgaaggtgaagcgcttatcagagacgcgtttccgtcctggcagcgctgccagcacatcattgaggaacgtcttggcgcggacaacatcatggcgctgcagaacatttttcaccaaatctga

SEQ ID NO: 437755 - DNA, 1011 bp, Serratia marcescens
gtgaaatatcagatccttggcaatacaggcgttcgagtctcttcagtagccctgggaacggcaaattttggcatgcggtggggatacggcgcatcgttagacgaaagtcgggcgattttagatgcttttgcagaggatggcggtaactttatagatacggctgatgtgtatcagttcggtgaatcagaagagtttctgggggccctccttcagggacgcagagagaatttctttcttgcgacaaaatattcgagcggcgcatctaaagcagctggcgggctggttacaggcaacagtcgccgggcgatggtgtcttcggtggagtcgagtctgaagcggcttaaaaccgatcgtatcgatttatactgggttcatcatcctgacgatattacgccgtcagaagaactggtacgggggcttgaagatctgtccagagccggaaaaattctttacgccggtttgtccaatttttcggcctggcggctggcacgcgcagcaacgcttgccgagctgtctcgcgcggtgccgattgtcgcctctcagttccagtacagtctggtttcacgtcagcccgaacgagacatgctgaaagcctgtcaggcgctgcagataacacccataacctggtccccgctgggcggtggaatgctcacaggcaaataccgcgccggtgaaaaaggcagggcagaagggatgggcggaaaggtattccaggcggaaaacaacgaacagcggagcgccattcttgacgaggttctggctatagccactgaaaacggggtaagcccggaccaggtagctattgcctgggttgctgcacaggaatgtatccctattattggcccccggacccaggcgcagtacgtcagtaatgtggggttttcaggggcgaatctcacagaggcacaaatcgacaggctgaacagcgtcagccagtttgacaatgacattaaaactgcccccgtgcaggcattactggggcatgttataccgggtaaacccgtggcataa

SEQ ID NO: 437756 - DNA, 588 bp, Serratia marcescens
atgtcactttcaattgctggcgcttttctggcttatactttcatcactgcacttaccccaggtcctaataacattctggctctgagctgcgtgcatactcacgggtttcataaaagcctacgtccactggctggcatgggggctggatttctcattattatgctcctgtgcgccttatttaccgtggcgataacccggacactgccttccgtaacccactggctgacctggttaggcgtgatttatattctctggctggcactgaaaatagcccgaagccagcctgcaaataacacccgttctgacgtcccactgagcttcagaaccagttttttactgcagtttgcgaatgtaaaaatcatcctttatggagtaacggcgctctctactttcgtcattccctataccagcagtcaggtctggattattctgatcagcgttctgctggctttgatcggcgtttttggcaacctctgctgggcggcagcaggacacctttttcaggcgcttcttcgccagcacggtcgcctggtcaataggatccttgcaggggcactggtactggtcgcagtggatatgttgttgtga

SEQ ID NO: 437757 - DNA, 687 bp, Serratia marcescens
atgccccatattcatgaaatgatggtcgttataaatagcattaagcaggctgtccagcgaaacgatgaaccggaaggtgaattgcgccttgccgtgggcgagacgctgctctcctacaagatcccgcaggtgctgaagagttttaagaaaagagcgccgaatgtgttgctgtctctgcaatcccagaactgttatacaatccgtgacagcttgctggccaatgaaattgatttggggattttctatcgtgtgggcaatgatgcttctctcattatggaaaactatggcgaacatcctctcgtgctcgttgcctctcccgaattagcactggttgatttcactcggggaaatcagcatatccccgttagtttcattattaatgaaaaacaatgtgtattccgtctgatgtttgaatctgtcctcagacaaagaaaaataacgattgactccaccattgaactcatcagcattgaaagcattaagcagtgcgtgatggctaatacaggcgtgacgtacttaccgcgattcacggtggagaaagagctgcgtgccggactgttgcaagaacttcctctgtcaccacgccctgaaaccctttctgcagtgtgtgctcatcactcaggtaaggtcattacgccagcaatggagctgtttattcagtccttacgggagagtctggatgcctga

SEQ ID NO: 437758 - DNA, 1473 bp, Serratia marcescens
atgaaaccatacattacgcataacaatatcctagtgacagattcaacgctggactatttcaagtcggtcgttttcagtattccttataatggtgtgccaagtcttcggcgtccattttatcgtaatatagcagtattccttcagcatgttatttgtgtcgctacctgtagtcgtaagaacaaaaagaaagcaaaaattaaggcgagtaaaaaatggtcttattctgtgcctgttccatttgaattaggcagggagaaatttcctggagtatttaagaaaagtggggcgaccaatgatcgtgcaatggaggcactggcaagcgcgggaatcattaaactaaccgggtattcaaatactaatcatttatgccgggaatatgcggtttctcaacgtgttctgcgtaagttgtttggcaacgaccgcgaggcataccttagccgccaggatcgttaccattatctgactgacattttcaccaagcgtaaaagttactcattagatgaaatgattggagtcgcaatcgaccgtgggcagcatgctaaacataaacagtctaaacgcgatatccctaacgctgccttcagggaacgggtagtgagtgtgtggaacaaccttgagccgcttgaaatcaatctggatgcattgctggattactataacgagaatcccacgaagaagaacaaaatattcattttcaacttcctgtcgcgactggctgaaacaggtgtggatctggtgaaggaatcaccgttaacggtttcttacaggcagtcttataaaacagcatacatcggcgggagatcctttgaggttggtacaggcttccagactctaccgtctaaaatgaagtgggcgtgtctggcccgtggtcacaactatgacatcaagggatgccagcttgagatactacggcatgagctgctgagtattggcatttcggccaagtcgctggaggtgctggaaactcaatatatctgccgggtattgcgtattgctgaggaattggtgaagcaattccggttttccagcgtattcaacgccgggttcgttacgctatcgcttaaatccagtacccgacgcttgctgaaccgtgagctaggtaaggtagaagcaaagcgagtactgaaacgctggaagcaccttctgaaacccctgaggcgagatctggctttactgctggatcattatgaaggcactgctaaaaccaatcgttacggtaaatgcgttaccaacgcggtagggcaatctttcaacattacctacaaagatgtggcagcgcgtaaacgcaggaagtcagatgtgatgcgaaggaagctgctgtcgcacatgttacaggggctggaaagccaggctgtgtacgattacgttgccatccataagggcgtttgcgcactggagcacgatgggtttgtttcatatgaagaggtcactgactggtcccatccatatcttttgattgagaaaaaacattaa

SEQ ID NO: 437759 - DNA, 384 bp, Serratia marcescens
atggtcgaatgtattgatgaaaagctcgtctacattcaccgcacgaccactggtaaagggcagtcttccgtcagccaggcggaggagtttgtaaacgctccgattggtgattacttctacctgacccacggtaatcagggtgtatacctgcttggtcagttcactggtccggttaactacttcacgaaacacagtgatggttggatggacaggccattccggctgattcacaaagccaatgccatagaggcgtattatggtatcgagaaatggtggacacctaatcacaactctacctttgttaaggttccgcaccacgaatatgatttatttgaagaactgatattgacgccctatttcaatattaacctgaaagatttttaa

SEQ ID NO: 437760 - DNA, 750 bp, Serratia marcescens
atgaagggagttttagagaaatgtactgtggaagactttaactacatatcggccactctggatagctatgtatctttcacaaacgataagcgcagaaaaacactattatctgcatatcaaaacaacccagcattgcatgctgaattaatatcacttattgacacacaaataaaatacttcggttcttccgacttagcttatctgaagaggcatttaattaatggggaaggttctattccggcgacggagatcattgatgatgtatgcaaaaaactaaagatcaatgttaaagtcggcggctcgatagaatcaaaacttgaaaagctggtgctctccgttgttgagaaggaactattaagcaagacgccagaagaattatcaaaatgtttcaatgaactgggagtaggtgatattgacagagaggagataatctcccatatcaaaaagaatggcaaagtggcaattttacctattgtatttcagatccttggtcccaaaattgcacttgggatcgtagaaaccattatcgtcagtctcatcgctcagatgattggaagggaggcggcgaaacaactcgtcaaagagttactcaagcgtaacccctggattaatagcttaggacccattctatgggctatatctggagcatggattgcttatgatctgcaaggtccagcctatcgcaaaaccgtgccaatttgcctgtatctggggatcgtagctttgcgtgatggcgaagaaatgttttaa

SEQ ID NO: 437761 - DNA, 1689 bp, Serratia marcescens
atgaaagtatataaaggaaagttaagtgacaaagaggaaaaattgcttgttacattgttggctcgtacaaagatttccgaatcatgtccagttgcataccggtttattaaaatcactgattcgcaggggttggagtcgacatgtgtacttattcctgctttggcacttgtcagtgtattagagttaaagaaaacattattaaaatgtgggcataatcccaatgtaactaatgaatactggagtcgggcgcatcaggaggtcgttaaggaaacggataaggtaattacactgtgctataagcctggtttttatggtgatgcttatttgcgtgctaatgataaagtcgttggtgagataaaaggagataaaccaatattacaccccagcgcaaaaaatcatttacctgtcgagagaaaacaggaaacattaaaattatggaaaatcaatgttgctccatacgcgctacatagctcgcgcattatgttggctctgtgctgcggattttctggctttctccttaagctttcaggtatggaagggggcgggtttcatttatgggggatgagtagtataggaaaaacctccagtgcctacatgctggcgtcattagcaggatcgccgaaagacattgtcgtactgtggaacaatacggataaagggcttgaggagattgccgtggcccataacgacagctacctggttctcgatgagtcgaagctcttagataaagacgtactggcagccgctaaaatcatgcagaaccgcgtgtatacgttatcgggtggtaaagggaaaacacgctctgcagtgtatgagaacaaagttgctgaatggcaggtaagtattttcagtacgggtgagtgcagtcttcaacaacttgctgcttccgggaacgttgagcgccttgaaggcgaaaatgtgcgtgtaatcgacgttcatgccgatgctggtagtgaaatggggatcttcgaatcattaccggatggtgttaattccagcaacgaacttgttcatacgatcaaggatgcaactcaccactattacggcagcgccaaacctgcctttctcaagcgcctggtggctgatattcaggatgatcgtgagagtgtgaaacggaagcttgaaaaagggattgagttctttctggataagcacaaggtagatcgtaattctggcattcaggtgcgtattgccaaacgttttgccatcgcttatgtagcaggttccatggctgtgaaatatggtgttttaccctttacaaagcaggatgttatgaaggggatctcaacctgctacctggactcccttgagatggttttatctgaacctaagataatgaagtcaccattagggcgttcgtttgatgcaattattgattttatcaaaaaggatgatcttttaaatctgattggaaatgatcgcgtaactcaaacggcgattaaaaaggcaccggtcattatccacaaagttaaaggacgtacggtatatgcagttgataaggatctggtacataactgcttgccgaaatctcagcgcaaaggcattctgatgcaattaacaaagcaaggggtattattatccgatgcgaataaggagtacagtactatccagattgtctataagcgtaagcaagttggtcgtcgctactgttttgtatgcagtaagttcgataagtttatgacagaatag

SEQ ID NO: 437762 - DNA, 879 bp, Serratia marcescens
atgaaaattccgtcagtgaagataaacgaagcggtgatgcagccccctattaatcctcaatttgaggcgttcgcaaaagaaattaaaagacaggcacctaaattcgaaactatcgaagatgtctacgaagaaagattaaaacgtataaagtcattacgaactatagggaggcctctggataaaagagagtatctaaaattagcaataaagcttgaaaactgttggctcggtgggccttgtgggagcgcggcatgtccggaatgcttcagactacaccggctggaaatgattggggaggtacttcgcttatgtaagaaacggaagaattggcgaggcttaaccttaatattctatcaggatgcacttagtgacagtcaactgcttcaatggcagcccgatacattaatagcacggcttcgtcgctggttaaatgaatgtggcttccctggaatggtgattggtgggttcgaaatggattatcacacagatattaaaaagtggatgccccattttcaccttatcattcccaatgacaaaaaggctattaaaaggctacgtatcaggatgaagaacaagaagaacatgaatacgcgggaaaatgtagtaaaccgccctatgctcgtgagcaagttgaaaaatccaatacgacaggtgagctaccgttttaaagctatctggtggcgagtcgaatcaatccagtatgatgattatcatatacaagggagcaaggaaaggaaaaggaaacgctggactaaaaaataccgtctattgcgtaagcaatatgttgattctctgattaagctagattctattggaatagctggattaacctttatgtataaagtaaggaagtatggtgaccatttgacattaaaataa

SEQ ID NO: 437763 - DNA, 528 bp, Serratia marcescens
atgacagagaagcatttaataccagtttaccctgagctaggcgcggattcactcagaaagctgacaatgattgcttcgcagcattatccgggctgggcaaaagaaggaaaaaggagtggtgaaccgctgaatatgaccctgagttactgtattgaggtagcctataacctgctggaaaagtcccacacaacccttccactttatgatgctttacccccacccaaaacggtcaaagcccagatcctctacgacatttatcaacgcgtcacgactctaaaaggcaacggcagctccacagcacagatggtgttgtacctcaaccaggcgcaatttccgaccccagatgacctgttcgcagacaaaccactgacggcagcagcccgaaagccatcacgctgggataaccgcgatattgatacaattatcacccgagatggacagcccaccgatctgctgagagaacacctgcaggcactgaataaacgcgggcaacgcaaaagagcaccaggagcaaaaagcgtacgttag

SEQ ID NO: 437764 - DNA, 930 bp, Serratia marcescens
atgagcaggactgcgttacgtcaggtcatgccggtggtgcaaaccaccgtgttcgatgcgtatattggcggtctggccccctcgggacggcggggcatcatcagcctgttaaaccgcagcgccagcatacttaaatgcggtgtggatgcagcagactatccgtgggaacaactcaactacgccgccgtcgctaaagtacgtacggcactgctggatgacggttacgccgtgtcgtcggtgaacatggcgttatcagcactgcggggcgtggcgcagacggcctttaacctcaattgtatcaatgccgaaacgttggcacgtatccggtcagtgaagcgcgtgagcggcgatatccagcgcaagggaagggcattagacaggcaggaaatccgggcactgattcagaccgccaaacagcagccactgccggtacggcgctgtcgtgataccgctattgtgctgacgctttgtggagcgggcctgcgggccggggaactggttaaacttgagcgccgggactacgacagcggtatcctgaccgtcaggcaagggaaggggcgcaaataccgcgaaattcacgtggcggatgcggtggataaggctatacgcgcatggctaaaggtcagcgcagacgagactgacagcgcactgttcagccgtattcagcgcaacggtaaggtcgccagccagccgctgacaacgaccgggttaacggggattctggaacagttacagcaagcatcaggcatagcgcggtttaccccacatgacatgcggcggaccttcattacccgcttactggagcagggtgtggatatcaacaccgtacgccaattggcaggccacagcgacatatccacgacgacgcgctatgactatcgtggtgagggtatgaaaaccaaagcatcacagagtttacggtgctggtga

SEQ ID NO: 437765 - DNA, 453 bp, Serratia marcescens
atgaccatgtttacccaacgtgaaacccgtatcctcgatcaggcgcgtgacattattagccggtactaccagcgcggggttcaactctgttcccctgatgatgttcgacggtgcgtaatggttgagctggcaccgcttgaacatgaagagtttggcatcatcctgctcgataatcagaatcagctgctgcaccgcgaaatcctcttcagggggacgttaaactcggtcagcgttcacccccgcgaagttatcaaacgcgtactgaaacataacgccgccgcagccatccttgtccacaaccaccccagcggcgagcctgaacccagccgttgcgatatcaagttgactaaaaaactacaggagttgctggaaatgctggacgtacggttgcttaaccactttatcgtggcaggaactgaaacggtgtcgatggctgaacgggggctggtgtga

SEQ ID NO: 437766 - DNA, 540 bp, Serratia marcescens
gtgactgataacagagggatacgtgcgtctcaacagggcgaactggactgtctttgcggtgcttattgcgtggttaacatgctgagctggctgtatgacggcagggtgaaacgacgcccgttaatgaaccggcttattcaggcttatcagcagcgctggcctttgcatgaatggctgactgaagggattgaagaaggccgtttagactggctgatggcgcaggtgttgcagaaaggacattacagccgccagttcccggttgaaatcaccagaccctttgcagggaagcgagggttatcagacgggcgactgttcagagaaatgcagcggtttcttgacgtcactgaccactcccgcctgattatgctcagcgaccagtttcactggtcccttctggtcaaaatagatgaagaaacgctctgtttcttcgacagcaacgggcgaaccactatgtcccgtaaagctttctccttgcgtactggcgtaacccgccgccagctgtttcccgacgccatttacttcattgaacgggagttctga

SEQ ID NO: 437767 - DNA, 393 bp, Serratia marcescens
atgccagtcagtcaggaattaattaacgtcatatttaaagaggtaggaaatcccccaccgcataaagccagaatagccgctgtcagtctgttatttaaagacctgagttacagcgctgaaaagggcggttaccatcctgtcgaaatacggcttatttcacgcaatgatgaatggtattttgattacattaccgacttcagttatatgggagtggtataccccgaactggaaaaggaaattgatatcagctggagtcaacaatatgtctttcttgctcatattggtgatctgcctgttaacgccggaagggcgttgtttgaactctggcaatccaactttattcagtatcacgccatgaacgtctacaccattaccgtcctgtgggaaagctaa

SEQ ID NO: 437768 - DNA, 528 bp, Serratia marcescens
atggcaaccaccatcactgaaataacggaatgttttgagtattttttcagttctctttatcgcagggagttcgtcaaaaccctgcgtctgaacgaatgtagcgagcgggaattactgcctctggtacgttgctatttgctgggttggtttgcagataatgtctcaccggaagtaaaaagcaagctgccaggaactgtatccgggcacggttacattgattttgtcattgatgatgtagccgttgagtttgcagtacgtaaaccaactgcggcacgttccaatgtctccgcgaccgtcaacagtacagaagtaaagaaattgatgaagcacgatggcaaagccttgcttgtgctgtttgacttctcagacacgccttattcagaagaacagatcgaatccttccgcaactggccttctcttggtcgagggaatcatcacaagtccgcattcaacgtcgtttatttctttatggaaaaacgcagaccgctggcactggggaaaatagccaaaaacatccgtatcacttaa

SEQ ID NO: 437769 - DNA, 915 bp, Serratia marcescens
atggatttcaaagtatttaatgaagatttaggtgtgatggggtataaaagattaattcaccaaatcatgtttcccggaccatcaaggaagcctttgaatgattatatggacgtggctatgtataattcatttagaattcatccaaatttaaattttaaaatatctggctttaatgctgaaagtaagatcttcccaaaaaagaccgttttttcaagagtaagggtaattaaacgtgatgatgcaatacagtttatgaatggtgcgattaaaatcagcgatttttaccctccaagccctgaggtggtgagattaacccctggtagatataatgatgaaaactcaacggtgatgtacctttctgactctcctgaaaccgccgaaatagaatgcaaggtcaaagatggtgatttttttctaaggtctcaatacacgattaatcaggagatggcctttttttcgttgagtaagaagtcggctttgacaaagccattcttggatttaataaataatgatgatataaggttttatccagtaataacctatttaatgaatgatgtaatgcgttttcaaggctttcatgggtgcacatatgattcagtgccagcaaataaaataaaaggttttaaaagttcaaaaatgaacatagttgtatggggtgagtttattgataaggttgattttgaatattcttacttatgtttaaagcaaagtagcgtgctttattcaactacttttttctataaggaaggcggaaagcttttaagtattcattgtgaaaaggaacgtgataaagttaggcagaaacataaggacatttatgacaggctgactagaggggcgaactcagtgaagagcattaataaaaattttttagctagtatagcaagaccttttaaaatagttgaagggcagtag

SEQ ID NO: 437770 - DNA, 1197 bp, Serratia marcescens
atggactcacatagagatgagcttgaaaataaatgtgcttcattagatttcttacaatcgacggctgacatgtgtttttcaaaccttactgaatgggcaaactatacaatttttaataaacatcaaggtgagttgacctacgatttaattcttgatgaaagagtcaatgcaagagtaataagttatgtgcatcacccatataaagtgaaaatagaagttacatatggaatgcttcgtgcaatctataaagagtgcctagcgtatccggcatactgtaaaaaacttgaagaagatggttgggaattcaatgcattcgatgatgagttcgaaggcgcgcagctgttatttagtggtggagttccttctagaatcgtaaagtcggactttgtagatgcttttttaagtttaatggaaaaggaaaaagacagtactgaaggaagctacttcagcgaagatgattacatatgtcgtttcacaatgtatgaatgcatgctctcatgggttttctttcatgagttgagccatcatgtgcaaggtcactataaatttaagaaaaataatgcctctggtattcacaaggaatttctagaggtaggagatgagaacgattcaaatgaaattgacagtcagctcagagaaatattagctgatatggaggggctttatttaacattcagaatgatgttgaaaaataatgtttttatgccttcgaatgtgtattgcttattgtatgctcaaagctctctatttaacctattctactataacaatcctttagtgtatgatagtttaacaaaccacaatatatcacatcctcatcccaaagttaggaacaaatatttgcatttgttatttattacaataatgtcatgggatttacaaaatccagaatatttttcattacgtgaggattttcttagagggtttgattattatactgttaaatcgtcatttttagcaggaatgatttggtccattcgacatcaggataattatgatccaaacataatcccagattttttgtcgttcgaccggccggatgatatagacttttctagtgattattataagcaattggttatatctgccataactcacatagaggaaattgaaaggcaacatcttataaatgacgagcaggattgtttgtttaaagttattgatgtgaaaggtttttttggttttctttcgttgtaa

SEQ ID NO: 437771 - DNA, 1092 bp, Serratia marcescens
atgtctattcgatcattcaaaggagaagtgcttgagctttcaccggaagttagaggtctgcttgataatggaatagattttttaaaaaaggctcaggccgaattcgcaacttctccaacacattctattgttagtttttggacggctgtagaattgttgctcaaggttccacttgcacatgaacattggtctcttgtgtgtagcggaaaaaaaatcatacgttcgaaatatcttactggtgatttccagtcaataactttttctgagacatgtgatcggttgagggatgttctcgagaaacctttaaatgcatccactgtgtcatcttttgatataattaggcagcatagaaatcgagttgttcatttttatcacgatgcattaaatgaccaagccaaggagaaactactgattgagcaggctgatgcttggttcgccttgaatcggttaatgcgcgaagattggaagtccctctttgaaggagcattgggtcattatcttgcaagtcaagaaacacaattgctcataaataatacttattatgcagacatcaaattccagcaggttaagaaagtattagagaaacatgtcagtaacggaggtcgagttattgaatgtcatttatgcaagaaggttgctgcacctcttaaaaccacgtttgaatttgaaaagtattcgtttaagacatcttcatgtcttgtatgtagtagtatacaggacagattggtcgagttttcatgccctgaatgcgatgaaattcaaatactgaacgcttgggaagaatcagactttgaatgtagtgaatgccaacataccgcttctcgttatgagatatttgaaacgagtgatttttcaccggatgaatatggttgtttacctgtcccagcaggatgttcagagtgtgagcagtacgatactgtctgcgagttcgggaaaaaatacctatgcacttattgttttggaattttcgaaaccattgaacagtgcgaatattgtacttatcacagtactagtgttggtgagtttagcggaatgactggatgtagtttctgcgatggccaccgagaaacctggcccgaagacgatgattga

SEQ ID NO: 437772 - DNA, 567 bp, Serratia marcescens
atgctgaagctgaataatgttttaaggtttatactgaccataataatcttttcaggctcattttattatttttctgagtctgaaaggataagtaacttaagtggttggttacaattgattataggcgggggagttttgacacctttggtttcctacgcctggagtctgaagataaaatttgaaaagcttattgaaagtgaagggttgaattcggttcaaaccgacaggttaagtaaaagtatttctgtctttacaagaaagattggatattggatgctattttacgtttttagtgctggggtgatttttctacttcaggtgtttaaggatgacgttgaatatgcaagatacttagcatcattgacggtggcattgttgttcatagcaatattatcattcatttcattacgtgattttgatatatcactttctgagttgaaatctgcaataatcataaggcgaaagaaaaacgcagagaaagaagctttactcaaattgctgaatgctgatgataaattcagtgacaaagaaaaggaatatttcaatcgttataataaggatgattag

SEQ ID NO: 437773 - DNA, 1089 bp, Serratia marcescens
atgtctcaaaaaattacagcaatcaaagagccggtggttgagtacaaggacaaaactcttcattatcgtattgcaaaagtcatcggcgagaatgtggatcaaaccttacaagagatgattgcggttgcgctgaatcgtctttctgcggttaaagaccgttaccagactgtaagtgttgacagccatgatggcgaagatggtgatgttcaacaggcaaggcaatttttgaataataaaatagagagatggagtatattattcaatgaattagttcgctatagtgatggcgcaaataaaagtattataactattgatgaaagcgcttctttcttatcaatagaccaaatagcgcctccggtttctgtagatggtaaaagacgtgaatttcttgattctataatgcacatggcatttcttagaaaccatgtggtggtaattcagtcgccagttctaagaactcgagagttggaaaaatacattacgtggttattaaaaaaagccggggtaattacccaaggttctgtaatgctcaatgctgagttaccaaagcagcaaagagacaaaataatgaataataataccaagaaggttagaatcggtacgcctttggtagatacgcttagtaatatgcctgtagagaacgccagagaaacgataacatcagaagcaataaaaacaaatcatgttaaagtaactccgaaggggttggggctggatatcattaaagttctttttactgatagagagcgtgaaaactatgggcttacagatgatgtcttctcaggtgatgctattgataaaggtaatattaacgtttcggtggaaataagctataattacaaagccaaaaaaacctcccaagcaataattaataatatcagccaagcattaaggcatagccatccagatgatgttgaattaacacttgataaggtggggaaaatcaaaggtgatagtttggttatttctaagaagattaaacttaaatttattaatggaatagcagatccagaagagatgtatatgaagattagagaatggttagttgaacaaatccggttaggcgaattagatgctgaagctgaataa

SEQ ID NO: 437774 - DNA, 3327 bp, Serratia marcescens
atgaatatctcaacctggtccattcgcaaccctattccgtccatcttgctctttgtcatcttgagcgttgccggcttttattctttcaaattgatgaagatccagagcttcccggacatggatgtgcccacggtcaccgtatccgcttcgcttccgggcgctgcgccgccccagctcgaaacggaggtggcgcgcaagctggaggacaccgtctcttcggtacagggtttgaagaacctgcgcaccacgatccaggatggactggtcgatatctcagcggagtttcgtctggaaaaacccgttcaggaagcggtggatgaagtccgctcagccgtgcaaagcattcgcaccgaattgccgacggatttgcgtgatcctatcgttcgcaagctcaacatcacgggcaaacctgtcctggccttttccatcagcgccagcaagatggatgagaatgagctgtcctggttcgtggacaataccctgtcgcggcgtctgagaggcgtcgccggcgtagggtcggtcacccgtgtgggcggcgtgaaccgcgagatccaagtcgaactcgatccggtcaaactggaggcgattggcgccaccgccgccgaggtttcccgccagttgcgcgatgtacagatggacgcgacgggcgggcgagtcgatctggggcggggaaaacagccgctgcgtttggtcgcccgcgtcaagaacgtggatgaattagccgcagtcgaactgtcgttgcccggcgggcaacgttttcgcctggacgacgtggcgacgctgaaagacaccattgcggaacgcagttcacttgcgctcctcaacggccagaaggtggttggctttgagatcacgcgcgccaaaggcgccggtgaagtcgaggtcggcgacaaggttgaaaaagttctggcgcaattgcgtgcggagcggcctgatttgcacgtcacgcaggtcttcgactttgtccggcctgtgcaggaggagttcgacgcctccatgcacatgatttatgaaggcgccattctcgccatcctggtggtcttcatgtttctgcgcgatatccgagcgacgttgatctcggcggcggcgttgcccctgtcgattttaccggccttcatcggtatggacatgatgggcttctcgctcagtatcgtcacgctgctggcgctatcgctggtgattggcctgttggtggatgatgccatcgtcgaagtggagaacatcgaacgccacatcggcatgggcaaaccgccgtaccaggccgcgatggatgccgcatcggaaatcggcctggccgtcgtcgccacgacatttgccttgatcgccgttttcctgccgacggccttcatgtccggcattgccggaagattcttcacgcagtttggatggacggcggcgctggcggtgtttgcctcgctggttgtggcgcgcttgctgacgccgatgatggccgcctacctgatgaagccgcatacgcgccctcaacgcgatcctttctggatggcgctctacctgcgcgcctgtcggtggacgctgcggcaccgctggctcaccctggcgctggccggcgggttctttatcggctctctgatgcttatccctctgctgccccagggctttttccctgcagatgacaactcccagacgcaggtgacgttggaactgccgccggggagcacgctggaacaaacccaggcagtggccgaacgcgctcggcatcgcctggcccccatcccgcatatccgcaacatctataccaccatcggtggcggcgcaacgggcggcgatgtcatggcttccgacggaaaaaccgatgttcgcatggcaacgctgacggtgttgttggatgcgcgtaacgagcgcccgaagaaacaggtcatcgaaggcgagatacgcacggcgatggcagcgcttccgggcgtgcgcagcaaggtggggtttggcggctcaggagagaaataccaattggtgctggccggcgatgatcctcagctgctggcaaaggcggccgatgccgtattaagtgacctgcggcagatccccggcctcggcaatattgcctccagcgccgggctggcgcgcagcgaagtcctcttgcagcccaatttcgccaaagcggccgatctgggggtatcgggcgtcgcgattgccgataccttgcgtatcgcaaccgtgggtgactacgatcagtttctgtcaaaattcaacgtggagcagcgccagatcccgatcgtcgtcaagctgtcaaaggacatccgtgaagatatgggggtacttgaacgtttgaccgtaccaggcgccagaggcccggtgctgctcaatcagatcgtcaatatcgagcaaggcagtgggccggcgcagattaatcgcatcaatcgcacacgcagcgtgacccttgacgtggaactgtcgggcacccagctcggggatctggccgctcaggtggcgaagctgccgtcaatccagaatctgccgaccggcgtgcaccaggttgtgcagggtgatgacgaaatgatgaaggagctgttttccggtttcggtacggcaatggtcgccggcatcctggccatctatatcgtgctggttctgctgttcaaagacttcttccaaccgatcaccattctggccgcgctcccgctgtcattgggcggcgcattcgttgggttactgctggcgggccagtctttctcgatgtcatccctgatcgggttaatcatgttgatggggattgcgaccaaaaactcgatcctgctggtcgattatgcgatcgagtcacggcgcggccattacggcccgaatggcgaagtgctcaataaacccatgagccggacagaggcactgattgatgcctgccacaaacgttcccgccccgtcatcatgacgacgttagcgatgggggcgggcatgttgcccgtggctctgggtttcggcagtgccgatcccagcttccgcagcccgatggcggtggccgtcatcggaggattgatcacctccaccgtgctgagcctgctggttatccctgtcgtttataccctgattgacgatctcgaaaactggctgcgcaagttgcccagcctactggcacgcagcaagaacctgagcgggaggaaaaaagccgggtttgccatgcttaccgtggttttgctgtattggctggcatttcctgtcattccgttcctcgacattccctacaagattgtcgttgtctctacgcttgtcgtggtcggtgaaaccttgtttgtcattgccatcgccctgctgggcaaagagtattggggccagatcaaacactggctgcggcagaaggtctttaagcgaaaaggctaa

SEQ ID NO: 437775 - DNA, 546 bp, Serratia marcescens
gtgctgaccgacgcacgcgggcacctgtactggcacgtgtgccaggagctgatcggcgatctggccgagttcaacgagcgcgacaaaatcatcggcggccaggtagtgcagatccgcgaactggtgatccggtaccagataccgcaggtgttggttgaagtgaacgggcccggcagtttcgccggcaagttgctgcgtcaggcgctgaaaggcaccggttgcggtgttcgtgaagtcacgataaccaacggacaaaaacgcattctcaacgcatttgaggcaccgctgttgccctgttttctgtgggcgcatagcgacgtgctagacggctcggcctatgaccaaatgcgcgttttcaacccggtggtaaccaaccagccggacgacttcagcgattccgggacgggggctaacagcgagacgcccgtgcgcatcggagaaaattggtcggaaaaccgaccagctcaggggcgggaagattggcagtcatcagatggtgatcatgaggtcgccgtggactactccccctcatacatccaaacgtaa

SEQ ID NO: 437776 - DNA, 174 bp, Serratia marcescens
atgcacaacgattacaaaacccgccttaatgtgctgagtgacaagttaaccgacgtcgtgctgaaggaagccgaatcggatacctggccgggcgccgactgcctgacgatcaagcttttcgagaaagagcaccgcatcgatgaaaaaaggcgacggtgcgcagctatagactga

SEQ ID NO: 437777 - DNA, 261 bp, Serratia marcescens
atgacgtatgcattgaaacagccggccaacggcaaagaggtggagatgacgcctcaaaacctggtgctcgaaggtctggatcggtcgggtattctcgggccactgatggaatacaacaacatggcggaaaaggcatcgggtggcatggtcggcctgttgggtacgctgactgacgtcatccccggcgtgctgaacggcgacgccggggatcgtgttatacacaatgcctgcacgtttttaccaggcaataacctgttctga

SEQ ID NO: 437778 - DNA, 1344 bp, Serratia marcescens
atggccaaaacaaaggttgaaaaagcaccagattttgacataacgaagcttgattaccaaaaaatagctccatatttcaataaatatgaagctacagacgagagaggtagataccttcattggaacctacttaagtggcgtgttccacgtgctgaggctcttgatatttggcaagcgataaaatttaaacgtgaagtattaatgaagttcattccattaactgatatcaatggaaagctttttaaatattgtacgccgcattcgatggaggctcgtttacatcaaatagtaaagctagcgggtgctagtatggggagtattgcaggaggtaaagcttctgacactttgcaaaagaaatttttagtttcttcgttaatcatggaagaggcaattacgagtgctcaattagaaggtgcttcgactactcgtgaagtggcgaagaagatgcttgaggatgaaagagaacctgtagatgaagatgagaggatgatactgaacaactttcttttgttgaaacaggcagagaaagtatgtaaagaacctcttactattgatctgattctggattttcataggatcgccacaagtggaaccagtgagaacgatgttgtgcctggtgaattccggcaggataatagtatttatgttgatgatggtgatggtggtatcgcgcatcaaccgcctgattttgagttaatacaagataggatgcaaaaattatgtgactttgccaatagagaccattctggaacaaatggctgtgagtttataccaccagtaatcaaagctataatccttcattttatgatgggatatgagcatccatttcgcgatgggaatggtcgtactgccagagcattgttttattggtgcatgttgaaacacgagtacaatttatttaaatatgtatctataagtaagtttataaaagactctcctcgggattatgggttgtcatatctttatactgagagggatcaaaatgatttgacctactttatagattttcagttggatgttatattgaagtcatttgatgaactgcaaaactacctgcaagaaaaaacatctgacttctatgaagtgctctctcttcttgataatactagatttaatcaagagcttaactttatacaaaaagatcttataaaaaaaggaactaaagagccagggagggtgtttacagtaaaagaagtggctaactcttattcaattactgaaaatacagcaaggagtcatttgaacaaacttgttgatttgaaagtttttattcctgcaagagatggtagaaaaactttttacatagtcccttctgatttaaaaaagagattgcatgctggttaa

SEQ ID NO: 437779 - DNA, 573 bp, Serratia marcescens
atggaatttaatcagggtgctaaagcagcaatcgaaaggatggttgaggcctacggagtcaagacaaaactggccctatgtgaagcattgggagtaactgcaagtgctctttctaatcgacaagtccgtgattctttccctgctgagtacgtactgaaatgtgctctcgatacaggtgcttcattgcgttggctaacatatggtcaaggtgagatgtttgagcaaaacgttatcacggccccttctgcactctcagtcccatcgaagaaacttctaggtcgtcaactgcacgacggagataccctattattagataaggcatttctccctgaaaatataaaagacccaatagttataactgatgggaatactcattatattggcacacaaacatataacgaaatttatgacggcacatggcttataaatatagatgggaatattagcataagagagatcgtgcgtattcctggaaacaaagtgaatatatctgatcaaaagcactcttttgactgtgctcttagtgaactcaatccgatagctaaaatccttatgaaatgcacattagaataa

SEQ ID NO: 437780 - DNA, 990 bp, Serratia marcescens
atgaaaaaagcaatagacttcaaatttttacagttaaatgagcgaaagctctcagaacaatggatgttttggttgtctatttcaatccccttggctttgtcaataaccttatccattcctttatggttgcaaacaaaaataaacatttcgccagaaggttatgacaatttcttgcgaatatttaaactaccaattggtgtgttatccttatctattccactagtagccatagttgcacatattcatagaactatacaaacagcagaacagatacaaacaactagaagaaaaaacgctgcggatagttttttctcacatcataaatttatgattgaggcacttggaaaagtcccaactaatgacattgcgttatccaactcccctgtagagtacaaaataggagacccttatcaactatatgataattttttcacacactcgtcatatgaaaatggaataaacacatcattcctagttaaagccacatcgtcaattgaacgtgaaataaataaaatagaagaatctttaattaaatcacgagataatgaaggcaataaaattgagaagatatactcattaagagaaatttcagactcaattagaaccattgagagaaatctcactatagctataccaaagttcaaaacaaacaaccttgtcatggatcgagttgacggtgtaacggtattacatgtcatggattatcgcgacgaacctgagctaaaggaaaggctaaggtctttagtctacatcacaaagaaaatattccaaataataaacaaaccttatttagagcctgatacagtttgtttttactcaaatttatcaacaccaaattactgtttttttaatgaggtttttgatgatgttgttcttacaaaaatgagcattttccacggcataacagtaaacggtgcaagtaaatatgataagcactaccaagagtactccagcactttagcgaaaagaaaggctgccaatgttgtataa

SEQ ID NO: 437781 - DNA, 3441 bp, Serratia marcescens
atggaaatatatgatgaagatgtttttggtgaaggagcaaaaagatttaaagatgctcttctcacaaatgtaccaattgttggtttgtttgggcaaaatataggcttctctaaatctgaagatattgtccttaaagctgcactcgagtatgcacaaagacaaggagattcatggaggaatcttttaaagaaagaatctttaatcgaagggttttatcaatggcttgcagaacgatatggacgaagaaatcctacagaagagttaacccggatttttgatatcccacttagtgcagttttcacttcctctatagatcctggttttgtaaacttattgagcaccaatgggaggcaagctgagcccattcttttgggtaatccgctacctactataataagaagcattaaacgccctccaatattctatctttttggccgcgcaggtgttggtgttgaaagatttgacccgccaatcaacacccaaacattagcacagcgtaggttacagcatgcatctgcaatgctattaaatgcaaaagaaagtgctactgctttaggtgttatagtcgtcgatggatataaagctgacggtgattggttaagagccgaagagcttttagcttccatttctggtgtatctaaaggaggtgttatttggtttggggaggatcctgggtttaatgaagacgattctgacacctttaatcatctaattgaaattggtgttgtaattcgagaaaaacataatttatctgctgtatacaattattatctggccactgaagaaatagcaaattttgagccgctcgatgagccaggagtgattacgcttcagaatgataaaaaattcattattgagcctaaattaagattggctacggaagcttcagcatctattatagataattcttggactggctttctcgctccgtttaatgaaactgataactctactgcattttataatttccacagcgcgaatattggattgagagcaagagttgaaggtgtaagaaggaagtatgtaatagaacgcgattttgaaaaacaactgtatgataaagttgaaaaagcaattggcaagcatcacgatcaaacaggcgctcttattttacatggccagtcaggtgtaggtaaaagcattgccatctctaacctagccattaaaactcgaaatcggaataaggttgcggtattaatggtttcaggcaatataattcctcaagcgtccgaactttctccatttttagatgaaatagataagcataacggattaacattattattattagattgtaataaagcatttcactattacgatgagttattgttttctctaagaagtggtggccgaagagtcgtagttgtgggaactacgtacaaacaggatgatgaatcttggcgatttatcaattcaccaacgactttgagccaaaatgaaaaagaaagcattaatgctttatcaaagaggtttacaaatcaagattttgttaagtacgttaattcggataatgctttagctaaattttactggagtcttcccgctagtagaggtgttcttgccgaaggattgagcaaggaaactcgttatgtggaaacaaacctacgcattaggggaagaacaaaaaaaccagttactaagctaacaactcttgcacatgctttcgtggctgcaggttacaatgaacccaattttgaattatttagtaatgaagataccaatgatgcctttgatttaaattcaccagcatcaaagatcatcgattatgtgatggtctcatcaagattatatcaaagtttaccagtcaatttactgcttcgcgtgatacttgataaggagcataacacaaactcttctgtcgactctaccgttatcaatgaattattttcaggtcaggatttatttagatgggaaaggtcgggcgagcaacaaaacgaacttgtagtcagcgcaagattacaaattgaagctgaattagtatgcaatagaagaataggctcttcagaaaaagaagctgaacgcgtggtggaattgattgaatatgcatatctcgcggggcaagaagataatgaggaagcgaaattcgttgcagatattgtatatgctattggtccagatggccctacaaaatcacgttataaaaactcttatcttaaaatagcaagagcattaactttgttgcgggaaaagaaaggtgtaatgaatgcacggttgatgttacaggaatcaacattacgtaggcattatatcaagaatcaagaatcagacttaccaaacaaagcggaaatattgatcgaagctaccaaagcgattgatgaagctttgagagcaatagatgtttctgactttaagagactttatgtagcgaaaaggacccgtgaacatctttttacagaaagggctgcaatatatggttacttagctacagatagtgctcagaaaaaaggtacagcaggtgaaatatgggctagttacaaagctgctcgaagctacgcgaggttatcagcaggtagaattctaagctatcaacctctagatatcgcactgtgggttcccattcgtattttgaaagatgcttccaatttggatgaaatgcagagaattgaaatgctggctgatattagatctacgttagatttagtagatacacttgcattagattcccatcaattagagattttttataaacaacagctcaaagcagctgaagtgttacaagatgaggaaatcactgatgcaacatttaaagcattagatgaacaaggttcggctgctggttattacttgcgcgctaaaaaatacattccagaaaaaccaaaagataaaacaatcacaaccataaaagatgatgatatggctgctataaacaaagcagtagattatttgaaaagcgtatatcctaaaatatctggtgatacccgtactatgcaactgttgatatccactctgtgggcaaaattcacaaaaaggtggttatctagaggatggcgtcaaccgatacctgcatctttagaaaatttagaagaaataagaattttagttacggaattaaaaattatagatgagagttcattttctcctcagtttagatatcttgaggcaatgttacaatggctcacaggtgacacttcaaaggcattatcaatgtggagggatttggcaaaagatacagattatatcgaagagaatagagtttcaaataggcatactataactgacaggaatggtgatcctgtaatttacagtggcattataacaaaatccattggagtaggccggtggtctattaaggttaatggacttgataaagaaattgctttaatacaaaaagacttccccaaagatgaaattagtgaaggtaggttagtaagaaacttttccgtaagttttagctatcgaggaccaattgctgactcttttcattttaaggggcaaaaatga

SEQ ID NO: 437782 - DNA, 726 bp, Serratia marcescens
atgataactttcgatgaaattaatggaaaatttgtgcagttgcataaattagctaacgtgaatctcattccagaagctattgaattaatcactcttcctatcccatgcgaacctaaagacgagctttattttaacaagctcgtttcatggggctattctttaatcgtcgaatcctttcctgttttatttaaacgtttgactggacagataaggcaatcagatattgaaggctatcaagagattgagagctcacaaaaaatcatccacgcattacgtacaatccaaagccataatatgccgaaaaacgtacctgcaaatataaggaaaataaatttgattgatatatggtatgaacaaaacgctcctgacccagaagaaaaatggattgatgcatgtaatgctttgtgcaaaatgttacataatattgtatcaaaattatatgatgctttgaatgcaatcatcacagattgtgataacatgaaagaattaacgtctaagcttatctcctctataaaaaaagagtgggatgcatatagttttgatgattatattgaacgtgctgctatggacattggaatagtcggcatgaatgtagttggttatcgaaataatagaatcaaagagtggagagcattagcagagttattcgatgatgtcgatacagttcggtcaattattgaaaggaagataaaggttgatttattcatgacatttggacaaggttaa

SEQ ID NO: 437783 - DNA, 249 bp, Serratia marcescens; identical to SEQ ID NO: 428180

SEQ ID NO: 437784 - DNA, 240 bp, Serratia marcescens
atgaccgatcgtttaattgccttatttatcctgtgtctggtgttgagcgtgcctttcggcatcgtcctgctgtttaccggcgaaatgctgctcaacttcgtgttcttctggccgttgttcatgtccggcatctggatcgccggcggcatctatttctggctgcatcgcgagcggcattggcgctggagcccggacatgcccgcgccggcgctgccgggcaacccatcgtcagcgtgctga

SEQ ID NO: 437785 - DNA, 1965 bp, Serratia marcescens
atggcgaagcataagcggaaagcaaaaacatctggtagaagtataagtggtcatcttgaaaatgttactccagagaaggctctttgcgagtatgtttggaattcatttgatgccaatgctgaaaatataagcattgaaattaacccaaatggaattggtggactgtcttctatcattattactgatgacggtgacggtataaagtttgatgaattagattacacatttggcaatttcctggactctcaaaaaaacatcaagagaacaccgattacgaggggaaggaaaggtcgcggtagatatacattctttaagtttgccgatagagccacttggacaagttggaacaataatgaagagtttgatatagaaatagtttcgactcatctaaatgagtatgtagttggtgacttaaataaaacaaataggaaaaaaaacggggtctgtattgttttcgatcctgtgattgttgatgaaagttattttagaaatatcatcataccgcatatcgtaaatgatgtatcatggctattagtcgccaagcctcacctgaatttagttatagataatagcaaggttttacctgttggctatactgccaactcttatgcagaagatataaataatttctcttttgatataaagacaactttgtggtcacagaagccagtatcagaaaagtcatatatatattttatggataataaaaatgaagttgttcataaaatattgtcagatatgaatcacaaaggtttttattgttcttcctatgtgtcttctgattggttcgaaggtttcgattgtaatggaggtatgttctcaggaaccgataggaatatagattcagacgtttttaaagaaattgcatcaaaagtaaaaaaggttttacgtgatgaatatcgagactataaaaataatgcagctgaccaactcatacagcaatatttaaaagaaggtgttttcccagagtataacggagagaatatacttctgaatgaatttaaaagatcacaattaatttccactatcaagataatttttgaggctgagccatcagtattttcgaagaacctaaatcaaaagcagaaaaaaatccttgtgaagttaattgatcgtattgtagaaacaaataacatcagtaacttattcgatatacttgagggtgtcatttcattaaatgaaacggaagttgaaaaattatcctcgttgctgagacggacttctctttctaatatcactaaaaccattacacatattaaagatagaaatgatgtgctagcttatttccatagcttattatacgattttaaaaaagaaagttatgaagttaaacatattcaaaaatgcgtagaggagaatttatggttatttggggagcaatataatttattgacttctgaagaagatgattttgataaggccttgaggcgctacttaagttctgtttccgggtttagtgaggagcattattcaaaatattttgtagatcacccggataagaataaagaaatggatatatttgcagctcagagaggtaagcgttatttagataatggtgatgagtatttccattgtgttgttattgaattaaaaaggccaagtattaaacttagcgattctgaatttgaacaaattaaaaaatataaaaatgtcatttcatctacggatcaatttgatgatgaaaaaacgttatgggactttatcctagttggtaatgaaatttcggacagtaagattacagccgcaaatattaatgcagagttagcatctaatcgaatacatggtgagttcggacttgcccaaaaggatggtaacaagaggatttatgtgaaaacatggaagcaaattctaaatgattttgagttgagatatgatgacatattcaggaagctgaaagtaaaagaattagaagttattaaatcaacacctgatgatttagtcgatgaaattggtaagttagcttga

SEQ ID NO: 437786 - DNA, 360 bp, Serratia marcescens
atgaaaaaactcctattacccatcacgttgctgatgctgacaggttgcgcaaatccagaactaacaaaaaaggttactgctgagtttacgtctcaaaaagatgccaatagtttggctgtctgcattgcagaaaaatcggacaagcgtaccttcaatggattgcgaattgaaacagtaagtaagcccacacgagagagtgggatcgcactggttttgattaatggttatggttatatcgacattttagataaagggtctcaacagcaagtaatatatagaggtgaggccgccaatagtaattggggtaaactgaccaatagaaatggtgaggttatttctgacattaaatcatgcttgtaa

SEQ ID NO: 437787 - DNA, 159 bp, Serratia marcescens; identical to SEQ ID NO: 437584

SEQ ID NO: 437788 - DNA, 603 bp, Serratia marcescens
atgaataacgatctaacccctgattgggcacctggagcaggaaagatttatacatggtatgccatggacaaaaacggcaggataggcgtttttgttaataactgctggggggatttacctcgatgtatacttctttcagaagatgctagtgatatgcttattaacatttctgaatacttatatgaagagtctcaggttttcacttcatatcctgaagataaaagtggggggtatttagttgatttatttcctgcatggataggaccaaaaacgaaagaaaaagtgaaagaaagccatgatgaggcttttgctaaaaatagactgtctagtgaagcaaattttgcaattaataaaggtgtttttatctactttgcagtagagggaaattatccaggagaagattatccagttggttatgatggcgaaagtgaaatgggagattactatcgttatctggtaccgacggtgtacgggagtattgatgattttcctgaggaactgaaatctgggatcgtagtatcggattctattgattttactgtcgatagattgatacccagcaagagtatcaatcagtattttaaaaccatgtatggacagtag

SEQ ID NO: 437789 - DNA, 3834 bp, Serratia marcescens
atgttatttaataaaaaatacaataatcttttacccacaagaaaatttcttactgatgaggtcattctccttagtgcttggaaaaagtctcatcagcatataagaggaataaattcttatgccgattacttagacttagacaaatcggctattgaactagactcaagaatacagaaaatagctaataaactgaagggaagaagagtaaacctatccctcctagaactaatcccatcccctaaatctcacgcttgggaattccataaaaaatcacctaaaatacctaaagaccaagaagaaagttcatattactgggctccaaaagtagacaataactcatcagatggaaacgcaaaggatagtgagcaaccaatgcgcccattagcacatgtaaccattgatgatcagaccatttttacggcacttatgatactgttggctaacaaagtcgaaagtttacaaggagatccatccacaccgttaaaagatgttcatgataaaatggttatcaattacggaaatagacttcattgcaaatacgtgaactcagaagccaaatactcttggggaaacagtgatacttatagtaaattttttaaagattaccagcaattcctagcgcggccaatatattttggacgaaaagcaaaaagaacaaaaactaacaatgaagaaatttatgaagtacatctagacttttcaaagttttacgattctattgatagaactttgctaaaagaaaaaatatctgatcttataaaaaatattacggggagtgaacctgattcatgcactaaaaacctcttgaactcattcgagaattgggaatggacaaaaaactcgcataatctttataaagaagtttgtcagaacaaacatattacgacgttagctccgaaaaaaggtgttccacaaggacttgtcgctggaggatttttggctaatatttatatgcttgacttagacaagtcaatctccaagctaataggaaattatttagacgatgataacaaggtactgcttgtagacgcatgtcgttatgttgacgacctcaggtttattattaaagcggatagaagccacactgaaaataatttatgtaaaattattgaagataaatttgacatatcttatcttaacctaaaattccaagacgaaaaaacaaaaataaaaagatttagttcgagagatggcgctatttcagcaaaactagctgacattcagaacaaactcagtggccctatgccattacatgaactagatgaacaacttggtcaccttgaaggtctaattgagttgtctgacaatctcactgtcagcgacgaatatgttcaaaaagacaaaggtgattttactaccgaattattattcattgataagacatttaatgatgtacgcaaggacacactactccgttttacagcgaataagattcatatattacttcgccaaaaaagaaatatgataacgcaagaagttaacaatgcaggggaaccaatccctggttcctgggattatctacaggagagaatggctagaaaattaatatcaagatggacaaaagatccatcgcttacgtcattattgaaaaaagggcttgaactttttcctcatgttagcatactcagaccgatattatctaatttagaagcggttagaacgcgtggcaataagcgattggaaattttctcagagtattgtataagtgaaatacttcggcactctgccactgccattcatactaaagatagatgggcatttccggctcattctgaaccagaaaaatattttgattatttagaagatattgcagcgaataaactttttaatttaaaacaattaagtgtagctcttaaagagcaagtcctatttttctgtcttatacgaaaccaatcaatattaaaaaaacctgtcggggaagaaccttttgatttaatatctcaattgcagaatggttttcgtcaagttaacacaaatttaaccgtagaaaatttcaaaacagctgtgttgcttgccgatcaaatatctatagataaaaataaaatccatcgttcaaccattaacgctttagaaacgatattcaatagaagagcaagaactaactcattgaatgttgaaaatttagcggaaatatgccgcggaataatgttaagcgatcctgatttattcaagacgctgtatttaaaagcatatacacaagggttcaattgggtcaggaaagttaaaaatcttgcggattacctttgcctacatgcaccatcaaaattaaatgaagatctcgcattacataataacaaagagctatccttactatctataattagatctgataactctccacttaagcaagaaaatgggattttaaagttactccaatcattgctgactagtttaaataactctgggatccataaaccgattgatatatctaataccactgtgaaatgtaataactggggcaatatcttacgtcttgataactcttgtatactagaattaaaaccaagttactaccacgatgatgatctattttttcattctacaccaagttggctagctgaggatcataaatcattgtattacattggtatgtttacaagaaattgtcttttaggggaaatagattggactagcacaccacaggcctccaatgaaaatccatcttatcgtggtataaaatctaacatgctaaaaagacaaattggcatgatgcattcaccagagacatttggtaaaataaaatccccaatgactgattggctgtcgtcattactattcaaactattgcaatggcctggcattgaaagtaatgcagacttatatacatggcccattgaatggagcttagcaagcttaaaagaatgtataaatgatagaataaagtatcaaaataaaattttctgtgagttatcaaatgttccatcatatgtagagcgggttaagctggaatggaattctgataaaaatgttctaaacgtagtaatggtacaacctctacttccaaaggtaaaagatttcgattcaaatggacttaaactagacagcataaaatatagagcccgacatagaagacatgttgcctcggttgcagaattaatactgcataacatagccagcgttgacagtattaatgaaaatccaaaattgaaaggtaaggtcgacctaattatatggcctgaattatctgtatctccagatgatttagatgtgctagaaaggctttctgataaaactggagcaataatttttgctggtataacatttagtcatataaacaacctgagagagttaaacaatgctgcaatatggataattccaaacaaaaactcatcaggcagacgatttataaaacgcttacaaggcaagaaaaatatgacaccaggagagagaaatgatatttcctcgtggagaccttaccaattaatcattgaactactccatccagccttaagtgatcgtgatggatttaagatcacaggttcaatttgctatgatgcaaccgacataaagttaaacgcagatcttaaggataaatcacacgcatatattatttccgcaatgaataaggatatagcaacttttgatagcatggttgatgcattattttatcacatgtaccaatatatagttttagttaatagtggagagtttggtggttcagttgcaaaagccccatataaagaaagatatcataaattaataacgcacacccatggttcacatcaggttactatttctagctttgaaatgaacatgtttgattttagagagatcggtaaatcactaagatctaaaaaagaaacaaagacacctccagcaggaaatttaaaatga

SEQ ID NO: 437790 - DNA, 531 bp, Serratia marcescens
atgatttgtctagatatcgacgctgcccaatttttgacttataaattctggaatgaacgagcagccattattacagctcttattgctgctactgctcttatttttactattaaacagttaagagcaaacaaaagagagtctcgtcgagcaacagcatataatgcatatcaagaatacctaaaattatgctttgaaaacacaaacttttcctatggaaaagaaagtgacataatcgaagatggcggaattgataaaaaatacccttggtttatatctcaaatgctatttacatttgaacaaatactagagaatgatacatgtgattttgaatgggaaatatctattaaatctcagttatcacgccattcatggtacctaagaaaatctaaaagtgctaatagtaacgagtggagcacgaaattaaaaaaaataattaatgaagtctcctcaacggccaacttatcgagttcaaaagaaaaagcccccccgacaaacattagaaccgaaaataacaatttcaattcaaattag

SEQ ID NO: 437791 - DNA, 3432 bp, Serratia marcescens
atgcattattcattttctgacagcgggagctatattggagtgaacagagtgagattgaaccttgcctaccatggtcggaacacgaccttcgacgtgcctgaggcctctaagttcgatggtggcgcctatgctgcggacattaaggtccttgaagccctgcctgtgtggaccggtactccgaacggcctatcactctggcagaaccagaaggaggcaatagctctcggtgccgcctacgtccgcgtttcgcaacaaacgggtgaacccgaaggcgcccttgtcaagatgccgacgggtagcgggaaatcgggggtcatcgccgtgctgactcgatgcctccccaaggttcgacgtgcgctggtactaacgccaagggaaggccttgttcagcaaatgcacgccgatatccggcgcaggttttgggcgaacatgggatgcgcagagccgggtaacaaggtctggtcggactctggcgtcgaacctgcggcgatcgaaattctgctgccgaacagggctcgaaccgaacagatttgcaacatgttggaagctagcgaccgaaccgttcttgtaggcaccctccaagctctcgacaagatccggacagagcgagacaagttgaggcgtcaggctgctggcgttcagctaaatgaagcaaagttggcggaactcacacggctggaccgcatccttgatctgttgggcacgttcgatctcgtcgtcgtggacgaggggcactacgagccggcaccgtcgtggagccggagcgtcagagaacttgcgctgccaactatcctgcttagcgctacccccttccgcaacgactataaacttttcaccgtacgcggctcgttcgcctacaatttctcgtttctgaaggcggccgacgccaaaatcgtgagggacgtgtgcttcgccacgctagactcgcagaacggtagcgcgacggccatcaactgctttaacgaggatatcgaccaggcgttagccgacggcgacgcatcggccatcaagacctttgctgaccagctgctcgaactcgcacccttgcttactaaggaccgcccggccggttcaaaaatcatcgtgcgggccgcatcatggagcgcgctcgcgacgttgcagcccctccttgcggggagcaaacagacagacgcggtgctgatccatgaccaagtgggcaagggtgataaccgtaaattgcatccgcttcgcttcgtcacggtaagggaggcgcagaacaaggccggagaagcgaccttctggctgcaccaaacaaaattgcttgaaggcatcgacgatccgatgttcgtcgctgtcgctattttggatggtttcacgaacgaccgccagctcgtgcaacagatcggtcgggtgttgcgctcgaccgatgcgaagcgccagcaaatccagacggcgacggtggttgcacgcaacgccgagcagctcgcaaggctcaagaccagctgggcacaatacctggccttcgaagccgcaggggaggagaatcttgccagcatcattcccggcgaggcttatctgcccgagaggatcgtcccggcgatgccggatcaacagtatgttgatgggagcttccgccagagacttcctgtaacgggtccgttgcaccgtgatgatcttctggtcccccgccgcgcagcgattttcgccatcggtccggacttcgacgcgactcttgcggaaactgagacccgcgagggcatcgtcgcccgcaatcgcttcgtggtccaccccgtggacgatttgccggaaggagtctggggctggaccttcttctccgtcgacgaaagcccctacctcagtcgccattttgttacagaatggcagtttggggtcacgctaatggtgcggatcaacgaccgactgttcgtgttcgacaccgacggtgtgccgttcgatgccaacaagatcggcgtcacgcgtctggacaggcagatcctcgtccggctcttcggtccgagcagcaacgaccgtaaggtccgcatcaccaagctggctgccacatcgctcgaaatggcggaccgcgcgatccgggcgacgacgaccagcaccgcatctttcgaggatacgtttacggacttgctggatgcggtgctccttcctaccaacgtcgcgggatacgttggaggcaccgcacgctacttaggccttagccgttccaaggtcactgacgcgagtgtccgccgcgttggcgtcgatgagtacgtgaggtgggccaccgatatcgaccgcgagctcaccgccgcgacggcgggcaaccgggtgttcgatcgtttcgcgcagctcacaacaccggacccagaaaaggcgaagaccccccggaatatactgctcgatctgcagccgcttgacgactttggagcgttcatcgccgaccgtgagggtcagccgtcgacgccgaaggcgccgtccttgatcgacctctgcgccgacatcgacgacggccaattccaggttacgatgagtgatggcagcaagctgggctgctcgatcacttacaaccccaagtccggccgctacgcaatctcaagcgacgaactcaacgccattttccagcaaggcttctcggcttcgggtatggtcatgacgttaaccgagagaatcaacgccgagcaggcgtttcgcgtcctcaccgacgaggccgataaggtttacatgcatggcaaatgggccaaggcgcgggagatcgtgtcggacagacgtgtcccggcactcgatgttgctgttgccgtaccggcgctgagagacacgttcgtggagaaaggagaagcagcatgggcgaacggcaacgtcagcaagtggcaaaaggagtcgattttcggactgactgccaaatacatcggcctcaccggcccggcacccgacgactacgccaaggcgctgcgggagttccctcttatcctccttgacgacgacggccaggagatggccgacttcattctggtctcagacagcaaggtggtgctgcttcacgcaaaagctctggggaaggacgacggtgacgaaagcgcctccgtgacggccatccaggaggttggacgccaggtggctgcatcgctagggttcttcctgacctcgtcgccccaaatcgagaacgatcggtggcagcgcgcatacaccgcgaacaagaccactatcccagcgccagcgtcgggaagtatccgcatcttccgcaacactggaggggtcgctcccgctgatgttgctgatacggtacgcgcggcgttgcgtgatcgccgtattgccaaggaggtctggctcgtcgcaggccggttgctaaacattgagactgcgcgcaaacgtgcgttggcgaacactttgaccaaccggacgcggcaacttctcatgtacatcgacggcctgtcgacgacgtgcggccgcgcgaacgccaggctgaggatctttgcgcactag

SEQ ID NO: 437792 - DNA, 1227 bp, Serratia marcescens
atgagcaacgaggaagcaagcaaatacccccatagcgccatatccacttggagtggatttgtctaccaaggcaaggtagcgctctatcattgtcttaagctaattaatcaaggagatagtgatttccagctacagcttgacagtacagatgatttcgcgatttacaaagataataatttaataagcgcacatcaggttaaagcaaaaattggtgattaccgcagtaattataaggaagccttagaaaaatcggcaacaataaaacttgatagaatcgcagggataaaaaggtattttcatatatctcaaccgattaacgatcatagtgattacattgatgctaatcacgaacgagttgaattctatcaatacggtgaaaatcgccactgtgaactagataagatagaagatctaaccaaagatattattaaagaaatctatacccgccaggcaatcgtttatgatgagagccttatagatgcaaattattgtctactatcagataaaatcagctctcacgcgctagctattcacacaaaaatacaaaatgatggtgacgctcagcgtaaagcagcttatgaatatagagtatctgccgcaagtatgcttgcagacattacggacgctagtccatatgaaagaaaggactattacgcgatcgagttaaagacgcgcctctatagtcacctagaagaaaggctcgcagaatcactctcggagatgtcggacgcggcctacgaaagagccaggcgtatctatacgcttataagaaaatctgagggcggcgatttcaagacactctgccaacttatgaaaccctcagagaagttttcacgcattcagaactcagatatacgccgatatacggatctcgtacacacctttaaagtcgatccaattttaaaacgactaccacattatttagacagcaacaataaattttacgcaccaacggcattatatttgctggaaccaacagataaaaaatactgtacttctgatattatcgcagaaataaaaaacaacgacgatctaggcaggcttttattcgaattcaataatcttattgcagccaaggctaatgagagtttcacaattgatactaattatactaattgctccgatataacttgcatcgatgatcaagatcgcatcgatagcaacattactaaaagtttatgcattagtattttaacaaaagaagacgcagaggcccgacttaaatga

SEQ ID NO: 437793 - DNA, 666 bp, Serratia marcescens; identical to SEQ ID NO: 282745

SEQ ID NO: 437794 - DNA, 2340 bp, Serratia marcescens
atgaactggcaaatatccaaaattgagatttcaagttttaaagctttcaaaaaaatccatctggatttcgggggagcatcacttttgaccctggatgggcccaatggatttggcaaaactagcatattcgatgctattgagctattgttaactggcagaataaaacgaatctgccatctattttcaaccttaatgataggaaaacgaacgaattatgaagataatcttctttggaataatcgctcaggcaataatgaccttgcaatcaaaatcgagtttattaatggttcgaggaggcttactctagcaagacatactcccgcctcaaactttaacgagaagtcaaataatagagcggaccaatttacccactttactctttacgagctcccagagttcacctcaaacagctatgtagcagaaaatatccgcgacgaaaacttcattgagacactcttcggaaaaaacttcaaagagaacttttcatttttaaattatttggagcagggccaaaatcagctcctgcatacgcgagtagacaaacgtaaagaggcattgaacaatctctttaatattagtgacataaaggcagagactgataactgcaaaactatcgccttgcggcttacaaagttcatcggcgatcctaagcgtgctgcagatttatcaaggttagaaatagaggccagttcacttaagaaaatgattcaagctgatttgggatcaattggatacaaaaaaatctccacctcagtgctgcaaccagggtgggacaaagagaatcccttccccacctactctacagaaatccaaagagaatacattgaaaatatccacagtcttcaaaggctggctctgctaaagagtgcaatacagataagagataaaaatgaatcgattgaaaattttattgaacttaacaaggattcaataaaaagcttagcacgttttggcaatgatttaaacaagctggatggacttgaatccattaaaaaagaattgaatgaactgctcaaacgtgaaggaattataaaacgtggtgcaacagtcattaatgccgatgaggccaggagtcttagtggatgggcccaagggcgtttggaatggtttattgagcaaatagttatccgtgactcacttcaagaaaagagcaactctaataccaacgctgcaaccgagttgaatcgtttaaaagcagaactagttactgagcatactaaactctttcctgacgctcaggattgtccgctgtgtggtgcggactggcaatcccatgacactatgctgcaaaagattgaataccgatcaaagcaaatcaatgacgcattaaacgctgatggccagactctgttaactcttataggaataatggctacagagctggccataattgatgctcaacttaagagtctgaaagcgcagctatccgtcaactacaacagcgtcttacacaacgcactgctccgcgataaagctcggttgcctactattaaccaactcgtctccaactttcaaactttaggtgtagaactaaactattctttctccgaaaatgaggaggaggtggacacgagaattcagtctcttacagctttcatcagaagccagaaaacagctgagacagaacctttgccccaagattggagaaaggtcatcatggctgtctttaaagagctgcaggacttctatattgttgaacctcagttgttgaaagacaaagaactgtatatctcagctaaagcaaacgaggcacaaagcaaaaggctcagacaatgccttaataagctagagatcattaagaatgaaactaaagcagcacagatagctaaagaaaaagtcaataacctaaaggctactcttgagaaaacagaacgcaactactcagaacaaacaattgctgaaattgaactgattttccatatatatagcggacggcttatccaaaactatcagcgtggtttaggtctgttcattgaaagcaaggatggaaaagaactcaggttccttacagccgaaaaatccgagtatgatgcgattctatcaatgagctccggccaagtatctgcgctcagtctaggtttttttctttccctgaatcgggtttactcaaacgtaccactgattctgatcgatgacccgtcccagtcgcttgatgaggtgaatatcgcctctttgactgaccttcttcgctgtgagttcagcaatcgccagttgatcgtttcctcgcacgagagtgatatctccgcttatatgcgctaccggttcgccaaggccggtctaaacacccgctcattgaacatgcaacgcttggctaaggaagctttagtcgccgcggattga

SEQ ID NO: 437795 - DNA, 426 bp, Serratia marcescens
atgtccaaaacttccgattcacggttacgcaatgagggctttcgtaaagcagaggcttccctgagacttgtaggaagggaccccagtggtacgccactgtacgagtccattaaggcacgtattatttcaggtgagctgacgtatgagcaggggcgttcagagattcttgcatactacacaaaagcagatactgacgggcctgtgacagtgggagagatgctggtagaggaatttttaaaaccgctgaacatgtctcatgatgaactggcgggagctatgggtatttacaaacaggatgttgacgatattatctgcggtttgcgtcgtgttacggatgatgaggctcgcgttcttgctaccatatttggtaccgatgtggatttttggagcaatctgcaggaaatgcaatacaatcaagagaaatga

SEQ ID NO: 437796 - DNA, 681 bp, Serratia marcescens
gtgccgccgtcggcatcgtgctcggcgtgctgctggcccggcgttaacacccctgcagtcataaagataaaacagatgtgcgtctggcccgcggaaatcgcgggccgtttaattttagcgaaacagctgcgccagcccctgtaccgcccgctccgcctcctctcgccggctgaaattggcgccccccgacagtcacccctgccccgccggatggtcgatgcgctaatcagagagcgcctgcgtcaaccactcgcaccgctggcgatacagcggccgcatgcgtttcaggtggcgatagaaatgcccttgccggataaaatccgccacgcttgcctgcagcaacggcagcaatggccgcccgtgatagcgaaactcgctgtcgtagtcatcctcgaggatccaggctccgcgctggaatgggccgagtcggtgacgctgatcgccgccaccggcgcgccagacagcgctttcgaggcgctgaaagcgtacttcagcgataacgagatcgccgctccgactttcgaacgccttcaatcgtctggtcgtcagcatgcgtcagaatgcgctcgactccccctcttcactgagagaggagaatttctcacccgaaaaaatttttccctcgccttttccagccccgacgcggtctacgtaaccaatcccacaaaacaccatatatag

SEQ ID NO: 437797 - DNA, 636 bp, Serratia marcescens
atggctgagtattatccggcgatgtttggcgcagaggcttttaactgtcctctctgcggtgtatacgcccgtcagttctggcgtagcatgtatggcacttcgaatgtgttagccagtaaatctactgagttccgaatgtcaacatgttctcattgtgatgaagacgcttattggtatcaaggcaacatgctgattccggcggctggtaatgttgagctaccaaatccagatatgccagaaaactgcaagtccgactatatggaagccagaagcatcattaatctgtctcctaaaggtgctgcggcacttctgcgtctttgtctccagaagcttatggttcacttgggcgaacaggggaataacattaatgatgacatccgatcactcgttcagaaaggactgccagtacgcatccagcaagcagcagacatctgccgtatagtcggcaatcaggcggtccatcccggagagattagccttgatgacgacccccagttagcacatggtctctttaggctgctgaacattattgtcactgagcagattaccagaccaaaagagatagaggcgatgttccatagtatgcccgaaggccctcgtcaagggatcgagaaaagggacggtaagactagttaa

SEQ ID NO: 437798 - DNA, 144 bp, Serratia marcescens
atggtcattgaagatcaatcactgtcaaggctattcactccatcgactgacctagagcacaccgggaagcaagaaccaaaggcctcgctgtgtgtgtctgtatgtggtctcctgcccctgaaggatgcgatgagttacggttaa

SEQ ID NO: 437799 - DNA, 1011 bp, Serratia marcescens
gtgcgcaaaatagggctgtgcctcgtggcgctggttttggcggcgcttggctgggtgatttacgtcaacgactttcgctttgtcaccgaaccggtcgcggtgtccgccggcggcaatcggttgaccggcacgctggtgctgccggagcatgcgccggtcaagctcggcgtggtggtgttcgtacacggcgatgggccggccaacgccagccgcgacgaaggctattacggcatttgggaggcgatggcgcagcaaggctatgcggttttatccttcgataagccgggcgttggcggctccggcggcaactggctgcatcagaccatggcggatcgcgcgcgggaaaccgccgatatcatcgactgggtccggcgagacgggcgcttcgatgcgcgctgcgtggggttgtggggcaccagccaggcggggtgggtgatgccggaggtggcgcgtttgcgccccgacatcgccttcacgctggcgttggcgccggcgatcaactggctgcgacaggggcgctataacacccgggcggcgatggcggccgcaggggatgatgaagcgcagatccaggcgcgcgaggcgcattggcgccatatccaaacgctgctcgaacaaccggacggctacgcggagtaccgccgcgagtatggcgccgccgccgcattgagcgccgaccgctggcgctttatccgcgctaacatggccagcgacgcgacggcgggattgcggaatttcaccacgccggtgcacctgatcctgggcgggcgcgacgtcaacgtggacgcggacgaaaccgagcgtgtgtatcggcaaacgatcccggcctcgctgctgacggtgacgcgcatcgacgaggccgatcacgtgatggtcaagccgctgttcgcgcgccatccgtggctgatcaacgtggtgggcctgtttgccccgcgctcggtgcaatacgacgcctaccggcaggacgtggcggccttcctggccgctcagccctgcgggcgcgggcgctaa

SEQ ID NO: 437800 - DNA, 1488 bp, Serratia marcescens
ttggatactattagcataattatcaaggacataaaaaacatttcaagtgcaagtatcgagatacctttcgaaggcgggctctatggatttgtaggtgggaatgggtgcggcaaaagcacacttatgctcatcctgtccgtacttttgagcgaaagacgctttatgatgttaaaaagcgaagattacactaatgattctagcattgagattaaagttaatacttcaacaactaaagtaaatcattgggcccccaaaaaaagtaaatggcgcctccccttaaacacttatccatttagatataatgggttatatgaaggtagcttgttttatggtgcaaggtttgatgactcaaggatagttgatgcaatactcagaaaaggagatattaacactgatgatatagtggatgccgttgattatataaaagataatttgagttttattctgcatggcgacagaatgcactatagaaatttgaagaaaatcaaaaacaggcaaaccgccaacaagctaagtcttaataatatcccatattttaatgaagcgaaaaatggaaagctattaagtcaatatagaatgagttcaggagagtgtttactaatatcacttttaaatttcatatactatacaatagtagagaacaagtccgggcaaacttctaaggctttaattcttatcgatgaaatcgaattggctttacatccaatagccataaccaggttaatatcgttacttaatagtctcaatgaaacacaaaagaatgttgttatatatcttacatcacattccccagaggttattagaagcataaaaccaagcaatatgtttatgttagccaataataacggcataatgacaattacaaacccatgcttcccaagttatgcaatccgtgatgtctacaggcatgacggcttcgactatttgattttagcagaagataaactagcagctacggttattgataacgttctagttagtaaaggattaaaaaacagtagactcattcatatatctcctgtcgggggatggctaaacgttttatctctacataaagatttgattgctcataatgtcattggtataaacaggaaaataatcagcatcctcgatggcgatataaaagatgaagtcgcaaagaaaactgagtatgcggccattccaaaatgttttctccctataccaagcattgaaaaattcttctatgatgtagtctataaaagaaaggatgaaaaaataagaaaaatcattaacgacaagtacttcatattaaaatcacttgatgatttagtagctgagcacaatgaaaaatacaagagcacacccgaaaaccctgacaagaagttttacttccgaattaaatccgaccttgaatcaagaaacatccctgaatcaagttttattcaatacttatgtgatgatattagaaacgccatagacttctctagctttgaaaatactgtcgagaaattactcacagataaataa

SEQ ID NO: 437801 - DNA, 912 bp, Serratia marcescens
atgttcaatttgcttgtttctgcctgtgaagatgattggaataacccttcatgggttatttcaaaatccaggtttcttgaatatactgatgataatataaaagaaaggttcaaaaacctttcagaggatgttattaacacccttaaaaccataccaacatttttcatgtatgaagattatcatcgcgccagcgccaaaattggtcaaatcacagaaatacaacgaagacaaacagagataaaaataacttacgcgttcaacccagcgataaaagaaattccttatgaaagattaagaaccatttatagagaactagacatccgtaacaagttcgaacccaatagaacacactgggcaataaaagatgttaatcttatagaaactttacaacagataggcttacttgaaaatagaatttatcaatcacaaaaaagacctcctaaagtattcataagttattcttgggattccccagaacataaactatgggtatcttccctggctacttggctaaggcaaaatggaatagacataatacttgaccaatggcatgtaagaggaggtgaggatttaatcacttttatggaaaggtcaatcggcgaagctgatcgagttataataatttgcacagagaattatgcccaaaaagccaaagaacgatctggtggtgtaggatatgaaaacactttactcacaaacgaattaataaaaaacttagggagttataaattcatacctgttataaaacaaactaatacaccgtatacaacccccagttcattatcaacaatattatattatgatctgagcggtggtcaaaactaccaagatgaggccaggagcttaatgatggaactacataatattagcgtacctatcccccctctaggaaggaatccattttctttataa

SEQ ID NO: 437802 - DNA, 1995 bp, Serratia marcescens
atgcccgcagaccaaggccctgagcttcttagcgctcacttcggcacccagagcccccactggcggctggcgtttgacagcaatgccctggagctgtccgccgttaagggcaaagctcatatcgcggtagcgctcagcgccatggaagcggcgaaaatccgccgtctgaccggcgtgaccgccagccttgagctgaccattacgttggccggtgaaccgctgcatctgcatctggtcgggcgccgcgtcaacaacctcgaatgggcgggcacggcttccgccttcagcgacacccaatcggtggcgcgcgacctggtgcacggcctctccttcgccgagcaggtggtgtccgaagccaactcggtgatcgtgatcgtcgatcagcacggccgcatccagcgcttcaaccgactgagcgaggagtacaccggactgcacgaacacgaggtgatcggcaaaaacgttttccagctgtttatgagcccggaagaagctgccgcttcgcggcgcaacatcgccggcttcttccgcaacggttcgtcctatgaggtggaacgctgggtaaagacggtcaagggcgaacggctgttcctgttccgcaacaaattcgtgcacagcggcagcggcaaaaacgaagtctttctgatctgctccggtaccgacatcaccgaagaacgccgcgcgcaagagcggctacgggtgctggccaacaccgatctcatcaccggcctgccgaaccgcaacgccatccaggacaagatcaatcacgccatcgccacgcgcggcgaagagagtttcggcctggtgtacctcgatctcgacaacttcaaaaaggtcaacgacgcctacggccatatgttcggcgatcggctgctggtcgaggtcgcgctggcgatcctcggctgcctgagcccggatcaagtgctcgcccgcctcggcggcgacgaattcttggtgctggcgccgcaaagcgatcgcgagcgcctgcaaacgctggcgcagcgcattatcgacaggctgaagaccccttttcgcatcggtctgattgaggtgtatacgggctgttcgatcggcatcgcgctgtgcccggagcacggcaacgatctcgacagcctgatccgcagcgccgataccgccatgtacgtcgccaaggagcacggaaaacgcacctataccgtcttctcgccggagatgaacaaacgcgtcgccgaatacatgtggctggacaccaatctgcgcaaagggttggaacaaaatcagctggtgctgtattaccagcctaaaatcgacgcgcacagcggcgaagtgcacagcgtggaagcgctggtgcgctgggattcgccggagcgcggcctgatcccgccgctgcagttcatctcctatgccgaggagtccggcctgatcggcccgttgggccaatgggtgctgcaaaccgccgccgggcaggcggcgcgatggcaagagcagggattgaatctgcgggtggcggtcaacctctctgcccgtcagctggccgacgacggcatcgtcaacgacctgctcggggtgctgcaccgtcaccgcatggccccctgcctgctggacttcgagttgaccgaaagcagcctgattgaagacgagaaccgcgcgcgcgcgctgatcacccggctgcgcgaactgggcgcgcaggtgcatctcgacgactttggcaccggctattcgtcgctggcgcagctggcacgcattcctctggacgccatcaagctggataaaagcttcgtgcgcggggtgaatttcaatccggtatcgcaatcgctggtacgcgcgatcgtcgcggcggcggaggcgttggccttccgcgtgatcgccgaaggggtggagaccgagagcgaaaaccacttcctcgacgaggtcggcgtggacgaaaaacagggctttctgttcgcgcggccaatgctcccggaacagctggagcattggctgcagtcctatcgcccgcgctcaccctccgcatga

SEQ ID NO: 437803 - DNA, 306 bp, Serratia marcescens
atgtctttgcgtcgtggggtatttgtctgcgtggcgctgctggcggctctcgccatcgcgctctattacgggttgaagcctgaccatcccgatgcgctatggcgcatcgtcagccagcaatgtctgcccaatcagcaagcgcatgacaacccggcgccctgcgcgcaggtggatgtgccggccggtttcgtggtgtttaaagatcgcaacggaccgctgcaatacctgctgatgcccagcgccaaaatcaccggtatcgaaagcccggcggtgctggacgccgccacgccgaatttcttcgcctag

SEQ ID NO: 437804 - DNA, 1092 bp, Serratia marcescens
atgggaaaacgctctgaaattaaattcataagaccttgcatctccatatatgaaaataataaggtattgaccccagcttatgctttgcagtgtttgacgcagaaaaaagtggttcagataaacttagataattgctctttacaaagaatggaggaattatcatcgacatcaactctggaggatgtaaaacgagttggcctattaccgttagtaaatttattacaatcaggaaatgtatgtttaaccgcaattggtgttaatgaaatgcctgatatatgggttgagaaatcaatgacggcctatcagaacttttgccatcgattctggcctggtcatattgacgatcccgaggcgactttcagggaatacgccccagactctgaaaaaaagaaaattaacttccaggaactttccgttgaagcaaggacagtatatggtcttcattatatatctatgcttcaaattcaaaatataaaattaaactattctcatctcacgcctgaaaaaagattcgaagtatatctttatagcatgataagcttcattgacatgattagtgcgtatgatttagaaatagcaaaatatgctttttgggatcttgactcaaacaccattaatcagttgccagagagtatacatacgcgtcgaaaatatataaaagagaatttttataagaacggaagcaatcttgataaatgtcgatggtatgcatttgatgcagcgatggatttacactggcttacgggagctaatttttcagaaaatataggttccttcatcactataaatggtgtaaagtttgagactgaacattgggttggaacaaacgacaaaaaattatattatatctcacaagatattcatcatatttactatgagggctcaacgatgaaggcgttgagttcctgtagagaagatgagatgactgcatttcaatactgggaatttgttgatagtatttcacaatctgtacttttatcccgtaaacattcaaaaaagaaaccaaattctaatattactaatttaattgatttggctgtagaaaaaatcgaaaatgatttacataattattttttaacaaaagacacctaa

SEQ ID NO: 437805 - DNA, 675 bp, Serratia marcescens
atgagtaaaaagaaaaactcaacacctaataaagaatggcacattgtaatcattgacgatgataagttttatgcatccgggttagcgatagttttggaaaaatacttaaatagtattggccagagcacagtgttctcctttcattacccttgcaaaaaaaaggcagatattgtttttcaggcaatacgttgtggtactgtcatcgagcctcgcaacccaacctctatgaggaacgataaaccattgtatgtcgccatcgctgaaattaaagatgcacacttaaagcacctatacaaaaaaatcaataaaaacaacatattatacagacaccagtcggagggtattgcctttcaacttatggagaacatcctctccaagcagctcatgcaaaggacgccggtaaaagcgcagcctaatcaagcatcatttacacaacgagagcgtgaagtgttacatctaattaaacaaggtgaaacacttacctgcatgtcagccagcctgggtataaatgtaaagaccatcagtgcacataaacgcaatgccatgaaaaaattgaactttaaacgaaatcaagagctgtttcattggttgctgaaaagtgatttaaccagccatcaatctagaaaaggaaattcctccctattcaactcaggttacgtaaaaaggtctatttaa

SEQ ID NO: 437806 - DNA, 741 bp, Serratia marcescens
atgctcaggagtaatgacctgctcactatcaaactatccaagcctgcgacacgattactaactgagctaataaagaacaataaaaatgagctcacgcgagaaacgctaatcaagcacgtttgggaggactacggattctcaccgtctagtgcaaccctaagtaaccatatcagtgagttgagaaaagcctttgaagcacttggggtgaacaaagagattctgattacggtaccgcggataggctttaaaatggaagcggagatccacccagaaaccaagtcatcgcaagagcatttatctaatgaaaaggttaagacttttgatgcgtcaagcgagaagataaaggaagaaagtttgaatccttccgcgacttcagccacgaaaggaacattttacaccatgcgaaagccaatcttggctctaagccttgccttgctttcaattattacagccatgaaattgagtggtctaaatagagataaagagccggtgctcgcaaccactcagaataaatgtaattattatcttctgggcgacgataaacaaaacaatgaacaattggcacgtgcgctgaaaatggtagctaatgaaaagattgactgtatgcagagcagtcatgacatttactatatggaagcacgccctgccaacgatatattaaaggtttatttcatgtcagtctgtactaaaaacactgacatgagctacaagagctgccataactttagactcattgagtaa

SEQ ID NO: 437807 - DNA, 594 bp, Serratia marcescens
atgcggtatccccgcatgctttttggtaatgctttaaagtatggagcatgttctattatgaggctttgtaatagcgttattttagtggtttcttgcctatttacctttccagcgaactctgcgttagcagataaaaacgttgccggatggggacgggtaaatatgcacggagccattattgatactgcttgcgctattgctattgacagccgagagcaaaccattgatatgggggttttacccttgtcagatattattcgcgatgggcagggccgcagccagcatttttccattgatttggttgactgcatcactgaacgcccaggaaaggaaggttggaagaaatttcaggttacttttgacggcgaatctaatggtgagttatttggcgttaacggtagcgcctccggggtagcgttgcagattattgatgccaatggaaatgtcgcaacaccgagcaaggctatgcctccaatggatattatcccgggtaatagtcaattgaattatgttatgaggttggtggccaatggtcagacgttgacatctgggagttatctatcctctatccgatttaagctggactatttttga

SEQ ID NO: 437808 - DNA, 561 bp, Serratia marcescens
atgaaagggaaattgtcagggtattcacgctctccggtggccgtcctgatgttggtggcgatattgattgcctcaccgttaccggctctggccgcgggcgacaataacctgtacttgcatggtgctctggttgcagagccttgcgcgatctcaccgggcgatgaagaaatcacgctggattttggcactatcatcgacaagtacctgtacctgaacacgcgcactctggggcaacccttcgaaatacacctggaggaatgtgacctgacgcaaggtaaaacggtgagcgtgacctttaccggtacagaaaatcaagcattgccgggcctgttggccatcgacggtggcagtgaggccacggggattgccattgggcttgaaacaccagcggcaaaaccgctgcgactcaataaggtgagcgataaaaccctgctgaaggttgggggcaacaccattgcgctgaaggcttatatacagggcgagccagacgcaatagccaacaaaacgattggccgaggcgcgttcagtgcggccgctaccttcaatctggaatatgagtaa

SEQ ID NO: 437809 - DNA, 804 bp, Serratia marcescens
atgcaggtgtatcggcggcggaataaaagttgggtgcaatggtcggcgcatgatgcgttggtgctcaaatgggtggcgatacagattgaagagcaactgcccaggaacacgtcttgccatcaccttaaagggcacggtggcgtggttgggtcgacgcagtgtgtttcttctgcctggcgatgtggggaatggcgttatgtttaccgcacggatatccggggttattaccagcacattttaaagtgccaggtggcggggcaattgaactggcatatagaggatgcggtctgcagaaatttgtgcctgcaatggctctattacagcgttgaagacggcggtgagatagtgacgccggaaaaagggatttgtcgcggtagtgcgctgagtccgcttatcggcggcagtatattgcggcatgttgaccattatttcgcgacgcgcgaggagatattttatgcccgatacatggatgactttattttctttactaaaacgcgttggcatttacgcaaaacgattaaatcgctgtatgaattttttgatttgggtggctttgaaatacacccggataaaacgcaattggggagagttgaaaatggttttgactggctggggatatggtatgcccccgaagggccccggatagctccgcgagcaatagagaaccatcgggaacgtattgcgcggctttatgagcaagcacgtttgcggaaactgccgaaggcagagaccgataatcgtgtgcgagagtatgaagcccggtggatgaattgggcaaaacaccacttgatgaatttagggtga

SEQ ID NO: 437810 - DNA, 816 bp, Serratia marcescens
atgaaacgtctccatgtactcgcactgcttttgtggtcatccgccgcctttccttacaacatcgtcgttaccaacgcgcagatcaccatgggctccgtacctggtgaatacggctatgagtttgattggcacatcagcggcgcgcctgatccatgggaagatcaatactacccttgtacgggggggaccgtgaacctacggtgccatctctccgttcgtaccttgtttggtgagtcagcccccgggggattccacgtctacccccatgggaatataatacccgaatggtcactaggccgcgtgtatgggatgtgggttgccagcggtctgggcagcggccacgcctccttcccgcctgggccgaaccgcgggcaatggccgtggccgcccggatggccaccgcggtgggcggatctctgcttcgggccggcaatagctgttgaaaatcaatcctaccggctcgtcccaggggcgacgtgtgtccgcgcatcacctcctgaaaccacctgccgtgttaccctgccatccatgatcgacctcggtgtggtgaacgtaggtgccgttgcctcgggggtagcatatggtgacatcacgtgcggtaactctgtttctgtccgagcacgactcctcaacgatccaaacctcgatggccgatccgtccggctcacgatcaatggattctccctgggccgggccgagacaaccatagggtccggaagccggatcccattcagggtctctgcgtccgtcgacttacctctgatacatgccggcgtctactacacggactccgtgatctcggtcacctacgattaa

SEQ ID NO: 437811 - DNA, 363 bp, Serratia marcescens
atgcacggtgaggccggtggcgtagccttcggtgagccagataaccgcgttgtccgggccgcagagggtgtggcaagcggctttcacctgcccgcctgccagcatgcgcttgtccccgctggcgttaatcagctgcacgttaaccacctcgccaccggcattgtgcaatggcagcagcaggtcgccgggctggaaggttattccgccaacgcgcagcggctggccgtgcagggtcagggtttctgcctccggccagcctttggcgctcaggtaggcgttgccggtctgggactgcgcggcagccaccagagcctgtgcctgtcgcgcggctttgcgctgggcctcggccttgtcttgtggtga

SEQ ID NO: 437812 - DNA, 264 bp, Serratia marcescens
atgaatacgctggccgaccgctattaccgcgacacccattaccctatcccgcacgccgattttctgcgtcttcagcatgcgcacgccaccggcgtgctgttcctcgacctgctggacaccctcgacctcggcggacagcgccccgatgccgtgcaacaggcatcgtttgcctcggtcattgccctgctgactgaccagctcggccacgtcgtcaacacctgtgaatcccaaatccttgcccgcatggaggccaccgccgcatga

SEQ ID NO: 437813 - DNA, 159 bp, Serratia marcescens
atgaggctgctaaatttgttgcgaaaaaaaatcctcgtgataatgacggccgtcgctgcctgcctgtttttctacctgctggcgctggacagctattgcgacgatggtggaaattttgcgttgggcatctgttcggtgacccgcttcgtgccctggtaa

SEQ ID NO: 437814 - DNA, 582 bp, Serratia marcescens
atggttgagaaaagtatcgttcaagaagccaaggacattcagctcgccatggagctgatttcgctgggagcccgattgcagatgctggagagcgaaacccagctcagccgcgggcgcttgattaaactttacaaggagttacgcggcagcccgccgccaaaaggaatgttaccgttctcaaccgactggtttatgacctgggaacaaaatattcactcgtcgatgttttacaacgcctacctgtttctgatgaaaagcgggcagtgcagcggagtggaggcggtgatcaaagcctatcgcctctacctggagcagtgtcctcagcaggccggtgaggcgccgttgctggcgctgacccgtgcctggacgctggtgcgtttcgtcgacagcggcatgctgcagctctctgcctgcagctgctgcggcggcgcatttatcacccacgcgcaccagccgctgaacggtttcatctgcagtttatgccaacccccatcccgcgccgtaaaaagacgtaaactttcgccgcaactggccgatattattcctcaactgctggacgagcaggtcaaacgcgccatttga

SEQ ID NO: 437815 - DNA, 939 bp, Serratia marcescens
atgcagcttgaaagaaaattatgtgagagttttaatcttaccccactgcagctttctgttctttcatcaaaggctccgaaaaaatatcgtgtgtattatatccccaagagaacatctggattaagagcgatcgctcaaccgactaaggagctaaaaaatattcagcgttttttagcttctgaattggatgcttattgccccattcatcctgcagcgatggcttacaggaatggcaaaagcattaaagataatgctgaatgccataaaaataacccgtacctattgaaaatggattttcagaatttctttaacaagattaaaccggatatttttttcgaaaaattaaatgctcttgatgtgaaatacgatggaaaagataaaaaacacttgcgtaattttttattttggaagcctgggcagaaaagaagcattactcatattttgagtattggggcaccaagctctccatttgttagtaactttgtaatgttcgattttgattttgaaataagtaaatggtgcgctgagtttgatattgtctatacgcgatatgcagatgatataactttttctacggctaggaaaaatatactatttagtgttcctaagatagtgaaaaatattctatcaaaacatgcctcgggtattactatcaatgaagctaagaccatattcacatctaaagctcataatcggcatgttacaggagtgactatcaccaacgatggtaagctctctataggcagaaagaaaaagaagtatttgttttctcttgtttttaaatacagtatcggtgagttaaccagagatgagattttttatgcaaaaggacttatgtcacactgtatgcatattgaaaagaatataatttcaagaatgaaaaataaatatggggcagatgtaatcaataaattcctaaaggagggtggtgatgaatga

SEQ ID NO: 437816 - DNA, 876 bp, Serratia marcescens
atgataatcaataatatccatgaaacagtatttaactctctggccaaagaaataaaaggcgtgataaagaatgggcttgatgattcaaagaaaataatatttatttgtggaaaggataaaagcgataaaaatagctataggtataaaatttcattacttctagaaaaagaaaaaagctatcaacttgcataccccgaggacctttttgaagatttactagaaggacaagcaggtaatagccttttagctttggaagaacagttggccgaagccgtcgacttaataattttaataccagaaagccctggttcatttgctgaacttggtgctttttcaatgagacaagagctagcaaaaaaaatgttggttttaagacaaggcaagtataagtcggataaaagctttataaatcacgggccaatacgcctaattcgatcggcaaagggacatgtacaagacatacctactgattttgaagcatcacgcagtgcacactctctcccaatattaaagcaagtcagtaaaatgattccttcaagaagaaaaaaaaggaacattgataatatactcatgtatcaaaatcatatattgctattgatttatttatttgacaacatgacacagtcatcattgaacaaattacttgggatcattcttgagcgaaaactactaaatcaagactatatagcaagcaaagcagcattacattcgttaattcgttcttctttaatagagaaaaatcacgaaactttccaaataaaagagaaaggttttgacgacatcaacgcaagatattatgcaattaatgaaataaatgccattcgaatcaagatcatgaacaaacaattaggtagacaattaagcaaaaatatgtaa

SEQ ID NO: 437817 - DNA, 939 bp, Serratia marcescens
atggcaaaccgctatcaaggattattcacgcagagattgttatccttacccatcctacaaagcatcgatgacttggcaatacgtactcgactcccagtttctttaatatctaaatatttgcggaataataccagatattatagacacctagttctcaagaaaaaaacaggcggtttacggccaattgacaacccaaatgtagagttaaaagctttgcaaagatggatattaaaaaacttactaataaatctatctccgtctatctatgctaagggtttcattaaaggaatctcaatcactgaaaatgcagcaccacacagtggaaaccagtatatattatctatagacctcaaagattttttctccactgtaaaagcatcacatgtatttactgtttttaagtctgttggttactcgaaaaaaatatcttatgccctaacatcaatttgcacattgaatggagtacttccacaaggtgcgccaacatctcctgctttgtcaaacttagtttgcttaagattagatcaaagaatagggaagtattgtgataataaagcgctaacttatactcgttatgcagatgacataaccatttcaggaaacaagctggccgtaataagaaaagcttggcgtattgtcagactcataatagaaagcgaaggttatttcataaacaaaaacaaagagatcttatcaggtcctcagtcgcagagaaaagttactggattaattgttactccaaaagttggcattggcagagaaaaatataatcattatcgtaaagaaatattcatattagtaaaaaaagatgatgaatatagcacttacaagatacaaggtatactttcattcatcaaaagcgttgacattgaaagatataaaaaaattaaagaatattatgaatccatagtaaaaaagccaaccaaaaaatcagaataa

SEQ ID NO: 437818 - DNA, 627 bp, Serratia marcescens
atggattcaaataaattaagtgaattttatgagagattgtatttttccgagattgacaataaggataagctttacactagaattcaaatggcgtttggtttaatcgtgttatccacaaccgtgattacatatttattgaaaaatacttcttttgataaaaacccttgcgctgcaatgttcgtggttttgttttctgttgtgtcactttttcttgttataatttcttgttggctattgaaggaagcatcttggggtaatgactttaaatatttgccaagaccaaaagagataaacatccattatgagaattttgtaacctatgagcctacatatattaaatactgtgaggataatgggtttaattatagcggtgaatacaatccaaataaaaaaataaacgattacttactcaatgagttaattgagtgcactagttggaatacaagtaagaatgagttccgctcccaaaaaatatattcttctattacatttttcttttattctattattcctttggtaatcgctgtggctatattcttagcgatggatcttgattcagcatcaccaagaaaaccaacgcagcctcactatattatagtttctcctgataacttggtaatgttttga

SEQ ID NO: 437819 - DNA, 1989 bp, Serratia marcescens
atggacattaatttaagtggacttgatcctttatctcttctcacagttaagcaagatgatacagacaggatgagtaatgtcttgagtgaagcagcaaagggaaccgtttcaaatatacttaagagttacaccggattttttgacattttatcagaaccaatccaaaatgccctggattcaactcaaaatctttttagaaatagtgatggcaattactcaccaaaaatttggatagagatatctataaaagatggctacgtccgtatcattgacaatggaactgggatggataaacagcagttctgttattgtctaactccaaatgtgagttttaaaaaaggacaaaatttaaggggtaataaaggggtaggtgcaaccttccttgcctatggcttcaattacttatctcttcaaagcaaaaagggagacattaaaaattctatcgtcctacgaggggggcgtttatgggttgaagatcactctggaaaaatggagaggccaaaatttcaagttgagaattttttagtagatgagcttgaaaacgaaaattctgggacatgcattgaaatcagactaagtggcaagggcggagaaaaaccaaaaaaacttgattggcacggggcttcaagtgcagctcaatggtttgatatattaagagttgtatcgccactagggggggtttatttagaatctgaagcatttaaaccagaagttcagctccgtgttatagattactcaggatcgataacggaagttaaacagtcaaactgtgagttcttctatccacatgaaattcaaaacatcaaagtccaaagcctatccgacataaatcatttgatcaatagaattggcggcgatcataagaacattaaagaaaaaatgccaccagcatataaaaacttagagtgcatatatgatgtttgggacacaaattcattgttaagctctgacactagtctatctattgatttcgacaccgatgaagaatccctcattagaatgcataaaatgtgtgcatatgctgctcatttagactcaagaaaaacatttttgaaatttaatgagtctctagggttacgagcaggcacagaaatacttagaggagggcttcttatagcatcagattcaatgcctcaaggagaattattgataatcccattaaaacgctatataggatatcagaggaatacttttgtaattatacatttaactcaaggcaatcccgacttgggaagaaaagtatttcaacctgagatcaagagcttagcagagaaaatatcagagaagttaacaaatcacttactgaagtttcgtgagtatgtaaggcaagatacaggttcagcaccaactcttctacctaatcgagccttacacgattggaaaaaaaaccaggagatatggagagactctaacccatccggatttgaatcaataaatagcaatttatcatacctatcaataccaagagaagagcaagatgtcgttgcaatctataatcaaatggtgggtgctggattaattcgtggcttgcacttttactcaaccactcaccatgataaatatgacgcattaatagaatacaattatcaagatgagtcctacctctttgaggttgaaaaacaacctctgggtgtacgcaatgacttgcctcttccatatcagtctgaaccgaaagttctcgagtataaatttgatttcgattcaattcttgatgattttgataaagagataaagttttatgaccacgtagattttgtcgtttgttggacagcaagtgggaaatacagagaacaactatcactaagacctatcctaccagaatatgaaggtaatgttcgagaatattacgccagtacccatcaggcatttatgccaggaagagagagacctgttttcgaagtatgcgtgcttgaagagttattaaaatatttatctgataaagatgatgcagttgcacaacagctaagtaaatatagtgtagatatgtaa

SEQ ID NO: 437820 - DNA, 273 bp, Serratia marcescens
atgccgcagccggagtggacgcgcgacgaagcgcagctggaagagttcgtgcgcaacttctgcaagacggtgtatcacccggtgggcagctgccgcatggggccgtcgccgcaggacgcggtgaccgatccgcagctgcgggtgcacggatttgagcagctgcgggtgatcgactgctcggtgatgccgcagctcaccaacggcaacaccaatgcgccgaccatcatgctggcggaaaaggcggtggatctgttgctgggcgcgccgcagtaa

SEQ ID NO: 437821 - DNA, 330 bp, Serratia marcescens
atgggggataggttcaacttatacccagcgcagagtaaggttgtagatggcaaagtctgcgtcttttttaatgagagcgatattgtaaaaaacgaatccatactgaatatcgccatctggaagcagggtggtgatgactatgtttacgaaaagtcatatgcctataacccagtggttttggaggccgggaagtgtgttccagatatcggcgattttaattttattcctgatgaaggatacacggttttggtaagaacgccgctgaattcatatcgaaccagttttgttgtgtggaagaaaggtgaaagcattatgctgaagcacgattaa

SEQ ID NO: 437822 - DNA, 525 bp, Serratia marcescens
atgttatgtataactcctaagtgtgacactgtaagaataaataataaattaaatttctcatttgttacgttggatgaggtaacagatggaaaattcgacattgtcatcccaagaaatgcctctatcgatagtcataaaaaacttattcatgatttaaaaaaatttgacatagcacagcaaatagttgaaaatgtcttatcacacaacaaaaaacctaacaaatctcttagcaagaaattccattcgtttcctccttacgagccgaaagagtatactcttctgcatacaacaaaaaaattccacaagcttgaacatatagtattcgaaactgacgaacggaaaagggtattatcaagtaatacagacccagacacgataattttctgggatgaagattgtcatgaatacatttgggtcggtgatttacatgatttaaacacaatatcgcgagttggaaacctagtatctaaccttaatagaactggtaccgatgaggttgagtggttgcgccgaaacgcacgataa

SEQ ID NO: 437823 - DNA, 267 bp, Serratia marcescens
atgacagcctcccccgcatttatcaccctggagaatatcagcaagcgattcccaggcgtgctggcattagaccagatcaacctgacgctcaatattggcgaagtgcactgcctggccgggcaaaacggctgcggcaaaagcaccatcattaaaatcatctccggcgtctatcagccggaaaaaggcgccaacatttcgcttgaaggcaaactcttccacgccctgacgccgcagctgtccggttattacggcatacaggtgatctag

SEQ ID NO: 437824 - DNA, 1182 bp, Serratia marcescens
atgagaatgtgccaagaacaaccagaaccatttctatcattactgacctctaacgggtacatctatattattaaaaatgaatctacgaaagacccactaaatcgcacaatactgaagtctctgcttgcttataaaaactatagaagaccaaatgtacctttaagctcaatagagggacctacttttcccagaacagatagaaatataaaactagagaaattaatcagagatgcctatactggaataataaaatgtgcaagggttgaagtacccgttgatctaataacaataaaaagtatagattatgcattatcaatccctgattcattcattgagttaacgctcagtgaaacactcaaaaaaggaaactgcaacattgaaattctattatatcaggataataaaggtagattagttatggatgatgactatcctatatttcttgcctacaaggcaatgaataaaaaaataatacctgctgtaatcattggtaaatacagcgaaagggaaaatataaaaaccatatcaattggtgataacaatctaataccacctatttttgttcatcgaaaaaacaaaaaaacaaaaaaaatatcaaaagaagaattactggtggaaaaaataaataaaataacaaagaaacccactcataaccatgaaagcagcctaattttttcattcatagagttttgtagaatactagaaagtaaaaagacaagagaaaaggatctgcacaatttcctacttaaacacccaagacttatagatattaatggcgctcacgttaatgttcactcagaaataagaataggagattatatagctgacttggttttagaatacaaactattacacaaaggagccctgttaatagagttggaaagacaagacgacctaatttttacaaaaaaaggacgactaagaaataaagtaacacatgcgttacagcaagttgaagattggataaaagaaatacgtacaaacaaacccaacataccagattggttgaaaaaagaatacgttcctgaaggcatggtgattataggccgttcaaatatgctaagcacagaggataaattgagacttaaatcattaaacaacaatagaactataaaaatattaacatatgatgacttattacaacatttaaagcaatcaatagaaaacatcccccattcctaa

SEQ ID NO: 437825 - DNA, 243 bp, Serratia marcescens
atgatttttgggggcacgatgaaagtagagaccatcagctacgttaaaaagaactcagccacgagcgatcactttgaacccgtattggccacgccaaatggggtttctacctacgttattgaatattatgggcagcaggcgcgagtgaacgccattgctctgctgaaattgctgacgctgtcagagagggataaagctgaaggacgcgtgttctcgaaggaaacgctgttggatgaaatctaa

SEQ ID NO: 437826 - DNA, 1794 bp, Serratia marcescens
atggcggtaatacagcaagagttaatcgttcgtggcgaacaggttgagcgcgttttcattaattttcgagaagataagtatgtcgtcaatcgacaatatcagcgtaagctgatatggactatagaggaaaaacagagttttgttgactcaataattcgcggatttccgatacctattatattacttgccgaacccctaggaaggaaagacggaactcttgagattattgatgggatgcagcgtatgaatgccatcacgtcatttatcacaaacgatttttcattcgatggctgctactttgatttgaatacatttgcgacgacgaaggatctgcttgatcgtggagtggttgcccagaaaatgccacttcttgaccgagctcggtgtcttgcgattgcatcttatccagtaccgctttcaatttatgaggcggctgaaagagaatcggttgaggaagtgtttcgtcgtattaactctgggggccgccaactttctagacaagaacttcgtgctgctggcgcgacagatacttttgcggagtgcattcggaaaatctctgcacgggtacgtggtgacacttcgaactctgatcttctattgctaggtgagatgcagaagattagcatcacgaataaagaactagactatggcatcaacgccgatagcgtattctgggtcgccaacggaatcttgacgaaagaccaacttcggcaaagccgggatgaagagatggtcgcagacattgttgcttatatggtctctgatgagcctgtggcttctcgtacggagctgctcgatgactactatggcgcgacatatccagtaacgatcgccagtaaggcaagattcgacgcaatcgatcaggctgttagaaagagaagtttggaactcgtcgacctcgactatcaacgtgtgcatgacgcaataattctgcttattagtcaggctcaaacgacgtttactgggttaatatttccgaacggtaacggtggaaatccggtgcctcgttatttccaggtcattttccttgctcttcatgatttgatcgttaagaaggggatggttgtttcggatagtgcaggccttatcgcacggttgacagattgtggtaagagtatccaggtccaagatggagggcgatggggcgcggataaccgaagcagaatgatcgattcagttgttgggtggacgcaaggctttttcgaggacgataaaaacccagatccggggaaagtccattggatcactaaattccaaaacttgcttactaactcagtgactgaacaagcggcatatgatttcaagcaaggtttttatactcttaaccctgaaccttcctttgatgaggagtcatttgacaaaataatggagacctgtgcttctattgctaatcttggtaagggacacaaaggttatgtacttgttggtgttgctgagaatgctaggacagcggcaagggttcaagacattttcggaagccagcctctatcttttaagggattccatataactggggtagatcacgaagcgaagcattctggaaagaaccttgatcaaatgtatcaagacatcgctgatagagtcggacggtctaagctttcagaaccgctgaaatcttacgtaagcacccatcttaagtgtgttcagtattacgataaagcgatcttcgtctttgaaattgtaggtcaggatacaccttctcactggggggggaaatgggttgagcgtcaaggagctcaggtcaaagaaatcccagcagatcgcttgggcgctttgttcgagcgtttccggtga

SEQ ID NO: 437827 - DNA, 612 bp, Serratia marcescens
atggataatgaatttaaaaacaaactcaatgttaaattaatgcgacttcactcttcgatagataatcaaagggccaataagacttgtttaaggcgttggagtgaattcatccgattcagagacggctaccggtgtgttgtttgccattcaatgagtagagtttctgcgcatcatatttgtcgtaaaagttttttagaggaagctaaattttatacagggaatggtataactctttgcattgattgtcataaggttgctcataaaggatttaatggaaaagcagattataatcaaccaatggatgcgcaagggggagaaaaaatagaaatcatgttggaactgtatggggaattaattaatgacgcatatgagagagggttgctttgtgatgaatattattttttaagtgacttggttttatgtaagttcaagttactgcaaggttatgaccctttttcatctttcccaggtacacagctggaacaagcatattttatctggaggcaatgccccttaccgatgagaaatgctattttagaagctaatggatttgttgctacaactgactatctacttccaggaatgacaataagatatattaatggagagtga

SEQ ID NO: 437828 - DNA, 765 bp, Serratia marcescens
atggccgccgcaaaactttggaatcgggaagaattactggtcgctttcacgctgtatagccaaattccgtttggcaagcttcactcgaagaaccccgacattatccattttgcaaaactgattggccgtacgccttcggcgttagccatgaaattagtgaatctcgccagtttggacccattcatcaccgaatctggccgcagtggcttgaaaggcgcctctaacgccgatcgtgcgttatggctggaaatgagccacgacaccgaagcgttcaatcagcaatgccagttggcaatggagcgcctaaaagaagaaacggttacgccggagcttgatgagagtccaaaggatttcagcggcagcgaacgcatttctaccgtcaaaacacgcgttgatcaaaacctgtttcgtaagaatgtgcttgaagtgtatgaataccgctgttgcgtgaccgggttggaagagcccgcattgctggtcgctagccatattctcccttggagtcattcgatcgagcaacgtcttaaccctagtaatgggttgtgcctgtccagccttcatgacaaggcttttgaccgtgggctcattacgtttgatgataagttggaattggtgttatcaccacaacttaagaagttaaaaagtagtatttatgtggataattttgaaaagtatgaaaggaaaaaacttcgattgccattaatttatcaccctgacaataaacacttggcttatcatagagataatatatttataagtgattaa

SEQ ID NO: 437829 - DNA, 306 bp, Serratia marcescens
atggaaaaccattttttcgcttcagaacccaccacaatcaccctctatcgagaattgttcaatcaactcgatctcagtgaattagatactacgcagctcttagatctagccgccttatctgccgagcaggctgaagggttgtgccatggtctgatgctgttcggcggcctgctgcaaaagaacccgcaactcgatgccgacggttgggaacagctgaatcactacctcaatgcaacggctcatctggttccatcactgtgcaatctgtatgggcgggctctacgggaaatggaagcctgcagctaa

SEQ ID NO: 437830 - DNA, 180 bp, Serratia marcescens
atgaataactgcgatctgtattccaatcctaaaagtaaattaactgtaattccatacagcttattttttcattctatcgataacgttatagttttcttgctgcggaaaaatccgcagccggagttagcgttccgaatacttacactaagcagcattatgtatataatgctggggctttaa

SEQ ID NO: 437831 - DNA, 435 bp, Serratia marcescens
atgaagggcaatctattgttcgcgatcgcgggtatgactttgttgagtgcctgtgtaggtgatcgtctggaccagcgttatgcattggatatccctataactgcttatgctcgagataatggagatgtatgcatttatcctccggccaaggaaaacgaaaagcaagatacgctctatatcagcagtgaaacggatgagaaactgattgatgtagcaaatcaggatatgaagaagggtatttgcttcactcaaagggactacccactccaggcaaatcattcctatagcatgagggtaaattttgtcccggtagagaagcgtagagatctgcacgatgtctctggcagagcctttatcacccacttcaaagtaaaaaagcttaataaccgctatgtcatcgaaaacgccccacagcagggcacttcattgaaatag

SEQ ID NO: 437832 - DNA, 363 bp, Serratia marcescens; identical to SEQ ID NO: 230419

SEQ ID NO: 437833 - DNA, 714 bp, Serratia marcescens
atgtcatttgtaggaacaacaatcaaaaactcattttctataactatagttataattactctatcattactaatttatatcttaaagggatttctttctgtttttgttcatgaaatagggcctttatcagctgttttaggtgcagtcgcttcactaacaacttgtacaatcgcagtctactccctcacattggcgagaagatggcataaggaaaagattaaaggtgatatttttttaggtgccagtgaggttttaaattttataaattgcattccattacaatcggttgttatatataaaagatttttcctcctcacaggaaaccttaataaaaaacatgctgataaaactgttgaagattgtgagtccatcatcttagatgagtgtgctaaattcaatgatgaattttttagcttccagtcggagtcaatgaaaaattacacaaatgttcttagatatcatcgagtagtcgatgataaatacaaggattttgttcagcaccagtccagatgctatacaaaattcctcagccgctgttcaaaacctatagttttcgacagagaggaaaataaatttaaaatagaggagaatttcttaactctatataacaacataaccaaaagtgagcaattcgcgatattgagaaacgagttacccacaatacttgtcaacaaattcatcaactttgacgatatcgatatcgagaatttctaa

SEQ ID NO: 437834 - DNA, 1179 bp, Serratia marcescens
atgggagaaccctatttcaaaattaagcgggaatttgagcgcgcagggggcatcgcgttcagcagcaactatgagctatacgccgacatgtctcagcgtgtgatggctgttttagaagagatggcgccacgcgtagaagtgtattcaattgacgaaagttttcttgatctgactggcgtccgtaactgcattgatctggatactttcggccgccaggtgagggccaaggtacagcgcaacactgggctaactgtaggcgttggcattgcccaaaccaagacgttagccaagctggcaaacttcgcggcgaagaagtgggacaagaccggcggagtagtggatctgtccaatgaagggcgccagcgcaaattgatgagcctcgtgcctgtcgatgaggtctggggtatcggacgccggatatcgaaaaagctcaacatgatggggattgaaacggcactacaactggccgatgcaagcactacgatgatccgcaagcatttcagcgttgtgatagagcgaacggtgcgagagttgcgcggccagccttgtctcgagttggaggagtttgcgccgacaaaacaacagatcatctgcagccgcagcttcagtgatcggatcaccgagtatgaccagatgcaccaggctatttgtaagtacgcgacgcgtgccgctgagaagttgagggaggagcaccagtattgccggcatgtcagcgcgtggctcaaaaccagcccatttgccatcaatgaagaatactatggcaacactgcaagcataaaattgagtacgccaacgcaggatactcgcgatattatcgctgcggctatgcgttgccttgatgcgatttggcaacccggtcatcggtatcaaaaaggcggggtgatgctgcaggatttttacagtcagggcgtggctcagttggggttgttcgatgagtacaaaccacggcataaaagcgagcaactgatgggagtgctggatcggatcaataactctggcagggcaaaactgtggttcgcaggacaaggggcgcatcaggtgtggtcaatgaagcgtgagctactgtcgccggcatacacgacacggctgagtgatctgccgcgctcgggtttattaaaccagtgggttgacgataggcttaatcagttcagcgctgtcacggcggatattgccgactga

SEQ ID NO: 437835 - DNA, 546 bp, Serratia marcescens
atgcaaggaaaagtgtgtgcgtattgtgagagaaaaattgatttacataaggagggtgataaacatattgagcattttaaaagaaaaggatcacacaaggggttgacatttgattggggaaatcttttcggttcttgcggtgaaaaaaaacgatgtggattttacaaggataagcaagaatataatgagagtgatctattaaaagcagatgtgttagatcccaatgacttttttttatttatctatagtggcgatgttgttgtaaaaccaggcgttaatgcacaatcaaaaaaaatagctgaagttactctttcagtatttaatctcaaccccaaatacggaggggttaaggcagaaagaagaagtgccttagaaaaaggaatgagtgctatgatgggttatataaaaatagctcaagagttaatcgaatccggtggtgacgtcgatggggtcagccaatatgttcgggattgttactacgagcatattgaaaaaatggactttatttcggcaaggaaacatgttttcgatgcatttcttccataa

SEQ ID NO: 437836 - DNA, 981 bp, Serratia marcescens
atggcactttttgtagaagctgattgtatcgatgatttgctcaacgacgtacatactgcaatcatcaaagatggcattaaaaataaaccaactaaaggagctaacgttgagattcttggtgcacttttggttcttaacgacccaattaagcggattagcaggactgaatctagaagtaagataattagttgtcttggtgaatttttatggtatatgaccggtaaaaatgatcttgacttcattaaacattacattccaaattacgaagattatgctgagagtgatggaagggttcatggaggatatggtcctcgtttcttcaatatgcatggtgtctacaatcagctagaaaacattatctccttattaggtggcaaaggaacaagtcgtagggctttggttcaattatttgatgctgcagaccttaacaagacaggtgaagacttccaagaatataaggacattccttgtactatatctcttcagtttataattagggagggcaagttgaatctatttgtcaacatgcgctcaaacgatgcatttaagggacttccacatgacatttttgcattcactatgtttcaggaattcattgctagagtgttgaattgtgagttagggaaatattatcactatgtgtcaagtatgcatttgtatgaagtagatctagacaaggtaagtgatttgcagagtgaaggttttatgagtacccgtgctatcatggaagaaatgcctctagtaacatctcttaattataggtatcagttattagaggtagaaagaaacttaagggagaacaaactatttgatattgattcggagaaaatggacgattactggaaagatctcatgagaataattaagattcattatctttttagagctaaagatgaaccgtctatactcgaagctaaaaatgaaatcgataaacttgtaaataagtcgtatgagattttttttgaaaggaaattgaaatga

SEQ ID NO: 437837 - DNA, 945 bp, Serratia marcescens
atgagaagacatgagcatgtatcctctttagtcgaagatttaaaaaaattccataaggatgagtcccccttgaatgggttgagttcagaagaatgttatattacctttgcaatgcaattgactgatagtatccgaaggataagatatgttgaaatcacatcaaatccggatagggatattaatccactccgatctgaaccaaattctgactatttcgatcctttgctttcagctagtctatatcatagagcgggaaattatgacgaggcttgctggttagtgtttttatctacgcattttggtaaaaacattaagacgggatggcaactttgtcgggatatatatagtgggctcggaacgcagatctggacttggaataatattacagataattttgaagcatttgaacgttggtttaaagattcgtctgatgaattaatgagtaccagtacacaaagacaatacggtaatcatagaaagtatgaaactttaaaaaatgactcgaagcgttcgattcctcgtgtttttcgttcgtacattgattttattggaaaaaccaaaagccatgctgcgagatttgcagaggctgaaatgattgctcgctcccccgagtctctttttgaattattatattcaaacatgaggagtgttatttcttttggtagaacggctaagttcgattatctgacaatgttgcggaaaaaaaatctattgaacattgagcctagtcatccttttttaactggttcaacagggcctattaagggcgggaggcttctatttaataataatagggagaatggagattctataaatattttaaatgaaaaattatctttgcttgcagaaatattgccgattgagtatttaagaatgcaagtgctagaagatgctctttgtaactggcaaaaatcccccgatgattataaatacttcgggggctga

SEQ ID NO: 437838 - DNA, 1083 bp, Serratia marcescens
atgattggtacactcgacttttgccctgacagggtatcccccccaggcgatacaatcatagatctaatggatgaacatgggcttacagatgaagagctcagtaaaaaaatagggttatctattcgcaaaggacaacagctcctaagtgggcatcttcatataaatgaagttatggcatcaagacttcaagatatatttgatgtttccgtcgatttctggcttgagcgtgaaggtgcgtatcggaagcatatagagtttctagatgagactaacaaaaaatggctggaatccataccggttcgagatatgattgaatttggttggatatctaaaacatcttcccgtgaatccaaacttaaaaattgtttagatttctttggtattaattccgtaaatgatttttctcgtaaaataaatacagaaactccgttagtcgcatttagaaagtcaataaacttaaaaaccttgcctatggcagatttagtctggataactaaagctcagaaaattagccgcaacaacaaatgtgagatgtgggataaagaaaaactaaaaagcctaattccagagctgcgaaaaaccacaaatgaacccgacattaaaaagtttatacctcatcttaaggaggttttggctactgctggcgtatcattggttgtacttccaacaccttctggatgtcgtgcgagtggtgcgacttgtttctttgaacctgaacgtgccactttaattgttagctttagatatcttacagacgatcatttctggtttacttttttccacgaaataggccatttagttcttcatgatgcggtaagcattcgattagaaggcgatgtaaaactcacagcagtggaagaaaaagaagcagatcagtttgcgactaatacactaataccagaaatctttcagaaagaaattaaaaacttcggcgttaaaaattggaaagatatggttagagtttctagaaaaattggagtatctaaagggattgttcttggttacttacagcacataggtaatgttccgtacactcaccttaataggtttaaggtgaggtataagaaggaagatatattataa

SEQ ID NO: 437839 - DNA, 603 bp, Serratia marcescens
atgactatggataatgcggcacaacccatccttacccttagccacatcgtcaaacgatttggcggcaacgtggcggtcaacgacgtcagcctgcaggtaatgccgggcgaggttctggcgctactgggcgaaaacggcgccggcaaatcgacgctgatcaaagtgctggcgggcgtctacccgcgcgacggcggcgatattcgttttcagggcgcaagcatcgcctccgccgccgccataaaaagcgccagccgccagccgatcgcctttattcatcaggatctcggcctgattgaatggatgacggtggcggagaacatggcgctggtgatggggtttccccgccgctttgggttgatcgactggcgcgccattcgccgccgggcggcgcaggcgctgcacgacgtcggtatcgcgctcgatcccgatgcgcgcgtcttcgaactgtcgcgcaccgaaaaatcgctgctggcgatcgcccgcgcggtggcggtcaacgccgagctgctggtgctggatgaaccgaccgcctccctgcccgccaacgacgtgcgccatctgttcgccgtgatcaaccggctgcgcgccaaaaaggtcgcatga

SEQ ID NO: 437840 - DNA, 315 bp, Serratia marcescens; identical to SEQ ID NO: 426687

SEQ ID NO: 437841 - DNA, 540 bp, Serratia marcescens; identical to SEQ ID NO: 426688

SEQ ID NO: 437842 - DNA, 135 bp, Serratia marcescens
atgttgaaatcacatcaaatccggatagggatattaatccactccgatctgaaccaaattctgactatttcgatcctttgctttcagctagtctatatcatagagcgggaaattatgacgaggcttgctggttag

SEQ ID NO: 437843 - DNA, 141 bp, Serratia marcescens
atggtcctgagtttcagatatggcacagaggtgatttgtatcaagctaatcgcttatctaagaaagctattgaccgataccgcgctaaaaataaattattatcttcaagacattcacaagaccatgagtctgaggctgtga

SEQ ID NO: 437844 - DNA, 726 bp, Serratia marcescens
atgaagacattgttgaaaaatacaggtttgatttttaatcttaccaagcgggatgttgaaagtcgctatcgtgggactagtcttggtatcgtatggtcactgctaaaccctgtgattatgctttctatctatagctttatttttggctttgtttttaaagccaagtgggggctgacaacgacagaaaattacactttgattatgtttgccggtctgctgacacatggttttattgccgaatgccttggcaaggcgacaacaatatatgtatataatgtcagctatgttaaaaaagttttatttcctcttgaatccttgtgctgggtgtctgtttttggcgcattattccaattctttatgggatgcattgtttttgccattttttgtattttactaaagcaacctgttagtctaatggcattattagttcctattgttattcttccattgattttattatcatatagcatttcattatttttgtcatcgctaggtgtttatattcgtgatatggggcaggttgtttcagttatcattgccttaatgttatttatgtcgcctatattttatcctattactgctgttccagaacaatatcgtatgctgatttatattaatccgttaacgtttattgtcgaagctttacgtgatgtcgtcctgtacggaaaattattcagtcttgaaggctatgcactctattggggtatcagtattgggctttgctga

SEQ ID NO: 437845 - DNA, 627 bp, Serratia marcescens
atgattgcagagagcctaagcattccactgattcatatttcgacagactatgtttttagcggtgcagaagagggcgtttctttgtgtgaagattcaccaacggggccgctaaatgtctatggtcaaaccaaactgcttggcgaaaaagccgtactaaccacgtgctcacgcgccgtggtgatccgcacatcctggttattcagtgagcatggcacctcttttgtgcataccatgcttaaattaggaaagacacgtaaatcgcttgctattattaacgatcagtttggtcgacctacctatgctggtgatttagctaaatgtattctcactattattagccaaggggttaatgaacccatgctatatcatttctgcggggacaagattgtctcgtggtttgagtttgctgcggagattttttctttagctaaggtatttgacgatagttatagatttatggctttgtcttctattaacagtgaacaatataaatgcgcagccaaaagacctaagcatgcgatacttaactgcgaaaaaatatatcgtgaacgcgggatctgcaatagcaactggcgagtgagcctggaaaaagtagttccaaaaattattgatcagatgaataattaa

SEQ ID NO: 437846 - DNA, 1872 bp, Serratia marcescens
atggatccattactttctcaaataattgtcagtggcactggcgaagcggtaaaagtcatggtcgagaaactcctgtcttctagatggcttaaagggaccgaggactccattgggattattgaacaattagaccaatttgaaattagaactaaatatatagagaagcatgtatccaatgcgctacgcatgagaactcttcaccagcgagaacatgatattctacttgatgacatctatttccctctgacaataaaaaacgcagcaaacaatgatgaattcatagtagatgacaattgcattatatctcacccgagaattttaaacatcgttggtattgcaggtcaaggtaagagcaccatactaagaaaattatttctaaatgaaataaaactcaacaacaggattccattttttttagagctaagaagagttgaaaaaggaactgtattagattttttcaaattaacgctcgaatcgcttggtgttgatataaatcgctcgcatagccatgttgaactacttctacaatcaggaaaggttattttaatgcttgatgggttcgatgaagtaaaagccaattcaaggtttgaaatactgtctcaaataaaagaattaaacatcagatacaattgccccattatagttacaagccgcccggaaactgaggtatgcagagagacatccattaataacttaatggttaaagagttggaagaggaaagccaacttggcatattaaaagtattatccaatcaaactgaatttaatgaattatctagtataattagtgacaaccctcaacttagagaaactctcaaaacacctatattgattaatcttttatatgtatgctatccatactgggatgaattaccaagtaatgttgttgagttttataacaaattatatattactctgtatctcaagcatgacaggatgaaatcttgggcccgtgaacgtaaatcatcacttaatacagatgattcattatggtgtttttctgccctgtgctatttttcgatgaaagatgaagtttttgaatttgatacaatgtcacttgcaaaatatgcaaagaaagcactcaatgctgcgagcattaatacaaaagaatgcgaacttttcgttgatgacatcatcaatattacttgtttgattcagcaggatggtctagaccggtatgtcttccttcataagtcagtacaggaataccatgctgcgtatactataagtaatcttccaaaagaaataaaggtacaattttacgattcgattacagaaaacttatcatcaaatgacaagttcgataacgtgctaacttttttgcattatatagataaagatgaattccaagagcatatctctataaaatatttcgaaaaattaggattggctgcaattgcaaatgttgatataaatgacgtttgcgattttttaattagtaaagcagaaaagttgaacatatatgccgagagcactgaaaatgataaagtatcatggcaagaagttgaaatcatttcttcagcaattggacttgacgtattgcctcttatgaggggggaacagcgactttttgatgagattctagatgactctatattagatgccgcgaataacgactttcatatttccgaactagaaaagtatgattattctgttgttgttaatccactggcgggaagaacttccgtaacgagattcagagttaacctttccagttttatgattgaaaacaacttgcttttagatgctgccgaaagattaaaaaaaatcgcctctgactactatcattacgtttacatcccattaatcgaagataagcaagaaaagacaaaggcattatacaaagagtttgaaataaagcgagagttatga

SEQ ID NO: 437847 - DNA, 504 bp, Serratia marcescens
atgaataataatcgccccattttttcagcagcatgggctgcaagcactaaaatatataacgcgcaatattcagctcaaaatgttgccaagattattggcgggcgtgtcgccatgaatattgcgcccaatggaaagtgggaaaacacctgcgctgtgcgtatgagctacatcttgaataaatctggcttccccattccttatgtaaaagatcagaccgtatcaggcgccgatcgtcaatggtatttttttagagttaaagatcttatcgcttatctgacaaagatctggggcaaacccgaccttcgagtcaaattccctcctccaggtggtggtgaattagccggaaagaaagggatcatactgtttgaaattgcaggttggagcgatgctggaggacatgctacgctttggaatgggaacggcgattgttatgatcattgttatttcaatgaaccagaagctcgctatacaacaaattacgctaacttttgggtattgagatga

SEQ ID NO: 437848 - DNA, 183 bp, Serratia marcescens
atgacacgcctgattaacttcatcgggaaatggctcctcatcgccgctgtaattcttggactcaagcaattgctaattttttgtggcttagcccctgtcgagccgaacctgtccgagttaatgaagccagaacccgctccgattgtgttcacaattcaggactacaggagtaaccaaaattga

SEQ ID NO: 437849 - DNA, 612 bp, Serratia marcescens
atgaaagctttggttttcgttgtgatattattatcgggatgctctatcactaaagaatatcaatcaaagttcgatagcattaagttccgctcgcaaagtggactcaatttatcggtagatgatttaaagagaatgcatcttaaagaaactggaaaacctctggaaacccctaataccacagcctgcgggatggatagtaactgttattataatgcttgggctgatgtatatgacaaatctccatatcgtgccgagttaaaaaagaagcagaaagagtttgctgatagaaaagagcgagaatgccttgcaagcaaagattgcttaagagatagaaatatagctaatagcagttcagatcttagagtggcatattacacaacattatcgacaaatccttatttacaatctgagttagattatgctgtaaggacgatatgtaataattcagctagagctcaaaggtcaggagttagcaaagaagagttgatgcgaaaattgcaagatgcaccaggcattgatcctcaaacacggtcaacagttcttaaagctgcatcagcgtgttggactctttccagtctcaattacgattggaacgaagcccttagaaattaa

SEQ ID NO: 437850 - DNA, 537 bp, Serratia marcescens
atgtggattctgccgttcaggcctgattcttggggtttctcctgcggccaaccaggccagcgccaactgctcatgccgctgaacaaattcgtttttcaaccggccataagccgctgggttttgccggctgtcttctgctgcctggcatttgattgccgcatattgctgagcaacatcatgatgcttgcgcagataatctctggacgccaaatgtcggatcgcctgttcacttcctgcagtaaatgcatgattgccgtttcccttcgcttgccggctatgccgttctcgccgcgcggcgtagatctcatatcatgcatcctgtcattcaaaccatccaacgccgccaggctttcaacttctaacaagatatcaatcgcggcagctccagctgatgaattgccgttaacatgccggccagtatgcgctctgtcatttcctgctccaataatgatgaccgggcatggtttctatggcgcctacctgccggtattggccagaaatcccctgctttttttgatcgcgctacgtgaaatctga

SEQ ID NO: 437851 - DNA, 261 bp, Serratia marcescens
atgccacagaaagagaccgcgatttgcgcaggctacgcgccgacgaatgccgaatcgcaagcctcaatcctcatgagccggccggatgtaaaaacccgcatgcaggaactgcgcaataacgccgcgctgttggtttccttcaacgccggccatctggcggaactgtcgtataaatctgcgcagttggcgctggcgaataaaaaatttggtcaggttgcgccgaacgtgaagaacgccgcgcagctgaccggccacgaataa

SEQ ID NO: 437852 - DNA, 204 bp, Serratia marcescens
atgttagaaaattacttcaaggcgcaaaatgaagaagagcagagactgatcgccactcaagctgctttagaaataattaaggcatctgtttctgcccctacgggatacgatggtagggaaaaattagatagggacattaaacacgttgtagctaatctctcggtcctaaccgatgccattcaagaaacactaaaggcagagtaa

SEQ ID NO: 437853 - DNA, 1302 bp, Serratia marcescens
atgacagcagagatagcagtttttaatgcctccgcaattgctctggcagcagactcagcagttacaactggctttgatgatcgagtgaaaatttataatagtgcagaaaaattatttgagctttcaaaacaccatcccgtagggctaatgatttacaacaactcaacactgtgtaacgccccctgggaattaattataaaatcctacagaaagcaattaggaaaccgctcatttgcgcatttaaaagactatgctgatgacctatttacttacattgcaaataacaaggcaatcattactgatgaaatgcgttcacagtctgtagaaaagatcattgaaacagagataagaaaagtggttttagaagtaaataacactgacatcgttatttacatgcaaaccaacagactagagccaacctttgatattttccactcattactaaaaaacagaatagaaagtaagattaacataatagactcaatgccttaccttaatggatttgatgcttcaaacactgatgaagttgaaagctccataatgacaatcattgaaaaagtcattgaggagcaaattcctaaagaagctggacgtacagtgccagatgagcttaaatcagcattaatattatactttacaaaattaatctataaacaatcttcttgtgatatttatagtggtatagtcttcgctggatatggtgataatgaatattatccttccttagtatcacttcatgtccatggtatatatcaggacaaaccacttttttattttaatgagagtaaaagtcacaataacacatccctatctgctattattccatttgcgcaagaggaagaagtggttagctttatagaaggatgtaatagctcaattagcgatttcacgcaaactcttgctaacgaactagttaacagagcacgacacttcgttgacaatcaagtcatacaacatttgcacgctgatgaaagagaaagattaataaatgaaatcaatcagttgtggccaaccttgctcggtgacttcatacacaaaagacaaaggtttgttatagaaaagcatgttgataaggttatatcgatgctgtcttctctatccaagcatgatttagcctatatggcagaatctttggttaatctcacagcgtttaaacgaaaagtctcaaatgagcacgatactgttggaggacctattgatgttgctgtaatatcaaaaggagatgggttcatttgggttaaacgtaaacattactttaaaccagaattaaatagtaatttctttaacagaagtagcatataa

SEQ ID NO: 437854 - DNA, 153 bp, Serratia marcescens
atgaaattggacatgtacgaagtgctgtcccgttggggggggcgcgagaaagtagtggcattgattattcgccaattgctgcaggcttctaggggctattgcctcacccgtccaatggtaaactgtcctgctgcgatgatgatgggttggtga

SEQ ID NO: 437855 - DNA, 2808 bp, Serratia marcescens
atgatcactattcctgatcggcttaaaaccaagcttgaaaaaaacccagctctttgtggcgcggtctattcctcactgtctaaacttaatccttggttcagcgataacaagacagttttcttccctgaatataccgaccatggcattactcatttgcaggaagtaattaatactgcagatagcctaattacagatgagagttggccatccattacggccaatgatgcagcagccataataacttcaacactattgcatgactgtgcaatgcatctcagtgaagatggtttttactcactaataaataaaaaatacccccctggtaaatcacgatattttgaaaatgacattgactggagtcatgcttggcatgaattttttgcagaggcaaagagattcgatggaaaaaaactaagatccctttttggtgatgatacaccagtaagagacatcccactcaataaactagatttgaacttgcgagacaaactacttattggcgagtttttaagaaggcatcatgcaacacttgcacaccacatcgcccttaacgggataccaggcccctcagaatcaagagtacgacttgaaggtttcgataacgatattctcgatctctttggattcatagcaagaagtcataatatgggactaagaagcgcaattgatctacttgaacaatcgaagcgcagagtccactacaatacgcatgtaccattcattatggcagttctgagaatatcagactatatacaaatacacagtacgagggcagaaaatcaattattagaaataaaatctctttcgagtccaatttcaaaaaaagaatggaaaaagcacaacgctataaaagagataaatcagacgcatgatgatcctgaagcattatatattgatgcagaacctcaagatgcaatagtgtatgagtcattatcagctttatttaaagacattcaaaaagaactagatgtaacctggtctatacttggtgaagtatatggaaggatggatagcttaaagaacattggtataaatatcagaagagttcgttcatcattagatagcactagcgtttttataaaagacaaaaagcccaacttcattccaaaaacattaaaattaaagacctcagatagtgagatgattaatcttctcattgctccactttatggtaactctcccggcgttggaattagagagttgatgcaaaatgctgttgatgcatgtaatgaattaatcgactattactacaaaaaagctgagcgagaaattagcagcaataatattgatgtcactattaaactaataaaaacgggagataaaaatacattaattatatctgaccatggaataggaatgacgctatcagtaattgaaaactactttttaaatattggtgcttcatttaggaaaagcgactcatggaaatctattcacgagagagatggacaatcgagtgtgcatagaacaggcagatttggcatcggacttctggctgcatatcttcttggtgatgaaatacatgttaaaactcgtcatgttacagaccaaacaggatatgagttttcttgccgacaagacagcgatgctatctgtgtaaaaccaatagattttcgtattggcactgagatctctataacaatcaacgacaaagtctttaaagacttaacaaactccgacaattattctaatgaagattattgggactggtactgcttacctcacccaaaggttaatagattgatttgcaacgagtcggaagaagttattttagaacaatccatcaccgttcctatgaacgaagaagatctaagcgatacaccatggaatagaactcatcatccggaatttaatgatataatttggggatatgtcgaactcagagaaaggaggaatcgctccacaaacctaatatgcaatggaataaaagtacttagaagcaaccacttttataatataaatttaagcaccaacagacatgacatgaatgcaaattacccaacacttatcgtctacgatcaggatgggcgcatgcctttaaatcttcaaagagatagtctcacaacgcgagaccttcaatttaaagatgaattaatgaaggatgtatcagagtaccttagcaaaattattatctctaaatttaagaatgaagatagaaaaataaatgaagagttaataaaaaaattaataatgcctgggatagacatcttagtaaataacaatgctgccgatgatggtttttctcagttgattatttttaatggaaaattacttcctttaaatgcatgcctaattaaagaattaaaacccaaaatggtttcaattgattttgttgtactctcagacaaactaggttcttggcaatcacaaacgctaatggattctgttgagtgttatataccatatcactcgcgaagaggttctaaaagtagtaaggttaactttttgagaggaatccttgatgataataattatagatcggggtatttcaaaacattcccaacaatagggaaaagaatatttattagaaaagcagaaatagatgatttggtttcaccgaataattacccaagaactagttgggcgcgattaaagacagaatgggaaaataaggaatggaaaatactcagcattgggaatgtaccacctataaatgagaaaatagccagggttataaatgagctatccagagtagaacagccgttttatattgaagtttatttagattgggataaggcagatgggatcgatgatagctcaatattttctacggtttggaaagagactgcccaaggagttttaatataa

SEQ ID NO: 437856 - DNA, 936 bp, Serratia marcescens
atggctcgtattcgtaccgtaaaaccagaattttggaccgacgagaaggtggtggaatgttccatcgcagcccgattgctgttcattggattgttcaatttcgccaatgataagggctgtctggagcgttcgcctcggcgtatcaaaatgcaggttttcccggcggatccgatggattgtgaaccgctaatccaagagctaattactcatgggttactcactgaatactcagtgaatgatgtgcagtatttgcacatttcaggatttttaaagcaccaaaaaataaaccgtcccagcaaaacaaacatccccttgcctcctggattcaatgagaactcagtgagccatcacggacaagtcactgacggaaaggaagggaagggaaaggatctaaaagataaacccctctctctatcgggagcgggcgaaatttcgccagatggacagggatcaccgccgacaccctgggaagaccaagacgacgagaacccatgcggaaaatttccgatgagcgccaactgggcgccgacggttgatttccagcgattggcggcgttgtggggccgaattatcgacggcccggcgccgggatataccccgcaggagctggcgagcttccaggcgtactggaaagccgagggcagggtatttaaccagacacagtgggagcagaaattcgccgacagcgtgctctacgagcgccaggcggcggccaaacgaaagcagcatgcaggaggttcaaatgcgaccagatacaccgcagcagccgctaccgctcagcagcaggtcagggccgcacgaaacgcagaacgggagcgacagggcttggctcctctgggagacgatggcggggatttacgccaaccgctgggtgaccaaaaacggggtggcaccatccacgatctggggccagacgatttcgaaattctcagatga

SEQ ID NO: 437857 - DNA, 246 bp, Serratia marcescens
atgaccggactagacaaagccatcaaggttgcagttaaccagcgtcgtttggctcttatgttagggatcaaaccctcttctctgaaccgctgggtaaagaaatataacggccgtgtcccagaggctcatttgctgaaaatttatgaactaacaggcgtcacgccacatgaaattcggcctgacattcacccaaacccaacctctggcttaccaccagaacctcaggataacaaacctggagcttaa

SEQ ID NO: 437858 - DNA, 849 bp, Serratia marcescens
atggtacgtacatttaatttcaaaacacgatttaaagaaaaggtaataaagatagggaagtatattagtgaaattgagttttactttataccacatgtcattatatatatgttttgcaagctaaaaaagatcgatttatcaagatataaaaaaaacaaaattcttcaatataagagtttccaagactttttctgtcgagagctaagtgcatatgaagttaataaaatcaatgagttgaataatgttcaaatatgtactccttgtgatggatgtattggagcttatggggtagttgagaataatactttattgcaagccaaggggaatgcttattctttacagcgcctttttggatttaataacgatatggtatatgggtataatagagggaagtatgtgaatatatacttatctcctgatgattaccatcgagttcatatgccgtttgatggtttcttattgaatacgatgtattgccctggcgatttcaaaacggtaagtttaaaaaatgttaggagcaataataatgtttatactggaaatgagcggttggtttgcgaatttatgacggcatacgggaaagttgctattgttttcgtgggggcctttatggttggtgggatttcaacttcttggcaaggagttgtgaactataataggctttatacacatgaatcattttgtgacgatcatttatattataaaaaaggtgaagaaataggtttttttaaaatgggttcaacaattatagtaatatttgactcttgttgggatattgattttagacatatagaagaaaataaaaagttatcattttctgatgtgttgtttactatatgtgataattga

SEQ ID NO: 437859 - DNA, 693 bp, Serratia marcescens
atggatggattagttaaatcggtgcatgtgggaaaagttactcctttcacccgaccaggaacatttacgggaatttataagaaaaaaatcatagatcgagtttatgttgattttgagggggttgttggtgatggaattggagatttaacggttcatggtggtccagaaaaagcattgcacatatatcctttcgagcattattcagaatggatgaaggaattccctagcaattcatcttttaaattcccaggtgcttttggagaaaatctgagcattacaggattaaatgagagcaatatatgtataggcaatatatatacaatcgggcgggtagaagtcattgtttctcaagggagattgccttgttggaaattaaatgataggtttggcattccaaatatgtcaatgttgttgcagtcaaactatagaactggatggtactttaaaattttaagaagagggaccattggggctggagatgatattaagttagttcatgagcatcgtgtagaaagaaaactcagtcttaagagagtcatggagttgatttttacgggggttgttgatgagcagctattaatggaggcgcttgagctgccgttagtcccgtcatggcgaaaattatttatgaaaagattggcaactggagtagtagaaaattgggagcggagattgtttggtgggagggggtaa

SEQ ID NO: 437860 - DNA, 2364 bp, Serratia marcescens
atgtcggtacctaatcaaaccccatacaatatttacacggccaacggcctgacaactgttttcccctacgagttttatctgctgaatgatggtgatttggcggtatccctcaacggctcggtgatcacctccggctatacgatttctggcgttggcaacgttgacggcggcgaggtttcattcctgaccccgccggcgaacggcgttaccgttatgcttgagcgcgtgatccccacctaccgcctgaccgactaccaggaaaatggcgatctgctggctgataccgtaaacaaagatttcgaccgattatggatggccattcagcaggcgtttatttatctcggtctggcgctgacccgtccgctgctcggtggcccgttcaatgctaaggggtaccggatcgaaaatcttggcgatccagtgaatgggcaggacgcagtaacaaagaactggtaccagcagcaaaacacgctttcgctttctcgcgtgctgcgtgttcctgattcgacaatttcatcgcttccgtacgttgccggccgccgcaatcaactcgttggtttcaatgcccagggcgacgcggttacggtaccggttgtatcagactccgccgccgaggtgtttttaaaactgcaggattacgacggctataagtatatcggcagagtgcctaattattctgcgctgcgtgctattgagccgggtaatgatttacaaaaaattgaggttattaaccgagtatccggcaaccgctggggcggtggtatttttaatgctgacatgagcgataacacaacaccggacgatggcggtgttgtcattgtcactgctggcggccgtcgctggaagcggcaatttgaaggggatgtaattcatctcgtttggttcaaaacctcagcgaacacctgggacgacgcttgggcgaatgcgattgcgtacgcatcaaatacggccagtgacaccgtgcgtaaaatcgttcttccggctggcaatatcgggccaatgacgcggccagttattttcaccccaacgctgggttggtacattgagggaattggcggtaatggccagaagggcaccacgctgttattcaacattccaaaatcggctgggtatgccgactatggcgcgctgcaccacttcccgcctaatttcgtcgagcagttttcattgaaaaatgtgaacatctcaggggctgctaccacgatcgcacagccaggtgatgaagcaggctgggcctttacgcatgctgtcgtttgccgagctggcaactccacgtggtttgatgtcagcatgctgaatttccgcggttcgctgatgctcgataactcgtttgattgcgcgttttaccgtgtcagcacatatgctatggggcgcatgaagcctggatattcatatgaagaccccgccgcggttggagatcgtgaggcatgcgaaacggcaccgatcatgttttacagcacgcgcgctggcgatgcatgtaataacctgcggttttatgatggatccagcgagttgcagaatgtgacgccatttgtttgggctagaaccggaattgatttgcatattactcgaatgcatgcagagcgcccgggccgatcatttatggcgccgttcttgccgatggggtcatttgcgcgagttgataatgctgagttatttatcgatggatgcggagttcaacctaactttattaacgttattgagtatggtaactcatcgcaaattgtgctctcaaatatgcagcgttttagcggcgggataattcgcaatcctatagtgcctccgcagtctggtacattacggattcgcgctactaatattattactggtaacgttgagttaccaaattctcaaacgcaagatattcagtttgctaactgcattatgggtaatgttactgcgcattcaaactcgggaatacgtagcttcattggatgcaaaatgagaggtattacaatatccggcattgcgttgccacttggatctgattacggcacgcagataattggcggttcaatatcaggggatttttctggtgatgctaccgcgcagcgcgtgactttgcagggtacgtatgtggctgggaatgtgtcgtatcttggcaacaatagccgcatcgagccggcgtttgtcggcggtactgaaacatataacaatgcaggtacaaaccatattaattcaccgactggtcctcagatttactatgtaaatacggatatatctgaagtctccggttcaattattaaagggtcgttaatctaccgaaaaaacgcgacatcggggcaatcgatgggctggttgtgcacgaataccggggcgagtgggggcggcggttcgttcgcgaaattaccaaaccttcaataa

SEQ ID NO: 437861 - DNA, 384 bp, Serratia marcescens
atgtccgacaaagaaatcgagcaggaaatccaagccaaaggcaaaaccgcgccgcgcgtaacgcctggccacatcgagagcattatcagtgactgttattactttactgcgcaagacgggttaatgactgcaaatcctgacgcagcgcaatactcaccaaagtcacttgatctgctgaccttctgcgtcctggtgctgaaaaacggcttcaccgtcaccggcgaaagcgcctgcgccagcccagagaacttcgacgccgagattggccgcaagatcgcccgtgaaaacgctgtgcaaaaaatctggatgctggaaggctaccttctgaaacaacgcatgcatgacgatgcgcacctgcgtgaacttctgcggcagaaagagtaa

SEQ ID NO: 437862 - DNA, 306 bp, Serratia marcescens
atggcgaccaaagacgagaaacaatggttatcagacgtggcagaacttggctgcgtcgtctgccgcaatctgggctacggcaaatccccagcagaaatacaccatatccgcacaggacagggaacagcgcagcgcgccacccacaagcaaaccctcccgttatgcccaccgcatcaccgcactggcggccacggcgtagccgtacacgcaggaagaaaaacatgggagaagaattacggctctgagctggaattactcgatcaagttaatcgggaagtggaggaattgcgcgaatgcagaatttaa

SEQ ID NO: 437863 - DNA, 540 bp, Serratia marcescens
atgacactaacgactgagacgctcaaacagtggcgaagcgatgccgagaatatcgcgcgccagagctgcgagtacgagacagaatattcagcagccgaggctatattggcgcttacggccgaactcctggctaaccgggaggcgcagccggtggcttggttggctatttatcacggagaggtgtatgacgaagcgatcggcattactcgctccgttgttgaggctcaggcagatcgtttcggctgggagtcggcgttgacggaaattatcccgctctatcgccacgccccgccagcgccagccagcgctcgcccggcagcatgggaaatgcgctactggagcgacggatacaatatctggggagagtgggagcgcattacagcagaacagcacgcagatatgagcgtacagcacgcggcagacaacgattacgagtttcgtgtgctgtacgatgcgccgccagcgccggaggatgtaaaacttgcaggcaaggaaaatcccattacactacccggacacacgagcaaggaggggctgtga

SEQ ID NO: 437864 - DNA, 438 bp, Serratia marcescens
atggaaaataagctgagcaaactgagcaagccggtggcgtggaaactgcattactacggtcaaggtcattacttcgaagaaaacgcacatgtagttgccttagcagaaagcatgaggaaggcaaaaggcgacgccctctactcgcaagagtacgtctccgccctgcaacacgaatccgctgttaactgggaggctgcggcatcgctgaacgttgaaaatcaggagctgaaaaagcgcatcgccgagctgtcacgcctactggcgcacaacatcgagcgctcagaagcagcagaggccaagctggctacgccggtgcggttgcctgtcgtgctgatggggtatcaatcagacgattatcggattgggtttatggaaggcgtagagaagtcaggcgatgaggtgcgcgccgctggcttcaccgtagaggggggtgagtag

SEQ ID NO: 437865 - DNA, 195 bp, Serratia marcescens
atgaacgaaaaactatgcagtgacgatgtaaaaatcattaagcaccaaatcattttcaagaaaagcaaactcgagattgttgattttatggtgcgccaatttggccttgaaaaaatagaggttgaatcagtctatgagcagctggtaaccgaagtccaccgcgaccagaagaacgttcgctatggcgatttatga

SEQ ID NO: 437866 - DNA, 207 bp, Serratia marcescens
atgaaaaaaataatcatcgggctaacaattttgttactggttggctgcgacaagatcgccatacctaccggcgtaaactccgcaaatgcgctaacccgctacgtggataacgccaacggagtgatttgctatcaggtgctgtaccaatccagcaccgccatcagctgcgtgcaattggatcgtgaggtgcgcaatgccagcaaatga

SEQ ID NO: 437867 - DNA, 261 bp, Serratia marcescens
atgtccaacaaattgaccctgggggagtggaataagcggctaccgcgcccgcgaagccatgaaaccgttcgccgctggatccgcgcagggaaaatctaccctgccccggtgctggatggccgggaatatctttttgatgagcaggctgtgcgaatcgatacgccgtgcagcccaacaagcgagctactgcagagaatcaccaatggcaagaaccagaaaccacgcaaggcgcgatctaccgccaaacctatacgttcgtaa

SEQ ID NO: 437868 - DNA, 1071 bp, Serratia marcescens
atggcaagaaccagaaaccacgcaaggcgcgatctaccgccaaacctatacgttcgtaatggcgggtattactgctaccgcgacccgcgcaccggtaaagaatacgggctcgggcgcgataagcgcctggcggtgaccgaagcgatcgccgccaacatggcgtttttaggtagtgaagatattaagccgctggcgcaacgcctgcaggatgaaaacaatgtcacgctgcacgcctggctcgatcggtacgacgagatagtgctacgccgcgagctgaaggaaaagacaatggccaaccaccgcagcagaatgaaagcctttcgcagcaccctgccggataaggcgatgtgcgattttacaacgcgggatattgccgacttcctgaatggatacgtcgaagccggcaaggcggccagcgccaagctgatgcgcggcgcgctactggatgtattccgcgaggcagttgccgacggcatcattcagcacaaccctgtcgaggcttcgcgcaacccgaaagtggaggtgaagcgcgcgcggctgctgctggatgaatttttaacgatccgggcgcaggcggtgaactttccgcactggttccgcatcgcgatggacatagctttggtgaccggtcagcgtattagcgatatttgtaacatgcggtgggccgacattgtcgattttcgtctgcgagtcgtgcaggaaaaaaccggtgccagaataacgatcccggttgaactgtcgatcgctgggttatctctggaaaacctgatcgaggaatgctgggaattgtccgccggctgcgagtttattttggtgagccgtaaaggtgagaaaatcgcacagcggacaatgacggactacttcacgaaatcgcgccggctcacgccgctatcgtgggacgccgacaaagagccgccatcattccatgagatccggagtttgtcggcgcgcctgcatactgacgtgcgcggcggcgagtttgcgcagcatcttctcggccacaaatcggcggaaatgacagcccgctatcaggactcgcgcggtagtgaatgggatgatattcagatatga

SEQ ID NO: 437869 - DNA, 219 bp, Serratia marcescens
atggtctatggcgtgcgcggcgggttggcgggtgaagctctgcaggcgcaaaacgccgcgttggcgcaggtgacacaggcgtaccgggacggtttgaacgcgttttccgcctggccggcggtgccgttcaatcgcaatgaggattttgacgccgatctggcgctgaagcccggcgcgccggtgtacagcccgttcgtgcggcactgcgatccggcttaa

SEQ ID NO: 437870 - DNA, 1770 bp, Serratia marcescens
gtgtccgcttattccctgacgaccgtgcaacaagccgtgtggctagaccaatctttaaaccccgatatccccttatataacgttgggtgtttatggcgcgtagagcgcgagatttcgctaccgctttttcaagaagccatacggcaaatacagcaacaacatgatgcgttgcaaaccacgctgaaagaaacgccgcaaggcattacccaggaaacctgcgaccgggcctatatcgacctgcattaccatgatttttcgcagaggcaagatgccatcagcctggcagaaacacaccttcgttctcaattcctgcagccttactcactgtatgacagcctgctttggcgctgccacctggccaaagtcagcggatccagcacgctatggctgcttgcttcccatcatctgattgcggacggcacctcaatttccctgctgagcaaaatgatcatggagcgctataaacaattaaaagcagggataaaaaacgaagccccccgctcgcgttaccaagacttcgtcatcagcgatcgcgcctatcagcagtccccacgctacgagcgcgatcgtgatttctggttgaagcgtttcatcgacgcgcccccctccatgctggaacgccgccaaaatcactgtgagcaacaaacctaccccagccatcagataatcaagcggttgccacgcgagcgtttccttcagttggaacaatacgccgccgcacaaggcggttctgccatgcatttttttagcgctttgctggccacctggttcgcccggatttggcaaaccgatcaattcacgctgggcgtgccggtacataaccgcagtaccgccgaacataagcaaactttgggcatgttttcctcgatgatcccactgcgcatcacggtcgattcacagcagtccttcggccacttactgcgacaaatcggcagcgagctgcgccagtgttatcgtcaccagcgttttcccattgccgaactcaaccgccagttgaacctgcatcagcaggagcggcgccagctgttcgacatcagcttttcgctggaggtttttccgaccgacatcgaactggagggcagccagttcaaggttgaaaacctgcaccacggtcaggaacagctgcccctcggcgtctacctgcgccattaccatccgggcgacgacccgctgctggagttcaacttcaatcaggcctggttcagtcaggaagacggtgaacgcatcgccgcccgcatactgcacctgctgaacaccctactggacggcgatccggcgctgccgctggggcagttgccgctgctgttgccgcaggaaagacagcaaatcttccatcaatggaatgaaacccgacaaacatgggcagacatgccgcaaggcgtgcatcaattcctggaacggcaggccgcgctgacgccagaagcgccggcgctgtgctacgaagaccacgagatcagttatcaacagctgaatcagcgggcgaatcgattggctgcctttctcaggctgcagggattacagcctgacgatcgcatcgcggtatgcgtcaaccgcagcccggatatggtgattgccctgtacgccatcctgaaggcgggcgccgcctatgtaccgctcgatcccgactatccgcaagaccgtctgcgccacatgctgcaagattgcggcgccagattcgttctgatcgacaatggcggcgaacacgcgctgcacccgctgcgtgatatcgccgtgccgcgattgcatcttcagcgtgagagtcatctgtag

SEQ ID NO: 437871 - DNA, 1032 bp, Serratia marcescens
atgagtaaacgcagccgccgcaaggtaaaagaaaatcagaccgtcgcgcgggccgatcagcaagttgaggcgttcacctttggggaaccttcgcccgtactggatcggcgcgatattttggattacaccgaatgcatcggtaatgggaaatggattgagccgccaatcagtttttccgggcttgctaaaagtctacgggccgccgtgcaccacagctcgccgatttacgttaagcgtaatattttggcgagcacctatatcccgcacccgttgctttctcagcaggatttcagccggtttgtgctggactatctggtgtttggcaacgcatttttagaaaagcggatgagcgtcagcggcaagctgctgaagctacaaacctcacccgccaagtacacgcgccgaggggttgagccggacgtatattggtttgtacagtcctttgcagagcctcacagttttgcacctggcggagtctttcacctgttggaacctgatattaatcaggagctttatggcatgcctgagtatctcagcgcgcttaactcggcgtggttgaacgagtccgccacgctgttcaggcgtaagtattaccagaatggcgcccatgcgggttacatcatgtatgtgaccgactcggcgcagagtaaaaccgatattgaagccatgcgatcggcaatgtcgagttcaaaaggactggggaattttaaaaacctctttctctacgctccgaacggtaagcccgacggcatcaagatcgtgccattaagtgaggtcgcaacaaaagatgacttctttaacattaaaaaggtcagcgctgccgacctgctggacgcacaccgtattccctatcagttgatgggcggcaagccggaaaatgttggatcggttggggatgttgagaaagcggctagggtgtttgtgcgaaacgagctgacaccgcttcaacaacgaatcaaggaggttaacgactggctagggatggaagtcatatgcttcaaaaagtacagcctcgataacgatgacgagtga

SEQ ID NO: 437872 - DNA, 696 bp, Serratia marcescens
atgaaagaagaaaacgtactggagcgcttcaagcgcgacacccgtaatcattcaatgtccgttgataacgataacggtgtgtttagacaccttcatttttctcgaggcggcagcagctgttatcacttcaccttgaccacctggcctggccatctgtgcattggcggtgatatgggcacttacgttttccgccggctgcatgacatgttcgatttcttccgcatggataagtacgacttcatgcggaacgaaggagatctgtcaatcaacccaggttactggtctgaaaagttgcagcatggcggacgtggttactgccgtgaagtttataccgaatggtcgccagaagctttcgaggctcgcgcgcaggaatatcttgatgactggcttgagtgtgcggctgaagattttgacgatgaagaggcttttgaagaagccaaagaggaagctatagaggcgatcgaagaactaaagctggcatccggttatgagtatgaagcagtaaccgcggtgcatgactttagctgcaagcacattgacctgacggacttcttcgaagcgagttgccgtgaggccagcaatggttacatctggtgcctttacgcaatcgtgtggggtattcagcagtatgacataagcaaacttgcaggctcagccattgacaaattcttcgtgtacaccctggataaatattga

SEQ ID NO: 437873 - DNA, 759 bp, Serratia marcescens
atgactacaacagtatatgaccgggtcaacaggttagtagccagtgactcaagatggtctgtcgacctgactccaaacggatatgatggtcatgttctttatatcgacgataccggctttggtaagattgcggacagaaatgattttgtcatgactttagccgggaatggacacctcattgagttatggaaaaaatggtggtctggtaacttgtcagaccaagagccgccagtagttttgcccactgggcaatcagtaagcttgcatattgtgaaaaaatccaccaatgaagttatgttcgataaagggaacatgcttgccgctacatgtactcaaaccaataccttacaagccgtgttctctggttcaggttgtggtgtagctgctcaaacttggatggcttcacattgtgcaagaacggcgattgaagcagctaaagggcatgaccctttcactggtggttctgtaaggtacatagatttcacaagcagcaaatctgaccttgagacaaacatacatacaattgcagaagttaacgaagctctattgatgagggggctgattatggataccaagaatccacaaataccacatgtttccattagtgcacaggaagtcgctgatgttcgtcaaatgttggtgactggctctattaccccgtgcgctccagttggtcgcccaacacaagactgggatgaaccttccaagcagcgactaactgctgctataaatagaatccgtgaagaagaagccatgtaa

SEQ ID NO: 437874 - DNA, 1095 bp, Serratia marcescens
ttggcttctttacaagttttgaatgctatcgctgttaggatcacacctcctgaggacgaacagaaagattggtcctatacattaggtgctatgtggcctgtcgatcagcaggaagtcatcacatttacaacgaaagtagatgtaagatttcataagagcagtaaatctcatgcgaagtttcaaaaaccttacccaggaagttctttcccttccaagctgtcaaaatttttagaaaaagaaacttcattcgaagtcttcgtagatgattttatccagaaaaaattaattacatctgcaagacaatccagagcaagtaatggtgcaatattggtttttactcattaccaactgcaacatgaaaaggaagatggttctgttcataaagatttcgagcgacttcttgttttgatgcttaaaaacaccgatgcattaagattcaaagaaaacctacaactaaatcccgttgatataattgacttagataaattcttgcagggagcaagagttgatataaccagattcatgtctgaggaaatagaagatgaagacaaaaataatttatgcttcatccgtggaactggtgatgtaaggaaatatttcaccgaatcaattggtgccgaagatattatctccaataaaaccagtagtgagcaatgtattaaagctttggagcaattctctcaccaaaaagaatttggtcgtgctttgagagaaaaaatcgaatccaagattcaggaactatttaataattgtaagcgtggacagtccataacccttgaaaagattcaaacacaaatcgatgctattatacccgttgatttagcagagcataaaaatacattcgtagattttgtaaacgaaaatggatttgaagttaatgaagaattcgaagtatctgcaagagataaaagacaatatgaatggttagattttgaaaccaatattgcaaaaatgagtgtaagaaaacatcagattggtttgcctggttctgatagaccaattatctttgacactgaaacaaacgaagttaaactaactcagaaaattaatgatccaataattattgctcggctgaaagagcttgcaaatgaataa

SEQ ID NO: 437875 - DNA, 516 bp, Serratia marcescens
atggttatagacattggtgctggtcgaataaggcggatcgtaggctttggcgattgtggaaagctttgcgtcacccagcttaatgtaatccaacgggtttttacctttcgtggtttggtcgccggcgctgtctttcaaattgtgtatatacaccaccagcacgcccatgccttttttccaagcctcgcatatttcgaaattaatccatttgcgatcagcggtatctttaccagcgagaatcacggcgcagctgcgattgtccaactggcccttgatccaagcggcgatggcggcgtcaccgccttttttcacttcctcccaatcgttatccgtggctggccggttaccttccagcgagcccatttcgcgtacctgagaagcgcgccagttgtccggctcataatggaaactgtaaaaacattttctggtcatcgggggttatccttagtaatgatatcgataagcgccaacaggctttttttcttctccgccaggctgcccggttcgttaagctga

SEQ ID NO: 437876 - DNA, 603 bp, Serratia marcescens
atgcataaaattgttacattagagagtattgctgagatccgcttagggatgccctttaaatcggcaatacaagatgctggtgagcaaggctcctgttatctcatccagacgaaagatattgggctggacggcagtttagatctaggtgctttaacctctgttatcccagagggtaatcctgagaagcattatcttttctctaatgatattttattacgtctgcggggacctgtgttttcagctgggattatcgaagggaatctaggcaaaccaatcattacgtccaatcagttagcagtaattagatgtaatgaaaatctgatactaccacattatttacattggtatataaactctacttctggaagtaaatatattcgcagtttgagtgaaggtactagtattagtaaaattaattcaaaaacggtttctaaaatgactgttaaactcccaaatttggggtttcaagaaaagattggttctattaatagaaactggaataaacaaaaaatagtctataattcactaatacaaaatggcgatgtgctctttgatggtatatgtgaaagtatcattaatagcgaggagttagaaaatgagtga

SEQ ID NO: 437877 - DNA, 189 bp, Serratia marcescens
atgaacgaaaaaaaatatcaatccctgcgtaaaaagtcaataagtaagggggggaatatggcttgtattgttatgctggtacatgcgctctccttttcctcattgcagatggatttagatgtacgtgtgggggatgtgaattggaaacactcgattgtgcttaaaactactggaggaaagggagagtaa

SEQ ID NO: 437878 - DNA, 228 bp, Serratia marcescens
atggttaacaggcgtcttttaaacccgctttgtaatatgatggcgctaacgttgagtatgttacttatctcgttctcctcattgagtattatttcatacggagaacatttggtagatgcggccatcgcggttttcacgtattttggtatcagaagctgctgcctgatgtgtgtaagtttattccattggttccacggtagaaatgaccgcattaatcttgataaataa

SEQ ID NO: 437879 - DNA, 2463 bp, Serratia marcescens
atggctatcaagaagaacgaactttactcctccctttgggcaagctgcgacgagttgcgtggcggaatggatgcttcacagtacaaagactatgtgttgaccctactgtttatgaagtacgtctctgacaaagctaagggcaacccttacgcgatgattgaagtgccggaaggggcaagtttcgacgatatgattgctctcaagggcaacaaagaaattggcgagaaaattaacaaaaccatcagattactggctgaagctaacgacctgaaaggtgttatcgacattgccgacttcaatgatgaagacaagctgggtaaaggcaaggaaatgaccgaccgcctttccaagttggtggcaatcttcgaagggttggatctctcagccaaccgcatcgatggagacgatctgctgggtgatgcctacgaatatttaatgcgtcactttgctacagaatcaggtaaatccaaggggcagttttacaccccggcagaggtgtcacgcattctggcgaaagttattggcatcagcaagcagacaccacaggatgctaccgtttatgaccctacctgtggctcagggtcactattgttgaaagccagtgccgaagccggtccgaaaggactgaccatttatggccaagagatggattatgcgaccagcgcactggcgcgtatgaacatgatcctgcatgacaacgccaccgctaaaatctggaaaggtaacaccctggccgatccacactggaaagatggcaacgataatctgaaaaccttcgactttgctgtagctaacccccctttctccaacaaaaactggaccagcgggctagatgctgcgaatgatacttttgaccgttttgtctgggggactccacctgaaaagaacggcgactacgctttcctgctgcacatcatcaagagtctcaagagcacaggtaaaggcgcagtgatcctgcctcacggcgtattgttccggggcaatgccgaagcacgtattcgtgaaaatctgctcaagcagggttacatcaaaggtatcattggcctgccagctaacttgttctacggcacgggtatcccggcatgcattatcgtcatcgataaagaagatgctcgactcagagcgttcaatgctaatggcgagagtcagcaaggcatcttcatgatcgatgccagtaagggctttattaaagacggcaataaaaatcgtctacgcgcccaagacatccataaaatagtcgatgcatttaatcgtgaacaggaaatctctcgcttcagtcgcatggtaccgctgtcagaaattgcagccaacgacttcaacctcaacatacctcgctatatcgacagcagcgatccggaagatctgcacgacctttctggtcatttggctggtggcattcccaatcgcgatattgatgcccttagcgcttactggaaaattttcccgactttacgtcaggatctgttcgaacctgcccggtctggctacagtaatgctcgagtcgaagctggtaaagttaaggccgctatcctggcacacccggaatttgccgctttcagagatggggcactgataccctttgaaaattggtttgctggttgtcagctagatgaaattgctcgcggtgactcaccaaaacagctgattgaagaaattggcgagcggctcctcgctgcttattcttcagaagtcacaactggcgctccgctgctcgagaactacgccatctatcagctcctcatggattactggatggaggtcatgcaggacgatgtttatgttctaagccaagatggctggcaagcgggcaaagtgctacgtgagttaattgtggaaaagggtgaaaaactcaaagaaacgccggatctggtaattggtaagaagaagtataaggctgaactactgccgccagctcttttagtcgctcgctactttgctattgagcagcagaagctggatcaattacaagtcgcttatgatgaatcagtgcaagcgttggaaagcttccttgaagaaaacagcggtgaagatgggttgctggctgatgcaatgaacgacaaagaaaaagtaacagcttccagtgttaaggctcgtctaaaagttaccacggataaagaagaaaaggcggtactaaaatctgctcacgcattattcgatgctgaaaccaaagccaaaaaagcgcataaagaagcagaagaaaaactggatcttgcggtattgattcattatccaaagctcacagatgacgcaataaaaattctgctggtacaggacaaatggcaagccagcttagctcgtgctttggaaacggagattgagcgtgttacacaacgactggcgaatcgtgtaaaagatctggaggaacgttataactctactctgcaggatctcactcaaagcgtggctgcgttggaaagcaaagtcgcaaatcatcttaaggtgatgggactggagtgggaatga

SEQ ID NO: 437880 - DNA, 1392 bp, Serratia marcescens
atggggaaacagatcagaatgttggaaaacgagtcgggagcggtgccacatgggggcattccggtgggctataagcagacggaagctggcataatacctgaggattgggaggtaagaaaattaagagacatttcaccatcgcaaagtgtagggttagtcattaatccatcatcttattattctgaaaatggtactgttccgatgctcgtcggatctcatgtgtatgaaaataaaataatttggattaacgcaaatacaattacagaagatagtaatgcaaagcttcctgcatcccgcctgtatgctggagacctcgtaactgtgagggttggcgagccaggtattacagctgttattcccaaggagttagatcaggctaattgcgcctctatgatgattattagaaagggaaagaattttgactctttctggctttgctatttaatgaactcgaaaataggaaaatctagaattgagggagttcaatacggtacagcacaaaaacagtttaatatcgtagatgctgtagattttattttcccatttccacctaagctcgaacaaacagccatcgccaatgtgctctccgataccgatgcgctgattacccagcttgagaagttaatcgccaaaaaactggctatcaaaaccgccaccatgcagcaattgctgactggccgcactcgcctaccgcaatttactaaacatcctgatgggactcgtaagggatacaaaaccagtgaattaggtagggtaccagaggattggaccgtattaacctatggtcaaatatttgatttcttatctacatctaccaatgcccgatctgacctcagccatgatggagaatatggatatatacattacggtgacatccatacaaaatggaataataagcttgatgctagtgccgtagaattgccaaaaatatcaagaaaattagtatgctcttcgtttttagagaatggtgatgtaattatggcggatgcttcagaagattataatggcatcggtaaaagtattgaaatatgcaacattagcaacaaaaaaatagtggctggcttgcatacatatctactaagagataaatacaaacagctatctgatggatatagaggctatttacatagcaatgctaatgtaaaaaaaataattgagcaattagcaaccggaatgaaagtttttggcatttcaaaaaataatcttttgtctgtaccagtacctgttccgtctaaacaagagcaaaccgcaattgctaccatcctctcagatatggatgccgaactcgaagcattggaacaaaagcttgctaaggtccgcgatataaaacaaggaatgatgcaacagctgctgaccggtcgtatccgtttaccgttggaacagcagccatga

SEQ ID NO: 437881 - DNA, 270 bp, Serratia marcescens
atgaacacacgaaacgtcaacgtcaaaaccgccacgaaggcacactcaaagagatatgggcaaccccgttgggagatcatgtttttcggtcaaggtgccaatggatcaattccaatgttttcacgcataacggctaaaacagcagcagaggcaaaggcgcgctttatttcgctgttaaatccgttgaatgggtatttcctgggcgagccggtacaaattttggaaacagagattaaggaggtcaacgggggcgggcaatccctgaattga

SEQ ID NO: 437882 - DNA, 387 bp, Serratia marcescens
atgactgaacgaaaaatgacggggctatatgtctttttattgcttgcctggtggggcggctggcttgcgctcgatatgtggcgcattgagcacctgctgacagatgccgacaagtgggccggttttcggcgtgacattctctggtgtgcggggtcggcggtggtctccgtgattcttttcatggcaaccgcggagaaaaaatcagccgtttgcgtactgctggggttcctggcagcggcagtgggcatctcgaccgcgttcgtcgtcagtgatgcttttattcactggggatttgatatgtcgatgttatcggatgcgatttcggtagttggaatagcgatggtgccaatgttgccgtttgcggcttttctcgtggcaaggtcataa

SEQ ID NO: 437883 - DNA, 534 bp, Serratia marcescens
atgacaattacacataagacggtacaagaagaagcaaagaagcttaagtccatttttgagaccggcgatgttgaaattccttcattttggaactgtgcatggccggggatgcttcttgtggtctggttagtattgtggccttttattgcgttcggaatactcagtgaaccatccgaagggatagtaatagctattggatttggagcttttctcggttttttggtgtctatagctatttttaatactagaagcctatatctagctattccgtcaagttttaggaacgagtcgaaagtttttgctttagtgaaaaataagattaaatactatttgatgacattcgtagtaataaatttctttgtcggctgctttgccgagagcagtaaagcaggttctttcttgtatacattcgtgaccatagctgcgatggttattctggcatttatttttgcagccgacataggtcgttaccgcctttccgtatttacttcggtgctggagcttatcaaatcccgcaaacagggaggtgagtaa

SEQ ID NO: 437884 - DNA, 219 bp, Serratia marcescens
atgaacacaacccaaaatgtctcaacgacgcagggcatcttgttaaccactgcggtcttgctgtccggggctgcgacgctctggggatatatgcagtgggacgtgatgagcgccctgccgctgtattggcgcaatgcgctcgtcccgttgcctctgctggtcttcatgggcctgaagcacctgcaggcgcggccaaacagggcggacgagcatgaataa

SEQ ID NO: 437885 - DNA, 549 bp, Serratia marcescens
atgaatatgtatcatgagattgaggaaggcaacaatatagcaaagaaaatgctatgcatattattggttgctctcgtgcctttgctattaattgctgctgtgtattatattaatccaaaatcctattttctccaggaagtatcggagtataccgcgtttttaccagcgatcgtttcatctaataaccctttacttagcaaagtaatggatgtctatttaaagacatctccgtttttttctttgtttttcttttttagcttctacaaaagattgaatttgaaatccaatcagtcagtgtcgaaactgttagtcacgtttatttgttttacggttttttatgtctgtttgatttatgggtttttatttaccaatattgagctaacgaactcggtaagaactctgaaggcgatgtcgacaaatgacataaccttgtttttgttttatatcactttgtattctggtatatatgtattcggttgtttatatttgtggttcggtatcggtactgtcaaagcatttaaagcgaggcagagaactacctcgctttaa

SEQ ID NO: 437886 - DNA, 576 bp, Serratia marcescens
atgaaaacgagtgagctcgttgcggccgctggagaaaaagtgggtgagcatctgggggataagtacaaagcggttgcaaagcaaatcgccgatgacatcaagaatttccagggcaagaagttgcgcagcttcgatgatgcaatggcatcgctcaacaaaatcaccttgaatccggccatgaaaatcaacaaggcagacaaggaggccattgttaatgcctggaagcacgtcaatgcaacagacacggcaaataagttgggcaatctggcccgcgccttcaaagtagctgatgtggcgttgaaagtagaaaaagtgcgtgaaaagagtattgagggatatgaaaccggcaactggaaaccactcatgctggaagtggaatcctgggtgttgagtggtgtggctactgctgcggcgttagggttactaggtctaattctcagcgcggttcctatcacagggctgccgctgacagccctaacgatacttggaattataactatcagttatttatcttcactgattgatgataaaatcgcagagaaaataaacaacgagattattcctccggctcattaa

SEQ ID NO: 437887 - DNA, 285 bp, Serratia marcescens
atgctggcccgcccgttgctcagcattatttttatcctgctgtgcctgattaatacgctgctgagcttcattaatttgccgctgcgccgcttcttccttatgttgttcgtcccattcagcttgtttacgctttgcctcttcctctgcccgacgtttggctgcggcttccgcatcagcttttgctttagcctcggccgccgctttggcttccgcttgttttttctcattcaaataagcctgaacctgatttctcgcaaactgcttaccggcatcatcattacctga

SEQ ID NO: 437888 - DNA, 159 bp, Serratia marcescens
atggaaaagacagccgtggcccaactggtggtgttaaagggggtccaaccgggattggtgggggcggtaaaggtacaggatctggcgatgtacccgccattggttcaggaaagggggatttcaaagttgcattccaacggcatgaaggtggctgggtag

SEQ ID NO: 437889 - DNA, 264 bp, Serratia marcescens
atgaaattattagcatcatcggttgtttgtttagcctcgctattattgccactctctgcgcttgctggagaggctcggttttgcgaaagcaccaatattaaatttaagggcagcagtacgaattatctcaccaatgaggtgatttttgactgtggtaacaacgtgaagggtacggtcgttgaattaagtaaagccggctggaatatcactcaagtgatcggaacgcaaagtgttgccagctatgtattgcttattgagaaatag

SEQ ID NO: 437890 - DNA, 522 bp, Serratia marcescens
atggggcggcctgcatgggttggagcggaagtttggccgcgcgcaaaccccctcccgccgcctgcggcggcctgcaggcgagggcgtgcggctgcgccgcccgctgtcgctgccgttcggggctgctatcagggcttgccgggtgtctgtatggtgttgcctgttctgctgctgttgcggctctgcttcatcttcttcctgttctttttccctttcctggtggtgttcatttgtgtggtggtctgggcgtccggtcggctgtcatgcttcgcacagagccggtttcgccgtctctgcccggcccttcgggcagcgggtttccatcctgacgcaagggcacgcttgcagcggcaagattgccgcgccgcgccaggctcaccgcccggcggtgccgggcttcaaggccgccccggcgtaacgccgtgtcgggtgtgttcctgctcatctctccggtggcactctctcatcggtccttacgcggccgcttttgtcgcaccgtcgcccaggtgcccgcaagggtaa

SEQ ID NO: 437891 - DNA, 945 bp, Serratia marcescens
gtgacgccgcagccgaccccgccgaggctgaggtccccctacaaagctgctgagcgtatcggggctgaattggaagccgtgcaggcgcgcgccaatatcgcggcctgggacgcccaaagcaaggcggatgccggggtggtggtgtcgttttatcgcggcgaactgaccgtacaacggggtgtggtgcgtctggttgcagaggaatgggacgagcgcgaagacgacaccggcagcgataacagcggcgacaccaacacctcccaacaacaagcgacagaaccccaaaacaagggctacagcgccgcactgctgcgcagcctgaccggcaatccgcaggtggcgctggcgctgctggtgcataccctgctgattaaaatgaccacgccgtgggcgggcagcgtgctgggtgccagcgtcagccagcagcgcggcacgttgctgactcatgcccccgccagcgcagaaaccgaccgcgcaatgacgcgcctgaacgaggtggagcagggctggctggaacggttgccaaagggctgggagcaggacttcaccttgctgattgactggccgatgccgacactggttgacctgctggcgttctgcgttagcggcggcatcgatgcactgtgcgaaaagactgaccgcaacggacgggcaggggcgcagcttgacgggctggaagcggcgttgggctttaccctgcgtgactggtgggtgccgaccgcgcagaactgctttgcgcgtctcagtaaagaccagataggtgacgtgctggttgatgcctaccgactggcgcaggccgcctcggcgctgaagatgaagaaagcggacgcggcgatactggccgaggccgaaatcagtcaaacccgcagggtgctgccgtgcctgacgccctatgtgccggtgacgacaacccagcccgcaagcgacgacagcgacgcggcatag

SEQ ID NO: 437892 - DNA, 378 bp, Serratia marcescens
atgctgacggccagacgattgaaggcgttcgaaagtcagagcggcgatgtcggtatcgctgaagtacgctttcagcgcctcgaaagcgctgtctggcgcgccggtggcggcgatcagcgtcaccgactcggcccattccagcgcggagcctggatcctcgaggatgactacgacagcgagtttcgctatcacgggcggccattgccgccgttgctgcaggcaagcgtggcggattttatccggcaagggcatttctatcgccacctgaaacgcatgcggccgctgtatcgccagcggcgcgagtggttgacgcaggcgctggaacggcgactgggagcgtggcagcaggggctggcggtgcaggcgctctctgattag

SEQ ID NO: 437893 - DNA, 231 bp, Serratia marcescens
atgaagggtatgcagaagatcaaaaggggtaaaagcttcgctggtgtggtccagtatgcattgaaacctgggacacatcataaaagcgacccagtcgtatttcggggcaatatgctgggtggctactctgctcttgaactgtttgctgagtttgatcgcagcaaacagcttcggccagatgttcagaaaccggtttggcacaacttcgcttacctgatggtgaatcactaa

SEQ ID NO: 437894 - DNA, 468 bp, Serratia marcescens
atgaacgatctttacaatagcaataataatgattattttgggatggtttcctctgatagaggttttcaaacgaaaaatatttctatgtctgtttctggaataattgaacagattaatcatgaccgattggacttacaattagcaattaaacatacaaatgattggaccgttcttaaatcgagtaagttaatcgaatccgttctagtcggctttcctctacagaatatctactgtgaagaaaatcagtatggcaatctattacttttagatggaactcaaattataaactctttatatagattccatcgaggacagtttgcacttaaaggtttaagcattcgtaaggagctaaacgggaaaaagatatttgatttagattatcgcgattataatttgttaatggatagatatttaataaatatgattatccaatacaaaatgcgcggaattatgcatatcctgaaatga

SEQ ID NO: 437895 - DNA, 282 bp, Serratia marcescens
atggcaaacgagaacgcagcaagttggggcggcgaggtagcaaaggcattttttgctgctaacttagagttttatgaaaaaaaccctatcgttgcatcgacgggctatcttctgctgatgggttctataccgttgtttctgatcttgagatttgcttacaaaatgacggcgctggacaacgagcgggttctcggcaagctaaagattgaaaaagaacgagaagctttgaaaaaagaagtccctcaagaagtggtcaacaacacaactacagcaggtggatga

SEQ ID NO: 437896 - DNA, 486 bp, Serratia marcescens
atggaaactatcgtaccaatcgtaattgtactcgcgatcattgttcaagcatttatgtatgcaagagcggttttcatccgtcggcatttcatgcttaaccgtgtaatcagtttcattgagcgacctgatgctagcatccgcatgaaggaagttgcgcagaatgcgtttgaggatgccctgtcggtaaaattaccgatcttcatgatgaatttcacaatacgttgccaggacaatcctgaggcccgtgaagagctagataaaattctcgctgaacatgagaaagaagaagcgctttatgaggatgctcgtgaagagctgggtgaaatcattaacatgatgttttgcatcaactggaagtttaaccgaatcattttcgagtatgcccgctggagaacttcgtgttcatccgcagttccagttaaaatcacagaagatctggctcaagagcagtacttgatgggctttaagactggccatcagcactga

SEQ ID NO: 437897 - DNA, 270 bp, Serratia marcescens
atgagcaagcagttttacgagcgccgtaagcgctatttcgaagagaagcgccgccgtatggaagaaatggaggtcagcaagattgtgctgactcaagagcagattaaagaactggcgcggttcgctgctgaagacggtcagccgtcttacaccattacgcatggagccattgaagcattcgaagctgataatggtgagcatgtgccggagtacagcggcctgatcgcctactctgagtcggaagagcacggcgttctgcagttgggctga

SEQ ID NO: 437898 - DNA, 1992 bp, Serratia marcescens
atggccaagtcattcgactttgagctgacggctaatgatgaggcgtcagccgcaattctgcggattgaggaaattgtaaagcacctaaatccgctgttggacagaacgcgcgatgcgttggcgctgggcggtcaggaatccagagataacctggacgatttgggcagccgttttgatgtgctggctaaaaatgccagaagtggcgtccaattcatcggcgatttagtccctccgctcaaaatggtcggtggattaaccctcgggctgggtggcgctgcagcggtcgtcaacgttgttaaaaacaacctgaccaattttgccaacgccggctaccggatcgataccgttgcaaaaaacgtcagcatgacggcggatgcgtttcaggaactgactggcgccatgatcgaaaacggcagcgcgcgtgaggctgcggaaggttcggtcagtgagttatttgaaaaggcgaatgatgctgtacacggccgtaatgatggttttctcgctttgctgaaacagcgagggatagggatcagcgaaaccaaggatggcctggctgatgtaggcaagctgattaacgatctcaaccgcgccatgcaatctcttcctgctgggcagcaggcgctgtttgccaacaaacttggcctttcgcccgatcttctcagctatctgcgcaacacgaccagtgaagtgcaacggctcaaggatcaggcccgccgggatggcctgatatttaccgagaaggatctgcagaatgccctggcgttcaagcagcagctgaaccagataggtgctgcctacgacggcatgctgatgaaagggcaggcctggctgggccagtcggaaaccttagcggcttcggtagaccaactcaagcaggtcgtcaccaatggtctggacagtacggctatcggttcgatcctgacgtttaacagcggcgggaaacaggccgatgttttgcggcaggctcaaggcgatgagaaatttaaagacacgctgtcatggaaagagaagctggatttaaaactgggctatgcgtcggaagatctgatcaataaactgaacggctattataagcccgtatggcgcgccgaccagctgagagccgataccgagaaaatttcaggttacccggcgcaggctgaaaatggggcaatgttgccgtatggccagccggggaataatgcactcggtctgcgcaacaataatccgggcaatctgcgttcagcaccgaatacgacaggccgaaacggcggctttgtcacgttcgaaaatcccaatgatgggctggcggcgctttctcgacagttgatgctgttcggcgatagagggaataacacgttaaaccgaatgattaggacgtatgcgccgcctaatgaaaatatcacccaggcctatattgatggtgtggcaaaacaaacaggctttaaccccgcggaaccgctagacctgcattcgccggcggtgcttgaaaagcttatcccggccatcatcaagcatgaaaacggcgctcagccatacagccgcgatcaaattttcaaggggatcagcgattcgatctttgaccctcgatggtctggtttacgtgaccagaataaactttatgaacagcgacaattcgggggaattgagcaaagtggggattcaaaaaaatctgaagctgatcaagttataggggctcattcaccctatgaagaatttcccacacagcaagtgcagcataaagatacagaagtgaataatgagcttttcacatctgataatccgaccatattggaacgagagcagccaaggccagaaccaccatcgttattttccccattagatgaggttagagaaccttcaaaacagatttctgaagcgttaactaaagcactcgaagaaaataaacttcagttagaaattacgctgataaatcctcagacgggagagcggaggaaggttcagacagaaggtggtgctagagtggcgttatcaatgcaatcaattagttaa

SEQ ID NO: 437899 - DNA, 909 bp, Serratia marcescens
atgcaaaaagtaggtagcgtaactgaaacagcagattcaaatggtgaatttacaaatggtaatgttgctcaaggtgtgccaccaacaatactattagccgagatttttaatacatggcaacgtgagctggtaaatattgttgaaggatctggaatggaacttgatcctaatgactttggccaattactgaaggctataaataagtctgtgggcggcggtcgcttgcttcgaacgtcgatctataccaaggtggggggggggcaatacgtctccattgatggcggtactgccacccagaacatggcggcgcaatttacagcattggctggcacttcatttgttgaaattgagtgtcaaggtggtggtgctggtggtggtggcgtatcggctgatgggataaatccagccgtcgctggcggtggaggcgctggtgcctacggtcttgcgcgattcactactggattctcgacacttgcaataaccgtcggggatggtggggctggtggcgcggtaggaaataattttggcgctgcaggcggaacttcaagtgttggaacgctgatgtcgtcccctggtggtgccgctggaaagggcggcgaacctacaatagcccctttctttaatggagggaccgcctactcggacgatgctacagggagtaatttattaaaagttaacggcggaaatggcagttatggcatcgctataggtgggcaaaacgcagctggtggcggcggcgggataagtaagttcggcgctggttcccctccaacttcgaatagaccaggtttctcagcaaaaaactttggatcgggtggttcaggcgcgggggcctactctactggaagcataggtttttctgggggggctggtgcaccgggagtggttattataagggagttctcttag

SEQ ID NO: 437900 - DNA, 1008 bp, Serratia marcescens
atgattaaagaacactcaggcatgaacctactacgggttgttgctgcttttttagttgtttttatacatgtttctcccgaagttttcggagtcaagagtgaaagctggcttggcatcaatgttatggcttcgatatcgagggtttcagtccctctatttttcatggcatcaggttactttgcccttcgttgtgataatgaaataaatttaaaaaacttcttttttaaaaagtcatcaaggttgtttatccccctggctttgtggtcccttgtttacattgtctatgacaagaccacaatcaacacatcaacaatatggggttttctgacaacgacacctgcacattatcatttgtggtttttttatacattaataccaatgattttaatttcaccacttctttcaaagatggttcgcggtgttaatgctacctatgttgtatactttacgattttgtggttattgctttcgttaatcccatcattggttcaagcattgatgtatttcctaaatgaagaggatcctattttaaaggtagggaaggctcagctttttatcgccatgctaggatactttctactgggtggttttttgcgtgaagtgaaatttagaatcagctcaaagttgcttgttgtcattttcactttatccactgcaataactatattttcaacatgcatcatatccaatacaatcggagcgccatcgcaaggattctttgtttactactccccattcattgcatcctcaacaatagcactatttattatttttgaaagattaaatatagatagtgatagagtatccaaaacaataagcaccatatcaaaatacacgcttggaatttatcttatccaccccattataattgaccacttaaagttaagcattttgaaatcaacaacggcaacatctctactactgatgactgttgttattttcattacttccatgattgccacttttttaatttcgaaaataccatttatcaggaaatcggttttgtag

SEQ ID NO: 437901 - DNA, 264 bp, Serratia marcescens
atgagactgataaacgaatacaccccgcccgccccggaagatctagagcgactgaaatcagagcttggttacaccggcaatcaaatggctgatatcgcaggcgtagccagtaacagtcagtggcgaaaatacaccggcggagcagaaccgcgcgcaatgtcgccgcacatcctgtttttcatggccgcacagttagcgctgagtgatgatgagctagatcgagttatcaaaaaaatggctgatatcggggctgttataaaataa

SEQ ID NO: 437902 - DNA, 2076 bp, Serratia marcescens
atggcacaaagatacaacaccggaaacccccgtccttctaacagtatgaaggaccttaatgataatgcacttgcttatgatgacttccttaatggtgaacaagatgaagcttacgatcggtttcaaaaaccattccctacagtacgtaagcaggtcgcagagcgtataaatgaaattattggcgcgcagaaggatgccgaagaatacgcgaaggatgcgaaggcatctgcggatattgctcaatcgggttctgattcctatgccgatgaagctgaggcacaaaaagcggtcgatgatggattggagacaagagagtatttctctgtacgttctaattccacgaatgaatggacactcgaatatacagtttctagtggaaaagttgtgcaaacaggtcgttggttagcagccgggggcgcagtaactgatgcgatcaatgaaatgaaggcgcgagtgagcactgtccccaacgcgccggcggggatcgacgataagattgctgctggtgttgagttcgcagatggtcattttgcgccgctgatgttggatgacgggcggcacgctttcatcgatgagaacgggatgctgcgagttgttgcggctgattctgaccttgtagtgcgtccgtacattgaatcgcagccctatgagctcccggatggttcagtttgcacgaaaatcattgtcgatccttacaacaacattaccgaggcttggactgaggacggcggctattattttgctacccctgatggccttaaacgagttggtgatttaaaaccagcagcacagcaaataaaacaggctacagctgttaacgatctggtgatgaactacggcgcgacgcgtatttcagtttctgatgatattcggccggttatgtacatcctgccgactttcggccaatccctggcgcaggggtggagcacttacgcagatgatgtgttgatcgcaacaactcaactctatcccgacaatgcatggatgttcaaatcagatcgcggtgccgggaaagaaaaccctaaccgtggtccagggcaaatagacgaaattgtttcgctgaaagacaccgtgaacggcagttggaaggaaactgcgtgctcatcgtcagctgcgcacattatcagtgaagtggaaaagttgactggcaagcgcattcatattctgcgctatgtagccgccgatggcggcaaagcctatcgtaatctcacacgcgggacatgggcttggtctgcactggttcaggggctgatcgacgcgaaaagaatctgtgaacgcatgggctttaagcctgttgtattggggcttgatgtgaaagcaggggaaaccgatacggacggtacgcctgggatgttccccgagctttatacccgtttcctgaggaatcttgacaggaattataacgccgaagtgaagcgcattttcggtggtgaccatccagaaacgccaatctttgttgagcagtgcagtttccaaccgtggggagagtgggacagtcgagtccggcaggggcaactggatgcagacgggcttgggaatatccgatttaccgggccggggtatcaatatccacatccgggcgacgttattcatatcaacagcttggggcaaaacaaacgcggtgtggctttagctcgcgccgtagcatttgaatgctttggcacgggtttcatctctctcaagccacgttcagtctactggtcaagcccaacaactattgatgtgtattgcgcttcgtcagtaccgatcatcaaagacgagtctggtgagattttaaatcccgcagggcttggccccggcgctgggttcaacattcgtgcgcgcgatggttccgagataacaatcactgacgtttccccgctcggtacgacgggaatgcgtctaactgtgaacaatccgacgaatacccgagtggtgcagatcgggtatgggcttaagcgcactggcagcgataaacagtctgggccgatagatggcgcccgagggctgattcggacaaccaatggcatcactaacctttataccggcgagacagaatatcagtggctggccgctttcctgtgggagataaattaa

SEQ ID NO: 437903 - DNA, 828 bp, Serratia marcescens
atggcaaacgcaatggttgtcttcaaagccgatcgcccggcgaataaccctaatctgccgaagctagggatcactgagcaagagatcgctatcttgcaaatgaatccgacggcgtggcttgaggcaaaaagcggcgttgtttcgagtggtggggaggtttctcttgtccgagataaaacaggtcgtgccaattgggttcccactgctacattgaaaccgcgcattatcaccgccggcggtggtgctgccctccgttttggtcgtgcggcgcagaactctggtgcgctgatcgcgcagagtggttacgagtctctgccggccgatgggatttattcgcagtttattttgtatcgtatcccactgccgaacaccgagggctacggcggcacgggcggtaatatctgcgggaactacacgacggcgccggactggctgcgtgtccggttcgggaatgactcgttcttgaccgatgcagtatggatcaaccacggcgatacggcagcaagtgaacccagcaactacccaatcaacaccacgatcactgggttcagagacaatctttggcacattgcagcaattgaggcgacgagctcgcatcatcgctgggagcatgacggtgtactgctacagcagaaggaaatcccggcgaaacaatttgcaactgccgcatcacgtcagttgatcgtcggtggtgccgggaatccgcttaaccacggttttcagggggacatcgccgcgaaaatcatcatccctggcgttttgtcagttgacgcaaaaaacacgctctatgcgcgattcaacgcgttgaaagcagaactgcaatcgtaa

SEQ ID NO: 437904 - DNA, 1824 bp, Serratia marcescens
atgaaatcttttaacaaacagcagtggatatttttaatcgttgtttcactgccgattgtctggatgatagctaccgttgccgtttacccgttaaacggcatcggggttaaaggaatatataaatcctatcgattcggcatgttatggcaggtgttgaccggtgataatattcgctttgatattcgattaagcgcaattaaggcattggggatcgggtttcttggttcaatcattctttttgctgttgcgctattgtccgggaataaaaccaagagcaatttgtacggtgatgcaaagtttgcctcagagtctgatattcgtcgctcgaaggttgtgacctggggggacgagtcaaaaggcggcgttatcatcggcagatacaaaggcaaactcattagatacattgcccctgattttatctcgatgggcgcaggtacacgcgccggtaagggggcggctgttgtaataccgaacctattgagctggcttcactcgatgattgtgctggatccgaagcaagaatgttacatgataaccagcaagttccggcaacgtgtgctgggtcactcagtctacctgcttgacccgttcagcagtaaaacccacggatttaacccgcttttttatatagatctcgcatcggagaaaggagcgggctatttaaagaacctcgcggaaacatgttggccgtcaatcggattgaccgggcctgaagcccactttaacagtgccgcgagccgggtatttgtagggtttacagagttgctctacttccttatcaagtatgataaaaagtaccttgaaaacatcggtgtaaaacccgtgttttcaatcggtacggttcttgatctctactatgccgtagaccaggaggcgctactgagcgatcgggaagaactggttacgcttgctgatggaaacatgaacgatacctacgtcatcaccgacgcactcaacaaaataaaaaaattgtttgaggctgagggggaagcaaaatccagtacagaggagacgttccagaaaaaactcgattcgtttacgttaccgctttttcgtgcagctaccgatcgcaacgattttgatttgcgcgaactgcgcaaaaagaaaatcactatctatatcggtgttaacgcggacgatgcaaagattgcggactcattcttaaatctgttttttaactttgcaatcgacgtgagtatgcgagaaaaccccgactttgtaccggaaaacaaaaacgatgttttgtttttactcgatgagttcccttcaattggtgcgatgcattacatcaaaaaagcgtccggctttattgcgggtttcaaattgaagctgttgaccatttatcaaaatatcgcccagctcatagagatttatggtttgtatggcgcgaagtcgttgatggctaaccacccgtgccgtgtgatttatgcggtcagtgaaaaagaagatgccgatgaggtgtccgcaaagctgggttataccacggtaaaaaacaaagggaaaagccggagcatggcgaaaagctcgactacccgaggggaatcagaatccgatgcgcaacgtgcattagtgctgccacaagagctgggtacattgaagtttgaagaagaatttatacttcttaaaggtgaaaacccgattaagtgtgataaggccttctacttcaacgatcactactttatggataagttagtatctgtttctcctaaacttgaaaacgaagtgaaaaaaaggaacaaaggcgtggcctttggtaaaggcctcgactacccatcaaaagaagtcatgctctcattaggcgaactggaagcagagctgttttaa

SEQ ID NO: 437905 - DNA, 579 bp, Serratia marcescens
atggaaaagtgtatcgaatacggcaagacgatggtgtttgtgggggaaaccggctcggggaaaacaacctatttaaaaacgttggttgattacattcctctcgacctgcgtatcactacgttggaagataacccggaggttaagttcacaaagcataaaaactacgttcatctattttatccgagtgagtcgggtaatggtgagaatgaaatcgtcacatccagttcgttattacgcgccaactaccgtatgaatcccgatcgcatcctgcaaacagaggtgcgcggcggtgaggcatgggattttttgaaaatcgtcacctcggggcatgagggagcaattacaagtctccatgccgggagcccttacgaggcgatcatggggttaatcgagcgctgctatcagaacagcgaatgccggatgttgccgtacagcgtcattctcagcaaggttttgaactgtattgacgtgatagccagtatccaggttgagggggatgttcggcggatcggggaaatttacttcaaggacgccgataaagaggcgtatcagaagaggttccgagatgaaatcttttaa

SEQ ID NO: 437906 - DNA, 1278 bp, Serratia marcescens
atgagtaacgaaaataaaacgcctgatgaaatcgaacaagaattaagggaaagagaagaaaaagcgaaggttgataactcaccaacgcaacagcgagaaaaaaccgtcgccgaaatagagcaggagttacgcgagcgacaggaaagagaatcgcgggaaaacgatgttgaagaagaggtgttaactcaccagccggaagttattaagctcaaaaaaagcaaaaaagaccgggtgttaaaagggattatttacatcacattggcgctgataattgccacggtcgtcggccttaaaatctattcaaaatacaagtcgccggataatacggataaaccagaaaccgtaaaatccacggaaagcagcgttaaccggcgtagcgatctcggtcagggtgttgaccccttcaagcaagaagagccgccgaaagcggagtcggtagaaagcacacctggtgctgaagccgctgccgctacacctggcgcaccggcacctatcacattctccagggcgttggcggtcgtcagtgataacacctcatcaagtcaatcgagtggctctagccgcaagcaggagacccaagaggacgccgagaaagctgaggctgtaccgtctaaaggcgcagacactaacgcggcatctgagggcgatgagggggctttagaggcggtacggcgtataccgtataacccagacctttacttaccggagaacacctcgttgccgtgtgcgttgacccgccgctttatttcagacgtggccggtaaactgcaatgtcagctgacggaagatgtgtatagcgccagcaagaacaccaagctgctcgataaaggcacggtggcgacattggtctacaagacgggaacgcttcgccacggccaggcgcgcgcgttcgtcatcgcgaccaaactgagaacccaacagaaaccgttcctggatatcccgttggttgatacagcggcagctggtgagctcggcgaagcgggtatggacggctgggttgatacgcatttctatgatcggtttgttggggcgatgatgctggggatcatccctgatattgcgaatgccgcgacagacagcgccggtaaaaaagaccgcaataccgattacacggaaaacagccgtcaggcgtttgccgatatggcgaaaaccgcgtttgaaaacagcgtcaatatcccaccgacgattcacaaaaatcagggtgagatcatcacgctggtcactggccgggatatcgacttctcaaaaatctaccgattgcagtataagcggggataa

SEQ ID NO: 437907 - DNA, 915 bp, Serratia marcescens
atgattaaatatggaaccatcgcgcttgtgctgagtagtgccttgctgatgcaaacggccggtgcggctgtttcgccaagcagccgaggctatgacagcagaatgcagcaggtcagctataacgcgtctaacacgacggtgatcactgccggtgtcggatatctttctaccatggtgtttgacgatgaagagacggtgcttgatgcccgtccaggcatggaaaaaggctgggatattaagcatgacgctaatcgcgtctatatccgggctgttccgatcgcccagccggttcctggcgagaacggccagcaggttaaccaagtgtttgagccgacgagtaaggattgggtgacgaacctctttatcgtcacgaccaaacgatactacagcgtcgagctgcatgttcaggaggccggtaagccatcgggaacgatctcctatgtggtcagctatacctacccacaggaaacccgcgctaaagccgcaaaaatggaagctgcgcggttaaaagagttgcagcagcaacaagagaaccagcgcatagaaaaagccctggctaacgcccaggcaccgcgcaattgggaatactacatgcaggttggtaaagacagcggcatgatcacgcctgattttgcctatgatgatggtcggtttacctatatcggtttttcgccggtgaaaaagctgcctgccgcgtttatgtattccaatgggaaagaaattgcgaccaacccagggattaaacaaaaggggaattacaaagtcatcgtgatcccgcaaaccaatccatcttttgtcttgcgttatggcaatgcagttattggattggtcaataaaggctttgggaaggttacggtgaaagatggttcgacggtttcaccaaatgtcgagcgcgtggaggttgataatgagtaa

SEQ ID NO: 437908 - DNA, 687 bp, Serratia marcescens
atgtctaatatcgaaaagacaataaaagccgctcaggggtttgagaaaaaaaacatggagcgggatgagcgtgataaaaaagtcggcttttttatcggcgctgtcggtgtgcttatcgccattttgtcgatagtcgccattcttatcctgctgccgctgaaagagactaaagtcagcctttacgttttggataaagcagcaggaaccattagtaaggtgagcgaatttaccgaagagagtatctccggggacttggcaaccaataaagtaaacgccgaaaattatatcgaacttcgggagcggtataactacttctctttgcaagacgactataaccgtgttcaagcttataactcggatgatgtgaataaagagtatctcgccgtatttaatggcaagaacgctcctgatgtgatttatcacaatgctgataacacagttcgaatcaatgtgatttcagattttatcaccgaagcgacaaaacctgatctgctggcaaccatccgatttaagaaaaccatccgtaacattaaatccggtatggagcgcgaagaatattgggttgcgcgtatcactttccgctatgtgccgaccaaggatctcactgaggaacagcgtgaaatcaacaagctcggctttgttgtgaccagctatgaagccgaaaaagagaacggggtgacgccatga

SEQ ID NO: 437909 - DNA, 1050 bp, Serratia marcescens
atgcctggtgaagccacagattttttccaatctatggataagcttgtcatgaatacgatagaaagctcaacacaaggtaaaatggccttttatgctgggcttttttctacattgattcaagcatcaataacaatttacatgcttgttcaagggtatcgtattatggcgggcaaacttcaacgacctgttgaagatactgttttcgaagttggtaagatgagtattattatagcattcttacagaatggaggcggatatttagatttggctatcagcgcacttgacggcctgaaaacaggtttgtctggttctgataacgtttggctctatcttgatcaactttggttcaaagctcaacaaattagtgggactttgttagatctagattcttctacctatgtaaaaatggaaggtggtataggttctatcttagtgtgggctggggtactggtagccctattattaacaaccattgttttcttaagtgctgagattacaattcttcttttaactgttacagctccagtgtttattttctgtttgatgttcggtttcttaaggacaatgtttaataactggcttcaatctattttctcttccattctaacactgatgtttgcgaccctagttctatcttccggtataaaatatctaaatggcgttctagaaactataaaagcctcagcaaatgagtccaatttaattactatgggagctatggccggtgctgctggcgttatatgtgcttttgtcgtctggttatcatcgaagtttgccgcacaactagcaggcgttggtcttgagggcgctgttcaaggtatggcggcagtagggctgtctattggcggttttggagctgctaaagccgctggcggtgttatgcggggaacggtcaacgcagggcgcggcactatcgaaggggctaaaggtacttcctggaagcaaagagagtcctccggcctttctgccggtacgggttatggagctggccgcgtaggccgtgctgtcgtacaaaaggttattgcgcggaacaactcacgcgcttcttga

SEQ ID NO: 437910 - DNA, 255 bp, Serratia marcescens
atgaaaaaaattattactgtaggaattgtatctatagcggttggttttttatcgggatgtaaagacgaaccaaaatcggaaagttggtataaagaccatccagaagaaaccttcaatgtctataaaaagtgcattgaatctggcgaggcaagtaaaaactgtgagaacgcaagaaaagctgctatcagttttgctcgttctggggatgccgaattagaaagcaagttcctaccactaatgcgtaagtcggcgtaa

SEQ ID NO: 437911 - DNA, 585 bp, Serratia marcescens
atggaaaccgcacagcactaccgttctcagattcaggcttacaaagaccagctgatgacggccactggccttcgtgatattcaggcgcttgtggcgcaggggcaaagtcttaaaaacgatatcgtcaaccttcaaaagcagggtatcagcctcaatgatctgctgacgtcgaacagcgccccggctggggctttggacagtctttataataagtataaagacttcgatatttgtgacgtgaagcaggcgcagagctacatcaatatctgcaagcaagaaacggtcaataaggcgtgggcgattgaacagaccactgaggtgcaggggcagatcaacacggcactgaatgatattgcctcgctatcaagccgcatcgccggttcgaaggattcgaaagaatcgcaagacctggctaatgccatccaggcaaaaagcgtccagctcaacgtgctctcaaatcagtgggaaatgaacatgaaggcatcggagcagcgtgataagctgttgcaacagaaacgcgagaaagcgtttcggcagcagcaaataaatgcaccgttaccaaaattcggagatttgggttcatga

SEQ ID NO: 437912 - DNA, 2439 bp, Serratia marcescens
atgaagttaaaccaaagagcaccattagaaaaaatcattccctattcgtcacacattgataaagcgattatcaagaatcgcggttctgacttagtggcaacgtgggaagttgatggtgagccgttcgagtgccaaacgcaagatgttttggatatgctggcgactcaactcaataaagccattgtttcatattcgggtgaggcagtgacgttctatgtacataaagtacggcgtaagtttcacgatgaccttgattcaccgtcgggaaatgtgtttgctgataaaatatcctctctttactatgcaggcataaaaaccaaaccattttacaaggtcagtatctttgttacgctgtgctttataccttttaataaagaagaaaaggcagagagaaagacgaagggcgacagattcaaaaagaaaacgcaacaggacgcgatactgcgtatgaatgagctgcgttcttctgttgaaagcatgttgcagcgttatcggcctaaagcactggggctttttgaaaaaaataaccgtgtatattcttcgcaaatcagcttttacaactatctcataactggcgcgtggcaagatgttttggtcactaacacaccattttatgagctccttggtagttctgacgtatttattagttctgactctgcgcaagttaataatttcgactcccgtcgatatttccgctctattgaaattaaagggtttacaaaattaactgaacctgggttgttggattcacttatctacgagcccgttgagtatgtgctaactcagtcgtttaccagcatgagtaagtctgaggccaaaaaagccatacatgatcaggaaaaacggctgagtagtacgcaggacgacgctgtagaagagaaggaagaccttgaaatcgccaaaagtatgctgacttccggcgatatcagttttgggttgtatcactattctcttctggtttatgccgattcgcttgaacagttgattaaagacaccaaccagatccgctctacgctgacggatatcggcctgatcgtgacgctctcaacgttgtcgttgccagcggctttttgcgctcaattgccgggtgtttaccatttacggcctcgtctggtgccggtgagtagtcagaacttcgttgaactcacttcgcttcattctgtgatgagtggtaagcgggataaaaccccgtggggtgaagcgattgttattgctaaaaccaacagccagacaccgtattatctgaatgttcataacaccatgatggggcaagatgatttcaaccgaaaaacgaccggtaacgttaaaataatcggtacgacaggatcgggtaaaactgtcctgctgacatttcttcaaaatgcgtttcagaagtacgctaaccctgaaagtttctctccccaggctaaaagcaagcgcatgactacggtctatttcgataaagaccggggggctgagctcaacgttcgggcgttgggtggtgaatacttccgaattaaggccggtgagcctaccgggtggaacccgtttaagttggaacccactaagcgtaatcgggcttttgtgaaaaacctgatgaagctgatcgtcaccaggcgtggagaggtattgacggccaggcaggaaatcgacttataccaggctgtcgatgatgtgatggatttgccaagagaactccgttcctacggcataacccgcgttctcgaaacgttgaatgaatcgactaccgtgcaggcacaagagaacggcttgcgcatccgtttgtcgcagtggaaacaaggtgccgattttggttgggtttttgataacgatgaagattcgtttgatattagccatatagataatttcggcatcgatggtacagagttcctcgatgatgaagatacacgctccccgatcgctttctatctgctttaccgggtgacaagtttgttagatggccgtcgattggttcttattctcgatgagttctggaagtggctggcaaatgatgcgtttgcagattttgtttataacaaactcaaaaccattcgcaagttgaacggtatcgtgatttttgcaacgcaatccttagatgaagtgttaaagcataaaatctctaaggcgacgcttgagcagacttccactgatatttatttggcgaacccaaaagcagattattccgagtatgttgagggtgcgaaagttgaccccgcgcattttgaaataatcaagaatatagacccggagtctcgccagtttttaatcgttaaaactgcgctgcgtaagggtgatgttcagaaatttgcggcgctggtttctttcgatttatcttgccttggcgtttatacaaaagtcttgagcggcagcgaagataatctcgaaatatttgactctattttcaaaccgggcatgaagccggagcaatggctcgatgcttatcttaacttggctctatag

SEQ ID NO: 437913 - DNA, 291 bp, Serratia marcescens
atgtttattaaaaaacacctgtctgctcttaacactgctgttctgttagccctggtttccgtgagcgtcaatgcaaatgccgccagcggttttgataaagtgaaccagatgctgaattcgatcattgccggtatgcacgtcatctcaattgcaacggctacgcttgctgggctctatgtaggtttccgcgtactttgggatggacgtgccctgatggatatgaaaaatgtcatcattggtgcaggtatcatcattggtatcgctgagttagttgcgctggtcatttcttaa

SEQ ID NO: 437914 - DNA, 633 bp, Serratia marcescens
gtgatttcatctacaacatttatcgcgcttgcgatgcagtgcgcggcctctgtgcaccctgatacagcgatggatgttgtcagggtggagtcaggatttaatccgtatgccatagcggaaataattcctaaaaaccaaagattgaaagacgggaaaagcgtcatatcgcatatgccgagcaataaattcgatgctttatctatcgtcaaggcaatagaggaaaagaaaaggcgttactcggtcgggcttatgcaaattacgagcacaaactttaagcaatttaacgttgatgctgagaagctattcgacccatgcacaaatctttctgttttcgagaaaatcatcaccgactgctacaccaggggaaaaacgctcaagaacgctttgagctgctattacaccggcaattttgatgctgggaaaaacaaagagtctgaatttaatcagacgagttacgttgaacgtattggttataaaaactcaccagggaaaacttttgctgtgcctagcactaaggaagataagggggaagtaaagaaagaggaagaagctaaagagtcacgttctaattcaccaatcatcatttatccatcacgactgattcgtggtgatatacaactgtctaaaaattga

SEQ ID NO: 437915 - DNA, 150 bp, Serratia marcescens
atggaaaacaaacctaaagctattatctgtttagctgtatcttcgcctgttgatttaacccagtgcaagagtattggcggtaaggcaattgtcgataaccataagttcaaggtggtttataagcctagcattaaagatacgtctaaataa

SEQ ID NO: 437916 - DNA, 240 bp, Serratia marcescens
atgtcatcgaatacaggtcttgaacgtattaaaaagccgtccacggcttatggcgtcgtttatgttggcgctgcccgcaaacaggtagtagaaaaactggcaattgaagtttcatttatgaccggcaagcaaatcacaacggctcaattcttccagtatctaatcgatctgcatggggaaaaggctaagaacgatatcatcaaagcgtttgagggcgatcgcaatggaaaacaaacctaa

SEQ ID NO: 437917 - DNA, 468 bp, Serratia marcescens
atgaagggttggtttctgctttaccacagcccgaaagcgtaccagcaaatcctggctgggttcgaacgcttgtcggtcacacattacacacctaagctcacggtcattacgaagagagcagacagtaagacgagcgtgagaatcaataagcgtccgttgtttcctgcatatctgtttgtgtacttcgatccagaggtcgtccacaccaccaaaatcacacagctgatcggtgtgaatgagtttgttaagattggcggccaagtgcggcctttgccggaagctgttatcgacggcctgcgcaaccttgagtttgcgaaagttgatcaaagtgaccaatcagtttcctacagtaatgtgcctgatgaccttatggcgaaactggaagaaattaacgggcaaagcgagcctgtaaatcgaatggcttctctcatcagctttctggacgggtatgtaagaaacgcccactag

SEQ ID NO: 437918 - DNA, 282 bp, Serratia marcescens
atggttccgaagagattgagaactgccagattatacgctgggttatcccaagaaaaactaggcgttcttagcggcatcgatgaagcgtctgcccgtgcacggatctcacggtacgaacacggcgttaaccgccctacctatgagcaaacacgcctctttgccagagtcttaaacgtccctacatgctacttctacatcgatgacgatgagttcgccaaccaggtcttagcgctgtatgacaagacgtataaccctgctatgccgccgcgcacattctattga

SEQ ID NO: 437919 - DNA, 1146 bp, Serratia marcescens
atgggcgttagcattgataaggagtataaaatcaaaaaagcccggagtgagcgggctgctaagaacccattagcgcataaagccaggaatggcggtgatacttatcagaaaggcgtaaaacagcgtatcgcttctaaaggggctagtcgcgaagtgatggtgaagatcaccggtaacgctaaaaccgccaagggtataaaaaactctataaattacattagccgcgatgccgatctcaaactgagggatgatgaagggcgtgagtatgatggtggaaaagatatgtcggatgcctacgactatatgatatccccggaagaccggctaagaattgatgatgataaaaatccaaatatttcgcataacatgatgtttaacactaatgccgttgttggtgtttcccaggaagatatgcttgattcggttcagagcgtcattaaagaaaaataccctgacaatcgcttcataatggcttatcacaacgatactgataatcctcacgttcatgttgttttgcgcattcccgataattctggtgtgagaataaatatacgaaaagcagacttgcgagatttgcgctcaggcttcgctcataaattgcagcaaaaagggtataacgtaaaagctacacataaacatgattttgccttgaaacataagttaacgtccgaacctgaccgcacccggaatctgtatgaggttgtagactttgggagaactcattttaaaaatgacccgaaaaataagcgccaaaactacattcaattgaagacgataaagggcggcaaagaggttacgatttgggggacaaaccttcctggggagttattgcgtgagaaggtgaataagggaagcgttatcaagatcaagaaggaaggtgagacaacggttaaagtgcctttgttcgataaacaaggcgaggttaaaggttacaaggagactaagcgcaacaattgggtgattgagaataaaggtgtcatgggaatcgaccgcagcgttaacttcaacaaggttgaagtgctgagtgatccacaaagagctatcaagcaaggcatgagcatcaagcagttccaggaagcgaagatgagcctcatgaaacaggagaaacaaaaagtgggcgtcagagtcggcttcttgaaattctaa

SEQ ID NO: 437920 - DNA, 204 bp, Serratia marcescens
atgaccgacaagccgttttacatgaaatcaattcactactacaaggcaggcgttaaacggatttttgagcataaatatggggtgacgatggaagatgtgtcgttaagtgaggactttattctacaggcatttgaggcagaagagagtccggcgcaattggtcgaatggtatggacgaaaatacgatttgacgcaaattagataa

SEQ ID NO: 437921 - DNA, 210 bp, Serratia marcescens
atgaacaatattacccgcaacattgacaccctccgcttaactcgttttgacgtggttttcattgctgagaatgtaaatggtgaattggttgaatgccactttatcaccaatgcattgaatcaatatgatgccgcatatgttttcggtcagaacaaccctcaacaaaaatatgtcatcaaagaagtgaatgaagtgatccaaccgttctaa

SEQ ID NO: 437922 - DNA, 240 bp, Serratia marcescens
atgtataatgaatttatcgaaacgataatattcactaccgcagagggctacataatggaaaagaaaactaaagaattagtggtgggtgacatggttctaaatatattgaaccggtcttattatccgttagaagccgtggagaaatcaggctccgggtatatcgttaccctgaccccagcaaatatagacggcaatcgatattacgcagaatatacaacccgacatcaaattaaagtttga

SEQ ID NO: 437923 - DNA, 516 bp, Serratia marcescens
atgaatattcaagaagccctcaatgttttcggtttaactggtgaagttaatcaggcagaactcaaaaaagcgtttaaacgcctcgctgttaagtatcatccagataaaaatccaatcggcgcagagatgatgaaaatggtcaatgctgcgtatgaatttctcgtcaataatttagagaagatcaagcaatttcaatccgtgaatgaagatgatatttataactatggagaagaaattgagagtattttaaaaacacttgtgacaatggagggtgtgatattcgaagttattggcaattgggtatggattagaggggaaacccgaaaccataaagacatgctcaaagcgttaaaatgcaaatgggcaccaaccaaaaaagaatggtattacagaccggaagagcataaaagcatatacaacaggaaaacacatacaattgaagagatccgcgaaatgtatggaacaagcgggcaaagaaaagcaagaggtaaaaaacagttagaaaaaacaaattaa

SEQ ID NO: 437924 - DNA, 432 bp, Serratia marcescens
atgatagctaccggtaccgaaattactaagttgagaaatcaacttggcctgacgcaaaaagaattggcggcgttgttcggcgtgacgcttgcaacgtggcaaaaaaaggagtctgaaacgtcaaaagagacgatcggcatacgccccggagagttccagtttctgctgttgctggccggtgaacatccgcagcatgttttgacgcagaaacaaccggcactgatgacggtacagcacaaaccgtccgctgatgaggttaagcggacacgggaagaggccggattgagcgtcgaacaagccgctgaactatttggctgcttgccgcgtagctggcagtccaaagagaatccaaacacgcgcggaaccttaaccgtaggagagtataactacttgctcttgctggctggtaaacacccgtatctgtcaatttga

SEQ ID NO: 437925 - DNA, 270 bp, Serratia marcescens
atgtctaagacctgcgtatatcatcatgccggttccagcggcatgaacacatttaaaacagaagtgtttaagttggatgacggcaagttagaggccgtattcacacggattaaacgtaagcgctttcctgacggaactgaaaaggaatttgaggatcaggttactcggtttaccgcaaacagtaaaaaagaattaaaagggatggatttacctaaattgcgctcaaccaaaattttactcgattctgatttctttaagggcgaagaatga

SEQ ID NO: 437926 - DNA, 561 bp, Serratia marcescens
atgcaagagttttcaaatcagcaaattatcatcctagaacaagtctgcttgctacttggcgacgggtggcacatcgaccgcctaaagtctgaacaatggcgtcaagtcgtgcgctctcctgaataccggcattacagcatcataatcacctgctcctatcaccagttccggttgcttggcgtgatcggccacagcagcgacaacgtgattaatatttcccacagtagaacaccaacggcgatcagtcgtgatattcgtaagcggcttttggacggtgcccaggacaagctcgctaaagcggccatcgatcgggaaagggaggccgaacggcagcaggtgaaggggtggtttatcgatgcgttggagcgcttagtcagcgtagagcggcctcgttacggtcacagtgatagagtctgtgaattgaatcacgaggggatcggcggcgaggttcagcgctactgctacgataactataaaattaaccttaaagggttaacgatggatgaagttatccgactcgttggatttattagtcaattaagagggcaaagtaatgtctaa

SEQ ID NO: 437927 - DNA, 282 bp, Serratia marcescens
atgacctataaactcaagtttgagaagcgggcgctgaaagagtgggaaaagctggggcatccgatcagggagcagctgaaaaaaaagctggctgagcgattggaaaatccacatgtcccagcgtcccgactcagtggccgccagaaccgctacaaaatcaaactacggtcgtccggctatcgactggtttacgaagtcatcgaccacgaaatcgtcctacttgtgatcgcagtgggtaaacgggcaggggatgaagtctatttaaccgccgacaaacggtaa

SEQ ID NO: 437928 - DNA, 252 bp, Serratia marcescens
atggcttaccagatcttaaccactacggcggcgtctatcaccgacctgaaaaaaaatcctatgggaaccgttgccgacggagacggtgaagcgatcgcgatcctcaatcgcaacgaaccggcgttctactgcgttccccctgaactgtttgcctactatcgcgaactggccgaagacgctgagctcaatcaaatcgctgatgagcgcatgaaagatgccgagtacgtgagcgtttctctcgatgacctataa

SEQ ID NO: 437929 - DNA, 693 bp, Serratia marcescens
atgtctggaatcaataacatacaaatgcatcgcatcgagatgagcatactgtcacagtgcgagttgttggattttgcgatcctggaggcgatcagcgccggtgatgttgactactacgaacaaatccaggaacagacgataattgcagacgaacggttgtctgaaaaaaatgcgttaactgatttagtcgatttttgtaaaagtcactatgaccgtgatttagggtttcaatcaaaaatggatgacggtattcattgcttttatacttgctccgttcctgccgataaatttatttcgtttgctcaagtttatccatccttctctgagttcctcgataaattgaaagaggagcagatagattttattgaagtgagctttccagagaaaataaagaaaattgtccttgaacagtttgactatgatgaagactcgcaagcaaccatttttatggaaaagttcaacgataaagaaggggggaagtttttaatttatgcccattcaaaatacggttcaaacatcacgaaagtaacatttgttttagaacgcctttatgattgtcaaatcgaaacagcagctaaaacaagcgccgtaaaattaatctgccagcgactgaaagaagatataaaagataaagttggagttaaatatattaatgaattaatggagccgtttgaagatgaattccataactag

SEQ ID NO: 437930 - DNA, 843 bp, Serratia marcescens
atgaaattagctaacgttacacccaagacaaaaatacggcatcgtaatgaaataaactctactttttcaatgctgccgctatctgcgcgaaggattctctttatggctatagcacagcttgattctaaaagaatgctagaaaatggccagacctttaggatatctgcaaaagattattcattaattgctgatgtcgatatctcagtggcttacaagcaacttaaagaaggtgccactgagttacaatcaagtataattagtatacctaagagtcaactgctagaaccctttcctagagctggcgatcctcttttacagaaaaaagggaaaaaatcagcacctgatacaataaggtcattaaacttaacagaatattgcgactatgcagaaagtgaatcgtctattgagttgagtttttcaagacatgtggaaccatacatctgtcgcttaaaggataactatactacgcaagttcttttatctacggtaaggttgacggaaaataatgctagttcgctttatcagctaataaggaaaaacattagcataggaaagaaaagctattttgatattacggtggatgaactaaaggaagaattaaatttatttaaagtagtagatggggaaaggatttattcttatcctgaattcaaaattttcaaccgtgattttattaaaaagaatgttgatgtaattaacaaaatcacagagatacagaacttgaaatatgaagttatagaaaaaattgctcggaaagcctctaagttgcgattttcttattcgcttagcaaagatagtgaagctgatgatgattcaagtgaagagcagcaggaagaaagttaa

SEQ ID NO: 437931 - DNA, 453 bp, Serratia marcescens
atgtctaatatctatcagttcccacaaggacaagaccgacaacggtttaaatcggccgttaaacatgccaggaatgaacgtaaacgatcggcagcaaaaaatacgctcttttcctgggtagcttctgcgtggttctactctcgccttgccgtcgcttttactatgaccaccgtcgttctcttcgtgatcaatcttctgtattcttttagaaaggttctcacgtttctgacggttgttcttggcctgatcctctactacacaacctatgagcatcatttttataagggaaatgattttacgctaatcttttgcatagggcttgttatcatcgcgcagtcgggtttagggcttaatatcttgatgattcgatatcaaccatttttacggctgtttcgtgttaacgatgcgaaagaatccagcgatcgccaacgcgtaagcagtgaggaaccatga

SEQ ID NO: 437932 - DNA, 729 bp, Serratia marcescens
atgagtaataaagatgatgatttttgggaggatgtttataatgattcttcctatgaatacatgcgtgaacttcaagatcaagcaaaagaaattgagtggttaaagaaaaatccacatcttgatattttttccaactatgcccgcacacttgattatctactttctttaaaggattttggcagtgctgattttttggttaaaatgcaattttcatactcagttaccgtccttgaagcctgcctaagtgaaatgttgaaatcattggttttgacttctggattctatattagaaacgccttggctaatattccagaacttcaaaaatcgactgtatcacttcttgaggcttacgattatcaggataaatcagagattgaaaaggcagttattacatacttgtcaaaagttctttatcataacattccaaaagtaattgctttgtattcgtcaatacttggcattgagaaaccgacccacatcaatatagaaaatatcgcaaaaatcattgctctgcgccatgatatcgttcatcgagatggaaagacgatcgatggtgatgttataaatataagttatgatgatttgaacgattttgtttttgacatcaaaaattttcttgaaaacatgcatcaattaatatcagactcagtcgaaaaacaagaggtattacggatagccgaattagagcgattttaccatgaactcgacggtaacattttccctgaataa

SEQ ID NO: 437933 - DNA, 318 bp, Serratia marcescens
atgtcaacaaaaccaaaagtacaattaccaatgcgtaagcctgcctcagaatccgaggcagtagataagaatgagcaggtaacatcgtttatcagagaaggggataagcgccctgagacgcgtaagaaagttaaacctacactatttactttgaccgaagaagaaaaggattttgttgaaaacactgccaagagaacgggtgcgacaaaaaccaacgtaattcgtgctgcgttaaaaaccctggctaaattagacgataatgatctgctgatgctgttgggggaaatcagcctgagaagcccaggtcgttggaattga

SEQ ID NO: 437934 - DNA, 144 bp, Serratia marcescens
atgctcgctatcatatcggtgatcacagcagttgcatacgcggtactcgcgttactgaaattcagtgatggagtgatgcttaccggttacatgtacactctcataagtcttatttttttatgtttatttgtcaaaagtaaatag

SEQ ID NO: 437935 - DNA, 645 bp, Serratia marcescens
atgattgttctgattggtagtcacaaaggcggcgtagggaaatcaacaaaagcggccaatattgccgtagcggttcgtcatatgacgaagaaaaccatcgctatggtgggctccgataagctgggttgtttaaaaagctggtatgcacgtcgccaggacgccggtttgccatccttcacgttcgtagaagcctacggtgatctgcgtaaagagctaacagagctgaacaagcgctacgatatcgtcctggttgataccgccggtcacgatagccaggaattccgctcagcgctcacagtgagcgatattttactctcgccggtaaagccgtcctcgcaatcggagatcgactctatcgcagccctcacggaaaccgtcagaacggcgcaggaaaagcacaacccttcgttgaaagcgcacctggtctttaaccgttgttcaacgcgcagcgggaatactgacgccaccgatttagctaatatgcttaagagcgatgagtattggttacagccgacaaaacagcgcatcggcgagcgtaccgtgtacgtcaaaacctttaacgcagggcagggcgtgcatgaagcaaaagacggccaagctaagggtgagattgaattactgtgccatgaagtcgggatattttga

SEQ ID NO: 437936 - DNA, 243 bp, Serratia marcescens
atggggacattaacgatcaggacacagccagagcatgatacagccctagaggcagttgggaagcggctaggagagaaaaccgcttcgcagacactgctcaagtcattgatgacgtatgagcgccacagtgacgagattgagcgtcttaggcgtgagctaagtgctatgaaatgggagcgcgacgagttacgccgaaagatagatgactacaaacgagcccatagcagtctgatggatttataa

SEQ ID NO: 437937 - DNA, 813 bp, Serratia marcescens
atgacgaaacgggcgacagaacgcgcctatgcggagctgcaacaggcgtatgacttctacaatcagcgcttgttcggcggccagctgccggattgcctcatcacgttccagcgagggaagaacacgatgggttatttcagccgtaaccggtttgtgtcaccggcggacggtacacagatagatgagattgccctcaaccctgagtatttcccggtctacccgctgatcgaggtcatgcaaacgttagtgcatgagcagtgccacatgtggcagttccattttggcaacccgtcgagaaagggttatcacaatgcgcagtgggcggcaaaaatggagcaggtcggccttatgccgtcctcaaccggccagcctgggggaaataaagtcgggcaatcgatgaacgactaccctatccccggcggccgcttcatgaaagaaacgctggagctgtttcgctccggttttgcgctcagctggtttgatcggttcccggttaaggtcgaacagcccaaagacctaacgccgattattgagcagtggcgagaaacgttggcgcaggctgttcaagatcaccccgttgcagacggacaagccggagttgagcgtctcctaacgttggcgttggtaccgtcagtgcggagtcatgatgaagaggatgatgggggcgaggtcgcgggtgtcgttctgcaaccaaagcaaaagacgcgacacaagcacgtttgcccggaatgtggggcggcggcttggggcaagcctggactaaacctcttgtgcggtgattgcaatatcgcattcatcgacgtcgatcggtag

SEQ ID NO: 437938 - DNA, 345 bp, Serratia marcescens
atgattgaactgtacatgcatacagtggttatcattatcatgaaagacggctacaacccttttcaaacgacaggcatcaacttcttccggcactgcgatgagatgatccaggttgtctacctgggcgcgtttctggaacgtatagaacccggtgctttaattttctttcaacgcctcgatggcctgttctggatggggcgggtatggcctgaacttttttggtttgagctcgaaaagcccatcacagtcatggaagggctgacatttctttcccagcagcactacatgcggatacttcacgagaaggaaggggattttgttcatcagcatgaactccccttttag

SEQ ID NO: 437939 - DNA, 858 bp, Serratia marcescens
atggaaaacagagtgattgggttaatcactggcgctatcaagagtgaagggcaattcctggcactggcaacaaaagtgcgcctcgaagagggaagggatgaagtgttgtactttgccttcccgaaacttaaaggtctgttgtttaccctgcaaaccaaactgggcttgatgcaagaaagcggcacctttaacacggcacagaccagccaggaaaccgatcaggagcaagcccggtatcgccagcaggccatgacgttcaccgacgaggaacttagcacacccgacgcccagaaaggggtagtgtcgatttcaacgttacccggagaggggtttatcactctagatatcgcacgcatagacggccagcgtgtcagcttcgctattcctgatgccgccattgaaatcttcaccggctatatcctgcatacgctcaaagccgctggcggcgatgcacttatgtcgcacgctatctcaaacctggacttcatggggctttactcggtggaatacggctcgaacggggagctggactacgaattttacaatcaagatccgtggcagatgagcgcactgaggcaccacatggcgatcttgtataccgtcaagaacggcaccaggcaggaagtcaaatgtgcggccatcgtgaagacgtccataccaagcgggacgccggaaacgctcgatatggctaaacgcgtcgcagacgcgcaccctcgcctggccgcataccaacacaaatttgacaccattcacacccacctcctgcacaatccatcagatcaaccgatggagctggacgcagcgcttgatgtgttgtcgcgcttataccttcgtcatgcctccgcaggtaacgcttaa

SEQ ID NO: 437940 - DNA, 729 bp, Serratia marcescens
atgtgggggtttgagcacgccgttcgcttacgcgaagtggcgatcgccgccggtctggatctgccgctctatctgctcgccccggaagtggccgttctgctttcctatcttcccgacatgcaccagcggcttttcttcgagacgttgtggaacaccggcgcacgtccgaacgaagccgctgcgctgacaccgaacgattttttcttccacgatcagctgatgccctttgttcggttgcgcacactcaagcagcgccaggcaccccggcggcgtgttggccgcccttccctggaaagccagaaagaggaagagaagcttccaccgctgcgtgcggtgccgttgccggatgtggcctatgtccggcgggtgcaggagtatattgcgacgttcaagctgatgacgcggcgagcaacgccgatctggggattcaagagcagtgaaaccccgcgtaactggttaaaggcggcggttggccgtgctgagcgtgacggggtaacgttctcggtgcgccctatcgtgccgaagacgttccggcatagctacgcggtgcatctgttgctgaacggcgttcacatcaagaaagtgcaggcgctgatgggacatcaacgtatcgagagtacggaagtctataccaagctatttgccctggatgtgacacgcgacctggggttgacgttctcgatgcagccggaagacgcgatcgcgctgatgagtcacaaagatatataa

SEQ ID NO: 437941 - DNA, 159 bp, Serratia marcescens
atggacaacattgaaatgtggatgattccggtgtttctgtttttaatgcctttggtgtatattgtgtatttgttgctgcaaagaaaagtcagcagcaaaacaattaaccctgaacaagagagaagaaagcaagataagtattatccaataaaaagatag

SEQ ID NO: 437942 - DNA, 252 bp, Serratia marcescens
atgtttatgtatcgttttgttttcctggccactcttattgttgcgattccttggggatggttcacgttctggcctgaaaccttcaacatgtacgctgctcttttcatcgtttttgtcattttgtcgctagagtcactttttttccgaaatgttgatgatgaacctccgatctattggatctctttgtatgggtttatgttcggggttacggcgatttttgttttcggtttaaactatttttatgcttcataa

SEQ ID NO: 437943 - DNA, 204 bp, Serratia marcescens
atggaaaaacaatcctttctcttcaagttccgcaaggcaagtaacatcgatacgttagagcgcatgtatgaacatatgcgggataaggtcgatgataatgatgtggcgtttttcctcggggcgtatgatcaccgcaaagcagaactggcggtaggacgcatattcgataaagtcccggggtctgcctggaagtacgtgaagtag

SEQ ID NO: 437944 - DNA, 438 bp, Serratia marcescens
atgagcgaaaacgacacttacagcaaagttagaggtcttttgtctaacatccgttcagtacgcgcatttgcgcgtgagactgacttcgatctactgctcgaaatgcaagaaaaactgaacattgtaatcgacgaacgacgcgaagatgctgagcgtgaaaagaaagaacgcgcagagcgggaaacgaaacgcctagaactgcttcagctgatccaatcagaaggttttgaccctagtgagctgttgggtattgaatcatcaggcggttcgagcaagaaatccaaaaccggcgtaaaacgcgcacctaaatatcaatatgagcaagacggtgcaatgcattactggtcaggcgttggccgtaaaccgcgaccaattcaagatgccttagatcagggtaagtcgctggacagcttcctgatcccatcacaaaatcagtga

SEQ ID NO: 437945 - DNA, 2151 bp, Serratia marcescens
atgagactttttattgcagaaaaaccggcagtagctaaagacattgctgctgccctgggcggcggtaaccacaaaggcgcatatattgattgcggtaacgataaagtgtcctggctgttcggtcatgttttacaaacagtgcagccggaagtgtataacccggcgtataagcaatggaacaaagaagatttacctttaaaactttaccccccacaatatgaaattgcgccggataaggttgagcatgtaaccaaagtgctcgacttgattaaacaagctgacgtcattgttcacgctggcgacccggacgacgaagggcaattattggttgatgagctgttgatttatagcggctgcgataaaccggtaaagcgcgtgttgattaacgacaataccgataaaggcgttaaaaaagcgttagctgatttacgtgacaacaaagagtttcacggtgattatctcaaggcgctttcccgcagcgtcggggatgagatttacggtttgagttcaacccgcgcatacagtattgaagcgcaatcccagggttatcgtggtgtgctgtcggttggtcgtgtccaaacgccaaccctggggctcatcgttcggcgctggcgtgctaataaggcgcacagtaagtcctattactacatgctcgatggttcgtttacattcggtgccggtagcctgactgcgcgtctgcaattcccggaagacgccccggttgacgaaaaagggcatgtactccagaaaagctatgtggacgagctggcagctacgataaacggtaaagtggcgcgcgtggttgaagcctcggttaaggacaaagaaaccgcgccgaagctgccgtttaatctgagtaagctacaacagcaaatgaaccgcgatcacggtatgtctgccgctcgaacgcttgaagtcacgcaggagttacgtgagaaattcaaggcgatcacctataaccgttctgattgcgcctatttgtccgatgagcagtttaccgaagccccggacgtggtggccgcattgaaagccagtcccgcttttgctgatgccgatgtagacaccaaccgcaagagcaaggcgtttaacagtagcaaggtcacagcacatacggcgatcattccgactgataacgtccctgacctggacaaactgagtgtcgatgagcggcatgtctatacggccatagccaagcagtaccttattcaattcatgccgcctaagcgcttccaggaggccacagggcgcattgaagctaacggccataccttcacctaccgagcgattaaggacgtgcatccgggctttgaggcgtatttgaaagagccgaaagaagtcggagaggacgacacggtagaaacggcttttgaaaccgtcagccaattgcaggtcggccaggatgggaattgcgattcaactactgttcagcagaaagaaaccacgccaccaaagctttttgatgaagccagtttaatctcggcgatgacacgcatcgccgattttgttgataaccccgagattaagaagctgcttaaagagaaggacaaggacaacgatcaggcgcacggttctatcggtactgaggcaacccgcgccacgattattgagacgttgaagaaacgcaactttatcactgttgaaaaagggaagctgatccccaccgacaccggtttggcgcttttcgatgcgttgccggaagtggcaacgcagcctgatatgaccgcactatggtttgagcaacaattgcaaattgcagagggttctttaactgttgatcagttcgtaaacgatttatatgattttttgactgagcaacttaaagacgttaatgtaggccaaattaaaggcgagaaaagggaggaaggtaaaatccctcgactcaccgagaaatgcccgaactgcgataacgagatcatggttcggccaaaactctttgcctgtacgggatgtgattttaaaatctggtcaacggtagctcagaaaaagttgacaacaaatcaggttgaaaccatcctcaagaaaggcaagtcaagcgagattaaaggtttcaccagtagtgcgggtaaaaagttcgacgccattctggtgttgcaggataaagccacaggtaagctgggcttcgagttttctaaaaaatctaaggggaagtga

SEQ ID NO: 437946 - DNA, 318 bp, Serratia marcescens
atggatcataaatacgatacgttggaaattgaagactacatgacggaagaattcgtaggccgtcaggttactgaatacagaaaacgtacaaaaggcaggtctttactgattgtttttccggaatacgatgacataaacgaccacttcaatatcagcagggacgatgacaaagaagaagcttttgcattagcagggtatgtcagcgatcagctatcaataataattaacgcttttgataaagataatgcacgagaaattattgttgcggcagcgggtgagattcagtctttagtacaaagtgattgtatgaaaaaataa

SEQ ID NO: 437947 - DNA, 636 bp, Serratia marcescens
atgaaagcgagctcaatactgacggtttatgattttatgcgttactgccgtatgccactctggtttcagcgttcaatcagggatatgaaagtcggtgacactttcatccttgggaaatatacgcagcctatttctcacgacagcgattcattttgtgtgccccctcgctattcagcttgtctggatggtagtgagtcttgtttcgttgcggaagcgtggatagaaaaggaacgagggctttatagcttttatgcaacatggactttccctactaagccagaccgtgcattgataatgacatccgggaaattcaaaataaaaaaaggtggtgttattgattttgaagataaagactgttcagtgaaacattttgctcttgtttgtcgttatattgccaagatgttgagcatcatgacttatgaagatcaagagatctatttcaaaaacaagagttcaccattgtttaacggagtatggattgatagtgattgtaatgagcggagacagcgcgtggtggaagtggatggaaaattcaagcgagtatggattaattacaaaaattacatgccaacacatcagctttcggcaattgttgaagctgcctttgctactggcgcacttcagctggatgattaa

SEQ ID NO: 437948 - DNA, 696 bp, Serratia marcescens
atggaactggatcgccaaatgcttaaaaggttgaaccgtcaatccgaagcaagcgttagattaggtcgaagcggttttgaattaattcgctatttggttagaaacggattggggttagatattacaaccgttaataaggcggttctgaccgtatcagaagcccttcataacctcccgtctgcgggcaatgatattactgctggcttaacagtcaaaagggtacgcaatgcagtagttgaattgtctaaaatcgtgccaatggtaaatattaacggtttgaatgacagttttaacgcgtttgagctggaatgtatgaaatcatcgtttttgagatgcatttgtgagcatgttgtcagtctcgatgagcgaatgtggaatcaattcattcagaaaacaatgacgggggaaactgtctcctttggcatcgatacgaaaatgggggaggttgttgatccagaagacttgcggcaagaaatcgattctctgtctcgtgttgagctagttgaaaagaatcttatggattcccgtgagccggaattttatgtcgatgagttgaaaaagggtgctgaccagataggcgagattgacggcttccctatctggtttcatacatcgggatactacttttattgggattcagaatcggagtgtttgcttgaaagctggctaacgttcccggtgtgtccgtatggctga

SEQ ID NO: 437949 - DNA, 531 bp, Serratia marcescens
atgaactttcacttactccatgccatagcctttctggctgtgttgctgttcttcgcctggttgtcctggcggcgcagaacgcggcggcaccgacgcaagatccgccaggctggccgggtattggcgaaactcagcgagataccgcatccagggcagcgcctggcgtatctgcgaaagattgacccgtacacgtttgaggaattgttactcgaagtctttgagcgccgtggcttcaagatccagcgtaataaacgttactccggtgacggcggtattgacggcaaagtttggcacgatggcgagctctacttcatccaggccaagcgttatagcaatcaaatcaacaagcgccatgtagaggactttatcgagctgatcgaggtgtttcagtgcaggggtattttctgccacacggggcgaacgtcgagtggttctaaaagccttgttaacaaccaccctaaaatcttgatgctctccggtagccgattgctggatttcatcgatttagatatccccttttcgcttacttaa

SEQ ID NO: 437950 - DNA, 516 bp, Serratia marcescens
atgccgaggatcgttaagagagttacaccggaattaaaagagaagtggcaaaccttttgtcatgagcgtggtgttagtgaatccgatatgttggggttgttgctcgaaaaggtaacggcgggaatagtgcctaatgaagctaaagggttggaagagccacgctcagataaagtaactatacgtttgtcaccgaaagatattcacagcatgacagaacgggccaaggctgaagggttccccagcagaaccacttggcttactaatttagtgttggcgaccttgagcaaagagccggtattaactgacgccgaagttaatgctttgcggggttccaatcgtgaactggccgctataggtagaaacctgaaccagatagccagagcgttaaatgtagagttccgtgatagcgataagctgaacaaagaattaatagagcggctgcttgaacagatagatggccatcgagacaaggtatctaatcttattgatagaaacatgaatcgttggggaggttaa

SEQ ID NO: 437951 - DNA, 993 bp, Serratia marcescens
atggccgttgaaagcttgtcaaaactccttgagggtaaagtaaagactaaatccaacaaaactacagacctgaaaggtaaggctagtcgcatagctaatcgtgcgtctgaagttatggttaaggtgagtggcaatgcaaaaggcccagctcacgttaaagcccatttagattacatcagccgaaacggaaagctggaacttgaaaatgaacgcggtgaaatcttgaagggaaaggacgacgttaaagccgttcataaggaatggactcaggatcaaggtaagcgacgtgccaatacgcgcgatactactaatgtagtgctatccatgccgaaaggaacggaagctaaggccgtcaaagaatcggctagggcatttgcaaaaaaacaatttggcgaaaactaccagtatgtttttgcacttcatgaagacgttgatcacccgcatgttcatatcagtataaaaaccttgggtttcgatggcaggcgcttacatgtgaaaaaaggcgatcctcaaatatggcgtgaaggttttgctaaagaacttcgcgctaggggagttgaagctgaagcaacaccacgcgctacacgtggcgtagttaaaaaaggtattgatcaggcgattcttcatattcgcaagcgtggattaaccccggaagtcgataaagccaaaatcaaagagatcgtagaagagtttaaagatacgagggccggaaagcctacaaaagcgaaaccgtgggaaaggaaaatacagacaaggcagcaggaagttagaaaagggtggctatcggcggcgcaggaacttaaccagagttcagagccgggcgataaaaagcttgccgctgatgttgtgaattttgttaataccatgcctcctatggctacggaacgacatgaaatggccaaagcagttagtcagaaactagcaagccagcagcccggaaaaaagcaaaattcaactggcagagatagagataacgatcaggaggaacgataa

SEQ ID NO: 437952 - DNA, 1158 bp, Serratia marcescens
atggccagaggtgacgacaaagagaagaaaccattctatgaagaaattgctgatcgtctgatcaaacagcttgaggaaggaaccgcgccatggcaaaaaccatgggaaccgggttcaagtagaatgccgcataacccggttagcggtactcgttacaagggagccaacgccctatggctggctatgcaacagcgtacagatccccgctggatgacgtataagcaagcccaaagcgtgaatgcgcaggttcaaaagggcgaaaaaggtacgctggttcaatactggaagtttaccgacacaatccccaagctcgacgataaagggaaaccggtactggatgataacggtaagaaaaaaatgattaccgtgaaacttgatcgcccaaaagtcttttcagcagtggtatttaacgcggaacagattcaaggcttaccgccattagaagttaaggcaacaaaacccgattgggaacgccatgaacgagccgaaaatatcttgcaggccatgagcgtacctatcaagcatgatcaagctgatggcgcattttaccgcccttctacagattcgatacacctcccggaacgtagccaattccccagcgccgataattactatgccactgcattgcatgaagctggccattcaactggacacaaaagccgtctggatagagatttaaccgggcgatttggttctgagtcctacgcaaaagaagaactgagagctgaaatagcctctttaatgattggcgatgaattgcaaataggccatgaccccggacaacacgccgcttacgttaaaagctgggtgaaggttctaaaggatgatcccaaagaaatactgagggctgcaaaagacgctgaagctattagttcctaccttttgagccatgagaaagaaaaggcgcaggaagcccctcaaaacgcaccagaaagcgatacagaccaaaaagaggggaatgatagcgcattgcctttaaaactcgctgagaagcttgcagagcgttttaacaacgcagaagatcgggctaaattcatggaaaagatacagtccagacttacccacgaaaaaccagatacggaaataaaaataaaggaaactaatacggttgtagtaagcaaaaaaggtctaaaacaagatactgatttagagcgttaa

SEQ ID NO: 437953 - DNA, 153 bp, Serratia marcescens
atgaacaataaaatactggatctgaatataccgggccgtgaaattgagatgagtcgccaagaagctgaagagttaggcgcatttgaagaaagcgccttatctgaagctgatgcaagagaggcgattgatattgaagacgagcgggagggttaa

SEQ ID NO: 437954 - DNA, 2736 bp, Serratia marcescens
atgaatgaaccaaacttagcaactaagaacaccgtccttatcgtcagttttgaggaaaggaatgaagctaaaaaagcggctggcaagttagagaacggcgaaaacgctttaggcttcgatgaggaagcgaaacactggtttgctaaaccgggtgcagacctgagcaagttaagcaaatggctaccagatcagcataaaggtaatccagtgcaggataataatccggctgctgaatttggcgctacgttagctgaagcaggctttgaactggatggcctgccggtgatggatggtaaaaagcaccgagtaagaacggctgacgacaaaaaaggcgaaaagaccggggtttatgcgggctacttagacggcgttccggctgggtggtatcaggatcaccgaatccatgaccagcccgttaaatgggtatcgactggccagcaagttgacgccgaagcccaagcccatttacgtgctattgcggcccaaaaccgcattgatagagagaatgccttacaacgacagtatgcgcacaacgcccggagatctggccaagtatataacgcgatgccggttgctgacggtagccaagaatatttggttaataagggtgtaaaggcattccccggcgttaaggctgataagaaaaaccgggtggttattccactggtcaacgaagaaggcgaagttcgtaccctgcaacgtatcagcgccaatgggttcaagtcgctgaagaagaacggccagaaaaccggtaatttttttgttgttggtggtgaactgaaaaacggcgagccggttctctatgccgaaggttactcaacggcggccagtattagcgaagccaccaatcgcccggtagtaatgaccgttgacgcgggaaacctgcctaaagttgccgacaagcttaaagataaatacccggatagcttacatattgtgcttggcgacgacgaccgcaaaaatgccgttaacaaagggatggccaaagctgaagaagcggccactatcgcaaatggtgttttcaccgtaccggcgtttaccgctgaagaaaaagaacgcggtttaactgactttaacgaccttcaccaatcacgcgggcttgatgccgttcgcgatcaggttgaaggaatcattactgaacatactcataaggctgaaacaatggctgataaagaacatgaggcaataaatacaggcccggtgattactgaaaattttgaaagggaaatggacgctgcccttaatgtgaatcattcctctatagatttagagccgtatcaatctgaagaggatgagtatgcggagtatatggatcagtattacgctgaacaaaacacctcaccagctcctgtggccactgccgaacagaacgccgagccaactcctgtgaccgctgccgaacagaacgccgcgccagctcctgtagccgctaccgaacagaatgatgatgtagaaaacagcatcgagccacatatagaacaggaaaaggcccaaacggctgatgatgatgtaagagcatggttatcatcatcacgtgtttctactgcggatatgttagctgaagacgatgaacgcgagggccgtaaacgcgaagagttcaagcaagtagagcctgacgctgaagagccagtttttaaacgccagccgcaagatcaggattatttcgaagacagctcttataaacctgtagtgccagatagagtggccaagtcttatattgaagttgaaggtaaatattatttccaaaatcgcccggactcactggcctttgtggacaaaggcgcgaagcttcaaaccaaactgagcaatagccaagtagcaggttccatgattgatattgctgaagcacgtggctggactgagatccaagtaaaaggtactgaagattttcggcgtgaagcatggttacaggctacggccagaggactaaccgcccatggctacaagccaaaagaagaggatttagcacggctgaaaaaagtagccggtgagcgcaacattaacgaagttgaagcgcgtgaagttgctgataacgtgaaaacgtcaccttctgccccttccggtacaacgtcaaaaaatcaatccgaagcccctacatccaaaaccggcaccactgagtcaagcagtacgacgcaaggcaaaaatgagggtgttaaagttgaagctgaagaaaaggttaataagctggccggtaagttggtagagcatggcgcggctccttatgaacataagaaagacaacaaagataattactatgtaacgctggaaaacgccgatggtaagcaaagcacaacatggggtgttgatttacaacgtgccatggccgagagtgaagctcaaccgggtgatcatattgagttagaaaaccttggccgcaaagctgttaccgttgaaaaagatgttaaagacgaaacgggcaaagtagtcaaaaaggaaactatcaatacgttccgtaatagctggcaggttaaagctgatgccattcgcgatcaggaacgcccagcgcgagaaatagttaaagaacatcccgatttagtaaacgaaattacagcggttaaactggctgagaaagtatctcaatcaatgaacgctgacgacaaagaacgctttatgagccgcgtccgtgacaaactagcggataaagtggccagtggcgaaaaagggccagaactgaaaatcaaagaggttcaaacggtcgataacccacgggttaaagataccgaactggaacgctga

SEQ ID NO: 437955 - DNA, 1929 bp, Serratia marcescens
atgagccagagttcaaacaaaatattttggtggcttaaaatcctgctgctgattagcttgccgcttatctttttggcggtagcagcttggattggcggggctatattcatggccggtaatggatacgaggccaaagatgctacaccactgacgctataccaatactggtactattacggcgatatacctaaaactaatctatggctgatggggtctatggttggcggtttggttattactgcgttgccttgcttgctgccgcttctaccgaagaaaaccccattgcatggtaacgctcgctgggctaacagtcgtgaaatccgcgaggctggcttattcagtgatgatggtattatcgtcggcgtaaaaaaaggctttatgggccttttcatgcagtaccttgtattttccggttctcaacacgtgttgatggccgcgccaactcgttcaggcaagggggttagtatcgtagtccctaaccttctttcatggcgtgatagcgttgtagttctggatataaaacaggaaaactgggatataacttccggctttcgctctcgtcatggccaagactgttttttgttaaatcttgcgccaagggattaccgttcgcaccgctggaatccactcttttatatttctgacgatcccaattttcgcattaacgacattcagaaaattggccagatgttgtttcccaagattgagaatgaagcgccaatttggcaatcatcggcccgttctctttggttaggtatggtgctttacctcatcgagacggaagagctgccggtaacaatgggtgaagcccttcgccagttaaccatgggtgatgaacgtctggctgaaattgtcgaagccagacaagaatctgaaacccctttatcagatgaatgttacttagctctaaaagaatatttagacacgccagataaaacacgtggttctgtccgtaaaggttttacttcggcgttagaacttttctataacccggtgatcgatgccgtaaccagcggtaatgactttgatttgcgtgaactgcgtaagcgccgcatgtctatctatgttggcattacaccagacgatttagaacgtttggccccgctgattaacttgtttttccagcaagtcatagacctgaacacgcgggagctgccggagcaaaatcccgaccttaaatatcaggtattgatgttaatggatgagttcacggccatgggcaaagttaacattctgtcaaaaggcattagctatgttgcgggttatggcttgcgaatgctgccaataattcaaagccccgcgcagttacgagaaacctatggccatgatgcagcggaaacatttattgataaccatgcgttacaaatagtttttgcgccaaagaatcttaaaatcgccaaagaagtttcagagtctcttggtactaaaacagtgaaagccagatcccgcagccgttctactattgggagggcaagcggttcagaaaataccagcgaaactggccgcgcgctgttaatgcctcaagaacttaaacagatggggaaaagcaaagaaattattctgttagaggattgccctccgatccaatgctctaaaattacttggtataaagaccccacctttgaagccagaggtaatggccgcgatggcgttaaattcccttccccggaagtgacaattattgacccggccaacaggccaaaaggtgaagtttcctttatgagcaaccgggtagaacaggctgaagagacaaaaaccgaagttgtggaacgtgctgttaccgttgctgatattgaaaatatcgacaagctgaatcttgatgattttagttgtgatttttcaaaggttgaaatccctaaaggggatattaccgatgatgcgatggacgacatagttaatcaatttttctctggcttagaagctgcttaa

SEQ ID NO: 437956 - DNA, 1038 bp, Serratia marcescens
atgaccttaaagcagcctactaatgctaaaggttcatcacttttggagtaccttcgggtactccagccctttttaaacgaagacggggttactgaagtggtgattaataaacccggagaggtaattactgaaggccggaaagggtggcagtttcataacgtaccaaagttagattttgctgcttgcgctgacatatcaaaacttacggccacttattctggccagtcatttgacgagcgtaagccgattgtttccgcaacattaccctacggcgaacgtatccagattgtgcggccaccggcgacactgagcgaccgttacagcctgactatccgtaaaccctctgacgtaatcagaacgttggatgattacgagcgtgacggtgcattcgatcacatcgtaacggacgctgtagggctgcgtgactttgagcgagaacttattgagctgaagaacgccagacgctttaaagagttcctcacgctggcgattaaacatcgccagaatattatcgtttccggcgctactggttcaggtaaaacaacgttcatgcgttcattgcttcagcttgtacccgatgatgaaagactgatcaccatcgagaacgtagacgagctgaagctataccaaacacataaaaacgttgtgcctctgttttacagcgccggtggccaaggtattgctgatgtgacccagcagcaccttttagaaagttctcttcgcatgaaaccagatcgtgtgtttgttgccgagttgatacgtggcgatgaggctttctattacctgcgtaacgttaacagtggccatccgggatctataacgtctatgcacggcactaacccacgaatggccatagaacagcttgttttgttcattaaggaaagccaaagcggcggaacaatgtcacgtgaagatattaaacagcttctgtttagttgcatcgacataattgttcaattccaaaaccatcaaggccgtcgatatatttcggagatctattatgagccagagttcaaacaaaatattttggtggcttaa

SEQ ID NO: 437957 - DNA, 1188 bp, Serratia marcescens
atggctaaagaccgagacgacttagatacagatatcgaacaggaagacgctgatcgtggtatgccttcgatttccaaaaatcggaaaacgggtaaagcttccggtatcggacaaaaaatcgtagtaggcattattgggatcatcgttattctggccttaatagcggtaaatggcggctttaaaggtagtgaagaagataaaccgcctaagcttgctggtaacaccggtgtagccaaccggcttggcccaccgccaacgttgccgccaccgccagccccgccgaaaactgaaacgccaaaagaagaccggatgttgaatacagggcaaatagcaccgccgccgccgtcttcagcttcgggaactggtggcaatgggaaacacgagcagacaccagatgaacgtaagcgggcaagctcaattctggcgtttggcaatatttctaaaccccagcaacccggacagaaagcaggtaatggccagcccgtacaattggccggagaggtacaggagggtaatagctcactctctgaaactgaccgcgctgatagcctatctaaccggcttaaaggtacggaggttaacggtagcagggcaagcctgttagtagatagaagttattttattacgcaaggcacattccttaattgtgcgttggaaacagcaattagtagtgatgttcccggaatgacagcctgccgtttaactgatgatgtctacagtacagacaagaaagttttgctgctggaaaagggttcgaaaattgttggccagtatcaaggtggaataaagagaggacaagcgcggattttcgttctctggactcgtatagaaacgcctaaaggggtgttggttaaactggattcgccgggtactgatgcccttggccgctctggtcttgatggcttcgttgatactcacttttgggagcggttcggtagcgccattctgttaactacggttaacggcgttgttacttacgcggccaatagtgccaacaatggcagcaatggcaaccaatacaactttggtgataccgcgcaaacggcgcgagattcagcgagcattgcgctggaaaactcgatcaacataccgccaacgttaaccaaaaatcagggtgacaatatttctatctttgtagctcgcgatctcgacttcaggggggtgtatgaccttaaagcagcctactaa

SEQ ID NO: 437958 - DNA, 822 bp, Serratia marcescens
atgctttcgcttaataaaaccaccttatcggttcttctcgttctcggcattttttcgtctacggcgtttgcgcttgaagttccaagagggggcgcttatgacaaacgagtcaagttcatttcatacaaccatgagcaagttgttaagttgattggccattatggctattcaacagatattcaatttgcccccggcgagaatgtcaccaatatagcaatgggcgacccggacgcttgggaagttgcgccagtagaaaaccatattttcattaagccaacaggcgaacaagccaccacaaacatgacggttttgactgaccggcgcgtatacacgtttgatttatccgctactggcaataaaaccggcgatatgtattttcaggtgaatttccgttatccgcaggacgaagcggcgcggcgtgtagctgaagaagatgctcgcagactgaaagaacggatgaatgaaaaagcgcctaacgcttggacaaactggaactattgggtattcggttctcgtgaagtttccccttggcgtgcttatgatgatggccgttttacctacttcaaattttccggtaatacctcgatccccgctatctacattaaacatgctgatggctctgaaacacttctgaacccaacgatggattccgatcacccggataccatgattgttgaaaaagtggctcctaggtttgttttacgcaacggtaaatatattgccaacgtctacaacgaatctttcaaccctcatggattaatcaataccaacggtacaacgtcacccggcgttaagcgtgtaattaagggaggggcgcagtaa

SEQ ID NO: 437959 - DNA, 759 bp, Serratia marcescens
atggccaataaaaaagcagcccctgccaaagagaaaaaagtaaccgacaaggattactttgatgaggctaaaagctgggatgaatctgagattgtcagggaaaagaaatcagcccgtagggcttggtcggcattttgggctatgaccggcgttgtaattgttcaggcgattgcaatttctacaatgatgcctctgaaaacaatcgaaaactcaattgtgcgtgttaatgacaccaccggcgaaactgaggtgatcagcaacttaaaaaacatggatgaagctaccgaacaggtaatgagccgttactggttggctaaatatattaatcaccgcgaaggttatcattggaatacccgcgaagatgatcgccttcaggttggcatgttgtcagatggagccattcagcaacaatatgctgattataccaatcccaaagttaaccctaacgcgcccattagaatttatggtgaaaccactgaagttgatattaaggtcaatcctgccattacctacctgaacggtaaaggtggagtgaagccagaaaggggcgagaaggatcagttcggtgagacggtatataccgcgttagtgcgctacacggccacggtgaaaaaagagggtgaaacgccagcaacaacccattgggctgcgactatttccttcgtctaccgtaaagagccaatcaaggtagatgatcgcctgataaacccggttggttttcaggttattagctaccgcaaagatcaggaagggggttaa

SEQ ID NO: 437960 - DNA, 219 bp, Serratia marcescens
atgaagaaatctctagcagtaatcgcactcactttcacccttggggcttgcactctcacgccaccgccaccggctgaagctgtagacgatgggcgcggcatggttccgattaacccggcaatggttacgcaagaacagattaatgctgtcagctcgaagtacaaggaagtgaataaaaaacaggttcagcaactgaaggagtttgcgcatggccaataa

SEQ ID NO: 437961 - DNA, 1014 bp, Serratia marcescens
atgggtacgggaacaaacttatttgtccgtatttttgccaatgttgactcggcgttatcaacctacattaccgatacagtcagaaatgtaatcgggtatgcctcaccgctattcaccagcatgatgatcgtctggattgccatgtggggcattctgatgatgttcgccaaagttgatgagccattacgtgatggcgtctttcgcattattcgtattggtgggattgtcgcgctgggcttaacggtcggtacttatatggatgtggtcgttaatgtcctacaaaaaggcccggaacacatttcagcggtggtttccggtacaacaggaacaacagccgacacactggatgcgctctttaccaaaatattcaatgtggccaaagctgcatgggataagggcggggtcatgaacggtaactttggtttgtacctgatagccctgattgtgctggttgtcgggtgtggattgacgttgtttgtggcgttcttggtcttgttgtcaaaattcatgataaccatcctgctaggaattgggccgttgtttatcattgctctgctttttaacaccacgcagcgtttctttgaggcttggttagcgatggtatgcaactttggcattctgctgattctttcggcatcggtaggttcactgatgatctctctaggtgatacctacatttcaaaaatggcaccaacagaaagcgcagcggccaatatggctaacctaggtgatgcggcgatgctatgccttgtatttgcgctttgcattttagttgttaggcaagttccttctatcgcttcagcattaggtggcggtgtggctatggccacgcaaggcgcgtttggctctgccatgaatgcgttacggccaacagcaatgaagcgcggtatgcagaacgttaaccgagaagttaagacgactcaacgcgccctgacttcccccgttcgcggtggtcaagcggcttatgcctcctatcaaaaacgctttggtggtaattcagtcgcacaaggatag

SEQ ID NO: 437962 - DNA, 249 bp, Serratia marcescens
atgtttttttcgtgcgcacgaaaaataagcgcggtgtgtctggtaagccttgcgcttaccggatgcttcgacaaagaagaaacgcattccgttgaatggttctctaaccacaatgcagaacgggccgaaactgttaagcgttgtagtgataaccccggcgagcttggcaatacgccaaactgtaaaaatgccattgctgcggaacaaaaagcctctagtggctcattgcgccacattaataattggtaa

SEQ ID NO: 437963 - DNA, 645 bp, Serratia marcescens
atgaaactgaaaaaattagcgttagtgctggccattgcaggaagtcttaatgccgttagctatgctggcgttcctgtatctgtggttgccgaccctcaagcatggacagcacaccttgaagatatggcgaaatacattgaacaaatcaaacagcttgaaaaccagtttaagcagcaggttaaacagtatgaatctatgaccagcgcacgtggattagctaacgtaatcaattcccaatatgacactgacgcgcttagtggcatcaataccgacagtattctacgcaatagcggtatcaattcagccagtgattttaagcttcctgaagatgtagctgacctttacgacactgccgctaaaaatgccgccacctatgctggccaagcttcccgttcacttgaccaagcgcaatcgcgctttacagagttatcaggtctggtacgccgtgtaaatacggctagtgatcccaaagaagtaatggacttaaacgcccgtattggggccgaacaagcctttttacaaaatgaagttggtaagttgcaaattctccagcagacagcgcaggcaaatgatgcactgtaccaacaaaaggttaaacagatggccgttcaatcatctggctcactgcgtaatgtgaactggtag

SEQ ID NO: 437964 - DNA, 2451 bp, Serratia marcescens
atgagtaacgcaactgcgacaaaatcacgccaatgggtgaatgaaaactctgttgctgagtttatcccttattctgttcaccttgacgaaaacacaattaaaactaccagcggctattatcttcaggtaattaagattgatggccgcgcccatgaaagtgccgatccagcagatgtaattaactggaaagagcaacttaatggactgctgaaaaatatcgcttctccaaacatatctctttggacaaatattattcgccgtgaagaaaatacatttccgggcggggaatttgaagaaggtagttttgctgaacaactaaataacaaatacaaaaatcatgttggtaaaaataacatgatggtaaacgagctgtaccttacagttctttatcgcccttcaggtattcccggcattaatctccttcagcgttttgaaaaagatgttgaatctattaagcgcatacaggctgaagctattgaagggttacacgaagtggttaacaccgtaaccagtagcctaaaacattatggggcgcgggttttagggtgttatgaccgaaaggggataaaaaactctgaagtattagagtttttatcttacctgataaatcttgagtggataccccgcgctttacctcgcaaggtactctctgaagcgttaccttttgatcgtccattttttggtgaagatgcctttgaagttaggggagtcactgaaagcaccgtgggcgcagtcctgagcattggcgaatatccagaaggcaccgaagcaggcttaatgaatgcgttcttatccgcgccattcccgttgattttgtcgcagtcgttcaattttttaagtaagccggttgcagttgaattattaggcagaacacaacgccgaatgaaaaacgccggggatttgtctaaaacacaaatggaagaaatagacgatgcgcttgatgatttaacttcaggccgccttgtatttggtgaacatcatttagccctaacgattctggctaaagatgcgcggagcctgaagaaaaacctctctgacgccaaagcggagctggtcgattgcaacatgatcgtatcgcgtgaagattgggctatagagtctgctttctggtctatgttacccggaaactttaagtaccgggcaaggcctgcccccattagttcacgtaactttgctgggttttcctcatttcacaactacccaacaggccgcagaaccggcaaccagtgggggccatcggtaacgctacttaaaactacttctggcgctccctattatttcaatttccatagcgagttaagcgccgagaaggcgagaaaactagcgcaactggaagctgaaaagggcgctgatagcattcaggaaacgaaagaggaacaaaaagccctagggaatacgttaattatcgggccttcaggctccggtaaaaccgtaacgcaaggtttcttgatggctcaaagtaagaagtttaaccccactcaaattatcttcgataaagatcgtgggttagaaatctatgtaagagcagaaggcggcgtttatttgccttttaagaatggtgcacgcactggctgtaacccgttccagatggaaccctccgaagatacttatcagcttcttgagcagatagttaaaaaatgtgccggtggttccttcacgaccgttcaggatactgacattagtaataccgttcgcggggttatgcgcctgccgaaacacttacgccggatctctgcctgccttgactttatggacccaacagatccagaaggtgtaggcgctcgtctggccaagtggtgtggcaatggaacattagcttgggtattcgataacgaaacagacgacattgattttagtaataacacgatgtttggttttgacgttacggacttccttgataacgccgagatcagaacgccattaatcatgtatttgttccatcgtatttctcaaattattgatggccgtcgaatgatgattttcatggatgagttctggaaattattgttggatgaatattttgaagactttgcacaaaacggcctgaaaaccatccgtaaattgaacggattaatggtgtttggcactcaatcagctaaagacgttcttaaatccgctattgggtacagcatcattgaacagtgcgcaacgatggtcttcatgcctaaccctaaagctgattgggatgattacgttaaaggcttcaaacttacagaacgtgagtaccagttaatcaaaactgacatggcccccggctctcatcagttccttattaagcatggccataattcagtgatcgccaagctcgaccttgcagggtttagcgatgaactagccgttatctctggaacggctgacaacgtggaactattagaacgcatcatgcaacaagtgggggatgatcctaaagtctggttgccagagttccataaacagcgcgtagctgcctga

SEQ ID NO: 437965 - DNA, 1983 bp, Serratia marcescens
atgaaattaatgattgtggaatctccggggaaagttaagaaaatacgcgagatccttggcgatggttggaaagttgccgccagtgttggccatgtcagagatttaccagaaaaagacattggagttgccgcacctgacttcaagccaacgtatgtggccactgagcgcggcaaagaggttttggcaaagcttaaacaggacgttcagcatagtgatgctgttttcctcgcaactgacttagaccgggaaggggaagccattgcatggcatctgaaacaggcgttacggcttgagaacccgcagcgggtaacgttcgctgaaatcacccctcgcgctatcaaagccgctctggcgtcaccaagggcaattaatatccctatggtagcctcacaagaagggcgaagagtccttgatcgccttgttggttacatggtttcgccgcgcttgtcagaaatgagtgggcgacaaggattatccgctggccgagttcaaagccccgccgttcgtattattcttgagcgtgaacgtgcaattcaaaactttaagcccaccgctcattttggcgtaagacttaattttgcgggagattggtttgctgaatgggatgtaaaacctttcttggccgaaggtagcgaatatttcatggatgaaggctttgcaaaaaaaatagccgccatccgggaagttgacgttatttcttatgaagagaaaaacgcatcaaaagcgcctcctgcgccttttatcacttcaacattacagcaggcggcatctaataaattaaagatgaagccaaaagcaacaatgacgaccgcgcaaaaattatatgagcaaggccatataacttatatgcgtaccgataacccaaacctttctgatgatgctctggttgaaatataccaactctgcaaagcaaagggcttacctatggcgtctaaacctcgaacatggaaagcaaaaggtgatgcacaagaagcgcatgaagctatacgaccatcacattttgacgttgaagaagcagggagtacgccagaagaaaaagctctctatcgcctgatatgggatcgcgctgttgcctgtcaattagaatcagctcgctacgccgttcgcgtggcccgcttccgggctactgacagcagcggcgaaaaaccagttgagtttgaggctgagggccgaacgctgacgtatgccggatggacaacgttgtttaaagacgataccgaagccgatgatggcaaaaaggaagagaaacctaagaacccgatcccttctttgcaacgtggccagcaccttaccgctgaaagtgggaaggtattaagtaagacaacccgcgcccccagccgctttactgaggcgtcacttatcgcagaattggaaaggttaggcattgggcgaccaagtacctacgcggcgatcatggaaaacatcatgcgccgtggttacgtcaaatcggatagcgcaaacaaatatcttttgcctactgaaaccggtgcattagttattgatgctttggttaaaggcggctttagctttatcgagtacgactttacacgcgcgatggagggcgagctggataaagtcgcccatggccagacatcttacaaaaacgttgttggctctgtttatgaacgtctggaatcagaacttagccacctgaaaattgacgttgcacctcaatacccctgtccaaattgcggcaaggctctttttcgcaaaaaaggggctaccggcttcttttggggctgctccggttatccagattgctctaccacgttaccagatacagcagggaaaccggggaaaccaaagcccaaaccagaagcttcaggctttaaatgtcctgactgtggaaagcctcttatccggcgtaaaaaaccagccaccggcggcaaaaaagggtatgactttttcggctgttctggctaccccggttgctcatcaaaatttgatgctgtgaacgggaagccaaaattcgagaaaaagtaa

SEQ ID NO: 437966 - DNA, 747 bp, Serratia marcescens
atggaactcttttcaatattggcaacctgcgccgctttaacttttggtacaggtagcccagcagaacaggcttaccctgttagtgagcaagaatgtaaatcagcagcggcgatgtatcgtgagcagttgcaaaaagtacagctcaccgatcaggacagggatgctattgcacgtgttgccatagccgaagcggccaatcaaggtgattcgggtttagctggcgttgtgtatacgattattaaccggcgtcttagcggtcagtttggccagactgtgacggacgtagtaaacagccctaagcaatttgagccagttaccaaagttggtggtgactggaaaaagttaccttccgtaaccgtttcacaatatacgcaagtacagaccatcatcaatttggcgttagaaggtcacttgcctgatattaccaatggtgggttatttttccagaaccccgcaattgtagctgacagagaaaaagcaggaaaagtatctaaaggtttaactaatttcggtggttccgcaccatcagcgatcattaaagatcatgccttctacgccagtattaataaaggtggcccgtctaactcttccccggttcaattaactgcttccactgtgcctgagcctaaaaaatgggatgtatacggaactgcaaagttccaaaaaaatagtaacgccgaatggaatgtattttctaaaaatacgccatccaaaagcgtttatcaaaatgaaggggtgcagccatga

SEQ ID NO: 437967 - DNA, 309 bp, Serratia marcescens; identical to SEQ ID NO: 40473

SEQ ID NO: 437968 - DNA, 315 bp, Serratia marcescens
atgaaccagacacaagtattaagaccggcaacgccgggtgacgttctgctttctcagttcttggaaccgaacagaattagccaaacggcgttggccacctataccggatggacgagaaagcacgttaatcagctctgtcatggaaaagtggccataacaatagattccgcgctcatccttgcaaaagtctttggtaacaatcctgatttttggctggatttgcagaagaaagtcgatttatgggatgcactgcattcagaagatcgccgcagcagaatagataaggcgcgcccttttcaattactggcggcctaa

SEQ ID NO: 437969 - DNA, 1353 bp, Serratia marcescens
gtggctacatcacaactggcgctttttaatccagccgacgaagcggagacttatcacaattccgggcggcatggtttcttttctgtactggctcagtggccaacgggtaaacgccaatcttcttacccattaagtgagatggccaccgttcttagcatggtcgatacctcacgcgatacatggataacccaagctgaatttatgcgtcctaaccggcgtgtcgtaaacctcttacgtttggggttgctttttgtcgatatagatacttacaagatgagttgggcgcagggtagaacacctgaagctttggccgctgcaatcaactatttctgtcaacaagaaggcataccagaaccctcctttatggtctattccgggcgtggtattcaggctaaatggctacttgaaggaaccttgccacgtgccgcgctaccgcgctggaatgcttgccaaaagcatttagtatctaaactttcctcgctaggggctgatcccgcagctaaagacgccagccgggttttacggttggttaatacggttaacactaagagcggcaatatttgccgtgtagtaagcattctagaacgtgatggcgcaccaatccgttataacttcgagtaccttgctgaaatgatattgccggtggctcgctgggatattgaaaagcaacgccagacaaaagcggaacagaaacttcaattgctgcccggaggccgacaaagcaacctcagaggttttagtggtcgtcagcttgcatgggataggcttgaagatttgcgcaagctggacgagctgcgcggcgggttagcggaaggggaaaggatgcgtcatttattttggcgtattaactttttgctgttgtccggggcgacaaattcaacgcagatgtatcacgaagcggccgcgctggccacggagatctcccctgcatggtcttaccgttcacaagagttaatgacgctgtacagcaaagcaaagcagtatgaagccggtgagaaggtatcattcgggggaaaggagttttcaccactctacacaccaaaaaatgacaccctaatcaacctgtttcaaatttcagatgaagagcaacgccagctaaaaactatcatttctaaaagtgaagcgttggagcgtagacgcgcacgagacagaaagcgtgacgaggaacgccgcagagctgccggagccgttgagcgtgatgtttacgaagctaattcactgactaaacagaaaccgtgggaagcgttaggaatgagtcgcgccaaatggtacagattgggcaaaccatcagccagtgagacaactccctcccctattacttgtgatggtctaatggccgctaaatcagcctag

SEQ ID NO: 437970 - DNA, 195 bp, Serratia marcescens
atgtggataacgcaactgattaccttgggcctcaagtttatccagtgcagcgaacgctttcccttgcattggactatcaagatccaaaatttcctgttgtgcttccgggtgaaaaatcaattcaaacacaaagcggcctcttttccgtataccattgtttatgaatatgccacccaacacttagcaccatcgtaa

SEQ ID NO: 437971 - DNA, 285 bp, Serratia marcescens
atgaaagttaaaggtatcccttatgctgaagtgaaggctaaagccttacagaaccctgatgtaatggctgcttatcttgcagagaagaaagaggaagagttacaggaacttttggctgatctgcgccgcagagctggtatcaatagtacccaagtcgctgaacgtatggggattactcagccagccgtaagtaaattagaaaaaaacgccagtaaagccagtgtcacaacacttgaacgatacgcggcggcctgtggtgccagtatcaagattgtcatgggctaa

SEQ ID NO: 437972 - DNA, 222 bp, Serratia marcescens
atgaaaaacagcaattttgaagaagctaacgagattaacaacgccatcaatgaaatgattagtgaacgtcaatctatcgacgcaggtcggaacgacttcctacaagaaacttggcttcttgttcgcttagggcatcagtataaagaggctggaaaagattggtatcgctgggctaaagctacggctatccgtctttgggagagtggccacatcgttaaatga

SEQ ID NO: 437973 - DNA, 150 bp, Serratia marcescens; identical to SEQ ID NO: 40467

SEQ ID NO: 437974 - DNA, 753 bp, Serratia marcescens
atgaatatcataacagtgacgaatcaaaagggcggggtaggtaaatctacaatcgccgtacatcttgctatggctcttcaggaacgaggcgacagagtgctttttgttgaacttgatccgcagggtaacgccagtaaaactttagaaaaggctggaggtgtggcggcacttcaggcaagccaactttttgaagaacaacagttaactattacgccaaatgaaggcattactttaatcaatgctgatgcaaagatggccgatatagaacgcgccccgttaacggttatgtcaacctttaaagaccaccttaccgcgctggcgtctcagtttgatcattgtgttattgatacccctcctacccttggtttgcgtatgtcagcggcgcttatcgttgcaaatcatgtgttgtcgccaatagaactggaagaatattccattgatggtattacaaaaatgctgcaaaccatttttggtgttaagtcgaaatggaatcctgatctgaacttcctaggcatgttacctaatcgctttaactcccgttctgaagaccagaaaaaaacattaatgaatctggtagagaactacgctcatctgttaattagagcgcggatcggcattcgttcatcaattccagaagccctttccgaaggtattccggtatggcagttaaagaaaacatctgcgcgtgaggcagggaaagaatttcaggaagcttttaagatcatttttgaaaaaatgggggttgccaaatga

SEQ ID NO: 437975 - DNA, 1125 bp, Serratia marcescens
atgagcgccaaaaagggattggatttaagcgggctggataacttttcagctttgatgggaggcgacccggctcctactcaatcagtggcttcaacagacgtaccagaaggtttcgcaggaaaccttatccgtgtgcctctgaaaaaaattcataaggatgcagataacgccagaaagactatcgacccgcaggaactccgtgagctggccgattcaatgaagtctgtaaatccggcaactggaaaaccacgtggtaacaaaaacccggtaagcctgaagcctcatccagatataccgggggaatatattcttaatgccggtgagcgccgttgtgctgctgctgaactcgccgagttacctgatgttctggcgttcattgatgaggacgccgacgaatttgataatgcagtcgataacattcagcgcgtagctctttcaccaattgaaaccgctacgtttatccagcgccggattgagaaaggcgataaaaaaagcgccatcgcggcccggttgggtaagccagcatcgtttgtatcagatcatattattttctttgatatggctgattgtatccgcgacatgtacgacagtggccgtgttgtctctatgcaggccatggctctgttacatcgcgcctataaaaaacacgctgaagaagtagaggctttttgcgccgaagcacaagacgagctaaccactgctgatgtgcgggctttttgtgattcactcaaagagccggaatctaaagccgtggatacgtcaggtgacaatgaagaaggccaggagctaccgagcgatgccaacgcatggatcggagggagtgccgatagcgacgagctggagaagggcgaagagcaacaacctttagttattgacggcgaaccaatcagcggtggcccatcttctgatttggaagatgaagccagtaaaatcattgccgcagatgaggcaagcgacaaaattaaaaaggcgattgtccagattcaatatgatgaacgcccagcgcgattactcacgaaccgccgagcttcttatgggttcggttggattaaatacgatgatgatggcagtgaagacgagattgatctaaaggacgttagcgttgttgccattgttgaaggttga

SEQ ID NO: 437976 - DNA, 180 bp, Serratia marcescens
atgaacaatgataaagctaaacaagccaacactggacacagttttactttagcaaaagctaaaactggaatgcagatcaacccggagctattaaagcagtttgaggctatatcagcggacgccggtaaagcgatactagagaattgcactactcgtattgaattgaagcaacaaccttaa

SEQ ID NO: 437977 - DNA, 513 bp, Serratia marcescens
atgagcccgccagaagaaattatgcaaacgctagtccatgaaatggcccatctatggcaataccattttggtaaacccggacgccgtggataccacaataaagagtgggctgacaaaatggaggctataggtttaatgccatcctcaacagggaaacccggcggggccagaacaggtgatagcatggctgactatgccattgaaggtggccagttcatggatgaatacaacaagcttatgcaggatgattttcgtatttcatggatggatagatttccagcaagggatcgccttcttgaagccattgcatctggcaatgctgaccagttcgccggtgacttagaagccatggggattgaagttggtgaagatggcgagttgacgataaagaacgagaataaatcaaacaggattaaatacacttgctctatgtgcgaaacaaatatttggggaaagcctgacctgaatgtgatgtgtggagactgtaacgtagcctttgaagtcgctaactga

SEQ ID NO: 437978 - DNA, 621 bp, Serratia marcescens
  misc_feature (64)..(77): n is a, c, g, or t
atgtacaaccggaactcgctggcgccaccgcatctcgagctgattgatgagcgatttgaaactnnnnnnnnnnnnnngtcccgtggcgctgtgtttcatgtcgtaaaacggagacaacatccattgataaatttttcttttttccagaaacaacgtactttgtgctttcatgccattttccaaagggagcgattttccatcgtaagcaataacctgcttttcgggtttcactattaccttgtaataagggatagcgtcaccttgcagatttctgggggccccttgataagtgagcatttcctgcggcgaagcaggtgttttagatacagttaccaccgtggcagagaactgcccaaacttctcggcaggaaaagcctcatagcgaacattaaccttgtcgccaacattgatatagggaacggcgtcattgggcacccacatcaccaggtagtaattttttatatttttggggatgatttgaagaaggctatcgccaatatttaccatttgtccgacagtcacgctcatagagtctaccgaaccatcagacagtgcacgaacaataatctctccgccggcatctgtattaaccaactctttttgcaactcataacgctgtaa

SEQ ID NO: 437979 - DNA, 444 bp, Serratia marcescens
atgacgttgtatatacgggaaaactcaggtggacgtgaagaatggactgcctatgaacaactgggtttcgctgtgagttgtatgctacataaccgcaactacagcctttatcctgttctcagcattcaatattggactgagtttgccatacaacacaaacagataaaatttctcttcgacacacgcggccaacctctggcttatgtcacttgggcatatttgggtgaagatactgaggcacgactgcttcatgagtcagaattccgactgcatccctcggaatggaatgaggctgataggatctggatcctcgacttctgctgcaagcccggctttagtcataaagttattgagcgtttcattgaaatcaggccatggggagaagggccggtgcgttggctgaacagaagaaagaaagtgatgactttatcaccgaaattttga

SEQ ID NO: 437980 - DNA, 1569 bp, Serratia marcescens
atgagtcaatcactttcacttgcggacttgaaggcaaacctggtgccgtttactacacatcaggtcacttcttctcttatctggtgcgctgcagatgtcgatgatgttcaggctctacagaaatcgtgcagttacgttgtgtcgcccagtgcacccggcgtttctaaagtcttccaggctgaacgctatggtggcagtggtattcagctcaatggcggtggagcccgttgcggttttgatgggcgttatcaagttaaaggtattggcgctaatcctctggtgggggaaggatcagactggcatcacaccaatggggcactcggagtcaatcaagcgatttatgaggctctgtggggggaaattttgtcccaaactttgccatatggtgcagtacgtacccgtgcagttttgctcacagatgagtacatcgatctcgacttcgagcgcgccagagggcgctcgcgtcgtgcattactggttcgcgagccagtggttcgcccggcacattttgaacgggcaccttacttccggccgcaggccgcatatgcagccaaactcatgcatgatgcgcaacgcgtcaagtcggtgatcccgctactgcctgccagtttgccctccccgcaaatggggttcagcaaagaagcggctgacgatccacggcactattgtttggaggggctgtgtgagttggccaggcgtcaggcccaacagatggcattttgccgtacacgcttcctgatgttgacaacgtcaccctccaatatcgcaatggatggcagagttttagatttcaatggattgacctgcttgttccccagcgatcatcactatagttttgaataccagcttaaacttacacatttgatgagagaaccggcgattcttctacagggactatcggatttgtgcttgtatctcggcaaatacctgtttgatcacgctttcacggaatttgcgcagaagcgggttgagaactgcttttggctggctttccaggatgcgtgctgtcgcgggtatacagctttactgggtatacctgttgataggctttcgctgacagagacgcctaaggtgttacagcaactgacaaacaacttcatacagttgataagcaaccgcagcagggcgctgtactttgcaccagacgcggtgacggatgaatccccattggagcgattggtcatgacgctgcaccgttgcagtcagggacaaatggtccctggttgcgatgatttattgcgtgatgctcattttgctcaaacattacgtgctttaacggaagctaatcagtggctgcttgaaacatgtcatatccagaggtttgatgccgcctttctcctgaacggtatggaatatcaagcgcgtttaaggcttaagccccgttcgtgtttagacaaggtgcggatgcttaaagagatcaccgaactgatggaaacgtatggtgatgacgaccagctattacggcaagcattatccgcaatggaagcgaagacactagcattcgctaaagaagcattcggttatcaaccgccatcatgtcacgttgccagaaaggatcagaaagcatga

SEQ ID NO: 437981 - DNA, 4008 bp, Serratia marcescens
atggaacttttcaataccaaataccttcctttgatggatgctcagcaaggaatatggtatgcctctcaagcaagtctttcctcaaaactctatgctacaggacaagtcttacacctctgtggtgagatagatcacggtaaattacaagaagccatcgaacaagctttgcttgaatttgaagtgcttaattatagtttcatcaatgtgaataatgtgccatccctcgttcctcagcatctcagcccaccagtcatattgtgtgatctccgtattcaaagcgagcctgaggcctttgcatgggagtcaatgaagcaaataatcaacgaagagctggggccagagcaattacattgtcatgaacatagactatatatcttaaatgaaagcgaggttctctggttttcccgcatacaccacatcgcctttgatgcttatgtttacgcgttgttgcatcgtcgagcaggtgaacattatcgggctttgatgcatgatcaggccgtggcatcgtgttcttttatcaaactggatactttgagtgcagatgatacatcttacaggttgagcccacaatatgaggtcgaccatcaatactggatgcaatgctgcacacaaatgcctgcgcccaccttccttggggcacccgctcaagaaatggcttctaatactctagaagttgaaacatccatcgatgctggtttgtcaatagcattagcttctttttaccaaagtagtgaattcggcttgtccgatatactgctcgccgttttcgtcagttatttttcccgttgcttggcaggtgagcgtaatctgttattcggcttaccttgcatggggcgactggatgcctatggatcacaggcggcagtcacacgcagcaatatcctcccattgttggtggatttgccacctgatgccagctttcgggatgtttgtgccgcggttgctcgcagtcgacgtgaattactcgcacatcaacgctatcgcggtgaatggatcggtagagcgattggccgaatctctgatgctcttccactttacggcatcgaacttaacattttaccgccttctattccgctagatttcgcgggattgcaaacgtcagtcaaacatgtagcaaccggccccgtacgcgatctcaatatccacttggaattagggacggacttacggccacgtagcctgcgtttaatagctaatgcggcaaggtacagccatgccgagttgcgactgcatacgcatagaatgaagcactggatagcacaattaattgaggctcctacctcagattttcagaaacttcctttggcgtcaccagctgaattgggctctatcactcagtggaacaataccacccatgatttgcctgcacgtaatattctcgatttgttcgccaaccaggttgaaaattcaccacaacagctcgcggtgatcgatgaaaatgaggagctaacttatggtgaactggagttacgttctcgtcagtttgcccaggtgcttgttcatcatttgcagggtgcgcggggcaaagtgatcggggttgcccttgaacgtagcgtagcattagaagtggtcctgctggctatattgcgtgccggggcagttattttgcctctgtcgcttgaacttcccgaactgcggctgcaaaaaatgttaaagcaagcggatgctgctttggtgatatccgaccaaatcggccaccatcggcttccagcagattatccactgcttgacattgcatcgttaaatgagttggcaaattggcatggggatgtccttttatcaatgccgttcgagaaaggagtggataaacccgcttatattctttttacctcgggttccagcggtgaacctaaaggggttatggttggtcatttggccttagctaaccgcttgcagtggatgcaggctgagtacgcattagggccaacggatcgcgtattgcagaaaacgccggcgactttcgatgtctcaatgtgggagttcttttggcctatgatctgtggtgctactttggttatggcacggcccggtgggcacacagaaccggcctatctgatgaactgcatcgcccaacaggctatcaccactcttcattttgttccgtcaatgctggcattatttcttgacgcggtggagcgccgcccggagcagttgccactacgcagggtatttgccagtggagaagccctttcgccagagctggcacagcgttaccatcgattgatgaacgcgccattgcataatctctatggtccgactgaagcggccattgatgttacttatcatgcattaaattgcgccagcgagaagcgtagcatcccaattggtcggcctatttggaatacgcgtatccatatactcgatacgtatggccaaaacacacctatcggaattgccggtgaattacatattgaaggaatttgccttgcgtatggttatgtcggccaaccagcgttaaccgaggagcgttttatcattaatgctgatggtagacgtctttatcgaacgggcgatcttgctcgttggcgcctggatggtgaggtagactacttggggcgtttggatcagcagataaaaatacatggtcagcgtattgaactggaagagattgatgcgattctctgccagcatccgcaagttctgcatgcctgcacccatatgcatgaagaacgcattatcgcctatattgtggcaaatgggacagacgttgatgaaaaagctttgctggcactttgccgcgaaaatctccccgtctatatgcaaccgcaacatctgcactttcttactgaactgccgttgaatcgaaacgggaagctggataggaaaatgctaccagttcccccggtgccagcccttgagaacggcacaggcagtgttccctccagccttatcgaacaacgcgtgtgtgagtactatgctgacgcactgcagcttcccactgtaccacccgatgcaaatttcttcgcgttaggggggaattcactgaacgctgttgatgtcgcggccagaataaacgccggtctgggctggaacattaccattgccagtatttttgctcacccatctccccgggaattggctgagcaaggacaagacgatgcgccgaatatgctcgcccccaccttgttgttgcgacctgacccctacggaaaagggggcacattaccaacactgttctgtatacacccggctggcggtatcgcctggtgctacagcggtcttgctcgctttctcaaaacaccgtgtgaaatcgtcggattgcaagcacaagggttgatgccgggctgtcatattactgagtcaatgaatatattagctgaagaatatgctaatcgcatacgggctcaccaacctgaggggccttattggcttattgggtggtcagtcggtgggatgattgctcatagcgtggccgcacgccttgaacatcaggggcataaggtcgagttattggcaatgatggatgcttatcccagtgacctgtggcgtcgtttcgcttttgaaacgctgagtgccaaggaagaagaaagcatggcgctggcggctttgctctttattgctggcatagcattgcctttcgaacgtggtctgccctcattaattgtacctaaaggcgaaatactcgaacgtgcacagacgatagagttgctgcgcaagcacggtaatgccttggccagcttggatgatgttacgctcgaccggcttatcgatgtcgttatcaacagccgacgcttggtcggtggctcttcacatgatatttatcacggtgacgtgcttttctttacggcggcggcgccaagagccgaagattggttggatcgcgaagcctggcgtccttacgtgaatggacacattcaaaacatagacatcgaatgtgaccatcctgccatggccagatcggaagcgctccatcaaatcgccttgcacctggatagtttttttgcacgcttggataaacgctctcttgcctcagagcgtgaaataatagcggagcacattgccaaatga

SEQ ID NO: 437982 - DNA, 1143 bp, Serratia marcescens
atggatgttaccttaactgcggctgttattgttaaagatgaggagcgctgtattgcacgctgcattaatagcatactgactatttttgacgaaattataatcatcgatacaggctccactgatgataccttgagcatactaaaaagttatcaatcgaaaaaaataaaaatattcgaatcgttatggaatgatgatttttcttcagcacggaatttcgcaataaacaaatgtactgggcagtatattctcttcattgatgctgatgaatacatatcatcaacaaaaaattgcatcttgactgaagacaagaaagcagaatttgatgatgagtttgtttattgccctgaaataaaagggcatgatggtaattcgtcaaaaaccgttaggcgttttttcgccaacaatggaaatttttattttcatggctatgtacatgaagaactcagacgaaaagatggaaatgaaatcaaggatatccccatcaatattgtgatcaatcatgatggttataaagacgacatcataaaagaaaaagataaaatcaatagaaaccggacgttaaacattaaaaatataaaaaacgagccccattatttgcggtgggtgtttttttattttcgtgattcctttgaaattttaaacccaaatgatatctatcaatcccttttgcgctcactaaaattacgccaagattctgatataaatataaataatttgaaatcagatcgttatacatttccgatattagaccttatggccagagcaaagctaaaatcaatggatagtgagattgacttctatttggccactagccttatgcgggagattatcccagacaatagcaacgccacttattacgaactgatttatgatatatttaaatggaaaacaaaagccaagaaaaatatcgataaaataataaagctaaagagtgaaaaaaatcaaaaccacagtgagatgatacactcagaaggactgcatattgatgctgctctttcattttatttatatgaaaccggattgatatcgcaagctagaaaactattacttagtgtagagagtaatggattttcatcggagatgacaaagttatacttaaagaacgcagatttaattagccgggagaaaaataatgaatcctga

SEQ ID NO: 437983 - DNA, 690 bp, Serratia marcescens
atgctgacgtttactgaagcacaaaaccaattcatcagcctctttgaccaaacggcccgctaccatcaccggtacaaggtcttttctgactttgttcagtgcggcgcgatagcaatacacaaccgcttttgtccggacgacgcgctggagaagcagtacatgtcgctcatcaaagggtatgaacgtgaggatgtcgaacgcctggcgcacttacttgctctggtgcgaatagcactggccgctaaaccttgtgattttttgggcatggctttcatgagtctggagcttggtgataaacatcgtgggcagttttttacaccctggagtgtggcatccatgatggccaaactgcaattcaccggactggagcaacggttgttgactcaaccgttcgtgacgatcagtgagcctgcgtgtggtgccggcgccatgatgatcgccgctgcggccaagattcaggcgttggggtatatgccttcacagcatatgtgggtttcctgcgttgatatcgatgtggtagcgatgtcgatggcatatattcagttgtcttcgcttggcattcctggagaggttgtgttggggaatgcactggcagatgaacggcgattggtgatgtgtaccccgatgcattggttagaacaatggccacttcgattacagacgcttagagagtttaaagcgattagttga

SEQ ID NO: 437984 - DNA, 258 bp, Serratia marcescens
atgcttgatgaagaaactttggccaccataacaaaaggttcgcaaatcaaaattcagcttaccgacgggattagcgataaatttaatgagaccattattatggaagtggttagccgggacagccatgtcattgaggctaaatttatcaggcgtcaaacgggcagatttgacgatgctcactcggcattcgtatctccatttttaacagacacggtggtgtttatcaaagaagccgtttttgcagtactgaacgactaa

SEQ ID NO: 437985 - DNA, 432 bp, Serratia marcescens
atgcctgatttctcccgttgtgcctttacagaaggtagcgtttccttaccggaaggttatgtcgaccgcactgtcaacgtgttgctggccggcgatgaagtttctccctcagtcaatatttcccgcgatgcattgcaaccagcagaagccctcgacggctatgtcagccgtcagctggaagtgctgggtcaaagcctgaagggctgggcgttaaaaagccgcgaacctgcgacgttgggcgacgggctggcagccggcgagtgggtgcgcgccagctacctgcgcgacggcaaacgcatctggcaaaaccaggcggtgttcgcgctggcggagggccgggtgctggtgtttaccctggcgatggcgcgtaagctgacgccgcaagacgatgcgctgctgttgcaggtgctgagcagctaccgggcggcataa

SEQ ID NO: 437986 - DNA, 306 bp, Serratia marcescens
atgattgttattaatggttttgatgagttgctgcaaatgaaagatggcttgcctgatgtaggttggctgtatgtctcgccatcgttcagcctttcttctgaagaggatatagtcaaaggtagttattatattgctgaaaacgaagacgaagaaatggattttgaagataactacggcactttccttgaagcgccaatctttaaggcgattattgacaataaattagagcacagcccggcttctgggcgtgtggaacttcttcaagcggtccgctattacatcgaaaacgatgatttccaggactga

SEQ ID NO: 437987 - DNA, 1701 bp, Serratia marcescens
atggtagagcacattgaaaaccctgtgtctgcgctttccctccgaccggataattggtatgagatcaactgggatcgtgtcaataggtcggtgaggacgatgcagaaccgaattgcgaaggcttgtaagaacggtgaatggcggcgggttcgccgcctgcaacgttctttaacacgttctcctgcggccagatatctggccgtcaggcgtgttactgaaaatcggggtaataaaaccgctggagtggacggcagacgctggaccacacccgcggaaaaatggaaagctgcacaggctctgaaacgaagagggtatcgcgcattgccgttacggcgggtatttatccctaaagccaatggtaaacagcgacctctgggcatcccaacaatgcgcgatcgtgcgatgcaggcactttacatgctggctttgtcgccggtggcagagacaacggcagaccccaatagttatgggtttagaccatggcgctctactgctgatgcgatggggcagctttattgtaacctgtgccgaaaacgttcagcctattgggtgctggaggcggatatcaaaggctgtttcgaccatatcagtcatgactggctgatacgccacattcccatggataaggatattctccggaaatggcttcgtgcagggatcatcaacaaagggatgttcagtgaaacagcggaagggacaccgcaaggtggagtgatctctcccgtattggccaatctggcacttgatggtctggaaactcagttgaaaaagtatctcggggtgaccagagccaagaaatcaaaagttcatgtggtgcggtatgccgatgattttgttgtcactgcgaactcgccggaactgcttgcaagcgaaatccgcccgtgggtggaacagtttctgtcctgtagagggctggaactttcaccggaaaaaacgcgggtaatttcaatccatgagggttttgattttctcggctggaattttcacaaatacggtgaaaaacttctcatcaagcctgctaagaagaacatacaggtgttttaccagaaggtcagaaccattatttcccggcatggtggcaacacgcaggaaacattgatctaccgactggcgcctgtactcaggggatgggcacagtaccattcccctgtcgtggctaaagcgacgtttcaccgattagacgccaaaatctggtatctgctctggagatgggcgaaaaggaaccactccaagaaaggtcgtcgatgggtgcgggagcgatattttcacactatcggcaatcggaactgggaattcgcctgcaagaaaggcagcactgagtcagattacatcaggcttaagccgttgtctgcaacccccatcgtacgccacacgaaaatcaaaggtgcatttaacccctttgatccggtctgggaaaaagaaggcgaatcgctacgcatgcaaagaatgcttcattcattgcgttaccgtcgtgagatcgccggactttaccggttgcagaaaggggaatgcctccattgcatgcaccctatcacgcaggcaaccggctggcaggatcatcatctggaacatattctccagggaggaaagaatgtgttagacaacagggtattgttgcaccctgaatgtcatgatcaagtccacaccctcggaataaatctcagcaagccggctcgtcaaacgggcttagtaaaggcttga

SEQ ID NO: 437988 - DNA, 279 bp, Serratia marcescens; identical to SEQ ID NO: 103517

SEQ ID NO: 437989 - DNA, 1512 bp, Serratia marcescens
atgatgaccaatagctatctggagtatttcctgacgttgcttggctggctgattaacaatggcctgtgggagctgctggtcagtacggggctgtttgtgctgccgttgctattcaaggtagtggccatctggctgagggtgcgtgaggaaggggaggatgagggcaacaaagggatgctgtctttgccacgcatcgaaaacctgctctacggggcattttttgtgatgctagcctgctgcctgccgctgatgaatgtcagcctcgacaccatcaagtacgacagcagccgggcggcgacctgtggcacctggacgccgaagaagccggatgaaacgggctacgccaacatcatgtcgagcctgaatggccagacggcgaaggtgccggtgtggtggttattgatgcataagctgtcgaaggggatcacgtcggcggccgtagccaccattccgtgcaggccagatctgcggcaggtccgttttgaagtccaacacagtcgggtcaacaacccggcgctggcgaaggaactgcaggacttcaccaacgactgttacgcgctggcattatatacctggcagaaccgcgaccagggccagacgacggacaaagccaccctgcgtgacatcgagtggctggggtcgaaaaccttcctgaacggcgggtactacaacaacctgcagtccaaaactccgcgttccagtttcccctggaatgaggggcgggacagcggccggccaaacactggacgagggggatatccaacctgcagcgagtggtggtcatctggcgaaacggggctggaagcccgcgtggtgaaacaggtcgatccgggcgtcatgctgcggatgtctgccgcgctgaagatgatggggcaacctgatgcggactataaagaggcggtggtgcgccgcctggtcagcccggataacctgacggtctcccagggcggacgcgcttatgccggttacggaggcaatgcagactttaccctggacaactcggttaaccggctcgcgtcgctgggcggaaccgcgctggggagcctggcggcgtacccggcatttgatgcgatgcgtcaggcactgccgatggtgcaggcggtgctgctgatggccgtctacatcatggtgccgcttatcctggcgttcgctgcctacgagtacaagacggtgattacggtgacgttcgtggtgtttgcgctgaatttcctgacattctggtgggaactggcgcgctggctggacagctggttactggaggcattgtacagttcggactcgcacagccgctggaatgtggccgggttccagaatagtgccgatgacctgattatgaacctagtgatgggctgtatgtttattgtgttgcccatcgtttggatgggagcgttgtcatgggctggtgtaaatgttggccatgctattgcttccgcagtgaatagcggtacagaaacagccaaaaacactggggggaaagttggtgatgctgtaacaaataaaattacccgatag

SEQ ID NO: 437990 - DNA, 687 bp, Serratia marcescens
atgtgtggccgctttgcgcaatttcatagccgtgacgagtttctggctgcattgcagttggaaactcaggtgatcgctacagacgggtggattctacgatataacatagcccctggtactcaagttcaggtcattcatcacaataatgagcatgtacagctggcgccggttaattggggctatgcaccggcatggtggcacgaacagggaaaaccgccgctcatcaatgcccgagttgaaactgcggagcacagtcgaatgtttgctccgctctggaagtatggccgcgcggtggtgccggcatcgggctggtacgaatggaaaaagtcgccggacaatccgcggttgaagcagccctattttatccgtggcgctgatcgccagccgttgttctttgcggcgctgtacgcagcagatagcaacggcagcggcagctttgtcattatcacggccgccagtcatgccggcctggcggatattcatgatcgacgtcctctggcgctgccgccggccgccgcgcgtgactggctcaataccagcttagttccgccctctggccttatgcaggctgacgtgtacagcctgcaagcggaggatttttcctggctgccggtctcgccggctgtgggcgccgttcgtaatgacaatccctcacttatcctggccatcgatacaccaatggtctga

SEQ ID NO: 437991 - DNA, 234 bp, Serratia marcescens; identical to SEQ ID NO: 103527

SEQ ID NO: 437992 - DNA, 558 bp, Serratia marcescens
atgataattacagacctgcctgagcaacttattacggggcgaaaagtaaaactattgcctccagatgtatcatattatcgtgatgtctattcacttatttcaaaattttctaaaatacattttgagtttcttttgtggtcaaatttagagcacactcttgatacctgttataaaaatcttgaaattgcctctgataatttcataaatgacaaagatgaatacaggttcttaattatggatattcattcaaataatttagttggatgtattagcttatttattgtaaatcctaaaatacctttctatgaaatcggttattgggtttcaactcaatttatgggtaaggggtttgttaaagaagcttgtattttagtaagagatattgcttgccattacttaaagtgtcaaagattagagatcacaatggccagcaggaacgtacgaagtgcagaagtagctcttcgtacaggattccagttagaagctaaactgaggaaacatcgattggatggctttggatgtattgatgatacttgtatatatagctatcctatataa

SEQ ID NO: 437993 - DNA, 1164 bp, Serratia marcescens
atggctattaattttaatgagcttattaataaatataataaagaagattattattacattatagatctagatgctatcaggaaagcagtgcgcagattaaaatctcattgggagtattactttcctcagttggaggttgcatactcttataaaagcaataacttatcaacggtggcggagttaatgctttctgaaggtttatctgccgaaacagtatcgttacacgaaataaatcttgctttaaatgatggttttacaggcgagagtatttattttgatgggccagttaaactaaatgaagaaattgagttcgctatatcaaatggtattaaaatacagtgtgataatgctctggaggtagagagggttatactcatttccaaccatattaaagtaaagccaaaaatatcgtttcgtctaagtgtcgattataaatcgatagggttatctcgttttggaatgaatcgggatgaatttcatgagtcattgttgttactccaagaaaatggtattcatcttagcgggcttcactttcattctggctcaaatctcacatctcatgactacctgataaaagcattagagtattattcaattgaaatcaataagttaaaggatgtcataaattttatcgatatcggagggggctatcctgcatccactgcaaattgtgatgctgttttggtcaatgataattatccaggacgtgtgcgtgaagcacttttaaaacatggtatagatatcaataaggttagtgttgtaattgagcctggtaggatcttaactgaggattatggatatctaatttccggaatagcctcagtaaaagaacgcaatgacattaatattctaaccctatcggtaccaggtacaagtgtgagatcggcgcagtatcataataatagatttgcgcttatcattcctcagagagatggaagtattgaaactagcttagctcatgtttttggctctaattgctatgagtctgatattattgcgatgaatatgtcaatacctgttgatctttctattgatgataaggtgctaatatcatcatgtggtagttatgatataatgaattcatcgaattggattagaagcaaacctaagttaattgttatctctaacggggagcaccttcatgataattacagacctgcctga

SEQ ID NO: 437994 - DNA, 792 bp, Serratia marcescens
atgtctgctaacaatatcaaaaactgtgatttactgaaattatcctatcctgatttccttggtttttttggagtggataatactcctcctggaggaaatgtaacattggaaagctggataaaaaatagcaaaataaacaaggagtcttatctccttgacttggcttgctcaacaggattttcatcaagaaatatatcgttaaaaactgaatgccgagcagatggaatagatatatcgcctccatcaattgagtcagcaaatgccttagcaattaaaaatgggattggtacacgagtaaagttttctgttgcaaatgcggaaagcattccattttctgataacactttcactcatattacagcagggtgttgtttcggcttcatttctgataaagagactgccttaaaagaatgtcatagagttttgcgaaatgatgggcatttgtgcatttcacctttcttttatgaattaacaccagatagagagctaattgatttggtggaaaaacatatagggtatcgtccagatacaaatagagattatgattattggtatggttttttcagtacacgatttcatcttatcagtgaggagctttttgatttgcctgtttatacagatgatgagatcgagttaattactcaaacagctatttgtagcaagcctcctttcttgatgttaagcgaagaacagcaacagatttcatttgatagatattataatactcgtgttcttctcaatgagcatgctaaatatcagtcagttgcattatggacaatgagatctaaataa

SEQ ID NO: 437995 - DNA, 1287 bp, Serratia marcescens
atggtaataattgatccagagataaaaaaactattacacagttgttctgcaatgaatgcgattagaatggttactggttcttttcatgtttttttccttttttcaatgggagtttcaatctcagagatagcaattttgcaaatggtttttagcatatctatctttgtatttgagttgccaaccggaatattgggtgacaagctaggtgtaaaacaaaatgtaattctatcttgctttttttatgctctattctttccattatgtacgtttgctccgaacatgtatttactgattatagctgaaatttgttatgcccttggcgcatgtttttgttctggtgcagatagtacatggattaaggggttagtcgataggctgccaggagaaagtcgtgagtctaatatatatcaccactacatgtcatatgtaagagaagtaaatgcattaatgaactctgtatcaggtgtcattggtgtaattattgttgtattaattgggagttatagtgccgcgtattacttatgcggtgcatcatttatatttttggtgttcgcttttagtaaaatagactcagtgagcgaaaagaaagatgtacaaaacattaaagaaagatttaatgtttatttgcatacaaaaagtgcattacagttgttagtatcaacaaaggttggtatttactatatattaatatgcggattggttgtggcagcaatgcaacctgtgtttcatttctggcaaccattcattttaaatcaaactggattactgaataatgccacaaagaatcaagagatcgtgatcttaggcgggtgttttttctcctattcatttacaaagtatctcttcaatagatattttaggaaagctttattgactagatacaacccaatgaaaattactttgttggcgacagtttttgcggctgcatctatgcttgcactgattttaataaatgggcaatggcttccaatagtgattttcactatgttccatagcttcttttcagtcccgatgagtcaattcgactctgagttctttaaacacttaaataataataactcaaacactgttttatctattgttagcttgcttgcgcgtgtttttggtatcgtatctcttctcatcataggggttatggcagaaagcttacctttatcatcggcgtttgtgttttcttttatttgtatattaagcgtgattccggtcactatcgcatggataagatatattgataagaatgaagaaaacaaagaaaacaaagatggaatcattggagttgcggaatga

SEQ ID NO: 437996 - DNA, 486 bp, Serratia marcescens
atggggctggatatcaactttatccgtcagcgcaaggcggactacccgatgttgccggttaacggcgactggacacccgtcggtgactgggtgccgtgttcaccagcgtggctggaggacggcggcgattgtgcgcagacgccgcgaatatacaaccataaaacatgctgtcactaccatccgcctgttcaggtttatacctgtcattttcgcggctttaccgcgttaatgaactggatgggcgccagcgtcgctgaggtcaacaatggggcattgcttgaactcggtcgtaacgacatccagatgttggatttgtgtctgtcgcggctgaatgaagcaaactgccatgacgattttccgtctgaatgtacggattacagcgacatgtactggtcgcaggtcgaactgttgaaggcgtatatcaatagcgtcatgaccggtttcgattttcaccaatatcacctttacttccgggcatcctggtaa

SEQ ID NO: 437997 - DNA, 375 bp, Serratia marcescens
atgagtatgaacatcgcttttttaaccaccgcacctcagacgctgactcaggatttgtgcgatctggccaacctggaagggcatttgttgtctgtacgcgcgctgatgcgtctcgatgccggcaatgaaaagggtgagggtgaagtccactcgtctaaccaatgtgaggtggctcatgtcgcccactcgtttggttttgcctggaatgggggacgcttcgaccgtttggcctgtgaaccgcttatcaacgcactgcaccagctcgggaccgcaatcgatccggcagtatggcagagcagctttgatgacgggtgtaatgacgcagagattgaacgggagcaggcgcgaatgaacctgctcatctccctcatctag

SEQ ID NO: 437998 - DNA, 540 bp, Serratia marcescens
atgaacgtgtattttgactcgccgccgtcccaggacgcgtggattgatttcaccctggcggtgaccgaagtgttctggttgttgccggcgacagcacggcctgcggatattgaccaggccagtgaccttttcagcgatgcggtactcgatgtggccggtctgcggttttctcagcagccgggacacatgcagcctgtacagcagatgctctgggccgacagtcggcagagttttttcggtcggctgatgctgctcctgatacataacctgtgtccgggctttgtccgcattgaacgggatacacaaactgccgaatgtggctgggagcaaccgcttatctggttgcgccatcatcttcagcgccctgaacttcaggcgccagaagccgtgaatgaacgggtgcttacggatgattccgtctgcagacacctggtgcagttcagggacagcattaacaccgacgcgctcgcctaccactggcgagtgatcgccttgatggataacgtctggcttactccgaaagaggaaaaaatgtcatga

SEQ ID NO: 437999 - DNA, 150 bp, Serratia marcescens
atgaacgtattgccgacattgctttacatgaacgagaagcccgaaagcctgaacgccacattgttgctgccatgcatccagtggccctggaaacacgcgatcttggttactgttatgatagccaatcagagccggtatttagcgctttga

SEQ ID NO: 438000 - DNA, 516 bp, Serratia marcescens
atgcgcatagctcaccattttgtagatgactataacaatcagtatcagcgcaagattgatggccagaaaatgcgtttccctttccatctcgatcaaatgattatcaatggaagacgctttttcgaaatggcggaacagatactaagaacgttaaatagctataaaaatcgctatcgtacaggggatcaatatatacgcactatgtttgactgtgctctgatcttttatatcgacaaatttggtgggcagtcgttatctgcagcggttgaaaaaagctttatctgggcctacagatgccgaattcggcagcaggtggtacagctagcgactatggataagtacgtgctggaaaataatctgttccgggtgatcaaagaggccagagtacctggtgatgtactatctatgcagctactcactgttcgggcttcagaaaattacaataaccgccgtaaaggtaactatgaacaagatgaactggtgaggctgttcaaggagatgaactactatgagtga

SEQ ID NO: 438001 - DNA, 384 bp, Serratia marcescens
gtgaccgccggcgttatcaaggcactgcagcgcgatccggataatgccgccctggttgggcgtctggccagtgagctggcgatggcggataccatcgaaacggcctttatcatgcggcgcatgatcaccaccgggatgtctgagccgaacgcctctgcgcagaaagtcgccatggaagagggtgatcggcgtatcgaggcgctggatcgtgagatcacggcgctcaagaacgagatggagatgaagcgtgagattgcgcgtaacgcggtgctgaccatcatcgacagggagaacaaccgggcggaaaccaacccgcagcgtcagtcggttgacagcccggatactaaattcaaccagctggccgtgccggaaagcgaccagtaa

SEQ ID NO: 438002 - DNA, 147 bp, Serratia marcescens
atgaatcaacgggaaatgccgatgatgaatcacagaacgttcaggaagaggaaacgcctgcaactcaaactgaacgccgtgttgaaactcagcctgacctatatggtgcgccttctgtgttgtcgggggacgttgaaacggttttag

SEQ ID NO: 438003 - DNA, 312 bp, Serratia marcescens
gtgctgttatcgatcgccacgcgcggctgggcgccctttgcgctgctgccgttcttcgccgcgggcggtatggcgctgcccgcgctgcaggcgttaatggcgcacaaagtggacgacgatcatcagggcgagctgcaagggacgctggccagcatgggcagcctgatcggcgtcgcggggccgctgatggcgacggcgctgtatgccgccacgcgtgatgtctggcccggcctggtctgggcgttggccgccgccctctatctgctggtgccgccgttgctggcgcgttcgcgcgagcgtgacgcggcatag

SEQ ID NO: 438004 - DNA, 609 bp, Serratia marcescens
atggacttaaaagggaactttatgaattaccaagtggtgccgttttggttttactccggcaaggctctgctggcggtgctggccgcgatcggattgggcgtgtgcggcgtcagtgcggcgttcttctattgcctgctgctcgcgctcgtctggccggtcgccgtttcgatgcggttacaccagctggcggaaaagggcgtggcgatgaatccccgacgggcttcgcaatggatggtctatgtgcaaggcattccggtacaggaaacccgccaggtgttaaccaacccctgttttgcgctggaaaaccgaatgcggaccttctttctgtgcgctttcaccgctaaaaccttactgcagatggcgctgttgctgttgttgatcgcgcagctggccgcaacggtcaatctgtggatcgccttggccggcgtattgttcggcgcctggctggtgtataacaccgtcgacagcatccaggcactgcgcagcctggcccggcgccagtgggtaagcgagcagtgggtgagcgacagcggctctatctggcatcgggcggcgcttatcggccgtaaagggccggcggcggcgctggaacgtctgttggcgtggtga

SEQ ID NO: 438005 - DNA, 483 bp, Serratia marcescens
atgctggactttatggaatgtatcttccggctccatgcgctttttggcgggatcgatagcattatcggctacagcttcggcggcatttccgcaataaatgcggtgaaagcggggctgaacgtcaatcgtttgggcgtcatcagctccccgtccagtttttacggcatctttgagaaagtgtccatgcagctgaaactctcaaagggaatgcatgaacacctggctggggtcatcacgcggcgctatcgtattgatgccgatggctgggatcattacagcacttatcatgccgtggccgagcaacagatccctctggttgccatccatgatgcagacgacagctatgtccacaaaattgaaagcgacatactggtggatgtctggccaaacgcgacgttgatcgaaacacaagggcttggccaccggcggatcattaactccgaagcggcaatgcaagcgttttgcgatgcgctgttaaagtga

SEQ ID NO: 438006 - DNA, 783 bp, Serratia marcescens
atgagtctattgacaggcaaaaggcttttaatttccggtgttgccagcgatcgctctatcgcgacaggtattgctgaagctctatatgcgcaaggcgcggagtgtgctttcacctatctgaatgataaattgaaggtgcgcgttgagaaggtcgctgaacggtgtggttcgtcattacttttcccatgcgatgttaattcagattcgcaaatcgaagcgctattcaagaacctatcacgccagtggcctacttttgatggttttgtacatgccatcgcttttgcacctgacgatcaactggacggcgattatttggagtcggtcacgcgtgaaggattccgtattgctcacgatgtcagctcctacagttttgccgcgatggcaaaggcggccaagcctttccttaatcccggctcctcgcttattacgctcagctatcttggggcggagcgttcaataccaaattacaacgtcatggggctggccaaggcttctctggaagccaatgtccggtttatggcggcaagccttggcaagcacgatatccgcgtcaatgccatttcagccggacccatccgcaccctggccgccgcgggaattgccaatttcaaaacgatattgcaccaatttgaattaagcgcgccattaaagcgctgcgtgaccattgaggaagtcggcaatatcgccgcgttcttggcgagcgatttatcgtcggcgataactgcccaggtgttgtatgccgacaatggtttcagcacgacggccttaactgttcccgcataa

SEQ ID NO: 438007 - DNA, 1965 bp, Serratia marcescens
atggaaaatgtagtaaaagaaacagtaaaaaactatagacgtgatattgacggcttacgtgccattgcaataattctggttgttctctatcactcgggagtcggttttctcagtggtggttttatcggtgtcgacgttttctttgttatatcaggcttcttaattggcggaattatctatacagaaacaacacagaataaattctcttattcaaaattctatgtccgtcgaataaaacgaatcgcaccggccttgattgcaatgctgatagtatgctctgcctttgcctttttctatctatctgcattagagctaaaagacttcagccttttttccagtgcgacaatcttatccgttcctaacataatgctttggcataaaacaaactatttttcgccaagtgcagagttaaatccgttattaatgacgtggtcattaggcgttgaagaacagttttatattttcctgccaattattttctccattattgtcaaggcaaatattaaagtagttaagactatttctgtactatcgatagcctcttttattctttgcattatccttacaaaaacatcacctctcttttcgtttttcatgcttccaactcgggcatgggagttgggtgctggcgtaattatttcaataatgcataaagagggacgattcaacagtttgaaagcttcacatagagaatggctttttttggccgggctcgcaatgatattatttgcagcgctaacttttgacaaaaaaacggagttcccaggttattccgccaccttacccgtgctcggttcgatttttttaattctaagcaacggtaagttaagctcaatcattcttggcaaccgtgtgatggtatttattggattagtatcttattcttggtatctgtggcactggcctctgctttcttttgctcgcataggtatcgacgagagactgtcattacatgccggcttactgatatcaaccgttgccttatttattgcttacctctcctatctctttgttgaaactccattcagaaaaagggttcacctatccaatccgaagatcatttttggttacatcttggtttcagcagcattgctcttaccgaccgctctcggttatctcttgaaaggtataccacaaagactcagtccggaggtcgtgcaagtcgacaaggacaagttagagagagttgctgaccgttgtctggtagggtatggagcaaaaacctactctagagatgaaacctgcctcccaaactccagtcaggatgccgttgctctcgtgggtgatagccatgcagcggccttacgaggcggcgttgaaaagtatgcgaaaaataacaatttagtcgtgtatcaaattaataaagcttcatgcccaatgctggttggcgcaacacgaaccattaatacctacccagcacatggtgctgaatgtgatgagtttaataaaaatgcattgaaccttataagtgaaaacaaaaaaataaaaactgttattatctccgctttgtgggactcggccatctatgataatagtggaagctacaaaagtactgtaacgacagaaactggaatatctgctttaagctcaggccttaatgagttagtaaaccaattaaaagccgctcgcaaggaggttataatagtcagtgatgtcccccaacttgacttcgatgtagttaaaaacatcgacaatcaacaaatacccttacgcaaattaataaacagtttactttcaagagaaaaaacagcaggtgaatttaccgatcgctatcaactgccacactcggacgtaaacgacttattgacttctattgcacaagaaaaaggcattagaaaattcaaccctgctgataacttatgcgataataccggctgcaagtttaagtcaaaagatcgtccgttttattatgacaaccagcatttaactacgttaggcagtatatatgctctgcacgggctataa

SEQ ID NO: 438008 - DNA, 732 bp, Serratia marcescens
atgcatcttgacaacccggctcagacactgcgccagtttttattggccgtttgtaaagctgatcccaacaaaagtcttcgttcagcattgtgcttagcattaaacttagagaacgaaaacgtcaccgagtcagttttatgggaaaaaactgccaaaatcatgactcttacatataaaattgaagatatactaaacgattacttccccgatgaggatattacagccccaaactggcaaaagaatgtcaccgaattcttctctcaaatcaacattaataacccagtacatcattacagtaatgtaataaaaactgaaacatttaatgagcttggattgcttgccttactttttaaaacaaaaggagagataggaaaactagccaacgaagatattgatgatatacaacagcaattatccgaactaaaacaatcagtcattgaatctaatctcagccaagagctgcgtaaagacatactccactacttaaataatataattcgctcattagaggattactctataacaggaattgaacctgtcatatcctccatagaggcaacattgggacacgcctgtatatcacaaccttttcaagaggtggttaaaaacacagagattggcgctaagttgaagggggttttgaagaaatcactttctgctgtaagtagcgtggagggcgttgtaagtctcggcgccaatgctattactctaattgagcatttcagtaagtaa

SEQ ID NO: 438009 - DNA, 819 bp, Serratia marcescens
ttgtctagtgagtatcacttatttagatttcgtggggataatgtaaacacggtaaatgaattggtgaataatgtaatttggcattcaaagccaaaaagtttaaatgatccgtttgaaatgtttttttcttttgattttgagtcattaaaggaaaaatccactggtgatattgctacaataattaaagatacgaaattcttaagggaaaatagacgtaggatagaggagtgctttattgggggtgatctttcttttgtatacgatcatatctataaatactggggtgagcaattcaataaagttattattgatgagtttcatcaaagcgtggctattgcatgttttacgaaaaaatatgatagccgtttgatgtgggggtattatgggagtgggatgaaaggtgtttgctttgtgtataataaagaaaagctaaataaatgcggtgtggagttcgcggatgtagtgtactcagacattccacctaaaatagatatattcaagcatttacttgaaaaattacgctcggaaaaagttacaattagtgctgagttctcattgataaagcatacggattgggaaaaggaagaggaagtcaggagtctgaaatttttctctacgaaagagcattataaacactcccctggacatgccgttattttagctgagagttgcattgatgccgtgattattggtgcgcgcttgacgggagatatgagggcttttatagaggagtattcaaagcgaaatggtatcaaattgtttatcgccaaagctgattttttagggtacaaggtggatgttagtgaggtgccattgtaa

SEQ ID NO: 438010 - DNA, 264 bp, Serratia marcescens
atgcctatcattgaatttgatgacaatatggcctctaggattgctgaagatgcgagggtattggccgagcaggtgaaagttgttgacgattatatcgtgattaatgtttcatatgaatacaatattccgttgatttcatgccagactgcagaaggtgtgcttaattgggtatggcatttgacagaaaaaacatggatgaccaatgaggtaatgaggcgattcattgaaattgcatgcggggcaacaggcgtaaaatttaggtaa

SEQ ID NO: 438011 - DNA, 729 bp, Serratia marcescens
atggggattgttttggagctaatactttcatttgtttcttttgtcgcctttgtggcgttcgtgttgggtttaatcaaacctcaatgggtaagaatgccgagccggaaacgttcaagtgctatatatgggttttcttttctgttcgtcggaatgttgagtgcgattttatacccattaccacggcaagaagtggcagtaaaatccgaagtggtagaagaaaaaacggcagtgtttgaacacgcggatttaacgcttgtcgagtaccgaagaaaaccgcaggcagaccgtcaccaaatcgttagcgattacgttaaatttaagggaataccggcggacgatggtgatggattctatgcctgcctgagtcagtacagcatcaccaagtcagaggagctaccgctcggtgaagttcttggctggtgtgatgctggctatcaaaaagacccgaaatcgctggcggaatatgccaatcttgacgcgtttcaaggaaacttcagcggctgggatggttcgtatcgtccgcttgaaaagctgattaagaaaagtatgaatgatgattcatcgtataagcatgttgaaacgatgtcgcatcttgtccttgggaaagacccacacgcagtggttaaaaccagatttaaagggacaaatgcttatggtggtattgtaacccaaactgttacagcacgcattaatattaatactggaattgtcgaaaagataactgaatag

SEQ ID NO: 438012 - DNA, 618 bp, Serratia marcescens
atgccgcaagcaaaaaaaaatgtgcgcgtgccgattcaggaacgcgcggcggcgcgcatggccaaagtgctgagcgccgccgaacagatgctcgccaccctcgggccggaaaaaacctccattcccgctctggcggaagcggccgatgtgccgcgcgccgcgatctacccgttcttcccggacaaatacgcgttgttttcacacctggctcagagccatatggcgcaactggcgcaggcgctgcgtgaagcggagctcgagagcgccgacaccctgcacgattgggtggatgccgccgtggcggccaccgcccgctactacaacgcgcatccggcggcgagcgtcttgctgctacgcggcgcgttcaccgaaccggagcaagaggcgcacgccgccaagaacctgacgatcggcgagatgttccgcgccaaagtgcgcgagctgcccgaacttgatgcgctgccgtcagatcccgacgtcgtcttgatcgccatagaattggcgttcgcctgcatgaaatacggctatgcgcgggaaggcaccgtttcgccggccatttgccgcgaggcgacgcgggcggtcacgagctatctcgggcagtggcgcgccgcgccgtaa

SEQ ID NO: 438013 - DNA, 186 bp, Serratia marcescens
atggtcgaccatactcggaagcatcgaaagaagatcctgcaagcggcggtgaagacgcggcgtgccggtctgccgttcacggcggactccccagccaccccgccctttattggtttgccgcatcagccgaaggcggtgctggtgcatctgatcggccatgatgacgcccaggaggaacatgaatga

SEQ ID NO: 438014 - DNA, 192 bp, Serratia marcescens
atggaaatttgccccccctcacaaccccctcagtcaatctccctcattctcttcggcattgaattgtcatcaaaaaataagaaaatctataaaaataaaacccgccactggccgtacgccccacaggatcaactttcgcaaggcaaaataagcaagataattcccaataaaaaggccgaaaaaaagcgttaa

SEQ ID NO: 438015 - DNA, 147 bp, Serratia marcescens
atgacaggtaaagcttacggtgcccatgcgggcacactgccgctggagccgatggatatcacccgtcgcgcctccggcgcccgtgatgtgcagattgatttcgcgttctgcggcgtctgccattcggataacgccaccctggcttaa

SEQ ID NO: 438016 - DNA, 1128 bp, Serratia marcescens
atgaaagatccattaatgcagccatttttatttaaaaacggtcttgagatgcgtaatcgcatcgtgatggccccaatgaccacctggtcagccaatgatgatgaaactatttcagatgcggagttagcctattatcgggcacgcgcgaccggtgttgggttggtgctgacaggctgttcccatgtacagcgaaatggcatcgggtttactcatgagttcgcggcctatgacgatcgctttattccgagcctgaaacggctggcggatgccgctaaaagcggcggcgcgccggcgatcctgcaactctttcacgcgggaaataaagccgttccggccttgatccccgatggcgagctcgttagcgccagtgcgctagccgcaccggcaggcccgtttaacgatggcaaaaaagccggccgcgcgttaagccatgatgaaattctgactgtgatccgcgattttggcgaagccactcgccgcgcgattgaggcggggttcgatggcgtggaattgcatggcgcgcatggtttcctgctccaaaactttttctccccgtatttcaatcagcgcacggatgaatggggcggttcgctagagaatcgcatgcgtttccccttggaagtggcgcgcgaagttcggcgagttatcgaacgccatgctacgcagcctttcttattggggtatcggttgtctccggaagaatccggcgaaaagggactgcgtatagatgattctctggcgttggcgaaccaattgacggaagaggcgcttatcgattatttgcacatctcgctgcaccatgtactgacggacacccctcgggatgacgatgatgaaaagggtacgctggcaaggttcattgagcagaataacggccgtttaccgatactggccgccggaaaaatcacgtcgtcggacgtggcacggcaagcgctggatgccggattgtccatggtcgctttgggacgcgcgatggttatgaatccccaatgggtggagagagtacaatcaggtcatgaaggaagcatgaacgtcaaactcaatttgtcgcaagatccggatgaattacagatcccacataaactgtggcaagcgattcaaaataccccaggctggttcccgagctga

SEQ ID NO: 438017 - DNA, 651 bp, Serratia marcescens
atgtatggaaccctcatcggtttgacggtcgttttgctggccattttgggcgtattggcctctgtcacgctgattgaaaatcgacaagccgcccagttggccaagatagagcctcatgcgcattcaggagaaaacgcatcgcgtaccgccgtcgtttatttttctcgttcagggaatacggcgctggccgctcgccatatcgctcaccgcctggatgcacagctcttcaggcttgatgcgccgaactatgcccctggcttgccggggctggcgtatgcgctgaaagacgccactttgctgaaagagcggcaggatgcgttgcccgagataacgccggccaagattgacttgacgccgtttgacaccctctggttgggctcgccgatctggctatacagtccggcgccgccgatttgggcttttattgagaacagcgatttcagcggtaaacgggtcatcctgtttaatacccacaacagccacttttcggacgagcatatcgcgcgttttaaagcccaggtgcttgcacggggagcagtaactttcgagcatcgcacggtgctgcgagggcgaatgacgcagcaaatcacaccggaacagatgctgcaatttatcgatgatcgctggctgggaaccccgctggcgaagtga

SEQ ID NO: 438018 - DNA, 834 bp, Serratia marcescens
atgaatcgcatttggtttgtcaccggcgccgcgcgcggcatgggcgcccatattgtcagggctgcgttgcaacagggagactgtgtggtcgcaacggggcgggatagggaaaaattgcgccggacattcagcgatgttgcagcggaaaagattgagctgctggagcttgatgttcgtgatgaacatcaggcgctggcggctgcagatgcggccgtgagccgttttggccgcattgatgtattagtgaataatgccgggttctgtctgttggggcgttttgaagaagcgacagccgaacagatagagcagcaattttcaaccaacgttttcggcatggccaatgtattgcgcgcggtgctgccggtgatgcggcgccagcggagcgggcgcattatcaacacctcttccatcgccggcgtaaaagccgtcgcgaacgccacattttattccgcgtcgaagtttgccgtggaaggtatgaccctggcgttggccgatgaggtcgcgcctcttggaattaccgtcaccgccgttgagcccggctttttccgcaccgaatttctcaatgacagttctgcccggtacggggaaagaagcattgccgattatgccgcttttggcagagcgcgcgagctactggcatccgccgatggtcagcaacagggcgatcctgccaaacttgcgcaggtgatttgccggttggtggaaatggacacgcctccgcgccagctattaatcggtaatgatgctatcgatttcgtcatgccgacgttgcagtcccgcattgaagaaacgtgggagtttgaggcgctcagcaagacgaccgattttgattaa

SEQ ID NO: 438019 - DNA, 735 bp, Serratia marcescens
atggagatgaacagtctcagcggcaaagtcgctgttatcaccggggcttcaagcggtattggtgaagctgccgcccgccgattggttgcggaaggcgtttcggtcgtgctggtagcaagacgcaaagagcgaatcggaagcctggctgccgaactgggcgggggcgccgtcgcctttgacgctgacgttgctgatttagctcaggtccggtcactttttaatgaggtgaagagccgcttcggcggtgtggatctgcttttcaacaacgcgggcatggggattttcggccggttcgaggagagctcacccgagggctggcaggagcagatcaatgcgaatatgtacggcgtgttgaactgttcctacgaagctatccctctgatgaaaaatcgccccggcgcaatgatctccacggtatccagcgtcggggggaaaagcagcgcacctaactgggccgtgtattgcgccaccaaatttgcagttaggggattctgtgacggtttgcggcaggagctggctgaagaagggatacgcgtgtcattgattcatccgggggcggtacatacggaatggggacacaatgtttctgcggacatgatgcgcgaacgtcgtgatgccattcaggctctcatgccggatgatgtggctcgtgcattggtctattcatttgctcaaccgcccggcgtattactcgatgacatcgtgatacgccctagtttgcaattgacgctttag

SEQ ID NO: 438020 - DNA, 636 bp, Serratia marcescens
atgaaaaatgtattgatccttggcgccggcggccaaatcgcccgccatgttatcgacagattggcggatgaacagtcgcttgtgcaaacgttgttcgctcgccagccggaaaaaatccggtcgcgcccggccaacggccggatccttatcggcgatgtgttgaacccgtccgcattggaacaagcgatgcagggccaggatctggtgtacgccaacctgacgggagaggatctggatgtgcaggctgaggcggtgattgccgccatgcaggccagcggcgtcaaacgcctgatcttcgttctttcgctggggatttatgatgaggtcccgggaaaattcggtgaatggaacaacgcgatcatcggtgagcccctcaagccatttcgtcgggcggctgacgcgattgaagcctccgggctggactacaccattctgcgcccggcctggttaacggatgaagacctggttgactatgagcttaccgcccgcgatgcgccgttcaaaggaaccatcgtatcgcgcaagagcgtcgccgctttagttgccgacatcatcgagcaaccgaaaaaacatctgggtgaaaacatcggcgtcaaccagccgggcactgacggtgacaagccgtattttatgtaa

SEQ ID NO: 438021 - DNA, 300 bp, Serratia marcescens
atgacagatttttacatttcagcaatccgtatggatagtaaagggcagcatatcgagtgggtaaaaacccataaaaatattgataataaatcgcttgatcttgaaggttctgtaaactcaagaaagtttgttggtgagttgatcagttccgggaaaattacctttagaaccgtaacttggaaccaatccactaaaaaatgggatatcggcgctgtcgttgaagttatggccagcgggtatattacaactgacccaaacaaaactgaacttgataacttggggaatttgcccaagttctaa

SEQ ID NO: 438022 - DNA, 2154 bp, Serratia marcescens
atgagtgatgaatacgccgccgccgtgactgaagtcgaaagctttgaacgcctgcgccaattggcgccgacggccgaaggtgagaaaatcaagctgcgcagttggcatacagataaagaccttggcggcggcgagtttgttggacacttgggcaacgcgagcgatgatggcggcattattgccgcaggcaacggttactattggaagcgcattctggaaaatgaagtgcacgccaatatgttcggcgccttgccggcttccgtggatagtcaatacgactccgcgccggcgttccgcgccgcggttgcggcggtcaaaattcataaccgcagcaagctttactacgaaggcaactataacctcaaatccgtcggcccaacggtatatgagctgccgtatgacgacggtaccgtttcccctaattttaaagccaagggggaagttgacatcgatccggaagagattcatacgatgccgatcgttttggatattccgagctatgtggtgttggaagggctgggcaatatcagttcagcgttgatcttcacctggcggcgcggcgaaggtccgatcgacacgcagcaggcgatcggcatctgttggcgcgttgcgggttatcccgccaaagaccgcatgacggacatggttcgcggcgttgggttggttaacacatccatttcttctgcctttatcggttgcctggcggacggcgttttgttctaccggatcaatttccgcgacctgattttcaataactgtggcttgccgttcatcgcgcagggctcggatgccgtgacgttcgccggttccacctctctggagtcatgcatggcgggcatcatcattggcgggatgtggctgacgcgcaacgatacctgggtgggcggcaagtgggtgccaccttatgccgacgacaccgacgtttatgccatgggctggtgcgactacaccacctttgaattcctgagcggttcttatccttcccctggctatacgccgcgccataaggtgcttgatgagtttttcaatacctacttctacaaatcagccaactccgagccagtggcgaagggcgggcgtttaaccgccacggatttccagggtatcgtgtcggactataatggaaaggatccgtatcgcggcgtggcggggcgtttcttcatcaacttctctcgttacaaacgcggcaactgcaacgtgcagattaaggacatgaaggtttatggcccaccgcgcgtaccggtttatacgccacgcattcaggggcaagattattacggcactatcgagaatgcctacatcgaacgcgttggttttatcgaacataccaagccctggagcgatgcgaacgatttctacaagagcctggatacctttaacccggattataaaacatgcccgaacctggtcgctgaaggggtgattggcgcgcgcaaagttactttgcagggtacgccatatcggccgacatcccaggggatggcccacagcaatacccgccagcattttaacatttggaccgatgatctggagaagtggaaagagaacacgagcagctctgccgtgattaacgattgcctggtttatgacaacaatggcaaagggtggtgggtctggcgtaattttatggatcgagtgtttactcgtccgctgattttcaacgaggatgatgtcggcaaactggagaaggcgtttaagtggcgcgtagaccagttggtgctcagtttgaaatccgccggcgcgacggtggcgtcgatcaatgcgaacgcacaatggtttagcgggttgggctacattagcgtggagatccctattcccgacaacgccgccagtgataacggcatgctgtccgttacctggctgcctaagattgatccggactcgccgacgggtatcaagggcacgacgtccatggtatcgggttacagcatcgtcacaaccgagaatatcgacgtcaagaatggcgccggcacggttgttggcagctttagccagaaaaaagaagtcaaaggcgtcaccatgaacaatcagcagctctacctgcattcggatcgcgagtgcagcgatgcggcgcgattgaaaatgagtgacttcaaacccggcagcagcattacggttcagatctgcttcccggccaagtttaactggtattga

SEQ ID NO: 438023 - DNA, 174 bp, Serratia marcescens
atgaccctcatggaatacatcactcggcactttaacggcgatcttcatcagtacgcgcagtcggaaggcgtcagccgtgaacaaatcattagttggataaataatgaatgtcacgtgatcaaaggcagactgtttatgccggtgaagcatctcccggttgaacaagcccagtga

SEQ ID NO: 438024 - DNA, 525 bp, Serratia marcescens
atgacaacaagtggggacggctggttgaataaacctggctggctcctagccaaatcgccagtgcataccggtaccagcatcaggcaggcggacagcatcgtggtcaccaccttcccggcggatgtggtgcaggatctgcaagactttatcctgtggcagccggatgcgctggaaaccggggttgaagctgtttatgtgatggtcagtgatccgctggactcggggcgttttacgcgtcagcaactggataaaaagtacaagcacgcgagtgactttggtgttgcggacaccagaaaaaacagagagactctgactcaatatcgcgatgcgctcgaggcccatttgaaggataaggatacggtagagaaagggacttatagacgagaaaaaggatctaaggtgtttttcaatcctaacacaatgaacgttgttgttttaaaagaaaacggcgatttcttatcagggtggaagataaatccagacgcagataacggtaggatatatttagatacgggggatttatga

SEQ ID NO: 438025 - DNA, 258 bp, Serratia marcescens
atggaaaagaaaacaatatctgattatacggaagcggagtttttaaacttcgtgaaaaaaatttttgatgtgcaaaatacgacggaagaggaggatataaggaatattctcgagtttaaacggctgtgtgagcatccttcaggatccgatcttatctattacccagatgaaaacagggaggatagccctgaaggtgtcgtaaaagaagtcaaagagtggcgtttcaagaacgggaaaccaggcttcaaacaagggtaa

SEQ ID NO: 438026 - DNA, 612 bp, Serratia marcescens
atgataaacggaataacattgatacattctgcaagctataaagatgaagctcttgataacatggccattgaactaagaatgagtggagtaaatgtcgttattaaggaaaaacccgaccttggagcatatgcagctatagaatggttgctaccaacaactatagttgcatatgtaacatctggcttctttaatgaagttggcaaagatttatatcagttagtgaagaataaaatttcagacctaacggctaacacaatgaagaaacccagaatagaacctgtcatttatgtttctggcaaaaagaaaattacagacgaccctttttccagagcattatccattagcgcagaagctacccatggacgtcagtttaaactattaatccctaaatattccgctgatatcgattatgataaaataatacgcagtttctttgattttctgaatgacttccatttgggtgtaatcaccgaaaatgatattggctataaaacactgggagcattcgacaccaaaataattttggtgcattataacaaaaaaacaaatcatattgagtggattgaccatctcccaccacatattcgaaaagatttagaagatgatgattaa

SEQ ID NO: 438027 - DNA, 309 bp, Serratia marcescens
atgactattaacaaaaaaagcctagccaatttcaaagtcaatagcattattattgatagctatgattctttaagtgatgatatattcaaggcatccattcaaaacatagacatattgaaaaaaaatgaatcagaggccattattattatgtactcggcacagaaaagatttcaaaaagatgccaagaaagccaaatacttatatgaagttgagaaagaagatctatcgaattataacaaatcattgatctcaagctataatatgtacataaaggtttccaacgatgcactagaagaaataagagattaa

SEQ ID NO: 438028 - DNA, 132 bp, Serratia marcescens
atgcgacactatctgcacatgaatattcagatacacaagaaacagcgtccgaatttccttcactcagtcgataaggatgaatttttcagagaaaaatatatctttccctatcaatataaaacccacctttaa

SEQ ID NO: 438029 - DNA, 426 bp, Serratia marcescens
  misc_feature (398)..(407): n is a, c, g, or t
ttggtgaaagaggcgttgcgggtgcttaaacccggtggtttgctgattctggagacgccaaaccccgaaaatgtaagcgttggaacctgttctttttatatggatccgacgcacaaccatccgctgcctccagcgttgctcgaattcattccgaactattacggttttctgagaactaaaatactgcgtttgcaggaaaaagcggcactgagagacgaagagacatcggtatatttggtcgatgtgttgaaaggtgtcagcccagactatagcatgattgcccaaaaagagggtgaggcatcgattgtcggtgagttggacgcctattttgataaagaatatggggttactctcgacggcttaagcgatcgctatgacctacgcttgaataacgagtnnnnnnnnnnaacgagtttaagcgaatga

SEQ ID NO: 438030 - DNA, 1365 bp, Serratia marcescens
atgactaagtataaggcgtatccggagtataaggattccggtgttgaatttttaggtctcgtacctaatgagtggtccgttaaatcattaaaaaatatagttgtgattgttaatggttctactcctaagtcaggggtggaagagtattgggatggtgatatcaactggataactccaaccgatttaagccaaaagtcgggtgtttatttaaatgatagtcagagaaaaatcactaataagggattggattcttgtggcactagtttagtgccagagaatacagttattttatctactcgcgctccaattggctcgttagcaatagctggaactcagtcttgtactaaccaaggttgcaaatctttggttgtaagaaacaaagaaattagcttgtttctctattattacctctcaatatcaacaagttcgttaaacaacttagggagaggaagtaccttccttgagttatccactgaagatctcgcctcatttaaagtcccaatgccaaatgtaggcattgggacaattgtttcttttctcgatcacgaaaccgcaaaaatcgataagttgatcgagaagcaacagcaactgattgaactgctgaaagaaaaacgtcaggcaatgattagccatgccgtcaccaaggggctaaaccctgatgtgccgatgaaagattctggcgttgagtggttggggaaagtgccggagcattggagttgtacctcattgaaatataaggcaaacgtaatagactgcaagcatattaccgctgagttttctgatgtgggtattcctgttgcaagtatcggcgaagtaaaaaattggtttgtaaatttatctactgcgaaactgacaagcgagaagttttatcaatcccttattgaaggaggaagaaaacctttagctggcaatataatatatagtagaaatgccactgtaggtgaagcagctattgttgctagtgatatgccgcggttcgcgatggggcaagatgtttgtctgattaaaactgaaagaaaagttattccagattttatactttatactctaaagtctaaggttattgctcagcaattgaaacttgcaatgattggttctacttttaaaagaataaatgttgaagatattagaaatttttcaatagcaattccttctcaagatgaacaaattgcaatcgtcagtatgttgaaggctaaattggaaaagtatgatcagattattgaaaacgccgaagcaatgatttattacatccaagaacgccgcaccgcccttatctccgccgccgtcaccggtaaaatcgacgtacgcgactgggttgcccctgatatgcaagacgctgaggagccacaggagaccaccgcatga

SEQ ID NO: 438031 - DNA, 321 bp, Serratia marcescens
gtgaatgtgatgacccagttttactttcatcgcgacggaaccggaatcaccacctacaaaggggcagcctctacccgagagctggcgacgatggtggatcgcgatgtgaattttacctggaggccgcgcaatgatgcgggaatcatcgagctgacctacacgaagacgctacggcgacataacgataatacgccagacaacgtgtggggcgattttgcccggcgtggaactcgttactatctgactatttctgaggtggctccgtcggtgtggttgattcaggacaggaagtatccaacctacctgtgccgagaagagtaa

SEQ ID NO: 438032 - DNA, 771 bp, Serratia marcescens
atgttctttatgttaagcaattcgttagtatttgacccaaacacacaaaaactcagcctggcaggccagcctgaatcagcggtaaagttatcagcgcctgctgttcgattattattggagttcattagaaatagagaaaaagagctcagcagagacatgctgattacccgggtgtggcaagattttggctatacgccatccggtaacaacctcaacaaagctgtcagcgagattcgaaaagccttccagtcgttgggcgttcacacatcgccaatagtgacagtaccaggcaagggtttttattttgatgcggatgtcgtagcacagaagcatctcgataaaaatgtcgctatcgagccagttcctccaccgaaaacgaaaacaaaaaaaacatggaaagagagattacgtttatcaacacaccggccttactgtattgcggcattagccgtatcaacgttaatcggagggagctacttactttcagagtatgcgatgaatattccgcgaatcatgaggctaccgaatgaaaattttgagcagtgtactgtctggtggataagcacccctgaaaaaccgattattttatccaagcttccttccctgcttagtgagaataacctggactgccagcgcgacaagtatgacatctattattttagcgcccgcttccctctcacctctgcagatgatatttttattggctcctgcccaaaaagtaaaaagggcctatgtaaaacaattcgttataaaagtggggttgaaaagtga

SEQ ID NO: 438033 - DNA, 639 bp, Serratia marcescens
atggagctgggtgtcgatgcttcagggaccgcgatcattaaagtggcatccaaaagtgatgatattcagttcgttcgggtgacgcaaaagagaattcttaacccaggtacgccgcatgaaaaagaggtggaaatcgcttcatggaaaaaggacggtctgatagtaacacctgccaaatttgcgcttgctgctggctcaatgcgcgttgtgcgcctggtatccctatcacctccgacaacggaaagtacatggcgggtttattttgaaggggtgaaacagcctgatgttttattgtccggagaaaataaaacccgctcagcagaagcgaagctaggggtgaatgttatctggggggctttggtgcatattgctccagagcggcctaaggtttcgctggaaattaatcctgcactcggagaagttataaatacaggaaacgtacgagttccgctaaaagaaattggtttttgccgtgccaatgcatcgtgcaaatggattaaagaagacgctactgtgtatccggggacgcaaagaaaattaaagtccctgagtgcaaatagtggtgcaacctacaagtttcgctactttaactggctgagtaaaaccagtgaagaggctgaattacccgtcgcaaaataa

SEQ ID NO: 438034 - DNA, 3072 bp, Serratia marcescens
atggctgagataaaatacgaaaaacagattgccagcatttattatgcaatcactcggaaaagcccacctgaaaaagatttaaaatcacttagtgaaaatttacagaaaaatggacctgcgggtttagaggatttaatcacaaggctaatgaagacgcctgaagcaaaagaaatatatggtggatatcataataactttgagatcatgtttttcttttttaacaccattcacggtagaaccatgggagaaatagagtttaagctctggtcaaacgagtcatatatcaaccctaatctcaataataatctcttcaaaattactaaggaacttgtaactaatacggcaccatggcctcaattgaacgacgactggagtataaataatagttatgaatataattacccggtacaacgtcagatagatagggagcattttgtagacaacggaaatcaggctctttatcctggctctccctccccatcatcaacgaatgaaactgatagcacagctgatattcaaggcgtttttcatatcttaggggcaggaatcacccgtgatgtgattgagtattgggctccattaatcaataaccatgaaagaacattacttcaagccacagaaaaatttattaatgatcgtccatatctaagtaaagtaactaataagacatttatacaaaagttattcgagaatggttatgagcgttcagcatctgataatgaattgaacttttatgtcaatctattatcaacgggaatatctcgtggagagattgcaataaaattaatgaatacattaaaagaaagtaacaatgaacaagatcacgttgcaagggaacatttaaaaggcgcttcatatgtttataaagcaggagaactgcctcctttagagtatcaggagtttatcgccgaactttatttagctggcgcgggaagaaatctaaattctgaagcactatttggctggagccaaaaaatggcctcaggtaccagctacgacaaaatggtagatattttactcaatacttctgagttcactcgcatatcaacatatttagaaattaccgcatacgcgcaaaaagtgtataattttgtttatgggcatgatgcagatagcgccacaatacagcaacttgttaccctatccgataaaggtgagataattaaaagtgtaataaacagcgcactaaatacaaccgcgggcacaacaaatgaatttcatgagaagttccaattcatatttagagttgcagacagcctgaattataaaacctatgcaacattgacaaacaattcagataactatctttctagtagtgttaattctgggttgctacataatatcagtaaaatagaaatgtcaaaattagaaaaaatagatatcaatcttgcaacaaaaagcaatattaaccttaatcaggcagcaaacattaagcaaataagcattagcggaaaccaacctgtaaaaatagctttgcccgataatagtgttaatgatttcattttcgcttatatgaacggaagcatttcagagttaacgtctaaaaaagcaaacacattattaatgttaacacagtcagctgatatcaccacagcgccaactcattttaattttggtatcggtaacgattttcttggatggacaggaaataatagtaacaaatccggaaataaaataaacactttgtttacggcagatggcggtaacggagtcaactcaatatctgcgaactttatcaatactcgatctgaaataacaatcaccaaaggtattaatggtgctccagacacaaagagcatccaatatacaagcaatctcgaccagtttaaaaacttctcgcttatcgacttatataaatacacaggtcaaatatcaacattaacttatacaaaaaatgtagatggtactatatccagaacatcatcagtaatcagcaacactttagattatgatatatttattgaaaacaccaacatcattagtggagggaatattaatcaaattggcaaagcagggttctcatttataaacacagcgaatcaatcaaaacctgccactgcagatatagtttccgtcatcaacatacctaaagaggcggcaaatttttatattggaaaccgcagtgacggaccttactctgtgagtaatgttaattactcactgaaatttaagaatgatgtaacagaattaaacttccttaccaatcaaaaaaatggtgaagacacattaaccaaatcggtagaatcatctggcactaaaagcgttatttatgcaggagcatttgagttaataggggaaaacctgaggaatgttaatataaaaaccgtaggggaatcaaatgacaaaaatggtttgacgttaaaattaaccaagtcacatgttgaaaaaataactattgaaggcacacacaaaataaaattgaatactattcttggaggagataacaatactactgaatttactattgatgcttcaaaaaactctggtgtagatctttcgattgaacctgatttatttacaacaataagtaagaacatcgtcatttttggcggttcgcaaggcaataaatttgcactctcgaattcaatataccgagaggtatcaagcactataaaactcatcggcggcgatggggacgattattttgacgtgagtgatatcgtaacggccattggaggaaaaggggcggacatgtttaatattatgtcaatcgctaaaaacaccagtactctttatgattttaatgcacgagaagatattatcgctctcagtgatgataatttttatatttcaggaagaaaaaaaggggagaaaatacctttcgtagataacgttagtggagggagtagcttggacaactatggatatatagagttcatttcagacccagaaaacccattgcaatttaaagggaaggctggtgtcgtttccactctggacagtaatttgaaaaaagatacgtatatcgtggtggatcttaataataacaaaatatttgataactcagatgcattaataaaaatatccggacagccagatactgaactccttgcatcacaactatattattaa

SEQ ID NO: 438035 - DNA, 1038 bp, Serratia marcescens
atgtcttctttgttaaagcataagaatctcggattggcggctgggctgctggtcacgctgggcgggttttcgcagagcagctatgcgttgtcgtgtaagcagaacggcagcattcgccaggatatcgtgctggataaggccatcaaggtgtcgacggctaatactgctccgggggcattgctgtggcgttcgcagccctttacctctacgttccagtgctctgatacagacaatatgccgaaaggcgaagacgcatttttgtattgggatccgcagaataaaatgcaaaacatccacaattcaatcgaagtgggtgtgacatttaaagggattgacgtcaagccggtaaagaatcagcgtgagaatgttggtccgggtacagtatgtagcaacccgccacgttgtagcaggccggcgacgagccaaagcgtcaccgtaacatactctatctacattaaagcgaccggcaaggcaccgccggcgggcggaaaaatcacagacaataatgcctattcggtgttccaggttgatggcgtcggcggcttgaacagccgtccgaacagcaactttaacgcctacatctccgggctgggcaatattcagtttatctcctgcaacccgaaaatcaccgtggtggccaacaacggttcgacggtgaactttggcaccattccgcgtcagaatgcggtggtgggtaaaatcgagaagcaggtgccgttctcggtcgccgccaatatgtccgatccaacgaccggtcaagactgcaaaggggaaacgctgcaggccagcttcagcaccacctacccattgcaggataacagcgtgatcctgccgaccagcgacagcggcttcggtattttgatctcgcaggcggcgacgccaaatacgccgatcatgatgaacagcccggtcgatctgggcctggtcaacggcaccatcgttgaaaagaactttatggccagcctgaaatggttgagcaccaacccgaaggtagggccgttcagcgcatcggcgaatattgacgtcaccttcaaataa

SEQ ID NO: 438036 - DNA, 888 bp, Serratia marcescens
atgaaaaagatcggactggcgatagcgttagggaaagacgccaacagccatacacgaacctttattgaggctattaattatagcctcaagcattttcctgagttcaaacaaaacacgttgaaaattgtcaacgacgaaaaatcgtcggcaggaggagagcgtgccgctattgagctaattgaatggggcgcagacgtggttgtcggccatttttccagttttgccgcgttggcggcattaccgttatatctccgacaatccatacccctgatattaccggcctcgacagcgtgtgagtttggcgaatctaacaaagttaaccgagtcgaggtaatgaaatatcagaaagatgatgccgccttgatggcctattgcattgatgacagcattattaattgtcagggtggaaatgtttatgcggtggtacagaataatgcttatgccaaccggatgatagaccacttccctctcttggccgatattcaggtcatccgggagctgcctgggcgggccgaaaaaggggatacgtttattatcattggcttcagtgattttgcatcgaccatcatcaaaaagttgtctcaaacacaggtttatcggatcctgttggttgacgactcggatgatgttgaagtccataaatcatgcattttgcggcctcaacgcttgtcgcgtgttcgctccgcatcgcatatttcgcgacatggcatgaaacggccatactggaatgaaactctgctggcattatcgctggcttgcagcattacatctcaacaggcagccaaacatggggagggattaagtttcaacacctatcttggattacaggacttcgataaatttaattgctatggcgattgcatattgatctcagaagagctgatctag

SEQ ID NO: 438037 - DNA, 1242 bp, Serratia marcescens
atgaaattattggcgattgaagtcgggcaatttggcgattactacaattcgcgctaccaacaggtggaacagcacggtattgagctgtatgtcctgtccgggctggctgatagcgatcactggcatgccgggcgattcttcgtttccgacagtatggatatcaacgatttgaccacgctggccatacagctgcatcgggattttcactttgacggggtgttcaccttcgcggagaacagcgtgatcgccacggccatgatcgccgacgccctgcagctgccgagcatcccggttgaggcggcggtaaaaagccgcaacaaacttgccatgcgtgaagcccaccgcgccggtcaggcacctcacccggaatttcggctgacaccgacgctgcctgaagcgctggaggcggcggcgaccctcggttatccggtgatcctcaaacccacactgggttcggccagccagtttgtctaccgcgtcgacacgcctgaacaaatggcggagttcttccctaaagccctgatcggcatatcagaaatgagccagttcaaaaatgaagggatcactgacgtactgggccccaactcgctgctggtcgagtcgtatctggatggacgtgaatttctgatcgaggcctattcctgggacggcgtcacggtgctgggctccatcgtcgatcgtgtcaccctggaagggaactcgtttgatgatgatgtccatcacacgccgaccgatcttgatggtctggatctgcaacgcgtgcatgacgtggtgcatgccggtgccgtggcgcaggggctgacgcgcagcgtgatgcacgcagagatccggttccatcagggtaaaccctacatcgttgagattgccgcccggcctggcggcggcggcctcgattttatggcccgcatctccgccggctattgccctatcaaagcggtcattgatatggcgattgggcagaaaccggactacctgtgttattcgccaaccggtaaacacacgtttgcgctttgcctgatctcctcgcctgggcggatcgacatcatcagtgtccctgaacacattacgcaggatccgaacaccttcatgctgaaaatcatttcaccactcggcagcgtcatcaaacggccgccgttggggaacgatattatcggtttcctgggcgttaagggcgacagtcgccaggagacagaacagaaagcgatgaactacagccaacaggtgattgtgacgacacgatga

SEQ ID NO: 438038 - DNA, 1221 bp, Serratia marcescens
atgagtaatgaaaccattttgctgaacgtcacaactcgtcagatcagcaaaagaaacgaaaatctaatccttgccgcgtcgctggtttccactctggggagcggaatactcaccatcgccaacgcgctgatcatttcacagagcatgggaacggcgaaagccgtgggcacgctgttcattctgatcgcactgccgcaagcctttttctcggtgttgttcggcaagttatccgatacctacgacagaaagaagatctgcattattaccaacgtggtcaacgcggccatcgtcattggcgttttggccggcatcaatacattcaccgatccttcgatggtcatctttgtctgcagctttatgctgtccatgaccatggctatgttcttccctgccaataacgccatcatcaaagattcggtagagccgggcagaatggccgcattcaatgccaaactcgaaatggcagtgcaaattggtgctttgacatcggtggcgatcggtgggtttctcatccagctgattggcgtggatttcgtatttgtgctgaacgccatcaccttcatcgccagtgcggcgctgtttttcatgctgacgccgcgtgtacagggatcagatgatgcgcccgaaggcggcacggcctccgaacctgtgccggcaaccaccttgcccgcggtgagaaaaccctggctgatgctgctgtatggcgtcggcaacatcatcgtgacggtcagcaatatgctgttggtgctgttggtcaccaaacattttgcctccggcgccggcgttctgggtgtggttgatgcactggccggcgtaggggtagccatcgccgccgccatgacaccgttcctgcagaagcgtttttccttactgacgattgtcatgttcggctacgtggcgaatgcggcatttattgccctgcagccgcaatttacgttgccgtggctgatggtcttcttcccgcttggtgccgtgtgttttggcctggcgcgtatctcgtgccgcacgctgatgttcaacaccattccttcccattacaccggccgtttcttcggcttcagcaacgcaattgggctgacgtcagccgtcgtactgacctacgccattggcgagctggtcgatagcaccactgtcctggccggatatgtggcgttggcgctggctgtggtcttcctggcgcttttggcatcaaccctggtctttaaaggaaaaacaaaatga

SEQ ID NO: 438039 - DNA, 1056 bp, Serratia marcescens
atgcgtcctaacatcgccatcatcggagccggcattaccggcgtcatgactgcgctggcttgcgcccgtaagggcgcaagcgttgagctgtatgacgccgccgccattccgaacgctgccaatctgtcgtgggcacatggccgtctgtggaaacacgcgcacgaaaacaatgccgcgttgcaaccgctggctgcgcactcgcttgctttctggcgccaactcatcggcgcaggcagcgatgcagtcggttgtcagacgcaatccattcgtgtggtggatgacgccgattgtcgtcgtttggcgcagctgtatgacgcgctggcgataggttatgacatccaggatcccgtgttgtcgacacagagcagcctgttgcgcatgcacagttctaatcgacggctcttcgtcggccatgacgccattcttctcgatgcacaaaaggtatatgcacatttgtgccaagcgctggcaaacacgggcagcatcgcgttgaaaccgcatacgcgcgtagatctcggcaccattcgggaggggaggcattttagcgttaacggtgagcgtaaaagctacacggcggtgatttgcacggcgagccgccctctcacccgccacattggccggtcaggtgtcactccggcgccgcagtatcaggtacaccttgacgtgcacctcaacgatccccgtgcgtgtttgttaaagccggtgctgacgatgggagatgaacagcgatcatggtgtgtaccgtcgccggaacgtcgggtgcttaaagtgagcgccagtcgattttcctactcgatgccgccagacagtcacgacctgcaggtgtgtaagcggtatttgcttgaccgactacgcgttaaatacgaccaagtggatgtcgtcgtgtcgccctactttgaattgccggctgaaaaacggcaaggcactgcatactggggccggcacgatgtcaccggatgcatcgccgttgaagcgtgcgatgcctctatttttaagatcgccccggcgctgtccgagcagatcagccagtatgccattcacggagttaacgaatga

SEQ ID NO: 438040 - DNA, 1545 bp, Serratia marcescens
atgtctaaaacgctcgttattgccccaccgcccacgcccaatggcgatctgcacgttggccacatggccgggccttacttggccggcgatatttacgcccgctacctgcgcctgaccggagaacgcgtcaactacgcgaccggcactgatgacagccaaacctatgttgtcaccagcgcctacaaactgggcacatctccggaaaatttatgccgtcaggctgccgacgacatcaggcaaagcctgaatgactggggagtcgagctggatggttatgccccgttcgacgacggttataaagaaatggtgtacgcctttttgtctcccctacatgagcagggcaagttccggctcaaaaccgtcaggctgccgtactcgacacaccgcaatacgtttatggtggagtcgttcgtgtccggtgaatgcccgacctgtctggcgcagtcccgcggtggattgtgtgaaagttgcggacaccccaacaactttgatggattaaaaaacccggtggcgacattgcccccctacgaatcactggagtacagagaaacggagatcctggtgttcccggtagaagcatacagggccgagctggagcgttattacgccgcgaaaaaaggcagctggcgcctgcacattcttcagctaatgacggaactgttcagccgagagctgatcgatttccctatcacttaccccattgcctggggattgccatcgcattttcccggcacggaggggcaagtgctcaacgcctgggcggaggggatgccggcatcgatgtactgcaacgcctgtggcgaaaacaacgcggcgccgacggatgcaacctggcgtgctgaaacaggtaatcgcctggcgtatttcctcggcttcgacaactcctatttttggggagtgacgcatcttgccttgctgatggcgcatgagggtaagtacctgttgcctgacaccatcgtgcccaatgagttttacgagctggaaaacgccaagttctcgaccagccgcggccatttgatctgggcccgcgatctggtaaaaaccctgcctcgcgactatgcccgtttctatctttgcctgaccagtccggaacacaaccggaacaatttcagccgagatgccctcagtcaaatccttaacgaacgactgatttccgcctggaatgcgcttgcccgtgcatacgccacgcaacgctgggaattgcgccagaatgacgatgaggccaatactcctctgctggtcgacaccatgcgtcagcgcctggctctgccctgtcgtctcgagacgttcagtcaaagccgattggctgactggtgcctgcaccatattgggcgcttgcaggagctggttgcggaagaaagcgatatcagcctgaaggcaattaatcaacagttacgggtcctcgtcgacggcttggggttgattatgattgaccttcaccacgctatcgtgaatgccaatccgctgaacggcagtgaacaatgggccttgcctgaactgccgccgatcgccacattcaccaacagtgggtcatatgcgtcctaa

SEQ ID NO: 438041 - DNA, 189 bp, Serratia marcescens
gtgtgcgaaggtgaaaaaacgcgctttaaagccggcgacaccgttcaattcccgccattcacccggcattgcgtgctcaatgaaagccccgagccgttcgaaatgtacagcatttggtgggatgaggagatgtcctcacgttttgctcaacgtcatcaacaaaaaaatcaggtgtcagaccatgtctaa

SEQ ID NO: 438042 - DNA, 1245 bp, Serratia marcescens
atgcaacacaccgatctattaatgattggctgcggcccatcaaacctcgcagtaggtgtcgcacttgaagaatgtgctgaagttcacaacatcaactcttctctcattctggaaaaagacacttctgtttgttggcataggggaatgttatttcctgaagcgcagtctcaggtttcctttctgaaggatctggtcacgcagcgtgatccgaccagccggttcagctttctcaattttttgcataaaaccaaccgcctggacagttttgtcaacctgcagacgtttaacccctaccgtaaagagatttcggattatttgcagtgggtagcgggtggcctggagaaaacacaggttatttacaacagcaaagtagtggcagtcagaccggaacttgcatcggaagggcaaattactggctggcacgtaaccgttgaaaatggcgacagttaccgcgcccgccgtctgatttttggggctggccgcgacctcaatatcccggctgtgtttgagcatgtctcaccggataatgtgatccatagtgccaatttcctgacggctctcgaacaaatgaagtgcggtagagttaaccgtatcgcggtaattggcggcgcgcaaagcagtgccgaaatgtatcaatcctgccttgagcatttccccacggccaatatcaccatgatcatgcgctccatcgggctggtgaattatgaaggcagtcaattcaccaatacgttatttcagaatgactacatcaacacgtatttcaattgtgacaatgcaacccgtgaaaagaccctggcggcgatgcataccaccaactattccggcgtggccccatcaactttgtcagggctttatcgtttccattatttgcaggagttgcgtggtgaaaatcgggcggtaatgctgacacagtgcgatattttacatgcggtagatgatgacggcggtgtgctgatcacctggaaagataacaagtcaggccactcacactctgcgcgttttgacgtagtgttgctgggtacaggatataagaataaaacgccgacactcttcgacagtttgtcaaatcatcttgatatcgaaaaaatccgcgtcgaccgcaattatcgcgccgttttgccttatgcccccggcgtttctctgcatctgcagggggttaatgaaagcacgcatggcattgcagattcattgttgagtgtactggcattccgttcaaaagaaattattgacgatatcacggcctga

SEQ ID NO: 438043 - DNA, 1128 bp, Serratia marcescens
  misc_feature (1008)..(1017): n is a, c, g, or t
atgggagaggtacctggagaaatagccttatcacgccttacgatacctgagtcatggaaaagtatcccattagaccttaaagtcactagtgataacacttatagcttaagtaatgatggggttgaaatattaaaaggaaaagttggtgagcttgcaagtggtaatggcgtatccctgctaattagtgggcttggtgccaagattggcactgagtttacaattgtacagcaaccaaagttggttgctattaatgatttgctcgcggttctgtcggtccaggataaaggaaaagatacgggggtattggcacttagtttgactggggccgacccaatattggtgcgtaaaaccctcgatagcatcactcgcaattatttactgcaaaacgttgagcgtaagtcggaagaagcagcaaaaagcttagagtttttaaaagaacaactccctgaagttcgtggagcattagatcttgcagaggataagctcaatcgttttaggcagcaaaatgattctgtcgacttatcgcttgaagctaaatctgtgctggacagtattgttgcggtagaagcacaattaaacgagttaacttttcgtgaagcagaaatttcaaagctgtatacccgtgaacaccctgcctaccgggctttgatggaaaaacgcgctacgcttgagcaagagaaaaatcgtctaaataagcgtgtaggaggtatgccaaaaacgcagcaagaaatcattcgtttaactagagatgtagatgctggcaaagaaatttacatgcaattactgaataaacagcaggagttaagcattaccaaagcaagtactgtaggtaatgtccgtattgtggatcctgcggttacacagccaaagcccgttaaacccagaaaattgcttattattttgttggcgacgttcttggggggaatgatttcagttgctattgtcttgttgaagacaatgttgcacaaaggaattgaaactccagagcagctagagcaagatggaatnnnnnnnnnngaattaacgtatatgcgagcattcctctttcagaatggcaacagaaaaaagatcgggagacgttgttatcttcaaaacgtaaatcaaatacacgttctaatagtctcttag

SEQ ID NO: 438044 - DNA, 180 bp, Serratia marcescens
atgattgctcgcttcagcatgaatactgtgaaagaaatagagatcagtatgcggcgctttgaacagaatggcattgatattaaaggtgttatactgaatgcggtggagcgcagagcgagtagctattatggcggatatggctactatcaatatgagtaccgctcgaatgataaggcatag

SEQ ID NO: 438045 - DNA, 1914 bp, Serratia marcescens
atgtcatttattttgcacacagaagcaccatcatcagaagataagatcgatggcaatagccataaaaacatcgctattaaaatagcagctactttaaacaacgataatgtgaatataattggtattgatggcccattaggttctgggaaatcaacagtaataaaattattagaaaaagagctttccgatgaaaaattcaacttcataaatttcgatgctgaagtatatcaacaaggttccaccaagaaagctctaattacaaaaatatatgatggaattctaccaagaataccacgagatcttaaaagcaagctggaagagcataaagacaatgctcttggaaataatataacttacaaaaaaacccaagatagcgaaattagcttatgggcagtaatattcattacatctctatttatttgcagccagtcaatccggccactccaattggagtggggtaaaaaaccagaagattttagttatattttaggttctattttaatggtattgttaatatcaccaatcctcgttacaggagctttccttgtacgatcattttgggataaatcacttaaaattggaaatttaataaaaagaaactctgtagatgtgattacagaaaaaatgttaatttcaaaagaagtgggaagcatagaactacataacgcaataagtggcttcaaggaatgcattccacctggtttgaatttcttgttagtaatcgataacttagataggatcacccccgataaagttaaagagatatggagtgatattgagcttattagtaactcttcagagaagagattaaaattactaattccttactcatctgagcatgttgcaaaatctctttccaatgatctctacgagggaaaagaatatatatcaaaaagaatacctattagttttcaaatccccccaatactttctgctggttggaggaatacgttctctaactattggaaggaaagtttccctgaagataaagataatctttatcatgataccgcagagctcattgaaatttggcttcctaaaagctatcaacccgtcactccacgctacctgaagaaactagtaaatgatatccaaatactatccatctctactccgtttgaaattaaaaacattgcatgtgcttattacattctcgcaacaaagcaaaacgaacatccttttagtaatttgctaatagagaatttcgatgacaagcaatttgatgattcattaacagataaattcaaaaagagcattagaaagcttcagagagtatatgggaatgaccgacaaaaatggatcgatgaacttctatgtattaactatcagaccaatgctaccttggcacagggtgagttaattgatgaacctcttaaaatagcattaaaacaagctaattccgacgaatttattagagtatcagatatgtttggcttccattctgcttggagaaggataatagactcaacagacccaactgactggttcgtaactctttctaaacttgcacttatcaaaagtgatatggttaaggaaattcttcccgaggttatcaggtctctagacactttagatgaagtgtctgcttctacagtggaaaatgataactttttaccttcgcttaattacctgaaagaaaatgaatttgaagtgcatggtaagtacattgatgtcttgaaaaacagaatatcaaaaaaaatccttacttatacctcattggatgatgattcactaatggagttagggatttataactctgaaatacaagatgtactatctcaatgtaatttaatgtcaaaattgttaaatgataatattttaaagactgcatatccaaaaccaaaatcaattttctatattcttaaccttaaagataaatctcaggaatatttaaatttagaagtatcaaactag

SEQ ID NO: 438046 - DNA, 189 bp, Serratia marcescens
atgtcattcaaatacaaatctttggcccatcaggcggccgaagcggaacgtcgcgcccattttgcagacgctgcagaactgtggcgccaagcgatcgatgcggcgcgggcggtagatgtagtctgggttaacgtccgcatagagttttgcgtgaacgcggccgcacgctgctggggtaatgctcaatga

SEQ ID NO: 438047 - DNA, 564 bp, Serratia marcescens
atgacactaacgactgacgagctgcgccaaatcgtagaaactgaccacgtacagtgcggcgatgctgccgtaatggcgcgcgaactcctggctaaccgagaggcgcagccggtggcgtggcgccacgataatggccaattagcaggaattgaaatcacccgcgctaaaagtgttgcggagagttggatagctgagggcgggacggtcacaccactctacaccgccccgtcaactccatccagcacacaagctgtagcatgggaaatgcgctactggaacagcggttacaacatgtggcacgactgggagcgcatcacagcagaacagcacgcagagatgagcgtacagcacgcgacggacaacgattacgagttccgcgagttgtatgatgcaccgccagtgccagcagtgccgccagaggcaacacccgagaacattgaaaacctgctggcagacatcactttgtttttcaccgctggcagcttatcgcacggtggagcggtcatgtttgccgaagtttggaacgcctgccgcgccgcaatgctgaaaggagaaagaccatga

SEQ ID NO: 438048 - DNA, 210 bp, Serratia marcescens
atgaatctgacaatacaacaaatttgcgacatctgcgacctgatgggcatcaactacgagcagcccgatgccggtcaactggaaactgaggtgtggatcggtgagggaaccatcgccggtgaaaatggcgaacctgactatcatggcctgatagctcacgatgctgaatacccagaggaaggcgcagtagctctggagaaagcattatga

SEQ ID NO: 438049 - DNA, 513 bp, Serratia marcescens
atggttcagagatataaccctgattacgtcatgcacgcggcgcgctttgcgccgtttgccagagaagctgagcatggtgagttcgttaagttctccgattatgaagccttggtatcagaactcgccagcatccggcagatcaacgcccaaacgctgcaggtaaagctgacaatggctgaaaccatcaaagaactgactaatcgagttaatgcgctggctgtggagaatgcgcgctgtaagtttgaggtttcacgctgtcaccagaccatcgacgagatgttcaaaaatcgtgacaaatggatcgacaaagagtggctggcagcaatctggtcaacttcaaagaagttgatgaatgaaaccccagccactgacgcagcacttgcagctatccatgcgcagggagttgagaagtttgccgacttccttgattcgccgatcgacgggcagcactgctatcagcatgaagttggcctggcgcgtcatttcgccagaacgctgcgggaggccaaatga

SEQ ID NO: 438050 - DNA, 144 bp, Serratia marcescens
atggtaagcctcaacgcccgcatacagcacaagtacgacctgaccgggggcgatttcgcccctaagcgccaccacggcaaacacctcttctactttctcatttttaccctgtgcctgctgactgccggcgcggtctggagttaa

SEQ ID NO: 438051 - DNA, 180 bp, Serratia marcescens
atggcacttgaattcacggttttggctggaaagcctgatgacgacgatggccgctactacgagaacatcaagtactgcaacagcgccgacagcttagaggcagcgcagaaaattatctcggataacaagctgtatacgtatccgatttgccgcatcgaagtaactggattttccagctaa

SEQ ID NO: 438052 - DNA, 1077 bp, Serratia marcescens
atgtatttttccaaagagacattggcggctaatagccgcctcggcggccactggaatgagctgtgggctaaccgaaacatctggaacgcccagcacaatgcaatgctcgccgcaaaccgtgcgcatatgacgccggaaatgctggcgtgtaatgcggtcggtggtttcgctcgcgaattctgggctgaaatcgataaccagatcctgcagttgcgcgaccaggaagaaggcatggaagtcatcaatgatttgatgggtgtccagactattctctctgttggtaaaactgcaaaactgtataacgttgtcggtgatattgctgatgatgtatcagtaagcattgacggccaggcgccgttctcattcgatcataccgaatacggcagcgacggtgacccgatccctgtcttcactgcaggttatggggttaattggcgtcacgctgccggtcttaattccgtaggtatcgatcaggtcttggattcgcagtctgctaagttgcggaaagtcaataagcgccgggtggcctactattttagcggtgatgaaaatattcgggttcagggctatccggctcaaggtctgaagaaccaccgcaacagcaaaaagcttaatctgggggccggtgccggcggtgctaacatcgatctgaccaccgcgacgatgactcagttgttcgagttcttcggtaagggggctttcggtacgttggcacgcgttaacaaagtttcgcagtacgacgtgatgtgggtgtccccggaagtctgggctaacctgacgcagccatacgtggtcaatggtgtagtgagcggcaatgtattgcaagcggtaatgccatttgctccggtgaaagaaattcgccagacgttcgcgctgaaaggcaacgagttcatcgcatacgttcgccgcaaagatgtaatttccccactggttggcatggctcagggcgttattcctttgccacgcccactaccgaacgttaactacaacttccagatcatgtctgctgaaggtctgcaaatcactgcggacgatcaggggctttccggtgttgtctacggcgccaatctggcgtaa

SEQ ID NO: 438053 - DNA, 2655 bp, Serratia marcescens
atggcggagcaggacggtgggagcttggtttaccaagttgatattgaaactgcaaagatggtcacaggtagccgtcaagcagctgtcgtgttaggggagatggaaaaacaagccaatcgttcatctaaagccgttgatggactgacatcctctgccgatagtgctggtaggtctatgtctgggtttaaatcagtgttgagcggtgttgcaagcgcaatatcagttgctttgattatcgattacggcaaggcttttttgacagtcgccgataacattgcgcaacttcagtcacggatcctcaggctatcaaccgatgccgcaacagcaatgtctacatttgaaacgttgacgtccatagcatcggctactggcgctagcctcagggatacggccaagctgtgggaggcgatgacctccgcgctaaaagggactggagcaaccaacgcccaaatacttgcattaaccgatacgcttcagaaaatagggcgagttggcggctcttctacagaagagatggcaaatgcattaagacaattcggccagtctatttcctccggcacagtaagagccgaagaatttaactccatccttgaacaaatgcctgaacttgctaggcagattggcgcagggatgggactatcaatgggacagttgcgacaagcaatgctcgaggggaagttgagtgctcaggatgcacttaatgcaataatgaagcagtcatcggaagttaacgatgaattctcgaagctcccaaggacgatggagcaggcgagcaactcccttacgatttcccttcaaaatctaattgggaaaatgaacgaagctatgggcgctagcgcaaccatggtgaaggtaattgactctattagtgcagcaatagataggctaagtggaaaaactgagacggcatcacagaagattgcagatctcacgtcaactggcgaaatgtatgcacgaagagcaagaacgtggtcatggcttggccttgatggctggtcagaacaaaatcaggctttggcagctctcagcaacaaagcagccacgctaatcggcgacatgaattcggtggcaaaagcttcagaaaacgcagccaatggaacgattaatttcaataactcaggcactgcaaaccctaagcaagatgcattggtgaaacgttctcagcgacgcatagagctatcgaaacttgaaggggaatcaagggccaggctacaggcagtatatgatgctgaagatgctggcatatctaagaatgatccgcgagtgaagaaactccaagatcagtatgccgagatagagcgaaataccaaagcccagaaagaaagcaatgcggagggcaagaaatcagccaaccaggctgaaagcgttgcccagaagctggcaaacctgaagcagcagtcagagcttgcggcggactcaacaagcgagcttagccgagagcaggcgattcttaccgcacagcaatcactggggaaaggggctacacaggcccagatcgctgaggcaggcgcttacgctgccaaaaagtgggacactgccaacgctatcaaggcgcaggctgcagcagagaagctcctgccagaagccaaagagaatgccagctacgcgcaggacgttaaggatttaaacacggcgttagcggccaagaaaatcagccaggagcagtacaacatcacggctgagcaactggagcaacagcatcagattaacttggcaaaaatccgggctgaagccgtggtaagtcctcaacagcaagccgccggcatggttgacccagtgcagcagcttgccaatgagaatgcgcagaagctggcgttgatacagcagtttgaaacggataaagggaagattactcaacgcggaattgagctgatgaatgctgctaacaagcagtacgaacaacagcgaactgccgcgcagtgggaaatccttagccagcagagccttggttacgacatgctgacgagcgctgttgatgccttctcgggtaatgcctcaaacgctataacagggctgcttaccggcaccatgtcggcacaagaggcgatgaggtcgcttggtaacaccatcctgaacagcgtgataaacagcatcgttcaggtgggtgtggaggcgttgaaaaactacatcctcggccagacgcttggcgctgcctccgtggcgtcatctgtgggtatggctgccaccactgcatcagcatgggcaccggcagcagcgatgacctctctagcgacgttgggggctaattctgcacctgcatctgcagggataatctctactgttggggtagccaagggcatggctttggccggtgcgcgttataacggcggccctgtgagcgctggcgcgatgtaccaggtaggtgagcgaggcaagccagagatttaccaggcgagcactggtaagcagtacatgatccccggtgacaacggcaaggtgattagcaacaagcagatgaccggcggcggcagtgcggcgccaaccatcattatcgaaaactactcatccggcgctggtgtaatggatacccaggccagcaaaggtgctgatggtggcgatgtagtgcgcattgtgctggcggatctgcagcaaggtgggcaaatcagccagggtatatcccagtatcaccaggcgcctcgcaaagccactgaatag

SEQ ID NO: 438054 - DNA, 2145 bp, Serratia marcescens
atggctacaacaccaactacgaatccagtacctagtgaagcaataccggatttaaaatttaacgctggaaaagttgatcagatagttaactcagatgatgagttttactatgaccggctgggagttaaacgttatacgatacagggagctatcaacaatatatctcttcttggtaaaccctatgctacgttggacttggctaaggctgatattgcggccggggtgataaaaaacaatgttgtttttagtgtattatctgatattgatgataatttaattgacctatatgttaataacgaaggtattcctaattacactggtaaatctgagattgcagcgagctatgtcgagcgactggcagcatcaatagagctgctgaaacagttcattccacaagaacaaggtaataggctcagcggatatctatttatgtttactgatgtgaccggggaaaaaggtcttataggaatgaatgaggacggtggtcttgaagttgctggtattcagggggcaattcaggactacttatcaaatctggttacatcttcctttgctggtaaaatttctggttatcaggtggtcatctttgcccaggatttaaagacggttatgttggccattgatgatgacggtgggctgtggttgcctggaatgagtgaggctgtacaagatgcgattggctcagtcggcccagcattagtgcgtccatacaatggatggaatgcgctgtttgcaaacaaggattcacaaacacctctatggagtcgtcagcctgtaatttctgccacgccagtaaccaaaaatggcgtgtcatttgtatatgaggaaaatggcatactgaaatctggactgatgccaactaaatggccggcaaatgaggtgtacgggccgccatgtgaattgtcacccattgcgcgcgaggttcatgcatactttgggagaggccaatctcttcgtgtcggcggtgggaatcggatctcgacgctgaaccctttatttaaagggcggctattcatgttctcaggagccggccaggacaggggggcaggagtgccaacagatggcccagtatcggattcgacgttagctggatttactgatgcccagccattggcatcacgtcagagctgccagacgcctgctctttaccgcattgctaaacgacatattgatcgcggagtagatcctgtcgatatcccgtcaatgtttactcgtatggacgcgcgttctggaaccggttacgccggtcttaagaaggggacgcagccttacatcgatgggattacgtcttgccaagcatttgcggatcgtgtccgcgctgtcggaaaaatccccgtcatcaaatgcatcggcataacacacggcgaagatgatgcgggaagcggaacagtcactaaattcggcgactacaaagccatgcttgaagagtgggttaatgactcaaatgcggatctgatgcctattacagggcagacaacgcctattatttgggatgttgaccaaatggggggctggatcagaactgtatggccaccgaccggccgcacggtttatggcgatatcgtatcaatcgatcagtgggaattttcattgtctcgttctgatgtaattatgtcgtgtccgaaattcccattgaacaggatgttcccgtcagatttccagcatctaaccaacgttggctatgcagttcttggtgaataccaaggccaggctgaggatgcaatgatctatgacacatcaagaacgatgaaatggaagcctgtacaacctgaacaaataattaaagtaaatgaaacgacatttgatattatttttcattcgccatttggcggcgcattgcgtttcaatacctctattggtagcgcacctaatagcggcattgatttaggcctggcatcagccaatgtattatcagttactcaagttggtgatattaagttcagggttgtcactgacgcccctccggtagcgggggattggttcaggtttggttttaacgcaaatgaccccaagacgattaatggtgtaactttcattcatcctcttgttaatattagtgatgactctcaaatatcaagtgaatacgtatcaggactaaagcttgtaaactggtgcgtcgggtctcgaattttcattcctgcataa

SEQ ID NO: 438055 - DNA, 897 bp, Serratia marcescens
atgactagtttggctttcaatacattaaaaccctatacaggttctcgggccccaattgatttgtctggtgcatatcttgatgcaactgctttattcaatgcgcacaaggcgcgagtaacagccgacggcggtattattcttaacgaagcatcgtgcaagtctgagattgagttcattatcaatctcgggttgtgggatgtaatggcgtcagtggctgcacctgagtgggggattaaacgtgatagctcaggtaatattttgaaaatgtatggcctgggaaagacgccagactatacatctacccaggttggcacagctattcatcctgtgacgctcgacactagcaaagaaattccgatggccgtaatccgccttgacggcggtggcagtcagctcgttagtggatctatgacactacaggctgctgcgtcgctgccttatatcgtgtcagtcaggggattggattacgacataactgataaccaggggatcgcgcttcgtttcaatggtccgagctggccgcatttttactattggtgcgtaagccgaaacgatcaaaaattccagtggttctattcctgcgaccggtttaatccgccaactggtgccggcggcgccagcgctagcaaagcatgggatggtacagttggtaaatcagccgcattggtcagtagttctgagggacagcttcgcgcatatgacaacggctcaatatttgcgacttcatctagctaccctccgccgaatattgcagggatcggcggaaccgtaactctgggaacgcgatatgcaggggagcagagccaagcagctgcagcatacggtggcatcggccgtattcgaattttctcgagcggaaacgacacggcagcagctcagatttcagcgcgcgcgtag

SEQ ID NO: 438056 - DNA, 240 bp, Serratia marcescens
atgggcagcatcaccctcgccggccggcagatattcattctcaacgaaaacgacagatacccagaaccgcagcaaaacagtcccccaatgttcgcgattcgcgaggacgaagaaggccagcactggctttatgtttggcataaagggcgctggccgctcgtcgcagaaacgccattcgaaacagagggcaaggccgttgatgcggcgatcgcattcgactttgccacgctctacaaatag

SEQ ID NO: 438057 - DNA, 279 bp, Serratia marcescens
atgaaagacgcaagctttactgattggatgattatcggcctgatggctatcagctacctgttcattttgtctcatgcgtggaagtggctgatacagattatggccaaccggttcgatcggtttttaaaccgtaacagcccaaaacaattagctatcaacgcactgtgcgatgcctttgaattgcagaaaatgaagcaaggcgaccgcatcaccgcgaaaacagtgaacggtctgtgcatcaggatatcgcgggagccacgcgaagaggatagagcatga

SEQ ID NO: 438058 - DNA, 225 bp, Serratia marcescens
atggataagctacgcgaagagtttgaagagtggttctctaaaaaatacccacttaaaaggccgtcggtaagaaaactaaaactctgggaagcatggcgcgatagccgaaagagtgtcgtggttgatgttcctgacgcatgcgcatttagcctttgcgaattggtctgccgggatgacgttatcaaggccatccgctctatcggcctatcaatcaaaggggagtag

SEQ ID NO: 438059 - DNA, 1017 bp, Serratia marcescens
atgtcgacaaacgcacttaaagcggctgccactggcaagaccgcagtacaggctcattcagaaaaaccaacaactttagccggattgctggcagatccgaaaattaaagcccagatggcgcttgcgcttcccaagcacatgacagctgaccgcttagctcgcattgctaccacggaaatccgcaaggtgccaaaacttggcaactgtgaccaagcaagttttctgggcgccattatgcagtgcgctcagctcgggcttgaaccaggtggcgcgcttggccacgcatacctattaccattcgataaacgtcagaaaatcaatgggcgctgggaaactgtttccaccgaagcgcaactgattatcggatacagggggatgattgatttagctcgccgctctggccagatcctaagtatttccgcccgcaccgttcatgctaacgacaaattcagctatgcctacggccttcaggaaacattggagcatgtaccgtgcgaaagcggcgaccgcggggaacttacacacgtttactcggttgcccgtctgcgagatggaggaattcagtttgaggtgatgagcagagctgacgtcgaaaaggttcgcgcaacaagcaaggctggcggtaacgggccttgggtggatcacttcgatgagatggcgaagaaaaccgttatccgccgcctgttcaaatatctgccggtatctatcgagatgcaacgagcagtggttatcgatgagaaggcagaggccggggttagtcaggataactcttccgtcatcaccggcgaatactcgattgtcgatgatgaacaaaatagcagcctaactgatattcaggaagatgcacgccaacaagtagaggcaatcctcaacagccttgacccaagccacgcagatgcaaaggcgctatttgcaaaagcagaagcagaaatagcggaactggctccaagcctgggtgaagacatttacgcagggttcgtcatgaccatgaacgatatgcgtgccgagtaccaataa

SEQ ID NO: 438060 - DNA, 915 bp, Serratia marcescens
atgttacagaatgctggaaacatggaccgtaccaaatacctcggcggcagtgatgtcgccgcaattcttggcattagcccttggcgcaccccgctcgaggtttatttggataaggtgcagccgcgcatcaagacaatcgacccaaacaagcaaaaggttttcacccgtggccaacgcatggagccttacgttattgacctgctggcagaagaaactgggtttgaaatagtctcgcgcggcaaccggtatattcacagagattacgacttcattgccgcggagatcgactttgaatacttcgaccctgttactggccaagtggagaacggagaaataaagacagttagcccattcaaggcaaaagaatggggagaggttcagaccgatgcgatcccggttcactacacagcacaggccatgcacgggatgatggtgacagggaagagggtttgcactttcggtgttcttatcggcggtgatgacttcaggatatatcgcgttgaaagggatgaggaaacaatcgaggcaatcctacagagagaggttgaattctgggatcgcgtctcacaactaaacccgccaccggccactgcagtaagcgacatcatgatgatgttcgaaaaggatgcaggaacccgaattgaagcagacggaaaagttatcggattatataacgacctccgcgagatgaaaggaaagtacaaggagttagagcaggaaatagcgataaccgaagaaagaataaaactttacatgcaggatcacgcaatcctgaccattgaccagaaagaaatagcaagttggaaaagccagagcagcatgcggtttaaccaagaggcattttcaacatctcatcccaagttattcaacaagttcaaacaggcttctatctcacgcgtgttccgcctgaaataa

SEQ ID NO: 438061 - DNA, 483 bp, Serratia marcescens
atggaaacaatctggaagaaaccaacagagacgccagacattaagcgtggcgatgacattaaagtgtgggggctggttgatttttaccagtattcgcaaaagtggggaggcctcggtgctgacggtaaggccgaatgcagcctaacccttgaaaaagttgaacgccgcgttatcgaaatgcggtatgcacttaccgccgcaacagatgatgaactggctgaattcaaggatagcggggaatttcctgaaggcgccccaggctggcttgataactgggtcagtgaagacggtgatttccttggcataaacggattctatcgcgattatttcgaagaaggcggcatttactacgactacctgaaaccagacgatagcggcaggttggtgattaagcacgcctacggtcgggacgaaccgagcaccgtttttctggcttgggccgacttcattcgcccttccgtacccgacgaattacctgagtaa

SEQ ID NO: 438062 - DNA, 201 bp, Serratia marcescens
atgaaaactctgaatatttcatggcttggcgcatgccctaaatgcgacaacgagacgcacaaagttgagacggaaaaaggcatcggttgctggctatatgccggtgacaaaattacctgtccacagtgtggcaacactggcgaggtggatgtcgatgactgcgctttcgcggtgtgggatgagcaggagcaggcattatga

SEQ ID NO: 438063 - DNA, 408 bp, Serratia marcescens
atgagcactgagaagctgagcgaactgagcaagccggttggattcattagcaagctggcgcaaacctttctggagtgcggggaaacggcaagcatccggccattctttgatgtgcaagggagttcccccctgtactcgcaagagtacgtctccgccctgaaacacgaatccgcggttaactgggaggcagcggcatcgctgaacgttgaaaaccaggaaatgaaaaagcgcatcgccgagctggaagccaagctggctgcgcccgcagcacctgagaagtgcccatgttgcaatcgcagatacaccctagagagctatgcccacggagagtgtgctatttgcggtgaggcgtttgatgctgcccatgctctacgctcgatggggttcaaagtcgagggggatgagtag

SEQ ID NO: 438064 - DNA, 372 bp, Serratia marcescens
atgtcacaactgaaaatgtaccgcgtcacacggaagtcattcatcaacgggcatctgctggaagagggcgacacaatcgaatacggcggcaaggctggcgacaacctgcagctgatcgatggtgatggcaatctgctggaggagggcgacacaatcgaatacggcggcaaggctggcgacaacctgcagctgatcgatggtgatggcaatctgctggaggagggcggcggcgacaacgacgacagcgcgaagctggccgcactgcagcagcagtatgaagaaatcttcggcaccaagccgcaccacaaagcgggcatcaccaaattgtcagaagaaattgaagccaagcgcaaagagttaggcatcaactaa

SEQ ID NO: 438065 - DNA, 852 bp, Serratia marcescens
atggtcagcaggtgcgaactgctggccgacgtgatacccaatgaaaaggaacacggaatgactgcattgaatttagcaaacaacgctggcgctgtcactatgtccagcctggatatttctgtcttagtcgaaagccggcatagcgatgtaaagcgtagcattgaaaggctggcaaagtctggtgttatcaaacttccgccaatggcgaaagttgagaataaacagtcaaatagcccaaaccgatttattgagtgctacttttttgaaggggaggtcggcaagcgggatagcatcattgttgttgcccagctttccccctctttcaccgctcgcttagttgatcggtggcaggaattggagaaggcggttagcaggcctgcatttgacgcagccacagccctgaacgatccggagtttcttcgtggcgcactgctcacctacagcgagaaggtcattgcgctggagagcaccaacaaggagctggcgagtcaggtcgagcatatggagaaccttttcaaggacggaatgacgccaacgcaattctgcaagatgctgaacggtgttaacgtcatgcaggtatgccggtatctcgaaggccgcaagtggctatacaacgagagcaagaccgggacacgctggcgcactggaagctacgcgcgcgacaaatatctgaccgagcatcagagcaaggttagcgtgcacggtggcgaagagttcgtgaagttcacaccggtgttactgcataaaggcgccgtccggatctatcagctatacctgcgcggccagttgccaatgaagaataattggaatggcgtgttcacccatgacaaggaactgaaaggagcagcgtga

SEQ ID NO: 438066 - DNA, 513 bp, Serratia marcescens
atgtttttgaatgaatataacggcaggatatttcccactggcgaattcaaaaccgatgattttctgatcactcttaaagaggcgttcaaatgtcattggagaaatggccatcatccagatcttgggaaagacactttatttgataggccagaagaagttcttggctttcatcttaggaaggttcacgttaatttaggtcaatatgcgtcatattcttattcatgcacagaagagtgttgggatgagtggtctttcggcgctatagatgagcgtggagcattcagagcaaaacctaccagtaatgcttatctaatatatgcggttaatgaaaacagagatgctgccttacttgcgtattgggatcctccagctcataccaaagccaatgaaccagtttggatggagtctgttttaaacttcactcgactattccacaagaagacctgcatagcaccaatgtcgagagacattgacccatggaatatagtatataaagttaaaaagcccgcgtaa

SEQ ID NO: 438067 - DNA, 333 bp, Serratia marcescens
atgacaaagcttgggttcgtgattaaaggttcggcttctagccgctcgcctctaaagcgtcgcaaggttcgtgtgtccgctacccaactggaagcagcaccaaagacagtttttagactggctaacacggatggtaactacgttcgtcgcttagcggtgttaaggaaacacagaaagctcttctatacacctgttgctatgtgtgtaaaggagagctcacacctccctaaactgaagcctatctctgcagtggaatctgaagagctgtccttccgcatgctgaattcattagaagaccgtatgaaggaagagctattcgatgtttttgaatga

SEQ ID NO: 438068 - DNA, 726 bp, Serratia marcescens
atgaaaactcaagcaaccatcttcagcttcgaatcatcctcaaacatccgtgcagtagaaatcgacggctcaccgtggtttgtcgctaccgatgtatgcgatgcccttcgcctgtcaaaccccactatgtccctgaaggcgcttgatgaagatgaacgatctaagctgaacttaggccgtcagggcagtgtaaatatcatctccgaatctggcctctacacgctgatcctgcgctgccgcgatgcggtgacgcctggcaccatcccctaccggttccgcaagtgggtgacgtccgaagttctgccggcaatacgccagactggccagtaccagcatcgggcgccggagacgttatctgacctggcaggcactggaaccacgatgacagttcgcgacgcgcgccgcggcaagaagaagaccagcaccaaggctgcaagccggatcgccgatgcatgcgtgccggttatcctggaggccatgcgtgaccagtaccactacgccaacacgaacgttggaccggaagaagtgatcccctccctgctcagcgaagagcgcaacttgcagatcaccgcgttggtagaagaactggcagacaatggccacaacgtcgccggcgtcgtgcgtgaagttgaggtgatgcgctactacatcctgcagtgcgccaagaacatggcggcgatcgccacacacgcagcattcattgcgaagcagacgaaggtgcagtaa

SEQ ID NO: 438069 - DNA, 2574 bp, Serratia marcescens
atgaccgtatcaacagaggtaagccgagaggaatacaccggcaacggggtgacgacagattttgactatcgcttccgtgtgttttctgcggatgagcttgttgttactgtcgctgatacaacagataacatccgtacgctggtgatgaacactgactacaccgttaccggcgcgggaagtcgtaacggcggtaaagtaaagcttgtcaacgcactggccaacaactggcggatcagcatcgagcgagatcttcctgtcacccaggaaactgacgttcgcaaccagggcaacttcttccctgaagtgcatgaggatgcatgggacaagttgaccatgctgatccagcaaacatggtcatttgcatctttagcattaaggaagccgaactggtttgctaagtattatgatgcaaagggaaatcgaatcgtaaacttaggtgatcctataaatggtcaggatgccgcgacaaaatcctacgtagatgctggggatgcggcaagcaatcattacgctgacgatttgtttaaacgcaccttgcgtgtacccgagaatttcattcgatttttacctagtgcaaatagccgtcgccggcagttgttggcattcgatgacggcggaaatccgataaccgtgctgcctgaatcaggttctgcggctgatgttcttattgtattggccggtgaggatggcgccgacaggatcggcatgggcttgagcactgtacatgatgtgatcggacacgttacccctgaaatgtttggcgctatcgggaacaaagcggaagacgatacaggcgcatgggagtcaatgctgtcattcctgcttgaacatacaagctcggaacgccgaatcggtatcctcgcatctcgcacctatcgcacgacacgacctctttatggggttagttacactaaattatatggtggaggcacgttatattacgacggcgctgatataactgattctacagttttaacgtattctggaaagactaattttagcgttgagaatatttcaatcactcgaaatttctctgaccctttcggcttgtggtctaagggagcatatgcattgactctgtcattgtgcacggactttgtggttgatggcaatgatatctatatgcatacagatgcgattagcgtaatggatagtgacaggtttaccattcgcaagaataaaacccatgagcttggcgaagaggggatcgctgttcgtcgctctcgaaattggctagtggaagacaacgatatttaccaccataacggcgacggaattttaataaaaaccggtaacgctgatacccacgatggcaacataatcaacaaccgactctatgatgggattggttctccaggtacagccggtgggcaggtcggtgggggtataactttaaacgacgaagtcattggtggcgggagtacatcatcttttcatcggcttgttgtagatggtaatcattgttacaacgttagttacggcatagcgttcacaaacattacagacctcacgatcacgaataacctcgtgtctgatattaaacgttttgggataattattgatcctgttattttcaataacccaaataaaaatccagtcggccgaatcaatgttgctaacaatattgttagaaacacggtgcaagcgggtattttgtttgtaggcactaacgatattcatgttagtgacgttaacatacaaggaaatctcgcagacacttgcggtacatcgactgcatcgcagtacccatcaataggtgcgcagttcgctacagttacaggaaatacggtgctaaatagcagggtatccctgcaggttgacagttgcgtaacgactgggaataggttaattaactcaacatttacagtgtcagaatctaattctgtttgggttaaaattataaactcaggcgtgtttagcggtaactatattgaagattctaaatatggtcacatccgattttcatcggttaagaacctaagcttttccgcgaactccattaagctttccagcaccttcgcggggctttacgttgatacggtttccgatggaagctctgtaaagttttccggtaattcgtatgactgtgcctatggaacagtaactcgctataatgtcggcgccgaaacaataaagcaaattcagttaacaaccgcggagagtggcaagaaatcacgcgcatactttgatggaacattccctaatataccgtccgtcgtaggcgacgagtttataaactcatttgctcctgccggtgcggcacgtcgatatgtttgcactgaagctggaacacccggcgcttactctcctgtagagtggaatgttattactgtatcgactggtgctgctgatagaacaatttcaaacggacaaacattacggataaacgcaaactacccggggatgtccagtgcgtccgcgtgcgttggcgccaaatttaaccaaaacccccaggggatagacatgaccgcgtcggtaaccgaagccgggactgtaacgttcgtcctaacaaataggactggtaacgacaaaacgtttcctggccttgtattaactgcatattgccattcatag

SEQ ID NO: 438070 - DNA, 303 bp, Serratia marcescens
atgaatgatcagcaggctacaaactttattactcgtgcatttggtgtgctggcaactgttgccagtgcgctgggtatgtctactcaagaactggtttacatgatattcgcggctgtcggcgcaatcgtgacggtactgtcatttttgatggggcgaattgatgcgagagctaaacgcaggcaggaggaacgacgtacagatctgtatgagcagtatttggaaaagcgcagtgggcgggcaggccaatcacttgatgatgcggatcagtacacgccgttgcctggcggggagggtgaagcgtga

SEQ ID NO: 438071 - DNA, 675 bp, Serratia marcescens
atgatgataaataacttttattatcctcatctatctaggcaggatatttctgcttattataaatcagccggggagttctacgctacatataattgcgaaaagaattattctaacattagtaaggactgccaatacagatgtgtctattgtgatgcaagtatagatgagtgcggtggggagcctttttcattagaccactttaggccaatggatgtttttcttgaaaaatttgacggtatacttaaaacacatcctttcaatctacacctttcgtgtcagaagtgcaatgtactgaaaacaaacgactggaaggggtgcagagaaactcaagatggcgccacatatgtatcaagattaggctatattgacagattcaaagttgatattagcaattatatttctgtaaatgaaaatggaatggttgtatcaatagatgacaatggccctggagattatatgatacgtaagatgttgttgaatcgtactaatagggtttttatcagaaagcgtagacttgtgaaaaataaggccgccttgatattgaggctattattgcaaaaacaaaacgatcttttgaattcaaaagatctcagtgctgaagatttaaagctagagatcatgaaactacaaaatatttttaaaagatttgaacagctggatttaattaaagtttag

SEQ ID NO: 438072 - DNA, 627 bp, Serratia marcescens
atgaatactattatattcatcgacgatgacagcgatgtacgagcaacgtatcaactatctatgagtttaatgttctcaggcgagtttgaggtattatgtttagatgttgaaccgtcattggatagcatggttcaagttttaaaagatataccggaaaaaattacattttttattgatgagaaacttaaacactctggcgttgctacttataacggggtcgaattagctgaaagaattagggtgtttgattcaaaaattcctatttatatcttaactagttttgcagatgaaatagagaagtatcttggcgatatagaatttgtaattgataaaaacgattgggatcttgacgatacaaatctaaaacaaagatttctgagacatattaatacctataaagacataaagtcacaacaagcaaagagattcgaggttcttctcgaaaagtcaatattctcaactttaactgaagatgagcttgaagagtttaaagctttggatttgtctcgaataaaaaatgtttctagtgaaggaatcattagtgaggaatcgctcgggaagttaaatgaagcctcaaatgaattggatgcaatatatttggagttgaaagggaatgatgataaataa

SEQ ID NO: 438073 - DNA, 2277 bp, Serratia marcescens
atggcacgtagatatttaggaaagaaaccatttgatctttcagcccgtgttcctatgcaactcggtcgtgaaagtatttcaagttcaacagttgctgtttctgagctgataaaaaatggatatgatgctgatgctgagagtgttcatgtagagttttttttaagagaatcaccggctctctcaacattagtaattagggatgacggtaatggtatggatgcggaaacaatctatgatcattggctaaagattggtactgactttaagaatggagtcgaattatcattaaacaaaaaacgtgttctaacgggtgctaaagggttggggcgtcttggcttagacagattaagtaaaaaagttgtcttatatactaagaaaaaaggaagtagctcggtcattcagttgattgttgattggagaaaatatgagggaaccaatgcttcaatctcagaaatccagcatgatatttatgagcatgatttgccattatcaggtaaatatggagaaatattctcatctgtagacgattctggtacctatatggtattgattgggttgaaagattattggtgttcagaatttattgaggatttaaaacaagagttaaggcttttaatttctccatatagatctactaatgatttttcaattacaatccataggacaattgacaatatttcattccctaaagaggttgttgatactcaagaattactcaaggcggccagttgggaagtaaaagctgtaatagactccagcaataaagttaaactttcctttaaaaataatagtactggagagttaatagagcaaataccaacaccatggaaaaattggatttcaaaacaaggtgaaaatccattgtttggtcctctgaagtttgaatttcattatatggtacgaaaaaaagagtttctttctaaaatagatatgtccgcgagaaactggtcaagatttatggaattgaaccggggggtgagaatttaccgtgatgattttcgcgtcaggccttatggcgaacctacgggcaagggagattggttagatttaggttatcgaaaagcctctagccctggcgggattaagcaaggtggttggagaattgcccctaatcaaattattggtgcggttagtatttctaaaacgacgaatgccattcttaacgatcaggctaatcgagagggtatagttgaaaatgaagcttatctgcaactcaggaattttatactcaaagtcatttcttcttttgaagtgcttgctacaaaagatgctcaagcaaatgaggaaactgatcttgccgctgaacttgagcgtataattaaagagaaagatactgaattaaagggcgcaattgacgagataagagctttttccaaaaaaaccaaaagaagaggtaaaaaaacacctcccgctcaggtgcttaatcaaaaattacgtgagcttgagagagctaaagcctctcatcaaaaagcccttgatgattattatttatatctggaaaaagaacgtaaaaagttagagggtgaaaaagacacactttctaatcttgcctctttaggggtgttaacagtcagttttggacacgaaattcgtactcattctgcattagcattaaataactcgaaaaatcttaaagcattaattaaattagcacaagatacaggtgctgctataaattatgatcaacttattagtgttactgaactcatgataacaggagcccagtatgttgatactttttcaaagttagccattaataatattaagcctgataaacgaacccgttcaaaaataaatgttcctaagatttttaagtatatatgtgaaatgatgtctgcaactttcttaaaaatggggattcaatatgaaattgaatttgttagaattgcggaagaagatttcaatgttcgatcatttgaaattgattgggagagcattgcaatcaatttgataactaatgctacttgggctcttgaagatataaatcatcgtcagagaaagataaagattgttttcgagagagtcggtggttctcgattaagattggcgtttatggattctggatgcggtcttgaaacagggcaagaaaatactatatttttgcctatgcacagtcgtaaagttgatcgtaaaggaaattcgataggtactgggatgggattgtctattattaaaagtcaggttgaagagcatatgccatcaggtacaatatctgcccagcaatattcagatttgggtggggccggttttttcatcgaagttttgcaggataaataa

SEQ ID NO: 438074 - DNA, 1266 bp, Serratia marcescens
atgaaccccttgacttcacataatgatgctatgcgagagtttctactctcttcagacgttgaacgactgagaaattcagttgatctagatgacattgatgatgtcctgagaaagttactttcgattgatgaaatgcgtgaggcgggaagtttctttactggtcaatcattggcatcaaaagcgatatcgtcctttaaaaggccaataactctgagttccgtgatcttggatccaacctgcggcgcgggcaatttattaattgaagcatctagaaagctaggcattgaaactaccctgactgaaactttaaaagtctggggtaaggtgctttggggttatgatattcatcaccacttcatagaagcagccaaaatacgtatagtaattgaggctattaatagaggtgtggagcaaaattgtgagttggatgaagcattaaaatttctctcaaatatatatgtaaaagatgcgttaacaatagattcaaaggagcttgaaagggtcactcatattgtcatgaaccctccgtttacaatttggccttccccaaaaataaattattggaaagaagggaatgtcaacgcagctggtataatttttgacaaatacttgagagtgattcctaataattgccttattagtgccatattacctgatgtccttcgttctggaagtcgatacagcgagtttagacaatttgtatcagcttcaatggaaggggatgtcacaatttgtggtcgatttaataggaaaactgatgttgatgtattcttattatcaggaattagcaaaggcaacgaaaataaaatacattggcatacggcaataaataaagaaacttctgtagctgattactttgatgttagaaccggaccattagttgcatatcgtgatcccgaagaaggtaatgagtatgcatacttttatcctaaaaactgtcctaaatgggaaatcgtaaaatatgcatccgaaagaagaagattttcggggaaagttttacaaccaccttttattgttatcaaaagaacttctagtccatcagataggagtagggcatcagctacgcttattaatttaaatgaactggttgcgatcgaaaatcatatgatcgtagtcacacctaaggatgggaaagttaatacgtgtaaaaaacttatgaaagtacttcaaagccaacaaacaaatgatttccttaatgaacgaattcgattacgacatctaaccgttggtgtgataaaagatattccatttgctgagggtgcatga

SEQ ID NO: 438075 - DNA, 1119 bp, Serratia marcescens
atgaaaatttcacacctgtattggccagtcactttcttctccacggcattcggcgccgggattttctttttgcctcaggcggtggggccgggcgtgctggggatgaaggcgttcatgctgtttatcgtcatcgccatgtcggtatcgatgatggcgcactatctttttttcaaattcatcatctcgcacccgcagaaagatttcctggcggcatcgtcgacgtttatcggtgagcgggcggcggcaatcgtctgtgtgctgtttattctgtcgatgatcattatcgtgctgataaatttcatcaccctggttaacgtggtcgcgtcttttctccacgatggattttgggttcggggcggtgtttcgctgttgctgagtgcggcgctgtcggccgcatggctggcatttagccagcgaatcgagcacttgatctccagaatggcactggtttctatcgttctggtggcgatccttacgctgtttttcctgttacaacctgcaggggctcagcggacgcctgcgccgccgagcatttcattgcaaacgttggtgctgctgcctatttttctttttacgtttaactttaccccgtgtatccagcggtttgcgcaaagtgccgtgcggccgcaggcgcgcagtattctgttcggcaagatactgatcctggcgtttatcgccatgatcgttatcgctatcagtcgcttgctgacgttggatgatatctcgatcattaacggccgcaatgtggattcgctgttttataccgcaggtttgaccggtaactcgatggcgtggttaggcgcagccctgctgctgtgcttgctcaccggcggcgcttatatcggcaccttgaccggggtcatcgacggtattacgtccttcggcatggcgggaaaaaagggcatcatcgcggggaacattgttgtctgtacgcttatcggcacgattaatccgagcatcatcaagatcatctcaagctggtcgatacccgttatcgtgatgaccgtctttttcatcccatcactgtattttttacagcggggcgacggccagcaaaagatggtaggaatagcggtgctgtgctgcggcatcgcggtgatagcgacgctattcgtgtaa

SEQ ID NO: 438076 - DNA, 774 bp, Serratia marcescens
ttgttgttattaagatttttttttaaagcatcggtgctttttttgatagcgaccccgccgtctgcttttgccagtaatgctttgtggcgcgtagtgaataatctatgtgtgtttaactatcaatatttaggaacaccatttccctgcgataaagtttcaatggatgaaggtgtcgctcgtggctatgccatcgtacgcgatcttgaaagccgctatcattatttgctcgtgccaacgttgaaaatggcgggagtcgaaagtccggaactgttattagctgatacgccaaattattttgcgttggcttggcagaatcgacatgttctggaagaggtttatggctcttcattgccacgagaagcttatgctttaacaataaactcgcagcgaggccgtactcaagggcaattgcacattcacatttcatgcttgaaaccgcatgtcagacgcagtatagaccgccagctacctaatattggggatgaatggacaccgttgaaagacaacttggttgggcaacattatttaggtatgcgaataaggcaagcggatttggacggtgtgtttccatttatcaatataggtcatgatctgattaaaaaaaacgcggatatgagaaagtttggtgtggcggtcgtccccgttacttttgaagataaacaacaagggtttattttattggctgacgaggaaggggcgatgaaaaacaatacggggcacactgagaatttgcttgatttttcttgtaagaactttacctcgcattccagttag

SEQ ID NO: 438077 - DNA, 207 bp, Serratia marcescens
gtgtcaggggatgtgatttgggaaaactccgagcgcccgtcaagtgggcttagcgcagtaaaaagcccgcgaaaacgcgggcttgatggcgaggtgaagctcaggcggaattatttcgccagtttgcgcatcaccagcgtggcgttggtgccgccgaagccgaagctgttggacatcacggtggtcagctcgcgttgggtcggctga

SEQ ID NO: 438078 - DNA, 183 bp, Serratia marcescens
atgattgccgtgatttacgtcacgctctgcgcttttgctattgtccagatgaaattatgtaactctgccaatagcctttccctcataagagttagtttgttgtgcggcaataaaataaaactaaatgattcaatagataaaaataaaactgaatattccccagcgttcattcaatacgggtaa

SEQ ID NO: 438079 - DNA, 627 bp, Serratia marcescens
atgaaaactaacgttatttcatttttgaatggtaaagggggggtcgggaagacaacgacgtctatcaacgttgcaacctgcctggcgaggcaaggattccgcgtagttgtagtcgatactgacccacaggcaagtattggcaactggtatgaggaagataaatgcaggttcgacctggcggaagcgtcttccgagaaggaagtttacacagttcggaaacagctcacaggttatgacttcatcatcattgatggggccgcagcaatttcggcaatctcatctgctgctgtgatggttagcgacctcgttttaatcccggtaacgccttcaccgttagactttgcagcctgcagcgcaattattgctgttattgaagcgagacagaatctacaacctataactgccaggttcctgataaccaaaaaagtgtcgtctgcaaaaatgcttgaagtcctcaaagagtctattgccgatactggcattccggcattgaaaacagggactggccagcggcaagcatacatcagaaccatgctggatggcggcaccgtctacgacacgacagacagccaggcgaaaggagaaattgatgtaatgaccaaagaaatcctggagctgatccaatga

SEQ ID NO: 438080 - DNA, 204 bp, Serratia marcescens
atgaagatgaaactgggaaaacataagcagctggacactgctttgcatgcaatacagacaccaaaaggactgacaaagaagctgcagatgaacatcgatgaaaacctgcataaaaggtttaagctggcttgtatgaagcaagataaagaaatgaccgaaatcactatagaactaatcagtaactggctgaaagataatgaataa

SEQ ID NO: 438081 - DNA, 255 bp, Serratia marcescens
atggttcctcaacgactgaaagccgcgcgccgacgagccgggctcacccaggaaaaactgggggtgctggccggtatcgatgaatcaaccgcgcgctcgcggatctcccagtatgaaagcggcacctacacgccggcgttcacgacgatgtgcgccctggctcgtgtgctgaacgtgccggagtgctatttttatattcttgatgatgaatttgcagataaggtactgggattatatgattccgggagtatatga

SEQ ID NO: 438082 - DNA, 795 bp, Serratia marcescens
atgacgtttccgagccttcccggccacccgttcgcgccgttgtcgctcgcaggcgccccggcgatgccggtggccatcgattatccggcggcactggcgctgcgccagatggcgctcgagcacggcgactacccgcagtacctgctggccgtcgaggtgatcgccctgctccactatattcccgatctgtatcagcacagcctgatcgccacgctgtggaacagcggcgcgcgcatcaacgaggcgttggcgctgacgcgggcgcatttttcgctgcagggcccctacccttatgtgtcgctggcgactctgaagcagcggcaggccagcgcccaacgcggcgccggcgcgccgccgaagaaggagccgatgcgccgcctggtgcccctgtccgatccgcagtatgtcaacctgctgcacagcctgttcgccaccttcaagatcccgctggcgccgcgcgacaaatccggtcgcgcattgccggcagagcccatctggcgcgtgaccgatcgcaccgtgcgcagctggctgaatgaggcggtggcgcgcgccgcggccgacggggtgcagttctccctgccggtctcgccgaaaacgctgcgtcacagttatgccatgcacctgttgtacggcggcgtgccgctcaaggtgctgcaggggctaatggggcataagagtctcaagtcgaccgaggtgtataccaaggtgttcgccctggatgtggcggcgcagcagcgcgtacagttctcgatgccgggggcggaggcggtggcgatccttaaaggtcggcgctga

SEQ ID NO: 438083 - DNA, 384 bp, Serratia marcescens
atgggcaaggcattacgtatcacgttggggcaacgcacctttaccagcaagaaagcgggcgtggcatattttatggatcagcgcgacgcggtcagggcgggcggcacgctgaccgccggcgaactgtttgaggagctccgggagctgtacacgcgctattgcgacagcagcctggagtgggcgctcaatggccgggagatcaccggtttcgtcgtggatcttgaacgccgcagaaacggcgccacctgggcacaacacctgtgctacaaggtctgtttctccaaccgggaagtgcggccgttctcgatcgacaaggcgctgtcggccctgtcccggagcggcgtaccatcccagccaacacagacagtaaccgatgaacgctaa

SEQ ID NO: 438084 - DNA, 885 bp, Serratia marcescens
atgagcaaagttcaacagcattttattgacgaagcggaggcgcgggtcctccctgagccgcaggataagcccgatcggcaatcgccagcaattgcctggatcctggcgcactaccccggcatcgaggaaggcactgaagagtgggaacaggcttgccggcagtatgagacgatgttagagattattcgcccgtacttgattaaggcgtcgctgaacaacattgacgatcgctatgcccatgccttggcggagctggacgatctgcagccgctgcatgcgcactcgcaaccggggatcgtgcgtcgcctggcctatgcgcattgcgtgacggtcatggaggccttcctgttatattccgcctgtgcgttgctaaatgatcgtctccacctgacacgattccacgacaagaagtcggaatttttttcacgcaaggacgtcctcaagggcttagatgacgcatacccttatggtgttgaggaagaacctctttcatggcggggccgtgtcgtgccgggtcagaacgaactggaatggaccactattacgttggccgaccacaaatttcagttatataaggacgttgctcagacggccgtggccgagataacgtttcataacctgaacaaggtaaaggcctactttgacgccctgctgaccatcccgcccgactggccactggccaaggatggggcattgcagaaactgatcaacacacgccaggatctggtgcaccgcaacggtatgacgaaggacaaccaaccgatcacgattacgcctactgacctggtccacgccgtggaaacggtgcgccactttatcacgcaggcctataacgatttgcaggccgaagtggcgcacttccccggacccgaagagggattctga

SEQ ID NO: 438085 - DNA, 315 bp, Serratia marcescens
atgaaattttccgaagtgtatgacgaattgctccacacatatggtcacaccgatctttggttagtccccggtacatcgatggccatcgttcaagaaggtgtgggagatcctgcgttatggcccaatcccaaaattgtgacgcgcgccggttttgtggttgcacagcgcacccatcgggctggtcccccggcgactctggatacatgggcattcacgggcaattacaagacgccgccggcagttacttccgggcccgtaccgtatgccgcttttagcctggatgaatattacgggctagtgcgtatgatcatgtga

SEQ ID NO: 438086 - DNA, 1071 bp, Serratia marcescens
atgctcagtcagatgaacctacgctttccgaaatccctgatcgccgccctgaaaaaccgggccgccgccgaagcggtaccggtcaacaccctagccgaacgtctgctgcagcaaacgctggccacctcggtcgccggcgacgaataccgcgcgctctgcgcggcgccgtacaccaccctgggccagctgtaccgcaaggtcgtgcgcgcggaaaccgtcgacggccaggcgctgagccgtgccgaactgcgctggctgttcgcccaggcgcagatcgcctaccgcgatggccgcgggccggtcaaccgcgcgccgctgtcggcgctgctgctgatcaccgatgcgctgctggagacggcggtgggcggcgggctcgatgtcgatccccactattaccggcgcacctttggcctgcgcggcgaggactggctgcaggcgctgcgtgaccgctttacggcgacacacacaccgccggccggcagcgccgagttcttcgcccggccgctggccagcggcgtgctgaacctcgacgacttcagcgacgaggcgctggcccgcgcctgcaccccggtgcggctgcgggcgctcttcccgctggcggtcgccgcgcagcgcgccgacgatccggcgcaggccgagtacctggcgctgaccgcgcccttcgtggagcgcctgcagctgatcgccgccgccggcgagctcagtgccacggtggagatcgtcgccgggcagggcgcctatccgggcgccgacgacagcctgccgccgttcctgtccctgcacatcagcggcgcggtcttccagtcgaccttcagctggccggtgttcgccgagctgcgccgcctgctgcgcgcgcgtcagcacggcgatcgcacccgcagctatcaggggcggcacgtctcgctgcatgtgccggagagcggcgacatcggtctggtgctaccgaatttgcggctgcggctggcgccgggcaccttcaccgcactcgaggccgagctgctgacgcagctggagcacccggcggccgccgcggcgctggccgagctcgccgcgctgtacggagatctgtaa

SEQ ID NO: 438087 - DNA, 2238 bp, Serratia marcescens
atgacgcattcaccgcaagaaaaccgccaggggcaacatcccgatcgcgccatcggccataaggacgaagaccgctatggtttcacgcacattgccaccgagttagcccgcgccattcaggggatcggtcgggagggcagtgccgtgatcggtatcgaaggcgcctgggggacggggaaaaccagcctccttaatctgctgcgcacggcgctggctgaacaacaggaaaaacagaccttcgtgttgacggtttccccctggctcgacggcagcgatacgtctctggtggcgtccttactgcttccggtcgccgccatcattgccgaggaagaagaacgcctgctttcacccggagagcgggcggaactcaaagaaaaaaaagcgctgacccgtaccgcccggacgctgatggactacacccgggccaccgcccggaatctggcgcctgtcgctaagatcgccgcgctcattcccggcgcccccgacgtcagcaacgcactgaacgccgtggcagagtcgagctggctgaaagaaaaagaaaaaaccacggccgacatgcgcaccgagattgcccgaaaaatcgaggagctggatctgagcttcattgtcctgctggacgatctcgaccgcctcgaaccggcccaggccgtggaggtgatccggctggtgaagtcggtcgctgattttccccgcttccgctacctgctctgttatgacaaagcggtgctgtcacaggccatcagccaggggctgggcgtcgccgacggcagcctgtacctgcagaaaattatccagatcgccttcgcactgccgcgtctggaatcctttgcgttgcgtcagcaatttcgcgatgccgccatcgagttataccaaacggtgaatgatttccccccggagaagggcatactggctgacctgacggcagtcgcgaatatttatggcgccacgctgaaaacgccccgggaagtccagaccgtcctcaatgcactgcggttccgttatgcgggcatgcgggactatgtgtatttccccgatctgtgcttcctgcagctgctccgtacaacgaatccgggtctgtatgactgggtggaagaatacctgtcggaatggaacgtggtacaagccgaagatggtcaggtcagtgacgaggagcaaaaagccctggtaggcagccttgagcaccacctgaagcgctatttccctgcggcagcgcattccgcatatatgttgggccagtgggttccggggatctttggtgggctgacagaataccccgtcagactctttgcacggactggaccgcaggaaagtgccatgcagacagcagggaagcggctgagcagccaagtctactggcgatactacttcgccttctccgcaccacaaaatgtcctgtcaccacagatttttgaccaactcttcacgctcgccagccagcctcaaaagcagcaggaacttgcggaatgcctgctcggatatatccagagcaagaacttatcctcccggacctggtttgaacacatcctgacccagctgacatcccccctgattgaggcaagaacgccggccgagtgccggggtttgctgcagttcttctgcaacaacggagatatcatggtggaacgctatcggcaagacaacgagtggtttgcgctgcaggacctggatacctacagcgtggcggaccggctaatccaacgaatgctacaggagggtgctgcgtccacgatgaagttcctgattgctcaactccagagcggcaaagcctggtactggtgtgcggaatatgtccgtcacctgctgtggcagcatgggatagtcggagacagaacgggccatcagctggaagagtggatggagcggagtaacgtcgtcatcttacagaataccatgggcaagagactgaaaagcccgaccatcaccgatcagctgccggcctttgccctgctgaattggtatatttgggcatggcgagatatcagcggggctccggtagtacggaaatgggttaagagccaggtcaaagaggatgacgcttttctgaacctgctgctgctgcttcggtattatggcaccagtagcgcgcagggatattatcaagcgctgccactggcagatatgaccgaatttctgggcgatattaaaacagtgacaaaccggattgagagcatcaagcaggccggacgttttccagaacgggttaaacaggtcgaacagtcgatcaggagaagccgctaa

SEQ ID NO: 438088 - DNA, 249 bp, Serratia marcescens
gtgttcgccgagctgcgccgcctgctgtgcgcgcgtcagcacggcgatcgtacccgcagctatcaggggcggcatgtttcgctgcatgtgccggaaagcggcgacatcggtctggtgctgccgaatttgcggctgcggctggcgccggacaccttcaccgcgctcgaggccgagctgctggcgcagctggagcgcccggcggccgctgcggcgctggccgagctcgccgcgttgtacggcgatctgtga

SEQ ID NO: 438089 - DNA, 246 bp, Serratia marcescens
atggatcaggaactgaatttctctctcagctatgagcagctgacccggatagcggaagaacatatccgtgaatgcgagctggacagccagggcgctaaatacatcagcgagtcagccaaggccggagccattctgagtttctggcacggtctggcgttgcagggttatccgggcacaacaatggatgaacgtgttgatgccgaccggcagcgcctgcatgccctcatccataagagagagggctga

SEQ ID NO: 438090 - DNA, 456 bp, Serratia marcescens
atggatactgttgaagagttaggtggcacatatttttacgctggaatggaacgccttagcgctggtgagctgttcttctgggtttttgtggataaaaccatgcagcagctgggcgtcggtgatgtgggggctgtagcggccatcgtctcaggcatggctattttaccgaccaggcagaaacctgccggagccaaaaaaggaacatcgctcgccagtgtggcttcacgcaaggtctttgggaacgccaaatttccgtatgggattcagctaccgacatttatcggtaatcccgtggaaggcgtgaggcgaaagatgatctcgaacatcggcaccttcgttggccggacagtgccggtcgtcggctggctcattctcgcctatgatgtctcacggattggcgttgagagcgttgtagcctataacaaaatcgcccgtgctgaggatcgcttatggtaa

SEQ ID NO: 438091 - DNA, 687 bp, Serratia marcescens
atgtgtggccgctttgcacaattccatagccgcgacgaatttctctcagccctggcgcttgatacatcggttagcaccgccggcgattggcatgcccggtataacgtcgcccccggcacgccagtgccggtgtttcatcatcacgatggtcagctgcagctggcaccggttgactgggggtatgcaccagcatggtggcgcgaacagggaaaaccgccgctcatcaatgcccgcgttgaaaccgcagaacacagccggatgttcgccccgctctggaaacatggccgcgcgctggtgccggcatcgggctggtacgaatggaaaaagtcgccggacaatccacggctgaagcagccctattttatccgtggcgccgatcgccagccgctattctttgcggccctgtacgcagcagacagcgacggctgcagcagctttgttattatcacggccgccagtcatgccagcctggcggatatacatgacagacgccctctggcgttgccaccggccgccgcgcgcgactggctcgataccagcctagttccgccctctggccatatgcagactgacgtctacagcctgcaggcagaggatctttcctggcagccggtctcgccggctgtgggcgccgttcgcaatgacaatccctcactcatcctggccatcgatacaccaatggtctga

SEQ ID NO: 438092 - DNA, 1974 bp, Serratia marcescens
atgaagtaccgtagtgatattgacggcttacgagctatagctgtcgctttagtcattttttttcatgcaggactaagtcaatttccagctgggttcatcggggttgatgtatttttcgtcatatctgggtatttgatatccaaagtaattttaagcggtactaatgaccaaaaatttaatttaagtaacttttataatcgtagaatttggcgactacaaccatcgctgcttctcatcgttttcatttctataattatcggtagcattttttaccttccagccgattacaacacattcttacacagcgttaaaaatacattgtacttcacgtcaaaccagtatttctctggtgtaacagctagttatgcttcagaagactccggctacttattgctgcttcatacatggtcactctctattgagtggcaatggtatttgacattccctgttattctgtattttacattaaagatttatcaaaaagacaaagtggctttagcaaactatgtgattacagttgttttccttattgcctcgctatacctatcatatacaaccagtaaagtaagatactatgattttttctcgcgttgcttcgaactgcaaattggcagttgccttgcatttagctcattcaagataaatcataaattatccaatattgttggcatcgtttctctatctttaattataactctttcgatgtttccaggattaatatctggctacccaaacgggtatacccttatggttgcattagcaactggcgctataattctatcaggtgattcatccagatcctatgcatcgaggttgcttgcatcaaattatcttgtagctattggtaagcgttcatattctctttacttatggcattggccctgcctggctctgctacattatatggatgcgtttaatgattctcttttacttatattattacttatatcatcattactccttgcgtgcgtttcttatagttatatagagatgcctctgcgaaaatgtaataaaaacttaaaaacaacaatccttttattaattgtaacgccattgctattaagcattgctctatatgctgtggcaaaaagtcaaaactacctcccatggaggtttggaagttcatttaacactgcaacaaaccttgagttaaagtacaaaaaaatggcgggacatcgttcagattgtcttacagatgatatcgaaggaaaatattcaaacgaacactgtacgttcggagctgaatcacccaaaaagactgctttcttcattggagactcaaactctaatcactactggatgttcttagatactttagcaaaaaatgctaatttagcaattaccgcaaaaagtacagcaagttgtttaacgttgccaggcatctaccagtttgattggtggcatttttataacactgtttatgaaacttgtcatgagaacactaagcaatattatgagcaaatagcaagtaacaattatgactatgttattattggtgagctctggccaatgtatgtgagtgataagatcataaataatcaaggagatacccgcaccttagaactttcaaaagagagattaagctctgctattaatgaagcgctaacaatcatcgaaaaagcgggttccacaccggtgataatgaaagaaatatttactaggccagacggctatgagtattgtttgaaaagaaaattgatagggagagatgattttgaaaatggcgagtgcaactcactacgaaatattaagccttctccttcatggtttgatgaaaaattcgaagaattaaaaaaatcacatccatcactacgaattattgacataaaagatgttcaatgttcagaaactggatgtgctacagaagtaaatggagtgagtgtgtatagggatgttggtcatctcaacgattatgcatcacatgtttttggtcaaatgtatctccaatcgaaaggaaatcctttcatcaaatag

SEQ ID NO: 438093 - DNA, 441 bp, Serratia marcescens
atggaggaaattggctatcgtaccgatatttttacactggacgggatcaccggcagtcagcgtgaatatatccagtggctgctgaagaccagcaccggtaagggtaagccggaagatattctgacgaccgaagccgttgacctgctggcgatgaaactgcgaacaccgctgcaggtccagttgcacctgacgctggcgatggaagcaggataccagacgggcgaaaaaccgattaccgccacgctggttgaatccgtgctgtcacgtcagctggatgacctggagccgacgctcacgcggcatggttaccggctgaaggatatggtggagcagttcgatgcaaaacctgctgaaatcagggcattatttaacaatcagttagaccctgcccgcacggccgaactacgcgacagaatgctggcggtcggtctgccaatatga

SEQ ID NO: 438094 - DNA, 558 bp, Serratia marcescens
atggcaggagctgcagaacatcgaaccttgagagacttagcgctaaacttggcaaaagctcgaataatcctcgatttccaggatagagttcagcccgacctgatagcgttagaacggattaagccctcagactgggaaatagttcatccagcctggagagaacaccctgatcggatagatcacaagatcgattttaactggttgaagcagagaaataagaggcgcgataagttagatgtaagtatctggtatcaggggactttatgtggactatttcttgcaaagctatcaagaagaaggataaatgtcgcactgcgttatcttgaatcaaacccttttccccatggtttgaaggagctcatgatacctataggtctgactatagcggaaaactttggcgtagcttatggtgcaacccaagtgatgataagtcagccagaaagaaacttagtacatcggtatcggggtcaggggtatgagctcatagctgcagatttggatcgcgaaagaagaggttgccagattcgcgcgaaactgatggttaagatgttaagttaa

SEQ ID NO: 438095 - DNA, 870 bp, Serratia marcescens
atggcgacgttgttcatcgatctacttattaaaccacgcaaaagatttcgagttaaaacaacgtctcaggatgaactgacgcagcaactggtgttgtatgtgcaacgtcactatctgcgtgtgcctggctgggagctctacaagtatgggcgtagctggggttgtttatgtcaggttgtgccgcttccgttcctagactggttatcctcgaacgagaactgtgcaaaggctaaagagatcgctgaaatctgccggccgttcgttgaagatggacagcaaactgtcgttccgccgatcgctgtatacattccgttaagctggttatgtatcataattcctcccctggagctcatgcttcgagaacattggcaaactcaactcggaacaacgcggacggtgccagatgttgatagcgatacatccttcagaccgtctgattattacctgttatgcgaaggacgggcaattcctgacgtttggcagcggcattttgaactatgtatgaaaagaggtatgccattcatcgtattatggcatttcccgcctaagcaggctcggttcagttctcgatacgacattcttttttcatgggaaactttagccaaaagtcatgcccatatattcgataacccagaatttcctgatatcacgacgatcgtgactaaacgcattatgcaactattgagggagagacgtgatgaagaaggctttaagagagtatctcttcagaatgtgcttggagaaggtcaaatcaacattttgaagctgagttttgaggctgctgaacagcttactctggacttggtaagactgattaaatcattgattaatgaggcagaagcaagtttgaagaataacttgttaggataa

SEQ ID NO: 438096 - DNA, 711 bp, Serratia marcescens
atgcacgttgcctttgcgcgatcgcttggtaaacggcgccgtatgcctccgcttcttcgccggcgggcgattgatgcgttgttgcaggggatgtgtttccactatgacccattagctaatcgggtacagcgatctatcacaaatttggccatcgaatgtggattagccacggagtcccataaaggcaacttgtctatcactcgggcgacacgagccttgttcttcatgtccgaactcgggctgatcacatatcatacggaatatgatccgcagataggttgtaacatcccaaccgatattactttcacgccagcgttgttttctgctctagacgtttccgacgtagctgttgtcgctgcacggcgtagccgcgtggaatgggaaaataagcagcgtgaaaaacagcacctgccgcgccttgagatggatgaattgatcgcaaaagcctggcggttcgtgcgcgaacggttccgcagctatcagtccgaacgtaaggaacacggactacgtcgcgctcgagctcgccgcgatgccgagcgcactcgccgcgatattgaaactatagttaagcgacagctgacgcgtgagatcgctgaagggcgtttcatgggcaaccaggctgcagtcttcactgaggtgaaacgacgagttaaagagcgcatgctcatgtctaggggaaactacacccgcctggtacctgatcccacctga

SEQ ID NO: 438097 - DNA, 258 bp, Serratia marcescens
atgacacaacgcgccatggctacgcgccagacctattccatcgtgccaaaacataacaacatgttgaacgagcaggctgtaaacctcaccgcgatccttgaacgaccggtagcctgcagagacgttcttcacgccattcttgagttagcccctcaaatcgatagtcaacagctggctcagtgcgtactcgacaaggttaagcaacctcgtcgggggcgtcgtccacaacaggttaacaagcgtggaagcgattcatag

SEQ ID NO: 438098 - DNA, 981 bp, Serratia marcescens
gtgaaaaaatggctacccgtcgttttagcccccgctgtattgggcggatgctccattaacaaccacccagaaaagtctgcgatcactgcccagcagttagtaacaacgctaatcgaagcgcaagtgtcgcctctaaaacaggcccaaaatgagctggctgcggtgactcgcgtaaaacaaacaaaagcacctggtaagcaaagcatatcaacgagcccttctgcgctggctggccagaggttgagcgcgtcgatgacagcactacgtttcgtaggcaatgcaccaccaccttcgaccctggcgggggccggaagtgcgtcgtcattacgtgatgcattacgtaaaattgtgccggctgattggacgctgagcttttcccaggatcttcatcctgatgagcaaatacctcaggtatggcgtggcggcgtcatctgggttgatgcattgaatcagttgttggaaaaacaaggaaaagtggggttgattgattcggccgtgcgccgagtatccattgcaaacaaagcagcagcatttaaagttgcaaccaagatcgagtcaaaagcagtaaccccaagcggatcacctcaatctgtaactcacggccgcaaccctttcaatggcggcaaatcagcagatttaaaacaagcggttgcaccagccacaacaaccagaacatccaagaaagcgactgtcgtacaacaaaagcaacattggcgaatagatgctggcaacacgctcaaagataccctgtttaactgggcagccagcgaagtatgtaaccaaccggggatcactcactggacggttgcctggctaacaccagttaactatcgcattgatgctccattgcacttcgaaggatccttccgcgatgcgctaaacagtctatttaccctttacggaacggctaaagtgccgctgtatgcaggtatccgccctcttcagtgcgttatttccgtcgatgataaagaggtgcactga

SEQ ID NO: 438099 - DNA, 423 bp, Serratia marcescens
atgatttattggctctttgccatattcatgggaatgattgtctggcttgatcctccaccgcaagtccctccggtatccctagaggatcaaactctttcccagcaggcgcgcaacacggtgcaatatcttaatgcgataaacgactggcgctatagccatcctgaacaaaaagacggtgtgatccccgatagcgccttcggctggtcatccgttgcagggttgcgcaatgttttgcacgctgatcgagtgtatgtctatcagccagatcaacctgggctgatggcggcgttgttggtgcagagccgatattccgcgctgattggcaaagtcgtcggaagacgcctcatcgacagtgttggcactgacatgcaggtcaatgtgccggcgagcattactgacggcagcctggtgtacctcaactaa

SEQ ID NO: 438100 - DNA, 1299 bp, Serratia marcescens
atgaaacaacagactacctacacgctgcagaatgggaacgcctggcttgtggccgggttgcactggcagtatttgccgctgcgtgggcgccgcagcatgcgtttgcgtgcgaaggaggccaaggctacgcattgggcagcattgccaaccggtgacggccaggcacaaggcaccctgctgggcactgtcaatctcgccggcaaggctgtccgaaaaggaggcgggatggcatcgatggcgttggcggttctgccggcattgccagaggcgtgttatggcgttttcccgttatccaatggggaatactggttcgtcgctgtcagtgacggcatgctttccccgttcggtgatatcgtgggggatgaaacggctatacgtaccgcggtgtcaaattttctggcgatcacctcagcgcctgctgcgggatggatgatatatgctccttgcggcttctttcccggggaagacacggaagataaatcgctctccgagttggtcgatagcaaggtcggtttgcgccgggcccggctgagtcagactcatgatccgaaggtgctgtggctttggggcatggcagtggtggccctgggggccgggtatgtgggttattcagcctgggagaaacaccaggaagatgcgcgcatagcagcagctcaggccgcgctgatggccaggcaacagatggcacaacaggcgccggcagacaacctgaaaccctgggctacacaaccgcggtttccatcgatgctcagtgcctgcagtcgcgtatggaaagacgcgcagatctctattgcaggctgggttttcaatacagcaacgtgtgatgcgcagggaaaaatcatactgcactacaccttgccgaacggtggcaccgtaggggattttgcattgcggttacccgtgctctatggttcagatattcaacccgtttttaatattcccggtagcgcagacgacgcctcttttgcgttatcggtgccactttctcctcctgaacatcccgaagatcttctcccgggcagccagcaaattcagcacttaaccagttatgcccagcgtatcaatgcgcgcttgcgcctaagcgaaatggacgtaagcacgcagttaacgcagggcgacgtacaaaatctgccgtggcgtacctacagcttcacgttcattaccgatattccgcccgatcggttgtttgcgccaacgcgcttcaacagcagtggaataagggcgtccagcatcacgaccacactcaaaaacaaccgtctggagtacaccattgagggacttctgtatgccaaccgctaa

SEQ ID NO: 438101 - DNA, 579 bp, Serratia marcescens
atgccaaccgctaaatccagagtaacgccctgggcgttgtgcctgttgtgcctggtgctgattgcacctggtgttttcgccgcgccggtcgctgacataccggcggctccgcccgcttcaccgtcggtgaagtcacccgcgacagcggatcttcctctgccgaccacgtttgcgcgcacggaggctgggcgagcgttaaatcttggtcaactggaagccatccaggcagagacagtgctgtacgaggcccagctggccagggccaaggcgctgaatgaactgcaaaagaacgggtatgaccgtgcactggatcagcctttcaacccggcgccaccttctcaggacaaatccgaggtcaagggcgcggtgcaagatgctgctccaccacagattgttgagatcaccggcgccggtaaaggattcacggccgtgctggcactcagcaacggcaatcaggttacggtgcgggtggggaatcgtatcccgggtacggagttcgttgttaaacggatcaacatcaatgaagtcgtggtctccgggaagaaccaaacactggtctctctttcctttgcggggtaa

SEQ ID NO: 438102 - DNA, 669 bp, Serratia marcescens
atggctttgtatctcctgaagttctcgttactgatggtatgcgccggcgccactctgtttattggcgcccagccgttggttcatcgagcgaaacaattcttgcttgaacatgatggcccacccctcactcggcggcaggtcagaggcgtcacaatagttttcgtcggcagcggtactgcactgatcgcaacaacagcccttgtggggcatccctgggcaggtactgtcaaaattctggggctgctggcctggggtattcccatggtgctgctggatttacgcaattactggctaccgctgcgatatacctcaggtttttggctgactggtctgctgtttactttgatgcctggaagtgcacttaccctgactgaggcgctcacaggcagtatctgcatgtttttgttcctctatgcctttcactatggcgccaagcatctgcggggtgaagaagggttcggcatgggcgacgtgcatttgatcgccgcgctgagcgcctggtttccctggcagctcgccagcgtgctgagcggatgtgcattattgctgtttatcgtaggggcattactgacgaacaaaaagactcaaccttatgctccctggctattcgtgttactggcagttgtagccggtagctcccctcaattgctctcttcaggtgccctatga

SEQ ID NO: 438103 - DNA, 1401 bp, Serratia marcescens
atgactgctgaaaatgccactcctcgtattaaccgggggggcacgttggtttcgatggccatcgttctggcgatcgtgttgattgccgctcctattgggctggaaagatattcgaactatatagaagaacaaacatgggtcgtgaccgcgacacacctgagcacagtgagcgagggtgcccgtcgatacgtgaaagataactacgatacgttgctgaatcaggtaaaagggggcggcaacgtaacggtaaccggccagaccctgcgcgataaaggttttttgccggcggggttttcccttaccaacaataacggccaaacctatattcttgccgtgacacgtaatccttcgcaaaccgacaagctggtcgcctttgttttgaccgccggcggtcaaaaaattacgttcaagggccaacgctatatcgctcagaacacatctggcttgggtgggtatatcgaacccgtcaatgttgccaacggcgccggcggtggctggcaggtcaacctgtctaatatgggactgaatggccaaagtggccatctggttgcgtatctgacgtcggatatattagacggaggtactgaagagagtgaccgtctataccgctatcaggtcaacggacggccagacctaaataaaatgcacaccgctatagatatgggggggaacgacctaaacagtgccaataatgttaacgggaaaagcctgttagcacgggaaaacgtctggtcagacggctggattggcgccaacggggatgtccgctctaacgggggctggcttatcacaaaacacggaaaaggttggctcaacgaagaccacggcggtggtctttatatggatgacaacgactggatcagatcagtcaacaataaggggatctacaccggtggacagctcaaaggcggaacggttagagccgatggacgagcctcagtaggcgaatatctacagcttgatggacaagcacaggagaacactggttgttggccaaatggcttggtcggccgcatgcctgacggaggcctgcttgtctgtcaaaacggtgtctggcgcggcacaggaaaaagcaacggggcctatcaaaacctgggttatcacgaaggtatattctctggctctaaccaaggggcatcgacgctttggatcatcgcgagcggaggtgaatcgcccaaacgatgggacgttgaggatggcagttgcatgaacacttatgctttagaggcaactgtaaacggcatgaatattgccagcagcattaacaataacgtccaatgggcgaaacaaacttccattaccttcgccgttccggcgggtgcaagctacaacgtgatctcaaaccctttaccagctcatagctgcgggcctggacggtttaacgttctcagctatcaataa

SEQ ID NO: 438104 - DNA, 459 bp, Serratia marcescens
atgaagcgtttatctatgatcgccgccttgttcggtttaagcgggtgcgtctgtacgccggcgccgcattctgttgttactccaacagcgaccgtcactcccgcggcgcagtcaatccagaacatcacagcgacgctctatcaatctgaggcgctgaaccaagtgcgcccagttttattcacacccaagatcaccgccaattcacagcgcattactgtcgattgggatggtgatgccatcgaactgctcagccaactggctcacatgcgcggcttatcattcgcctataccggcgtgcgacttccgttgccacttacattgcatgccagcgacgtcaccttcgaacaagtactccgccttgttcgaacgcaaatagactggcgggcacggcttgaacagcaatcgcatgagctgcgtctgttcttcatgttgccccttaaaaaaggaatgccagcatga

SEQ ID NO: 438105 - DNA, 789 bp, Serratia marcescens
atgaaaaaaatcgctcttgccctcgggctggggttgctcagcacggcggccggtgcggccgttctggatggggggccgcccccagatatcggggcttacttgtcgccaaaggcgccggataaacatggattgaacgacactctctggcagttgatgaacgaagctgggcaaaccgtgggtttccgcggcggcaaagcgcagcgcgcctgggagctgcagcaagctttaaacgcccaaaacgacgcactgaacagaatgtacaccttcgcaccactgattagccgtcagggttggttaccgccggtcatagttgcttcagaatcgttggcacacattactgacaggcagattcgcacagcaaataagacttacagcatcctgctaccagaacggttcgtcagtaatccgcccacctggcggcagtatttgctggctgggttgactatcaatactgatattcccactgacatccgcccaaagaacggaaatgaagaaactgtgtggcgcgccgcggtagaaaaaggttggcaggacgggcgcgagagcgctgatcgcacgctcgagagcaatttcaaccgcctgactcgcgattacaccggcatgttgcgttacaccacgctgctacagcaagggatcattaccccgccggtcgtcagtgaacagctgcagacagtcacgggttcccgcgacaaggtgacgatcggtgatcgtacccgtgagctcaaacagcacgctggattcgagttggataaaaagcgctggaagccaacggttaacacccgacaataa

SEQ ID NO: 438106 - DNA, 1161 bp, Serratia marcescens
atgatagccctcaccgattttgacttcagcggggggcttacccccgacagactccgtgaatttttcatccattgttaccgccataaagtttccgatatccatctgcaaagcggcagcaaaatcgtcgtggatcatcatggccgtaaggttaccgccagtcagttcccgctagatcacgccaaactgttacacctgatcgacagtatctatacacctgatatcaaggccatggtgcaaagcggccaaggcgcagatcggccattacagctcgaaggtgacaatactggccggtacgggctggagcgcggggagcgcgtccgttttcgcagcaacttcattcaggctacgattggcgcgcttaataccgctatggcagtgacgctgcgtgtcattccaaccgccatccccccattggacagcctaggattagaagacgacttgcgccaaaacctgttgcccctcgatggcctcggtttggtttgtggcgtgaccggctccggaaaatccactctgttggcgtcgatatatcagcactacggagaaacgcatccgcacgggaagcttgttacctacgaggatccggtcgaatacctcttcggcggacctacctggcagctgcgacctcagcagtcggaaatcggccgcgacgttccaagttttgcccacgggctccgtctctcattacgtcaggcaccgactctcatcggagttggtgaaattcgcgacctcgagaccttgcaagcagcagtagcgtgcgcccagtccggtcacctgacactcagcactttgcacgccttttctcctggccatgcattttctcgatgcatcctcatggcgccggccgatgctcgcgagcaagtcgccttcgaccttctcgatgcattacgtttcctgatcgtacagcgtttgctgccgaccaccgacggtaaacgccaagcggttcgggaatacgttctgcttgatgaagcatggcgccgaaaattaggtgaagttcactactcgcgatggccagaaatgattaacggtgaacttgctgcacgggaacatcgcattgttgaccacacatggcgactgtttaccgccgggcgtgttgatgaagagaccgcgaaacaggtcatgggctatccgctgtttactgcgaaaaacaaggagggtttatga

SEQ ID NO: 438107 - DNA, 300 bp, Serratia marcescens
atgagcaaaaacaattccccctggatcgacagcggtgggaaagactattcaccttggctcgatagcggtcggccggcaacgatcctcggcattcccgttctggtgtacctgctgtttctgctttgcgctatttggccatccatgatgactttcatgttctgcctgctcgcactcggcatttacaaaattttgtccctgttcggattaaccccaacggtgttgtttcagcgtctccaccacctactccgcggaacctcggtaaccggtcgtccctggtggtatcgcaagtttttcgaataa

SEQ ID NO: 438108 - DNA, 3231 bp, Serratia marcescens
atgatagctaccgaacccacctatttggtgatccccgttgaacaacgcaaagaagcgtttcgcgcagcgggaaaacttccggatggaagcaatgccctcaccttcgatggcgaagctaaatcctggtatgccaaccctggggccgatctcagcaaactcgctaagtggcgtatcgatcccacattggccaaacctgaaaagcaaggtgatgcaaaaagggagtttcaagattttattgagtctctcggtggcgtctttaatagacgagacatgctggaaatggatggcaagacacaccgaatttccatgcaggacgacaagccgggaaaaaaatccggtgtgtatgttggtcacctcaacggttttattaacggatggttcgccgaccacagagacggaggaatgaggcacacttggtcattggctacggaaaaacccgatccggccgttctggcgcatcaaaaagcgctggcagctcaagaacgctataaacgtaacgaagaaataaaaaacgaacaaaatgttgtcgctaaaacccagagtcgcatttacgcacaactctctcaggccagccatgatcacccttatcttcaacgaaaaatggtcaaggcatcttcgggagtacgcctcgatcgccaaggtaacctgaaaatccccctgagcaacgtcgacggtgagattcgttctcttcaaaccataaagccggacggcgccaagatgttgaccaaaaacggtcagaaagaggaatgtttcttcgtcgtcggcggtacgcttaagaatggctctcccattgttatggcagagggatacgccaccgcagccagcggcgcaatggcactgcatcacccagtggtaatgaccgtcgactccggcaatctggttaaagtcgctggcgcgctgaaaaataaataccccgatagtcccatgatttttttagcagatgacgacttgcctaagccgaaacgtccgggtaatccaggtaaagaaaaagcagaagaagccgcggcactaaccggtggcatggttctattgccaacgttcagcccggaggagcgccagcaggagctaacggacttcaatgatctacatatcactcacggactggcggcactgagcgaacagctatccccggtgcaggcaatgctaaaacctactcatcaacaagaggcaaccatgccaaatactccggtcgtaccagagatgaccaacccggaaccagatcatgtggctaacgacacagaaaccgtagctattccgccagtgcttaccgatgaaccttctgaacctacgcctaacgtcgctgaatcagtatcagatcaggcattgcccgatcacgtaactgccaatgtgccaaacgagttcaccgactacagccatatagcagacgccgtcatggagaatgaggctcttatagaaatatcaaaaacggcagaaattgccactaccgttatcccatctcctccttctgtagatgaacagtccgcatctatagaagacaaagaacctgtaaaacaggcagctattgcaacaatctccagctcggaggcagaagactccgtaacggaggaacccgtttcttttgccagtcgtctggcaccgcgacctgcggtagaaaaggaacaggcggctccaacttcatcctctgaagaagtcgacggtatccacattgagacgcctattggtagccagacgcgcgcggcgaaaccattagatctggatgccttaatgcaacagatcactcatgaaatggcagcagacggtcgttcagtgaaatatctttttgccggcgaagcagcgtttgttgaccacggcgatcgcttgttgatggcgactgcccaagccagccagaacgacgccatgatcctgagtgctctgttggttgcgcgagagcagtaccgtggtcgtattgaactcaccggcagcgacgaattcaaacaacgagccatcacattgattgcggaatacaacctcgacctcaaaatgaagaacgcccagcagcaggtgatgcttgaggaggcaaggcagcgcctcaccgacgaacctgcccccgctgacaaaccgtcaccggtgggatcaccgatatccgcgattgtccctgatgcagcggaacccaataaatcctccgtttcgatgcaatcagcaaacgccttgccgccagagcttcaaccggtaacgctgccacaagaggcggcgcaaaatgccagtcgtgctgaaggcgaagcgggattgaccggcacactactcgatcatggacaggccaagtacaacttcgataactctgagagtaatagttactacatcaaactgcgtacagcagacggagagaagtttgtctggggtaaagaactgtctcgggtagtaccggagagtggcttggccaaaggcgatatcgtcaagctaacctggctcggccgcaaagaggtcaccgtagaggcaaaaatgcgagacccacaagggaaggtagtggtagacaaacacggcgtagaacaaacggagcagatcaccacgcaccgcaaccattgggaaataaagccggctatcgacccctcattattagttcggaacgaacagcagttggtgccgccggcggcgctgcatgcttatgatatgacgcattatcacgcactgcagcaacaggtgatccagctggcaaccgaggcaaaactacctattcctccaatgccaacactgcaacacgagctggtctggttaaaacctaatggggaaggtaccgaacctccgtcaacacgtcctgcagttacaccgctaccggcccacacccaggatgcaggcaccgcgctaattaaaacactggatgcggataaacaactcaaattgcttctgatcaaagggctcggcgactatgtacagggaatggtgaaatatcaggatgcatatcacccggtactcggcaaactttgtactcataccaatggtcatcgctatttgacgctcaacattatcactccggaaggcctaacaccgatcggtcatggtaatgccatcaacaatgaggaaggtgctagcaacgcttttgtgttcaatctcaaaggcgaaaaagagcggttgtatgcccctctcgttgagccggcaaagtgcccgccggcgctgcataaacaactggggttcacgcgcgagtacacgcctccggcgcacaccccgcagcgccgggacgacgtgccggagaatacagtcaaacccgcaaccgcattccctcgcccaggggcatag

SEQ ID NO: 438109 - DNA, 480 bp, Serratia marcescens
atgatccgtcaacttttcctggtcgcattattaattggcaatgtttctctatcggcgcatgccgccaactgccgggcggtatctgccgcgcaggtgggtgcgcaagcgggctatgaacgagatcgtaaagctgccgaggcctggtcgcagcgtgaaaaccaagtatccggtggcttgcagcaatgcctgggtagtatcagcacggccataacagtaccgacatttggtgatctcagtgggatcctcaatggcatcaaggacaaagtttgccgcgcggtacgtgacaagatccaatcttatatacccagtaaaatagacccatggggtgacctgtcgtcccaaactggcggtttggtgacaacccgttcgatgaacgcggcgccaacctacacgccaaccacctacagccagcctgctaccgtcgcgccaacatcgaccggcaacagcggcaattccgatgggtacattttctcccgataa

SEQ ID NO: 438110 - DNA, 672 bp, Serratia marcescens
atgaaaaagccagttactccacctgcgtctgcaggtgaaacgccttacgcagctgccgtggcgcagcatattgccagtcagctcaatgccgattttgcccgtcgttctctggcggttaacttgtggcaaagcgtcactctcgtcgtatgcgcgtttattatcgctttactggcgtatgtcgccttgcatcctccagtgaagtatttcgccacacaggatgggcagatcacgccgctttatcccactgatcaaccagcctacagcgatatcaacgtgaccgactttggcgcacaggtattgcgagaggctttcacgctcgattttgtgcattaccgcagccaaatgaatgcgctacaggctcgtttctcagacgatgggttccgcagttattacaccgccctgaccacctccaacgttttgacagcggtgaaagacaaaaagatgaacatgtcgattatgacctcccccggcgtagtggttagcaaaggaacgctcgagaacggcatttatgcctggaagatccaatatccgataaaactcaagctcaccggccaagtgacatcgttgcccgaacagtcatttgtgatgtcactacttatccagcgtaccgacccccgtcttaaacacaccggcatggaagtgtcccagctcattactttcgaggctaaataa

SEQ ID NO: 438111 - DNA, 990 bp, Serratia marcescens
atgaaaacccccctgaccggtttgcttctgttgaccctggcgcaagctgcaggcgcggctacaaccgaagtagcgcctgcccccgcctggaaaccggcacaaacgttgagcgtgacacctgtcaatgccccgcaacatgtccctgtaacaacaacaccagagccaacaacgcccttaccggaggatggctcgccaccgctgcctttgcctgcgctggattatgcccaaaagcaaatggcgccgctttcaccacgcgaggtggacagcctgcgtaatacttttgaccaacttcaacgcagcgaaagccgttcaccggtaacagcggtgccgcgggttagctctctgaccgtcaacctgtcgccaggtgcctcattgccgatgctccgcgccctgccgaatttcccgagctctgtttcgtttacagacgaaaccggcgcgccgtggccgattgccgcaccacctcttaatggcaacaacgctggttttgaggtgaattacattcccgacagcccagccatgtccgttcaggcccggcgcgcttacgacaccggcagcgtaacggtctatctgaagggattaccggttcccgtcgtcatagcactgaccagtggcgaaccggacaacgccggcaggtcccagatcactgacagcagcctaaacctgaggatccctcttcgcggaccatcggcaaaatccctgccgatcgcacgcgagaaaatcagcctcgataatcctacgctgcaggcgtttctggacggcgtcccgcccgatggcgcccgtcatctcaaaactggcggcggagttccgttgactgccgtttggcagatgggagacgacctctatatccgctcacgaagcgaattacgggatgcatttgttgaaacctcttccgcggctgacggcacccatgtgtggaaactgccgctcactccggaggtggtgttctctgtacagggtcgcaatacaccactgaccatcaatctggagtaa

SEQ ID NO: 438112 - DNA, 1215 bp, Serratia marcescens
atggccatcgaaaaagatgcggcgagcgacggcaaaaaaagcctgctcctgctgttatccggaggcatcggcctgctcgcgctgttatttgtgggctggggctatttgaaccagccggcaccgaccccatcgcaatacgctattaacaacctagccaatagcgcgccggttacctctcaggaaacagcgcaatatcagcagctgatcaaaacgggtaaccgtattggttcagaagcagcagctgccagcgatggtagttttatcgcttcattgcgcatgagtgatgtgcaaatcgaaacaccaaatgagccgcctccgccggtagcccttaaaacaaccgcggaaaccgacaccacctcagttcctcagtctgggggaaccatccaagaggatcaaaaagcagcgttaaaaagctatctgaagctgctcaacgatcgctggcgaccgagcaacttgcagttagctggcacctttgggcagacacctgctgcaggagaacacgaagccggggccggcaataacgctttcagtcagtggtcgcagagtctgcctggaagagaggcaactgtcgcctcggaagtccctccctcagctcgaacatctggtgatgccgtcattgtgccgccaaacactcgccgcccggcggtggtcgacaatgccatcgattctgacaacctcaattcactggtgctggcccacataccagccggccagttggccggtgcagaattcaccgctaagggcatacagttggccggggatggtgttgtgatccacttcactcgaatgacgcttaatggcgtcgactaccaggttgatgcctacgcgctgcaggacgacaccctgcaatctaccgtctccagcgacgtcaataatcgctacgtcagtcgtatcttgctgcctgcattggccatgggcataggaaaagccggtcagctgtacgaacagcaaaatacccaaatccttgccaccaatgccggcaccatcagcggcggtacaggacaggtgaaagggtcagccctcgcgggcaccgtcgctggcggtatcggtactcaagccggacaggtgatggcggccgacgctgcacggttaccggtcaaacaggtgaaagtcttcaaaaaccaaaccatcgcgattcatttcatgaaaggcgtatacgccagcgatcgcatcaatcgggatgctattaccacatccctcgcaggagagcgttaa

SEQ ID NO: 438113 - DNA, 765 bp, Serratia marcescens
atgtctaagtctcatttcgacctgaataacccgcccccggacgagcaactggatgaaccaatcgaggcagagactccgatcgttcgtaagccttcagaaccacggctgatcacattgcccttgggcttaaaagttacacgtcttcagatgatcgccctaataatcgcgctgttagccatagtctcctacggtgtgctacgcaacacaccacagtccagtggtagtaacggcagcacccaattcgtgactcaagagacaccaatacagcccacgccaactccagcaccagcagcgccccagtcccccccagcaggagtgcatatcgaatcagcagatcgcgaacttgaacctctcggtgaaaccgcatcgctaactaacgtcgaggacaatgcgcagcaggcaacggcacaagctctagacaacgtgtgggtatacgctcgcgataatcgagaaggtctcaaatcactggatcagcgcttgcgtactcttgagcagcaagttgctgctcaagctgtaagacagccccaacctgctgcggttatgcctgccactaaaccaatcggaaatactgcttcacgtcgctcaaacgcgaaccacagcctcaaaggagcctcgataaccagtctgtatccggacctggcctgggtgacttatcaggggagcagttgggcattacgaccaggcgattccctgggacgcgcaacagtactgcgtatcgatactgaaaaacgtgaggtgatcacctccgccggaaccattcggtaa

SEQ ID NO: 438114 - DNA, 531 bp, Serratia marcescens
atggatttggtccagatgctggccaacgcagtcaacaatgtgacagacgtcggtattcgcctggtactggcgatcggtttagttggtgggttggtcatgatggccatgcacttgagcagcatcgccggcaaagctcgacgcgggcaggtacaagacggcgccggcaaaattgtcaccgttgtcgtgatgtgcggtgccactatcgcccttcaccaggtgatgaacgctacatcaaaccagatggcgctcggtagcgttacctttggcgccatcgcctatgtctccgaaggaaaatacggcccggccgccacggccatcaacgcaaccctgaccttgttacaactggtcggcgtgatttacgcgctacaggggcttttgcgcctgcggcgttcacagaaagacggccacaccgggctcagtgccggtgatgacgttgttagcggcgcaaagcgtctgatcatcggcactatgctcgccgccaatccgcgtgtactcgatgcactgcaaaacactcttaatatccattggtaa

SEQ ID NO: 438115 - DNA, 405 bp, Serratia marcescens
atgaacgttctgaaatccctgaaaaatgctcccctgcacgcggcagtcaaaatctatatggtggccgatgcccttcgtcgacatatcgccagtattctggcagcagtgattagtatggtcgttgccccgctggctcatgcggacgatgatcttgctgggtcaatcgaagccatgcttaacggagtaacctccctgaaagacccgtttgttaaatctatcggtgtgatcggcctgctatgtatagctgcaggaattatcatgatgatctctaagaagaataatcctcagattaaagtttctcatatcatgattgcaattgtagccggcgctgcattattggcacttgaccaggtcgcaaaccgcagtcagaaacagatgggaatgcagcccgtaactgctggttaa

SEQ ID NO: 438116 - DNA, 606 bp, Serratia marcescens
atgcttattttctccatctcccggcgaattaccgggcatgctctcacacctgcgcagcgcgatgcattggacgatcaggctcgccgtggcggtcatagctgtgactattgcggttattcatcaccacacaacagggccgtgtttagggacaccaatccattgaatactgcccaggacaacctgggggtcgcagatccaatttgcgaagcctggcaaaaactcgactctgtttctgccgaagcgggtgtgatggtttatctgcctgctttggctccggaagatgcaaatcatctgcagcgagctatcgtgcaggcattatcctccaccgacgatgaatatcgcagcgacgcacaagcgttactggactggctgacaacccacgacagtcccgtcaaacaagcttggggcaccacacacccgcaagcgttcgcccaggctctgagcagactggatgaggaaggtcgacaaactgcagcggagcgctggcaacatctcgcgttagtgttacatcccgcacgtataaaagactggctggccactgacggtcttgaagcgggaacaacctggtggcgcgctttctatcacgactatctgtcccggagttaa

SEQ ID NO: 438117 - DNA, 3075 bp, Serratia marcescens
gtgattatcgataaaatcgaagatctctttgcttatttctcccgttatgttctaggccgcgatttcgctcagtattgtgacctgcgtaccgtcataggcctgacaccagacgacaaaatccgacacccctcacttgatgctccctacatacacgtcactaaaactaacgactatgccagcacatttgagatcctaggagcttttcgcgagttcagtgaggcagttccccagcacgaaaatgaaacaccgacgccggacagcttcctgcgcttcgttctgaaattacgcgatgcattgaccggcgatttcaaaagcctgggtcataaaatcagcatcgtgttcgaacgcgatccaacgcgcagcgccgaagaaatcactcgtctcgttgaaccgcaacgacgcgcctaccggaagcttggtctggctctcgatgacctggtcgatgagcaaatcgtcaaactcacgccgtatgtcgcccgcgaacgagtctggcttaccgtgtattccgccattggcgctctgccgctcagtgaacgtagagaagaaatacagcggcagaatactcaattcaaaaatcttcctgaagcccgtttcgggcaaaacccgatttacgccgagtttgaaggccttaagctgcgccacgacgcatttatcgataagctggccactgatttggccgacggcaacgacggcgtgatggttcgattgcttgacgcccatgaagctggccatgtgatccgcgatgaaatagagcggctgagtacccatgaagagtggcgccccctgctgccaggcgatcgcgtgatccctcaaggaaaattgcgcggcgacgatatcagcgcagccctggcgccgcacttgaatttccagttctgcgacaccgaggtcgacacccacggcagtcttatagaggtcgacggactctatcacggtcagttggccatgacgctggcacctcagcgccccgaatcctttgcccagctgttcaccaaagtaccacggcagctaccctggcgcttgcgtctggacttgatgcccggcggcggtgaggctttggaaaaaaagcagcagctactgtcgtttgccgccttcgtccctaaactacgagatatttacgactccatttcatggttgatggcgcagcacaagaaagagcctgtttgtatgatgagtatcaccgccagtacctgggacgcagacaaaagccgtttgaaacgcaatctgacgttactgcaaaaagcaatccagagctggggtgttacaacagtgacccgtactttcggcgatcccattcgtgcctgggtcaacactctacctatggtgtctagtttcagcgcgccaacgctaatgtacccccctttgtctgaagcgttaaaactgatgccgctgcaacggccagcgagcccctggggtaacgaaggcaacgcaattttccagaccgtcgacggcaagccttatccgatcggcttgggcagttcgttgcaggaaaagcacaccgagttgctcgcagggcctccaggttcgggcaaatccctgttagcgaacagccttcacctcgatgctctcactaacggtaatactgatctgccgtttatggctttcattgacaaaggctttaccgctcagggcttttacgatctggtctatgacagcctaccccacggacaaaaggacaaaattgccagtattattctgcgtaatacagcagatttctgccgcaatccgttcgatatccaacttggacttaaagccccaattagtactgaacgtgactacttgctcggcatgttgaccagcctgtgtatcgatccacagctgggcactgcacctgatgccccatcatgcagacagatcctgacacgcgctattgagatggtgtaccgcaagaacagcgacattgaaccggtacgttatggagcatcattggttccggaggttgatgccgcgctggaaacaagcggctgtttgaatcgctatgatgccgcttggtgggagatcgcaacctggtacgaagtccgcgatatgctgttcactgccggctgcgttgccgaggctgcgttagcacaggctcaagctgtacctgagctcaacgacctgcagggggcgctaaacagcgaggaaatgcgcaatgtcttcgctaacgtcaaccgtcccggatcggatgagtcattactgcattatgtgtcacgctgtctgacacaggcactgttcgattatccgttgatatcggggcgcacgcggtactccatcaacccaaatacgcgcattcgtatcgtcgacgttaacaacgtagccggcaatcaaactccggaaggtaaaatcaagacaggtatcatgtatcagttcgcccgccatctggccggcgctaacgacttctatctgccacagtaccaagatgaactctacaatcatctggatccacgttatgtaccactgcatcgaaaacgcatcgaacaactggatcaggaggtcaaactcatctttatcgatgagctgcataacatcagaggtatcgacattttgtgggatgcactcgaaaccgaagatcgcgagaaaagaaaattcggtatccgcacggtgttcgcttcgcaatatttggatgattacccgcagacaatcctggaatccgccaactccctgtacctgatgcgggtaaggactaaggacttccctattctgcaggaaactttcaaggtgccgcgtaccacactaaataggttgctcaacacaacccgcggcgccgcgccggatggaagtggcgtcacgtttctggccgttttccaaaccaccaatggcaacgtggctcagctgctcaaaaacaccgcagggccactgcggctctgggcattaaactcgaccccggtaaaccgcgctctacgcaacatgctgtatgacgcgttggatggccaaacggcccgacgtttgttggccaaaaccttcccaggcggttcagcagaaaaacatattgcgatgatgaaaaagcgcgccggcaatgacgatgaaagcggcgccattcgtcaactggccaacgaaatgctggcaagcctcggctatgtgcagggggatgcagcataa

SEQ ID NO: 438118 - DNA, 1221 bp, Serratia marcescens
atgaaatcataccctcctgccatgaggctttcccctctggtcgtgctggtactctccacattagcttctccagcgcacgctgtctccgttgtcgtaacctctagcgttcccattgagacacaggtcgctccggtccttgggcagatgagcggtacattgacagggatggctgctacacagcagcagatcggtgccgccatcaaccaaaacggcggcaagatcgccacgcaaatcgaacaggcagcacaagcacaacgcgatcaagatatttttgctcgtcaaaccgaacgcctcgagcgatcgcgccgaacctataccataccggatagcctgtgtactgaatctggttccggcatggtcacacaagttcaaagtcgcgctcgcgcgcgacaaagtgcgctgtcgcggggccagggaatcaacaatgccatgatccgccaaggatggaccgccccggctccagcaccagaacagacagcctttcgggccgcaggcgtacatgccgattactgcgatgccaccgatatggctgcttacggcggcacgggagtatgcacccgcctatctgaattgccggggggtgataagcggtttacgtctctactcgatggtgccggcgctgaaggcaaagcgcctgatttaacctttgatcagaaacagaccgacgcagcaatggcttacgcacttaacagtgctccagcctcggccgggaaacagctcagtaaaggcgaagtaaaaagcgcctccggccgccaatatatcggcctgatgacgcagtacgaagcagtgaacacagcggcacgcgaacccatgttggccatggtggcctccagtcaacccagtgaagcaacacgcgatgtgctgaaagaagtgatgcagaccccatcagctgccgcctacttcaaccagacagcatctgatgaagcccggcgtaccgggatgatgtcggagcgggaatttgagcagttcgacgtaggtcggcgctatgccaacaccgactatcaaaccgacctgcaggcgatggacggcgacaacctggcgcgcgaatctatccgtgtgcaagcgcaacaaaactggttgctgttggggataaagcagcagctgcaaaaaggcaacgtcctgcaaggccaacaactgggcctaaatgccaacgaggtttatcgtccacaactgcaagccaagctgcacgaactcagcgccggaggggctcgtaatgactga

SEQ ID NO: 438119 - DNA, 570 bp, Serratia marcescens
atgactgaccaatccccgaaatctaaaacgtcttggaagcgcgccagcaagggactgtatttcactgcaaatctgttcctaccgttatcggaactgcgttacgcggcgactaaaattggcccttcactcgccaataacttgaagcgcagtctgatgcttgcttacggctaccggattgaatatcaacagacactccccgcgctacagtttgaggaggcagtggccgccagcggcgagtctgtgatcaccttgataaacagattcaggcgccgcaagcatctgtgtctcgttctgggtgcagtaccaatactgatcgctttgtcggtcgttctgctggttctggccagcaaggtatttaccccaactctgctgatccggaccgcaacactgtgttttacattgttcgctttggcagcgataccattactgcaagcgtttatttccacctggcggctatggcaattacgcaatcaacgcctttccaaggaggaagccggcagcctgaccgactttctgcgggaaaacacctggtggcaagttcttctacggtacgaacgcccgatccaataa

SEQ ID NO: 438120 - DNA, 2112 bp, Serratia marcescens
ttgttgggcctgttctgcctttgcgcgcacgcggattccgcagtcagcttcagcacgatcgagcaggcagctaaacgcaccgatgatctgtctcgtcaggcattggttatgatttttggtgacgttgtcaccaatccgttatctaccgaaaccagcatggtcggtgaactgttctttgtttttaacggtatcgtcatggcgatcgccgtggtgtggttcctggtggtcaccctcacgcacctggtcaaggccggccagcgcggcaaagtattcagccaagggagctcaatggtcggtcccgtcagcacagcagcagggttcatgaccttggtgccaaccgtgtcaggctggtctatcgctcaactgatatttttgtgggcagcatccgttatgggcattggcagcgcgaacgtggtaaccgaccgcacggtcgatcttctcaaggacggctacagcctagtcgtacagcccgtggcgccgcaaactgtcagtgccgcgcgagccatctatgaaatgaacctgtgcatgtacagtatcaacaccgaactgcgtgacatgtatcagcaatacggccaggctggcacaccactaatgggcatcaagaccctgaccgatggttttgagatcggcaacgggagtgcattgtgtggcgcagctcggctgccggaaagcctcgccgacaaaaccactggctggttgttccctgcccctgtaaacacagaaagcattatcagcgcacaacggagcgccatgaatgaaatgcaaaataacctgtcgacagccgccgctcagtttgtaacggcattagtcaacaagcagaacagtgggactggcgcgctcccggacgccgaaactgacatccaaagggccgcacaggcctacgaaaatcgcatcaatcaaaccctaaacgctcaaggccaaaccagcgaactggctgatgtattggccgctcagttgaagaaaagcgggtggcttgctctcgggtcgtggtatcaaacatttgccactgcaaataataaaattaacgatgccgtacagctaaaacccgtgattactggtcgctctggaattggagaagttggcgtaagcgatctatttaataatgtattcaccgtatatcgaactcaaaagcaaaatacttcttttgtacctccactcgggacagaaagcgctaaagatacccagcaatccttagatgcatctgaggccagtgcagtttttgtcggtttcttgaactcccccatgcagaatttagcgaacgctatcgcgacatctgagttaggcagtgactttggtactggaaaccaaatgaacccaatgctgaaaatgaaatatgttggtgatatcacgttaggcggagccgaagctgcactcggcatattcactggtgcgaaaattcttgctgcagtttccactgaaggtttttggggtcaattagccagcgccttttctggtaatgctactcaaggtatcgcggctgggctagatgccctctctccgattgtatactttattctgttcatgttgtttggcattggttttagcttgtcaatctacctgccatttataccattcatctattggctaacagcggcggctaactggatagtcagtgtgtttgttggcgtcactggtggtaccttatgggcggcaactcatatcggaacagaaggagataggggccatcgttctgcatatggctatatatttctcattgacgttatgattaggccaatgttaatggttttcggatttatctttgcaagcataacgttgatcgtaatgggtacactactcaacctcatgctagggcctgccattgctaacgttcaagcaaactctattaccggaatattctctttaattggtattctcactctttatgctcgcatatgtaccactacagttacccgtgtattcgggttgcaagtgaccatgcctgactacatcatctcatggctcggcggtcgtgaagctgcaagcattcttggtggtatggttgaatcaacaaaaagtatctttgccggcttttcaaatggactacaaagatctcctggtgtaagatctaatatgagaagtaacaacaatggaaatggagatggtataaaatga

SEQ ID NO: 438121 - DNA, 579 bp, Serratia marcescens
atgacgaaataccaaaatcacttaaggacactctttttactttttacattaacctctggtgtaggctgcctactcttttcaatggttctttttctcgtatccgacgctagaagcaacccatcgtggccttacatcttcctggcaattggcgtaacgttcatttatgcatttgcgaaagtgcaagaaaaatcaaaatcaaaaacacgtaacgcaatcgaagccttcaagtgcaatgagttttctccaaccaaagagtatgaactcaaaatcctggatgcaggtaaatacttaggtattgatgttagaagcggaaccatactgttggtgtcaactactgagtccatttaccaaggaaagacgacactcgaactttcagggtatgagtgcaatggaaatatgctaacgctgaagtttaatgacgtttatttcccctacttccgtatcagtgcaggaacggaaagtaaatgcatgaactttggtcgcaagttggatgctttactatcatcatcttatcgaccagaaaaagactcaggcaacactttcaacaagttcgtgaaacaaaaatctttggcttattaa

SEQ ID NO: 438122 - DNA, 1338 bp, Serratia marcescens
atgaatgccaaaagtcacctgcagcccagagccggtaacgagcaaggtcttatgttgctactcgttgccgctttggcagcatttctgctttggatctatcaaccccctgtaatgtacggatgctgttggctactttaccaactgtggtcattatgcgactttccccgtgtccataaccaggtcgcagaaaagctaaacctccttgcctgggcaggcagtcaagttaatcaactgtcatggagtcagtttatcgacgttatgaatcatactgcggggatcttattggcgccgatggtcctgattgttatgggtgggctgctcatggtgcgcaaccatccgcggaaccagacccggcgccatattgatgtctataccctaccccatatcatggcgcgcttttctccaagcatcataccagcactctgctatggcgataaaaagacacagttgctgaacgttgatccgccagaacatcgcagcgcccagtggccggaagaatttgccgttgaacacaagctgattattggtgatcgccttgatacccaaagaacgcaaactgcgttcgaatgtcaacttggcactccgttagaaaacttttccagctttagcgcccatgagcgcgctctggttgccatatttggcctagtcgcatttctgaacgatcgtaaagccgctgaagctcttctcgatagcctgaaccgttcatgccttatcaaaagcaggcgggacaaaggacaaaagggatatcccgtactccaactcgccagcaaggcattcgaaagagtaacgcagacaccagctgctcaagaatggcttcaccaacattcaacaacacgtactgcactttatgccttacataaccgggatatgcgcctgccatgcgctcggtttcgttggctcaaaggtctcgatcggccgctttggtacaccctggcctcaacggggcgcccgaaggcctttattgaaggcgcaggagtcattgcagccgctaactgggaaaccgtggtagctcaaatgggagaacgccttcatgcatcaatccccgtgccggaaaacaggatggataaagccattaaaggcctcgaggacgaactccgcagcgtcgggttgatcatcgataatcgcacgacgaatacatctgtcctcagtgaactggtcttcgatgaagatgaagatgaagatgaagatgctccaatcgtgatattgcagcctctaacggacactacggagaagactgccagcgaaacagcaccgctgcagacgaaagccactatccctggagcgaataccttcccccaaaaaccaggccgcgcccacttcatccctcgggcgagataa

SEQ ID NO: 438123 - DNA, 939 bp, Serratia marcescens
atgaaatcgaattatactgcttcactgcagggcagaaccttgtccgtatttaatcacaaacaagaaaacgaccaagtggtcgccatactcgatcccggtccgtatcctcgtttctacctaaaagatgacgccatttggcacgataatcgtgatcttggcccagcggcaatcctacagggttctggaacgaaggatgctgctgagatgcttcacgcgattaatgcagcgttactacaccgacgccaagcatatcgccgctgctggaaacgattaggttgcatgatgagcgccatagccctcagcttggctttagcaggcttctggtattcgaatcaaccgggggatatgtcagcaccactaacgcagcaagttacgccaaacacgctttcgaataccgttgccgcaaccccacagccagaattgaaagtaacagcagatcagtaccaggccgttgccaaggcactacgtaatgcggcaaaagcagggcagtacaccattcccctatccagtgggcatcagcgaactctctacgtttttgccgatccgttatgtcacaactgccaaattattgagccggccctggaagcgctctccgaaagatttaatattgagatcttcccggtcacactcgtcggaaaacagcaaaccgtcgaccaagtgagccctgtgctttgccaggcaccgcaatatcggcgccaattatggaagcaacttttccaggccgacgcaggcatttcacctggtgaaaacactgtatcaaataaaatctgtgatgccggtaaccaggcgatcgccaaaaacgatcaagccttcgatatctacaatttgccgggcaccccctcactgatcgcagatgatggacgctatatcccgctgtcatccctgaaaagcgatgaagctctagatgcattcctcagccaaaccatcgtcaccccataa

SEQ ID NO: 438124 - DNA, 1632 bp, Serratia marcescens
atgtggtcactcgcacgccgatttgggcgtgaggatgatttctacgtcctcaacttcatgactggcggttccgataagctgctgcagctgctgctgaatgacaaaaagcgccagccttcgaacaccataaatttgttcggcactgccaataccacgttcatcatacaattgatggaatccatgttgccgcctgccggcagcggcgatcaaggctggcaagacaaggcaaaatcaatgctagccgcactggtctatgcggtttactacaagtgcaaacgcgaaaagcggcggatctcccaacgggtcattcaggaatacctgccgctgagaaaattggcggagctctatctggaagccaaaagagatggttggcatcaggaggcttataacccgctggaaaactacttcaacacgctggcaggctttagaatcgaacttatcagccgcccctctgagtgggaacaaggcgtttacgaccagcatggctatctaattcagcaattcaaccgcatgctgaccatgtttaacgatctctacggccatattttctctactgacgccggcgacgtcgatattgaggacgttctgcataacgaccgcatcctctgcaccaccattcctgcgttggagttatctaaaggcgaagctgccaatattggcaaactctacatttcggcgatacgcatgaccatggccagggatttggggtttgagcttgagggcatgattaacgatgtgttgatcgtcaaaaaatacaaaggaaatttcccgttcccgatcgccatggatgagctgggcgcctatttcggtcctggcatggataatctggcaagccagatgcgcagtctgggctatatgctcatcgtatcagcacaggacatccaacgtttcatcgccgagcacaagggcgagtacatgaccgtaaacgccaacctactgacaaagtggttcatgacgttgcaggacgagaaggataccttcgaactagcacgaattaccggcggtaaagggtactattctgaactcggagccgtagagcagcaaggcgggctgatcacgccacatttcgaggatgcaggcagtaacgtcattagggaaaaggaccggctcgatttgggtgatttgaaagatatgaaccctggcgaaggtatgatctctttcaaaagcgcgctgatcccaagtaatgccatctatatccaagatgacgataagatgacttcagcactgccaatgcgtatcaaccggtttgtgaatctcgatatgccaacagaagctgaactgttggatgcgaaccccgcgctcaagaaaaagctgccgccgtccgtgcacgaagtcgaaactatcctaacacgcttggaatcaccaccatctcaaacaacctgcaacggcctgatggaccctgtattgcaaagcgtagtgtcgctatccctggatcttaatcaccgggcagacgtcagttatacgccagcacagcgcggtattttactgtttgaagccgccagggaggcattgcagcagcacaagcgacgttggaaacaacaacctacggcgccaaaaccaataagagtgtcaaaggacatagccaaggctctagctacgtccgaacaccatcgcgatgagcgatatgggtaa

SEQ ID NO: 438125 - DNA, 318 bp, Serratia marcescens
atgagtgaagacaccatggactatcaacgcgggtacattgagatggttcgactatgcgccaccctgttgattgtcctggcagaaaagaaattaaagaatacagaagataaaaaatcacaaactcacatcgaaacgttgcatgacgaagctgccaggctactcaaccatttcccagctccagatatccttacagaggaaaagcacgatagcgtttttcaccgccttatcgatatgttcacagagcttgaagggaacgatgacgagggttggcaagcctaccaacccatgctgaagacgttatactcacgcctacattaa

SEQ ID NO: 438126 - DNA, 1929 bp, Serratia marcescens
atgatccctatcgttcctgagaagcgcagtgatgggcgttccagcttcattcagttggtcagttatctgacgctgcgcgatgaggataagcctgatttgccaatctctcctgagaatccctatgttcgtccatcgcgttcaaaagctgcaatctttgaccgcctggtagggtatcttgatcgtaatgctgggggggatcaacagacccttttggctatgtttgcagacggtacgcagcaggttaaatcaggcgaagttgtgtgtgaaacgaactgcttcagtttggaaacggcatcggcggagatgaacgccgtggctatgcagaacactcgctgcgtcgacccggtttatcactgcattctatcgtggcgtgaagaggatactccgaccgatcagcaaattttcgagagtgcgcgttattgcattaatcagctgggaatggctgatcatcagtacgtgtttgctgtccaccgggacaccgataacgtccattgtcatatcgcggttaatcgtatccatcccgagtcctatcgtgcggccaacatgtataaagatgtcgacacacttcacaaagcctgtcgccaccttgagttggagcatgggtttacacctgataacggggcatggaaagtgaatgatcagcagcaggttgttcgtagccaaaatgacttcaaatctatcccacgtaaggctcgtcagctggagtattatgcagattcagaaagcctctttagttatgccgtaggtgaatgccgtcaagcgatcggcgacatcatggcagatcctgaacgcctatcctggctgaacctccataatgaattgaatcgtgcaggtcttgtgatgaaacaaaagggagaaggattagccatctactcgattcaggactcgagcttgccacctattaaggctagcagcttgcaccctgatctaacacgttcctgcatggaaccgtatttgggcgagttcacttccacgcttgatgttgatgctgtggcatctcctaagcagccagaatacgtatatgatccgcgtttccacgcacgcgacctgatggcacgggttgaacgtcgccaggccagagccgaagcaagagaagatcttaaagcccgttatcaggcgtacaaatcggcatgggttagaccaaaattggatgctgatgtaatcaaagcccggtatagaaacttgtccaaacgttttgcctggcgtaaggctaaagcgcgggtcgaattacgcgatccgcttctgcgcaaactgacgtatcacattatcgaagttgagcgaatgaaggctatggccgcattgcgattagccattaaggaagaacgacaggcgttcaaagctgctccagaaaaccgacgtctgtcatatagagaatgggttgaacaacaggcgttgatgcacgatcaggctgcaattgctcagttgcgtggatggtcctatagattgaaacgctcatccctgacttcgagtgtttctttgaatgggatccgtttcgcggtctcggatgacagcaaaccattagccatagacggttaccagacccgaatcatgcgagacggtgtggttcagtatgttcagaatggggttgttcaattgcaggatcgcggtgagcgcattgaggttgccgatcctcatgttgaggatggacagcacattattaccgggctggtgatagcgcagagtaaatcgggtgaggagatggtactggagggcgatcgtcaatatgtccaacaatcttgcgaacttgtctcttggtttaatgaagcgtcaggaacttccctgccattaacagaaaccagtcaaagaacgcttgcaggatatggatcattgccaaccgaaaattcccatggaacgactgatgcaagtgttaacgagcggcatgaactggatggttatatccagctgccaactagtcttcgtcctcactaa

SEQ ID NO: 438127 - DNA, 342 bp, Serratia marcescens
atgagtaaaagcgagcgccggaacagaacagccctgctgcccagcattcgttgcttcccagaggaaaagtcagtgatccaggaaaaggcgaccgcggccggtttaagtatcggggcgtacatgcttaagtgtggcctcggtcgccgaatcgatgctcgttgtgacgttgagctcatcaatgaactgcgccgtttaggcggtcttcaaaaacacctcttcaacgaggggaagggaaatgtaagtgatgctttcagcaagcagtattcggatgtgcttattgcgataaagaaagccatcatcgcaatcgatatggacatgacaaatgaaggtgataaggcatga

SEQ ID NO: 438128 - DNA, 1113 bp, Serratia marcescens
atgttacgttttggtgtttccatatcctcttcggtgcttagcggcatgtcttgtgctgtgacagaccttgtgccggggcacctacatcgcaagggttcgctatcgccggccatcctcgcccgttcgcactcactcaacgcagtttcgttcgcttgcgcatgcggcctgcggtgtcgcccatgcgttgcaggtttataccccgtcacggtcattgcgtcacagcacaagacgcgccgctccggcaaaaccggaataaatggcaacaccgaaaacagactgaaggggatgaatatgaagcgactgtatagtggatttcgccatgcaaatgtgatccgtaaaactcgaccattaacaaatgatgagttattccgtcacgtaccaagtgtcttctctgaagaaaaacatgcatcacgtagcgagcgttatacctacataccaacgattaatttgttggatagactccgcgaagaaggtttccatccattttatgcttgccaaacaaaagttcgcgatgatgataaacgtggtcacacgcggcacatgctaaggcttcgtagaaatggtttcggtcaaaatgatgaagttcctgagattattttactcaatagtcacgatgggagtagcagctatcaaatgattcctggcatatttagatttgtttgtaacaacggtttagtgtgcggcgacacgttcggggaagtccgtgttccccacaaaggagatgttgttggaagagtgatagatggtgcttatgaagtgctaagtttctttgaaaaagtaacggattctcgtgatgaaatgaaggggatttttcttgataaagatgaacaacatgtttttgctgaagctgcattaggttacaaatattttggagatcaccaaccaattaccgcagaacaggttcttagtccgcgacgttggcaagataagaaagatgatttgtggacgacgtttcaacgggttcaagaaaacattataaaaggcgaaatacctggaatcagtgccaacggaaaacgaaacagaacacgggcagtcaatagcataactggtgatgtaaagctcaataatgccttgtggaaaatggctgaaactatgaagaatttgaaatcttaa

SEQ ID NO: 438129 - DNA, 150 bp, Serratia marcescens
atgattattgatgactatatcgcggcgatcggtcgtaaaattttggaacaatggcaagaaaataaaccggtaattattccagctcttaaaggttttgagtggacacagttgctccgctacttagaactaaagcggggctatgcgtgttga

SEQ ID NO: 438130 - DNA, 450 bp, Serratia marcescens
atgtcaacgatcgagcaacagcaaatggttttttatattccgggaacaacgtggccactggatgtcgcaatctggctggaagatcgctttgtcacgtcgtcaggcaaaacgcttgaacagctacagcagcgtaatcctgcatgtattctggtgtcgtatgaagaagcgaagcgcggtatgtatgaggccgcaagtctgcctgtccgtcgtatcagcaaagatgagtacatggacaagttggagatgttgccgccgctcgattggaagtattttgatggccaagaatctttcaagatgatggaaatgtattgcgggaatattaccgatattttcgcccagcttggcaatagctattttgcgatgcgcgatcatgtttcgttaccacatgctgagatcatgcagcgtgtgcgtacatttatcgatgccgagtctgcggccgtagcagcctga

SEQ ID NO: 438131 - DNA, 441 bp, Serratia marcescens
atgaacccctataacgtcaacgtcaaaaccgccgctgcagaatctgccgagagatgtgaaaaggcgaaatggagcgaatcagaaacccctgagccgtgggaaaagccgggcgtgcaatatcccgcagccgttcgagcgatggagatggagtttcgctatttagacgacctaaatgatctgtatgcgcaaagcagtacgtcccccgaggagctggagcaggcgctctatgagattttcaggcggatgacagagcgcgtccaaagctgcggggctgactataaactcccggacaaaccgcgggttgcttacgaaatgatccaatattgggtcagagggcaacgggtagcgcagtgctgcttcggggaaaccggtcagcgtgcctgggaacatgcacgttacagactggcgctcgagatggcggtggagtattcgtacaactga

SEQ ID NO: 438132 - DNA, 765 bp, Serratia marcescens
atgatcccgaacagtcacgcgctggtgccggtcaatgaatatcagcatgccgccgtccatgccgtagcgttggtcgaaagtaaaagaaagaggggaaagcggctcgctgaattcccgtatgccaaagcctttttcaaggtcttgaacaacgggcgggggcagatcctatcaaccgacattcgcctcatttcatccaactattttcctgatgagaggggcggcgcatccatcgcgcagtatgttgcggcactggacacgttgatcgaaagtggtggccaatacaacccgcttcctctgtctggggatgtcgctgccaagctgtttccggcctacggtgctctgtgccgcgagcggcgagagcggcagtgggatatgcagtatgagcgtgatgagcgtagacgttctcgtgaaaaacagcacaagcgccgccgttacaagaaccaacttgcgcaggcggaagtcgagctggcgttttcaacgccgagcactgttggggggtggtattcgcgttggagcaagcaggacataatcgaagacgatctggtcgaaagcgttctgacatggatagaacgattcccctgtatggctggcagagggctgcagtattacaagagcgatgcattgtggagcctgatggatcggctgaagcgagtagaagccgagttttctgaggcagaacgtgtattaaacactttgctcatccctaataagctaagactagccgcaggtaatacggttgccgatgcggaattgagccagtcctaa

SEQ ID NO: 438133 - DNA, 2049 bp, Serratia marcescens
atgccaaagaccatgacaaaaccaaaaaccaacaaagcagagccacagaaaaccgcggcggcgaagtttgtcgctgatacgctggccgatgccgccgttgaaattctgacgctcaaacaattggtggatacaaagctcaatgcccgtaaaacagctcgcacacaaggacatattgaagggatagccaacagcattgaaggaactggcttactgcaaaacttagtcgtgtaccggatggccaacgggttttacggggttgcagcgggcgaaacgcgtcgtttagcactcaatctgttgatggaacagggtcgatctgcggcaggtgtaccagttacaccggacttcccggtcttcgtcaaagttgtagatgaagacaaagcgcgcgcgatttcttatgcagaaaacggacagcgctcaaacctgacacctgcagatcagctggaaaacttccgtgatatggcgaaagacgggacgtctgtcgaaaaaattgctgccattctcggttaccgcacggtgcatgtcagaaaatgcctcaaattgacaacggttgcgccatcgctgcaagagttattgaaaaccgaccagattacccttgatcaactcgcggctttgggagcgagtgatgatcaccaacgccagattcaggcgtgggaaaacggccgttactacgagcatcttcgtaaaccaaaggcgttgcgagacgctgtgctcaatggcgaaatctcagcagtagggagcgagctggtcgattttgttggtttagatgtttaccaatcagcgggcggagaaattcgtgaagaccttttcggtgaaagcgtcatcctgaccaatccattgcagctggaatctatggcgatcgccaaactgcaggaagctgctgatgcgatcgtaaaaaaagaaggttgggcatgggggataggtcgttgccgcgaagcgcgacgttataccgacgatgagaagactttcgagatcccttgcgtaaccacgaggctgaccagcgggcagcagacagaaatggatcagctgatcgccgagcaaaaattgctggatgatatgctcgatgagactggtcttgatgcagacgaagaatgggaacatgcgccacgtgtagagcagattgaggcgcgtatcaacgaaatatacgcagctgcagaactcaacaattggccgtcagaagttcgtgcgacggcgggcataatcgcttacctgaaagatggtcggatccaaatccaacgcggcttgatgaaagtagaagatatcaagcaacaagaaaaagccaaccgcgaagaaatcaagaagaacaccccgccatcagaaaaagggctttcccaagtcttggtgaccagcttatccgccgaacgcacattagccgtgtcagcggcgctggcgcagaacaccaacgtcgcgattgcactccatacgttcacactggcgcggcgggtgttcgacaatggatatttctatgtgttgcacacctctgtagaaagcatgcgcagcggctgcttatcccagtcagaagaggcaggcagcgcgagtggcatcgccaaccttaaactgaacgagatgcatgagagctggttgaaccaatttccggaaaattggagcgaaagttttgagtggctgctggcgtggccacagggtgacgttctcgagttgttggcatactgcatttcccacggcctcgatggccgagacagttatctcaaggataagcgggtaggcaccaagctggattctatagaaaaagccctagatttccagatcggcgaatggtggaaaccgaccaccgcgaacttcttctcgcggattagcaaagaccaaatcgtggacgttctctatagcgccggtgaaagcgggaaagccaaagatgccgagggcatgaaacgtaaagatgccgctgagtttgctgctgcggtgctgagcgaaaccggttggttgccgaactgcatggcaccgcagccgcaggccgaatcggaaaaccgggctgatgccactgccagatccgcgaacgccaatgatactaacgctgaagacagcgctgccgcctaa

SEQ ID NO: 438134 - DNA, 225 bp, Serratia marcescens
atgactatcgcagggcttattgccaggctaaaccgttatcccaatgatgcgctgtgcgtggccagtttttggctggatgatgattttctcgcgttggatgcaacgttgacagctgatgatattgagctggcgatggaggttgtccatgacaatcatgatgcaaatattggcataaactgggatgtgctgcagagcgcgattgatattgtaaaagttcaagaatga

SEQ ID NO: 438135 - DNA, 558 bp, Serratia marcescens
atggatgtttttgagttgagattatggcgcgccggccaatacttttcgctgtctgaggcgcgttcgctgcgccttgggagccattggcggcaagaggatgccgccaatgctctgggagtgtcagaacggacttatcggacctatgaaaatagtggcgtgtcccgaacagctcgcctggggatccagacactgatgctggttcgcttgttacccgatttgcgtcgaatggagcaaccgcaaatcgttttgcaactgcaggcgctaacgcgccatgatcagacaacaccccagtccaggggcgtggcatcgcttattatgccttctgcaggtatgaaggcatggcgaggggggctgggttggacgcaaaagcagaccgcggattatcttggggtttcgcttcggaccgtcaagaactatgagcaaggggttttgccgcgtcgactgatgttggccgcacaggctgttacgctgataacgttattgccggtctgggcaacctatccgtcagccaggttactgcaggttctggatcaactggttaatattgcagtgaaataa

SEQ ID NO: 438136 - DNA, 405 bp, Serratia marcescens
gtgagcgaaaacagcagtgatacccgtcgaaaatttaccagctatttgcagctggactgcgaagcagatcgccaggctctgaatgtggttgaatccatttcgcagcgagtacgcggggattttctgcgtaatgccatcatcacaacggcggcattacatcagctcgattcacgattaccagtattgttggccacgatgtataacggccagttgaccagcgagcaactggtcaacctggtcagtcaaacaaccggctggaaacccgaaatggctgcgatccgcgacgtggttatggcgttgtccggtgataattgtcgattggtggatcctgttgaacctgtacagcaacgtaacgaatcgggggccctggatgaggctcgcaagaaattggataaactgctctaa

SEQ ID NO: 438137 - DNA, 342 bp, Serratia marcescens
atgaataataagatttattttaagggtaaaaagacaattgaggtgatcactcatgcgcgtcaacacgggtgtgatgtgctgttgatcaaggatgagggggtgtatttgatggcggcatcgcatgccaaaggaaagcgattactggcctatgcggaagggttggatccgacgacccgtgacagtagcgatgtgtttgatgacgcctgccgattatgtggcggcgacgactttatggagcgtctcccgtcggacgacccgacctttgaccatatgctggagaaacaaggtcatcttgagtttctcattacacaacccgagttctgtatgacgtctgtgggttaa

SEQ ID NO: 438138 - DNA, 504 bp, Serratia marcescens
atgacgaagttactgaaagagtttttggccgagctggccgtcagccagaacgctaacaagctgcaggacgaacgtgccgaggacaatttggcccgtatttcattggctgcagaggctgttttggctttcttggagagaagtccgggtgaagagcgtgacgttgcgacgatttttgctgatttagtggccgatttattccacttgggacaccgcctgcacatggctgggttctatgctgatttcccattatggcggcagtctgtattactcaccgccatgggccattttgacactgaaactaccgagtgttcagaggttgaggcaagtcatcctcatgcggctttcgcattgttgtcgttcctaaacagtcgtaagcgacctgagcaacacatcagcgtatcggcacgcctacttgcgaccgaactgctcatgatgaatacccgccttgaatcgttaccgaaagctaatgcactggccgccgtcatcgccgaaatctacaagtaa

SEQ ID NO: 438139 - DNA, 549 bp, Serratia marcescens
atgcagatttgtaaacggtatgaggctgccgatttagaaaagatgcagcatttgttctgtttcctggtcgatgcgttggaagccggaatgcatgacctgttgggtggtgtattcatggaactggaattcggcgccgcatcaatggggcagtttttcacgccgcttgaactttcgcgcttgatggcaaggctgacaatcggagaacacgttaacgagctgaagcagcgaccgtttattacgttggatgagccggccagcggatcgggagggatggtgatcgctgtggccgagcacttgttaacgcaaggctataacccgcagcagcagttgtatattcgttgtactgatatcgatccgatggccgccgatatgtgttttgtacagctcgcattattggggatgcctgcaacagtttataccggcaataccttatccatgagtatgtcgaaggttcgccatacgccgatttattacattaatggatggggtgagaaacttcgcttgcttgatatcgcaactcgattccaaaaagtgctgcaagcggtttag

SEQ ID NO: 438140 - DNA, 1440 bp, Serratia marcescens
atgggtaataccatgaatggaaacaaaacaggttgggacagtgttaacgatcttattcactaccatgagcgcgggaatggtttgacgatcaataataaaccgtcctatgacataaatgatgcggggttgcagatagcgcgcagcgataaaacctggaatggcgttcacgtcacgggtaaagatgcgacggtgacctattccttcccggattgggaatataaagaactgaacctgggccaccgctcctcagaacgcgatacggggctaagtgcgttcacgcaacatcaacaagaacaggcgaagttatctttgcaatcctgggccgatgttgccaacctaaagtttgtcgaagtggcatcggatcaaccttccaatattacttttgggaattatgaggggaaagggcaagcgtatgccttgaaaccattctcatataatggcaatgactacagaggatacaattctgatgggcaaagttggtataatattaagaaccattctgaaaacttgcaccctgagctgggtaattacggccgtttaaccattacccacgaagttggccatactctcgggttagatcatccgggaacgtataatgcggggcaaggaagcccaaattataccaaggcagtttacgccgaagatacccggcagtttagcgtaatgagttactggaatgaatccattaccgatgcggatcatggccactactatgccgctgcaccgctggttgatgatatcgcggccatccaacatctttacggtgccaacatgaccacccgaaccggcgacaccgtttacgggtttaattcaaatacaggccgagacttctatacactcaagggcagccacgacaagctggtgatgtctgtctgggatgcaggtggtaatgatacccttgatttctcggggtatagccaaaatcaacgtatcaacttgaacgaaggcgctttctccgacgtcgggggattaaaagggaatgtttccatcgctgccggtgtcaccatcgaaaacgcgatagggggctcaggtaatgacatcatcgttgggaatcacgcaggcaatacgctcaaaggcggcgccggcaatgatgttatttacggcggggctggtcaggatcaattatggggaggagacggtaatgacatttttgtcttctctgatcttaatgactcgcctgttcaggcacctgatacaatttgggactttgagtcaggcaaggacaagatcgatctgtccttcttcaaccaaggcgataaaggcagtgatttcattcagttcgtcgatcatttcagcgggcaggccggtgaggcgctattgtcctatgatagccagaacaatctgagtgaactggccttcaacatccagggtggtgcaaatccagacttcctggtgcacatcgttggacaggctgacgtcgctgttgattttatcgtttaa

SEQ ID NO: 438141 - DNA, 1986 bp, Serratia marcescens
atgatctgcggttattacggcaaaaacatcgacctgatcgcgctgcgccggcagttcaatctgtcaacccgcggtgcaacgctggttgggctgatcggtatcgccgaacagctggggttgagcacccgccccttgtcgctggatctggacgaacttggcgcgctgaaactgccctgcattctgcactgggagttcaaccatttcgtggtgctggttagcgtcaaaggtcaccacgcggtgctgcacgatccggcgcgcgggcggcgggcggtcagcctggcggagctgtcgcacagtttcaccggcgtagcacttgaggcctggcccggcagcgcctttaccgccgatagtgttcgccaccgcattcacctgcgtacgctgattggcagcgtacatggtctcaagggggcgcttggcaaaatcttttgcctgtctctggtgttcgaaaccatcaacctggtgatgcccatcggcacgcagctggtgatggatcacgctattcccgccggggatcgcgggttgctgacgctcatctgcgttgggctaatgctgttcatcctgctgcgggccgccattggcatggtgcgcgcctgggccgggctggtcatgtcgacgctcatcaacgtgcagtggcaatccggcctgtttacccacctgctgcgcctgccgctcggctactttgaacggcgtaagctgggtgacattcagtcgcgcttcggctcactggatacgctgcgcagcaccttcaccaccagtattgtcggcgccatcatggacggcattatggtgattggcgtgctggtgatgatggtgctgtatgggggctggttgacctgggtggtgatcgcgttcaccgcgctctatgtgctgatgcgcctgttgacctacgggtattatcgccagctgtccgaagaagcgctggtgagaaatgcccgcgccggttcctattttatggagacgctgtacggtatcgccaccgtcaagatgcagggcatggcggagcgtcgtatcgcccactggctcaatcttgaaatcgacaccatcaataccggtatccggatcaccaaaatggacatgctgtttggcgggatcaacaccttcgtggcggcctgtgaccaggtcgtcatactgtggctggggacccgtctggtgatcgataatcagatgaccctcggtatgttcgtggcgttcggcgcctttcggggccagttctccgaccgcatagggtcgctgacggaatttttgctgcagctgcgcatgatgagcctgcacaacgaacgcattgccgatatcgccctgcatccacgggaagatcgcaagcccgagctcccatatatctcgaaaatgcaaccaatggggttatccacccatgccctgagctaccgatacgacagccagtcaccggcggtctttgatgccttggatatcaacgttgcaccgggagaaagcgtggccatcgtgggcccatccggggcaggcaagaccacgctgatgaaggtgctgtgcgggctgtttcccccggattcagggaaggtcgaggtgaacggcgtcgatattcggcagctcggcatcaacaactaccacaagatgatcgcctgcgtgatgcaggacgacaagctgttctccggctcgatccgggaaaatatctgcgggttcgcggacgagatggatgatgcctggatggaaacctgtgcccgcgccagctatctgcatgaggtgatcatgcgcatgccgatggggtacgaaaccctgatcggcgaactgggggaagggttgtccggcgggcagaagcaacgcctgtttattgcccgagccatttacaagaaaccggcgattttgttcctggatgaggcgaccagtgcgctggacaaggacagtgaagcgaaggtgaatcaggcgatcaaaaaactaaaaattacgcggatcatcattgcgcaccgtgaaactacgatagcgtcggcagatagagtgattaggttggattaa

SEQ ID NO: 438142 - DNA, 756 bp, Serratia marcescens
atgctatataaatatgtagggaatgttgatgacgataaaaccatcgaatatttggatgcctttgttgataaaggcaccatatatgccagcagagccttaaactttaacgacccagccgaactgaagttaatttttgactataatgccgaattatcggtgatcaaacaacgatttcatcaagcccgtccagaaagaacagagcaagaattttgggaatggtacaaatcgtttgatgaaaattctaggtggggtgttgagtatagtatgcgaaattatactttgacgacaaaaggtattgtgtgccttacgcgtgagtatgataactacttgatgtggtcacattacgccaactctcataccggattctgtataggctttaatgatgccttctctcatagcattgaagatcgtgcgattgagggtgatgtcgtgtatgttgactcatacccccattataactattacactgatgctcctagagactatttaagcggcacatatcttcataagggtaaaccgtgggcttatgaaaatgagtacagagtaattactgagggttctggtgttaaacaatttgataagtctcttatcaaagaaattactttaggttgcagagcttcatttaaacttcaagattacgccagtaagcaaatagacaaaggaatagatgtctataaaatggcattagatcgtaattcatatagattaatacgaatccgtgtaaaagaaggtcattatttccagggtgacacatag

SEQ ID NO: 438143 - DNA, 804 bp, Serratia marcescens
atgtccagcacaacgcaaagttatttgtttagattaaccccatacacagcttttgttaaagggttggccaatgttaactccaatgactttgctatttctgatgagtcagactccggcatcggatgcaacgatctacacgtattaacatcaccacatataaacagtctcactgatgagaaggaagttactcggaagctaaaaggtttgctcatgcttattaatggtgcactctcaataagttttggatttgaacaatttgaaagatttggccctttaggaatagatgcatctgaaggcatcagtttatcgcatgttactaatattgaatctttggatatagagcagtcatctccattcgcttccggtgttgacatgaagcttgccactaatgctcaggaatattccaaattagtctatgtagcctctcaacgatatgatgtcagggttattttaggtatgtgctcaatgaggcatgactgggttaatttgtacagattatgggatacactgtcgcacttcatttctgaagagtacagtaacgacaatgcatttatcccgggcataaaaaaaacaaaaccacaaaccaaggatttagtttcggtgctctgcggcatacctttagccgatattagcgcattcactgctacagcaaacagcttcgaattgcttggtctcgcatcgcgtcatggaattggtggtaccgggagtggtggtaatccccaaaaaacaatgaatcgttcagaggcgatgaagtttatctggaccatctgtcaacgttacttgagacgaacaagagccctttga

SEQ ID NO: 438144 - DNA, 498 bp, Serratia marcescens
atgaccgaatttctcggaaaactgttcgacagggtttatgcggagaaggatttcagcattaatgtcgccatatttgtcgccggactcgccgggatgagctgctatctggtccttcatgactctgtcctgacgctgtttgcatttattatttcgtttccgatcgtcaagattattgccggaggatggcatcagcgtcttatggcccggaaaggaaaggccactgcagagcagcagctggccgctctttgtgattctctgacggacagtgaaaaagatgtggtgcagcactttgtggcacacggcggcgccgtcatgacatgggggcagatgaaccggcttgatgatccgcaaaccggcgtggagtccctagcacggaggggattactgtgcacctctgtgtccgtggatggaatgcgggagacttttgagctggacctgacgctttttacctatgcttaccgctggcaagcccctcagaagatgaacgttccggtataa

SEQ ID NO: 438145 - DNA, 213 bp, Serratia marcescens
atgacgctaaaacagcaggacaagctggctgataccagtaccgatggtgaagacgcattgattaccattcgcggttttcttaacatcgtcgcattaatcctgcgggtggaaagtgatgcggagaaaattgcactaaattgcctgttgttattggtcgtcaccggttttcgctccattgaagcgtttaatctcagacaggttaagcgcctttaa

SEQ ID NO: 438146 - DNA, 795 bp, Serratia marcescens
atggaaaatgttaaacagtctgcaccacctcctgattttgttgtcgaggcaatgggtgaatatgttgaaaaatatattgcggctataaattttataccacggggtgatgatagagatcctcctggcgaccactggggcactggttggttagttgaagagtgcgatagccctcttcttgcgacttgtgagcatgttgcaattaatcaattacaaggaacacttggttactcgtgttacggctgtgaatacggagtatctgtaggtggaaaatttactctttatccttttgaaatagattttgctcgtgctgatatatcgaaaacctttaatctggttggccataaaggtgaatgcacgacaaaagaacattatgctgatagccactcccctgttgcggatgaatatctctatgtttacggattccctagcgctgatgcccaggcaggtttcggacaacacgaaatccggggtatgggcgtatttttgcgtgaagttctatttgatccaagtggttttaccgaggcacctgtgccagttttaggaaaacatatttcttgtgcctggagtacaaatcttgcttcatcattaatgggaacgaccggaaatttatctcttccaaatgggatgagtggctcacctttgtggaatacaagatataccgagattaccaatgccggcggtatatggaccccttgtgattctcgcattacagggatagtctggggacattcagcaaaaatgactcggctctttgccacgccagtagagttatttaaaaatttactttttaagtaa

SEQ ID NO: 438147 - DNA, 4953 bp, Serratia marcescens
atgtgggatggtggcttacaagagcaggaagtgttggctatcgagaaaataaaggctgctttttcagccaacatatctaagcctgacaagcctgtccgtggcggttcaattggcgagcagctacaaagctatggttttaccggcaatggaatgttcccctggaaaggttatgcaggttttcgatttgttgaggcaaaaaaagagggtgaattcgatttagttattgtcacacactgcaacgtgatcattgttgaactgaaagattggaaccatcagcctgtaaccgcgcgcggagatacttggtataagggtgacaagaacatggggcgctcgcccgtaagcgtgacccgtggcaaaaaattcatgctagacaacaaactcaagcgtctggcaaaccgttttacgaacaaaggctataccccgattgttcatttctttgttgtgatgaccggcaatgcggacttcagcgcgctgccggaggaacaacttcaccatacgatctcgttaaaagatttcctgaaattttccgatcgcagaacattcaataactacttcaaaccgcaccgaggttccgaagttcttaacaaggattttcctctttttaataatctgttcctggggcctcagacggcgccaaaagccctgagagttaatggctacgaggctaaggatatgattttcgaacaccctaaaaaggtgtatcgcgaatatttggcaaaatctgagatatcagcgaacagcgaagcgctactcagagtgtggaattttaagaatatcgcgggaacaaaagcgaataccccggaaggacgagctcagatcgtttcacgtgagcgcgaagtgttacagcacatcaatcaccagaaccgtgacctgtataaccactgtctcaggtctctgacgagtttccagaaagacgaggtcacggccgagtacagtgaagtctatgaacttccgccgggccatgtccggtttaatgagtttatcggaaaatatggtaaggccttttctgatatggatcgcttgaacgtggtgaaactgctcattgcgaagtttagtgatctccatgagatgaaaatagcgcacagggatatagccgatcacagtctgtggatttcaccttcaaaagaagttgctctttcgaactttatttcggcttaccacagaccagccggaacggtcggtgattatcgtaagcttttatccgtaggtgcaatcgaggtaaaagacatgcttgatgagggcgaacttacgccttttcagcaggatgttcacgccctgggccttgtggcctggcatttattaagcggtacgcgcatgtcgccaaagagtctggagaaagtacaggacagtatgctaaacagccaacactggtattcatatgtattactggatgccgttgctgcaaaatttacttccgcgacagaattttttgatgccctgaaacaagccgaacctgctggcaaggctatcccaacgtttgatgatactgagcttgatccttaccggcatgctatcaatcactctcgtcagtaccgggaagacggtgactttctggtcgaaacatccgacaaggaagtctatatctcgggtggaaggctcgtgaaggtctggctgaacgcgggggggcagggagacgatccgtcaattaacttccaggttctgaagtttttaaagcaggttgagcagctttctttagttaaaccaacgtatcttcctgaaattcgtgaattcggtatcgcatcaaaatcatcaagtctctatatggtcacggatcaggtacatggagaaacttgggataaaatgctggtcctcgatgatgaaaaaatcgatcttattggtaagttcgtcgccgccgttgagcacttacacggcctgggtgtttctcacggggatatccatcctggcaatgtgatgcttgggacacagagtcgttcacttttcctcatcgatatccccgatttttcaccatccggtgacgaaccaaaaaaccacagctacagccctgaatacatcgataattgtacttcctttgaacgcgacaactatgcagtgatgaaaatgtcctgcgagttgttaggtttgtcatgggggcaggaatcagatattcatcagactattgcgaatgccatccgagctgagctggaagacttggtttttgggtttaaggatttaggacggtttaaaaaagcgatatacagtaataacctggcgtcagaacaagccctgatagagataacagcaggaaacgccgatgagataatctctgtcctacctgataacgggcatctatatgtgaaagttgagtcaaatcctaaagtgcaagctgaagtaaaagtgactttcacagggataggtggcagtttcactgctgtgtttcacaaagagcagaaaacgctgattcatggattcaggccatgggctcgcacatccattcgtaagcaagatattgatgaaagtcagttcgaaattgctaccggtatcaggattacccccggcagtccgcaggatatgtcggcgttgacagttttacttaatgaagaagaatcttttgggcgggcaatcgaattgattgccgcgtctgaacacgttcaggaacaggatccgcttacgcttcagctaaaagatgcctttgcaagactggataagcaggctcttgagcctgctttaaaagaagtgctggaaatcccgacggtgaagctttggcgcgccattcttgatactgaaactgaatcctacccaaacattgaagtcagcggagaggtggtcccggttgcagatgctcatggagagctacttctcccttactctgcagatgttgatcctcttggcgcattcagaagtggtgatgaggtcgaagccttgcaggtcgatcaggaaggtgttgagcgatttataggtgaggtgtcactcaagaagtcagaactcaaagagatccgtctgatcaaagtgcgttcagcagcctacaggctgaaggattctgatactgtcttcttccgtacaaagcaggatcgggcgtcttatcagaaacgtaaacgtgcgcttgaacgtctcctcgatcgagaaagtgtactgcctgacttaattgacctgttcgacccatcctgcaaacaggtggctcaaaattatggtatcactctcagtgatgcagattttgccagatacgaccgtgaagaccagcacggaaacaagatcagtctgaatgagcagcaaagaaaggcgtttaacaaactggtcaataatggccctctttccctgcttcaggggccaccagggaccggtaaaaccgagttcatcgcggcctttgtccactacctgatcgagaaacagaataccaaacgcattttactggtcagtcagtcacacgaggcagttaatacagcggctgagcgtatcagaaaacactgttcccggcttggtacagagttggacgttgttaggttcagcaaccgagaaggggccgtttcccctggtctgaaagatgtgtattcaaacgcaatcacaacggagaagcgcgaactgttcaatgctgaaattaagtaccgtgttgaagcgttgagtgaagccattggcctagaaccgagatttatttcgggtgttgtacttgctgagctcaggttgttcaggcaaatcgatcaccttgagaaattgctctaccaagtgaacgatttaacggattcaaaagagattggtgaactgaaagatattgcagtcgaactcgattattccattcgctctaggctaagtcaggaatatgggattaacttagacaaaggcgcgaaagtctctgcagcaaaagatattctgatttccaggctgtgtacggagtatggggtcagacctgatgaggcaagacgagtaaaggcgttagctaaaatatcccgtgatatgcaggatgctatgtcgggagagcgagtgaacttggacgagttttattcgcggtccaggcagttagtggctggcacatgtgtaggtattggacaggggcacattggcattcaggagaatatctacgactgggtgattattgatgaggcggcgcgctcgattgcaagcgagctggccattgctatgcagtcggcccgacgtgtcctgttggtgggtgaccacctgcagcttcccccattgtactcggatgctcacaaggcggcattagcgaggaagctgggtatcaataactcccgcactgaaattgacgaggtattacgaagtgactttgcccgtgccttcaactctgcttatggtgcgcaagcaagtgcagctctgctgacccagtatcgtatggctccaccgattggtgatctcgtgtcgaagacgttctatgacagtaagcttctgaatggagaacgggcaattccggatgtctatcggcaagcaccagaagcgttatgtagcgtcgtaacctggcttgatactgctaatctcggctaccgggcacatcatcttgaagatcgcggaacaagcatttacaaccgatgtgaagctgacgagattatttcggttcttaaacaggtgtcagagaatgaagaatttgtcgctcagctttcaaagctcgttaacaaagatgaagccgctatcggcgtgatatgtatgtatgccgaacaaaagcggctgcttcgtcagaaattcaatcaggaaatatggagcgagggatttaaggacattgttaaaattgacactgttgacagttatcaaggcaaggaaaaccggatcatcatcctgtcactgacgcgttcagataagcagcatagcccaggttttttacgcgctccaaaccgtataaatgttgcgatgtcacgcgcaatggatcgactgttgattgtgggtaatgccgatatctggaagggaaacaataaagaactgccattaggctccgttgtaagttatatggctgaacgaggtcaggaagctggatacagattcctctccgctcagcagggaggcaaaaagaaatga

SEQ ID NO: 438148 - DNA, 1428 bp, Serratia marcescens
atgatatctgataacaaagtaacctatcacgaggttgacttcctgctgcccgcacaaaggtttaacattcagttttcctatgtttcccagaaggggctgccattcatccgggagtttgtgctgagactcgttcatgtagcctcgatgagcaaagctcaaatagcaacctattttggcctgacccatcgtgagacagaggaggcgatttccgatcttgtgcagcgtggtgaattgacgctctcctcagacggtagaatggccttaaccgacaaatcaaatggctatttttcagaggttggcgagataccgcacctttcaactatccaagacagtggcggcaccttatcctttgatttagccacatttagctgcttcagcaaccagactttccaggaccactggaggggagggttaacattaaaggttgatgacagcaacatttctcaaagtgagaaactggttgagaagcactttcagtaccagtttaatcaaatccttgataaaggttatctgtctcacctacaggttcagggcggaaaagaacaaccttctatctataccgttaattctgttaataagctgcggcaaataccgctccgtttaacaacggaatttaaaatggataacgatggtaaagctgttgagcgtgaagactatgaacagttaaacagctcggaatgtgttcatgagtcaatggctgttgagatagccaggttatcacggcataacaataccatgagtatttttaaggccatggtatccattaacgatgatcttacgcttaagctgtttgactctaaaacgaatcagcttaatccatcatttatcaaggatatgcaggcacttgaagaatactcagactcaggcaggacgacttttttaggcccggtttattctaaagacaactgggaaacgctgcagaaagctctggcaccggtgctcaatcagcgtatcagagacaaaaccgattatggcggtagcccgttcgtttgggtagctccatcagatccctactggtcaaagagcgcccgatttatctcaagcctgagcgattttcttaacaggtcggctacgaaggataagcggctgtataaaccggtgctatacgtacccgtccaggatgcaactgatgtccgggttgcaaggcagtggaagcatgaacttgggcaattccacgcgcacactaaagggctagttgaaggaatgttagatggtaatgttgaaattcttcatcttgaggatgagttatctgccgttatctatcatatttctcaaccagaaacgctgcctgtgactatgccattgggtttcattacaacgaacaaagatgcggttaagatcattggtgcgctgattactgaatatgtcaaaagcacctctggttttgataagcctcatgactgtggcgcaatttccgcaatggtttag

SEQ ID NO: 438149 - DNA, 1755 bp, Serratia marcescens
atggaaaaacttttgtttttgtttaggtacttcaaagcttcatcaagccaaacggtaaaatggcagtttgtctatgttgtattaatatccgttatcaccacgctgatgttctcagtgcaacccgtaattatgtcatatctggtcaatgccatcgaagtaaaagcgtacagtttatccgttgcggtgattggtcttgccattagctatattgcactgatgagcataaaaaagctatcctcggcagttaactttattttgataacgtcgttgcgtaacaatgttgtcattagtctgacagatagttatttcaaaagtttgtttacttcaaataaaatgacgacaaatgagaataccggtgatgtcacacagcggttgaatcaagcagtggacgaactgacaacgttgctgagaaatatctcgcataatttgttacctccgctcctgcagttgttttttagtatttcaataatattgatttctggtgatgtggttgtcgcattactcttcgtactttactttgttatctatctgtggacgaagaggaaatttaacccgaaaattgttactttgtattccgatttttattcatcctcggtaaaaaaatacagcataattacagacagtgttaagaatatagatgctgttagagtttgtgactcttatgattttttgttttctagatataaaaacttactcaactcaatagaagagaaacatgaggccttgcttaaggctgacttccggttcctgctgattgagtctattttaagcattctattttttggtgccactttcttactctccttttatcgcgtcatgagtcaagatatcacgctcggtcactttgttatgatatcttcctacattatgctattggcttccccccttgagaatatcggctccatgtataccgcaatgcaaaaatccacggtatcactgtataagtttattactgatatgggcacccctccccgaaatgatcatccggtgatgaacaatgtccaaggtgaaagtgtctctgtgacgctctcaaaggtcctgttttcgtatgaaaaaaatggaacgaatgcaatccataacatggacttaacgttatcatccccaggtttctataccttgaccggtccaagcggggctgggaaaagcaccctggctaaactgattgctggggagctcatgcctgactcaggcgagatatatgttaatcaaatgccaacaaatggcatgtctgacaaagcacgagctaagttaatgttccatgtatcgcaaaatgactatattttcatggatactcttcgctttaatttacaaatttcgtgcccacatgcatcggatgaaaaactactcaaggcgttgcagttagctcaatttaatgatattccgtataacgatcctgccgaattgttagatttgccgataggagataatggtatgaccttgtcaggggggcagcgacaacgcctgtcattggccaggttgtttctcaggcagccacagatcattattctcgacgaagtcacctcgtcactggatattgtaaatgaaagagaagtgctgaaaaacataaaatcagcctatcctttcgctatcgtcatcaatatcagtcaccggcgttcaacatttgattactcagatgagatcatagtattggatcaggatggcattgttgaccgaggtaatttgccctcgcttgcctgcaaaaatacgtatattcaatccatcctgaaaaagggcgacttggacattgcgggttaa

SEQ ID NO: 438150 - DNA, 792 bp, Serratia marcescens
atgggaaactacgttctaaatggtaatgtcatcaaattacaaccgttcgcatatcctgatgtaagtcatcttcacaaggatagtcttgtattactgggtaagactcagcaattgataaagaggacaaatattggatatgaacaaatggtcaataatgctattgaggcaataaaaacagacagggtaaaattattgcaacatcgccttagtaatcatgtagatccaaaaatattccccagtgaaaacgcgaccagtcgtaaagagttttctttctatcagcatgcagaacctgtttttatagataaactgctcagtgatgaatcgttcattgggtttatcagtgatgccgggcgaaaaataaaagatgagtctaacattattcggcaggggaatataagaaccgtccctgatgaagagggtgggtacaccgagtttattgatatgtcaatgcttagtgtgtcattgtattccttacgtgcgtatgcactgaaaaatgatgatacgcactgtttgtttgtgtctattgttttttccgttatgtttgtacacgctcatccgcttttagacggaaacggtcgtgcatccaggcttttttttaacatgatgctgaataatatatcatctgattacatccctctcaccgagctgtgttatgcagcacgtagtgggtatgttctcagtttacgcgaggcatttttgttctcagagtgggataacatcatccgattttactgtaactgtattcatctgctctatggttcatcattaagtgatctaaatagcatgcagtga

SEQ ID NO: 438151 - DNA, 1614 bp, Serratia marcescens
atgctgaacctgatcagacggctgcatttttatatcggcctgctggttgccccttttattctggtcgccgcactgaccggcacgctgtatgtgctaaccccgcagcttgaagaggcgctgtatcgcgatgcgcttttcaccgaaccgcacggacaggcgagatcgctggctgaccaaatcgccgccgcccgccgcgtggcgggtgccgagacgcgcatttacgccgtgcgcccggcgcccggcgcgacggataccacgcgcgtacagttcgtgggagccgatctgggcgcttccgagtcgcgcgcgctgtttgtcgatccttacaccctggcgatcaagggcgacatgacggtgtacggcacctccggcgtactgccgctgcgcacctggctggataagctgcacagcagcctgctgctcggcgatatgggccgcaattacagcgagctggcggcttcttggctgtgggtggccgcgctgggcggcgtggcgctgtggctggcgacgcggccgaagcgcaagctgaaaagggtgaaagggggcttcgccgctaaccgccattggcatatcacgctgggcgtagcgctgctggccgggctgctgttcttctcggccaccgggctgacctggtcgcagtgggccggcggcaacatcgacgcgctgcgggccaacctgggctggctgacgccgcaggtcaacaccagcctgcaggccgatgcgccgcagacgccggccgatccgcacgccgagcaccgcgggatgatgccgggcatgaagatgagccctgccgcgcaaagtaatgcgctgaacggcgattgggatcgggcgctgcacgccgcgcgcgccgccggaatagacgccgctaaggtcgagctgcgccagccgaaaggcgagggcaaagcctggacggtgaccgaagtggatcgcagctggccgacgcaggtggacgcggttgccatcgcgccgcaaagcttcgccgtcgtcgaccaggtgcggttcgacaccttcccgctcatcgccaagctgacccgctggggcatcgacgcccacatgggcattctgttcggcttgccgaatcagctgctgctggcggcgttcggcctcgggctgtgcttaacgatcgtgctgggttaccgcatgtggtggagtcgccgcccggcggcgggggtacagcatccggtgcagaccctggttgccgcctggctggcgctttccctgcctgcccgcgccgtcacgctgctggtagcagtggcgctgggttattgcctgccggtaatgggcgtgagcctcgcggcgttgctgctggtggacgtgtggcgctggcgcgggcagctgcaaggccttcgggacgaaacgccggaagcggccgcccgccgcgccgaggtgcgcaagttccgcgcggcggtggcgacagtggcggtggcggtcggctgcgtgatgggccgggcgatcctcggcggcaccgtcgaacagtttcagctgccgatcggtgactggagcgcgcagatggtgatcatgcagagcctgatggtgctgctgtatacgctggtgttcaccctgctgctttccattccgctgtggtatttcttcctgggggaaaaagaggggcgttga

SEQ ID NO: 438152 - DNA, 876 bp, Serratia marcescens
atgttgaagggacgaattaagttgcgatttatattagcgttgaaagtgggagccttgctcttttttccaatcagcgctatagctgattggaaaacggcggcagaagtggaaattataccccccaactcaccagggcagggaccggctgttcagggaatctggcacgtttatattaaccaatgggataccaatgatctcaggcctaaccctatgtacggttgtaacagctgtgctctccatctgcggtataggttgccttggtggggatcaggtcatgatgctcaggtatttgccgacacaggaggctggcttagcaacagcaagacgcttggcgaagtggctctgggggctcaacaacaggggctggtcggaccgaatgcgactcgatatcttgttagatcagtgagtggttgggggctgtgtgcctacttagcgtactctgaccatgctgtgattaaaggcactattcttggtggtgccatagatgcgaatcgctatccggcttgcgaggcgcctgtagtgcaccctactcaatgtaatattcgtgagccccaggtagatattcgacatgggttggttgcaccagacaaagttaacggcagtcaggcttcggcacagattaccgtttggtgcaatgaaactttgccggtgcgtattgtcgcggcagaagcgaatgccactgactttattagcctgagtaaagccagtaactttcgtagcatcgtaacgatcaacgggagtcccttctcgaaaggtgcctttattgatgccgggtcggccggtacgaaagttaatttgacctcaacgctggctaattactctggtgaagtgggtgattttcaagggagcgctacaattgtggtatccattcaatga

SEQ ID NO: 438153 - DNA, 627 bp, Serratia marcescens
atgcctgaagtgccggaaaacctgttgttatcccagttgaatgtgattgccgaggggctgagcgccaccttcgcgccgttttgcgaggtggtggttcacgatctgcaaaatcccgaacacgccattttggcgatccacaacaacctgtccggacgagaagtcggccaagcggcgacggaacttggcctggctcgcatcgcttcggcggagtttcccagcgtgatcgccaactacggcaaccagttcgccgatggccgcccggcgaaaagcacctcgatcggcatcaagaatgcgcagggcgactacgtcgccgcactctgtttgaacgttgatatgacgctgttccgcggcatgcaaaacgcgctggcgcagttcacgcaaacggcggccggcgcggtgacggaacacctggagcccagcggcgcggaggccatccgcaaccgtatcgatcgcttcgccgcacgccacgccaccacgccgcgcgcgctgaaaacgccggagagaaagcggttgattcaggaactgagggagcaaggcctgctcgaggtgaaaaaggcgatggagattgtggcgcagcacctcggcgtttcccgcgcttcggtgtatctctacgccaaggaagagtga

SEQ ID NO: 438154 - DNA, 1275 bp, Serratia marcescens
atgtctgcaacttcagtcgtcggttctgcacgaaaacctttttattacacgttgacctttcagttggtggtagggctggcggccggtagcgcgctgggcctgttgtggccgcaaatcggcgctcagctcaatccgctggcggcggccttcgtcaaactgatcaaaatggtggccggcctgattgtgtttctcaccgtggtagccggttttgcgcaggttaaacgcggtgccggcgttggccgcctgggcatgatctcggtctgttatttcgaagtggtcagcacgttggcgctgctgatcggcctggcgatgggcaatctgtttgagccgggcaaggggctggtcttgcatgccgatgccgccacggcgcttaaaccggcggagcccctgcaaggcatggatttcgtgatgagcatcatcccgaaaacggtggttgatgcgttggccggcggcatcatgctgcaaatcttgttggtggctctgctgtttggctatgcgctgtacgcgatgggcgataaaagcaagccggtggttgatttggtgaatctgctgaccgacgccaccttcaaagtggtcaatatcatcctcaagctggcgcccgttggcgtatttggcgcggcggcgttcatgctgggcaaatacggcatcggcgcgctgatgccggtgatgaaattggtggggctggtctatctggggtgtctgttcctcattgtggtggtgttttccgtggtggcctggttgacccgttttagcctgttcagtttcttaaaactcatcagggaagagctgatcatcgcctttaccaccacctcatcggaagccgccttgcctggcctgatgaaaaaacttgaatcggtcggctgcagtaaagccaccgtcggttttgtcgtgccgaccggttactccttgaatctggacggctcttcaatctacatgacgttagcggcgctgtttatcgctcaggccgccggtttggagctgagcctggcgcaacaggccggtctattgatggtgtttctattgacctcgaaaggcgtagccggcgtgacgggcggcgctttcgtcacgctgtccgcttcgctgttgatgtttccagagataccgatggaggggctggcgctgattctcggcgtggatcgcttgatggataccatgcgtacgttgaccaacgtggccggaaacggcgtggcgaccatggcgatttcttactggcagaaagaacgtgtgggttttcaggcgaggctgcctgaagcggctgcgcgcaaacccgtctga

SEQ ID NO: 438155 - DNA, 390 bp, Serratia marcescens
atgaagcatgatgtggtttacaacgccgccggcggctttcctcccgccggtcattattcgcccagctgtacggccaatgggacggtctatatctctggtcaattgccgatcgccttttccggtgagagtcttgccgacgaacctttcgcgcggcaagtccgtcaggtgctggacaatctggatgcctgcctggcaggggccggcgtcggccgcgcgcagctggttcaggtgcgcgtctatctgacggatatcgatttgtggccgaccttcaatgcgctgtatgccgaatggatcggcgagtttcgccctgcgcgcgcggtggccggcgtatcgcaactgcattatggcgccgccgtggaagtggaagctgtcgcgttggccgccctttaa

SEQ ID NO: 438156 - DNA, 972 bp, Serratia marcescens
atgaccgatttgattttacccgtttatgacgacgtggccgccgccgccgcgcgcatcaatgattatactcaccgcacgccggtgcagacttcacgcacggttgacgacgatttcggcgccagcatatttttcaaatgcgagaacctgcagcgcatgggcgcctttaaatttcgcggtgcgatgaatgctttgctgcagttttctccggcgcagcgcaaggccggggtcgtggccttttcttccggcaatcatgcgcaggcgatcgcgctggctgcccggctgctcgacattcccgccacgatcgtcatgccgcacgacgcgccggcggccaaagtggctgcgacgcgcggctatggcggcaaagtggtggagtacaaccgttatcatgaagatcgcgagcagatcggccgggatctggcgcagcaacagggattaacgctgatcccgccttacgatcatccgcaggtgatcgccgggcagggcaccgcagctaaagagctgttcgacgaggttggcgaactggacgcgctgttcgtttgtctgggcggcggcgggttgctggccggttctgcgcttgccgggcgccggctgtcgccgggttgccgagtctatggcgtagagcctgtggcgggcaatgacgggcagcaatcattccgtaccggccgcatcgttcacattgagacgccgcagaccctcgccgatggcgcgcagacgcagcacctgggccaatatactttccctattatccgccgggacgttgacgacattctgacggtgaccgacgatgagctgattagcgccatgcgctttttcgccgaacgaatgaaaatggtggtggagccaaccggctgcctgggattcgccgccgcctgcgcgcataaatcgatgctgcggggaaaacgcgtcggtgtgatcatcagcggtggcaacgtcgacattcgccgctacggcgagttgctggcaggtcaatag

SEQ ID NO: 438157 - DNA, 507 bp, Serratia marcescens
atggtgacagacaagacggtatttgagcaggtcatggcgctgctgagcgccggagaggccgcattccgggtgatagaacatccggcggaggggcgctgcgaagcggtggcggcgctgcgcggcaccgaacaggggcagggcgccaaggcactggtctgccaaacgcgcatcgacggcgccaagcattacattttggcggtgctggcggcggaccgtcaggcggatctgcagcggttggcggccgagttgggcggtaaaaaggcatcgttggtcagcccggcggaaatcgcgaccctcacggcctgcgtgccgggggcgatcccgccgttcagcttccacccgcagctcaggctggtcgccgatccggagctgtttgaccgttacgatgaaattgcgtttaacgcgggcgatctgcaacgctccgtggtgctcaatgcgcaggattatctgcgtattgcggcgcctgagtttattcattttgcgcgtacggagacgatggcggagtga

SEQ ID NO: 438158 - DNA, 381 bp, Serratia marcescens
atgtcgttaacgatagggttcagctttgcgtggttaaatcttttagagatttataatcgtgatacgttattttttcagaagttgacgatttccgtcatcaataacgtatcgttcgccgatgttatcgccccttacctgagactgattctgtatcttcctttcgggctattggcggtggtgctgacgctgctgttttgcgcccagcggttatgcgatacccggttcttcgtgctcgcctggccggtttctctggcgatcttcctggccttttggtttatcaacgtcgctttccccgggcatctcaatctggtattagccgccaaatcctgtgtgctggcgctgattgggctgatcccaccgaggaagcggaagaccgaataa

SEQ ID NO: 438159 - DNA, 510 bp, Serratia marcescens
atgccgaacggtggtgctggcgcccacaaacgcgccgattatagtggcgttgccggccgccaaacccggcgccggccggggccgttaccctctcgatggccccgccttatcccatcccggatcgcgccggagattctcttgcgcgactccgggccctctccgcagcaacgcgcatatggcgtatcgcggcctgtaagggtgtacgggcaggtgccttgtcggctaaaggactgtggcataacggtgctcggcactcactcagcggtgagactcataggacgctgttgcggcagaaaagtggggaaagaggaaaaaaagaaggtacagcgacgaagagaggttcgagtagccatccccggtgctgccaatggccctggtgtcggccgcggatctttttgccgcctgctccctgcttacggacaagagcaggcggtttattttgtgagactggcacccccccaggacgcgaatcacacagtatgtgcgctaattaaccacataaacggctaa

SEQ ID NO: 438160 - DNA, 180 bp, Serratia marcescens
gtggttcctctgttttatcccatcctcgttcgttggcagaaaattcgcatgttcaagaaaacgctgttggccgtgctctccctgttgttccttttctccctcagcagttgcaatacgtttcgcggtttcggcgaagacgttcagcatctcggcggcgccatctcccgcacggccagctga

SEQ ID NO: 438161 - DNA, 657 bp, Serratia marcescens
atgggaattgcttttgacggtgatttcgatcgttgtttcctgtttgatgagaagggcgctttcatcgagggctactatatcgttggcctattggcagaagctttcctgcaagccaaccctggctccaagattattcatgatcctcgtctgtcatggaataccatcgatatcgttacccaagctggtggcatccctgttatgtccaaaacggggcatgcctttatcaaggagcgcatgcgcaaagaagatgctatctatggtggcgagatgagtgcgcaccattacttccgtgatttcgcttattgtgacagcggtatgattccatggctattggtagcgggtttactttcagttaaaggcagtgtgttgagtcagctagtgaaggatcgtatggaagcgtatccagcatctggtgagattaatcgcaaattgcctgatgctaaagctgccattgagcgtgttttaggcgtttacaaagatgatgccgtggcttttgacatgacagatggtatcagccttgaattcaatgaatggcgttttaatctgcggacatcgaatactgaacctgttgtacgtttgaatgttgagtcaaaaggggatgttgaattgatgcagaaaaaaactaaagagattctggcgctcttaggcggagaataa

SEQ ID NO: 438162 - DNA, 621 bp, Serratia marcescens
atggggcatattcggcttttagatatttccaatctggtttttattggaaatcaagtagagctaagctcgtcattctctgttttccatctggcatcggcaccttcaggagcagtattgattaaaaataatcatattcaatcacccgctacgaatgttttcactggtatgatgacagcagcacatatggttgatacggatttttcttcgtttggaaataaagtgtgtttatttggtgttcccaaatatggtgagtttaaagccggtgatagagccatacagcgctgtcctgaaccaggtatgccctctgaatgggtatgcattgaaagtggttcaccgggtatttggagtattgagaagtttgccaacataagttgtcgcagtactcctcaaaaaatcaatttggctcctagtgaaaaagcaatcatcaaaagtgtcgctttaggtgctaagtctgggtgggcgatcaattcgttagggtgttcactacctctgatgcaagcctcgctgaatgcttctttagatgaagatggtgttgttaccattacagtaagaaatattggtgatgctcacttgaatgtagaaaaagtcattttcaatgttgtgatcaatagggggtattag

SEQ ID NO: 438163 - DNA, 1152 bp, Serratia marcescens
atgatgagcaaacaaccacgcatcgccgtcgtcggcgccgggctggggggcgccgccgccgccgggctgctgcaaaaagccggctttaccgtcgatctgtatgaacagagcccggcgttctcgcgcctcggcgccggcattcacatggggccgaacgtcctgaagattttccgccggctcggcattgagcagcggctggagcagatggcgtctcatcccgatttctggttcagccgcgacgccgaaagcggcgactacctgtcgcgcatcgaactaggcggcttcgcccgccgggagtacggcgccgcctatgtgacggtgcaccgcggcgatttgcaggcgttgcaactctccgcgctgcagcccggcaccctgcacttcggcaaatgcctgagcacgattgaagatcgcggtgacgaggtggtgctgaacttcgtcgacggtacctcgacccatgccgacatcgtgatcggcgccgacggcatcaattcgcgcatccgcgaacatctgctgggcgccgaagcgccgacctacagcggctgggtggcccaccgcgcgctgatccgcggcgagaagctggcgaaatacaacctgacgttcgaagactgcgtgaagtggtggtcggcggaccgccatctgatggtctactacaccacccaacggcgcgacgagtattactacgtcagcggcgtgccgcacccggcctgggatttccagggcagcttcatcgacagcagccgcgaagagatgttcgagaccttcgccggctaccacccgatcgtgcaggcgctgatcgaatccagcgagcaggtcaccaaatggccattgctgaaccgcaaaccgctgccgctgtggagcgagggccgcctggtgctgctcggtgacgcctgccacccgatgaagccacacatggcgcagggcgcggcgatggcgatcgaagacgccgccatgctgacccgctgcctgcaggaaaccggcctcggcgactaccgcaccgccttccagctatatgaagccaaccgcaaggagcgcgcttcacaggtgcaggcggtgtccaacgccaacaccttcctgcgcacccaggaagatccggcctgggtctacggctatgacctgtacgcgcaagcgctgaaatcggagaacgccgcatga

SEQ ID NO: 438164 - DNA, 360 bp, Serratia marcescens
atgagagcctcagtacaaagaaaggtaaacgaagttaatcaagcgaaagtaaatttatcaggccgtcggtcgacgaaatcagcggcgacatcgatcgctgaaagtcgtgccaccgaaatggcactggaatacatcacgaaaaatggcatcaaaccgcgcatgaccctgaaggaattcgcggagttcttcaaaatgccactggagcaggtgcagagtgatgcccgccgtaattacctgccattaatgccgcgcactaccccaggccgccgcgaactgctgcaggtgaacatggttgcttactacgcgcatagtttggcggccagcggcaattacattgcaaatgcaacggcattccaatga

SEQ ID NO: 438165 - DNA, 252 bp, Serratia marcescens
atgaacgccccgttcttcgccgctgctaaccgcgtgctccgcatgtatgagatccggcaacagcactcaagccgccgctgcccagcccattcacccagcgagattgaatgggctgctgatcgcctgctggatttggcactcgcggcaggatacgccggcagcaacgaaaccataaagctgcgtgataccgccgaatactggaagcgctacggcaaacaacccgactttttccccgaaacaatcgaggcttaa

SEQ ID NO: 438166 - DNA, 1176 bp, Serratia marcescens
atgacacctaaacaaaaagcccagcaatggattgatgataactgcctgatcctggataccgaaacaaccggacttggagacgatgccgagatcgtggaaatcaccgtcatcgatacagcaggtaaacctctgttaaatacgctggtaaaaccgaaaagcgttattccagtttctgcgatagccattcacggtattactaacgagatggtgaacgacgcaccttcatggccggaggtgtgttcagagctttaccctatgattagtgggcgtaaagttgtgatttacaacagcggctatgatactcgagtaatcgatcagactaatgaagattggggaatcactgagcacttaaatattgaatggccaacatttgaatgcgtaatgctggcatatgccgaattttacggccagaaaagtgaccgcggcgggtacaagtggcaaaagctgactgccgcagcggaacaacaaggcgtggttattgaaggtaccccgcaccgcgcactttctgattgtctgaccacgttgggaattattaaggcgatggccgccgaagagttcccgcatcatatcagatccgttctgaacgaattgaaatatgcatctgaggcggccgcctgggagcctcgtgtttatgaagcaataattgaagctgtggtaaccattgagtgccaagatgaagtaattgaacaactaaaggccggtcgcaatagatttggtgaatatagcaacgaattaaaagatagataccattgtctcgaacagtatagcaatgcaaattttctcagcaagaaaaccgctgagctgcagcgcgatgccttgctgatggctatcggtggaactgaagacgggagaatcattgatatcaccaagcctgaagaagccacggagcaagcggtaattatcatccgtcaatctttccgagacctaaagcagtatcgcgaccttgaagaaatcccgttcggcgccgttgagcaggatcatgaagtggcccagctgcagcgccagatcgatgaaaaagatttgttgctccaacaggcaaaagaaaatgaacgccgcgcgatggattgctttgcgcgcgcagtggctttcgctaaaggcgctgaaggtgatccgtgctacatcaccgagctggcaaaagaagttgctgacttggcagacgaggtgcggaaaaaatga

SEQ ID NO: 438167 - DNA, 897 bp, Serratia marcescens
atggcaacaggcattaataccggcgtagcattcaacactagccgctggtcaccgatagatctgagtggacttattctgaatgcgacgacgctttttaatactcataaagctcgcgttcttgccgatggcggtattattccagacgaagccggctgcctggctcgctttaaattgctcgtcgataacggaatgtatgaaaatatcgccgtttcattaacgccgcgatttggcctcaaactggccggtgatggtgtttcagtacagaaaatttataacctctccggcccggattttatcagcgtatctcaagctggatcatggctgccgcaatggaattcggcaactggctctgttcgcgtgcaagtgaattcatctgtggctggctatctccagtctgcgagtaacatcacagtgcagatcggaaattcatacgtggtcagttgtgtgggaaaagatactgatcctactgacgcggttggcctgacactcggcgcggtgatcggtaatttgccgatggcctattgccgtatccaaaaaacaccgactcaggatgaggcgtatcgctatggaacgcgaggtagtgattataagagccccagcagcgccggggaggcggtaagcgtattcaaaacgccttacatcgattatcagccgtctgccgcatttttcgatgtcagcgcgggcgttgtgacgccgttcgacaacggccgcattgggacaccggcaacggcgacaaccggtgcgctctatgcgatgcgttctgctacgcccgtgataatcggaaacccggcattcacaggttctgtgatgcaaaactgcgatggttcgttccgagatttcacgatcctgaactctgctcaatctgcagatgcgctgattttgtcgcgtattctttaa

SEQ ID NO: 438168 - DNA, 1074 bp, Serratia marcescens
atgggctacaacatcgaccggcaggggcataacatcccactcgcaaacggcctgatgtacgaaatgcgtgatgcgggcatgaatctgccgacgattgttaatgcgccgtgcaacgctggcggccagccgctatcaggtatttctaaggggacgttcgcctacacgaaaagcctggcaatgttgtcacgcattactgagctgtcactgtcaatcggtaagcctctccgcaacgacttcatcttgtttgagcacggggagaccgataacgacaacggaaattgcccaacgccgggtagctacttgtcattgcttggcccgtactttaatgattgcctcacggacttcaacggcatcactggcgccacaaccggcccgattatcgtgattgaccagatgggcagccgaatcaacacgaaagccaatgatgtagatgatgaagggaatcctatcggcgatccgattgtggtgcagccgtattcagttaccgccacagatcagctcacatatgtgcgtcagcatagcaattctattatgtgcggcacgaaatactggctcaactggctgtataacgacggctcactttctcacctgaaccaatacggcaaggtgttgcagggcgaggctattgaaaaggcggtgtactggcatctttatgaccctgccaaaaaggggacatggaagggtacacgggtacagagtatcgctgtcaacggcaacgtgattgacgtcaagtattacgtgccgttcccgccgctggttatcgacaccgacttccttggcgactgcgctgggaaagggttctccctggaagcagggagtgcgtcggtagtgtcggtagcggttgtcggcggtgatactgtccgtctgacactcgaccaggcaccagcgaccacagaccacttgctaatcgggttcacaaacacgacacaggcgaataacgggaacacctacccgctggtatgtgtacacgactcgtcgtcgtgggtatcacgttacatcacgaaaaacagtaacccggttccgctctataactgggcaaccctcgatcgcattccattaactggggagttttaa

SEQ ID NO: 438169 - DNA, 1545 bp, Serratia marcescens
atgtcagccattatcaccagaaaatacgagcagtgggcggcaagccaggcggccaataatctgccggcgcgcccggatacattcgtttttgcctatattccagggcaagaccctgaagcagagatcagccgcgacgagccattgccggcgccggccaacatcgtgcacaccgcaccggtcatgcaatacggcatgctcaacactgacgcggtggttttctctgtggtgctggacacctctgtcggcgattttgattacaactggatcgggctggttgaccaggccagcaacacgctatgcatgattgtgcacacccgcacccagcgaaaaatcgcaaccagcggccaggaacagggaaacaccctgacacgcacgctggcgatggaattcaacggcgccgctggcactacgcagatcagcgtgaccccgcagacgtggcaaatcgatttttcagcgcggatattcggccaggatgaacaactccgcctggctaattgggacgtctacggcgaaggcgccttcttcggcgatgccttccttgtcgttcgcagtggcgacacctacacggctaccgcgggaagcggctacgttggaggtattcgggctgagcttgagactgacacccccatcgacgttaccaaatggacaactacggtatgggccgatgtaagttggcaaggcgccacaacaagccgctggtcggcacacatcgcgctgaccgccgccgacaccttggaagactacaccgacgcccagggattcaggcattacgtcacggcgatcgcacgtatcggcgctgacggcgcggtgactgacctgcgcaagaaaggctctcaaggtgaacaggaagccagccggctgtttctgcgcaaagccgccaatctgtcggacatgaccgaccccgccgccgggcgcgataatctgggtttgggggaactggccgaaaaagacgtgttgtacgcgcacgacgtcggcgcctatacccagggcgaagccgatcagaagtttttcccgcgggcaggagggataatcaacggcccaatcaatgtactcggcgatgttggtacgcaaggtggcgtggtggtttttcgcaatgcggaagggtatcagacaggcgtcgcagcagcgtatgacaacggttcgctggcaatgacacgaagtgataacggccgcggatttggggttgacccagacgggaatttttacaccaccaatggagtgccgattttcgagtcggggcagcgagtctacagcccgaacaaccgaccggaagaactgcacgtcgatggcgctaactggtggtcgcgggattccagcgggaaaataacccaaggcggtatcgtcaaccgatcagataattccaacgccgtatcgttcaacctgccatttcctaatgcggtgctatcgatccagctgacattacgccaggtcagcgaagccggatcggagcgaaatattatcgcccaaggcgcaacaaatagcggcttttggtgttggatgaacgaaaacgagctttcagcctactggatggccgtggggtattga

SEQ ID NO: 438170 - DNA, 273 bp, Serratia marcescens
atgaaatttatcgcctatgcctgggctagcggcttaatcgagtttggcagcactctccctggtggcgcattgccaattctcattgggcaagaaaaagaagtaaaaaaagtcattgaggtattagcccgacactcccgtaccaatgagcaactgttggttccgggcgtaccggaagctgatgaccagcattcagcgatggatgcattaattgatttttataatcttgctaacaaacgacacgcagatttaattaaaggtgaacgtcatgaataa

SEQ ID NO: 438171 - DNA, 684 bp, Serratia marcescens
atgagcagacgcattctgcacgtcgtcactaacgtttcccattatgacaatcccgcgcataagaccgggctctggctatcggaactaacccacgcctatgctattttcgccggacaagggtacgagcagcatattgtcagcccgcagggcgggcgctcgccgctggaaccgcgcgcgctcaaatggccgctgttggatgcctccgcgaaagcatggctcaagacgccggccaaaatggcgctgcttgaaaatacgctgagccctcagcaggtcgatccggtgcgcttcgacgccatctacttcaccggcgggcacgccgtcatgtgggattttcccgacagcgccgagcttcagcagataacccgtgagatctacgaacgcggcggcgtcgtttccgcggtgtgccacggctattgcgggttgctcaacgtgcggctgtccaatgggacactgctggtggcggggcgccggatcaccggtttctcatggacggaggaagtgctggcgggggttgcgcgcgacatgccctacaacgcgcaggccgagatgcaaaaacgcggcgcgcgctatgagaaagcgctgttgccgttcgtgccgcacgcggtggtcgacggccgtctggtgacgggccagaaccctaattcggccaagttgaccgctaaacgggttgtcgcgttgctttga

SEQ ID NO: 438172 - DNA, 444 bp, Serratia marcescens
atgaagattggggatttggcgaaagcgacggggctcactccttcgcgcattcgtttctacgaggcggagggtctgatcacgccaccgccgcgccagagcaatggctatcggaactactcgcccgagatgcccggcatgctgaaaattatcgacagcgcccagcgcgccggattttctttggaacagatccgccagttcctgccgcatggccagggatcctgggatcacgaagagctcaggcatatcctgactgcccgcgtcgcggaaatcgagcgtttacaacaacagctggcgcaaaataaagcagatctgctgatgctgatcgccaacattgaaaatcgccccgacgggatttcctgcgaagccaacctgcagcgtctggtcggcctgctgccggatcccgttcccgcctcatccaccaagaagagcgcctccggcgcctga

SEQ ID NO: 438173 - DNA, 909 bp, Serratia marcescens
atgagagacgagtcctatacagaggttgaattcgcggaccagaaagtcaaagtgccgcgcggtggctactatgaccgcttcagagccaatccggatctggatgaggtggcgcgcgatcccgaagcgggcgacatcgattggttccgccgcattcccaaacagcaggttccttcacgcgtcggccaggtctgggcgcctaatttttactaccgcagcagcagcatacagctgctgatggccgcgccgctcagccgcctgcgccccctgttgccggcgccgctcgagccgctgcacgccggcccgcggcacgggctggtggcgctaagcctcttctcgtatcgggtctgtgacaacgatccctatgccgaggcctccatcgccatcgtcgttccgcaacccggcagccggcgagccggcattgccgaactgctgcggcaggtgcgccgacgcagtttctatgcgcatgtgctcgcgctgccggtgacgacggaaatcgcacgggtgcggggtgtattcggttaccagttgcccaagtgggtcaccgagatttcgatggacatcaatagcagcgacctgcgcgcctgcgtcaacagcgccaacggcgctccggacttgagttttcaggccccatcgccgccgtttcgcaacgtaccttctcaatcgcggatagggtgcaatacgatgctgcatcagatcgatgggcgatggcatcgcactgtcgtacaatccaatacgctgacattcgcgcagcgccgatggccgcgtgatctggttctgacgcagcacggcggcccaatgagcgcgttgctcaatgggctgggcgtatcccgcgtgttgcagctcgacgccgtgcgggatgcgcagatggtgctcaacatgccggttcctttcgatatgccggagcgttga

SEQ ID NO: 438174 - DNA, 3078 bp, Serratia marcescens
gtgatcagaatttatccttctcgcctgcctggtgaaccgcttgaaactcatcaacataaagccatgaccgtgcaccagtggttcgtcgataacgtggatggttatcagaatgtaatgcgtcatcctatctcggttgaggttaacggtaaggggataccccctgaagagtggccactgtgttatatcagcgctgaaacggatgtgcgcatatttccaattccctatggcactggcttagagattgctgcctgggctgctgtagcggtagctgtagcatctgccgcttattctctgatcatgatgtcccagatgagcaaggatgggatggggtcagccagcggcggggattctctggatttatcgccagcaaaagccaacacagcaaaacttggcgatccaattcgtgaagttcttggcagagatcgcgtttatcctgattatctggtgcagccggtaagtcggttcgacagcagtaatccacaaatttacagaacagatatgtttctgtgcatcggcgttggcacgcatgcaataaatcagacgacgataaagatcggcaatacgccggttagcagttttggtgatgatgttagttatacgatttatccgccaggagctagcgtcgcttctgatcaccgcacagaaaattggtttgcttcaactgaagttgggggtacgacatcaggcaccgctggacttgaccttgcatcaacaggtcctgattcggtcagcatcaccgcagatgcaataaccatatctggcaacaacgttacagtaattggctccgtggatgatgctggtgatgctgtaattcctgattcttgggttgtgggaacagatcttactatccaagtgccagatacctttactgtagcgatcgaggctggtcgtaacgttatctatggtgatcttgctgaactcaacccatcagtaggccttccagtgtccatgacatggaatggaactcggattgaccttttcatttcagcttatgatcctggctcccctgcagtcccaggcgtaggtggaaacgcggccagcatcaccgcatccgcatcaccaacaacatacgacttcagtgctaatccactttcatttacattgacatgggctggtgtgaactatgtcatttctttgacagctaactatgtaactatggcaggtctcacagatgagatagatgatcaattatctgggtcagggctggaagttgtagcgatagatacgaagatagtgatcagggaaaaggaaagcccatttagtggaaatagtattggtttcagcgtactgccttcagttttgtttggtaccgatcctgttattgtggccggtacggcatcaacaggtggaacccccgctgttatggagcacattactttatcatggggaagcgtgactggagatccattcattggccttccaagtggcccccagcgcatagcctttggccttcgaggatatcgttatcgtataactgacattgatgggaaaactatcagcgttgatagactaattgaaaattcagatggctcaacaacggtagatccctcttggcctgggtttaccgggcgcacgttgttggattttacagtcactggactgagtgattcctatgactggatggggccattcctctgctgtccagaaaatgaaacgacgactcaaatagagctaaattttgtctatccccaggggttgtgcgatgtgggaagtaaagacggagccattcactggcatgacgtagcgatgacagttcaatatcgtttgtcaggttctgatgactggaccagtgtacaaataaaacatgggaacaacacggttaatgaggttggttacaccgaggctatcacgtttcccgctcccggaaattatgaagtacggattaagcgagatacgcctgtatggggtggtactactcgagactccgtccagtggcaagcaatgcgcgccaaactttctgctcgcaagaccagttaccccaatgtgacgacgatcgcgctaacaattcgaaccggaaaccgtttggccgctcagtcagaccgccgcgttaatcttgttgcaaccaggctctatgacgggcatgcgtcgagaagcatcagcggtgcgttctaccacgtattgaaagaccttggctatgccgatagccagatagatttcgccactatcaatgcactggaggctaattactggacgccacgaggcgaaacctttgactggtcagccggcagtgataacacttctggtttggaagtgctgcaacgggtcgccaatgctggcatgggttactttttactgagcgatggactggcgtctgccggcagagagggggtaaaaaactggtccggcgtaatcagcccgcaggaacaaaccgaggaactccagacagctttcaaggcgctgtcgcaagatgactacgatggggtcgatgttacctacattaacgccactacatgggctgaagaaacggttcaatgccgtttcagcgacaacccaacacctcagaaggtggaggactacacccttgatggagtgaaggatccagatagggcttaccgtataggcatgcgcaggctgatgaaatatcgatatcagcggctaacgcatacaaccagcacagaaatggatgctctttgctacaactacggagatcgcatcgttcttaccgatgatattccgggaagcaaaacgattagttgtcttgtggtagatgaacagcatgatgctaacacggtacatattcacgttagtgagcctctcgactggtcatttgaaaacccgcgatgcttaatccggtttcaagacggttcggcatcatccctgctggttccaactcgcattgatgattacaccctctcactgagcaacacggtagatgttcgtattgatgaatggataatggatgacccatctgtcgaaccaccaaggattgtattctgttcttcttctcgggtgggatacgattcgataatggattcaatagaacctggttctgatggtacgtgccaaattaatgccctgcaatatactccgctgctttatcaatatgatgacgcaacctatccaggaaatactaattaa

SEQ ID NO: 438175 - DNA, 1938 bp, Serratia marcescens
atgtcgctgaaccgtgcatgcaccctcatgaaagtgaaggcgattaacgaggatgaacgggttattaccggcatcgcctctacgccttcgcccgatcgtgatggtgacatcttggagcctgatggcgccaagtttcgaaatgacacccctttcctttggcagcatgaccggagtcaaccaatcggtagttgcaccccaaaaatggtgaaggaggggctacaaattacagccaagctggtaaagccaactcaagatatgccttcccagcttgtggctcgattagatgaggcgtggtcctctatcaagtcagggctcgtaaaaggattatcaatcggatttcggcccattgaatattcgtatatcgatgatgctgggattcgctttatttcatgggacctgctggaagtttcggcagtaaccattccggctaacgccgaatgttcaatccaaacagtcaagtcgtatgaccgtcagttgctagccgcgtcaggcacggagcaaccggtggttaaagctaaacctaccgctggcgctacagcaaaaaaatatactgaaattaaaggaaaaaccatgaatattgcagagcaaatcaaaagctttgagaacaaacgtgcagcgctggcagcatcactgaatgatgttatgagcaaagccgcagatgaaggccgcaccctggatagcgaagaaactgagcaatacgataatgtgtctgctgaaatcaaatcagtagactcccacctgggccgcctgcgcgatatggaagcgaacatggccgccaccgctaagcccgtaacgaaagcagcaagtggcgctgttaatgtggttgataaccgtgctcccggtatcatcagggtagagcagaagttagaaaaaggtgtggcatttgcgcggttcaccaaggctcttgccgttgctaaaggggtgcgatctgaagcgctccagatcgctaaaaataaatatcctgacgatacaaagctacatcatgttttgaaggcagctgtaagcgccggtacaactactgatcctgattgggctggttcattagttgaatatcaggattttgccaatgactttgtagattttcttcgtccgaaaactatcatcgggcagtttggcgtcggtaatattccttcgctgagaaatgttccgttcaatatccgtattcctgtgcagacatctggtggttcggcacaatgggttggtcaaggtaaggcaaaacctttgacaaaatttgattttgagacgattacctttggcttctcgaaagttgcggcaatttctgtattgactgaagaattactgcgtttctcaaatccaaaagcagatgtactggtgcgtgactcacttgctgaatcagttattgcgcgccttgatcaggattttgtagatcctaacaaagccgcacaggctggtatttccccagcttccatcaccaatggtgcagctacaatcccgagctctggtgatcctgatacagacagcacggctgctttccaagtgtttattgatgctaacctgcaaccaactggcgccgtttggttaatgtctagtaccacagcgttggctttgtctaagcgaaaaactccgcttggtaccaaagaatatccggaaatgacaatgtttggtggtacctatgaaggacttccagcgattgtttcacaatatgttggtaaccaaatcattttgatgaatgctccggatatttatcttgctgatgatggtggtgtagcagttgacatgtctagcgaagcatctttggaaatggaatctgcgcctacaggggacagcgtaactcctacaggcgttgaattagtttcaatgtggcaaactaatagtgtcgcaatccgggctgaacgctggatcaactggcaacgacgccgtactgcagctgtagcagttatcagcggtgttaattatggttccggacaaggcagctga

SEQ ID NO: 438176 - DNA, 462 bp, Serratia marcescens
atgttaacagggcagaagcgcaagtttgcattggcgctgatgtctggttcaactcaagtcgccgctgctatcaaggctggctattctgagaaatcggcgcgttccaagggctcgcagctgaagaaagacccggacgtcatcgcgtttatgaagaaaaaacaaggtgagaaagtccgtgttgatcatcaggctgaggccgcgatttctcctcctccccttgttaacaatactgttaaagaatttgatgacccgcttgattttcttaagtcgatcatgaacgacgtgacggaggaaatcgacgtcagaaaagatgcagcaaaggcaatgctgccatatcttcatcccaagaaaggtgaaggtggaaagaaagatgccagaaacgcagctgcaaaagtggctgcaagcgccagcaagttcggcgcgatggcaccaccaaaacttgtcgtcaacaataatgggtaa

SEQ ID NO: 438177 - DNA, 198 bp, Serratia marcescens
atggcattatcaaaggaagaagaaattcagcggctgattctgctgggcgcaatcagtcagctggatgaagttgaacggaatgaaatttatgcactgaaagataagtttctgggtgtgttcaaaacggcaactaggccagagcttgcaatggcagccttaggattggtctcagctgacgctcagaaagaggattgctaa

SEQ ID NO: 438178 - DNA, 486 bp, Serratia marcescens
gtgatagcaatgtcagcctgctttgtggctagctattaccaaggtaagtcggagaagctggagggatcggtcaagcaactgcagagggataacaaccagcagactgcgatcattgccacccaagcacttcactttcagcgtgccaacgaaatcagcaacgcggcgaatcagtacggcatcaacaccgacgctgccacacaggggaaagaaattgaataccggacgatcctcaagaaacagccgacgtgtgatttggctgtgcctgccgctgttgctggtgggctgctcgactacacgcaccgtctacgttcccgcgcaatgtcagacggtaccatcgtcgctgacgcaaccggtgctggcgccactgcctccggcaccctgacatactgtcaggcggtgctatggattgatccgctgctggcagcgatcgacaaagcgaacaaccagcttctggagattcggcggcttgatggggagaggaaataa

SEQ ID NO: 438179 - DNA, 198 bp, Serratia marcescens
atgaaaaaagatgatgttatttcgtacttcgatggggtgggcaaaacagccaaggcattagggctgtcgcatgcctccgtatcgggttggggggagattattcccaaaggccgagcattcgagatccaggttattactggtggtgaactgaaagttgatctctctctttacaaaaagtctaccgcgccagcggcttaa

SEQ ID NO: 438180 - DNA, 591 bp, Serratia marcescens
atgacaaccatcaagcgttttaatcccgactacaaaatgcacgcagctcgctttgaggctttcgcgcgtgaaaccgagcatggcgaatatgttcgttttgatgcccaccagcaggtagtgagcgcgttagaggctgagcgcgatgcgcagcagaaacgagccgatgcgctggctgtggagaatacaggctttaagcacgcgctttccgtaattttggaacatgtggatgtaactgataaagggcaggccggagtagtggcgatgattgccaatgatgagctgttcaactccgaaaccccagccactgacgcagcactttcagctatcgaagcgcgattctgcggccttctggacaattatggaaaagtagagccagagcgatttaaccccgaatttgcagacctctacgcaaaaatcgtcaatcgtattttcagttcagtgcttgataacccctctgtaactaaccttgagtcattgactgattggctggaaaacagcgccgaaaatgcacgcgcttacgcagacatgtccatcaagtttcacgtcgagctgcgggagggccggtatgaatttacgcagcctgaaatttaa

SEQ ID NO: 438181 - DNA, 582 bp, Serratia marcescens
atgaatttacgcagcctgaaatttaacgacgaaatgctccaggcagtcactgttgggagcaaaacacaaacccgccgcccaatagaggattatccagttttcgaactggccgataacggcctgtggcgcgtgcatggcccatcaccacgccaacaggctgtacttgatgaagatgacaacgttattgatgtaatcccggaaggcactttcgaaaagatactgattttgccgaagtacatcgatcgctattgcccatacacgaaaggagaaaccttcatcaatgcgtgcgacaaggacggcaatcccgttttgacgcttgctgttagggttcgcgtcgagcgcctgaacgatatcagcgaagaggacgccaaggctgaaggtgttcgtgcaatcgaaaacaacttcggcaatggccctgcctattgcgattacttgcttcctaatttggatgacactgcggagtggtacaaccgcgcgagcgacagcttcaaaagcctgtggaagtccatctacggcgcagaaagctggcgcgccaatccctgggtgtgggttatcgagtttcgtcgtgtggagggtgcgtga

SEQ ID NO: 438182 - DNA, 282 bp, Serratia marcescens
atgccagcaaatgaactgaagcaacaagtccaatacccaggcggctttgacagacttgaaatccgcaagctgttagatggccttgtgtcggcgcatatctctgctgctattgcaggtgaaaagatgaagacagccgaccgcaatcgtgacctgtccatcatcaaggaaagcatcgtaagtgccgcccacctagttcgctcgattattgaggagcgagagggtgtatggctgaacggcattaactctgcagatgccttcctcaaggagtcccagcatggctaa

SEQ ID NO: 438183 - DNA, 201 bp, Serratia marcescens
atggctaagcgcgatgacctgtttaaggttggcgaagtgtggcagtcccctcgcgggactctatacaaggtaatgggcgttgatggaaatcaggcaacgctgcgccttggttcgtttggtgatggccgaatcgttcgtcgctgggtttatcaaaattacggatggaagttgtgggccgaggcccaggagaaagcattatga

SEQ ID NO: 438184 - DNA, 186 bp, Serratia marcescens
atgagcatattcatcggtgtgattcgcacactaatttttgtagcgtcagtgctgttggtttctgccatgaaagtcactgtggcaggctctttcggttacttcatcgctggcgtgttactcagcctctactgctggatcattctgaaggcgctggactacataaaggcttaccgtcatgggcaataa

SEQ ID NO: 438185 - DNA, 498 bp, Serratia marcescens
atggataaattcagcgaactgaaagcggccgcaatggcagcaactcccggtcgaattggtgaccgcatcgatggctctgggagcatcaaatatgaatgcactggctacgatggctcgttagttctgcgcaccgatcacaaagatatggagtatggattcgttggtgataatgctgatgccgatgagctatttttcaggctgtgcgttccggatgtggttctagaactgctgtcagataacgagcgccttgcccgtgaacttgtcgctaggaatggcgagaatgaatggttacgaaagagagcggccgagctggaatccaagctggctacgccggtgcggttgctgggtgagatgctacttcacgattgggagcaccgcgttgaacagcaggcgactttccagcataggaaaatagcttgggatgcccgcttagcagaagacaagaaagcaatcctggccgctggcttcaccttcaccgtagagggggatggtgcatga

SEQ ID NO: 438186 - DNA, 531 bp, Serratia marcescens
atgtttcatcagcctaattatgttgttgtggctatccgctttctgtctgcggttctcagagtcttgttggtctggcctggcgttgtgctggcagttataggcttcatgttttttgtctcaacgctcggtgatcccggcgggcagaaggctgcctcacgcatggccaacattgcgcaaaattaccgtgcagcccccgacgggatggtgatggttcagccttgtccgtatccagatgcccctgacttaaaaccgttgactgaatcgtcggcggtgctgattaaaaaacgggactgtaaaccttatccgcaggcgtttgcagaggttgctgcgaaggagcggcacctgattctcatcatcgggagtgggctggtcgcattgggtttgttggtcgaactgttttctttgctgatcaggcgccgccagatgagtcggagcgctgtttactacggatctatcaatgcaaaaggggagcgcaacataaccctccagtctggtgaaaccgtgaatgacaaggaaggccgccatgagtaa

SEQ ID NO: 438187 - DNA, 372 bp, Serratia marcescens
atgactggaactgaaaagagaaattggccaacccgtcggggtggcaggcttggccagttgacaaagcgtgctctgcagttgctggcgatgttggttgcttcgatggcgtttgcgttgtggatggcccactggggactgaatcacccgggagagacagcatcgctgcgtgactggatgcagaacacacgttacggctggctgttctggcgcctggcgctttatgcggcgctggcctggggattctggaaaacctggcatgcgccgggctgcaaaccggaataccggcagcccctcaagcgtatggccatcgcctgcgcggtatttgccctggtgtgtgaatactccgtctttggcggagggctgaccttatga

SEQ ID NO: 438188 - DNA, 954 bp, Serratia marcescens
atggacaataatagaaataaagatgaagcgataaaacatctggcgtcagagtttaagattgatggatactcacgacaaaataaaataaagccgaccaaacaactgatacaagatatagcagactctgtaacatatctaaaacgtgaaaaagagtacgaggggaagaaaaaagagtggagtataattagcgcccttaatggcttagctattttagccatcttaatattcatattctccataaaccgagatggcgattctgaatacctaacgaaatggaagttttatgcgtatcttttttcagtcttccttacggcaatttggataggcgttaacattgaaagattgttgttagtcagagaactctggaaatttggcataacaaaaatcatgatttcattatcatttactgcattacttgtattctctacagcatcagcatcatctaccataaatggtatttttggaattgattcatctcacttcccgttcaccaggagtattctaactgcatatacttttttcacttacgcctcacagcttgtttatgctttgttgattgcagcagcaattaacattttaccaataggctattatctaaaaaaattatggaatagtgacactgatagagagatcccatgggggtcaatcacctatatttttctaactctcgtgttcacctacttttcatggggatgggtaagtaataactttaataaagacactctgaatgagaaaatatatctccttgctcaccagcttgatttcaatgacagtaatttgtgtgtgaacctaaggaacaaaaacgccagcgttatcttcctcggaccagagcaaagacaggtaatggttgattttaatactattaagccagacgatatttcaagttttgttgagggtggccgaagcttcagactggagatgaaagatctccaggttatgccttgtttatattga

SEQ ID NO: 438189 - DNA, 888 bp, Serratia marcescens
gtggctaaactcaatttggatcagcttcagacgttcgctcaggtcatcaaacaaggcagtttctccagtgctggtactacactgggcttgacgcagccggcagtgagcttgcaaattcgtcagttagagcggtcgctcaatgtcaaactcattgagcgggttgccaaacgtatccgcccgactgcagctggtactgtattgttggaacatcaccgccgtatcaacgctgcggtggacgaagccttaaacgacatggccagccattctagcgacatcatgggaaatgtgctcattggcacgggggcgacggcctgtattcacctcctgccgccaatattgcgcgaattgaaatatacctatccattgttaaatgtgggtgtcagaacgggaaataccggtgatatggtgcgagcagtggaagaaaaccgtctcgacattgccctgatcaccctgccggctgccggtcgaaatgtgctgatcacgcctctgctgcaagatgagtttgtggccattttccctgcaacccatcctgacctgccagcggaactttcgccgggggcattacgcgattatcccctggtcgtttttgaatccggtagtagcacgcggctgctgatcgatagctggttccaacaggcgggcatcacaagcagcccgattatggaactgggcagtattgaggctattaaagagatggtcgcggcaggattgggattcagtattgttccacgtatgtcactagcggctcatacgccgtttccagggatcgtacaccgcacgctattcccttctcttgaacgcactctgggtattgcgctgcggcaagataagccactcaacaaggggcttcagaaagtgatcaaccgtctcaatgacctgcaatactaa

SEQ ID NO: 438190 - DNA, 534 bp, Serratia marcescens
atgaatatctccatcaccgatgcattgcttacagatttggcacaggtacaggcgatttatgcgcaccatgtgttacacggtatcgcgacgtttgaaaccgagccaccggaacttgaggaaatgcagcaacggtatcatgaggtcttgcgccagggtttgccgttcctggtcgctgtacatggggggcaggtggtcgggtattgctaccttacgccataccgcccacgttgtgcatatcgctataccctggaaaactccatttacgtgcacccggaaaagcttggccaggggattggcaaactactattgtctgcagcactggccaaagcggaggtactgggatttcgccaggtgatcgcggtgatcggcaacagcggaaatacaggctctatcggtctgcaccatgctgctggctttaaaccggtagggacactcaccgcagttgggctgaaacatgggcgttggatcgacaccgtgatcatgcagcgagcgctgggtgaaagccatatgactctgcctggccacgacggatga

SEQ ID NO: 438191 - DNA, 1230 bp, Serratia marcescens
atgaagacacacccgttgagcggtaaaatagcctggtgtataggtctgacccagttaatcaactggggcatcaccttctacctgttgggggcttttggtgatgcgattgcgcatgacacggcatgggggcaaccccttattttctcgggactgactctggcgatggtcgtcatggggctcgtttcgccggtatccggacgactgttggcattgatgggagggcgcaaagtcatgcaacttggcgccctcctgaacggcctgggatgcctgttcctggcaacgagccactctctcgatatctacttcctggcctggctggtaatgggcataggcatgcgcctttcgctttatgacgccgcctttgccgtcctggtcaatattggtggggctacagcccgtaaatccattgcgcaagtaactttgctgggcggcctggcttctgtggttttttggcccattggagaggggctgctcaacctgctcggttggcgatggggggttggctgttattgcctgttcgccttgatcagcattgcgctctgtatttccttgccggatggcaaggaaatacctgacatgtccccccacccgccgaaggtgcagagtggccatccctccggtggtgatcgcttgaaaggcgggttgtatgcagcattaatggcgctgctgagcttcttggcaaccggcatttctacacacttacccctcattctgactagctccggcgtgccggtacttgttggcgcattatggggggtggggcaggttagtgcgcgtttcggcgatgtagttatggggagtaggagctcggcgttggggctgaatctggtggtggggatattgcttccttgttgttttatcatcggtcttgtggggctgacatctatcgtgggaaccggtttgttcgttctcgggtatggggcgataaacggcttgtctaccctagttagagcgaccttgccattgactctgtttgaaccgcacttgtacgccagccgcatggggacattgctgatgcccagcttttttctgtcggcgttggcaccttcactctatgccagtttccgcgaacggttcggggataccggtatgttggtcatttcactgggccttgcttgcatagccgcaatcatagcaatagtgatatatctgatcggaacaggaaaacgggcactaaaggtagcgcccgtggacgtgacatcgaatggcgatggggaagctagttcatga

SEQ ID NO: 438192 - DNA, 126 bp, Serratia marcescens
atgtaccatgcgtttgtggaaatagagaagcaaattgcctctcgcatccggctgtttttaagcctgccctttgagaaactagaccgcctttccttgcaacatcagttggaacaactgagccgatag

SEQ ID NO: 438193 - DNA, 903 bp, Serratia marcescens
atgtctcaaatcactgagtctgcagttaaaggtgcgccgaagccgatgaccccgtttcaggagttctggcactatttcaagcgcaataaaggggccgtggtcggcctggtgtatatcgttctgatgctggtgatcgcgctcggcgccggggtgctggcgccgcatgcgccggcggaccagttccgcgacgcgctgctcaagccgccggtgtggcaagagggcggcagctggcaatatatcctcggcaccgacgacgtgggccgcgacgtgctgtcgcgcctgatgtacggtgcgcgcctgtcgctgctggtcggctgcctggtggtggtgctgtcgctgatcatgggcgtgatattcggcctgctggccggttacttcggcggcgtggtggacgcgattatcatgcgcgtcgtcgacatcatgctggccctgccgagcctgctgctggcgctggtgctggtggcggtattcgggccgtcgatcgtcaacgcctcgctggcgctgaccttcgtcgccctgccgcactatgtgcgtctgacgcgcgcagcggtgctggtggaggtgaaccgcgactacgtcaccgcttcgcgggtggcgggcgccggcgcgctgcgccagatgttcgtcaatattctacctaactgcctggcgcctttgatcgtgcaggcttctctcggtttctcgaacgccattctggacatggccgctctcggctttctgggcatgggcgcgcagccgccgacgccggagtggggcaccatgctctccgatgtgctgcagttcgcgcaaagcgcctggtgggtggtgaccttccccggcgtggcgatcctgctgacggtgctggcattcaacctgatgggggacggtttgcgtgacgctctcgaccccaaactcaagcagtaa

SEQ ID NO: 438194 - DNA, 1107 bp, Serratia marcescens
gtgattttactgtgccagtcatctgaacagtatttcacggtaacagggtggatggcagcctgcataactctcccccatatgctggggccgtttattgcccgccgtatagatacggccagcgatgggcgtagggttatcgcagcggcttgcctggcctatgccgttatcaccgcattaatgacagcgacttttggccacgtccccttgcttctgaccgcactacttcttatcgccgcaggactttgcggccctctactgaccggtggaattagtactttcctgcctgccattgcagggccagaccagaggagccagcgtcgggctcagggtcttgatgtggcaacctacggtttcggcggcacaattggcccttcggccgtagccgctatttccgcctgggcttcgccttctgcggcattttaccttctggctgttggtactgttcttgccgctttctttatcatgcggctaccggtttcacaggtagcaaacacaggcaaggctacaaaagttaccagtgccatcgcaacagtgggtttgatgattaggcacacgcagctacgcaggaccatatatctgacaatggctgtggcttttgctgttgccgtcctgcccgttgttgcggtgaacctggcggatgttctgggtgtgcctgcagccacggccgcttttctcactgtggcctatggggcaggtaatcttacaggatcagtgtgcctgatggttattccgctaagaggtgaacccgacaggctgatgctgtgtaccggcgggctgattgttgcagggttgctttccatttttatagtcagcagctttctgccagtgttcgtctgcttcttcatcaccggaatgcttaatgccgccttcttcgccgctacgcttgctgcacgcagtgaatactctcctccttcctgccgggggcaggtttttgtctgggttggtgcgatgaagattactgcgggatcgcttggcactgctgctgcaggccaattgatgctactgggggcttatacaccactgattttaagcttgtgttctctctcggcaatactggttatttctatcgtggcccgcaccaggccgtggattaaaactgattactga

SEQ ID NO: 438195 - DNA, 894 bp, Serratia marcescens
atgttcaccggcttgtctgctttcccgttaaccccaatcaccgccagcggcgtcgacgaacaggggttcattaaaattctgacccgccttacggcagcacgtgttgattctatgggcattctggggtcaaccggaagttatgcctatctgacccgggagcagcgcaagcgtatcgctactctggcaaaacaacattccggagatatcccaatgatggtttgtgtgggggcggtcagcaccgatgccattctgcatctggccgatgatgcgcaggcggctggcgcgaatgcccttttactcccggcggtcagctatcaatcactcagtgatgaagaagtcttctcgttattcgagaccgttacccggcacgtgtctgcaccggtgtgcatctatgataatccgggcaccacgcattttacctttacggatgaactgcatgggcgtctctcatcacttgaaggtgttcgctcggttaagatccccggtgtcccggatagtccggcggcagcggcggaacgggttgcgtcgttacgccagcacctgcatccaggcgtaaccatcggtattagtggcgatgcctatgccgggctgggattgaatgcaggctgtgaagtctggtactccgtgtgcggtggtctgttcccggaaacagcaaaacagataactgaggcagcagcagcgcaggaccatgaacgcgttactgcactgacagcacggcttgaaccgttgtgggcgctgttccgtaaacatggcggaagtattcgcgttattgccgctgccgctggcgtacttgggtttaccgacacggattgcctgcctcgccctctgcaaccgttgtcaacaagcgatatcgcggagattgtccgtgtgattaccgcgctggatctgaagtaa

SEQ ID NO: 438196 - DNA, 1371 bp, Serratia marcescens
atggctaagtataaggcgtatccagagtataaggattctggggttgagtggttgggagatattccgggccactggaaaaccatatctatatccaggttgttttcccgaattaagcgaaccggatatacagagaaagaattgctctctgtataccgggactatggtgtcataccaaaatctagcagggatgataacaataataagccctcagaagatttatccccttatcagttagttcaaccaaatgatttggtcatgaataaaatgaaagcctggcagggatcaatcgcaatttcagagtatgaaggaatagttagtcctgcgtactttgtttaccaacccaataactctctttttgagttggcgcatccaaaatatgtgcattatctgcttcgtaaccccatctatgtcactcaatatttgagtcgttccaaaggcatacgagtaaatcagtgggatttagatcctgatgagtttagaaatattgaacttctgcttcctagcaaggttgagcaggaaagaatatacaacttcctagattacgaaaccgcaaaaatcgacgacctgatcgagaagcaacaacaactgattgaactgctgaaagaaaaacgccaggcagtgattagccatgccgtcactaaagggctaaatcctgatgtgccgatgaaagattctggtgttgagtggttggggaaagtgccggagcattggggaatcaaaagatgtaaaaatttatttaaatttgtgacaagtggatctcgcggctgggctggttattattctgatgaaggctctttattctttaggattgctaatcttacaagagatagtatcagccctaaacttgcttctattcaatatgttaaccctcctaatggtagcgagggcgagcgttcacaaataaaagagaatgatctcttaatttctattacagctgacttgggatcagtatgtactgctgatgagtcaattgttggcggttatgtaagccagcatgtttcattatgtaggccaaattctctagtctcatcttcgcgttggttagcttattttgttctttcagatgcagccaaagagcagttccaaggtgcgggatatggaggaacaaagatccaattaagtttggaggatatcaatgagctctatgttgcttatccaccgagaaatgagcaagaaaaaatagcaagatacatagacaagcaactctcagaattggacgatttagatcatagcgtacaaaaattagttgagcttttaaaagaacgccgaaccacccttatctccgctgccgtcaccggtaaaatcgacgtacgcgactgggttgcacctgatatgcaagacgctgaggagccacaggagaccaccgcatga

SEQ ID NO: 438197 - DNA, 408 bp, Serratia marcescens
gtgacgcgtgaagacgaagaagagctgatcccgctgtgcctggaggaaggtcttggcctgatgccctggtcgccgctggctcgcggcgtgctggccggctccggcagtggcggcacgctgcgcgccgccaccgacgagcaggccccccgttggtacggcggcagaaacgaggtcgaatgcaccgtcgctgcggtagcggaggtggcggccgcgcgcggcgttcccccggcgcagattgcgctggcctggctgttggccaaacccggcgtggcatcgccgctggtgggcatgtccaagccacaccatctgcaggatgcactggcggcgctagacctcaggctatcgcaagaagacgtggccgcgctggaggcgccaatggcgcacgctgcccgccccgaacgttggtag

SEQ ID NO: 438198 - DNA, 312 bp, Serratia marcescens
atgattgtaagaacttggcatggctgcgttcccttaaaatatcaacaaggttttgcggatcatttagttgtcacaggtgtgcagcacgctaaggccattgctgggaattgcggtgcttttgtacgacaggaaatccagggggaatatgctcattttttccttgccacctattgggaatctctggcggcagtaaaagattttgccggtgaagaatatcagattgcagtgacctatcccgatgatgagcgtttttctttgatttcagatccctatgtatttcaccatcaggtagaagaaattgctgcgttatga

SEQ ID NO: 438199 - DNA, 1752 bp, Serratia marcescens
atgattgactatatatcacaattacctctaccagcagatcagatcccccaaggccttatagaactattatccatagaggatattactaaccctcagaaagaagttattgtaacacatagatacgaacgaaatctgtataaagataatcatgagtgtagtcatatgactatggctactataccaaaagaagatgttgataatatcaaggttcttcaggaatcttctaatggtttagtatcatattccattcctgattgtagttctaaaggcagtgcaagggattacaatatatcaatttcaggttacaaatacattgtggcttcttggggtgatagttctcacttctcattttttttagctgaagatgtctggatgatgcttggtctaaagcctagacttataggtgacactgagcaaaaagtttttttcgatgaggtaagcttgcctgactatggtgttgcaaaaggagatgtatcaagtgactattactttagaagcaataaagatgtaaaatggacaatgcgtaatgattaccttagaagatatctttggatgaggaattatgttggcgtaaaagtattttactatgaagcatacgttaaaagaacgacggaaataattaacatactgtcggattcgaaacacttcaagcttgatttaccatggatagattttgaaatagttgatcttgatgacaggataatgttgcaagcatgggggacagtacaatctgttcaacctgaactctgtgagaaattaaatatagatacattaatatggcctgggcataccacctctatgaccaagtcaagatctagagacatcagaaacagtgaatttgtcttgattaatgactctttccttactaaatatgaaaaagatgcttcatatgatgcaattccattttatgacggaaattattacagggttgctccaagctacggtggacaatggtcgtttagagattgcatacgggttggaagaaacctagtcagaataccattttatgaactgtatcgaggacttccagaggaggaggtttatcatgtttttgattatgcggtggattcaaatctaatcactgaaactgatttaagcgtagagcatattgtatctaaaacatttagattcgctagagaattagcaagacttagtaataatcttgtatcacttggtagaagtgtaggcattgttttatccaacgcggagattttagaaattaatcgagcagagttagagtccgaaggggtttctaattactccgtattacagaaacttgcttatgttgcaccaaatgatatgcaagaacaagatttcctgaacagatgcaagactattaatgagactttaaataagattaaatcaggttctttaaggaaattattaattgctatgggggttaaaaaatctgagatagaaaaatttcaaactctgaaattactacaatcaatacttaaccttatcgaacctattgttgagcagaatgaagactcatctgcacttaagcacgccacaaatttttcggatttcaatactcaaaatcatcaattagcatcattatttataaataatgatttaaggaatgcggaagcccatgaagcggtaaacaaatcaattgggcatttggaaaaattaggatttgatacggccaccttggtcattggttatagtaatgcccttgactttgtatttgacggtgtaattactagtttattaactataaattcaaatatagaaaaagcattgaaatga

SEQ ID NO: 438200 - DNA, 138 bp, Serratia marcescens
atgatgtatacccccaaatggaatggcgatatttcatacgatctcgtaatctgccaaaagaaaaaatggatgagcgttgatcaagtagtgtcaggtcttgctgtaagtatcccgcttaacctaaccattcacttttag

SEQ ID NO: 438201 - DNA, 705 bp, Serratia marcescens
gtgccgggatttttatccacgcccggcgcgtgggtacccgttgttgctgggtggttctgtggtatgatttatgcgccaacacaatcaaccacaaagaggtgtatatgtctgataattatccgtttgaaggatatagatatcctgagcgtcaagatcgtccttcaccagatagccaagttccatataggcctaccgagcgacagcctgagcctgagcctaaaaagtaagaggcagcaaatgacccgagaaagcactatttttcacatccgctattcgttccacattgagacgatgcaggcgactttttatagcaggctggatcggttactaacgttttcacaaatcatgctcgggtcagctattttcgctacttatggaagccttccactttttggcgctattgttgcctctttatctgctattagtttcgtttggcagccgagtaaaactgccatgctgtgcgaagcacaatccaagaaaatgaaagagctaataacgaagccagacagtacttcagattctgaacttcatgccgcatacgttaaggccgaggagacggataatccaatgcttggcctcctgcgtgacgccgcttacataagaacgctgatcgttcttggccgctcatccgaagcaatttccgtcaaactaagctttattcaaaaagcggcagcttggtttgctggcgaccttccaaagccttaa

SEQ ID NO: 438202 - DNA, 1287 bp, Serratia marcescens
atgaacgatacagacctgctagaggctaatgcaatatcatttgaaatcttagagtcaatggctgatgcaatttgttctaaactttgtaagatagttaatgaaaagttagtcggcactgatcttaaagaagttagttatgaaattattctgaacgattcttcaaatgcaggtgtttattatgatctcagtaaaatagtgataaccactggtatggttagatcaatataccaagacgcattaaactttcctttatattctattagggtaagtaaagactttaatattgaggagttagttaataaagtatattatggcaatgagtttatatttgacggtggtattcctgaaattcctgattgtcaattaactgaattttctaatttctataaaaatacttggatcgaagcgggtgctaataaaacccaagaaatacccgctaaatattcattcgattacccaaatgcgttatcttgcagattcttaatgtttgagcttatgatggtgtgggttttttatcatgaatttgcccattacacacagaaacacaatcttctccagaaaggtgctaaaacgcactttgaatcatcagcctttgatattttagactccgctttgattgatgaaaaatatttatcacaagcccgtgaggtgttagctgatactgatgccatgcttaatactttgagatacttattaagtgaaacaaaaagaattcatccaggaagtctgtatcttctagtatcggttcaggcgtgcatgtttattaggttttacaaaaacaaaaattctaattatacaaatgatatatcagttggttacacacaccctcatccggcagtacgaaatactttccttcagttaatattcatagaggcaatgatgtgggatgttagaaaaaacatgtccatttctgaagaaaaaaaggaaagttttcttgttgggtttaaatacatagctgggcgtgcaaatttattttcggtggcctattatacagctagatattcaattgaagaggatgatagatttaattttttatatctaattggtcgtgaaaataaagataagttacaaaatgaggtttcaataatagttcgctttgtcaatagtcaactattagatatcataaaaaatactaacgaaaatgaaaatcacattcattttctcacaagtgttaattacttcaaacggattggtcagtattaccctgagttctttgaggaacaaggaaatgatagaggtgaacaagtagtaattgttaatgatagtgatttaaatacattgaaataa

SEQ ID NO: 438203 - DNA, 897 bp, Serratia marcescens; identical to SEQ ID NO: 432518

SEQ ID NO: 438204 - DNA, 957 bp, Serratia marcescens
atgaaggaaatgactaatagatttactgcggctttaaaaggattatgccagaagagccatgatgagtgttctctatgtagatatcgctttaaagaaggggatacaacgcactcaggatatggtctaaatgaagaggaattatatgtttgtgataattgctcggattatttatgtgaagttgcaatacgccattatttttctccgcggccatatgctttgcctgaagattccgctagtctatggaggtatatggatttcacaaaatatatgaacctaattagtactcaaagcctatactttgctcgctctgattgcttctctgatatctttgaaggggcgaaggggtatttaagtgacaagagcgtttgggaacgtcattattatgatttttttattaaagccatgacgaatctaccagagggatttaatgttgaactatcagaaaaacaagtcttagagcgtgcgaataatctcctgaaagattttgaaggtgctggtgtaaagcaaagacagagcacttttataagttgttggcatgaaaatgaatacgaatcagaggcgatgtggagattatattctagctatctaccaaatgcgcttgcaataaaaaccactactggtgatttaattgactcactaggctgtgactcgtctataaagattgggagagtggaatacattgattatagaaacaaattctctggtgtcaacgagtctttctggcggaagcgtaagtcttttgaacatgaaaaagaggtgagagcaataattaatgattataaatgtgcagggtatgggaaaaatgtgttatgtgatttgaactctttaattaataatgtatatatttcaccaggtgctgcagattggttcgtagatctagttcgaagtgttaacgagaaatacggcatctctgcaatagtaaataaatctgatttgaccgatcctcctttttattga

SEQ ID NO: 438205 - DNA, 1086 bp, Serratia marcescens
atgcgcgtatttttagatacgaatattttttataataattggttcgtcaacaaagcaaactttcaatatctatttcattttcttaacaatgaagaccacgatcttctgttatcaaatattgttttagaggaaactaacaatataagaaatagacaagtagattcgaacattgaagaaatacaatccgttattaataaattgaaaaaattaaattctagtgaaatttattttaataaggattctttaggagtatcggattacaatctactcaatgaattacatggaaagatcaacaacattacaacaattgaatatgaatctatatcgcacaacagaattgtatctcgcctgtttaaaaatttaaagcccttttcatcacaggaaaaaggatatcgcgataccttaatatggctttcacttgtcaagcatgtaaaagaaagcggacgtcgtgatgaagttattttcataacggagaatagttctgatttttatagcaataataaagatggaatatctttccatggtgatcttcaaaaagatcttgaagatgaggatgtttctgtaaaaataataccgtacaaaaatcttcatgagttcgttaagacgcaaatagataaagaaacacactcatttgatcataataaatacgagtctatatttgaggaatatgttgaaaccaatagcattgaatatctagaatctttagataatgaatcattaagtttatatctcgaagactcaatttttgaatcaaaagcatctaatataactaatttaacggtagagatattagaaggatttgaggacaacagcatcgaaagaatatctcaggttgataaaaacaaactgtacgtgtcttatgaattcaatctccgccgggtgtttatacaaatcgaaataccatacctggactatataacaaacaaagccgaaattgactctaaatataatattataaataataatggacaatttgttacgattgaaaaattagttaggccatactttgatgttagcttcatgttctcaccacaaacagaaaagcttgagtcattctctgtagatcatctctggctaagacgttaa

SEQ ID NO: 438206 - DNA, 726 bp, Serratia marcescens
atgagcaccaccgccttaccgaaatacatcaccgataaactgcaagccctgcgtgacgctcgcgccgcccacgacaaaaactatcaggcgttgaccgacgtcgtaaccggtattgcccgctgccaccaacagaagaaagacaccgaagtgcagagccaggaggcagaaagccagtggcgccccctgtttcgtaaactgcgcggagaaatgacgccggaaccgcaagcgcaacaccacagccggatttccaagcgggagctggcgaaagagttcgacggactgattgaggagatggagctggacaaaatgcagcttcacctcaactgcggcggcacagccccgaaggtggtgagcgcgcacaaagacgccctcacgacctttgcagctcacgcgatgcatcaggccgtggatgcgctgagcaaggcgctaatcagccctgacgttatcaaggcgtgtgcactggcttcacgggcttacggtgtctatgcggacaatccgatgaggatgattgagctacaggtacagggcgcactacaaggccgcattcgcgctaccatggctacgcaaaatatcgaccacccggtgcttaatgagattggcctgacgataccggaagaaaccggcgtattgcgggagcgacaaagatgcccaatgcgccagatgcgtggggcaagagaactggcggaaaaacgccgtctgctgcaagaaaaaggagccaaatcatga

SEQ ID NO: 438207 - DNA, 939 bp, Serratia marcescens
atgtcggttaacaaccccgtcgcccgcctgctggccgaacatcccacgctgatcctggacggcgcgctggccaccgagctggaagcgcgcggctgcgatctgaccgatccgctgtggtcggccaaggtgctgattgaaaatcccgagcttatctatcaggtgcatctcgattatttcaacgccggcgcccaatgcgccatcaccgccagctatcaggccacgccgcagggcttcttgcgccgcggcctggatcaggagcaatcgctggcgttgatcgccaaaagcgtgcaactggcgcagcgggcgcgccgcgattatctggccgaacacccgcaggcggcaccgctgctgatcgccggttcggtgggcccgtacggcgcctatctggccgacggctcggaataccgcggcgattaccggctggcgcaggatgacatgatggccttccaccgcccgcgcatcgccgccctggcggccgccggcgtcgatctgctggcctgcgaaacgctgccgtcgttcgccgaactgcaggcgctgctgacgctgctgcaggaattcccgatgctcggcgcctggttcgccttcaccctgcgcgacagccaacacctcagcgacggtacgccgctgacggaggtcctgtccgcgctgcgcggcaacccgcaggtgttggccatcggcatcaactgcatcgcgctggacaaggtcgccccggcgctgcgtcagctgaacgcgctggccgacaagccgctgctggtttacccgaactccggcgagcactacgatgcggtaagcaaaacctggcacgcctgcggcggcgagcacggcagcctggccgatcaggcgacggagtggcgcacgctcggcgcacaattgatcggcggctgttgccgcaccaccccgcaggatgtccgcgccatcgctgcgcgctgcaagaaatga

SEQ ID NO: 438208 - DNA, 516 bp, Serratia marcescens
atgccgaacgccggcgctggcgccggtaacctccccggctatagtgaccttgccgaccgccaaacccggcgtcggccggggccgtcaccctctcgatggccccgccttatcccatcccggatcgcgccggagcttctcttgcgcgacgccgggccctcgtccgcggcaacgcgcatatggcgtatcgcggccggtaagggcgtacgggcaggtgccttgtcggctaatgggcagtcagaaagatggcataacgatgtgcggcactcactcaggagtgatactcatagagcgctgttgcggcagaaaagtgggaacgaggataagaaggtacagcgacgaagagagattcgagtggtcatccccggtgctgccattggccctggtgttggccgcggatctttttgccgcctgctccctgcttacggacaagagcaggcggtttattttgtgagactggcacccccccaggacgcgaatcacacagtatgtgcgctaattaaccatacaaacgattaa

SEQ ID NO: 438209 - DNA, 798 bp, Serratia marcescens
atgagcgcagcactggttgtcgtagttcttgtatgtggctatttgtatatcaatagccacataccttcaaaaatccttttcaagaaaaccactggatggcaatcatattttcaggttgccctaaaaggttcaatttatctgaccattgcgtttcttttactgtcgttcgtatggtctattgccttcatcttaatgtttattctgaatatacctactttcttaggagctgattattctaagttcacttttgctatagatttgcttgagtttaagatagcaggtctaggtttgccgtttatcctgttagttgctctaaccagtgccttaagcttcggtgagtcgaagcaagtagaaaaaaacctaaaacacgcagcatacagaagacaactatttgaagagatttcgtcttcaagttctatagaaagcatgatgctcgagtcgatagatagcaagtctcacttgcttgtatctatcacattgaaatctcgaaaagtttatattggcatggttcatgaggcaagactcgaagagcatgacactgacgtcattgttatcattccttttttgagcggatataggcataaagatacgctgtcatttgttgaggaagtaaactatgcggaccattacaaagagtgtgatatcactttaacgtcaactccactatcttatactcagtatcggcatataatcccgcgcgatcagattgagtctttctccctatttaattcagatatgtataataagtttaagcaacagaaagaattaaaagataccccagaaacactcagttgttaa

SEQ ID NO: 438210 - DNA, 237 bp, Serratia marcescens
atgaaagcaatcaagaagtatctggctatgctggccactccggatcggattatggacgttgcggttcgcaacaggtgggataccaaagataacccggcttcggacaacagcttggaaccatattattttgaccgctcaggggcgcttaagattaaccctcgaaatgaagaggtgcaaaaagcgtttctttataatataaatgcgctatctacgaagaaacataatcatcaaggatag

SEQ ID NO: 438211 - DNA, 624 bp, Serratia marcescens
atgagccagccaggaatgaataatacggaagtcggttctgtaagaatcgaacatgagtttggatactttctagatcagagtaagtatgaagcaataaagaattatgatgatgagtctattgcagtgttaaaactgtctttgattattgagaattacctttctgttttgataaataatctacggagaaaagggacagaacgtttcgtaaaggaaggcaggtacttcgctcccaaacttgatttgagtgtggtattgggactgcccgtatctttagctgatgtaatgctggaaataaatagtataagaaataagtttgctcatcatattgaacatgaaatcgatgataaggagattgaaggtttattgagaaagttaagtgaggttaagattgaggaagtcaatcacttcagttatttcaaagaggatatgattgggtttttcttcgaaagtgggattgactgtgttagctttgtaaaaaatgcattttatacaactagtaaaaaaaagatgagggtgtttaagcttgtagcggcaacctatgttcttcttaacttcgcaacattttatttaataaatgagatgagtggccgtgggattttaaaaatcacacctgttaataagtaa

SEQ ID NO: 438212 - DNA, 222 bp, Serratia marcescens
atggctgatactattgatatggcgcaagagcgccaggcattgatgctcgagaaacaaattgcgtacgccaggccggttgccactgcgccctcggcgttctgctgtgccgattgtgacgcggcgattcctgtggcgagacgcatcgcgattcccggcgtcagccgctgcgtgacctgccagcagctatcagaagccaagcaacgtcatgtcgctcgccgttaa

SEQ ID NO: 438213 - DNA, 330 bp, Serratia marcescens
atgctcaagtttttattaaccatactaacggtcttctccctcaacgcttgtgtagctgaagggcctaaaccgaagccagtatccagagttaatcctgtataccctatttatgcttatgacaataagatagagggatatgcaaaagtaaaatatgacgttgataaatatggaaaaattagtgagataagaatcattgaatcaagccctcggggtttgttcgagaatgcgcttgttatggcgatgtcaaagtggcggttcgaaaaaaataaaccatataagaacctggagattaccgttcgttttaaaatgagcagcccaatctcccaatga

SEQ ID NO: 438214 - DNA, 1281 bp, Serratia marcescens
atgaccgcagaaatagctgtttataataaaaactgtgtagccttatcagctgactcagcagtaacaatttcaggtctaggaatgcataaaatttacaatggcgctgagaaactttttgccctgactaaacaccatccagttgggctgatggtttttggtagtggtaacttgtcgtcttcaccatgggagcttgtgatcaaagagttcagaagaaaactggggaagaaatcctataaaacacttgaagagtatgcggagaaattcttcctattcgtcgaatccagtacaaatatcatcacagaaggaatgagggaagagagcacgttccggttcctatctgagaatgttttcaagagcttacttgatgcatatcagagcagcaaagacaatgaattttgggttaattttgatataaatagattttatgctgaacttgaagcacattgtcacgaactccttcaagctctgtctgaaaccgacttccttgatgatttcaatgctgatgatatagattcagcacgtgattattgcaaaaactacactgaagtcattctaaacgccgaaatacgtgatcaagacatcccaacgccagagtcattactagaagtagtaaatgagatatttgcaacaatgctatgtaaaaaaagtgacattggtaatatttcaggcttagttttagctgggtatggtgatgacgattattatcctaaagttttggcttacgatgtgtgtggcttttttaagggcaaactcagaaaagcaatgaacgaaggtaagtgttctgccaatggtattagcggcgtcactccattcgcgcaagacgatgaagttatggcattcatgcagggaggaagccaaaatctcataaatcaattacatacagagtacaaaggttgtcttgctacacttttagaacatttagatgatgtaatatcagactcagtcatagaggaaaaacaagagttagtaaaggaaaaaataatcgcacatgcaaaatcctcacttagcgagacaaatcaaaagattagcgaattcatgagggttaactacatcaataaagttgttaatatggttgaatttttgccaaaacaagatattgcttatatggctgagtctttggtaaatttaaccgccttcaaaaggaaggtatctgatgatagcgagactgttggcggccctatcgatgtagcagtgatttctaaatcagatgggttcatttgggtcaaaaggaagcactactttgacaaagagatgaactatcacttctttgctcgcccatag

SEQ ID NO: 438215 - DNA, 132 bp, Serratia marcescens
atgactatgaaacaaatgtttagcagaacacaacctaagcgcgttgatgagttctttctgaaaaaaaatgataatgaaaaaaagacacagaagaattttttctcatctctcttagagaaaaaacacatgtaa

SEQ ID NO: 438216 - DNA, 351 bp, Serratia marcescens
gtgagataccggaaagaagacaagaatggcgattacagcttcgggcgcggcgagggggatttctttattaacacgcccgaggccgtgggcatggcggtgatcagccgcctgcagctgcgaaagggtgagtggttcctcgatacaaccgccggcaccgactggacgcagatacttggcaaatacacgtcgggcctctatgacatcgtgatccgcgagcgcatcctcggcacgccgaacgtgaccgagatcgtcgagtaccagagccagcgcgatgttgatacgcgtgacctcctgatcaccgccacgctaaacaccgccttcggccaaacctcggtaacaacctatgtatga

SEQ ID NO: 438217 - DNA, 453 bp, Serratia marcescens
gtggaaaacatcgagaaactgaaaaacgagatcgtgaactgggcgacggagcaggggcaggaacacgttgccatcgagatcacccgcgcatggttccagctcggtgccgacgtcggtcgggttcggctgtatccgatcgaggatgaaaccggcgccgccgacttgcgagcgatcaacaccaaccggcaggcgattttccgccatatgcgcagcgagtcgaaagccgcgcgtgagaaggtgcaggagctggccgacgccatgctcgctgcgctgccggcggaacggcgcgcccggctggccggcccgactcaacagtatttgctttcggtggccatccgtgaatttgccgccgcgattatcgcaatcctgctcggcgcctgcgacacgccgcagcgcattgccggcgcacttgtcgccctgcaggaaacccagcgcctgaccagcgccgcgtaa

SEQ ID NO: 438218 - DNA, 453 bp, Serratia marcescens
gtggaaaacatcgagaaactgaaaaacgagatcgtgagctgggcggcggagcaggggcaggaacacgttgccatcgagatcacgcgcgcatggttcctgctcggcgccgacggtggccgggttcgtctgtatccgatcgaggatgaaaccggcgccgccgactggcgagcgatcaacaccaaccggcaggcgatatttcgccacatgcgcagcgaatcgaaagctgcgcgtgagaaggtgcgggaactggccgacgccatgctcgccgcgctgccagcggaacgtcgcgcccggttagccggcccgactcagcagtatttgctttcggtggccatccgtgaatttgccgccgcgattatcgcaattctgctcggcgcctgtgacacgccgcagcgcattgccggcgcacttgtcgccctgcaggaaacccagcgcctgaccagcgccgcgtaa

SEQ ID NO: 438219 - DNA, 219 bp, Serratia marcescens
atgcaagccaaccacatcacataccggaacggctggcgcctgaatggcatgcccgccgacgccgcagaaatcagaccgatctttgaagatcgccaggctgccgcgcatgccgtctgggaacaatacgagcagggcaaggccgcgctgcgtgaagaaaacttatcgccggagcagtaccaggacgcgtgccgccagcttgcagactcgctggggatctga

SEQ ID NO: 438220 - DNA, 243 bp, Serratia marcescens
ttgctcagcgataacttgcgcaacctgtgcggcgcgctgctggaaatcgtcggctttcagctgatgcgccagcgcttcggcacggtcggcattttcttctgcctgctgcagctgctgggatttctccgcaggtgcgtttgcgtaaacgccatagcccatctgatccagttgctgcttggcctgcgccgccgcggcgtcggtaacttgctgctgcgccacttccgttttttcaccctgatttga

SEQ ID NO: 438221 - DNA, 672 bp, Serratia marcescens
atgctatcgcgtcgtgatatattgaaagtctccgccgtcagcgcggccgccgccggcatgatcggcggcatcgtaaaaaatgccgctgccgacgatcatcgcaatatcgtcccccccagcagctatcagccgcctgccgatgcgcagcatctctataaatataaattcaccgacagcaagaagcgcagcctgcccagcggctgggcgcgcgaagccaccgtcgagcaattcccgatctccgaaggcgtggcgggcgtggacatgacgctggagccgggcggcgtgcgcgagctgcactggcacgccatcgccgccgaatgggcgtttatgctggaaggccatgcgcgcatcaccatcctcgaccccgagggcaaatgcgaagtggcggatttcggccccggcgacgtgtggtatttcccgaaaggctatggccattccattcaggcgctggcagacggcgcgcattttattctggcgttcgataacggccatttctccgagttcggcaccttcagcattaccgattgggtggcgcatatgccgaaagaggtattggaaaaagcgtcaacatgccggcggcggtattttccaaggccaaacagggcgaggcttatattgtcggcggcgccgttccgcccaccttgccattgccgaaaaacgacggcggattaa

SEQ ID NO: 438222 - DNA, 156 bp, Serratia marcescens
atgattttgttatgttataacatatcaaataagatttttttcacgatcgcgaacgacctgattaatcaagtcgcagaaaactcagcgattttgctcaatggattgggctgccggtcagagtgcgatacactaacgctattgctgattaacccatga

SEQ ID NO: 438223 - DNA, 2853 bp, Serratia marcescens
atgacagacagcgtacagactgaaacgaccgagggaaaaatcatcatcaacttgtttgcgcccaatcttccgggcagtaccaaagaagatgatctcattcagaaatctctgcgtgatcagttggtcgagagtatccggaactcggttacctctcatgacaccgataagtctgctgggctaacacggtttattgatgagtccggtcgtaatgtattttttgtggatggtactcgcggtgcgggtaaaaccacttttatcaatagcgtggtcaaatctctggacagtgagaaaggtgatgtcaatgtcagcatcaagtgtttgccgactatcgaccctaccaagttgccgcgccatgaacccattttggtcactgtgactgcccgtctgaataaaatggtgtccgacaagttaaaaggatgctggtcgtcgaatgaccataaaaaacaaaaagaacaatggcagaatcaccttgcgcagctccagcgtggtttacatctgctcacagacaacgaatataagccggaatatttcagtgatgctttgaagctggatgcccagcttgattactccattggtggccaggatttgtcagaaatctttgataagctggttgaaagtgcatgtgaaattctcggctgcaaggccattttgatctcgtttgatgatattgatactcagtttgaagcgggctgggatgtacttgaatctattcgtaagttctttaatagccagaaattgttggtggtggcgacaggtgacttgcggctatattcgcaattgattcgcggtaagcaatacgaaaattatagcaaaactttgctcgatcaggaaaaagagagcgcccgcttagccgagcggggttatatggttgaacaccttgaacagcaatatttattaaaactttttccggtacaaaagcgtattcaactgaaaactatgttgcaactggtcggcgaaaagggaaaaggcggtaaagagaatatcaaggttaaaactaagtttgacatgcaggatattgctgccatagatgtccggcaagcgattggcgatgctgttagggaaggtcttaatttgagagagggctctgatgcagacatgtatgtgaatgaattgctgaagcagccagtgcggttgttgatgcaggtgcttcaggatttctacaccaaaaaatatcatgctacatcggtaaaacatgatggtaaacaaggcagcaatgaaagatctgatgagttatcagttccgaatttacttagaaatgccttatatggatcgatgctaagcagcatttatcgagctgggttaaattatgaacaacatcgatttggtatggattcgctctgtaaggatatatttacctatgtaaagcaggatcgtgattttaataccggattttatttgcggcctcagtctgaaagtgaagcattaagaaattgctctatttacttggcctctcaggtaagtgaaaactgtcagggtagtctgtcaaagtttttacagatgcttttagttggttgtggttccgtcagcatattcaatcaatttgtgaccgagttagcactggctgaaaatgatagagaaaaattcgaccagatcgttagtgaatatgtagcttatatgtctgttggcagaattgaaagcgcctcacattgggctaaccgatgttgtgcggtggttgcaaacaaccctaatgatgaaaaggttggcgtttttcttggcatggtgcagttaaatcgtaaatcacgccaaaagatgcccgagggttacaaaaaatttaacattgatactgagaatggcttggcaaaagccgcaatggcggcttccttgagtacggtagcttcaaataaccttatggatttcagtagtgtttttaatctgattggtgctattgcagatatctctgcatgtcgtcgtgaaagacctgccattactaatgcttttaataaagttgtagctcagacaacatgtattgttcccccatggagcgaggctgctgctcgtgcagaaatgaaaggctcaagtaaaagggcggataaagatgctgctgttttggatgttgaccttgatcccatggatgataacgtaactgatgacagtcaacagaatgacaatcagcagggtggcacaacggaattttctgatgccattactaaagttgagcaatggcttaataaagtaaacgaaattgagattcaaattcgtccgtcggcacttttgattggtaaagtatggactcggttctatttcaaccttaataatgtggctgatcagcataaaaccaggctctataaagatgcagagcatggaataatggccagtcaatcaaatgctgcgaaaattatgcgttttaatgttttggcttttcttcatgcggtattggttgaagaggacttatatcattcagttagtaatagggagtatatcggtgaagggttaaaactaaatccagtcacttcggttgatgagtttgagaaaaagataaatgtaatgaataaaaaattgaaagtggataagaaaaaatggaaagatacccatccattgtttttcttattaattagctgtccaattctacatccgttcatttttcctgtagggggagttaattgttcagccaaagcactgagcaaggaagtaagtttccttaaactgattcgtgagattgttggcggcaaattactttccgaagaagaatgggagtatttatctgaaaatgataatcgaaaaagaagcattaaacaacaggcgtctaaaaacactataacatcgctgaattcctccacaatcgttggagcatcatacgataaggctacaccagctaggaaaactaagttgccttcaataagtgacaacatataa

SEQ ID NO: 438224 - DNA, 2400 bp, Serratia marcescens
atggaaaggtttcttcttaactcggcattgctgttggatcggctgagcaccgtctcgttgaatgagatatcacttgatgacagggtggagtcatccgtgttccttactcaatacgaacaaacgcgtagtttgcctgatcatgtagccaagtcggcttggtcatccctggaacagcgactcaaacagcgaaatatgaaacttggtccagtagcggccttgcgcctaatcgctgaaaaatttgttaaaaacgagaaagacggccctagaaccgatcttgctttgttctcggaatggcaaacgctgatgagccgagtgtcgtgcctgccaattatggcgtgtcatcaggtctttaactctgggcctgccagtcaagaatatagttttcgctggcctttatacccatatcacccgacggttgaggactacattacccgtgaacgcctacacgaaacccaccaacatctgaatggcagtaccagtgcggaagagtgttggctggatgcactcaagcacccagaagtgagcgtcagagattttgataagggctgggcatctcaagagatgaaacaactctgcgcccagattgacccttctctgacgcctgaaattttcaaggatcgtttgcaaatcgccagtaatattcgcgaaattctttgtcgggtcgctcagggcgtcgagttaccagagtggatagcatcaatgcagaatccgcagcagctggcggatagcacaattctgcattatgaccaggagtatgggtttgcgacggtttggccaactgacgacaaatacagtcaagagtctgaattttgctggctaaccgcgttgttggaaaaatggcggtatggtgcgcccgaagggttggaacgactgctttggatttaccttctgattcaaaatcagtacctgaccttactggttcagcgagacgattttttcggttttgatcagttccagaattacaccatgacagagctgagggaggaaaccgagaaatcttatttgtctcgttttaaacatgcccatggtgctggtgtgtattctcaggtgcgttatctggaaggacgttttgctccgaagagcgaccctagcaaaatgcaaaaactgctcttcagtgtgttaagagggtattgggaatacctaagtgctcatatgtctctggaatgggtgcatgataagccgctgaatatgtcgcaagtgctcgataatctcgaactggttgaacctcatggcaagtgtgcaaagctggcgctagtgccgcactttatcaaaagaaggcaaaaaaatggtgaggtctatccttacgcattactattcaaggacctgaaaaatcaggctgctattctgatggacatgctgaagtatgaaccccgcctgacaagctggattcgaggagtggatgccgcagctaatgagatgtacgcgccaccggagttgtttggtcccttgttccgggtgctagccaaatcaggtattgctcattttacctatcatgttggcgaggactttccgcatcttatcagtggtattcgatccattgatgatgccttaaggtttttgccattgcgtaatggcgaccgtcttggtcactgcacggcgattggcatcacacctgacatctggaaacgctctttgccattatctttgtccatgaccaaagagacgcgattgctcgatttggtatttatttggcgggaacttcgaagtcacccggaactgctgcgttacgccagtgatgcagcgattgaagctgttcgtttggcccataaggtgttttcgctagaagaagaagtctcgattaccacccttgatcaggtatttgaaatgcgggggggattggcggaatcggaaggcctactgggtgagctagatgggccattaaaacccaaatccctctggttggaagagtacgagagcaccagagagttggctaaaatggcgggcatgaaaaggccgctgaagttgtataagcaatggcttacatctgacaatgtacgaaagcagcgtgctgaatatgttgaagttgccctggaatatttgccggatgaagcggttgttgcattacaacaagctgtaatggccaaaatggcagaccgaaacattgcaatagaatgccctccgaccagcaatacccgtatcagtcagtatcgagatgtcagcgagcatcatatctttcgctggatgggcttgccgggtgaggcgattgaaggtgatgttcctatgtctatttgtcttggatctgatgatccgggggtcttcgctgcggatttgaaatccgagttctatcatctgttcgttgtgttaacccgtaagttcggtttgtcgccagcggaggctttgagaaaggttgcggaggtgaatgagaatgggcggatttatcgttttcacgatgtcaggtaa

SEQ ID NO: 438225 - DNA, 1692 bp, Serratia marcescens
atgcgaataaaaaaggtcattattaataactatcggagctttcgttattttgaagccgagctacaaaacctgactgttgttattggtgaaaatgatactggtaaaacgaatttctttactgcactttcgttaccattgagtggcaaccaaatagatttcaaccagaagcgtttgggtatttctgatatcaataaagatgctgttattgatttcttgacatcagtaattaaaaacgatgcagatctgcttcataagatcccaaaagtgtcagtgactatagagttttcagatccaaaagatagctatgaaaccgcattgcttgctaagtggctagtttctgaaggtactgaagaaacctataaaatcagatatgacttcaaacccaaaaacgacaacgacttgcttgaggtcgtgaaaaaaactcttaatggtaaaactatcgatgacattagctggttcactctaccagtcgaactatatgactaccaaattgtgtctgtgaataacgaaaaacctatttcatatagtgacctaaaaaatgtcagtattcatagtattaatgctgagcgagacgatttctccgagagtagttcaatgaagtctaatagcatttttacaaagctacttatgaacactctagacgatgatgataaaagccaaatcaacgctgcatactccgaattctttaatgctattgaggaaacagaaacattcgaaaaaatcatcggaaccaatccagactttgacaactacggtagtattataaaacagctagaatgtactcctaacctgcctaacttaaagaatatcttgtccaatatcactcttaagtacggtaatgaattcctttatcaaaaaggtttgggacaaagaaatcttatctatatactgatcctttttgcttactacaaatcttgcagcgatacttttaacttatgttgtatagaggaaccggaagcacatctgagtgtaaacaatcttcgtttgattagagactttattgagaaaagtgcaattaacagtggctcgttagtacaaaccattatttcgactcataatccgtcaataatcaacaagctcaagatatctaatgtgctggctttcactggtgataaagcaattagtttatccgatactcccactcagttagtagattatctaagaaagagaccaaatttcgatatccttaagcttttgttcgccaataaagtcattcttgttgaggggccaacagaagaaatgttgattagtacttatctttctaaacaaacaaccctgaatgacattgatattattgctgttggccagcgcggttacgctatattcttagatatatggcttatgctaaataaagataacccaaacaaaaaaatcggtattattcgtgattttgacaattcagagccagcaaaagcaaggcatgacgcttacgatgcagaacatggaaatgtcacagtaagaacaacaacgaattacacacttgagattgacttagtagaagcggggaataatttggctttactaaatggtttgttcgatatgacgggagacgtagaagcagtatctggtcatatgatcaatggaaaaacagcaagaatgttggatgtgtgtgatgcgatggtggacgaggacaacccactggacatcaagttgccagctcacatcgctgaggttattgaggctttatcatga

SEQ ID NO: 438226 - DNA, 1377 bp, Serratia marcescens
atgattgaagtacagattgctggagctggcgcggggaaaacatatgggttggctgcgaccttgataactcacatcaaggcttgcactaatcataaaaagacgtttgctttgacttacacaaactcagcgacagcaaagattgaaaaagagataatcaaacaacatggatttatcccgtcaaatctatgcatacagacagtacatagcttcttattgaacgaaattatctacccattttcttcattttctctcggtgatgtttataatgatacttccattatgatattgccaagtgaccctagatataaaaataatgtttttgcacgattgaaaaatagaaatgttattcacgcagaaaaagtctacaatatcgctaaacaagtcgttgatgaaaaagtaagtaagcacaacacgatagctaagaaggctaaagtccaacgactcttagctattcttgagagctgctttgacaagatattcattgacgaagttcaagacttagacagcgatgcgttgagagtatttgaggtgttaggtagtaatggtattggcgtatatatgattggggatcctaagcaagctatcaaatatccaaaagcacttgatgatttcgttaaaatggtatcaaaaagagaatatgcaaaaatattagaaatcaataatcaaactagacgagtgccaaaggaaattctagtgctatcgaatagcttctgctatgagaaccagcagcaagaatcattgtctgaaattgttggtgagttaatgtacattgaatcagttgaggctcggtacgacgttctaataaatgactacatagaaacgaaacagattgtttgtatcgacaagaaagctgggcgctattcaacatcatccagacataagtattcatttcctagagagatagaggatatgattcgcgaatcaaaccacaagaaagacaaggagttatttgttaaggctgcttttactgagtttatagatgatattgctagaactaatgaaaaaagagcaattggcagactaatagataggcattcactgatgctagagaaaaatcattttgctcaactatatgaactgtgcggaaagtttaaagaagataaggtgcagtttattgtcaaaagcattgattcagttaaaggactggatgctgatacgtgtgtgttcatactaagcactaatacactgaaatatttgactaaaaatggtatagccgcaactagccatttcaacaaagagtggaagaaaatttatgttgctctgactcgagctaagcaacggcttgttttggctttagatcatgatctattgaatggtgcggatatggcagcggttagagattctatcagagcattgggattcgtcaatcacgattga

SEQ ID NO: 438227 - DNA, 1170 bp, Serratia marcescens
atggctcgcgagcttgacgtaactgctatacctgcgggctggaagtatgatctgctcgataagtttgcagagagatgcagtggtcatacaccgagcaagagccatcccgagtattggaatggggggattaaatggatttcactgacagatagctatcgtttagacaaaggctatgtatatgcgaccgataaggaaatctcacaaaaaggtattaataatagctcagcagaactacatcctgctgagacagtagtgttatctcgcgatgcagggattgggaagagcggagtgatggctgaggccatggctgtaagccagcactttatcgcttggaagtgtgacaataaggaaaaattgaacagttggttcttgtataattggcttcaattgaataaggctgagtttgaacgacaagctgtcggatcaacaattaagactattgggttaccttattttaagaagctgaagattgcagttccgccatattcagagcaaaaaaaaatcgccaaaatcctttctacctgggataaggcgattgcagccactgagaaactgcttatcaatagccagaagcagaaaaaagcattgatgcaaaaattgcttacaggcaagaagcgttttatggggtttagtggggagtggaaaccggctcaattacgtaatatagcgaaagtagttaaagggaaagcattaagcagcaaagatttgattgagggtgaagtgcctgttatagcgggtggaaaaagtagtccttacaagcactgtcatttcactcatgaaaatgtggtaacagtaagcgctagcgggtcatatgcaggttatgttgcctaccatcctcataaaatctgggcttctgactgttctgttgttgttgcaaaagaggactcttctattgggtatatattccagttacttgtatttatgcaagaaaaaatttattcattgcaaagtggtggtgcgcaacctcatatttacccaaaagatattgaaagcttacacgttttaattcctcctaaaagggagcaagagaagctctctattgttttgacaatttgtgacaatgaaatagaaactttaaaacaacaactcaatcacctaaaacaagaaaagaaagccctgatgcaacaactgctcaccggtaaacgtcgggtgcaaacggaggcggcatga

SEQ ID NO: 438228 - DNA, 582 bp, Serratia marcescens
atgccagcaacgttaatagagttaggtgatattgctacaatccggtctggctatacctttcgaggggcaatcgagccagtatctgacggggatgtacgcatattacaaattaaggatcttgagcaggattggcagggagatcatgaggctttaccggcgataagctgggagcagcgtgttgcaccacctttcctcagacaaggcgaaatcgtcgttgccgctagaggtaaccggaacgtcgcggttgtctatcgtagtgagatccctgtggtagctaccagccagtttctaattgtcactcttcgaagaaaagagtgtgagatcgctccagaatatctgtgctgggtacttaaccatcccgtgacacaacaaatgtttaatcgcagtggtacaaacattcagctcattactaaagcagcattgctggatgtggagattcctgttccatctgcaggtactcagcgacaacttattgagctccaacgagtctggcaggaagaagataaaattatcagtaagttacaaaaaaatcgccaccagcttgagcttggtattttgcaaaaattacttaaggataaatag

SEQ ID NO: 438229 - DNA, 186 bp, Serratia marcescens
ttgtatagcgtgaaacagcaagtggcgccggtggacgattttatgcggctgcggcaggttgccggcctgtctgcgcggccgcgtgcgggcgccgaacgtgcgttgcccaacagcctgtacggcgtgcaaatcacgttgtcggggctggtgtcggcatggggcgtgtggtgggggatggcgggctga

SEQ ID NO: 438230 - DNA, 849 bp, Serratia marcescens
atggattatcaaactattagcaggatatttagtcggccggtcgtcttggagcttgctcagaagaatagggctgatttatttaaagaaattttaatgggaagttatccagctagtatgttggaagataagcctatattctttatctatgatgaaatttatcggctgttgcaaaaaaaatatcgaaatgagtatgtttataaaaatgaaattgcaaagaaaataattaaaggttgtcataggtataataatgttagttatgtaaatgagttcaaggtaaatggttgcattgcagatgttgcaatttttaatggaacgtcaactgcatatgaaataaaaacagaattagattcttttgaccgtcttcaagaacagttaagtgtatataaagaagtttttgaattcgtgcatctggttattccagctcataaacttactcaggcattagacttggttgatgaaaatacgggggttataatattaaaggaaaataacgttttaaaatatgaaagacttgccaagtcaaatatggatgttctatctaaagataaaatatttaattgttttaggcctacagagtatatatcactgcatgaagatataactggaagtaagcctttagggcgtgcagctgatgttaagcatgaatgtaggcgtgttttccttgatctgaacactgagcatgcacatgctgaaatgttaaagatcttgagaaagagatctctcgaaaatttcgaaaaagaaaacttccgagctttgcctcagtcgcttttggctacccttttaaatttgaggttaaaccataagtctttgattagtttgagagagaatataagagaaacaatatgctaa

SEQ ID NO: 438231 - DNA, 948 bp, Serratia marcescens
atgtatcattgttatctaagaggaaagcaatatgagttgctagcagttagagcaagtctttcaaagatggtccaaaaagatatggttgcgattatagagccagtaagggaaagtactcgtgacctatatagttgccttagagatgtccataaggaacgtgcgagagtaattttaataataaatcctaaatgtggagagcttgaaaataatcatagagccttggatgaattactccaaggagctatcgaaatagctccagatatagagcttggttttattgttgatgataaaacaagttcgacggatttagctggtttctttagttcctacccgcaaaactttaaatccataattcattatggaagttattctaatgcttctcatttgttgagtattcaattaagtgagccattgttccgctctaatatatttattgatggaaaatgtggtggtcattatatttctgcatttaactcgacaaacaaggttttgattatcgacgggttgaatagggcgtcaacaaatgcagggtatgcgaataatattgttgagtttttttctgatttacacacaaattatattgctaatggttttcaagggttcggtgatttttctatcgtgggtgatcattttgctgaaggaggtgggcaggccgtcaccgctgctatacatatcacatacgataatttgaatgtgccggaaatattaatccaccactttttatctgatccaagaattggatatgaagatgttgcaattctaatcgatgaagcgctggaaaaattagatgattttgtcaaaaatactaggcctgatatactggcatggtcaactgcttgtagtgaactaatttccatatacaatactcctggaaatagtacgaatcttgcctatattaaaaaaatgtctataaaacatcactttgaactaatgaattatttgctgtaa

SEQ ID NO: 438232 - DNA, 336 bp, Serratia marcescens
atgaatacctcatcctgtttaccgattgaagtccgtaccgccgttttccgccgcgccgtggcgcaagcctatctggatacctgcgccttttaccgggtgagcctcgggtacacgctggacgagctgcagatgacgattgccctgcgcctggaaggacactttgtgcgtcagtacggcgcagaggacggcatggacatggcgtgcaccatgctgagtgatatggtgcagccggacgttctggtggccgcgccgcgcctgaccgcgctggggcaaaagatgatggacgagctgtgctgcgagcgcttgtctgcggcacagcacgccaccgtacactga

SEQ ID NO: 438233 - DNA, 795 bp, Serratia marcescens
atgtcgctagaacgtcaaaccaactttgagccggataatgcccgcgcgccaattgtgggcgtagtcgaacagtggccatccatcagtcaacgcgatatgcattcacatcaccgtgatcaacttatgtatgcaacccgaggagcgatgcatgtgatcactgaaactgcacgctgggtactcccgccaacccgtgctatctggatcagtagaaacacggcacacgccttcgaaaccaaacgccctgtcgatgtgacgattttgtatgtcgatccgtacgcgccaggctcgccacgatgggaggaatgcaccgtcatcaatgtttctctcttggtgcgagagttactgtcagcttgtgctgctttttcatgggactatcgtcctaattcaagagcgggacgattggcgcgcgtgctgcttgaacaacttcaggtattgccacaagccccactgaagctgcccgatcccaaagatcctcgtgctagccgtttggcgcaatggtttagaaagcaccccgggatccgcatccccttgtctgaacttgcgcctaaattcggtggaagtgttaaaacccttgagcgcgccttcgttgctgatacgggtatgtctttcggagaatggaggctgagattgcgtatgatgacggcgctggagcacctggcctatggagaaagtgttgagaacgtagcccatcacgttggttacgagtcatcttcaagttttatcgttgcgtttcgtaacacgtttgggacgaccccttcacgctactttaatgttcaagtggataaaattaactga

SEQ ID NO: 438234 - DNA, 1215 bp, Serratia marcescens
atgcaaaaaagcaccccttttgaaactgcgcagagcaaggttgtcaatggtatcagtccaggtctggtacgggcgagtcgggcaaccaaattagtctttttcagtgcgggttttgggctggcttgttgggctccgatggttccttatgtcaaagctcgacttggggcgacgcatgcggaactgggtacagtactgttgttccttggtctggggagcgtcttcggtatgcccacggctggggcattggttggccgatttggcagtaaaatcgttatcatgttgggcgggctggggctgttgttcgtcttgccaatgatggccttagcctcaaacagcattgcgttgggagccgcattatcgctttttggcctgtgtctaggggcggttgacgttgccgtcaatattcatggcacagaagttcaaaaccgggttggtaaaccattgatgtcgggtttccatgggttatatagcgtgggtgggttggtgggggccgctgcgatgacttttggcctgtcattcggtgtgaatattgtcatcagcgcattcctggccagcgtgattatttttgtgtgtattgccagcgcagttttgtggttgctgcctgcacgggctaccgaaccgggtaaacgttcggttttcgtcatgccgcacggtatcgttatcgtgttgggtatcatggcgttactcatctttcttgttgaaggggcggttttggattggggcgcggtattactcagcgagtacagaaatgtacctgtcgggcaagcgggcgcgggttacgttgtttttgccttaacgatgacccttgcccgtttggtgggtgatcgcttcgtgcagaggattggaaacagaatgacgctgctgatgggggctttattgatgcttgttggccttgggatctctgcattgggggagaatatcaccttgatactgtttgggtttggcatggcaggttttggtgcggccaatattgtaccggtgctttttagtcttgcaggaactcaaacgatgatgccttccagccatgcaatcgcgttaacgagtacgttcggatacctcggcgtattccttggtcccgtcatcgttgggtatgtggctgcgtttgctggattgccgttggcatttggtgcgttggcggcgttaatggctatggtggcggtgctttcgggaattgttactcaatatgtgcaatatactatttcttctgatgtttaa

SEQ ID NO: 438235 - DNA, 450 bp, Serratia marcescens
gtgtcttacagtacatacggggtgctgcccatctatgacaagcgggtcaccctctgggtagtacgccgccggtacacctgccaggcctgccagaccaccttcaggccccagttaccggtgacgatggaaggcttcagcatgaccctgcggctgcatgagtacgtggagaaagaatccttcaaccatccctatacttttgtggcagtcctgaccggtttcgacgaaaagacggtacgcgaaatctttaatgcccgcgccgagttcctagggtgctggcaccgcttcgagacgccccgtattctggggatcgaagagctgtacttaaacaagcactaccgctgcatcctatccagcatcgaggagaagaacctgctcgacctgctggccagccgccatcaggacgtggtgaccaacgacctgatgaagatgaacgaccggtatcacctttaa

SEQ ID NO: 438236 - DNA, 1284 bp, Serratia marcescens
atgtcagataaacgtgttcctaaatcgcctgctgaatatcttattgatcatattgaaaaaaatcggccagtagcaaaattattgggagtattcgataagaatgctaaagcgcagtttcaggaggtagaaagacaattagaaatcataaaaaacatgatgatcaatagggatctgtttgcacaaatttatagtccgcttggatgggtaaattatgatcgtttctcgacagatattgtcgcaaaagttctcgatatgaaccttgaggatggggaaatcgaactgacaagctatcacctaaatccagataacttgcgttttttgggttaccggttttgtacgcgtcattttaatccgtgggaagcaatgtatgaacgggctgtagagcgagcgggagcagaggattatttgtcggctatcccacttgtgttaagcattattgatgggatatgcaccacatcaacgggtaaacatccgttttctggtggtgctgatacacctgtttttgatagccaaacatcaggccctggaggtctatctgaagggcttgcaattcttggttcgactcgacgaaaactggatacggaacttatctgtatgccattccggcatggtattgtgcatggattaaaccctaactacggcagttccatagtagcagggaaggcatttaatctcttatgggcgacggttgattattttgatcggcgtcgtgatgaagcacaaagattagaaaaagctaccgaggaacaaaaacctgttgatctgcgtgagcttgggaaaagcatgcaacgaaatgcagaaattaaggacgcattaaataggtggaaagcccggcctgtcgtttcgaatattatctcggccacgtccgatgatattgcgaacctgccatcaggtagtccagaggcttttgccgctgaatatctttcatggctgatgacgaagaattatggtgaattagccaagggtacagtcgattaccccaatcgtcctattggttttcgtgctggtcgattacgcaatgaattgaaaggtatttcgttaatacattggtccattactggtattgaagatacttcatccgctatcagccaggtgactgtaaagttggaaggagcaatagacgagcaagtgtgtaataccgagtgtttaatgaggcttatgttcgctgacgaaagctatgagcttgttcctcgtgggctatccggtggtgtttggtctgtgatgccgaatttcttgtctgaactttggttattgtctataagaatgaaacaaaataaaacttaa

SEQ ID NO: 438237 - DNA, 393 bp, Serratia marcescens
atgttggcggaaacgaagctcaaggcgttaaagctcaaagacaaactctacaaggtagctgaccgtgatggcttgtatgtcactgtcgctaaatctggcctgatcacctttcgttttgactaccagatcaacggccgccgtgaaacgcttacgatcggcaagtatcctatcgtttcgttggcgttggcgcgtgagaagttgctggatgcgaacaaactctgcgccagctcttacgccacagcgctttccggcgcgacctgtcatctgacgcacattttctgcgtcaattctcatcaacccacttatcagaggagaactgaaccgatacctgaggcaggctttcagcctgaggggattaccctgctgatgcaggcggttgcaccgagtgcataa

SEQ ID NO: 438238 - DNA, 195 bp, Serratia marcescens
atgaacctggtcgtgaagctcgcggttaacattaagggcgaattttcgccctttttacatcatcacggtttgtctaaccccggtaattgcaacaaaaaaccgccgtcgcaggttctggtagctcttaccgatagcctaggcgatctggtggtgtcgtgggtcattcaaccccaagaatgcgctactttctggtag

SEQ ID NO: 438239 - DNA, 135 bp, Serratia marcescens
atggacaagtttacgatgtttgggtttacggctttgggggggcagcatcaagagagcttggtgaaaatctaccttgctccaattttttcccagcaaaccattggcaaacaatttcatctgttgatgaagttctaa

SEQ ID NO: 438240 - DNA, 267 bp, Serratia marcescens
atgatttcaggactgcattatttcgactcatggttaaatcgcagcacgtggtatgcttcacatgacacagaaactacgatgttctaccaagcattaaaaaaagtcattgctgaaaatcctggggttttgattcatgagcactatgttagggattacattttaacccaaaaaaacactacactcgccaactcaactcttattactacggctgaaaaatacggaaagttagcagaggatatttcagaatacatactgaaaacgaagtaa

SEQ ID NO: 438241 - DNA, 651 bp, Serratia marcescens
atgaagtcgagagatttaaaaacaattcacgacctgattgttacgaactaccagaaacatgatttaggtaatggtcgttatctacacacattccagccagcaacaacagatacaacctatcaattcgaagctaactttgaaaacgagctagtccctggagaaagatacaacataggatttaccgaagcaggtggagttaaaatggtagatatatcttgtgtatcgaagtcctctgtagttaatcaatatattagctacgaatgtgcaaaattagtttcaagagaaaaacatgatgaaaacaaaggcaagaatgattcaagagtaaattacgctgtgcaaaatgattactattgggggagaaaatatgcatggcgcgagtttggattagtcatccccaaagatgtattttacaaatacttattagattgtgttaatcaccctaatataccgtgtacagttacaacgcccggttatccaataggtgatgactcgatagcatttgcggataaagggctcgaaaaagcaatcggggatctaataagtacagcaacaagaattaaagatggtccttatttcaaatcccctctatatttcaatggtgataagaggttcacaataagggggatcagcgcaataacagacaaaaaataa

SEQ ID NO: 438242 - DNA, 633 bp, Serratia marcescens
atgttaagaaacatgactgacttagaacaaataaccgcactattgttagtcgaagccggtgagtgtgcacgctgggaatactctgcttcacttcattgccctaaaggtccgctactcgaattcagtacagaaaaactagagaaccgagcaaatccctcttcagcattgctggactcaatcagtaattggcctaactttgttttgcatcataaccacctgagcggggagtccttgagcttcgctgattggcgaggagcatccgtttacttcaatgagatatacgcacactgcaatgatggaacctcgtattatggtagagtgttaaataaagagaaagtgttgtcagtaatacaaaataaaaaagacttcatagagatgcatgctgagaaccatctctttaattatacaaacaacattcaacttgatgctttttttagaaaagaagtaatttgtagggctttgaaaatcagagggtacgtagagtatgggtatttatggggggcgaaacaggttaaccatcaagctattttgacaatgaatatccctggtatccaaagcatagggcaattgggaactgcctatgagcgatggattcaatctgcagcccttgatttatcaaaagataactggtga

SEQ ID NO: 438243 - DNA, 198 bp, Serratia marcescens
atggttgtcccttataagcgagtagcggaagttcgcatctgcttactgcaatattattcacatcgcaatgtcatcaatgcgaaaaatatcaatggttatagtataataactaatgcatcatatatggataaattttatactaaactgaccataaaccttttcacctttaaaaaacttaacatgttgcaagtgagataa

SEQ ID NO: 438244 - DNA, 828 bp, Serratia marcescens
atggttaatgtaaataagtacaataatgaagatagaatcaagttgattttgaaaggagtggaaaatggcgattatcctgaaactctatttaagtatagagagatagaaagagcaatgcagattctgaaggattgcacatttaggttttccagtcctgcaagatttaatgatccttttgattgttcacttgacgaagttcttaaatatgatcgcaatgaaataagtaattggctagatgttatgttttcttcagaatcatccttaaataattcagaaaaactcaaagggattaataaaaatgatgtaatagacgctcttttgaatgacgaagataatcttgtgtctattgtgaatgaatataaaaacaaggctataaactcaagaggtgttctttccctatcaaagaaagtaaatgaaatccttctttggtcgcattatgcagggaaccaatcaggcgttgcaatagaacttgaactgaagaaagatccatcattctttctcatgccaagaaatatgaattatgttgattcatacaaccctacaaactacatcaatgatagtttagaaaccattaatcaaattttaagtactaagtttagtcattggaagtatgaggatgaagttagaatatataaagttgattcagcagataaagatgtaaaaataaacccggaagctattaaggcgatttattttggtgtcagaactgaagataaagatatacaaagcataaagaaattatgtcaattatctcacttgcaacatgttaagttttttaaaggtgaaaaggtttatggtcagtttagtataaaatttatccatatatga

SEQ ID NO: 438245 - DNA, 132 bp, Serratia marcescens
atgtttttcagaattcccctaacgttcacgttcttctcttaccatcgcaaggaaaaagcctttttaatgaacaacaacatcaaagttaaacaacaggtctggcgttatcccaccagcattacgtattcttag

SEQ ID NO: 438246 - DNA, 648 bp, Serratia marcescens
atgttgctgctgtcgggtgcggggggcgctatagctgccgacgaaccttatctgcagctggatacacgcatggtcgaggtgccttaccagtggcagttgccagacggcgaagttctccgcaagggggtgagcgatcaggctgcacgggttgcggtggttcagcgcaaaggtcatgaggattacgtgctggagacgatctgggaccgtttctcggtgagggtgccagcgcgttgttggaagttgcaggtggcgcagttcgaaagctgcgtgtacatcggcccgcgagagaactcgacacggcagagtgaggtggagcagtcgatcgaccaagagatctccgtacgccagcagaaccgtgagaggcgagtgacctgggcgagcgaacagatcggtctcgaacaagtgccacgtatcctcgaagcagcgtttgccaggcatgagcgttggctggccttgagctcaggtcatgcagactcggccgcatttctctgcggccggctcaaaggcgctttggccgctgtgccctcgcaaagcaccttgccgcgtcgggatatgatggctggtcggccagaagcggttgcggcatatgttcaagcagctcgggggggggtaactggcgcgctgctgccgggttgttcgacgcgatga

SEQ ID NO: 438247 - DNA, 129 bp, Serratia marcescens
atggagcgaaattacgtggacttcatgcccatgtccgatgcctacacggccattggcaatctggccatcgtcttcgagcattacagcgaacactatacgcacagtgcattgaggtattgctcgccgtaa

SEQ ID NO: 438248 - DNA, 411 bp, Serratia marcescens
gtgatcgcatttttcgatgccaacgcgctgatctatctgctcgagggcaaggagcctttcgcgagccgggttcgggctgaactggcgacggtgtaccgtgctcatcccgatgttggctctgcagtgaaccggctttcttggctggagtgtcgtgtaggtccaatgaaagcaaacgatgcggcgatcctgaacctgtacgacactttctttgcctggccagatcttgtctggctggagttgaatcgcgatgtggtcgaactggcggccgctattcgtgtgcggcacgggctgcgcacacccgatgcgttacaggcggcatgttgtcttcaactggggcctcggcatgtttttttgaccggggattccatgttccaacgtgttcaaggcctgaacgtggtgttgctcacttaa

SEQ ID NO: 438249 - DNA, 267 bp, Serratia marcescens
atgaacaacacccttaccgttgccgagctcaagcggcgaggccttgctgctatcgaggaaggtttgcagcacgggccgatccatatcctgaaacgcaaccggccagccgctgtagtgctgtcggaggaggagtaccagcgccttaccagcgggcgctcgccgatctcgggtttgacggccatgcaatggctgctgtcccaaaagggtacaggtacgcgggacaaggctgaaattgacgctgcttcggcagaggagcgcaactggtga

SEQ ID NO: 438250 - DNA, 1413 bp, Serratia marcescens
atgaactttcgttcctcgcagtgcatgctcacaggccttgccttggccctgctgccaggcctgtgggccggcgcagtgcccaagcctggcaccgcacaggtgcagcaggccctgcagggccttgccacccccttcgaggccaacaatggccagttcgataagcgcgtggccttcatgggccgcaccttcgcaggcccggtgtacgttactcgcactggccgcatcgtctacagcatgcccggctggagcctgagcgaaaccctggtggacgctcgggcgctgaacccctacggtggcgagcaggctgccacgcaggtcagccgcttcaccggccccaagagctaccaggccgccacctaccgcaacgtgatgctgggccaggcgtggccgggcatcgaggtggaactggcagcccgtggcagcaacgtagaaaaactcttccatgtgaagcctcatgcggatgtggatcgtatccaggtcaggctcgctggtgccgaatcgctgcgtctgggcgaagccggcgagttgatcgccactaccggccatggcgacatcgcctacacagcaccggtggccttccagatggtgggaggcaagcaccttgacgtgccggtgaaatacgtgctcaacgaggcgggcgacggcgacggctttgagctaggcatgtacgaccgcacgcggccgctggtgatcgatccgctgctgcagagtacgtacctgggcggtacaggcactgatgccgtccatgccattgccatcgatgcagcctcaggtgacgtgctggtggggggagagactcagtctgctagcttcccgggtgttgaaggtggtgcccagcccgcctttggcggctatagagatgcttttgtggcacgcctgtcgggcgatctgacgactctgcggcaagccagctatctgggaggagatggctatgactatattcaggcccttgccattgatgcagacacgggcgatgttgtggtgggaggattcacaaactccaccaatttccctgcatcggcgggtggcgcgcaggccagaggaggcgggggcgatgacggtttcgttgcgcgcatgtcaggtgatctgaaagtgttgcaacagagcagctatctgggcggaattgagctggaccgggtctatgccgttgctatcgatgccgctacgggcgacgtgctggtgggcggggcttccggctccgccaacttccctggcgttcaaggcggtgcacagtccattcatggaggaggcgacgatgcctttgtggcgcgtatgtccggcgacctcaaaatactgcggcagagcagctacttgggcgggaatggtagcgaccagatctacgctcttgccattgatgctgctacaggtgatgttcttgcggctgggcaggcagcggcttccccggcacgatag

SEQ ID NO: 438251 - DNA, 1593 bp, Serratia marcescens
atgaacattcgttctctgcgcatgcctttcaggtatgcgccggcaagcctttttgtcattgcactcagcctgttatccggcgcccatgccgccgatcagcagccgaaggcaaaacctgataccgcccaggtccaacatgccctgcagggtcttgccatccccttcgaggccaacaatggccagttcgacgagcgcgtggccttcgtgggccgcaccttcgcggggccggtattcgtcacccgtgaggggcagattgtctacagcttgcctgctacggaaacaaaagaaggccggcaagcctggatcctcaccgaacccctggtggatgccagggcgctgaacccctacggcggcgagcaggctgccacgcaggtcagccgcttcaccggccccaagagctaccaggccgccacctaccgcaacgtgatgttgggccaggcatggccgggcatcgaggtggagttggccgcgcgcggcagcaacgtagaaaaactcttccatgtgaagccccatgccgatgtggatcgcatccaggtcaggctcgctggcgccgaatcattgcgcctgggcgaagccggcgagttgatcgccactaccggccatggcgacatcgcctacacagcaccggtggccttccagcaggtcggtggcaagcgcctcgacgtaccggtgaagtacgtgctcaacgaggcaggcgatggctacggctttgcgctgggcatgtacgaccgcacgcggccgctggtgatcgatccgctgctgcagagtacatacctgggtgggggcgagggggaggacgttatcaatgccatggccatcgacgccaggacgggcgatgtgctggtggctggctatacgagctcaggtgactttcctgggacggccggcggggcgcaggcgcagaccatgggcggcgcctacagcggctttgtggcacggctgtcgggcgacctcaagacactgcaccaaagctctgccctggggggaagcggggccgatcgtatcaatgccatggccatagacgctgccacgggtgatgtggtgctggcgggccgtacaagttccaacgactttccgggcacggcgggcggagcccagccagcctacgctggagggatggggttgatggcagaaggcgatggtttcattgcgcgcctgacgggcgacctcaaggctgtctcgccgcaggccgtcacctttccgctgcagaccggccgcgacttcgtggcgggtggcactttcgccatcgacccggcagccacggccagctcgggcctgccggtgagctataccagcagcacgccgggcgtgtgcacggttgcgggcagcgtggtcaccatggtcagtgccggcacttgcacagtggtggccagccagggcggcaatgcgcagtgggagcctgctgccgatgtggcggccaacatcgtgctggcgccaggtaatggcaacggtggtggcaacggtaatggtggtggcaccggcccggcgaatgccacccccgtgcccgcgctgggtcccttcggcctggcgctgatgagcctgttggcgggtggcctgggcctgggccgactgcgccagcgtgcatctgcatag

SEQ ID NO: 438252 - DNA, 786 bp, Serratia marcescens
atgacgaaacccgcctttcaagtcctttccagccgtctgtgcgacattgagatcgtcatggcagacacagatttctcctttggccgccatactcacgatcaatttggtatcggcctgatggatcgcggagggcaaaaatcgcttagcgggcgtggacgtgttgaatctgccgccggcgatctcatcacagtgaatcccggcgaagtccatgacggagcccccctcatcggcgccagagcctggcgaatgctttatttcccccccgcatggctcaaccgatgctttgccgatatcagcgaaggtaaatattcttccggagaattcagccacccggtattttgccggcatccgctctctacccgtttcaaccacctattcagcgccgtcgaacaaagcgataaatttgcggtggaggagactttgctggctttcgctgccacgctggccgagatccccggggagagtttcgtttccccgcccgcaggcatcatgcgtgcacgagaatggatagacgacacaccggccagcccgttaaccttggcggagctggcgaaagaggctgggctaagccagtatcaatttttacgtagtttcaaacgcctcatcgggctgacgcctcatgcctacctgttgcaacgtcggctattgctggcacgccaactgatcctcgccggtaacgcgttggccgcagtagcggacatcagcggcttcgccgatcaaagccacatgacgcgcatgttcgtcagaagttttggttacacccctggcgttttctctcgcaaatag

SEQ ID NO: 438253 - DNA, 615 bp, Serratia marcescens
gtgaacgcagattttctgttaacctcattactgatcgtgatatcgccgggaaccggtgcactgattaccctatccaccggattgcagcaaggtgcgcgccgcgcactggtggcggcagcgggttgtacgctgggtgtggtgccccatatgctggctgcggtgaccgggctggcggcattactgcaggccaaccctctggcatttggattggtgaaatatatcggcgtagcctatctgctgtttatgggatggcaaactttacgcaatagtggcccactgtccctaacccaaagctcgatgcaacccagtcagggagctttagttcgctatgccatattggctaacgcactcaaccccaaactatcggttttcttcctagcattcctgccgcagtttgtcacctcagacgatccgcatccagtccgcaccatgctgctgctgtccactctcttcgccgtgatgacattggcgatctttgctttttacggcgcttttgcggcgcgcgtccgacatcttattttgggtaatgtccgcgtcatgaacggtatacgctggtcggtttctgtagcgtttatcgttcttgccgtgaagctggccctgtcccatcagtcgtga

SEQ ID NO: 438254 - DNA, 381 bp, Serratia marcescens
atgaaacttgaatttatccgcctcagcgccatcgatcgcagtgagatcgttgccctaaatactcacccattagttttgcgacaaatgccgctgggggacacaagcttcgatgacgctgcatgtctggaatgggtaaaaggtaaagaatctcaatgggatgaacacggctacggcccctgggcatttatgctagacggcaagttcgtcggctggggtggcctgcaagatgaaaatggggacgctgacttagccttagtgctccatcccgattattgggggttgggaaagcatatttataacgaaattgtggaccgcgcttttaacccgatgggcttcgaatccattaccatcctgctccctcccacttgggtaaagaattaa

SEQ ID NO: 438255 - DNA, 864 bp, Serratia marcescens
atggaagaatctagaaaaatacgtcaattaaaagaaaaacttataaatgaactacctttttttccaaatgaaaaatcaatacgcactgaactagaaaatctaagtttaaatggagttttaatcgcttaccttcactggaaaacaagaatcgtgcctccgcgcagaaggaaagttaatatatctccagaggtaacgagtgataaaagatggaaggaactaaagtctggtattcatgggttattggataaggtgagaaaaggtgaagacttgtaccctcatctttcattgcgcgcgcataagtatggttacactcctgttgaaagaattcgtaatggagaagttgattcatgggaagacaaagaccatttattaaatacgaaaggttttcatcattttcatttaagcatgaatatccaaagtacaggcttgggagtaaggacaaatagtgttcttttcgccttcgtttctcgcgaccagtttcatgcagttgggatatttgatcatagcgtatttgataaacccgatattttgaatggcatgtctgaggagcgtgaaagaatgtgggccctacatgaaaagcataccacattcggaatgaaaccgggcacagtgtacatgaataacccgataacatcatccgggcaccctgtaaatattatcatgcttgccgatcgttatgctgcaatcatccgagaatatgatcagaaggcggaagaaagaaattttgcaaatgagctttatgctcaaagtccatattcccctccagaaagatataaatttgaatggggcattcagggtttggatcttgttctttttgataaaaaaaatagagtgacctttaacatccacaaggcgcacatttga

SEQ ID NO: 438256 - DNA, 384 bp, Serratia marcescens
gtgcaggttactcgtattctggacagcattgcgctgtttcgcggctatccgattacgataggcactgatcaggacccggaatttacctgctgcgcgctgggtcaatgggcctttgagcatggagtggagctgcgatttatccagtctggcaagccgacacagaacggatttattgagagctttaacagacgttttcgcgatgaatgcctgaatgaacactggttcagagacgtcagccactccagggagatcatacgtgaatggcgtcaggattataacgagtgccgcccgcactccacgctaaattatcagacaccgtctgaatttgcggcggcctggagaaagggacattctgaaagtgaaggatccgacattactaactga

SEQ ID NO: 438257 - DNA, 240 bp, Serratia marcescens
atgtatgatacgaccggtctgtcgcaacgtcgtgcctgcaggctgacaggtttgaccctgtcaacccaccgctacgaagcgcgccgtccggcgttggatgtgcatttatctggacgcatcatcgaactggcactggagcgcaggcgttttggctaccgtcgcatctggcagctgctgcgccgcgagggcttcatgttaatcacaagcgcgtgtaccggctttatcatctttgtggtctga

SEQ ID NO: 438258 - DNA, 648 bp, Serratia marcescens
atggcaatggaaacggtagcgcaatgtgattggcttggccttttaacgagcggaacgctcataccagcatctgcctttgttgcgatttgtctttttatcctaagagagttgttagattggcgtcgtaaatccaaggccagaaaaaatgaggttcgcgcattaaagaagctctttgcacgggagtgtcagttagcctggaacataaaagaacaaattaaaacactatgtgaaaaattcgcaccttacgaagcaaagcctatgcacgagtgcccccttgacttaagcattacaaaaacgacagctggtaaaactcgttataccgtcacagaaaatgacgttccacgctggggcggcactctaagccaaccatcagtcgcaaccttcacaaagcatttatatgatgtatctaaaattgattctgtattttatgaaaatattaacttagcttataccgccgtgattgagctgaaacatttctacgaatcgttagtggataacaaagacacatcacatctaattggactagacaacgtgatgtatggtttttcaggctacgcactcaaagagataatatggattgaacgggaacttaaagctctttatcaatactgtactggtgaagaactgactgtaggtcttttacgataa

SEQ ID NO: 438259 - DNA, 1296 bp, Serratia marcescens
atgaagaaaatactttgcactctatttctattatcaacggccgcttttgccaagggtgatttatcgccactgccggacagtggggccaatcactacctgtcccctaacggtccggaaattatagagaaaggctcgccattcttattagacaaggccaagagcacctacacgtatatgcgctgttattatcgtattaatcccgccagcaccgctccgcaggcggattatctctgggcaagggcgcagaactcaacgtcatattaccgtctggaagggcattggtggtcatcgctggcggtatcctggaaaaacatgttttacagcgatacgccgctctccgcgttgcagcaagtgtgtggcgataccttgagccgagcgggcattcgtcagcctttggcgatgattgcagcggcaaacaataaactctctttcaactacaccgtctggagcaatgactcgccggcgcagagcgcggccatcaacaaaattatcgtgtttggcgacagtttaagcgacacgaataatgtttttaatgcctctttatggcgtttccctaatccgaaaagttggttcttagggcgattcagcaatggaccaacgtgggtggaatacctggcgaaacaaagcggattgcccgtttataactgggccgtgggcggtgcggcttccaatcagcaaaaatgggtgatccccggcatacttgagcaggtagactcctggcttatttatatgaaggaggccaaaaactatcggccggaaaattcactgtttaccgtttggatcggagccaatgatttggtgacttacaaccagggagtggatgggctgattgaaaatcaaggcaaggcgttaacgcgattagccagcgccggtgcgaaaaagatattggtgcttaatctgccagacattacgcgcgcgcctgaatttgctcatcgcaaggatggtgcagagataaaaagacagattgatgattataatcggcgtatcaaacaggtggcggatgatatcaaccgccgttatccctcagagcctgtgatgttgtttgatcttgcggcgctgtttacggatatgctggataatccggggcgttatcaggtcagcgaagtcaaaacgtcgtgtctggatatccaggccccttcatcactgaattatatcaatgcgataccagtgcgcgctgcttgcacggatgcggataactacgtgttttgggatcttctgcacccgacgacacatactcaccggctattggcggagcatattttcaactatttgaaacaacaacaggtatggcgttag

SEQ ID NO: 438260 - DNA, 876 bp, Serratia marcescens
atggaatttatgtcaaaacgcgtgaattattttatcgccgtagcgcaagagggatctattaccaaagcagccgaccggttgtgcattacaccatcaccattaagcaaaagaattaaagaaatggaagagaatctaaacatcactctttttgaacgaactaaccaaggtctgtccctgacgaaagaggggcaacatttgtatagtaatgtcatcgtccattatgaagagctcaaccggatcaaagaaagccataaagagaagaaccatattcagattggcatttacggcccggtgcctactcacgtcaatacggtgattgattacctgctcatgaagaaccccgccataaccattaatttggtgcgtttaatgccgaccgatggcataagccgtaatgagctcaatcggcttgacttgctcttcagcatagaacctcttgagctgtctcccttcacccaacatttatgcgccgaagagcaactgttgctacttcaccaggtaagacagccttctgaaagctaccgcgcattgccttgggtacagagtaactatgtctccgagacacagatattcaagcattatcatgcacagctgcagctgcagggcttttcccgagacgtgatgaatatcgataacctccagctgcggcttaatttgatccgacaaggcaaagccgtcgcctttattctcgagtcgatgaggtccgtgatcaatttcgacgaatatgaatgcaacagcctgtgcttacccaatacccgtttaacccatcacatctacagtaatgtgtcacagctaaatgacagccaacagctgatagcgcatatggcgaaaaggggtgcgcaacaatggagtcactcggtatcaatgcccgtataa

SEQ ID NO: 438261 - DNA, 804 bp, Serratia marcescens
atgagcagtggaatgctgacgcaagttatcgacaatttgtcccgcaccggcgacgcgattcaaacgttcccaggtttgccggcgaacgccgtcttacttcaacgcaatattcaaaccgcggtcaacatgctgttgccggatcttaagcagatgcaacgtgatgtgaccgcctggggtgtaaaactggaagctcagttggacgacaagctggcggcgttggaaacgctgccggtaacagaactcagtcggttcattcgtcaaagcaaagaggatatcgccggcgtcatggcgcaggtttccagagtgcaaagccgaacgcagagcacggacgtcgccgtaactgaaaataatctcgctttgcaacgcatcattatcgatttgcaggccaccatctccggactgcaatcgaatttgcagggcagccaacagcagctcgatgagttgaataagaagaaactttactttattgcgctaggtatcctcggcatacccggcctcatcgccatggcggtgttgcttagccaggcgcaagacaaagttcgcagcatcgaacggcaaatctccgagcaaaaatcgagtattcgacagcagcagagctttgccacgcaaaccgcagcgttttcacaagacctgctagaactcagcaaccaaatgttgaaaatcggcaatgccattgagtttgtgagcaatgacatcaataacgcggaaaagaatctctctggcgccgaagcgcaacagcttgcgaaactgttccttaccgccgccaagatgagtgtcggaacgctgttgacggacatttcctga

SEQ ID NO: 438262 - DNA, 1077 bp, Serratia marcescens
atgacgatcccaacaatttacatcaacgacggcatgaacacccagtcttcgcaggcgcttcatattcagacctattgcaacagcgtgcggcagcaaataccggttgatttcgaacgcttccctaaccttcgggaaatccagcgtcagatcaataccggactagcaacggctaaacaacatgccaatcactatctcaatgatattcagccgttaattattagaaacattacaaatattcaggactatttcgaaacgcaaaacctgatctccaccgttatgccgtctggcgcaactaaagagcaatggctgagcgctttgagcatggtcagcgataaagctagagaatatcaggaagtctcggcgaacactcgccgtacgatcggatcgttgaatgataagttgattatcgattcaaacaattatcagctgattgtggtcaacctgaataacgtggtcaatggcaataatggcgttctggaacagcttaatcgggatatcgacggcattaacgccgccattgacggcgccattgccggcatcgtcgtcggcgggctgttaattattgggggggcaatcgtaaccgccatcggcgccgtagctgggctggtgactgcaggcacctcaacgccggtcgtcatggggggcatcgccatgatgaccgctggcgcgggcggggtgatcggcggcgcgatcgtgctggataaatcattgagcgcacgtgaaaaactctaccgtgaccgcagccaactcaacagtgaagtcttggtcgccagccagatcggatccggctaccaggggttgcagactcaggcgcaaagcgcagtgactgcggcaacgcaaatgagcaatgcctgggactctctcacctctgagctggatatcctcaacgcgaacttgcgcaaagggatcattgatgacagcttcctgcgccaactgttcctgaccgcttcgcaaacgtcagtaaccaaagtgttggatggaacgaaaatcatcaaacagcagatggccggcgtggtggtgcgagaagtgccagcaaaccaaactattgccgatttcgttaagcgcctggcggcttaa

SEQ ID NO: 438263 - DNA, 1098 bp, Serratia marcescens
atgaataacctaactgacattgatttaagccctcaagcgttaatggctatgcatatttctatttcgtcatatgcattgcttaaccaaagctacagtaatttattactcagccagcaattactggcgtcgcaaaatatggaccctggtttgaccgttaaaattaaggcttaccaaaaccagctaaggcaacaggcgcaaatattcaagcaaagcacggtcgcggaactgatcgggttatacaccaaggcgtcaaatttctccgccctggtcaacgcggttaatacgctgtactccactgaggacccgcaggtttctcaaaaaggctcagaaatggtgtctgcgctttccgagatcgcacaacgctatcaggctgcggcgcaagccgtccatatccagttgcagacaacgagtgaaatgctgactcccgtcatggccaatttccgtgaagtgattagtgccatcgagcaagggctgaatgtcgaagcgaagcaacaggcgcaaaccatcgctgaactcaatgaagcgatcgcaaaaaatatccaaagcatcgcagaggcggggttcaaagcgggtgaaggcgttgtgcagcttgggcaatccatcgtagcgacagtgccgctcggccctgcggacaaaaaaaccaaagaagccgcggccgcggcgtcgaaaccgctgggcgatcaggccagctacatgatctccggcattcaagcgatctcctcaggggcatccggcgcacagcaggccgtcaatgagttgaaggctaactacgccaaattggctgtagcatatcgagctttggcaaccgccaatgcgttgctttccgtagccaagtccgtgcacgcccaggctcaactgtttgtcgacacctatgccctcactacacagcgcatggcgttactaccggatgagtggaataaggtggctgatgcctatctgacggctgcgcccatcattaatcaggccaacagtgctttggaaattaaacaggccaaacaaattatttctcttaatgcggaaaagtggcagcttttttccaaatccattgataacgccaaagctaattatgcaggaaacaacatcctgccggaagtttaa

SEQ ID NO: 438264 - DNA, 486 bp, Serratia marcescens
atgcagaagatactgtcagagcgcgggctatcattaattaaaagctatgaagggctgcggctttcatcctatcgcgacagcgcggggatttggacgatcggttacggacataccggggaggtcagggcggggcaagccatcagcgaactaatcgcgctgacattgctgcaggctgatgtgatggagtgtgaagcgctgctgcacaagattatcgaggtgcccctgaatcaggggcaattcgatgctctggtttcttttctattcaatgtcggccccggcaaggccggggtgaaaagcgggctgcgttatctgaagtccggttcgccttcaacgttgttgcggctactgaatgccgggcgatatcaggaggcggcagaacagtttcctctgtgggcgtatgccggtggccaacgtttacctgggctgttgcggcggcgcagagaggagcagcgtctgttcctgtcgcaaatgcggcgggttgcctag

SEQ ID NO: 438265 - DNA, 1251 bp, Serratia marcescens
atggcgataaaaacacgattgaaggtgatgattttcctgcagttctttatctggggcgcctggctggtgacgctgggctcctatatgatcaacacgctgcatttcagcggcatgcaggtgggaatggtttacagcgccaaggggatcgcggcgctgatcatgccgggcctggcgggcatcatcgccgaccgttggatgagggccaactacctgtatgcgctttgccacctgctcggggcgctggcgctgtactgtgcggcgcaggttgagcaaccgatgctgatgttctgggtaatgctgttcaacgccatggtctatatgccgaccatcgcgctctccaacgccatttcctatttttgcctggagaagcacggctttgacacggtaaaggactttccgccggtgcgggtgtacggcaccgtgggattcattctggcaatgtggctggtcggtttcagccaaatcgagctcagtaatctgcagctgtatctggcttctgcggcgtcgctgctactgtccgcctattcgctgacgctgccgcgctgcccgaccaaccgcgcggccgagtcgaagcgctgggtgagcgtgctggggctggatgcgctggtgctgtttcgccagcggcgcatagcgctgtttttcctgttcgccatgttgctcggcgcggcgctgcagataaccaacaccttcggcaacccgttcctgcacgatctgtcgctcaatccgctatatcaggacagcctcagcgtccggtatccggcggtgctgctgtcgctgtcgcagatctctgaagtgttctttatcctcaccattccctttttcctgcgccgttacggcatcaagcaggtgatgctgatcagcatggcggcctggacgctgcgtttcctgttcctggcctacggcacgccggtcggttttggtttcgtgctgctgctgttgtcgatgatcgtttacggttgcgcgttcgacttctttaatatttccggcgccattttcgtcgagaaggaggccgatcaccgcatccgcgccagcgcgcaggggctgttcatgaccatggtcagcggtctgggcgcctatgtgggggcactcgccagcggcgaagtggtggatttcttcagccgtgacggcgtgaaagactggcagagcatctggctggtgtttgcgctgtatacgctggtgctggggattgtgttcgcgttgagcttcaactatcgccactcgccgcaggagagtgcggcggcggcgcagtaa

SEQ ID NO: 438266 - DNA, 1398 bp, Serratia marcescens
atgaccgatatcaatcgcaatgaagcatggaaggtagagagcaccggtatcgaccgggtgccggatgcggaacagaccgggcggcccatcgagctgttttggatctggtcggcagccaatatcggcattctcggcgtggtgtatggcgccatcatcgtcggcttcggcttatccttcctgcaatcggtgctcgccgccttgttcggcgtcgccagcttcgtgctggttggcctcaccagcttcgccggcaagcgcgggcgcacctctacgctgacgctgtcgcgagtgattttcgggctgaagggcaacgtggcgcctaccctgttcagttggatcaatctgatgggctgggaagcggtcaacgtgatcaccggcaccctgacgctggcggcgctgttcgaggccttcgggctgggggccagccatctgctgaccgcgctcagcctgttgctgttcgccgggctcactatcgtcgtcagcctgctggggcagaataccgtagtctggatgcaaagctggttcagccgcatcttcggcaccatgacgctgatcgtggtgctctatatcctgttcaacaccgagtggagccaggtgctggcgctgccttccggcagctggctgaccggcttcctgccggcggtctcggtgatcgccgccggtaccggcatcagttgggcgatcgccggcgccgattacagccgctatcaaagcccgaattcgtcgagcaaaagcattttcgccgcggtgatgggcggcgcctgtttgccgctgatgctgctgatgctggccggcattctgctttccgtgcagctgcccgatctggccaacgccgccaatcccatcgcgctgataggctcagtgctgcccgcctggatggcgatcccttatctgctggccgccaccgccggcatcgtcaccatcgcggtgctcagcctgtattccgccagccttaacctgctgaccatcggcgtgcaggtcaaacagtggttggcggtatcgatcgacgccgtggtggtgctgggtatcgccctgtatgtgctgttcatctccggcgattttatggggccgttcatctccttcctggtgttctgcggggtgttcctggcggcctgggaggcgattttcctgctcgattacctgtgcctgcgccgccaccacgggtatgatggcaacgctttgtacggcctgcatggccagaaccgcggcgtgcgcaaagccccgctgttctgctggttcctcggcgccctgtgcggcctgctggtcaccaaaaccggttttatcgacggcccgctggctaaaggcttgtttgccgactccagcctggggctgtttgtgtcgtttgcggttagtctgatcgcttacggtctgtacctgacccaacgcagagaacatcaatga

SEQ ID NO: 438267 - DNA, 1221 bp, Serratia marcescens
gtgagccaagaagatgatgataagtatccagccagcgccgtatcctcgtggagcggtttcgtttatcaagggaaaattgcactatatcactccctcaagattattcacgatggcgacctagactttgagctgcagctagacagtagtgacgactttgctatttataaaaatggaaaactacacaccgcccaccaagtcaaagctaagataagtaaatatcgaagcggttacatcaaggcgctggaacagtctactttaatcgaacacgacaaaattaaggggataacgcgttacttccatgtatctgtcccgttagacaatacagacgatcatagaggcgctagcggagaaacagtaaaactctaccgctatggagacaactattattgcggcttgggtgaaattgaagggcttaccaaagaactcataaaagaaatatgtaataaacagcacatcactgtcagtgataaccttataaactttaactactgtttactgtcggaaaaaatcagcgccaaggcaatacataatcataaattaaatcaagttgatggagtttcagaaaacagagcggcatatgagggccgaatcaaggccaagaatattttggatgacttgctaactgaaaacccctatcagaatagagactattatgcagttgaattaaaggccaggcttcaaaatcacctggaagaaaggttggatcaggcgcttccaacaatgagtgacgctacttacgaaagagctagatgtctgtgcgagcacattcgcgaaacccatatcaatgaattgaaagccctatgccagatgatgaagccctccgagcgatttcaaggcgttcagacgaacgatatcaggcgatacaccaagctcatccaggctatttcggtggagcctatattcaaccatctcccgcactatcttgacagcgaaaatcggttctacgtacctaccgctcttgacgtggatgaaagcgaagagtgtgagtttgacatgatccgtgaaatgaaaaacaacggggatctgctgagactactttttgagtacaaccatctaatcgccagcaaagcggaagcctcattcacctttaatacaaaattcacaaactcagatgacttcgacaacaagcagactactgaaaaactcgaaagcaacatcaccaagtcgctatgcattagcgtgataacaaaagacgacgcggaggaacgactgaatggttaa

SEQ ID NO: 438268 - DNA, 666 bp, Serratia marcescens
atggttaagcaactcattgatgaagcacttgttgctcatggctttgttagtaaacgcgacttggataacacaagcttttatattcgcgagtctggatcagctatcaggttcgctgttctacataatcttgatgaccttcctgatccagccgaactgaataatagaatcaatcatcttgcacctgaggaatttctcagaaacccaagctttaagaaaaactgcgacttgatttgtattcatcggcttgacgttctggccaagttcaaagatcacgaagaagaaatcttcgcaattgaggaagacccgcacttctataaaaaatatgttctctattacagtattgcggaagaaagtgcactcactaattttacctacgacaaactggagtctgtgattgctgacaaaaaggaatttcttggatacaaagaaaaccctcttgtcgccacacagtacagctttgcggcgaagacctttattaaacttcctttcttagagctgcctagtcatcaagaaaatcttgtgtccttgaggttacaggcagcagaggccgttgcagaagccagtttgaacgatacatattttactatccagaaagtcacagaaaaaaacgtcgatgaaattatcaaggaaatgattaacaatgaactggcaaatatccaagattga

SEQ ID NO: 438269 - DNA, 2331 bp, Serratia marcescens
atgaactggcaaatatccaagattgaagtctttagcttcaaagcatttaaacatatctacttggatcttggcgagtcgtctttgctaactctggacggcccgaacggttatggaaaaacaagcatattcgacgcaatcgaattactgcttaccggccagataagtcgcatacaaaatctattcaatacattattaaccaggaacaagagagactacgcggacaatcttttctggaacaggcgctccggtgaaaatgacctctgcattaagattgaatttactaatgagggacgaaaacttgttttagctagacattgccaggctgcaatattcaaaaaaccagtaaacaatcgtgcagacaaatacgagaatttcaagctttatgagctgccagaattcgagtcatctgacttcactgagatcaatctgcgcgacaacaactttcttgacgaaattttcgggaaaaatttcagggaaaatttctcctttcttaactatttggagcaagggcaaaaccggctcttacacactcgggtagacgaacgtaaggagaaacttggaaacctatttaacattagcgatatcgaagccgagatcgaaagttgcaacactatatacagtaaactcacaaagtacatcaacaatcctgaacgaaatgcaaaagctgtatcacttaaagaagaaatagctactctaagggctacattacaggcagaggctgggatcattgggtacaaaaagctatcgacgactgatgtccaaccagggtgggacaaggagatactgttctcaacgtattcgtcggtagaccatgctgcctaccaagaatcagttcgcaagattattgcccttctgccactcaaagccacaataaaaactagggttcacaacgagacaattgatgccgacattgatcgtaacgaggaatctctgagaagtttggcgcagtttggtaaagacctgggcaagcttgatgtgcttgaagctatcaagaagaggattgatgaattagagcgttcagcaagcatcattaaacgcggtgccacggtgatcaaactcgaagaagcccgttcattacaaggttgggcggatgagcgtcttgagtggtttgagtcacaaattaatacccgaaacagcctacaagtaaaaagcagcgccaatgcgaacgtcgtagccgaattggaacgtctaaaaatgcagttacttggggaacataagaagtcttatcccgacgagcagttgtgccctctctgtggcgctgactgggaagaccacaaatcaatggcggatgccattgaagcaagaactaaacagatctctgaatcattaggccgggacggtaagaatttagttaatctcatcgctgctatggatgctgagctgaaactcatcgacacctttatacaagacagcctgaaactcctcacgcctacatttgaatcaaatcttcatgcagggctaaccagaattaagcttcggctcccggcaatagcactgctactggagaagctgcagagcgagaacattcaatttactgattcttttactgaaattgatgacttaatagatgagcgacttgaaaagctcaaggagattctaagaaataaaaaacaggttgaagctgatgccttagcgctgccggaggactggcgagagaccacaaactgcgctttcaaagacctgcaggacttctacatagtcacggctgaagatctgaaggataaagagcagtacatatcgattaaagctagcgaggctcaaagtttcaggctccaaacctgtattaacggacttaagattatcgaaaaagaaacccaggcagcccaaaaagcacaaggtaaaatcgaaaagctccgcagcatattgaagaagacagagcagaattatactgaccagacaatttcggctattgagttcatattccacatttatagtggtcggttgatccaaaactaccagcgcggcctgggcctgtttatcgagagtcgtgaaggtacgcaactgaggttcctgactgccgagaagtctgaacacgacgcagtcatgtccatgagttctggtcaggtgtctgccctcagccttgctttcttccttgcgctcaacaaggtctatgctcaggtgcctctcatcctgattgatgacccgtcacaatcattggatgaagtaaacgttgcttccttgaccgatctactccgttgtgaactcaagcattgtcagttggtcgtctccacacacgaggatgatatctcggcctatatgcgctaccggttcgacagagcaggtttgacaacaagttcgctcaatatgcagctcttggcaaaagaagcttag

SEQ ID NO: 438270 - DNA, 855 bp, Serratia marcescens
atgacaacagtatttatcgccggctcaatatcgattagtcgcctgcatgcgaaggttcaggagagaatcaacaaaattgtgtcatcaaacttcaatgttgtagttggtgatgcagatggtgctgattcatctattcaagagtgtcttcgcaactatcaagccaataacgtgacggtgtattgtacgggtgagatcccaagaaataatatcgccgattggccaatacatcgggttttctcaaaagcaaaagttggaagccgagcctattttacagcaaaagacttagaaatggctcgcagcagtgattatggattaatgatttgggactgcaaaagcaccggaaccctgagcaacgtcattgaattacttcgagagagaaaaaaatccgtcgtcttcatcaataaaaataaagattttgtgacaatttcagatatttcggggcttgagcaccttctcacttttatgtcaccacatgccagaactaaggcagaagaaaagattagtctgacatcaaaaattgccagcctttcgcacgaacagttttctctcgatgtgtccgtagaggataaaactgctgccttgccagacgaacaaacaggacaagaaccacttaatgaaaatgcagatcaaacagaaagcatgaaactgcgctcagaactcatgtccgcccttaagcagcatatcgttaacacccatctaagccagtcacaagctgccaaggttttcggcgtcacgcagccccgaatttccgatctgacgagaggcaaggtcgatctgtttggactagatgcactagtaaatatggcagcaacagcgggcctgcacgtagaaatgcatgttcgaaacacggtatga

SEQ ID NO: 438271 - DNA, 591 bp, Serratia marcescens
atgcaagttcaagtcagaaagctagaaggtagctgggacctcggctatgccctgcataagcatactctttcaagcgtctacctcggggacgatgaatacggacatccccgatttgacaatactcggtctgagccaggagaagctctctaccaactcaagtaccgaggtgactggaatcaaatcgcaccgttggctgcgcagatccaagcaacattacttccattgtttggaaagatcggcttgataattcctatgccagcatccaccacccgcgctcggcagccggtagatgaacttgcggcagaactcgggagaattaccggaattccggtgctcaacaatgttgtggtaaaagcacctgccccgcagggtgctccacaactcaaaaacttgcatagccgcgaggaaaaagatgcggctttgcaaggtatgttcagcatcaatccgtgcatcaccaatgacggccgctgggatgcactgttgctggatgatttgtttgatacaggcgcgactatggacgctgtttgcaaggcactgcggacgtacaacaagataaatcgcgtctacgctgccgcaatttcgtggaaataa

SEQ ID NO: 438272 - DNA, 456 bp, Serratia marcescens
atgccgctagaaaccggctatatgagcctgctgtcgatcgaaccggcggtggatcttgctgccgaaaaattcaagttcagcactcatggtggctatcctggccgctatagtgacacattgttcgccgtgaaattctcggacccgtctggtcggtcgctgagttcttttatctatgacgccagtttgtacatctatgatgacgaccgcgacgtatttgttgagatcaactgtgcagacgaggcacagatgaccgaagcggtcgcgacattcgataacattacgcctctcactcgccacgatattggtgatggggccgttttgtacacgcctatcgaaaacccttccgcagagctgctgcttgaggcgggggaggctgtagcggcgctcttcgagagttttggctacaagaggatggccttggagcgcaatcagtggcagctcaaatccaagcgttag

SEQ ID NO: 438273 - DNA, 1005 bp, Serratia marcescens
atgcgggaaaatcttaatcaaatacaatggttgcggggaattgctgcggttgttgtcatttttacccatattatgggtaaagcttactcaacagggtggtcgggggtcgctttcgagagaggtggtatcggtgttgatatattcttcattatttcaggcttcataatgatgtatgtttgtgatggaaaaccgcaaacctcggtgaaatttataaagaatagagcattaaggatattgccacttcattatttgattcttgttcctttactgttggtatattcagtcaaaccggggttgataaatagtacatttagtggaacatatattctagaatctgtctttctaattcctgttaaaattgggagctatcaatatctaaacccagttgtgtggactttatgttatgaaatgatgttttatataatattctccttgttcttgtcgtttaatgatgtcagaaaaacggcattctgcactgtcgttgttatcttatctctggttattgtaggctttatatacagaggtgattcgcctctggtgttaggtattaccaacagtatatctgttgaattttgcatggggatgatgctctatctgatttataaagcagggaaattgaaagtcaatccatgcgtaatgattggggctgctattgtcctttattttgccttcgataaaacttcgcttccacgatttatcatttgcgggttgccttcagcatttctctttattggttttataaatttaaaaaacaagttcatacgtcctctcaatgttttaggaaatatttcctatgagatttatatttcccatatattggttgtgactgctgtgtatatgattcttaattccataggtgttcatgaattgattatttacattgctgcttgtgttacatctattatccttgtagggctggcgttgcattacggttataccaataaaataaatgattttgtacgaaggaaaagaattgcaactaataaattgaatgataatgcataa

SEQ ID NO: 438274 - DNA, 1149 bp, Serratia marcescens
atgaagcttgcacaagcacggacaggagagagactgaaagttaataaaaaactaattccatatagtttttggccagtaaatactggctcaaaaggaaactctagcattttaccacttttgttttcacttgatccttgggccattattgatcaagctataaagaataactgtcctaatttatctaaaagtgaggcattggcatgtgttcaccaggctagagatttttatgagtcggctattgatacacagcgtgtttctgctaggccgttatctctttactattgttttatgaatctagttaaagcgttttgtttgacaagaggaacgcaagtaacctttgataaagcgcaacatggattaacagagcaactggggactggggggaaagagcttcatgatgcttatttggagggattccctagcccaaacgcaaggggtaaattacaaaatttttcagagtttatgcaggctttaactggagcaggactgactgcacctcagcaatataaaatccctattcttttaccccaaattttgcctggccacagactttggtcttctgcagcgaacaaaaaagaacgttttgttgctgttcatgaaatacgcccttatgtcaataaagaaagcggcgaaatttggttaaatatttactttgtctctgatgatctttcacgtattggtataacaacgacaaattttcttctcgagactgatttggctggaagctatactcaagttagttgtgctgaattagataatttgaataggaaattaatatgttttcaacaaacaaccccattcatttgcaatacaagaaaatatgcaaattatcttcagggcctctttgactcgatacgaccttatctctgggtcactgtttcgacaataccgccttaccgcaggcattatgtttataccagacctagtactgattctaatcaggtacttccgcagttactttcaatttatgctctttcttattatctggggtcaattactcgatatcgacctcaccatcttccgacgattacagatactgttttcggaccaagagttcaggattttataactggtcaacctcagcaatttctttatcttatggcttctgaatttgcaaagagggaagtaacaaaaccttccattctttga

SEQ ID NO: 438275 - DNA, 1179 bp, Serratia marcescens
atgagtaaggtcgcgttcagacgattgggagatttgattactctcaagaggggatatgatttacctgaaaaagtcaggatagcaggcccgtacccggtaataagttctgccggggtatctggatggcacaatgaatataaagtagagggaccgggcgttgtaaccgggcgatacggcaccttgggtgaaatgtattatgttgaggacgagtattggccgcataataccgcgctgtacgtgcaggacttcaaaggcaatgaccccaaatatattttttatctattaagctgtttagggagaattcgtacctctgataaaagtgctgtaccgggcgtaaatagaaatgaacttcatgaaatggctgttccagccatagaagatgtgacatcacaaataaaaatacgtgaagttcttgagtcagtcgacgaaaaaatcgccctcaacaaccgcatcaacgccgaactggaagcaatggcgaaaacgctgtatgactactggtttgtacagttcgatttccctgatgctaacggaaaaccgtataaaacctctggtggtaagatggtgtataactccacgctgaaacgggaaattccagcggggtggtatgcttccaatattctgtcattagctgatttgttaggcggtggaacgcctacgaagacaaaccccggatattggaatggttctattccattttttacaccaacagattcagataaaaatatctacagtctgaatacacaggattcgattactgatcttggtttaaaacacagtagtactcggctctttgaaaaaaacacgattttcatcactgcaagaggatcggttggccgtctcgcccttaatgctgttcctatggcgatgaaccaatcatgttatgcactgagggcgaaacaaggaacaagttttgcgtttttgtatttcctcactaaagagttaattcatcatctcgaagtgaaggcaactggatccgtgtttagctcgattatctcaaacgatattgaatataccaacctagcattacctgatgatattggcatgatacataaatatgccaaaaaaatagaaccagctttcacaaaaattgaattattgacaaaagaaaatcagcaactcaccacactccgtgactggctcctccctctacttatgaacggacaggtcacggttaaataa

SEQ ID NO: 438276 - DNA, 1635 bp, Serratia marcescens
gtggtagaactggaatttagagacaaaaccaaaactctgatcgacagcctgaaaagcatctgtgcgaactacggtctgggtaatgacggtaatgagttcaaaatcatcactcaggcatttctgtacaaattcctgaatgacaaattcgcctttgaagccaaaaaggtggataaaagcatcgccagcgccgaaaaatgggaagtcgcgctcaatcagatgagtgaagaacaacgggataaactgcaactgaagatgagcgccgacaccgcccgtctgaagccacatcacttcattcagtatttatacaaccgtcaaaatgaggccaatttcgccaccacctttgacgacaccctgatggatatcgccgctaccaacaacgacgtcttcgcagtcaaaactgacggcggcgcaaaagtggtcctctttgaacgtcttagccaatacatcgccgacgaatcaaagcgagatgacttctgccgcgccatcatcaacaaactggccgatttcagcttcgaacgtatcttcacgcagaagtttgacttctacgccaccatctttgaatacctgatcaaagactacaacagcaactccggcggcaaatacgctgaatactacacgccccacgccgtggcgcgcatcatggcggaaattctggtgccgaaagcgcaacagggggtcgtgcgcaacgtaagttgttacgatccatccgcaggttccggcaccttgctgatgaacgttgcgcacgccatcggggaaaatcgttgcagcatctttgctcaggatatctcgcagaaatcctccagcctgctgcgcctgaacctgatcctcaacaatctggtgcattcgatcccaaatgttattcagggcaacaccattctgcatccgttccacaaggacggcagcacgctgaaacgctttgactacatcgtctctaacccaccgtttaaaatggatttcagcgacttccgcgacgagctagacagcaaggaaaaccagcaacgtttctttgccgggataccgaaaatcaaagccaaagccagggacaaaatggaaatttaccagttgttcctgcaacacatcattttctcgctgaagccgggtggtaaagcggcggtcgtggtgccgaccggctttatcaccgctcagtcgggtattgataaaggcattcgtgaacatctggtgaaaaataagatgctggcgggagtggtctctatgccgtcgaatatctttgccaccaccgggaccaacgtgtcgatcctgtttattgacgccagcaataaagagaaagtagtgctgatcgatgcttctaacttaggggaaaaagtcaaagacggtaaaaaccagaaaacggtgctgacagaagaagaagaacagcgcatctgcgaagtattcaacaataagtggagcgaagaagatttctcggtggtggtcagctatgacgacatcgccgcgaaaaattactcgttcagcgccgggcagtattttgatgtgaaaatcgaatacaccgatatgactccggggcagtttgccgcgaaaatgaaagggtttacggataatcttgagagtttgtttagccagtcgcgcgagctggaagcggagattaagaagcagatggcagggctgaagtatgagtaa

SEQ ID NO: 438277 - DNA, 3099 bp, Serratia marcescens
atgaaattcaccgaagacacccgggtaaaaatccccgtcatcctccacctgatacggctgggctactgctacctgtccctgaaagaacaacgctgggacaaagaaaccaacatcttccctgacctcttcaccgctgcgattggcaaaataaaccccggacttgcgccagatgacattggacgcctgttaaaagacctcacgctcctcctcgacaacgatgacctgggccgcgccttcttcgaaaaactcagcgaccgttccggcatcaaactgatcgactttgataacttcagcaacaacagcttccatgtcgtcaccgaactgacctgcgaaaatggcgacgaagagttccgcccggacatcacgctactgatcaatggcatgccgctgatctttatcgaagtgaaaaagcccaataaccgggaaggcatcgtcgcggaacgcaaccgcatcaacgaacgctttaagaaccccaaattcaaacgcttcgccaacatcacccagttcatgatcttctccaacaacatggagtatgacgacagcgacccggagccgattcagggagcattctacgccagcagctcttacagcaacccggtattcaactacttccgcgaagaagaactcttcaacctcaccaacttactgaaaccgctgtcagatgaagccgaaatcaccgtcctgaaagacaacaacctggaagtgatccgcaccaacccggaattccagaccaacaaagatcacaaccgcccgaccaaccgcctctgcaccgcgctgttgagccgcgatcggttggcatttatcctgcgctatgcgctggtgtacgttgccgaaccgggcggcatccagaaacacatcatgcgctacccgcagcttttcgccaccaaagcgattgagcgcaaactcaacgcgggtgtgaaaaaaggcattatctggcacacccagggcagcggaaaaacctcgctggcttactacaacgtgcgctttctgacggattacttccagaatcagcaggtgatcccgaaattctactttattgtcgatcgtctggatctgctccagcaggcgcagcgtgaattcaccgcccgtggcttaatcgttcaccttatcgactcacgcgaagcctttacccgcgacatcaaagcaacgcaggcgctgcataaccaccacggcaaagcggaaatcaccgtcgtcaacatccagaaattccgcgatgacccggacgtcgtcaccacccaagactacgacatcaatatccagcgcgtgtacttcctcgatgaagtccaccgcagctacaaccccaaagggagcttcctggcgaacttaagccagtcggacactaacgctatcaaaattggcctgaccggtacacctctgctgggaacggactacaactcccgcgacctcttcggcgactacatccacaaatactactacaacgcctctattgccgacggttacacactgcgcctgatccgcgaagagatagccaccaattaccggatgatcctgcaacaggcgctaaaagacgtagaagtcagaatgggcgatgtggatcgcaagtacatttacgcccatcccagcttcgtcaaaccgatgctgaactacatcgtcaccgactttgccaaaagccggggcgcgctgaatgatgacaccatcggcggcatggtgatatgtgatagctctgaacaggccaaacagatgtttgaattgttcaacgccgactacgccgaatcgcccaccgtcgccgatgaagtcaccgacgaaatgcctgtattacaggccgcagaacccgcagccgtttaccagatccacgccaaagaaacatggaaaatcaaacgcgccgccctgatcctgcacgatgtcggcagcaagcaagaacgcaaagagtgggtggaacaatttaaagtaggcgagattgacctgttgttcgtctacaacatgttgctcacaggctttgacgccaagcgattgaaaaaactctatcttggtcgcgtgatcagaaagcacaacctgctccaggcgctgacgcgcgtcaacaggacctacaaccacttccgctacggctacgtggtagactttgccgacatccgccaggaatttgacgccaccaacaaagcctacttcgaagaactacaggccgaactgggcgacgaaatggagcactactcccgcctgttcaaatcggcggaagagatccgtgaagaaatcgaacacatcaaagacgttctgttcagcttcgataccgaaaacgcggaaatcttcactgaccagataagccagatccaggaccgggaaaccgcgctggcgctgaaaaacgcgctggccgatgcccgcagcctgtacaacctgatccgcctccagggcaatactgaatttctccaggagctggacttcaacaaactcaacatcctttaccgcgaagccagccgccgcctcgacttactcaacctgaaagcggaactggaacagggcgttgacctctccggcctgctgaaccgggcgctggaagaggtgatctttgaattccataaagtgggcgaagaagagctggtactggccgacgaactgaaagagacactgcgccgcacccgcgaggcgctggccgcgaacttcgaccagcaggacccgcagttcgtcagcctgaaagacgaactggagcgcctgttcaagaagaagaagctcagtgaagtcacgcaggaagaaatggttgcgaatatcggcacactcaataaaattcatgaccgcatcaaagagctgaaccgccagaacaacctgctgcgccagaaataccggggcgacgtgaaatacgcgcgtacccacaaacgcctgcgcgagcgcggcggcctgagcgaaccggagcgtaaaatcttcgaagcactgcttggcgttaagctggatgcggatgaaaaagtgctgaacaacagccatatactgaacaatgaaagctactttgagcgccagattgtgtcatgtgtacttgaccactttgaacaacagcagcacatcaccctcagtgcgaaagcggctggcgacatcaaccgcctgattgtggcggaatacctgaacgaatttaataccggagcacgtacgtggtag

SEQ ID NO: 438278 - DNA, 489 bp, Serratia marcescens
atggatttatttaaaataatgagaaagttaagaaagatatactctcccagttacctatacacgttagatcgtagcgttatccgaacggcggatggatattggcttttcaaagagtttggcacccatactttcgtgaaaaaaaactgggggcaactcattgagggcgattttctcaggcacgttaacccgaaagacatcgcttttatcgccgagaccgaatctaagataaaagtcgcctcggccaaactgtcgattcatgaagagaaacgaaactgtatgtggacgttgaaaaatgacgttgactcgatatcaatatcaggggcggattttctaagggatcgtgatcttgttgacaaaacggagtccctggatgcgacaaaaatagccttttatgccggggtaaaggaaggcagagcactctctgcctcattgaaaaatgcaaagaaaagtgacggatataaaaaaacaatactgacgttgattaaataa

SEQ ID NO: 438279 - DNA, 909 bp, Serratia marcescens
atgaaacagcaatctctttccattacacctatagcaataaaagaagtagataatattagcatgggcattctcccaaatggagaaacattcttatctcttcaagggctagctagattttgtggtatggctccgagctcaataattcaattagcacaagactgggaaaaaggagaagctcaagggcgccaaagaggaaggcaattagaagagctaataaaagaatggacggaaactgaacaagccccagatagtttatatgtacaattgagtagtaataactccataacagggactattcacgctgttccagaacaaatcgttatggccataaccgactattatgctcactttgcacaagtaaaaaaagatgaagccataataaattatcgaaaagcagccaaatttggcttacgcaaatatatatatgagcgcctaagttataaagaaacagacgccatatcaaagagctggtcattatttcaagagcgaatcttattaaatgagactccacgtgggtatttcacgatgtttgatgaggcaacagcgataatagcctcactaataagaaacaacattattgtagatgattcaattatgccagatggtagtttaggaagccattgggggcgttattggagagcaaattccctctcagaaaaatatggggaacaaataaaaataagacataactttcctgaatcttataggcagttagacccggaaataaatgcataccctcacagtgcactttcagaatttagaggatggtttgaagacgtgtatttacctgaaaaatatcctgagtatgtgagaagaaaagtcaaggatggaaaaataatgcttgagtctatcccagtcttactatcagcagtaatgcctcccgaggtttctgaaaaaagattacgttag

SEQ ID NO: 438280 - DNA, 1476 bp, Serratia marcescens
atgaaatcaaaaaaagaaaaaagaaagcaaaaactcaaggctagaagcaaaagggccagggagatgcgagagggggtaattgaaaaatataacaaaaagaaagatatttttacttacggaaaacgtctgacaagacgtcaatttgatgcttactgctattgtcgaatgccactagtcagatttactgctcatgaagttgaatggtactcattatttgataataagttgcttggtgttgtgataatggatgtaactgatgaggattatggttttatcatactgggtagggatgcaaggaagctattccgttgcattgatatttgttctgggttttatcggacagcaatagaggcaagaaaagctctagcattaaaaatttccgaaagttataagggtaacatcaaggatgtgtatccgcaaaatgatgaggtagatgttgggtttaatttattcacagatgttataccagaaagtgagcagcatagaggctataagatattaaaaaatgaaattaggtttgaagctgcaagaaatattatttctgaaattgtcaattcatttattgataatgatggtcactatgagcgagaatttcaatcggtaaacttccaggcgaaactttgggagctttatttgcatatgtatattcataatgcagggcttgccattgaaaataatcatgctgcacctgatttcgaagttaatgattttggtaagaagtatttcattgaagccgtgacggctaacccatcaactaactcacagcgaccagatttaccggcgcctcaaagtcatgaagaaattcaagagcgtcttgacaatttcatgccgataaaatttggaagccctttgtatagtaagttatgtaagaaatattgggagaaagagcatgtctctggtaaccctcttatattggcgattcatgattatcacaatgataatgcaatgacttggtctagaactgcgctttctgattatttatacggaataagaaatcgtattgttggtggaaaagctacgttaaagaaagttgaaaaacatgtatgggatggcaaagaaatcccttcaggttttttttaccaggaacatgctgaaaatataagtgctgtattgtttagtaatcaagcgacaataccaaaatttaatagaatgggtaaactggcagggctggggagcaatggtgttaagatgataaggaatgggtatttgtataatccggatccagacgccatttatcctataccattctcaaaagatgttgacgatccagattatgaagagtcttggtctgagggattgataatgtttcataatccaaacgcaaataatccagtagatattaactcattttcagatatcagtcatatattttattcagaggaaaaaggtttctatggacaccatcaagcgtttgatgttctaggttcagttacaatagtcattagtcaccatgataaagatataaaggatgcttga

SEQ ID NO: 438281 - DNA, 348 bp, Serratia marcescens
ttgagaaaatatgccgttatcaccgccgcgttgatgatgtcttcctgcgccacgccggaaaagtgggaagcgcaaacggcggctccgaccccccttgaagccgccagagcaagctgccgacaagaagccgaacaacgctatcccgtgagcctgtctttagacacccgctcgcctgtattctcctccatgaatatcaacggcgcggatatccccaatactcacggcgtcgtttttccttcggaccgcaatgaaatgcgcagaaaagaacacgttaatgcctgcatgaaattggagggatgggaaaataagaataaggtgacggggttattggcctttttatttaactaa

SEQ ID NO: 438282 - DNA, 144 bp, Serratia marcescens
atgatgaagttatgttttgtcatcgccgccatctgggccgtcgttgctttcgggctggtcggcctgctcgcctaccgttactgcaaattctgtcgtgccttcaatcgccaatgtttgcagcctgaagaacgcaattacgactaa

SEQ ID NO: 438283 - DNA, 345 bp, Serratia marcescens
atgaccacatcagcagagcgtaaacgcgcccagcgccagcgcgataaagcgaacggcatcaccacgcttaccctacgcgtagacagccaggaaatggtgatgattctggagggctgcgaacaacgcaggattgccagggaaccttacgagataatggaatatctgatcggcctcatccggcaagacaacaagctgttgcataagcaaatggctgaactacataaaagtagttgcaggaagtgtggtgacaccttacctggtgacccagctggctgctgtatgcaaggtgactcacagtgctggcagacggccggatacaaaaagctaatgctgaaaactctatag

SEQ ID NO: 438284 - DNA, 2280 bp, Serratia marcescens
atgaccatgcaagagttacaagcacgattcaagattttttacgcatccattacattgcgtttttacagcataaggattcggttttaccaatggcgtctcagtcatggactgaagcttgcgacatttttgctgttgggagggatcctattaagtgtgttagggatacctctactccagcgtgtggtcggagtctatttcagcaatagcgagcgtttggctgcattaagaaccctttttggcggcaccggatcggcgctaatcggggcaacggctattgcgttctcgctcgttgtttttgcaatgcagatcaatgttgagcgaatgccgcatggtttatttaggaggctaagttccgacagaaggctacttggatcatttcttggttctttctttatagccctcattgttgcttctatgtctatgattaaaaatggagattttgcggttcacgctattgttgtggctacgtggggaacactcttaatcttgctactgtttctctacgcatatcgacgtgccctccaacttatcaatccaatcgaacaactttccatcatgtcgaacgctgtccgacgtgatctgcataaatggaatcatctcgcagataaagccgtaatcctgatgaatgaaaagtcgcctcccaatgtcggtaatgacggtgaagaaattcattttaatgccgccaaggctcatttcttcaaagttaacgccgactggactaaaacagcggaccaagcaattcactatgcaatttcctatgcaaagcgctttgcggaacaaggtgactatgaagttactgaatacgcctttaagtgcattatgctcgtcaatgctacctattgtgcaacaaagcacggtacctttgtcggacataatcccttctacgaaataccggatgctactgatggttttattaatacatcgttagagctaatgcggcagacaatgcaaactgcattgagtaaaggagacgaacgactggcgggaagcactctgcgtggtatcggcggcctttatggcgtgtatctgatgatagagtatccgggacgtgaccaaagtaagcaccatgcatcgcttgcggcgagttacatgggatctgcagtcgaatctattgctccacataacatgccagacctcatgatggaaggtatccggctgatggggaaggcgtcaatactagcgctggaccacaccgacccgagcgggattatcggcatggcagggaagattgctaccctatcaaccgtcggtgtattcaatgcaaatcatcaacccgtgacgttgacggcattcgatcagtttgccgacatcacttaccatcttcttgtaaagggaaagcataatatcgattatccgatcggccaattgcgttcgaatgtgaccgaatcggcgaagcgttttttggagtcttcggacacgccattcagttcacgacattgcaatacgctaggaccttatttttcaagcagaagcttttcatcactccggagtagactcacatctctggtcaacaagttaatagaggcgcctgtagacaacacacgtgctgttgagcttattgccaacattgagacttgggctgaccggcttaacgcttctcagaaggagcttcttttacttgccgtacagaagcgatcctctttcatctttgatgttatctcctgggctgttgggatttcagagctgctgaatgcactttcgaatgcgcctgcctgctcaccgcatctgaaagataagcttagaaatcatgccaactggctcatttcgacactgtcgtggcttccggacgacaaggaatcagtaacttttgttgagaattactcgcttaccgagaatctgttcgaggcggcattagacggctttgatcgtaactgcctagagttctatgaaagttgcaagcagctcttgattggttgggcgaagaagggcggtagacatgaatctggccggggaattctggaaaaatcagtgcaagggctagtagcccttgttataagtgaagggtctgctattgcaacaactgagctgaaatcccagttccgagcaatgctcgccagtgataaagcccccgctattgaggtacgaattctcgccgctactcgtcttgtaaagagcaccaacgagcttcgacatcatgccgctatgcattctcgaatcgattacatactcgcaaaactcaatcacatagatgtgagtacactgatatatgagatggcaggaattctcgcgccagatcttcagtttagtactcgccccggtaagggcgaatctgagaagtaa

SEQ ID NO: 438285 - DNA, 1038 bp, Serratia marcescens; identical to SEQ ID NO: 429272

SEQ ID NO: 438286 - DNA, 2211 bp, Serratia marcescens
atgacaactatatctgcccttgtaattgactcgaaggctatcagcatattggatcgggcattcatcgaagattcttggatgcagaaattcgaagtaccacaaaacaccgatggcctacgccgagtgcaattagatgacatagtttttctactttcaaaagatgccgatctagatgaaaactatcttgtcatcaatactactgttttctctaaaaaaggtatagtggccaaaccgtgcatggttttcgagcgcatcatccgcgttgcattgcgacattttgaccgtaatatagcaattcccgttctatggcagccttatttctccggctctctactttcgatttacgcgcagcctccccgagatacccaacaacggatttatttcgaccagtcgccagatagtaccagctgcctatacgcgttcgccatcacaagcactccagaagacctagaacgagtacctgaagacaattctctgtatcagcgtgcaattaacagggtctgtgatgctctcttagcggaatctccacccgtcccaaatgttggtaattttggtgttttgcttactgaacccttgggtgtcagactggctagtgcagggactttgcaggaatggtatgagcaacgacttaatcgtgagcaacgagaatttgtcgataggtcacatgatcgccccgtaagactacgtggtgcagctggtactggaaagacgcaatcaatggtggtgaagtgcctgcgtgacttgtacagcgatgtgggaaacgataaaactttcgcattcctaacccatagttcggcattggctaatacggtcatacgaggcatgcttcaggcacttgatccaacagaaaaatggacatcgttaaaaacgacctcgggacaaccgaaactgtggatcggcactatttacgagcttgcgcaagagaagttgggttatgagaaaaaaggactgcagcccctgtcactagacggtcgagatggacgtgagtatcaaagaatgctcattgtgcaggcaatcgagcaggcagtaaaagaaccacgtattgtgttggattattttatacattgtcctgatttccaactgcgtttagagaaacatagcgatgattcctcgctaattgacgagattatgaacgaatttgcctgtgtgttggatctggaagcaattaagaaagatacgcatgacgctaatcgttatgctgcacgaggttctcgggaaccttggcagatggttctaccaactgaagcccaccgtcgagttgttttagagatccacgacatatatcggacgctactacggaagcagaagatgctgagtatggatcaaatgatcgctgactttgaccgttacctcggtactcacgagtggggagcattacgtgatcgtgacggtttcgatctcgtgttcgttgatgagtaccactatttcactcgagctgaggcgatgttgcttcacaacctctttaaaacgcgagcgcaggttagtggtcggtggccattgctaatggcctacgatatcaaacagagtaccaatgatgtcgctattagtggtggagtggaaaagtttcgcaacccaggcgttggagagtctgtcttgacagaactcaaacaggtttatcggtcaacaccgcagatcacagcgttcctgagtgatcttgatgcttcatttcctgccatggaccttgagggcgagtacgcaacctacacagctaattctcgacaggatgatggtgatatcccaaccttaagcatctatgacacagatatcaaactagttgatagcgtattcgcggaggctgttcgtatagctcgcagtatagaaggtggcggaagccaagtagcggtactgtgtttgaacgaagctttgttcgataagattcgtgttgctggccgcgtccgagacaaactagtgccggtcatatcgcgcgatgatcttaaagaactacgttatgccaagaataaatgtgtcttcagcatgccggaatttgtggcgggactgcagtttcatacagtattcttaatacatgcaaatagcgcggattatgacgaagatcttggcttcggctcacgccgacgttatgtgtcacgtgtttatcttggtgccagtcgggctgtttacagggtcatgctagcaagctcaaaagaacatggtgggccttgccaattgttggaagtaccattggccaacaagaccctgaaggatatcacgtga

SEQ ID NO: 438287 - DNA, 870 bp, Serratia marcescens
atgacgggattttttaagcagattgaagataatgaagatattcgccaaggtgatatcatccgcaaacttaatcctgataccggagaagtagaaaaattgggtgtcataatcacggccgattgtgacattgctcaaaagaaagctagcgaacgctatacatggttagaaatagtacctatgacagtttatatagaaggcccgtgggcacaggagcaattgcgtaggctttcagaaaaacgttccaattctatatgtgagtatcttaatagtcagatccgcaaacgacagcttgatctaacgcctcttacacatgattctgtcgtgcaatggttacgcagtaagtccgccgaagatattttaaagagtgtcactggggaaaatccagggctggaccagaagcagttgcgctatcttcagggatttgcactgacagtatgtacagacgaaaaacaaagctccttcaacttattaaaatcggcttgggcgtgctttgatatcaatgagaaaaatcagcaggaatctgtccgagatgcctttaaagatagtggtggcttccaagactattttgtacttccagagttacctcgacagaagggtgttggatttgtcgtaatgctacgatcaatgtggacaatcatggcccccgagctttatctcactgagcaagatgcgcgtatagatggttacccacacgcttatcaccgagttggaagactcaatgatagcattcgcttctcaatcactcagaagttggcatttctattctcacgtatcggcatgcctacgttctttgaatctgcctgcaagaccgctgctgaattcacggctgaggaatttttcaagaaaaatgagcaagaggtacatccctga

SEQ ID NO: 438288 - DNA, 264 bp, Serratia marcescens
atgaacaccctggccgaccgctattaccgcgacacccattaccctattccgcatgccgattttctgcgtcttcagcatgcgcacgccaccggcgtgctgttccttgacctgctggataccctcgacctcggcgggcagcgccccgatgccgtgcaacaggcatcgtttgcctcggtcattgccttactgaccgaccagctcggccacgtcgtcaacacctgtgaaacccaaatccttgcccgcatggaggccaccgccgcatga

SEQ ID NO: 438289 - DNA, 192 bp, Serratia marcescens; identical to SEQ ID NO: 437351

SEQ ID NO: 438290 - DNA, 276 bp, Serratia marcescens
atgactcaaaaactgactttagaagaatggtgcaacgagatttacccaggtaaaaaaccgtctctgcaaaccttgcagcgttgggccaggaacggaaatttttacccggcagcggaaaaagaaggccgcgaatatcggctgacaccagggactatttacatcaatcccaaagatctcaatttgggtagaaaaataaaggaagcacgaagcatcgagccagctcgagctgcgtttatggagaaggtgctcaatgacacggcgaagggagggttatga

SEQ ID NO: 438291 - DNA, 258 bp, Serratia marcescens
atgaataacgaaaaattcagcaaagacgcatacgacacggcttttgtgtacaacgttcagcagcgtttcgcagcaatgctggttcatacaggcaactttaacgtgaatcgtcgtggcgctgacatggtttcatttatcgctgaccggaaagttgattatcgagcggcacatcccgaaatgctgaccacgggggaaaccatcgtaaaccagcagcatttcactgatttcatttgctctggtgcctggcgtagacactaa

SEQ ID NO: 438292 - DNA, 462 bp, Serratia marcescens
atggaaatcaaacacgagcagatccgcgaagcgctgcgcgggtgggccatcgaaacaacccagcgcactgtagccgccgagatcacccgcgcttattttgacctgcatttacaggcgccactgctggcgcagatcgaacgtgccgatggcagcgttgacgatgcagcatggcacaacaacaaacagcagatctttcgctggctggacggcgatagtgtggccgcgcgccgcaagattcatcagctgcaaccggcgatcctcgccgcgctgccagcagagttacgcgcccggctgattgccggaaacagcattgaatatcttgcaatccgcgcgctgaaagaacaccaaggggcgatcgccgctgcgctgctgaacgcgttgccgaccgactttgaacgggagtgcgacaaagctgagcgaagcctcaacgagttacggcgcgcctattcaaccctgcattaa

SEQ ID NO: 438293 - DNA, 201 bp, Serratia marcescens
atgatttgctgcggtgccggcggtgttctgctgcaggagctcaacaacagcggcaggcatatgctgaccagcacaggcatcattcttgattgcttcacgatatttcctctggtagttttcgccctgctggcgcagctgctgctctctccgttgttgttctgccatcaatgcgcgattgcgggcgtcatccgtgcgcaatga

SEQ ID NO: 438294 - DNA, 141 bp, Serratia marcescens
atgacatgcaatttggtctgtgaaatcaaaattcgtcgctggatcaccccggtgctggtcatcgcgtgtctaacaaaatgggattggttgctgatgaaatgcatcagtatgaagattaaaaccgtcccgactgagggatag

SEQ ID NO: 438295 - DNA, 1059 bp, Serratia marcescens
ttgaatatttccgacctattgaaaagagaaaataataatttagatttaatacgtattatttgtgcttactttgttatttactctcactccttcgctttatctccatctaatggagatgttgattttctactcaagctaacaggaataggctttattgcatttagcggtgtggctgtaaaaactttctttttgattagtggtcttttagtagccaatagtttacttaccactggaaacattactaagtttgtagcttctagatttctacgtatattccctgcattcttttctgtcgtgatattgttagctcttgttgctggccccatattaaccactttagacacatcaatttatttaagagaattcacgacatggcattacataacaaaaaccttatcattagacattcagtatgttttacctggagtgttcgataaaaacaccactcaagcagctaatggttctctttggactattccatttgaagttaaggcatatttttaccttcttgctttatatatattatcaattccgctagggaaatataaaacctatttcatagggatcgtttcaatcgcaatcttcttagaaccgcttacgccatttaagggggtgttattagcgaaatcagacgaccctagtatttatgagctatatccattctttgcttttggatgtttgcttgccttggcaaaggatagaataaagattggggtttacctgcctattattttcggcgccgtatatctgctccatagcagcgaaacatataaaataatgtttttctacttatctgcaagtacatttttgatttatgcatcatcactaagaatggttcggaaaataaaaataaagcatgatatttcttatggcgtttacctgtgggccttccccgtgcagcaaacgttagctaccatgtatctaggtcaaccatacgtaaatatgtcactatcgattgtgataacaactctcattgcttatgcaagcttcatatttattgaagcgccatccatgaattttcgtcataaaataaataaatttttttcaaaaaataattga

SEQ ID NO: 438296 - DNA, 837 bp, Serratia marcescens
atgcagactgaacctgaagtattaaccgaccacacagcggtgatttgctccaccagcattgaacgtatcgtcaccggacgtaacgccgcgctggcgcagattgaagcactgatccaccagcttgatactatctcaacgctgaccaacagcatcggtggtggcaccgccacagactggggtatgcggccgggacatcgctacgactgttggtttacggaaaaaccggaaaccgccatgaaagccattacccgcagtattgatcgcgatatatggcgagacctgatgctgaaatccggcatgctctcactgatggacgcacaggctcgcgctgaatggcacaacagcctggaaaaagaggatatcccaaccgtcaacgaagccaacatcctcagtacgtttgaacaactccataaaagtaagggagaggtatttgaacgcggcgtcatcaacacattcaaaagcctgagttgggactataaaaccaattgcccatgcaggtttggcaagaaaatcattgtggaaggcgtcgtaaagcacgaccaatgggggtttggactcaactggggccggcaacgtgaccggctgactgaccttgaacgcatgctgatgttgcttgatggcaaaccgatcccggacaatcgcgaagatgtcactcgccgtcttggcgatcatatccattcaaaaaggagcagtacctactatgaggatgatatgttcgcaatcaggtactttcagaagggaagtgcgcatattacgttcaaacggcctgacctgatagagaagatgaacgatatcattgccagacattttccttccgcgctcccctcacgcacctga

SEQ ID NO: 438297 - DNA, 330 bp, Serratia marcescens
atgaacagtggcacattccccaccggggcgctgctcactggtattcagtgcagcaccgcgcacatcaccgatggcgacaacacattgctgtaccaaacgtcacaccagcatgaagagtatggcaacggcgagtggctccattttaccgggacagggtacctgattcggctcaatgcgtggcgacatccggtgctacagcttaaacggttgggggtgtcaaaaacctgccgccgactggttgttacgctgatgaaccatcaccccatcgctctcctgcacctcgatgcggcaggtgaaattctgtcggagtttgagacctttgactggtga

SEQ ID NO: 438298 - DNA, 312 bp, Serratia marcescens
atgacgctagtttttaaatatttcgctattgccttcgctgtcgcgctagtggtagtcctgtttaacgttttcgggagcactggcgaaatccgcagcttcgggcaagggatagggtatctgttctggatgacccttggacccggtgccggcatgaccatcggcgccttcctgcgccagtggctgatgccggatgcggtatatacccgtgaaggcatgactgggctactgaaagcccggctgttctggctggcgggtccccagtgtatcggctggctagccggccttatcgccgtcggtaagcaactgacctga

SEQ ID NO: 438299 - DNA, 516 bp, Serratia marcescens
atgaaaaccgtaaaaagtatcacctgccggcgcctgctgaaggcgataattctattagccaccacgccagtttcttatgctgcaaccccggatacgctccgtcaggtacatgatcagcgctgtgcgaaacccgtgttttatgcccagacagcaaaccataaaaaagaggtggagatttgtatcgtcaccccgtcggtatcgtattcattcggcagggccggcgcagaacataaggaaatggacattaccgtgccggcacacaccaccacgtatgcataccagagcaatcaggtaatcagtctgcaggaattcaccatccggaacggcgacacctcataccagatatctgccgggacaaacgatgaaggcaggccgttcgcctccctggacgtttaccagggaacaccggaggcgggtaagcatctggcggaaatccggctcgacccggatacggtggtgaacaatatcagccatgcacttgcacaggaaggcgtggtggaatcggacagcctctga

SEQ ID NO: 438300 - DNA, 564 bp, Serratia marcescens
atgttgaaaccttatccgtttctcaaacaggacacctacgcctggtgtttatcccttggccttcctgttatctggggtctctccgctatcttcctcccacagaaagttgcgctgggtctttatatgctttgctccctggtctgggtgttgctcgaccggctgagcttgatgaagcaggaaaaagaggccccttcattggggtggttcctgctgccgatggtgtatctgaggcaacgtgacgagcgtcaggggaaaccctggcgcttgttacaggtctggctgatttgcacggtgttgtcagccgtggccggcaatcactttaaaatacaatccggtgtcgagcagttggcgcacagtgcgtgcgcggtggtgacacaaatcatgcgggatgacgacagtgatgagctatgtattcgcgtgacggatatgaaagaagaagtcagtggccgtttctggcgggcgcaggcgctgttgaatacaggcagtaagcaacccgtgaccattgaggtcaggggcagggatgtgtatgtcgtcttacccgaagctggggagtcaagaagatga

SEQ ID NO: 438301 - DNA, 885 bp, Serratia marcescens
gtgcccgacaatcctgaacacgccttagacatcctgaaacaacaactctccctactccccgcgtatctctccgcgactatcctgggtcgactacggcaatccattcactatgagcctacgattggcatgatgggcaaatgcggggcgggaaagtctagcctttgcaatgctctgtttacgccaccgcctgcccgggtcagtgccgttcgcggatgtacgcgacacgtgcagccttaccccttcagcctggccacccataccttacttatcgtggatttcccggggatcggtgaaacaccggtgctcgaccgggtatatgtacgcctctaccagcgctggctgaataaacttgacctgattgtttgggtactaaaagccgacgaccgtgcctggaatgacgatattcgttgttataggcaactggtgtcgcacggtgccgacccgacccggtttatcttcgtccttaaccaggcggataaaattgagccttgtcgggaatgggatgtcatcaatcaccaaccttcgttacatcaacaaaagaatctgcaggaaaaagtggctcaggtgaatgctgtgttttcgcctgttcatcctgttttagcggtatccgctccagaggggttcaatatcggcctgtgggttgaagccctgattatcgcattgcccgataaagccagtagtgcagttacccgtcagcttgagcctgtgtatcggacggagaaggtgaccaccacggcacaggagggctttgcccgtgttgtgggtgaaatctttgacaaaagcgtggaagcccttctggagtcgcacacattaagaaattggttaaaacagatccgctatcgactgctctcgctggccaaattgctctggcatcgtttcttttaa

SEQ ID NO: 438302 - DNA, 219 bp, Serratia marcescens
atgacaacgacaacagctactccaggccttatgaacgataaaatggtcagcatggccttcattactgagtttacaggatgcagtgataaatggttctataaactcattcaggacggtgagttccctaaaccgataaagctgggccgcagttctcgttggttaaagactgaagtggagcagtggatgcagaaacgtattgctgactcccgggggcaatga

SEQ ID NO: 438303 - DNA, 1632 bp, Serratia marcescens
atgagcatgttggatgcaattaattaccccctcgggcttggcgcgcaagtcccccaaattacccaacagaaccctttagttcaacagccaatattgccctatcccgtcgaggcttttccgccactcttacaggatgttattcgtgcattgcacacggatacgcaaatcccgatcgaattaataggtaatgcggtgctcacggcagcgtcgctggcgtgccaacctcatgtggaggtcattcagccacacatgacaactgctgaaccgtgctcactatactttttgacgattgccgagtcgggtgaggggaaaagcaccatcaataaaaaggtgatgggccctttctacaccctttcagatagcatgaagcaagagtaccaagaacactttgccgactataagcgtaagcataaactttggaaagttcgagagcgggtttttattaagcgacttcaaaaagccattgaaaaagaccctgatgatgagaaagaagccgaggaacagcttgacgctcatgctctcattgaaccgattaaaccccattgcccggttatgctctatgaggatgcgacaccaaaaacgcttattcagggactcagcgaataccctaccgccggactgatatcggatgaagcaataatattctttaaagggtatgtaaaaaacaatctgggtttactcaataaactctgggatggagggacatatagttaccgtcgttctggtgaggaaagtcgtgatattaaggcctgtctgacactgtcgttaatggttcagcctcagatattagaggactacttaaacaaaaacgaggacattgccaaaggcagtggctttctttcccgctttctattcgcaaactcaacaagcaccatcggtcaccgtcacggaaacggtgataacagtgagtcaacccgaacattaaaagcattgcacgaaaggatctctcctttacttgataagcaacatgcccattttaataaaaacatcacacaaaagagaacgctaaaattatgtaacgatgctgtcgcgctacagcaacgtcgacgtgcagagatagaaggaaaaatggcatctgctcaggagtgggaacatattcgagatcttgcgtctaaagccggcgctaatgctatcagacttgccgctatattcacttttattcaggataatgaaagcacgcagatttcttcggagacgcttgagcaagccttaaccgttataaactggcaccttcatcaggccagcacattactttacccgatgtcagaacgataccagtttgagcaggatgtctatgcgctttttttgtggcttaaaaataaattcattcaaggaaattacttccctattcctgtcaatcacgtgatgaaattcggcccccatcgtttacgcagggtggataacttgaagcccattctggagcagcttatcagcatgggacgtgtctgtcttattcaagccagccctaacgcggcaaattatattgcgatgcccgcaatccccccctttagcggatggtatatacctccagcgtttcaggtaaacggtaggggcccaatcattacttcatctcaaaacgttcggggcaaatatgctgccagtcactttgatccttcccggttgtcatactga

SEQ ID NO: 438304 - DNA, 165 bp, Serratia marcescens
atggcgatgggggtgaccatgacgcagagcaacaacgccatgccgatttgcagtttcattcagaatatccatataagtaaacaagggatcgccagggttctggctccattcgcgttgccaagcctgatgtttcagagcttgaacgctttttctatcaccgtgtaa

SEQ ID NO: 438305 - DNA, 531 bp, Serratia marcescens
atgagtgagcaaatacagattggtgtaaaggtcaacaaagacctgaaaaatgaggtggatgatattttacgcgggctgggtatcaagcccacaacggccattacgggtctctataactatattttacagcacagggaattgccgttcgtgattaatatacaggtgaacaaacccagcactctcgtcagtaatttatttatggatttcactttgctcaaaaaatcactcggtgagttctatgtaaaaatagaagctcaaaagcacgtattcgaaaacgaactgatgcttctgaaaaatgtgatccgtgaattcagcaccaatttccgtcagatagagaaagcactgtatcagttcagcaatgaataccctgttgactggaaaaaagtgtttaatggtgccaaaagggccttttacgtccttgaagcttatctgaagtttgatccctttctcggctaccatctggaagacgaaggggtcattaagctgtccatggcgttgaagatgatccaggatgccgaaaaaaacgcctga

SEQ ID NO: 438306 - DNA, 1068 bp, Serratia marcescens
atgaaagcattttatttatcactgttccttgccggtttatatgctaacgacagccaggccaaatgttatggcaacccgttgggaacggcccgcgccatcgccatcgacctgtcagacaaactcagtgccaagtcacccgaatggagcggccagatccacacacagttttccggtcaatttaattgcgatacccgaaacagtcggctcggttatttttcccccatcgccgatacggccagcaataagctgattgtgggctttggcgacggtaaacattgggtcaaaatagaaacttccgcaccggaaaaaggagaaatcaatctcgccgaaaaagggcaacactcggcgagcgagttgaatattggttataccctcaaggccaccttggtgaagaaatcaggcaacacaacggtaaaagatcggctctacatcgataactcaatgatggtctctgactggaccggcatgtcactctgggagatcatcacctggcccatcacccaggccggcaaattcttgtcctggctgaccggcaacgggtggccgacagatcaacgcgacatgtatatgcaacccctgcagcttacctacacccccaaagcaacaacctgcctgtttgaaaatgcgggtctgaccgtgcagttgccccgattaggcatcgcgcaactggctggtcaaaaccagccaggctacacccccttcacactgaatatgcgctgtgaaaaccgtcaggagaacggtacctcagaccggggcatcgacatgttcttgtcgagcaataacctgctggccacggataacagtgtcatgatagataccagtaccggatcggcaaaggggattggcatccgcctggcacaatccagcctcccctcaacacctgtgctcatgtccacatccagcacccaaaaaggcaatgccacgtccttattcaaagtggcagggggaagcccactggaggaaagatttatgcttaccttgggcgcctattattttccttataatctgacgtcggcaagcaaaggaaagatcagtaccagtgccaccctgaacatcctctatgagtaa

SEQ ID NO: 438307 - DNA, 2508 bp, Serratia marcescens
atgacaatcaataaaaccctcgcctcgctgctggcattggcgcccattcttttcgccaaccggacgttgtcggaagaatttgatacccgtttgatggccggcgattcccgggaggccgatctctcacgcttttaccgccaatcagacctgccggccggccaatataactttgatatttacgtcaacggcacctggaaaggccgcttgccattacaactcggagaacaaccggaacaaactgcacttcgctatagcgacgcagcaacattgggcgtcgacctttcgcgtctgccacaaccgaaaaacaccgcgcagatgctgccactcaagaacctggttcagggcggtagcgtgaagcaggagaccgacacaatgagcatcaggctgtcggtaccgcaggcgcacgttattcatgcagagaacgggtatatcgacccacaattctggcagcagggggagcctgccctgctgctgtcgtacaatagcacctactaccgttcacaattcaaatctggggacaaacgaacgaacgacgacctttatctcggcctgaacgccgggctgaatctcgggggatggcaatttcgcgacaacagtaacttttctgattattccgatcgcggcagcgagtggcgcaacaatacccgctatctgcagcgcgccttttcatcgattacgtcaaccctgaccgccggtgacttctattcgtctggtaacctgttcgattccattcgcctgcgcggcgtatcactggcctccgataccaatatgttacccagttcacagcagggattttcgcctgttgttcacggtgtggcacaaaccaatgccctggtgaaagtggtacaaagcggcaatgttatcttccaggagaatgtgccccccggcgcctttgtcctcgacagcattcaaccaacgggctctggcggtgacctgctggtgatggtggaagaagcggacggcagcaggcagtcctttactgtgccgttctcctcggtgcccaacatgctcaaacaaggggtggccaaatacgatctgattgccggtaacgttaaccaaagcaacacggactacgatcccgcgttcttgcgcggctcgttacaatatggcttcaataacctgctcaccgggtacggcggcgtccttgtcagcgacgattaccgcgcctggttgctgggaagtggctggaacctgccaataggtgcggtgtcactggatattacacaggcaaatacacagcttcccggccacagcgctcagggacaaagttaccggattgcgtacagtaaatttctggacaccaccgatacgaactttactctggcggcttatcgctattcgaccaagggatattatagcttcacagacgctatctatacgcatgacggtttccgccaactcaccgattgggaacacaatacgccacaccgccccggcagtgagcaaaatacccctctggacatgaacacgctcgacgccctgcgtgccgcccggcctcgcaacaccctcaccctgagcctgaatcagcgactcagcgatgacctgggcacgctctttttctccggtacacagcgcgactactggaatgcccagggtaaaagccgggaataccaactggggtactccaatgctttcggcaaagtggattacaacctctccgccagccgggtacgtaataccgaccaccgtgaggaaacacgctattacctgtcagttaatgtcccgttcgatgcattcgaccacaccgcgtacctcaacagcagcgtatccatgaccgacagccattaccagcaaagccagctcagtatcagcggtgtcacgggagagactaaccagttgaattacacgctctccggagccaaccagcccggtggtgtcaacatggccggtatcaacgccgactaccgcacgccggtatcaaccttcggcggttcttacagtgaagcaaccgattatcggcaggcaggactgagcgcccgcggcagcctcgtcgccattccctggcatctgttggctgccaatgaaatcggccacaccatgacggtagtagaagcgccggaggccgccggactgatggttaatggtgatgagagcattgtcactaatcagcaagggctggctttggtcccctacgccagcccttatcgccaaaatacactcacgctctccgactcccagggagcgtccggtgccgaggtcatcaataatattggctacaccgtgcccttctatggcgcagtcaaccgggtcaccttcgccactgaccggcgtcagtcttatatgctgaccgcaacgttcccggatggcaaaccgttaccgttcggtgcggaagtcgtggataaatcaggtacttcccttggttatgtcggccaggccagcgtactgcatatcaagacgacgcaaacgccacaacaccttgaggtcaaactcaacaaacgcgacgcagacagctgcgtgatttccctgtcatccgcagacgtcaattcttcaaaggccctgtgccgctga

SEQ ID NO: 438308 - DNA, 720 bp, Serratia marcescens
atgagcctggctatcgggagcattatgattcgattcatgttattcgccgggttcgccctggcggcggggcatgcctgcgccaacatagtgattaatacaacccgcgtcatttatcaagaaagttataaagacgtcacggtacaactgattaataatggagacgcttcatcattggttcaggcctggatcgatgacggtgatatgaactccacaccggagaccgccaacgtcccttttttactttcccctcctgtcgtcaaagtcgccgctaatggcggacaacagctacgcataaagaaaagcaatcaggtattggccaacgatcgtgagtccgttttttatttgaacgtgctggatattccgccggtaccggaaaaccttgatggacaaaatactctgcagctggctatcaaatcccgcattaaacttttttatcgccctcaggggctgaaaataaagcctgaagccgtagtcgataatatagcaatctatccacggggtgatcgcgtcacgataaaaaacgacgcaccctatcacttcacgctggccaacattggccgagaaaacaaaaaggacgtgttggtcgacgctgtcatggttccgccgttctccagtatcacaacgcgcgtccacgaaccactcagggccaatgaacgcctttcggtcaaatatgtcgacgatctgggtagctataaagaaacaacaatcacatcgcattga

SEQ ID NO: 438309 - DNA, 585 bp, Serratia marcescens
atggttaataaaatcctttcactctcattattggccgcgacaatcggctcaactcacgtgatggccgcagatcaagcagccggcggcattatttctttttcaggtgccatcaccgatacgacctgtaccattaacggcggtaaaagtgctgactttaccgttgcattgagccctatctcggtaacagacgccggcaataccgtcgggcccatcaccaaaaacaaaaagtcattctctctgaccttctccaactgtgcgccggccgccggggctgccggtcagccgctgaaaatctatttttcttccgcggacaatatctctaccgatggcaagtacctgttgaatgacagcgtcaacgaaagcgatgccgccgtgtcgaaaaacgtaggtttctcactggccaaagcctcgtcctctattcctctctctctgaatcagccgttcatcacggacatcagcggtaacagcacctcaccagactcagaaacattgacgctggatgcgtattattacaaaaccaacacggctccggctaaagtgggggccttgcactctaacgtgacttataccatctcttacctgtaa

SEQ ID NO: 438310 - DNA, 1590 bp, Serratia marcescens
atgaagcacggtgtcgtaaatacacaacctcatttcttataccccatcgttggggtagcgatcgtcgcgggcatgacgttcttttccccggcgcatgctgcgccacaagccggagttcccgcattattacaatttgccgagcaatatcagcaagaaagggaaacagatgttgcgcctaaaaaagcgcaaccatccgcaaaaagccccgtccctctcacagataaaccaggaaaggacagtgctaaaataccgccacgctggcaaaccaaagacacgcagatccagcgcctacaggggacgatccgacgtctggaactggagattgtcacgctgaaaaatgcccaggcaacccaaccactggccacgcagattacggctccaacacccgtagatctacagcctttaagcaagttggctcagggattacgtcaggctctgtcacttacgccagaacaagcgcagttgcaaaaacaattgcgggaaatgcagcaacgtgttgcacgggctgatgccactgaacatgatttgcggacagaaaatgccagtcttaacaatcagcttagtacgctaaaaacgcaaattcacactgccaccaccgaggaaaacagcacccttacaacccaattacatcgggccgagcaagataaggcgacgctgcaagcccacctggccgatgctcaaaaagactaccaaaccctactcaccacagcagaaaacgacagggctcagttggcacgggcaaaagacacggaaaccggcttacggaatatgcaaagccaacaacagcagcagctggatgaactgaagcgtcaacgtaccaccctgcaaacagaactggatggaaaggtagccgaaatcgcgaaccaggcagcagagctgactgccttgcggaagactgccccggtaaaaatagatccagacaacctgaaaaaacctgcggtgcgccaagactacgctgccggtgtttcattgggtgaggagattttgcagatgcatgctgagcgccggcgctggggcgtcaatgttgataaacaaaccttgctggcagggctgatagacaccttcaatgggaagcaacaacttgatgatgccgctctcaataaagcacttgaagagtcagaaaaacgggttactcaggctcgggatatcacggtctccgctcagaaaaaacagggggatgcctatctggctcgcttcaaaaaagacaaacatgtcgcacaaacccctagcggagcctggtatcgcattgattatgccggagacagccacattcccgctaatgcgaccctggacgtcgtagtgaaagaaaccttaaccgacggcacggtgatccaggatatggaggccagcggcgcggttctgtcacagacattgtcccagttccctccgctctttgctgaagccttgcatcagttgaaaaatcatggttcgttaaccctggtcgtcccgccggcactggcctacggtgacaaaggttacccacctaacgtgccacctaacgccaccatggtatatacattacgcattgccgaagtgtacccggcaacacagcctaaactaacgccaaccgcgacggcgacatctcgataa

SEQ ID NO: 438311 - DNA, 393 bp, Serratia marcescens
atgtttaaccgtactaccttgcccttgtcactgttgctgatgacctcattgttgagtgggtgtcaccccccctcacgcccatcaccggtcaacaccattacgccagcactgaccgaacaacaggccggccaggaagtacagcgcttgcgtcaatgtcagcaagagctgaaagcactcagtacgctgcaagcagccaactatccggcgacccagcgagcctttgatcagttaatgcgcggcgcggcacagtatgccagcctgcgcacgagtatcaatgaaacgacacaggacaccgtggatgcactttatcgctatcgtgtaaatctgctctgcgcccaaatcaatcaggctgtgctcaatcgcctggcagagcaaagcgggtcggttcaatga

SEQ ID NO: 438312 - DNA, 687 bp, Serratia marcescens
atgaagtccaatgcgacaatattgattgccgaacccaatacgtatttctccctcggctttactcaggggatcatggcgtattttactgcactcggaatacacgtatccgttacccatcaggtcgttgataaagatcatgccgatctggtgtttttggccgcagaacaagagggtgcctatttacgttatctcactcagcgtcatacctctcccgctcatcaacggatttttttgatcaaggaaaaacccagccaatgtgacgctgcccaattcaagcaccttgacggtatattttatcgtcatcaaagccttgactgggccttacagattgtgacccagagtttgccaaacaaccctcagccaacaatgcaaaaaaacgcacgtatctctcgccgaattcccctgaccgaacgagagaaagagatcttgtgttatctggccagaggtcagcgctcctgcgagattagtcgtgctttacgcctcagccaaaaaaccgtgagcgggcataaacgcaatgccatgggaaaactggggatcagccgttctcctgacctcaattattggttgctgcatggtggaatgggacaactcccctctgccatcccgaccccaaacgcccaactcagtcggccactgaccgtatcagaaacagtcacgcatgccttccctgcgatctccgcaggttaa

SEQ ID NO: 438313 - DNA, 294 bp, Serratia marcescens
atgactacggatactgaaaaactctctgacgggttatcaccgacagaacgcctgattgaggcggcaacccagcaatgtatcactcagcaaggacgtaaccccaatgtgcaggaaagctggccaagcacccgagatattgcagaaaattgtaattttagcatttataaaacccgctattttcttctgaagatggccgccaaaggttgggtccaggtgacaccacgaccggtaaaaaatgccctgcgttggtatacctgcaaggacttgagctctgatgtattccctaataaataa

SEQ ID NO: 438314 - DNA, 585 bp, Serratia marcescens
atgatagaacgcgtgttcatcatcgttaatgactttaaggaaaacaaaatgcaattgaacaaaatcatgatggcagcggttgttgcttttggtctgtcttctgtagcccatgctgccgatcagggacatggtaccgtcacgttcacgggctcgattgttgacgcgccttgctcgatctctccagagaccatcgaccagaccgttaacctggggcaggtctccaacgttgcactgaaagacggtggtaaatccacgccgaaaaacttcaaaattgagttggaaaactgcaccgtgaccaccggtaaaaccgttcaagtaacgttcaccggggctaaagcccaggaaagcaataagaacctgttggcaattaccggttccgccagtggtgctggcatcgcgatgacagatacctctggtgcactggttgaactgggcaaagcaggcactgcacagatacttcagaatggcaaaaatacactgcagttcgctgcttatatgcagggattgagcggtggtgaaaccgccgctactgtggttccgggcgatttcactgcgatcactgactttaccctggcttacccataa

SEQ ID NO: 438315 - DNA, 543 bp, Serratia marcescens
atgaggcgaatcacgggttgcatgatctcttccctattgaccgcgctgtcgttcagcccgatggggcaagcgtcgatgcttgttcagggatgggggcgcgtcaatatggaagggagcattctggataccgcctgcgcaatagaggcaggaagccgggatcaaagtgttgatatgtccacattaccattgagtcagattattcgtgatggggtaggtgtgaaacggccttttaccatccgtttgattaattgtgttcgggcccgtccggatcccacgctacctgactggcagcgattcagggtgacctttgacggtgaggggcataacggtttgtttcaggtacaaggttcggctcgcggggttgcgctgcagatcacagatacgcaggggaatattgccttaccgggtaaggcattaccagcgggtgacattatcccgggcaacatgagtctgaattactctttgcgattggtgggaaaccaacaggtattacgggcgggagaataccgttctgccgtacgctttaaactggattattactga

SEQ ID NO: 438316 - DNA, 2544 bp, Serratia marcescens
atggcgtacttatctcctgtgcccaggatatttcgtgctcgcttgttgggtattttagtgatcgcggctctgggcagcaaagtgatatttgcgcaagccgcagacgaagtaaaatttaataccgatattctggatttgaacgatcgcgccaacatcgatttaagtcaattctctcagggtggttttatcatgcctgggacatacccaatggtcattcggatcaatcagcaggatttacccgaacaacctgtggtatttcgagccccggttggagacccgaagggcagtgctgtgtgtttgtcaccagatgtcgtttcacagctgggcttaaagcctgaggtagcgaaagaaattacttggtggcacgaggggcaatgcctggatttaacaagcctgaaaggtatggatgcccggggtgatctgggcaagggcatgctgttcctgagtatcccgcaggcgtttctggagtacatggacgaaaactgggatcccccctcccgctgggacgatggtatccctggattactgttggattataacctcaatgcccagacccggcagcagcaatctcgtggcaataaaggctacagtttgagcggtaacggtactgcaggcgcgaacctgggggcctggcgtttgcgagctgactggcagtcgcgcctggagcacgaaaccggtcaggggaaaggaacgcgttcaagttgggactggagccgatattacgcttaccgtgctattcgcagcctcagtgcacgcctgacattgggggaggattatctgaggtcggaggtcttcgacagtttccgctttagcggcgccagtctcaaatcggaagacagcatgctgccgccgaatttgcgtggttatgcccctgaagtgacggggatcgctcggggtaacgccaaggtcactatcagtcagcagggccgggttttatatgagacacaggtcgctgccgggccatttcgtattcaggatatcaacaacgctgtatctggtaagttggatgtgaaggtggaagaacaggatggtagcgtacaaaccttccagatggataccgctacgatcccctatctgacgcgaccaggtcgagtgcgatatacgctggcaagtggtaagccatcagactggcaacaccatgcggacgggccgttattcgccatgggggatttctcctggggtgtcaataacggctggtcattgtacggcggtgcattggcagggggggattacaacgcggcctcggtggggtttgggcgagatctgctggttttcggtgcactggcattcgatgtgacgcagtcgagagcaacattggagaagcagggggctttgagcgggcgctcataccgattgagttattccaaaacgtttgacgaatatgacagtcaggtaactttcgccggctaccgtttctctgaacgtaactttatgcgtatgggggagtatttagaagcccggcgcaccggggcctcgctaaatcagagcaaggaattgtataccgtctcgctaaacacacaatttcgtgatctggggttgagtgcatacctggacttccagcaccagacttactgggaccgtccggaaaacaatcgggttagcttgtccttgtcacgttactttgatgtgggggaattccgtaacctgagcctgtccctgtcggcttacaggaatacctacaatagtgtacgtgacgacggcatgtatttgtcgttgtccatgccgttcggaaacaacgggtcggtcagctataacagcagtgtcaaccgtaataatgtcactcatggggtgagttattacgatcgcgttgatgagcataccaactatcaggtcagtgcagggacggcacgccagggcgagtcggtgagtggttacgtcagtcatcagggcgacctggcccaggtcaatgccaatgccagctaccagtcaggtcaatattcgtcccttggggtgtcattgcaaggtggtgccacggcgacactggagggtgctgcgctacaccggtccggcatgatgggagggacccgattgttgctggatacggatggcgccgcaaatgtgccggttcgtggttatggtgcgagcacccgaacgaacacctggggcaagggggtcgtcgccgatatcagcagttattaccgcagcaaggccagtatcgatctggatcaactgggtgatgatgtggaggcgacagactcggtcgcacaggtgacgttgactgacggggctattggttatcgcaagtttgcggtgatatccggtatgaaggccatggccgtcattaagctggcggatggcactacaccgccgttcggcgcgacggtgcttaaccagaaagaacaagaaaccggcattgtaaatgacggtggcagcgtttacctgagcggtatcaagccaggagaagcgatgtcggtacgctggagcgggcgtgtgcagtgcgagattgcgctgccaacggtcttgccgaaggcagagatgacgaatttattgctgccgtgtcgagcggtggcgacgatgaacacagagaacacaggtaacgattaa

SEQ ID NO: 438317 - DNA, 762 bp, Serratia marcescens
atgacaagtcacgtgaaaacccctttgagtctccttgccctgttagtgggcggaagcctgctggcgcagtccgcaatggcggcgatttctctggaccgaacccgcattgtgttcaacggagcagagaagtcgcagagcctgaccgtgggtaaccagaacaagcaactgccgtacctggcgcaggggtggattgaggatgagcagggcaacaaaattcagagcccgctgacggtactgccgccggtgcagcgtattgaggcgggggggcagagccagataaaaattcaggcgttgccggctgccaacctgttggcacaggaccgggagtcattgttctattttaatttgcgggaaattccgccaaagagcgataagcccaacacgctgcagattgcgctgcagacgcggattaaactgttttatcgccctgcgtcaatcgtcccgacccaggcacaaatggctgcgccatggcaggagaaactgaccctgacaaaacagggcgacagctatcaggttaacaatccaacgccatattatatcacgttggtggatgccggtaacaaagccggcgtggaaggtattaaagggtttgagccggtgatggttccgccgaaagggcaggctccgttgggggtccgcaccagtatgctgggaagcaacccggtactgacctatatcaatgactacggtggccgtcctcagctcaaattcaactgcagcggcactcaatgtaccgcctctccggtgaaagagcctaagtga

SEQ ID NO: 438318 - DNA, 669 bp, Serratia marcescens
atgaaagaggaaagcaggcccaaacacttttccttgtcgcggcatgagcgacagtaccgttggtgcctcggtgcactagtgataatggtgcctgtggtgctcgtggtcggatggctgttgttgcccccagtccgggctgcggagtgggcgttggctgagcatggggcagtggacggtgctcaggggcggctgtgggtatatggttcgttgaccgagagtgcgtgccggctcgatatgaccagtgccagccaggatgtgttgctcggagatatcggtaccgggcggttgcagcacataggcgatcgcggaataccggtggcggtgaaattactgctgcgggattgtttgcgcatgtcaggcagcgcccaggacagtcggacgggcggtctggtctggagtgctggccagccggcagtctcggtgagctttatggcgccggctgacccggataacccacaactggtccaggtgcaaggtgctcaaggggtggggttgcgggtactggatgaagggcaacgggatgtgcgcctggggcgccgaggaaccccattgctgttgacgccggggcagtcctcactgacgtacagtgtgatgccggagcggacttctgcaccgctgcaagcaggggcttaccgggcgacaatccactttcggctggactatgactga

SEQ ID NO: 438319 - DNA, 510 bp, Serratia marcescens
atgcgacagcctcgaaccggggccgggaacgcggccttgttgctggccttgttgctgttcgcgggcagcggccgggcggcgacccagatgccggacattgtgataaacatcaccggcactgttatcgcatcgagcccgtgcaagatcaacggcgatcgcgtcattgaggttaactttggtgatgacctgatgacatcgaaagtggacggtgtgaattatagaaaaatgattaactacacgctggattgtcggggggctagttccaacaagttgcgactgaaaatacagggtacagcggcatcatttgatagcaccgtattggcgactgaacgctcgaatatgggattaaagctttggagcggcagagttgcaatcccgattaacggttggtttccatttgactcgtcatcccagccatttttggaagttgtgccggtaaaagcgcaaggcagcacattgagcacggggcgattttctgccggcgcgaccatggtggttgaataccaataa

SEQ ID NO: 438320 - DNA, 510 bp, Serratia marcescens
atgacgcaaaaatggatcgtgcggatgggctcttgcatgctggtattgatgctgtgggtgagcaagctgccggcagaggcggcagaaaacatgcgtttttatggcacgttgattgcaccgccgccctgccagataaatgatgggcgggtcattgaggttaactttggtgatgacttattgaccaccaaaattgacggtgtgaattaccgcaagtcaattgactatacgctggattgctctgcggcgggcagtaatgccattcgcatgcaaatacaaggggcgggtgcctggtttgacggatcggtattggcaaccgttgaacgtcgtgatttgggaatagcgataaaggtgggcagttcggactttcccttgtcaattaacagctgggtggctctttcttcaaattcgacaaaaccggcgttggcggcggtaccggtcaaggcatcaggaagtcaattggactcggggcgtttctctgccggggctaccctgttatttgagtatcaatga

SEQ ID NO: 438321 - DNA, 480 bp, Serratia marcescens
atgaacagtatgggggttggcgtattgctgatgctgttgagtggggtgtcggttcaggctaccgctaatatgcagtttagcggggcactgattactcctccgctctgtacgctcaatggtggccagcaaatcgacgtcaactttggggatcgtgtcggggtgaggaaggtcgacggggtgaattaccgccagacggtggattatcagcttcagtgtgagccgggcgccagtggcgtggcgctggggctgacgctgaccggcccgcaggcgccgtttgatacggccacgttgcagaccaatcggccggggctgggaatacggatgacgctggatgggcagccttttgaactggcgacccgggtggtgattgatgcgggccacccgcctgtattgcaggccgtgccggtgaaagcgccggacgcgaccctggaagaaggggcgttcgaggtgctggcgacgctgctggcggattaccaataa

SEQ ID NO: 438322 - DNA, 534 bp, Serratia marcescens
atgcgaaagggaatggaggggctgctgacggcgctgtgcctgacgttgctgctggcaagcggcgcgagccgggcagagacgatgcgcctgtacggggccctggtggcagagccgtgcacgctggccccgggggatgaaaacatcgtgctggattttggcacggtgctggagaaatacctgtaccagaaccaacggactcacagcaaggcgtttcgtctgcatttgaccggttgtgacgtccgtatcgggagtggggtgacgttgacctttagcggtacgcccagtggagccttgcccggttatttggcactggacggagggagccaggcggggggcattgccattgggatagaaaccccggaggggaaagcgctgccatttaatgaaaccagtgcggtgtacccattgacaaccggcgacaacgttttgacgttgcaggcgtatgtacagggcgagccggatgcgctcaacaatcaacgtattcggcgcggtaacttcagtgcggtggccacgtttcatttagcctatccctga

SEQ ID NO: 438323 - DNA, 951 bp, Serratia marcescens
gtggctctctggcaggccgcgtatcagtggttatgccgacagcggcgccgggcaccggcgagtgcagacgtgtggcatgtgcgttttcattgggcaacgctggggccggcattgtttcgccgggtgaccgccggcgattatcgtctttcggccatgcagcttgtgggccggtcgagggcggagcgcagggcgcaatggtgcgcgcaggatgccctggttctgaaatgggtggcgctgaaggtggaaagcctgctaccgactcacgcgcgttgtgctcacctgaaaggccaggggtgtcatcggtctgtggcggaggtcagtcaggctcaaatgtcgggtgagtatgccttcgtttaccgtacggacatacgcggttattaccgacatatccgtaaggagcaggtcatgcggttggttgccgccagcgtgccgtgtcaggtgctgcgggggctgttgaatcagtacctgtattacagtgtggaagatgcgggggagttttatacgccggatgctggaataaaccgggggtgtgccctgagtccgttgataggcgcaagcctgctttaccacgtggatacgtattttagcacacaaaggcatctgttttacgttcgctacatggacgattttttggtgctggcacgaacgcgctggcctctgcgcagggcggtgaaggcgttacataattttttaaatctggcgggttttgaaacccacccggataaaacgcagttaggacgaatagaaaacggatttgactggttgggcgtgtggttctcgggcgaagcgccagagatagcgcccagggcattggaaaaccaccgtatacgacgcctgcggctttacgagcaggcccgcggtcgagggctgtgtgaagaggcggctgaggcgcgggtgcgggcgtatgagacgcgatggaaaagatgggttgatagattgatgtcatgctag

SEQ ID NO: 438324 - DNA, 942 bp, Serratia marcescens
atgaaattaaactatttcacttacagaataaccgacaatcgaaatcagcaaatttattttgataatatctcagagataataaaaaatttctgcctgcatagaaagaaaccactttttgaaaaaaacagaggtttaaagagactttatttagcaatgccttcatcattcgatggaatatattacctgaccactccagcaattactacagcatttaaggcagttgatcgagctaccggtgtagtaaatgatttgtcatcagtgcttggtaaagatagtctcgagaaagtaacttacttttttattgaccctaaactctctttaatcggagtaaccgaaggtaagggtaatgctgatattgatgacttacaattttttattaacgaaataataaaccaagactttaaatcacagatatttacatttgagctttgtacattaaaaatagaaataaaatccagatcagcctcaaggttcaaacttataactgaagctagagtgaagttgaataatgactcagttgcagatgtaatcaatggcttatttgggaaagagccatcaagtaatatggaagtgcaaatcatcgttaaaaggaaggacaggaaggagaatgtgaaagattatattcagccgctactgacaagcttatctacctctgatgataaagactatgcggaaatttatttcagagctaaagcagatgaattccagtcgaacgtgaaagagtttattttagaccaaaaccaaaatatctttgatataataaaccctcatcttaaagcaaagattgaagagcaaatattagagaaaagatataaaaatcaagttgttataagtgagtgtgacgcttatgcacaaaaatttattgggcgcatacattcaactattactgactcactctggaacgagataaaaacagaaaatcaccataaaacaagaggttga

SEQ ID NO: 438325 - DNA, 1152 bp, Serratia marcescens
atgaagtaccgccgacccaatgacaaaaaagaagatcgcttagcatttggtgtgtggccgacagttacccttgctgaggctcgtggaaaacgagatgaggccaaaaggttactggtgcagggagtagacccaaaagccgagcagaaggaagtacaggccgaaacggcaggggcatatactttcgaaaccatcgcccgagaatggcatatcagcaacaagcgctggagcgaggatcatcgttcgcgggtgctccgctatctagaactgcatatattcccgtatattggagccgctgatattcgtggccttaaaaccagccatctcttagcaccgatcaaggttgttgatgccactggcaagcatgatgttgctcagcgcctgcaacagcgtgttacggctatcatgcgttttgctgtccagaacgattatatcgattcgaaccctgcagttgacatggctggagcgttaacgataaccaaagctcggcattatccggctctacccccaaaccgttttccagagtttcttgcgcgtcttaccgcttaccgcggccgtcagatgacgcgtatcgctgtagagctttccttacttacctttgtgcgttctagtgagctgcgttttgctctctggcaagagttcgactttgataaagcttgctggcgtatacctgcaaagcggaaagaaatagaaggcgtacgcttttcccatcgtgggatgaagatgaaagaagaacatatcgttccgctcagtcgtcaggcgctgtccttgctggagagattgaagcagctaagtggtgataacgagcgacttttccccggtgatcacgatcccaagaaagtcatgagcgaaaacacggtgaataatgcgctgcgtgcgatgggatacgatactaaaacggaagtatgtgggcacggttttcggacgatggcacgcggtgctttgggtgagtccgggttgtggagcgatgatgcgatagagcgccagttaagccattctgagcgaaataatgtgcgtgctgcctatattcatacttctgagcatttagatgaaaggcgaatgatggtgcaatggtgggcggattatttagatataaataagcataagcaagttactccttatgaatttggcaagatacatagcggtaaagagtaa

SEQ ID NO: 438326 - DNA, 3300 bp, Serratia marcescens; identical to SEQ ID NO: 436926

SEQ ID NO: 438327 - DNA, 2967 bp, Serratia marcescens
atgcctaattttttcagggattcgaatggtgctctgaatctagccgcacaaacgttagtgccaaaccaaggctttcgtgcaggtcaacttggtgccctgcatgctgcaatggcgcattactcggtctatgccgacccagcgataatctgccttcctactgggtacggtaagacatctgtaatgatggcactgccgtttctggttcagtcaaaacgagtgctcgttgttgagccatctaatgccctacgcaagcaggtgtcatcgcactttgcggagctgtctacactaaagcgtatcggtgctattccggtggatcttgctaacccatcggtgctccgacatgaagggagacctcaatcggaggaagattggcaggtcttagagagccacgatgttgtggtttcgaccccaagtagttcttcacctgcggttgcacctggcgcctcgccagacttgttcgatttaatcgtatttgatgaggcccatcacgctcctgcgagtacatgggctgcatacttagagcactacacgaaagctcggttcgtatttctgaccgcaacgccttttcgccgcgatggccaagtaattccaggtaagctggtctaccgctacccagtaatgaaggccgtagatgaaggagcgtttcatcccgttgccttccgagctgcgcctattcaaaacacggttgatgatcatcatattgacttggtcattgcagagactgctgtaaaccaactgcatctggacttagctgcagggcatgatcatcgcctttttgtgagggcagcaacgatcaatgcagcgagagctttggttccaatctatcaagcgcttggagtcaacgttgaagcagttgatagtaagatcacgaagcgtacccaggatcgctgcgagcagcgtttggtcagtggggaactgcaggggatcgtgtgtgtggatatgttcggggaggggtacgactttccgaaactgaaggtggccgcattgcacactccacatcgttcactggtaccgacaattcagttcattgggcgtttcgctagggtggataaggcaaccggccaagcgacattgattgcgccgctcccaagagttctggaggcacctagcgctcttctgaaagagggagtagatcttgcgagtatgatagatgctgcagcacaagcagagatggcaggcgatgctgctgagttagaaatggttgagcggctcaagctgcggcgaatggccgagtcaaactacgatgcagtatcccctttagcaattgagctctatgcgcatgtctgcgtattccggtgctccacacctccaatcttcgctcaaataaaagaaactttggggcgtgacctgcgagtagtgaagcaatgggcgtcagatgatggagccctgacactaattctgacctctgacgaaaatccaccaaatttcgctacatccgatgtacttgtgaatattcggcatgatgcttttctgcttttatactttgcggactctcaactttgctatatcggctctactcgaagaactgaaaagatctacttgggactgatggacatgatttgcccccaaagttatcggtcattgagctacgaggaaaccagccgcgcgagagcaggtttggagggggtgcgattcttcaatgtcggactaaaaaatacgacattcaactcacaaagtgaaacataccgtacgttaacaggaccggcagcggaacgtgcggtaacggctggtgatagccgggcatactctcaagggcacttctttggaagcggctcgagcggcggagaaaaagagaccatcggagctagcagtagctcgcgtatttggagtaatcaacgtctctccatagcagaatttaaccagtgggtcgctcgattagatggtcgacttgctggcaatgctcccttctcagaaacacgcctcgatgttattcggtcggctacgacgttgcagaagctaccagacttagtgattgcagggacctggcccagagcaggattcaaggcaaatccgaggattaggattcgttgttctgaggatcaacgcccgctctatagccgcctcactgaatgggacctagcagactttgactgcagacctttagaaggccaattgctcttcagtattcactcagaggaagccagtgccaatatgcttttttcgcctcaggggcggatggtgatattgcttgatcagaatgtggttttggagatcgaatcagctagcgaacaatggatgccgttagctgactggttgagtgaacacccgccgatgttctatgcctccgataaatcaacctttgaagggctgaatttaatgcttgcgccgcagttacaggcagtttcactaacaaagggagatacgaaggtcattgattgggacgagtgcgaaatcaaggtcgagtttgtcatcgacaatgacactgaaaaagcacgggaacagcgtgcaaagctacagggaaaaaggactgtacaggaacatctcgaacattacctgcttggtctccctaacgtagtcgcattgttttacgaccaccgttctggagaggcagctgactatattgccgtgaccgtgggggccaatgacgacgtggacatcacgttgtaccactgtaaaggagcaggaggcgctcccagcggggggcgagtggatgatgtgtacgaagtcgccggtcagttagtgaagtccgttttctattgcgatgtatctgtacttcttgcgcatatggaggatcgaatgagtcaacgttttaagtcgccgtctaggtttgttgtgggtgatctgcagacactgaaggaaagactttacgctactcgggcaactcaacttggattcactgtcgtgggcgtgcaacctgggataagcaacgatgcaatcgatgcccacctcgcagatctgatgtcattcggaatctcttatgccatgcagggtggtgcaacaagagcttattggttagtgagcaagtag

SEQ ID NO: 438328 - DNA, 1074 bp, Serratia marcescens
atggattattcaaggttttatgatttagatgataatctgaaggaactactgcttaaatcgaatttgaatgaaggtaatgtggtatctaaaaatagtgggatgtgtggcgatatttatatatttgatcgtggtcctaacacaatcccgcaatattcatgtgcaaagatccctaaattgatagatggaatatctgataaggaaatctatgctaggtttgttaacgaacttgaaaatcaattaaagtactaccaccatcaatatgtgcactgggcatatgatttcaaagaggtaatgggagttccggtagcgctctttcgatactggggaagtgacctcagaaatattatcaagtcttcctctagttctgatattaacaaaatatccattatggcatatttatgtgctggacttagacattgctacagcaaaggacttgtttctcatcaagatttaaaaccagaaaatatatttattcgaaacatgagaaatgatttccgtgttcgagtggagcaggatgtatataactttccgttggtaggtgattttggcttggctaatgcatccgtggattctgaattttttgatggggcacgaccctatatggcccctgaacaatgggaaaggaggccgttatcttctaagactgatgtgtttgctttgggggttattttatttgagatgatgtcaggaggattccatcctgcagggatcaaactgagtgatttttggcctaaaccgattgagggaaatactaaaaaatggactaaggctgaaccatggaggaagtgggtatcaaatggaggggctatctcagcagatgttgaagttctcgttgatggagaaattctagaacttgttaacaaaatgctttcatcaaatcctgatgataggcccgaaattagcttaatgattgatgacttactacaactcttaaggtcacgagatatgagtagctttgtacaagtatcgcacttgattagtcattatgattctcaggcctcacaagtaagtcttgaggaatcttggccgtatctatctcagcgttggaagatgtttaaggcaaagtttggctga

SEQ ID NO: 438329 - DNA, 921 bp, Serratia marcescens
atgaaaacgaagagttcaaccattggagcagtaagtactttcattgaaaggattatgggttttagttttgaaaatacttcacccacagcatttagagggcataagaatgatacgtggaaggcgatcccttctatctttagagatgagtataccgatgcttataataatgaggactctatagttcgtgatattgtttcggctcatcctgccgagtttgagtcagacaaaactatgtttgatcgactcgttagaatgcaacattattcattgcccacgagacttttggatgtgactattaatcctttggttgctttatggtttgccactgaagagaatgaagataaagtatatttgtctaatggtaggataagaaataaaaaaacggatggaaaggttttcatctactttgtgcctgataatcggaagagatattatgacagtgacacagttacttgtttatctaatctctccaatttaaaaaagaaacaaaaagatgatttcctagagagagcttttattttttccaatcgaaatgataaaatggttaatataataaaagatttcaatgatgaagatgataatgttgaacaactttattacaatgcagggatggagaagtctcatttcagaaaagttattaatcccaaacatttcattagccctgtttatgtcaagcccaaaatgagtaataaaagaattatcgctcaatcaggagcatttttactttatcctcatcatccagaactaacaaaaaaacatcagggtaacgatctagatattcatgtggaaacattgattgtacaggcaagagctaaagccaaaattcgtgggcaactggctaggttgggaattcatgctggttcaattttcccggaaatggataaagcatctgaatacatacttgctcaatataataaatga

SEQ ID NO: 438330 - DNA, 1032 bp, Serratia marcescens
atgcttaaaaaacttatagtttttattattgcgatagtggggcttcacagtaatgtgtcctattcttctataacttgtccaggatgtactaataacactgtcaatacaaatataaccagtgcattgggattgggggataatgaagtagggaaaattatatcgagtgcaaatatcgtaactcgtgagtttgactttacagccaatgtaaatcctccagtttatcttaatgaatggtttgtatacgcaggtgagtctgttttacctgcgggtcagcataatactacatgggtttttcggaaggttgatgattatgtatccatagcattgcgatatgttaataactgtggggtggagcattacgcgccatttaacgctctggttttaactgatggtgagtgtagacagcaggtatatacgacatcacctcgctctgaccattggtttcctaggacctaccagactgctatgcgaattgacaagaagattgtttctggcacctattccaagaatatatttgtcggtgaatatggtatctgtatgaattcggcgggtaattgccaaagtaaagaggttgttttctctagggtttatgtttctatagatgtcaccgttccccaaacctgcgagttgaacgctgggcaagtaatcaacatcgattttgataatatttcttctggcgcatttaaaactgcgggagcgattgcgcagggggttcagcccaagtcacgagatattagcgtcaagtgcgataacattgccggtaatgcacagctgaccctgcgtctgcaggcggataaaaccaacggtaatattgtggtttcggatgagaataatgatgtcgggttccgtgtgaccaataatagcgggacgccattgatacccaataacttatccagtgttattccctttaccctggacagtaatgcgcgtcaaaacgtcaccatccaagcttacccggtgagtgtgacgggaaataaacctacagagggacctgtaacatcgcgaggttatttgcgtgtcgacttcccttga

SEQ ID NO: 438331 - DNA, 1263 bp, Serratia marcescens
atggcactgactgacgctaaaatccgggctgccaaaccggatgaaaaaccctataagctcgccgacaatggcaacatgtttttgcttgtccatcccaacggctcccgatactggcgactccgttaccgttttctgggcaaggagaaaaccctcgccctcggcgtgtatcccgaagtgtcattatctgaggctcgattaaaacgtgatgaagccagaaagctcattgcagaaagcatcgacccttgtgagcagaagcgggtgaagaagtccatccccgatgttgcgcagacatttgaagctatcgcccgccagtggcacagcagcaataaaaaatggtctgagtcacacgcagagaaaacgctgacgagcctcgaaactcacgtattcccgctaatcggttcgcgggatatcaccagcctgaaaacccccgatttgcttgcaccagtcaaggctgccgaagcaaaagagatttacgaaattgcttcccgtctgcaacagcgtatttccgctatcatgcgatacgcttcacaatccggccttatcagctacaacccggcggtagacatggcaggggcgctcactacggtcaaacgtcagcaccgccctgcccttacgcttaaccgcattcccgagctgcttgagcgcctggattcgtataaagggcaaccactcactcgtatggcgacaacgctctcactgttgatatttatccggtccagtgaacttcgattcgcccgctggtccgagatcgatttcgatgcagcgctatggaccatccctccggagcgaaaacccatcgaaggtgtcaaacattcgcatcggggtgcaaaaatgcgcactccgcatttggttccactttccaggcaggtaatggtgcttctgaaacagatacagggtatcagcggcgaacacgaactgatcttcaccggtgaccataatccctggaaacccatgagtgaaaataccgtaaataatgcgctgcgcctaatggggtacgatacaaaagtggatgtttgcggccacggtttcagggctatggcctgcagctcactgattgagtccgggttgtggtcgagggatgctgtggaacgacaaatgagccatcaggaacgcaatggggtacgtgctgcgtatattcataaggctgagcatctggaggagcgcagacttatgttgcaatggtgggctgactttctggacgccaacaaggctcgacccacctccccatttaactacgcaaaaagtagcttaccgcgagtgtaa

SEQ ID NO: 438332 - DNA, 780 bp, Serratia marcescens
atgaagtacattataaatggagttgcaacgtacaactctttagactgcacgctgtattgtcctgattatagtctggatatggtcagtttaaaccgtgtgaccaatgagcttctgttgttattcgtacaaaacaatggtgtctcgttgcaaagagatatgattttgaatacgctttgggaaagtaaagggctcagtgcttcaagtaacaatctgaataaccatgtctctatgttgagaaaggcactggctcagtgtggttttcctgatctgatcaccacaatacctaaacatgggtttatttttgaagcggactctatcattagtgtggacgaagagcctttggcaatcccgtctgctgctgttgagctgactctgtcatctcgtgtattgaggaggtcattcttttcaaaaaagatgaaactcatgcttgttatgttgtttatactcatgacttcaatttctcctgtcatctataactatattcggttgcaatctttaagaactccgctaatgagtgtcgaaaaatgtcacttttatcttaccggtgataaagcgaagagtatggagaaaaatgaggctatccaagttatcaaccttatctccaagaggtatggtgtaagttgtaaaagcagtgctaacgtttatttattttctgataacagaatggatgcagttgcggagccctttgtggggtacgtattggctatgtgccctaaagaaagtaaactatcgtgtagtaattattattataacaagtatgaaggtcgagatgaaaaataa

SEQ ID NO: 438333 - DNA, 273 bp, Serratia marcescens
gtgacgttcacgggcccgccgaatgcggcgttgccgggcttgctggcgctggatggcggcagccaggcgggcggcatcgcgatagggatggagacgccggaaggtaagccgttaccgttcaacgagacgggggcgctgtacccgctggtcccgggggataacgtgctgacgctgcaggcatacgtgcagggcgagccggaggccatcaggcagcagacgataggccgcggggcgttcagcgcggtggcgacatttaccctggtgtacccctga

SEQ ID NO: 438334 - DNA, 900 bp, Serratia marcescens
gtgtggcacctgcggttttattgggcgacgcgcggcgacgacgtattggcgcaggtgcaggccgggcagtaccggctctcaccgatgcagggcatcggccaggggcaggggcgactggcggtgtggtgcgcgcaggatgcactggtgctgaagtgggtgaccttgcaactgaatcagcgcctgcctacccatgtacgctgcgcgcacctgaaggggcggggcggcgcaccggcatcggtcggtgaggtgggggccgccctgcgaacggggcggtacgcctttgtttatcgcactgacatccgtgggtattaccgccatatccgcaaggcggcggtggtgtccctggtcggtcgctacgttgacgacccggtgctgctggacctggtgcatcagtatgtgcactacagcgtggagacgggcggcgagttttataccccgaaggcgggcatctgccggggctgttcgctcagtccgctgataggcgccgccgtgctgtatcacgtggaccaatactttgatgcgcaggccggggtgttttacggccggtatatggatgattttgtggtgcttgctccgggacgctggccgttacggcgagcggtgaaggcgttgcaccggtattttacgctggatgggtttgaggcgcatccggataaaacccagttggggaggatagcagatggctttgagtggatgggggtgtggttttcgtcagcggagcccaccgtcggcctaagggcattgaatagccatcgcgaacggcgtgtgcggctttacgagcaggcacgggcacgcggccagtcgcacgaagaggccggggcacgtgtgcgtgcgtatgaggcgcgatggcaacagtgggctgcacgcatgctgcgggcggctcgtaatgatcaatcatga

SEQ ID NO: 438335 - DNA, 624 bp, Serratia marcescens
atggacaataagctgagcgaactgagcaacaacgccagaaaagcagtgaactcattttataactggtcgcagttggcaagctgcacatccgagcgcgttagctgcctgactgtagagcaattgaaagaaacttccgaactgctctccgccctgctggcagaaaacgagcgcgttgccagtgaccttgtcgcccgaaatggcgagattgaagggctgaagaagagagcggacgaactgctggcagagctggaagacgagcgcgccagtcgggagcagtggcagcagaactgcacacgaacggaagagcgcatcgccgagctggaatccgagatgaaggtttgggagtcggcagcgacaaagcatctggcacggacagaggaagtagaacagcgcatagcagagttgtccgagatggaagctcacaacgaatgcctaatcaagaagaatgccgacttgacgcagcagaatatcaaacttggtgagcggctggctacgccagtgcggttgccgaacaagagcgacgacgagttctggttcgatggcgtgttccaggtggcaaagttcgaccgtgcagttgagcgagccattagcgcggcaggcttcaagtttgtgggggatgagtag

SEQ ID NO: 438336 - DNA, 696 bp, Serratia marcescens
atgaaactcgatgaagttctcgcacgctttaagcgcgatgttagcagccacacgatgagcattgagaatgacgacggggtatttcgccaccttcacttcgctcgtggtcgcagcagctgttatcacttcaccctaaccacctggccaggccatttgtgcattggcggcgatatgggcacatacgttttcagccgggtgcatgacatgttcaatttcttccgcatggataagcacgatttcatgcgaaacaaagatgagttgtcgatcaacccaggttattggtcggaaaaattgcagcatggcggacatggttaccgccgtgatgtttataccgaatggtcgcctgaagctttcgaggctcgcgctcaggaatatcttgatgactggttggaatgcgctgccgaagattttgacgacgaagaggcttttgaagaagccaaagaggaagttatagaggcgattgccgaactaaagctggcgtccggttatgagtttgaggcggtgcccgcagtgcatgactttagctgcgagcatatcgacctaactgacttcttcgaaacgagctgccgcgaagccagcaacggctacatctggtgcctttacgcaatcgtgtggggtattcagcagtatgacataagcaagcttgcaggctctgcaatggaaaaattcttcgtgcataccctggaggccaaatga

SEQ ID NO: 438337 - DNA, 462 bp, Serratia marcescens
atgacaaccatcaagcggtttacccctgactatatcatgcacgcggctcgctttgagccgttcgccagagaggcggagcacggtgaatatgttctgtttgatgcccaccagcaagtagtgagcgccctgaaggctgagcgcgatgcgcagcagaaacgagccgatgagctggctgtggagaatgcggcaatgcgccatgcaattaccttcgctaccgcgccagatatgtggatagacaagggatataaccacttcgagtaccgctatcaggaatggtatgtcgatgttttgaacgcttccgccgaaatcccagccactgacgcagcacttgcagctatccaggcgcagggagttgagaaggccatcgagcgactgatgaatatgttcgcaagcaccgggcatattggcgtacctgtcatggctcttgaaggcctggctaaagagctgcgggaggccaaatga

SEQ ID NO: 438338 - DNA, 144 bp, Serratia marcescens
atggtaagcctcaacgcccgcatacaacacaagtacgacctgaccgggggcgatttcgctcctaaacgtcaccacggcaaacacctcttctaccttctcatttttaccctgtgcctgctgactgccggcgcggtatggagttga

SEQ ID NO: 438339 - DNA, 264 bp, Serratia marcescens
atgacacagttgcacatcgggatgcagcaacacttcttatcgatatccaagtttaccctccccaaaaattcgttatctttagatgatactgacatctttgttcctgaattttccacagacattagtaaatcaacccttgagtacaagatcggaaaatactgggcagatgtgtacttagaaacaggcgttggtgatgtagcaatcgaagtctgggttacccatgaatgtgaagaagagaagagacaatattacatcgaccactag

SEQ ID NO: 438340 - DNA, 1005 bp, Serratia marcescens
gtgcgcaaaataggattgtgcagcgtggcgctgctcctgctggcgctcggctgggtcatttacgtcaacgactttcgttttgtcactgaaccggtcacggtgaccgccggcggcaaccggctgaccggcacgctggtgttgccgcagcatgcgccggtcaagcccggcgtcgtggtgttcgtacacggtgatgggccggctaacgccagccgcgacgaaggctattacggcatttgggaggcgatggcgcagcagggctacgcggttttatccttcgataagccgggcgttggcggctccggcggcaactggctgcatcagaccatggcggatcgcgcgcgggaaaccgccgatatcatcgactgggcccggcgggacgggcgcttcgatgcgcgctgcgtggggctgtggggcaccagccaggcggggtgggtgatgccggcggtggcgcgtttgcgccccgacatcgccttcacgctggcgctggcgccggcgatcaactggctgcggcaagggcgttataacacccgggcggcgatggcggcggcaggggatgatgaagcgctgatccaggcgcgcgaggcgcattggcgccacattcagacgctgctcgaacagccggacggctacgcgcagtaccgccgcgagtatggcgccgccgctgcattgagcgccgaccgctggcactttatccgcgctaacatggccagcgacgcgacggcggaattgcggcatttcaccacaccggtgcacctgatcctgggcgggcgcgacgtcaacgtggacgcggacgaaaccgagcgcgtgtatcggcaaacgatcccggcctcactgctgacggtgacgcgcatcgacgaggccgatcatgtgatgatcaaaccgctgttcgcccgccatccgtggctgatcaacgtggttggcctgtttgcgccgcgctcggtgcaatacgacgcctaccgacaggacgtggcggcctttctggccgctcagccctgcgggcgctaa

SEQ ID NO: 438341 - DNA, 825 bp, Serratia marcescens
atgagcacacttaaagaacaaatagaaagggacggctttgtcattatccgaggcatgttcaccgaagaagagatgtctcggatgaatgattcaattgataactttttcaaaaacaaaggggttacgtatcgctacggattaacccaaccaaatatagctgttgaggaggaggcgttctcttgggtattccatcacccaaaagttatcgaagcttaccgcgaggtttttggcagtaatgagtttgtgttcacttctcatgccgatatacatcacaatatgggattcggttggcataaagacgacgcaaaaggtgcgtacttttcgcagccctactttactcccgactgcaaggtgtacaagatgggaatctatatgaatgaccactctaccgatggtaacggaatgtccgttcgcgtggggtcccatgtgaaaaacaaccttgatgaaggcgaggctatcgctttggcgactagtccgggtgatgtcgtgatctttgatgttcgcatcactcacgccggtaaagaatatgatttcttcgagcgcggcctacttaaacttggccgtatattaggtgacccaacagggaaatcgatagtaggaagaaaagtcagagatatttattgtggatttaaaacgggaaaacctaaacgcagtttcttttttactttcggcaccccaaacattttcactaacgattttgctcgcactaatatgcgccggcaactagatcaatcgggcggtaaaaaattcacattaccggattcgttatcggctgagcttcacaaacacggcattaagacattaagtttcgacggcgaactttaa

SEQ ID NO: 438342 - DNA, 516 bp, Serratia marcescens
gtgagtgcagtcaaaaagggaggcgccgccggcgcaatctgttctgtcgcggtaatcatcggcctggtgctatcgaacggtgaggtaaaaaccagccgcgccggcttggagcttatcggcaacaccgagggttgccgccgcgacccgtacaaatgccccgctgatgtgtggacggatggcatcggcaacacgcacggcgttaaacaaggcgtgcgcaagacagatcagcagatcgccgccgactggcaaaagaacatcctggcggctgagcggtgcgttacaagctatgccgccggtgacaagctgcagcagggtgccttcgacgcggcggtgagcatcacgtttaatgccggttgcgcgacgatgcagaaatcgacgatgttccggctgttccgccagggtgacactgaggccgcctgcgatcagttcccgcgttgggtgtatgccggcggcgtaaagctcaacggtctggtgatccgccgtgacaaggagcgcgcgctatgcctggcaaaataa

SEQ ID NO: 438343 - DNA, 1611 bp, Serratia marcescens
atggtttcgttcccagcgttctttctcatgtggtccgagcgtatgcgttgggacgttccggactgccactggcgcgccgtacactggcttgagcatcgtggcgatctggcggtgctgcgttgcttccgcggtttcggcaaatcgaccattctggcggtctataacgcctggcgctattaccgagatcgtacataccgcattctgcaccagtccgagtctgacggcaccgcgtacaaaaccagccgcgatacgctgaatgttctgcgcaatcacccgttgactgttggcatgctgcctgacggccttggtaccgttgagcagtggtgggttaacggcgctgaggatagccgtaacgccagcatgtacgcgaaaggcatcctgtcgaacgtcacctcggcgcgcgccgacgagtgccagaatgacgacgtagaggtgccgaagaatatccagacgccagaggctcgcgaaaagctgcgctaccgtctggaagagcagactcacattttggtaccaggcggccgcacgctctacattggcacaccgcacacgcacgacagcctatacgacgagctcgagcagatgggcgctgactgcctcaccatcaagctattcaacaaagagcaccgcatcgaggctgagaaagccacgaaaaaggcttatcgtctgccgttcaggccggagtacattttcacaggcatccataaaggcgcacgcctgctggtcgaagggaaggattatcgcctcacagaaaccggtatcgagttctccgcgccgcccgatgtgctggtcgattgctacgccgattgcgaatggccggagcgcttcgaccgcgaggaaatggagaagcgccggaagaaaactcgcacgataaacgcatgggatagccagtaccagctgcacagcaagccggtcggtgacgttcgccttaaccccgaccgtatccgcgcgtatgctgtcgagccggaggtgcgcttcgccaacggcggctgctcgatgtggttaggcagtacgcagattgttggggcggtagcctattgggacgtggcgcttggtaagatcaaatccgacgccagcgccttcaccatcatgctgaccgatgcccgcgggcatttgtactggcataagtgtgaagggttgatcggcgacctggccgatttcgacgagcacgacaaaatcatcggtggtcaggtaatccaaatccgagacctggtggtgaaataccaaatcccccgggtagtcgtcgaagttaacggccccggcggttttgcgccgaaactactgcgccaggcgctgaagggtaccggttgcggcgtgtctgaagagttctctattactaacaagcagaagcgcattcttgatgcgttcgaggcgccgctgtcgtcgaagttcctttgggcacatgtcgatgtgctggacggcccgatgtacgatcaaatgcgggacttcaacccggagcttaccaaccaggacgacgactatatcgattctggtgccggtgcgatcggtcaaacgccggtgcgcataggtaagttagtcaagatttcgaatgtgcaagcgcgggaacattggcagccatatgatggcgatcacgaggtcgccgtggactactga

SEQ ID NO: 438344 - DNA, 342 bp, Serratia marcescens
atgcacgaagattacaaaacccgcctgacggcgttatgcgacaaactgaccgatgttgcgatcactgaatccaatcccgacaactggcccggcgcgggcaaggcgcaaaaggactttacgcaggaagaacgcggtgaccgctactgggagaagaaaaacgcggccgcaacgctgacgctgttggttaagttgcattcgctgatcgggatgcacgcccggggcggtgcgccggcagaccctgccagcaacgccgaagcggaagcgaataatcagatcgccaaagcagagaaagaagcacagcgcatcgtcgaccgagcccttagcaaagcgaaagtcggctga

SEQ ID NO: 438345 - DNA, 447 bp, Serratia marcescens
atggcacgtaagaacgtcaagattgaaacccccggacaggaaacctctcaggacgacgacagcgacctgatcggcggtgacgctggcgcaggtatccccgggcccgcaaacacgccggaacagctgaacgacgccaccgctggcgccacggtggtgactaccgagaagccagaaccggaccccgttgccttcgccatgctgaccgcccgcaacgcagcgctgtccgatctcaacgcgcagggttttgccgttatcaccaagttcgaggcgtacggcttcacggacgagcacgatcacccgctgaccaacagccttgagtttatcgcgttagtcaagcaggccaccacgtcacaggccgcgccagccgtggtaaccagcgaagacggcgcccgcaaaaacccaggcaaaccggtgctgaccgagcacggttggcacgtaccaggctaa

SEQ ID NO: 438346 - DNA, 237 bp, Serratia marcescens
atgcacgtggattggttcaggataatcaccgacgtagagcgctcaggcatgacgcagcgggttatcgctaaccacctggacgttgcgccctcgacggtgttctactggaagcagggcaaccaaccgcgctatgctgagggtgaagcgctgatccggttgtgggagctggtgaccgagcacgaagcgcaccagttgccatacagtcgggagccgtatagccgttaccgcaagcgttag

SEQ ID NO: 438347 - DNA, 2166 bp, Serratia marcescens
atgccgaaaaataatatttggggggcgacgcctgaagagtggttccacttcgacctgatcctcggccgtagcgataacctgctgccggtcgtatgtgaccccgtggcgacgctatcccctgttaccaagatgaaagcgctgggtaaaacgcccagccagtacgatcacaagcggcgggttattggcgtcaaaaactggacacaattaaccatcggcgccggcgatttggagcgttggtctgccgagcctgattatggcatctgcgcgcgcaccggtagcggctggctagcgctggactgtgatagcgaagtgccagaggtgcaggctgtcgttcgcaatctgctgctcgagcacattggcgcgctaccgccgcgccggtaccgggcgaacagcaataaatgtttgtacctgctggcgataagcggagattaccgcaaacgcattcaccgcctggcggaagataacggcatcatcgagttgttggccgacgggcagcaggccgttgtcgcgggtacgcaccccagcggcgtgcgcatcgaatgggatggaggtctgccagaggagccgccagtcgtgactgcggagcaactcgaggccctttggtcggcgctggccgctgcgttgccggtggaaacgtcgacggaggcgggggtagggcgcctgcgcgaccgcagcattaccacgcccggcgccacggatgaagtggcggattatctcgacgccaacggctggacgctggattttggcgccagcggcgagcgttacatccgctgcccgtttgaagatggccacagttccgccacagacaccacctcaacagtgtatttccccggcggtactgccggttttgagctggggcatttcaaatgtctgcacgccagctgcgcgcaccgcaacgacggtgactacctcaacgagataggtttccgcaacagcgatttcgaagcgctgccagccgatgtgaccgaacccgcgccgctgccgacgttcaagcgcgacaagtttgggcagattgagtcaaccatcgacaacgccgccaaagcggtaatgcggcctgatttctgcggcctgcagatccgcttcgaccagttccgcgacgaaatcatgttcgcccctgatggtactgaccaatggcagtcgttcggcgacccggattactcccgcctgcgaatcacgatggagcgccgcggcttcaagcctattggccgcgagctgatccgcgacgtggtgatgctggccgccgacgaacagcctttcgacagcgccatgacctggctcgagtcgctcaaatgggacggcgtgcagcgtatcaaccgcttctaccatactcactttggtaccgaggacagcgcctatacgcgcgcagtgtcgctgtacatgtggacggcgcttgcgggtagggtgctgtcgcccgggtgcaaggcggatatggtgccgatcctggtgggcgagcagggcgttaagaagtccagcggcgtggccgctctgtcgcccgaccctgcgttcttcactgaggtgtcgtttgcggagaaagacgacgacctggcgcgcaagatgcgcgggcgcctggtggccgagataggcgagctgcgcggcctcaatacccgcgagcttgaatccataaaggccttcatcacccgcacgcatgaaaactggatccccaaataccgcgagttcgcgacacaattcccgcgccggctggtgttcatcggtaccaccaacgaggacgaattcctggccgacaagaccggtaaccgccggtggttgccggtacgcgtcactgaggtgaatgtcgacgccatacacgcggatgtgttgcagctatgggcggaagcgcgcgacacctttaaacggttgggcggcgtccagttccgcgaggccgagcgcctggccaccgccgtgcacgaacagtacacgattaaggatgcgtggcttgagacggtcgaacgttggttggacgagccggacctcttgacggaagcgacgccacgaagccgcgaatttttacgggctactgacgttttacgggacgcgctgaacctcgaccctaagaacatcggcaagcgcgaagaaatgcgaatcagcagtattttgcaagcttgcggttatcaacgtgttttacggagggtagaagggaaagtgcagcgtatttgggagcaggcgtaa

SEQ ID NO: 438348 - DNA, 222 bp, Serratia marcescens
atggacacttctacccttgcttctcgcataaaagaccgccgtaagacgctgggtatcacccagaccgcgctggctgagcgtgttggcgtgcgccagcaatctattcaatacattgaatcggggcgtgcgggacgaaccagctttattctcgaattggcgaaagcgttgcaatgcgatcctgattggttgctgacaggcgaatgcacaagcgataaggcgtaa

SEQ ID NO: 438349 - DNA, 630 bp, Serratia marcescens
atgaatctggcaagccgagctaagaaacgtcgtctggaactgaacctgacacaggctgaggtggcgcagcgcgcgggagtcgctcaacagtcgattgaagcaatcgaaaacggtaagactagaaaaccccgcaacctaatccccttagctgcggcactacagtgtgatcctaagtggttattgctcggcggagacgtcgtgactgactataattacggcgcacgaaaggtgcctattttgagctacgtccaggcaggacttttcgcggcagaagaatcattggaaatagacggagattttgagtacgtgctcacaacagcagagctgtcggaacgttcctttgcacttcggatccgaggggattctatggaaccagagtttaaagagggggacatagtaataattgacactgaagtctatccgaccccgggagaatttgtcgcagccagcaacggttcacatgaagccacatttaaaaagtatcgtccgatagggattgactcaaaggggaaagaaaatttcgagctcgtacctttaaacagcgactatccaatatgccgctcctgggagaaacctgtaagcatcattggcaccatggtagaacaccgcatcttccgcagaaaacgatga

SEQ ID NO: 438350 - DNA, 903 bp, Serratia marcescens
atgagcctggaatcaaatctcgagttaaacaacaagctgctcacccggcagaacgagctggccgaacagcaaaacacgctgctggcgcagctggtgaacgccttctccagcggcaaaaccttcaccgcggatacgccgcaccagccaaaagccgaaacacctgtcgataagaaagacagcgcggggccgttctatctgcggcgcaccgccgacggcgcgttaaatcaggtgggcaccgagtcggcacgcgacagcatgctctccgatggttatgtcgaaatcggcaaggcgcagttccagcaacttaagaaagaagctgaaaagacactggtcgagcgggttaccctggaagaccagccgctgccggtcgccgtggcgctagcggttatctacggtgcgaaaccggcggcagagctcacatcagaaatggtggaatacgccacccactttgtggaaaccaccgacggcgacgaacgtgacgcgcagatcgacgcgctgaccatggcgctgaaaggcgttgaccgcgcgaccaaacttcacggcgccggcgtgttcgacctcgcattgcagatggttgagcattgggacgcgctgccgggcatcacagagcgccgcgcctacgccgacctgctgctggacaccccgaaagagaagcgcgccaacgtgaagcccgccaagccgaaggcatccgccaaaggccaaaaagaagctgtcgataccgcagaagatccgaaagcactgttcgccaaggctgagcaactgatcttgtcgttggccaaaggtgggtatcgcagcgaggccgtgcaaatccttacagaccatggcgcgaagaagctgagcgaagtcgagccggaaaaactcccggccgtcattgcagcagccgagaaagcgctggagggttaa

SEQ ID NO: 438351 - DNA, 1314 bp, Serratia marcescens
atgccagaccaacacgcaaaactctccccatcatcagcgcatcgttggatgcgctgtaccggtagcctggcgctcgaggcaggtatcgaggatagcggatccccctttgcgcttgagggaacagccgcccacgcgctggcggagatcgtcctgcgcaaccgcatcgacccaacgctggtaggaattgaactgcaaggcggccagaacgcgaccgactatatcggcacgtacccgttagccagcggtgaaagtgctgacgccgggccgcaggtgacagaggaaatggctgaaaacgtacagacgtacgtcgataccgtttggactctggcggagggcaacacgctgctggtagagcagcgtgtcgacttctccgatgtggttggcattccgggttcgttcggtaccgccgacgccgttatcttcgccggtaacgagctgcagatccatgacttgaaatttggccgcggggtgaaagttgacgccgaagaaaacgagcaactgcagctttacgcgctcggtgcgctggatcagttcagcattttgcaggacttcgacagcgtgcgtttgttcatccaccaaccgcggctcaatcacgtttcagaatgggcgctcagcgttgacactctgcgggcattcggagagcgggcgcaggagctggccgccgcagcggtaacgaccgcggcaattgccagctgcgacggcgttgagaccctgccgaacgacttgtactccccaggcgaaaaacaatgccgcttctgcaaagccaaagcgacctgtcaagctcttgaacagttcaccctcaacaccatcgccgacgactttgtcgacctgacccgcgaaatcgcgccgcaaatatcgggcgcgcaggaacggatcgcggtttgcgacagcgctcacctggccgaggtttacggtcagctcgatttcatcgagggctggtgcagtgccgttcgtgcccgagtgcacgccgaactaaacgccggcactgacgttccgggctacaaattggtcgccggtaagcaaggcaaccgggcgtggagcagcaaggaagaagcagaagccatgatggagtccttccgactgaaaaaggaacagcggtacacctacacgctgatcggccccgcaccggctgaaaagctgctgaaaaaatccaacccccgccagtgggcaaagctggaaaagcttattacccgcgcagatggcaaaccaacggtagcgccggcgacagacccacgcccggcgctggttatcaaccctgaaaacgattttgaaaacgtagacgctgccgaagcggatgcagaatccctcatttaa

SEQ ID NO: 438352 - DNA, 546 bp, Serratia marcescens
atgaaagttaaattgcaaaatgtccgtctggccttccctgatctgttcgaagcgaaacaattcgacggcgaaggcgatttcaagttcagcgccactttcctgatcccgaaagaccatcccgtaaacaaagagattgaagcggcaatactcaaggtcgcgaaggataaatggggcgcgaaagcggattctatcctcacgtcgatccgcggcaaccctcagcgtttcggctaccgcgacggcgcggagaaacccgattacgacggctacgacggcaacatgtacattcgcgccagcaacaaagcccgcccgctggtgctcgatcgtgacctgtcaccgctgaccgccgccgacggtaagccgtactccggctgctacgttaacgccacgatcaccatttacgcctatgagaacaagggcaaaggtatcagcgcttccctaggcggtgtccagttcttccgcgatggcgatgccttcgccggcggtggcggggcgagcgtcgacgacttcgaacagatcaccgaaggcgcagacgccgagttgatttaa

SEQ ID NO: 438353 - DNA, 2118 bp, Serratia marcescens
atgcgaaaactctggcttgataaggaaacattttgtgaggtaccgatacgcaacggtacccacgtatacgcggaaagcgccgaggttatgctgatcgcctgggcaatagacgacgagccggtgcaggttgtagacctcaccgccggcgacgccctccccgaacgatttctcaccgcgctggccgatccagattacgaggtatgggcgcaaaactcccacttcgaccgcaccgttatgcgacacgctctcccggatatcctgccgcccgttgagcgctggcgcgacacgatggtgcaggcgctggcgcatgggctccccggcgcgctaggcgctctctgtgaagtgttggatatcccccaggacaaggcgaaggacaaggaaggcaaagcgctaatccaattgttctgcaaaccacgcccaaagaacaacaaactgcggcgtgctacccgcaaaacgcacccggaagaatggcgccggttcgtggcctacgcggggaacgatatcgaggcgatgcgcgaagtgcataagcgcctgccgaagtggaattaccaaggtgcagagctcgcgctgtggcatcgtgaccagcgtattaacgaccgcggggtatgcgtggacgttgagctggctgaggcggcgatcatcgccgttgaaatcgagcaaaagcggttggcaaaacgcacccaggtaatgaccgatggagaagtgcaagccgccacgcagcgcgatgccctgataaagcacatcgtggagtcctacggcgtagagctgccggacatgcagaaaagcacactggaacggcgtatcgcggacccggatttaccctcagaggttaaagagctactggccatacggctacaggcgtgcacgaccagcaccagtaaatataaagcgctgatgaaaggcgtcagcagcgacggccggctgcgcggaacgctgcagttctgcggcgcttcacgtaccggtcgttgggcgggccgcctgttccaaccgcaaaaccttcctcgcccgtcgcttaagcaggacgaaatcgcaacaggcattgaggcgattaaagcgggttgcgctgatctgctgtacgacgtgatgccgttaaccagttccgcgatacgtggctgcatacaggcgcccccgggtaaaaagctggtagtcagcgacttgtcgaacatcgagggccgcttcttggcctggctggccggtgaggaatggaagctgcaggctttccgcgattacgacacattcgtttatgacgcaaaaggcgatcgtatctgggacccccaggcgaaagattacaagcgcgtaggtgctgacctttacaaactggcctatgcgcgagcgttcaatatttcccccgacgacgtcaccaagcaccagcgccagatcggtaaggtgatggagctaggcctcggctacggtggcggcgtggcggcgttcgtcaccttcgcattggtctacggcctcgacctggaggatctcgccgacgctgcgctgccaaacattccgctcgatatccagcgcgaagcgcgcagttggtggcgcaagtccgtcgagacgaaacgcacctacggcctgaccgagcgtgtgttcatcacctgcgattcgctcaaacggctgtggcgcaaagcgcaccccgccactgtgtcgttttgggcggagctggaggcgacggtgcgccgcgctattggctctccaaaaaatacgttcgtctgcaggcggctcaaggttcgccgcgacggggcctggctacgtatcgttctcccttccgggcgggcggtctgctacccctccccggcgatcagagacggcaagatcacgtacatgggcgttaaccagtacagccgcaaatggcagcgcctcggcacgtacggcgggaagcttgtcgagaacggaacacaggccgggtcgcgggacgtactggccgacagcatgccccatatagaggctgccggctatgacattgtgctgaccgtacacgatgaagacattaccgaagcacccgatatgcccgaatacaacgccgaggcgttatccgctttactcgctactaaccccgaatgggcgccgggcctgccgctaaacgctgcaggctttgaggcctatcgctacaggaaggatgattaa

SEQ ID NO: 438354 - DNA, 270 bp, Serratia marcescens
atgaaaatcaaaacccctaccgtgctaattaaccaaaaagaagtagatggtgattatgtcatcgcgatcaccgatggtagtgctaattttcacgatatgcagctggcggttcgcgttagcgcagccccaaacggtgacgattggacagatacgctcgagtcggtttgctggtatatggcgagggaaatccgccggttgcgcaacgaggcaaaaacggaagatcgcagcaccctccccggtaattcgcagctggttgccggcggtcactaa

SEQ ID NO: 438355 - DNA, 270 bp, Serratia marcescens
atggcctacatccgcgaatcaacgatcgagcggcacctggtggcacaagttaaagccgccggcggtatcgcttacaagtttgtctcccccggcctgcgcggcgttcctgaccgcgtagtgctactgccgggcggccgtatcatcttcgttgaatgcaaggcaccgggcgagaaacctcgccctgaacaactgcgccaacacgcccggctccatgcactgggcttcgacgtagtggtgctggatagcaagaatctggagggcattttatga

SEQ ID NO: 438356 - DNA, 186 bp, Serratia marcescens
atgacgccaattactttagatactgacctgatcagcattaaagaagtggaacgcgccacaggttttaaaaagtcgtatatttatcaaaaaataaaagacggggaattcccccctccgaaaaaattgggtgtatcttcgcgctgggtccgcggcgacgtggaggtatggaaaaagcaatttgattaa

SEQ ID NO: 438357 - DNA, 1176 bp, Serratia marcescens
atgaaactcaacgcgcgacaggttgaaaccgccaagccaggcgagaaggactataagcttaccgacggcaacgggttatttttgctcgtaaaaagtaatggcgccaagtactggcgtttccgctacacctttgcgggcaaagaaaagatgctggcgatcggggtctacccggcggtgtccttggccgccgccaggttgaagcgtgacgaagcccggcagaatgtagccgccggtatagacccggtgaaggcgaagaactatggcgcggctactgcggccgcgcaggcgatcacgtttcgcgagatagcagctgaatggcacgagtttagatcccctcgctggtcggtaggctacgcaagtgacattttggaggcctttaaaaaagacatattccccgctgtgggggatgtggccgtcatcgatattgagccgatcaccatgctcaaggcgctgcggaaaatcgaagcgcgcggagccaccgagaaagccgcaaaaacccggcgttggtgtggcgaagtattccggtacgctgtcgcaacgggccgctgcaaatataacccggtgggagagctcaacagcgctatggctggccacgagggggagtctttcccgttcctttctgcggagcagctctctggctttttagacgctgttgatgattaccccggtagcccgctgccaagattaggcgtaaaaattatgatgctggccggtttgcgcacgcacgaattgcgtcactcacagtgggcgtgggtggatttcgataaggccttgtgggaaatacccgctgaatttatgaagatggggcggccgcatttagtgccgctctccagacagataatcgaactgcttaaagagttatacgcgttgacggggagatttaaaaatatgttcccaggcaggaacgatccgtcaaaggttatgagcgaaaacacgataaaccgaatgattcacgcgctcggctataaagataaggtagtagggcatggttttcgccacacgttcagcacaatactgaatgatgaaggtttcaactctgattgggttgaaattcagatcgcgcacgtggataaaaataaaacgcggggtacgtataaccatgccctctatttggaggggcgtaaagaaatgatgcagtggtatgcggattatatagatggtctgcggttgatttaa

SEQ ID NO: 438358 - DNA, 579 bp, Serratia marcescens
atgattaaaatcacccgcaaaaaactcagggaatattatcaacctagtaaaataatgctaggcattttttccgatcttgaattaaatagatttaatattattacgttatgctttacaactacgtgctcttataatccaccgatgatatcgatatcaatagaagataggaattattcttatcacttagctgagcaatctaaggaagtggttttagctattccaggaaagtcgttagccaatgaagccatgcagtgcggtttttatagcggtcgagatgtcgataaattttcgacgtgtggatttacaaaattagagttgcctaatgttgagatacctggcatagctgaagccattgccaatatcgaagttaaagtcattaatcgtatcaaaacaggtgatcatataaccttgttttgtgaagtgttaggttatcacttaaataagaaaatagttgaaaaaaatttagtatctatcggtccaaatacgcttggatatgatttattagttaagaaaggaatgcatagaatcggagtcataaatggtgatgatgataaatacatcgattttttcaacaattaa

SEQ ID NO: 438359 - DNA, 2139 bp, Serratia marcescens
  misc_feature (12)..(21): n is a, c, g, or t
ttgcatgaacannnnnnnnnntctgtgggagctatcgaacgagtacatactttagatcaagaagcggtgacttttgtgcataaaacgtttgctgagtatgctgctgcagttttcatcaaaggacagccgcataatgcgcaacgtgatttactaataaaagttatacggcatgaatcaaaacgtgagacgctttcttttgcaagtcaccttggtctggttcaagagattcttgatgtatggagtgaattgatagtcaatggcgatactgcagcgacaaaaggattacgagaagcacacaaaattattattgacgcggggttaccagtaacgccagagtcactaagtgtttttgctgattgttgctggaaagctgcgacatcatctataagtttgtttaacgcaggagattcgctttgccaaattgcagaacaaaactgggatgttgtgcgcgatcatgtgacttcaaacctcaactcacaggatggctggctttggcttgtcgcttggggatgcctcctgacaggttccccggatgaggtcagctatcatgatgcggtaactgtattgaatagtataaagtcgaaatggccaatacgactgcaaaaaggaaactctatctttgatttcatttctggtcagcacgtaaaaaactgcatcgttttaggcgcagcaaaggttatcctacgagatcctaaagaagcaggactggtcgttctcactgccataatagataaaggaagaggcgtttcagccagctgccttctgcagcttctgaaactctatcaagaggcgggtattgagttagaaaatgaggtgtctcgttattcgttcctgaaccaagattttatgaatgcatacgacgtaattgatcgggagtgtttaaatttcctatctctattagccgacgagtatgacgtttcggatcagaatgatattttgccagagaagatgattgagcttggcgcatttatgacagtatctggttttcatcaactgtcgttaagtggattacatcgtttaggatgttttaatgaagatgtcgtttatctacgcatatttctgtatcaagttgccaggtccgtaggacttgagcctgaaaaaataaagtatcaagccgctatgttgaaaaaacacggtctcagtaacaaatcggtactcaattcctattttttccggctacctgttgtcgatatagatttggctcctgaaaaagttgaaattgacgagtccgattttgatagtttgtgttcgttaattttactagaccatgagtactacagtgttttagcagcactcgttctacatgagcacatcagtcatccacgcgtcttggaatgtatagaaaaaatcattatgagaggtcatggactggccttgtatttagctgtcgagctcataaaagacatgtctgaatcgaaatggcaggaatttatcctccaccggctggaaacatctattcctgacaaaggttgttcatatctatacgatgcactcatttcccccttcgacttgcgtcatgaggaaattgtaaagcaagggctgcgaaatgaatctatggacattgcaatcgctgccgcaaaatttgcgaccaaactcccaccatctaaagcattattgattgagcttcggattatttatgaagattggaaacagctggagaaaacttctccagatggagtcggaattgattcggatagccctcgggatgttcttgctcagattttaatgcagaatttcagtcagaatgatgtggagctcattctggatatggtgcaggagaagcgcagtcccatccgcagtgcaggtgagaaagcattgctcgatgctttggctgaatctgtcgatttacaacaaaacctcacgaattgggtcagtgaaggagcctgtaaaggcaaattgttaggtaagattatcagtaatatcaatttaaatgctaagacagtaatggagcttgttccgtttcttaagcatcagtctgcagagttacgttttgcgtgcatggcacttcttaacagacgatatctcaataatgatcaaatcgaaatgtacgcacgagagcttttaacggattcagaagttgaaatcagggaaaatgcactttcagtgctgtcttctttgactctcaatgataccaactga

SEQ ID NO: 438360 - DNA, 1872 bp, Serratia marcescens
  misc_feature (1829)..(1838): n is a, c, g, or t
atgaaaaacacagtgacagataacaccccgaaaaaaactaaacaatctgaacaagagggggaggggcaaaacaaaaaatccgcggtaggggggagtgccgctgagcgagggttagattttcaagctcgcgttatcgcaatcacgatgatttatctgctgtcagaacgaaaaataacctggttaagcgatatccttaacgatgttccatgcctagttgatgctgaaacagggggacctggtgacgacatttcattactcaccaaaaacggaaaaacagttgaaattcaggctaaacgtggcctgagaagcggcaccgatttgtgggaggcgcttaatgctttggtacaagcgatccataaagaagaaattaattcaggagtgttggttgtctgtcctaatagtagtgcaacgatacgtacaaatctcgcagagaacattatacgtattggtacaggaaggaaggatggactccataaaatcggccacgagttcgttgaaaaatctggactcaatattgaagagctaacccgtgtatgtaattctctgcgaattattacagttgctgcagtcgagggaaacaatagtgaagaaaccaatgctattaaccagcttcaacaactattctgcgagccttatcaagcatggggcatgcttgttgaacacgctcggaaactcatcaggatacggggtagggtaacaatatcttctttactgaatgaattcagacttaacaatttagacattaaaactaattccattgactgtggaattcagctaagagcaacaatctctaaatggtttgaggcaagctattcgcaattcagtattcccggccaagttaaacctgtttcactaaagtcctgttggatcccactaaaaaccgcagtcattaaggatctggaaacgtttcctaatgacttatcacaggctctagttaattatcacagctattcagcgggcaaccggcactcaagtcaaaagttcgatgcctgtaccttgggaagatacattaaaaaaggaataattattggtggtccagggataggcaaatcgatgctcctccgccgtattggaattgagtatgcatcagaatgctatctggtgttactagcttcccttacaagaatagcttctttaattaaacataaagggattccttttgaagaggcgttggttgacgtcgcacttagtgattcgggattgacctatcgaactgttgatttgcaggatgcggtcattttatgtgatgggcttgatgaatgtggttcaagtcaaaaaacaattaccgatgcattgcatagatttgctgtggcctatcccaaagcaagaatcttacttactagccgccctgtgggttatcagcctgggttacttgctgagtggagacattatgagcttcttcctctggaagactctcaggcagatgacgctattacacaagtaatggccgcacttaattttgacagctccgaggctcgatcccaagcactcgttcacgcgaaagaacagatgaagtcccaacatctgaagggggttgctgccagaagtccactaattctgacgatgctggcatccttgtcttcaaaaggaattgaacccggtacctcccgtagctcgctgtacagacagttatttaaattacttgagtcatttccttcaacgcgttctgtcaattctctaccaacagcggctgatcggaactggtttatcaatttgttaggatgggttttgctagagcatggaacagaaccttttgatacaacatccgagcgttgtgtttctgagtggcaaaatgaaactcaagggagccgactcgattgcatgaacannnnnnnnnntctgtgggagctatcgaacgagtacatactttag

SEQ ID NO: 438361 - DNA, 1233 bp, Serratia marcescens
atgtcgtatgctcactacggctttcctgtgctgtctgtgccgttcggtggtggcaagggcgcgaagcagcagtggatcgagtacgaatatcacaacatggatcgctttgatgagatttggctcagcctcgacaacgacgaggtgggcatggaagccgcgaaagagattgcccgccggcttggcactcaccgttgccggctagtctcgctgcctcacaaagacatcaacgaatgcctggtggccggcatgactcaggacgaagtgtttcgttgcctggagacggccgcttacttcgatcccgatgagctctgctcagcgtcggagttcctgcaggacaccatcgacacattcgagcgtcgcgacgaaggtatgtttatcagtccgtggacgcgcctgaacggtaacttcaagttccgtgaatctgaattctcgatcatcaacggcatcaacaaccacggcaaaaccgagatggcggggcatatcgccgtctgcgcaatggcccagggcatccgaacctgtatcgcttcgttggagttgaagccgggtaagctgcttgcgcgtcttgtgcgccaggtcatctgcaacaagcgcccccagcgtggagaaattcagcatgtgttcgagtggttcgacgacaagctgtggatcttcaatctcacgggaacggcgaaggcagaccgtctgctggagatttttgcctatgctcgccggcggtatggcatcgacttgttcgttatcgacaacctcgccaagtgcggattctccgaggaggacgccaccggccagaaagacttcatcgacaagctgtgtgatttcaagaacaccaacaactgccacgtgattttggtgacccacagccgcaaggtggacgagaacgtgcccaccggcaagatggacgtcaaaggcactggcgccatcaccgacatggcagacaacctgttttctgtctggcgcaacatcccgcgcgagactgctcagcaaaagcaggatgatccgagcgctcccgaactcacggacaaagacagggcggcactggcattacctggcacgcttattcgcctgttgaaacagcgcgagggggaagggtgggtcggcgacattggcgcgtttttagagccacggtctcaccaatttttagaaaacgaaaaaggcagcccatggaactacctcgtcgcgcgcgagcaagccgaagtggacatggactgggaaatgcagaacgtaacgagggcctaa

SEQ ID NO: 438362 - DNA, 336 bp, Serratia marcescens
atgaaaattaacagcactgcaaaaatcgcattggaaaaatacctacggatcctcgaagaaatcagggtacaagaaaacaaaggaattgatgaagaccctgacggcattggttttggagcggatgaagaactatttgaagagttggcgcaagccaaggacgggttcaacgaaaatatcactccgagtgattatgctgggttgctcgaagagattgcgctccaccgcaaaaatgtatgtgaactcattatggaaaatgtagcgttaaaagccacgataagccgcttgggtggtaatccagactttatcggaaatatcgatgcatcggggaaagcataa

SEQ ID NO: 438363 - DNA, 432 bp, Serratia marcescens
atgcgtgacattcagatggtattagaacgatacggcgcatgggctgccaatgaaggggctggcgtttattattcgccgatcgctggtggcttcaaagggctgttaccgccatcggggaaatctcggccggcatgctgtgacgacgacggattaatcgttaactcggcggtggcgtgcctgaagaaaaaagacccgtacctgagtacgctgctggagtggaattatattcaccgcataccggtgcgcactattggcgacaagctgggaatttcccacacgcaagtattaaagcgcctacaggcggcagaagggtttattgatggttgcttggcggcgttgaacgtcccgctcgaaatggacaggtattgccaaaaagaaaatgtttatccgcccgcaatgaaaaagcttgtggaattccaaaaggcgggataa

SEQ ID NO: 438364 - DNA, 255 bp, Serratia marcescens
atgcgtggccttttctatttggagagcacgatgaaatttcacgaattgcacgaagagacaaaggaacgcgcgcgtgatgcgctgtgtgcggttgtagccagaggttctgtaaattcggcctcagcaaaattggcaggtgaaaccgttgccgctgcgttcattgctatggagcaatacgagagcgagccagccgctcagccgacgcttgttggttgcgacggcgaagtaaacatccgcatcaccaccaaaccataa

SEQ ID NO: 438365 - DNA, 999 bp, Serratia marcescens
atgagattcctgcccgatcgttttaccctgacgctgatcgccaccgtgctactggcgtcgttcctgccggcacgcggcgagttcgtcggctggctcaacgccctgaccatcgccgccatcgccctgctgttcttcatgcacggcgccaagctgtcgcgcgaggccatcctggccggcagcaataactggcggctgcatctgtgggtgatgttcagcaccttcatcatttttccggcgctggggatgctgttcgcctggtgggcgccgatcgacgtcagccccgagctgtacgccggtttcatctacctgtgcattctgcccgccaccgtgcagtcggccatcgccttcacctcgctggcgggcggcaacgtggcggcggcggtgtgcagcgcctccgcctccagcctgctggggatcttcgtgtcgccgctgctggtcggcctgctgatgaacgtgcacggcgataccggcagcctgcggcaggtgggctcgatcgtgctgcagctgctggtgccgttcgtcgccggccacctgctgcggccgctgatcggcggctggatcgagcgtcatcgcccgctgatcggcaaaaccgaccagacctcgattctgctggtggtgtacgccgccttcagcgaggcggtcacacacggcatctggcatcaggtggggatcggttcgctggcgtttatcgtcggcggcagcatcgtgctgctgacgatcgtgctggtggtgaacacctatatggcgcgctggctgggattcagcaaggcggacgagatcaccatcgtgttctgcggttcgaagaaaagcctggcaaacggcattccgatggccaatatcctgttcccggcggcgacggtggggatcatggtgctgccgctgatggtgttccatcaggtgcagctgatgacctgtgcggtgctggcgaaaaggtatcagcgcaagcagcgggcgcaacaggcgatacccaacgccaacgcgcaggcgtcgcgcgggtaa

SEQ ID NO: 438366 - DNA, 1125 bp, Serratia marcescens
atggcgcgaccacgcaaatataacgtcaccatcccaggcttatcatgcttcaccgacgccagaaccaaaaaggtctactggcgttacaagcaccccgtgacagggaagtttcacggactgggcaccgatgaagaggctgcaagaatgatcgccgccgaggcgaactctcgcctggccgaacagaagatgagccagttgctgattgcccgtgacaagattagccgcaacctcggcgaaggtatatcggtcagcggttggcttgatcgctactggaagattcaagaagagcgctgcgcgctaggcgagatcaagcccatcacacttaaccagaaaaaatatccggtagaggtaatgcggcaggccataggcaacaaagatattactgcgataacagtgcgcgacattatcgataccctgactcccttcaaagaacgagggcaaaacggtatggcgaaggttgtgagaagtgtaatgagcgacgttttccaagaggctcagcaggccggagaggtctcgcctggatttaacccagcaaaagccgctaaagctccgaaggcaaaagttaaacgccaacggttaacgactgatgaatggagaaccatttacgaacaagcagctaattctccgagataccttcaacgcgccatgcttttggccgtagtaactgggcagcgccttggcgatatatctaatatgaaattcgccgatatttgggataaccatttgcatgtaacacagtcaaaaacaggtgcgcggatagctattccgttgagtttgcattgcgatgaactgggaatgagcctcagccaggttatcactttgtgtcgagacaggattgtcagcccctaccttctacaccaccaccacacagtcgcaagggccaagcgtggcggccgcattcaagagcaaactatttcaggtgcgttttccgatgcaagggatgcgtcggggcttaagtggactgacggaacaccaccgacattccatgaacaacgatcactatccgaacgaatttaccgcgcgcaaggaatagacaccaagctgcttcttggacacaaaaatcagcagatgacggacaaatataatgatgatcgcggcagggaatggactgtaattgccgtttag

SEQ ID NO: 438367 - DNA, 249 bp, Serratia marcescens
atgtctcgcacgatgaagctcagtgactgggcgaaagaagagtttgacgaaccgataccgagctacccgacactgattaagttcgctaaaaatggcatgatatcgcccccgccattcaaggcgggccggtactggcgggtagacagaacggcgcgctttgtcggtatgtctgctcgcccggtagtgaaaaaggacgacgatccacgattgaagaggattcttgaagatggcgcgaccacgcaaatataa

SEQ ID NO: 438368 - DNA, 369 bp, Serratia marcescens
atggaaaaccgaattgaagtagaaagcctggtcaccattgctgaccacttgaaagccctggcggatatcaacgattcaatcggcggtatcagctatcaactcaactacagcaacggcgacaatgcttggcgccggcgcgctggaatggcgctacataagtgcaaaagcattcgcgtggcgattcagtgcaaattggccgttttgcgccaagaagagaaagagaaaaacgccgagctccaccagcgccacagtgattttctggtgaaagagctcatggctgtagtgccactggaaacgttccaggaatgcgaccagcgggcgaagaagaaagcggaggtagtggatgtctcgcacgatgaagctcagtga

SEQ ID NO: 438369 - DNA, 345 bp, Serratia marcescens
atgccgctaatcactaaaaatttccgcctcaacgggctggcaaaccagtacgcggccgccgtgtatgcacgcgtacagcagaacaacggcggtgattttttcgaagttcaggcgggcacgcaagcgattcaggtgaacatcgtcggcggcgtcacaggcgttcgagacctggtggatgcctattacctcgaagccttgcaactgaattaccagaactgggagcaactagcgatcctgatgttgacaaaaagcctagacggttcagcactgacgcaaacaggctgggaattctgggaaagcatggttaacgacatgggttccactgtggagggccaggcgaaatga

SEQ ID NO: 438370 - DNA, 762 bp, Serratia marcescens
atgaacaccattaccattcaagacacgcagttgccagtagtggaataccgcggactccgtgtagtgaccttttcaatgatcgatgacgcacacgctcgcccggacggtaccgccagccgtgtttatcgtgaaaaccgcgatcgcttcattgaaggtgaagactacttcacggttagcaccgacgaaattcgtcgggacaaattttacccactttcctctatggcccgagggcacgttacattcctgacggagtcagggtatttaatgctagcaaaatcgctgaccgatgatctggcatggcaagttcaacgtgacctggttaattcatatttccgccagcgtcagcagcaacctaagacgcaaaacgaaattatcgccgcaatggctctggccaacgttgagcaggaacggcgcctgaatcaagtagaagatcaggtcgtggcggtaaccgaaaccatcgagcaaattaagcgaggcacgatcccggttggctgggcgggatattcattgctcaggactaagtcagggctgactgataccaagtgccggactttggtcaagggctacaacatcccaacggacacgatcaccatcatgacaccagatggacagccgcgtcctatgaaaatcgtgctcgaatcagccttcatgtcaacattccgccaaatgatgacggaagccgaaccacgtggcgttcgctggtatcacccgctaatgggccttttccaggttatcggctgggagagtggatcatgccgctaa

SEQ ID NO: 438371 - DNA, 285 bp, Serratia marcescens
atggggcttcataacacaccacatgcctttggcgtgacgtcgattagtaaggaatcgcgaatcactcacagccgccggcaggcgcggaagttgacacctgagcagtttctcgcactgccgatggttaaaacctacgtagagcagcacccagatagcgtgcgacgcgatcccgataccggcgaggtctggacggacaagcccctaacgctgctgtatctggatgtctgccaggccaagaagttgaaaaaagcactcattaaagcaatgaaggagcacggcctatga

SEQ ID NO: 438372 - DNA, 315 bp, Serratia marcescens
atgagcattgaaaaaatttaccaactagatgcgttgcccgacttcagataccagaagactccagaaaccgattaccaccgtatatcaagcgatgcagatacaaaattaattggaattttggatgctatgacatttatcggtaatagcatcatggatgaagcaggaaagaaacatattgacacagtagccattgagaatcttgggagtatcgtctccatactttcagaagttggtatattcataaatcaaatttcatcctccgctcattatcttagcggaattaaggacggctctggcgcagacgccaatcaataa

SEQ ID NO: 438373 - DNA, 381 bp, Serratia marcescens
atgaacacctcattcagctcccgcacgatggcgatcggcctgttgctggtggcgctgattgttgccggcaagctggcgttttacttccacagttacgcagtgcgggccggtgagcaggtcaaacagcaggaaaagacgctggcgcagcagtcagtaatgatctcaaccctgcaagcacaagaccggaagaacagagccttggccgcggagcaacaacaaagagagcagctactacgccagcgcgaggaaacctaccagaggaaattgcgtgatgcacttaaaggcagtaaatgcgggaatagtcctatgcctgccgctgttgttgagctcttgcagcaaaacacttccggcaccccagcaaatcgtcctgttcccccctga

SEQ ID NO: 438374 - DNA, 888 bp, Serratia marcescens
atggttgtggacaatgttaatcagttatctttaataaccacattggtttctctaaaagataaaggagtgccagtttcaatcggaaccggtttcttttatcaggatgtgaatagcggcactatatttttagtaactaattaccatgttatatcgggtgtatctcctggtgaaggaagaggttttttaggcgatgaaattgagttttctgttaggcgtcgtggtaatagaacgagaactattagcttaccactcctaagtaatgacgaaaaagtatggcttgagcacccaacagataaacatgctgacttagtaatgatccccttgcgcaaagagcaagtttataacgcagatatacttgcagttagccaaaatagcacaatgatggatttacatattgaaccatcatcatcagcggtgcttattggctatccgcatggttatcatgacattaggaacatgctgccaatatggaagacaggtagtattgcaagtgagcctgaatatgattttgatggtaaaaaaatcattgtaattgatgtgtcagcatttcctgggatgtctggctcccctgctttttatgtttcacacggaggatataagcttaaagatggatcgtttaactatgctccaggtatgactcatagctttattggtatttatgcaagcatgcagatgattaacagtcaattatatttagaagatgtaagtaactcaagcgggcagatggttgttcatagtgagtcattacaattaggtcatatatggaaatcatctctcatacacgacatagtcaatagtttcaacctagatttatatctccaaagggtatatccgaatagaacaatgctgcccagtatggtagggggaccgttagagtttaagttttag

SEQ ID NO: 438375 - DNA, 156 bp, Serratia marcescens
atgtctaccaacccgaatagcttcaaaggatataaagacttcgctgttttctacaaaacagaggccggggcggtttcagggaaagtaaactatgtgctaagcgaaaaaattcttcccggccaagatgaacgatcagttatcgaaatctgccgctag

SEQ ID NO: 438376 - DNA, 174 bp, Serratia marcescens
atgcataccgatcatcggtttgaaaaggggcgcgttgcgctcgagagttacttcaacggcctgcccagcgtaaacctcgagcaagcggcgtcgatgaacccgtggccggaagtcgcagagtgtgcacatgagcatctggtccagaagattactcgggagaatagatatgagtga

SEQ ID NO: 438377 - DNA, 1314 bp, Serratia marcescens
atgagtgaattttcgactgccccgacagtatccaccccgtctgaatcttcgccaacacatactatgcccgccaagcctggcttaatgcaacgcaagttgctgtttagcctcacattgccctggctggctggtgccgttcttacactgggactgtcggcagtttatctgtttgccccagatttgaatggcggtgatagcggttcggcagcaacaccggacgcatttagtgaatctgagtatgtgcaatctccggcgccagtgacgttggcacccgttacctctgccgggagcgcggattcggttcaactgcaaaacgacgtcgctaccatggtcggtggtgtccgttcttttgctgaaaccaaccgcacggcgatttcccgtttgtcggatacggttaaaacgcagagtaccgcgctggccgcgatgaaacagcaaatggcagacctgcaggcgcagaacaaccaactgcttgtccggttgccgcagttggccagcaactttgccccttccgtgacgcccgtgctggctatggcctccggcccggatggtttgatgaatgatcccgccccggctaacgtttgggcgctaaggcccgaagacttcaccgcgcaacttcaacttgttcaccgcaagacgctcgatagggctgccgccgcggcggtgttcaccgcgcagttgggtaaacctatgtgtgatgtgacaaattggcatccttacgagcgcgctttgctggcagtgtttggtctgcaggtcttcctgaacgatcgttcggcggcgtcacaactactggatgatctcaatcgttcctgtgtagtgagacgatttttacggcgcaagcgggtttcaccagtgccgttgttccagttggccaatgcagcgtttgaacgtgtgattcaggcccccggtgtcaacgagtggttggcggggcacggatatgtgcgcagtgcactcgttgggttgtatgcccgtgacctgcgattgcccccggcgcgttttcgctggcttaaggggattgaccgtacattgtggtatgggcttcactcagcagacaccgctaaggtgtttgttgaaggtgccggtattgccgctcaggctcgcgccgaggttcgtgccagtaagctgcgattgcctcgtccgggcattatggtggaacaagccgttgaagggctacaggccgatctggaaagtctgggcctggtctacccgtatataccggcagtggttcgtcggcgtcaggcgacagaacagtcagtgatgtcagctgtttatgctattaccgacccgccggacagcgatgcggcagcggctccctag

SEQ ID NO: 438378 - DNA, 996 bp, Serratia marcescens
atgcgtgcaaaatctgactatgcgcctttctctgtatacatccgcggtaatctgttagtcgtccaacgtccagtcgacctgggcaagccggctgagggtcggggtgtccgtactttatgtacagttgacctgcgacgccagccgatttttttcctgtctgacgccggggtgatgtgctgcgacaagttggggaatgtcttcacagttgagtccagcgctaatggtggtaacgatcagctgcttgcggcgttgtctgaggcacagttaaagcaggcagaaaattggcgtacccgatggggcggtcggttggtcattaccgctggactgctgattgtcgggctgatgctgggtgtttctctcgtgcactccagcaaggtggggccgttggaactggaacctgggcccgaggttagcctggctcccgcgcaacaggttgtgccgctgacgcttccgcctcatccgactaaagctgaacgccctgaagtgcctgttcctgtccagcaaacgcgggctcccgcgccagaagatggctgggcgctgccggcgtcccttcggtcaaccctgccgcagaagctgcaaagtgctgccgaccgccaattgttcaccgtgaactattcctctggccacgatcgcactttgtatgtgtttgctgatcccaactgcccgaattgccggcatctggagccggctttagtggcggcggctcaaatggctaacgtggtcgtcttcccggtggctgtgattgggcgagaaaaatccattgccgccattaccccggtgttgtgcttgccgccggcgcagcggccggctgcctggcaggcattatttactgtaggtaccgatggacttcagctgggtaaagcggctgcggtcgataagaaagccgacagcgcctgcgatgtggccgaaaaagcgcttggcgtcaacgaggtggcttatcaggcctatcgcattccgggcaccccctgggtgattgctgatgatggccggcactga

SEQ ID NO: 438379 - DNA, 645 bp, Serratia marcescens
atggtgcgtcagaacggtgttctcggcagccgatgggatgaagacgacaggctgcaactgcgtgagcaaaagaaagtcagcgtggaagaagtacagcagctgcaggagggcgagaatatcaccctgtttcggggggaggttatccgtggctcgtcactttatatcgcggatgccgacaagtttaccaaagaagcgatacagattaaccgtttcattgaggtctctccgccatctcttgatgcgttgctggcgcaggcgccggcaactattcgccgcagctacccacgtgccgatcggatacagcagatcgttcgccggctggacgcgccatctgcacgttcagacctggagaacctgcagctgaccgaccccgcgctggccgccctcaatgatctggaagatgaatggttacatatctggcgccgacgcccgacggcggcggttagcaccagcctgttatgggaaacagcgctggcgcatctgccggcgcgcggatgtggttaccaggtgcaggcgaggacgccgatcgcattgggcgtcggacaacctcgtctgatggcctatcaaatgcaacatatcccggttgagaagccggccgacaacacttcaaaagagaatgcaaaatggcaacgaaaatcacagtaa

SEQ ID NO: 438380 - DNA, 531 bp, Serratia marcescens
atgcggacttcactgaaagcctggtgtctggccgcgacgttagcggtcgttccgtgcgctatggcgaccccctcggtgcaggtcgggttctcaccggaagggagcgctctgcagctggtattgaatacgcttaatgaggcccggagcagtatccgtctaatggggtattcgtttacctcacccgaagtggtgaaagccctgacgaccgccaagcatcgtggcgtcgatgtgaaagtggtgctagatgcgaagggaaatcagaacaaggccagccaggcggcgatgaacgtgctggtcaatgccggtatcccggtacgtactgtcgataccttcaagataatgtacgacaaactgatcatcactgaccaagtgaatgtcgagaccgggtcatttaactttagccgtgccgcggcgcggtccaactcagaaaatgcgctggtgctacgtgatatgcctggcgtggcacaaacctacctgacgcactggcaatcgcgctgggatatcggaaaggagtggcgttcgtcgtattaa

SEQ ID NO: 438381 - DNA, 261 bp, Serratia marcescens
atgtcacagaccgtaaatgcagttacttcctcatcgaaaacgaagcgctcttaccgtaaaggtaacccgatgtccgcaaccgaaaggcagctggccgcgatagcccgtaaacgtgagactcataaagaagtgaatgtttttatcaaaaaccctatgaaagaccaacttcttcaattatgtgaagaagagggattaactcaggggcagatgatcgaaaaactcatcgaaattgagactgggcgtcgaaacaaaagaatgtaa

SEQ ID NO: 438382 - DNA, 717 bp, Serratia marcescens
atgagtggaaccccacataacaacaaagtaacctatgacggcttcaactgtaacggcggtaagccgcccgaagccaataccagttggagccatgtaaccaatgcatgggaatggaacgacctgaaattaaatcccggctcgatatctgactggtttcctgaagaagtaaaagaagcactcgaaaataatatctgtatcatttgtggggaaaagaactgtccctatattaaaaataacagagactaccaaaatctcatcaattccctgaaaagtgggaacgtggaagaagcaaaaaaagtttatagaacaaagtttgcacaacttcggaaaatacacaaagcggaagtgatgaaaggactacaaaaggcccgcgatgcaagaaacaatggtgtttgtaccgtgccttataccggtccaattcaacataaacgcgccatcgctacgcctggtgtatggagtgagtggattgagttattaaattcctttgctaacgaaacttcccctaatgtttataccgtcagttttaatccttcgtcgaatatggagtcttcttttgatgtggagataaaatacccagaagctaatggaatgaaaaccattaacacaatggggcccggttcatatacaatcaaagccacagggatcggaaatacatacatcagggtaaaatcacactcaagccctgtgactgttacctttgaattccctgataaataa

SEQ ID NO: 438383 - DNA, 3138 bp, Serratia marcescens
atgattcttaataaaagattgaaattagcgtactgcgtttttctgggttgttatagcttatccattcattcttctcttgccgcttatcatgactccggcatactcggttcgcccgccagttggaaaaccgcagaatttaatcgtcagtgggggcttgaggctatttccgccgaattcgcctatgccagaggttataccggcaaaggcgtgacgatcggcgtgattgataatgccattctctcccatccagaattcgctggtaaactgacgcggctcgataacggtacctataatttcaaatatgacaagaaagacaacatgtctttctccgaccatggtacacatgtggccggtattgccgcggctaaaagagacgggaccggcatgcatggtgtcgcgttcgacgcagatattattggcgccaaattgggtgactacggtaatcgcaatggccgcgaagaactgatacagagctcagcccgggtgatcaacaacagttggggcatcgctccggcgatcagaaaggatgcccaaggaaaagatatctggctacctaacggacgaccagactacgtggcgctgatacaaggcgatgaaattaataagatgatgcgaaataaggccaacgtggaacggagcagtcaacagccgattgcgtccggcggacataattccatggcggcaatgctccgggcggcaagacacggcaagctcatcgtcttctcggcaggcaattacaataactataatattcctgaggcacaaaagtcactgccttacgccttccctgacgtattgaataattacctgatcgtgactaacctgagcgacgaaaaaaatttaagcgtctcttcgaccagctgcggacaaacggccagttattgcgtttccgcgccaggttccaatatttacagcactgtgggtcgactggagtcaaataccggcggcgccgttaatcgcgaagcctataataaaggcgaactgtcggtgaatccccgctacggcaacaaatccggcacttcaatggccgcaccacacgttacaggcatcgccgccgtattgatgcagcggttcccttatatgagtgctgatcaaatatctgcggtgatcaaaactaccgccaccgatttgggcgtgcccggtattgataatttgttcggctggggacgagtcaatttacgggaggcgattaacgggccgaaaatgtttatcacccaggaagatattccgcaggaattctatgtgccgggctcctacagtgaaaaacagttcgtggtgaatatccccggtctggggaatatcgtcgagcccggtacctctgttgagcggcgctgcacgtcgagcgagtgcgacttcgatgcgtggagtaacgacatccgcggccacggcgggttgaccaaaacgggcgccggtacgctggcactgttaggcaataatacctacagcggtgatacttgggtgaaacagggcgcactggcgatcaacggttctgtagtgtccaacatctatattgaaaatagcggcacgctggccggcgaaggcaccgtgggcgccttcagagcggggcggggcggcagcgtcgcaccgggcaacggcatcggcacgttgcacgtgctgcacgatgccgtttttgaccgcggctcgcagtataacgtggaagtggcggacaatggccacagcgataagatcgaagcgcaacgcgctttcctgaacggcggcagcgtgaacgtcagcctagagcacagcaaaaacctgctgtcgcagaatgaagcgcaaagtctgctgggcaacaaatacaccatcctaacgacgacggacggtgtcaacggccggttcgaaaacgccaacccagcgtatccgtttgttaatgtgacgctggattatcagggtaatgacgtcggccttggcatcacccgcaccgccgcccgttttgacaccctggccagcactgagaacgagaaagcggtggcccgtgcggtggaaacgctcaacgcgacggaaccggtcacggaaacggtgaagcgcagcgtggctgcccctaccgctgaagcgctaagcgcactgcaaggtgatgaaggcaaagcgcaagccgttaccgaagaagcggacgtcgtcaccggccatccggtctatgaaagcttcctcggcttcacgtcggccagagagctgcaacaggcgacccgccaactgtccggccaggtccatgcggatatggcttccgcccagattaacgaaagccgttacctacgcgatgccgccaccgagcgcctgcgccaggcggaaggccgccgtatcgcttccgatatcaaagcggatgacaacggcgcctgggcgaaactgctgggcaactgggggcatgcttccggcaacgacaacgccaccggttaccaaacgtccacctacggcgtgctgttgggcctggatggcgagctgtttgacgacggccggcttggggtgatgaccgggtatacccgcacctcactggatggcggttatcagtcagatgctcacagcgacaactaccatctggggctgtacggcgacaaacgcttcggcgcgttggcgctgcgggcggggggcacgtatacctggcatcgtatcgacaccttacgctcggtgaactacggtgcgcagtcggatcgcgagaaggccagctataacgcgcgcaccggccagctgtttatcgaaagcggttacgactggacgaacgacacggtcaatctggagccattcgccaacctggcgtatacccactatcgtaacgaggggatcaatgagcacggcggggcggcggcgctgcgcggcgacaagcaaagtcaatcagccaccgcttcgacgctggggctgcgcgcagatacgcagtggcaggccgatagcgtggcgatcgcgctgcgcggcgaactgggctggcagcatcagtacggcaagctggagcgcaaaacgcagctgatgttcaaacgtaccgatgcggcgttcgacgtgaacagcgtgccggtatcccgcgatggcgcggtgctgaaggcgggcatcgacgtttcggtgaataaaaatgccatcttgtctctcggttacggtgggcaactgtcgtccagtcatcaggacaacagcgtaaatgctggcctgacatggcgcttctga

SEQ ID NO: 438384 - DNA, 2121 bp, Serratia marcescens
atgccgactgaaaaccgccccccggtgatttggcaaccctttaagcgggcagtctaccgcctcgacgatacgttgtcagaagaagaccgccgggctatcagcaccgctcacgggcgcacgctgtatcagcagcgccggcctgtcccgccgttattgcagccgctggtcgatattgcccggcacagcggggcgagcgggcggatagtccgggtgaccatccaggctatcctggccgaaatggcccgcctgaatataccctgtcactgctggacggcagagcgctggcaggcgatgtatcagcatcggcggctgagcgggccgttgctggcggcgtttgccttccacctgagcgatgtgccactcccgctgcaggacgcgcgctgtcggcaaccgctgtgttatgcccgcgccgtatttggccaggatatttgtcagcaggaatggcagcgtttgctggcggtgttggtcaacctcggctattcacgccgcacgcaagagatgttcctgtccgcggtgctgagtctgctgatgctggaaaacggcgatccgcgactcgagagttttaccgaggcactgctgacacgcggtcaacagcaccgaacggaagggatagccagagccgtggggaaagtgtctcatgggctggcggcgatgggcattctgccccgcccgttgcgcatgcggggctacatcggctggcgggagaaaaacaccgacggcatcgcaccggagtgggcaacttggtgccggcgctggcgggaaacgtccgtgctgcgccccaagacccgcgagtccagttacagttttatcctgcgtatcggtttgtggctagcccgggaacacccgcagatccgcgagcccaaagactggacgatcagcatctgcgccgattttatcgccgcgctgggccgactcaacgtggatgaactctccctggcatcatcaccacgccggcacctttcatcgcgtggcggccagccgatgaagagcaattcccgggcgtccttcctgtatgccctgcggcgttttttcatcgactatgaactctggggctggggacggttgcaattcagcccctgtcgccatctggccacgcccaacaccccgaccttcagccgcggcatcaatccccgggtgatcgacgatccggtctggcttcggctaatttgggccagcctgaatctgcggccggaggacatgctgaccggtatccattacccgtttgccatgcaccaggccatggcggttatctggacgcacgccggcctgcggcagaatgagatcctgcggctgacgatcgggtgcgtgcagccgcagggagaggatatcgtccaggaagacggcactcgcattccggccgggaccctgtgctacctgaacgtccccgctggcaaaacatcaaaagcctttgtcaaaccggtggcggccgtggtgaaaaaatatgtcgatttatggctgcaggtgcgcccggcggagcaggccgcactcagcgatgagcgtaccggcgaaaaagtccgctacctgtttcagttccgtggcagaccggcaggccgtgcgatgctgaacaacaccctgatcccgatattgtgcgctcgcgctggcgtcccctgcgaggacagccgcgggcgaatcaccagccatcgcgggcgtgcatccgcggttacagcattggccagcgtaccgcagggcatgacattgcatgagttgatggaatggtccgggcacagctgcccacgctcgacgctgcactatattcgcctccgccccacccggctggcggcatctttcgtcaaggcagacaaaatctcccacatgattggcgtgctcatcgaccacgacagccaggcgatgactgaaacgggcccggcattgtattacgatctgggcgagctttactgcaccaatccgttctggagcaattgcccgcatcgcatggcctgcatcggctgtgatttcagcctgccgaaaagtagcgcaaaggccgtggcgctggagagccggacctccattcggcgctatctggaagaggtgcccctgacgcctgatgaacaagctattgcggcgggagatatcgaaaaactggatacgtttatcagtaaagttcctgataaaccggcataa

SEQ ID NO: 438385 - DNA, 1002 bp, Serratia marcescens
atgaccagacgtctgctttccactcacagcatgctctttgtcgaccaatggctgaagactctggctgatttggggcgagcgccagccacgatactcgcctaccgccaggcgctggcacattatttacgttactgtaaggcgcaggcgctgcggcccgagtccgcgcgctttgaggacttttccgcctaccttcgtccgcagttgccggggatgacgcaccccgtcgccagcgccaccttgcaactgcggatctccgccattcgcctctggtacgatttcctcttctaccagggaagctgtgatcacaacccggtgccacgcaccctgcagcccgccgcaggtttcagtgcccgcggactagtgccgcgcatcgtcaaactgccccgtattccggatgatacgggctggtttaccctgctcggacaggcggcacatgcttcgttgcgcgatcggctgatgctggcgctggcctattatggcgccctgcggcgagccgaagtgaccgttcttaggatagacgacctggatccggggcaccgtctgatccgtatccgggcggaaaccaccaaaagccggcgcgagcgcgtggtgtgctacagcccggccgtgaccccgatgctggctgcacacctgcagcaacttcgacgggaagggcataccggcggcgcgctgtttcgttcggtgtcggaccgtaaccacggcctccccctgagcatttggagctggagcaagacggtgcggcactgggctgcacaggccgaattgccggatttttcaacgcataccttccgtcatctgcgcctgacacaccttgcccgggccggctggcgattgcacgaaatcgccgcctatgccggccaccgcgatccgcgcaccatccagatatacctgcacctgtccggcaccgatctgtcggccaaaatggccggggcgatcgcggagcaggaccggcgcgtcgcctgccaggtgtttggctacccggaggtgtcccatgccgactga

SEQ ID NO: 438386 - DNA, 231 bp, Serratia marcescens
atgtttgccctggttgacgtcaacagtttctacgcctcctgcgaaaccgtctttcgccccgacctgcgcggccgtcctgtggtggtcctgtccaacaacgactcttgtgtcgtggcacgcagccgcgaggcgaaagcctgcggcatcaagatgggggagccctggttcaaaatcgcccgggacgccgagcggcagggcgtggtggcgttttcgtcgaattatgcctactag

SEQ ID NO: 438387 - DNA, 234 bp, Serratia marcescens
atggacgccggtatcctcgacggcgacctgctggtcgtggagtgtttctaccgggcgcagcacggcgacatcgtcatcgccaccgtcgacggcgagttcacctgcaagcgcctgcagctgctgccccggccgatgctgttgccggccaatccggcctttgcgcccattccgctcggtgacgacatcgagaccgtgatcttcggcgtggtgcgccacgccattcacacgctgtaa

SEQ ID NO: 438388 - DNA, 1224 bp, Serratia marcescens
atgtatattccgcgacccgcaaagctgctgttccagcatgacgacggctggagccgctatctcgacaaacacggtgacacccttagcgactggaccaaactcgccgtcgagcgcatgctcgcctgcggcacttgtgccatgggtgttcgccgctactgctgtgcctcaccggattgctcccatgcccgctttttctgccagagctgcaagtccaaggcctgcagcagttgtggcctcaaggccaccgagcagtggatcgccgaacagcagcacattctgcccgactgcgactggcaacacatcaccttcaccatgccgcacctgctgtggccgttcttcaataacaactggctcctgctcaatgatctgtttcgctgcgccacccgcgccatgctccgctgggcgcgccaacaggggatcgaagtcggtatcttctgtgctctccatacctacggccggcagctcaatcagcacccgcatatccacgtctccgtcacccgcggcggcctcgacatcaaacatggcacctggcggcagctgttcttcaaaaagaaagaggtcgagcaaatctggcgcaacgccgtggtttacctgctgcgcgacaactacgcccaaatcaaccctggaggcctgccgggcctcggtcatatccgtaatgaagagcggtggcaccgttatctgcatgcccaatatcgccgcgcctggaaagtgcattttgccaaaaaaacgcgcggtgcctggcgcagcgtgaaatacctcggccggtacctgaagcgcccgccggtggccgcttctcagctgcgccactaccgcggcggtgccgtggtccatcagtattacgatcaccgcacgcagcaacacaaacgccagaaaatcagccaggaggagatgctgcagcgttacgtcagccatatcccggcccgacactttaaaatggtgcgctactacggctttctggccaaccgcaagcgcggttcgctgctgccgaaggtctacgacgcgctggcgatgacggtacgggaaaaaccgaagcgacccggatttgcagtgctgatgaaaggcttcctgggtaccgatccgtaccagtgcatcctgtgcaagggccggttgcgttttaccggtgccgtggcgggcgagcacgccaccaaactgctctctgcccggctgcagcggatggcgaaaaaacgatggcttcagaccccttctctggataagtgcgcctga

SEQ ID NO: 438389 - DNA, 1224 bp, Serratia marcescens
atgtacataccgcgacccgcaaagctcctgttccggcacgatgacggctgggatcgcttccttgaaaagaatggccatcagctcagcgactggaccaaactctccgtcgaacgcatgcttgcctgcggtacctgcaccatgggcgttcgccgctattgctgcagctcgcctgactgtactcactcacgctttctctgccagacttgcaaatccaaagcctgcagcagctgcggcctcaagggcaccgagcagtggattgccgaacagcagcacatcctgcccgactgcgactggcagcacatcaccttcaccatgccgcacctgctgtggccgttcttcaataacaactggccgctgctcaacgacctttttcgctgcgccacccacgccatgctcaggcacgcgcgcaagctgggcatcgaggtcggcatcttctgcgccctgcacacctacggacgccagctcaatcagcatccgcacatccacgtctccattacccgcggcggcctcgatgtcaaacatggcgtctggcgcgacctgttctttaaaaaacagcaggtcgaagccatctggcgcggcgccgttatccgcctgctgcgtgccagctacgatcacgtcaatcccggcaagctgcccaacctcggtcatatccgcgatgagaaacagtggaaacgctacctgcaggcgcaatatcagcgccactggaaggtccacttcgccaaaaagacccgcggggcctggcgcagcgtaaaatacctcggccgctatctgaaacgcccgccggtggcggcgtcgcagctccgtcattaccgcagcggctcggtggtacaccagtactacgaccacaatacgcagcagtacaaacgccagaagctgagccaggaggagatgctgcgccgctacgtcagccatatcccggccaggcattttaaaatggtgcgctactacggcttcctggccaaccgaaaacgtggctcgttgctgccgaaagtctatgaagcattggagatgacgccgcgcgagaaaccgcagaagccggggttcgcggtgctgatgaaagccttcctgaggaccgacccgtaccagtgcatcctctgcaagagccgactgcgttttgccggcgtagtggcgggcgagcacgcgacaaaaatgctctcggacaggctgcagcggatggcgaaaaaacgatggcttcagaccccttctctggataagtgcgcctga

SEQ ID NO: 438390 - DNA, 765 bp, Serratia marcescens
atgtccctaataaaaagtaaagtcacctttaccaaccaacatgatataaccttggccgggttgttggaaaccccggtgactcctagaggctatgccttgtttgcgcattgctttacctgtggtaaggatctgaattcggcgtcgcgaatcagccgtgcactggccgaacaaggcatagcggtactacgttttgactttaccgggctaggcaacagttcgggcgattttgccaacagtaatttctcctccaatgtcgatgacctgattgctgcggcaagcttcttggacagacactaccaggctccagatattttggtaggccatagcttgggggggacagccatattggccgccgctcagcacctcccgtcggtcaaaggtgtggtaacaataggcgcacctgctgaacccagccatgtgatcaaacagtttggtgccgacgtagagcgtattcgagtcgagggtgaaagccgggtgaatctggcggggcgtgagttttcgatcaagcgccagtttcttgaagatatcgacaatcaccgcctggaaaaccgactggatgagctaagcaaggcactactaatttttcactcgccggtggacacagttgtttctatcgaacaagcacagaaactttatcaggcggccaggcatccaaagagttttatctcattggacaaagcagatcatttgctcagccatcgtcctgacgctcaatacgtagccaactgtatagcttcttgggttgagcgttatttgccgcagtaa

SEQ ID NO: 438391 - DNA, 390 bp, Serratia marcescens
atggagcatccggggtaccagacgaaaaggctgctgaagcgcgcggcatcaacacggcatggagtcccggctgaagcaagccgactcctgcagatgaagaagctggaacctttcgacttgagtttccagcagaacatctcccgtaaggtggtgagagagcttgcttgcctggcgtttgtggaatgcagcgaaaacgtgatcctgcagggcccaccggccgagggcaaaacgcatctggtggtagctctgggcgtgaaagcggccaatgaagggcatcgggtgcccttcatgcctctggataagctgatagcggcactgatgaagacacagcaggagatccggctagatcgccactgtagcaactgtgttctgcgcgcgtactgtccttga

SEQ ID NO: 438392 - DNA, 258 bp, Serratia marcescens
atgaaatccatcgtccgtacaaccattgccgcacttgctcttaccttggccaactacgccaccgcagatgaaattaaccgtcaggacgctgcagatctgataccgtcaggccatatttctgtcggtaatctgtcaacgcctgacgaagtgacagacgcgcttaaagccagagcagaacaggccggtacctctgactttcgtatcacttcgctttacggcaaaaataaattttacgggactgccgttatctaccactaa

SEQ ID NO: 438393 - DNA, 180 bp, Serratia marcescens
atggagggcagcatcaaacttatcaaatactccggttttatattcgcaatataccagacccagatcggttttccccggaaaatggtagtgtatactggcttttctgataccaatctctttttccaagtcggcatagctgaaaccaagaaatccgcgttgttggatcaatgtatccgttag

SEQ ID NO: 438394 - DNA, 282 bp, Serratia marcescens
atgtgcggcgtttacgccatgttgtccgacagccaccagttttcccctgaactgcagaagactgtcagctggctggcacagacagagatgttgatactggaagacgttctcgcctccgggcagaaaagcggcgaactcaggtccgtcgtccctcctgatgatctggccatcattgtctgctctgcactgaagggcgcactgatgctgaaccgtatcccccctcacgatgcctattccggtgccgttgacgctttaatgatgatgcttgatgcccgtacctga

SEQ ID NO: 438395 - DNA, 429 bp, Serratia marcescens
atgaaaaattttattaatggttttatccgctcagacttcgacatggttattcttcgcctgtcggctatcacgatatttatgcttttcgggacttataaatggtttgattttgaagtgatggcccttgagcccctgatatctgccacgtggctgaatattttgtacatcctatttggtgttcacggagggagctatttcctcggtgtagtggaatccatcacctttctggcgctgatgatcggtttattcagacctgccgccggggtgctgggggatatcatcgttatcgttactggtatcaccacgctgagtcttctgccccaactagtcaaaattgacagtttcgtcataaaggatgtgctgttgattggtgcgggcgctgttttgctgaaacacgacctgaaaaggcatttaaatatcaggtcctga

SEQ ID NO: 438396 - DNA, 417 bp, Serratia marcescens
atgagcattaaacttgatttgaactggacgggtggcatgaaaggtacaggccatatcaaaggcgaagatttttcaaccgacattgcgattcctgctgctcttggggggaagggaaccggctcaaatccaaaagagctgtttgtcgcttctacagcggcatgcttcttggcaaccttagcagctatcagtgaaggtaaaaaattacaggttgaacatctgtccgttaaatcggaaggggaagagggtgaaaccttcactattcgacacactgcccatgtgacgctgaaaagtggcagtgacagtgattcagtgcaaaaagctaaagagattgtcgcttctgctgataaaatgtgcgctgttggaaatattgcgcgtaaggccggagtggtcattgaggccattgccaatatcaaataa

SEQ ID NO: 438397 - DNA, 1227 bp, Serratia marcescens
atgtacataccccgccccgccaagcttctgttccagcacgatgagggctgggaacgcttcctcaagaagaacggtcaccagctcagcgactggaccaaactctctgtcgagcgcatgctcgcctgcggcacctgcgccatgggcgttcgccgctactgctgcagctccgctgactgcacccactcacgcttcctctgccagacttgcaaatccaaagcctgcagcagctgcggcctcaagggcaccgagcagcagcacatcctgcccgactgcgactggcaacatatcacctttaccatgccgcacttgctgtggccgttcttcaacaacaactggccgttgctcaacgacctctttcgcggcgccacccgcgccatgctcaggcacgcgcgcaagcggggtatcgaggtcggtatcttctgcgcactccatacctatggccgccaactcaatcagcacccgcatatccacgtctccataacccgcggaggcctcgataccaaacacggcgcctggcgcgacctgttcttcaaaaaacagcaggtagaagaaatctggcgcggtgccgttatccgcctgctgcgtgccagctatgaccgcgttaaccccgccaccttgcccggccatggccatatccgcgatgagaaacagtggaaacgctacctgcaggcacaatatcagcgtcactggaaggtccacttcgccaaaaagacccgtggcgcctggcgcagcgtaaaatacctgggccgctatctgaaacgcccgccggtcgcggcgtcgcagttacgccattaccgcggcggctcggtggttcaccagtactacgaccacaacacgcagcagcacaaacgtcagaaactgagccaggaggagatgctgtggcgttacgtcagccacttcccgtcccgacactttaaaatggtgcgttattacggctttttggccaaccgtaaacgcggcacgctactgccaaaagtctacgaagcgctgtcgatgacgccacgagaaaaacctcagaagtcggggttcgcggtgctgatgaaagcgttcctgggcaccgacccatatcagtgcatcctgtgcaagagccggtttcgttttgccggcgccgtggcgggcgagcacgccaccaaaatgctctctgacaggctgcagcagatggcaaaaaacgatggcttcagaccccgttgctggataattgtgcctgaaaaatgtttttttggttaa

SEQ ID NO: 438398 - DNA, 228 bp, Serratia marcescens
atggaagacaatttttttaagcgggagtcgaacaagttgtcctttagtgaagtgatgggaaggcttagcgagcttgaggaggactgggatcggaatgcacctcatacaggtgtttatcgccagctcaaggaccaaggtttggaaacccttactgaaaagcagcgctggatttatgagaatcaattgaagccgaagagtgtcgaaaagtgtggttataacgtgtattag

SEQ ID NO: 438399 - DNA, 231 bp, Serratia marcescens
atgcgaaccgtatcgatttttaaaaacggcaacaaccgcgccatccgtctgccccgcgatctggattttgagggggtgagtgagctagagatcgttagggagggggacaatatcatcctgcgtcccgtccgcccgacctggggttcgttcacgcagctggaaaaagccgatcctgactttatggcggagcgtgcggatgtagtcagcgacgaaggacgatttgatctgtga

SEQ ID NO: 438400 - DNA, 417 bp, Serratia marcescens
gtgaacatgacctatatgctcgacaccaacatctgctcattcatcatgcgtgagcagccggaagccgtcattaaacgcttggagcaggcggtgctgcgtaaccaccgcatcgtggtttcggccatcacttatgccgaaatgcgtttcggtgctgtcggtaagaaggcctggccgcgccacacgcagctggttgatgccttctgcactcgccttgatgccatcctgttctgggagcgggccgcagcggacgccactaccgagatcaaggctgccctggccgcggcctggacaccgatcggcccgaacgacacggcgatcgccggccacgccattgccgccgacgccatattggtgacgaataatacgcgagaatttgcgcgggtgccgggcctgacgctggaagactgggtcagataa

SEQ ID NO: 438401 - DNA, 246 bp, Serratia marcescens
atgggccataacatcatgcgaaccgtatctatttttgaaaacggcaacaaccgtgccatccatctgccccgctatctggattttgagggggtgagtgaactcgagatcgtcagagaaggagataatatcatcctgcgtcccgttcgcccaacctggggttcgttcgctcagctggataaggccgacccggactttatggcggagcgtgcggatgtagtcagcgacgaaggacgatttgacctgtga

SEQ ID NO: 438402 - DNA, 417 bp, Serratia marcescens
gtgaacaagacctatatgctcgacaccaacatctgctcattcatcatgcgcgagcagccggaagccgtcattaaacgcttggagcaggcagtgctgcgtaatcatcgcatcgtgatctcggccatcacttatgccgaaatgcgttttggggctgttggcaagaaggcctctccgcgccactcgcatctggttgacgccttctgcgcccgcctcgatgccatcctgccctgggaccgagcagccgtggacgccactaccgagatcaaggccgccctggccgcctccgggacgccaatcggcccgagcgacacggcaatcgccggccacgccattgccgccggcgccgtgctggtgacgaataatgtaagagaatttgcgcgggtggcgggcctgacgatcgaggactgggtcaaataa

SEQ ID NO: 438403 - DNA, 510 bp, Serratia marcescens
atgagtagccacatcccggtggatgacattcgcaaggagtacacgatgaacagacagtataaaaaagaccctcagatcattcagaaactgacagaactgcagtttagcgtcacccagaaaaatgccaccgaacgcccgttttccggagaatatgacgaccacttcgaggacgggctttacgttgatatcgtctctggtgagccgctcttctcgtcgaaggataaatttgattcgggctgtggctggcctgcattcagtaaaccagtggaaaacaacgtccgaaacttgagcgacctcactcacggcatggtacgtactgaagttcgttcccgtcatggtgacagccatctggggcatgtattcccggacggaccacaggatggcggtggactacgttactgcattaactccgcttcactgcgctttattccgaaaacagcgttagcctcagaaggatatgctgactatattgccctgtttgagaaaggagatgagcatgaaaagaaatga

SEQ ID NO: 438404 - DNA, 147 bp, Serratia marcescens
atgatatttcataaaatcagaaagatagcctaccttggtgaacgcttcacgcggcgggcctacatcgaggccaaacgcaaaatgcgtccggataaaaagaccgtgcgcttagaagcactaccaggttaccagttgcagtatggctag

SEQ ID NO: 438405 - DNA, 492 bp, Serratia marcescens
atgaaaaccagaattaagattatctttatattttcacacctaatgtttttggtggcgggcaccggcttgggtatctatattctacctatattgacggctcaggaggatatctcacttaatgaaattaatgaggtacagaaaaaggcaaaatataagggggagttcagccgtaatcaaaaaggtagcgatgtttttcattgggcagagggtgaactatatgtcactgataacgaaattgccttcaatggcgaagtggctcctggtccggattataaaatttatctaactaaagaacaggctgtagataagaattcatttctagaaataaaaaaagaggccgtcatgattggggagctaaaaaatttcggtaattttagaaaaaacatccctaatagtgttaacgttaatgattttactactgtccagatatggtgcgaacggttctctaagtttattggttcggctaaatatcggcatgatttcgggcaataa

SEQ ID NO: 438406 - DNA, 156 bp, Serratia marcescens
atgtatttttgcaacagcacctgcggagaagtgcaattcagacacggtaagtttatcgctattattaagaattcttatctcaacctcactaaatttaattttatttgcattagtttttatgacatcacctttttaaaaattaaatttagaacataa

SEQ ID NO: 438407 - DNA, 315 bp, Serratia marcescens
atgaaaaaattaataattgcagcatcactaacctttacgctgtttagtgtgtcacctaacctgcttgccgatgataagaacgcggtgtctgagatgagttcagcaatggaaataactaaggcttctgcaaaaatgaagattgaagagatgcaaggtcataagaaaataggttctattagcggctccgctagaactcaaggtgaactagaaaaaaaattatcaatggctgcgagtatgatgggggccaattattacgttatcacctccttaaataacaacaatcactcctatggtaccgcggacatatatgaatga

SEQ ID NO: 438408 - DNA, 537 bp, Serratia marcescens
atgaaaatttataagtttcttgtgtcgtgcgctctggttgtcgagttatgtgtagggatatcgactctagcgcacgctgaacgcggtatacaaggacaacaaaagcatgcatataccgaatacgaaaaattagttttgaaaaatgtgtcggaatttcataaaaacttcagtaatcatgagttttataaaaatagtgcgctagttaccgataatattatttttaataccagtggcaccgagtataatggccgtgacgcgttcgtcaatgctataactgactttgctgcgccatttcctgatgcaaaaattactgatttggtaaccatcgttgatggtaatacagcagcgataagatatgtgctgactgggacccataaaggtgaatttaaaacgccaaatggtgtagtcgcggcaacaggccgaaaagtcaaagttgacggcattgagatttttacctttgataaggatggcaaagtaactgagatagtcggaatcgataacgtcaaccaactactcaaacaaatacaaagcaaataa

SEQ ID NO: 438409 - DNA, 633 bp, Serratia marcescens
atgggcgttcgccgctattgctgctgttcgcctgactgtacgcactcccgctttctctgccaaacctgcaagtccaaggcctgcagcagctgcggcctcaaaggcaccgagcaatggattgccgaacagcagcacatcctgcccgactgcgactggcaacatatcattttcaccatgtcacacttgctgtggccgttcttcaataacaactggccgctgctcaacgacctctttcgcggcgccacccgtgccatgctcaggcacgcgcgccagctgggcatcgaggtcggcatcttttgcgccctgcacacctacggacgccagctcaatcagcacccgcacatacacgtctccattacccgtggcggcctcgatgtcaaacacggcgtctggcgccatctgttcttcaaaaaacatctggttgaagccatctggcgcggtgccgttatccgtctgctgcgtgccagctacgatcgcgccaatcccggtaaactgcccaacctcggccatatccgtgatgagaaacagtggaagcgctatctgcaggcgcaatatcagcgcccctggaaagtccacttcgccaaaaagacccgggggcctggcgcagcgtcaaataccttggccgttatctga

SEQ ID NO: 438410 - DNA, 402 bp, Serratia marcescens
gtggttcatcagtactacgatcacaacacgcagcagcataagcgccaaaaggtgactcaggaagagatgctgcgccgttacgtcagccatgtctcggcacgacacttcaaaatggtgcgctactacggctttctggccaaccgcaaacgcggctcgttgctgccgaaagtctacgaagcattggagatgacgccgcgccaaaagccgcagaggccagggttcgctgtgctgatgaaagcgttcctgggtaccgatccgtatcagtgcatccagtgcaaaggccggttgcgctttgccggcgccgtggcgggcgagcacgccaccaaaatgctctctgaccgactgcatcggatggcgaaaaaacgatggcttcaacccccggttctggataagtgcgcctga

SEQ ID NO: 438411 - DNA, 177 bp, Serratia marcescens
atgagaaaaatgaatgatccgcagcggggcccctccccctcccgtggcctgatagacactattcgccgcgtatttaccgcccttaccggaacgctgcatacccgcccggagcttgtagccgttgagctggaagaagagaaaagccgcattacccatctcctgataatggtgggctga

SEQ ID NO: 438412 - DNA, 351 bp, Serratia marcescens
atgaatatattaaatatggttatcctttctgcaacattggtatcaacaggcgctctggccgaatctatcaacgctgaacatttaaaaaacaaagcagagcagaaggctgagcaggccaccaatcgtgctgaagaaacgactcacaaggcaaaaagccggcttgaggagaaacaacttcaggcggaaaaccggctcaaaaatggcggagaagcaaccgcgacagataaggtaaaggaaaactcacagaaagcctggaaccggaccaaggaaacaacagaaaaaggctggaataaaacaaaagaagccgctcaacaggcgggtgacgcggtaagcgaaaaagtaggccattaa

SEQ ID NO: 438413 - DNA, 303 bp, Serratia marcescens
atgggtgcacagtattattgtcgtggtaacacttcgccttatgttgctttgcctgctgataaaacagctcttcgcctggagtcgcaggggctgtggcggcgtgccgccacgcgctggcagcaggtactgcttcgtgaggcagacgaccacgtgatagaagcggtgctgcagcgcctacgctattgcctggcacgggcgccagcacagatccgccgtgtcagtgacggcaccgcgccggcgggcgcgacactcgtggcgagaaacggcatgccgaacgacccggatctgtggcgaatggaataa

SEQ ID NO: 438414 - DNA, 243 bp, Serratia marcescens
ttgactgataaaaccgcatccgtttccccggaaaacaccacctcagcgctcagccatctggcgcgccaggacagtatcgccggcacgccctatgccgaaaacctgttcctgatccgctggctggccaccgcccagaagcaaaaacgcttcccccggagcgtcgcgattgacatccagtggctgctcgaacgtggccgcaagcacggcccggccggcaaactgcgccagcatcttgatggttag

SEQ ID NO: 438415 - DNA, 534 bp, Serratia marcescens
atgctgaacagcctgttcagcaaagccaaaagaacacaggctgagcgccttcaacagaccggaaagctgatccagtcaaaactgcggcagtacatcgatgtcggccaggcactgtctgaagcccgtgattccggtggcgatccatggctcgcaatagaaaacatactgccatggcctcaatttgtcgccagtctggaggaaacacgccacctcgccaggaaaaataattttgatccgctgcatattattaccgagaaatacagcacattacggaaatatgccccgcgcatgttgtccgctttacagttagtcgccaccccggcagcgcaacctctggctgatgcgctggttgtgatcaaggatatgtaccggaagcagtcacgtaaagttccggcgacatctgggttaaaggctcacgccgctacaaaaactttgatgattacctcattcccgaaaaggactttgacaaactctcaccggcgttgcctctgcccgtatctgctgattatcatgagtacattaccagccgtatga

SEQ ID NO: 438416 - DNA, 1398 bp, Serratia marcescens
atggctgcccttggtgagctacccgatgtggaaatatctgacaggggcgtaaaagtctccccgctggataactgcgtcccggtacaggtttcaccgctggcagagctggtttacagcatgctaccgcgccctaaaatcacggaaattctcgatgaggtaaacagctggacgacgtttacccgacatttttcgcatataaaaaatgacattacccgtcccgatacccgcctgctcctcaccaccatccttgcggatggcatcaatcttggtctgaccaaaatggcggaagcctgccctggtagcaccaaatcatcactggaagatatccaggcatggtacatccgcgacgaaacctattcagccgccctcgcagagctggtcaacgcgcaggggaaaagaccactggcggcattctggggagacgggacaacgtcatcatcagatggacagaatttcagaactggcagctcaggccgctatgcagggcaggttaacccgaaatatgggcaggagccaggacgtcagttttatacccatatatcggatcaatacagcccgttttacacctgtataatcagtcgggtcagggattcaacccatgtgctcgacggtttgctgtatcacgaaagcgacctggaaatcagggagcattacaccgataccgcgggtttcaccgatcatgtttttgccctgatgcatctgctggggtttgcgttctgtccgcgaatcagggatctccatgacaagaaactttttatcaaagggaaagcagaccagtacccggaacttcagtcactgatatcaacaaccagcttgaatctgaaagagatcgaaattcactggcgtgaagtgctgcgtctggcaacctcgataaagcagggaaccgtgacggcatccctgatgctgaaaaagcttgccagctaccccaagcaaaacggacttgccaaagcactgagggaaattggccgtattgaacgaacgctgtttatgctcgactggttccgcgatccggcacttcgtcggcgggtccaggcgggactgaataaaggagaagcccgtaacgcgctggcccgcgcggtattcctgcaccgtctgggtgaaatcagggatcgtaaaccggaaaatcagagctaccgcgccagcggactgacgctgctgacggcagctatctcgctgtggaataccgtctatatggaaagagcggtcgatgccctgaagcgtaaagggatgaagctcaacgagcaactgctgtcgcatttgttcccgctaggctgggaacacatcaatctgacaggcgattatatctggaaaagcaaccggataccggcttccggtaagtttcgtcggctgaggccagctaaagtaggaaggtcaaaaaacgaccttaacgtacaataa

SEQ ID NO: 438417 - DNA, 264 bp, Serratia marcescens
atgacgggatttgagttgaaactatggcgaacggggctgggatggacacaggaacgggcgtcaaaggagtttgggatttcgatgcgtacctacatccgctatgagcatgctgatccaccgagggcgattgagttggccatccaggccctgtctctggccgcgatgttgccggatatcgacgctctgcctgcagaaacgttacgacaacgcgtcaggatgctggttgttgaaatgaataatatttttaaggaaaatcacccctga

SEQ ID NO: 438418 - DNA, 372 bp, Serratia marcescens
atgacacctgatctaatcggtaaacacgttgccatcaaagactatccggtacacctgatcgagggggtgtacagctgcaggtataacgacattatttattgccgattcaaaattccgctgcggcagggtgaattttcctatatggagcaggagatttctggcaccagtgagcattacatcgtcgtagccgatagggataagttgctgtcggcctggcgtaacacgccgaattccattgtgcctgagctcagccgcggtgatgaggccgcctggcgacgtgaccacaaatttcacgaagcagagaaggatgctttagcattggcgcgggcaacccggtgccgctggccactccgacatgtcgatttattctag

SEQ ID NO: 438419 - DNA, 948 bp, Serratia marcescens
atgaaaattgcaattcttgatgattttcaatgcgctgcccgaaaaagtgccgactggtcctctgttgatgctcgcgcaaacgttacggtattcagtgatcatctcatggacgtcgacgctttagccacgcagctgcaatcctttgatgcaatttgtttgatgcgcgaacgaaccccagtcaatcatgctctgctgacgcgattacccaatcttaaatacattggctcgaccggacctagcaatgcatctatagaccttgatgcagctaagaagcagggtatcactgtgacatatactgatggtgttggcaatggtgcaccagagctcacctgggctttaattatggcatcggcgcgtcacattctagttgaaactcagtctattcatagcggtggatggcaattgacagttggagaggatctagaaggggcgactttgggaatcatcggcttagggcgtataggcacgaaaatcgctgctattggaggagtcttcggcatgcgcgtcattgcttggagcgagaatttgactgtcgaaaaagctcaggcggcgggcgcacaactggtcgacaaagaaacgctattgcgcgaatctgactggttgacgcttcatctcgtactatcggagcgcagccgatcgataattgatgcaagcgatcttaccttgatgaagccttcagcatggctggtaaacacttctcgaggtccgcttattaacgaggctgcactgatcgacgcgcttacaagacgtacgataggcggcgcagccttggatgtctttgataccgagccactcagcctatcgcatccattccgatatatggaaaatgtaatagcaacgccacacatcggatatgtgacaagacgcgcatataaagtattttatcaacaatctgttgataatcttgtagcttggatgaatggagatcctatccggattatgaactaa

SEQ ID NO: 438420 - DNA, 537 bp, Serratia marcescens
gtgaaaaaatctgtatttattttgtcgtgcattctgtttactccactattggccaatatttcactaatagcatacgctgacagcggaacgcaataccagaaaagagaaggttacaccaaatatgaaaaattggttttgaaaaatgtctctgagtttcataaaaactttagtagtcatgaatttttcaagaatggtgatctggttactgataatataggttacaattcaagtggtgttcagaatcatggtcgcgaggcttttataaatgatttaattgctcttgcagcaccgtttccagatgccaaaatcactgatctagtaacaatagttgacggcaatatcgcagccgtcaggtatgtgctaaccgggacgcaccaaggcgaccttgaaacgccagatggtgttatccccgcaacaggacgtaaaataaaagttgatggcattgagctgtttacatttgatgaacacggcaaagtgactgacatagtagctgtcgataacataaatcaattgcttatgcagattcaaggtaagtaa

SEQ ID NO: 438421 - DNA, 582 bp, Serratia marcescens
atggcggagcgcggtattgtcgttgaccattccacgctgcatcgttgggttatccgccgggtgccgttgctggataaggcttttcgccgacataaacgcacagtaggtcgtcgggagcgcatggatgaaacctatatcaaagtcaaaggtcagtggaaatatctgtaccgcgcggtcgatacagcaggccagaccatcgacttcctgctgaccgccaaacgggacgctgcagccgcactgcgtttctttcgcaaagccattcgtcatcacggcgaacctgatgtggtcaccatagataaaagtggtgccaacaccgcagctttagccacgctcaacgctgaaaaacctgatgaggaagcgattaccgctaggcagagtaaatacctgaacaacctgattgagcaagcgcaccgaaacatcaaacgacgaatacggccgatgctgggattcaaatcatttcgccgggcacagacgatattggctggcattgagtgtgtgcagatgatacgtaaagggcaacttcagcctcctgacggcgagggtttatccccggcggaacaattctctttgttggctgcctaa

SEQ ID NO: 438422 - DNA, 762 bp, Serratia marcescens
gtggtggtcagctacggcctgctgttgcaggatgccacggcgtttgccgaccggcaatggcacagcgtggtactcgatgaggcgcaggccatcaagaacgcacagacccagcgggcgcgagccgtgacggcactgaaggccgattttcacctggcgctgagcggcaccccggttgaaaaccatctgggtgagctgtggagtttgttccgcttcctcaatccgggcctgctgggcgtgcttaaatcgtttggccaacgctttgtcggcccgatggaacgaggggatcggacggccggtgacgcgctgaaacagctgatcaagcccttcgtcctgcgcaggaccaaaacccaggttcttgatgagctgccgccccgtaccgacattcttcagcgtatccccctcagtgaagaagaacggcactggtatgaggcgctgcggcagcaggcggtggaccggatgaagggtgaaggcaatgacgttagcccactgcaggtgctgaaggaaatcacccgattacgacgcttctgctgccatccttcgctggtgctgaccgaaattcccttggcgggcagcaagctgtcggcctgcctggacatcatcgacaagttgcgggaaaatcggcacaaagcgctggtattcagccagtttgtcgatcacctgagcctggtgcgtcacgccctggacgagcgaggtatccgctatcagtatctggacggcgccacttcgccggctgagcggagaaaatggattaccgccttctag

SEQ ID NO: 438423 - DNA, 243 bp, Serratia marcescens
gtgatccatctcgatccgtggtgggacccggaggtcgaagatcaggtcagcgatcgcgcgcatcgaatgggtcaggaacggccagttacggtataccggctggtgatggaggaaactaccgaggaacagatcgtcagtctgcacacccgtaagcgacagctggccgatgaactgctggaaggcagcgacaacgtggcccgcctggatacccagaccctgctggccgttctgcgcggacaatga

SEQ ID NO: 438424 - DNA, 162 bp, Serratia marcescens
atgtttaagggattgttagtgatagtatttgtattgtcaatggtgctggggaggagcttggctctcatcaaaagcataaatgcaatttgtggtgttgaatttatgcatgtgagtatttgtgagaatgcgccaatgattgaaacgattttaatttttatataa

SEQ ID NO: 438425 - DNA, 681 bp, Serratia marcescens
atgatgaatgcagtcaagaaaaccgcctgcgccctcgcggtgctggccacctctaccgccgtcatggccgagagcattgatgtgaaggtcatcggtaccatcactccgacggcttgtaaacccaccctgaccgggggcggtaccattgattacggcaccattaatcctaacacgctgaaaaaggatgagtttaccattctggcagaaaaacaaattgacttcgccatcacctgtgatgcgccggctaaagtcgcagttaaaggaaagtctgctcgcggtgtaagtgctgtgaacaatgatgggagtctttccgaagtcagtgttgttagtaacccattaggatcaacggcatatggccttggccttgacggtaataaaggcgtgggtggatatgatttgatcctagagcctgataccgttcaggttgatggtacaaaacccgctaccattcaccgcaatgcacctagcgaggcatggcaaagttcaactggattggttcagcacagggatcagaatcgtgaaatcacatgggcagcgccgggcaccctgacgccgattgccttcaccactctggctggcaagctgaatgtcgaggcctacatcaacaaggcctcagagcttgacctcaccaaacccgtcaagctggatggcctgaccaccctggagctggtctacctgtaa

SEQ ID NO: 438426 - DNA, 708 bp, Serratia marcescens
atgaacctctctgctttttgcgcggcctccgcggccaccctgtggctgttctctgcctgcgcccaggcgacgggcgtgctgcccgagtcgtcggtggttatcgttgaggaaggcgatggtgaaggcaccatcaacctgcaaaacaccgacaactttcccgttctgctgctgaccaccctacaggatatcgagcaggacaccgaaaaactgctggtcgtgacgccaccggcggcccgcgttgaacccggcaagacccagcgcgtccgcttcatgctgaccgccaaaacgccgctcaaaacagagcgtctcaagcgcgtggtgtttgaaggggtgcccccacaggaaaaagacaagaatgtggtacgcatgacggtgcgccagaacctgccggtcatcattcgtcctgccggcctcgcgcgggatgaagcgccctggaaacgtcttatatggtcactcaagggcggggtcctgagcgtcaacaacccgtctgcgtatgtcgtgcgcctgggtcaggcggtgaccacactgcctgaccaggcaacctggatgctgccgcacacctatgtattgccgggccagcaactgtcgctgactcgccaggcgaaacgcggtgaagccaccgccggcgcggccggtaaagtacgcatctcgccggccacaacctgggggtttaccgtcgacagttatgaagcgctgctggcgccataa

SEQ ID NO: 438427 - DNA, 2436 bp, Serratia marcescens
atgttgcacgcaatacactactctcgttctcggccacttcgacgtctgcttccgctattgattgccgcactctgcgccggccatgtcgaggcagcagatgagcttcagaaccacgataacctgaccttcgataccggcgtgctgagcggtcgcggcattgaccttgccattgctgccctgtttggtcatgctccgcgctttctgcccggtgaaaacaccgtgtcactctccgtcaacggcaatgcccgcgggcgggtgcgggtcaaatttgatgaggcaggcactttgtgtgccgaccgggcctttcagcgtgcggcgggactagtgtcccctccaggttatgctgacggcgcagcctgctttgacctgcgccgcgcctggccgcgggccgaggtacaacccgaaccgggtgaaggtaaggttatcctggtcgtcccgcctgaagcgctcagtacgccgggcgctgaagacggcaactggcagcacggcggcgtggccggcatggtcaactatgacgcgcagtatctgagttcctccggtggcgccggcgggctcaacttcggccagctgggtaccgaagccggattcaacgccggtgactggatattccgcagccgccagacatttacccgcttcaacggtgatgaccgtatcaatcatcaggccgcctttgcgcagcgcagcttcgtcggcattaaaaaggtgctgcaggccggccaggtcagcctctccaactcgctgttcggcaccgggcaggtgctgggctttcaattgtttcccgagtcggcgctgacatcgggtcagagtggtgccggactggtagatggagtcgcacagacgcagtccgtggtcgaggtgcgtcagtccggcgtgctggtttacagtaccgccgtgccggccggacctttccggctgcaggggttctccctgctgaacgcccgcaccgacctagaggttaccctgaccggcagcaacggcgaaatacgaaagttcatcgtaccggccgccaccttgctggcgcgtgcgccgctggtctctccggggctgtcgttcggcgccggccgactcgagcagcaggacggcaaggcgccactgctgggcacggtagcctccggctggcagcttacgccatttaccagcctgaatgccggcgtactggggtcagctccttaccgagccggttcgctgaacctggatacccagctgtgggaaccaacccgtctcagtctgcaaagcaccctggcgcaggatgcggaccacggcaataccggcaccctgctgtctgctctgctcagccacagcctgagtgagcgcctgagcgtcaacgtcaacgggcgccagcaaaccacgggctatcgtgagctgagtgatgcgctgcaacgggccgaccaggacaaccccaacagccaaagccgcagccggtatcagtggggcagcggcgtcaactggtcggcagagagactgggtaacctgtcgctctcgtgggcacgcagtaccacctttgccggcaacaacaccgattacctgcgcggcggctggagtcggcagtttgggcgcacctacctgggcgtcagccttgagcacaacaccggcaccctcagcggtcaggcggatgaccgtctgtacgtgtcattcagcatgccactgggcgaagggcgtgacatcaacagttatctgaacaccgccaaacgcagcgcccgtgccggcgttcgctacagcgaccgcaccagtcaggaccggggctggagcattgccaccgaccgtgacctgcgcaacaaccgtacgtcggtcagtggcaacctggacttcgtgacgccggtcagtcagttgaacgccagcgtcagtcatgacagcgataactataccagctggtcgacgcgtgccggcggcgccattgtattgcatgaaaacggtatcaccctgtctccctaccgcgtggctgacacctttggtattgcgcgggtggggaaagagtccggcgttcggctggatacgcctgcggggccggtatggaccgactggcgggggtatgccgtgataccgacgctgaacggctaccggcggtcggccattcaggtcgatacccgcagcctggcgaaaaatgtcgatatcggcaacgcctggcaggagagcgagatggcccggggcgccatcggccgggtggactttgatgtgcttcgtacccggcgcgtgctggtcggcacggcaatggctgatggcaaacgcctgccgcatggcgccagcgtgttcaacgcgtcgggtgagctggtcacggtgatgggggacgacggcacggtcttcgtgccggatgcggcgccggggatgcgcctggaggtgcagagttccggcaagacggtgtgcacgatgcaactcgacctgccggagacggcagacaccacggacctttatgaaaatgccacggcgacctgccggtaa

SEQ ID NO: 438428 - DNA, 600 bp, Serratia marcescens
atgaacatgttttggaggcggtggctgctggccctgttgatgggcgtcacgggtgccagtgctgccgacaccatcataccccctggcctggaagcaagcccgatgccgacattaccgccggatacgcgctgcagactgtcggtcagcaatccggtggtcgattacggaatgatgtcacgctggcaattggaagatatcggggccggccgcgtctcgccggggacacgctctctgaccgtgagcgtagtctgcccctactcgcggacgctgggcctgcgggtcgagggcgaggaccatgacgggggattgcgctacggtgagcatggcactacccgtctgcgcctgctggatgcgcagctggacggcaatgcggtggagctgcgcacgataacgccggccggcgttatcacggagagcggcgggcaaaggctggtgcttaatgcgggacagcggttggcgcccgtgaagcagggaagactggcggaaggcaagacgttgacggcccggttggagatacagccggtactggcggaaggctatgcgcgcgtcagcagtcggcagcgcagcgaaacgatgctgacgttgacgctggacgactag

SEQ ID NO: 438429 - DNA, 588 bp, Serratia marcescens
atggcgccctttttcaataccgcgctgttcacccaattggatacctttctggataccctgttcgatacccttctcgatacctttttgttcaagctgttgtgcgatggtcatcagttcctcctcgtgttgcggaacccgcagggccagttctcggacaaatgcctctgcattcgccgattcaccggcctggataatatagtgtatcagcgaaatcacctgtggcgaagacagatagccggccagcagaatggcggacagcctgtcggtcaactcggccaggtcgcgttggcgaatatgtttctgcagcagggtcagtgcggccatgctgcggtgacccataatctcttcgtcgggaatgaccgtcacatcaaccagcggaaaatcgccggtgtacagtttcccggccagcgtcggatcatcaaactcctgcagccagttggtggagtaagggtatgggctgcggttgccggtatagaaaagtaccggaatgaccagcggcagcgatttatggccggcgtcgagatggcgctgcatggcggcgacggcatatcggatgaggcgaaacgccatgtgcttatcaggacttga

SEQ ID NO: 438430 - DNA, 462 bp, Serratia marcescens
atgaacagacagtataaaaaagaccctcagatcattcagaaactgacagaactgcagtttagcgtcacccagaaaaatgccaccgaacgcccgttttccggagaatatgacgaccacttcgaggacgggctttacgttgatatcgtctctggtgagccgctcttctcgtcgaaggataaatttgattcgggctgtggctggcctgcattcagtaaaccagtggaaaacaacgtccgaaacttgagcgacctcactcacggcatggtacgtactgaagttcgttcccgtcatggtgacagccatctggggcatgtattcccggacggaccacaggatggcggtggactacgttactgcattaactccgcttcactgcgctttattccgaaaacagcgttagcctcagaaggatatgctgactatattgccctgtttgagaaaggggatgagcatgaaaaatga

SEQ ID NO: 438431 - DNA, 492 bp, Serratia marcescens
atgaaaaccagaattaaaatcatattgatattttcacacctaatgttttttgtggtaggtactggcttgggtatctatatactacctatattaacggctcaggagaatgcttcgctgaacgaaattaacgatgtgcggaagcaggcaaaatataaaggtaagtttacccgtaatcagaaaggcaacgatgtttttcactgggtagagggcgatctttacgttaccgataacgaaatcgctttcaaaggtgaagtgtcgcccgggcctgattataaaatctacctaactaaaaaacaggcggtagacaagagttcttttctggaaataaaaaaagaggccgtcttgattggagagctaaaaaatttcggtaattttagaaaaaacatccctgatagtgttaatattaatgatttcactaccgttcagatatggtgcgaacggttctcccagtttattggttcggctgaatatcggcatgactccggaaaataa

SEQ ID NO: 438432 - DNA, 693 bp, Serratia marcescens
atggttcgagttgtgatgtttggcctgagtatcacgttaatcgctctggcgggagtttatgccctggctggctctcatgaggagctatccaacgatgtcgcgttgccacctccggcagtgaagatcgtttttaatgaacacggcgaggcagccttgcctaaaggctaccgttcctgggtgcacacatatactgcatgggaatcaatcgcagtaaacttcctggacggtaacctgaccaagacgcctgaatttcatagtgtctatgttgagccaaatgcctatagaacctttatgcaaacaggcaaatggccagaaggctcactgattgtcaaggagttcagtattactagtattgatccgaataactgcgatgggccgccagcttatgtttgcaatctcggtggcagcaaagtcatttttccacatggtaaaacagggctcactcttatgctgaaggatagcaagcgctatcccagcgagccgggcggttggtcgtactttagttttggccatcaaccaccgccttatgaaaaattctctcctgcgcgcccgcgcgctcagtgcgcccaatgtcatatagacaacgtggggcctaaagatgactatatatggtccgtgaaattgaatcagcctggttttgaaagagagggcgacgccgcaaaacttaatctcgacgccgctttcgcaaattag

SEQ ID NO: 438433 - DNA, 246 bp, Serratia marcescens
atgttcattcaggtactggctccagccatcgtcatgctggaacagcagctttgccggtcgggaatatacatggtgcagagtctacagggaggcagggaacaggaaaagggcatcggcgccaaccggctcacgtcgcagacgtgctcattttatgcgtatgtcaacgcggcggtgggggatacgccaccgtgcgggccgtcaggcggcaccggccttgatgtgaggctgggtcttaaagacggttga

SEQ ID NO: 438434 - DNA, 150 bp, Serratia marcescens
atggcgggtagcaagtggcagatcagcgatgaactctgggagaaaatggcgccactcatcccgacgcatgaaactcagcacccacagggctcgcatcgcaagcgcgttgatagccgttctgcaatgagcgccattttctttgtgttctga

SEQ ID NO: 438435 - DNA, 870 bp, Serratia marcescens
atggggatgtgccttgtcaaggcaagtatacaattgctggctgggaggcctgcgttatttatagcactgacatcgtgcggattgttcgggctgatgttaacaccgctgtatcgttttactgacaacagtttgccgttatactcgccaggggaatcctatcctttaatggtttttggaggaggggtgttcggagtagcttcagtgatgaacaatggttgcagcttaggtaccttaaccaagtttgcatgtggcgatttcaataaattgtttacaatggtaggttgggttcttgcgatctttctttggtactacgtggacgcggctcacgaaaagaagatcgttactgtaacagacatttccagcggaaattattgggcattgatcagtataatagcactggtgttgatattattagctcgtgtacaaggaaataaacagcttgtactacccagtttgctgctgggagggctgacgagcgctctctatacatttgacccgttatggactcctagcactttcttttacaagctgtcgcagtttttatcgcaagaaaatacaaccgtcaccgcacgaagtgtagccgtgtttgctatgctgatgacgggtatgctgacttttgcaatttatgaaaaaaagttctgtttcgagggcttttctccatcaaaagctagcgttaatttgttggcaggtgttttgatgggggctggtgcttcaatgatgcttggtggtaacgattcgcaaatactgttagtatttcctaatctgaccgttgattcaagcattccattagtgtcaattgtcgtagggattttggtttcattgtggtgcaaaaaactcggggttgagttaaataagaatttaacaacatag

SEQ ID NO: 438436 - DNA, 789 bp, Serratia marcescens
atgaaccttcagcatgaccgtattgcagcgctttgcgaacaactcaagctcgaccgcctggcggcagagtggcccggtgtggcacagagaaccatcgacaacagcggcacgcatgccgacttcctggaagcggttttgcagcttcagcatgacggcctgaacgagcggcgtcggcagaccattttgcggttatcaggtctgccagtgataaaaacgctggagcagttcgattacgcctatgccagcggcgtgccgcgaagtcagatccaggagttggcggggctggcgttcatagaacgtcaggagaacgttgtcttgctcgggccttctggcgtcggcaagacacaccttgcgaccgccattggctataaggccgcgatggcgggtttaagcattcggttcattaccgcagccgacatgatgttgcaactgatggcgtcgcaccgtcagggggatctgaagggttacctgaaccgcgtggtaggtaagcctaagttgctgatcatcgacgaagtggggtatctgccgttcggtaaaatggaagcgaacctgttcttccaggttgtcgctaaacggtatgaatcaggcagcgtcattctgaccagcaacctgccgtttacccagtggtctggaacgtttggtgatgatgagacgttgacggcggcgatgctggatcggctgcttcatcatgcccacatcgcgcaaatcagcggccagagctatcggctgaaagataagctgaaaagcggccaactccagaagaaaactaaagcagcagtccccgagtag

SEQ ID NO: 438437 - DNA, 1029 bp, Serratia marcescens
atgatgacattggagaccagagtggagattagtgttttacaccgtcagggcatgtcgatacgcgccatcgcgcgccagctttcatgctcccgcgagaccgttcgcagatatattcgtagcccgctgcccgtagcggatatgcggtataagcctcgggcaccgagaccctgcaagcttgatccgttcaagccctatattcttgagcgtgtcgctgcggccaggccgcaatggatacccgccagtgtgctactgcgcgagatccgacaacttggttacgatggcggctacagcatgctgacggcattcctgcaccccatgaagcagcctgttaccgaggaagtcacgcgttttgagaccgagccaggcgtacagatgcaggttgatttcaccattatcagacttggccataaccctttgctggccttcgtcgccaccttgggctggagccgcgcgactttcgtcaagttctacagcaaccaggattccgctgcctggtgtgatggcatagagtcagcgctcaagttcttcggcggggcgccgcatcagttgctgttcgacaacgccaagaccatcattattgagcgggatgtctacggccccggcaagcatcgctggaacccgcagttgatgcacgtcgctgagaagtatggctttacccccaaagtctgccgcccctatcgcgccaagaccaagggcaaggtggagcggtttaaccattacctcaagaacagttttgtcatccccctggccgcgaccttccgccaagcaggactggtactggatgtacccgccgccaacggccgcattggcgagtggctggtcaccgtcgccaacacgcgtgttcatggcaccactggcgtacctcctgaacagcggatgccaagggagcgtgctgcgctactgccgttaccgaaggtgatgctggcattgcccgcgccagtcccggcggtcaagtcgcgtccggtgccgaccgagagcctgcaacatcctctggcaacgtaccaggctttactggaggtgcagccatga

SEQ ID NO: 438438 - DNA, 300 bp, Serratia marcescens
atgccctacatcaagctggaatggggagccgacttccaccaacaggaaagccgcatactggaaggtgataacgtgccggtgcttactaccacctccgctcacctgacgcgtcagctgttggaaaccacgggtggatgtgctttcctgcccagccagtgggaaaaagagtatccacagttggtggccgccaccgagatcccgccgattatccgcccactgtatgccgtctggttgcaaaacagcgatcaacagcctttgattcggcaattacttaaaatacctttaaataccgcagcctaa

SEQ ID NO: 438439 - DNA, 396 bp, Serratia marcescens
atgactgacgcaaacgggcttccgcttgcactggtcgttgccggggcgaatacgcacgacataaagctggttgcggatacgctcgatgcccttcagacgggcaggccggggaaaaggctccggctgtgcctggacaaagggtatgaagcggaatggctgggctcgtatctgaaaagccgccgctatgaacctcatatccagtcacggaaggaggtgtcagaagccatcaaaagcacagattttaaagctcaccgctgggttgtagagagaacacacagttggatgaatcgctaccgtcgcgtcctgacgcgctgggagaagaaggtcgaaagttatgaggcgatgctgcattttgcctgcggtatcattgtctggaataaatccctattgggatag

SEQ ID NO: 438440 - DNA, 288 bp, Serratia marcescens
atgtatattccccgaccggcaaagctcctgttccagcatgacgatggctggaaccagtacctggataaacacggcgacaccctcagcgactggaccaaactcgccgtcgagcgcatgctcgcctgcggcacctgcgccatgggcgtacgccgctactgctgcgcctcgccggattgcacccatgcccaattcttctgccagagctgcaagtccaaggcctgcagcagttgtggcctcaaggccaccgagcagtggattgccgaacagcagcacatcctgcccgactga

SEQ ID NO: 438441 - DNA, 249 bp, Serratia marcescens
gtgatttcaatgcgctgggttaacctttatcggattttggccaacatattgatggatagaataaaatcccggcctgtcactattttcctggcggattatcagccagcgggactattgcggataggcggttatggccgctcagagataagcgatgtgaatgaaaaacggcagccgcccgcaggcggccgcgactattttttctcgatggggatcaccagcaaatcgacgttcagctcgttgatcgcctga

SEQ ID NO: 438442 - DNA, 879 bp, Serratia marcescens
atgagtgcaaataaattaaaaaaaaatatcaccgtcttattttataatattgaaggtgacgatttattttatgaaaatcttgccttaaattattttaccttgtgtgagtcggaagaaaacacgaggataataacttcgcgcgacaaaaaacatcttattaaactaaaccctccccattatgtaaatgataatgagattttcggtgttactgttgttcgtgagaggaacacttggcaaacgaaagccactaaagatggttcaatcactgggatccatctcaaccaaggaataattggtgacctgtattatatttatatattaccagcatacaggactatttttggtttcacttccgggcctagtggtacattaaagagtgtctgcaagttcattcttgaacaattaaatacaaacagaagactaaaaataaaaattgacctcatcccgaaagcaaaagggtatatatcgttgaatgattaccaagcatttaacagcttgcattttaaaatgaactcatcttatctcagcgagataacagatgatgcgcctcatttttttaaacaactcagcacaagcccctatatcggaccaggaatgcaactttcatttgatttagaatttaatgatgaaaattgcagctcatttactaaagataatgtaattgaaatcattaattttctatcagatcatgacggttgttctacattaaaagtaaaagcaaataatagtgatggcaaagcaagtactatagatttctcagatacatttcttcacttcaaaaccgaagttaacacacgaaataagtatattgatgaagaatctgcatcacgagttcttgaccaagcattattagaacttttaaacttcaagaacggctga

SEQ ID NO: 438443 - DNA, 1332 bp, Serratia marcescens
atgaacgaagaaaaatatatatgtcatagatgcgtgggcgaagagtatgtaaggttagttataaaaaaaacaggaaatgccaacaatgattgtaattactgtggtaggaaattaaagagtattaaattggaagttcttgcagagatggtgcacaatgtctttattgaatattatgaacagcctgatgatggcgagttttataatgatagtggtgatactgcaacctctattattcaagacgagctaatcattgaagaagaacctgccgatgatatattcaatgtgatgcaggacatttataacgattatcacggcatagatgtagtttatgatgaatgctttaattatgttcgtgttaatcgcgtcaataattcgcttggctgggcgtgggagaaaatggagcagtcacttaaaagtgaagctcgttatttcaataagcatgtaaaagagtttctggatgagcttttttcagacatagaaagaatgaggacaggtgaaagcaggcaggcaattaatgatgttggcagcgatgtcattttttaccgggctcgggcatttgaaaactacgaggacgtgcaggaagcactggagcatcctgagcggtattttggtccaccaccacaagcgttggcacgctcaggaagaatgaatgcacacggcattccagtattttatggtgcaacgtcaccgagcattgctgtgtcggaaatacgtccagtggttgggaatttcgtggtggtcgtaccgtttcgacctatcagaaatttgaaaattctcgatatttcagccctaaacgatctctcaaatatcaaaggtagtatcttcgatccatatgtgaccgggcataacgagaaggtctctttcatgaggacgcttgccagaaagctgactatgcccgtttctggcagaaagccggaagatgaatacctgatcacacaagcagtatcagaatatcttgccttatccgataaatttagtcttgacggtattagttttgaatccactcagcattccggtgatgagcccgaggatattggtcaccacaacgttgtgttgttcagaaaatcatcgagaatactgaattctgagagtaacgaaaaatcttttcaagtagatctatttgaaaatgtggaagatgataattatattttttcacccgctattcatccaatcaataaaaataaaacaaggagaacattgtcttcttctttcagtatcgataaacacttgtgtgctcttgagttaatgcctgatggcatcgtatttcatagagtaaaaggcgttaagtattacacagactcaattgatgtaaaatcagatgggatgttatga

SEQ ID NO: 438444 - DNA, 1074 bp, Serratia marcescens
atgagtggcggtctttttgttggggttgagaaatacctaataggaggaataacggacgccacaaaaggattaatgatgtcgtactcttctatgatgatggggctggcagcagcgtcagctaccatctacatcatgtggcgtggataccagactctggctggtaagctctctacgccgatggaagacacgatgtgggacatcatgaggatggcgatcatcatgtcctttgtagctaatttaggtggctacctcgatggcgttattgatgccataaacggaataaaggagggtttttctggcagtgataatatatggcagctattagacaccttatggaataaagcaaaggtgttaggtaaaacattacacgacatggatgattccacttatataaaagatgagggaatgactgctcaattttatgtctggcttgggatattcgtcttaatgattatcaccgcgtttgtttccatgatagcggaagtcatgatcttattactgagtattacagcacctatatttattttttgccttatgtatggttttctccgcaccatgttcaataactggctacaaaatatatttgtagccatattaaccattatgctttcagctctttctttaagaattgtagtgaattatttaaacctagtccttaccaaggcaacgaaggtcgcggacagttcaacaattgttgaattaggagcacaagtctgtcttgcgggtatctgtgcggcaatattggtttatctctccgcaaaactggccgcagcactggccggggcgagtgctaccgtatccatgcaggggctggccgctgtaggtatcggtgctgctgcttttggtgccgggaagctagccggaggtgcaattaaagaaaccaaacgttccacccaggacaacattcagggctggaaggatgcgaatgcaggtaagcccggcaagcctggaggtgagttaggctataacgcttctaaagcgcgtaaatacgcgattgagcagatgatagcccggaacgaagcgcggaggctggcacagtcgagagaatccgcagttaagaagttcaatagctaa

SEQ ID NO: 438445 - DNA, 714 bp, Serratia marcescens
atgaaaactcacttttacgcgctaattttcgcatgttcgcttgcaagccctctggcacaagcgggaggtatattagtatttgatgccacggccaaactggaaaatgtccgccagtggcagaaagaagcgaagcaatggatggagaccgcacaacactacaaagaccagatacgagcttataaagaccaactggcaacagccacaggtgttcgagatatcgccagctttgttgaccaagccaaaagcctgaaagccgatctcgaaaaactacgcaagccgggacaggctctgaatgatttgcttctctccggcggctcctccgggcagttcgatgcgctgtacgaaaaatataaaatttttgatacctgcaaagccgaacgctcggagagttatgccaacgtgtgcaaacaacaggtcatcaataaagctatccagcttgagcagaccgacgagatccagaatcaggtaagccaggccctgggagaaatcaacagcctctccaacagagttgcgctagccaaagattcgaaagaatctcaagaccttgcaaacagtattcagctaaaatctgtcatgctgaacacgcttaccactcagtgggaaatgagtgtgaaagcagcagataaacgcgaaaaagtgcttgaggcggagcgcgttaaacagtggaaccaacagcagttatacgcgccaactgctgaccttaataatttatga

SEQ ID NO: 438446 - DNA, 294 bp, Serratia marcescens; identical to SEQ ID NO: 15700

SEQ ID NO: 438447 - DNA, 711 bp, Serratia marcescens
atgctttccaccacagcctttctggcgatagctatgcagtgcgccgccagcattcatccgtccacggcattcgacgtggcacgggtggaatccggttttaacccttatgccatcgctgagattgtcccgaaggccggcccctctttcggcgatcaacacattatttctcacctgccagccagccggggagatgcagagcatattctccgtcgcctgacagcacaggatcgccgttactctgtcgggctgatgcaaatcaccagcaccaatttccgccattatggtgtgtccgccacagagctacttgatccctgtaccaatctgtccgtcttcgaacacattctcagagactgctaccggcgcggcggcacgctgaaaagggcgctgagttgttattattccggcaatttcagtaccgggcaacaacctgaaacggcgttttccggaacgagctatatccagcgaatcggttatccgccgggatcatcccgctatgcggtccccggaacccgtgaggacaaatcatcagttgccgttcccctgaaaaccgcccctgccagtgactcatcccgtcaccacgagatctggcccggagtcgtcgtccgtggcgtccctgcgaaactccgccaagaaaaaatcttcatcgcaccgttctccgcgccgtcagtgcgccggagtttctccctgtcaccccgcgaggaggaggaataa

SEQ ID NO: 438448 - DNA, 234 bp, Serratia marcescens
atgagaaagcctgtttattacgcgtatgttgcccaagaaagtcatccggactctcagggtgagaaaaatacctggtggacaaaggtcggagtcgcctttccccaccacggtaaatccggtctgaatattgtcctgacgcccggtattgccgtttccggcaaactggtcctgcttgagccccgggaggaaaataatccaccacagaatacgggccccatcgaaaccgtgtcgtaa

SEQ ID NO: 438449 - DNA, 582 bp, Serratia marcescens; identical to SEQ ID NO: 15705

SEQ ID NO: 438450 - DNA, 186 bp, Serratia marcescens; identical to SEQ ID NO: 15707

SEQ ID NO: 438451 - DNA, 927 bp, Serratia marcescens
atgtcaaaaaaagatcagccattgcttataactcattatatgtcaacatgggtcactataacggaagcagttgagatcactaccaaaaccataaaacaaaaaattactcctagcgatatttatcgtcatgccttgagtggcaacatcctactatcggtctatttccagtctcctgtgatacttaagaagatacaaacttttaatggaaaaataaaattcaggcagtttgagggagacctacttgataaactatgcatgcttgacagggacggttttatttatggtcaaaatttaagactctgtacagaagccagatatgtttgtcctgtgcaacaaattatagatacccccctgataggctatgaatatgttttgattcagcgcatactggcacgtgaacttaaattcccctccccaattgtgggggcaagaaaaactaaccatggtattatagtaagattttcagaggagctttttcaaattttcgaaacgatgagttggaaagaacgcgtagaaaaacaaatttccagactacctaaaaacacagcattagatgtcataaaaaaactaacagaagtgacgaccataaaatataatcacaatgggtgttttcctctttatacattaccgcctgatgcctgttttgttattcgccacaccgaagtcgaaagactaattaatttatacaaaaaaagggagagtcaccccatttcaccttcccgtatgacaacaccgttatcacgcctgttttggctggcctgcaagcacaatgatactatcagcccactgctgaatcatccctataagctcctttctatttttgaacaatgggcatcagacgatggcatcggggaaaaactggacgctgaaacactgaaaaatgcgctgaagcgtggttcgccatcttcgacatccttatccggctaa

SEQ ID NO: 438452 - DNA, 2022 bp, Serratia marcescens
atgaaaatgacacggctttatcctctggccttggggggattattgctccccgccattgctaatgcccagacttcacagcaagacgaaagcacgctggtggttaccgccagtaaacaatcttcccgctcggcatcagccaacaacgtctcgtctactgttgtcagcgcgccggaattaagcgacgccggcgtcaccgccagcgacaaactccccagagtcttgcccgggctcaatattgaaaatagcggcaacatgcttttttcgacgatctcgctacgcggcgtctcttcagcgcaggacttctataaccccgccgtcaccctgtatgtcgatggcgtccctcagctttccaccaacaccatccaggcgcttaccgatgtgcaaagcgtggagttgctgcgaggcccacagggaacgttatatggcaaaagcgctcagggcgggatcatcaacatcgtcacccagcagccggacagcacgccgcgcggctatattgaaggcggcgtcagtagccgcgacagttatcgaagtaagttcaacctgagcggccccattcaggatggcctgctgtacggcagcgtcaccctgttacgccaggttgatgacggcgacatgattaaccccgcgacgggaagcgatgacttaggcggcacccgcgccagcatagggaatgtgaaactgcgtctggcgccggacgatcagccctgggaaatgggctttgccgcctcacgcgaatgtacccgcgccacccaggacgcctatgtgggatggaatgatattaagggcagtaagctgtcgatcagcgatggttcaccagacccgtacatgcggcgctgcactgacagccagaccctgagtgggaaatacaccaccgatgactgggttttcaacctgatcagcgcctggcagcagcagcattattcgcgcaccttcccttccggttcgttaatcgtcaatatgcctcagcgctggaatcaggatgtgcaggagctgcgcgccgcaaccctgggcgatgcgcgtaccgttgatatggtgtttgggctgtaccggcagaacacccgcgagaagttaaattcagcctacgacatgccgacaatgccttatttaagcagtaccggctataccaccgctgaaacgctggccgcatacagtgacctgacctggcatttaaccgatcgttttgatatcggcggcggcgtgcgcttctcgcatgataaatccagtacacaatatcacggcagcatgctcggcaacccgtttggcgaccagggtaagagcaatgacgatcaggtgctcgggcagctatccgcaggctatatgctgaccgatgactggagagtgtatacccgtgtagcccagggatataaaccttccgggtacaacatcgtgcctactgcgggtcttgatgccaaaccgttcgtcgccgagaaatccatcaactatgaacttggcacccgctacgaaaccgctgacgtcacgctgcaagccgcgacgttttatacccacaccaaagacatgcagctttactctggcccggtcgggatgcagacattaagcaatgcgggtaaagccgacgccaccggcgttgagcttgaagcgaagtggcggtttgcgccaggctggtcatgggatatcaatggcaacgtgatccgttccgaattcaccaatgacagtgagttgtatcacggtaaccgggtgccgttcgtaccacgttatggcgcgggaagcagcgtgaacggcgtgattgatacgcgctatggcgcactgatgccccgactggcggttaatctggtcgggccgcattatttcgatggcgacaaccagttgcggcaaggcacctatgccaccctggacagcagcctgggctggcaggcgactgaacggatgaacatttccgtctatgtcgataacctgttcgaccgtcgttaccgtacctatggctacatgaacggcagcagcgccgtcgcgcaggtcaatatgggtcgcaccgtcggtatcaatacgcgaattgatttcttctga

SEQ ID NO: 438453 - DNA, 1578 bp, Serratia marcescens
atgaattcttcctttgaatctctgattgaacggtatcccttacccattgccgaacagttgcgccactgggcggcccgttatgcctcgcgaattgccgtcgttgatgcaaaggggtcgttaacctacagcgcgcttgatgcacaagttgacgaacttgccgcaggtctgtcatcactgggtttgcgttcgggggagcatgtaattgtgcagcttcccaacgacaacgcgtttgttaccctgctgttcgccttgttaagactgggcgttatccccgtgctggctatgccctcgcaacgggcgctggatatcgacgcgctgattgagctggcgcaacccgtcgcttacgttattcacggggaaaaccacgcagagctggcccgacagatggcgcacaaacacgcctgcttgcgtcatgttctggtcgctggagagaccgtgagcgacgattttacgccgctcttctcccttcacggtgagcgacaggcatggccgcagcctgatgtttccgccaccgcgttgttgttgctctcaggcggcacaaccggcacgcccaaactcatcccgcgccgacatgccgactatagctataacttcagcgcttctgctgaactgtgcggcatcagccaacagagcgtgtatctcgccgtcctcccggtggcgcataactttccgctggcctgccccggtattctgggaacgcttgcctgcggcggaaaagtggtgctgaccgacagcgccagctgtgatgaggtgatgcctttaatcgcgcaggaaagagtgactcacgtcgccctggttccggcgctggcgcaattatgggtgcaggccagggagtgggaagacagcgacctttcgtcgctgcgcgtcattcaggcaggcggcgcccggctcgacccgacgcttgctgagcaggttatcgccacctttgactgtaccctgcaacaggttttcggtatggcggaaggcctgctctgttttacccggctggacgatccgcatgccaccattctccacagccaggggcgcccgttgtcccctctggatgaaatccgcatcgttgatcaagacgagaacgacgtcgcgccgggcgaaaccgggcaattgttaacgcgcggcccttataccatttcgggctattaccgcgcccctgcccacaacgcgcaggcctttaccgcgcaagggttttaccgcacaggcgacaatgtcaggctggatgaggtggggaacctgcacgttgagggacgcataaaagagcagatcaaccgcgccggagaaaaaatagccgcggctgaagtggaatcggcactgctgcgtttagcggaagtgcaagattgcgcggtggtcgccgcgccggacacgctgcttggcgagcggatttgcgcgtttatcatcgcgcagcaggtgccaactgactatcagcagttgcgtcaacaactgacccgtatggggctcagcgcgtggaaaattcctgaccaaatcgagtttctggaccactggccgctcaccgccgtcggcaagatagacaaaaaacgcctgacggctctcgccgtcgaccgttatcgccattctgcccaataa

SEQ ID NO: 438454 - DNA, 321 bp, Serratia marcescens
atgtcgctgtttcttcctcttctgcgcgctgatttttacgccaccgagagctatcactacgactcgcccgacgtctgtccgccgctgcgcacgcctgcgctgttattgtgcggcagccacgatcgcgaagcctcctggcagcaggtcgatgcctggcgtcagtggctgagccccgttacaggcccggtggtgattgacggcgatcatttctatcccattcaacaagcccggtccttttttacgcagattgtccgccattttccccacgcattttctgcaatgaccgcgttgcaaaaacagcccagtacttcagaaaggtga

SEQ ID NO: 438455 - DNA, 513 bp, Serratia marcescens
atgtctatcagctcagcgataaagtcggcatcatcgcgatggctgagctggcgttcagaatgcagatgcggggcatggcacccggaaataatcagtccttgtggcgcaagcccccgttgctccagaagtcggcaggtttcaaacgccacctgcgcccccatgctgtgcccggcgagtaaaagcggcgtgtcaggcgatacggatgcttccagctcgttcgccagcagtgccgccagttgtgtaatgcttctgagcggttccagatggcgaaggcgatcgcgccccggccaggtcaccagagaaagcgcgcaatcagccagttgctcagcttgccagtggcgaaacgcgctactgctgccgccagcgaaagggcacatgaccagatgcgcagtattgccgttccgggcgggccacagcgggatgcacattgcagattgcgtcacagcgcctccttatcatcatcgttgtagaaaccggctaaccggtcgtggtgcggcggcgtcaggcgtctga

SEQ ID NO: 438456 - DNA, 1101 bp, Serratia marcescens; identical to SEQ ID NO: 215999

SEQ ID NO: 438457 - DNA, 9492 bp, Serratia marcescens
atggataacttgcgcttctcttctgcgccgacagcagattccattgatgcatcgatcgctcaacactacccggactgcgaacctgtcgcggttatcggctacgcctgccattttcctgaatcgccggatggcgaaacgttctggcaaaatctgctggaaggtcgtgaatgcagccgacgctttacgcgcgaagagcttctggccgtcggtctggatgccgccatcattgacgatcctcattatgtcaatatcggtacggtattagacaacgccgactgcttcgacgccaccctgtttggctattcgcgacaggaagcggagtcgatggacccgcagcagcgcctgtttttgcaggcggtctggcatgcgctggaacatgccggttatgcccccggcgccgtcccccataagaccggcgttttcgcctcttcccggatgagtacctaccccggtcgcgaagcattgaacgtgacagaagtcgcgcaggtaaaaggtctgcaatctctaatgggcaatgataaagactatattgccacccgcgccgcgtacaaactcaacctgcacggcccggcgttatcggtacagaccgcctgctccagctcgctggttgccgtgcatctggcctgtgaaagcctgcgcgctggcgaatccgatatggcggttgccggcggcgtggcgctctctttcccccagcaggcaggctaccgctaccagcccggaatgattttctctcctgatggtcactgtcgtccctttgacgcctcggctgagggcacctgggccggtaacggtctcggctgcgtggtgctgcgtcgcctgagagacgcgctgctgtcaggcgatccgattatctcggtgatcctctccagcgcggtcaacaacgacggcaacagaaaggtcggctataccgccccttccgtcgcagggcaacaggcagtcatcgaagaggcgttaatgctggcggccatcgacgacaggcaggtaggttacattgaaacccacggcaccggcacaccgctgggcgacgcgattgaaattgaagcgttacgcaacgtctatgcgtctcgcccgcaggatcagcgctgtgcgctcggttccgtgaaaagtaacatgggccatctggataccgcggcgggcattgccggactgctgaaaaccgttctggcagtcagtcgcgggcaaattcctcccttactgaattttcacacccccaacccggcgctgaaacttgaagagagcccctttaccataccggtgtcggcacaggcatggcaggacgaaatgcgctatgcgggcgtctcctcctttggtattggcggcaccaactgccatatgatcgtcgcctcgctgcccgacgcgctcaacgcgcgcctccccaatacggatagcggcagaaaaagtaccgcgctgctgctcagcgccgccagcgacagcgcgttgcggcggctggcgacggattatgccggggcgctgagagagaatgcggatgccagctctctggccttcacagccctgcacgcgcgccgtctcgatctccccttccgcctggcggcgccattaaaccgtgaaaccgccgaggcgctcagcgcctgggccggtgagaaatcgggggcgctggtttacagcggccacggcgccagcggcaagcaggtgtggctgtttaccggccagggctcgcactggcgcactatgggtcaaacgatgtaccagcactcaacggcgtttgccgacacgctggatcgctgtttttccgcctgtagcgaaatgctcacgccgtcactgcgcgaagcgatgtttaaccccgattcggcgcagctggacaatatggcctgggcgcagccggcgattgtcgcgtttgaaatcgcgatggcggcgcactggcgtgctgaaggactgaagccagacttcgccattgggcattccgtcggtgaatttgccgctgccgttgtctgcggacactatacgattgaacaggtcatgccactggtttgtcggcgcggcgcgctaatgcagcagtgcgcaagcggcgcgatggtggcggtatttgcagacgaagacacgctgatgccgctggctcgccagtttgagctggatctcgccgccaacaacggtacgcaacatacggtattttccgggccggaagcccgtctcgcggtattttgcgccacgctctcgcagcatgacattaactatcgtcgcctgagcgtaaccggtgcggcgcactccgctttactggagccgatactcgatcggttccaggacgcctgcgcgggactgcacgcggagccggggcaaataccgattatttccacgctcaccgccgacgtcattgatgagtcaacgctcaaccaggcggattactggcgccgacacatgcgccagccggtgcgttttatccagagtattcaggtggcgcatcagctcggcgcccgcgtttttctggagatggggcccgatgcccagttggttgcttgcgggcagcgcgaataccgcgataacgcatactggatagccagcgcccggcgtaacaaagaggcgagcgatgtcctcaatcaggccctgctccagctttacgctgccggcgtcgccctaccgtgggccgacctgctggcgggcgatggacaacgtatcgctgcgccatgttatccgtttgatactgagcgttactggaaagagcgcgtctccccggcctgcgagcctgccgacgcagcgctgtctgccgggctggaggtggcgagtcgcgccgcgacagcgctcgatctccctcgcctggaagcgcttaaacagtgcgccacgcgactgcacgccatctacgtcgatcaactggtacaacgctgtaccggcgatgccattgagaacggcgtggacgccatgaccatcatgcgccgtggacgtctgctgccccgctaccagcagctactccagcgcctgctgaataactgcgtggtcgacggcgattaccgctgcaccgacgggcgatacgtccgcgcccgccccattgaacatcaacagcgggaatcactgctgacggaacttgccggttattgtgaaggttttcaggctattcccgacaccatcgcccgtgccggcgatcggttatatgaaatgatgagcggcgcggaagaaccggtggcgattatcttcccggaaagcgcctccgacggcgtggaagtgctgtatcaggaattcagctttggccgctatttcaaccaaatcgccgccggggtattacgcggcattgtccagacgcgtcagccccgccagccgttgcgtattcttgaagttggcggcggaaccggcggcaccaccgcgtggctgctgccggaactcaacggcgttccggcactggagtaccatttcaccgatatctcggcgctgttcacccgtcgcgcccagcagaaattcgccgactatgattttgtgaagtatagcgagctggatctcgaaaaagaggcgcagtctcagggtttccaggcacagtcttacgatcttatcgtggcagcgaacgtgattcacgccacccgccatattggccgcacgctcgataatctgcgccccctgctcaagccgggcgggcgcctgctgatgcgcgaaatcacccagccaatgcgtctgtttgacttcgttttcggcccgctggttcttccgctacaggatctcgacgcccgcgaaggtgagttattcctcaccaccgctcagtggcaacaacagtgccgccacgccggattcagcaaagtggcgtggctaccgcaggatggcagcccgaccgccgggatgagcgaacatatcattctcgccacgctgcccggtcaggcggttagcgccgtaacattcaccgcgccatcagaacccgtgttggggcaggcgctgacggataacggtgattatctcgccgactggtctgattgcgcaggtcagcccgaacggtttaacgcccgctggcaggaggcctggcgtctgctttcacagcgtcatggcgacgctctgcctgtggaaccgccccccgtcgccgccccggagtggctagggaaggttcgcttaagctggcaaaacgaagccttttcccgcggtcagatgcgcgttgaagcccgtcatcctgctggcgagtggctgccgctatcgcccgccgagcctcttcctgcgccgcaaacgcattatcaatggcgctggacgcccctcaacgtcgccagcattgaccatccgcttacctttagcttcagcgccggtacgcttgcgcgcagcgacgagctggcgcaatacggcatcattcacgatccgcacgcctcttcacgactgatgattgttgaggagagcgaggatacgctggccttagcggagaaagtgatagcagcgctcaccgccagcgcagccggattgattgtggttactcgccgcgcgtggcgagtcgaggaaaatgaagcactctctgcatcccatcacgcgctatgggccttgcttcgcgtcgcggccaacgaacagccggaacggttgcttgccgccatcgatctcgccgaaaacaccccgtgggaaacgctgcatcaagggttgagcgcagtctcactatcacagcgctggctcgccgcacggggtgacaccctttggctcccttcactggcgcccaatacgggatgcgccgctgaattaccggcaaacgtgtttaccggcgatagccgctggcatctggtgaccggagcgtttggcggattaggccgccttgccgtgaactggctcagagaaaaaggggcgcgacgcatcgccctgctggcgccgcgcgtggatgagtcatggctacgcgacgtggagggcgggcagacgcgcgtctgccgttgtgatgtgggcgatgccgggcaactggccacggttcttgacgatctggcggccaacggcggcattgccggagcgattcatgccgctggcgtattggctgacgcgcccttgcaggagcttgatgaccaccagctggctgccgttttcgcggtaaaagcgcaggcggcaagccagctgttgcaaaccctgcgcaaccacgacggacgctatcttattctctactcttccgctgccgccaccctcggcgcgccgggtcagagcgcccatgcgctggcctgcggctacctggacgggctggcccagcagttttccacccttgatgcgccgaaaacgctctctgtcgcctggggcgcatggggagaaagcggtcgggcggccacgccggaaatgctggcgacgctcgccagccgaggtatgggcgcgttaagcgatgccgaaggctgctggcacctggaacaggcggtgatgcgcggcgccccgtggcgactggcgatgcgcgtttttaccgacaaaatgcccccgttacaacaggctctgtttaacatcagcgccacagaaaaagccgcaacgccggtcattcctcctgctgatgacaacgcctttaacggcagcctgagcgatgaaacagcggtgatggcatggttgaaaaagcggattgcggttcagctaaggctgagcgatccggcgtcactgcatccaaaccaggatctgttgcaactcggcatggactcgctgctcttccttgaactcagtagcgatattcagcactacctgggcgtacgcatcaatgcggaacgggcgtggcaggatctgtctcctcatggactcacgcagcttatctgttctaagccagaggcgacgcctgccgcttcgcagccggaagtgttgcggcacgacgccgacgagcgttatgcgcccttccctttgacgcccattcagcacgcctactggctggggcgaacccacctcattggctatggcggcgtcgcctgtcacgtcctgtttgagtgggataaacgccacgatgagttcaatctcgccatactggagaaagcatggaaccagctcatcgcacgccacgatatgttgcgtatggtggttgatgccgacgggcagcagcgaatcctggcgacaacgccggagtatcacatcccgcgtgacgatctgcgcgcgctttccccggaagaacagcgcatcgcgctggaaaaacggcggcatgaactgagctatcgcgttttgcctgccgaccagtggcctctttttgagctggtggtcagcgaaatcgacgattgccattaccgtctgcatatgaacctcgaccttttgcagtttgatgtgcagagttttaaagtcatgatggacgacctggcgcaggtctggcgcggtgaaacgctggcgccgctcgctattaccttccgtgattatgtgatggctgaacaggcgcgccgacagacatcggcatggcacgatgcctgggattactggcaggaaaaactgccgcaactgcccttagcgccagagctgccggtggttgagacgcccccggaaacgccacacttcaccaccttcaaatcgacgatcggcaagacagaatggcaggccgtgaaacagcgctggcagcagcaaggcgtcacaccgtctgccgcgctgctcacgctgtttgccgccacccttgagcgctggagccgtaccacaacatttacgctgaacctgacgttcttcaatcgccagccgctccatccgcaaatcaaccagttgattggtgattttacctccgtcacgctggttgattttaacttctcagcgccggtgacgttgcaagagcagatgcaacagacccaacagcgcctctggcaaaacatggcgcacagtgaaatgaacggtgttgaggtgatccgtgagctgggccgcctgcgaggatcacaacgtcaaccgctgatgccggtagtgtttaccagtatgctggggatgacgctggaaggcatgactatcgatcaggcgatgagccatctgttcggcgaaccctgctatgtattcacgcaaacgccgcaggtctggctggatcatcaggtcatggagagcgacggcgagttgatgtttagctggtactgcatggacaacgtgctggaacccggcgctgccgaggcgatgtttaatgactattgcgccatcctgcaagccgtcatcgccgcccctgaaagcctgaagactctcgccagcggcatcgccgggcacattccccgccgacgctggccgctgaacgcgcaggcggactacgacctgcgggatattgagcaggcgacgctcgaataccccggcatccgtcaggccagagcggaaataaccgaacagggcgcgttgacgctggatatcgtgatggccgacgatccgtcgccatcagcggcgatgcctgatgagcacgaacttacccaactggcgctgccgttgcctgagcaggcgcagcttgatgagctggaggcgacctggcgctggctggaggcgcgtgcgctacaggggatcgcggctacgctaaatcgtcacggcctgtttaccacgccggagatcgcccatcgctttagcgcaatagtacaggcgctgtccgcgcaagcgtctcaccagcgtctgctgcgccagtggctacagtgtctgacggaaagagagtggttaatccgcgaaggtgaaagctggcgctgccgcattccgctcagcgagattcctgagcctcaggaagcgtgcccgcaaagccaatggagccaggcgctggcgcagtatctggaaacctgcatcgcccggcacgacgccctcttctccgggcagtgttctccgctggaattgctgttcaacgagcagcatcgcgttaccgacgcgctgtatcgcgacaaccccgccagcgcctgtctgaatcgctataccgcgcagattgccgccttgtgcagcgcagaacggattctggaggttggcgccggaaccgcagccactaccgcgccggcgctgaaggccacgcggaacacgcggcagtcgtaccacttcacggacgtctccgcgcagttcctcaatgacgccagagcccgtttccatgatgaatcgcaggtgtcttatgccttgttcgacatcaaccagccgctggatttcaccgcccacccggaggcgggttacgacctgatcgttgccgtcaatgtgctccacgacgccagccatgtcgtccagacgttgcgcagattaaaactgttgctgaaagccggcggacgtttgctgatcgttgaagcgacggagcgaaacagcgtattccagctggcgagcgtgggctttattgagggattaagcggataccgcgatttccgccgccgggatgagaaaccgatgctcacccgctccgcatggcaggaggttctcgttcaggccgggtttgcaaacgagctggcgtggcccgcgcaggaatcgtcgccgctgcgccagcatctgctggtggcgcgttcgcctggcgtaaatcgcccggataaaaaagccgtgagccgctatttacagcagcgctttggcaccggtctgcccattttacagatccggcaaagagaagcgttatttacgccgctgcatgccccgtctgatgcgccgactgagccagccaaacccacgccagttgccggggggaatccggcgctggaaaaacaggtggctgaactctggcaatcgctgctgtctcgccccgtggcaaggcatcacgactttttcgaactgggcggcgacagcctgatggcgacaaggatggtcgcgcagctaaaccggagagggattgccagggctaaccttcaggatctgttcagccattcgacgctgagcgacttctgcgcccatctacaggcggctacgtcaggagaggacaacccgatacccctttgccagggcgacggtgaggaaaccctgtttgtcttccacgcttcagacggcgatatcagcgcctggctgccgctcgctagcgcgttgaacagacgcgttttcggcctgcaagcaaaatcgccgcagcgctttgccacgctcgaccagatgatcgatgagtatgtcgggtgcatccgtcgtcagcagcctcacggcccttatgtgctggcgggttggtcgtatggcgcgtttcttgcggcgggcgccgcacagcgcctgtacgccaaaggcgagcaggttcggatggtgttaatcgatcccgtgtgccgacaggatttctgttgcgaaaaccgggcggccctgctgcgcctgttagccgaaggacaaacgcctctggcactgcccgaacatttcgaccagcagacgcccgacagccagcttgccgactttatcagcctcgctaaaacggccggtatggtgtcgcaaaacctgacgctgcaagcggcagaaacgtggctcgacaacatcgcgcatctgctgcgtttactgactgagcatacgccgggcgaaagcgttccggtcccctgtctcatggtgtatgccgccgggagacccgcgcgctggacgccagcagaaaccgagtggcagggctggataaacaacgccgacgacgctgtgattgaagccagccactggcaaatcatgatggaagccccccacgttcaggcttgtgcgcaacacattacgcgctggctttgcgcaacctcaacgcaaccggagaacacgttatga

SEQ ID NO: 438458 - DNA, 6108 bp, Serratia marcescens
atgatttctggcgcaccatctcaggattcgctgttaccggacaaccgccacgcggctgattaccaacaattacgcgagcggctcatacaggaactgaatttaacgccgcagcagttacatgaagagagcaacctgatccaggccggcctggattccataagattgatgagatggttacactggtttcgtaaaaatggctaccgccttacccttcgcgagctgtatgccgcccccacgctggcggcatggaaccagttaatgctcagccggtcgcctgagaacgcggaagaagaaacgccgcccgacgaatcatcctggccgaacatgaccgaaagtacccccttcccattgacgccagtacagcacgcctacctgacgggccgcatgccggggcagacgcttggcggcgtgggttgccacctgtatcaggagtttgaaggccattgtctgacggcgtcgcagctggagcaggccatcacgaccttgctgcaacgccacccaatgctgcatatcgcctttcgccccgacgggcagcaggtctggctaccgcaaccttactggaacggcgtcaccgttcatgatttacgccataacgacgctgaaagccgccaggcctatctggacgcactgcgccagcgcctgagccaccgtcttttacgcgtggaaatcggcgaaacgtttgattttcagctgacgctcttgccggacaatcgccaccgcctccatgtcaatattgacctgctgattatggatgcctccagctttacgcttttcttcgatgagcttaacgccctgctggccggagaatcgctgccggctatcgacacccgctatgatttccgctcgtatttgctgcaccagcagaagatcaatcaaccactgagagacgacgcgcgcgcttactggctggcgaaagcatcgacgtttccccccgcgcccgtcttgccgctggcctgcgaacccgccacgctacgtgaagtccgtaatacccgacgccgcatgattgtcccggcaacacgctggcacgcctttagcaaccgggccggcgagtatggcgtgacgccgacaatggcgctggcgacctgtttttctgccgtgctggctcgctggggcggcctgacgcgtctgctgcttaacatcaccttattcgaccgccagccgctgcacccggcggttggcgcgatgcttgccgacttcaccaatattcttctgctggataccgcctgcgatggcgataccgtcagcaacctggcgcgtaaaaaccagctcacgtttacggaggactgggagcatcgccactggtccggcgtcgaattactccgtgaactcaaacgccagcagcgctacccccacggcgccccggtggtatttaccagcaatctggggcgttccctctacagcagccgcgcagaatcgccgttgggcgagccggaatggggcatctcgcaaacgccgcaggtctggatagatcatctggcgttcgagcatcacggcgaggtctggctacaatgggacagcaacgacgcgctgttccctccggcgttagtcgaaacattgttcgacgcctactgccagttgattaaccaactctgcgatgacgaaagcgcctggcaaaagccgttcgcagatatgatgcccgccagccagcgcgcgatacgcgaacgggtcaacgccactggcgcccccattcccgaaggcttgctgcatgaaggcattttccgtatcgctctgcaacagccgcaggcgctggcggtaacggacatgcgttatcagtggaattatcatgagctgacagactatgcccgccgttgcgcgggcaggttaatcgagtgcggggttcagcccggcgataatgtggctatcacgatgtcgaaaggcgcaggacaacttgttgcggttctggccgtcctgctggccggggcggtttacgttccggtttcgctggatcagcctgccgcacggcgcgagaaaatctacgctgacgccagcgtccggctggtgctcatttgtcagcacgacgccagcgccgggtcagacgatattcccgtccttgcctggcagcaggccattgaggcggagccgatcgccaacccggtagtacgcgcccccacgcaaccggcctacattatctacacctccggctctaccggtacgccgaaaggggtagtcatttctcaccggggagcgcttaacacctgttgcgatatcaatacccgctatcaggttggcccgcatgacagggtgctggccctctccgccctacattttgatttatcggtttacgacatttttggcgtactgcgcgcgggcggcgcgctggtgatggtgatggaaaatcaacggcgcgatcctcacgcatggtgtgagctgatccagcgccatcaggtcacgctctggaatagcgtcccggcgctgttcgatatgctgctgacctggtgtgaaggtttcgccgacgccacgccggaaaacctgcgcgcagtgatgctttccggcgactggatcgggcttgacctccccgcccgttatcgggccttccggccacaaggacaatttatcgcgatgggcggcgccaccgaggcgtctatctggtctaacgcctgcgaaattcacgacgtccccgcccactggcgctccatcccttacggttttccgctaaccaaccaacgctaccgggtggtggatgaacagggccgggactgccctgactgggtgccgggtgaattatggattggcggcattggggtcgcggaaggctatttcaacgatcccctgcgtagcgagcagcaatttttgacgctcccggacgagcgctggtatcgcaccggcgatctcggctgctactggccagatggcacaatcgagttcctcggtcgtcgcgacaagcaggtcaaagtcggaggatatcgcatcgagctgggcgaaatcgaaagcgcgctcagccagctggcgggggtgaaacaagcaaccgttctggcgatcggcgaaaaagaaaaaacgctggcggcatacgttgttcctcagggcgaggctttttgcgttaccgatcatcggaacccggcactgccgcaggcgtggcacacgcttgcgggaacgttgccctgttgcgccatctcgccagagatctccgcagaacaggtagccgatttccttcagcatcgcctgctaaaactgaagccgggtcacaccgctggcgccgatcctctccccctgatgaactcactcgctatccagccgcgctggcaggccgtggtggaactctggttagcatttctggcgacacaacggcgactgaagcccgctgctgaaggttatcaggtctgcgctggtgaagaacgcgaggatgagcacccgcacttcagcggacatgatttaacgttatcgcaaattcttcgcggtgcccgtaacgaactgtcgttactgaacgacgcgcagtggtcgccggaaagcctggcctttaaccatccggccagcgccccgtatattcaggaactggcgacaatttgccaacagcttgcacagcgcttacagcgcccggtacgcctgcttgaggtgggaacccgcactggccgcgccgcagaatcgctgttagcacagctcaacgccggacagattgagtatgtcgggcttgagcagagccaggagatgctgctgagcgcccggcagaggctcgccccctggcctggcgcccgtctgtccctctggaatgcagacacgctggcggcgcacgctcactcggcggacattatctggcttaataacgccctgcatcgtctgctgccggaagatcccgggctccttgcgacattacaacagcttgccgttcccggcgcgctgctctacgtgatggagtttcgccagttaacgccgtccgccctactcagcacgctcctgttaaccaatgggcagccggaggccttgctgcataacagcgccgactgggcggcattatttagcgcggccggcttcaactgtcagcatggcgatgaggtcgcggggttacaacgcttcctcgtacaatgtcctgacaggcaggtgcgccgcgatccccgtcaacttcaggccgccctcgccgggcgtctgccggggtggatggtgccgcaacggatcgtcttcctcgacgccttaccgctgacggctaacgggaaaattgactaccaggcgctgaagcgtcgtcatacccctgaagcggaaaacccggccgaagcggatttaccccagggcgacattgaaaaacaggttgccgccctctggcagcaactcttatcaactggcaatgtcaccagagaaaccgacttcttccagcaaggcggcgatagcctgctggcgacccgtctgaccgggcaacttcatcaggcaggttatgaagcgcaattaagcgacctgtttaatcatccccggctggtggattttgccgccacgctgcggaaaaccgacgtcccggtcgaacaaccattcgtccactcccctgaagatcgctaccagccctttgcgcttaccgacgtgcagcaggcttacctggtggggcgtcagcccggctttgccctgggcggcgtcggctcacatttctttgttgaatttgaaattgccgatctggacctcacccggctggagacggtctggaaccgattaatcgcccgccacgatatgctgcgcgccatcgtgcgtgatggacagcaacaggtgctcgaacagacgcccccctgggtgatacccgcacacaccctccatacgcctgaagaggcgttgcgggtgcgcgaaaaactggcgcatcaggtactcaaccccgaagtgtggccggtattcgatctccaggtcggatacgtggacgggatgcctgcccgcctgtggctgtgtctggataacctgttgcttgacggtctgagcatgcagatcctgctggcggagctggagcacggctaccgctacccgcaacagctgcttccgccgctgcccgtcaccttcagggattatctgcaacaaccctcgctacagtcgcccaatccagattctctggcatggtggcaggcgcagcttgatgatattcctccggcgcctgcgttgccgctgcgctgcttgcctcaggaggttgaaacaccgcgcttcgcccgcctgaacggcgcactggacagcacgcgctggcatcggctgaaaaaacgggcggctgacgcccatctcaccccgtcggccgtactgttgtcggtgtggtcaacggttctctctgcatggagtgcacagcctgagttcacgcttaaccttacgcttttcgacaggcgaccgctgcacccgcaaatcaaccagattctgggcgatttcacctcgctgatgctgctgagctggcatcccggcgaaagctggctgcacagcgcgcagtcactacagcagcggctgagccagaacctcaaccaccgcgatgtgtcagccatccgcgtgatgcgtcaactggcgcaacggcaaaacgtgcctgccgttccgatgcccgtcgtctttaccagcgcactgggctttgagcaggataacttcctcgcccggcgtaatctgctcaaaccggtctggggcatctcccagacgccgcaggtctggctcgatcaccagatttatgaatccgaaggcgaactgcgctttaactgggattttgtcgccgcgctgtttcctgccgggcaggtggagcgccagtttgaacagtattgcgcattgctaaaccgaatggccgaggatgaaagcggctggcaactgccgctcgccgcgctggtgcctcccgttaaacacgcagggcaatgcgcagagcgctcaccgcgcgtatgccctgagcactctcagccacacattgcggcggacgagagcaccgtcagcctgatttgcgacgccttccgcgaggtggttggcgagtctgtcacgcccgcagaaaacttctttgaggcgggcgcaacgtcgctgaatctggtgcaactgcacgttttgttacaacgtcacgaattttccaccctgacgttgcttgacctcttcacccacccttctcctgctgccctggccgattatctggccggcgtcgccacggtggagaaaacaaaacgacctcgccctgttcgccgtcgtcagcggcggatatag

SEQ ID NO: 438459 - DNA, 960 bp, Serratia marcescens
atgacggagtcaccgcaaacgcaatctgaaatctctattcaccagttggtggtcgggaaacctgcaaacgatggcaatattcctgctcagtgtgaactgctgcgctgttcgttgcaggaaggtatggatattttgctctggaggggccattttgcgcggcctgagacgttgcagctacacgacgatctgggcaggattaacttctcgtgcatcctggaaggcacatcgcgctttgcgattcagggactccggcaccacaccgactgggagcttgcgcgcaatcgccattacattacccatacgccagactgtcgcggcagcgcctcctattgtggccgattcgagagcattaccctctccttcagccctgaaaccctcgcgctgtgggtgccggatattagcgcggtcattaagaataagatcgactcccactgctgttgccagcagcagcgttgtaatgctgaaacccacttaacggctcaggccttgcgtcacgcgctgatgcgcatgcacggcggcttcagtcatgaacaaaagccgtcgacgctatggttgcaggggcaaagtctggtcatgctcagtctggtgctggatgaacatcgcgaaaacgccagttgcctctcctgccacttcaacccgatggaacgccagaaactgctgcgggcgaaggatctgctgctggctgatctgacgcaagcgccgggcgtcgcggagctggccagagagtccggtctgagcgttctcaaaattaagcgaggcttccgcgttctgttcaacaacagcgtctatggcctgtttcaggctgaacgaatgcaggaagccagaagacgcctggccaacggcaatacctccgtcatgacggtggcggccgatctgggctatgccaacgccagccatttctctgccgccttccagaaacagtttggcgtaaccccttcgacctttaaacgcgtgatgtaa

SEQ ID NO: 438460 - DNA, 1713 bp, Serratia marcescens
atggcgctggcggggctggcggcattaaccagcctgggggcgctcctttttctggcgtggagcctgcgtgacattcgcgcgacgcctgacgctattccggcctggccgctgggcggcgtgatcggctgcgtggtcttaacttttgttctgcgcttacaggcgttcaacacctctcattacgcggcttttcatctggagaacattctgcgcagcaggttagcccgtaaagcattgcagcttccgcctggcgtgttacagcaaatgggcagcgggtcagtggcgaaagtgatgctggatgacgtgaagtcgttacatatttttgtggccgacagcacgccgctctatgcccgcgcgatcatcatgccgctggcgacaatcgttatcttgttctggctggactggcggctggcaatcgcgacgctgggggtactggcgtttggaacggttgttctcgtgctcgcccgccagcgttcggaagatatggctcagcgttatcataaggcgcgcgagcaggttagcgcggcggttattgagttcgtgcaggccatgcccgtggtgagaacgtttgatagcggcagcaccagttttttgcgctatcaacgcgcccttgaagagtgggtcgatgtgctcaaaacctggtatcgcaaagccggtttttcagcgcgtttttccttctcgattctgaatcctctcccgaccctgtttgtcctgatctggtcgggatacggcctgttgcactatggcagtttcgattttatcgcgtgggttgccgttttactgctgggcagcggaatggccgaagccgtaatgccaatgatgatgctcaataacctggtcgcgcaaacgcgtttaagcattcagcgtatttatcaggttctcgcgatgccggagttatcgctgccgcagtctgaccagcagccgcaagaggcgagcattacctttgagcaggtgagctttcattatccgcaagcgcgtactggcgccgcgttgcaggaggtgagctttcatgtgcctgccgggcaaattgtggcgctggtcgggccaagcggcgccggaaaaagcaccgtggcgcgcttgctgctgcgttacgccgacccggacaaaggccatatccgtattggcggcgtggatctgcgtgatatgcagacggacaccctgatgaagcaactctcgtttgtgtttcaggacaacttcctttttgccgacacgatagccaataacattcgtctgggcgcgccggatacgccgctggaggcggtaatagcggcggccagagtggcgcaggcccatgattttattagcgctctgccagaaggttacaacacacgagtcggggaacgtggggtatttctctccggcggccagcggcagcgcattactatcgcccgggcgcttttgcaggatcgccccatcctggtgctcgatgaggcgacggcgtttgctgacccggaaaacgaagcggcgcttatcaaggcgctcgcggcggccatgcgtggccggacggtcatcatggtcgcgcatcgtctctcaatggtgactcaggccgatgtgatattgctgttttccgacggacagctcagggaaatggggaaccatacgcaactgttggcgcagggcggcctgtatcaacggctctggcaacactatcagcaggcgcagcattgggtgccgggtggaacacaggaagaggtggtggaaaatgaaagacaataa

SEQ ID NO: 438461 - DNA, 1803 bp, Serratia marcescens
atgaaagacaataatcctgcggataacctggcctggcgcgtcatctggcgccagcttatctccagcgttggcagtcaggccaggatgctgcgacgcagtatgctggcgctgttgctggcggcattcatgcaggggatcgcctttgcctgtctttatccgatcattgatgcgctgttacggggagacgcgccgcaacttcttaactgggctatggccttcagcgtcgccgcaattgtgacgctggtgctacgctggtatggcctgggctttgaataccgtggtcatctggcgcaggccacccatgagttgcgcctgcgacttggcgagcagttacgccgcgtgccgctggagaagctccagcacggcagggcgggtgaaatgaacgccttgctgctgggcagcgtggatgaaaacctcaattatgttattgcgatagccaatattttgctgctcaccattgtcacgccgctgacggcgtcgctggcgacattgtggatagactggcggctggggctggtgatgttgctgatcttccctctgctggtgccgttttattactggcgccgcccggcgatgcggcgacaaatgcagacgctgggggaagcgcaccagcgtctgagcggcgatatcgttgaatttgctcaggggatgatggtattgcgcacctgcggcagcgatgccgataaaagccgggcgctgctggcgcatttcaatgcgctggaaaacttacagacccgcactcaccgtcagggcgctggcgcgacgatgctgatcgccagcgtcgtggagttgggcctacaggtggtggtgttatccgggatcgtctgggtagtgacgggcactctgaacctcgcctttttgattgccgccgtcgcgatgattatgcgcttcgcagaaccgatggcgatgtttatcagctacacctcggttgtggaactgatcgccagcgccctgcaacggattgagcggtttatggcgatagcaccgcttcccgtcgcagagcaaagcgagatgccggaacgttacgatatccgctttgacaacgtcagctatcgctacgaagaaggcgacggccacgcgcttaatcatgtttctttgacgttcccggcagccagtatgagcgcgctggtgggtgcctccggcgcaggcaaaactacggtcaccaaactgttaatgcgctatgccgatccgcagcaagggcagatttctattggcggcgtcgatattcgccgcctgacgccggaacagctcaatagcctgatttctgttgttttccaggatgtctggctgtttgatgacacgctgctggcgaatatccgtatcgcgcgcccacaggcgacgcggcaggaggtagaagaggccgcccgcgcggcgcagtgccttgagtttatttcccgtcttccgcaaggctggctgacgccaatgggagagatgggcggtcagctatcgggcggcgagcgccagcggatttccattgccagagcgttattgaaaaacgcgccggtcgtcattctcgatgaaccgactgccgcgctggatattgaaagcgagctggcggtgcaaaaagcgatcgataacctggttcacaaccggacggtgattatcatcgctcaccgtttatccaccatcgccggggccggaaacattctggtgatggaagagggacaggtggttgagcagggtactcatgcgcaattgctctcacatcatggacgttatcaggcgctgtggcaggcgcaaatggccgcgcgcgtgtggcgcgacgacggggtttccgcgtctggagagttggtgcatgagtga

SEQ ID NO: 438462 - DNA, 1281 bp, Serratia marcescens
atgagtgatgttcagtcgaatgtgaaaccgctgacgttgacgaccgggcgggtgatttttgctattgccggcgtctatgtgacgcagagtctggtatcggcgctgtctatgcagtccttacccgcgctggtgcgcgctgctggcggttcgctggcgcttgccggtgcgacaaccctgtttatgctgccctgggcgctgaagtttatttgggcgccgtggatcgagcgctggcggcttccgcccggtagccaggaacgccgttcccgcatgttaatcctgcgtggtcaggtcgcgctagcggcgatcctgactattgccgcagcgattggctggtttgggcgagaagggggattccccgatacgcaaatcgtcgcgttatttgttctgtttatggtggcaggcacggtcgcctccaccattgatatcgccagcgacggcttttgcgtcgatcaactgacccgcacgggttacggctggggaaacagcgtgcaggtcggcggcagctatctgggaatgatgtgcggcggcggggtgttcctgatgctgtcggcggcatccggctggcctgtcgccatgctgatgatggcggtgctgattatggcgctgtcactcccgctgtggcgcattacggagccgacgcgaacagcgactatcccgcatgttccggcgttaggttatgcgctaaggaggaagcaggcgcgcctgggcttactgctggtattgatgctgaattcaggcatgcggtttgtgctgcctcttctggcaccgctgttgttggatcatgggttgagcatgtccgcattgggcgcgctgttcagcggcggcaatattgcagcgggcatagcaggaacgctggccggcggattgctgatgaaatacacctcacccggcagagcgctgttgacggcttatggcgtccaggggatcgcgctgctggcggtggtgatgacgctcatgatggcgccgggtcatctgctgctgccgattctccagtgtctggtcattgtccagtccatttcgctggcctgcgcgctggtttgtctttacgccacgctgatgtcgctttcatcgcctttgcaggccggtgtcgacttcaccctctttcaatgtactgacgcggcaatcgccattctggcaggcgttatcggtggcgttgttgctcaacattttggctatgcggcctgcttcctgtttgccggggcattcacgttgctggcggcgtgggttgcttatatccggctgcattcggcaagagaactgatgacaagcgcaattgattga

SEQ ID NO: 438463 - DNA, 1305 bp, Serratia marcescens
atgaaaatcagtgaatttctacatctggcgttaccagaggaacaatggctaccgacgatttctggcgttttacgccagttcgcagaagaagagtgttatgtctatgagcgtcaaccctgttggtatttaggcaaagggtgccaggcacggctgcacattaatgccgacggaacgcaggcgacatttattgatgatgccggggagcaaaaatgggcggtggattccattgccgactgcgcgcgtcgttttatggcgcatcctcaggtgaaaggacgtcgggtatatggacaggttgggttcaactttgcggcgcatgcgcgggggattgcctttaacgccggggagtggccgctgctgacgttaaccgttccccgtgaagaacttatttttgaaaagggaaatgtcaccgtttatgcggactccgccgacgggtgccgacgtttgtgcgagtgggtaaaagaggccggtacaacgacgcagaacgcaccactggcggtggataccgccctcaatggtgaggcatataaacaacaggttgcgcgcgccgttgcggagatccgccgtggcgagtatgtcaaagtgattgtctcgcgcgccattcccctgccatcgcggattgatatgcccgccacgctgttatacgggcggcaggcaaacacacctgtgcgctcgtttatgttccgtcaggaaggacgcgaagcgctgggctttagcccggaactggtgatgtcagtgacgggcaataaagtggtcactgaaccgcttgcgggcacccgcgatcgcatgggaaacccggagcataataaggcgaaagaggcagaactgctgcacgacagtaaagaggtgcttgagcatatcctttctgtcaaagaagctattgctgaactggaggccgtttgccagccgggcagcgtggtggttgaagatttaatgtcggttcgccagcgcggcagcgttcagcatctggggtctggcgtgagcggtcagcttgcggaaaacaaggatgcctgggatgcgtttaccgtactgtttccgtcgattaccgcctcaggtatccctaaaaatgctgctctgaacgcgattatgcaaattgagaagacgccgcgagagctttattccggcgcaatcctgctgctggacgatacgcgctttgatgcagcgctagttctgcgttccgtatttcaggatagccagcgctgctggatacaggcgggggcgggaatcatcgcgcaatctacgccggaacgcgaactgacagaaacccgggagaaattagcgagcattgcgccctatttaatggtgtag

SEQ ID NO: 438464 - DNA, 333 bp, Serratia marcescens
atgctccaccaacacaatcccgcagcgagcggtgatgagctcgatctcgacggccacggcctgacgcagctcgacgagtcgccgttagccggccacgcgctgcgcaagattagcctgtacgataatcagctgacggccctccctgtcgccctcttccggcaccgaaatctgcgggtgctgaatatctcctgcaatcagctcgaccgcctgccgccggagattggccagttgcaacagctcgagatgttcgactttggccacaatcgcgcaaacgaactccccgaagaactgggggcagctgcatcggttgaaatacctctatctgagcgataa

SEQ ID NO: 438465 - DNA, 1227 bp, Serratia marcescens
atgactgatgatataactaatactaacgatgagaatgaagagcctctttccgtaggcaacgtagttgtacctgccggtatctctgacagcgcgattgaaaaacattatgagacaggaaggttgcgtgttgtacaagaaagaaatgatatatttctgactcatgtccttagctttatcagtgaggattcgagaaacaaagtatggtcaaacatccgccctgaatatcagcgtagacttcgctgggataataagaagaaatcacaactaattgaaagcttcattatgaatattcctgtccctcccattttcctttatgaaaaaagcttagggagttttgaggtgatggatgggcaacaacggctgaatgccatagcttctttctatgaaggagaatttcaattacaaggattaaaaatttggcaagctctcaatggaaaaacttactctcaattaccaccactaattagaagaggtttagatcgagcaaaaatatcagcaattacactaatgtctgacaactcgacaaatacagaggatagcattgatcttcgagctcaagtttttgaccgtctaaatacaggtggggaaaagctcaacgctcaagagttacgaaatgctctttatgcaggaccattcaatgaattactaattgaattatcaagagagcgtgagtttgctaatgcttgggacatccctatttattcagatcacataagagcagacggtactgttagcgagttgcttgagaaaaacacctattataagcgtatgtcagacgtcgaaatagttctaagattcttcgcatttcgagatgtaaataacatttcagggtctgttagaggaatgttggatgatgcgttaaaaaataatcgccatccatcgactgacgagctaactgaaatgcgtgacagctttaataaatcacttaacctttgcttatcagtttatggaaaagatgcttttagaataacatcgcaacgtaataaaaatgagtctaatctctcaaaaccattctttgatgctcagatgatagcaatgtttatcaatctccaacattcaatagaaatagtcaaaaatgcaaatgtaataaaaaataagataatggaattagccgttccaggaagcgatagctatgatttgattgttggcaaagcaaacacctcatcatcaattaaagaacgaatcaatataatttcaaacattatattagaggtggtaaatgcctga

SEQ ID NO: 438466 - DNA, 774 bp, Serratia marcescens
atgcctgaaatacaacatcaagttgatttatctgaggcattcttctcagaattagagtcgactgcatctatgagaatggtatttatggatatagtgatatctaactctagcacactattccaagcctttagtcatgacaaagctttgctgtcaaaactaaaagaagccatgaagctaaaaactgtagatcaaaatgccctcttcagagggttattcattcaagcagttgcaatttttgaagatttcattcgaaatatggttactcacgtcgtccatagccatcaatcccagagagaacggtatagtgaattatcaacctcccttcaaaactattttatatccagctccgggaacgttctaaaatattatggcagcggcagtgttaatggcgttaagtatgacttttcccaccttaaaaaaagtttaataagttgcctatcagacaataatgatttttatcttgaacctagagtattcacgatctcaatgggtaattgcacatcaaccagagtcgagaatttattttcaaaactttgcctatctgataatatatttgataagattggtggaaatcaaaatctaaaaaacattatacaagaactaagaaaatcaaatgcatcagtattaataaaagagaaattagatagtataatcgacacaaggaatgatatagcacatggtgagttgactcgttccataagcaaagatgaattcgacgatgcgattcttttccttcgtggtttaattaaagcatttgctgattgttgtgtttga

SEQ ID NO: 438467 - DNA, 822 bp, Serratia marcescens
atggcgaactcattcaagcagatgaagaacaacggaacgcttaagcggactgactccgggatgttcatcaagctggctgatattcacgtccaggagggcttcaacaagcgcgttgacgatgagcgcacacaggccgctgatgatgacctgtttaatcacctgtcatcaggcaagcctgttcctccacttgaggttcgcccacgcgatgaaggcggcgtttggattgttgagggccaccgtcggcaccgcgcatatttacgttgccgtgacgcgggaaagcccgttgagtggatagccatcctaccgttcactggtagcgatgtggagcgcatagcgcgcatcatgaacagcaatagccagctggcgcttaccccatacgagcaatcgcaggtggtaaaagagctctcaggcttcaacctatcaccagatgagattgccgcactggtcggcaaaagccgtacaacggtcgataaactgctggcgttgagtcagaccaaccacgatgtgcaaacgctggtgaaagatggctctgtagcggttgatgcagctcttgagcgcgtgaaggttcacggtgagtcagccggtaaggttttgacgaatgacgttgagaaagcccgtaaacagggcaagaaaaaagtcacgaaatccgttatcagccgtgaattcagtgccaaaaaagcccgcagactctgcgaacttctttacgatgccgccccaatgacccgcgaggaaggtgatgttttacttctcgccaggggaacccgagaagaaattaactccatcctcaacgaatatcgacggcttgacggggaggccacatga

SEQ ID NO: 438468 - DNA, 663 bp, Serratia marcescens
atggctcagatctgctggagaatatttaaaaaccatgatgactatactcgtggtatggaacggttcttacagcttgctagtggcgaactaatgcctggaactgacgattatgatgagttcgaaatcttgaaccttctgatcggtcattatgagaataagaactattcacttgagatgccagatcctatagaagcgattaaattcaggatggatcaacagggcctgtctcaggcagatatgacgcaatttattggccctgcatcaaaagtttctgaggttctcaacagaaagagaccgcttagcctttcaatgataaggcggttacatgatggtctaggaattcccgccgatatcttgatacaagatatgagcgctatagaatggaatttggttgatgcggttgaagaagaagtgaatgtcacaggaaaactactgcaattctgcactgcgttggtaacgccagggtttgaccatgttttccatgaacattttttggctacagcatcgcaaagcatgtctcctcccaaaagaagcacagcaccgagacgagaggagtcgagcacatttaagcggtttactgaactggtgggtaactttacggctccagtttacgaacaatctgaagaattacaaattgacacggaattttcattaatatcatga

SEQ ID NO: 438469 - DNA, 198 bp, Serratia marcescens
atgtctgccgcgagaccgagatttctgaacaactggaaagcgaagttcggcgttatcgaagcctccgatatcaaaaagatgaaagaccttgaggatgaaaaccgccaactgaaacagatgtttgcggaccagagtctcgagtgccgcggactgaaagacgttattgaaaaaagctttaaaaccagcgaaaaagcgtga

SEQ ID NO: 438470 - DNA, 780 bp, Serratia marcescens
atgtcgaataaaaaggtattatatcttggccagtcggctgctgattatctttatgaggggataggcgtcaatattgaaaaatatatgattgatggaccagacttctcccaagaaattgaagatggcaattggaacattcctttatccatcgattatattcccgaaccattacaagatcttaaatacagtaataatgagccagaatcagttaagcgtgatttagagatagagaactcaatattagtttggtcgtccttaaggaacctaacgccagttttagcttgtgagaatagagtctggtcacgcttcacacacacagagtgtcttaaattcaccagaaacagatgggatataactaaaatatctgaagaaaaaaagattgagcatataaaaaagcatttcttcgccattaacagaacacattgccgagatgacaatgcaatatctagattatggtggaatgcatggattgcgagccagtactccaatgacaactttgaagttgcattaagaataatattgcgtaccgcagatataagaagcaacctaatagaacgaccgtggatgttcagacgtcgagaaatttccaatggtataattagatttatgagtgagcactttttggatggtgaggataaaagagaggcaagatttagacaattttctaaaaccttaaatatgcaaggggcaggagttatttttgaagggatgaatgattcaaaaatagatgcatttattagacaatgctatgatgtatccgagagctcaattaactcttaa

SEQ ID NO: 438471 - DNA, 840 bp, Serratia marcescens
atgaaaataaaaaataacatgagattcccattcccagtattaggaccactaacggaagattataccgatagtgatttttcatttgaaaaattttctgctatagaagacagaaactcttggaacattattatatctggctcaataaatataggaagtaacgagataaaaagttatataatagagaggaaagccaaatgcgttatctatatcacttgtaatgatacatattattcatcatgcgaagagatcgatatcgatagttggaaaataatcatcccctcgggtaaggtcaaaggaaaggtacaaataaggccaataatttacacatcagaggataaattaaatctgcaagatgaaaaaataaatcctgaatttggaaatgagatcatcattcctgaatttagtccaatagcaatcggtcttcaagccgaatttactgctggctatgaaaagctggcaccaatggagtcaatatttaaattaataaaaagcaatgacattccagatggttcgttcgatattcaattagacaattcaactatagatattttggtttctccttcaatccataagatcatatgtaacttaaggggaaatgttcacactagaaacatgttattatccagtatttacttgccagctgtaatgcaaatatttagtgcattatcaaaaggttacctaagcgaacaaagatgggtcaaagtatttaaagaacgttgtgattcatttaatataaactactccaatgatgatgagcatcttaaaaacgcacaaaaaatcctatccaatccattgatgttattggaagacgcaataagaggactggctcatgtcgaataa

SEQ ID NO: 438472 - DNA, 1872 bp, Serratia marcescens
atggaagcaaaatggttatttgttgataacaaagctgatgaaagtgatggtttctctaatcccggagttgaattattcagagattcacctgtttcatcagtgtctagggagtgtgggcaaaatagtattgatgccgcattagataatgagattgtgaaaataaattttgagtgtttagacgtaggtgtgtcggaaatcccagattacaatagtttattgaaaaccatgagatattgtaaaaataagctctcagactccaaagaccgtagagcaaatttgttttttgacagagctgttaatttattaaatcaacctagaataaaaatccttaaaataactgatagcggaacaacaggattatcaggtccatgcattgaaggcacaccatattatgcactgcttcgttcttcaggtactagcgaaaaaggaaataatacagcaggtggctcattcggtatagggaaaaatgcgacctttgcagtatcagaaataagaagtgtattttacacaacaaactacagagataaagaaactggtgaaaagatatttctttgccaaggtaaagcatcattaatatctcataaaaatgacagaggggaacgattcagaggctctggctactgcggagaagatgattttcagccaattaaagattcaagtaaactaccaagctggctacaacttgaaaatattggaacatccatatcaatagttggttttgatgattcagatgactgggaggaaaggattacagaaacgctaactagaaacttcttttcagcaatacatatgaaaaaagtaatttttaatataggtagaaaacataccataaataaagataatttaccctatttatttaaagaagataaaataaaaaaaacagctgaaagagagggatataaagatgagtttaacttcagtcactctctctaccgatgtataacatccgatctatctcttagaaaagtaatagaaatagatggaattggtaagttaaaagtccatctacttatagaaaacggattacctaaaaaagtaggtttcatcagaaatggaatgtacatcacaaatgaactatctaattttagcgataaactaaaacaattttattctctaaaagacttcattgccgtggttgaacctatagatgaaaaaagcatatctattttcagagagttggaaaatccacaacataacagtttctccccattgcggtatattgaaaaagacgagcagaataatattaaagcaaagtttgctgaaatgtctagagaaatacgccatttcataaagtcaaatacggagaattcttcagaggaagaattactcatcgaagagctaaatgaattctttccgatagatggtcataattgcaacatcccttgcgataataacgacacagataatttagatcttgagaaaacaaaagttagaaaagtaaaactcaatgtaatgataggaaaagaagaatctccatcgattaatagaggttccaaatataaaagaggaaaagaaaagcaatccggtaacgaacccccaagaaatgatggagagctgactgggcataatgatggtattggaacaagtataagctttaataaactcaggactaaactaggtacagatgattatgaaagagtaattttcttaacacctcaagaaaatgggattggtaaaatacgaatatttactcctggaatatccagtcaagacgaaatcgatgtaataagtgtaaataacaataagaaaaaagaaataaaactatccaaaaatgaaagattggagtttaatgtaaaactagcgtatccatataaaggtccaattatagtagccattgaaattcctggagataaaaatgaaaataaaaaataa

SEQ ID NO: 438473 - DNA, 1320 bp, Serratia marcescens
atgctgtccttcgatccatcttttgatcaaataaaaagcaagctcctagatttaggtgtggataaaatattaataaaggtattatcaagcaatgataattcaaagcaacaaatatatttaggctctgacttcaatgtaataaaagaaatcccatccggttgtttagataaaggggaaacatcaaagagtggagatgttatatttaaatcaaaagtggaattttattggataaatgaagaatggatacctgagagagctccaaacgctcaattaatactttacccaaactatccagaagtaaggctttctggcctattaaaaggttgcaaatcagctccatctgctcttatgaaatatccaacaagagaagagagagagaaaaggaaaaataaaaaaagaatactaatacttggaattaaaaataaaaaaataatttcatacattagtcactgggactctattttgtcgagtgatataaactccctaatagataagaaaagcataaagaatattttctctgttttttatgaatataaaaaaactcaagaaaaaaatagtaaagacattttaattaaaaaacttaaagaaataaccaagcttggttacattgattcacaaagattgaataaacacggggaaataattagttatacagctaaaaatggagctggatttacacttgaaagtctatttggaattagacctaatggaaatccagaaccagactttattgattgggagctaaaagcacactcaggaagagtggttacattaatgactccagaacctaacttaggtttatatcatacagattttaaaaaattcatttcagatcatgctaccagtagaaactcagatagaattgatttcgcgagcattcataaagtatccaaacccaatgaaagaactggattatcattagatcttgaaggattcgaatcaactacgggaagaattaccaatcccaatggcggattgatgttaagaaataaaaaaggtgaacttatttgtgggtggagctttagtaaacttttagatcactggaaaaggaagcataataaaacatgcttcgtttcttatgaaaagtctaatgaaggcagcactaaatataaatttggccctaaagttacgattgcaactggagcagattttttattattttttagtgcactatctgaaagctacatctattatgacccgggtataaacgtgaaaatgctagggagtgtaaacataacaaaaaaaagaaatcaatttaggataaagttcaatgatatatattttctctataaagaagttgaagatttatatttagcttaa

SEQ ID NO: 438474 - DNA, 993 bp, Serratia marcescens
gtgaaaagtgtaggctttttcaataacaaaggcggagttggtaaaaccactctcttatgtaatgttgctgcatcgcttgctattcagcataagaaaaaagttttagtcatagacgctgatcctcagtgcaatgcttcagcctatatcttgaaagaagaagatcttgagcgtattttcttaaataataacttctacagcattgactctttctttgaccctgtgcgtagaggacaaggttaccctcaagagatgccagaaatcgttagcagtgaacgattcaatgtcgacttaattgtaggaagccctaaactttccattagagaagatcttttagctaccgattgggcggcaacaagaaatggtgagcatagaggttttcagacaacttatgtgttcaaagaactaatatctcgattaactcactatgacataataatgattgatatgggcccttcccttggtgctttaaaccgatctgtaattctcggggttgatgcttttttgatgccactatctgttgatatattcagcatgatggctgtggaaaatattataaaatcatttaacacttggaagacagcactttctgacgcaattgataaatataaagatgcagaaaacgaaccatttaaaattgcaaataaagctgttgaatggaatttaacttttgccggttatgtcatgcaacagtacaaagcaaagagcaaatcaggtgtccgtgaacccgtcgctgcatttgaaagaataataacaaaacaaaaaagcgaacttgttgagctttgcaacttctttaactcgaatgttgataaccttcacttaggtgaaatacctacgttaagcagcgttgttccattatcacaacaggcacacgctcctatatttgagctatcagctaaagatgggatcgtaggttcacaatatacacgcgtatccgaagctgcagaattcttccataaaatagcatctaatttattggagcgattagaggaatga

SEQ ID NO: 438475 - DNA, 870 bp, Serratia marcescens
atgatttcttggcctgagaatttagtttctgctttagcacggcgccgttgtgtgatcatgattggtgctggcgtatcaaaaaactcggttaatgatgcaggtaagcgaccagcaacatgggaggagttccttagagcttgcctaaatgaaattgaggataaaatatgtgttacggagttattgaaccaaaaagattatttaagtgcatgcgagataattaaagagaaacttactttagatatcttcattgataaagtgcaaaatgaatatcagcgtgctggatataggcacgcaaaaattcatgaacatatatataatcttgatgcctctatcattgccagtcccaactttgatactatctatgattcttatgctgggggggtatctgctggaactttaatagtcaaagatcataccagtgatgatactgcaaactatttacatggcggagacaccagacttttacttaaaactcatggttcagcaaatgcgccacagaaaataatattcacaagacgagattatgctgaggccagaaccaaatatgttttattctatgaaattctaaaagctctagcgttaacacatacatttttattcctcggttgtggtacagatgaccctgatatcagaatgctgtttgaagacattcaatttgcacatggtagaatgccttatcactatatgactttacctgaaggtgaaatacattatgatttattaggtattgcatccagatctatgagagttaagtttctatcttactccccagataacgggcacttagaacttactgattcactcgagcaattagttgataaagttgagcaatacagagtagaagaacttaaagaaacacaaaaatggtaa

SEQ ID NO: 438476 - DNA, 573 bp, Serratia marcescens
atgaacagtcttatgcatgaggaacgttttgaacgctggctaaaagtttccataggattggcacgatttgatccttttgtagtaaaccttgtgcaaagtttgggtaaaatggatgcaaatctgtgtgagatggatgttactttaataaataaatataagcagggaggaaatgtaagcgaggactacgacctaataaaagggcatctcactcattcatatttatggattttaggttcttatgaagtaattcgtactcttacgcagagcattaaagaaaacaaaagtgatgatccagtggaagtgttagagaagtttcaggatgcaaagaaacgttttgcacgcttaaggatacccttagctaaatttgaagccgctaaggcccacaataagactgactttaagatcgcatatccaggatttgcctatgacattgggattgcatggcaagttagtgatgacgtagtgatctcccggcaagaactttcagatttgtttttagaaacgctagagtttactcgtgtcaaaaagcttagtaggtctcttgccaatgatgcccctctcccgtcatcttga

SEQ ID NO: 438477 - DNA, 195 bp, Serratia marcescens
atggttgaagattggatgatcccacaagattggcaaaatctgaaatggaatcgggacggtagccagcctcatcactggcataattatgtctccagcgcagttcagcaaatatggcaaagctttactgatgagcaaaagcaggtgctagccgctgggtttgcagaggtggcgctgaacgaggattgttgggattaa

SEQ ID NO: 438478 - DNA, 1032 bp, Serratia marcescens
atgactgaaccatttagttgggaaaattggagaaaagtatacctccacaaaaaaaataaaaaacgagcatctcttgagcgatatggattgagaaatctgcattctgttgctagtttggatgtaatcgtatcaaaagttaatgatttatacttagaaaacaaacaagaggtgttcgtcaatgctagttctgtttggatagatggaactcctcaagcaaggttcacgactattgatggctctattttaaactgtgaattggcggatcttttatttatagtacatgaagttgatgaaaggaaaacaacaaaaaacttccgcgctgttttattacaaggtaaatgttctgtaaaatacgaccttcttccaaatggactttcgacagaaaaagaaagaaagttactagaatcgatagaccgagataaatatttaacattgtatcctggcacaagagcatatggagaaactattggagagtataaactggggggcgatgtcatcggattgacagattgtgcaaaatttttaatgatgccaaagaacgaacgttggaattataaagctccagacggcataagcccttacgtgattggctggccagaaaacccatcatctaaaaatttaataaacactgaaaattatttaaattcaattcttaggggcatgataatatcgaaagatattggtaaggttataaaattatcagatgaaaaggatatagacagacgttgtgaatggtcaaatatgatttatgatttactaaataattatttgccggtaacgatgaagggttataactgtcaacgaagagtatataagtcaagttcatttgatgataatatgcctgaagcgctagctttgataaaaaatgattactgtgacgcaataagtaaacatgagtgcggaaagatccgaagcgataaggaacgatttcatctacagttaggattaaatttactttgcaactattctgggcctgttatttcgacaatatttatacaaatcaaacaaaaggaagggaaagttactcgttga

SEQ ID NO: 438479 - DNA, 189 bp, Serratia marcescens
atgacattcaaatacaaaaacttggcccaccaggcggccgaggcggaacgtcacgcccatttttcagatgcggctgaactgtggcgccaagcgcttgatacggcgcgggcggtagatattgtgtggattaaaatccgcatagagttttgcgtcaacgcggccgcgcgctgctggggtaacgctcaatga

SEQ ID NO: 438480 - DNA, 720 bp, Serratia marcescens
gtgggtaaggccatattcctctacgacttcaccgggttgatggcaaaaccgtggcttgatgccggctatgagtgctggtgcttcgatgggcaacacgatgccggaattgccagagagggcaatcacgtccgcgttggcatgtggttcagtgcaagcgacaagcttagccaggctcgcgagattgcacggatggtgggtgatggagtggttatggtgttcgggttccctgagtgtaccgacctgactgttgccggcgcccgccacttcgaagccaagcgacaggctaacccgatgttccagattgaagcggcagagcttgctgaccttgtgcgcattgttggtgtcatcaccggcgcgccgtgggctttcgaaaaccctgtcggagttctgtccagcatctatcgaaagcctgactttgcgtttcagccatgtgacttcgccggctacctgcctgatggtgatgagcacccgctttacccggaggtttaccctgggcgtgaccgatacaacaagacgacgaacatctggtgcggcaatggctttcgccaaccaaaaacgcgccacatagcgccggcgcaaaaagacaatccaggctggcgcctgtgtggtggcaagtcaactcgaacaaagaacattcgcagcgcaacccctcggggatttgcaatggcagtgtttgaggctaattcacggcgggccgaggcccaggagaaagcattatga

SEQ ID NO: 438481 - DNA, 135 bp, Serratia marcescens
atgaaggcaaaagaaatgttcgtaatcggttatgacagcccgattctgaataaagcatttttccaaacgaagtctatccagggctgggaagtgatgctggatgccgacaagcaggtggcggttttcacccgctaa

SEQ ID NO: 438482 - DNA, 192 bp, Serratia marcescens
atgtctttactagattacataaaagccaacttcaacgggaatcaatcggagtttgcgcgctttatgggtgtatctcgccaaaaggttaacggttggattgccgatggatggatcgttgacaatcacacgctgtacagcccgcgccgtaccgtgccggagaatatctctggcggcggctcggctgagggatga

SEQ ID NO: 438483 - DNA, 480 bp, Serratia marcescens
atgaaacttttccacggctcttacagcaacacagctccagtcatcaaagtcggtgcatatgcgctgggtacgctggacaacgtgtttgatggtgttttcgccagtgctgacgctgagatagctggatcgcacggtggcactgtgtatgcctataccgtcgcttctatcgccgatagcgttatcttgaatgaacgtatcgaagaggtgatcgccttcctcggtagtgaagttgaagctgactacgacactcttgatgcccttgcctctgccatcgctgacgacgattgcgagtcatgggagcaattcgaatccatcctcaacccccgctcttgtgctgatgctttcgccgctgtctgctgggaaatgcagcgcctgcgtggccgcgttgccgccaatctcggctacgatgcagtggaaatggatgacgagcacggaacctcttatctcatagtcaacccatctataaccgcagaggaataa

SEQ ID NO: 438484 - DNA, 534 bp, Serratia marcescens
atggatgtgaataaaatatttgtattatttgctttggtttgtttttgtgtggccgtttattttggcatgcgtgaagtaatgtcattgttaataattatacctgtatcgttgttatgcatagcaggaatggataagttcggtgtaattccatgctgcattggtgttattgctgtatctatagccacggtgctatgggtaaactcagttactcctatttttggtgaaggctatgcctctagacaggaagcaaaatcactggagcaggataaaaacaaagaggcagtagctattattatttcagggcagaatgcagtaaaggaaaaagtaaaagatccaagttctgcaaggtttatgaatgactttacaagttttcatgatgggaagggatattactgcgggttagtggacgccaagaatagctttggaggctacactggtatgcaacggtttgtatctaatggcaaagcgtctgggacatttctgcaagaagaggttaatgacttctcgtcggtgtgggacagattttgcaagtga

SEQ ID NO: 438485 - DNA, 711 bp, Serratia marcescens
atgccattgataaacaaattcgcttacacgtccccaggacctagaactcaaaaccaagatgccatcttggttgagtgtttgcccagtgctaatttgttatgctgcgttgcagatggtgttggcggtaatcttggaggggaaacagcctctcgcttagcgctggacataatttctgcaactttgcgaagtgatggcaatgtttcacttcatgaagccattaactccgctgacgaagcgattaaaaatgctgcaagggaagatgagaaattgaccggtatggccacgactgtgactgccatcaaacttctaggtaccaagttactaggggccaattgtggtgattcccgtgcttatctgttgagggggcgtggtcttatgcagctttcatatgatcatagtgaagttgctcgacttctacgtgaaggtaagttaactaaagaggctgctgttgactatccgcgtaaaaacattcttgatagtgcacttggagcaagcaaacctttacaaatctatgattttcaaatcgatttgatgggcggtgacagaattgccattctcacagacggggtttcttcagttgttagtaaaaaggactttcgggatctttcattaaaaaatcagttattggatgattatggttcaagtattatcaatcttgttgagcatagaggtactagggataattactctttgattcttatagaaatttga

SEQ ID NO: 438486 - DNA, 1332 bp, Serratia marcescens
atggtgatcaatcatatcaagcgtataggtagtggtggttttggtaatgttgatttagtgcaagacattgagaacggtaattattatgcaaaaaaaacattttcgataaaccaaccccagcctttgcctcccgaactggctgaaaatgttaaaaaaagatttataagagaggctagtgtacagcacagattaatacataaaaatattgttccagtccttttcaaagatcttgcaagtaatccaccatcattccttatgcctgttgcagcatcaagtcttgataaagatatcgcacaaagtcgaaatttgaatggttttttcttaagggccataatggatattttgtctgggcttgaagaattgcattcattgcaaatttatcatcgtgatctcaaacctcaaaatgttctaagatttgacgcaggagatggctcatattatgcaattagtgattttggtttaatgtcagttaaagatactcaaatttctgcgttaactcatacaggaatgaaaatgggttcggattattacactgcacctgaaattgtttcagacctcagaaaagcaagtattgcctctgatatatattctttgggatgtatactacatgactttgtaggtacagacgaaagaattccttgtggtgagattaataatgattcaagtgcgtacgcccatattctacgtgtatgtactcgtcgagatccgtcaagacggttccctagtgtctcagcattaagggatgcaattcttagcattgatcctgcgactgttattcatctctcagctgaagtaagttcatatgcttctgctttagagagcggtaacccaattaatgttgaaacgtggagagaaatagttaattttattgaagataatattggtggagaaaactctactgtgatatttcaacgtctaactttcgataggatcaatgaggtcattgctcatgacactatgctcgcttgtcgactaggtgaggcatatggtcgttgggttgctgatggtgtattttcatttgagcagtgtgacgggatatgtaatcgactcgaacagtttttacaagttaacgacttgaactgtaaagttgaaattataattgctatgcttttaatggggacatctcataatcgttggtatgtcgaaaggcgctttgtaagcgtagcaggtcacgatatgacaccagatctggctaaaaggcttgctttggagatgagtatacttgaaggtagaatgtgtgcggcggtgagccaccttcaaagatccattggtgccacacctgatatgcttcatccagagcttttcgatatgatacaaagagtatgccattga

SEQ ID NO: 438487 - DNA, 2100 bp, Serratia marcescens
atgaataaaggtagaatcaaaaaaatcctggaaaaactcgatattggacttaaccaccgtgttccggttatacatcaaacagagtcttccgaatgcgggttagcgtgcctggcgatggtttgcggctactatggcaaaaatatcgatttaatctcgctgagacagcgattcaacctgtctgctcgcggtgccaccctcgcaggcctcaatggtatcgccatgcaactggggatggctgcccgggccgtttccttaaaccttgaagaaatcgaggcgctcaaaacgccatgtatcctgcattggaattttaaccattttgtggtgctggtcagcataagacataaacgcttcgttctgcacgatccggcgcgcggacgcagaaccgttagcctcgacgaaatatcgcaatactttaccggcgtggctctggaagtatctcccaatagtgaatttacagccgaaacggttaagaatcgccttcaactgagaacgttgctcaacagtattcacggcattaaaggtgcgctaggtaaaatattccttttgtcgttagtgatcgagaccatcaatcttgtcatgccgatcggaactcaactggtcatggatcatgccattcccgccagcgatcgcgggttgctgacccttatctgtataggcctgttcttctttattctgctacgaaccgcagtcagcatggtacgtgcctggtcatctttaatcatgagcacgttaataaatgtccagtggcaatcagggttgttcaaccacttgctgcgcttgcccttaggctattttgaacgacgcaaattgggtgacattcagtcgcgattcagttcattagacaccctgcgtacaacgtttacgaccagtgttgtcggtgccatcatggacggcatcatggtcgttggcgtcctcgtaatgatggttttgtacggcggctatctgagttgggtcgtattaggatttactgcgttatatattctcatccgcctgttaacttacggttattatcggcaactgtcggaagaaactttggtgaaaggaggcagggccagctcatattttatggaaacgctctatgggatagccaccgtcaagatacagggaatgggcgctcgacgaagtgccaactggctgaacctgcaaatagacacgatcaacagtgggattaaagtcaccaaaatgaacttttttttcaatggggtaaatacgtttattaccgcttgcgatcaggtcgtcattttatggttaggcagcagcctggttattgataatcaaatgacgataggtatgtttgtcgccttcggcgcattccgcgggcagttttctgaacgggtggcctcgttaacgagctttttgctgcaattgagaatgatgagcctgcataatgaacgtatagcagacattgcactgtatgaacgtgatgctcaaaaaccggacatcccatatcaggcaacaatgcaacccatatcgctggagagtcgaggtttgagctatcgctatgacagccaatctccccccctattttgcgatctcaatatccatattgcgccaggtgaaagcgttgcaataacaggcccttctggagccggaaaaacaacgttaatgaaagtgttgtgcggcctattcgaacccgatgctggcatggtcatcgctgatgggatggatatccaacaattgggattaaataatttccacaaaatgattgcttgtgtgatgcaggatgacaaactgttttccggctcaatacgcgaaaacatctgtgggttcgaagaggatatcgacgaggagtggatggtcaaatgtacccgcgccagctatatccatgatgtcattgtaaaaatgccaatgggttatgaaacgttagtcggagagttgggtgagggactttcagggggacaaaaacagcgtctttttatcgcccgtgcgctctatagaaaaccagggattttatttatggacgaggccacaagctcactggacaaagacagtgagtattatgttaacgaggccatcaaacagatgaacatcacccgagtgattatcgcccacagagaaaccactatcgccactgccgaccgcgtgatttcactggcttaa

SEQ ID NO: 438488 - DNA, 1701 bp, Serratia marcescens
atgtatatatctggtgtttatttaaaagggtaccgaaattactcagacgcatatgtaaaattaaataaagcaactcttattattggtgcgaatgatgttggaaaaactaacctaattcatgcgatacgattgctactagataagagcttttctgagttagacttagagccaaaaaacaatgactttcatattgattctagtgggaatcaatctgatgagatcgagataactttgcattttagcgatgttgaggaagacgcggtactctcaagacttgcggggagtgtgagtgacgcaggtagaacagtaataagatatgttgcctatagaacaacgttagaatataaaatatttatcggatttaatgtaaagcatatggaagaggtgtcgagtcgattttatcttaaatatctaaatatgagatatattaaatcgcaaagagatctggataaatatataaatgttgaaaaaagacatttgttgaaattggcacaggatagtcgcactcaagagcagatagaaagtgataagggtatccttaatgaattagatgatttattagttggcgtgaataacaaagttaaggcgattagctatgtaactacagcgacagatgaacttaatgatgagttaaagaaactttcttattcgaatgatagatataatgtgcagttagactctggagctataggtacagatcaatttatagaaaagctggagttaagctctaacgcaaatggttcaaaagtaatgttgggaggtgatggatttaataaccaaatacttttagctttgtggaagactaaaagtgtaagagagcatgatgtcgagaatgaagtggtcatatattgcatcgaagagccagaggcgcacttgtatcctcaccaacagagaaaagtttcaagttatctaattaatgatttaccagggcaatcaatagttactacccattcccctcagattgctgtaaattactccccagactcgatagtgaaaattcattcttacaatggttcttcagaggctgctagtgaaggatgctcagaatgtattagtgacgcatgggatggcatgggatacagaatgagtatcattcctgcagaagcattttttgctaacgttgtctttttggttgaaggtccttctgaagttttgttttatgaacagctggctaatacacttaaaattgatttggatttctataatatcagtattatatctgttgatggtgtccagtttgatgtttataaaaaaatactcgatgcttttaatattagctgggtagcaagaacagataatgatggttctaaagttcctaaaaaacaggagtggcaatatgctggaataaatagagctttgaaattgtgtaatttggcaagtaaagataatcaacaatcagaaataactttgccagagttgattacagcttggggagattattctccaatagtaaatagacatggggtttatttatcgtttagtgatcttgaaggtgatttaagcaatgagtttactctcgaggttatggattatagtggaaaggatgatatcgattctgcagctaactacttgagatcaaaaaaagcaataaggatgcgtgagttacttaaactctacaaacaaaacctgattaaactggaaagtggcgatcttgcgaggccactctatcattgcgagagattagctagaggtgaggaatga

SEQ ID NO: 438489 - DNA, 495 bp, Serratia marcescens
atgaatgaaaaaatcaacggcaggacgccaaagcgtgccgacacattgcgtgagattaccgagcgcctggatgaaggcaacagcgccgccgaactgaagctggtggctgaacaccgcgcaagtctgttgcttggcgatccgaagatgggccacatgctcagcgccaagatgattttcgatgccgtccggttcggtggttatctggctgccgccaaagcctgggatcgtcagcgcaaccacaaagccgctatggccgaagcagtcgaacagcagcgccaagaaccggtggtcggtgacgcacctgagattgatttcgatgatgcgttcgatcgcctgctgattgagggcttgcagcctgagaatccggccgagaaacaggcgctacagcatgttcagaagcatggtttcagttccaaggttgaagaaaacgcacgccgtgagtggcgggtaattttggctaaggcgtatgcccgcacaggaggcgttgaggtatga

SEQ ID NO: 438490 - DNA, 543 bp, Serratia marcescens
atgttttctctagaacagattgctcagataacatacaacaccatgcagctgtattttgatcagcgcaatatcgatcttgctgtgggccccatttctgacgatgatgccaacacccttacaagggcttacggagacttgaactgggagtactacatatctactcttggcaaccaagatgattgttttagcttatgtatcaagtttgtaacgtcatcagaacatcgtctaatcgagagtgcgcctgctggtgccgccatgtcaatttttgatgcaagagataagagcctaaacattcatatcgtagaaaactttgttaaagattcggaaaaacacccgctgcgtagaaaaatggtgttgtataccctttacgcaagcatgattttcatgaagatggcaggaagtgatgttatacgtatacatgaaccggttgaagataagattgactactatgcatcgtttggttttactatggaaccgtgtggttacattatgtccagcagctttgccaaactgcagcaagagatggccaggagagcaagttag

SEQ ID NO: 438491 - DNA, 135 bp, Serratia marcescens
atggacaagtttacgatgtttgggtttatggctttgggggggcagcatcaagagagcttggtgaaaatctaccttgctccaatttttttccagcaaaccactggcaaacaatttcatctggtgatgaggttctaa

SEQ ID NO: 438492 - DNA, 420 bp, Serratia marcescens
atgacgcaggatacgggatggctgacgacacaacctgccgttggccccgcgatcttcaccccaatcaccacagacatcaaagcaacatggacgcttcagtggatattcacgctgcagcaggcagagcggtttaagtcgtggctccgatctccgacgtactgcgaccgcgggcgaaactggttccagatgccaatcgacctgggcgacacgcagggcgttcagctacagacgctgcacttcgtcaacatgccggtgcagaccagcaaaaacggtaatgtagtgacatggactgcgactgttatcagcaatgggattgatgacatcactgaggactatgacgactggatcgtcggagctcagtccaatcacggctattggctggatctgctggttactgaaattatcccggagaaaacctaa

SEQ ID NO: 438493 - DNA, 471 bp, Serratia marcescens
atgccgacactgagagagtggaaagaacggcgtccagcgagcgatatcaaacagacggtagagttttatcacccatcgtttggctattaccgtgtcgtaaacaacctgttcatgcctgccgcattcggtggtaatgagttcgagccagcgcgctttagtgtgactgagccagctcaggatgggacggcagtcatatcaatgaccatcacctttgtcgccgcgacggagcatgtccggcagacactgaaaagctggcgcggggcggcgcgcatgacgccgataaagtgcctgtatcagcaatggaatgcgatcggtgatgcatcatccctgaaagactggacgctttacgtgaacgacatttcagccgatgccagtaacgtcacggtgaccgccggcaagaccaatccactgacgctggccaactccatcatttacaccacgaaagactatcccgggctgatcaccgtatga

SEQ ID NO: 438494 - DNA, 396 bp, Serratia marcescens
atgacacagagcgactttatcgggcttgttaacggcaagccctgggctaaccgcgcctgtagttttgagcagatggactgctggggcctggtggttctctattaccggcatgtgctcggcctggagctgcatcacatcgccggctacgaatcgggcgtggatttcatcacctgctacgaacaggagcgcgcccactggcggcgtgtgccggtggcggccaccggatgcatcgccgttttttaccgcggcgacgtgccggcgcatatcggtgtgatgatcagcccggttaagtgcctgcatgcccgcggcgaattcggcttcgtacgctgcgacagcccgctggcgcttcttaaggtttacagccgcgtggagtacatgattcatggttcgatatga

SEQ ID NO: 438495 - DNA, 2478 bp, Serratia marcescens
atggttcgatatgagttacagaggttgccaggcgcgccgctgcagcggggggaagtagatgctggctccacactggtgagcctgcttgactctctgcagctgcaccgcgatgttatcgtgaaactgaatggccgtgcgctgcctgacgattacgatatcagccggccactgcgatctggtgacgtcgtggttgtgttcgaccagccagagggcggggttggcaaactcatcaccacgatattacgtccggtcacgaaaatcctctccggagcgctgaaggtgttcggcctgtcaaataagcccagcgcgtcagtatcggtggcgacaggagaatcccccaataatgatctgacgggtcagaccaaccgggcgagactgtacaaggggcgcccgaacatttacggccagtgccgcgtctttcctgacctgattcaggaggcgctgttcgagttcgtcgacaacaacaaacagcttacggaatggttcgaggtgggttacggacggtacaccatctcatcgatccgctactcggaatcgaacctcggcagcctggcgggcgccagttccgcgatttataacccgggtgacgtgatcggcacgattgaagtcgggtatcagttcgatgacgtcgataacgagactgtgccaggcctgaatgaaagccaggactttccggcccagaccgcgaccacgacggcgccaacatcggtggcgatcgagagtaatcagctaaaggctgttgtcctgtcgaacgatgacaactttgcctactttgcagccctggcggtaccgcatcccgtcactttcgtcattaatgccacctggagcgacggtggcacaagcgtcacgcggaatgtcaccggcgccgggaatatcatctcctcagagagttttattggcgacgacacgctgtcgtacacgacgttttatatcggcgaactctcgggagaaattatgtctctgccgggcaatgctgttatcaacgcgacgttgttcacactgaacgatcagacaccacttgttatcgggccgtcagtgtcgccaatcgtctcgacgcaggtctgggtgcatgtgctggttcagctcggcgcgacggccggcacaacgcaataccggatcaagttctggcaggtcgatgacgacaacaatcaggtgccgggtacttcagagcagcacgattatttcttcgataacgacttccaggtgacgacccggtattatcgcacaacgcataagttcgtcccggcggccggggcggggcgctatgcggtcactatcgagcgcctcgacaacagcaatgacgccaacgtagtgactctgatggcgatccacgcggtgaacgtacgcgaaaacgtcgtgtatccggaggacacgattgcccgcatcacgattaaggggtcgaacgatagcaacagtaaccgcgagcagaagtacaacatgctggctcagcggcataccatcagctacgaccggactaccggcgcggttgattacacgctgcggccgagtcgttcgtttgccgacgccatccttcacgaatgggtggttgtcggtaagcaggacgtggccagtattgacgtcgcggctctgtatgccattgccgattcgctgccggatgcccagcttgggtatttcgattacaccttctcggatgagaagcaaccgctgggtgagcgcatagcgacggtcgccaatgtggcccgcgccgacggcaacaacatcggcgatgttctgacgttctggcgtgatgagaaagtgacaaacccggatgcggtttttgcgcgctcaaacatgttctgggacgagtataaagtggcatggcagatgtctcttcccggtggttatgacggcgtagcgctggactacgtagacccgctgacgaacaagaaagcgtacatctacctgcagatcgacagcagcggcatcaccgaggttgaggatgccacagttaacgcgatgcagatcagcttggacggttgccgcaatgtcgttcaagctacagaccgggcctggctggaagcgaggaaaatcctctactcgcgcatgacaatgactgtgaaagtgctggagtccacccaggtggttcgcggaacagtcgttcagtgcccagacatgtacgacaacacccaacaaaacgggtatatcacgggccgaaatggcgacgtgttcacgacttcagagcgcattgatttcagcttgggcgatatgtgggtggtgatgaccgatagcctcggtgattatcgtggccgttggcgcgcttatccagtgattggcaatccaaaagcgtttcaggccgcagctggctcatttgacttaaacatttatgatcgggtcagcgtgcaaaatgccagtcgttatttcatcgcaacagactcggaactgaactctacaatatggcgagttgacagcgccaaaccaaatggagatgagacgcaaacgctaagccttaccgaatattcagaacagatataccaataa

SEQ ID NO: 438496 - DNA, 840 bp, Serratia marcescens
atgacgtttgagcatggagaaacggataacgacaacggcagctcccagaatcctggtgactatctcgcgaaaatgacgccttatttctcgggcatgcaagttgacttcaaagcgattaccggccagaccgagaatttcgcagaggtcgtggggcaggtcggcagtcgcatcaataccaaaaatcagcaggtagacgatcaaggcaaccccatcggcgagcctgtgattgtacagccgtactctgtctccgccacagaccagttaacttatgtgcgtcagaacgcggcaaaggccatcatgtacggccccaaatacccgcttaactggctctataacgatgcaacgctgagccatctgaatgccgccggtaaagtgctgcaaggcgaatatgccgcacaggctatctactggcatctgtatgacccagtgaaaaaaggaacctggacggggctcaaagctcgctcattatcagtgaatgatagcactatcgacatcgtgttcgatgtcccatacccgccgctggtaattgatacaacaacgatcgccgattgtccagggcaaggcttctcgttgcaagatgcctctgctgaggttcagtcggtagtagttatcgcaccaaacactatccggcttaatctcaatcagtctccagcagttacagatcacctattgattggatttaccaatactgttccagcaacccaagactttgtctatccactggtttgcctgcgtgatagctcaactcaaacatcacgctgggtcactaagaataaccaaccctttccgctatataactgggcatgcctcgatcgcctaccactgaatggagcattttaa

SEQ ID NO: 438497 - DNA, 222 bp, Serratia marcescens
atgttcctggaggtgaagcaactgcagggagtggggttaagtacgagccatcaattcgagaaatgccgatcgatgcgaacgaaatacatggcggcggttctggcggtcagtcacttaacacgccaaaggatggcgcaggcatcaacattgtcaaccgagatcccgctttccgcggacgcgcgctggctggtgcaaatggaaggcctgaaggcggcggtatga

SEQ ID NO: 438498 - DNA, 711 bp, Serratia marcescens
gtgcagcaccctatcgagtggcatgcggagcatcagcgcgatgctttcgggagagcgtcccaagcgctgcagttcgtaaatatcttccgtgaagcgattgttgaaggtcatattgaaaacaatcccgtaacgcctacccgcgccgcaaaagtcgtggtgaagcgcgagcgcctggaactggctcaatacgggccgattcgagaggccgcggaaacaatgccgccttggttctgcctggcgatggatctcgctttggtctccggccagcgccgcgaggatctgacacaaatgcgctttagccatatcgttgacggacgcctgcaggttgaacaaggcaagacgggggctttgctctccctcccccttgatcttgaactgaaatgtatgggcctgcggcttggcaccgttattgaccgatgccgattggtcagcacgacagacttcatgatcagcgccggcatcaggaaaaatagcccagatggttcgatccatcccgacgggctaacgaaaaaatttgtcgccgcgcggaaagcatcaggtttggaatttcaggaaagcccgccgacgttccacgagatccgaagcctgtccggccgcctgtacgaaaagcagaacgacaaggcatttgctcaaaagctgctgggacatacaacggaaatgatgacgctgaaatatctcaaaacgagggggaaagagtacgtgatgctgtaa

SEQ ID NO: 438499 - DNA, 228 bp, Serratia marcescens
atggttatattaggccggcactcgccggccatcgtcatcaatacgccttccatgcagagaacacccgcggatcgccgaacgcaaatcgacagcatcgacagcatcgacagcatcgacagcatcgacagcatcgacagcatcgacagcatcgacagaatcgacagaatcgacagaatcgacattgcattgaaaaccatgtcctatcagacattagcacttttatattaa

SEQ ID NO: 438500 - DNA, 375 bp, Serratia marcescens
atgtctagcaaaataacgtctgcggtggtgatcctgctggcgctggcggctgttgtcggcgctggcgcctggctggcaggtcgacactaccagccaacgattgaccggctcaatgagtcactaacgcaatgccgtgataccggcaggcaacaggaatctacgatcgccagccagaacgctggcattgatgcgctgcagcgtaaacgggatgagctggaagccaaggcaaaggcggtgcaagcaaaagcccgtagggaggcgcggggcgactatgagagggcaaacgaggttatggcagaacgaaccacaggcgatttgtgcggcgcggcctcggcagcgtttgacgcagagctgcgtcgggaacgtgctcaatga

SEQ ID NO: 438501 - DNA, 2265 bp, Serratia marcescens
atgataaaaggaatcacaaggattaaagggctgggagtttacgataactatactaagcccgccggcacctccgaacttggcacaaaaaatctaatctatggatggaattattctggaaaaacgactctttcaaggctatttgctcaactggaatctaaaaaaccgaattctgatttggctgggtgtgaattcagctttgagactgataatcaaccaattacagaaaagaattttgagcaatccgatctaatggtacgcgtttttaactctgactttatacgtgacaacttacatttcgagggaaatagctttagcccaatattactactaggtaaggaatctgaagaagcccagaaaaaaatagatcataaatcaaaaagaataataaaatcagatgcggcacgaaaacggattgaaagtcatatcaccgcacatacccaagcagtatcaaatgctaagacagaagcagcgaagaacatccgtcaactgctaaagatcgatccctacactgctactcagctaaataatgacattacagttataggagctctagactcccaacttctttctgaaaatgaccttgcttataacttgggacttgccctaactcctgacagcaacaaaccaagccaagttgatcggatatcggtctctccatcgattgcggatatacataaagaggcggtaacgactcttgctaccactccaacattttcaaatactataaaacatcttgaagaaaatttggatattgagcgctggattgaaactggcctccatattcattcacaggaaggtacttgtgaattctgcggaaacgaaattactgaaattagactttcgcagttaagagcgcatttttcaaaagacttggctgatcataagaaaaaagttgaagacctgctacagcgtgtagaatctactaaaataaagttgattctacctaatgttgcagagctaaatacgcaatttcgggataggtattcgatcgcggctgaaccgttatccagagcaatagatatttttaaccaaacagtagcatcactagctgaagatgtacaacttaaactaggcgccccccgaaaaccaatggcaccgaaacatttagcccagggactggctgaagccattatatctaatatcgaaataatcaacacggttattgatgataacaacactctagcgaataacttcgctaccgcaaaaaaagaatcccaaaatagggtaaagtaccactacgttcagcaattcatcaactcacaagctaacttaggatatgagggaaaaaaaacacggctaagaaaccgagagatccgattacagagattttctactgtgttgaaggatcaggttgcagtacttcaagctcagataagcaaagcacagcttggtcgtgaaaaaataaacgaaagactctcttctatgctgggaggtgatgcagttcagattgccgttattaacgatccaatcagtaatcaagaacgtttcaaactagtccgtaaaagcggagagattgcaaagaatttaagcgatggagaacgcactgctattgcattttcttactttattacaaagctacaagaattaagacaaagcgattttataaaaacggtagtctatattgacgatcccatttcaagtcttgatgccaatcatatattccaagttaccgcagcgattcgggccgtattcttcaaacaagataacgagaacgctccgtggacaactacctgcaaacagattttcatttcaactcataattttgagttttttaatttgctacgagaaatcaagccagtaagcgataaacatggtgcccgcctgtacattatcaaacgtattagcgagaagtcttctaccttctgcgatatgcctgtttcgctagctcgatatcaatctgagtaccactttttatttgatgtagtttaccgattccatcaagctcccgacaaaacggatcacgctatactaatgctactccctaatgcaattagaagattcattgagctatatacttactctagacttcctggtgctatgaaccaaactgttgaccaacgagcagaagtcttattcggcactgaaaggtcaaaacgaatccttaagatatttcattactttagtcatgccaatacgatagataggttaactgggaataatgaattaatttttaacacagaatacgccgttagagatttaattgatgccattacacaaacagatagacaacatatggatgcgctgatatcttccatccagagatga

SEQ ID NO: 438502 - DNA, 558 bp, Serratia marcescens
gtgcttaccgagcaatcaggcaatcacgtcagtaatggcagtgttgtaggccgcgatcaacacatacataattatggtgataagggagtaaataaagagttactatcattatatgagaaacttaaaagagatggatgtggggataagagcacagatttttgtgaagagctaaatcactatttatccgctcaaacagaaattgatgtaagaggcttggatgcaaaattgtcagaaagtaacagattagatctgttattacttgcaaagcaaatgaaacaacgagctactaaagcaatcatgcggcgacaaacatctaaaaccgcacagagaatttttgtaattatattggatcaaattcactttgattttataatgaaagtaacccctttaattcaggatgataaagaaagaggggtggtagatgaagaaattagactgataattaatgaattgtattcatctttaggtgagaatttactcgagcttacagcaaaggacttgttgggtttgttatttttccttggtggaaattgtcatattaggtgggataaatgctaa

SEQ ID NO: 438503 - DNA, 1947 bp, Serratia marcescens
atgacttttcttagcccaacatttatggttagcaaattgaaagtttttcagcatgggcatgaagcctttagttgtgactttcataaaggggttaatgtcatacgaggtaggaatagttcgggtaagacaactattatggacctcttggccttttctattggcgctgaaagtattagatggaaacctcaagccttaatgtgtacgtcaacactgacagaggtttttctaaatggcgagcccgcctgttttaaacgagaaataagccaagagaccatgcgtccactgagcatattttggggggcaatggacaaagccttagaatcctctccattacagtgggaaacatacccatttagacgttctgaaaaatcattgagtttctcacaggttatatttaatgccttgggaatgcctttggcacaaggtgaaggtgcgtctattttaactatgcaccaaattctcagggttctctatgcagaccagccatctgttcatagcccgatatttaggatggatagctttgacaaagcactaaccagagaaacagtaggggattaccttagtggtgtcttcgacgataccctctatagttctcaaataagactaaagaaagttgataatgatttaacggataaaatatccgaattaaaaagcatttttactatattgggcaagtctggtcagtctgaaagcttacatttcattgatgaaaaaataaaagagctggaggtaaaaagatccgcattacttgaaaagttaagtcaagtaaaaactggaagtgtttccgatggtgagaataaaaacgcagacaaagaaaagacacaaaaattaaggcaggaattgaataaagccaaacatcaagagctaaagaataaagatgagattagcaacttggagttggagattgccgattcagagatgtttataaatgagttggaaagtagattgaaggggctgagtgagtctggtaaagctagagagttttttagcggggttcaatttcaattttgcccaggctgtttgagtgagatatcttcaaataatgacgacgcttgccatctatgtaaaacaccaataattgatggtaaggacgcacctcaaatactaaggatgcgtaatgaaatttccgtgcaattaaaagagtctagatttcttttagagcataacatggaacagctcggaaagcttaagatattatctccgtcattaaaaaagaatgttaggaaattaattcaagagtatgactctatttcctcgacatgggaaagtgcatttgaaattgaattcgaaaaaatttcaagagagctgggagggatagaggaagaaattaatcaggcttacgaacataaaaaattaagtaccgtcatttctgacttgcaggaggcgagggataccttgcaatctgaaaaggaaagtcttgagggtctaattgaatcgttgcaaaataaagaagaaaaaacaaagttggatgtgtccaatgaaatcagtaatattacggctagacttttgaagttagacttgcctcttcagactgaatttattgatgctaagcatgttaattttagctttgttgataatgaggtttatgttaatggttcaaaaaacttttctgaaagttctgctgttgtcctgaggcatgtttttcatttggcattgcttactgctagtttaaataaagcctatatgagactacctaggtttctaatgcttgatggaattgatgatggggggatggagaaaaatcgtagccataacttacagaaaatcattgttgaggaagcggggagctacatgcatgattttcagataatatatgcaacatctgaaataaacccagagtatgaagacacggatatgactgtcggcagatacttccacccgggtgatagatctttaaatgtaaaagctaccggtagtgatagtagccagaacgcaaatttaacgtag

SEQ ID NO: 438504 - DNA, 1173 bp, Serratia marcescens
atggatttattctcaacaaaaatacaaaaaaataagctcaatgatagtttcaaacgcatttacaaagatccagaatttgcccctgtaagggaagtaatccaatcttgggcgtacggactacaacaacgcagtggtgagaaaactaaatttgttaatgagtttcagaccaccttcaactctgcattttgggagttgtatctgaatgaggtgtttatccgactcggttattcagttgattatacaaaagatagccctgattttaatattaccactccatctggttacagttttaatgtagaagcaatggtctccgacaaacctcacaaacctcctatgggtgatattttcagcgaatcgaagttcaaacatcaatccacgctaaaacttctcggaaagattaaagataagcatgatatttttaccggtgttaagggtaaaaagttcccatattcaacaatggaacacgtagtcggtaaaccattcgttctggcacttgctccatttgattcagacttatcgctaactcagaataatacgatcattaatcgagttttatttggcatcgaagaacctacaatgaaggatattgcgaaaggtcaacagcgaaaagtcttatcgattaaaaaaaatgagcattgcgaaataccattaggtattttcacaaatgattcatataaagaaattagtgcaattatattctcaacaacgggcactttcggcaaggcaattgttcaaagtggagttgggcgatatataagatcaacaagacatcgtgctcttgacataaatcaattcattacctccgaaggcatgaggaataaaggaacccatacaaagaaacttggtgccgagcattatttaaaaacataccggaatttttacaatgatggggtttttggagcggatgttgaattatgtcattccaacgagtatgcagaaacacattttgatggcctgcacgtttattataacccaaatgcgatagtgccgttggacaaggacattttctttcctccagaaataacacataatttttatgacatggcaagtgattcatctgtgcaaaatcatcctgatagagccctagtgtcgcggcaggtatttgaaccgtctaaggccaacctgagatatattgttaaacactggttccctgagcatatcggagatctgtaa

SEQ ID NO: 438505 - DNA, 678 bp, Serratia marcescens
atgataacgcatttcactaacgaatttgataaattattaggtatcatttcatccacttcatttacattagggtattgtggtgagtattttggtgacaagaatgacaaagtggtttccaatgccgctcaccccatggtttcattcagcggttatgaggcttgtgagttacccaaaaaaaacataacatatggtgggtatggaatatcccttcataaaagctgggccttgaaaaacggaataacgcctgtgaactatatagagaaaaattctccggtggcattggggctcatagctttgttaaggtcacgccagttgaaacaattgcctaataatcttagattgccagtcattcagttgaagtgttttacaaagcatgtctatggatacaacagctactttaaacgtaatgattacaatttcgagtatgaaaaggagtggcgatatgtcccaacgactgagcaaatcgaaaagaatttaatttccattaatttctcagcatataaaaaacggaaagatgcttataatgaaagaataaagaaattcccccttaagttctcactcaaggacattatatgcatatatatacaaaacgaaagtgagaaaaaaaagataatatcaacttttaatctcactgaagatcaagtaattattgcaccttggaaaaaaatgaacaaataa

SEQ ID NO: 438506 - DNA, 1287 bp, Serratia marcescens
atggtaggaaaacaagagggaaagccactttcgtttaaagcggtagaaatgatgaagcctggcgacaaagataaggctgatgtaggcgaaaatcgtggcttacgtgtctcctgtggtgcaactggggttaagtcttttttctaccgttacacaagtcctctgactggcaagcttgctcaggttaaaattggtaacttcccgcagacttctctcgccgctgcacgtcttaaactccacgagttaaagctcctccgacaggaaggccggtgccctgcgactgaactcaaaaaagataagatccagcgtgcgatcgaggctgaacaagctaagatccctgaattgaccgtacagggattagttgaactgtatcttaccgaacgtattgaggatcgtaaaacgaaggacgggaaggttattgccggcgccagaaagccgaaagggcaggctgaggttcgtcgtactctctatggtgacgccgttaaaagcctaggagcccgaaatgctgctgagattacgcgccaggatgttattaatttaatcaatggcattgtagctcgaggtgcaactgtacaggcagggaatgtactgagggagctttcactcgcatatgaatttgctattggccttgggcgctttgatgacagttttgcgaatccagcgttgttagcaaaatccagtttacgacagaccagaatcaagctcacaaatggacgtggaacacgagtactgagtgaggatgagcttgctaaattccttaactggcttccgggctctgcttatacgccaacgatcaaaaacgtgctacgtttgactctctggacaggttgccgtaccggtgaagtctgcaatatggcatggaaggatgttgatcttgaaaaaggcactatccatctgcgagaaaccaaaacaggggtagaacgctacgtacagttatctgatcaggcaatcgactttctcaaagttctacaccttacctctgacaaatatctgtttccttcgcaagccactaagaagccaattcagcagaagtatctaactgaaaactcatggcgtttacgtgaaagcggtcaaatgcttgatatacctcattggacgccgcacgatctgcgtcgtacagtacgaacggggttatctcgtttgcagtgtccaaatgaggtagcagaggccgtattggggcatacacgtggcggtgttgaagggatctacaacttgtataagtatgatgctgagtgccggaaatggctgcaggtatgggcggattacttggaaagaatagtgaaaatctag

SEQ ID NO: 438507 - DNA, 933 bp, Serratia marcescens
atgtttgattttgaagcgcaacatattaacaaccctatgtttaaattaataatttatcttaataagtatgcccctgataaaattgaaaatcatgatattcaattttatatgaaaaacctcccaactcactttaaaaaacttttttactctgtagttaatattgataaattgcaaaaagattctgactttataaaaaaatatgataaaaccggtgtaattggttctaacctaatcgaatactgctattttaaaatcagtacagtatgggatatatcatatcaaattgctgacatacttgtttttaaaaataaaaaagaaaaaaacatcaataaatatgactatcttgaacaaaggtttaaaaaatatgctggtgaatttgataacctccatttaaaatggtacagagagatcaataaaataagaaataagataactcatggaggaataacaataaacccattcttcattaatagcagcgatgtcggtagtcgtttctgttttcaggcttacacacttaatttggatgacatagttacgccaaattatatgtatacgaacatatataataacaatattaattttgcagattactacttcaccctgcaaattaatttactatattcttatttaactgacttcttcgattttatcttattggaaatgaatgagggacacaatcacgatttgagcaatttattcccaggaaactcatcgttagatgtttttgagaatagccataaatattggcttttatccgacgttaatctattaaaaagcatgactaacgacttaatcgccctcagtttatgcaaaggaaatataaatagattgacaaccatttccgatgaggtaattaaaaaatattcttctgcgaaccctttcaaaatgcttaacaattcatcacccgcctttgaagcttgtgaaaataactaa

SEQ ID NO: 438508 - DNA, 315 bp, Serratia marcescens
atgtgcggcaaacgcttacggaccttcaacgtggtggacgattttgaccgcgcagcactggcgatagaaatcgacctgaatatcctggcccaacggatcgtgagggtactgggcaggatagtggtaaaccatggatattcgttgaagatgcggatggataatcttccagaacttgtgtctttgacgctggcgaaattggctaaagaccatggtgtgccgctggaatttattaagctaggtaggtcaacacagattgcgtttgccgaaccgtacaatcttacaaccggacagaaatcttgggtttttacctattaa

SEQ ID NO: 438509 - DNA, 660 bp, Serratia marcescens
atggcaataaaagatgaggtggcggttgaatcagactctcagagtggaggtataacagctggtaaaatacatgctgatgtaattaatcataatattactaatattcattatggtacgctgcccaccgaaatattattagaagcagagggtataattgcgaaagaaggggaggaacgtgagtataaaattcttctttgtccatgttctgaaagcgatttaaatatcttgaatgtatataaggaattgaaaggggaacttataaaacagggttttattctctacgagagttcccctgagttctatgaagactcatcatactggcatttagatgaggctaattttatagttagtaaaaattgtagttcaataatcatctttctcggagataataagactcttagccagttgtcattatttacttttttgttaagtcataaggatatgaaattaaatgaattggatatctgtatagtttcaatcgctgatactaatgaaagatatttcatggatggatgccttttatatgcaaatgataatataccaaagaggtatgatataaagtatttgcaagacaatggtgtacaggaaatagtgacgtatttagtaaggaaaagaagtgtttataataattctggtagaggtaaaaggaaactaaaatga

SEQ ID NO: 438510 - DNA, 1428 bp, Serratia marcescens
atgacactttctattcgcagagatatattgagttgggctattgcagttatacaacctgccactattagcgatatttataattttttgacatcagttttaaaagataaagatgcaatgccatctcgtgatgctattgtgattgaagttttagcattgatagaacttaatgatatagctagggtttcccaaaagccaacgcgatatagcattaccgccaaaggtaataatcggttaaataaaagactaaggcatttaagggatagaatgcgattgtttttgcttaagaatgcttatcgtggtaggcttaaacagccatcagcaattttcgatgaggaaacgaatgatgtttcgtcattcatacgtaaagctgttgaaattaaagatgcacagcgaccaaacagcagtttggtcgccgaccaaactgctgtttggtcgctggtctctgagcaattttctattggtccgaacgaagttgctgatggcgtccctttgatacccacattttattcttttgatgctaattatttcgatggtgaacttcgaagtgttgttgatttaagcgaagcgatcggaatatcaattagacttatcacatcgattgtgaaaaataagcagaagcattatcgcacctttccagttattaaaaaatctggtggggagcgggtgattgatgcacccagaacctttctgaaggttatacaaagatggttgtcagattttttattaaataaattacctgttcacgatttctgtttttcatataagaaaggtcagtcaataagacacaatgcacaaattcatgtcggtaaaaaatttgttctgaatatagatgttaaggatttttttggatctataactaaaaaaatgatctttactgctttaattgaaaatggttttgaaaataaacttgctaaaattgtttctgaactctgcacatataatgatagattaccgcaaggcgctcctagtagtcctatcttaagtaattcaattctttataaaatggattgttttttgactgagcagggtgtgttatttgattacaattattcaagatatgctgatgatataaccatcagttcaaatgatcggctgactatggaacttggaagagaaactatatttaggtgcctaaatgagagtggttttgatattaatgacgggaaaacacgggttgctgcaactaattctcgacaaatagtaactggtttagtagttaataaaaaagtgcagcctaccagggcgtacagaagaaaagtaagagctatgtttgatcatgcgaaaaagaatccaggtagcttcacggatagatataatgtgttgacagggtgtttttattatttagcgagttttggctgtattagtcactcgaaaattaatgaatacgaaaatacactatctttattaaaagagcttgctaagagatga

SEQ ID NO: 438511 - DNA, 651 bp, Serratia marcescens
atggtgaattgttttatgctaaaacctaatatcaaagatattcatgattacctcaataataaaaatgggcttgtagttcatttctctgggtgccctaaagggggcggccctggtgtcaaactatatccaaatgatcttctacaagtgattagtaataatgctaacggtggggtgtcgtgttcattaattgttcctggtgactcatacaacaagagttccgcaattggaacagttggtttaattattgattttaatagtgatggtttgaaagcagtttctccaagcgattgtggtagcgatgttatagatggtattcgccgagcagaagaaaagggtatttcattggatgacattaataattccttaatatctcgattgaattacaatgaatgggtgatcgttccatctaaaatattaggtgtttttgttttcacaggtgaagatattatagtgtggggggattgtcaggctttggatgaacataatgatgtggctgatagctaccttttcaataaatatatagatattcagcaggttagtcaggattttatcaatgaggatgttttttcttttattgatggttctattgcaaaactggatcgtgatagtatggaatttgtaagggtcgatggtaatgagttttataaataa

SEQ ID NO: 438512 - DNA, 378 bp, Serratia marcescens
atgatggttaaactgatggcagattcagctgataagctggtaggacagcgtattcaggccagacgtaaagaagcagggctaaccgctgccgatcttgcagagactatcgatatctctcaacaacaactttcccgctatgaacgcggaacgaataagatcaatattgctcatttagtcaaaattgccgttgctttaaaaactccaatcagttggttctttattgattgtatggaggatttaaatgtttctgatatcccgattaactatgccactgggcttgacgttgaattaaaacaacgtctcgaacaagtctggaataagctagataaccctaagaggaaaagcttaattatgtttttagatgagtttataaaataa

SEQ ID NO: 438513 - DNA, 930 bp, Serratia marcescens
atgagcagggcagtgttacgtcaggtcgtgccggtggtgcaaacaaccgtgtttgatgcgtatattggcggtctggccccctcggggcggagaggtatcaccagcctgttaaaccgcagcgccagcatacttaaacgcggtactggcgcaaacaattacccgtgggaacaacttaactacgccgccgtcgctaaagtacgcgcggcattgctggatgacggttacgccgtgtcgtcggtgaacatggcactgtcagcactccggggcgtggcgcagacagcctttaacctcaattatatggatgccgaaacgctggcacgtatccggtcagttaagcgcgtgagcggcgatatccagcgtaaaggaagggcattagacaggcaggaaatccgggcgctgattcaggccgcaaaacagtatccgcaaccggtacggcgctgtcgtgataccgccatagtgctgacgctttgtggaacgggcctgcgggccggggaactggtcaaacttgagcgccgggactatgacaatggcatcctgacagtcaggcaagggaaggggcgcaaataccgtgaaattcacgtggcggatgcagtggataaagctatccgcgcatggctgaaggtcagtgcagacgaggctgacagtgcgttgttcaggcgaattcagtgcaatggtaaggttgccagccagccgctgactacgaccgggtttacgggtatcctggctgagttacagcacacatcgggtattgcgcgatttaccccgcatgacctgcggcgtaccttcatcacacgtttgctggagcagggcgtggatatcaataccgtccgccagctggcaggacacagagacatatccacgacaacgcgctacgactaccgtggtgaggctatgaaaatcagtgccagcagacgattcaaatgctggtga

SEQ ID NO: 438514 - DNA, 501 bp, Serratia marcescens
atgcccaaagtcgacaggagtacattaacccctgaagaactcgaaattctgagagagaaggatcgtggctacaaaaaaaccagcaggaagaagagagggttgattgagattccggtcagcagggaaatgctgtcaatgatacaaaaagtaagtaaagcgctaagcctgtctgcgccgacatcatcaacacatggtcggatggacacgatatctcaggtattcgagtatttgcttaaaaaagaaatgaggtctgcgttctaccagataaccaaaaacgcaccaaaaaaactttttcgtatgcacaaaacagtctggtatctgaaaaacatcaaggaaatgagtgaagaagagattgcaaagcacatgacacacatggaggaattaacaccacaggcggtaattgaaggaaataagaatcgggtatggtctgaaaaacatgttcactaccttctggatagggaaaaagtagccaaaagaattcaacaaattaatgaagcgtaa

SEQ ID NO: 438515 - DNA, 1137 bp, Serratia marcescens
atgaagctgcgcattgactggctttcaatcgtatcccgcttccacagtgaggatgagaaagctgagtttgttcagaagttgcagtctttatcggaacgggagtggaaaaattatgttgtgcagaagaaatctccccggaacgcaacggggacatgtcacccttacaagtatggtttgtgcatttcacgtaatgaacctgatgcaccaatgctggcatatctcatgtgggggccaaaagcaccaggaactggcgggttcaatatccagtttcatccccaacacatgacgggtaaacggatggatctactgcttaagtggttgagtgaccgtctcggtgaaacttttgctcacctgctggcgcgggcatgggtcacccggcttgatatcgctctggatatctatgggtgcaagttgaatgactatctttggggcctaaaaaagtcatcaatttataaagactacgataatgataaagggttgccggggttatcacttggggcgtttgactcgaaactgtcagtgttaatctatggcaagattaatgcagcgcagtttgagcggattgccttccctgagcgcgcaggatatgtaaatgaaaaagggaggcgtaaacgggagtatttacttgaaattgacaaggaagaacatccgtactttctacgtgttgaaatgcgtatacaacctgagtctactggtcctggtaggcgaggattcaggcagaaagcgctgatgttgtcggacctcgcaaagctcaagcatccctttgatcgtctgttggtgtataagcgcaaactggagggagaactaatgaatgctgtgtttaccaatgaccggcccaaaactaatggtatcaaagcatgggtagatgtcttgaggcgtggtgattcgggggggcgtctggcccgtaaattcgccaaactcctgagccttaatgaggtagagctgttcgacaagaatgacgtctggtctttttggcctatctgtatggctaagctggggcaggttattggtacattaaagccagagtttgcgaccggggaagagatggctgtcagccagtttgttgaggatactcgcaagcggaagcgcaaaacacggcatcaaaaacgtcaggaacaggagcattcaaaaccttag

SEQ ID NO: 438516 - DNA, 1536 bp, Serratia marcescens
atgaaacaagaagcaatcgttcaaaaaatttgggctttatgtaacatactaagaggtgatggtatcacttattatcagtatgtttctgaacttagctatctgctgtttcttaagattgctcaggaaaatggttcagaaaaattgatgcctgaaggttaccgatgggttgatcttgagtcccattcagaggaaggattgctaggattctatcaagagatgctcacccatttgggcgcaaatattgaaaatgaagttataagagcgatttacgcattccctacaacagtattctcacattccgaaaatttaaaagctgttatagatggcatttcaaagatagagtggcaccaagtaggaaaagatgggtttggtgacctttacagcggtttaattgataagagtgctcaggatactcgttcaggagcagggcagtattttactccacgacctttagtcaacactatcgttagattgatacagcctaacctcggggaattaattcaagatccagcgacaggaagcgggggattcttagtttctgctgatagctatattcgaaacaagtattcaagagaaaaataccaatcaactccacctaaatatcaaggagtggaaattgagaaaaatactcgtcgcatatgcttgatgaacacctttttacataatttagatgcaaaaattatttatggcgatgcgttgaccgatgacgcggaagagttagatgaagccgatgtaatcatagccaatcctccttttggaaacaaggccggaagtcaacgtccattgcgaaacgatattccgttccctggtgcaaataagcaactcgcttttttgcagcatatttatttgaagcttaaagcaggtgggcgggcagctgtagtgttaccagataacgtactatttgaatctggtgtcggtaccgatatacgccgcgacttaatgaataaatgcaatctgcacactatcttgcgcctgcccaccggtatcttttacgcacaaggtgtaaaaaccaatgtgttatttttcaccaaaggctctgccaaagacaaacatcagcaagagaactgtactaagaacgtctgggtatacgatctacgtactaatatgccgagttttggtaagcgcacgccctttggtaattccgacattggctttgcgccagaagacttcggcacagacccgtacctcggtgcgttcgagaaagtgtttggcgacaaccctaacggaatcagcaaacgtaccgaaggtgaatacagctttggtgcacaagagattgaaatagatagagaggctgtagaagaaaatcagagtattgatgagagactcatgcactctcgctggcgtagctttaaccgtgagtggattgccaacactaaaggcgactcactggatatctcatggctgaaagataaagacagtttggatgctgccagcttgccggagccagagacactggcgcgggaagcaaaagaggaactggaagcagctttgagtgagctagatgatttgctagcaaagttggaaagggtaaattga

SEQ ID NO: 438517 - DNA, 1644 bp, Serratia marcescens
atgaaagaggttgatttgccggaagggtggaaaacttgcacgctggaagttatcgcgaagtttattgactacaggggccgtacaccgaaaaaaacatcaaatgggatccctttaattacagcaaaaaatattcgtgatggatacataaatagagagcctcgtgagtatattgcggaatctgattatgatgattggatgacaagaggaattcctaaagttggtgatgtcctaataacgacagaagcgcctatgggaaatgtggctcttatagacataagcgaaaaatttgcgttggcacagcgtgctatttgtttacagtgttatgaaccagaattaggtaactttttacactatgcactaagaagccctgcttttcaaaaactattgaccttgaatgcaacaggcacgacagtgaatggcatcaaggctgcaactttaaaaaaattaaaaataccatttccctctctggcagagcaaaaagtaatcgcgaacaaacttgacatccaactggtacaagtggaagttaccaaagcccgtctcgagctcatccctaacatcctaaaaaccttccgccaatcagtcctcactgctgccgtaagtggaaaattgacggagaattggcggaatacacctgatctaatcggttgggaaaatgtgaaattagatcaaatagtagaaaaaattgaagcagggaagaatcttaaatgcattgaggttccaccacaaaatgatgaattcggcatcattaagatcagcgcagtaacttggggacgttatgacgaagatcagagtaaaacgttacctaacaacacccattttcttgaatcacgtcgaatagctgtcggggattttttaatatcaagagctaacactattgaactattgggtaaccccgttattgtccacgaagtaactaaaaatttaatgctaagtgacaaagttcttcggttagtaatgcaagaggaaaacaagccttgggttagcatttttctgagatctaagcgcggaagaatggaaattgaatctcgttctactggcaatcaagtatccatgagaaacattgggcaaaaagctctccttgatattgatttaacgaagccgccagccaaagagcaagccgaaatcgtccgtcgcgtcgaagagttgttcacctatgcagaccatgtcgagataaaagctacggcagcactagagcgtgtcaataatctcactcaatccattctggccaaagcctttcgtggtgaattgactgccgattggcgtgccgctaaccccaaattaatcagcaacgataacagcgctaaagcattgcttgaacaaattaaggcaaaacgtgaagctatcgagaaacaacctaagccaaaacgctccgctataaaaaagaagaaaggtagccatatgagcaaacagattatgaaagtggttgaagtgttgaaacaagctggagaaccgcttagtggccagcaattattagcggctgctggttaccccagcgatagcgacaccgagcaacttgaacagttctttctggatattcgtgacgctcttaccatcgaagaatctattataaagcttgagcgcgctgacgacagccaagattggttcgccttggctaatccaccaataaataaagcaaagaactaa

SEQ ID NO: 438518 - DNA, 1644 bp, Serratia marcescens
atgaaagtcgacaaactgcatattcgctcacgcttcaaaaatcttgaaaacgtgagagtggactttgacgaagaccatctgatgacagtagtggttggccgtaatggttccggtaaatccaacgttctcgaagcccttgtggctatatttcgcaacctcgatctaggtgaagcccctcctttttcttacgagctgatttatcgattaggtgagcgccataggcccaatcatcccagtgaacgatggctggaaataaccattgatgccgatccaagccgcggcacactagcaaaacaatacgaagtacgtgtgcgtgaccttttaagtaatggcataccaaaggacgtgtcaaatgaacgaccttcaagcatcatcattccgttttcaaaagttaaacgggataaaaacggtaaagcaccatatctaccaaactatgtttttgcgtactactcaggccccagcgatcgacttgaaaaccattttaaaaaacatcgtacggatttttaccgtaggttactcgaagataagctggatctaaaaggtgacatccggccgttattctacgctaaacctcatcacagccaattcgtattacttgcctttttcttatcagaacaagacagcgccgaaaagacatttttgcgggaacacttaggtattgtaggattggatagcattcattttgtaatgcgccaaccagggtgggctaaacagaaaggagaattattttggggggctaggggcgttgttcgtcgttttctggatgaactgatacaacacacgctctcaccgataaaagttactcggcaagaagatacttcgttaaccggcaataatattcgcaatgagttctttcacctatttttacctgatgtaaacgcactacgcgaatttgcaagtgatctcagtgccgatgaactattcaaaatgcttgaaagtactcttctgtcggaaattatttctgaagtcagcatacgagtgaaagtatccagcagcaaagaacctctcactttccgtgaactcagcgaaggggaacaacagctattaaccgtattgggcctactcaagttcactggtggcaaagattccttatttttactcgacgaacctgacacccacctaaatccgtcatgggccgttaaataccttaaattcctgcgtgaattcgtacccaaccatgaaaccagccatttactaatggtcacacaccatcctttagctattgccgaactgaagaaacagcaagtacaagtcatgtggcgtgacgatgaacataatgttcactcacaagagccttacatagatcctcgtggcgctggctttatggccacacttactgagatttttggtctaaatacaacactggatctggaaacccaaaagttattggacgataggaacgaactagcccacatcgaaaatcgaacggaagatcagaacaaccaacttgaccttcttaatgatgagttaaacagactaggattttcacttgaaaacagggacccgttatacagtgagtttcttttagcatggcaagacttaagatacagcgataaaccaccactaacaccggataaagcggctcagagacgagccgctatgaaaaatgtaattgaggcgcttaaagctaagaaggattgctaa

SEQ ID NO: 438519 - DNA, 843 bp, Serratia marcescens
atgatttacatcaaacgagacgccacgcttattcctgcaaaggtacttgccgttgcccaacgcgcgcaagatgctctggaacagcttcccgctgagcagaggaaaggtttcatcaagaaaaagtctcatatatggagaggcttttctaaatacctagcccaaatgtcttatggtaagtgctggtattctgaagctaaagatgcaggtgcaaatttcgatgtagatcatttccgacctaaggctgaagcaaaaaggacagaagatttggtcgatgcggacggttatgcgtggctcgcatttgattgggaaaacttcaggctttctgctcagaattgtaatcgtttaaatactgatgaatcaggtaacacggtaggaaaaggcagttggttcccgctgctagacgatagccctaaagcctgttgggataatcgctgtattaacgatgaaaaagtcactttgctagaccctgtagttaaagctgacctcacctatatagactacgacgacagcggtagatttacttcaagtaagctctgcgttggtaaggcagcattaaggattaggcaatctggcattatttatggcctcaatttggagaaaatgcgtgaagcacgatttcaggttatgagggaagctaaagaactccttgaaacgattcaccaatgtgccgaagacttagaccctctgggcaatgaagcccccatgagaactattgaacgacaaatagaacaactccaatccagaacccgggccgatgcaccgtttagccgtgcagtaagaacacaactgataaaactcggtgcagaggattacttaattgatcgaagtttggatgcagcctag

SEQ ID NO: 438520 - DNA, 618 bp, Serratia marcescens
atgagccgataccatgtatccagcagtgaaggccagtatgagaaagactctggcgagcagattttggctaataagctggggatcgcgacttctgatgagatggatgaggctgaacttgtcctgttagaacaactctaccagtctgtttttgaagagcagttcccggaaggacagctcagcgtagccatgctaaaaagctggcatcgccgctggttaggtaacatctacgagtgggctggacaagaaagagcagttaatatcagcaaaggcggctttatgtttgcaccctcagcgcagttgccaaaactgctgaacgaatttgataacaagtatctggctcaatacacaccgtgtagcggcatggacgaagaacaactcatcaccgctatcgccatcacccatgtcgagctgatacttatccatccattcagagagggaaacgggcgcctttcgcgactgctagccgacgtaatggccgttcagggtgggtacaaaccgctggattatcaaagctgggagcaaaacaaaacccagtatatctcggctatccatgcaggtgtatcaatggactacgagccgatgaaacactgggtgagagaagcattaagaagggattaa

SEQ ID NO: 438521 - DNA, 708 bp, Serratia marcescens
atgaaaaaaagatccaaaatcattataggcacctttttattttttattgctatatccccaattctatcttatgggttgaaatttgggtttaacataaaaaacatatctggacaaaatgcaaattgggccgctttcggttcatttataggaggtatctatagttctattttctctttcgcaagtgttctcattctttctataaccttatatctaactcgagaaaacaataaggagcagatccgattaataaaacaagaaagtaccattaaagactttaacttactagttgaacaattactaaatcatttttcatcaccaaaaaaatacacaccaagaataagagacgaagagaattttcttcacagacttgatatagacataagatctaatcttaacatctaccaagcatcaagctttgaagatgttgtagagcaacacattagaacgcacacctatgacttatacaatgaggaagctaacataatgataaacttggcttccatatttgagatgattccagatgatttgcgcagtgtatataaaacagtttttaactcaaaaattagtaacgacaggcgattcttgttaaaaacctatatgaagactttcaaatttaatataagtaacaccttcatagataagagtgacttctgcgaaccccctcaaaacctaagagagttgaaagagcaatgtgacaggccattctag

SEQ ID NO: 438522 - DNA, 1779 bp, Serratia marcescens
atggttgacacaagcctattctcagaaccttttagggaaaaaaccctgagtgcgattgataatttagataataatactgatggcatattaatccatagcgacaatttccaagctttgaacttattacaatcaaaatacaatagagccgttaaatttatctatattgaccccccgtataatacaaactcaacgcctatactttataaaaatgaatataagcattcatcatgggcaagtttgatgcaagatcgcctgcaaaagggtatgaacttattgcaatatgatggtgttcaaactgttgccatagatgattcagagatggttaatctttcaacgatactagaacaaaccgcaccagagcatactctttcaagaattacagtagtgcataatcctaaaggatcaataacaagaaactttaatcgaacccatgaatatgcgctatttttaactcgcgagggactttctggttgtattgcgagaacacttgaaaaaaacagttctccacgaaaaatgcgccgctggggagagaattcaagaagaattgacagacgactctcattttaccctatttacttacttaatgggcaggttgtcgatattggtagtgtaccagaagaagattttcatccttccggaaagaatgttaagttatccgatggtcgcatcgaagtttggccaatagaccaggatggggttgaacgtcgctggaactttggcctcgactctattagagaaaatttagatcgcattgccgctataaacatcaaaggcgaatgggatctttttgtcactcatgaactaaccgttccaaaaacagtttggattggcggcgagtttgatgcggggaaatatggtaactctctgcttataaacatgcttggtgaaaaaagattcgactttccaaaatctattaacttggtaaaaaagtgtgtgtcactagccacgcaatctgatccagatgctctagtattagattactttggtggaagtggaacaacagcacacgcaataattgatttgaaccgcgaggccgtagctttaggtgaaaagaacagaagacgttttatattagtagagcaaggtgaatactttgatactgtaacaaagccacgaatcctcaaggctgtttactcttctaattgggaaaatggaaagcctttatcatgtgatactggtttatcgcaatgcattaaggttattagacttgaaagctacgaagatactttaaataatatttctttaatgaagcctacgcacgatctatttgatgcactatctggcgaaactagaaacgaatatcttctaaattatatgcttgatagtgaaagcaaaaaatcgttgttaagcattgacgacttccagcatccatttaactacaaaatgaatatagcaacagattctgttggggctactgatagcaagaatattaatttggtagaaacattcaattatttaatcgggttatgtgtagactctatcgaatctaatgttaatcatggctatatacggatagaaggaacactaccaacaggagagcgtacgctaatcctgtggcgcgactgcgataaaatcggttatgaagaattaaataaatatgctaaccgttttgatttatatgcaaaagagaaaacattcgatgttatctatatcaatggcgatcataacctaccaactgcatttacagttgatgaagaagacggtgaaatcgtccgtagtttgaaaattcgccagatcgaacctgagttcttaaacttaatgtttgctgaggaggtttaa

SEQ ID NO: 438523 - DNA, 2715 bp, Serratia marcescens
atggatattaacaatgatgtttacttaaatgcattgcaatcattaaaagaggatgatctttcacaacggattattaaacctttatttgaatctatggggtgttatagagtagattttcatggtggaccatatgaaaaagggaaagatctcatcgcttactctaaggcccctctgcaagatattataactgtagttcaaacgaaaaaaataggagaggggaaagcgacaggtgataaggttgttataggtaatcttttatttcagttacagcagtgctttttaacggaaataccattgcataacggtaggcataaaaaacctgattgtgttatcttagctacgccatataagattggatcaaggttgctagatgaaatacatccactactgacgcaaatgaaaaacgaggtgaaattaattgatggtccggaaatgctggagcttattaaggagaataatccttcactaataaattccattatgggtttggaacgtaagattttcttacaagacacattccagttaaaaaacattgaattaatgaaagcattgaatatggattattcaatagaaagaattaattgttataatgatttagctttctttatgggaaatattgatagtcatcatttattaaaatcaaagattaatatatcgcctttaaagatgtcactcaatcgtgatgggtgggatattcttaagaaaaagtatttagtcgatctggaacgttatttagggttttccccattacttcaaaaaatacaaattgttgaagataaatttgaagggcaattaaaaaaacatcttggtaaagataataaaaaacattacgagaaaatattagcggcccggatcgaaatatctttacttgagaacacattaaaaggtattaagtcagagtttgacacattcaaaacacatagtaacaacttcatggatgatgaggttgtcaaagacgtcatgagtgtttggtggccaatcatcaacgacgtgacaaaaacccaagattatttgaatatatataatgattacaatgaacttttaaaaaaatattctaatactaaacagttgccgagttcatataaaataaatttctctgactatttatcaacgctgacatcgttaacattacaagtagactcattgaagatgctagagtctcaatatattcagtatcctctgtatgaatatcagttcaattcatcaggcattgaaggctggctaaaatcacattgcgatttttatgttgaaggtgtatgtaaaattaatgaaggtaaattcgaagataatcaagactacttgagagccttcctgtctactacacagaaagtgcttgtggtacttgagattcttcaggagctatctgttgaaacaaatagtgttgtgaactttacttcttcacaagcagtaatgaaagatggcatatctatttctccattcaccttgtttgatactggccatgatatagctgtttatggaggggccggtgctggtaaaacgacaacacttcaaatgtatgttgaggatattataagcaagggtatgaagaatatcatctatctacctcttaataggcttataaataaaaagagtgtttatttttctgttgactcagaaacaacgtctagtcataaacaaatactttccttgatattactatccaagaacattgatgacacggatgataacatcaacgatcttgaaattactttgaatgacactgattcgctaaggcttgtaattgatggtctggatgaagcatatagtaaagtaccatatattttagactccattaacatatttaaaaagaagtatccatcaattcaattaattgtctcgagccgagattgtgttagtttcatatcgaaaataaatttcctgggagtcactttattaccatttactacagagcagttatataagttcataaggtattggtttgctgagaatatagatgaggcccaaggacttattctggatattgaaagcagtgatttaagggagatcgttaagaccccactattggcaacacttctttgtattttgaaaaaaagagggatagatactccttcaacagagatggaaatatttactagaagattgaagttactatgtggtgaatatgataattataaaaccattaagcgtagtagctccgatagcatgcagcttgaaaaagcggccatgaaactggcttatcatttgcatattaggaataaacgctctgacaatatggagtcaatggttacgtatttagcgtatgatactacgtttggttatcctcaagacgtttgctcattattagttgaagagttgattaacccatgtaatattcttcatttggatccgttgacaaaacattattcatttggtcatttgcgtttccaggaacatcttgccgctctcgaactgaaagagaatagaggtagggatatattacctctactgaataaagactggtggagtggaacattgtgtctgtattctcaagcttgtgatttcagtgggttgattgaggactattatagatattatggagaagtgagctctgcactgaaaatctttaaggaaatggtttctcataggcctcaaagagcccgggctcaccttcgggagttgatctctcaatatgaaaaaacggagcggcttgagggttataaaactgaagatgaagagtattttgatgattcatggcgctatcctccagataaataa

SEQ ID NO: 438524 - DNA, 288 bp, Serratia marcescens
atgaaataccggaacgtgcgggacaaaaaacagcgcgggaaattacatgaacagaaagcggtcggccaacggaacgccgcgctcgaggcgtggtggcagcgcgtcgtcgcgatcgtcaggctgggcagcctgtggcgcgacatcttcggctttttcaatcatcagctcgccgagcagggccagaaaacgagtgagcttttgcatattccctccggatcggtgattaggctaagcgtgatagtaatcgccgctaaaccggatgggaaaaacttaaaactcatatcctaa

SEQ ID NO: 438525 - DNA, 1188 bp, Serratia marcescens
atgcataaggatttgaaaatttacatttcatcagggcggtttagaaaaataagagagtggaacaggaggcggaattattacttcaaaaaagtgaagatgaatattaaggtttatattgcaaagcttatctgggataagcgtagaaaaaatgtgattgatatcaagtctgtcaaaaccgtattgctcctgcgcaatgaagggacaattggcgatgtggtgatttcgacgccgctagtgaaatgtctttatgagtatggttatacggtggatttattgctcacaaaatcgagtagcgcggtggtgaaacacaacccctatgtcaggaatatctatgaggcagatgattgtaataatgagatatttttgaaacggttcactcacacagttgcaaaatcaacagttaagatgttaagcgggaataattatgatctggttgttgatctttgtttgtttgataccccggtacataggatgatgctttttcgcgatataaacgcaaggtttgttcttggttttaataaatgggattgcattaaccactacagcaaatctatttcatttgacaatggtaaggaacatgtgacgaaagcaattgctttgattgcccatgccgcagggctcaatcttacaaatcgccgtgcctatgacttgcatatcccagatgagataacttttgaagtgagagagtatttaagaggttggaaggataaaatcaagattgtcattaatgtttttaccggaagtccagagagaaatctatccagagagcaacttgttcggcttattgatatgcttaatgaaaaatcgtcaagtataagtataattattctcgatcaccgaaaggaactgactatatctctaccaagtaacgttgttataaatccatttaattcattgcatcatgtcatggctttgatccgggaggttgacgtgattatatccccggatacgtcgattgtacatatttctgctgcatggaataaatcattggtttgcgtttacaagaacgtaacagataataatgacctgtgggcgccagactatgaaaatgcaaagcagattattgttaatagcagaaaaatagctgatgtggataatgttccggagcttatattgcatgaaatcggccgaagaggcctgttagataagcaagaaataaaacagctgcagcagtccgttgatcggtga

SEQ ID NO: 438526 - DNA, 153 bp, Serratia marcescens
atgaacatcacttttccccatgagccgttgccggagctgacgctgagcagcaacgccccggccaactggccggggttggttttatttaataggatagttgtaatgctctgggattttataattttccgggaacgacgtcccattgggaagtag

SEQ ID NO: 438527 - DNA, 1815 bp, Serratia marcescens
atgctctttgaccttgacgtcatacccgcctttgccggcaaacagcccggtctgttcttttaccgagtcgaagttgctgtgcagcttgtccttgctggcgctcacgttggcggagccggtcatcgagccgaaggtgaaactgccgcccgcgctggcgttttgctgtttggcatcatagcggtcgctatcctgttcactttgcagcgtcaggtcacggcccacgtcgacggtaaccttttcgccgctggcctgcgcgcctttcaatttggtgtcgcggccgctggtcaggctgagatggctgcccgcatccagggtggtttcggtatgggtcaggccgttgccgctctcatgccccttgccggcattgacgccggccgagacgctgatgccataaccacccgagccggcgccgataccgacgccaacgttgccgcctttgctgctgttcttgccaacggtgctttcgctgttctgcgcagactgcaggctgatgtcccgcgccgcatcgagcgacaggtctttacccgctttcagctggctgccggcgatggcgatatcgccactctgtgcgctgtggttattgccctgcgccgttatcgacaggttttgcccggcggtgagcgtgctgccttgcgactggcggctgtcggtgcggatttcgctcttcgacgactgactgccgtaggaggcgctgatgcccaccgtgttggtggcgcctttccctgcatctgtattgagtttgtcgagctcaacggcttgcgccgcctgcacgccggacagcgccgccttggtgttttgcagcgcgttcaggcgcccatcgccttcctttctcgcctgctgcgcagtgctgacggcggtgttgagcgcgccgcccacggtgcccgacagcgccacgctcaggccgctctgcttttgctcgaaggtttctttgcgcgtgcgttgatcgtagccaggatcgatagtcacgctgtcgccggtcagggccagatccttgcccgccaccaggtcggcaccgccaatgtgcagttggttgcgcgccgtgatattgacgctgccctggctgctgccgacggtactgacgctttggctctgggtggtggctttctcgtcgatttcgtgtttgctcgactgcttgcctatcgtgaagccgatgccgccgctacccagcaggccgctctttttcttctcttccagcaggtaatgcgtatcggtctcggtggccgctccgatatcgacattacggccggcctgcaggttcacgtcccggtcggcggcaatggccgagccggtgaccgtcagatcattaccggcgctgacgctgacgctgtcgccgctcagcagcgtgcctttctcacgcgtggtggcatcgcgcgctacgctgtggctgctgctttttttcaggaagccttttttctccgaacgctcctcactgtagcgcgactctcgctcggtagccgtattgagggtgacatcgtttttcgcctgcagggcgatgacgccctggtcgctgtgcagggtgctgccggtaatggtgacgtcgccctctcgcccgactaccgtcacgccgtcgcgtccgctgaaggtgctgccggtgctgatttcgcgctcggtttgttcgatgcgatggcttttggttttgccctcgcgtttattttcgctgtccagatcttgcgtgcggctgcgcgcgtctttaacggtcacgtcctgcgcgctgatgccgatacgcccttctttactgtcaacctgcgcgccttcggccagcagttggttgcccgccaccagggtgacgccttggtcgccgccgagtgcacttaa

SEQ ID NO: 438528 - DNA, 252 bp, Serratia marcescens
atggctgcttttggcggtggtgatggtcaggtcattgcgcgcgctcaggctgagcgtgtcggtcgcatcgagtttcgcccccgagagggtgatatcggcgccgctgagacgaatatcgccggcgttcatcgtcgcctggcgcagcgcctcctgcagattattgctcagggtcagactgtcggctcgcacgtcaatgctgccggccttgatatcaccgccctggtgcaggaactgcccggcatcaacggttag

SEQ ID NO: 438529 - DNA, 1050 bp, Serratia marcescens
atgcgtgtccttgtcatagtggtcgacgataaccgcctggcgccgttcgttaaccgagtaaccgcggttgtccaggctgccgccgccgtcctgcgtcaggttgccgttggcggtaatgacgctggcgtcattaagcagttgcccggtgatgcgcagcaccatattgccgcccgccagaatacgcgcgccgatgccctcggagaccagcctgtcgcgcgtcagcgtgccggtctcggtacgttcgcggaagttgttgtaatcggtgacgaacggcgcactgtcaatatcgacatgcttctcgggatcccacgtcatcacctgcgtccagtcatgctcccaatggaagccgttttgataaggcgtcgggatggttgccagctgatttcccccacgcgtttcgtagaacgtcatggcatagctgccgtcggcattcggcttgagcgccaggtagttaacccacaggtcggtaagtgcgcccttattgtccttgacccgcacctgcgcgcgtttgcccgccgcatcaatagccagcagggtgccgtagcgattgttctgggccaccgcgtcatcctgaaagctcagctgttgggtggttggcgccatggtgcttttatcggggttgaccgccgaaccataggagcgccagtagtagttgtagcgatgccatttgtaatcgctcttctcggcgtcacgctcaatcaccagcccttcgcgcaggttatcaagacgccgagcctcgacggtggcatcaccgtcagcttcgataaagctcgcccggttttcaatcaggtcatcactgtgcagctgcagacggtcggcgctgtagatcagtgccccatcccggttggtcaggcgttcaccggcctgcaccgtcaggctttgggtcgccgccatcaccgcaggttgaccgtggttgtcgataacacgcccacgcacggtgatagcgtcccccatcagcgccgcggcgttgtccagggtatcgacgttcagcgtcatgctgtcagcctcaatacgcccggtgttctgcaacgccccggtcgtcagctgtag

SEQ ID NO: 438530 - DNA, 1164 bp, Serratia marcescens
atgcagggtaagttggccggcgctctccagccgcccgccctggttaagcaataccagcggcgaatcggccggcgacaggccggcgttaatgccaagatcgccgttggcgaggagttgcccctggcggttgtccagcgaggccacgttcgtgagcgtgagcggaccgacgctctgaagccgcccagccgtgttgtcgatgtcgcgcgcggcgatgtcggtctgggcagagccgcggatcaggccgccgtcgcggttgttcaggcgctcagcctgcacctccaacgccgcctggctgctcagcgctccttgagcgctgttgtctatctctgcagctctgagcgtcaaccgctgggtcgaaaccagctgcccaccctgattattcacctgggcgccgtcgagcgtgagcgccccaccgctgtgcaccttgccctgttggttgttgagcgtaccgatgcggtaggcgcccgttccctggctgatgagcgtgccgccggtattttccagccgcgccgtggccagatcaaggccgctccggctgctgaatatgccctgacggttcacaatgccagccgccgacacctgctgttcaccattgctgcgcaccgcgccgccggtattatcaaacatgccgagaatacgcagcgccacctgttgctggccctcgagctgaccgccgacattgttcagcgtttgcgcgtcgagttgaagcgcctcgccactttgcattttcccatcgcggttgttcagcgcgtcgctcagcgcaaggcgttgttgtttctggctgtagagcagcccgccctgcgtattgtcgagtgcacgggcggcgatactcagcccctcgccagccagccactgaccacctgcgttatcgatggcgccggcgtgttcgccgtctttggcacccatcacagcaagctgcccctgcgccgagaccttaccgccacggttatcgacatcctgcgcaacgcgcagcaccaaatccgccgccgactgcagcccccctttggcattgttcagccagcccgccgacagctgcgcatcctgctggctttgtacgctgccttgcgcgttgtcaaaaccgccgctgacggcgtgccagccgccctggctgcccatccagccctcggcgttgtatatgtcctgcgccgtgagggcctgggataa

SEQ ID NO: 438531 - DNA, 768 bp, Serratia marcescens
gtgaagatccagtttctctcctgcgccgataaggccgccccggttgcccacgcggccggcggtcagatcgagattgcgctggctgacgagctttccttgcacgttattcagatgctgcgccgtcagccgcacccggctgccgtccaccgttccggactggttgttcagttcgccgcccgcttcgagctccagggcctggccggcgaacaggccgccgccggcgttgttgatcgcaccgcccgcctgaaccaccaactgacccggcgttgttatcttgccgccctggttatcaagcctgccggcatccagccgcagatcgccgttgccgcccaattcaccgtcgctgttgtcgagcaggccgccgatccgccagtgctgcgccgcgtcgcccagcgccaccaggcggccgcgctggttggtcaacgccgccgccttgagatcaagctggcggctctcaatggtgccgtcgctgttattcagctcaccgcccaggctgaaacgactttcgccaccgccggtttgggaccagacggccccctggccaaacacattgttggcatcaacctgccagcgcccggttttgaactgagcctgccgggcgtccacatcacccggggtgttcacggtaaactcaccgctatcgacggtcgattggcgcaacaccacgccgccctgccgggccgccagcgaggcatgagccgccgccacctgcgcaccgctgagatcaacgcggcgcccgctggcgctaaccgcccttttgctcagtaa

SEQ ID NO: 438532 - DNA, 1068 bp, Serratia marcescens
atggccgctgctttgaatgccgtgcgcggcgtcaagccgcacatccccggccgccgccagcgtgccggactgcgtcagcgtcccctcccggctctgcacggccagctgaccgccgctgtgcaatttgccgcgatactcgatgtcgcctttcgccgccagtttggtgtcgccgccggactgcgtggcggcatccggcgcatcagaccgccaactgagcttgccttcgctgctgacggtgagcgttttacctgcctgcacttgcccattctggttgcgcacgccgacgccagcctcggtgccgatcatgcgaatgctaccgctgtacatgccccccatctgacccatgtctattgccagcgccggtctggcgccgccgtcatccgccagcgccgtcaccgttttgccgtctgcgctcacccggttgcggccgcccaccaccgacacgctctccttggcccaaacgccggcgttgatctcgaccgcgcgtgccataatgtctacatattcggtatcgtgacgggcatcgccgttgaggccgccgccctcaacgcgcaccacgccgcgttcgatctgataacctgccatgctgccgtcggcgttcatctgcggtttgccggtcgtcagcgtcatgcgcccggcgttgatcgtaccgcaaccgttgcacacgatccccgccgggttagccacgatcacctgcgccttgccgccggccacttccaaaaagccgcgcagctggctggggttattgctgttgacttcgttgaggatcactctggccggcgcagcgttgggggtgaggttcgggttgccctggatcatcccggccatctgggtcgctgtcatcaccgccgagttattgaggatggcgcctttggcgtcaacatcgaactgttgatattggttatgcgatatccctgcctgattgggggccgtgatattgacctgcgacagcccattttgcgtggcgataacctccggccgcagagaaggattggcggcaccgtccgccacaatgccgtcagccatcgccggcccggcgaacaaggccagccccagcatccacactga

SEQ ID NO: 438533 - DNA, 1728 bp, Serratia marcescens
atgcgctcaaattacgttcgtgctgtgccttgttttattcgctatggtctgtcgggattgttgctcggcgccgtgccgttttttgccgcctccgcctctgcggctgaggctttcagccagggcgcggcgactattgatgcccgtgaacagctgcgtcagcaagagcgagaacgcgccctgcagaaccaaaacacccctcaggccgatgcgcgcgtggctgcccctgagcgggtgctgcccgattaccctcctcacgaaaaaccctgttttaccatcaaccggttggcgctcgtcggcgagtcggccgaacgctttcagtgggcgcttgcggccgccaacgatgccaaaggccgttgcctgggcgggcgggggatcgtgctcgctatcaacaaggtgcaaaatgccattttggccaaaggctacgtcacaactcgggtgatggcgcaggagcaggatctgactcagggcacgttgacacttacgttgcaacccgggcgcattggcgccgtccgctttgatgagccggtttcctggcgtggacggttgtggaacgccgttccggcctcgcgcggcgatcttcttaacctgcgcgatatcgagcaggggctggagaacttcaggcgggtgcccagcgccaatgccgacattaaaatcgtgcccggcgcccaggagggcaccagcgatctgcaggtcaactggcacgaggggcgcccggtgcggctcagtctgggactggacgacagcggctccaaaagcaccgggcgctatcttggctcggccaccctggctattgatgccccgtttgcgcaaaatgacctgttctacgccaacatcggcaaggatttattccaacacgggccgttcggcaaccgttcgcatacgctgaactatttcttcccggtgggatattgggccttctcggccaactataacgactacacctaccatcagaacatccccaacgccaatgaggtgctgcgctacagcggcaagagcgacaactttcagttgaccgtttcccggttgctgtaccgcgaccaatcgcacaagaccacgctcaacctgcgcggctatcgcaagcactcgaccaactatgtggaagacatcgaaatggcccagcaaaagaggcggacagcgggctgggagattggactgaaccagcgcagttacctcgggcgcaatacgctggatgcgtcgttagcttggcggcgcggcaccggcgccctgggagcgctgcgcgcgccggaggaagccaatcacaacggttcggcgcgtaccggcatcctgctcggggatgcggggttcaacataccgttctcctggggcgagcagccgtggcggctgtataccagcgtgcgcggccagtggagctcgaacgcgctgacgccgcaggagcggatggccattgccgggcgctacacggtgcgcggttttgacggcgagcagatgctgtctggcgaaaaaggcctggtctggcgtaacgatatcgcctggaatgtgtttgcccgcggtcaggaactctatctggccgccgactacgggcgggtggacggcccgaatacgcgaggcttgccggggcggcaattggcgggcagcgcgcttggggtgcgcggcgccttatgggggcgactcagctatgacctgtttgccggcattcctttgtacaagcctgcgggtttccacacctcgggtgccacggccggcttcagcgttaacctggaaatctga

SEQ ID NO: 438534 - DNA, 147 bp, Serratia marcescens
atgaaaacgggaagcaatgtgagcaatgtcgtgccggatcggggggctcagaaggagacaacccttttcccctcactggtgaataaaatgataatacgtctcattattgaatacaaagtcatttccccaggcaactttcccccttga

SEQ ID NO: 438535 - DNA, 738 bp, Serratia marcescens
atgcaatcaaaagcacactattcattctcacaaaaaatggactactttgatgacgatatagagttgatagatgtcctaagagacagcgtacttgaaggcgatcttcatgataataccacaccccatattttaaatagagtaagcccttcaaaacactctcatctagcaagaagaaagaattcaaaaggcagccgtgagctagtaatgaaccatttaaggaacactctttactcgtcatatgtaaaggatatttacgaggagctaacagagtatttaagaaacattcttaagcacgcatcgctttcaggatttgatagtagaaggctagttggcgagcattcatttaaaactgaggctaatcatttactatccttggggtcatgggaggatgtttgcaaatatgtcagtgattcagttttccaattacttgaaaatgaaagaagcaccttatcacttctaaagtcaatgaaaggaaagctcggattaaacatagaacaaagagtcatagataatgcactcccttaccttgaaacaagacatcttcttgtccatgccgatgggaaagtaaatccgacattcagatctaaataccccaacataccgatcaaaggcaaattcgtcttcttagactacaactttattatctcaatgagagtagcagtaaaggaattggccaaggcatacgacaaagaaattatagacagaaaccttttaaacacccagcacattagaaaataa

SEQ ID NO: 438536 - DNA, 1191 bp, Serratia marcescens
atggtcgatatgctctatgagtatgaagaacaagcagaaaatgaagatgatattaatctaactgataatattaatttttcctctgctgttgtgagcggaacagattggacaactgaaacaattatcaatcaaataaataaaaacaacatccaattaaaccctgactttcaaaggcgtgatgcgtgggataaaattaggaaaagtaatttcatagagtctcttatactcggacttccagtaccgcagcttgttttagccgagcgtaaagataagcgaggagcttatatagtactcgacggaaagcaaagactattgagcatcaggcagttttccgccgaaaaaaacgatcctctttatgaaagcttatcactgagtgggctagacatacggcctgatttaaagggaaaaaatctacacgaaatgaaaaacgacccgctatttctcgatgatgtttcagcatttgagaaccagccaattagaacaattgtaataaaaaattggcctagcgaagagtttttatatcacgtatttttgcgtcttaatacaggtagcgtaatgctggcaccacaagaactgaggcaagcactacaccctggaccatttgtaacgttcatcgatacctcatcaactcaaagtgcagcgctgaaagctattttgaagttaaaaaaaccagatttccggatgcgtgataacgaacttttattacgctatatttcgttcaaaaatttccttagcgaatactcaggagatcttaagaaatttttagataaaacctgtttgatttttaacagagactggagttcaataaacaatcttattgataatcaagtcgcagaatttgaactatctcatcaatatgttgaaaagatatttggtgacaatagctacaggaagtggtttgcaggtagttatgaaaagaaattcaatagagccatctttgatatattaataacgacgttctccaccgcggaagttagagcaaagagcgtgggaaaagaagcaatgatcgaagatgcttttaaaactctttgcgctactaattatccgtttttaagctcaatagaaacaacaacaaagagtctcaatgccacgtttaccagattttcaacatggtataccgccgtcaataacatcattggaaatgaactacctacgctcaaaatggataacaatagaattaaagtgagttaa

SEQ ID NO: 438537 - DNA, 654 bp, Serratia marcescens
atggcgctttcaactagattctcacaattagaattgcgattaaatgaattaagagagcatttactccccgctgaattctctgaaaccggagactattcgccagccgtcatagatatggctaaagggtatagattactggctcatgcagagttcgaggcatacattgaggatatttcaaaagaagttatcattgaggcaataggaaaatggaaaaatgccagaacgccatcagtcacaatagtatcttttttagctgcctatcatagtagctggtcaataaatgatgagcaacacaatcacgatataattgagttatctaaaggtcgtctaaacccaaaagaatcgctaatggaggcaattaatattgcatcaaagcaattcaataaaaaaataggctcaaacaatggaataaagtcggataatttcaagacacttatccttccaacaggggttgatttagagcaattagattcagaattattattaaaactcgacaactatggttctaaaagaggagagattgcacacaactcatcgcttcgtgttactcaacagttaaatcccaaagatgagttcgcagaagttgtctacctagttgaatgtctaaaaagtcttgatgaaaagctgaacgagttaaggttgtctttacagtga

SEQ ID NO: 438538 - DNA, 1260 bp, Serratia marcescens
atgaatatcatgaaacaatttgaatgtgatacttgttgtacacatattgattgcagaattggcctttctaaccgagatgttcaaccgtttcagtttgcgtgtcctgtctgcgaacagcagatcacatttaaaatttcagcagaggattttagtcttgaaggagccagtgacattttggactttgaaactccattctcgggtaaaaatccatttattgacttacaccttgatttcccagcaacattcgaaaaatatgttatgggatatacaacattcatgaaagtaactcaagaaataggtcatgcaaattacgtagaactaaacagcaaactggacgcacttaataacctttatccaaaaaagaaagagctacgtagattaataactcaatacaaacgaggggagtttaatacattccgaaaaacctgtcgaagtctttttgatatacaaccaagaacagataaaaagcaggacattatagcagcactgtacaaagcgacttcaataatgtcttcgccattcacaatacatgaacacaacaaagaaattagcgaagaaatgcctaaaattctacgggaaatcgatcttgcttatcatggtaaaaacaatgagttttttactgaattgataaaaaccggttttctacaaaatgtacatcacgaatgcctctctatttatcctaaagttatcgaactagaacttccactacgaccagcactttactttgactacaaggaactaaaacctgaagacaagatatcaggccgagtgtcgacaacagacttcgagagttgcagtaatttatacaaagatttatccgaggttttctctagattattaactctagttgcaggaataaataacttactcaaacgtggggatcataacatatttgacgactccgttcgcctaaacaaaaagttagaaataataaaagagctatcatctcttgataatttcactaatatggacttagggaaaaaggtcgattgtattgataactcattttatatcataaacaagagcgcaattaatagcaaactgcgaaatgcaatagctcattacaagtatgaatatgaagagtcaactcagttaataaaatactatccgaacaaagaaggcatgagaagagagaaactgtatgaaatatcctttctcgagttcctcagaaatacactaatgctgttccgagaggtgcatttacttaatcacattgttaaatccatgttgtattacactatatttattttaaagaaatag

SEQ ID NO: 438539 - DNA, 156 bp, Serratia marcescens
atgctgcggcgccggcggcccacagggttcttaattgagctgctgagcctgttcgctcagcctgtttcggttatcggcaaaaatgagaagaacttgaggaaaaaaagcggcaatgtagtcagcatccagcgagcctccattgccgcctacccctaa

SEQ ID NO: 438540 - DNA, 357 bp, Serratia marcescens
atgcatcatgcgataattcaaatcaacgagagagacatcaatatgaaaatgaaaccaggcgaaacaggatacctctgctatcagggcgatatgaaaaacgccaccttggtggcgttgatagcgttaagtgaagaaaaaaacaaattacttattacgattcctgttgatgtgatcctgcaaaatcacaacaagctcttcaacttcatccaggccaaccccgacaaaaaaacgttcggtgggagggatggtgacttcttgggggaaagcaaaaccaataaaggccattccagaatcaccttcaatgtagccgtatttttcagcaatgacatacggatcggtgcgggtttccttctgtga

SEQ ID NO: 438541 - DNA, 258 bp, Serratia marcescens
atgggtaacccattttatgaagctgcaaatctggttttagcactgcacaccgaacgtgcgaaatatacaaagccgcaatatgccacatcagaggttaattggttggcgggtaaattgcaggatctggccggggtggctaaatgcgttggtgatgataacgctgggtttactattgatcgcgctgcacgcatgtggattaacaccggacgtaaaccggcccctttcaatgccggagatagcgatgttcaattttattaa

SEQ ID NO: 438542 - DNA, 837 bp, Serratia marcescens
atgagtaataaacctgcacttaagtggttaggcggcaaggctcgcataatagatacactgcgccagtatctgccggagggtaaacgcctggttgagccgttcgtcggctccggtgcggtgttcctcaataccgactatgacagctatctgctgtgcgacatcaatgccgatctgatcaacttccacaacgtcgtaaaaaaccagcctgaagtgctaattcgtgaagcgcgtcacctgttcaacgcacacccggatcaggcgggctattacgccgtgcgtgctgacttcaatctgtgctgcgacagcaatttcatctaccgggctgcgcagttcctctacctgaaccgccacggcttcaatggcgtttgccgctacaacctgcgcggcgagtttaatgtgccgttcggccatcgaaaagcgccctatttccctgaagacgagatccgggctttctctgagaaggcgcaggccacaaaggcgattttcctgtgctgcgcattccaggaagcgatcagaatggcacaggccggcgacgtgatttattgcgatccgccctacatcccggccagcgccaccgccaatttcaccagctaccacactgacggctttaccagcgaacagcagagaaagctggtgcgcatgctgcgcattgcggcaaaacgcggccgccacgtcgtagcctcgaacagcgaaaccgacgccgcgcgggagctgtattccgatttcatcatcacaaccgccaccgcacgccgttctgtcagcgccaaagctgccagccgcgcaacagctggcgagatcatcgcaactatgaaggcatcaaccgtagaggggggatga

SEQ ID NO: 438543 - DNA, 258 bp, Serratia marcescens
atggctgagctgacagcagcagagcgtaaatggctgaatgacgtgcagaaggtgctgaaccgttgcccatcaaagcgcctgggatttgccacgatgggtgacagaaatatcgctgtttacgataccgcgttctcgcaggctattgaagaccacatttttagtggcggaacgggcgacttcattcctaccgcagagcagtttggtgcggtgctaggcgaaataacttttccggccaacgtcgaatctacagcaggctaa

SEQ ID NO: 438544 - DNA, 426 bp, Serratia marcescens
atgacactaacgactgacgagctgcgccaaatcgtagaaactgaccacgtacagcgcggcgatgctgccgcaatggccagcgaactcctggctaaccgggaggcgcagccggttgcgtggctggctatttatcacggagaggtgtacgacgaagcgatcagcattgctcgctcagttgttgaggcccaagcggagcgtttcggctgggagtcagcactgacggaaattatcccgctctatcgccataccccgccagcgccagcagtgccggataggttcaagtttgtgccgacagtaccaacgccagaaatgatcgccgctgctatgaactgcgacgacgtgaccttcatcaacctcgaagacttctgcgttaacttcggcaacatctacgccgccatgctggcagctgcgccggaggaaaagtag

SEQ ID NO: 438545 - DNA, 216 bp, Serratia marcescens
atgaaattgaaaacctctaaatttcctcgttggtggccttatggggtgctgaggctccttatctgggtgctcaccttcaatgccgtaatctttacgattatctatttttatgatcgcggtttcttaacatttctgctccccttctgcgtattccttcttggctgttttttatactggaaagtgcctgaaaatcaggaagaaggagagaacaaataa

SEQ ID NO: 438546 - DNA, 642 bp, Serratia marcescens
atgcgagcttatgatctggctaaatcagttttcgatggcgtcgtgaccatccctgctgatttctatttcggtcttgaaagaagctttgaagatctgaatctaacggctggcggttttttgtatcaaagccgaaaccgcgctgaagatgaccgccttctgaagggattagcccaaattgtcaaaaagccaaatgtcctattcgacatggtcagattcatagttgatgatgtgctttcaaagttacctgagcctgttgtaaaaaaagtattcgaaggcgtaacgttatccggttcgacttacatatcaaaaactcaggctcaagctatcgtgagttttgccattgcgaatagagtcatcagaggtgcttctgtatcgtcatttgttactaagtttgcgcgcctaaatactatcgcgttactctcgactgtaatggtgcaaggcaccattgcccgcgccgcccgttcctctcgcaaactactgaatgaaaacccgaagttatattacgagttaaaaaaacggaactgggacatgctttactttctggttgagagctccctggaaaaatttctgatattagatcgcctttaccacaaagatcgcaccacatttgataaggttgtccatgaaattgaaaacctctaa

SEQ ID NO: 438547 - DNA, 840 bp, Serratia marcescens
atgcctattaccaaatttttccgcgtggcggtcgagggggcaacgtgcgatggccgcacgctggagcgtaagcacatcgagcagatggcaaaacgttacaacccgacggtctatggcgcccgcatcaatctcgaacatatcagcggctggtcaccggaaagtgtcttccgtgcctatggcgatgtgttggagacgaaaaccgaagagatcaccgatggcgatcttaaaggcaagttggccctgctggttaaggccgatgctaccgatgagctggtcgagctgaagaaaaaacgccagaaggtctatcacagtatcgaggttcatccgtcctttgccgataccggcgaagcctacctgatgggcctggcctgcacggacaaccctgccagcctggggggcgagttcatgaagttctgcgccggcagtgaaacgaacccgttggcctcacgcaagcatgatccggcctgtttcttcactgaaaccattgagtcttcactggaattcgaacaagaagcgccggcacccgaagccggaaaaaaattcctgagccggatcaccgagatgatcaccggcaataagcagaagtttagccaggaaaccgacgacctgagaggggcggtaacgctgctcgccgaaagtcagcgggatgcactcgaccagttggagaagttcggggcgctggaaaaacagcatcgtgagttgcaacagaatttcaccacgttgcagagcgatttcgacacgctgaaaggccagcttgacgcccagccgaacaactacacacaacgcccgccggcaactggtggtgagggtaaatcgactgccgagttagccgactgctaa

SEQ ID NO: 438548 - DNA, 783 bp, Serratia marcescens
atgccacccgtttcaaaactaaaaatgctgcggacacgggcctatccaaggctccgccgactcacattcttttctctgtttctcagcgtgtctttgatcctctgcgggtgcgcaacctcgcctgtatcagaccgtttgtcaggaacccgccatgttccagcaacatggcgggccaccccgtctgactcggcacacgtgtctgtgtggaatgcatggccccccgcccgaaatgaatccggcgcccggcgcttgcgcgcttcgactggcaaatccagtcacgtagagcatgtacgcggagcacaaacgccggttgcgcgcgcaaatttggagtgcgttcaagcgttatggaatgacgctcgcaaactggttgcggcagaggctgcggccctctattacgcatcgcgtacctgccggcgacaacacgcgttctctacccaaagcgcgccattgcctgaatccttcgaacgggcgatacaaacgccccctcgccgggcgtcccaatctggtcagaaggaagtcgccgagcgtggcaaagccgcacccgatggaagcgggatcaaccgccacacgacccagcattctgctccccggacgttggacctatcgagcgtagacaccgaccccggcgaaagcgaggcggattggcaggctgaaccgcatgagcatcataaccgcgtgcgatccacagtgcggaagtggatacggcgtttgttcacttcgtcagagcgggcaatgcttcaacgccaggctgaaccgcagcagaacagcaccggattcgtttga

SEQ ID NO: 438549 - DNA, 723 bp, Serratia marcescens
atgtcagagtcaaactttacccaagatagttcgccaaagagtacaaaaatctgctatcacagtccaaagattactgttctctctattatattttcgtcaatagctactattgtagtctggatactgctttttcaattgtctctgacagccggtttttcatcatacctaggtatacagagtcagtactttttgcaacatccacatgcacagatggatgctcttacattacataacattggtgagctagtctcaaacggtactttattgagccttgatgatttatggtcctttcaaggtactttttatcagacgataattactgtgctgatagcattaaatgctattcttggagggtttgctttttttatggttaaacagtcatctaatgcaaaagctagggaagaagctattctagaggtaaaaaactacatagaaagcaaatcatttgatcgtgaagtaaaagatataaccaatactaaagttgagttaaccgtaaatcaaaaaattggtgccttgcaacttgacttaacgtcacaaatagaaattgtaagcaacttaatttctgacatggaagaagtaagaaaaagagaagaattagttaaaatgctagaaggcgaatgcgctgaaatgaaaagacatatctcaattttagcacaggcgctctctcagagagatgtatctgagagtgatggctcatcattaaccttaaaacaaggacattaa

SEQ ID NO: 438550 - DNA, 543 bp, Serratia marcescens
atggcttttattaaacgtaaaagtgttaacaataaaaatactaatgatgaaaaaatcaatgcgaatactcctgaggagcttttatcattcgccagtagcaatggcataactgtcgaacccttagatgtaactagtttaactcagaaacttggaatatcgatgaggatggaacctatgacaggagaagagtcaggtagcctcaggaaagataaaaatggaaaatggattatgacaataaattcattacaccaccctcatcggcaacgctttacaattgcccacgaattagggcattacataaaacatactattctgaaagaaaactttgttgatactacttttttcagaaatgaagaaagcaacccgatggagcatgaggctaataaatttgcggcagagttattaatgccaaaagcgcctttcgaggcgtatattaaaaacatttccaagcaagtagaagatttagctaagcacttccaggtttcatctatggcaattcgtatcagggcaaaacaacttggatatgaaggacataatttatga

SEQ ID NO: 438551 - DNA, 1041 bp, Serratia marcescens
atgagtaattattgctatttccctttacttaaaactcgcgacgctgaattaaaagctgtttccaagctaaactcagatgacttcgataacattttacctatatatgaattaaccaagtcaagaagaacaaatattgctcccgatggtgatatccataggaaaatggcatctattagagaaatccaaggagaaaggccatttattttagatgtcacatctaatgaaaaatacgtaaactatcaacttgaacaacttgtagatgaaagtaattcattttatgaatggcaatacttcataaatttatatagtgatttgaacattataccaatgattcacttatatgatgaagatgactttactgaagtttctggttttgttaaaaccatgtcagaatctaaagaaaaccttgcagtaagattaccgtatcaccttgataactataagaaattcataaaaccaatttatgacaatctttcagaaaactgtaaattgtatgtaattttggacggtgagcagattataaaaggtaaatcggaagcaatagctgaaggatttatcttcgcctgctcagaacttgaagagtttggaaataaaattgaagatatagtaactgtatgtacatcattcccattaagccctgctgcagaagggaaagatgatcatggagacttccttatctatgaagaagaaatatttgagcatatttcttcagagttcgacattaaatatggcgattatgcctctataaacattcagcaagttgaaataaaaggggggacctttgtccctcgcatagatatttgccaagttaaagattttatatataaaagatatcgaagaaatgcaggaagttatattttgtgcgctcaaaaaatgattgcagatgaaagatatagtccattgggaacttgggcagatgaagaaattgctagcgcagctaatggtgagccatctgggatcagcccttcattttggatagctgtaagaatgaattattacatgacatctcgaacaagactaagacttaggttattagactaa

SEQ ID NO: 438552 - DNA, 609 bp, Serratia marcescens
atgaaagaaattgagataaagaaggtgcttatagagcatttaattaattgtgataataatattattagttctgagtttcgttttgattttggaactcgtagagctgatataatctgcatgcttgatgacatgcttattgcctatgaaataaaaggggctggggataacactgaacgtttagccactcaaattgatagttacagaaagtattttgatttttgcttcatagtttgtgagcgttctaatgtggatagcattagaaaaaaaacacctcgtagtgtcggaattattgtcatcgaaaatgaagttgtgactcaagtaaggaagtctaataaaattaaaaaacatgataagataactttggcgagcacgatagatataaactatcttcgacgacttgtagttgataaacgagtaaagtcgaaacatgagctttgcgaggctcttgctttacagaagagtcttgatgatataagaaaaatatcgagggaagatgtgtttaaaaaaatagttatcccttataaattattcttggcggaaatgggaaaaataatacattcagatgacatccttactctcacaagaatgccatcgctagaattagtctaa

SEQ ID NO: 438553 - DNA, 1308 bp, Serratia marcescens
atgtctacctctcgctctcaacagatccagcagctggaacaggaatggaaatcggcccgttgggaaggcatcacccgcccttacagcgccgaagacgtgatcaacctgcgcggttcggtcaacccggaatgcaccctggcgcaaaacggcgccgccaaactgtgggcgttgctgaacggcaaggcgcgcaaaggctacgtgaactgcctgggcgcgctcaccggcggccaggcgctgcaacaggccaaagccggcgtcgaggctatctacctgtccggctggcaggtggcggccgacgccaacagcgcggcggccatgtaccctgaccagtcgttgtatccggtggactcggtgccgaaggtggtcgagcgcattaacaacaccttccgccgcgccgatcagatccaatgggcgaaccagattgagccgggcagcaaaggctacaccgattacttcctgccgattgtcgccgatgcggaagccggcttcggcggcgtgctgaacgcctttgagctgatgaaagcgatgattaccgccggggccgccggggtgcacttcgaagatcagctggcggcggtgaagaaatgcggccatatgggcggcaaagtgctggtgccgacgcaagaagcgatccagaagctggtcgccgcgcgcctagcggccgacgtgctcggcgtgccgacgctggtgatcgcccgtaccgacgccgatgcggccgacctgctgacgtccgattgcgatccgtatgacagcgccttcgtcaccggcgagcgcacggcagaaggcttcttccgcacccatgcaggcgtcgagcaggcgatcagccgcggcctggcctatgccccttacgccgatatggtgtggtgcgaaacctcaacgccggatctggatgccgctcagcgcttcgccgacgccattcacgccaaatacccgggcaagctgctggcctacaactgctcgccgtcgttcaactggaagaagaacctcgacgatcagaccatcgcgcgcttccagcaggcgctgtcggacatgggctacaagtatcagttcatcacgctggcgggcatccacagcatgtggttcaacatgttcgacctggcgcacgcctatgcgcagggcgagggcatgaaacactacgtcgagaaggtgcagcaggcggagttcgccgcggtggatcgcggttacacctttgcgtcgcatcagcaggaggtgggcaccggctacttcgacaaggtcaccaccatcattcagggcggcgcctcttcggtcaccgcgctgaccggttcgacggaagaacagcagttctga

SEQ ID NO: 438554 - DNA, 639 bp, Serratia marcescens
atggtcattcaggggcttagacagcggcaatggcatttatttaggagacgctatatcgtggcagacaagtatatgaattttcaacaactttcatcatcggagtccagaagggcgtatcgaattgagcttcgacaaaatggctcatcgatagctttgattgctcctcacgctggaaaaattgaacctggcacatcagaaatttgtagatatattgctggagatgatcttacctactatctatttgaaggagctaagctaaataataattctgatcttcacattactagttcgcgatttgatgaaccacaaggtttagctatagctgaatccgcccgctttgttgtaactttccatgggcagtcgggtgaaggattattcgtcaatgttggtggtttagcaagagatctctgccaggtagtaattgagtctctcattaaagccggatattttgcagaacggcaagctgaccgttcgcttcaaggtttagataaggacaatatctgtaatcgtggattttcgaaacaaggagttcagctagaaatatctcgtggacttagaaataagatgatttctgatatatctgaaatgaagcgtttcggtcttgcaataagatccgcattacttcaatgtggtcaataa

SEQ ID NO: 438555 - DNA, 579 bp, Serratia marcescens
atggccactagttacattagtgaacacagtgctgaatactatttagtaccagcgctcaaaaacattttacaggaacaatatagccatatcgccccagtgtttccgtggatatctcgagagtttagcaatatctcaaaatatcttcataaagaggaccggtttcatgtgctggtaatgtttccgcgcaggccaaaaataaatttccctgatgattgtgaagtatatatcaccattaatgaagaactagatacttttaataaagtagggaaagaaaaaggggttccagtgatagctggttgccctagggctgtaaatatctgggacttatcaaattgtaataattacgcatgggtgaatcttagcaaaattaattattatgagtatttaaacccagtaagtagtttgaaaaaaaatggatttttgctagagaaagaggacattctatctcttgtgagaaatagtgctatttttaatttagagacttttgaagatttttttcgatatgcaaaagaaactcaacattacaggatgtatggaagtcaatataagcctgtatactttctgattaagacacactaa

SEQ ID NO: 438556 - DNA, 2610 bp, Serratia marcescens
atgctcagcaacgagtttttgcgctttttccaaactttagacgcagcagatgtacccggcgatgttagaaaaatggcgaacctagtgtgggataatatggatagtattatcccgttaggtaccgcgcagggccagcggattcgtcgcatcgtcgatctggctcagtcttcatgggataccctcagtccggaagtcctgccactgcttgagcagaactccgaacgtgtccccacgttcagtcggctaaaaaggctgtccgttggaccgttcagaggatttgctagacaagaggaatttgatctggattcgcgtttggtgctgatttatgggcctaatggtaccgggaagtccagtttctgcgaagcacttgaatatacattattgggtagcgttgctgaggctgaaagtaaacgctttcgtaatcaaaccgactattttaaaaatgcatacgtcaatcagttttctgcgcctgtgattactggcgttggagctcaagggcatgatgtggaaattgagaataacgaagcactgcatcgcttttgctttgttgaaaaaaaccgcatcgacaacttttcaagaattgcggcactagccccggcaaggcagaccgaactaatttcaacgttatttgggctggatgtattcaatgattttgtccgaaatttcactgcggagattgatggcagatacatcgatctgataggcgtaaaagccgctcaactggcagaaaaacgccgtacacttgagggggccatccaacaactggaagcgggtaagacggatcttgaaggactggtttctgaggaacagacgctggcttctggctaccgcgagggcctttcttttcagcagatgatgattgaattaaaaggggatgagcaaaatatcgggaccatccggcagcttgaggcagagttacagaaacctcttccgaacaagagtcacctgacctgtgcgatgttgaaggacttaagtggctctgttgaaactgtattggcggatctgtatggcaaacagaagcaactggcagaggcgagcctgcaggtttcgttcaaaagtttattcgaagcagtcgtccagttacagagctccagcccagaacagtgccctgcatgccataccccactccagcaagctacgaaaaacccctacagtcatgccagtgaagaattgctgaagcttgagtttttgtcagccttgcagggtgaaatagctcagttggaacaatcattcagccagcagatgtaccgcgtctcacaagttgtcggcacctgttgccagtttcttcctcatgaaaatgttctcgaaaggttccgagtagacaatggcatcgctttgtggcgtgatctgcatcaaccagcaggcaatggtgtcactccctggtctcttctggagaaacaggtgttgcagttggaagaagaagataaaaaaacagaagcaactgctaaattgcgggaatcccggcagcgtgatcttgtggggctgcgtgagtcagaacgccagataacaatattacagacaagaagaagtacgacagaaagggccatcgcagcggctgagttgttgattggtaactttgatacggaaaacaggcagcttattgaagaggttgtatttgaggaatccgttgtaagaaagaatagagaaatctcaggagcctatgcccggttcgtattgcagttgaacgcctataaagatggtttgcctcagcagttggttgcgaatctcggagacagcattgttactttgtacaatgcattcaaccgtaatgaccctccaggagaaaagctcgctggtatcaatctccccctgatgcagaatcagaggctggaggtggcatttcagaacaatccagcgcaatattttgatgctttacatgtgctcagtgaggggcatgttcgctgcatagggttggctattttgttggcaaaaaacatcagtgagcaatgcccacttttgatatttgatgatccggtcaatgctatcgatgacgatcacagagaatctattcgaagaacactgtttgaagacgccttctttgcagataagcaaatcatcctagcctgccacggagaagagttcttcaaagacatacagaatttattgccagcgccagtggctgcacaatccagaactttcagttttttaccacgtcttgacgaattgcatatccgagtggattttaactgtgcccctaggaactatattctttcagcgagaagtcattatggacgtaatgaaatcagggaggcgctgactaaatgcaggcagtcacttgaatcgctgatgaaggggaaagtctggcgttatgtaaacaaacacggtgacggtaacctcagtcttaaactgaggtcagcaactgcacctattgagctgcgtaatctctcagatcaattgaaaaaacaaattggtcgtgccgattttaatgacccaaataaaaatgccgtgttttctcccatcgaggttttgaccggctttagcggagaatcacgtgaatggcgatacctcaataaaggtacgcatgatgaaaacgacagggcagaatttgacagggcaactgtagaagccatgataggtgcaatcgaggcgctcgatcaggccgtgggataa

SEQ ID NO: 438557 - DNA, 582 bp, Serratia marcescens
atgccaacaaagttatacaagataggtgatttggctgatattcgctcaggctataccttccgaggggctgtcgaaccagtgtctgatgggaatgtacgcatattacaaattaaggaccttgagctggattggcagagagattatgaagctttaccggcgattagttgggagcaacgtgttgaaccacctttcctcagacaaggtgaaatagtcgttgccgccaggggtaaccggaacgtcgcggttgtctatagcagtgacatcccagtggtagctaccagccagtttctgatcgttagccttcgaagggaagaacacgagatagctccagaatacctgtgttgggtacttaaccacccgatgacacaacaaatgtttaatcgcagtggtacaaatatccagcttgttactaaagcagcattgttggatgtggagattcctgttccacctgcgcatacgcaacgacaacttattgagcttcaacgagtctggcaggaagaagataaacttatcagtaagttacagaataatcgccaccaacttgagctcggcatattgcaaaaattacttaaggataaatag

SEQ ID NO: 438558 - DNA, 1230 bp, Serratia marcescens
atggtgcctgaaggatggaaacatggtttagtcaaggatttggcaaatactgttatgggttatgcattcaaaagtaccgatttcgttccagatggtattccattgttgagaatgggcaatctatatcaaaatatgttagatcttgagcgtaaccctatttgtttaccaaaacagtacttgcttgatttttctaggtttattgttcgaccaggtgatcttgttatgtcaatgacgggaacaatgggaaagagagactatggattcacagtacagatacctgatagtgtacctgtactgttacttaatcaacgggtgatgaagttcgaacctaaaaaagatgcatgtgtcgaataccttttaaatttatttagaagtgaaatttttctaaactatttatactccttccctggagggactaagcaggcaaatttatctgcgaagcaagtacaagaattacctgtattgattccccctaaagcagaacaaaaaaaaatcgccaaaatcctttctatttgggataaggcgattgctaccactgagaaactgattgccaatagccagcagcagagaaaagcactgatgcagcaaatgctaaccggtaagagacgttttccggggtttagtgaagagtggacggaagtttatctttctgacttatgtttcataaatcccagtcgatcaaaaaaaccagaaaacggaattgtttcttttatctctatggatggagtatcagaggatgcgaaattaataaaaactgaagaccgatattattcggatgtttcgaagggttttacatccttcaaagatgatgatgtgttagtagcgaagataactccgtgctttgaaaatggaaaaggtgcttatgtaactaacttaaccaatggtattggttttggtagtacagaatttcatgtgctgagggctaaagaaggggttagcgcaaaatatatttactatcttactgtgatgacggagttcagagtgagaggtgaaatgaacatgcagggttctgctggtcaaaaacgagtaacaacagattatcttaaatcactcaaactcacagtacctatctcatttacagaacagaataagattgcaactgttttaactgtttcagaccaggaaatcgcgacactaacacaaaaactcaatcacctaaaacaagaaaaaaaagccctgatgcaacaactgctcaccggtaaacgtcgggtgaaaacggaggcggcatga

SEQ ID NO: 438559 - DNA, 915 bp, Serratia marcescens
atggccgttcctacctacgataaatttattgaaccagttctccgttttctggcaggtaaacctgatggcgtacctgctcgtgatgcgcatgaagctgcggcagatgcacttaatcttgatgataatcagcgagcagaagtgatagccagcggtcagttggtttataaaaaccgggcaggctgggcacatgaccgtctgaagcgagctggattatctcaaagtttatccagaggaaaatggtgcttaacgcccgacggggttaaatgggtacaggctcatccccagccactcgccgaaaaggaagtgaaccacttggcctttgatttcatgaacgtgaaattaaaacagcagccagatgctgtcgatcttgatccaagaccagctgcaccgaaccaggaagagctggcaaaaagcagccctgacgatcgtcttgatcaagcgttaaaagagctgcgggatgctgttgctgatgagttactggaaaacttgttgcaggtatccccagcgcgttttgaggttatcgtcttggatgttcttcatcgtctgggatatggcggacatcgggatgatcttcagcgcgtaggtggtactggagatggtggtatcgacggtattatttcacttgataaattggggctggaaaaagtttacgtgcaggctaagcgctggcagaacactgttggtcgtcctgaacttcaggcattctatggtgcgctggccggacaaaaggccaaacgtggggtatttattaccacctcaggttttacctctcaggcgcgagattttgcccattctgttgagggaatggtactggttgatggtgaacgtttagttcatttgatgattgaaaacgaagttggcgtttcctcacgtttggttaaagtgcccaagctggacatggattattttgagtaa

SEQ ID NO: 438560 - DNA, 228 bp, Serratia marcescens
atgactactatcaataacctcattcttagtgctgaagacccgcttatagacatgacttttatcactacatataccggcatgaccgacaaatggttttacaaacttattcaggatggcgaattcccgaaacccatcaaactgggacgtagttcacgttggttcaaaagcgaagtagagagctggatgcagcaacgtattgaggattcacgggggaactgtctgcaatga

SEQ ID NO: 438561 - DNA, 570 bp, Serratia marcescens
atgaattacacctctaatcctttctggcaacaacgtattaccgacaccttacagaacgcccttaaggcttatccgcgagtattaatgctgagggttgatctacgactacccaatgtaccagcagctacagatgctgctgtcatttcccgatttatagactctctgaaagtaaagattgcagtgtatctgcttcgtaaacaccgcgagggaaaccgaaagcgcatgaccgatctgcgttatatctgggcaaaagaatatggagaacgcaacggtaaaaagcactatcacgtggtgttgttgcttaatcgcgaagtctggtgttccgcaggcaactataacgatccggcttcactggcaggattaatcaaacaggcgtggtgtagcgccttacgggtgggtacacaggagtatgcaacgctggcacactttccggaaagcccgatgtactggattgaccgagggaataacgagcaactacaggaggcattattacgggcttcatatcttgcaaaggaccataccaaggttactggtgatggcgagcgtaattttggatgcagccagcgctga

SEQ ID NO: 438562 - DNA, 921 bp, Serratia marcescens
atgctgataagggaatatctttcaacctttccattgtctatgctcaggcgcatattaatatcgctaaatataacgatagcaaactcaaatttctcacagatagccaataatgccccggcattaatagattttatttgctcggatgtcgcttctgataaaataaaatctccttttgataagataaataaacttgtaaaagatgtagaaagtgacgctttctccgatggttgtattgtatggcttaaaaatgatatcgaggcatgccactatttctggtggaatctgatgcaactcgaatggaaaggtgtgtttaaactgctcagagcggataatatacatctctacagtgatgtggggagtaagcagcaagctcaatgcgtctttgatacattttgtttgcccagagtcgtaggcggacataaagaacgttataaatccatttttaccttattaagtttgttgccattcaaaaatactgaaataaatcttctgatttcacatttatcctgtaactacaagagagataaagagatatgcaggcatgaggtcaatgtcacctctttgatgaaaagcaaagagtcggtttctttttcagttcgttacttaaagaaaaaaaatatgttcctggctgatttagaacctctcacggagagtgatagtaaatacgcattaatcacacagctttatatgcttacaagagaagacaattttaaagagttagtcacttcgttgactaaagcttggtcacaaaagaaggtacgtgaaaaaagaaaagagacggataaaaaacagactgccgaacttctcggcttgagcaaagaaagcatcaggatgcttaaggaattatcaaaaaaacacagtatgggccaatcagaactgatggatctggctatacagtctttgttcgagcaaatgcaataa

SEQ ID NO: 438563 - DNA, 678 bp, Serratia marcescens
atgtctgaacagggacaccgctatgatcggttggccagccgtctcgccatcctggtcagtcgcctctttatgggcgaatcactcagcgtcagacaattggctcaggagtttggcgtttctgagcgcaccgttcagcgcgacttgcgtgagcgtctgcgttatctcgacatcgaatattcccgtggaagcttccggctcctggacgcccggggtccctttcgcaccaacagcgacattctccgctttgcccggataaccagcgtggcgcattactttcctactctggatcccaggctgctgtcggtgttgctcgacagtggtcaggattccccctgcattatctggaatgccccgccacgtcaggcacctgcgttgtttggtggtttccaggctatcgttcaggccatcattcgtaatcgccgtgttcactttctgcatcagggtcatcagcagtctgcagtggccccttaccggcttatctgtctggacggggagtggtacttggtggccgtatcgaaagatcgcattcaggtgttcaccctttcagccatcactgatgtggtgatgaccctcagcggttttgtgcgaaacagccatatcactcgcatttttcaggacccgagattcattcaggctctgccgcattatcagtatatcagcgggctcatcagggaatga

SEQ ID NO: 438564 - DNA, 465 bp, Serratia marcescens
atgaacaattcatcactcagcgcgttggtgctggtctgtggcctggttccggtcatggcgcaggctttcggaaataaggacacttggtccagcggttggggccaaggcgtatcagagtttgttatcaaggggaaaggtcagtcacagttatatctgtcctgtgaggattacggctcacagccagccacggtcatatttacggacgctaacgggcatgaagtcagtatggatgaggataaaaacctccaggtcagcattgacggtggagagaccattgatatcagtgagtctggcagtcgtctcggcagcaataacttggtgctggcctggacacagttgcgtaacggcaaacaagtctcggtatccggcgaaggtgttaagccagctaccttcacattagctggggcggcgaaggtgctgccagagtttggcacacacggctgtgtggcaaaggcatcacgctga

SEQ ID NO: 438565 - DNA, 360 bp, Serratia marcescens
gtgaaaatcaaacaattgttgatatccgcactgtttttactgtctgcttcggcgctggccgagccaacgtctccaataaaagtggagaccagtgattatgttcatcctgccggaacacgctacgccactgtagtggtcacctcgctggatgacagtgtgaaagttgaaaacattgacgttaatcggggcaactgccgcatcgacaacaaaaagtttatgtcctccgttaacaaggaaaccattctgccgatcactctgcgctacgggcagtctgtcaaagtgaatttttataatgagtgcatggcttcggaagtggtagtcaccaccgacaaaggggcgtggcgctacacctataactga

SEQ ID NO: 438566 - DNA, 213 bp, Serratia marcescens
atgatttttctgaaaatgctggtgaccgctttgggtcaggttctgacctggtacggcggtcagcaggcccgacagtttattgaaatccgctttcgtcaggccggtcacgatgacgacagcatagatgcagccagagaagcagccacgctgctggtgaccgcgctgataacggccctgatgacgcagatattacggatcctggacaacttctga

SEQ ID NO: 438567 - DNA, 819 bp, Serratia marcescens
atgaaattagctagccgcttcggagcggtaaacctcgttcgccgcgaccgccctctaacccgtgatgaactggcgcattacgtaccgagtgtctttagtgaagaaaagcatgaatcacgtagtgaccgatacacctacatcccgtccgtaacccttctcgataacctgcagcgtgaaggcttccaaccgttctttgcctgccagactcgtgtacgggaccagagcaagcgagaacacaccaaacacatgctgcgcctgcgccgcgaaggccaaatcacaggcaaacaagtgccggaaattattctgcttaacagccatgacggctccagctcataccagatgttgccggggctatttagatcggtttgccaaaatgggctgatttgcggtgagagttttggtgaagtgcgtgttcctcataaggggaacgtagtggagaaagtcattgaaggggcttacgaggtactggggatatttgaccgagtggaagagaaacgtgatgccatgcagtcgctgctgttaccactacccgctcaacatgcgatggcaaaagccgcattaacctatcgctttggtgaagagcatcagccggtaacggaatcgcagatcctttccccgcgtcgttggcaggatgagagcaacgatctctggaccacctaccagcgaattcaggaaaacctgattaaaggcgggttattggggcgaacgaccaaaggtaagcgtgctcatactcgtgccgtcaaaggtatcgacggtgatgtgaagcttaaccgcgctctatgggtgatggccgagaatatgctgcagcttgcctcatga

SEQ ID NO: 438568 - DNA, 471 bp, Serratia marcescens
atgtctacatccaatttatccccggtatttcctgcaaacgagcagcgagtcatccgtcgggcattgcggctgttggagaaataccagcgtcagccgagtgagtcatttacctccaccagccatacaaaaacctggctgcaactacagatggctcatctggagcgtgaggtctttatcgtgatgtatctcgacaaccagcactctctacttgaacgagaaatactgtttaccggcactctcagtcataccgaagtgcatccccgcgaagtggttaaattggccctgaagcacaatgccgcagcggtaattctggcgcacaaccatccgtcaggtacgatagaaatcagtcaacaggacaaacatgtcactcagcggatcgtaaaagcgttggcactggtcgaagtgcgagtgctggatcatcttgtggttgggaatgaagtggtttcttttgctgagcagggtttgctttaa

SEQ ID NO: 438569 - DNA, 324 bp, Serratia marcescens
atgtcatttacatcacctcatgaatgggggctacaaagcgatattacccctcgctttggtgcaagactggtacaggaaggcaaccgcctgcattacctggctgacagggctagtttgacgggaagttttagcccggcacacctgcagaaattagatctggctttcccgctatttgttgaacaactgggaaatatgttgcgtttcggtgagctaaatccacaccagcaacatcaggtgaccattcatcttccgggtttaacctgcatagctgatacccgtggtagctgtggctatgtttacatttctatttatccaaaccagtaa

SEQ ID NO: 438570 - DNA, 321 bp, Serratia marcescens
atgcaaattttatctgtaccggccacggtgcctgtttcgtcacgtccgtcacccgtacaggtttggcagcaactgttaacgtatctgctggaacaccattacggtctgacacttaacgacacgccattccacgacgacgctgctatccaagagcatattgaagcaggtattacacttgctgatgcaatgaatttcctggtggaacgctatgaactggtacgcatcgaccgcaaagaatttacatggcaggagcagacaccatttctgaccgcgaccgatattctcagagcccgccgagctaccggattaataaatacctga

SEQ ID NO: 438571 - DNA, 837 bp, Serratia marcescens
atgcaaacagaacctgacgtgttgacggaacacaatgagctcattctttcgaccagtatcgaacgtgtagtcactggacgcgattccgcgctaaaacagatagaacaactcattgaacagcttgatgccatttcacggttaacctcagaaattggcggtggtacagcgcaagactgggcaatgaagccagggcaccgctacgatagttggctgactgagaaggcagataaagcgatgcctgccgtcacccgcaatatcgacagtagtatctggcgcgatttgatgctgaagtccggcatgatggccttaatggatgcacaggctcgcgaccagtggcacaagaacctggaggagggcgatcttcctgctatcagtgaggcgaacattctcagtacttttgaacagttacatctgaacaaaatggaagtatttgagcgcgggatcattaacgtcttcaaaggcctgtcatgggattataaagccaatagcccctgcagctttggtaagaagataatcattaacaatttggtaactcataaccgctggggctttagccttaactggggttggcggagggatcagttggctgaccttgagcggatgctgtttttacttgatgacaaaccaatacctgacaaccgtggtgatatatctatccgattgatggaacatattcgggataatccggctaagaatgcttacgaggatgaatacttcagcatccgctactttcagaagggaacagcccatctgacattcaagcgtttggagctgatagaaatgatgaatgacattattgcgaaacactatcctggggtattagctaaaaccaactga

SEQ ID NO: 438572 - DNA, 1389 bp, Serratia marcescens
atgagttttgaatggaagaaatatactattgcagatgtttcaaaaaatgttgttacagggaaaacaccaccaggaactttagaaaaatatttcggtggggatgtactttttgttaccccaacagatatgggagataacaagtacattgagcgaacccaaagaaccttatccgatgagggggaagctaagctagcaaaacagagatttgaatgtgggatagttgtctcttgcatcgggtggcaaatgggaaaatccgcaattgttaaaaatgcggcagttacaaaccaacaaatcaatacaattattccaaacaatgagattatcgatactgattttttatactatatacttagtgataaaagaaccgagatattcaaccttggagcaacagcgacaagaacaccaattttaaaaaaatcactgttcgaaaaaattgagttttacgcaccaaaacttgaacagcaaaaaaagattggcaacattttatcttgtttggatgataaaataatcaacaaccggaaaatcaatcaaaccctcgaacaaatggcccaaaccctgttcaaaagctggtttgtcgattttgaaccggtaaaagccaaaatcacggtattggaatcgggtggttcacaggaagaggcgatgcttgctgccatgacggcgatttccgggaaagatgttgatgcgctgatggtgtttgagcatgaacatccagagcaatatgctgagttaaaagttacggcagatttgtttccgtctgcgatgcaggacagtgagctgggggagattcctgagggatggtgtcatgggcccttgagcgacattgctacttttgccaacggtaaagtcgatgtttgctctctgacgcctgaaacgtatatttctactgaaaatatgctggaaaatcgggctggtatttctacagcctcctcactgccctcagtaaatagcgttcctgaatttagatgtggacacgttctaatttccaatattcgtccttattttaagaaaatttggttggctcgtttcaagggaggacgttcggcggatgtactagcctttgaagcacgagattcagtcaatgtagaatatgtttacaaccttctttatcaagaggttttctttaatttcatgatgcttacctctaaaggtgtgaaaatgcctcgtggtgataaaaaagccataatggactggcagtgcgtacatcctgataagaaaatttcaaacgctttttcaaaagcagttggtgaatattattcattcattgaaattaacaatgcgcagaataaaacgttaacccaactccgtgacacccttctccccaaactcctctccggtgaaatcactctgccggaagtcgagcaggctataggtgaggtggaaaatgtataa

SEQ ID NO: 438573 - DNA, 870 bp, Serratia marcescens
gtgattaattttagttcaataatgaatgaacactctcacaagcccgttgtcgcaggggaatggtttacaattcagtggaaccctgacatcgccacaggcgagaggcttaatattggcgtctgctttgttgatagtatgggcacatcatttgtgcaaacgttagagtattttgaaaggattacatgtctgtattctcaagggatggtatttcatcttcagcttgcttgtcaggttgcaaaagaaatagcgctatctggtgaagtttttcacgagaattactgcaatagtataacgttcaaaaataacggttatgctcagggtgagtccgctgatgacatagtgtcttcattattctccaatgtagtcccgttatctgtaaagattgttaagcggaaagaaaaggtattctcacctattagccgcgatcgtttatacaatataatggatggttatcttaaaaaacatcttgagtatcaagagtactttgagatgagggatccatcccctctaaaaagaataaatttaggacatcaatcacagtctatctatctgccttataaagcaagaaaatcattaggcacgattgcctcagctgcatattcggatgaaaacttagccaagtgtcatctgtatgatgcgcagagagatatctctctggctctgagcaactatagtgagtatgaggatggggccatttttattttgtctccaaacaatgatctaaaagtggaaaagagagatcaggtagatttggaaattgataagttttgctggtatttaaagactcaatcaatagaaactgaggtcgatagtgatcccgagtcattatctgatagggcgattcactggtatcgaaggaaagccgcctaa

SEQ ID NO: 438574 - DNA, 732 bp, Serratia marcescens
atggctttaacactgttatgcctcattgattggcccgatggagtacaaaggcaatcatatgtcaaaatttttgctaaaaatgaaggcattggcgtttttaatgaagtgcttggttatctgctcacaaaatcacacgatcttccagtatcaccaaaggcaggaataataatactaccggaaggtattataaatagtattggtcaggatgtatccccgattgcttttgttacgtcaaaagtctcaggcaactctcctagtagttattataatataggtgatatgctaaattttgagagtctaaagaatattttagatagctgggataaattacataaaaccattgcctttgacgaatgggtagctaatcaggatagaaatctaggtaacttgattattgattcaaatagccatgtgactttaattgaccatagtaatatgcctgttgatttagtctggtctccagatgatttgtctattgaccttcatccgattaataaattggagatagctttgcgttcgactccgaccttgccgcagaaaatggatattgttaatagtgcaaatgggcagtcagaggcattaaatattgttattgatgaacttatctattggtgtgataagcttttgaataaaaaggcaaaggattgtttgttgacctttttggctcaaagggctctcatttcgaaagaaagattaagcaaaagacttggcgtactggtgggggtagcgtga

SEQ ID NO: 438575 - DNA, 966 bp, Serratia marcescens
atggctgatccggtcaaagttcataaaaagtatgacgaactaatcgatctgctgcttttccgtggtatggatattccagatcgaaaccatgctatgaagaaaatctctcaagttggttactaccgtttgtccggcttttggtacccttgccgtattcctcacatcacacctgagcaagtaagaaccagactggatcaagtgcgccctggaacaagttttcgtgccgtatatgacctttatctattcgataaaaaattacgcctcctgatgatggatgcgttagagagaatagaggtttatgttcgttcagttattgcccatgaaattggtgagctctctcctcttagctacctagatgatgccatcatcaatcctaaacacttgaagccaaggagtcttgggcgccgcagcgcaagggatgagtggctagcgaagcattcacaggaaatagcaaagagcagagaggactgtatcaagtggcacgagggcagatatgagggggttccattctgggttgctattgaagtttgggatttcgggctaatgtcaaagtattatgccatgcttaaagatggatatagaaataaagtgctgtctcgattgggtatcaccgcaggaaatggtgctattttccaaaattggcttagtgccatgaatgtgcttcgaaaccgttgtgcccatcattcgcgtatctggaataaggtcaacgagcctaaacttatgccgttacaaaaacacccatactttgaacgcctacaattgaatgatgatgcatatgaacggttgtatggcatgatcgctatactttggttattgctaaaagagataggccccggctccaattggattaatgatgttgctgatttgattgataataaaccatatctgccagggtgtaacttgacggctatggggttccctaataatgatggttttccgagagaactattcggccttatggagtaa

SEQ ID NO: 438576 - DNA, 210 bp, Serratia marcescens
atggaaaagctcaatattgaattatattctattctttccaaacaagaggttacgggttgggattggcaaccaattattgaagccatgaaaccttattaccgtgatggtgggcaagatgacagagctttgatcttgagaaaagtcgagactttaaagcttcagcctggggtggagtttcctgctgactatgaacggcttttggaaggctga

SEQ ID NO: 438577 - DNA, 570 bp, Serratia marcescens
gtgagagacagaacgcgcagctataccaccgatctaccccgcataggattgccatttcttgcgcacatgcgtagcaggctggcggatgctgaaccgggtacacagctttatacccagacagaaaacggtatgttgcataccttccggcaagccgacagctacgcgatgacaatcaacggtgttacgcgggctattcgcactacaaccactcaagccgggtatggcatgcgggaatggtacgtttgccctcactgcgccaagtgggttgcaaagttgtatattggcgctaaggatattgcctgtcgggagtgctggaaacttcactacaaaagccaaagcggagataggctggataggatgcgtgcgggcatacgccgccagcgcgtagcaatatggggaagtgacgagcgcactaataacctgtttaaccatccgtacaccttccaaaagccaaaggggatgcgatggaaaaagtttaacgagaagctggcagcactggtacaaagtgaaaatgactattggcaggcattcatcccggtagttgaccggataacgaagcgagcacagtag

SEQ ID NO: 438578 - DNA, 2451 bp, Serratia marcescens
atggaaggtcaaaatctgggtggtgtttattacgaagttggtgctgatatcgagccattgcttcaaggttcaaataaagccaagcaggctttagacgcaatgggcgataatgcgaacaaatcagcgaatggatttaaaacgctagaaacacaagcgaagagaagcaccatagccattaaccaggccactaacggggcttcgaaattccgtggcgtggctggtcaaatggggtatcagttacaagatgtcgctgtacagctacaaatggggcagaatgctttaatggtatttgggcaacaaggatcgcaactagcaggggcttttgggcctggtggtgcgatcgttggtgcgattattgctgtagccgcggcggtaggctcggcgttaattccgaatttgattgatgccagcacaagcgttgaagatattgagtctgccctggacacccttaataaaacgatatcattctccaaaaatggagtagcagctttaagcaatgactatgcattattagctaaaaccaaccgcgctttggctgaggcggtaagagataacgccttagccaagctagaacaagatgcgtcaaaggctggagatgctataaagggcgtcattgccgaacagagtagttggctaggttcatttggtggtggagttgcaaacgttcaggtgatgggcggagcactagccgcactaagcattactacagatgattactcggaagcaacaaaacaggcggcgcacgcgggattagcttttcaagcacaatcaaacacaattaatgctactgtcggcatgctggcggataacttcgggataagtgcagatcaagcatatattttagctcgccggatgatcgatgtagccaacaacccaaccccgcaagctgtcaatcagctaaatacttacctcgcgaccctacatagcactacagagggaggcagcaatgcgttgcaggattttaaaaccaacatcaccaatgctggggcagaagtttctaaaataactgttgcgctggagatgttcaaaaactcgatgaatggagttattgctacagcgcagcagcaagccaattttgaaggcatgttggagtctcttaagcagcaagaaattggctatagaaaaggggctcaggctgcgaaggaatatgctattgaacatgcagacctgaacgaacaacagaaaaaagaactcatagaacaaagccgagttacggaaggtgctcggaaggaatcagaagcccgcaaaaaggcagaacaagaggccagaaagcacagtaatacggtcaaccagtcagctaatactctatcccgcatggctcagcaatacgatattgcgcagcttaaggctcaggggcttgaaagagaggctgcacaacttgcagctgttcagtctcttggtgaaaaggcaacaaacgcagaagctatggctgctgctaatctagctggaaagctttttgatctgacaaaagcagaagaagcaagaaggcagtcgaagcaggggcaaaaattcgcccaacaagaaatagctagctctcgagctcaagttaatcccgccactggacaagccgttgatccgctagcgcaagtaaatttggaagagcagcagaaattagaggctttggcgcaatatcaagaaactgacaagcagaatactcagctttacgaagatgccaaaaccgcaattcagcagcaggctagcaacgaaagacagagaattgctcaggaagaagcagagaccaatcgccggaacctgagtgatttgttaggcaatacatcagatttttttggacaaatggcgggcgccattggtgattatgccggtgagtccagtggcgcgtataaagcactctttgctgttagtaaaggttttgccattgctcaagcggcattaaacctgcaaacggcaatcggtaatgctatggcccttccgtggcctgctaacatccctgcaatagctgctgcgattgcgcaaggaactcaactgatttcatctgtaaggggggttaactatggtggaggaagaaaaaacggtggcggtgtcaagcctggacgtgtatacgagtttggcgagggcggcctacctgagatgctgcaaatgggcggaaaaaactacttgttgcctggtaacaacggtacggtaatcagcaacaaagagctgatgggcagtaatggtcagccgcagatcccgaaagcatcaaatggtagccagcagtttaaaaacacagctaataatgacaggggatcggccaattctgtcagcgttgtgccaaatttcactgttctcgttgagaatcacggttctccaatggaagtattggggcagcagtatgaaaaaggtatgaatgaagacgatgttatccgtgttgtagtatctaacgtacagcaggggggagagatcagtcaggcattttcacgacaccaccaagcacctcgccgtgcggccgagtag

SEQ ID NO: 438579 - DNA, 519 bp, Serratia marcescens
atgacagcaatcaagaatcgagctccaacatctagagaacaaaaagtgaaagattttaacgccctcttaaatgcctcagaactgccagcacgaggcgaagacctaacgactagcgaatgtaccaacaatatagccagcgcgcggcaggaaggcgttgatggccccggcaaggctaaaagacggcgtgctatcaagttgaatcagaagaaaactgcacgattggttgctttatggcctactcttttcagcgtcgagaagccaaaaccgataaagatcgggatacataccgagctcctagccgcagcaaaagatagtgcgctacctattaccgatgcgcagatccgtgcctgtttggctacttatgcaaatcgttatagttacctagttgcgttatgtgagggtgggtgccgctatgatctggacggaaagccatgcggcgaagtcactgtcgaggaaagggaaaaggcaagagaggtgctactgaggcgcaagaacggcaagatcgcggcaaggatgtag

SEQ ID NO: 438580 - DNA, 462 bp, Serratia marcescens
atgacagcacaaatcgcagcatatggccggctggtggccgatgtgcagagcaagcccaccagcaacggcaacacaatggcctttgcacggatggcggtgtcactgccatgccatagcgcagagagcggtgaggcgcctttctggctgggcgtcgtggcttttggcaaacaggccgaggcgctggctcgtcacgccaagggcgatatggtgagcgtgtccggcaatatgcaggttagccaatggacagcgcaggacggcagcactgccagcggctaccaggtcgtggccgattcggtgatcagcgccagaacggcgcgacccgatggtaagagggggcagcaaggccaggctgataatgcgttacaaagagcaagggaaaagtcagcaaatcccgcagcgaaaggcgcatatcaacgcccggaagacttcgatcagacgccgccgtttaatgatgatttttga

SEQ ID NO: 438581 - DNA, 624 bp, Serratia marcescens
gtgaacaatattttcactcttaaccagccggagaaatccggcaagcagtacatagaagcggcaccagagggagtgaaattctggttgatgaaccgtgctggaaaatatgaaagcaaagagttggtgggctatgccgaactcataacgcgattggaagtaggggaactagacgataacccgttaggcccatggatttttagagcaatggctgagggaatggatctcggctaccactcgccaacgattggagagctgctgatttgctggcgccagaatgttgcccaggcgtttcttatcgaacaagcgtctgccaatgggtttgccgaggtagctcaaccggaaggtgggacaaaacgggctgttatctatcgcggcaggaacggcagtatgacggtttatccagatgccttgcgctttgctatggcaaataacattgagggcgtactgatagagcagtacggccaagagaaaggtatcgataacgccgtactcatgtataccgccatgctgggcattagcggtgagctttcaccgctaggacgtgagctgctaaccgatttgcacgatggttttatccagcagttgaatgatgaaggtttaccaccagcaccaacagcgcactaa

SEQ ID NO: 438582 - DNA, 204 bp, Serratia marcescens
atggataagccaatgttacacggaatggctcagcgcaccgagcggcaaaaacttaacgacgccagagacgccatgcgtaaggtgcaaatcctgctgtctgccgcccaacatctaacatcaacggaagaagaaacagaaatgcgagcagagcttctaggccttgtggaggatgtggttgccagaacaatggaggccatcgcgtga

SEQ ID NO: 438583 - DNA, 201 bp, Serratia marcescens
atgagccatgcacagggcctgaaaaaagcaaccaagaaggcggatcagctttgctcacttctgcatctcatcgttcactctggcggtgacctcggttcggttgaattaaacacacttctcacgttagcgctggatttgtcgggagagcctgcgtgttggttattggaagaacagcaactgcgggaggggacgcatggataa

SEQ ID NO: 438584 - DNA, 201 bp, Serratia marcescens
atgatcaataacgaaactttcgaagcgctagaaaaatgcgaacgactttgtgcgctgctggtggctatgaagattgctgtgccaagcatggaggatactgaagtacaagagctgattgcgctgtgtcgcgatctggccgagccagtttgctgccatttggccgagctggaaggaaaatcctatgacggaggtaaaccatga

SEQ ID NO: 438585 - DNA, 924 bp, Serratia marcescens
atgcataacttcgctgccagccagaaagaagcctttccgttggcaggctggtggctatccgatgttggcaacagagccaatgatagtggctctgtttatggagaggaaaatcagaaactttcaaactggaaagatagtggtgtagagcaattacgcaacgccggtgtggcgtggataaacagggtgactgtcagtcactctgtttcatcctcggatgagtttttggctttcttgcgctgttctgcttttagcttgcgtccgcaagcatctagcacccatgcggagaagttagcaccggggttatctggtttctcgcgttctacgcttgcgtctatttcgtcgagcagctcgtgcggaaatcgtatgcctttgtacgaggatctattgtttttatgtcctgtagccatagtgtcaacctatgtaatgtccatttcttgtgacaatacaggaaggataaaaacaagtgaagtgtttaaacataaattgattgacgtgtttaaacatcatgagataaggtatttaaacaccttatccacagataaggcacaacaaacgcacaaaatagcgacgccccagagtgctgtaacactaccgaggcgccttaccaccaacgatagaagaagtatcgaggtagctatgtcaaatcataccacacccattgctgggcggaatacgcacatccagcaacatgctcaaagccaccagcgctttgtttttatcttcgcagctattcgcagaaattcgacagaaatagctcctgaaatgcgccatgtctctgcattttctgaaagggaagcccggaaggcgctcgcatctgattttattcttttgttcgctggccgcctgcctattcatgcgctgaaccaatcagcaaacaaccctgcaatgagtatccgcatcgaggctgaaaaagatgatcaataa

SEQ ID NO: 438586 - DNA, 810 bp, Serratia marcescens
atgaagcagaaacgcatgcccgaacaggggcagggattcgctcagcctgaaaacagccagagtagtattgatcacacaggtttcgcggcaattgtgccaattattccgggccatattggtgaacgtgaaacaggcgttgcgagtgcgcgttcatttcataaagcacttggcgttgggcgcgtatttacgagttggtttaatgctcgagtagctcagtatggttttatcgaaggtgtggattatgtacgtgtagaaaatttgagcgcacccaaacgggtgtcctcaaaatctcgccagcaggtcgaatatgattatcagatcactgccgacatgggcaaagaattaggcatggcggaacgtaccccggaaggccgcgctattcgccgttacttcattgcctgtgaggcggaattacaacgcatcgcgccaaaggtttctgcaaaatttcgccgggaacttaaagcacgcattacagcggccagtcactttaagccgatgtgcgaggctctggctcttgcacgcactgagcagggcaaaaagacgctggcacaccactacaccaccgagagcaacatgatagccaggattgtgctgtgcggactaacagccaagcagtggacacaggctagcggcattgatggtgatccacgcgatagcatgagcgccgagcaactggagcacttttcttacctggagcaaaccaacatcacgctgattgagttggggcaggactaccaccagcgcaagaatgaactgacgcgcctatcacaacgctggctcgctaaacgattgggggggagccatgcataa

SEQ ID NO: 438587 - DNA, 939 bp, Serratia marcescens
gtgcctttgtcaaaattaaactgcttaaggaaatggctcagtattgaggagtcagcaaaatatcttgaaaggaagatagaagagcaggtggctgttactgacgttctgcgatttgcgcttgatgggcatttaactttatctgtgaacttgcagtcgccaaaaatagcaaaaaaggttgagataaaaaaactaaaaatgggagacacggccacccatagagaagtgtacgttcgtgataattggggggtatacattggagaatcattttccccaaatagattgatagatttcgcttcgcctgtaggaaatgatcttaccagtttgagcggcgtccaagataccccactgctgggcattgagcgtctattcgcagaagaacaatactgcgcttgcctgggcttaccaaaaccgtccaggaagcaggatataattcgcggcgtaatgattgacgccggcccagccggattgttccaattgcaacgttttattgatgtggattatgagctagagaatctttacaaatcagcggcagttaccggcgatgttaatcatcccgcgtttcaaaacataatctctatgttcaagagcattcaatctatcagtatgtgggatcctgatgcccaccaaagatacatacccgtccccaccttccctggtgatgtgtattttgttgcgagaacggcgaacctagataagcttgtggacatgcttaattccaccccagtaacgaacaagcccaagcagtcaaagaaaactgagaatgcccaggccaagtttatcaagagccttctgactcttatgtatgatgaagatgtagccagtaacccaagaaaacatattgacggtaagcttgcccagattagaaccgagctggaggctaaggggcttcactgcccgagcggggttactgttgaaaactggctttccgatgtggactag

SEQ ID NO: 438588 - DNA, 423 bp, Serratia marcescens
atgacaaactatactcaaatcatgaaagagattaataaaataatttctttttgcatggtaaaaggggtgcagcctcatgagttggttacatctatttttgagcgtgaatatcaacacatcgaaacttataagaaaggtgagctagttcatttcattttaacttattcagatattcatgatgatggtgtcaatttaattaaaatgaaatatgtctataacgatagacaacaattactatcgattgctcaaaaaattgattcctcaagctataagatccaatgggatcgcagtgaaaagcttgatgcactgctcagtaacttggcatcgcagttgcctaagaacagttcgattatcggtcaacttagagaggcgattcctgatgattttaaaactattttttatccagttttaaaagttgcctga

SEQ ID NO: 438589 - DNA, 801 bp, Serratia marcescens
atgagatacataattaataataatattaaatatcacgaagatagatcggaattggtctcggtgcatgacgatatcccgccgattatgctgacggccacactgaaccgcctgctttccacattagtcagaaacaacaatctggtgttatccagagagacgttgttgacgcaggtgtgggaggctcacggtcaggtcgcttccggtaataacctcaacaataccatttcaattttacgcaaggcgttctcttcgcttggcgaggaggagatcatcgtcaccttgccgcggcaaggttttatgttcaccgccgctacgatcaaaacggcggacagccaggcgcccgcagaggatccggctccggaggtgggccaggatgtgggtatcccctctgaggtaggctccgccgctgtacgcagctatacgcgtttcaaagccgccgggctggcggctttgttggttctggcgttgggcagcggtatttgggcgtggtgcgatgcaggttatccgtcgctcagcgtgatagatgtagggaaaattggtagttgccgtgtgcagtttgtaacgtcttaccataagccgggaagcaatcaggtcgatttgacgcacttgcgcaatatgctgaagcagcgaccgcagatacgatgtaatgaaccggcgctgttgctttactatgatactcaaacgttaacgccaaatggctctggtaagacacgaagctcttatttttattattgccctcagacgcaaattgcgaatgataaggcgcaatgcgagaatttttatgaaagctggggcctgtag

SEQ ID NO: 438590 - DNA, 492 bp, Serratia marcescens
atgaaagctggggcctgtagcgcgatgaaaaaacgatacggctatatcataaccgcgctgttggctatggggtgctgcgtcacctccgcatactttctgttctttgaaccgcagataccagcttgtcaggcggttgagcatgtgactgacaacattgcgggtaagagcatcgaacgcgttttactggtgagttttgttcccgaagggcggcggagtatgtcaatcctgctgaatggcaggctgtatgacggggaaaatcgctacgttattgagcgtgtattgcttgtggactacaagcggcaggggaaaaactacaccttgttggtcaaggataatatcattaagccccatgattctatggtacgtgaggatttgaaccgtaggttaccgatgaaagggacgcaactacactggcgtatcgagcaaattgatagccggcatttcttgtttgccgataaccatgcgccgttattggtgtgtgctacaccctaa

SEQ ID NO: 438591 - DNA, 1032 bp, Serratia marcescens
atgaaagacggtttgaaaataaattctacaaaccgtaaagttcttgagatgggctacagtaccgaaggtgataatggtggttatctgcttgtaaataacatttatgagtgtaaaagaaaaattatatctgcagaatctaaagatcagcatgatgatgagttaaataaaagacgctttactaaactatcccaattgtcaattggttacatatatgctttaagaaattcatcaatgtacaacgaggtgatttcttcagctcaatttttattagaggcttttggtgatacgctaccctcgcaatattataaatatcatttgcatatagcatcatccttcagaatgttgggtaagtatgctgatgcacaataccacttagagaagtgtattgcactatgccctgaaaatgacaaaagtacaattgcactttgttatgttcaacagctatatatatatgagatgactgaaaaagaaaaggctatagaactcgcaaaaaaaagaaagaaagaatttcgtaagaatagtaatgcttatattgtttccgaccaaatgatttcacttcaaaaagaaagatcagaacgtattgtttatcttgaaagattggctaagaaagctcgaaaacttaagtttcatacaactgcaaataacatcttgttggacgtcaatagagagaaaacaggtgttaaaaaaatggagagtttagaggaggttttatctcatgaaacctccccatataaccaatgcagagctagtattaataagtatcaaattattgtcgataatgggcaatttgaaaaaattaaagaagatgatattcgtatattaaagaatgtgtataattatctcttcaaccaacgccttgataagctttttaagcaatgccatgaaatattgtggcgtgttgctgaagaaaaaagaattcatgaggttatttaccttatttatcataaaggtcaaattatttggattcttaatgatgattctgaatttttcaataagtacgaaaacctatttgatgccttcataattcattag

SEQ ID NO: 438592 - DNA, 495 bp, Serratia marcescens
atgaaaaaatatctggtagcgtctgcactggcctgtacggtgctctcttcttctgcattttccgctgatggtgtgattaatttcaccggtaaaattgtcgataacgcctgtgtggtaaacccgacgctgaatgtacagatgggcgatgtggcggcggctgcgtttaaaaatgtgggtgatgagtccggcgcccggaactttgaactggagttgaaagactgcccggccaatctggaggctaaagtgatgctggaaggcgcggcggatgccagcaacccggatttgttcaaacttgatgaagccggcgcaaccggcctggccttgcgtattgaggggccggaagggaaaaacgttttcccgggtagtaccacggcgcacatcaagttgttcgaagggaataatttagtgccattcattgcggcttataaatcgacggataaagtcaccgccggtgatgctaatgccactatccaatttagcgttttatataattaa

SEQ ID NO: 438593 - DNA, 540 bp, Serratia marcescens
atgatgagaaaaatagcactgcccctgacgctgctcggcgccgccatgctggcaccgccgctgcaggcggcggatgggaatattaatattactggcagagtgacagaaagcagttgcgtgctggatgccaggacaacgcgtaaaatagatttcggcacccgccttgttaaaagtaccaacgttcaaatatatgggggtttttatatatacttggctgattgccccgatagcattaagcaggtgaaagttaggttcgagggaacaccggccgagagtaaaacaaagcctggtaaagtgtttgctatcgataatattaatgagcctggtgcagcaaagaatgttggtttcactttttatgatatatacagggaaggagtccctgattacgctcttggtgttaatgaaatcagtccattgatagatttaaaagagggggaggtaaataggttttcctttgggtatggatatactactgacggtctgatgcccacggcagggattgctcgatcacgggtgcagtttagtttgatttacccttga

SEQ ID NO: 438594 - DNA, 516 bp, Serratia marcescens
atgaaaaatatcatcaagggattgttattggtcggctacgggctgtctttctgcgcctatggtgcggatggaagtgtagatcttgaactgaaactcgttaatgatacctgtaatttgacatcagatagcaaaaatatgcaggtgttactgggggacgtttctcgtaccgaactaaaatctatcggcgcggccagcaagccggttgaatttaccattaaagtaacagattgtgctccggatataagggtcgatttcaatattcatggtaatgcagctaaccgacataaggagagaagaaatacttttgaattagatagtgactctgttgcatcaggggttggggtacaggtagccgttgatggtggcgaatgggagtcggaatacgcttttttaggccgtgctaacgctgatggtgcgatatctaaggtctttaaggctcgttatattgccttggatgataagataatccctggccgtgctaatgccgctgtgcagtttaatctgctctatccataa

SEQ ID NO: 438595 - DNA, 561 bp, Serratia marcescens
atgataacgacagtaaaaagcaagatgcagccgctgatattcctctgtgcggtaatgctttccccaccgctctacgcggcggacggcaatattaatgtaaccggccgggtagtggagaatgcctgtgcggtagccgccgagtcgaagaatatcatggtggattttggtgtgcaggcgggtaactccaggtatggtggcaagggtactcctcaagaaatatggcttctggattgcccttcgggggctaagcaggtgaagattagatttgaaggtaccgctagtagtgattttgtgtggtatgagaaagaatatactttcgcccccgataatcaggggcagccgggagctgcacagaacgtagggttcaggatatacaatagggatgataattcttggattaaagttaacggtgagtcgaaaccttatgagctgaaagacagcggttccggcagtgcgaatagacttgattttggtgtgatgttgtcttggcctgactatagcaagcctatcccacttggtgaggcgacgagcactattcagttcagcattctttataactaa

SEQ ID NO: 438596 - DNA, 540 bp, Serratia marcescens
atgaataaagcaatcaaaagaatcgttcagggtttgtcaatttgcctgattggcctgacctgcgcggcacaaggtgcagatggcaccatcaaaaccaaagtgaagtttattcagttcacctgcaacctgacggccgccagcaagaacatgcgcgtgccgatgggagatatcaaccgcagtcagttggctaaaaccgggagcctgagttcgccagtgttgtttgaattaaaagcaaccggctgcccgacaggaggcgaaactaaagttggcgtgcatttttcaggcatggcagcgccggaggatggggaggcttatgttttggataaagactccggggcgtcgggtgtcgcagttaaaatagcgactgaactttacggtaagtattatttcattaggcccaatgattctagatatgaaccttatccaaactccgacggtgaggtcaccctgaagtacgcggtacggtatgtcgccctcaatgataaggttacgcccggtactgccaatctgacaacccaaattgatttggcttactattga

SEQ ID NO: 438597 - DNA, 144 bp, Serratia marcescens
atgcgtaaagctcgattcaccgaacaccagatcatttctgttctgaagtccgtcgaagccggacgtaccgttaaggatgtctgccgtgaagccgctatctctgaagccagctattacaactggaaagcgaagtttggcgtctga

SEQ ID NO: 438598 - DNA, 126 bp, Serratia marcescens
atgagcgtacgccaggcatgcaggacattatcgctgagtaggacggtctatttttaccagcccgatacccggcgctatgagccggtgatccgggcgctgactgaactggcggagcgctatccgtga

SEQ ID NO: 438599 - DNA, 528 bp, Serratia marcescens
atgctggtgacgccagaggcgatgaagcagagctggtccatcgattttatgcacgatgcgctggtgtgcggcagacgcttccggacgttcaacgtggtggatgattttaaccgcaaagcactggcgatcgaaattgacctgagtatcctggcgcaacgcgtcgtgagagtgctggacaggatagtggcaaaccgcggctatccgcggaagatgcgtatggataacgggccagaactggtctcactggcactggctcaatgggccgaagaacatggtgtgttgctggaatttatcaagccgggaaagccgacgcagaatgcgtttatagagcgttttaaccggacatatcggacggagatactagatttttatctgttcagaaccctgaatgaagcgcgggaaattacggagcgctggctgactgaatataacagcgagcgacctcatgaatccctgaacaacctgacgccggaagagtaccggctgatggctgaaaccccggaaatctcaaaaagtgcgtggaactaa

SEQ ID NO: 438600 - DNA, 207 bp, Serratia marcescens
atggaacgcttcttccgcagtctgaaaacagaatgggtgccagcggatggttacgcaggcaaggacaaggcccggcgacaaatcagcggctatatcctgaattactacaatagcgtcaggcctcatcattataacggagggctgacgccggaagagtcagagaacagataccgtttttactgtaaaaccgtggccagtattacttga

SEQ ID NO: 438601 - DNA, 909 bp, Serratia marcescens
atgattgaaccattaggaaatttcaatattaacgaagcatccattacattatgggtctttaggaaaaagatagaacagaccctgcctatatattctgctcgttgggttagtatttctgaaaacttagaaaatgagttaaaaacttttataaataacgaaaagttgcgatatacagaagttattgattatggtttgttagctcaaaataatgaggctagcttacttaaaatagggagcgatgaaactgagatagataaggtaagattatgttcagctaatcagactcctgaacgaaaagttcaagatgttaaacatctaaacaattgcgatttttatgcagtaaaattagtgcatgataatgacacgttatactgtataaaaaaaaccgatgcttcttggaaaactaaaaaaaagaaaggtttgaagtcgttggtatttgaagaacatactcttgcgattgatgacacacctagattcgatatagcaaagtgttttgatttttttgttttaggaaatgatatctttattaaggaaaaaggtgtgtttgagtctcttttaagctataaacaagcacatataactaactttaatacgcttaccgttgagcctgaattttcagggctatttacagacttggctcctcttaatgagtatgtaggtaataatgcaatgcagttacgtagagcatcagctattcaacaaaaaggatattacaaaaacggcgcgttcatggccagtttagttgcaaatgctcagcgttttagattaaatctgcagtttgatccacatggtaaaataatagttactaaagcatgttgtcctgatatttttcaggcgttgttagatcatagattacagtctcattaccaagctcatttatatgatgtgcccaatgctcaacctgtatga

SEQ ID NO: 438602 - DNA, 243 bp, Serratia marcescens
gtgcccagcccggagacgccttcacggccgatctgcggcttcaccacccagaaggcggaatcctggcgcagcaatttctccatgccggaattgagacgcgcctgcaccatcaccttgctcaggtcatcgctcagcgtgacggtttccaccaccccgacgtcaacgctgcggcttttgattttggttttacccgcttccagcccttccgccgtcgtggtcaccagcgtcaccaccggcccctga

SEQ ID NO: 438603 - DNA, 483 bp, Serratia marcescens
atgctgtatattccggccaacctgatgccgatcatggtgaccgaggcactgggcaacaagatgaactccaccatcatggcaggggtgatcctgctgtggggaagtggctcttacccggtggcgatggtgattttcatcgccagcatcatggtgccgtcgctgaaaatgttggcgatcggctggctgtgctgggatgcgaacggcaggaagaaaccgcgcgccgacagcgagcgtatgcatctgatttatgaagtggtcgaattcgttggccgttggtcaatgatcgacgtgtttgtgatcgccgtgttgtcggcgttggtgcgaatggggcagttgatgagcatttatcccgcgacgggcgccgtgctgttcgcgctggtggtgatcctcaccatgttcgccgccatgacatttgatccccggctgacctgggatcgcgcaagtgaaacaatcaacaaggagccgcaaggtgacggaaaataa

SEQ ID NO: 438604 - DNA, 186 bp, Serratia marcescens
atgccacagttaaagtttagccatatatatgacagcaaagatagcaaagaaaatagttatgaagaaacctatcaagcccgcatttttgatttgattcaagaacggagtttgtatgcttttacggtagttagcagttccattctcaacgtcgatttgctttatctccccctgatcatcagtatctga

SEQ ID NO: 438605 - DNA, 324 bp, Serratia marcescens
atgaagaaacacagttcaactatcaattatgatccctaccgttacaacggtggcatagcgcctgaagcgggtctggtctggagcggtgaaagttggggatggccgactaccggcatcagcattggtggtgcggaagaaactctggttgtctggccaacaggtgacacatcactttccgaagaaaccaaagatctgttggataacgacatttgcttggtctgtggtaagaaaaactgcccctatatcaaaacggaaaagtcataccaattgttgcgcgatgcgataagagccggtgatatgaagactgcaaaaaaatccacatga

SEQ ID NO: 438606 - DNA, 204 bp, Serratia marcescens
atgaatttacttaataaaattctttccaaggtgcttgttgggacaagctacgccattgggagcatgacattagttattattggctattttttgttcctatcggagtcgggttataaatatgcctttgctttactcacctgtttggggtttgttcttggctacttcgtatacaaactggcaatgcggttttatgacggtctatag

SEQ ID NO: 438607 - DNA, 648 bp, Serratia marcescens
atgaccaaaagtgcaaaagatatcgcgcaggatatggctgatgcgttaaacacgaaaagccactttgcaaccggatttattcaaggggctatagcgtttcctgtagacattggttatctggcatatgattttttagatactgataaccgctcagcaaaccagaatgatacagagaggatgatccggttgattaagtccggtttagctagtaaagaaagcttgtctaaaattgctcaaatggtagccgatgactttctcaaaaaagtggatctcgaacgcattaaggttatcgttgagaaggggtccggtaagttccttgggcggttcatcagtaatcaactacttggtgtaaacctcggcatggtcatttccgaaaggtttgttgttcaatatgctgctggtctttcactgacgtctgttttgacagttggtgcaatgaattctcgggcgattcatacatcacgtgatcttagagcgagaaacccgcagttgtatgaccgtcttagaagaatgggtaatcttgatcttctttactttttagtagagaagcgaacacgaccgttcgaggatgcaattgctgtatggcatagaagccgaagcgagtttgataggattactgagcttttctttcagaaggtagcaaaatga

SEQ ID NO: 438608 - DNA, 147 bp, Serratia marcescens
atgatggctttctgcttcactctcgccgccatttgggcggttgtcgcgtttgggttggttggctgggttgcctaccgctattgcaaattctgccgcgcctttaatcgcgcggcatccgttccacctgaattacgtacttacgattaa

SEQ ID NO: 438609 - DNA, 849 bp, Serratia marcescens
atgacaccacaacagcaagcacaacaatgtttaaatagaaattgcctggttttggatacagaaaccacaggcctcgatgataaagccgagatcatcgagatagccgtaattgacgccactggcaaggtactgctgaacacgctggtcaagccatcaaaacctattccggcagaagctaccgcaatccatggaatcactgatgaaatggtaaaagatgccccaacatggccggaggtcaaccctcagctgtgcagcttgatcagtggaaaaacgattgcgatttacaatgctgaatatgatctccgcttgcttgaacagacagatcgcatctggaaggtaacgccgaaaattagcgtaatgccacagatcgtatgtgccatgcatgagtacgccgagttttacggccagaaaagcgaccgtggcgggtacaagtggcaaaagctgacagccgccgccgaacagcaaggtgtcattatcgaaggaacgccgcatcgcgccctttctgactgcctgacaactctcggcgtgattgaggcaatggcagccggaagtgttcgccgcgcatcgcacggaataacggcacaaaaagctgtcgatatccttaacgggttatttcaggtagacccagatgcgatcacagctctggttgataatcgcgttaagtgctctgaatatttcgccaaaaagacagcggcaacggtaggtatctgcgacagcacctatatcatcggcatgattggcgtcatcaatgcgctgatttcccctgaagtgatagcagcaatttatgatggtaatgaactgaagggtttcgctgtagctgatgtcgtttttgcaggcggtgacgcatga

SEQ ID NO: 438610 - DNA, 2151 bp, Serratia marcescens
atgacgaaaattaatgaaagcggccaatgggtagatagcgtttatcaaatccagcgcggcgacaaagtgatcgggggccgcgatggcgttgcaaatatccaaccgcagcagctggcgaaccgcacgcagtatctgaaacaggcggttgagggattatccgtcggcgaacagccgttcgacaacgtggaaaaggcacaggcaaaaatcaatgacggtagcattccgctgaatgcgcgtttttccgtgcgtattgaaagcaccgatgcatggctggccgaatataaaaatatagctggcgtcgctacggcaacgggaaaaacgttaccgtctggcgagctggttaaaaagataacggattatttttatttaaacgatgcaatcggtaatttgctggttgatatggttgatgaagattatttctctgtgtggcgcttattcgataatggcgcattcggtacgattaaaagtctgttatcgccacagggtatatttttggacgacctgaaaattacccacgtcggcgatcggcccggcatcacttatcaggatgtggatgattttgtcgttgaaatcgtcgggcgcgatggagtaacagcgccaaaggcgctacaggggtatggcaaattttccaccctcgaaacgtcggacgcctggctacggcttgaggacgtggacggcttttaccgggactatatcgatctggatggcaacccgctcaacgccggcagcggcgacgtgagtgagttcgatttagtggcgcatgatgcgcagaacaaagcctattcacaatctgtacgcgacaggtacaacgccgatcttcagcgccttgtgactgccctgaatcacctggttatgtacagccagagcctgggcacacagcaggaaggctggccctccctcaccaaggagccaacggcagactatgacaacctgatgctgggcgacagcgtgcgccctaaaagccgcacagctgctgagtttgttcctgtgggcgatgcagtgcttaaaccgctgaaagctgtagttcagtctggcgacggaagtaccattctgaccgatgagcaagttgccgctctgggggtaggtgccgggaatgaaggtgaaggcggtgcggcgctgacaaatttcctgcgtaagctatggctgcaaaaaaattgcctggagcgcgatccggggcgacgctttgtcgtatcaagcactggcgttaacggccgcactatcgaagaactttcaaaaggcgctaaaccggagttataccagcgcccgctgcaagcagtgaaacaagtcaaagctatcgccgatgggcttggcgtcagttatgccattgccgcattcattttcatccaaggtgaatggaactacaacggcacacgcggcggcgtacagaccaaagacggatataagaaagcaatggggacattattccctgacatgacaaacgatatggcgagcggtattgccgggcaaaaatcaccgcctgcgattttcatgtaccaaacaggggctggttataccgtcgataaatatgaccttggcataggcatggcgcaatgggaattctgcaaagaaaacgcaaacgcctacctggtgacgccggcttatccattcccggataagggcgggcatttgacgtcaaatggctatcgctggatggacatgcaatttgccaaggtgatgcaccgcgtactgaatgaggggcaaggctgggaaccgctcggccctatccgcatcgtgcgcatcggccgcgtggtgtatgtgctgtatcacgtccccagcccgccgctgcaattccgcccggcatatgtcggccgcgtgccgacgatgtatgccgataagggattccgtatcactgacagcaccgataacagcgtgccgattgagtcagtggaaattgccgccgataccattataaaaatcacgctggcagcgctgccggcaggtgaggcaaaactctggtatggcgatagaacaactcatttcggcaacggtaacgtttttgacagtgacaattttgcatcactggcaaattacgagtatcgggcggggagcggccaatatgcggatgaaaatattcctgatctggtcggcaagccctatccattaaataacgcatcggtgcaattctgcatgccaattgaaatcggagagtaa

SEQ ID NO: 438611 - DNA, 741 bp, Serratia marcescens
atggtcatggtcattaaatcaaacgttgccggcgcatctatttctaaaccggacggctggaatccgccattcagtaccgaagggctgaaatatgcaaatatctttggtcgcggaaatttgacggcgaacctcgcccccggaggcgcgccagcagtcccacacgggaaccccattcagaaaggcgaggctttcgagttttcgacaagtaattacatcgatacccgcgtgccgacaagcgaaaaggcaacgctgatttctattgcgaccgcgccgtcgacagcgacaagccgctgtttcctgatttccagtttcaaaggaagcactgatgcgggtaaatcgctgttgatgcaaggtgctgcaccgcctgcgatctatgtctactcgcattacaaaggcactgatgcgagcggaacccccttcaataacgcctacagtttgggaatgaataccagaagcacagacagcacccctgctttcttccatggccgtgatgtgggcaaggggctattaatcggagacatgaccaacgaccaggtcaaaactgttacccctggctggcctgtggcgtcgttcgccaatccagccctcacatatcttattgggcagagttgggcagaaggatcggccccacatcttaactacgcctcgctgatttatgaccgcgcgctgagtgatgacgaaatcgcgcaaatttatcagtacttccaggggtattacagccgccgcgggatcaccatttaa

SEQ ID NO: 438612 - DNA, 1092 bp, Serratia marcescens
gtgagcgagaaaaaatacagcgcagtgatcaccgctgccggcgcagaaaagctggcaaatgcagctgttaccggcacgccgatagccatcaaggaaatggccgtcggcgacggcggcgggcgtctaccccagccaagcgccaccaacgccgggctggtcggtgagcagtatcgcggtgagctgaataagctggtgatcgctgacagtgacgccagcgtcatcgaagctgaaatgatcatgccaccgcagcgcggcggcttctggctgcgagagctggcgctgtacgccgacgatggcgaatgcgtcgccgtcggcaacatgccggagacgtataagccgctgctggcagaaggttcgggccgcttccagataatcaggatgcaactgaaggtcagcagcacggccgacgtggagctgattgccgatccgtcggtaatcctggctaccgctgaggacgtcaagggtgcagaagacgcggccaaggactacacggacgaagcgatcggcgagctgagcgagagcgtaaacaaggcgatcgccgccgcagtaaaaacggcaatccgcgacgcctgggagcaagacaaccctgtcggctcgtcgcgcctgttcaaccagaacgtgaaccctaacactaaatggccgtggtcaacatgggagtacgccggcgaacacctgacgatcagaacggcaaaagcggacggttcagacgttggcacccagggcggtagcgatacggtgagcatcacgcgcgccaacctgccacagtctgtgctgaatgtgtcaggttcaaccagtgagcaaggggcgcagacgctgcaaacaacgccggcagggagacacgttcaccccggtaaatacgtggaaagtaacacgtcattggatggcggtggatcagaccgtagaagttggtcaatcaattacggttacaaggatgaaggcttaatcggcgaagcgcctgatcatcagcacgaggccactgtgccagcgcatgcccataccgtatgggcgcaaaccgaagcgctcggccagggtcaggcgatcaacgttgtcgagcgccataagctgcaaatgctgtggcaccgcgtagcctga

SEQ ID NO: 438613 - DNA, 225 bp, Serratia marcescens; identical to SEQ ID NO: 427041

SEQ ID NO: 438614 - DNA, 222 bp, Serratia marcescens
atgagctggctaaaatcctttcttgtgaagttcgttaaatttgttggccggcaaactgctgacctggctgaatccatagtcattggcctgttctctatagcggcatttgttgccttgttctggtttgatgagtggtggaaatctatctctgcggctatcgcgaccttctttgccggcttcctggtgagtctggctataggctggttaagaggggaaagatag

SEQ ID NO: 438615 - DNA, 294 bp, Serratia marcescens
atggatatggattggttaactcaagatcaggttgtgttacgaacaggagagtatgaaagacacgaccgtgctgagctaaaaaccgaggtaagaatctgtccctccactggcgcacggtggtctgaggccgagagtctgagaaaaagccagctcgcgaaatacaaaatcacatacaccaacacaaaaggcagaaaaaaccgcaccgttcccattagcaaagagaaagagctctatgagtctctgcctgatgataaaaaaggccggttgtttggtgattgttatggggcgttctga

SEQ ID NO: 438616 - DNA, 135 bp, Serratia marcescens
atgtgcataacgcattgtcatttttatatctgtatggccgagtacgtgttgcaataccaaaatattaccaccattcatcataaagtgactggcgaacgtatgtcgcaaaacgtgagtcaactgacctgttggtaa

SEQ ID NO: 438617 - DNA, 255 bp, Serratia marcescens
atgaaatcgaagcgtacatctcaccgcaacacaaataataacggtaaaggcaaatcccgtaagaaggcttgtaacaaacctgtccagaatgtagacaagatagaaaaatgcacaaaatatatgcgttttttctattggttgttcaggttgtatcaacttttctttggtagcgacagtgactcactcggcagtcggtcattgttcctttaccttaaggaggcgcttaaggcactgattacaaaacactcaaactga

SEQ ID NO: 438618 - DNA, 1743 bp, Serratia marcescens
gtgaatataagaaaagacagcaaaagccgtttaaatagcaatgatgattctctctctatttatcattgtattttgtcgttgctgctcttggtcggtttggcggtgtttttcattgtttttttatttgcctctataggccatgccgcattacccagtgcgggtcaagctatccgtgatcttgagaatgcccgtcccacgctgccagcccccgttagcctaaaaaatccgtcgccggtaacggagaaaatgacttcgccagcagatgataaggacctaccgcgtctcttggtaaagggattcgtcatcacaggtaacagcagcatccccaccccgaggatatcgccgttgctgaatgattttaaagaagaacagctcacgctaccgcaaataaaggaagcggcaaggcgcgtggctgaatactatcataagttgggatatatcttagcaacagcctatttacccaggcaagaaatcactaatggccaggttcgtatagaagtaaacgaaggtcgttatgggcagatacggttgaataaccgttcccgtattaaagacagcgtgctacagcaatcattatcggctgtcaaaagcggcatgccggtcatcggccccccgttggagcgcagcttgctgttattaaatgatacgcctggggtaaaaattaacagcatcctgacgccgggcacacagcctggcactacagattggcaaataaacgcactccccggcccatggttcagtggttcactgcaggcagacaactatggcgatacctacaccggtcaatatcgcggcggagcggcatttagcgtcaacagcccgttacggcttggcgatctgctagacctccggctactgagcagcaataaacatcaacgttactaccgcgctgcctaccaactccccatcggcccactctcgacgcgtgtcggagtcgcacattcttatatgaactatcggctgggaaaggatttcagtgaattgcaggcacacggtaacgccagtattagcagcgcattcatttcccagccgcttttgcgtagccgaacattgaatgttaacactcagttgcagttcgacggtaaagcgctgcgggacgatatcgacctgttcgacaatcgcaaccgaaaacgcattgatctgtggactgccgaagttagcgcgaatatgcaagaccgcctgtttggtggggggcaaagcgctgcctcactggcttatagcgtcggcaatttacacattggagatccccgtgcccgccaatgggatcgattgacggcagcggcagagggccaattcagcaaactgacgctgagcgctctgcggctgcaaaatttgaacgacagtctccagctctatgcccaattcaatgctcaatgggctcccggcaatttggactcctcagaaaaatttaatatcggcggcccctatggcgtgcgcgcctatgcgcccggcagcggcaacggcgatttgggctggcaatccagcttggagctacgctatgccttgcgagccggttggcaactcagcccctttatcgatcatgggcaagtgcgcatcaacaaacagccgtggactcaggaaaaaaacgtcgcccatatgtccgccggcggagcggcattagcctggagaggcgccagtcatcaagtatcgctgaccgtcgcctggccgctatcagactcaggggtaagtgacacgacggcgaaatcaccacgagtttggcttcaggctgccagatatttctga

SEQ ID NO: 438619 - DNA, 2793 bp, Serratia marcescens
atgaataaaatctatgcgctcgtctggaatcccacacaagattgttggaatgtggccagcgaaaactgcagcaggaaaggcaaacagaccaataagcgtcgtttggctgtggcgctatcgctgttgagcctggcagctctggaacccgcccatgctctgccgaacgggcaaaatattgttgccggccaagggagtatcaccgctaatggccaacatatgacagtcagccagcaaagcgacaaactcatcacccagtgggataatttcaacgtcggtgccgccgaaagcatcacgttccaacaaccgggtagcaattccgtggcgctgaaccgcgtgatgggcgttaacggcagtgatattcaaggaaaaatagacgccaatggcaaagtctttatcgttaaccctaacggcgtggtgtttggcaagaatgcccaggtgaacgtcggtggtctggtggcctctacgcgtgatatcagcaatgccgacttcctggccgggaaaaaccgcttcacaggtaaatctcaggctgaagtgcgcaacgaggggactctgaccaccgctcagtccggcagcgttgccttactcggcgcccaggtcaacaaccagggggtgatcctggcaaaaatgggcagtattgcacttggagccggggatgacattacgcttaacttcgatggcaacaagctgttgagcctacaggtgaacaaagcggctgtcgatgcgttggtgcaaaacggcagcctgctgagggctgaaggcggccaggtcttgatgacggccaaagctgccggtgatgtgctgaaaaacgtagtgaacaaccagggagccattgaagccaacacgctgaataaccaggcgggccgcattgtgctggatggcggtgacagcggtgtggtcaacgtcgccgggcgtttaaacgccaatgccgataccctcggcgatggcggtaccattgaaacccgaggtaaacacatgaaggtaaaccttgggactcaggtggctacccgagcggcatccggcaaaaccggtacctggaagctggcaactgccgaagttaacgttggcgatgcagctaccgtgacgatgaaagcggataccttgatgtctgcactggaaaacagcaacgtggctttgaccagcacccggggcgatgttgccgtttccgcgccgataacctggaagagcgccaatcagttgtcgttaacggccgaacgcgcagggatcaatcttagcgcaccgttgaaatctaccggcactggcggtggattggcgcttaatcacaaaacagggtatgccctgaacaatgacacctctctcactctgtccggtgcaggcgcctcattcagcatcaacggtgacagttacaaggtgattcaaagcctggctcaattacaggaaatcaatcaggatttaaacgcgcgttatgttttgggcaacaacatctcttcctatagccgtatcaacgccattggaggcagtacaacgttcaacggcagcttcgatggattgggcaacaccgttcatggcctgaccatcgtcaataatgggcctttcgttgggctgtttaactcttccgccgggcacctcagcaacctgaaactggactcgctgcaattggccgccggtgataaggcgatgtattcaggcgcgctgactggcataaatctcggcaccatttccaatgtaaaagcaacgaacatcagcattagcggcgttggcgaggttgggggcctgattggcgtcaattttggcgcactggcgcactcttcggcatccggcaagatcacaggcaacagcaacaattacgctgtcggcggcctggttggcaccaattacggcgacgtacttgatagccaggctaatgttgctataacgagtaccgctaacagcattggcgggctggttggacgtaacgcaggtctgattgccgattcttccagccgaggaaaagtcagcgcttcaggctatgaggccaatatcggaggactcgtcggcattaatgaaggcgagattcatcacgcatccagtgagagtcaggttatcggttaccgcactggcgcaatcggcgggttgatcggatacaactatggcattctgaataatgcagatgccagtggtgaagttaccgataatagcggccgcaacatcggcggattgatcggtattaatgataaaaatgcacaagtgcatacggtccgggcagcgaaccacgttaccggtggcaataatgccaatattggcgggctcattgggcaaaacaatgctcgtgaactcgtcaatgcttttactaataacagcaaggtaaaaggaggaagcagtagtcagatcggtggcctgattggccataaccaaggcgcgatttctcaggtgactgcaataagcgacgtggaaggaggcgccaacagcaacgtgggtggtttagttggcctcaacgatatcaccgcaaccggtggtattgaattcgctaccgcatcaggcaatgttgtcggcggtacaggaagtgccgttggcgggctggcaggcagcaacgccagcgtcattcgcagttcctcagcctccggtagagttaacagcctcggcgtatcgcagcgcggcggtttggtcggcgtcaatatcggcctgctcaccgattcatccttctctggtaccgtgatgccgaagtcaatcacaggtcaatgggtcggtagcctggtcgggataaatatcaagggggtagcgcgcaataataccgcctataatgccccggcaggccagccactggtcggccaaaatctgtatggcattgtcgagtaa

SEQ ID NO: 438620 - DNA, 2226 bp, Serratia marcescens
atggccgatatcgtccctaacgttgtcgtctcgatgccttcgcaactgttcacgctggctcgctcgttcaaagctgcagctaacggcaggatttacatcggcaagatagacactgacccgaccatcccggagaaccagattcaggtttacctggagaacgaggatgggtcgcttgtgccaatggcgcagccgatcatgattaacgccggcggatatccggtgtacggcggccagatttccaaatttgtgactgtcgaaggtcatagcatggccgtttatgatgcatttggcgctcagcagttctattttcctaatgtgcttggttacgatccggatcaattcaggccagcttttgaggatttcgttaacggactcgcttcaccagatgggccaaaatatgtaggcagatgcccagatgtggctacgcttagaactatcgagccaacaatgcctaatcagaaggttgacttggttagatatgcatctggttatgcggggggcgggagtgatatctattatgaccctaacgatactacaacgcctgacgatggtgttatgacgtttgtcacccctggcggcgctcgatggaaacgaccaaacacaggtgaaatcccacttgaatgggctggatataatccatcgtcaagcaacgcagcaactgcgctacagaagattataaatttaattgtgtccattgccgtaagcacgaaaagttttgcagatctgccagatattattatcaaaaagggcagatatacgatggccacaacaataaagcacgcacccttcatttctataaagtctcaggggaatgtaatcttcagttttgccggttctgacataatcggattcaacgttactaacgtatgggatggcctgcagaacaccgacgtatcattccaagcgtcttcaggggcgtacttcctcgatggaagtggagggatgatatacatcatagggattggcatgtcatctagtagccagggtggcattcagcttggcaactcaacaactggatatccaaatttccgcgaagctaaaataaggaatgtccttgttacagggttcattgctggaactcgctggaagactgtggacacttatctttgcactatctacgacagtcgatttgaacgaaataaacatggtcttttagtcgatgacactactgcaagaaacagtggagaaaaaatcacatttgtaaaatgtgttttcggtgactgtagcgataacactattaaccataatgcgtcaggtatcaatttcgatttcgtgagctgcagctttgactttacacccaatcatattgtggctttccgcccatcaggagcctattcagacctgtctttcatcggtgggcatattgaagcatttggtggcgccttagtgcgtcaggattcacagattgcaggagctggcccaaaccgtgtcctattcagtggcacaacaattctgtgtaggaaaaacatcaatacttacaactcagttaggcagatttttggtgccaactcgcctgtttatgtaaacattgataactcacatcttatttttgagaaaacgaatagcgaggtttcaggcactttagtacctgcatcagatggcacaactaccaataatgccagggtcaaaatccgaagccacattgataagccagaatacctaccaacatacagggattctctaaccgcatggatcttgagcggtacgtcagggacggatatcactacaactggcgatacgagcataggtctaagcttcttaagcactggcagcgcgactgtgagctatctgcttttggatggagagatcgtcctggagataaattgcccaactgtcacatcatctcttcgcatgtatatgaccactccggtatctgtcggacgcggtgatactatttacagcatgtgtagcgtcaggcctggtagcacaacaggtaaccttaacatatccggattgattagaggttatggtcgtcagacaagcaatgctaaccacgacgttattgagaatttcacgttggaaaccgcagataccacagttgacatgctgccttactttactgcagaaggcatcccaaaccctggaacattccagtttatttccactcctccgctggcaggaaaggctgactacaaggcgttctattgctatccagggttgagattcacaggatttacagggaaggtgcaggttaagcttccagcatggtggtttaagtctaagtag

SEQ ID NO: 438621 - DNA, 258 bp, Serratia marcescens
atgggcagagaagaccctcagtttaatctgcggcttccggcagaattaaaggataagcttaagcaaagagccaaactcaatggaagatcattgaactccgagataaccatgatcattgaggaatcgctatctaagccatctaaagtatctggctatcgcgatgaggctgagaaattagcaaacgagcatgcagatagatttaaaaaggtagtggtcgaaacgttgatcgctctatattctgaaaaaaataaattgtag

SEQ ID NO: 438622 - DNA, 909 bp, Serratia marcescens
atggctgatgatggattgaaagaaccagtaatcatccaggcaacacgcatcgacgccacgctcctgcctcacaatattttctcccaaccttatctgctttacgtcatccagcaaggcaccgatttaggaaacgtggcggggaaggcaaacgaagcggggcaaggagcctgggatgctcagaagaagaatgatgagcaggatttggtgctggcagaccacgaaaccaggattgaggcagcagagcaaacgctcatcaaccatgagcaacgtatcacagctgctgaagcgaccttggttgatcatgagacgcgaattacagccgcagaggctgagcttgtagaccacgaaacgcgcattacggccaacgaagcggaactggccaatcatgaaacacgcatcacccagaacacaaccgatattgcaggccttaccgttcgcatggtgacggctgagagcagcattacatcgctgcaaaccaatgtcgcatcactgacaacgcgcgtcaccactgcagaaggaaatatcaccactctgcagggtaaggtttcgaccatcgaaaccaactatgtatccaaggctgtatcaacgagccaatcggtgcaggcgtcaggcggttcgttcctggttggcaacattgccacgccaaccactgacaagcttcaggtcggtggaagcgttaatgctgtttcgtacaaagtggcaggaattcaggttgtcggcgcacaaagaactggatggactgcagcaaccggcactgcttatcgcggaacattcgacgctaaccaggcatggacgattggaattctcgacatcgttcagatacagcagatcgccaactcccttactcaggctcggcagcgcattaaagcgcttgaagatgacctaaggactcatgggttgattaactga

SEQ ID NO: 438623 - DNA, 1428 bp, Serratia marcescens
atgccaatccaaaagctgccattagccaaaggccttggcaaagactaccgcaatgctgattacgtcgatttgcttcctgtgaacatgctggctacgccaaaagaagttctgaatgcatcagggtatcttcgttctttccctggcgtatcgaagcgctcagacgtttctgggccatctcgtggcgtggagtacaacacagttcaaaatatcccataccgtgtagctggggggaaaatatataaaggctcagaagagcgcggaacggtatccggttcatcaagggttagcatggcccatagcgcgtcaagtcaggcagtttcatcaggtggaaagatgactctctaccgttatgatggaacacaaaaaaccttggataactggccgcctaatgttggaggggttgattacgcccaatacgatattggcagcgtcaaagatatctgccgggcgcgtggccgttatgtatgggttaaagatggcacacagaccttcggcgtgacagaccttgaggacgaatcacaccctgaccgattccggccgttctatacggcagaaagtcagcctgatggcattattgggtgtggcgtgtggcgtgacttcgttgtgatgtttggcagcagcaccatcgagtatttctctctgactggagctgccgacgcatcagctgcgatttacgtcgcgcagccatcactaatggtgcagaagggaattgccggcacttactgtaaggccgagtttatggactcgtttgccttcatcagccatcagtctaccggcgcgccatctatttacatgatcagcaatgggcaagcctcgcagattgccactgcaacggttgaaaaggtattgcgcagctacacggcagacgagctgtctactggcgtgctggagtcaattcggtttgatagccatgaactgctgatcgcgcaccttcctcgtcacgtcctgtgttacgactccacagccagccaaagcggaccacagtggtgcatcctgaaaactggcctcttcgatgacgtgcatcgcgccattgattatgtgttcgaaggtaatcaggtaacggtgggtgacaagatagagggtgtcactggtgcgcttaaattcgactcatctgcgcaatacgacaagcaagccgagcatctactattcacgccgatgtttaaggccgaaagcgccagggtgttcgactttgagctcgaatcagcaactggcgtatctcagtgggctgagcgcctattcatctctgcaacgcttgatggctcaaactatggacgcgagcagatggtcgattacaacgcgccattcatttacgacaaacgcgctatctggcgtcgtgttggccgcgtccgaaagaatatcggcttcaaggttcgagtgattacccgatcacctgtaaccctgtctgactgctcattgaggatcgaataa

SEQ ID NO: 438624 - DNA, 351 bp, Serratia marcescens
atggccgagtggatgatcaatcccggcaacgtcggttacttgttcgcggcggatggcgaggagccgttaccagacgatgactctggactgccgcgcaaatacaagcatgcagttggctatcagctaatcctccgcatgctgtctgattatggcgtagatccatcgcctcaagttctgactaatgctcagcgctcatatgacgcgctgctgactgacacgctcattgttccgtccatgcgccgccgcggagatttcccgcttgggcagggaaacaaatacgacgtgtttaccatcgaccgatactatccaggcgatcttcccccgattgacggcgacatcccaaatcagtag

SEQ ID NO: 438625 - DNA, 186 bp, Serratia marcescens
atggatcgcatgagcatctttatggctgccgataacgaggctggccatgttcaagctgtaatcgcagagaaagatttcccaatttacgaaaagctcggctttgtggcttccgttgacgacatcaagccggttgttaaacgtgggcgcaaggcggctgacaatggcaacgactctgacaaagggtga

SEQ ID NO: 438626 - DNA, 1275 bp, Serratia marcescens
atggctaccaatgatttaaacagtaacgtcagtcaaatcgtcctgaaaaaattcctgccgggtttcatgtccgacctggtattagcaaaaaccgtagaccgtcaattgctggctggagaaatcaattccaataccggcgatagcgtaagcttcaaacgtcctcatcagttctcatcgctgcgcacacctaccggtgacatctccggtcaatcgaagaacaaccttatctccggtaaggcaactggccgcgtcggcaactacatcaccgttgccgttgagtatcagcaactggaagaagctatcaagctgaaccagttggatgaaattctggctccggttcgtcagcgcatcgtaactgacctggagacagagctggccaagttcatgatgaacaacggcgcattggctctgggtagccccaacaccccaatcaacaaatggtcggatgtggctcaaaccgcatcattcctgaaggatttgggcgtcgttgagggtgagaactatgcggtaatggatccgtggtcagctcagcgcctggccgacgcgcaatctggtctgcacgctgccgaccaactggttcgcaccgcctgggaaaatgcgcagatctccactaacttcggcggcatccgcgcgctgatgtctaatggcctggcatctcgctctcaaggggccttcggtggcacactgacggtgcaaacagctccgaccgtgacctataacgcggtgaaagacacctatcagttccaggtgacattgaccggcgcaaccgcatctgtaaccggattcctgaaagctggcgaccagattaagttcaccaacacttactggctgcagcaacagagcaagcaggttctgtataacggctctgcacctatcagcttcactgcaaccgttctgaccgatgcaaactccaccgcaggcggcgcggttacggttactctgtcaggtgtgccgatttacgacaccaccaatccgcaatacaacgccgttaaccgtcaggttgcagcgggtgacgcggtgactgtaatcggtaccgcaagccagaccatgaagccgaacctgttctacaacaagttcttctgcggcctgggtaccattcctctgccaaaactgaacagcatcgactctgcagtcgcaacttacgaaggcttctctatccgcgtacacaaatactcggacggcgacgctaacgtgcagaaaatgcgtttcgacctgctgccagcctacgtgtgtttcaacccgcacatgggcggccagttcttcggcaatccgtaa

SEQ ID NO: 438627 - DNA, 888 bp, Serratia marcescens
atggaaagcgaactgatcatcgacggtcaggttattgacctgtctgaaaaacaggaagaagccgaagaagtaatcactgaagcaaaggaaaatcctgaggataaatcacaggaagaacctgagcagaaagagaaaaaggccgaaagtgaacagcccgaagagcagccagaggattactcactgcaaatcggtgatgaggaaattagcctcaaccctgaagaagacgatcacattgatgggcaaccggctcctcaatgggtgaaagagcttcgcaagggcttcaaagaaacacagaaagaaaaccgggagctacgccgccagcttgagcagattcaatccaagccagcagaagcgcagcaaccacaatcagacgttattcctacaaagccgacccttgagtcgtgcgagtacgacgaagcagcgtttgagcaggcgatgactgattggcatgagaagaaaggccgtgctgagcaggttaaacaacagcagcaacgtcagcagcaggaattgcagcaacgactcacagagcgccttacgaagcatcaggagcgagcatcaaggcttccggtgaaagactatcgcgagatggaagacatcgttcgccaggagattccggttatccaacaggaaatcctgattcatgccgccgacgaaggttctgagctcgttgcttatgcactgggcaagaaccaacaactacgccagcgtgtagccgctgagacagacccaattcgcgcagcattcctcttaggccagattagccagcaagtgaagttggcaccgaagcctaagaaagccatcaagccagagccggaggttcgtggtggcggcgctgatgcgaaacaagatgatttcaacaaactctgccccggcgctaaaatcgaataa

SEQ ID NO: 438628 - DNA, 2091 bp, Serratia marcescens
atgctcaggtttgaccgcgcctatacgccgcagcaagacgtgcgcgaaaagtgcatcgaagctacgcgattcgctcgtgtccctggcggtcaatgggaaggagcaacagcagcgggaaccaagcttgacgaccagttcgagaaatacccgaagttcgaaatcaataaggtggccactgagcttaaccgcatcattgccgagtatcggaacaaccgtatcactgtgaagtttcgcccaggcgatcgcgaagcaagcgaagagctggcaaacaagctgaatggtttgtttcgtgcagattatgaagagaccgatggcggtgaggcgtgcgataacgcatttgatgatgccgctaccggtggttttggctgcttccgactgacgtcgatgttggtcaatgaatacgacccgatggacgagcgccagcgcattgccattgagccggtatacgacccatcgcgatcagtgtggtttgaccctgacgcgaagaagtacgacaagtcagacgctctttgggcgttctgcatgtattcgctctcgcctgagaagtacgaggctgaatacggcaagactccgccggcgtcactcgatgtaacgacgatctcctcttgggagtttgactggttcgagccagaagtcgtttatatcgccaagtattacgaagtgcgcaaggagtcggtggatgtaatcagctataagcagccgctgaccggagaaatcgccacctacgatagcgaccaaatcgaagatatcgaggatgagcttgccgaggctggattcgtagaggttgcgcgccgttccgtgaagcgacgtcgcgtctatgtgtcagtggttgacggccagaacttcctcgagaagccgcggcgcattccaggtgagcacatcccgctcatcccggtatatggcaagcgctggtttatcgacgatattgagcgcgttgaaggccatattgccaaagctatggacccacagcgactctacaacctgcaggtttcgatgcttgctgatacggcagctcaagacccagggcagattcctatcgtcggcatggagcaaatcagagggctcgaaaaacactgggaagctcgtaacaaaaagcggccagcattccttcctctgcgcgaggtaaaggataaggcaggtaatatcatcgccggagctacgccagcaggttacacgcaaccagcagtgatgaaccaggcattggcagcgctactgcagcagaccagcgctgatattcaggaagtaactggtggcagccaggcgatgcagcagatgcctagcaacgtagcccaggaaactgttaacaacctgatgaaccgcgccgacatggcgtcgttcatctacctggacaacatggctaagagcctgaagcgtgccggtgaagtatggctgtccatggccagagaggtttacggctcagagcgtgaagttcgcgtggttaacgaagacggcaccgatgacatcgcgctgatgaatgctcaggtggttgaccgccagaccggccgagtggttgcgctgaatgacctatcgactgggcgctatgacgttactgttgatgtcggcccaagctatacggcaaggcgcgacgctacggtatctgttctgaccaacgtccttaactctatgttgccaaccgatccgcttcgaccagctatccaaggaatcatcatggataacctggacggggaaggactggaagacttcaaagagttcaaccgcaagcagcttctgacctctggtatcgctaagccgcgaaatcaggaagagcagcagatcgtccagcaggcgcagatggcagctcagagccagcctaaccctgaaatggttctggcacaggcgcaaatggttgcagctgaggccgagaacaagaaggctgataacgcgacgcgtgaaaccgtcattaaggcgttcacggcccagcaggatgctcaggaaagtcaggctaacgttgtctacaagctttctcaggcacagaacatcaacaagaaaggggtgatggatgctatccagctcctgaacgaccttcttaaatcccagcaagaacaaatccccacatcaccacagtcaccggcagactcaatgccgagttaa

SEQ ID NO: 438629 - DNA, 1461 bp, Serratia marcescens
atggacaagcttccgcctcggcacaatctgagcagagagcagaagattgagcttattcaacttctagaagaaaaacagcgccgcgagaatgtctatcgctataagcgcttctacaaatctcgctacccctggcaaaagaaattcattgccgcaacatctcagttcacccaggttgcactgatcgctgctaaccgtactggcaagacggataccggcacgggtattgatgctatccacgcaatgggtgattaccctgaagggtgggatggtcacaggttcgaacatgcaccattaatctggtgtcttggatactctggtgagaaatgccgagacctattgcagacaccaatccttggtcgtcgcactgacaatgggtgggatggcggattaatccccggcgaattgattgtcgacacagagccgatgcagggtacgcctaatgccgttcgttctgcatacatccggcacaagtctggtcagctatcaaagattcagttctggtcgtactcacaaggccagcatgctctgatgggcgatgccgttgactggttccatatcgacgaagagccaaaagacgcgacgatctatccgcaggtgcttactcgtactgctaccggcgacaaaggtaatggcgggcgtgggattctgacgtttacgccagagaatggaaggactgatctggttatcgccttcatggatagcccttcatctggtcagcactgcatgaatgttggctgggacgatgccccacacctaagcgagaaggtgaagaaagacctgcttgagtcgtacccacctcatcaaagggatatgcgcaccaagggcatcccaatgcttgggcatgggagaatctatgacctcggcgaagattttgtaaagtgcgaccctttccctatcccagatcactggcttgtcatcaacggcatggactttggttgggatcacccgcaggcgcatgtccagttggcatgggatattgagaatgaatcattctatcttacccgagcatacaaggcgcgccaggtttcaccagcagaagcattcagcgcagtgaagtcttgggcggataacgtgccaaccgcatggcctccagatgggcttcagacggagaagggttctggccttcagcagaagtcatattatgaagaagctggattccagatgctgcctgagcacgcgcagtgggaagatggcagtagatctgtagagcctggcttattcgagctatacgacctaatgcgcagaggtaaattcagggtgttctctggcctccgtgacttcttcgaagagtacaacttctatcaccgcgacgagaaaggaaagattgtgaaggtgcgcgacgacatccttgatgctgttcgttacgcctacatgatgcgtcgctatgcaattcgttatgcagacataaagaatcctccagttgaagaggatgtctacgttccctcatcctccggttggtaa

SEQ ID NO: 438630 - DNA, 540 bp, Serratia marcescens
atggcagcacccaaagataacaaatatgccgaagggaatagcggtaggccgactcaataccagcctgagtatgcagcacaggcagagaagctttgtttgctgggtgctacagacgacgagatagctaatttcttcgatgttcaccggtcaacaatctacagatggaagctggagcatgaagagttttgcaacgccataaagaccgccaaggaaatcgccgatgagcgagtggttagaagcctgtaccaaaaggctactggctacaactatgttgagcagcaggcattcaaactaaaagttgaccagcatgaagaagagattgaggtggtcgatgttgagcgtcacgcaccagcggataccaccgctgcaatcttctggctgaaaaacaggcagaaagaccagtggcgtgataagcaagaagtggcgcacacgcatcagtttgaagcgcttagtgacgatgaaattgagcgaagactgacggagttagaaaatggacaagcttccgcctcggcacaatctgagcagagagcagaagattga

SEQ ID NO: 438631 - DNA, 333 bp, Serratia marcescens
atggcaatcacatccatgcagacagcaaccgccggttcggtggcaaacctgattccagtggttaagtcgcatatcgcagcatcacgcttccctcaaggcggtttggttggcgttcatgccactcccaccaagaccgagtatttccaagtggtcgctgccggtggcactacagcaactgactacgacatcgtggttagctctgaccgtgccgacttcaccattaagtgcaacgcgaagatcaccgctggcttcctgccactgggcgacatgagcgttatccagttaacccctggccgtatggttgagtacgctcaggcattcaccaaggcgtaa

SEQ ID NO: 438632 - DNA, 231 bp, Serratia marcescens
atggcaattacagaaatgaccgaagagcaggcaatgaaccttgaagtgttcaaactggttcagagcgataccgctgcaggtgagaaggcaattaccttcatcggcggcaacaagctcaagtacgagcttttcaaagatgcctatacgcgcgtgcaaacagaaccaggcgtcgtcggtcgtgtagacaaggccatcaagatggcagaggaagcgctcggcctgtttggttag

SEQ ID NO: 438633 - DNA, 447 bp, Serratia marcescens
atgacttggccgctgaagcactggcaagcaatcattgttgcattagtgcttgggctcctgacttacttcgccattagcaaccaggcactgcgccatgacaaagaagcactgcagaaagaaaagcagcagctatccggtcagctggagtggcagaacaaaacacagaaagcagtagctgatatcgatctgcagagaacgcaggagcttgaagatgcgaaaagcaagattgctgatttgcagcgtgatgttgccactggcgctcgcaagctgcgcatctcagcctcatgccaatccgccaaatcctccggcatggatgatgcagccagccccagacttactgactccgctcaacgggattatttcaccctcagagagcgaatcgaaatagccaacaagcagatttccggattgcaggattacatcaatcaggtttgcttggcgaaatga

SEQ ID NO: 438634 - DNA, 333 bp, Serratia marcescens
atgaatgagcgcgatgcagggttctgggtcgacgttctgaacggccttaaaaacgcatggccgcaaattcttggctcaatgatggccgggttaatttgctatggccgattaatttacgatggtgtagagagaaagaatcgctggattgagggcgtcctatgtggcgccctttctctttgcatctccagtgctttggatgtgttcggattgccggtaagcatgtctcctttcattggtggcatggttggcttcatcggtgtcgaaaagctccgtaatatcgccatcagcgctatcagcaagcgagtaggtgctagtgatgaaaatcagcaataa

SEQ ID NO: 438635 - DNA, 180 bp, Serratia marcescens
atgaacgccataaccaccccagaaattatgaaagtgccgaagaagtacggcacagatatctgctgcagctgcttatcggagctcggcgaagatgaatgctacatctgccagcagtgcaacgacgagatagaccgtcaggccgatgaggttatcggaaacgcggaggatgacgatggctaa

SEQ ID NO: 438636 - DNA, 195 bp, Serratia marcescens
atgagtaacgagccaaaattccctgaacttccagtcgagcttcaggttgcattggtaactgctgcaaccgcgatggcgacggaaaaaattagagctattggcagcaattacaatgagagatgtaacttcttcgatcgcgagtacaagctgatttgcgactcgctctacaaagaaaatcgggggagaaatgactaa

SEQ ID NO: 438637 - DNA, 237 bp, Serratia marcescens
atgaataagctacgtgaagagtttgaagagtggttctctgaaaaatacccacttaaaaagccgtcggtaaggaaactaaaactctgggaagcatggcgcgatagccgagcaagcatcgtggttgagcttccgcacgcaggaccagccgaggatgaatgcgactatcattataatcgcggcattgaagctacggctgattacctgcgctctatcggcctatcaatcaaaggggagtga

SEQ ID NO: 438638 - DNA, 210 bp, Serratia marcescens
atggacattgacgcagtaagtagggcgcttcatgcattgaacatgatctatcaaggctacgcatacgcgctagggatgtcacaggcattctttgcacttggtgaaaaatatcaattgtgctcaaatcgcctcatgcggcaggcaatgacattgaaatataaggctctcattgcgcatgaccaaatgctaactggagataaccatgaataa

SEQ ID NO: 438639 - DNA, 210 bp, Serratia marcescens
atgaaaaaacatgaaatagcaaagggtgatatttttcgcgccggagaggtttgggaatcgccgaaaggaatgctgtacaaagtcatgtccgtcgaacttcgccaagcaacattgcgaatgggttatgatggtaacgggagaattgttcgtcgtccgtgggacgctgtaatcggctggtcaattagcaaggagcataaccatggacattga

SEQ ID NO: 438640 - DNA, 213 bp, Serratia marcescens
atgagaactaacggaatttggaactgtgatttttgcggagaaaatcagagtgaagtggaaaaaatcatagcaggaccaaaggaagtcgctatttgcaatcggtgtgtatgcatcagtctcgaagtgatgctcaaatcagttaaagatgccgccgttgccgacattgttgttcatgaaaaagacaaaaaaactatgccaaagggcggtttctga

SEQ ID NO: 438641 - DNA, 1338 bp, Serratia marcescens
atggaaagctacgagtttgaagagcagttggtcggctcaatgatgatcaagggcgaccatatcgactgccgggaagtcgccgggaagttacctgcagaagcctttgaaaacttccacctccgccagatgtatcaagtaatcgtcaccctcctgaatcaggccgaaccaatcgaccagttcaccgttcaagatagcctttctgactcaagcaaagatttggtgctgagcgtggcggcgcgctgtaagtctgcagctaacatccgagcatgggcaaaacgcgtccgtcaatgctggatgatacgcaaaggaattagcgacctgcagcaagcaatctcaatcctgcaaagcgtaggcgctcatgatatcaacgagcgaactgcagaagtggctagcgttctgtcaaaggtgcaattcgagaccaacgacaagcttcctcgccgcatcggtgatttgctacctgactacatggacgtgcttgaaaagcgaatgcagggcgctgattccgggatgtacctgaaaacgggaatcgacccgctggatgatgagtatggcggattcgaccgcacagacttaatcatcatcgctggccgccctggcatgggcaagacggagctagcaatcaacattgctaactcgattggtcggcagaagggtaagggcttgctggtgtcgatggagatgtctgacatgcaggtggtggagcgtcatgtcgcggatcgcgcaggattatctatcagcacgctacgcaacccgctgaacatgattcaagagcaatacacgaagctcaccggcgcaaccggcacactgatggacgaaaacaactacgtcattgatggcgcctttaccgttgacgctgctatcgcccacgcagagcggatgaacatggacggcggattaagcttcctagctatcgattatctcgggcttatcacaaagccaaaggcagagcgcaacgacatcgccatcggcgaaatgacgcgcaagctgaagcagttctgtctgcgtagtaaggttcccgtaattctcttggcgcagcttaaccgcggcccagaaaaccgggcagacaagcggccaagcatggcagacctaaaggactcaagctcaattgagcaggacgcagacgtgatcatcttcccgtaccgcgacgaagtttacgatgagcacagcaacatgaaaggcattgctgaaatcatcatcgggaaatatcgatctggccagccaaagacattttatatgggctggaagaatggtcacttcgtcaatatcgaccaggaagaagctgcgatgcgttatgcgcagaacgaacaacaaaccaaagaagcatctggatggaggtag

SEQ ID NO: 438642 - DNA, 891 bp, Serratia marcescens
atgggcgtcgttagaaaattatccgactaccgtaaacctcatcaagaggtcatggagcaacgcgtggccgataccgatgatgggtatacccgcatagctaatgagctgctagaggccatcctgagagcgaatttaaccgctcgccagctcaagattgcgtttgcgattatccgtaagacttatggattcggaaagaaaacagaccggatcacaaacacacaaatttccagcatgaccggcatccatcacacccatgtttgcactgcaaaaaacgagatgatcatgatgaacatcatcgtaaccagcggaacacaaatcgggataaacaaggtagtttctgactggaattgcgatattagccaaggcagcgaaacattagccaagtcggctaataaaagtttagccaagtcagctaacgagcattcgccaactcagctaaacacaaaagaaactattcaaaagaaagaaagaaacattacccaaacccacgcagtgggattgtcgtctgaagagaaattaaccccacgacagaagggaaccaatccgcgagccaagggaacaaatcctcgctctgcaatgccagctttcgatcgtgaaagactgcgcgatacttggaactgcaaagccgataaacatgggctaccaaaaattcgcaatgtatcgaccacagtcgagagcggcttgaagcgcctctggcaatcctacctgaagcagtgcaaggatcttggcagccagccaacagagatcaacacattcctgaatggctatttagcccatggttacacgccaacgaaatgggcttgcggcgacaatccagaaggaaagcgatacggcattgagaccgcacttcgccaagagaagattgacgaaattctttcccgggaggactga

SEQ ID NO: 438643 - DNA, 174 bp, Serratia marcescens
atgtttggagataaccactggaggaaattatggcaaaaaatcgccgaatttacaagacagaagaggaacgacggcatcctgattcaccggaaggaatcgttgttgcagccgccaataaccggagctttgctgctcggttcattggtgaatatcggattgcactggcaggggtga

SEQ ID NO: 438644 - DNA, 171 bp, Serratia marcescens
atgagccttgcaacaacaatcgaagagagcaaagcaaaacggcgcgaacatcttctggatgcgatctccttccgccgtaagggaatgcgcaaagcagttaaatcctgcctgaatggctcgatgatcgagaaattaaatcaacgttattttttgggtgagcagcctttttga

SEQ ID NO: 438645 - DNA, 627 bp, Serratia marcescens
atggaagcaaaattagtctacaaggcaatcagcgcagtggctgcagaactgtgcgagcagggaattaaaaaatccaagcagcaaggaagccaagtcaactatgcattccgtggtatcgacgctgtttataacgcacttgccccagcgctggttaaacacaagttgttaattcttcctcgctgtactgagcgcacctcatgcgagcgcaccagcaagaatggcggagcattgttttacatcactgtccgcgcagagtttgattttgtcagtaccgaggatggaagcattcataccgttgttacttatggtgaagcgatggatagcggcgacaaggcaacgaacaaagcgatgtctattgcatacaaatatgcggcattccaggcgttctgcatcccaaccgaagagacggctattgatgctgacgcggaggttcacagcgttgcgccagctactgctgaccagattttggcggagtttaccaactatgcgggctcagaaaatgacgccaaaacgctgcagtcgaaatatgcagaagcttggtcgagcctaaacgggcatccggatcaccaaaccaaatgcaaagatgttaccggcattcgacttaaagaactgaaacaggcggcataa

SEQ ID NO: 438646 - DNA, 471 bp, Serratia marcescens
atgaccgaagtattgacctatgaagcactgaaggctgagcgcgatgcgctggaaatccgcctgagaaatgctcttatcagtgagcaagaagccattcagcgcgctcatgcagccaatcaaaccgctgatgcgctggctgtggagaatgcggcgctgaaggtggcggttgatggatttaaccaagagctatacggcaaagggtttgaggtattggggtggcacctaaatggggatactgaaccgttggataactggtttggagaaaatgactggaacccggaaaccccagccactgacgcagcacttgcagctatccgcctcgaagcaaagatcgaaggcgctaatgagctggcggagcgtatcgctgaaatgcattccaaaactgcacccggatcaaacatcgaaaagaagctgatgtttgcagctgaagctgcaatcgcatacgacaatgggctgcgggaggccaaatga

SEQ ID NO: 438647 - DNA, 222 bp, Serratia marcescens
atggacaagctgagcgaactgaccgtgggcgcattctgcatccacacaagcaaatggctgaagcgcgggtgccgcgtcgtggcattcgataacggaaacgttgtgattaaaaacctaggcggcggctaccacggcgttcccgcagagtcattaacaatcaccactcgtgctaatgcgcaaaacattgagcgagactgcatggcgaggaggaatcatggataa

SEQ ID NO: 438648 - DNA, 699 bp, Serratia marcescens
atggataagctgagcgaactgagcaagccggtggcgtattcactgcgatttcggaatatgaatggcgagcctgataaaaccatcaacgccaacaccactttctctacgctggagaaggccaaggcgtatggcctgggtagccggtatgtaacgcaaggcgacggcaagatagttagcgttcgtgacccgtcacaagaccctatcgttgagccactctactcgcaagagtacgtctccgccctgctgacacgcatcgaagaactcgagaaaaaagatcagtggagcgaaaggcaaagcgttattgatggattggccggtgcgggtgaggcgtggtcggacattgaagaatacatggttaagtgggatgaggagcatcgcaaagcaattggaaaacagccggtgcgctatcaatgccgtgaaattggcgaaggcggttggatggattgcgataaagacaggtatgactattgtcagagacgtcctgaaatggacacgcgcactgtctcatccccgctggcagagctggaagcgaaggataagcgcatcgccgagctggaagccaagctggctacgccggtgcggttgccgacagaacatgaactgcatcaagtatcgtgcagcgagtgcgcgggtaattgtctggagctggtcgaaaacaccgttcgcgccgctgggttcaaagtcaagggggatgcatga

SEQ ID NO: 438649 - DNA, 270 bp, Serratia marcescens
atggaactaaaaattggtcttaaatatgtcgtaacttcaacaactcatgacttcgttctcaatgaggttaaaactgtaaaggaaggcaagaatgcgggaaatgaaacgctctcagtagtcggatacttcaccaagctaagccagcttgtaacctacctaatcgctcatgatatcaaaggttctgatgtcgattctatcagcgccatggaagcaaagatcaacgatctctctcgtcaaatagaaactgccttcttaaacaaggctgcgtaa

SEQ ID NO: 438650 - DNA, 240 bp, Serratia marcescens
ttggagctgaagcgcgaggtggaagtggtggagaaatataccctcggcgaagggcgttcgaaggcgtttctgacctgggataaagagtcgatggactgcttccgctcgcagggcccggcgcacatcatcctgttcggcgtcaactcgccacaggagtatcagcaggcgctggcgctgggcgccgacggcgtgatggtcaactcaccggccgaagcgaaaagcttccgcaaggcgaaataa

SEQ ID NO: 438651 - DNA, 735 bp, Serratia marcescens
atggcaccttctctaatcggcgacaattacgccaaagatctttcccaactcccgtctttcccaggcgggagttttgtttcacacacgtcatgcttcatcctgcctgacgacgtcgtaattctccgcctaacggaaacaacctacgatagcgccgattatcatcacatagcggtagtggaagaagttgccttcaccgatcctgagttcattgccagccacatcgacgatttgcgtgacaacgacgggttggaagacagtgagatcgttgatcgcatcatggttcttgagatggaggacgagggcaaatctgaagtgattgctcgatttgcttatgacaatttctctttcatagacccaaacggaaacccagctgaaggtaagcaaatacgaggcgcttatgttacgcctgaacgagctggtgctggtttggcggggcagatttaccgtcatctgacggaagtccacaaacatctaatctgcgataacacccaaacagtttatggggcagccctatgggcaaatacagttcgcaacgttgtcggccgcgttgatatttacaacgtagctaaacatgagtatgtcgaagagttaggtgatggagccaaaggggtaaaaggcttcataccttgggacatcgggaaactaaacccctcatcgttgggcaagtggcagcaatatcccttcaacccgaatatccagcaatgttattacctggtgttgatcatttcagcttaa

SEQ ID NO: 438652 - DNA, 420 bp, Serratia marcescens
atgttacacgcacaagctaaaacgaagaaccagcgctcgattcagaccattcgtgacaatacgagtgtaatcgcgagctttgaacctcgttctatgtttcctgacactgttgaagtgcgtaggatgctgaaccgtacccagaaggattcgcagcactttatcgttaccctgaaaagcgacctcaagcgagcgctggacacgactgttgttaagccatttgcggagatcgccattcgtggtgagaacctgcgctttaccgtgaagcctgaaaagcaatatccaaacctgtctttaaacgacgaagttattggaatgattgaaacatcagttgctgatttcatggaaaagcacttttctgctcacgtcaatcaccgtgaagctaaaaatcaggattgcaaaaaggaatggcaccttctctaa

SEQ ID NO: 438653 - DNA, 741 bp, Serratia marcescens
atgatttccgaactcacatttgcaaaaagatttacatccttctggaaccaattattgccaaacgaaaagcattatgtgcgtcttattaatgacgggcttttcgagatagttgacgctcctactggcgagctaaatagaaaagagaacattgctttaataaatgaactggcgtttgagatatacaaacagatattatcaaataaaataaaaacgcctagtttagattcaatcgagttttataaaagtgataagttccttgaaatatacgccaatgctaaaaaaagattatctaagtttgcttacggttctaatttttcgttacctttaacatcaaaggaactaaccacaacccgaatgttaaccctaaggttatatacacgatattatgacagtatgaaggacatcattatatcgcctttcttttcaggttgtggttatataaaccattcaaacggagacttatacattccaggtagattgatagagataaagtcaggtgctaggaactttggagtagtagacgttaggcaaatattaatttattgtacattgaacttttactctaagaaaagactagttattgatgaagttgagctgttcaatcctaggatgggtatatcatattcatgtaaaacaaatgaactatgcgaaaaccttggctcgctcaatcaagaagatcttttcttcgaaattaaacaacacataactgagaatagctttatagaaggtgcaatattataa

SEQ ID NO: 438654 - DNA, 231 bp, Serratia marcescens
atgaaaaccttcgatgccatctggcgtgacggttttcgctaccaaaaggcgggcatcatgctgaacgatttttgcgacaaacctagccaaaccgatctattcgacgagcggccgccccgcgccgttagtgaacagctgatgaaggttatcgatggcataaaccaatccgggctgggaaaagcctggcttgccggccagagaagcaatacaacctggacgatgcgtcgctaa

SEQ ID NO: 438655 - DNA, 225 bp, Serratia marcescens
atggcaactgcaactaactcggacaatagctggacttacgcgctgaaagtgctggatgaagacaaacagaaagaaacctatacggtttgctttaacgataaggcgttacctggccccccgacatacaacaacagccaagagctggttgtgaagaaaagtccccaaggaacttacaaggttattcaggttgtagccgaaaattcagtttgctcgtcgtcgaaataa

SEQ ID NO: 438656 - DNA, 990 bp, Serratia marcescens
atgagtgatactattgtcgttatcggtaaacccacgtctccttcagcgcctgatggtgtgcctgtaacaggcggaaacgccggtggtgggctcaatttccctgttccgttccatatcgccggtcatgatgatttcatggttcttgctatcaataatgatgtctttgatgccactaaacgtgaccaaagtaccatcgatccgctgacaggcgaactcccttacgacgatactgtctctattgagcgaggtgataaacgcctgttactgacgtacaagaatttcagtgacgccttgaacgagcttaatcgcctgggtgatgtctggaagcagggggcgatgatcctggtcttatcagacaagacgttcatcactttcgacgacgttaaccagatgacttcattcctgtccaactctaaccgtatcgcaaaaacggaatttatccgtgagaaagagggttttcatgcggctggctatgtcccccgtgatgcggccggtaatgctttaggccaatctggcgtgactattggcgtagggattgacctggggggccgttccgctcagtccatgctgaatgacggtgtgccgcaaaatctggtcgatattttaagtccatatctgggactgaaagggcaatccgcggtcgataagttgaatcagtcgcccctgtcattgcccgaatcacaggcgatggacatctccaatatttatgtcaaccaatattcagccggtatggccagccgttattcctctgctgccggcagttcatttagcgccttgccactcaacacgcgtactgcgatcgtcagtgttgcctatcagtatggccaaaacttggcacaggcggcacccactttctggaactatgtcacgcagaagcagtgggccaatgtggttaatgaactcaacaatttcggtgacgcctatcctacgcggaggcaatcggaagcggcattgatccaatccgatattaatagcggtaagttgaaataa

SEQ ID NO: 438657 - DNA, 123 bp, Serratia marcescens
atgctgcagcggtacgtcagccacatcccagcgcggcattttaaaacggtgcgctattacggttttttggccaaccgcagacaggacacgctgctgccgaaggtctacgacgtctggagatga

SEQ ID NO: 438658 - DNA, 1374 bp, Serratia marcescens; identical to SEQ ID NO: 129761

SEQ ID NO: 438659 - DNA, 1737 bp, Serratia marcescens; identical to SEQ ID NO: 129762

SEQ ID NO: 438660 - DNA, 2121 bp, Serratia marcescens; identical to SEQ ID NO: 129763

SEQ ID NO: 438661 - DNA, 594 bp, Serratia marcescens
atggtgaacgatctatccattaaagcgttcgttcaattcttagaatctcttccggatttaaacatcattcctgaagcgactgctcgaaatcttaagaactcatccctattgctgatttcttctgccgagctgccagaggatgaagacgttcgcacttatgcgcctgagcgttttttagaaggctacataagaaattcagaatctgagccatcagacagcaccttgcgagcctatagaagcagattaatgagtgcgattaagctttttgtagagcatgtcactggtgaggcgatgccagcttttgggaagaaatctggatcggaattattgaggaatgcttcagttaactttctaaagatagctcatgaccaactccaggaaaacctgggtacgaccaccaagaaaaggaaagcgtcagtggctagaaaaccatcagttaaagataagcaggacgatgaactgaaaactttcgctttaccaattcctttgcgtagcgatctgattctcaccattgaaaatttaccaacagacctaagcatcgatgaggctgaaaggatagccactatagtgaagtcgttcgcggtgaagaactaa

SEQ ID NO: 438662 - DNA, 324 bp, Serratia marcescens
ttgaatgcctttggcatgagtcggtttgcaccattgccctatgatccgcaaagtctgatgatttgcgatatggctggctacagggagcggggtaaacacgacacagataagatggtgttccataccttcaaatctgcgtttgagaaggagattgcggccgggttcaatgcgaagcactttgctaaggttttactggagtccggcatgctcacaccgccaagcagtggtcgtggttaccagaggaagtccccaagagtgaatggccaacaggttaacgtctatgtcctgcactacatgcctgaggataaacaagcagaagagtaa

SEQ ID NO: 438663 - DNA, 297 bp, Serratia marcescens
atggtgttgttcgtgaataacgatacgttcaatggactggggagttacggtgaagacgggacgggtttggcgtctctgatacgggaagcctggctgagtgccatacaactgagccaacaacccgaataccgaaagttggtacatttcccggataatccgctgtattacctggacgtcaatgctttaaactacaaaacggtttacgataaattcaccttcaggctgagttattttgcgaaggagcgcaccaagtcatacaaccggaatgaacgctcatttggctgcagtcagtcctga

SEQ ID NO: 438664 - DNA, 879 bp, Serratia marcescens
atgagcgggcatgaggtaatggtacaaagaataaccgctattattgcagaactttaccagtacggctttgtatcacgtaagaagatgatggacgaattcaacatcagtgagcgtactttgtatcgtgatcttaatcgtctgggcgacagaatcgtccccgatggtgatggtatttacaggctggctcccgcttacgctaaacctcaggctctaaaagaacaacaaaatctcatcaatgccctagggatggcagagttattccctgtaaaaaaaatcttctcccagcctgacatgacttcactgatcatcagatcgctgcccggagacccagaggcgaaacgcgtacttgagaataactatagtgtgttcgataaagcgattcgtgaaaatagcctttgtgaatttcattataaagggaaacatcggaccgtcgcgccttataagcttattaacataaagagcgtctggtatctcggtgcggtagagaatgaaaaggttaaaggattccagctcaccaaaattcattggctgaaatttaaatcagagtacttcacaccacaaccccatatcacacaatactttgctgaagaagatgatgtctggttttctttggataagcagattgtactccttaaaatttcagccgacgtaagccatttttttaaacgtcgaaatgttctgcctgcccaaaagttaattcgtcaggaacctaatggcgacttgatcgtgcaaaccaaaatggcacacgaaaaccagctattcccattattacgttattggttaccaaacctcactgttatttccccggttagcctacaacaacgtttttatcagaagctcaaccagcaaataatagaaatgaaaaacccattgcagtga

SEQ ID NO: 438665 - DNA, 846 bp, Serratia marcescens
atgttacgtggttcagaaagaaaagaagcattagccagtctcaaaagtgcaactaaccgttatgaagtacaggctaaagacacccaggatgagatcactgccctctttctgttacgccagaaatgcagtaagaacctgattgcccgtggtgaaaattttgttaatcgactggcgaatacaccgaaagagtttgataaatcctggagcgaattgaaagcggaaatcgctgaatttgataacgtggtggaaaaactggaagaagaataccgcgcatcacatattggtaaaggaacggctgctgcgggggttgccgtaggggcgggggtcgccgcatttgcccctacggctgcgctggcggtcgcaacaacttttggtacagcatccacgggtaccgctattgctacgttaagcggagctgccgcaacaaatgcagccctggcatggctcggcggcggcgcactggctgcgggtggcggtggcatgtcagcaggaagcgcactactggctctggcgggtccaataggctgggggattggtgctgtaggcatcgctggcggaaccttactagcccgtcgcaaaaacggtaaaatcattgatgaagcacaacaggaagagcgccaggttcgcgcaaaaaccagcgaacttcgcgtgatggaacgtggtgcgcaagaactcaagatgctcacatccgagcactatcatggtactgaaagcattattgatgtgctggaaaaggctgcgcctcaagactattgccagtttaatccccatcagaaagatcaattaggggcattgattaaccatatcaatgcattatcaaaactgatcaacaagaaaatccagtaa

SEQ ID NO: 438666 - DNA, 1446 bp, Serratia marcescens
atgagcattaaccataatacagttggcgaccagcttatcggcagcgcggttaacgccattaatcagacccgcattgataatgaactgttaaaactatcgcagcaggatcgtgcatttgagttggctggcgaacaaatgcaaaaggtgcgtgatttcatcgcgtcaccgggtaacatcctgggctcaatgagcaccaaacacggtgaaattgctgagcaggtagaagttggcgtgcgcaatgctcgccaagcaatagaagaaagggttcaggatgcctctgatcttagcgccacgtttgacggagtgggtcgaaccgctccggcggattatatgatagatggcgttgacgtgcagtcaaagtttatcaacggagttaataataacctgaaccatgtccttcagcacatggaaacctatcccaatttcacccagggagaatccttttaccatatccccaaagactcctggcaaacgattcaggatgttattgatgggaagccggtggagggcttgagcgaaaaaacaatacaggctatcagggataaagttgcagaaattgaaagtacaacgggaagatcctttaatgatgtcgtgcgtcctggagtttctgattacaaagatgttcagtggggaaaaattgacgaaacgcttgataaacatgatcaggaattagcggaacagaacgaggcaaaaaaagcagaaattattgacgatcaccaaccctctctaagtgaaggcatgcgtgcaaccgcaatgggagccgctttcggtggaacctttgctcttgtaacaggtatatatagcaaataccgtgacggtaaaaatatatttcgtggagatttcaacagacaggactggcaggatgtcggcttagatacattgaaaggtgccgctattggcggtgtatccgccggagcaatttataccctgaccaattatgcctctctgggagcaccgttcgccagcgcgctggtcactgccgctaaaggtgtaagcaatctcgctctctcctatcagtgcggtgagattaatactgatgagtttaccgatcttggccttatcatctgcgcggaatcggccatcgttggcgcaatgtctgtcgcaggtcaggcaatcatccctgtgcctgtgttgggggcattagttggttctatctcagggaagtttatggttacagtagctaaaaatctggacagtaaagcacgccaattgctggcgaaaaaaatggagcaatttacatgtcgcttaagtgagattgagcagaaagcactcaaccgaattttgaacgagttcgcggcgctgggtgagcttaccgcagctgcatttagcgtggaaaacaatcgccggttgctggaagcaagcatcacgcttgcccaggcccacggtgttgaagaggcgaagataatcaaaaacgcggatgatcttgacacatttatgatggcgtag

SEQ ID NO: 438667 - DNA, 2292 bp, Serratia marcescens
atgtggggacttgatggtaaacatattgcctacgaagcttattcatttgattcaatgaagtttattttaaccgctgcatttgccagtggcctgcttgcagtacctgtaaaaaccaaggctattctacaaaacgggcttatactagccgatatcaatgccaaacttaaagagtattattgctgtttttatacgtcttactttttgatggcctgctctgcggctacaccgtttatagcctggcaatataatatctcatcttcactgatgtggtggacagggttgctatactggatagcagccttactgacacagttctatgcggcaaaccaaattcaggaactcaagaagttaactaatgccatcaatacagggttaaatgagcaaaaagcgatcaataaccaactttggctgacggaactaaaagaaggaagtaacctctcagcagaattcgtagagactatctatcttaagttggtctcacagcatatttttcagggcgatactcgagagcaggatctggctggtgaaaactggcttttaaatgatgcctggtatgaaagaaagatggctgaatttaatgagcagttaaacagtaaaattgtacactcatcagatgagctaagaagcctttttggtaataggctgaatttaccctctgctgcgaatgatgatctcctgaaccgttatcttgatggtgggaactattattctttttcggatggtcgaaaatttgtctcgtttcactatgtcgacgagctttgtacctgcacttcatgcggtttgagcgagattaaaaacgcaaaacaccagggcggtggtgggagccaggaatggtattgctctgatatttgccgggaaacggaaaaactctgcattgaaattcacaagcgaccacaggctgaatttatttccagtgcagcaacaaacggtctgattctcatgacactcccggaggcctggaatactaacgaaaaaatgtttgcagtgggaggacaagtacatggttttgcagccgaacggggaaatcatcttactgacaaaatccaactaaaagatgcacatattctcggtgatgataatgcgaaaaatggtgcagacaggctggttaacggttcagagattcagaccaaatactgtgcaaccgctgcacgtagcgtcggtgctggttttgacggacaaaacggtaattatcgctattatgacagtaacggaaccccaatgcagttagaggttccgaaagaccagtattcgaaagcgcttgaaacgatggagaacaaaattcgcgatggcaaagtccccggcgttaccgatcctgcagaagccacaaaacttgtacgtcagggacacctgacttatagccaggcacaaaacatcactaagtttggcacgttcgaatctatcacttacgacattgcggaaggatctatcatcagcctcgcagctggaggtatcagcttcggtctgacagcttctattttctacctcaataccggcgatcgtaaggctgcgttgcaaacggcagcaatacaggcaggtaaaacatttacccgcacactgacagtttatgtgacggtacagcaattacaccgtatcagtgccgttcaggggctacttaaaaatattgattttgccgctgccagcccgacagttcgtaatgcgcttcaacagggagtcggagctaacaatctcaactcccttaacaagatgatgcgtggcacactggttacctctttcgcactggtcgccgtgaccactggtccggatatgatcaaaatggtgcgaggtcgtatttctggggcacagtttataaaaaatctggcagttacttcatctggtgtggctgggggtgcaattggttctattgctggcggaatgatgcttagtccattaggtcctttcggtgctttagcaggacgcgcagctggtggcttgttaggcggtatgattgccacagcgatttccaaaaaaatagcgggtgcactagttgaagacgaccgagtaaaagtgctggctctcatccaggaacaggttacatggcttgcaacaagtttcatgcttacagaacacgaacttgaaaacctgaacgcgaatctggcaacagtaattgaccaaaaaaccctggaggttatcttcgccgcaaaagagcaagaccgagcaacggccaatatgctgattaaaccacttgtagtaagtgtggttaagcaacgaccggtcctgagctatgaacaatcgcaaatctgcgaaatggtcgatcagcttgatacatcggtttcattatctgctgttgcataa

SEQ ID NO: 438668 - DNA, 333 bp, Serratia marcescens
ttgcaggctctggctaacgaactggccaaaaaccttaaaacccctgaggatctcaaccagttcgatcgcctgctgaagaaaatcagcgtcgaggcggcgctcaatgccggaatgacccatcacctcggctacgataaaaatcagcctaaaccagcgaccaacgcccgcaacggctatacccaaaagaccgttatcactggcgatagtccgctggagctctacgtacgccacgcgatcgtgatagctccttcgaacctcaactggttaaaaagaaccagacccggatcacggggatggataaccagattttatccttatatgccaaaggaatga

SEQ ID NO: 438669 - DNA, 903 bp, Serratia marcescens
atggataaccagattttatccttatatgccaaaggaatgaccacccgcgagatcgccgccatgtttaaagagctgtatgatgctgatgtctcgccggctctgatctcaaaggtgacggatgccgtcattgagcaggttgtcgaatggcaaaatcggccactggatgctgtctatcccactgtttatcttgattgtatcgttctgaaagttcagcaagatagtcgcgtcatcaacaaatccgtgttcctggcgttgggtatcaatattgatggccataaagagtttctgggtatgtggttggctgaaaacgtgggggcaaagttttggctgaatgtgctgacagagctgaaaaaccgtggtctgaacgacattctcagtgcctgtgttgatgggctgaaaggcttcccggacgccatcaacgcggtgtatccgcagacacgcattcagctgtgcatcgtgcatatggtacgcaacagcttgcggttcgtctcctgcaaggactataaggccgtcacccgcgacctgaaagccatctaccaggctgcgacagaagaagctggcttgcaggcgttggaagcgttccccagcgcctgggacagccgttacccacaaataagccgcagttggcaggcaaactgggccaaccttgccacgcttttcacatatccagctgatatcattaagattatatacacaacgaacgccatcaagtcgctaaatagcgtaatcagacacgcgctgaaaaagcgcaaagtattcccgacggatgacgctgtcaaaaaggtggtgtggctggcgatccaggcagcctcgcaaaaatggaccatgccgttgaaggactggcgtatggcaatgagccgctttattatcgagttcggtgaccgcctggacggtcacttctaa

SEQ ID NO: 438670 - DNA, 1779 bp, Serratia marcescens
gtggctcgatatgaagatacaactcaatatgaacgcgatgtaatgacttcaatggggtactattggaatgggcatggatggcagcgaggttttgatctctcagatggcaacatggttgttgaaggatgggttggtgacggtttgcctgatagacagaaggaattgagtaatattacccatatttgggatcaaaaaatttccgatattaataaaccgataagtgcttttgatcctgaagatgatgatgtcacgccattcagtaatgaagccaaaaatagttttcgtgaagattcagataaagccatcgatttttctgctaaaaaagaaaatgaccttgataaccaaatcaaggaaatgcaaaaggatattgatacattaagcaagaaatccgaaaataatcaacagactgaattcgaaaaagcaaacctcaatgctattattagtaagttaaaggtaagtaaagaacgtctcactgttctgcgaaatgaagctaataaaagaaaagtgcagcaagaatatttaaagctgaataatgaagattggttcttctccagagaaaaacccacgtcctgggttagggaacaacaatcattaaatagaaatgaaatgggtaaaaaacaggaagaagtgaagaaaatccaatcagaaattgacacggccaaacaaaatgttgaacgtttggaaaatgagcagcgtgaaaaggaaagtgaggtaaatagacttaaagatttagacttgtctaccgaagtcggtttaaatcatgctgagagtgaagctcatcaaaacgaaagtaacgcacaacaagcgattaatgatgcgcaaaatcgtattaatcaggccaacaacgatagggtaacagcggagagtgtagcacgagataacgaaaacaaagcggcacaagctgaagcaaagagaaaaaagcatcaagatcttcttgatgaattcgtaaaatggaacacagaagttgattatggtaaagaagcatggtggaaagaatttaatggcgcaagtgacctgatctccagtttggaaaatgaaagaaatacagcaacaaatgcgatgaatgcggcaagagactcagcaaataaggctgccagccgtcttgaacaggccgagcgagataagatcaatgcggagaatgcgcttaacaatgcgcggaaaacgcttgcagatgttcaggctaaaaaagaggctaatgcaaaggctaaaaaagatgccgaagctaaagccgaagaggatcgggttaaggatgcattaaaagccaccgctgatttctataaagagacaacggaaaaatttggtgaacaatctgccaaggtagccaaagaactggctgatgccgcaaagggcaaaaccatcaaaaacgcggatgaagcattaaaagcatttgagaagtacaaggatgtgttgaataaaaaattcagtgttaaagatcgagaagctatctctcatgcgctagagtcgcttaaacgtgatgaaatggcgaggaatttcgccaagttcagcaaagcatttaaatatattggaaatacaatcgatgtatatgatacagccatggaattaaaaaaggctgtagaaacagataactggcggccattttttgttaaattggaatccttagccgctggacgtgccgccactgccattactgcatttgcatatagtattattcttggcacaccattaggtatcttcggttttgccatcatgatgacactggtcagtgtcttcgttgatgaaaaatttgtggagaagataaatagtgcacttaaaatctga

SEQ ID NO: 438671 - DNA, 1524 bp, Serratia marcescens
atggatattgaaaatgaacttaaccaattatttataaacagagcttcgggaccattcttgtttctaggttcaggcttttccagaagatatatggggcttgaagactggcaaggtttactcaataaattttgtgttatgggtaagccgtatgaatactataaaagcagcgcgaacggtgacatagcacgttctgcattattaatcgcagaagatttccatgacctatggtggagtagcgacaactataaagaaagcagagaaaagcattcaaatatagtcaaagataaatcatctcctttaagaatagaaataagtaggtatctagtagaaaaaacagaagatcgaaaagaagatcttgatcttaacgatgaacttgaaatactaaaatcctgtgatgttgacgggataattactacaaactgggatcttttgattgaacatttattccctgactacacaacgtacattggtcaagaggaactacttttttcaaacacctatagcattggtgaaatatataaaatacatggatgtggttcaaagcctgaatcaatgattcttactgacgctgactatagagattataatagtaaaaatgcttatctggcctctaagttaataacaatttttgttgagcaccctgttgtattcattggatattcaataacagatgaaaatattcgcgcattacttaaatcaatatcattatgcattggcacggaaaagttagaaaaattaagaagtaatctaatatttattgataaagatgaacctgctacaggggccgtaatcgagacgtcatatcttcattttaatgacgttcaggttccagtcaaaatagttaagacaaagaatttttcattggtttatcaagccattcataatttcgaacgaaaattaccggcacgtgtgcttagattttgtaaagaacaagtgtacgaaatagtccaaagtcaagacccacagaataagatagctgtagttgactacgataacataaaagataaaaaggatattgagatcgtctttgggataggtgttattggaaagctaggagatactggttatagggctataaccgtgcaagatttattcgaggacgtcgcattaaataataagaacttctcacctgagaaaatcctaacaatcactgtaacacaatataactacaagttcatcccagtattcaaatatctatcaaaaatgaatataggaacattagaggattataagaaatctggcttaaagctagaccaatatatccaaagagattttccagatgtcttcgcgagcagaaaggccagagacttcgttaagtatcagggtatgacatttaatgatttttacgatgcagcaagtgaatccgcatttttatcactggccccattacatcctgagcctgatgctgagtttattgcgcaattcatccgagaaaattatgatagacttatatcttctaataataaatatttcttcagaaaattaatctctttctatgattggcttaaatatggatttatttga

SEQ ID NO: 438672 - DNA, 2316 bp, Serratia marcescens
atgaaacatatcgtctctgccaccgtaaaggcggccaccggactgtggccgcagcttctgcccgccctcggcatcagcgtgcacgccggggggcgacacggtgcctgcccggtttgtggcggcaaagaccgcttccgctttgacaatcagggcggtcgcggaacctggctgtgtaaccagtgcggggccggtgacggcctcaacctggtggaaaaggcgcttgacgtcagtgctaaagaggctgccgtgaaggtggccgggatgctcggcacgctgccggagtccgccccggtgatgcctgatgaagccaccgaccgaacccgcgcgcaggccgatgccgccgcacgggcgcaggtactcatcgccgccgccgtcagccgcacggacaacgcctacctttcagcgaaagggctgcacggcacgcaggcgctgacgctttctgatgcgctgcgctgtggcggcatccgctttgccgccggggatgtacttatcccgctgaccggtgaagacggcacggccgttaacgtgcagctcatcagcgccgcaggcgacaagcgcaccctgcccggcgggcaggtaaaaggcacctactggctggcaggcgagccggacggcaaaacgctgtggctcactgaaggatatgccaccggcctgaccgtgcaccggctgaccggccaggcggtttacgtggcgctgagcgccaacaacctgcccgcgctggcgaaacggctgcgtgattcacatcctgatgcgatgatgctgattgctgccgaccgtgacgacaacggcaccggccagttaaaggcagaggaagcggctaaagcctgtggcgggaaagccgccctgccgccggttgcgggtgactggaacgacgtgtggcaggcgcagggcgatttcgccacgctggcgcagctcaccgacttcacgcagccgcagccgctcagcccgtttgaatccgtcagcgaggctgacctgaaagcaatgagcgccagccagaaagctgagctgctggtcgcccattacggagaggcgctggccgtgccgccggtcggggaggaaatctgccgctatgagaacggcgcatggcaggtgatagagacgaagacgctgcgccgggaaatcgccgcgctgtttcagaaagtgcgtgccccgttctccgctgccggtatcggcagcgtgctggacacgctcaagctgatggtgccgcaaatgggcgaaccgtcccgccgcctgattggcttccgtaacggcgtgtttgataccgctaccggcacgttcagcccgcatcgccgcgagcactggctgcgcaccgtcaacagcgtggactacaccgccccgcgtccaggtgagaacctcgcagaccacgccccggctttctggcactggttaacgcgggcagccggacataatcacgacaagcaggagcgcatcctcgcggcgttatttatggtgctggcaaaccgctacgactggcagatgtttcttgaggtgaccggccccggtggaagcggaaaaagcgtattagcctcgatcgccacgctgctcgctggccgcgataacacaacgtccgccacaatcgacacgctggaatcttcgcgcgaacgcgccagtgtggtgggcttctcgctgattatcctgcctgaccaggagaaatggagcggcgacggcgcgggcatcaaggcgattaccggcggcgatgcggtggcaatcgacccgaaataccgtgacgcctactcggcacacatcccggcggtgattctggcggtgaacaacaacccgatgcgcttcagcgaccgcagcggcggcgtgtcgcgccgccgggtaatcctgacgttcccggaggtgataccggcaaaggagcgtgacccgcagctgctggacaaaatcagcaccgaactggccgttatcgtgcgccacctgatgcagcgcttcagtcagccggaggaggcccgcgcgctgttacaggcgcagcagtcgtccggcgaggcgctggagatcaaacgccaggctgacccgctggttgatttctgcgcctacctgatgccgataagcaccgcgaccggcctgtttatgggtaacgccaatatccgcccgctgaacccgaagcgttacctctatcatgcctacctgtcgtttatggagtcacgcggccatcagcacccgctgagcctgaccgcgttcggccaggcggttccgcagacgctgaaagagtatgagcgcaccctgctgaagcgcaggaccaataacggcgtccagaccaatctcacgctgcacgaggacagcgaggccgactggctgcccgcgtgtagtcagtaa

SEQ ID NO: 438673 - DNA, 342 bp, Serratia marcescens
atgatgaccgataatcactcgtgcctgcccgttgaggtacgcaccgccgtttaccgccgcgcgctggcgcagggctacctgaatgcctgcaaaaacctcggcattaccgtatccgccacgctcgatgagttgcagatgacgattgcccttgagctggaaggcttctatgtgcgccgtcacggccccgatgcgggcatggagatggcctgcaccatgctgggcgatatggtcgagcctgacctgctgaccgcgccgccgcgcctgacgcagctcggcgtcaccatgatggatgagctgttccgcagccagcttgcgaccgccagccgcaccacgctgcactga

SEQ ID NO: 438674 - DNA, 267 bp, Serratia marcescens
atgaacacccttgcaaaacgcctgaataacagtgacacctacctcattcctcacgctgactacctgcgcctgctgcacgcgcacacggtcggcgtgaccgtgctcgatatgttcgacacggtgaactgcctgagcgcgcgcggctgcgtgccggatggcgcggcgctggcctcggtcgtcgccctgctcaccgaccagctcggtaaagtcgttgaaacctgtgaatcccgcatgttcgccacggaggcccgccatgatgaccgataa

SEQ ID NO: 438675 - DNA, 528 bp, Serratia marcescens
atgtgtgaaaaaaggctttcctctggcgagcgaccgttatacagttttcgcgctgccgcaaaatcggcagccgggatttgcagcccgtgtaactcaatggcgacaccacacgcgccacgcgtgtttttttgtgtcattgctctggcatacccatttttcgggctgtggttcttagaccgcagccgccgtcaaataatggtggcccgggcggggcagccttcgggctggccggtatccattgaggccggtactgcaaaccccgttcgggccaccacccatgagatttgcagctccggtggtggcgttaaccgctactcgatggagattgtcctcatgacaacggcccttactgccgctcaccccgaattcacctttatttttgccgccgtgcgccgcaccgatgccgccgcacgtccctgtatgctgcgcaccgtggcaggcgatgagcgcagcgcccgcgccagcctcgcccgcgattacgtcctgtcctttgctggtcgtctgccggttaaggcggtggccgcatga

SEQ ID NO: 438676 - DNA, 249 bp, Serratia marcescens
atgattacgctgaatttcggcactaaaacttaccccctcacccgcgcagaagccgcctttgtcgcggaaagcctgacggcagccgtcagcggcaaacccgccccggcaccggcttttaccagcgggatgcacggccatatctccgttctgagtcagaaagcgaagcctgcaaagcgaagcgcaaagaaagaggacggtgaattccgatcaaatccgccgcaatccgatcacgtcctgaccgattgctga

SEQ ID NO: 438677 - DNA, 258 bp, Serratia marcescens
atgcacgcagtttcatccgtaccggcccccgccatccccgtaatccgcgatgccgttttcccccgcgaccgctttatgcgcctgccggaagtcatcagcacctgtggcctgtcacgctcgaccatttacgacttaatcagccgtgagcagttcccctcacagatttccctcggcggtaaaaacgtcgcctggctggcgtcagagattgacggctggatgcaggcccgcatcgcccagcgccccggtggtgcagcatga

SEQ ID NO: 438678 - DNA, 717 bp, Serratia marcescens
atgaccatcccggaacagaaacctgcctcactggtgcgcttcgagaaagcccgcgctgaacatacggaaagaatgaagacctataacggcatctgcgccgatatcgcccgctgtgagaaagagcagcaggcggccattgaggcaggaaaagaggccgagagccactggcgcacgcgcttccgtaacctgcgcggcaatctcactgacgagctgcgcgccgaacattctcagcgcatcgccagccgcgagctggccgatgagtttggcgggctgctgaaagagctggcgctcgataagcaggaggcgatgcttaaatgctgcggcagtggcaaagagtacgtggaatcacaccgcgaggcgtttaccggatttgcggatgcgcactggcagtcggccctgcgtaacgtgagtccgtcactgctgtgggccattaagctgcgtctccgtcgtgaagaactttccccgacgtttgccggtgatgatcgggaccggattaaggacgtggccggtctggtcggtgatgcgctgacgcgggcagcggcggctctgccggacagtgtattgaaagatgctccgctgctggagattatcggcctgcatcgtccggcgctgacggggattgatatgaagctgtatggcaaccctgcttaccgcatgaagtttgtaaaggcattacagcaggaacgtgcggcattgcaggaggacagccagaaatga

SEQ ID NO: 438679 - DNA, 252 bp, Serratia marcescens
atgatgcactgcccttactgcagaagcgcggcacacaccaaatcgagccgctatatgtccgaacaggtgaaagagcgttatcaccagtgcactaacctggactgttcctgcaccttcaagacgaatgagagcatcaccaaagtcatcaccgccccaccacagccggaaacaaaactggcagcaccgccggagccggtaaaggaacgccagacgctgggccgttacggttcttcattccgccaggttcattaa

SEQ ID NO: 438680 - DNA, 1383 bp, Serratia marcescens
atgagcgactttgaaatcaacggaaaacttgtatattttttagatattcttgagagtattgaggatgctttaccatctttaaaaaagaatcttcttgacgaattcaacaataagaaagctgagtgtgaaagttttattgaggctcatgctaaagaaatcgaaagaaaggaagatggaaaaatatcaagttttttaatgcataggagtaagacacctgagctaagaaaacttcgtaaagaaagagataaatcaagaaagttacttcttgttatccctactaatttcttggtggcaattgttagtgaatatgatgcctttattggagatcttattcgagaaatatacaagaataaaccagaaaaagttaatagtttagagaaggagtttacatttaaggagataattgaatttgggagcatggaatcaattaaggattttgtgattgaaaaagatattgaaactactttgagaaaaagccatcttgaacagttaaatgccctagaacgaaagtttactatagaccttacaaaagacctgcctttactccctgattttattgaaataaccgaacggcgaaacttatttgttcattgtaagggtatagtttcatcccaatatataaaaaactgttctgaaaacggtgtcaaactcaatgacctgaagattggcaatagattatatgcaacaaatagttatatacttcatgcaatagatgtattttctgagctggcgatcaaacttacgcatgtactttggaataaagtttttaaagaggattcagaaaaaataggtgatagcatacatgatatatcttatgaactgctatccagaaaaaagtatgagctattaaactcactgtccccactatttctatcaaaaccttttagttcaatcggtgaagttacgagacgagctctactagtaaaccattgcatcgctttaatagaaagaggccagaaagatgcctcagataagcttcttgatagttatgattggtctgcatctagtccaattttacaaatggctgaaagaattcttaaagaggattataaaaggtccacgatgtatatgaagcaggcgtatcaaatggatgttcttaagaaagaacacattgatcaatggccattatttatgcatttcaagagtagcgatgaattcaaaagtctttatgatgaactatttggtaaggacgaaactatcaatgtgacaataagtgaagaggacattcaatcgaaggaagctgaagctgaagctgaagcacaagtacaggcacaagcgactttagaggcggaaggggtagaggatgggcagcagacggaaactacatcagtatcacaacctgtagcccaaactgagtctgaaatagataataaacaatcttag

SEQ ID NO: 438681 - DNA, 678 bp, Serratia marcescens
atgaaaaacgcttatgtatttgacttgagatttgtttgcggtggttatagctacttctccacttacacccatagttgccctccctggggggaaacactagaagtacgagagccatcaataattacagtcaataaattcatcaccgctctgaatgatatgggaaaggaatattgcttaattttagatgagaagtctttttataactggacttgcattcaaggatggggaatagttgaggtaaacttcgctagagaattcattcctcactggctgaaaaaaagaaaatgtatggtaactccttttggctcatttactgacataaaccttgcatcaccatcagtaagaaaacgtacatttagaggaaaattcaagaaacgtatccttgatagagataacaaccaatgtgtactttgctctaatacggaaaacttgacattacaacatgttgtgccctattcaagaggcggggaaactagctaccgcaacttagtaacactatgtgataattgcaataaaagattaaagtctgagtatatccctgggttgtttaagcgagcaggattaattagtgactttgagttatcattattgagaggtggatatacaaatgaaggcgcaactatcagggccgtacagttctcttcaaatctaatgcacactcgagttgatctatattaa

SEQ ID NO: 438682 - DNA, 708 bp, Serratia marcescens
atggatatatggaactcaataattgagaaagcattacaagaaaagagtaaattccctgatagagccgcaagccatatgatgattgatccttccagaagggattatctcaacgttttatgcgaaaatttcatgttacatttcatatcggaaaacgtcgtttctaagcatggcgggagctataatctttatgctatagattatgatgtatgcctagaaaacaatattaaatatgccaatagaaaagatgattatacaccaatacgctttatctacgatggagtcctatcaaaatatgacccttattttgtaaaaaccaaacgtaaaagctacaagtgccctaaatgtaacaaaatatatgatgaagctgaacttataaaagtaaagataaaacgatgcttcgaagacgatgaaaaactcattgagataattcatcaagatgcacctgtcacacatgggaatttcgcggaagttgaaattaagatactgggattaataactcaactaacatttagtgaagctatgacagctcgtgagatagctgatgccgttggttgtacaagacaaaagatctcagcatggggaggccgggttttagaaagggagggacatattaaaattgataaagaatcaaaaccacatcgttattacgcaagtgacctcgatgaactacttaccacacaggatgaagtgacgaccagtagtcactag

SEQ ID NO: 438683 - DNA, 1107 bp, Serratia marcescens; identical to SEQ ID NO: 383424

SEQ ID NO: 438684 - DNA, 3099 bp, Serratia marcescens
atgacaacaacaatgggttttgatagcaaaggaaacgttcgtcgctcaccgtggcggctgaacgcgctggtctgctgcatggcgctggcggggtatgcgcaggcagcaccgcacgaggtgaacggccaagccggcgatccggccagctggcgcagcgccgaattcaacgccaactgggggctgggggcgatccacgccgatgaggcctatgccgcaggctataccggcaaagggcagaaggtgggcattttcgataccccggtcaaccgccatcccgagttcgccggcgacggcaaactgatcaacgtggtcaccgaaggctatcgcgcctacaccgatccgcaccggccgggcattaacgctggcgaccgcttttacttcgacggcaccttccatttctataacggggcgacgttgagcaatcacggggtgcacgtcgcgggcatcagcgccgccaagcgcgatggcgttggcatgcacggcgtggccttcgattcgcaggtgatcagcgtcgataacgacaacgacggcccggcctacggcgaatttctcggcttggacggcgccgtcaccaatgctggctggcaggcgatgatcaacagcggtgcgcgggtgatcaacaacagctggggcgtcagtattcccgactttctgtccgacggcggccgcgatcctaacgcgctgcactttgagctgaaggatgcgcaggaacaattcgatcaggtcaaaccgctgctcggcagcctggccggcgcaggctatcagggcgccatcgacgcggcgcgcaaaaatattctggtgctgttcgccgccggcaacgacggcaactacaaccaaccggatgtgatcagcgggctggcctacttcgtgccggacatcgcgccgaactggctgtcggttgccagcgtggcgcaggatgcggcatcgaccaacagcgtgccttacaccatcagcagcttctcttcccgctgtggctataccgccagcttctgcgtctcgtcgccgggcagcaaaatctacagcaccgtggccaacggttccgatccggccaacctggtgtcggactacggcaataaaaacggcacctcgatggcgacgccgcacgtcaccggcgcggtggcggtgttgctgcagcgcttcccgtacatgacctcggcgcagattgccgacgtgttgaaaaccaccgccaccgacatgggcgcgccgggcatcgatgcgctctatggctgggggatgatcaacctgggcaaggccatcaacggcccgggtatgttctataccgtcgaggatattcccgcggagttccgcatcccggatccgacgggcgtggcctatggcccgacccagtttgtcgccaatattccggggaggggtgccgaggtggatgccggtacgctgcacgccaggaaatgtgatgacttccactgtggatgggaaatctactccaacaacatttctggccacggcggcctgaccaaagagggcgcgggaaccctggagctgaccggcaccaacacctatgccggcccgacgctggtcaatcaggggcggctggcagtcaacggctctgtcacctcggccgtcagcgtgcagaacggcggcaccgtcggcggcagcggcacggtcggttcgctgaccgcccgtcagggcggcaccgtggcgccgggcaactcgatcggcaccctgaacgtggcgggcaacgtcagcttcgagccgggttcgcgctacgcggtggaagtggggccgaacggccagagcgatcggatccagagcagcggatcggcgacgatcggcggcggcgaggtagaggtgaggctggagaacagccccaacctgctgacgcaaagcgaggtgcgcagcctgctgggccagcagtacaacattttgagcgcgcagcagggggtgagcgggcagtttgacgcggtggcgccaaactacctgttcctcggcaccgggctgagctaccagccgaccggggtgacgctgagcgtcgggcgcaacggcacgagcttcgccagcgtggcgcagacgccgaacgagcgtgcggtggcggcggcggcggatgcgctggcggcgggcaacccggtgtacgagagcctgctcggcagcggtacggcgggcgaagcgcggcaggcgttccgtcagctgtcggggcaaatccatgcggatatcgcgtcggcgctggtgaacgacagccgctacctgcgtgaggcgctgaacgggcgtctgcgtcaggcggaagggctggcgagctcgtcggccatcaaggcggacgaggatggtgcctgggcgcagctgctgggggcgtgggaccacgcgtcgggcgacgccaacgccacgggttatcaggcctcgacctacggggtgctggtggggctggactcggcggcggcagccgactggcggctgggggtggcgaccggctacacccgtacctcgctgcacggcgggtacgggtcgaaggcggacagcgacaactaccacctggcggcgtacggcgacaagcagttcggggcgctggcgctgcgcggcggggcgggctacacctggcaccgcatcgacaccaagcggtcggtgaactacgggatgcagtcggaccgcgacacggcgaagtacagcgcgcgcaccgagcagctgttcgcggaagcgggctacagcgtgcagggtgagtggctgaacctggagccgttcgtgaacctggcgtacgtgaacttcgagaacaacggcatcgcggaaagcggcggcgcggcggccttgcgcggggataaacagcacacggatacgacggtgtcgacgctgggcctgcgtgcggacaccgaatggcaggtgaccccgggcacgacggtggcgctgcgcagcgaactggggtggcaacaccagtacggcggtctggagcgcggcaccgggctgcggttcaacggcggcaacgcgccgttcgtggtggacagcgtgccggtctcgcgcgacgggatggtgctgaaggcgggggcggaagtggcggtgaacgaaaacgccacgctgtcgctgggctacggcgggctgctgtcgcagcaccaccaggacaacagcgtcaacgccggtttcacctggcgcttctga

SEQ ID NO: 438685 - DNA, 1281 bp, Serratia marcescens; identical to SEQ ID NO: 383436

SEQ ID NO: 438686 - DNA, 195 bp, Serratia marcescens; identical to SEQ ID NO: 129415

SEQ ID NO: 438687 - DNA, 222 bp, Serratia marcescens; identical to SEQ ID NO: 383433

SEQ ID NO: 438688 - DNA, 213 bp, Serratia marcescens; identical to SEQ ID NO: 383432

SEQ ID NO: 438689 - DNA, 372 bp, Serratia marcescens; identical to SEQ ID NO: 383431

SEQ ID NO: 438690 - DNA, 297 bp, Serratia marcescens; identical to SEQ ID NO: 129411

SEQ ID NO: 438691 - DNA, 1071 bp, Serratia marcescens; identical to SEQ ID NO: 383429

SEQ ID NO: 438692 - DNA, 1302 bp, Serratia marcescens; identical to SEQ ID NO: 383428

SEQ ID NO: 438693 - DNA, 1110 bp, Serratia marcescens
atggaggaaggaaggctccataaaatgatgatagagtgcgggtatcgctatacgctagcccgcaaacttcctgaaaaggcgttcctacacagtcaggaacgcctgaaaggctattatacgaaagaatatgaaaccgaagccggaaatttcaatgtagcactagttattcggccagatccttttacggaactgccattagcttgcatagttgatctgcctgaaaagttcagagatcgccttatgcctcacataagccaagaaggaattctctgttatgtagagcagttggaagctgattgggatccaaacaaccttgagggtacgtacaaagaagtcgatgcccagattcaccgaacactgattaattcagttttagccgctactaatggcctgaatgataagagagaactcgaaggtgaatttgcaacttactggcgacctagtgatagtttatatattttatcaaaagcaagccgcgggatcagacttaagacactgttttcagagtcaacatttcctgatggttctcccaggctagaatatataactgtccaagaatcctctcccgaggactctgaaaccattttaaaaaaatggcttaatcaaagataccttcgtcaagaatctttgaaaaattattctatcaacactcattatatttctgtaaaccctaatcgtcttgctgggatgaaatggccaccgacttcattccgcgaattactggactggctagaaaatgcggaccataatgccagggacagagtggttcactacatcacaacagaggggaagaaaagatatatttttttattcgacattttcaatcaagatatatttgccatctatattgagttaaatactaacgctgttgatttcagaaggcacaagagatcagctaaaaaatcaacgtccaaacttgccacattgttagctggtaaaaatgtatgcgcctcatataaacgattgggtgtggttcgcgctgatatggcaaccctccttagccgaaatgcccaaagctttagttggttgcggaaccattggtgggtatattgcagaattgttactccgaaacggtgccggttgtgggaaaggtttactgcatttatttga

SEQ ID NO: 438694 - DNA, 1131 bp, Serratia marcescens
atgcgtaagaatcttgatatagaaatgcttcgagcaatagcaataatctttattttatttgctcatttatataacttattcccttggcaatcatctggcttggcaaaagtatatacatatttggatttgtggaccggagttgatttgttcttttgtgtgtctggctatataatagcctcctcgttaataaacaaaatacctacagaagcatccgggaaagagtttttcaagtttgcagttcctttctggattaagcgggcatggcgactctggccatctgcctggctgtggcttacaattttgcttatttgtagcttaacccttcgtcagagcggttattgggggcatccagggcaaaatgccatgtatcaaacgtatgcaatgctacatattgcaaatttctacggttttgaatgtcgtgcacaatacgacttgccaagtttgttagattatgcctgtggtgccaatcaaatttattggagcctatcaattgaagagcaattctattttatattcccatttgcggcagttttcataaaacgcaagtatctaatcccatttttctttatggtttttgcaatacaatttccactcaaccgaggcggttccgttctgggatatatcagaactgatgcaattgcactaggtgtcattattgcgctatgggctcgctatgagagctacaaattgttagagccaacagctttaaaacttaaaagatatgctatccccaccattgcaatattactatttatgttaattgaactagggaactctagaatagcagcaatttcattctcaacagggcttgttgctgttgtagctggtattcttgtgtgggttgcaagctttgataaaaactacttaacttttacactagctcttaaaaaaatagcagcctacattggttcaagatcatacactatatatttagctcacatacctgtctactttttaacaaaagaaatatggtggcgatatcttcctgatggatttcaccctgacggaagctatacatttagatacgtaataactgcgatggtaattcttgttgtggttacggaagtaagctatcgatttatcgaaatacctttaagaaacaaaggcagacgcatcgctgaaaaatattaa

SEQ ID NO: 438695 - DNA, 417 bp, Serratia marcescens
gtgaagaaatttctgattaaggcactcatagcctcaacctcgtatgtagttctggcgcttctggcttacggttcacttgctggcataacgtcgttggttggagtggccgccgccgtatattgggtaatcattgtccttggcttgctcgttggcgtattgatatctattttcagctacgtgatacctggcgagaaggacgagcagaagaaacaaaaactgataacaattgttcaagaagcagtgaagaagagaaacccaatactacgcggcattagttggattttttttatcgctatcaccttactgctggcttactccggatgggtgtttactgcggtgagctatgcgttgtctgcgttaatcgtaaagtttttgctctctatagcacgagacaacgtgaaggaagccacgtcgtaa

SEQ ID NO: 438696 - DNA, 954 bp, Serratia marcescens
atgagtttgatcttaccttcgcgccctctggttgttctgccagagttagctgcgcgcattggtttgaatcaagctattgcgctacagcaaatacattattggcttgctgacacggcatcaggcgttgaatacaacggtaggcgctgggtttacaacacgatggaagaatgggccaaacaattcccattctggtctctatctaccgttaagcggacattctccgatctggaacgacaggggtgtatttacgtcgagcagctcagcgaggacaagcgggatatgaccaatttctacgcgattaactatcaacatccagctttgagcagtgacggtttattcgatagttccattggctcaaattgcaccattccatcagttcaaattgaaccaatgcataaggtcagcgtgaaacgttgcaaaggttcaaagagagccactcccatcgggtcaaattgcaccaatgttcatacagagattactacagagagtacatcaaatataaaaccctctagtcaggtcgctgcgcaaccagacgatccttctgatgaggtgtttttatcccggcacccagaagctgtcgttttcagtgccaggaaaaaaatctggggcagtgctgaagacctgaaatgcgcggagtggatccgctctcgcattgtgaagctgtacgagcaagctgcagaaagcgatggggaggtcgcaagaccgaaggagccaaactgggctgactgggcaaacgaaattcgcctgatgtgttctcaggacggccgcacgcacaagcagatctgcgagttgttcgcgaaagcaaaccgggatccattctggtgcaagaacatcctgagcccgtcaaagctgcgtgagaagtgggacgacctgacgctgaagcttagcgttaaccctgcatcaccggctggtgctcattggaacactgctgaagcatgggagaacaccctatga

SEQ ID NO: 438697 - DNA, 486 bp, Serratia marcescens
atgacaaccatcaagcgctttacccctgactacaaaatgcacgcagttcgctttgaggctttcgcacgtgaagctgagcatggcgagttagttcagtttgatgaccaccagcaagtagtgagcaccctggaggctgagcgcgatgcgctggctgtggagaatgcggcgctgaagagtgccataaccgggaaagcctatatcgactttgtgacatccaatggatggaacccagggatgaaaaccatcaacggcaagtttgccggctttatggatgcagagatcgatttcgggtgcatggcatatgaccatgccaagaagttgatcgatgcggtcgaaaccccagccactgacgcagcacttgcagctatccaggcgcagggagtggagatggctgctgtgaaaatgcaggagtctggcgctcagacattcggtgattgctacatcgcattggttcagtacgccaacgagctgcgggaggccaaatga

SEQ ID NO: 438698 - DNA, 726 bp, Serratia marcescens
atggtcgcaggctcgctggaagtcttcaggaacgttctctttcatgaacaaccacagatcgtcattgcgattagggcacatccagcagagcgatgcgggcggggttggcaggccgtaatcttcgacgcactggatgcacatttgctttgtcatcatcatgtcgataagtggataacggcggcgccatttcccatctgtgaccttcatgcggcgcgctgcttcttcgatgctgatccccatccacatatctacaccgcgtgcagtcaggtatttctcgccgtatctgtcgttgagaaatctctgcactacctcctgcttccatttgacactgcagaatgttggctttttgccggtacaccacccattcgcatcgcggccgttacgtgtggagaaatacccaggcaacggctcatcttcgtttggcccgacgatgtcgtaggtggcgtaaaggcttttcggaacgatgtgatattcgatgccgacttcatcgcaaagcgccttgatatacttggcttggtatgcaaaaacgttgcttgcttcgcgctcggtgtccgacataacgatcacgtcgggttttggcaagacgcctgcatgaatcaggcagatcattgcgttgctctgggttccgccaccgctcgaaagcacattgaagcgagcggggttgtgcttaaactggcgacgcggaatgaaggatttcatgaatctacccacgctccacctccctag

SEQ ID NO: 438699 - DNA, 195 bp, Serratia marcescens
atgaacgaaaagctatgcagtgacgatgtaaaaatcattaagcaccaaatcattttcaagaaaagccaaatcgagattgtcgattttatggtgcgccaatttggccttgaaaaaacagaggctgaatccgtctatgagcagctggtaaccgaagtccaccgcgaccagaagaaaattcgctatggcgattcttga

SEQ ID NO: 438700 - DNA, 573 bp, Serratia marcescens
atgggcaataagctgagcgaactgagcaagccggtggcgtattctctgcgatttcggaacatgaatggcgagcctgataaaaccatcaacgccaacaccaccttctctacgctggagaaagccaaggcgtatggtctgggtagccggtatgtaacgcaagacgacggcaagatagttaacgttcgcgatccgtcacaagaccctatcgttgagccgctttactcgcaagagtacgtctccgccctgaaacacgaatccgcggttaactgggaggctgctgcatcgctgaacgttgaaaaccaggagctgaaaaagcgcatcaccgagctggaaagtgccaataaatcacaggacgaccatataaatcagcagcaagacagaatcgactcgctggagaagacaaacgccgggttaggccgacggcttggcgacgcagaaaagcggctggctacgccggtgcggttgcaatcgccgtgggtggacaaagtaggcaatcgctggctgctggaaggaacgacagccgatgtaatccgtgccagcgggtttgcggtcaccgtagagggggatgagtag

SEQ ID NO: 438701 - DNA, 309 bp, Serratia marcescens
atgaccgaattaatcaagccaacgaagaaaggtttgaacgatggtgctgttgaatatctgacgtctgacgattgccgttttttggttatgcgtggcgactataccgaggccgatattatccaggcggcggtaaatcacgaccaaatcgatagcgacattgctgagacttgggcgcgtgccgctcgatattaccaatcctggtacaaggtaagcccgattggtggtcaggatggttacggcagttggaaccacccacgcgatacgccgtgccggggtgcctatttcgcatcaacattgtgctgggactga

SEQ ID NO: 438702 - DNA, 255 bp, Serratia marcescens
atgaaatctataacgctgaccgaatgggcagagagtaaatttagccagccttacaaaaagggaactctttggatgtgggccagaacaggccgtatttatccaccgccggaaaagattgggcgcaactggtgggtaaaaccaaatgcagtgtacgtgaacccccaaaacccgaaggatgtggcgcagaaagctaagcccaccagcgaattaaaattagtggagcgcataaaatatggcagccagaccgagaattaa

SEQ ID NO: 438703 - DNA, 1086 bp, Serratia marcescens
atggcagccagaccgagaattaaaaaacacaaagatctacccccaaacctctatgaaagcggtgggaattaccaatggcgagatcctcgtgatgggaggcgatatgggttaggaagagataaaactgcagccataaacgaagctgtcgaagccaacctgatgatttataaagtgcagaacaaggtgaggttagctgacagacttcaaggtgctgatgttttgaccctaagcgagcacttagatcggtactttttgatcctaaagaaacgtgatctagcggcgaccaccctgaagcaacgcgagttgcagatcggttatatcaaggaaaaaatgggtgatttgttgctttcgcgtgtgaccacaaaagacattgccgacatgatgaatagttataccgaacaggggaaaaaagctactgcagggaagatgcgtcagatccttaacgacgccttcaacgaagcgatagcggcgggagtattgaaagaaaacccggtgaccccaacgaaagcgccagcaaataaagttcagcgaagcaggctgataattagcgaatatcgtcagatattggcggaagttggtgacagtgagccgtgggtgaaaaatatgtttgatcttgcgttggtaaccggccaacggagggaggatttagccgcgatgaaatttagggatatccatgatgggtttctatgggtggagcaaatcaaaaccggcgccagagtatcgctcccattaagcctatcgataccggaagaaaaccttgtgttggaggaagtcatttcaaggtgtcgatcatccggtgtagtaagcaagtatttactgcatacgaccagagggacgaccaaaggatgtgggttaaagccggggacgttatcaaaaggcttcagcacagcgagagatagaacagatttgaaatggcaaggtaaggagccaagccttcatgagatccgcagcctatccacccgcttgtatactgacctttatggaaaagaagttgctcaggccatcatgggccataaaaccgcagctatgaccgacctctaccgtgatacgaggggggctgagtggattagcatcaagttgggttag

SEQ ID NO: 438704 - DNA, 663 bp, Serratia marcescens
atggaagagatttctaagtatgcatggatgtttagtttaaccagtattattttagttttgataggttggagggttgtatatggaaatgcaaaaaaactcgccactcgttctgagagtaagtccctaattgatgctacatcaaaattggtgaatgaaatatctgatttatcaatggagtactggcttacaaagtgtaaggattcaagcaagaaacagacgaagtcaggttattttaaaagcaacgccaaactcaaagcaagtaacgagtcaaggctgtatgttatgaacgttatggccaaagcaagccaagcatcacgctacatagagatcttaaaaaatcgtgggctggtaattgataatatgtacttggctacgatttgtgagaaggcaactctagactgtgaaattgcaagtaggtttagtgttacttcacgcgcaacacgtgctcaagaaacgatggcagcttgcatggatacattagcaaacatgtatggttcatttgaaaactgccatccaccgagcaaagagattagcctggtagattcggttaaagataagctaaatgaactggatagatggcatgatgagcgcgattttttgcatggtgatagagtccggagcttcaatgaaacgaatgctccggaatcttctaacccaacttga

SEQ ID NO: 438705 - DNA, 327 bp, Serratia marcescens
atgattaacatagtgattgctaaagatttctctaagacgccttttggtcgttatacgactgatagcccaaacagtgctgagcgcttccgtagagacttccttgtgcctgccttcaggtctggagaacaggaagttgttgtagattttcgtggagttgctcttggcatcgggtcttcgtttcttgaggaggcttttggtggtcttgttcgtaaagaaggcttgcctaaatcacgcctgaaggggcgcttagtgattaaaagcgacatgccattctataaagaacagatagagaaatttatcgatatagctgagccggaggcccgctga

SEQ ID NO: 438706 - DNA, 924 bp, Serratia marcescens
atgacagtcatacaggctccttctcgactttgcgtctactcgaacgcagatagatcaggcactttgaattttcttaatctcatcgatgcgatagttttgaagcagcatcgaaatgttactctagacttatcaaaggtttcttttgcatctgctgctgcatcggtcttattttttgcgatcgtaagcagggctcagtttttactggaagatgcgaactatattcgattcaaatggccaaagaaggaagacaacccggaaggtcatcgttggattatgggcactggtttagccgttgcgttgctagctggtaacgaggaaaaacttgccaagttgacgaaggaagaaaggtttttccagtcagctgttgagccatttgagcacctcattgaaacggtgacgatgcttcagaaacaagcagttcttaaccctgaacaatttagtttgcttgcatcagcgataagtgaggccatgctgaatgtttctcaccatgcctatgagcaccaagactttttgtctcaaatggccattttaggtggaaagcgctggtggcagtgtgcatggtttgatcctgagaaaaatgcggtagttttcatcatttgtgacctaggattaggcattcaccgttctttcggagctttaggtggtgacttagacaagcaaaacgaagtatcttctgttcaaacggctcttacgttaggtcaatcaaggtttgttggtttaggaaggggcaatggttccgaagacatcaagaggcctatcggaacgggttgtgcagagtctgaaacactcttggttttaaccggacatgcgagataccgctataattctaacgacgctatacctcgatgtgagcgtctttctgaatttatacctggtactttagttgagtggtctttagtcccgaggagaggagaggatgattaa

SEQ ID NO: 438707 - DNA, 3840 bp, Serratia marcescens; identical to SEQ ID NO: 428139

SEQ ID NO: 438708 - DNA, 192 bp, Serratia marcescens
atgaaaaaagccggttttctgattaagaagctggcgcgcaaaccgagcaagcaaacgtggacgattgacctacccgcccgcgccttcctcggcgtaagtgacgatgaatttaacgtgatcctggcccgccagctgcaaggcatcgggttcggctgggaagtcaaagcacaggatatcaaggggaaactatga

SEQ ID NO: 438709 - DNA, 138 bp, Serratia marcescens
atgtactctcaatactggtctgatttcaatactgtgtttttgatcacaatttttggctgttttttgcacagtgagggctgttttataacgctttttatgggcaagcgccaggaagtagcccgccgcagcgggctataa

SEQ ID NO: 438710 - DNA, 294 bp, Serratia marcescens
atgaaaagtagttacaaagtggaagacgatcgccccacctacgatgaaaagatcacggaatggctgcatcataaagatgacgccgaaagcatgaccaattacaacattgggctttatcacgcgggctacatttaccgcgctattctttgtcgcggattgaacgagtatatggaagcaactaattttcttgatgaaattggcctggctaatgccttgcctagcgatgcccgttatcaaggatatgacgcactttttgccccgaacgatgaggttcaaaaactgaaaaacagatga

SEQ ID NO: 438711 - DNA, 240 bp, Serratia marcescens
atgccaactatcggccaagacatgagcaaccgcgccgcgcgtgcctcccttaaacatgcgctcgacctggcgcgccgcgaagcccaggcggatgccgctgtgaagttttccagccacttagaccgtatggccaccgcgatggccaaccaagagttatccgccgtggagatcgtggagctactgcgccaggacgctgagaactggaaaaacgaggggctttcatgttctgggtgctgctga

SEQ ID NO: 438712 - DNA, 1023 bp, Serratia marcescens
atggaatttgtaaaaaaactggaatttggcaattacactctaaaattcggcgacgctgttttgttggattatatagatgaaatagttatgccgtcatttttcgaaatgaactatataagaagcattgaaaataaatcagactacttttttattaacactgaaatggttgtggtagacggagatagcactccgccagttttaggagttcaaggtagaattgtaaaaaacacaacacttactcgcgatcaagtatttgaaggaaatagaataatagaagaccatgaagaactcgagacagcacctagttctttctttttacttttattaaataaccaccgactaatattttgcaaagaggtcagtggtgcacctacaattgaaaatttcaaaagcacgagccaatattgtttaactcaaagatataaagagtatatagatgagttacatgaggaatctcaagaaagacgtaaaactgatcctgatgcaccatggattaccaaaaaacagctcagacttgatattccgtccccgaaacttcgcatcacgacgctaaccgaccagaaaagccttgaagaatacattgatttatttgaaaaaataaacgtagtgtcgatcaatatgttaccaaccaatgctgaagaaatagataatgatgatttttggaatgcggttgaccagaggcgaaatcaattaaatagtaaacaagccgcagtccgtttctccaatacagaagatggtctaaattcacatgaggttttagaacaactatcagcagccacagagcttgctaactctaaatttaaagtgcatggattagatgacaatggtgatattatgaggggaagcaatgataatttcatcttaactaccgaagtagctgacttcccaacagatactaatgatgccacagaggaaggttatgaaaaattctcagaacttgttgctgatggtcggattacattacctgcaagaacttccgctcgaaccaacgggattatagcaagattatttgaaaggttctaa

SEQ ID NO: 438713 - DNA, 654 bp, Serratia marcescens
atgagcaagataaatgcggcagactttactagcgaaaaaaatttatgggatgtttttttactatctaaaaggctaaccattagtaagtcccacattatcattttgaccattgttgccgttttgcttttcttaaatgctttctttgtcgttgacaacacgtctaaaattgcatctgagactagggcgtgggcagtaattggatttaacttttcaatagctacaattggtccattaattgccggattcacaatttttgccactctgtcaaaaccagacatgatgattgagatgatggcacatattaatacagaaacaaaaatgccgactttgaaatataaccttatggctttcatgaaggtattcatttcatttgtaacactcacctttgtatattttgggataatgatgtttgcccaagatcatgggctggttgtaggtattttgaatatctttccttatgctgaaatcgtgaagcgctatatatccataattggatacgtactaactggaacaagcttggtttatcttcttttaacacttaagacattcatttttaatatctatgccatcgtaatggcatctattcgatgggaatatctcgtaagtactccaaagaatagcgaacctgaaattgaggataaaataaacaattaa

SEQ ID NO: 438714 - DNA, 567 bp, Serratia marcescens
atgacaccacaacagcatgcgcagttatggcttgataaagacatgttgattcttgataccgaaacgaccggattaggtgacgatgacgagatcgtcgagatctgcctggtcgataacaacgggttcatcatgctcaacacgctgataaaaccgacaaagccaatcccgaccgaagctactgcaattcatggcattaccgatgaaatggtcacgcatgctcctacatggcgcgatgtacatggcgctgttagcgcattattttttgaatatcgttttgttatctacaacgcggctttcgatgctcgaatgattatccaatcagcccgcttacatgggcttggggatgatggtctttgctcatttatcgaagagtattcccgctgtgccatgttggcctatgcagaatattacggacaagaaagcagtcgcggcggctacaaatggcaaaagctgactgctgctgctgaacagcaaggaattactgttgtaggaacgccacaccgcgcgctttcggattgtctcaccactcttggcataatcaaggctatgtctgagggggcaaaatga

SEQ ID NO: 438715 - DNA, 516 bp, Serratia marcescens
atggcaatgactacatgcaaagagtgtaaaaaagaggtatcagacaaagcgaaggtttgccctcattgtggcgtaaaggaacccgcgagaaacctcggtaaagaaaccaggcaggggtgcctggggttggtgattttagtcggcgttctctatttcatcttcggccgtggtgacgataaggacaaaacaaagccagaaaaaacggccgaagtgaaagagtgtacggcagccgacgctcaatgcttatttgacaaatacatggtagacgctgcgatcccttgtcgtgagttggtggaaaaatcatcgaaatatgattttgaatggacggatgggatcatgacgccaatgttttcacatatgcggaatgatgcgtcgaagaaccagatcacttacataggcgataaagttaaatttaccaatggtttcaacgctaaatcgacgatgacttatttttgtaccttcgactggaaggcaaaagaggttgtcgattttaagatcgatactggcaaactttga

SEQ ID NO: 438716 - DNA, 2088 bp, Serratia marcescens
atgcagaaaaatgagacagaggtcttttccgagttagagtcattgtgtacatctcatggatttattcattgtttggcattattgagttgcatgaataatatagcattctatgaggatgagctctcttctgaagatatgcaacatctttacgaaaaggagcgattgataaggagtgagatttcgaccattgcaggattgttgttgaagtctgagataagtacggactaccctggtgaagaagtaatgtcggaattgcacaaaggtgtaaatacgtctttggctgttttgcatcgtgccatgttttcggctgagaaggatgacgaatacggcaatactatgataaaagagagtatcttctatgcggctgaatctgcttatgattttcaatatttagatatggctgaggagaaatattctttagatgattcatggttatcggaaaatatgggctttacatgtgtcgatatggtgtcggtcgggcgatgtatagagtctataattgagcggcaagttattgagtttatacggcaaggccggggtgtgcttaatgatggggtgttgaatgcttacgcacttccaattagtttgatagctaccgaaactaatttaagtgatattaaggtgaaagctattgttgatttattttcatcaagtgaattatcaaatgaaggttttaaaaacatgagcgacttcaatgtttttaatgccaggccgataatacatgctggaaatgaatattattgcttctctgcgtattctttggctcagtctatatatgaaacaccatttttctggatgaatgacgataaaaaatatagaccgatatctgcacagcatagaggacaatttgtagaagattatgtgtataagaagatggtttctgtttttggcgctgagaatgtattcaaaaatgtgtatattgttaatgataacaatgaaacgttgggcgaaatagatgtattggtatccttttctgattcagtgataatctttcaggcgaaatctaagaaattaactattgaagcccgtaaggggaacgggaatgctattcaaaaagactttcaaggtgcaatacaagatgcctataatcaaggtgtttcctgttctcaactcatcatatctggtgcatgtctagctgatcaaaatttcaaacgatttaatctcaattcatctgtatctagatgttatattgttccgattatatctgagcattatccatctttaagctttcaggttcgtcaatacttaaaaactacggttacaaaagaaatttacccaccatttataatggatgttttccttttagatgtcataactgagttcttggttacgccactgtattttttatcttacattgaccgccgttctaattataacatgagattgttttcttctcatgagttaactattttttctttgcatttaaaacagaatctatggattgataatgaatgtgatatgttcatgttgcatgacgatatatgtgctgatctcgacatcgctatgctggctcgtaggagaggggttgcagggaaaaatactcctgatggtattttaacattacatcaagatggctttgttagaaatataatcaagtcattggagtctgaaaaccataagctggccgtggagttaggttttcttttactttctttggatggtgagactattgaaggtattaaccaaatagctaagaaaacgatatttttatcctcattcgataataaacatcatgatctttcaacagtagttggggatactggttttaccgtgcattgtaattactatagtaaagatattgcggaagaaaaattgaatgaacattgtataaaaagaaagtatataactaagtgtaaaaaatggattggcatacatgttaaaccaaaaacatatcatgtaaattatggggttatgctggattttgagtgggcatattcagctgagattgaaaaaattatcacgcccagtcgacttcaaaataccctggtcaatgttggtggtgttatgactcaagcccaaaaacctggtagaaacaaaccatgtttttgtggaagtggcaagaaatataaaaaatgttgtttgcgttaa

SEQ ID NO: 438717 - DNA, 1308 bp, Serratia marcescens
ttggcgaacatcggcagccaggttcaggccgaaggcgccaacctgattggggataacggtcaggttctcaatataccgggccgtgccgtaagccatgccgttctggcgggcgtggccgcagaaatcggcaagggcaatgccaaaggcgcagcggcaggggcgctggcggcggagctggccggggtgatcatcaatgataatttggtcagaagtgaaggctggcaagagcgtcaggctcaaatcagccgcgtagcgggcgcctttgcaggggccatcgtaaccgccaaagcagcaggtgccaccagcggtgcaaatgcgggtgagtttgtcgagcgttttaatcgacagttgcatcaggaagaactcaacgccattaaagcgttggctaagggtgacaaggaaaaagaagcgcgtctgatggcggcttcatgccgaaaagtagcttgcaccacgcaagaggcgttgaactcagacgaacgcaagcagtttgaagccctgatgaataagtacccgtcaacgcgggatgaagacggcctcattgccaattactgggtacaaaaagagcgccagcgcttcggcaactatccggcgtttgccggctatgacagcgaaaagttattcacgtatgatttgggcgaccagataaccgacggccagctgtttgcacgcaaccagcagatagaacaaatcagcaagttgaccgggtggtcgccggactgggtgaatgcctcggtgatggcggtctctattgccagcacgtttgccggtatgggtaaagcgaacgtcggcaaccagtacctgtcatccaaactggtagggccaaccagcgcctggaaagggtatctggtcaatgagaagaccgttcaacaggctgctgcgtttaggcagcaggtattggatgctagagcgccgttttctcaaaatatcaggaagatggggaatgccgcagttgcacaaatcgatatcccaggcatgccgaaaactcttgcggcacatagccgtatagacaaggctgaaaaaagttttgttgggaaaggtgggggaaacttcacatatgaaacgatcaagaatagtgacggtaacccaatccccagaaacctggattctgaatataaaattttggataatctggctgataaattgggggcgaacattaccgctaagggaaaggttaccatttttactgagcgtgtagcttgcgacagttgccttggtgtcgtggaacagtttcagaaaaaatacccaggagtcaaggtggaagtgatcgataacaataatatactgctgatacctcggaggttgaaatga

SEQ ID NO: 438718 - DNA, 135 bp, Serratia marcescens
atggataaccggggttggattgccccggtttttatgcgtttttattcgcttatcgtgatagtgctgattattgccttgaaaatcattcgtgtggcgcaaatgcatagccgtactttatctaagaaaattctgtaa

SEQ ID NO: 438719 - DNA, 1350 bp, Serratia marcescens
atgccaacaactccattgaaaattcatcttaaccgtaaccccacggagagaactgagaacttaatctttagaggaatacctaagtatagctgggcaaatgcttgcgttggtgaaaatgggcaaccagacacttattactatgcgcagggatatctagaggccgccattatactttctgacaaagttatcagtgagaggtttctcgctgacactctggtttatccaatttgttttaattttcgccactctattgagttatacttaaaagcatttttagatgaaattaatattttagcaaaaataaaaaaagtaaatttagaaagagaaatagcaagctattacttgaaggaaaaagtcagagatgtcaaaaggatgcacgacattgaattaatttggaacgatctatccataaaaacaacaattatagacaagaggtatactgaattcacgaataaactatcgccattaatttcctgcattagtgaagttgaccctacagggcaaacattccgttataattatgatatggaatcaaaacaaaaacaccttattaaagtttccgtaatcaacgtaatcaatcttcgtcaccattttttacttatcaaaggaattttagacgaactaataaaattaaactcataccttattaaagaatattatacaggtacgtttacaaggaatttgtcacgccatgacatttctataattgcagaaaaattaccgcctagaaatgaatggggcggggattctttcgataaagtaaaggatgaaataaaagataaatttcaaataagcaatagagaattcacttccgcattagaattaatacagtcatgtcatgatttatgcgttaaaattgccatgcccgcaacaatcccactcatcagccgtcatactcttattaaaatgttagatctatggaatgaactttatagcatggaaaatctaaaacttagattagcaatgcaaaatggcattgtcccattcaaaatgcctaaaaatgaagagtatgacataactgaaagtttggaaaggcaagcgaaagaaagaaaatattttctaaactttgctacgccagatattttagcaataataatggcctttcacgatgctggtatgaatcttttctccgaaaattttactgcatgctgcaaatcagaacgtgaaaagatgcagaatatttatgattctttcccggagcaatgggaagaagaggtatacctgaccttagacgatatttttagcagcctaaattttcctgttagagtagtaaattctttaagggatttaaagctaaatagtattgttgatgacgtgctaactcggtatcaattgcacggcataatttaa

SEQ ID NO: 438720 - DNA, 1212 bp, Serratia marcescens
gtgaattttttgttgctcggtgctggcgcttctaaatcatactccgtcagtcctaccggtgtaagaatgcccattgctaaggattttttctctacattcgaaaagttagatatttctggtcatccatgggtactaatcgatggattattagactttgtcatgaaggtaaagaaagaaaatcctatggattttttttcaagagatgtagatattgaagagttatatacagagatagaagagaatttgaattgctatgtaggaaaagatgctggtcttgaaagaatcatggctttcaaatcatacactcaattaatattcattttctctgctgtaataaattctattcaaaatggacccatatcacgtccacattcagccctagcaagaatgttaagtaacgatgatatggttgttactttcaattgggacactctcatggatagagcgttaaatagtgagactgaatggacaactgattgtggatatggtttttggcccaaaagcatatacagaaattgctggggtgcgccaaatgaaaagcaatcaacatcaccacttcttatcaaattacatgggtctgtgaactggctaagtagtcatcccatgagtcctgagaaggatgttgttttaatgcaagaatcagcacctgacaccgtatggatttacgaaagtacagaagagccttatgcgtgttttgcagggcggtatacacccggttatgaagatttttcttatggatactatcctcctaatatcttggatgatcgagggagggcagcaggtgcgggacgaaaactggtaagcgcacgattgaaattaccatgggttcctgaaggcacggcttcttctgagggattagtatcaatacctcttattatacctcccgtgaaacaaaaaaattataatggatacgggatgttatttgataacctttggacaaaggcacaagaaggtctaacaaatgcagaacacataattattataggctattccttcccgcgtacagacttgaaaagtaatcagctatttttagatgcatttttgaatcgcaaagacattccttatattacaatcttggatccattcccagagagagtagcggagaagtttcgatttgaattcggaatacctaactcccatctaagagtgattaaaggtttttttacagatgaaaccgatgtgaatgaattattcagttttcaaaattcatag

SEQ ID NO: 438721 - DNA, 378 bp, Serratia marcescens
atgaaatttttgaagatagtactgactgccgctgtgtttgtcgctgcgcccacatgggcaggagatttgactgggcctcaaaaaaatgccgctagatctgcgaagcagtatctcagtgtggcgggcttttcacgggacggactgattcagcaactctcatcggatgcaggggatggttacgagatttctgacgcaacggtagccgtggacagcctgaacattgattggaaccaggaggcggtgaaatcggccaagcagtatctcagtatgatgggcttctcgtgcaaaggcctcattcatcaactttcctcaagtgccggagacaaatacaccgttgaccaggcaacctacggcgcaaaacaggcaggtggctgctaa

SEQ ID NO: 438722 - DNA, 717 bp, Serratia marcescens
atgctggccgagctaacatcccccctgattgattccagaacgctggccgagtgccagggtctgctgcagttcttcttcgacaacggggatgacatggtgaaacgctatcggcaagacaacgagtggtttgagctgcaggacctggatacctacagcgtggccgatcggctaatccaacgaatgctacgtgaggatgtcacatctaccaataagttcctgactgcacaactccagcttgggaaagcctggtactggggcgctgagtatgtccgtcacctgctgtggcaacatgggatagtcggagacagaacgggccatcagctggaagagtggatggagcggagtaacgtcgtcatcttacagaaaaccatggggaagagactgaacagcctggccatcaccaaacagttggcggcctttcccctgctgaatagatatatctgggcatggcgtgatattagcgggatccaggcagtacggaaatgggtcgatcgccaagtcaagaaggatgaggcttttctgagcctgctgctgcagctccggtatcatggcttcagtaccgcgcatgggtattatcacgcgctgccactgactaatatgactgaatatctgggcgagactcagaaagtgctagcgcgtattgaacacatcaagcaggccggcaagttcgcggaacaggttaaacaggtcgaacagtcgatcagtagaagccgttaa

SEQ ID NO: 438723 - DNA, 291 bp, Serratia marcescens
atgttaagcaattcatccaatttggccatgattaacatggtttgctttggtttccctcccgggcagtatttcgtgattaatggcgataggcctggcgaagccgtagatccgaacggacgcgtgattttaattgatgagggaggaaatcgttatgcttggtttactaaagcgcagcgttggaattcttacgcagactttcctgtaaagagtctgattaaggcaaaacagtacactcataaattgagagtcggaattgacccgccttatgcgggaatgttggaaaatgagtag

SEQ ID NO: 438724 - DNA, 918 bp, Serratia marcescens
gtggcaaaagagaaacaggctaataattcaaattctatagaagatattgactcagacgaccaacaggttgatggtaaacctgtttgtggaataatcatgccaatagctagcactcctggctatcctgataggcattggggggatgtgtacgatattctttgcgaggttgcaacaaaggctaactttaaaccaagaatggttagctttgatgatgacattggtgttatccataaaaggatagttcaaaacatatacaatgaccctattgtgatttgtgatatcagttcgcgaaacgctaatgtaatgtttgagctgggaatgaggctagctttcgataaagcaaccataattgtaaaagataaccaaactccattctcattcgatatatcagcgatcgagcatctagagtacccttcagatctcagatatcaagctattaatgattttaagaagaagttagaaagcaaaatactggagacatacaagcggtctattgaaaatccggaatactcgacattcctaaaacagttcggaacattcaaggtttcgaaactcgacgaaaaagaagcagggttaaacgaactgctactcgatgaatttaaagagattaaaaaagtattgtctgctagtttaaatagagatattttattgagaaataagttcggtagttctcttaacgatatattaacaaacagcaggcaagattcagcgcagcgagttgttttgaaaagcccagggttgggagttaaaggtcggcgtgttctttcatttttaactggcgtctgtgctactaataatatgaatattccctcgataatttcagatgggccagacacgttaatactggagttctctcatcaggtctcagaagatttaatgcatgagattagagaaactattactagcccagatttttaa

SEQ ID NO: 438725 - DNA, 744 bp, Serratia marcescens
atgaaaaaaatcatactcattatcacgatgctagtgtctatgctcatcatgcaggggtgcaaacaaggtatggatttacaaccacaggattattttgacggtcagcaattggacattgccaaagccatttatgatggtgatagatcgcagttggataaactgttgtcatcagtaaacaaagagatcttaaatcgtccagctaaggaaaaaatgaccttattgttctgggcaataaacaatgccatctatgataaaaccacacctgaaaggctgaaaattatcactgacttggtaaaagccggtgcagaccctttacagcctcaacctaacacgccgggtagtcccgctgaatttgttatgaaagcggataaaggcatctggatacaggctatgttagagggcggactctctccaaatgctagggataaggttcataatcaacctattatatttgaaagttttgaagcgaagaataccgagacattgaaggtacttattgactataaagttgatgttaatatcaaaggggctatgaacagaacgccattaattaatgcgctgtataacagttgcccagaacacattgaggttcttttggctcatggggctaacccattagccaaagatgattttaatgacagcttcctctcgctgatttctgcggaaatagctcaaggggataagagcaatgcgtatataaaaaagctaattaaaattaaagaaaaaataaaacaggtgaattag

SEQ ID NO: 438726 - DNA, 1275 bp, Serratia marcescens
atgaagcgcagcgtactcgatgagatcaaccggggcggcttgctggcgattgaacagggaatgggcacctggacgccgacgaaatatgccttttacatcgacgcggaaggccgattacagcgctacccaggcagctctcttcccgccttttatcctaccgggcgcgtgatcgcccgctatgaagaaatggtcagccgctatggccaccgggcaaaaccgacggtgctgccggcgaggcagaatacgacccggaatccccctctgcaacaagccatcgcgaccgcagtggcaaccgttgccgccacggtgcaggccatccgtccactgaccaaggcagaacgctggcaagaacgccagtacctgatagggcgaggcaaccgcagcatttacccagatgcgcgcatggcggcacagcgcctggcggagaacaacgtcgcggtcgaaaaggcgaagttggctgagaatgtttacaagaccaccgattcacttggcgaactacctggagtaccagagggctggaaagatatcagtaatgacgagcgagctttaaataggcttggtctggatagtaaaatgctttatgacaaaccaatgaatcctgattttttagcccgagtttatcagccagacgagagtgtctttggtaaagcgatgagtccgacggtggtgttccgcggatcgcgtgcgcccgagttcccggagggaataagcaaggctgctcagaaagcgttattgaacggcgatttgtcagggattaaaaacctgagcgattggacaaataatggtgctcagggaatagggcttaattctgaatactacaaaagagcggttaatatcggtaaagcaattaaaggcgatgttgggatatctggccattcgctgggtgggggcatggcatctgcggcctccatggccagtggcaaaccggcttggacgtttaatgcagcaggcctgaacgcgggaaccgtcgaaaaatacagtggctcgataataggcagagccgataatattcaggcatatcgcgtaaaaggggagctgttgaccaagctgcaggaggttgatttgtgggaggatgccaaagaccttaaattttatcccccggcggtgatggcgaaagagcggctgtccatgttggcgcctgacgccgtgggagtaaagcacacgcttctcggtggaacaggttcactactggataagcacggtatagaccaggcgatacaatgcattgaaaatgaaaaagacgatgacattgccacaatcaagggacgaatatga

SEQ ID NO: 438727 - DNA, 1158 bp, Serratia marcescens
atgccagcaggcactctcaccctaacgagtaattccataatagtaaaaggtaccggaacggcctttaataccgaattaaaatccggtgatttcatcgtgagcgtggtcggcggcgtcacctatacgctgccggtgaaaaccgttgataacgccacgcaggccacgctgattaaagcctatgatggcccaacgcaggcgggcgcagcatggtatgccgttccgcgcgacgcgatgaacgtcatcaccgcccaactggccgctgagacggccaaagccctgcgtgggctgaacctcgataaagagaactggcagcaggtcttcagcaataccggaaatattaccgttaagttgccggatggcagcacctatagcggcccggcctggaataatatttcagcttcactcaataataagttagacaagacgattagcgctgcccaggaaattaaaggttcactgtctttacagggttctttggtgacagggcaaacggcaaaccttgacgttgggggatattcacgcttccgtaagtcaacgacatttgatgatacaattttttctcctaaaggactcattgctgatgggggaaataatgaatctccctcagtcatctgtcatcgcacatcgaccgccatggctgggcaagtaacaggagggacttttttatcaacgctgaagcaaaacggtttgaaaaccgcgatggtcatggcgttacgtcgcgagattggcattgaagactatgggtatatttcatatcaggactatgtcgggaattggcatgaggctcgctggttggctagcgggaacattaataacatgacaggaagttgggtgaccgggtccgatcttcgaataaaaactgacattgaagttattaatgatcctatttcccttgttcgaggcttgaagctttattctttcaatcgtgatggcaagccacagataggtggaattgctcaggaaattgaaaagacgatgccgttattaatcagtgatggcggatctatcacattaaaagatggtagaaatatcgaaaaagtaaaatccgtcgattattcaacgctgggatatgtggccctggccgcattgaatcaggctctggatagaatcgatcgccaggatgaattaatcaaagaacttatggagaaagtacaatga

SEQ ID NO: 438728 - DNA, 2838 bp, Serratia marcescens
atgatatataataaggtttttattagttacagctgggatgatgaaaagcataaaagctgggctaggaagttggctgataggttggaagaaatatacgaaattacagttagttttgatcaatatgatctagactctttttctgataaaaattactttatggaaaagtctgtatttgaaacagatctaataattccagttattactgacaattacactaataaagcaaatactagaagtggtggtgcagggatagaaacagcgatgctaacatctagacattgggaggagattacaaagtcaggtaggagtaatattattcctgttttaagagagggggagaatatacctaattacttaaagagtaagttttatatagattttagaggggatgagggatttgaaactgcttttcaaaaactactagttcatattaatggtgagtctaaaatgactagaccatcaaaaaagtattctataaataatattccatcaatacaagatttcacgcgaatagaggattttcttaaaataaactataaaaatagaagattagtattcgaaaaggctcaaacgaccgatttctcgggggataatagaattaagtttgaattgtgggaaacaaagtccccatcggttcagtattatttatttttatttaacaatatatctatagagaaaacggttcaaaggcttgcattattgattaaagatgcagatgaaaaaatagataatctaactgtgctaaaaaatggtagcagtaaaaaaggttatttacgtagcctttttcaagagtatggtattaaattaaaattaacagaacttacatactcacaatatatatgggagtattgtattgacgaagatgctaaaaagaatttagggatttacactagacctaactttatagatcaatcgctaatttcaaatgataacaaagaagatttggggccagcatttgattattttaagaaaaagttaaatgaagatgaacaatctgtagccaatgtggttatcgcacctggcggtacgggcaagactacattatgttcaaacttagctaattactatcaaaaggaaaatgatgttatacccatcttcattgaatctgaagaaatgaagaaatcttacaacttactaacaagaaaacaaataaaaagtgttttcgacctatatgatgcatactcatccatctgcataaatcaagatgacgaatatatcttcaataaggtcacgtttgaggtttctatattaactggaaagttaattttgataatcgatggcttggatgaaattgtcccgttatttcaagagggatttgatattgatttgtttttaagatctattgatgatctgaataaacaaatgaaatcttctaaaataataataacatctagaaatgacattattactgatgagttggtgtcaacatacagcaacataaataaatttatgctgctaggttttgatgaggttgcttgtcaaaaatatttagagaaaagatttaggaagtatgatattcaagagcaaatgataaaagcggtgaagtcaaatattaaacctctgatatctaaagatgaaaatcagaggattttaccatttatagtagatttgctttcatctatagttgagaactctagaggaaatgactcccgattagaattgacttttgaagataaggattacgaaagtaactctgatattactgactacttggtttattcaatcttgaggcgagagtctgttagacaatccatagaaatatctattggtgaggtgttggatatatttttagagttagccattactcatagtgatagtttccctgttcaagatttaagaaatattgtagaggcctattatccggaggtttgtcaagaattaactgataaactaataagaaatcctttaatattagtcgctggaaataattgcagttttaagtatgattttattctagaatactttaatacgttaagtattattaaatgtattaacactggttctagaggtcaagatttcatcaagctgatagccaagcatgctaatggtgatagcgttgtttatagtgatacatttaagtatctccaatctaaaggtgatggttcacaatcgcttgttataaaaattataaacatgattaaatcagggttatgttatacagatgctttcaatagaagtgattatcgctttagagcgatttctttcttagtgcatattattttgggtttaaatatgcagaaaacgaaaactgaaaagatggaaatactaaaaggaatatttggagatgagaggagtgtgtattatcttgcgatatatggtgatgcaaagccactagatttctccaattctcatatatttaattctgtgtttgttggttataagggatttacctcttcgaggttccatgaaacaaagttttctaattgtgtatttgaaagtgtcaatagtgaaaatataactactaacttggattcatgtgtctttgattcatgtcaaatgggcgatttagatgcagttattcagctcgcgaagaatcgtgtcgaagaaaacagaaccttagttgagaaagaactaaggatgtttttcacatcattttataacagaggtaggtttattgatcagaaaaaatcatatataaaattctcagataaggttaaagctatagataacggttttttcgatgctctactttctaaagatattattgagataaaaactgaaaaatcagatgagacttactttaaaataaactcaacttatcatgatagcgtttacacattaataatgaataattctattgacgataagatgaaggcgattttagacattgtgctgtag

SEQ ID NO: 438729 - DNA, 321 bp, Serratia marcescens
atgcagatgccattcgcccagcgagccaccgagcagcgggccgacgataaagccgacgccgaacaccgcgcccaccaggccaaaacgccgcgcgcgctggccggcaggagtaatatcggtaacgtaagcggtggcgaccgccatgttggcgccggtgatgcccgccagcaaccggcccagatagagccaggccagcgtcggcgcgaacgccatcagcagatagtcggccgccgcgccggcgagcgagatgagcagcaccggccgccggccgaaacgatcgctcagcgcgccgaggatcggcgagaacagaaattgcattaa

SEQ ID NO: 438730 - DNA, 1434 bp, Serratia marcescens
gtggcaaaagcaaaaacttcatcaaaaccgatcaaaggaaatatatttgaattttacgtacctaaaatatacggatcaaggccaaggcctaagcaggtaacagacaaaaaagatccaaccaaaaaggtttacgataaaagtaacccagcaaaatttttaaaaaagtcttttaagaagacgacaagcgtcccattcggaagtggtcctaaaaaagctctatcagtgagttacccggcactacccctgccacacattgtacatgcagcacttgagtgtgggtacggtcgtatagggatgtggtcctctaatcttcttctgaatcataaagagtcacttgaacttgcttcttatttactcaaaaggttattaatggtggcttcatgcatcaaagtcgataaaaatgatgcttatttcacacaaggattttattcaaaaatagaaccttcagaaaaagttgcaatctcatttatagcaggtggtataggaagtttcattgcagcatatcactggcttgctgctgcgggtgaaaaaattaatgttatgttgcatactagtatttatactaaaggtttgtctccttctattaaaacaaatcctttaaccgctaaaaagtcacccgactatcttattgagtctgacagtggagcatggcatatttttgaaagtaaaggtggcacggatgttgggcgtcataaaaggattcaggaaggtttactgcagcttggtataataacgcaccttggatggacttcatccactttacctttaaaaaaggtgcaaacaaatgtgtgtacacatacatgcattgatgctggcagtcgtttgaaggtgttagcctatgatcctccgggtgagaataccgaagaagggcaaaccatcattcttgatgaagccatttgcaaactacttaaaatcgttgaaagcctcgatcagtttcatgtgcttggcacagaagtgagtactgaagatggctgggaatggaagactgtgccgcagataaacaacatacgggtggctctgccatctcaatacttcgaccttgaagagaagcttagaacacggcttgggttatattttcttgcggctgagagtgtggagaagtataaaaaaagagagctgtggccggtagaggttaccattcgcaccattgtccaaaaaataactgactgtaaatttgaagatcaaaacaatgtaatggcagaggagtttaagcgttttgttatagaattaaatgaagttgaagaatccgctgtttttattacatgctgccgccaacatcttaatcttgatgaaacattcaatgaattcactgctgtattagaaaaagttattattcagccaaatctttcaaaaaaaattcacagtgaagttaaaaactcagatgttttgacgtcaagcggtatgttaatcagagaagtgaataatatagaataa

SEQ ID NO: 438731 - DNA, 732 bp, Serratia marcescens
atgacagacattattcaagaaattaaatccatattgagtacagaatcatttgcgtttctcataagtgtagcgtcaatttcaattgctttagtttcagttttattattgaaagatagaaaaacacgctacaatgaaaagctcaatagaattgaactcgactttgttcgttcaaattacgaaaacaaaatatatgatttaacagagaaactaaattctgaaaaaagcagatggatggacaataatcatttttttgcaaatatgccaagtgataatagggatattactaaaattaatcaagcaataaaccccaattttttcctagaaaatatgggcgtcaagcctgaaagtattaacataaagcccaagagtgtctttatattaacagcctttaacgatagatatcttgaagactataaatcaattgaaagagcatgcattgacattggtatatctgtgtcaagaggagatgaaacacgtataaatggagatattttatcttatatagtttctcaaatatgctcagcgcaattaatcattgctaatatctcagggagaaatccaaatgttttctatgaattgggcatcgctcaagcgttaggcaaaccagtagttattgttagcaaaggcgcgaaagatataccttttgatctaaaaaataggcaggttataatttacgacaatccagcagaccttcgtcttaaggttcaaaaggcagtagtaaatgcattataa

SEQ ID NO: 438732 - DNA, 141 bp, Serratia marcescens; identical to SEQ ID NO: 202508

SEQ ID NO: 438733 - DNA, 1680 bp, Serratia marcescens
atgagtatcttcgaggcgcattttcgcaggctgcacgcccgctacggcgcaggtcaaacgcacgaattacagatgcaggagatcgccgccatcttcggctgttcagtgcgtaactgccgtattgcgctgaaaaagatgcatcaggaaaaatggctcgactggcagccgcagcgcggacgcggcaagcgctcacggctccatctgttaacctcaccggaaaaactgttcagccagaacgtcaataagctgctggagaagcaggattacggtaacgtgctgcggtttatcggcaacgacaagtatctgctggatcgcctgagcctgtggcgctttggggtacaggataaaagcagcgaaacgcgggtacgcatcccctactatcgcaatctggatccgcttaatccgctcgttcccctgcggcgaaccgaacgccacctcctgcgccagtgcctgagcgggctgacgcgctatgacgccgttcagggcaggatcgtccccgatattgcccactactggacccacaacgaggactttacccgctgggagttctggctgaaatccaccgcccgctttgccgatggcagcgagctgaatgcctgcgccgttcagcgctgcctgctcgccgccagccagagcccgcagttcgcccctcttttcagcccaatcaaaaccatcaccgctgacgccccctggcatctggcgattgaaacgcatcacccggtcaggcggctcgactgtctgctcgccacccagccgacgatgctgtttgattaccagcacggacacatccgctgtaccggcgctttccacctgcaggagcacagcgacaactttatggttttgcggcgcaatcaacactggcaccaggcgcggcccggactggatgagatcaccattttcacctgggctccggagcatatcagcatgagctttattcccctgctgcggggcgaggaggcgcaggatgaccgcccgctcaacgagcgtagtctggagcagggctgctgctttgtactgctcgacggtgacggtgcctttgcagatgaggccggaagacagtttatcaattacctgctgcaacctgtcgaactccttagccagacgcagcttcccgacgaatatgcgcgcatcctctccgttgctcagggcatgctgccgcagtggaaccaccgcccggtagattttggcgggatcacagcgccgtttaacctgcgtcagccggttattatcagcacctttcagcagccggaactggtggagcttgccggagcgattcgcatcctgcttgaacgctggcatattcgcgccgaaatacggatcgacgcatttgaccgctttaacaaccagccgcgccctcccgcggatatctggctcagcaactttatgcttgataccctttcggttccggcgtttctggaatggctggcgtccaccacgctgtttacgcggctacctgaagcccagcgacgaaacctgaacgccctgctaccgaccattctgaacagcaacgatgaaaaggcattcgccaccattgccgcctttttccatgagattacccatcagcgatatgtcattcctttgctgcatcactggatggaatttgcgaccgagaagtcatttacctggcgggatttaaatacgctgggatggccggatttcagccaactttggctcgaataa

SEQ ID NO: 438734 - DNA, 1527 bp, Serratia marcescens
atgaaaagattcaaccttctgcaaatgttacaaagcatcgggcgatcgttaatgatccccattgccatgctgcctgccgccggtattttgctggccttcggcgtcagctttcaggatcccaatattgtcgccagcctgccgtttctcggcgctgactggctggttcacgtgctgaagctgatggcggaagcgggcagtgcgattttcgctaacctgccgctgctgtttgcggtcggcgtggcggtgggacttagtgacgatcagggcattgccgggctgtcggcgatcgccgggtttctgattatgaacgtcactatcggccagtttctggggatcacgaccgagtcggtggcgcaggtgcgtgactacacgatggtgctgggcatcccttcgctccagaccggcgtcttcggcggcatcattatcgggattatcgccgcctggctgtataaacgctattaccgcatccagcttccttcgtggctggagtttttttccggcaagcgtttcgtgccgatagtgacctccttcgccgcgctgtttgtcgggctggtgatggcggtggtctggccgccggttcagcatctgattaatggcctgtcgaataccatgacggtgcaggggccgggcgtgtccgccttcctgttcggctttgtcgagcggctgctgatcccgtttggtcttaaccatgtctggtggccgaccttctggctgcagtttggcgagtacgtgaacaaggccgggcaggtggtgcatggcgatcagcttatcttctttgcccagttaaaagaccaggtgccgattaccgccggaacctttatggccggtctgacgccgatcaagatgttctgtattccggcgattgcgctggcgatctaccgctgcgccagcccggaaaacaaagcgcgagtgaagggcattatgctctccggcgcgatcacctccatcgtctgcggcatcaccgagccgattgagttctccttcctgtttgtcgcgcccgtgctgtatggcattcacgccgtcctggcggggctggtgttcctgctgatggagtggttcagcgtgcacatcggactctctttctccggggggcttatcgactatctgttctttggcgttctgccgcgcgcgcctcactggtacatggtattcccggtcgggctggtgatgggcgcggtgtactacgtcctgtttacctttgccatctgccgctggaatttgctgacaccggggcgtgaagttgaagaaaccgcagtgactcaggaaagcgaacagaacgacctggtgagcggcatcattctggcctatggcgggctggggaatatgaccagcatcgaagcctgcatgtcgcgtctgcgcattgacgtgacggataagacgctggtggacaaagcgctactgaaacagcttggcgcggcgggcgttgtcgaggtcgggaacaatattcagagcgtatttggcatgaaatccgatcggctgaaagaggcgatccgcgcagctaacgcgtatacacaggaggcaaaatga

SEQ ID NO: 438735 - DNA, 843 bp, Serratia marcescens
atgaaacagctacaccacagcggcctgccgctgtatctcgatgatgacggcgtgatggcgctgaaacccccgctgaactatctcggctttggccgcaaaagcgccgggcagatggcggtggttttacctgcgtttactgaagtgcagcgtgatgaaccggcttacgatgtttaccgcgggctcagctttgcggaggatcaggaacggcttactgctgaccagtatcagtacgacatcaccatcatcatgccgggaacgatcggcaaggagcgcaagaaaaccagcggtcattatcacggctataacgacacgcggcacaacacccatccggaagtgtatgaagtgattaagggcacggcggcgtatatcctgcaaaagtcgccggattttgccgtcgcgccaaaagatctgctggtggacgatcttattgtggcagtggtgaaggagggccagagcattatcgtgccgccgaattacggccactgctccattaatatcggcgacgggccgctggtgttcagcaacctcgcgtataaaccctgcgcagttcactacgacacggtgcagttttaccacggtatggcctgctacatcgtggaagagaacgggcagctctgcgtgcgcaaaaatcattactacccgcatattccgcacattaaattcgccaccgttaaagagagtccgcatcttggcatcaccttcgatacgccactttatcaacgctaccgcgccgcgccggaacgtttccactttctggggcatgtcgataactatgtccgggaaatcatggggatgctcgagtatcaggatgatttattcccgctctgccaggaggaatcatga

SEQ ID NO: 438736 - DNA, 567 bp, Serratia marcescens
atgatggaaacgcaatctgttgcaggcgtcgcctgtagcgacttgaatcaggcgatgtcgcggattgatggcgctgcgctggcgcgtctggagcaggccatcgctgacgcgaacgcgatatttgtttttggtgcagggcgttcgctgttgatgctgaaagctgttgcgatgcgcctgatgcatatcggcctggaggtgcatgttgtcggcgatgtggtcacgcctgcgctgcaaaaaggcgacctgctgctgctggccagcgcatcgggcgaaacggcttcgctagtgaatgtggctacgaaagcaaagcaactgggtggcactgtggccttgctgaccattttccccgagtccacgctggggaaaatggctgacgtagtggtcaggatcccggcctataccgacaaactgccggatggacccgagaatgtgaaaggcattctgccaggtggcagcctgtttgaggaagccgttatggtgctgggtgacgccatgattgtgaatctggcgcagtcgacgggatatcacttaaccaaaggctttgcgctgcacgccaacctcgaatag

SEQ ID NO: 438737 - DNA, 636 bp, Serratia marcescens
atgaaattacagcttgccctggacgagttaaccctgcctgaagcgctggtatttattgataaggtggttgacgacattgatattattgaagtagggacaccttttcttattcgggaaggcgtgaacgcaattaaagccattaaagaaaaatatccgcataaggaagtgctggctgatgcgaaaattatggatggcggccattttgagtcgcagatgcttttcgacgccggggcagattatgtcacggtgttaggtgtgaccgatgtgctgacgatccaatcatgcatccgcgcggcgaaggaggccggaaagcaggtggtggtggatatgatctgcgtcgacgatctccccgtacgggttcgtctgctggaggaggcgggggcggatatgctggcagttcacaccggcaccgaccagcaggcggcgggacgcaagccgattgatgatttgataacgatgctgaaggtgcgccggaaagcccggatcgccgtggcaggcggcattagcagccagacggtgaaggactatgcgctgttaggcccggatgtggtgattgtgggatctgcgatcacgcatgcggtggatccggcaggtgaggcaaggaagatttcacaggtgttattgcagcatcactga

SEQ ID NO: 438738 - DNA, 801 bp, Serratia marcescens
atgctgagtacgttacccgatttacacagaagttttgcagagcaactcaaacttaaatttcagtcagattcgcgaattcattcccttcttgctggcggctcgatgattcatggcggatttgataaatactccgatctggtttttgtcgttgtcgtagatcctctctactatgacgaaattatgacgcagcgtagggaacttgccggaacattaggccatctgctgcatgctttcaccggggaacatgtgggagagcctcgcctgcttatatgcctgcatggccctgaactcctccatgtcgatctgaaatttgtcaccctggacatgctcactcaacgcgttgaggagccagcggtgttatttacccgtgataacactgctctgaagcgacaactggcaaaatttagtgctcactggcccgacatgacgccggagtggtttgagtcccgagcctggatctggcttcattacgcagtggttaaactgggaaggggcgaactctttgaggcgattggtatgctggcattcttccgggagcaggtgctgggaccaatgctgtaccgtcgtgcaaatctaccgcaacgtggggttcgccgcattgaattctacggcattgatcctgatggtctgctgacttccacgttggcaacgcacgatcgtgactccgctggtgttgccataagaatggctgttgacgcttatatcaatctgcgggctgatgctttgcctgaaaatatcgcagatgatgcggcacgatgggcggttcttaccatgttgaaagagtattctgacaggggttaa

SEQ ID NO: 438739 - DNA, 867 bp, Serratia marcescens; identical to SEQ ID NO: 159255

SEQ ID NO: 438740 - DNA, 753 bp, Serratia marcescens
ttgaatataaaacaaattaattactcagctgcctattcctttgctgatactgttgtttctgctgtgcggaacccatcaggaattggaacaggtgacataattgctgatttctttgagtttcgaaccctgaatttttttgagcaaattgagaagccaaaaaaatacactttgcttcatacctttatttccagcgtaaatggattcggaatacagcactacctcggaaaggttgatgcggaaatcatcatatctgactatggagcattacttgatggggcaaacattccacgcccaacatggtttacggaacaagatgttagcgatcatatacctgaattgagagaaatcatggagactgccaccgaaacaattactgaagcagccttccaattgctatttgcagatagaacatttttatatgaatttagtctgtttattcagccatttattgctcggctacagcccaatgagcatcaatgcattgctagcctgggagttatcaagagatcatacttccccgtatggttaaaaaacgcagtatttcatcgtgacaaaggaaggtgccaactctgtggttgtgatctcactaatattttagtgccaacagagtctagacacatagatcatatggttccgttaaatgcatcaggaaccaacgatccgacaaattttcaactcacatgtgaatcgtgtaacacatctaaaggggctcaagtacttgcaaaccctcattatacgtatccatattggtag

SEQ ID NO: 438741 - DNA, 1221 bp, Serratia marcescens
atggacactaaactttcaactaattttatagacgtaattgaaaatactatcggtagaccactgttaaaaaaagagctacttaaaagacctgtgggaagtaaagaattagaaaatcttggcatggctcttaatgattttaataatcaatataagctaccaattaaaaaagaaactgatttgaggccttctatatcgccaagacttgacacaatatacgatttgggcttcaactatgttagtcgtatacatgatgtctctcagttccaaggtgcgttcacaggagaactaaaaaagtatttactatattgtcacggtttagtgatagaagaccctttggtttatcttttagactattttagacccggtagttctaacaatcagcatgcattagcgaggctgccagcgataaattcgttgcttctggagtacagtgatatttccgatttaataaggtctggcattgttttcccagtttctgaaccccaatactcggataatgaagtaccttatccagaagatagcttgttaaaagagttaagtaaaagaataatcgataaaaatgacacaatcccccaacttgctgcatttgttttaagagaacaatttaggaaaaaacagtttcataataatatagattcattttacccaagtttcgagcatgttagtgtccttaaagaaataatgaagattcagcaagaaaaatttactcgcaatgagattataacaccttttggaactaatgttatcggtagcatttctttattgaatatgaacaacatttcgattaaagatatttgttacatgagaaagcaagaagagctattttcggaatggagaggtttcttaaactccacatttagggaactatacaaccattcttctgactacactgatctggataatgagtttttatctgaggtgaggagtgagttttctaatttagaaatgagagtaaataatcgattaagtaaggcattctctaattcatcattgattaacactggtaaaaatataagcattggcgctgtttcaggtgcgttatcaggaatagtaactggagatttgaaaacaactttctttatgacattattcggcggtatgctttccgggggaatgcaaccaagtgttgaagcagttttagacttggtgaaaaatgaatctcgtcgtaaagagacgaaagttataaaaaatcatttcttaactctcggtttaccatcatag

SEQ ID NO: 438742 - DNA, 1017 bp, Serratia marcescens
atgatgaacaaaatcagagccgccgtggtcggcgcaggtatctacggcaggcaccatatgaatgcgtaccgccataacccggacacggtgctggtcgccatctgcgacaccgatacagagcgctgcgacgaccttgccatggcctacggcgtgatgggctatacccggctggacgttctgctacaggaggaagccatcgacgtggtctcggtggcgacgccggacccgtaccacaccgaatccatccttaccgccctgcgccacggcaagcatgtgctggcggaaaaaccgctcgccacctcggtacgcgagtgcgagcttatcgtggagatggcgcagcaacgggacctgctggtcggcgtcgatttccacaagcgctgggacccggcggtgatgcgcattaaggctgaactggagaagccggaagccgggcgcatcctacgcgggcatatcagtatggacgacgtgattagtgtgccgacagagtggctgaactgggcgggcgcaagctccccggtgtggtttctcggctcacactgcttcgacctggtgcgccatctttccgggcaggaggtggtatcggtgtacgccgtcggacagaagcggctgatggtcgaatgcggcctcgacaccttcgacagcgtgcagagcttgctgacaatggccgacggcagttcgtgggtggtggaaaactcatgggtgctgccggagggctttccgaaggacaacgacggacgtatcgatattctctgcgaggcaacgtatatccgcagcacttcacagcatcgcgggctggaaatcactacgccgggcatgacgctcacgcccaacagctatttcatcaactaccgcaacggcgtcgccagcggttttggtatcaacccgatcaatgactttgtgcgggcggtcaggaaccggtctccgtacccggtgacggcagaggacgggctggcggtaagccggatttgcgaagcggtacatcgcagtctggagagcggtaaacctgaatgcccataa

SEQ ID NO: 438743 - DNA, 981 bp, Serratia marcescens
atgaacacggtgcttattcctcccggtcccggtggctacggtaaagggctgtggctgcccatagggagcggcaaaaaggtgctctcactgaccggacgcgagattcatcccatcgccattgaaatcggtgcactgaccgaatcggaaatcgtcaacggcttctcagacattccgccggataacgacatcctgtgcgtggtgattaactgcgccgggtccctgcgctgcggcctgtacccgcagaaaggcatcccgaccgtcaacgtgctgcccacctggcgcgccggaccgctggcgcagtttattaccgaggataactacgtttccggcgtgacgatggagcagctggtactggtggatactgccgaagccccggacggtgaaccggaatccgtgcctgtcgctacaccacgggttatcaccacgccaccgcctccacatggcgcggagaaactggtgcgcatggtcgagcagaccggcactgccgtcggccacgttatcgccctgctgtttgctgccagccgtgaggcggtggatgtctccctgcgcaacgttatcccgtttatggcctttgtctcgctgctgatagcgctggtgcaggagaccgcgcttggcagcctgattgcccacgccctgacgccgctggcgaactcgctgtgggggctggtgctgctgtcgctcatctgcggcattccgtttctctccccggtgctcgggccgggggcagccatctcgcaggtgattggcgtgatgattggcactcagattggtgcaggcgcgatatccccggccttcgccctgcccgcgctgtttgccatcaatgtgcaggtcggctgcgacttcgtgccggtgggtctttccatgcaggaggcgaagccggagaccattgcgaagggcgtccctgcctttctgctctcacgtcagttaacggggccgctggcggtaatagtcggctggctgttttccctgggcttattctga

SEQ ID NO: 438744 - DNA, 375 bp, Serratia marcescens
atgatgatttactgcgcacgtatagtcgctatcggactgttcgtcgctgatggcctcaccgacaaaatgctcatcaccttcgacagcaacgggccgaaggactgtctggactactccctgtcactggaaccgaacatacgggaagaaaatctgttcattctgccgggcgataccctgttactggccggatacagctacctcattacggctgtgggcagagaagcacagcagtcgctgtttgaactcggccatctgacgataaaatttgacggcagcctgaatgcctttcatcccggcgtggtccatctctccggcccggtgcctttactttccgccctgcacggcgaactgatgattgcggagggacgcccatga

SEQ ID NO: 438745 - DNA, 522 bp, Serratia marcescens
atgtttctggtctccctggctgaaagctttatccacctgttccaggtcgcaggcaaaatcttcctcgacatgatgacgggacttatcccgatgctcatctgtctgctgctggccatcaacttcctgatgaaactggtcggcaccgtgcggatggagaaaatcgccgccctgctcggccgctcgcgcattctcacctacggcgtgctgccggtgctcggctggttttttatgagcagccccggtgcgctcactttaggcaaactcctgcccgaaaagagcaagcccgactatgaggatgcgcccggcaccactgcccatcccctcaccagcctgtttccccatgtggtgccgtcggagctgttcgtctggctcggcgtggccgccggggttaaggcgctcggcctgcccgtcacatcgctggcgctgcgctatatcgccgccgccatgctgattggcctgatacgcgggattatcaccgagtacctgttcctgcggctcagcaagcgggggaatgcgccatga

SEQ ID NO: 438746 - DNA, 285 bp, Serratia marcescens
atgaaaaagtcaacaaccaaagactggcaccccgccgacatcgttgccgctttacacaagcgcggcaccagtctggcgaaactgtcgcgggaagcgggactggcctcgtcaacgctgtcgaataccctgacgcgcccgtggccgaaaggcgagtggctgattgccatcgcgctggacgtgcatccgtcagagatctggcccggccgttacctcaactccagtaacaaacgtgaaccccgaaaaccgcttcaccccatgacaacaaccgacaactccgggacataa

SEQ ID NO: 438747 - DNA, 2070 bp, Serratia marcescens
atgaaacgcgccccctatctcaacaggcagtcccccgaccgcaccctcgaagtggtgatcctcgccgggagcctggcatgggagacctcacgcgtgtggcgaaaagatcccgaccgggaagacaatattcctccggtggtgctcggcccggatgaactggccgaactggacaacctgaccatcatcaggcccggcacgctctacgtccgggtacttcgcaccggcgatattcgcgaagaagacctgctgaaaatcgccgtaaaactggcacatgcggatgtgcagatggcccggctgatgagccctgacggtgagttgctggaggactggagcggtcagcttgcacgcctgcgacaggaaagaccctctgacatcctgccggagcacttccgcctcgatgaagaggcactgtggtttgacaagctcaccgaacggcacgacggcgaaagcgacgttcagccccagcgcatctgttcccccctgcgcgtcaccgccatcacctgcgacagccatgacggcagctatggccgcctgctggaatggcacaccaccaccgggcagttacggcgctgggccatgccgatggcaatgctcagcggcaacggcgaggaattgcgtcgcattctgctggagaacggcctgacctatatctccacccgccccgccctgcgcagcctgctgtgcgaatacatctcacggtcactccccggacgccgggtcacctgcgtggagaaaaccggctggcacaacggcgtgtatgtactgccggatgaggttatcggtcccggtggcgacaatgtcatccttcagggcagccactacctgaccggcggctttgcacagtccggtatgctggcggaatggcaggagcaggtcgccgcgctctgtgcaggtaactcacggctggcctttgccctctgctgtgcactggccgccccgttgctgcgcctgaccggaacgggcggcggaggctttcatctgcgcggtgagtccaccgacggcaaaaccaccgtgatgaaggtggccgcctccgtctgtggcggtaccgattactggcactcctggcgggccaccgggaatgcgctggagggaattgccagccgccataacgacgccctgctgccgctcgatgaactgcgcgaagtggaccctcgtgaagccgggatgattgcctatatgctggcgaacggccagggcaaggggcgcgcccgcaccgatggcgaagtgcgtaaccgcaggcactggacgctgctgctgttctccaccggggagctgtcgctggcggaacataccgaacgcgccggggagcgcctctacgccggaatggacgtgcgcatggtacaaatccccagcgatacagggaatcatggcgcatttgagcagctacacggctttgccagcggccagcagttcgccgatgccctctgcgaccgggtcgcccgcttccacggcaccgcctttcgtgcctggctggccttcctcaccagcgacctggacgccagcaccaccctggcaagagaattacttcgccgctaccagaccgccctgatgccggagcatgccggaaaccaggtgcagcgcatcgtggcccgttttgccctgctggcggtggccggagagatggcaacgctgcacggcatcacgggctggcaggaaggcacggcgtatgaggcggtccggatctgcctgcacgcctggctgaacgaacgcgggcatatcgccaaccaggaggatgaaggcgtgctggcgcagatcaagcggttcatcaccgcgcaccagtacagccgctttgcctcgtgggatggcccggaccgcccgctgaatatggtgggctttcgccgggtggaaaaagatccgttgacgggcgaggaacacacactgtttcacatcctgccggagggctggcgggaaatgtgccggggattcagcccggcaaaagcggccaggttatgccaggaagttggttgcctgctgcccggcagcgacgggaaataccagtcgcaggttcgcctgccggagatcggcaaagccagggtctaccgacttacctccctcatcctcagtatctga

SEQ ID NO: 438748 - DNA, 216 bp, Serratia marcescens
atgaaaacccgtgctgacaataacgatgcttttcccgaaagcggcaatgtgcgtatgcggcaggtggtccagtttctggcgatgagcgaatcgtcggtttaccgcctgattaaaaacaccgactttccccgccccgtccacctctcctcccgactggtggtcttcgatgctgcggaaatccgtcagtggcaacagcgccgcgacgccatccgttaa

SEQ ID NO: 438749 - DNA, 4473 bp, Serratia marcescens
atggatccaatatcagttacaacagtatcaatttatgtcgcaacaaaatttattgatcagttcattgcagaagaaggttacggatggttaaaaaagaaattattccccaaaaacaactatgttaaccaactctatagaataattgaagaaacggctattgaattcgaaaaaaaattccccatcgatagtataaaaattccattttaccaatctcaactattgtttgaaacattgaatgagcatattttattcaaagaattaccagataaagattatttgttgcaaaaattcagtgaatatccaaatgtcatcccaccaactcaagaacaacttgaaactttctataaaatttttttactaaaaataaacaactgtaaagaattaaaaaaactccacattgaggagacttataaagataagatattcgatgtaagcaatgagatcattcagataaaacttttgctgcaatcatttgatgaaaagtttacttttcacttaaacgataattggttaaataataaaaatagagaagctatagctgatttaggaggacgttacacacccgaactaaatttaaaattagagatcgcagatatcttcgaagggcttgggaaaactaacaaattctccaaaatattttacgaacatatcgataatttcttgatcaaaggaaacaatcttcgaaactgcgatgaaatacgtgagcagttagctttaatttctaaagccttaacagacacctcaattctgtttctaaaaattgattttcacgaatccaaaagcattccaatcaataaatttaatgaatatatctcaaattgtcaaaaatacatttctgaggcggagtcgacactatggaaaatcaaggaaaaggaaaatccggataagacaacaagttttagcgataagtattcatcaattttgagagacttaagagaattttattatgagtgtgacactttatatatatttctcaattctataacggtaaaattatcgaataacccatttctgctccttgaaggagaagctgggattggtaagtctcatttgcttgctgatatcatcgaatcaagaattcaaacaggatatccatctctatttttattagggcagcaacttacaactgatgaatccccttgggtgcaaattttaaaaaggctacagctaaacactgtatcctcagaatttcttgaaaagctaaatctctatggtgaaaaacaagggaaaagattcctgatatttattgatgcaataaatgaagggaatggtaacattttttgggaagataacatcaatagcttcgttgatgaaataagaagttttaaatggcttggccttataatatcagtcagatcaacatataaagatattactatctcaaacggacggatctctcgtaataattttgaagtttatgaacacttgggtttcaagaataaagagatggaagctgttaacttattttatgataattataatatagaaagaccatcatcacctaatttaaatccagagtttaaaaaccctttatttcttaagttactatgcgaggggataaagaaaagtggtctgaaaaaagtccctgtaggatttcatgggatttctaagatcttaagtttttttgttgaaggcgtaaataagtcactatcctctcacaaaagatataatttcgatcctagtttcccattagttagtgatgctctcaataaattaattaaagttaaactagctaatggcagaaatagtattgctcttaaggatgctcatacagctgtccagtctgttgttaaagactatgtgaacgataaaacatttctcagctctatgatagatgaaggaatactgaccaaaggtatcgttcgcaatgaagacaactctgttgaagaggtcgtttatatatcctttgaaagatttgatgatcatttaacagttaactatttattaaatggtgttgataatattgaagatgaatttaaaacaggaggttctcttcaaaaatacttcaatgatgaatacagtttttatcgcaatcaaggaatcattgaggctttatctattcaatcaccagaaaaatatggaaaagaaatttatgaattactgcctaattacagtgacaattataatttagtgactgcttttatcgatagcttagtttggagggattccgcagcaattgattttgaaaaaattaagccttttgtaaacaagcaagtactcggtttcgataatagttttagtcattttcttgagacgctaatatctatttctggattagaagaacatcctttcaatgctaatttcttacataactggctattacagcattctttaccaaatcgagatgccttttggactactgcgttaaaatatagatatagtgaagactcagcatttaaaaatttgattgactgggcatggagtaggactgataaaagctatatatcagatgattcgatagagttagttgcaaccactctatgctggtttttaacttcaactaatagagagctaagggattgtacaactaaagcattggttaatttgttagaggaacgtatctccgttttaattaggataatcaataaattcgatgggataaatgatccatatgtttgggagagagtgtttgctgtagccctaggttgcacattgcgaacaaagaatcataataagctaagtcaattggcagagacagtttttgccaaagtgtttcaacctaaatatgtgtatccacatattctattacgagactatgcgagagagattatagagtatgtttcacatcttcaattgataccggaaggactcgacctatccaaaactaagccgccatacaaaagtaaatggcctgaaaatataccaaccaaagaagaacttcaatcactttataaaaaggatgggtattggtcactttggggatccataatgggtggaggagatttttctagatatactattggaacaaatcataatcactcaaattggtctggttgtaaatttggtgaaactcctattaatcgcaaaaaaatttttaacgattttctaggtcaattgtcagacgaacaaaaagcgctctacgactctacagaccctattatttacgataaaaattataaaagcatttcattcggtaatacacttattaaatatggtgtagcaatagatagaaagagtgaggaggaagttctttcccataaatccgtgttcaagaaatcattgtcagaggacttattagctacatttgaaagagacatagaaaaatatttagatcacaataataatctgctcgaaaccgataaatattttgatctaagaattgctgaacgcatgatttttaatcgtgttattaaccttggttgggatccaaaacttcatggtgattttgataagcaggtaggctctgggcgcggacgaagagaatcgttacaagagcgaattgggaaaaaatatcaatggatttcttactatgaatatatggcaatgctttctgataattttattcgttttgatgggtatggagatgaacgcaaagaaaatccttatcaaggaccttgggatccatatgtaagagatatagatccaaccattttaatcaaaaatacaggaacaaaagagttaacccaacaagaaatgtggtgggatactaaagaagtatttgattgggattgtacttttcaagaatgggttagcaatccttccacgataagtaatccatatggactgattgaagtcaatgacaacaatggtactgaatggttgatattagaaagctatccctcatggaaagaacctaaaactatcggtaatgaagagtgggggcatcctcgaaaggaagtttggtgtcaaatcagaggatatttagttagaacaacagaattaaatgctcttaaaaattgggcagaaaaccaacactacatgggcaggtggatgccagaaggaagcaataggtatcaattatttaatagagagtattattggtctgaagcattccattattttaaatcagattattatggcagtttagattggagttctgtaacagatcaagattctggagctaaaattgctgatgtaagcgtcacatcgatcaattatttatgggaagaagagttcgataaatcaaaaacagatactttaagtttcctcaaaccaactagtttaattttcgacaagatgggcctcaaagatggtaaatatgaaggtagttatgaggataaatatggaagtatagtttgtttcgccactgaagctttaaataactcaaaagcacatttgttaattaagaaagagccgttcttaaaaatgttgaatgaaaataatctagaaatagtgtggacgcttcttggtgaaaaaggtgttatcggtgggtccttaagttcaactcaccagtatggtcgtatagaattcagtggttttttttcttacgacgatggaaaactgactggagcaaacaaaatatattcatcttga

SEQ ID NO: 438750 - DNA, 600 bp, Serratia marcescens
atgccgctgctggaagcgcggcatctcgcccttctgcttctcggcctcgatgcttcccaaccggcaaacgccctgccggaagaacatcaggaaaattaccgtatcctgcacgacgccatcagccgcaccatcaaagcaacgggcatggtcagcgccccggcgaacaaacgcatgttctatgccgatgaaatgtttgccctggcctggcggcttattgatgacgaacttacgccgccagaaattaaggcccgcagcctgaaggcagtgatgaaactgtcacgcaacagccgtggccgcaagtggctgaagacgctcggtgacgacgcgctaccagatctcactacttcagcacaaccttcccagcgtgggatgcataaacgcgacaaagcgcgggagaatactgccaggctctgctggctactggttcagcttctggttgaggagactgacgggcgttatgggacgtctgataaaccggcttcggataggatacttcgaaagctgagagcgctagcgcaggagcgggaattgccgtcagacgggcttgggcgagggacgttttatgaggtgttgaaaatgggacgagagaaggagaagtag

SEQ ID NO: 438751 - DNA, 1248 bp, Serratia marcescens
atgcctaaggtattgaaatccctaaccaataccgagatcgctgccgccaagccgcagaagaccgagtatatgctgcgcgatggcgacggactggcgttgttgattaagccatccggcagaaagatctggtacttcgaatacactcccccggcgctgaaaaaacggaccaaaatcagcattggcccctatccggtagtcaccctcgccatggcgcgagatttcaggttgcaataccggcgtttactcgtgcagggcatcgacccgcaggcccatctggagcaggttgcagaagagcaacgactccagaatgaatgcacgctggaaaaagttgcggaacagtggctcaaagagaagaaacggaccagcgatcttagcgaagatcacgccaaagatatctggcgctcgttggagatgcacgtcttcccttctctgggtaacacgcccgtcaccgagatccgccctaagatgctcaaggagcacctcacaccgctggaagaacagggcatcctcgaaacgctgcggcgggtgatctcacggctcaatgaaatcttccgttttgccatctccgaagagctcatcgagttcaatccggctgacaacctggtcgcccgcttcaagaaaccgaaaaagcagaatatgcccgcccttcaccccagcgaactgggcaggctaatgctggcgctacagaacgcctctatccgcaaggaaacccgctgccttatcgaatgggagctactgacctgggttcgccccggcgaagccgttagcgcccgctggtgcgacatcgatatgaaaaaagcggaatggcgtatccctgacacctttatgaagatgaaccgttcgcacacggtgccgctcagcaaacaggcgctgcgcgttcttcagataatggagccggtcagccgccatcgcccatgggtgttccccagcatccgcaaaccactggagcatatgcaccagcagaccgcaaacgccgcgcttatccgcatggggttcggcggcgaactggttgcccacggtatgcgcagcatcgccagaacggcgggagcaggccattttccccgtgaagtcctggaatctgcactggcgcaccagaaagaagacgagatcgaagcggcctacaaccgcagcgattacctggaacaaaggcgaccgctcatgcagtggtggggaaactacgttgatgccgccaaacggcaggcattgctcggcgaagaagaaccgctgcggaccgtagaaggagaataa

SEQ ID NO: 438752 - DNA, 2379 bp, Serratia marcescens
atgagtcaattggatagcaacttgtttcattttaagacgcattcagacctgaaaaacataatcggtcaggatcttataaatgatgataatatcgcggttatcgagcttgttaagaacggcattgatgcaaatgcagaaaaaatcgatgtaacatttagtgaggcaggggatgctataattatatcagatgacggccatggaatgtctctcgatgatctggaaaataaatggttaaatatcgcctactcagaaaagaaaactaaaaaattaaaaaataggatgatggcggggaacaaaggtgttggaaggtttgcctgcgatcgcttggggcagaagttagatctttttactaagaaatttaatggagagttacttcatctatcgttaaattggaggagcttcgaaggcttaaagggccatgatgccattatacaagcagttgatataaaaataaaaaaagtaactgctgaatacgtcagtaatatcactaacactcacattgatgagcatgggactattctatttataacggatttaagacaattgtggaatagagatgatttattgtctcttaagcgacagttgcaaaatttcgttaatccgatagcagcatttgataactctgttgttattataagactcaatgcacctagtgaattaaaaatagatgctatctctgaatctcacgatgtaataaatggagttgttgaaaacactgtatttgaaaaactaaaatttaacacaacctatcttgagtgcaaaataaactcactaggagatgaagttgcaactgaactatttcatgagggttcaagaatttatagagtagttgagaagaacgttgcttttgatagtctgaagaatatatcattagtgcttcactttatgaatccttataaaaaagcatatttcaagagacagactgggttgtcggttgttgaatttgggtctatatttctttttgttaatgggtacagggtttcgccttatggtgatagagataatgactggctacagctaaacagtagaaaagctcaaggccaaaatcgttatttgggtaacagagatcttcttggcgttattaacataattgatgatgaaaataaatttagaattatctcgaatagagagggggttgctcgcaatgaggcatttattcaacttataaagaaacctgatggtttgataatcaagcaaatagcaagattggaaaaatttgttatagaaggtctttcatgggatacagtctcagaagagactaggaaaatattaaattcaggtattcttcctggggatagagatatgcctgagggcgaaatatatgcacagtcattacaaagcaagaggaggcgaattgcccttgatgttttaaaaattattgatgcatctcccttgactacactatctcttgatatatcccctgaggtgctagattctcttgcgcaagagaaagaggaaagtgtcaatgcaattttgaagaaatttaatgcgtttgaaggcaatgtagttggtcacgatgtcaaattagcgctaaacaggatttacgaagagtttgataaacaaaaaattgcattgacgaaagccaataaaaccgtttcaataaaagaaagacatgtcgaaaaattaagggaagtagcaaggaacttatcgactgataataaaaaacttgaaagtaagattttgacgcagcaagcagaggttttattttccaggctttcgacagggactgattatgatcagttgttattgctgcatcaccagtcgaaacttaaagcaaatactataaaaggttatcttgacagagctataagtattcttaaaacaacagatgataaaagtaaggtatttgatttactagaaaaagcacttattaacacaagaaaaattatcaccgtcaacaattttgcgacaaaagcaaactttaaaatgacaacggaaaatatcaatgctgatattgcgtcatttattcagcaatatatggaaaatgtagcttctgagaatacagctcaaaatcttaaggttaatgttagtcgggggtttttagagccttttatagtaaaatttaaacccatcgatattgctattatatttgacaatctcgctagtaatagcacaagagccaagtcaacggtgttcaatgtagaattatcattagagtctgaaaatatattgaaggttgcagtgtctgacaacggaattggcttaaatagttctattaatccaccatcggctgtttttgaaaggggagttactactaccagtggctctggattaggtctttaccatgttaaacaaactattgaacaaattaatggtactattgaattattagagtcagatagaattggatttaatttgcttatgaggatttataaatga

SEQ ID NO: 438753 - DNA, 576 bp, Serratia marcescens
atgaaaatatcagcgtcgtacgcgattgtgttaagcggtaacgtaccccaagaacgcattgagtggggactcattcaccagaatggtgcccaggtcgatccgttttttatcctcggtgtacaggcgcttatcgagggggttgtgcatagcgagaatagaatgaggggagaacttcgatataacacagtgtgcaggatatcgatagaaaaaatccagaacaacaatcccggttgggtgagggtcacattacgacggcagtcttcgttgattgaaatccaagagacgttgagcaaagcgctatctttatggctgcggcagggaacgccactgggagaagagaaaataataacacctgttttttttacatttcaagaaataagggtggccaaatatctgcgcgagggattttctcaaacgcaaacgggtattattatggggttaagtgtcaagacgataaatgcgcataagcaatcgttgatgcgcaagataggatttaaaaataaccgagaatttcagtattggcttttggcggggagtggagggctttggggggaggtacttaatatctcgtcatga

SEQ ID NO: 438754 - DNA, 1707 bp, Serratia marcescens
atggtattcaatcgcattttatttctatttgcttttttacttctcattccgagcgcgatttatatccttaatcctggctgtgtggagttggtgcagccatttaacctgctcttcgcggcgggcagtgcgttgttgatggcggcctactggcgttccgtactgctgcggcgggtggtgatcacgccgacttgccgggcgctagcgctggcttttgctctgctggcgttgccggtgctgtttacccgaccagaatggcaaagtgcagccctttggcggctggcggcgttgtgcgctgggggggcattttattttacctggttgcaggtacgcatgaccgcccggcaacgccatcaagtactctatatgatcctgcttacggcgctggtgcaggcggtaatggtgctgttgcagctgtttgtgccgaataccgtcgatgcgtgggtgtcgcccggcacgtcgcctgccttcggtatttttcaggcgccgaacgtaacggcaagctttctcgctaccggtctggcgttggcgttggcggccttcgcgctgccggggttccgcatggcgcaacctgacgccgagcgctggcgccgccgcctactggcagcatgcctgatgttattgtctgccgttgtcgtgttggtgcaatcactggctggttggctgtcgggtggattggtcgtgttgctgtttggcatctgtttttatcgacgcgtttcgcaaacggttatgcgtgcattggcgctggttgttacaggcaccggggtggctgtactggtgctgatgttcggcgatagcgggagtggcatattgcaatataaagatcctgccggctcaatccacacgcgttataccgtactgcacgacacgctggcgatgattatccagaaaccgctgttgggctggggttacgggggttttgaatacagtttccaacactttcgcgtcacccaaacgccggcagtggtgccaggcgaaatcgttcggcacccgcatagcgagctgctgctgtggtgggtggaaggtggcctcgtcgcgttgttgggaatactggttttgttgcgggccggagtcacggttgtggcaagagcccgctggcgtgaccggctaatgtgggccggccacaaagccgccgccggtgaggcgctggcgctgtgcctcgcgctgctgcctatggtgctttatacccagcccgactctccgttttatctctcgaccttgcactggctggtgttcttattactggcagcggtgctggaccggatggtcagccgccgcctgggaccggctatttctctcaggggctggcgctatccaatgttgggtctggcattggccatgttgttcatggcaggagccggtttttacagtgaccaggtactgaagctggcggaacgtgatggggggcgggatcggcagcaggcagaggcattaccgggatgggtcaattggatacataccgaaagaatggctttcgattgtcagcaagccgctttgcgggaattcaaccacacgggcgatgaacaattgctggaaagctatgcacagtgggcgcaagtctatctgtctaagcacgttgacaaaaacgtctatgccaatctactgaccatcctgcgccggcagcagcagtttgtgcgggcagacgaactccggcgcgaggcggcacagctttttccttacgaccggcgttttgctcggtatggattttga

SEQ ID NO: 438755 - DNA, 324 bp, Serratia marcescens
gtgaccgcctggcaacgccatcaagtactctatatgatcctgcttacggcgctggtgcaggcggtaaaggtgctgttgcagctgtttgtaccgagcaccgccgatgcgtgggtgtcgcccggtgcgtcgcccgtcttgggtatttttcaggcaccgaacgtaacggcaagctttctcgctaccggcctggcgctggcgttgacggccttcgcgctgccggggttccgcatggcgcaacctaacgccgagtgctggcgtcgccgcttgctggctgtatgtctgatgttgttgtctgccgttctccgatactgggtccggcattag

SEQ ID NO: 438756 - DNA, 714 bp, Serratia marcescens
atgcaccagcttaaacatctgttgatcatactgatcctacacacgaccggaagtgcccaagctacgctttggttcgacccctccaccggccacttacaaggtgacaccgtggcctggcagggggggcagggatgggagactggctcattcaaaggatgccagatcacgatgcgcaccaccaaccagagctacacgcgcatctacgaagtggcgcctgggacgtgttacccgtgggacctgccagcgacaatgtcttggctcaaatcacaaattaggaatggcgtcggcctcgcttacaggggtaccgtcaaccccggtcgtatgcatgtagctgccaggaccgggagcgggaccagcatagctactaccatgagcttcgatgtacggatacaggagagaacatcgtgtctgatggacggcccactggtgctcgaccatgggacactccgcgaaaaccaagtccaagggcacaacgccctgacccaggcccgtgtcacttgtgacggccctgccgatgtcgtcgtgaccggacatcccctgcatataaaaatgaccaacgggctggactccaaaatacttgtaaacggggaagaccaattgaaggtgcacgtagttggaactgctaccattgatatcacaagcaccctgtctgggactagcacacagcccggtgccgcgaccgggacgggtgtactacaatacgaaatccagtaa

SEQ ID NO: 438757 - DNA, 468 bp, Serratia marcescens
atgaaaaagctgctaataccgctaaacgctttactgtttctgttgtttttctcttacaaaatgcatgcagaggaaccctttaaatgcagttcgcacttcaagtcgcttattgaaaaagataatgactatatgctatttgatggtcagttaaccctgttcttgaaaagcgacagagagggattcttttcactatcgggaaaaataaagaccaaggataaaaattatatgctttctcgcgtcagttacttcaccctcgccccacaggaaatcaatcaagccaaacagacaaaagtcgtgagggtggtcaagcgtcttatcgataccacaccggaaaatatctggcagtccgaccttatgccggaaaggccaggggtcgatttccatattgaaatctggccactcaaggaaaatctgttgttagtgaaatcactcaataccaacttccttatctgtgctaaaagcgagtaa

SEQ ID NO: 438758 - DNA, 1638 bp, Serratia marcescens
atgaccaacatcacgaagaaaacgctcattgccgccggcgtcatcgccgcgctgggtatcacagcaaccaccagcgctttcgccgctgacgtcccggcgggcgtgcagctggccgacaagcaagttctggtacgcaacaacggtgcggaagtgcaatcgctggatccgcataagatcgaaggggtgccggagtcgaatatttcacgcgatctgttggaagggctgaccatcaacgcgccggatggcgccatcattcccggcgttgcggaaagttgggacaacaaagattttaaagtttggactttccacctgcgcaaaaacgccaagtggtcgaacggcgagccggtgacggcacaagacttcgtttacagttggcaacgtctggcggatcctaaaacggcctcaccttatgccagctatgtacaatatgcgcatatcaacaacattgatgacattatcgtaggtaaacaaaagccggacgttctcggcgtgaaagcgattgacgatcatacctttgaggtgacgttaagcgagcctgtgccttatctgccgaaactgttggcgcacccatccatgtcgccagtcaataaaaccgcggtggaaaaattcggcgagaagtggacccaaccgcaaaactttgtggccaatggcgcatataaactgaaagattggacggtaaacgaacgcatcgttttggagcgcaacccggaatactgggataacgccaagacggttataaatcaagtgacctacctgccgatctcttctgaagtgactgatgttaaccgctatcgcaccggtgaaatcgacatgacttacaacaacatgccgatcgaactgttccagaagctgaagaaagagatcccgaaagaggtgcacgtcgatccttatctgtgtacctattactacgaaatcaacaaccaaaagtcaccgctgacagatgtccgcattcgcaccgcgctgaaattgggcatggatcgcgacatcatcgtcaataaggtgaaaaaccaaggcgatctaccggcttacggttatacgccgccttataccgatggcgctaaactgaccccgccggagtggttcggctggacgcaggacaagcgcaacgaagaagcgaaaaaattgctggcggaagccggttacggcccgggcaagccgttgacgttaaatctgctgtacaacacctctgacctgcataaaaaactggctatcgccgccgcctctatctggaagaaaaacctgggggtggacgtgaagctggtgaaccaggagtggaaaacctttctggatacccgccaccagggcaactttgacattgcgcgcgccggctggtgtgcggattacaacgaaccgtcgtcgtttttgaacaccatgctgtccgacagcagcaacaataccgcgcactataagagcgctgaatttgacaagctgatcggtgagacgctgaaagtcaaaactgacgaagaacgtgctgccctgtaccaaaaagccgaggctcaactggataaagattcagccatcgtgccggtctactactacgtgaacgcccgtctggtgaaaccatacgtcggcggttataccggtaaagacccgttggacaatatccacgtcaaagatctttatattatcaaacactga

SEQ ID NO: 438759 - DNA, 183 bp, Serratia marcescens
atgcgcaaggcggaaatctacgccattattgccgccctcgtggtattggtgatgctgttaatcattaacatcgatagcgatatcaacgtttatccctccgctgtctattacgccggctttttagcccggcgtaatagacagcggagggataatctgtcgcagggtgtcttctgcgcgtcctga

SEQ ID NO: 438760 - DNA, 1107 bp, Serratia marcescens
atggcacaagtaatcaacactaacagcctgtcgctgatggcgcagaacaacctgaacaaatctcagtcttctttgggtactgcgattgagcgtctgtcttccggtctgcgtatcaacagcgcgaaagacgacgctgcgggtcaggcgatctctaaccgtttcactgcgaacatcaaaggcctgactcaggcttctcgcaacgccaacgacggtatctccctggcgcagaccactgaaggcgcactgaacgaagttaacgacaacctgcagaacatccgtcgtctgaccgtacaggcgcagaacggttccaactctaccagcgacctgaactctatccaggacgaaatcactcagcgcctgaaagaaatcaaccgcatctccgagcagaccgatttcaacggagtgaaagtgctgagcagcgagcaaaaactgaccatccaggtgggcgctaacgatggtgaaaccatcgatatcgacttgaaaaagatcaatgccgaagaactgggtctgaaagacttcagcgttgcgaatgcaggcaacaaagtgggcactgagatcgccgataaagccagcattaagtacgacaatggtactaccgttactgacaataccactgttgatacatcaggcttggctacaggtgataaattagtatctggcacggataaaaatggtaagaccatgtatatggttgagtctactgatgctgatggcaaaaagacttatgccaaagcggaggctacgtttacccctgaagttactggcggttcacctgcccctgcaaaagtagtctttactaagggtactgacgctgtagacatgtcgaccccgactgcgaacccactggatactttggacaaagcgctgtctcaagtcgacaacctgcgttcttccctgggtgcggtacagaaccgtttcgattctgttatcaacaacctgaacagcaccgttaacaacctgtctgcttctcagtcccgtatccaggatgctgactacgcgaccgaagtgtccaacatgagccgtgccaacatcctgcaacaagctggcacctctgttctggcacaggctaaccagtctactcagaacgtgctgtccctgctgcgttaa

SEQ ID NO: 438761 - DNA, 1422 bp, Serratia marcescens
  misc_feature (1406)..(1415): n is a, c, g, or t
atgaatctatgtttcgtttggatgaaggaatttaaaaatctacatgcgacaggcctgaatctgtctaacgattttgagtttcattttgacttcaaagaaaaaaccctaaagaaatcaaataaagatcctattccagatctatttggtgagaacatcgcatctataacagggattcttggagttaatgggtctggaaaaacaaactcattagaatttatatgtcgcgtgttaaaaaatccggaaaagattcgcaatgaatatatattaatatatagcattaataataactttttcttctccaccaatatacaacaagagattcatctaaatttctcggcttctgctagctctgacattcatctaaaaaaattacatgtgatatttttttcaaacgtatatgataaaaactatatagactttggtaatgatgtcatagatatctctatcaataataaaaataatcctagaaccctcgctactcagcgcgatacccgtgaaatagaattccttaatgatatcgattttttcagttcatctgaattttccaagataaacttgcagccgccacctaggattgaaataaaaatagatagatttatcaagagacatgatcgtcttcttgagggggataatagtttatcggtcctacattacttttccgaagtcaggagagaaagtcgagggcgtggaaagcttcatgtaattgtacaaaccattcaacttgatttcttaaagaatctattaatcaacgagatggataataaaaaatacctaaatttattcaatgaattcttgttgagagaaggtgataagggattgaaagctctcctcttagagcttagagaattgagccttgtggataatgatgtaatcccttggaatcgtgattttcatatgttcgagacattaacagtattggttaagttagagagttttttaagcgaaatgtgtttcgactttgatgattctctaagaggatccaagtttactttcaaaatagattatgaaatgtcagaaaatttctactaccgacatattataggtattcttcaaagcatgaggtatagttcgatatcttggtcgggtctaagctcagggcaacgagcttacattaatatttttagttctatctggaatggtctgcgtaatcatcatctaaaaattgatgatagtttaggaactatcatatgtatcgatgaaggtgatctttatttacatccacaatggcaagcagatttcgtcgacaggatcataaaatgccttcctaaactatctggcgccaaaattcaaattgtgttcaccacacactcgcccattttgattagtgatttgcctcgacaatgtattattcttctaaataatgagcagaaccgtcttagcgatcttcatgatgaagataataatcnnnnnnnnnnctgctaa

SEQ ID NO: 438762 - DNA, 651 bp, Serratia marcescens
atgttcaccggtatcgtacaaggcaccgcgccgctggtcgccattgatgagaaacccaatttccgcacccacgtgatcgagatgcctgccgagctgttgccggggctggagctgggcgcgtcggtggcccataacggctgctgcctgaccgtgaccgcggtggaaggcaaccgcgtcagcttcgatttgatcaaggaaacgctgcgcctgaccaacctcggcgatttggcgctgggtgacatcgtcaatatcgagcgcgcggcgaaattcaatgacgaaattggcggtcatttgatgtccggccatattatctgtacggcggaagtggccaagatttatacgtcggaaaataaccgccaggtatggctgcgcatgccgaatgcggaattgatgaaatatgtgctgcacaaaggtttcatcggtatcgacggcattagcctgaccatcggcgaagtggtgaataaccgtttctgcgtgcacctgatcccggaaacgctggagcgtaccacgctgggtaagaaacgcctgggtgacaaggtgaacatcgaaatcgatccgcaaacgcaggcggtggtggacaccgtcgagcgcgtgctggccaaccgcgaagcgacgctggcggcggcgatggcgccggcacacaaagactga

SEQ ID NO: 438763 - DNA, 849 bp, Serratia marcescens
gtggcggcgtccttcatccgtaagcgctccgacgtgctggagatccgcgaacacctgaaagcccacggcggcgagcagatccagatcatctccaagatcgaaaaccaggaaggcctgaacaacttcgacgagatcctcgaagcgtccgacggcatcatggttgcccgtggtgacttgggcgtcgagatcccggtcgaagaagtgatcttcgcccagaagatgatgatcgagaaatgcaaccgcgcgcgtaaagtggtgatcaccgccacccagatgctcgactccatgatcaagaacccgcgccctacccgcgcggaagccggcgacgttgccaacgccatcctggacggtaccgatgccgtcatgctgtccggcgagagcgccaagggcaaatacccgctggaagcggtcaacatcatggcgaccatctgcgagcgtaccgatcgcgtgatgcctagccgcatcgataccctgaacgaccgtcgcaagctgcgcatcaccgaagcggtgtgccgcggtgcggttgaaaccgccgagaaactggacgcgccgttgatcgtcgtcgccaccagcggcggcaagtcagcgaaatccgtgcgtaaatacttcccgaacgcggtgatcctggcgctgaccaccaatgaaaccaccgcgcatcagctggtgctgagcaagggcgttatcccgcagatggtcaaggaaatcgcctccaccgacgacttctaccgcatcggtaaagaagccgcgctggccagcggcctggcgcagaaaggcgatgtcgtggtgatggtttccggcgcgctggtgccgagcggcaccaccaacaccgcctcggtacacgtgctgtaa

SEQ ID NO: 438764 - DNA, 255 bp, Serratia marcescens
atggaaaataaaatgatatctgattatacggaaaaggaatttctcgaatttgtaaacgggatttattatgataactatccgacagaagagtcgcatattaatgcggttatagagttcgagagattgtctgaacacccgtcaggttctgacttgctgtattatccagaggacggaaatcaaggccctgaggctatagttaaagttatcaaagagtggcgtgccaagaacgggaaaccaggcttcaaacaagggtaa

SEQ ID NO: 438765 - DNA, 273 bp, Serratia marcescens
atgagtatgaaattaatagaaatagcaagggatcttgtaagctcaaagttaactgccgataattttgagtcgcaattcttcacaatatggaaggaggaaagcaactcaggacagctagcgaaggatagccagcgtattggcgaatgcgcgtcagagctttttattcttgctgacagttatacatctcagccgaatcgtagagaaagtgagctcgacgctgatggattaaaaaaggaagtgaaggatactctggagcgtttccaccttctttga

SEQ ID NO: 438766 - DNA, 978 bp, Serratia marcescens
atgaaacgacgtttattactgaccgcaatcctgagcaccattttgattctccccactttttcatctttagccgataccgctaggcaatcgcagagcggtgtggagcagccggcaggggtgtacagattcttactgggtgacgccaaagtcactgcgttgtcggccggcacagtggatttggatctgcacaagctgttgcatggggcaacgccagagcatgtcgatcagcttttgaaacgaaatttcctggaaaaccctgtgcggacatcgatcaacgtgtttctgatcgacatggatgggcggcgcgttctggtcgataccggaagtggcaaactgtttggcggtaacgccagccggctgatggacagtctggcggcggctgggatcaagcccgagcagattgacgacgtcctgatcacacatgctcatattgatcatattggtgggttagtgctggacggtaaggctgtgttccctaatgcttctattcacatcagcgagccggatctggctttctatctgcaaccggcgcgtccttccgtgccacatgcagatgcggtttcatccgatattgcagagaagatgttgcgtccttatgtcgatgcgggaatggtcaaatcattcaccggaaccgcagttgtgctgccgggcattaccgctactgtcttgagtggccatacgcccgggagtacggttttcacactcgagagacaagggcgtaagcttagtttcgttggcgacatgattcactctctcgttcagtttgatgagccggctctgaccattggttttgataccgatgctgcccatgcccaagcggtgcgtgaacagatgtttgccaggattgctgcgggacgctcgctgatggccgcacctcatcttcccttccccggtatcggtcacctgcgtaaatcggggctagggtatgtgtgggtgccgaccaattacgacgatcggcctctggcgctcttggattaa

SEQ ID NO: 438767 - DNA, 915 bp, Serratia marcescens
atgaaaattcaaaaaacggatattaatgccattgacctgaacctgctgaagttcctgagcgcgttgcttcgcgaacgcaacgtcacgcgagcgggcgccaggcttgggttaagccaaccggcggccagcagggcattgggtcggctacgcgagctgttcaaggacaaagtcgtcgtgcgcacatcgagtggcgtggaaccgacacccagaatccttgctttagaaccgttggtagagcgaatgctggaggacatccgcagtattgtggcgccggcgcaatttgatcccgcgaccgcgcagcagcgttttaccatcgcctgcctggatcatatcgcttcgatagtgctgccgaaattggtgacgagaaccgaacagatcgcccccggagtgacattgaacataccgacacccagcggtaacaacgtggatagcgtcgctcgtggcgatgcggatatcgcgttaggcgtgtttgacagtcaacagctgcctgcagggtttcatcagaggaaactctatgatgaagatctggtctgcgtgactcggcgcgggcatcctctcttatcttctaagttaactctggagaagttcgccgcatcctcgcatatcgtcgttaccatcaccggacaaggcaacgctcagatcgatacggcgctcgccgcactgggtaaaagtcggcgagtgtcggtacaactgcctcatttcctggttgcacctatgctcgtcgcgagcagcgatctcattctctccctacccagacggctggccatgcacatcaagcagagcctcccccttgaagtcacagaattaccgttgagggctgagacattttcaatgtcgatgatctggcatgagcgagctcacggcgatcctgcacagatatggttacgccaacaaattatcgagctgtcaaaataa

SEQ ID NO: 438768 - DNA, 249 bp, Serratia marcescens
atggataggaagaatctgaatttttatttttcacggatgataggggatgaggggaattatgacaatccgaccagtgggaaatacgaaatttcgcagagaataacggggacgcaattgtttgcgtccccgcaggcgatttattttttcttgatgggacggccggaccaataccctgccagcagcgaaccggagaggttgtgccagaccgagaacagcgcgcccggcagcgcggccagcggcgagaagtag

SEQ ID NO: 438769 - DNA, 249 bp, Serratia marcescens
atgaaaagatcacatctgatgatcgccggttcattgtttttattttccgccttcgcacaagcaggcctgaccgttaacggcgaatccgtcgcccccggcggccacaccgtcgacagttcaggtaaaatcacgcagaccagcacaaccgacggccagggcaacgccgccggcgttatcgttggtggcgacgcaaactcgaaattgtgcgccaatccgtttttcaaaaaagtgttgcctcagtgccgctaa

SEQ ID NO: 438770 - DNA, 828 bp, Serratia marcescens
gtgaaaataagcctatgcgtgctctccctcatcggtgtaaccttcatctcagcagcaaaatctgatattaactggatctgggacggtgataaattaaggtacgaactaatttggttgggcaatcctggtggcatgtttgactgtggcagtcaagggaagagctgttacttagagatggtgaccggggactaccctatggtattccgttccttatggaaggattatgatattccctatctgcagccagggatacaaagtgggaatgacatcattgcaaactataataattatagactgccaaagagtggggttatcactgggcatcaagaaaaagactgtacggtcatttaccttaaaggtagggggcttttgatgtcctcagttggaaacacctgcggcggaactttaacgccaccgccaccaccgccgacaggaccggggccatctccggtacccttaaactgcaacatgaatattatcggcagcggatttaattttggcactattccagctaatggaatggagggaaagagtacaagcagcatggtgaacatacaatgcagcggtagagacagtgatagcggcacaggccggttgacgttaagtggattagatggcacggataaagcgaaaataaaaaacagccagggtgacgttatcaatatccaactcattgcggataccaacagcggttctaacattaagtcattttatgcacagaatgggtttaacgttacctatactttggtggcgcgaatattaacctcaagtgtcgcgaattacggtgagttctctggccaagccatcgctaaacttgacatctactaa

SEQ ID NO: 438771 - DNA, 603 bp, Serratia marcescens
atggaagaaaagattaacatagccgtccttgaaggtaactcattctttcgatatggttttaagtatttccttgaagactatttcaggcaacgcggtaagctcaccgttttctctgacgagaataacgaaggcgcaccactcgatctggtgttctcaacggcacagctaagcagacggtcttgttattgccataccacattattggtgcatcaaaatacgcgtttttttaccatcagggactcccggaatagttggctggaggcgctgccaaaatgcgcattggaatgcggcacgctgtatcacagagatacccaagtatctatccatcatctactggatgaggccttgacgcaaatgccggaccgcgcattaaaccaaggcaaaacctgtgcgggaagccgcctaacgcggagggaaaaggaggtaatttcttacctgtgtcaaagtaagagccaaaccgacgctgccgataaaatgcggatcagtgtaaaaacggtaaatgcgcataagcagtcagtgatgcggaaactggatctgaagaaaagacaagacttcatttactggctcatcaaaaaccgtaaacacgttagcggattattgtaa

SEQ ID NO: 438772 - DNA, 474 bp, Serratia marcescens
atgccggttgctgcaaacaatatgatattacatggtgcgctggtagcggagccttgcacactggcgccaggagacgaaagtgtccagctggaatttggcaccgtgatcgacaagtacctttaccaaaaccagcgcaccctgggcaaacgctttcaattaaggctacaggattgcgacaccagtttgggaacctcgctacaaatcagcttcagcggcccaatcagccaggcattgccgggattgctggcgctggaggccggcagtcaagcccagggagtggcgattggtttcgaaacgcctcagggggcacctttggtattaaatgagtggagccccaattatccattgagcaaagacaacaatgttatcgcgctgcaggcttttattcgagcagagcctgatgccatcgcgaatagaaaaatcacattgggggaatttacggcagcagcaaccttttcattaaggtatgaatag

SEQ ID NO: 438773 - DNA, 480 bp, Serratia marcescens
atgatatcactacgccctttcgccgctgcgctactgttgctaacaaccccagggctggccggaaccgatatggtatttttcggcacgctgaatgctccccctccctgcactatcgatgacgatcagttgattgatgtggatttcggtgagcgggtaggagtcaacaaagtggatgggcaaaattatattaaaacggtgaattaccgcatcacctgtgagcctggcagcaccagcgggttcacactggggctgaaaattatcggcacccccatcgattttgacagtgcggccctgcagaccaatatccctgggttggggatacgcttactgcagaacggccagcctctgcagcttaatcagcgtctcaagattgagggtaaagcccctgagttacaagcggtaccggtgaaaaaacccggagtggagcttaaagccggtgcctttacggttacggccacgatgttagcggattatcaatag

SEQ ID NO: 438774 - DNA, 498 bp, Serratia marcescens
atgaggcgaaacggacgggcatggaccggcctactaatggcgacggcagcgtttaccggtgcaggatacgcggctacacctatcaacatttcaggtacggttattaacccgccttcctgcgtggtaaacgacaacaaaacgatagtcgtggattttggtaatgacctgctgactaccaaggtagatggcaatacctatatgagaacgctcgagtacacattgtcgtgtaatagcagcagcagtaatgcagtgaaaatgcaaatccagggaaccgtcagcgccttcaataacagtgcgttgcaggttgtggaacatgccgatctgggaattgcgttgcgcgtcaatgggcagccgttaccgattaacagttggttgaattttacttattcgcaagcgcagcggccgctgttgcaggctgtgccgataaaacgccccggcggcacgcttggggccggttctttcggcgttggagccactatggtagtggcgtatcaatga

SEQ ID NO: 438775 - DNA, 648 bp, Serratia marcescens
atgcgaaatataaacaacaagctgggctgccttgactggcagtattacctggtgttgctggcgttggcattgatgcttccgcttgccgtcacaactgcactgtggctgttgccggcagctcacggaaaaacagcggacagtgaacttatcggcggtgcacaaggtgtattgcatgtccgtggtgccttgacggagagcgcctgtcggctggaaatgaagagcgcttatcaggatatccagttaggtgagatcgccaccggtcggttgcaaaatgtcggcgaaaggggaactggagtcgggtttgaactgcatctgcaagactgtctgcgtagctctgcaggttccctagataacctaaacggtacggtagtatgggcccctcagcaacctgcagtaaccgtgagcttcagcgcgccggcagaccccgataatccacagctggtacaggtgcagggcacctccggattggcgctgcgcatgttcgatccgctagggcgggacgtgcgcctcggcagccgcggacaaccgctattgctgacgccagggcaaaatacgttggcctatcgcgttctaccagaacgtacccgagcgccgctggccgcgggttcttacttcgcctcggtcaattttcggctgagctatgactga

SEQ ID NO: 438776 - DNA, 546 bp, Serratia marcescens
atgaattatttcctcggaaaaagagtattcctctgcatattgattttctcgtcgctaaaccttaccgctttagcgaccgaattcaccccatttcagggacgggtcaatatgcaagggagtattttggagggggcatgcgctatcgccgccggaagccaagaacagattatcgatctggacatcttaccgctggcggaaattgctcgcactggtcaaagtaccgctcacccattttccattgaactgattaattgcctgcttacttcatcagaaatcgaagcgcagaattcaaagcgttttcaaatgactttcgacggcgaagcggatggcaatttatttagcgtaaaaggggaggcaaaaggcattgcattacagattgctgaagaatcaggaaatattgccacgcctggtgaaccattatcatccaaagcatccccactaagcgcaatgcaactgagctatagcctgaggctaatcagcaataaccagcctctgcatgccggcacttattcatccgcagtgcggtttacattggattattactga

SEQ ID NO: 438777 - DNA, 1170 bp, Serratia marcescens
atgggtggcttcaattacggtaagggtgatggcactagctggagttctgaacgtggagacagtttttcgcctggtggtggcacaggtggcggcaagaatgatggaaatggtgccaaagccgcgggctggaatgtgatgcgtcccggtgacaggcatcaaaccaagtggggtacggttattattgacggtgaaggccatgccaccatgaatgggatcatcatgacggagggtaactcgtcgtgggtggattatgaaggtggttcaacgcgtgttcttgattcattattgagagataatccaccaacaggaagaaatattggtacaccaaaacaaggtaaactacgacaggggtctccaggacacgctaacgtgtcagacggtggtcaactgtacggagataacagtgataagcatcaatactattctcggcgagatgataggacatattctgttttagttgataaaaatggaaatgttgcctttacatcaatagcatcaggaaaggaaagtggaagcaattccgccagagataatgccaaaaataatgctgctaatcaggttagggagtatctgaaagatgagaaagaattccttatggaagcgagcggtattattgctgatgccggcgagaagataagtcatcatatcggtgggcaatataagcgttacgctgacgaaattgccaataatttgcgtaatttccaggggcgcacgatccgtggttacaatgacgcattggcttcttttaataaaatcatgtcaaatccttcaatgaagattaatcaaggcgataaagaagccattatcaatgcgatgagaaacgttaatgctcaggatatggcaaatcggtttggtcacttcggtaagtttttcaaagcagctgatattgttctcaaaattgaaaaagtccgtgagaaaagcattataggctatgagactggaaattgggcgccgcttgcatacgaggttgaatccatgttgctgagtggattggttggctctgtagcgcttggctttgttacaagtgtgctcgcagctttcgctctaccagtgactgtaactgtggctttagtggtagcattctctatcgcaatcgcatacggtacatcatatatcgatgcgggtcttgttgaacgttttaataatgaggtggtccggttggcacattaa

SEQ ID NO: 438778 - DNA, 525 bp, Serratia marcescens
atgaacgatgatttatttgcatggaaaaaattcgcgaaaataggtgctttaggcatagtgccattggttttgatttttgttttttttaagttctctcccaacaattcagtcttttacgatgtattaactctgacaaaaaacatgaaggttaatgtatcatctaataacatgccattaagtaagttattgggtctatatatcgtatttggtattttctttgccatttactttgtaatcaaatatggaagtctcattaagttaaaagaaaatataatcaccccggcgtttatttttacaaagtttattccattcacagtcatatgtttagtatatatatactttatggctttttttgaactggatgtaactagagggaatagactgttaaagtttatatcatcaagtgattatttgctcctatcttattatctggtttcctttgtaggtgtatattgtttttcgatgctatttattttggtcgcaacaaaaatccctgcagccatcaaaaacaaaagccagccttaa

SEQ ID NO: 438779 - DNA, 183 bp, Serratia marcescens
atggctctgttttctggtacgccacggctgcgctcggtcggttggtcacgctggcgtctgtatctgcaacgctacaggacgcgaagggagctgttgctgctgaacgacaaacagctggcggatatcggcctgacgcgggcggatgcttggcgggaagggtataaacctttctggagagaataa

SEQ ID NO: 438780 - DNA, 186 bp, Serratia marcescens
atgcttaacattataattatatggtttattaggctcgctggggtgatgtcagcatgggccattatcaagtatcaattagacctatcagcagaaatttttgttatgagcttcataatgatcgtgctatggattagcgcggaatatgatgaacataggaaaagaaaggataagaaaggccggggttaa

SEQ ID NO: 438781 - DNA, 360 bp, Serratia marcescens
atgaaagagcgcgacatcgaaaagcttaacgaccaccagcttgtagacctgaaaaacgatatcgaaagagagcagaagcgtcgggcagatggcccaaaggtgaccacgtattacgtcgttacctgcatcactaacgctgagcactttgccgatatggattgcgccatgcgctgcttgcagatcagaacgaaagagcttctggaatggatggctgaagaccaggaaaaccgtgattacgtaaaccgatgcactggcattgttagcgtgaaattgcaggttaaagaaatgaatctcgaccatttcaacatgcgcgtggcagagaactacttcgatgacatctgctacccggaggccaaatga

SEQ ID NO: 438782 - DNA, 339 bp, Serratia marcescens
atggctaagacagcggcagagcgtaaagctgcccagcgagcgcgccagcgtaaaggcgggatcgttattcgtgagctgcagctggagccagaagaagaacagatggcgcaggaacttttaacaggactgcgtcttggccgcgagccttacgacttcaacgaagttgtgggcctgcttatccggcgatgccatgcagaatatcagcagaaactgatccaccagcaaaagcgatcttgtaaaaaatgcggcgataaactgccggtaaaagaatgtccgtgcgtaggtgatgcggcgtgctggcttaccctgggatggcacgaaacgaaattaacagtgtga

SEQ ID NO: 438783 - DNA, 1464 bp, Serratia marcescens
atgaaaatgacactcaatcagtcgattataatcaataagttagctatcgacgtgaaaccgagccttgatccgcaaggcagagtagtctatttacccaatccagagcgaaaaccttatcttatcactgataatcaccgggattcaccagttggttttggtgtcaaaatcagtgcgacaaaaaagacctacttcatccagcggcgtgtgtcgtcagcagaaaacaggccttctacggggggtagggcacctaaagaggttatcaggtctactattggtaatgtctctgattttaccagcattgaacaggcacgcgatgtagcccgcaatttcgtgcaaacgatgaagttgaccaagaggaatcctaatgcagtgaggcgggaggccgatgcttcagaactcactatcagcgaagtctttgctcaatacagaaatcatttgatgggtagatctaaaccagcgaaacccaacacacttaatgtgctgaacaaagcagaaaacagactttctgaatggtcaggacttcgagtgaaggatttaactggtaatgaaattcttcgtaagttcgatgaaatcgcttcaagagccagaacagcagccgaacaaacgttccgctgggttaatgttgcggtaaaacatgcaatcgaaatcgaagcaggaaatgctcaaacccaacaaaggaaaccatcactgtcatataacccattttcaatcctgaaggtgcagaaaaaattcagaactcgttcagagcttgaagatagctatagagctaaaggaattcgaaatcctctatcgccaaaggatacacttggtcggtttctgacagtattacataacaagagaagcttcaatcgattagggtgcgattatctgctactgactgtcctgttaggtgctagaaaggaagaaacagcatctttatgttggagagaagctctaacaagcgaagaagctaaaacgacgagctatgttgatcttgataacagaatcattcgcttttacgacactaaaaaccgtaatgatcatgagcttccgatctgtgatgcagcaaagcgtattctagaagacagacgggatattgtgttttattccgaaactcgtccagataggcgaaaatgggtttttcccgcacgttcgccaaggagcaaagtaggacactattcggacagtaaaagtttgcgagaatatctttgtcaggatgcagatattgccaaacttggtatgcatgacctccgtaggacctttggccgcgttgcagaagagctaacatcgtatgcggtggtcaaaagattgcttaaccaccgcaacacgacagatccaacagagcgttatgctgttcctgacgaagatagggtttacgaggctctacaacgcattgaattgcatatgttgatgactgcgcctacgttatacaatgcactactggcttcttccaaatacccgccattgtcttacaataaggagtaa

SEQ ID NO: 438784 - DNA, 609 bp, Serratia marcescens
atgagtgttattgaaacattgagagaactgtccgaagtttggaaactgttcagtgaaatacctgatgacgctactttgagcgtagatttggcagctctttaccttggcataagtgtcaaaacgttagcgagatatcgacagaacggtggcggccctcaatatattcaataccaaactgaggatagcaaagcccggaatcaacgggtaaattatctcttaagagatcttcgttcctggcgagataaccacagagtaagcagcacgatgcaagctgcacaagtccggggattagcttttacctgcctttcagatttcactgaacctcaaccattttggcaaatgattactaatggttgttctaaaaataaaatcatatctcatgcactaactactcctgatgatatcttcagtcagctactgaaagaacctaataaaaaagtaatctggacttccatagaagaagctctctttatggattggattaatgtcgatgaaagaaagagatggaatgacttatttaatgaggttttaaattacttaattaaaagctcaaatgctgcattggaaaagcaaactattgaaacagcccttaacttgaaaggaatgtag

SEQ ID NO: 438785 - DNA, 207 bp, Serratia marcescens
atgaaaacaggctcatacaaaagtaagtcaaaagaatactatatcgataaaaggcttaagaaaaagagtaatctaaaagataaggatgaatatgaatatttccttgttaataaaaatgatccaacagacgaaattggaccatttgaaacactgcaaaaagcagaagatgaattagttaaactaaaccctcactatcgccctgagtag

SEQ ID NO: 438786 - DNA, 321 bp, Serratia marcescens
atgaagggctgcgcctgggcaggctgcatgctgttgctgttttgggcatcggagagcctggcttctttaaacagcgcacgcccagacgccacactgagggaaaggggggcggcgacctgcaacgcgcgggtggttgagcaggctgattggggcgacatcgcggcggtggtgcagtccgctcgcctttgccggtggtggggtgacgggcggcagtggtccgagcgtgcgccggtttacctgggcgtcggcctggttcagcatcgcggcgcccggttgtcgggaaccctcgccgcacgggcgctggcggaaaaaacgccataa

SEQ ID NO: 438787 - DNA, 669 bp, Serratia marcescens
atgtcttatcgtcgtaaacaccgtgttttttcctccctttcacgacgtagtcgccgtcagaaagtgatacgtataaaaaaccttatctataatgagcgccaccgctgtggtggcatattttatgatgagtgtgactttgctcaatttgacgatgggcctgatcatatttgggagtggagtgatatctatttcaccggattagatcccgctgacttttggaatgcggaaattatcactgcacaggtggctttcagagatgcgtgtcactcccgtgcattcgacgaagcctgcgagatgttaagtgagcaagagcgtgaaaatgaatttaaaataaatacatgccctaattataattcgcaggggaaaataattagtcatacattagtacaccgtgaagcatgcaaatatgatattttcggtgggctagcattttttgatttcgttgagaaacgagaaattgaaatagtgaacaatgatcctcccactatttactgtggttatgattttttacctaattatgcgtatggattagggttgcgaatggttgttgatgcgccttatttaagtcagcaagttatcgaaggtgctatcgctgattttcgggagcgtggtgaacgtgagtggcattcatcagaggctgttttttttcctcgtgacttgcctaaataa

SEQ ID NO: 438788 - DNA, 1956 bp, Serratia marcescens
atgagtagtcgagcaaataagccagatacccaggctgacatagatttgcggagctgccttagaaacgttccaccacgtagcttcatcatgaaggccggtgctggttcaggaaaaactacgtcactgattaaaggcctgtcatcggccatccaaatacacggtgataagctcaagaggacccgtcagcgtattgcctgtattacctataccgagattgctgctggagagatttggagggatgtcggtagtgaccctctggttcatgtctcaacgatccacagctttatgtggctgctagctaagcctttccagaacgatattcgtgtctgggtatccgagcgtatcgtggaaaaaattgatgtgcttgaagaaaagcgcgcaacctatggccccagagttcaacagcgcacgaaggacaaagacgcccgagatttggagcgcctccgtcggcagtcggagcggatagctacagtaataggtttccgatacggaacaggtagcaactacgtaaagggtattcttggtcatgacgacattctgaaactcgtctcctaccttatttccgaacgccctctcttccgaacccttctcgcacgccagtttccattcgtctttgtagacgagagccaagatacgactcctgcagtcgtacaagctttaaaggccgttgaacgtgaacctggagtcacattctgtcttggtttctttggcgacccaatgcaacaaatatacgttacaggaaccgggcaagttgaaaccgagcctacttgggttgacattccgaaacctgaaaatttccggtgctcaactaaggttttaaacctcgcgaatgccattcgtcgtgatggtgatgatctcgttcagaccccaggccaacgtctagcccccgaaggtgtgattcccaacccagagggttccgcacacctttttattttgcctgcagatgaaacacgggacgctaatctcgttcgtgtacgtgaatggatggcaacacaaacaggtgatgattactggcgaccaggtgatgatgatcaggcgcgagtaaagcttctcgtcattgttcaccagatggccgcaaggcgtttagggtttggagacctctacgccgcacttaacgttaaggctccatcagcattcaaagatggttttttagatgggtctgcatggcctatttcatcgtgtgtaaagtttttgctcccgattgctattgctcataccaatggccaacaacttgaagtgatgcgattgattcgagagtattcacttcttcttgataaagagtctcttgggggagcgagcgtggcggagcgccttaaagtactcggcgaacttgttgcttcaatcgccgcaggcatagtgggacattccggagctacaatcggcgatcttctaaaactagtaaattcctccgatttactagtccttgatcctcgattggtatcgtatctggatccaaatgcagttcttcctgttcagcctgagccagaagcaggcgagaacaatgacgacgatgttcaagaagagcgtgaaactgacaaggaaatggcctcaatggatgctttcctagcatgccctgcaagccaacttttaccatatcatacctacatttcggaacgttctcccttttggactcagcaaggcataaaaggtgctgagttcgatagggtacttgtcgttctggatgacgccgaaagtaaccatttccaattctcctacgaaaaatacctcggtcttgaggagccatcagataacgaccagaaacatatggctgccggtgaagaaacaacgatggatcgaacgcgtcgacttttctatgtgagttgcacaagggcgttaaaagacctcgcggttgttctttttaccgccaatcctgagcaggcagaggctcacatacgtcaacttgatctttttgaaggtgaagccatccacactcaaggtgttttcgagatgacataa

SEQ ID NO: 438789 - DNA, 2310 bp, Serratia marcescens
gtgcatcttcactcgtatcgcctcaagaactaccgacgtctacaggatgctcatattgagctggctaacgatatatcaatatttgtagggtcgaataacagcggaaaaacctcagcgactcaagcgattcatgcgttcgtcacgggaggtagggatcgttttagcctctacgattttagttccccatgttggaaacgttttgatgaggctggaaatatcaatttggctgatccaatacccgaggggttttcacttccgagtatagatctcgatctttggttcgaggttgcagcagcagatctctatctcgtcattccattgcttcctagtacagcgtgggaaggtactaaggtcggcattagagtttccctggccgcgaaaaactctattaacctcattcaaaacttccaggaagctaaagccagagggtctgcacaggcagcggaactgccgcaagattcgcaatatacaccatggcctcgctccatgactgactatcttcagcgcgagctcaagagcgaatatgagttgcgttacttcatcttagatcacacacgatttgatgagacgaccttccaagagattgggaattatgttccagatgaattaagtggagagccaggcggcggaacaattttaaaatcacttatttatatcgataatctgggggcccaaagacatcttgcagatcctaatccagaagtcgggggaaggtcagaagacttatcaaagcgtttgagccgcttctacaaacgcaaccttaatcaaagacaagacgatcatgtagcccttaaggcgctattcgactctgagcaagcgctcaaccttcatttggatggtgtattcaagccgatgctggatcggcttgccaagcttggctatccgggcgtcaataatccgcgactgaagataatgtcagcactagaccccgctcatgtcatgagccaggatgcgcgggttcattatcagatcggagatggagaagacaccgccactcttcctgacagttataatggacttggattcaaaaacttaatctacatggttgtagaaattttagactcccaagccaggtgggcggcgatggataatcgccctccattgcatctgctttttgtggaggaaccggaggctcatctacatgctcagctccaacaggtttttatccgcaatattcttgagcttctgaacatagagggtgacgatggaagtatttttggtagtcagatggttatcacgactcactcgccgcacatcctttacgagcgaggattcaagccgattcgctatttccgacgcaaaaaaacgggtacagaacaggtgacagaagtcctcaatctatcggcgttctaccaatctcaaccggatgatcgtgattttttagaacgatatctgaagctgacacattgtgatctatttttttcagatgcagctattctcgttgaaggtaacgttgagagattgctcctccctgtgatgattagaaagagcgcgaagactctccgctctgcttgcctatgcgtcttagaagttggcggtgcctttgggcatcgtttccagtcactcatcgaatttctcggtctgaccacattgatcattactgatattgatagtgttgcccttaaagccctggaggttgaagatgctgaggagggagaagaactcgaagaatttgaggttccagccgacgcggaagacgatactgtagacttggtccaagacaatgggcaaaatccaggcggtgagccgatggttcctgcacctaagaagaaatatggcaaggcctgtttaccaagtacaccgaacgccgcaacgtcgaaccaaactcttatcaaatggcttcctgggaagctcacaatcgaagaactgcgcaatgcatctgatgcggacaaaactcacgtattcgaaaacgatgcaaaggttcgtgttgcctatcagactgagcgggctattacctggaacggaaccaccgaaatcttatgcgggcgtacgcttgaagaggatttcggcctcgaaaacccgggctggtcccaagcaatagcgagaaagcctttaggtttaattgtgaaagggggggccgttagcccggcagctcttgccgaaggccttcatcaaaaggtttcgcgaaagagtttcgataaaacaaagtttgcgcttgcagttctcaccgaagatgaggaagcatggcatgtgccggtttacatccgtgatggacttgtctggctgaaagacgaaatacggatcgaactcgaaaccgtgctgcctgaacttatcgccgaagaagatgttgtgacgggaggtgaacaatga

SEQ ID NO: 438790 - DNA, 1455 bp, Serratia marcescens
  misc_feature (38)..(47): n is a, c, g, or t
ttgcagagatcattccaatccatatcagcaattacgtnnnnnnnnnntcattattgcaaaagtgagttgagattaaggcctcttccgctgtatggccgattacggattattgattttctctgggtgttttctaccgatatgatgtttcctctcaaaggttatccctgggggagttcaacattatggcgtgtttgcggaattgccaatgtaaaagggttagaggcagaaaataaaagcgttgggcgaacggatatcattcctcctgatgagcaatccaagatcttcaattattgtgaaaaaattgtccaagatatgaaggctgagttgtctgtcagtggcattggatatcatcctagcgatgaacagatgtcaattcgttgtagagatgctgtactatatatagtttcaatcactagcggtatgcgcaatgacgaggctattggaattgaggtcggtgcttggcgtaaggagttaaaaaatggcgtcaccttttactgggtagctacaatcgagcataaaacaggcaaagggcgagtcgagtatcttgtgccggaactgacatttgaagctctgagccttttggcaaaatattccgcacctatcagaaatgagttggagaaagagattaggttgcttgcaaaaaatcagaatttttcgaattcaaccgaacacattcttaggctcgaaaaagctcgcaaggattcgaagaaactatttttgggacgaaacagccaagggggaaaaattaaggaaggctatcacgttgaagcgcttagcggccaaggttctaatgttgcatttggccgtttagctaaagctgctggaagcgattggccgttaaagacacatcaatgcagaagaacatatgcaaggtgttttgtggagtcccgtatgggaagaacttcgcttatttttcttaagtggcagtttaaacacagcagcatgagcatgacccaactgtatgcgtctaacccacagcaagacttggcactctttgatgaaatcttacagcagatgacagaatacaaaattgatttgatcgaatcatggctcgatgaacaacctttagcaggtggtgcaggtgaaaaaatcgtcaagatgcgagctattccaatcaaagatagggccgcattgcttgctcaaaccgccccacatgcaaacattcgtgcgaccggacacggctggtgtattgcaacagagcgaggttgtggcggagctggattatacgaggcaacacgctgcccaacatgtaaaaacgcggtgattgatgagcttttcgcggatacgtggcaggacatatactgtcaacagcaggagttgctcaaaatcgacgatgctggacctgctgtaagacagcgggcagagcgcgatttacaggttgcattagatgtcatcacgagtttaggcctgtgtcctatcaatgacgatgccagcgaggctgagaatgacaattaa

SEQ ID NO: 438791 - DNA, 1611 bp, Serratia marcescens
ttggctcagcaaaagaactataaggcagctctgcaacccggcactaaaagattagagcctgccggagaaaatatcaaaatttacttaccaagaaacccgagaaaacacaggcagattgatcattctcaatacctaggcctaggtttcgacgcttgggcaattcaaagcattcatgttatcagtgcgttattaaaaggagggaacttctctgtcgccactttaattggatactctgtgacaggattgagaaattttctgaagtttttaagtgtggacttaattgaatcgccacctgccacgccaaacgccctaaaaaaaagccatatagagcgttatatctcctggctaaaaattaaatacccaaacggctcggcggccaagaatttttatacaagctttaaatcactagtcattattctggcggattatggatttatagaaaacgttcttgacgatctcataccagctaatccgttccccaacaatgcgcaaaatacaaaagacgcagatccgtttaccatgggagagatgcaaaggttgctcagtgcattaaagtacgattttattgatatctataagggcacgtttcttggtaatgaagctgagaaaatgacagtgctgctgttaatcacggctgcaaggtccggtcttaatacaacgccattattagagatggagagagacgctttaacaccacatccgtttctgccaaatctcaaactaattaacactatcaagcgtcgtggcaaaggagcgcagagcaaaacaatacgtcaaacaaatctgctggatgaatatagctccattccacttgatggggttgcagttttgaataaggcgcttgcaatcagcaaaccgcttgtggagctggcatcagaagagattcgttcatatatatggttatatcgctcaggacaacgtgggggtgagaacaaaattgctgctcttacgcccggtactttatacgtgtgtagcaaaagtatttgtgagcgtcatgcactccaagatgatcgaggaaatagactaaatgtcacccttagtcgtttgcggaaaactatggaaagccgcctgtggaaactgagtggtggggacattattgaagtgtcttcgatcatgggacataccccacaagttgcagataatcactacttgaaaataaacgatgaaattaagacggagagcgcggctttcattggtgagactttccctgataaacttcgtggcaccaccattacaccgaccccatcaggcggttgtaaagacagtctttatggcagtctggcgcctatggatggcgtaaatcattgttctgagttcattcactgtcttgcttgccctagctatgcaattgtaggaactttggaggatttataccggctgttcagctaccaacaattcttatatgccgaaatcaaatactttcttactgatgagtgggacgcatggcgcaagcggcaggttaattttattcggttgatagatgatttcacctcccgaaagttcgatcttgcgttggtctcgcaagcaaagactaaagctgaatcctctccacacttgttctggagtaaaaagatcgagttcatgaagaaaaaactaggtggtgaaatgtga

SEQ ID NO: 438792 - DNA, 1158 bp, Serratia marcescens
atgaggcttgtatttgcaacaaaagacctgaccttggctggccgttcatttgagggctttccgttgctaattggatcagatggatggccagttcagccggcacagcctttcctttggcacacccttatcgagtcaggggaatcactaagcactcttacctgggaagcgtatggtcgacgtttgtatgactattatgcttttctggaagccaataatttggcctggaacgatgaaactccagctcatggcctcagcgttctttcgagatacagagattggtcaatcggcgaacttgcgcttgatccccgcactgttaacaaccgcctggccttaatcgtgaggttctatcgttgggcgaagcaacaaaacctgataaagatgctgcccttcagtgaaaaaagagaccgggttgtttcccactccggccttctcagccatgtcactcgacaaggaaaagaaggaagtaaggtctcaataatggtccgcgagcggaagcgtctgaccaaattattgactaaggatcaagtcaaagtatgccttgccttagatgctgacccaagccatcagatactgttccacctcatggtgcgaactggacttcgctcctgtgaagccagatcttttcctctcaaatatgtgtttaatcctaggttgaagaatgggctgcgtcgtgggcagatgataagtgttgctcttgatccttcagatatgcaaattaagtatgatcgacccagaatcattgatttgccttggtcactaatggaagacatgtggtcttattcccttcatcagcgagagatgcgtaatttcagtggcgatggaagtgctaccgcgttattactgacaaatgaaggaaggcaatactcaaaagatgctgtcgtagacattatgaagtcctacgaacgcaagtgcggtttctatgtgcgcgcccatatgctgcgtcacacctatggaacttatactttgcttgctcttcgaaaaactaaagaatttgaaggtgagccactaatgtatgtcagagatcggttgggacatccagatgttcaaacaacgatgatctatttgcatcttatcaatcaactggaagctcaatccgttcttgcgcatgaagatgaaattgacatgatgtttatggccacctccattaatcacgactga

SEQ ID NO: 438793 - DNA, 1065 bp, Serratia marcescens
atgaaaaccatttctttatttaataacaaagggggggttggaaaaacgaccctgacttggaatttaagtgtatctctgtcggccaaaggaaaatcggttttactgatagatttcgatccacaatgtaatttatccatagcattgttaggtgaaactggattctctgatcttttgaagaaggatgcaaataacccttatggtaaaaccataagagcattttgccaaccatttattcaacaagatatcgcacctgttgtacatacattttcaccacttcatccaatggagagaggttcaggcaggttagacatagctcctggggatttctggcttaataatctttcagatgtgattagcgtaggtacagatttaattgcggggaacgcagtaactagatttttaatccctagtttaatagccaataaagcccaagaattaaatgattgtgaatacgattatgtcctgattgatgtaccaccatcatttaatactatcgtcagatcagctctatattgctctgattatttcttagtgccgtgtactgcagatgtattctcagcttactgtatagggcttatcggcgaaaccttaccaaaatttagagacgactgggaacaaggtgttaggagaagctcagctcagagtaattcactaacaactcaaaaaggggcacctaaatttgcaggatggatcttcaacggatttgataaaaggagaaaccctggccagcaagtgtcatcggaaattgcagccgatgctgcccacagagataaaataattgattctgtaaaaaatgaccttcgtccaaaattagcatcgataactacatatcaagcagtggcttcattttctcgggatacacctgttgcaaaagtagaagacctcaatgtaatggctccagatagtattttacaaggcgttcctctcagatatttatctacagtagctccgacaagaggcgtgctggcaagaggagcctggtcagggccacagaaggatcttatgcgaaatatgtcgagggaacatgacgttttggctgactatataatcaataatttcgtttaa

SEQ ID NO: 438794 - DNA, 306 bp, Serratia marcescens
atgctaaaccgcgaaatttataaacttgaccctctggaaagcaaattggccaacaacggtgtggctgaggtaaaagatgatctctccaaaggggctctagaaacattagattatgagctgcggacgtttgtctgtagcggggcttatgccaaaggcatggctgatattcttagcaactacttacgaaacgttaaaagttctggtgaacaacctgcagtttggatttcaggctttttcggttctgggaaatcgcatctagctaaaatgctcagaaccctttgggtgaatcagaaaattaagatctga

SEQ ID NO: 438795 - DNA, 864 bp, Serratia marcescens
atgacagcttgtaaaagtagcccattgaagtcttttaaagtagttacgttattaaatgggaagtttgaattaaagaatgatattgggaaaagacatcctttaggtcgatataactcatctatttctaatgtgttgaagtacttgggtaaaatagttgatggaaataaccttgcgcttcaaacaaagatatataatagtaagcaacccaattacgatattttaactgatgcgttagttaattttatgagttttttcatgactcatatagaagttatgggaggaatcataaatgatttttatcctgaaaaaaaagagcaggataaaataagaaaagaactaaataagttagatgcaagaagttatgttgcaactataattaatcatataaaacataatggcggaaccttaaaccctgctagtataattaacttgaaaaatgaggctgtcttaggcttttttgttgaaggttacgatgatgattccattggtccttgtaaagttgtgcacagcaagggagatgatataatctcaattaattattttgttagaaaagttactgctgatatgtttttggttgataatttcatcgcatcaagtatcgaaaaatttattcaattaggaaaagaagaaaagtgtgatgaaagtctgttggggattttagataaaataaacaacctccctttacgtttttttgataaggaatataaaagaaaccatcttatgtattcaatgaagaatggcgtgctagtattagaacatttaaaatttaaaaggaacatgataatgaatggtcggatatctgtttcttatactgcggatggtgttacgcgcatttttaaaataccgctgggtgcagcgacataa

SEQ ID NO: 438796 - DNA, 576 bp, Serratia marcescens
atgactcatacaccttatcccggagtgctggatgcgtgcgtaatttatccgtccctgctacgggatcttttgatccacttggggctaaaggggttatatcaacctaaatggtcagccatcattgaggatgagtggcaacgaaatttactggccaacaggggggatttaacccaagtgcagatctcacggacaggtgagctcatgaacaaagcgcttcccgatgcgatggtcacaggattcgaaccactcattcccggtatcattcttcctgatgccgatgatcgacatgtggtggctgcagccattcgcagtaacgccgaaattattgttacggctaacctgaaagatttccctcgggatgcactcgctagttttgatatcgaggctattcatcccgatgattttattatagatttattcgatttgaatcaggcgcttgttttatccgcagtcaacgatcagcgtcgtaatatgaagaggccacctaaatcggtcgacgaatatcttgatgcgctacaacgtcagggattgccgcaaacagtaaaagaattaggtaaattccggcttctgctctag

SEQ ID NO: 438797 - DNA, 2133 bp, Serratia marcescens
atggccgatatcgtccctaacgttgtcgtctcgatgccttcacaactgttcacgctggcccgctcattcaaagctgcagctaacggcaggatttacatcggcaagattgataccgatccaaccattccagagaaccagattcaggtttatctgcagaatgaagacggaagcactgttccaatttctcaaccaattatgctcaattccgctggtttccctgtttatcttggtcagattgctaaggtggtgacggttgagggccatggcatggcagtctacgattcgtatggagttgagcagttttatttcccgaatgtgttgaagtacgatcctgacatgctaaagcaatatctaagcggcagcgacggcttgaaatatgtcgggcggtgcgggtcagttagcgccttgcgccaaataccaggtgttagtgggcagaagatcgatctatctcgatactctaacgatattaatatcggagagggctatctggagtgggttgatgatacgactactgcggatgatggagggatgttcttccgcgtaagcagccagggagggtggagacgaatatcgactgaggttaacaccgaattttacggacttcagcgccaaactcgcgccacatcagggatgattgaccaaacagataaattacaggctgctgcgaattatgcacgcgacaacggtctatatttaaacgctcagtatccggcgtttattggctcgacagactcaatgaaaggttttttcataaaaaaacctttagacttaaccggcgttatgggtacgaaaggggtgttatctatctttgttgatgggaacaccttcacagacccaagcggctttaattttgccgtacaaataagaaatgcgcaattcaacggaacaaccatcgttggcaatacaacccgtggaaatatcgatataaactggattgagacgaggaatataaacaggcgctctggaattgttaaaggaatcctgtttgtggctgctcgcagcactgtctctaaattaagagcaaacagctttagtggccgcggagtgtgggctgcaacttcgtatgattctaacattcaacgaattgagtccgaatggtgcgggaacattaacgaatgggcagtggatgctgcattctataccccatctacggggtttgctgacgaaaccaacggcctaaccataggtgcaattctgtgtcataactgtaccgatcggatatggcgctgttacggtagcaaaatcagattagataatgttcacgaggaagcgtcatattgtttgaacaagccagctgtgccgtcagctcaagacctgcgaacatcgctaggttatataaactcatacttctcttctatcggtgggtctgtgggtagtattagcatccaacctgacgcaagctcaactttagaccacgtcctggctatcggatttgttgggactagcgtcggcaatacgtataccccaggaacaaccgttattatgaacggcgacccaggccagcgtggtggtgctattggtgatatttacacaaaagacctgtatataatcgatcaggctagaacaacaataagccacgtagaagtcgcggggacgttatacaatcgcgcagtgcgtaacgatagccctattttaggagggtttattaccaacgttgcggaaaatgttggcgatattcacaacgtcacattcagaaacccagtaacgtatcagccctcgtttgcgcatacgctatatgggtgcacttttaacggtgcatttctgtcaaattccagtgctcgagtgactgcatttaactgcatttacaacactgcgctaacaacaataaatgacacaaagatggatttcttaaactgcgtattcaaatccggggtgacaatagctggcaatactcttgatataatatttaaaggaggccagataacaggggttcttaatttctcatctcctggtggaagttggttattcacagacccgccacggattgtcggatccattagtggatgggtatggccattaggaactgcgcctactggttcaaggactaggcatccagcaccaatggcggttggtgacacggttgagaggacttacaacggaagtgcatgggttacgacgcaaaaagtgctatag

SEQ ID NO: 438798 - DNA, 834 bp, Serratia marcescens
atgacaattatagcaactcttgaagcagttagcactcaatctgtgcagttccacggacagccaatcatcactgcgatggctgccggtgtggcttatgtagcgatgcgaccaattgtggaaaatctcggaatgagctggtcaactcagcagactaagctgatgaagcaactggataaatttaactgtgttcatatgaacatggttgctgcggatgggaaatttagagaccttttgtgccttcccttgcgcaaactcaacggctggctgttcagcatcaaccctgccaaagtccgagctgacatccgcgataagctgattgcctatcaggaagagtgcttcaccgttctgcttgactactggacgaaaggctcagccgtccgcaagcctgaaaccactgtagacgaccgcacccagctgagaggcatagtaaaccgcatcatgggcaagtacggcatgacttaccaagcggtctataagcttgtacataaagaattcggcgttcgccatatcgatgagttgtcaccaaaacaaacatcagaagctattgagtacttggcgactaaggtcattgaaggtgagttcctaggcaagcagccgaagcaagtaagcttcgacttcgagatgtatgcaaataacgcgaatgtcgtctgcacgcatcttgaatatatccgtcagatatggatgcaagaactccatccggcgctgagactaattggctcacctttagccgttaagctttacgacagaatcattgacgccggagcaatttcctatggaatcaggaatggtcttgatagagcgactggaatgaatggcttgcaatataaaggatga

SEQ ID NO: 438799 - DNA, 168 bp, Serratia marcescens
atggataaagagattaaaaagatcctggtaagaatgcctcagtcactgaaagacgctatcggcggaagagcaaaggaagaatgcaggtcgtttaattcagaagtgatcaagcgtctgatagacagcctgaagcgggaaggggggcggtatgaagatgccactttttga

SEQ ID NO: 438800 - DNA, 129 bp, Serratia marcescens
atgattttgcaggcggcaatcgatgaagagaggtcgccaaaatctgttgagtcatttgctcagcaggaggccgataagttcaaggaagcccttctggctaccctgaaggccatgcaggataaaaagtga

SEQ ID NO: 438801 - DNA, 1815 bp, Serratia marcescens
atgaaagttacggcaaatgggaagacgtttacgttccctgacggaaccagcactgatgacatcggatcagccattgatgaatactttgctgggcaaacaacccctgaacaacaggactcggcactagaaacacctgccgctcagccaactaatcctggaagtagtgctccttcgatgctggaaaatgcagagcaagcggcgcgtggcttggtaaatatcccattcgacgttctgcagggcggagcaagcctaattaacgccatcagccaaggtctaggagggcctaaggttattgatgatgtttaccggcctgtagatcgcccaactgacccatatgcgcaagctggtgagacgattggtggctatctaacacctgggctgggcatcgcaggcaacatggcacttggatcgctagcagaagcaggcaaccaagatggcgattttgctcaaaatgctgctaccaatgcagcagttaaccttggcgcgcaaggtttattgtctgcggcagctaagggcattggccgaggaattaccgctgttagaggcgagattgctccggaggcaaggcagatcatcgatagcgccgagagcatgggggtaacccctatgacttccgatgtggcaaggcctgttggggaaatgggggcgttaggtaaaggacttgtccagggcggagagggcgctttgctcggaactgggtcacaaagggctcagcagtatgccagccgtagcaatctcgtcaggaactaccttgaccgattcggcgagtataaccctgatgatgttgttaactcgcttacttcaaccctacgcagtaggaaggatgctgcaggttcggcgattgataacatcacgcagaagatgggtagcgccccagttgataccaccaacaccatcaatgcgctgaacacggccattgctcgtcaggagaggctggggacttcagcaaatcaagggctacttaactctctgaaaaacctaaaaggggaggtagaaggcggtaacgttgattttgacttactgaggcagcatcggacagcatttagatcaaacgtccaaggcgatgcaatggtcttcccaaaccaagctaaagcagctaccaatatggtagaaaatgcaatgagtcgcgatctgcgcaaagccgttggtaattcactcggtgcgcaggatgcggtttcatacgtgaaagccaactccgactatgccaatgtatttaataaggtgcttaataaacggattgccaacaccctgaacaaggccagcagagacgccactcctgagctgataaactccgttgtctatagccgcaagccgtcagatattcagcgcatatggggagcccttgacccgaagggtaaagacgccatgcgtgctgcatatatcagcaagatttccgagaaagtaggtgattctccggcgaaatttatcacggaggttaataagctgaagtctcagtctggcggagaaatttacggcacaattttcagcggcaggcatatgaaagaacttgatgcccttcacgatgttttgcgggcaactgctcgggctgactcggcgaatgtagttacgcaaactgggcagtcgttagcaaacccactcaggattggtgcggcactgccatctatgggggcgtcgctggccgccgaagcgggttatggcctaatgaccagagtttatgagagcaggccagtgcgaaatatgctattgcgactggctgctaccaaggtcggaactcctacctatgaaaaagctttaaaccaggcagcagtagctgttaggccgttgctggcgaatcaagctactcagcaacaataa

SEQ ID NO: 438802 - DNA, 1467 bp, Serratia marcescens
atggctacatggcaacaggctggtaactctggtggcctgctggctgggattggcggcatgaataccaatgcccctcaggccagcgatatcaataccacgttaggcctgatccgcgacaacaatgacatcgccagatcaggcgcaaacaacgttgctcttactggactgcgcggactggctggcgtcgctgatatttacaaccagcaacaacaacaagaagctcagaatgcttttaaccaggcgcaagcgaatgcgtggaagacgggagatacatcattactgagagattttgctgctgcaaatcctgcatttgtcgctcaggctcagcaggcattttctggattaaaagagcaacagcgcaacgaccttggcgatttggctatgcgggcaaacgtagccttgtctcaagggccagaggtctacagtaaattcgtttcagataacaaaagcagccttcaggccgtgggggctaatcctgactggatgatccagactggagtacaaaatccagaccaactatcacatatgcttacaacgatgagcatgggggcattggggccggagaaagcttttgatgtgatggataagcaagaagggcggaggctggagcagggacgactggatgaaagcattcgcagcaatcaggcaagtgaagccaacacgattcgtggtcagaacatcacgatgcgcggccaggatattagcgcgcagaactcaatgcgcagcgctggcggcgcagttccagccagcgttagagagtatcagtacttcaacagcctttcacctgagcagcagcaaacatatctgcgagtcagggggcgtccaggcggtgatgctgacaacacagtccagctatcagacggaagaaccgtaaccgtatcaggaaagctgcatggacaaggtgccaatgcattctatgaaggcaaggatgataacgggaatatggttcgagtgcctgccagcgcaatctcagccccgccaacatctgcagcaaacgcgcaaaactacgcgatgcgtaaagatattgacgcgatcgccaatgccgatgctagccagcttggcttcatgactggcgttactggtggagcagggacaccatctgttgacgcggaattaaggagcaggcttccaggaaataaagatcagcgacaactttataatgcatcaagacgcattcaagggcgcatgcagaaccaaggcgtagctgcagcaagggatatgggggcgagcgggattaataccgttgcagaagcgaaaatgtacttccagggcatgccacaggttgactactcaagccctgcatctatgcaacagtctttgcgagatatccaagaatatacagacaactacaatcagcaataccaagtaaatgttggtggtaaacgacagccaacaagtcaaccggcggcaacaattcctgcaggaactcacaccactaaatcaggcattcagtttaaggtggaatga

SEQ ID NO: 438803 - DNA, 954 bp, Serratia marcescens
atggctgatgatggattgaaagaaccggtaatcatccaggctacgcgcatcgatgccacactcttacctcgcaacatcttctcccagccttatctgctttacgttattcagcagggaactgacctgggcaacgtggcgggaaaggcaaacgaggctgggcaaggggcatgggatgcccagaagaagaacgatgagcaggatttggttctggcaaatcacgaaaccaggattgaggcagcagagcaaacgctcatcaaccatgagcagcgcatcactgccgctgaagcgaccttggttgaccacgaaacaagaatcgctgccgcagaagctgagttggcagaccacgaaacgcggatttccgccaacgaagcagggctcgccgatcacgaaacgcgtatcacccagaacacaacggatatcgcgggccttacaggtcgcatggcaacggcagaggggaatataaccaccctgcaaacgaccgttgcgaatcacacttcaagaatatctgcgcttgaatatgcaacgacgcgcaagaagtctgaggtggtttacagcggagtttcgcttgttatcccaaccactggagcaaaccttgtcaccctgcttaaggcgctaacgcctaccagcgggacgctagccccattcttcaatacaacgacagataagcttgttgtttacaacgaaaacaagacggtcaatttcaaactgtctctgattgggtcatggcctggcggaacgacaaaccgctctattcagttaacgttttccggggcggtgcctgacacattggttaacagccgaaacgtagctacaacaaccgataacgtattgttggccacgttctttagcgttgatgctggcggattccttgccactaacggcagcattatgacgattcaatcaaatggcgctgcatttacggccacgtctattaagataatcgcggagcaatga

SEQ ID NO: 438804 - DNA, 570 bp, Serratia marcescens
atgattctgcggacccagagccagaagaggaaccacggaagaagccaggtcgcaaacctaaggcggcaacagatgaatctaacgactaaaggcgatttagttaacgcagcattaaggaagttaggcattgcatccaatgcgacgctcaccgacgttgagccgcaatctgtagaggatgcggtaaacgaccttgaaatgatgatggctgaatggttaggtggcgatgattctcctggcattgatgttggttatatcttttccgccacagatattgctccagaccctggcgacgaccatggcatgaagaataacgctataaatgccgttattaccaaccttgcgtgccgtattgcccctgactacgcccaagaggcaacagcaaaactcatcacgacagcgcgttatggaaaagagcagttagtaaaactgtcagcaatggctagagctcagtccgctaaatgcaagtctggttatccaaatcggatgcctattggttccgggaatcgtcttgccacttggaatggatggagcttctttcacaagaaagatccgtgcgacaaaggtgagtaa

SEQ ID NO: 438805 - DNA, 1299 bp, Serratia marcescens
atgagcttaaaagaaggccaactggtcacctacgctatcgatgaaatcatcgagaccgtgcaaaacctgacgccaatggcgtctaaaacatcaaagtacactccgccggctgcatcaatgcagcgttcaagcaatactgtctggatgccggttgagcaggaagcgccaacccagacaggatgggatctgactaacaagcagaccagcgttctggagctgtcagttaagtgcaacatgggcgatccggataacgacttcttccaattgcgtgctgatgacctgcgcgatgagcgctcgtatcgtcgtcgtattcaggcgtctgctaagaagctggctaacaacatcgagaccgcgattgcaaaacaggcaaccgaaatgggctctctggttgttcatgatgctcgctcaattggtccgtcaactggcctgactggatgggatttccttgcgtccgctgaagaactgatgttcgctcgcgagctaaaccgcgacatgggtatcagctacttcctcaacccgtcagactaccgcaaagccggtcgcgatctgactgctggcgacatctttggtcgtgttcctgaagatgcgtatcacaacggtaccattcagcgtcaggttgcaggctttgacgatgtaatgcgttcgccaaaactgccaaccgttgttggttccactgttaccggcgtcactgttactggcgctcagaagtttaagcctcaggctttcactactgacaccgacggcaataacgaaaacgttgataaccgcgtggcaacggttgttgtttcctcaactaccggtctgaaacgtggcgacaaaatcagctttgctggcgtgaagtacctgtctcagatggctaagaacgtgctgaccgatgacgcgaccttctccatcacccgtgtcatcgacggtactcacatcgagatcactcctaagccggtagcgcttgatgatgcaaccctgacagcagaagagaaggcgtacgctaacgtcaacacttcactggcggcatctgctccagtaacgctgcttaacgtagcaactactaccgctaacattggttgggctgatgactccattcgtctgctttcacagccaattccggtaacacatgagctgtttgcaggtatgaaaactcagacattcagcattccaggcgttggcattaacggtatcttcgcaacgcagggtgatatcaacactctgactggactgtgtcgtatcgctgtgtggtattcggcttgcgccgttcgccccgaggcgattgtcgttggcctgcctaatcagactgcgccgtaa

SEQ ID NO: 438806 - DNA, 915 bp, Serratia marcescens
atgcaagacaccaccgaaattcaggcaactgaaggccaaaacctgcccgtcgataacgcggcggcatccgcagttgatccggcatcaaatgccaatgatgccacaggacaggaagaaggctttgagattgtactgaacgacgatgagaacaagccaaaacaagacccggaaaccaacgctaaatttgcacagcgtcgtattgagcgcaagcgccagcgtgagctcgaacagcaagcagaagcagttaagcgcggtgagttaccggagaatctgcgggttgctcctgaactaccatcccaacctaacgctaatgacttcttctctgatgaagcattggctaagtatgactacgaccagactcgtgctcttgcagcatttcagcaggccaacaacgaatggcttatgaaggctcaggacgcgcgcagtaatgccgtggcagagcagggaaggaagactcaggagtacacccagcagtcagcgcaatacgtcgatgctgctcgtaagcactatgacgcggcggaaaagctaaacattccagactaccaggagaaggaggacgcgtttgctcagttagttcctgcgcaaatcgtctccgacctgatggtgcttttccctgagaaatctgcagcgatgatgtaccacctcggcgctaatcctgaaaagacgcgtcaaattctgcagatgaaccagcagcaagcgctgattgaactcactcgactatcagaacgtttaactctcaagcctcgtagcaagccaatttctgaagcccccaaccctgatgaaccaattcaggggcaggctgttgctgctcatctgtcggctattgagaagcagatgaaggcagctgcagataaaggcgacgtagagacctatcgcatgctcaaggcacaattgaataaaggatctcgtaaatga

SEQ ID NO: 438807 - DNA, 2172 bp, Serratia marcescens
atggcagataacgaacgactcaacgccattctgtgccagttcgacatagactgggcgtcgggcgatgaagccagaactgaagcgacaaacgatttatattttagtcgggtgtcacagtgggatgactggctaagcgaatacacaacgctgcagtatcgcggccaattcgatgtagttcgcccggtagtacgtaaacttgtcgcagagatgcgtcgcaatccgattgatgttctgtaccgtcctaaagacggagcaagtcctgacgctgctgatacgttgatgggcatgtatcgcacagacatgcgccacaatgctgcgcgctcggctgttaacgttgctgtgcgtgagcaaattgagtgcggagttggtcactggagactcgttacggagtatgaggataacaacctcacaagccgcaatcaggtgatccgccgccgacctcttcacgagtcatgctctcacgttgtctgggactgcaacagcaaagagcaggacaagagcgacgctaaacactgcaccgttattcagccattcagcacagaaggctggaaagtgtttgcagaagaaaacggcatcgacccggaagttattccatcattccagagtccagacatgggatggatgttcccatggatttcgaaagatgtcgtttatgtcggtgagtattacgaagtagaagagaagagtgaaaaggtattcatctatctagaccctctgactcgggagccggttagttactatcaacgagatatcaaagacgttattgatgaccttgccgataaaggattcgttaaagttgcagagaagaaagtcaagcggcgccgtgtctacaagtcgttaattacctgctcagaaatcctgaaagaccgtgagttaatcgcgggcgagcatatcccaattgtgccagcttatggcgagtggggattcgctggcgataaagaagtttacgaaggcgttgtgcgcctgactaaagacgggcagcggctgcgtaacatgatcatgtcgtttaacgcagacatcgtcgcccgtaacccacgtaaaaaaccaatcttcgctcctgagcagattgaaggttacgagtacatgtacggcggaaatgacgattacccgtactaccttcagaactggaaggatgagaacggaaacgatctgccaattggccccatggcatacatggagaatccagaggttcctcaggctaacgcttatatgcttgaggcggctactgctgcggtgaaagaggttgccagtcttggcgtggacactgaggctgcaaacggtcaagttgctttcgataccgtcaatcagttgaacatgcgagctgatcttgagacgtatgtgtttcaggacaacctggctactgcgttccgtcgcgatggtgaaatttaccagtcgatggttaacgatatctacgatgtgccgcgcaatgttactgtgacgcttgaagatggcactgagaaagatgtgcaagttctttcacaggttgttgacctgcagtctggtgatgttgtcacacttaacgacattcgaggtcgctatgagtgctataccgataccgggccgtcattccagagcatgaaggagcagaaccgcgcagagattcaagagttgctcaccaaggttccgcaaggtacgccagagtggcagatgctattgctgcaatacttcacgctgcttgacggcaaaggtgttgagatgatgcgtgagtacgctaataagcaactcgtcatgatgggtctcaagaagcctgaaacgcctgaagagattcagatggttcagcaagcccagcagcaacccaaggagccaacgccggagcaaatcgctgctcaaggccagatgcttatgggtcaggccgagctgattaaggctcagaatcaacaaacgcagattcaggttgatgccgccaaggtcgaaggccagaatcaacttaacgcagctaaggttgcggaaatcttcaataacatggacctggataagcaatctgctttccgggatttcctcaagcttatgcagtcgttccagcaacaaaacagtgacgacgcacgagccaatgctgaattacttctgaaaggcgatgaccagcggcattctcagcgcatggactttgccaacatcctgcaatcgcagagacaaaataccccttccggacaaagcgccgagatacctcaataa

SEQ ID NO: 438808 - DNA, 552 bp, Serratia marcescens
atgtttgatgttgaatacctgaaatcactggagggaaaaagaccaatcatcgatagattgatgagtaaggttgagaaaaacaattcctctggttgctggattttcaagggtggaatagacagatctggatatgggcgaataaagattggcaggcacaatctaggagcgcacaaagtcgcatatttgataatggtcggcaactacgaccaatcatcatttgagctgatgcataaatgtgataatccggcatgtgtaaacccatcacatctaaaaccaggaactcacaaagaaaacattgatgactgcatcagcaagggcaggcatttaagtcagcggttcataaatagatcggctcatcatcaatggcatccaatcgccatcttctcaacaagaaagcttgcagcggctcttggtgaaaaaacatatcttggctctgtatgtagacggcacctaatggcaacaagaaaaacaaataatggtgcttgcatctactgtgcagacgaataccgaagaaacaagacggcaagcagaagactcggccgggtatcttaa

SEQ ID NO: 438809 - DNA, 354 bp, Serratia marcescens
atgaccgattacagcaagatgagtgattttgagattaatcgcctagtagcccgcgcaattgatggcctgcacggagatgatagaacggcatgcgattgttatttggaggcaggcgtcggcagtgcggtaaaaattcctgatggggacatcggctggtttatcatggactactgcaacaacccagcagacgcatggccgattattgttgagaataaaataacgataatggcggcttcagtgggtgataaatggatggcgcaggcattcaactactcaattgccgacattggaacaagaccacttcgctcagccatgattgtcttcctcatgatgaaggatgccgaaaaatgttaa

SEQ ID NO: 438810 - DNA, 177 bp, Serratia marcescens
atggcgagaagccagcgaagtccaacgcaaatcataatggataacctgatattcaagactgaccaccgtaagaccagaaagccacgccagcaaccagaaaacatcgtctcattcaattataccgcgaccttagccgacagcatgtggctgcgtcgtcgcgcacggagaaagccatga

SEQ ID NO: 438811 - DNA, 243 bp, Serratia marcescens
atggataagctacgcgaagagtttgaacagtggttcgataaattttacaaatctcaaccaatgtattctgaggatgagaaagaagagctatccgtatatttatggctagcttggagagatagccgacgtggaatcgtggttgatgttcctgaagcatgcgcatttaacctttgcgacctagtctgccgggatgacgttatcaaggccatccgctctatcggcctatcaatcaaaggggagtag

SEQ ID NO: 438812 - DNA, 279 bp, Serratia marcescens
atggataagcaattaacaaagattttcgttacaaaatacgcgctgacagtcggtgtttactctgcgatggctgaatgcaatttcggaagcgatatggccgtgattcctggcgatagagccaaaggttattttgacgcgtatatgcataaaggggattttcatttcacagagagtgacgcacttcagaaggccgaagaaatgcgacagaagaaaatcatcagcctgaaaaagaagattgaaaaaatcgaaaatctcaaattcgaggtgaagcatggataa

SEQ ID NO: 438813 - DNA, 240 bp, Serratia marcescens
atggaaccagttatcaaccaagtaattaaaaccgccatcgcgatcgtcggaacgcagaaaaagctggcgatcgcatgtggcgtaagtcagtcggcagtgcagaagtggttgcactgcaaggcgaaagtggctccagagaacgttgaatccatcgttcaggccactggaggcaaggtgcagaactatcagatccgaccagacctcccaaatctatttaagcacccagaacaagcagcataa

SEQ ID NO: 438814 - DNA, 699 bp, Serratia marcescens
atgttggccgaaaacctgacgcagtccgcactagccgatttggttggtgtgtcacaggctgcaatacagaagctagcttctggaaaagcaaaaacgtcgactaaaatcgtggagatcgccagggcattgcatgttcgtcctgaatggctcagtgaagaatctgggccgatgagggatgacagtgatagctcttatttaaagcatcaccctaattcagctacaccgccgtttgaagagtgggaagctggcgcatcatgggatagaaatacccctttgctcagggacgaagtagaggtgccttatttgcgagacattgagctcgccgctggggacggaagttataacgaagaacaatatgatggggaaaaattgagattctccaaagccacgctgcgccaggtcggcgctagtaccgatggcaaaggagttttgtgcttcccagctcgcggcaacagtatggagccaaacataccagacggtactgatatagcggtcaacaccaacgacaagaaactggtagatggtaagctttacgccattaaccagaatggatggaagcgcatccgggttctttatcgtgtagggccggataggataagcctaagaagctacaattcggccgagtacgagccggaggagaaggatattaacgaagttgaaattattggtcgtgttttctggtacgcagttcttccttga

SEQ ID NO: 438815 - DNA, 141 bp, Serratia marcescens
atgcgcatgattcacttttctgtgcatggcatcatcgtggatttcttttggtggagagacatctttagctaccgatggaatatgaaccgccttgacaacattatcgctgcagccatcaagtccattctcagttctaagtag

SEQ ID NO: 438816 - DNA, 654 bp, Serratia marcescens
atgaaagagcgcccagtgattttcaacggcgagatggttcgcgccattctggacggccgcaagacccagacgcggcggattgtaagtcgcagcgccgatattgaatctatctctacgcatttggattgggttcatagcggcgcgtatggagcacatcgccccagcgacaaagaatatgcgaacaaagcggaatcattgaaaacgtcaggtcttcatgcatttagagatgctaacggaaagctttttggccttcattgcccatttggctatacaggcgatcggatgtgggtgcgggagacgttcggcgattgcggtaatcgactcgtatatcgcgccgatactgaagatggagcggcaagccaggttaagcgctgggtgccatcaattcacatgccacgtgacgcctcccgcatcacgctggaaatcaccgccgtgcgcgtcgagcggttgagcgatatcagcgaagaggacgccaaggctgaaggcatgaaagccggtgtttcccctggtcacgaacacatgatgcaccaggtggcattcagggaattatggcaatccatctatagcgaagaaagctggtgcgctaatccctgggtgtgggttatcgagtttctcctggccggtgacagcgctagggaggtggagcgtggctaa

SEQ ID NO: 438817 - DNA, 252 bp, Serratia marcescens
atgcccaactgcgaccacatcacggatgagtatatcgagcaagcgttcgaaggaaccaactttggcccggttaacaagcggaaaatgttagagcaagggtgcctgaaggcggcgtgcgattcgtggtctggacacaccctctccaccatcatggtggaaatcggcttcacgaagaagctgcacgggaagctaacaaaactcggcaagcgcttcctgatggatgcgttttatcagccaaaacaatcggggtga

SEQ ID NO: 438818 - DNA, 300 bp, Serratia marcescens
atgagcgtatgcatggttgatattcgccgacctaaccaacggattcctgacgtcgaaatgccaaatcacacatggttttgtgtgctggatatccccggcatggaagcactgacagacaccaggaaattctgtgacacggctactgctactccagcaaaggccaagaagatggctgatttggttgaagcatggactccgccggacgagtggtgcaacggtaacgacaaagaatggcacgccagaatgaagggctacatcgtcgagttccttcgcaactgcaacggattcagagtgaggtaa

SEQ ID NO: 438819 - DNA, 561 bp, Serratia marcescens
atggacaataagctgagcgaactgagcaagccggtggcgtattcgctgcgatttcggaatatgcataccggcgagcctgataaaaccatcaacgccaacaccactttctctacgctggagaaggccaaggcgtatgggctggggagccggtatgtaacgcaagacgacggcaagatagttagcgttcgtgacccgtcacaagaccctattgttgagcccctctactcgcaagagtacgtctccgccctgctggcagagctggaagcgacagaatcacgcctgcacgaagtggcaaccacctgcgcgactgcagagcagcgcatcgccgaactgtcacgcctgctggcacacaacatcgagcgtgccgaatcagcagaaaagcggctggctacgccggtgcggttgctgggtgagatgttacttcacgattgggagcaccgcgttgaacggcaggccgctttcgagcacaggaaaatagcgtgggacgcccgcctggcagaagacaagaaagccatcctggccgccggcttcactttcaccgtagatggggaggagcagtga

SEQ ID NO: 438820 - DNA, 1269 bp, Serratia marcescens
atggcaaagcttacagatatgcagatccgagcatggattaaagcggaagaacgttttgaggggcgctcagacggcaatggactctatctacgctaccgagcagtagataggtcacctgtatggcgtttccgatataaattcgcggggaaagtgagagccatggttattggatcctatgctgaattatcgttagccaaagcaagagagacggccaaagagctatcagcccgcgttgctcttggctatgacgtagcaggggagaagcaggagcgcaaagctaacgcattggagaaaatggaagccgaaaagaacgcgatgcgagtctctaagcttgccgccgaatactttgaacgtcagatcctgccgcgttggaaacacccggacatactgcgccgccgtatcgacaaagacataaacccttgcattgggcacatgaaggttgaggaagtaaaaccccgtcacattgacgacatgttaaaaggcatcgttgaccgcggggcgccaaccatagctacggatgtattacgctggacacgccgtatattcgattatggcattaagcgccatgcgctcgagattaacccttgctcagcatttgaagtttcagacgccggcggcaaagaagttgcacgcgatagatggctcacgcgcgaagagttaatccggctgttccaagcgatgcgaacagctaaaggattcagcagacaaaacgagctcacttttaagttactgctggccttgtgtgtgcggaaaatggagctgtgcgccgctaggtgggaagaattcaacctagacacagctatatggcacctgccagaggagcgcagcaagaacggcgatgctatcgacattccactaccgccaccagcagttgagtggttaagagagcttcgcacattctcaagcaatagcgcctgggtgttaccagctagaaagatgcaaaaccggatgacccctcacattcaagaaagcaccctacccgttgcgctggcgaaagttagggcagaaatgccagaggtacctaattatacgattcacgatttcaggcgcacagcgcgaacccaccttgcagcgctgggagttgacccagtagtcgctgagcgatgcctcaatcaccgcataaaaggcgtggagggaatttataaccgacaccaatacttcgaggagcgcaaaacggcattgtcacagtgggcggctttgctggtggccctagaatatggtgaaaactacaatgtgagccctatacataaagccaaaaagaatgcctaa

SEQ ID NO: 438821 - DNA, 645 bp, Serratia marcescens
atgagtgagtttgttttccctttcgaatatctaccgatttcaaaagcattgccaataattaacaggcatacgcaatcatttgaaataactagagatctcatactgcaatggtggcgagagggtgtgataaatttgtacttcgttagcgatgagataagggcatcgtttgggaagcttggcatcgaagcagatttaggcaccactgacaagttaaccattcaccggtataacaccctggaatggcaaaaagtcgaaggtgaaatagttccaacatttgcttttggggataacgggccgcttccagatgaactaactttacatcctgaaggtgaggatgaagatgagggtgaatacggtgcccccatttttgtgtccatgccagaacaagtcatcatcaaagatgatgtgcagaaaatctacgccttagttcaaggcgtaaaaattgaacaggctcgggcgacaaatgtaacagctaagcaatgtcgttttattgtggaatctcttagagcccacggcctaactgatgaagattttaaaggaagcatcccacagctacgccagaaaatagcgcgcttgaaaatagcggaaacatatggcgacgacaaaacgcttactgattggctagttaaagcgggtgttaggtaa

SEQ ID NO: 438822 - DNA, 891 bp, Serratia marcescens
atgcataacttcgctgccggacagaaagaagcctttccgttggtaggctggtggctatcagatgttggcaacagagccaatgatagtggccctgtttatggagaggaaaatcagaaactttcaaactggaaagatagtggtgtagagcaattacgcaacgccggtgtggcgtggataaacagggtgactgtcactcactcagccgcattctccgcggaggcctgttttgattttaaacgctgcctgcgcttaatttctcccttagcggccacaaccaaaaaacccgcaatgctttcattgtcgcccttgattttctcgatttcttcgaggtcttcgagaggaagcctaacggacacttgcaaagaacgattattttttctacccgttgccattactgtaactccttgctttaggtggtgttcagtatacacacggaaatcaacattaaaacacttgaagtggtgtgcactaagttatacattggtggtgttcaccttatccacagataaggcacagcaaacgcacaaagtagcgacgcctcggagtggtggaacactgccgaggcgccttaccaccaacgatagaagaagtatcgaggtagctatgtcagatcatatcacacccattgctgggcggaatacgcacatccagcaacatgctcaaagccaccagcgctttgtttttatcttcgccgctattcgcaggaattcgacggaaatagctccggaaatgcgccatgtctctgcattttctgaaagggaagcccggaaggcactcgcatctgattttattcttttgttcgctggccgcctgcctattcatgcgctgaaccaatcagcaaacaaacctgcaatgagcacccgcctagaggctgaaagagatgatcaataa

SEQ ID NO: 438823 - DNA, 528 bp, Serratia marcescens
atgacagcaatcaaaaatagactgccaactgctagagagcaaaaagcgaaagattttaaccccctattaaatgcctcagaactgccagcacgaggtgaagttctaacgactaccgaatgtaccagtactatagccagcgtgcgacagggaggcgctgagggtgcggatggccccagcaaggctaaaatcctccgtgctatcaagttgaatcagaagaaaactgcacgattggttgctttatggcctactcttttcagcgtcgagaagccaaaaccgataaagatcgggatacatacagagctcctggccgcagcaaaagatagtgcgctacctattaccgatgcgcaaatacgtgcctgcttggctacttatgcgaatcgttatagttacctagttgcgttatgtgatggtggttaccgctatgatattgacggaaagccatgcggcgaagttactgtcgaagaaagggaaaaggccagagaggtgttactgaggcgcaaggacggcaagatcacggcaaggatgtag

SEQ ID NO: 438824 - DNA, 558 bp, Serratia marcescens
atgcttgataaggaagcttggatgacaactaaacaggtgtgctctttagttagtgtgtcatccagaacgttgctgcgaatgcaaatgaaaccagtaaatccgttccctaggcccgatgtaacccacgctggtggagcaaaccgctggaagagatggagggttctggcatggcaggatgcagagtcgttattaagctcgtcaaaaccacaaatccagggaaagatcgcgagagataaccaaactctcccgaaaattagtactaatcaaagccacaggcaggcaacaaaactcagtgatgaagagttgtgcacactatgctggctctggagccatgcagcattcatgattggccgaatagctgaaattgagccgcttctacgtgtagctgaacaccgccttgccggcgcttactggtcaatggcgcatgagtacgtaagcaacaccaataacgccagaagaatacttgaaaaggtaacggctcatatcgaatgcgagaaacataagaaagatgactggcgtgtcctgggtaggctgagagctgcttgccaagtcaaatga

SEQ ID NO: 438825 - DNA, 825 bp, Serratia marcescens
atgaacgagcaccaccaacctttcgaagaccttcgccttcacgatgctgatggtaatgagtattggtcagcaagagatttggctcctttactggattataaggactggcggaactttctgaatgttttgtccagagcggcgcaagcctgtgaaaccagcaaccaagaagtatcagaccatttcgttgatgccaccaaaaaggtaactcttggttctggggctcaacgcgaattagatgatgttcagctatctaggtatgcgtgctacctagttgtacagaatggcgatccaagcaagccagttatcgcagccggacaaacatattttgccatccaaaccaggcgacaagaattagctgatgacgaaacattcaagcgccttcgagaagatgaaaaacggcttttcctgcgcaatgagttaaaagaacataacaaacaactggttgaggctgcccaacaagcaggggttgagacaacgttggattttgccatattccagaatcatgggtatcaaggcctatacggtggactggatcaaagggctatccaccagcgcaaggggctaaaaaagagtcaaaaaatactcgaccatatgggatctactgagcttgctgccaacctattccgagcaacacaggcagaggaaaaattgcgtcgagatcaggtgaaatcaaagcaacaggcaaaccagacccactttgatgttggcagaaaggtgcgacaaaccatccaggagctcggtggtaccatgccagaaaatctcccatcaccggaaaaaagcatcaagcaactcgaatcagcggccaagcgactggacaagaaataa

SEQ ID NO: 438826 - DNA, 795 bp, Serratia marcescens
gtgagtatgacgccatcttatcaggctctaaaggatgagctgggcgagatttctcgccaggctagtgaaaaatatggtcctgatacaataaaacgactggattcatttttttcaagcctattaggtgaggctaaaataccacctaaacaccctatgcaaaaaccaagattacttttttatcccggtttaaataatgggccatggattgatgagggtgcgttccatcaaacacagcaaatttcacgcctgttggcaaaaaactatcaaattattaaggcagagttcaactctgccgtcgaatatctttcaggttacgcctcgcaggggcttttcaaaaatctaaatgaaaatgactggacatctattgcgctgtggagtcgtggaatatttagcaataaagcagactatttcccgcagacaaaacaaataattaaagagtttgaaaatgaccttttcccatggcgtggggaagtcaccttcatgcgactgaaagctggtgcttatctccctgaacattatgactggaccaatatgcagattaccggtcattttgggattaatattcctgatgaatgcgggctcaccgtcgccggagaaacccgaagctggcaagaaggcgagacgttattttttgatcacagctttttacataatgcgtttaaccggtcgaatgaagatcgtgacattctgctgttcaatttattacaccccgagctcgatacggccgaagtgtatggaataaaacgactaggtgcggttttgaatagatttgctcaaaaaaaacagccctcttaa

SEQ ID NO: 438827 - DNA, 576 bp, Serratia marcescens
atgaaaaaccaaaagataaaactgttttccacagaaagagcggatgtgtactgcctgacggagagtttttctcaggcaatgcaagccttcctaataaaaaacaaagaaaatttcgcccccttcgaacctttgcgttcagaagattatttttccgaaatcagtattagacagcgtatttctgcatcctgggtagactatgaggcaaaaaaatgtttgctgctagtattcacactgaaggattcggcggaaattattggcagtgttaacttcacaaactttatttatggtgtatttcaagccggctatctgggtttctctttggataagaaccacgaagggaaaggattaatgcatgaggtattgtcggctgccatagactatgtccatcaacagtatggcctacaccgtattatggcaaatcatttggctgataatcagcgcagcaaaaatacgttggcaagactgggatttgtacaagaaggctttgctcactcttatctaaaaattaacggtatgtggcaggaccatgtattaaattcttatgtctttccggtagatgaacaggagccgcaatag

SEQ ID NO: 438828 - DNA, 1329 bp, Serratia marcescens
atgaaaaaaaatgtttggttgaaaaaaataggttatctggacagcacctttcgtgcaatgcaatcgacctcaaatcagatcagtcatttattggttggcgctcttggtggtatgttcggttccgcagtttctttacgcgtttcaattgcattctattcatctatattattagagatcccatcaggtttactcgctgacaggttgggacatttcaaaagtgtctctctcgggtgtctatttactgccattgcattgattactctctatttttctttagcatcatcaagcgaagttagcttgcaaattaccatgctgattttcagttcatttatcagcgcaattgggatgtgtttgatttcaggcgcatatcaagcaatgctgcaagacatgatcgactttcaaatcatcaagcataatgaggccagcggcatgcgaaccaaagcgttgctgctgtcacaacgttatggaaaggaaattgtttcggttgtgcctattctatttttgctgattttactgattatgtatcgtaccgtcggccatgctgagatcatgctattcattccagcagccatgtttatttacttaagcctctggctatggaactatccgaacagaaatgaaatgcataccaacattactgccgaaacagtaacgttagtaaagagtaaaaatacccttaaaaactttactcatcatcttaaaacgatgtctcgggagcaactatttgtattgctaaaactttctttagttattattttcttaaacttctccatggtacacgttcatacctacttgatggtggccgaatttagagaatataacatcatgaatattgaggtggtttatctcatccctctgttcatttttatcgcttcattcgatgctgctcactatgttaagggtgttattgtaccgcgtgtcgccgcacgtttttccgaccgaaatatgattattatatcattttccagcctttcactgctctcagcgctatgctacgagttatatcttcattggaatggcattttcgctcttattttgtatgtattatttttccgcgcggccgttaccataggtcaagatgtagccatcagtaatttactggcccgccttcccgaggaaataagggcattttcacttagtctcgtgatgagcacggtgattgtactctacggtgcgtattccatttatttaactttcattggcattggaactgaacctgcacaaaatgtgctgcttgagatactatttttagctttattagggggaggcatggcactatatattaaaatcacgccactgactgaacctcaaacattagaaatacagtag

SEQ ID NO: 438829 - DNA, 666 bp, Serratia marcescens
atgctgttttctcgcaaacacaaacccgccgtatttgttggcccttccctgtcgaatccacagaacgattcgctgtttgaaattcggccaccgatccaggccggcgatttgaatgcattaaagggctctggccaacccgtattgatcattgacgggctgtttggctccacgatgtcgataaccgttgtggagtgtctgacgtttttgcaggccggtggcattttattaggctgctccagtatgggcgcattgcgcgcggcggattgctataacaatggcatggtaggaataggagaaatatttcaaggctatttgctgggttactatcgttctgataccgatgtagccgtgcgttatcacgcgggcagctatgacgaaatcacactttcctatgttcatatcgatcgccttatttgttttttgacacagtcaggtctgctgtcgagggtagacgctcggaagatcttgtctcaggttcgtgcgattagctggtatgatcgttatatcgatagaatcgttgatattgtgtgttcacattccccagctattgagggcaatcaactgattaatttatttaaagatgaggcactgcatcctaaaaaagaggacgcaaagttagccatacattatttgactcaattttatttggcacgatgtgagagctag

SEQ ID NO: 438830 - DNA, 1152 bp, Serratia marcescens
atgcaaaagttagctaactcaggattacgccgttattcatcgaaagaggctcttacgctggcgcttcccttacagcgtcttttggggatctcacgattagcctctgtgggtgaatttatcgatcttcctggcatcagcgtggtaaatgccgtgcgaacgacgctgaaagaaggccaggtttcctcaacacaaggtaaaggacgcagcctggtatctgctacctgcagcgccttgatggaagcctatgaaagacactgtgcatgctggtgtgatgatgctatttaccagcgaactgccgatcaggaggattctgcgctactggctcagttgggctttaaacccgacggtgaaattactttttggatgaacggacaagaattgcatacgggtaaggccgtgcgcatcccggctattgaagtgcaatttccttaccataagccggacgcaaagctgaccaatgttcgcgcgcatacgtcaggactggcgacgggaggaagcaaagaagaagctatttgctttgcaatgatggagaccatagaacggaatataacttcgcatttttatcagcattgtttatccagtatttgcgccgacatggtcgatttaaacagcatcgtttatccatcaacacgggcactgtggcacagtctgaacgacaaagggtacgaaagttttgccctgcgtattcacggcccactccctgttttttatgtcgcattgtacgatcctgtcagcatggggccgaagtttatgatcgcgggatctgcatcaggtttcaccgaatcagaagcacttgatgccgcattattagaagcggttcagggtttggtcgtcagcctgcaagcatctcgtgaagatttgagccgccaaaagcacaagtatgcttcacagacgttctccaaccagtccagattcagtacgctacgcgacctgtttcgcaggcattacccaagtttcagcctaccgttgcaggaaacatcgccagcgacattacagtgtgctactcagcatcttgtcagcatgctaaccgctcaaggaaaagaacgaatttatatcgtggatctgtcgcttcgcgatacgcctttccacacggttaaagccattgtacccggtatgtttgatcgccacgtcaatccagagagagatgcttaa

SEQ ID NO: 438831 - DNA, 2079 bp, Serratia marcescens
atgacattacacgtcgacggcaggattgatcggttaaccctggcaggccaggcaatttttgccgccgatattacccaactggagcctctggtcgcgcctggtgatgacattattgtgggtatttctgccagtcacgatgcctccgcctgcttaatgatcaacggcaaaatcagctatggcattcagttagaaagattaacccgcgtcaaacgtgacggccgcagcgttctcgacagcacgctggcggtggattattgccttgaggccgctggcctgacacgggatgatgtgaattgctttgcctataacattcaatccgctaccccggaatatatagggctgaatcagcctgtttgcagtgccgacttccggttgtttgccccctattccgacgatatcgtcgtcgccagccaccatttatgtcacgccttcgcggcctggtcaggttcccgtttcagagagggaaacgtcgtcgtgattgatggatccggtggtactgtcgtcggccacgatgatttactgttatctggcaccgagtttgcccgttatttaaatactgggcttgaggggaaaaggccagaattgcacgtggtttcacactacgttttcactgaagataattacacgttacgccaccgggaatatagcccatcgttcaacgtcagaagcggcagctgctctttgggagaagcctacgctgcagtgagccagttggtgtttaattcatggcacgcctctggaaaattaatggggttggcgccatatggttcacctaaatttgcggacgagatagcaattgaaagcccgcaaggcatttcgttcggctataactggaaacaaaaattcaccgagaaaaaaagcaacccaatggattatgccgatctggcagcctcggtgcagatggtgctggaaaaaggcgttttctcccgacttgaacattacggtctggataacagtgaaccgctggtgatgaccggcggcgtcgccttgaactccgtcgttaatcacaaagttcggcagcagtttaaactcaaagatttctatttgttccccgcacaacatgacgctggtatctcaatcggcgccgccaccgccgcgtattacaaacggcatggcaaaatactcagtaacgcattcaaccacgactacctgggcaaaatttacagctatcaccaggtcggattaacgctcaatcgttttgccgaccggatacaggtttctcctattgatgttcaaagcctggccgcacgattgcatgcggggcaaatcatcggatatttctcgtgcaagaaaggctctgaatttggcccaagagcgttaggggctcgctcattgttggccagcccatgctctatggatacctggaaatttattaacaagtgggtcaaatttcgggaagatttccgcccgttcgcgccgatggtcgcagcggaacatctcaaccgctattttgaaggtgaaggagagcataaatatatgctcgaggttttgccggtcagggaggaataccgcaaacaactggcagccatcactcatgttgatggctctgcgcgagtacaaaccgtctctgccagtgacaatgctgaaatccatacactactcaatgcatttgcggcgttatctgacttccctattttgctgaacacttcttttaacgttcgcggccagccgattgttgaacagccacaacaggcaattgagatgctgctttccacgcatattgatgcggtagtttttgacgactatatcgtcgaactacgcctcagttcgttccgtgacgatcatctccccggtttgttgcgcctgagtcccggctgcaagttacaaagcgtactggaaaaaaacgaacaccggtatcagttgattcacgagtatcaaggccacgctcagtacatcagtacaccgctgtaccaagccatagcgcagcttgtttcgttccaccaactggcggaagcgcagcagtattattccggcctgagtcagggtcttaaacagcaattagcgcattatgttcgtttgaaattcttgaacatcgcccatgatttttccagcggaaacgggcatgcaaaagttagctaa

SEQ ID NO: 438832 - DNA, 849 bp, Serratia marcescens
atgactgcacgcgtcggtttaggtattgattatacccatagttacggtcataaattgcatgacttattgcagctggcccccaatggaattagccatttatccgtcgttgctattcctgatgaagacgttgcgcataccttccgtcaaacgttttcacaatatgcgatgatccatcatttctctggtatggagcctgccggtattgaggggttacgatctggcgtactgaaaaaacagaatgctatcagtgaagttttacaggctgcctggtgcctggaagatatcggcatctggaatattgggccctataatctgccctattttgcagccccagtactgtgtgaacccgtattggccatggccattgacggcgtaaaacgtattcaagacgtttccagtatccctttctcggcagaaattccctcattcagtattgcggcaggtgatatgccgctaggcgaatttttccatcgactggtcgacgcgacaggctgtaacgtagtgttggatatcagccacgtattttcctacgccatctattacgatttgcttcctgaaaaggtgttggcaacgttaccgtgccatgccgtaaatgaaatacatatagcaggcggcagcgttcaccctacgcaccaatggcgctatcgggatacccattcagaaaagattgttgccgaggttttcccactgctggaacgcgcgttagttgactgccctaatctaaaggcggtgacgtatgaactcggcgtaggtatcacgccagaagtcatcaccacggacttgcgtaatatagaagaatcctgccaacggatgaactttgtcccttcttttgatcaagcgccccgttag

SEQ ID NO: 438833 - DNA, 585 bp, Serratia marcescens
atggacgctaaacttttacaaaaggtttatgtgtcgctgctctacagcgacaactaccgaatgcctggtgccgaggaagaatatcaattccttaataaaaccatggacagcgaacgccttaagatcgagcgcgcggcgcggaggagaaatttgcgaacggtgctttattccgatatgcattttgcacctcgttttttcacgaaggaagagtttctcgatttagtgattaaatactgtgaatcagatagcttctggaactggaatagccgcactctcgttgagagtttttgttatttcgttttccatcattctgcccttagcgatgaaaaaaagtttattttcatgctagatggaatttattctggtatttcaaccggtttggaaaattcaccatggcattcatcagtgagcaaacgccaggcaaacgcactaacggaagaaatcggcagcgattggtatttacctttggctaacctgaataacgtatccaatctggacggtcttggttttgtcaacaaacccacctgcgtacgtttccataatgaaaatggaaaagtggcgctttcttgtcgggaggcggcatga

SEQ ID NO: 438834 - DNA, 261 bp, Serratia marcescens
atgatcaatgtctatctacctgaatcaataggcaccgttcaccatatgaaagtgaatgccaaaaatcttgacggtgcgttgaaagaaataagagaaaatacacctgacacttttcaactgattgctatagagcgaaacggcatttgccaggtaaaaccttatattactttgttcataaatgatgtcatgtctgtggaaagtaatcctgtattaaccacgggtgatcgaattacggtcgaagttgctatttccggaggatga

SEQ ID NO: 438835 - DNA, 1098 bp, Serratia marcescens
atggtgtgttttatgtttaataatactggcggaatagacagtgtcaaaagcatcacggtagatgagctaaaaattcttaattcccctctattgattgatgttcgggaaagccatgaatattctaatggtacgatccctggtgcattaaccattggacgaagctttttagaaatagaattaaaaaaacgggaagtatcctcagaacaacctattttgctattctgtgccagtggattacgttcaaaatatgcctcattgagtttgacaacgctgggctactcacaggtatattcgcttgacggcggctttgaagcctggaaagcacagggtaaaacaatcgtatatcccaagattcttaatgagaaagaaaaatcccgttatgcccgtcacctgtctttaacagatatcggcagtgaagggcagataaaaatcatgcaggccagggtgttagttattggcgcgggcgggttgggttcttcttgtttattatatttggcagcagcaggtgtcggtgaaataggtgttgtcgatcacgatattgttgaccttggcaacctacagcgtcaggttattcataatgaagccacattaaaaagaaaaaaaatagactctgcgctcagcacccttcaggctttaaactctgatataaaaatcaaaacctatgatacggccgtcaatgccgataacatttccacactagtcgcggggtatgacattattattgactgcacagataattttaatgcccgctacacaatcaatgatgcagcagtgttcgcgcagaaaccgttagtttctgctgccgttttccgtttttccggtcatgtattaacgcgtaccaaccatacttcaccatgttacagatgcgtttatcctgaagcacctcctgcggcactcgccccgtcctgttcggaaaatggcgtactaggcgtggtacctggcattctaggtctgtaccaggcaaatgaagccataaagattatattgggcatcggtgaaactttggacggaaagttgttaaaagtagacatgcttaataatcaacatcacttattaatgacgaaaaagcgacacgattgcccatgttgctatcaatga

SEQ ID NO: 438836 - DNA, 123 bp, Serratia marcescens
atggataagtctcaagagttagaactcgctgttgctgaattgaatgcagaaaatgcagaagcagaaaatgaactgttgctggatgtgacttgcctggtttcaaacaaagagtggcaagagtaa

SEQ ID NO: 438837 - DNA, 282 bp, Serratia marcescens
atgtacagcaaactgctggaacaaatacgggccctgcgactggggcacatgagtaatgccctggagcagcagtggtcacaaccgatggcctacacgtcgctgagcttcgaagagcgtctgagcctgctgctggagcacgaactgctgcagcgtgaagtgtcgaaggtcaatcgtctgcggcggcactcaaggctgaggctggatgcgcagccttcgcaactggactaccgtccggagagagggctgatccaatctccagggcttactacactcgcaaaatga

SEQ ID NO: 438838 - DNA, 405 bp, Serratia marcescens
gtggggccggattaccacgtcctgtacggcactcatgcctactccgttccgcatgcactcgtcggcagtcatatcgaagccggagcccgcttgatccgcctataccaccgcggcgtgttggttgcccaacacccgcgctccgggcagcagggtggcttcacgacgcaggcggagcacatgcctgatacccatcgccagcaacgctggagcccggacaggctgctgtcatggggtgaaagtatcggcagtgccacccgcgcagtggtggcctggcatctgcatcatcgtacgcatccggagcaggcataccgaacctgcccggggttgctgaatctctcccgcgagtacggagccgccaggctggagaatgcctgccagaaagccctgctgctcgagcgtccgtga

SEQ ID NO: 438839 - DNA, 1761 bp, Serratia marcescens
atgtcagaacaaacaccatctatattactagacgacgctgctatagcactttttgaaatgcgtgcagatgaagtgatttcagccaatttaacgcatgatattttgggatttataaatgcgatagaaaatccaaactatattttttcaaatgaaataatcaaatcaaggtattactacaccattgctaattgtcaatctgccgtctttaataaaacaaacacaacttggtattcagaagagcttggaaaatcagtaataaattacagaaaagccctaaatgcattacaaaacatagataacacgaaaaaatacatagctaatctaaaaagtcgcatagaaacaaacctaggtaattacttatgttcacaaggtcgtcttctttgttgtaaaaatcattgggaaatggcaataaacctagataacaaccctgtcgcaataataagaaaagcatataataacatagagttggctggttttttgtatgatgaaggccattcctactatcattactatgaagcttataaatcgatatgcgcagggctgaatggaatcagcacgctagatccagaactagcctcagcatatagtaaggatgggagcttgattaaattcaaaaactggttcgaaaaaaacttcaacgaatcagactttaattccattgataactacaaagagaattttgaaaccaaaaagcaatatagttatttgaagtggtgcggagacaatagattattcctcaatgaactaaatgatgaatatacaacggaactagtttacactgactgcataaccttaccaagtcacactgcaattattaatcaaacattaacaatgtgcgaagatttagtttaccatggtaattttgatgaaataaaaaacgattatatatatgcacgttatttgatttttagtgcgcacaatatacccagcgaaaacattcacttctataacaatacatatcaacacatcgacgacatgtctcatgccataaccaatcttaaatcacaacattataaatccgcttttaaaactctttattcaatatttgataaaattgcatattttcttaactcattctatgatttcaatgatattgatgcaaaaatttactttcacaatttttttggtaaatttgaaaacggaaaactgaaaccccactcaaagttaaaagagagcaataatcagtttctacacgcactgttctacatactaaaagatataagagattcaaaccataaagatgacaacttagacagtgagtcctattggttagatccagatgcggaaaaattttctaaaatcagaaatgcaattgagcataggtccttaaagataattgataattttggctataaactattaaacaatgacagtaataatcatgaaaagatctatgcagaagaaaaaaacaatctagaatctctcgatagtgaaattaagtttatttgcaaagagattaaaacacataaagaaaataataatcagacaaaaataaacatcttaatagataaaagggatgaattagttaaaaaaataacactctctaaaaataagataaatgacaaaactaagcgctctaagcattcattaatgattagtgagcgtgatttcgaagcgaggctaatgctacttataagattggttagaagatcaatcatatacttatcacttgctatccattgggaacagaagcaaaatagggatgactatcctattgtaatatcaagagatgttccattaaagcataaacttgatatataa

SEQ ID NO: 438840 - DNA, 1122 bp, Serratia marcescens
atgaaacaatctcgtagacatcattatgtacctgaatggtatcagcgtaggttcattccgaaaggcgatacgtcatattacagattagatttacatcctgacttaataacaaccccacaaggtgatgttattcgcaaaggtgaaatcctacgaaaggggcctgcaaagttttttcatcaaatagatctatatacaacaaaatattttggtgtcgaaagcgatgatattgaaagatatttatttggtgaaatagactctaagggggctttggcgctcgctgttctttccgccgatgattggatgggtaaaatacatgatcatgttataaatttttatgaatatattgatgctcaaagattgagaaccccaaaaggacttaattggttaactaaggaatttaatccaagaaatcaaaatgaattattaatgaggatgcagtatgttcgtaaaatgcactgtactatgtgggctgaagcttctttggaaatcgtcagtgccaaaaaatcctcagtcaagttcatagtaagcgacaaccctgttactttttataaccctgaagtatatccagggaatgttttatgcaaatatccatttgatccttccttgactttacaaggaactagaacgatatttcctctcgactcagaatattgcattattatcactcataagcaatttgctcgaaaacctggaaaattcaaagcattaaaacctagaataaatgctagatactttgattcaactgttataaattatcatgattttattcgtgaacgctatttcaccgaaaagatggtagcttcagtgaattttatacttaaaacacgagctgagcgctatatagctgcatcaaatcctgaatggttatatccggagaaagtgttaaaaagtactgactgggcttcttttgataaaatattcatatctaaaagcatcaagttattaggtgataatgtggagattttttttggtggtgaaaatggagagttgattgccacacaagatgaatacggacggaagcctaagaatcggcaagaatgggaagaaaaagaaaaacaagcacaagctatgcatgaacatattttacggcttttgaaaaaacatcgaagtgaaggtaaatga

SEQ ID NO: 438841 - DNA, 228 bp, Serratia marcescens
atgaatgagatgagagtgctgtttttaaatggattgaattgtcttcttgatggtaattatagctcagctaaagtggcggactacgcctatagattttatctggactatgacattcctgatgaagagctttcatatgtagtagattatttaaaaggaattgatgctggcccagaatttgaaatgagcaaagatgaagtaatatctttcatcaagctaaatctgaaatga

SEQ ID NO: 438842 - DNA, 1302 bp, Serratia marcescens
gtgtgggaaataggccacaaattccctgcgtctggtggcggtactgagtacagagggaaagccactgttaacaatctggcgctgatacgaaaggagcttaacagaagcataggcgacaacctgccccttaactggtcagtgaatcaagtcgtgtgggtaggtgacgctttcacactggaaataagcaacgcagaagccgctacagcgtggcgtaatcgcatggggtgggatagtgccaccagcgacgagaaaagccagcagaaggccagagagacagcggagaacgataaacacaaagcagaactaaccaatcttgcaaagtgcatcgtaaaaataccaggtatggcgatcagtgcgggggatgaatgggcggcactggtggcaaaggtggaacgcaggatcgaagcaatagaccgcagacaacgggcaatcattaaaaatgcactgaggcgaggcgagtctatctatcaggctggtggactgacagaggaagccttacacggcttaaacgcaagataccgcattatctataacacgctcaaccaactggttgatgtgattaataaaattgatgcagggtttaacaacgatccatttgatgaaatgtcagacgcggcagaaagaaacatttcttattgcagatttttaagtgaaacagcacttatcaaacgcgctttcttgatgtgggctgaagattgtttcaggaatccgacaagaagcgtgcaaggctttactcacccataccttgaccaagtaccacaggcgaaagtgtggggaaccaaacagggcgaggatggtcgcttgtggttttgtgggtggctggtgaagaaagacgaggaacctgtagagataccaccagaacatgccgccagatgggtaagcatggaaaggctcgctttcatcgagtcagagacgaacaggaaggacgctgtaaggcagcaattccacaagctgataactgaggcgcgtcactggtgcgaagctggcatagcgttatctgtagacgctgagatagataccagcaatttctatgacgaggcagacgcggagcagcacacacaagtaacacggcaaatcatgctggaagatgcgcaaagacgttttgagcgtctggatcgaataagagaaaaactcaatagctggtggaggatgtcagcgaaactatccgcgcaagacgtggaaaaagaagccccaaactatgtagctatgttcgctgattaccaaactgaaccaagagcagggagcgtgaacgcatggcgctacacgacactgattaaagaacaaacagaggaaggattttaa

SEQ ID NO: 438843 - DNA, 270 bp, Serratia marcescens
atgaaccggaaacaacttgagcaaatgttagaacgtgaatcacggatcactatgggtggcatgttgtcgtggtttgagcgtaacgccaagcacccactatacgacaacgaggaagcagagaaggtgaagcagatccacgcatggttatgtactgccagtgacgcggagaaagagaaagccttgcaatggtacaaggattggtatcaagacgaagccgccacaggtgagcaaaaagagatgccagaatttaaccttattgcagatttttaa

SEQ ID NO: 438844 - DNA, 609 bp, Serratia marcescens
atgaccagccgagtttatgcctacctgagagcctcaaccaaagagcaagacgcgaagcgagccaccacgcagatccgcaactttgcaaaggccaataaactgaccatatcagcggagtttatcgagaacgaaagcggagccagtttgcaacgtcctgaattgttccggttgctggaggtggcacaagctggtgatgtgctgttagtggaacaaatagaccgcctgagccgtttaaatgcggcagattggcagacactgagcaacacaatcaaggcaaaaggtgtgcgtgtcgtggcgctggatctgccaacgagccaccagctactgaacaacggcgacgagttcacaggccggatgatggaagcagtaaacagcatgatgctggatatgctggcagcagtcgccagaaaagactatacagaccgccgccgccgtcaggctgagggaatcgctaaggccaagaacgccggagcctacaaaggccgcccagtggacgacaagaagcacgaacaaatcaaagccctgtttgcggcagggaagaacaagagcgagatccaccgattgaccggagccgcacgaaccacaatcaataaggtgttagaagcatga

SEQ ID NO: 438845 - DNA, 519 bp, Serratia marcescens
  misc_feature (295)..(304): n is a, c, g, or t
atgtttatcaccccttctactgaaactgtaatcaccaaaaaacgtgatgattcggaaacattcctaactcaaagctacctagtcattcctggaaaattgtctgagcccgaagctaatttcagcgcctataccaacgatccacagctgcttgaggcaatcaaattaattcgtgacgaattcctgaatgaaggggcgccctatcctaaagctggtcgtgcaatgcgaggtgatgatagaaactggataaaagctcagtgggtaaatggagtcacctataatgacttctcgccgagcnnnnnnnnnntcagtatttataatctttctaaacaaagagatgcttacaaacgtgccatggaccgagaggatatgcgggaaattagtgaagccttaggctgtgaatataacgatacgattatggtgctctatcagcgcggaaactactctagtggagtgacagaacaaaaaaaaataaccaaaaaacagctatctcgcatccgcaattccagcgtgttcaaatag

SEQ ID NO: 438846 - DNA, 135 bp, Serratia marcescens
atgatggtggaattcatcttgttccccagcgcctcggtcaccatgatcggcatcaggttggccgggatatacagcatgatggaggtcaccagcagcgccagcgtccattgcaggctgtggcggcggcgcacgtag

SEQ ID NO: 438847 - DNA, 609 bp, Serratia marcescens
atgacggaaaaactggcgagcacgattattccgctttatgacgaacatgccgccgcctgggaacgcctcagacccatcacgctgtttgagcggccgtggctcgaccgctttttacagcttaccccggccaatgcgcggctgctcgatctcggctgcggcaatggcgtgccgatcgccgcctattttattgaacaagggtatcgagtcaccggcatcgacggtgcgcaggcgatgatcgcgcgctgccggcagcgttttccacagcaggagtggcggcagatggatatgcgccagctgaatctggcgacaagattcgacggcctgctggcctgggacagcttcttccatttggcgcgcgacgatcagcgccgcatgtttctactgttcagacggcacgccaagccgaatgccgcactgatgttcaccagcggccctgcagacggcgtggcgatcggcaatttcgaaggccagccgctgtttcacgccagcctggcgccggaggagtatacgcgcttgctgcaggagaacagcttccgcgtggtcgatcatgtggtggaagatcccgcctgcgggggaagaacggtctggttggcgcaaagcattgagtga

SEQ ID NO: 438848 - DNA, 588 bp, Serratia marcescens
atgaattatcaggtggtgccattttggttttactccggcaaggttctgctggcggtgctggccgcgatcggcttggggctgtgtggcgttaacgcggcaattttttactgcctgctgctcggggttgtgtggccggtcgccgtttcgatacggctgcatcaactgacggaaaagggcctggcgatgaatccccggcgggattcgcactggatggtctatgtgcagggcattccggtacaggaaacccgtcaggtgttaaccaatccttgttttgccctggaatacccgatgcagatcttttttctgcgcgccttcgccggtaaaaccgtattgcagatggcgctgttgctgctattgatcacgcagttggcggcggcgacttatctgtgggtagcgttggccggcgcgttgtttggcgtttggctggtgtacagaaccgtcgacagcgtgcgcgcgttgcgcgatgtggctcggcaacgctgggttagcgagcaactggtgaccgcacatgacactgtctggtatcgggcggcgtttaacggccgtaaagatactgtggcggcgctggatcgcctgttgacgtggtga

SEQ ID NO: 438849 - DNA, 138 bp, Serratia marcescens
atgatgaaatcgcaggcagcggaagatgtgccggcgctttgcatgcttatgcatccgttgtgcagggcggagacgttgccgccgacccgtgcgccgttctcgcccgcgccgtttggcggcagggcggaaagccgatga

SEQ ID NO: 438850 - DNA, 129 bp, Serratia marcescens
atgtcgttcctgatctgcctgctttccccggtatctacccaacgtatgcgcccgttcaattccctgcttttgccgttggcggcgactcaaccagtccttatgggacatcgcggccatcaggtcgattag

SEQ ID NO: 438851 - DNA, 903 bp, Serratia marcescens
atggtgttattccgtgagcgcagtgtttcacgggctgctgaaaaattacacttggggcagcctgcggtgagcgggatattggcccggctgcgcgaaatgttcaacgatcaactctttgtccgaaccgcgcaaggaatggaacctacgccgcgcgcagaggcacttgtgcaagcactggctcccctgatggtggaaatgcagcaagctttattccagcagcctgttttcagcccaagccacgacaaacacatattccgtttgggcatggccgattgggttgaaatgtggctaatgccctctctgttggctttaataaagcaacgagcgccgcgagtcgctttgaatgtgataagaattgcgccttctcagacggaagagatgctggaaagcgaccatattgatttagctttgacggttgctcctcatggcccgcgctggctccagcgtgagtctctaatcaatatgagttttcgcaccctgtggcatccggatcaattagatctgcctgacgtattatcgttggcggattatgttgcacaagagcatctgctaattccttaccgcggcattaacgcttgcgttattaatcatcaattgggcgaatatgggctaaagcgtaccgcgctctatactacgaccaactttgcggctttaccgttaattctgcaaagcacgcctgtattggcgagcgtgccgacatgtcaagccgccgtttggagccgggattacggcctgaaatatagcaagttgcccctggctaatccccctagtgttaacgtggagatgttatggcaccagcgttgtagtcaggaatcgacattgcaatggctgttggcgcaagtcagggaagtctcgcagcatctctgcttgtcagaagaaggggcctgttccccccatcgttaa

SEQ ID NO: 438852 - DNA, 966 bp, Serratia marcescens
atgaaacagagtttagcgcagagaaaaacatgttggttgcttgctgcagccggtttgttgattacctctgccgcacctgcggagacgaacagtcaggctcccggttactatcgaatgccgctggggaaaatgacggtgactgccgtttcagacggtaccgttacactcccactagagcagctgttgacaaatatttccccagaaacactgcaaaaacgcttggctgacgatggaatatcgtcattagcagaaacctcaatcaacacctttgttattgatactggtaaacaaaaaatccttattgatgccggcgccggttcgctgattggcaagacaggaggtcatctgttggataacttgcgggaagcgggttatccgccagaaagcattgatgcagtactcattacccatattcacagcgaccactcaggcgggatctcattaaatgggaagccggcattcccaaatgcgcaagtatacgttgagcaaaaagacgccgaattttggttaaaccctgccgccaaccttaataaagtatcggaagataaaaaaggcatgttcaatgaatcagtaaatgcgtttaaccctataaaaacggctggcaagttgcgaacatttaatgccccggcaacgctggtgggaggcattcgtgcattcccagcccccggccatacgccaggaagtgttatctatcgcgtggaaagcgaaggccagtcattgattttctggggtgatttggttcatgtcaaggcagtgcaaatgcccgatcctaaagttgccattcattttgattttgaccagccgcaggcgataaaaacgcgcgagcgtattttggcgcaaatagcgaaagaagggagttgggttggagcagctcatttttcattccctggattcggccacgtaaaaaccgatggcaatggctatcgctggatccctgccaattacactattaaggtagcgcagtga

SEQ ID NO: 438853 - DNA, 246 bp, Serratia marcescens
atgaaggtattgacgacgccggaaagacctttccggtatgatgagcttgcggataaaattatccgcgaggccaggagccgcttgggctgcgccgttctgcggtttttagactataataatcacggtaagttgcaaacgttcaaagtcattcttcctcttgggagcgacaagcagctaaaaaaagatcacctcgggttggtttcctgcctggaggctaaaaaattgatgaggataaaaaaaatataa

SEQ ID NO: 438854 - DNA, 1059 bp, Serratia marcescens
atggctgagttaataaaagatagaccttttgatttggaagctattcctttttacagggaaatgccacaaaagcctttacgatttgacattggaagcactgtccatgacttccttgagattgacttaaatgaacttgacggacttcaaccaattgaagggagaaggctatcgaaggactcgttagtgtttggtgtaaacccatctgaagatttattaaattcctatgagcgagataacgttgaatttcaaatgatcaatgttattgttaatatttatggaataaaagaggataatggtgttctcgtaggtaaaccttattcaatatctttaaagcccatggagaaaagaggtaaggtaacgactaacccaccaagtttctttaggcattttgacttggagtttctcaggcagcaagattatttttacaaaggatttaaccctttcacacttggctatgaaatttttggtaattacagctcgttgatatctaaaggacctctaactggccatacggatatgctggggtttgtaatcaatacatatgcgttagcaaacaaatgggatttcaaagatgtgctcctgcctgcgatgccggattgtagtaatttcctgcgggagaagttttcaaagtataggactcgaaggtatttcaaaccttttgaaaatgtcaaaccaagaaaaatatggggatgtgactccccaatagagttgttccttctacatgccatggattccagagggttgtctcccgaaatacaaacagcattgtttgaagatggaagtactcatccttctcttcatcagatgatatcagcgaactcgaaagaaagtgagataaggcaaataactgatgcggatttttattttcctgagcaaagattagctgttttttgtgattctaatgccttccatagagggaagttagcaggaaaaaaagacgctagaattgacagtgagttgaatgacttaaacattaaaaccatcagagttacggggcgagagataattgattctccttatgcgtgtgttaatagaataattaaaatgttgaatggctga

SEQ ID NO: 438855 - DNA, 438 bp, Serratia marcescens
atggtgttcaatcaggccgcacgtgacgttatcgtcaaggctgggatcgtcgatgtgattacccatgattggtggatatatatcttgataaccggtgtcggtggagtggttcattatgatgcggagccaagcctggattatcgtcaacatgtcggcaacgcgattggttttgactccgtatccaaaagaagactgtcgaagttgagcaaactattgagcggtgaatccagagggtggcatgctgcaaatattgcggcgctggaaaaaaatcgcgagtgcttaacttctgagaacaagcagaaacttcattggtttagaaagatacacgacgccaactggttagttagaaacttctactattttaaactcgggttatatcgacaaggctttttcgataacgtgggtgtgtttttattagtgcaactaaaaaaaatataa

SEQ ID NO: 438856 - DNA, 819 bp, Serratia marcescens
atgcaacgcttttccatcagcccacttgaaatgatttcaagtgtatggcgcaacagattcttgattaaaacaacggctatccgtgaagtgcaaggccggtaccgtggatcttttatgggtatcgtatggtccttattaacaccactttttatgctaacggtttatacgtttgtatttagcgagatttttaaggcaagatggcatggcggtagcgcgtcaaaaggtgagttcgccctggttttattcgcggggctcattatttttaatttcttctccgaatgccttaataaagcgccacaaataattctcggtaatgtgaattatgtgaaaaaagtcgtttatcccttagaggttttacctgtggtctcgctggcctctgccctttttcagttggtgattagtctaattgtttggctggctgcgtattgtgttttctttggtatcccacaccttacggttctttattttccgttaattctcgtgccgttggtcctgattactctggggattagttggtttttgaccgcgatgggtgttttccttagggatataaatcagtttatcggcttgtttactacggccttaatgtttatgagcccggttttttattctgcagatattttaccagagaattttagacggctaatgtatttaaatccgctcacaacagtgatagagcaaactagaaacatcctttattggggaaagtcgcccgactttgaagtattgagtgtttattggttggcatctattgttgtcgcttggttaggttttgtctgtttccagaaaacgcgcaaggggttcgcagatgtgctctga

SEQ ID NO: 438857 - DNA, 1416 bp, Serratia marcescens
atgtgctctgaatatgctattcgggttagtaatctgagtaaatgttatcaaatctacgatcggccttcagacagattaaaacagtctatatattctggagccaggcggttcctgggaaaaggagcgaagccgcttttccgtgagttttgggcgttgaaggatattagctttaatatcaaaaagggtgagtctgtcgggattattggtcagaacggttcagggaagtcaacgttattgcagctcatttgcggtacgttaagccccactgatggaacagtcaagactagcggacggatagctgccctgctggagttagggtcaggttttaaccctgagtttaccggccgcgagaacgtttatatgaacgccgccgtattagggatgagtcaggctgagattaatgccaggtttgatgaaatacttgtttttgcagatatcggtgagtttattgatcagccgaccaagacttattccagtgggatgctggtacgtctcgccttcgcggttcaggtatgcatagagcctgatattttgatcgttgatgaagccttggcggtgggggatgcattgttccagaagcgttgtttcgaacgtatggaccggctacgcacgaacggcaccaccttactctttgtctctcatgatcaagaatctgttcgcacgatgaccaacagagccatctttttagagcatggcgtcattaaatttgcaggaacctccgccgacgcattgctggaataccgtaaatccttgcatgagcttgaatctaaacgtttgaatcaggtggctcaacacttaaaagcaaagagtcaacatgcgcgacaggttcaacagtccgcgtctgacacggcagctaaagccgcggatgtcgctgtttccaccgaaactgcgccgctgtctgaacgtttgaaagctttttcattcggcgatcttgatgccgaagttttggatgtggcgctgctgaatgccaaaggggagccctgttctcactttgatcccagagataaggtaacggttatcgtacattgccgcgcccatgccaatttgacccatttaaatgtggggttgcgaattagaaataaagaaggggtcaagatttattcttggggtacgcttaatcaggatatggctattcgcagtcaggttcagaaagagggtgaggtattctgggaaaagtcctttgaaaaagacgacgaatttgaggtcaggtttgaattcatctgtggcttaggcccaaatctatatgaaattcaggcatcaataactgaagaaggcaagccttattacgctgagcaacggatgattcattggattgatgaggctgcattttttaccgttaccagcgaacctcaatcgtaccattttggtggagttgtcgatctgcgtatgattagtcaactacaggaacgtaactaa

SEQ ID NO: 438858 - DNA, 3735 bp, Serratia marcescens
atgaattcagaacaagacaatgcttttgaaaaaaactgggatgacaaagagttaagaaaaatgaaaagaatcgataatgcctttgacgtttcagaagaaatacttaacgcttgcggtgggcgaaaattcctgaacattggttgcggtgatggcgcgttggttcaggcattactgtcaagcggaatggatgcctatggtgtggatacatcggcaagtgcgatccagcattgtgaaaaattgatgcctaatcgcttcaaacaaggcacgatagagaaattacctttcgaaacccaatcattcgatactgctatcctgacttatactctggaggatctatcggaagaggctctgcgtgccgggttggcagaagttcgtcgcgtaacccgccgctccgtctatgtgcgagtcagtaccgtagcggcgtcggaaatcgaagcctctcacatcggccggaacagaaatgcgtgggaaaccctcttttttgacgcaggctttcgaaagcatccttcttactatttgcttaaagattatgagtcgttcgagcatgagggtgatgaggttacgatcctgtttgaatgcataccggatgaagcattgtcgcgttatccactggatgcgttgaaagaagaacgcgatctgcatatggatatgacccgtgagaccggcgagcgctccgatgcacatattgcgcgttatcagtgggccgcgacgtttgtgcgtcctggcgatacggtgctcgatgccgcttgcggattgggatacggaagctatctcatccaatgcggaacgatggccgcgaagacgctgggtattgatggcagcgactatgctatccaatatgcgcaaagtagcttcgcttctcaggttcctgcactgagcttttcactgggtatgttgccggaggcgctgaaagatatcgccgataactcagtggatttggttatttcctttgaaacgttggaacatgtgcctgagcctaaggcgctgctggctgagtttcatcgggttttaacgcctggagggagaattatcgtcagcgttccgaatgattggagcgatgagtctggagaagatcctaaccccttccatcttcatgtttatacactcgataagttgcgtgatgagcttaaaaagcattatgactttgaacaacttgtcgttcagtcggccacgcactataaaaatgggccaggtagcaaggagtgggtgccggctaagcgtgaactttatgctgtgccgagccatatctcattgcaagaggcgccaaaagcggagtggtggctcgcggttggcatgaagcctgcgttggcagggatatcagtgccttaccgcgaaacgcaattcggcacttacgaagatgataaagcctggaatgtcacggcattctctcgtgattataagaatccctggctggtgcgttcgatggtggatattggccaccgcatgaaaaataaagaagaactggttgcgctttgtgaggccgtttatcagcaaaacaaagataacagtgctgatgccggcgccgcactttgcgtactcggttatcaattaataaatgccagatccacaacggccttttcagacatattgcatttcaataataaagtcgagatgtacattgatgcgcagccggtaacgccacatggcatccgatggacagtctcgctgctttttgtgaccggaaagctttggttgatggccggtgatagcgaaaaggcaaagcaggcctttgaaaagtgcattgcgatcgaccctcttgcttttagcccgctgttggcgaacagaaccattgaggcttgccaactattaggcgtcatcgctctgagtcatgggaacaaagaacaagcgagccactattggcggcaggggatcgctacggcgcaacgcgccttggctgctgattggaagctgagcctcggtgacgtgaataagcccattgaattcgggctgccagaattatcctctatacttgactatgcaagtacatgtgcttatgcgctgactaatatcgattccttcgagaataagccatggtggtggctgcagctgcgtcgtagtgcaggcatgcaagcggcgaacatgaggagggaaatcacgagtctaaacgagtcgttgcgtgagaaaaatgtgatggcgcaaaatgcggatgccgcagtgcaggagaattatctgcaaactgagcaactgttatccgcgttggcaagtaaagaaaaaattgcggaagagatttatcaggctttgttaaataaagatagcttgttaagtgagttaggaaaagtcatgtacgataaggatgcaaccttgaatgatttgaattccaagttgcaagaaaacagccaacatatcgaagaattggtttcagcgctaatagctaaagaagaagctataaccaaactcaatcacaccgtattgctcaaagaacaggcgatcgttgaacaaaccaagacgatccagcaacttaacgggcagttgaattctcgactgattcgtctgagaaacgttgccgggcagcccctgagcatgagaaagattctgcatatggggtacctgatgacctctttggttaccccaaaacgggtacgggattcgttagcacctgtcattagccgactgcgagcaagagtggccactcgtccggcagtggcggcaatcgaaaccggagataaggcccctcagcgtggtcatcaggttctggtgcctcaggctaaggagaatgcgccgcaaatagtgcatatcatcgccaactttatgaccgggggatcttcccgcctggttgctgatttgattgagtatttggggaaagactacaagcaagccattttgaccagctatattcctgatccgcctgcttacctgggcgtcgatattgaagagtgccgtttccctgaagataccgcaccttttgtagaatattataatcgtcgtaagcctgacttcattcatgtccattactggggggatgtagatgaaccttggtatgctaaggcgatagaagctgcaagaatattaaacattccagtaattgagaatatcaatacgccaattgctccgcatttatctgatgcggtaaaacgttatgtttacgtgagcgattatgtccgtcatgtatttggtcagaataaagattcacatgtcactgtgtatcctggttctgatttctcacactttatgcgtgcacctgaagagcctgttccgcaagactgtgtgggtatggtttatcggcttgagaacgataagcttaatgaagatgctatcaagccatttatttttattgctcagaaacgaccacaaacgaaagtgctcatcgtaggtggcggaagtttgttggcgccattccagcaagccgttaaagacgcgggggttgaggctaactttgagtttaccgactatgtggaatacagcacattgccggattattaccgccgcatgtcattatttgtcgctccagtctggaaagaaagctttggccaggtaagtccttttgccatgaatatgcgtgtgccggtgattggctacgatatcggtgctatcagcgaaattgttaactctaaatccatgctggcgcctgcgggcgatgccgaaaaactggcggatattgcaattgcattgctgaatgatgaagcacgacgtaatgaactagggaaagaacatcagcagcgggccaaagataatttctccgtacaggctatgatcaacgcttatgatcatctgtatgctgacatgattaaaaaataa

SEQ ID NO: 438859 - DNA, 1359 bp, Serratia marcescens
atgaaaattgttttctttgttcactgtttcttccccgaccatttttatggaacagaaacctatacccttggattggcaaatcattatcgctcttggggccatgaggtttccgtcgtttctgcggtatttcagggggaggctaagcagccatccttgattaaccgttactcttatcaagatattcccgtcatcgctattgataagaatgttattccgcacagtcgtgtaaaagaaacttactatcagcctgaaatgcgaaatgtgcttgaggaaatcctcttagagctaaaacctgacgttatacatgttacgcatttgatcaaccatacgtcagttcttctcgaggtcgcaggtaagcttaatatcccgacgtatactacgttcactgatttcttcggtttttgcgccaacaataaactcgaagcggcagacggtggcctgtgtgcggggccatcggaatctcgtgccaactgtgtcgcatgttatctcaaagaggctgcgcagggcggtcatgcgacgggatggatgaagaaggcggcggttccagctatggccaatttgctggccaaggggctggtggcttctcgtaaactgggcgccttaaaatccggttcaacacaaggactggttgaggatctggtaacacgtccggatacgctgtcgtatctttataatacctattataaaggtgccgttgcccctacggctttcttgcaaaaggcgtatatagcgaacaatatcacagccccgatgcgtaagatttggtttggcatcgatattgatcgcaaagctaaacctgttcgtgatgaaaatcatattccagtgattggttttatcggtcaaatcgcgcctcataaaggcactgatctgctgatagaggcatttaagcagcaacctaagaacagtgccaggttaaaaatttatggtcctaccgatcagtcggtaagctatatggatacattgagaaagatgagtgacggtgtcgatggcatcgagttcatggggacgtttgatcaggctaaaatggctgatatcttcagtgagattgatctgtttgtgatcccatcgagatggtatgaaaatagtcctttggttttgttgaactcgttggcaacgcacactcccgtattggtctctgatgtggaaggtatgaccgagtttctaacggaaggggtcaatgggtacagcttcaagcgtggaaattccgacgacttagccaataaactctcttatatcctacaaacaccgcagttattgcataaattgtccttgtcgacagaatatgcaagaacaacagaagtcatggcaaaggaaacattcgaaatttatcaatgcaatgagttgataacaaatagttga

SEQ ID NO: 438860 - DNA, 939 bp, Serratia marcescens
atgaaaattgtagtttttggcggtggtggttttctcggatcggcaatttgtgatcgtttgcttaaagatggccatcagttgaggattttcgaacgtccgcgggttccgccttatcgggagtttacggcagacgaaagtgtggagtgggtgaccggcgatctgagcagcacgcatgatcttaatgacgccatccagggtatggatagcgtcttgcatcttgtttccacaacgctaccgaaaagttcgaacgaagacccggtatacgacgttcagaccaacgtggtgccgagcttgcatatgcttaatgctatggtgagtcagggcgtttctcgcattgtctttatttcctctggcggcacggtatacggcaaaccgcagtatacccccatcgatgagaaacacccgaccgatccggttgtctcgtatggcattaccaagctagccatcgaaaaatacctgcatatgttcagccagctgtatggtattaaggctgtgacattgcgtgtagccaatccctatggtgaacgccaacgcgttgagacggcgcagggcgctgtgggtgtgttcttacacaatgcactgaaaagtaagcctattgagatttggggtgacggcagtgttcagcgtgactatattcatgtcagcgatgttgcggaagcatttgccaaggcgcttgtttacgacggaaaggaagagtgttttaacatcagttcggggaaagggacgagtctcaatgacctcatcgccatgttgaaagacattttgcctgaagagctccagataaattataaaccagccagatcattcgacatagatatcagcgtattgagtaacgatttagctcgccgggaattgggttgggaaccgcaattaagcatgcaggaagggctcaagcgggccgctgactgggtgagaaactctttaaaaaatcataattga

SEQ ID NO: 438861 - DNA, 1335 bp, Serratia marcescens
atgcgcgttcttcttactgttcatcaattctttccggagtataaagcgggaacggaggtgcttacattatcggttgctaaagaattgatgcgagcaggccatcaggtgcatgtctatacaggacacccgggagaagcctctcttacggatgatgaacggtttgatgagtatgattacgaagggattcatgtttatcgttttcatcatgcctatgtgcctatgtctggtcagacctcgatgatcgaggttggatacaataatcagctggcggttaaacattttaaaaacattgttcaaaccttttgcccggatattgtccatcattttcatctgaatcggttggggatcgggtgcattgagcacgtagcgcagcaaaaaatcactcagttttttacgccaacagacttttggatggtgtgtcccaccgcgcagttgatgcttggggagggccggtattgtaacggccccagtccggcatccggcaactgtattaagcattttgctcgtgattcaaaggggggaatgctcggcagtatgtttgaccatgcgccaacgtttctttttgatcagctggcaaagttgactaaaaacaaccctcttattcattatcctatgagtaatgaagttcgagcaatggcgacgcgtttagaaaaaacgatagcctcgctgaacaaactggatggcattgttgcgccgaacgtgtttatgaaagagttattcatccgctatggtgttaacgctgaaattatccacagttatccgtttggtatcgatattccgaagcgtaacatagagcctaaggtcgatcgttatgaccggccattgtcactggggtttattggcactcttgcgccgcataaagggtgtcatgtcgctattgaagcggtgcaaagattgccgaagaacagtgcaacattgaaaatatatggtagcgcgcaaggttttccagaataccattcacggttattgacgttggctggagataatcccgcgattcatttttgcggtacatttcctaacgagaaaatcgattctgttatggatgatattgatgcgctgatagtgccgtcgatatggtatgaaaatacaccgttggtcatctactccgcgcaagctgcaaaatgtccggtcataggatcgaatttaccggggattgcagaagttatcacgcataaaagtaatggtttgttgtttgaggctggtaacgtatcggatctgattgcgcaaatctcatcattactggatgagggtatctctaatttaagtgaaaatgcgataaggataaaatcgattagagattacgttgacatgttgatgactttatggcgcagttaa

SEQ ID NO: 438862 - DNA, 1116 bp, Serratia marcescens
atgtctaatactaaaaaagaaagaattgacgggcctgatatccttcgggggtttgcggccatctcagtcattgttgttcacttgattgcctcttcgcaaattgattttggtcatgtcattacgcttattggcagtaaatttaccgccagtgttactttattctttacgataagtgcattttctattgcttatgcttataatgatggctttatcaacaaaactgactttaaaaatttttatatcaagcgattcttccggctggcccctctcttttatctggcgatgattgttgaaggcgttatcatttattatgcatttcaacatactccttctgcttttgaagtcttaatgtctgggacgtttctctttaacctggtcccaaaaatgcaagatggcatcgtatgggctggatggtccttgagtatagagtgggtgttctatctcctttatccggtgatatttatatttagcaacaataagaaaaccattgttgtgctatggatgctgtgtgtctttatctcatcaagtatcgctaaagtacaggcggaacccattgagatatacatgaatattctaaatcacatggttttctttatctcaggtattttcgtctatttataccttaaagagttgcaggtgctgggtgccaatcttgggcgatattctggttttgtttccggattgataatgtcatctctaatggcgttgctgatttattgttttgctcaggatggatatccatttaatatatatattgtttaccctctgatttgggtgggtatgatcgcctcttccattatcggcatccctgcattaatcaataatcgtttcacccgcttccttggtaaggccagttatagcatctatctcatgcacggcattgttctttatctgcttaaggctgttggaacataccggtgggttgacaccttcgcggtcagcggcccaatgaagtttctgatttctattttgattaccgctgttttgactatcgcaatctcttacctctcgtatagatacatcgaggaaccagggataaaactggggaagcgatttatatcaaaaagaaacgcttcatcatgctcagtcgagagaaggctaaacagtaatgggtaa

SEQ ID NO: 438863 - DNA, 1548 bp, Serratia marcescens
atgttcacgccacgctatctgtcctggttgctctgtgccgccatgttgccgctcagcggctgcgatcggcaaaaagtcgctgacgcgatgggcgggagcgccccgccctcggtcgcgcccgccgcgagtatcagtgcgccggcctatgcgccgctgagcgccgatcagctgtaccagttggtcagcccggtggcgctgttccccgacaagctgctggcgcaggtgttggccggcgcgggctatcccgaccaaatcagcgctgcggatgcctggctggcgcaaaaccgcgggctgcaaccggcggcgctcagctcggcggtggatgcgcaaccctgggatcccagcgtgcgcggcctggtgcaattccccgacgtgctcaatcagatggcgaaaaacatcccctggaccaccgctctgggcagcgcctacctcaacgatcctacggacgtgatgaacgccattcaggtgatgcgtcaacgagcggccagccagggcacgttgaaaaacaccccgcagcagcgcatcgtcgtagcgccgacgatccgttacgttgagcagcagtcctatcgccagcgcgtagtggcggcgccgggcgaaaccatcgtcatcgagcccagccagccggatacgatttacgttccgcattacgatccctgggaggcctacggcacgccgatccaggcttatccaagctatcagtatcagccttccggctacagcggcggcgacatgctggcggccggcgtgatcagcttcggcgtcggcatcgcggtggcctctttactcaaccagcacaacagcggctggcacaactgggatatgcgctgggacgatcggcgccagccggtggtctaccgcaatgcgccctacgtgtcgcattccaccaccgtggtgaatcgcgtcaccaacatcaaccaatatcacaacgtaaacaatgtgaatcgcagcaccaccagcacggtgaacaactacaataccgccgccgcaccaacgccgcgtttcagccaaccggtgcctaacgctgcgctgcaacagccgcgcgtcgcgcctgcggcccacgcgccgatgaccatgccgcactttgcgcatactcagccggtggcgcctcacgtacagcagccggtagcggccgtcccgcacgtgcaacaaccggtcaacgcgccccatgtgcagcaaccgatgagcatgccgacgttcacgcatgccgcgccggcagcgcctcacgcgcagcaaccgatggccgtgcattcagcgccggtacagacacatttgctgcagaccgccgcaccagtgcatcaatccaccgtgcggccacaggttcaggcggcaccgcacgttgtacagccggcagtgcatgagccggccgcaacgctgcattcggcgttggttcgcccagcggctgtgccgcaagagcgtatcatgccgcatgcggccccggcgccgcagctccatcagacgtccgttcagcctgtgccgcatcgccaggagccggcgcccacgaagccgcaggaacaccgcccaatcgtcgagcagcacaaggtaggataa

SEQ ID NO: 438864 - DNA, 1029 bp, Serratia marcescens
atgccatttacagcactaacatctctagaagaccaaatttctcaaataaaatctattgtagaaataaatgaagaagttaggaatagtattagcaacgattctcatcccgtttcaactccaattgatgaattatattggcgtcgttatgattactgctctgcaatattacgtttatactctagttttgaacgttttatcattgactcacttcaaaaatggttagactggatagttaaaaataaactacctatcttatcacaatcagataaggcaatttcccgctatcgctacggtgtaggagaaatactaaaacgctcaactgagtcaagattttcaaaaataaacatcacagcactagtaaatagcctaactgctctacataataaccaagacactcatcttgggatagaccctatatttgcgacatcaccaaacttgagatttaatgatgtaattagcgcactagaatcccttgaacttataggtgcatctgaatggctaaacgcctttccccctcttaaggaaggatgtgagacatcagacacgacaccagagaaattcttaaaagaacttgttgaccgcagaaatgaagcagctcacggaaataaaatgccggatgaattctggtcagtaacattaataaaagatgctgcatcactagtgctatctttagccacagcaatagcagagtttattgtttacaacatgatctgcattgtggaaagaaaccctatcataaatggcaataaactagaattacccaatattgggaaaatcggtgaggtattcaaaaagcataacgcatttgttatctgcgccaataaaactgggttatggaagggaatgaaaatccttgttgtaacaaacatgagatgctatatcgatatcttggtgtcaattcaattaaatggaaactcagcttgcgcatggatggcgactaaaaatgaagaaataggtttatgtacagaaatactcccacataaaagtgcaaggctgtatagtcttgatgaaatggtttgttttcaataa

SEQ ID NO: 438865 - DNA, 1182 bp, Serratia marcescens
atgattttagaagcagaaataaaaatgtgggaaaaagaaaaaaaacaaagatctacggcgacaactgacgcagaaatagaagcaaagtatgatacaaaatcagaaagaattgtcactgagacaaatagagaaaagttaccaaacttttatgaagcactgaaaaaacctgattatatgaacacccgaccgttttaccaaagacgctctaggtggacaccaaaacttcaatccagacttattgagtctatactgattaacattcccatcccacccctatttgtttatgaaatccgttcaaacgtgcatgaagttatggacggacagcaaagaatatcagcaatcaaagctttttattcaaatgaattagtccttgaagggctggaacggtggccagaactaaacggtagaacatacagcaaactgcctaaggcaatacaagatggtattgaccgcagatctataacgtggatatctgtccttcgtgagtcaaccgaaaacgaagaagaagcaatgcttctaaaacagcttgtcttcgaacgtcttaatacaggtggtgtagaattaagccaccaagaaatccgcaatgcacttttttctggtgagtttaatgatgctttactcgaactttcacgcttacctgaacatagagatgcttggggattacctcatttttcagcatccgaaatccaaggttcaccagcttatctagatgattcgtctttctataaaaaaatggaagacgttgaagttatattacggttttttgcccttagaaactcagaaaattaccaaaagggaatgcgagggttcctagatttatatatgctaaagtcaaaaatattttcaagtcatgacatagatgagttgaaatcaatatatactaaaacaatttcaaccgcattgaaaatttatgatgattatcttttccgagtttatgatcccgaaaaggaaaaatggttagattctaagcaaaaggcctttgctgatgctgtcttagttggtatatcaagaaatattgaaaagtcagattttttaatttcgaatagagaaaaagttattgaagcaactcgtaatatgttttctcaagttgaagaaggatcattaactggcagagggaacacaaaaagagatgtaattaaaagaattgataccgtaactgctctactagacagcataggataa

SEQ ID NO: 438866 - DNA, 387 bp, Serratia marcescens
atgatggaacgcaatctttttggttttatcatcgataacgatatacaactcgatatcgctaataagcggctggtgcgcattaattctttatcgccggaaaaactggtgttatttagtgccgtgacgctcaatgatgccatggtgcggctgctggttttttttctgattcaatatggtaaaggccggcagctttcgaagaatgaaatactgaaaaaagtctgggatgaaaatcattattcttcgtccagccaaaaactttggcaaaccattaaagagctgaggatacggctcgatgccatcggtttgccgcacgacttcatagtgaatgtgagggggtcgggttataccctgaataatcctatcgttacacctttgttctacgagtga

SEQ ID NO: 438867 - DNA, 534 bp, Serratia marcescens
atgaaaaagacctccgtaataggattggccttgctgggctgcgttggtcaggtgcaagccgccagcaccgggacgatcaattttagcggcactgtatctgcgatgacctgtgatgtacgggtcaatgggcaggaagccgatggtaatgttgctttgccggctgtaagcgagagtcagctgagcgtgatgagctggactgcaggtcgcacggcgtttgagctgaagttgaataattgccagggcgccttgaaaaccacgacggcgttctttgaagctggccccggcgtggattcgagcggacgcctgcgcaaccttacgggcacggcgaaaaacgtcgtgctgcagctgcgtgaaggctccggagcgctcaatccgatcgtagcgggcagtccaaaccagatagcgaacgctacctattacaccatcaccaatggcatggcgaccctgccgtatacggttgaatattatgccatgggcgccgcgaccgccggctcggtggtaagcaacgtcgtatattcactgcaatataaataa

SEQ ID NO: 438868 - DNA, 639 bp, Serratia marcescens
atgacatttgccagcgtggtgattagcggtacgcgcgttatttattcctcggaagcgaaggatgtcaccgttaaattgaacaatgtcggtaaagcgccggtattgattcaaagctggatcgatgacggtgatatgacggcgaagccggaaaatatccgcgtgccttttattttgacgccgccgattaatcgcgtcgatccgggcaaagggcaaaccttgcgcctgagctataccggggcggcgctgccgatggataaagaaagcgttttctggttgaacgtgctggaaatcccggccaaaaaacagctcaaagatgatgccagcctgctgcaaatggcttttcgttcgcgcatcaagctgtttttccgtccggcgggcttgaacggcgacgccaatgacgcggcgcagaaagtgacgtggtctgccgcgccgggcggcgtgagggcgttcaacccgacgccgtatttcgtctcgttggtgagtttgaccgtcaatggcaaggaaagtgaagggcaaatgatcgcgccgcattcctcgctgatgtttaacggtatgcgcgccgccgcgggaacccagatcgccattgaattcgtcaatgactacggcgctgtcaataaattcgatgcgctggtgaagtaa

SEQ ID NO: 438869 - DNA, 2577 bp, Serratia marcescens
atgaccgaatatgttagcgttgcgcatggccttcgcacggcctctgcgcgcttaacgccggcggcgctgtgcgtgctcggcgcattaagcggtgctcaggcgtgtgccgacgaccgtgcgccgcaggccatcgccggaaaggtcgaattcgactcgtcgtttcttaacctgagcgatcgcgccggcgtcgatctggcgcgctttgcgcgcggggctgccgggctggccggcacgcatcgggtggcgttgtttatcaatgacgaggcctttggcaataaagaaatcgaatttcgcagccgcgccgatgagagtctgtatccctgcctgacgccggctatcgtcaatagcatcgcttttaacgacgccgcgctgccggcgggggcgctggcgccattggcgcagggtgaaccctgttttaatctgccgcggcagatccctgatgcgcagatcaacttcgacagcggcgagcagcggctggatatcgtggtgccgcagatttatatgcgcaagaccgcgcgcggcagcgttgacgccgcgcagtgggacagcggcgtctcgacgttgtttcttaattacaacctgaacggctattccagcacgtctcgtggagcggactataactccgtctacgccggtttgtccggcggggccaacctcggcgcctggtatttgcgccataacggtgcctatagctggacgcaaaacggcatttcgcaatacgacagcattaacaccttcctgcagcgcgatattccgccgctgaagggcagaggcgtgatcggccaggcgaacaccaccggccaactgttcgatacgctggcgtttaacggcgtgcagctggccagcgatgagcgcatgctgccggaatcgcagcgcggctatgcgccggaaatccgcggcatcgccagaagcaacgcgcaggtgaccgtgcggcaaggggggcaggtcatctatcagacctcggtaacgccgggggcatttctgatcgacgatctgtatcccaccggttacggcggcgatctggaagtgacggtgcgtgaagccgatggcgcgcaaagcgtctttactgtggtttatgcggcggtcacccaactgctgcgaccaggcgccaatcggtacgaagtcgttgttggcaaggccgacaatgacagcctgcgggaaaagccctggctgtaccaggccacctaccagcgtggtttatccaatgcgttcaccgcctacggcggcctgcaggccgcccgagattatcaggccgtgcagttgggcggggccgtcggttcctcgctgggcgcacttggcttcgatgtgacgcaaagcgacagccgtctgggccgcgagcggcgtcagagcgggcagagctatcggctcagctacagcaaaaccgtgaatgacatcggcagcagcctgtcgctggccgcttaccgattctctacctccggctatatggatttcatgaccgctatgcaaacgcgcgaccggctgaggcaaggcggcggagagggcgatatcgcgcgcgcgcgcaatcgggtgacgttttccatttcgcaggggttggcgtctggatgggggcagctgtatgtcagcggctctgtgcaggattactggaatgggcagggcagcgacaagcagtatcagttggggtatagcaacagctataaagccgtcacctacgggttgaacatgacgcgcagccaggcgagcaatggccggacgcaaaacagctatctgctgaatttcagcctgccgttagggcgccgtgacaaggccggcacgccgcagctgcggctcggactggcgcatgacagcgacgggttatcgagccagcaggccaccctctccggcaacctgggggccgacagtcggttcagttacggcatgagcgcgatgaacgccaatcgcaatggcggcagcggctcggtaaacggtcagtatcgcagtcaggcggcgctgctcagcggcgcttacagttccggtaaaggctaccgcagcgcctccgccgggctaagcggcaccgtcgtggggcatgccggcggcgtctcgttcagctcttacggctcggaaacgttcgcgttggtggaggcgaaaggggccgaaggcgccagcgtctccgcttatccaggggtgtatgtggatgcgcaaggctatgcgttggtgccgtatttgacgccgtatcagctgaatgaaatcagtctggatcccaagggcagcgcctctgaccttgaaatggatgagaccatgcagaaggtcgcgccttattccggcgcggtggtgaaagtgaaatacaacgcccgccagggctctccgattctgatcgataccgctgccgccggtgcgccggcgccgttcggcgccgaagtgctcgacgaaggcggcgccgtggttggcgccgtggggcagggcgggctggtttatgcgcgcgtcgctcaggacaggggcgcgttgcgcgttcgctggggggcggatcgcgctgcgcagtgcgccctgaattacgtgctgatgctgcagcagaaaggcggccggccggtgttgcagcgctttagcgcgccgtgtcgcagcggcgttggcgcagaacgatga

SEQ ID NO: 438870 - DNA, 1089 bp, Serratia marcescens
atgacacagaaaaaccgccagggcatttggcgcggcatcgccttgttggcgctgttgctggctcaatcggcgtgggccgactgttattacagcgataaatcggacgttaaaaacgatctgaatatcaatgcgcccattgtatccggcaatatcaccgttgggtccgaagtggcccggggcgctacgctgtatacgcaaaattttaaccccactttctggagcgtgtacgttgaatgttcgacggcgcagccattcgtcgcgatagacatgggctatgagccgccgccgcatcctctgtcggagtggagtggcggttttggcaaggtttatcagacgggcgtaccgggtgttggcgtgtttatcgataaccacactttgccctttaccctaccgtactcgtcacaaagcacggagagtcataccctgtatgggtggtcgtcgaatctttttaaatatcgcattcggctgataaaaacaggcgatattcaaccaggtaccatcaccggcgccgatctgccctgtctggtgactcgggttggtccggttgtgtccccctttaccgcgatgcggctttgctttaccggctctatcaatatcgtagcgcaaacctgcaccacgccagatgttttcgttgccatggggaactacgatatgggacgacatttcaccggaaaaggcagcgtaaccgaatggaaagatgcgtccattcatctgttgaattgcccacgtttttacggcaccacaagcacctattattccgacagtggggcgggcgggataacttcgtctacaccgaatcggatagaggtatcgttaacgcctaataccgacatcattgacagcgatcagggcatactgtcgctcaaaaaaggtgccggtagcgcagacggtatcggtattcagctggcctacaattttggcggtgtgcggcagtgggtgaaatttgcgctcaccatgacgcgtgagatgccgaattcagacgctacgtcgtataccattccgttgcaggcccgctatatccaaaccgagcccacggtcacgccgggtgccgccgacgcgacagtgacctttaacattaattattattga

SEQ ID NO: 438871 - DNA, 162 bp, Serratia marcescens
atgctgaccggcaacgccgacaacgccgacccggtgtgcggcaaatcgccgcaccacggcaccattctggcggcgcgtgaagcggcgaatcactcgcagatcggtatcgatcagctgcgttttcgcaatcagaccaactcccgactgatcttcaagggatag

SEQ ID NO: 438872 - DNA, 2532 bp, Serratia marcescens
atggatgcgaaaaaatttaaatcgggagcgctcccgttaagcttgttagggatatgcatttcgttggccctgtgcagtctggcgtttccgttacgtgcagatgatgcgattcaattcaacaccgacattctggatataaacgataggaaaaatatcgatctcagccgcttttccaccggtgcttacattatgccgggtacgtacaacatgacggtattgatgaacaagcaggcattggatgaacagcctgtcaccttctatcagccggaaaacgatcctaaagacagcgtggcctgcatttcaccgcagttggtcgagcaattgggttttaaagcagaatttctcaagcagctgcgctggtggcacaacgagcagtgtctggatcttgccagcctcaacggcatcgaagcccggggcgatctggcggcttcggcgctgtacctgaacatcccgcaggcctatctggaatattcctcgccggactgggatccgccggcgcgctgggataacggcattcccggcctgttgttggactacaacctgaatggccaggcacagagcaacagaaatggcggcgggcagacgcagcggctgggcggcaatggtgcggtgggcgccaacctcggcgcctggcggctacgtgccgactggcagactagcctgagccatcagaccggctcgggccagtcgagccagaagtcgtttgactggagccgttactacgccttccgcgctctgcctaagctgggtgcgcgcctggcgctgggtgaagactatctgcagaccaacctgttcgatagcttccgctttaccggcctcagcctgatatcagacgacaacatgctgccacccaacctgcgcggttatgcaccggaggtgacgggtatcgccaaaaccaacgccaaggtcacgatcagccagcaggggcgggtgctgtacgaggcgcaggtcgccgccgggccattccgtatccaggatctgagcgattcggtaatgggcaagctggatgtgaaagtagaagaacaggatggcagcgtgcagcagtttcaggtggataccgccaacatcccttacctgacccgccctggcatggtgcgttacaaactcgccggtggccggccgtcgaactgggaacataacctgcaagggccagcctttgcggccggtgagttctcttggggggtgagcaacggttggtccttgtatggcggggccatcgccgcgggcgattacaacgcactgtctctggggctggggcgcgatctgctggcgtttggcgcgttgtcgttcgacagcacgcagtcacgggccaggttgccgagcgaagacggcaccaaaagcggcggctcataccgcctgagctattcgaaaagctttgatgaatacgacagtcaggtcaccttcgccggttaccgtttctcggtgcaggactttatgaccatgagcgaatacctggatgcgcgctatcacggcatgcagaacggcaaaagccgggagatgtacaccatcacctttaacaagcagttccgcgatcagggggtcagcgcctatctcaactatgaccaccagacctattgggataaaccaaccagtgaacgctacagcctggcgctgtcacgctattttgacctgggctcgttcaggaatatgagcgcgtcgttaaccgcttatcgcaataaagcccagagggccaatgacgacggcatgtatctgagcctgtcggtgccgtggggggtgaatgccaacctcagctacagcagcgcgtggaaccgcaacaacaacagccagcgggtggggtattacaaccggctggatgagcacaataactatcagttgagcgccggcagctcgcgcagcggcgaatccgccagcggcttctacagccacgatagcgacattgccaagattgacgccaacgtgagctatcagggcggccagtacagctcaatcggcatgggcctgcagggcggcgccacgctcactgccaagggcgcggcattgcaccgcaacggcgcctttggcggtacgcgcctgatgctggacaccgacggcgtagccggggtgccggtgcgcggctttggcgctactacccacaccaatatgttcggcaaagcggtggtggcggacgtcagcagttattaccgcagccgggctagcatcgatctgaccaacctggcggacgatgcagaggcgacccagtcgatggtgcaggcgacgctcaccgagggtgcgattggctaccggcgcttcaatgtgatttccgggcaaaaagctatggcggtgattcgcctggcggacggcagcacgcctccgtttggcgccgaggtattcaaccgccgcaagcagcagaccgggatagtgaacgatggcggcagcgtgtacctgagcggtattcgcgccgaggaacaaatgacggtgcattgggaagggaaagcgcaatgtgagattgacctgccggcggtgcgcgcggatgtcgctttgagcgacctgctgctgccgtgccggccggtgaccgcggcgcaggaaggctaa

SEQ ID NO: 438873 - DNA, 615 bp, Serratia marcescens
atggaaaggaatggcgtgggctacggcagccaaagaaaaggcattttaacgcgacgggcaggccgggcggcagcgctggcgctggcgctgatggcgaacgccaacgttcaggccgcgccaggcaatagcggcgtgctgcttgtgcatggtgccctcaccgaaggcgcttgtcggctggaaatgtcatcggcctatcaggatatctggttgggcgatatcaccaccggcagcctgagcatgcccggcagccgcgcagaaccggtggcattccagctgcggttgcgtgactgcatgcgcatgggggcggcgatcagagacccgcgcttgggttatcggctatgggatgcctaccagccggcggtgacggtaagcttcagcgccccggccgatgaggataacccgcagttggtgcaggtacagggcgccaacggcctggggctgcgcgtgttggatgccggtaaacaggacgttcggttgggtagccgcagccggccgcagctgctggcgctgggcgataacggtctgcagttctatgtgatggcggaacgcacccgcgcgcctttgctggcgggggcctaccgcgccgcgattgattttcggatgaactatgactga

SEQ ID NO: 438874 - DNA, 570 bp, Serratia marcescens
atggaaactctatggcgagccaggctgcaaaccggcgcagaatatctgcgcctggggtgtgggctggcggctactgccaccgctgcctcggcgttaaccctgctggcggtgctgctcattggccaacccgctcaagccgccacggtggacgtaacggtcaaaggcgtagtgatcgccaaaccgaagtgtgaaattaacggcggcaacgacattgacgtgcccttcggcgagctgaagattgcagatattgacggcgttaactatggcaaaaaaaagatcccctatcgggtagtctgccatggtgatacttccggcatgaatgggtttatgaagattaaattgcagggcactagcccgaactttggcgacggcttgctacgcactgacaaggataacttggcgatcaagctgctgtttcaaaatacccagccgctaaagttgaatgaatggctgaatttttattatcccaatcagccggagctgcacgccgtaccgataaaacgcagcggcgccactttgcgcggcggggacttttccggttccgccacattattagtagaggttcaataa

SEQ ID NO: 438875 - DNA, 498 bp, Serratia marcescens
atgaaacgttttccaaccatggccgccttggcctgcatggggttactcaccggtggcgttgcgcaggcggtaaacgtgaactttaccggcaagctggtcgagcagccagactgtgtgctcaacgcgggtaaagatatcgccgttaactttgataacgtcgtggtcaagaaaattgacggcgtcagctacaagaagatggaaatcccctatagcgtttcctgcaccgggggcgacccgaacagcggccagctcaaggtgatgctggacttcgtgccggtttcctggggggattacaatccgctgcaaagcagcattcccaatctcgggctgcgcatcacccagggctcgggggataccacctacgtcagcaagaccaagctgtcgatcgatgcggccaacccgaccaagctctacgcggtgccgatcggccgcccaagcgccatgctgaccggtggagatttcacgggctcggcgactatgaccgtcatgtatgaataa

SEQ ID NO: 438876 - DNA, 876 bp, Serratia marcescens
atgaataaaatattattattcttaataaccttttttttccttgcggcaggggtaaaggctgctgcatttcatgaggccattgtaatcaataatggtagggttggtacgaacgcgtatagtatatctcttacggcggtcagcctttctcctgctctttctgctcacaatgggtgtcagaggagccttaatccatcatatgattgtcatataagtatacggttagagagggtgtattctaatggtcaatgggatccagtttggctgcatgaggttattctggttgaccgtaatccgccgaattggtgcaatagcggtgactgtaacgtaagtgtagccactgctgcgacgatcggtgagttggtccccttaatgaagcttcgcggtagtttcgggaaaactgtcacaagaaatgtatctatttccgcacaggttatcggacttaggacttgcgtttggttgtaccgcatagaaacaaccacaacgtcgggatatcggtacgattgtggggataccttacctctgatgtcctcttgcgacattattgatactgatgcaatcattgattttggctcttttagcaatgatgtcacaaatcggcaggccagcggatcatttaaagttaactgtacaggcgatgctaacctgcgggttaaattttcccagagcgtcaccaatatgtccctaagccaggatggcaagctcaatgccagtttgaaggttcgcaattctacgccgggaaatacagaaacggaaagttttattaaggtctcttcgggtaaccaagagatatttatcgatggtgatctgaaaaataataatacctcgcatactgggccattttccacatcggtggtggcgattgttgaaatagcgtaa

SEQ ID NO: 438877 - DNA, 594 bp, Serratia marcescens
atggaaggaatatgtcagaggttgcgttttcttgttgagagattgaagatgaaaaccgttaattttattattgatgatggcaacagttattttgccgcaggcttgcggctttgcattgcggaatatgcacgagacaataataagacaattcgttttttagcgcccgacagcaaggaagtgcccgatgtgcttttcgcttcttcttcccgctgtattcggcattgggggacaccatggcatgccgctactgtggcgcagagtgtgatcattgaagaagagaagggggtatttcgcaaaaatggccggcgagtactatgtagaatggatcggcgaagcgatttatctgtgctgttggatcgtgtgtttgccgatgctcattttgcacaggcgaaatctgctcagctgacccaacgcgaacgacaggtggtgaactatctgcgcagaggggtcgatcaatcgcaaaccgccaggctgttaggggtcagcgtaaaaaccgtgcacagtcataaacgatcggttatgcgcaagttgatgttaagccggaatcatgagtttatttattggctgttgtcccaggagggagaatattcttaa

SEQ ID NO: 438878 - DNA, 288 bp, Serratia marcescens
atgataagtaagaaaattgcattactgagctgcgcactgctgatgtgttcgccgctggcccaggcaggtttggtgattgaaggcggcattaatggcaataccggcagcggcggcaacacgtccgttgacgtgagtattaacggcagcaccagcggcagcaacggtaccggcgtcaacatcggcgatgcgcaaaaaccggcgtccactgccagccagcggcaaaacgatatctatgcgtcaatttgcgccagcccgtttatgaagaaatatgcttcgatttgccagtga

SEQ ID NO: 438879 - DNA, 1392 bp, Serratia marcescens
atgcagcgcgccggtcaggcagcctacgcgctggcgcgcaacgcgtatccctcccgcgaccactggctggtgctgtgtggccacggcaacaacggcggcgacggctatgtggtggcgcgcctggcgaaggcggcgggcgtgcaggtgacgctgatcgcctgcgaaggcgcacgccctttgccaccggaagccgcagcggctcgcgaggcctggcaagctgcaggcggcgacattctgccggcgaacagccgctggccggcgtctgtttcgctcattatcgacggcttgctgggcactggcctgggcagcgcgccgcgtgcgccttttgatgcgctgatcgaggccgccaaccgccattcggcgccggtggtggcgctcgatattccgtccggcctgctggcggaaagcggcgcggcgccaggcgcggtggtgcgtgccgcgcacaccgtcacgttcatcggcctcaaaccggggttgctgaccggccaggcgcgcgactgggtcgggcaacttcatcagaatgcgctaggcttatcgggttggttggcgaagcaaccggagcagattcagcggcttaccgccgaggtgttgccgcgctggctgcatccgcgccgtccttgcgctcataagggcgagcatggccgcctgctgttggtgggcggcgatagcggtttcggtggcgccattcgcatggcggcggaggcggcgttgcgcagcggggctggattggtgcgagtgcttactcacattgatcatgttacgccgctgctgacggccaggccggagctgatggcgcaggcgctggacgaggcgacgctgcggcaggcgatgcaatgggcggatgtgctggtgattggcccggggctgggccaggctgagtggggcaaaaacgccttgagcgtgctgcaaaccagcgataaaccagccttgtgggacgccgatgcgctgaacttgctggcattaaatcccgagaaacggcagaatcgcgtgatgactccgcatcctggagaggcggcgcggctgttgagctgcagcactgctgacatcgagagtgatcgcttacttgccgtgcgcaagctgacggcgcgctacggcggcgtggcggtgctgaaaggcgccggtacgctgatcgccgatgagcaggggcagatggcgatcgccgacgtcggcaacgccggcatggcctccggcggcatgggtgatgtgctgtcgggcatcatcggcggtttgctggcgcaaaagctcccgctgtatgatgccgcctgtgcgggctgcgtcgtgcatggcgcggccggcgatcgcgtagcggaaagacaaggaacaagaggcatgttggcgaccgatttactgccggacatccttcatttcgttaatcctgagtgggcaaaatag

SEQ ID NO: 438880 - DNA, 198 bp, Serratia marcescens
atgagtattttactactgcctacggttgccaagatggaaaatgaggaacacacacagggctatgagcgctggtttcttgagagcgttcaggaagccatggatgagccgctgcccggtattcctcatgacgaggtgatggctgaaatggatgctgttatcgctgctgcagaagccaggatcaaagctaaacagtcataa

SEQ ID NO: 438881 - DNA, 210 bp, Serratia marcescens
atgagagtgataacccggctttatccgttgcatcaccagcctggcgagcaaccggcgcagcctaaacacgtgggggagacggtgttcgattcttcgctgcacccggcggacggcgcgcaactcaccgcgctgcaccagctttgtcagcaccagtcggcgccgtcctggcgggcgcgcctgagcgcgctgtggcggaagctgtacgcatga

SEQ ID NO: 438882 - DNA, 1353 bp, Serratia marcescens
atgcgtgttacagcacctgctaaaacgttttccaatggttttacggaagaagatgacatttttggacgaaaggtcttacatgatcagatagttaggattgcaactaatgctccagatagaagccttgtcttagccttggatgataaatggggaaatggtaaaacatcatttgtcaaaatgatgagttctgaaattaagaaccataacccagaattgaatgtaatatattttgatgcatttgaaagtgattatcaatcagatccttttgttgcactatcttccaagatatactcattattaaaaagtgaagatggtaagataaaaacgttaggtgagaaattattatcagttggaaagaaaattggcgcgtcattcgcgattaatggtgcaaaattcgcggtaggtgcaatcactggcggagtcgttaatggtagtgtattagaagctgcgagtgatactattactgactctttatcttctccaattgaagcatttattgaagggaagataaagtcaggtgagcaagaaatagcaacaattgaacatttcagagagatactttctgaaatatacaaagtaagcgggaagaaaactatctttattattgatgagcttgaccgtgcaaggcctgattttgctttagacttattggagaaaataaagcacatattttctgtcgagggttttgttttcctactggtaatgaatcgttcgcaatttgaaagaagcattgagtgcagatatggaaaaataaatgctaggctttacctgaataagtttatccactattggttcacacttcctaaaatagatcatttatcagaggatgtggttgcaggctataaaccatctacaattttaagatatttactggcattggattatccaaataagttacttgttcgaggttcttctttagttaaaacgttggcatatctgcttgaagtgaataattgttctttacgtgaagcggaacgctgctattctgttttctgtgtcatggaaaaccctcaaagaatggacggatacgttagcgacattctaaaagcagcgatggggatggttgccttcttaaaagttcacaatcaagagatgctatatgatattgtaaataaacgagtgactttagagacatctattaaagctttaaatattcatgagcatcacgcgcatgattcacctgaggtttattatgtccttcatgcgcttgagtatcatttttcaacggatgatgagcttgctgaaaaaagaaaagcaaaacatttcagtgatatagaaagctttatagggcgacgggttaagatttttgaaaaattagtagattcagtggatggattccaaatactttattga

SEQ ID NO: 438883 - DNA, 912 bp, Serratia marcescens
atggttatgaatcataatacagaaaaaataactttttcttggtggaataccagtctatcaccacactcgaaagagaacactgcaagtgatgagcacaaaagctatgtgatatataccttatatcgcttgatttctgacaaatctgctgatgtattatgtttgtgtgaggtgtcaagcaaggatatagatttcatcactgaaattctttcaagtagtgaattctcagtttatgatggaactattcgcaagggaaaaaagaagtttgatctatgcgtaatatataaatcacagatactggagtttgttgactcaaacataataagcaaaactctagttacaaaaactttatatgcaggccaagaggttaacttcataataaagtcaacgggagaaccaattactttatacttagttcattggtcaagtaggatttatgactatgaagattccccccaaaaaatacttctcggttctcttttgagagacgcggttatgtcctgtatcgaacaaaggaacataagaaatgttattatattgggggatttcaacgaggagccatttaacaatagcataacagatgcactttgcgcatcacgagatataacactggtaagaaaaactcctaggcttttatacaatccattctggcgacatatgacaagtagcaaccttcacccaaataatcaaaaacatgaaggctgcggtacttattattataaaggtgatgaagctaacagatggaaaacatttgatcaaattatattctcatcaagctttgttaaaggtggaaaatggtttctgaatgaggaaaaaaccgaagttttttatgatactgacttcataaactttatttttagctcgaaatccaagttcgaccacttaccaataatatcttcaattgagagggcataa

SEQ ID NO: 438884 - DNA, 621 bp, Serratia marcescens
atgaataacaccctgctccccccgtccgccggtgcctggatgcgccacaccgaaacggtcactgcgcggttgtcggcgatcaccgtcgcgctgcgcacgctgtggacgccgaccgcctgcccggttgagttgttgccgtatctcgcctgggcgctgtcggtcgaccgctgggacaagaactggccggcagagaaaaagatagcggcgatccagcaatcctactggcagcaccgccgcaagggcacccgcgccgcggtgaggagggtgattgagagcatggggttttcggccacctttgccgaatggttcgacaccggcgatcggccgggcaccttccggcttgagatcgacgttaacgaggtgggtatcactgaaaaaacactggctgagcttaatcgcctggtggcggatgccaagccggtcagccgacaccttgcgcaaatgaacatcgtcaccagaacggaggggattattcactttgcggcgtgcggctacatgggggaaatcctcacggtgtacccggaagggtatcaaccgaaatttatcaaccgctatgacggtgttcgcagttacaacgggcaaatttcttataccggggagcagtatgaccaaaatcaatga

SEQ ID NO: 438885 - DNA, 2025 bp, Serratia marcescens
atgaccaaaatcaatgagcaatcactctgggtacctgatatctaccagattgaccgggccgacaccgttgagggtggcgaaagtggcgtcgccaatatccaggccaggcagcttgccgaccgcaccaccttcttacgtaaccaggctgacgcgctggccggcatggcattactcggcgaggggccgtacaccagcgcagcccaggcgcaggccgatattgccgcaggccgtattccgttagggacaaaatttggtgtccgttcgacggtttccggtcagtgggtgcaggaatatcaaaacgtcgacggcgtggcgacgccaacgggtgaatggctgcccagcggcaaagggctgacggaggccgtcgacagtatcaagcgcaaggtgcgtaacgtaccctcccggctggccgggctgccgcccgagtttacggccggtgttcgggcgccgtccgggcgcgttgcgccattcctcgacaaaaaaggccgtttgtgctggattgacggccgccggcgtgggcgcacacagctggccgccgccgaatcagagttgccggcgcgcttcatgtataagtcgctgccggtcgcgctgccggatggcgcggtctgcacacgcatctatctgaacaaaaagcgccagatcaccgaggcgtacacgcaggacggcgcgcactatatcgccaccgacaaagggctgcggcgcatcgccggcgatacgcaggcaccggcaaagaacatcaactacagcagctcgtccgccggcggcgtgtgcggtatcacccgcacgcggctatctgtcgatcctgatcctaacatttgctacatcatcgttatctgggggcagagcctggcgcagggctggaacaccctaaacggtgacgttttgatcgccaccgacccgctctatccggatcaatgctggatgttcaagtcaagccgtggcgcgggcaaagagaaccctaaccgcagtattacaccgatcagcgagctggaaccgctgcgggaaaccattaacggcggatggaaagagacggcagcaagcagcatggccgcccacgtagtcagcgaagtggaaaaacagaccggccaccgtatccgcacactgtcattcattgcggcagaaggcggcaagccgtacatggaactgaccaagggcacgcagacctggcaggcgctgatccaggggctgatcgatgcgcgggatatttgcgaccggaacggttggaaaccggtattcctggccgtcgacgtgatggccggtgagtctgacagcgatcaggtgacgtttatgacgaccgagcgctacagccgacagttgcagcagtttgacggcaacatccaggccgaggcgcgccgtattttcaatcagtcggccaatgtgccgatcatcatctcgcaaagcgcattcacaccgacctcgcgcaaaatctgggatcagccggtgcgccaggcgcaatttgatgttgatgggatcggtaatctgcgcctggccgggccggtctaccctcacccatccggtgacaccatccacatcaactcgctcggccagaaccggcgcggccaggctgtggcgcgcgccattgtgtgggagtgcttcggcaccggctggcgcaccgttcgaccaaccggctacgtctggaagtccgacaccgtgtttcagttaacgcatgaagtcccacggccgccgctggtgattgacaggacggacgaggtgatcaagacaaccggactgggtgccggcatgggctatgtttttgacgacttcaccgacagcccgccgaccatcaccagcgtgaaagtggtatccaacacgctgattgaaattgagctatccaagccccctgccggcccatcgtgccgcctggggtacgccatcaagcgcaatgacgataatacgtcaaatcaggacgggccgatcatcggcgcgcgcggggtgctgtgtgacagcacagcgcacatttcgctttacgaaaacaaggcgcacccgaactggtgcccggcttacatcatgaacatgacgaggtag

SEQ ID NO: 438886 - DNA, 816 bp, Serratia marcescens
atgctggtatttgaaggacaagacgaatttgaaaacggctatctgccatcgtatgacctgacagaacaggaagaaaacattctgtacatggatccgtcgctgtggatcgaatcgacgagcggcgtgaatgtcagcgggacaaatgtcacgtcaattgatgaccgttccggcaatacatcatggctgccgctgaatcccagcgtattcccgcgtgtgatcaaatcggaaaaaggcactccggtgctcaatttcgggctgggccgtggcccgtcagcacccggcgcggtgctggcggccggtgaatacgaagccatcccgcagcatggcgtttttgtgctggcaatggtttaccgtatcccgttgcgcttgcaagggggatatcagggcaccgggggtaatatcctcggcaacaacgacacatcacccaatctgatggccctgcgctttcgcgatgatgcgtacaccggcacagcgctgtggatgaaccacggcactaactcaccggtgacggacaacaactacccgctgaatacgacgtttgtcgatgatgggatttggcacacggcctacatcgagatcacgccagagcatcacctgattgagatcgacggcgtattgcgacagaaaaaagcggttcccgccattccgttcaacacgccagcatcacgacagctgattatcggcggtgccggtagtccattcagaaacggtttctttggcgatctcgctatgatgctgatcgtgccggggctggcgagtctggacgaacgcgcaatcatctatgaccgcctgaacgccgtcaaagcgaagctgtaa

SEQ ID NO: 438887 - DNA, 1044 bp, Serratia marcescens
atgccgatctacagcagccaattaaccgccgccggcgaacggaagatcgccgaggctctcgccaacggcacacggctgaacatcacgcacatgaccgtcaccgatggcgagaccgaaatgtaccgcgccgaggttaacacgctgtcagtggtggaagatggcgtgctgttcgtggaaatggtgatccctgaaaacatcggcggattctggatccacggaacggcgatttatgacgacaccggcgagcgcatcgccgatggcagtctgccggcaacctacaaaccgatgctggaggaaggctccgggcggatttccacggtgcgcatgctgctgcgcgtcagcagcaccgaggccgtgacgctgaaggtggatccgtccgtggtgctggcaaccgtcgaatatgtgaataaccaggtgaggcaggccgtacagcgtgcaaacgacgcctacgagctggcgcgccagaaggtcacgtttgatgaaatgtatcccatcggcgacgtgaaatttttcgcgacgttcctcaaccctaacaagcagtggcccggcacgctttggtattacaccggtgaaaataagtcgatccgaatcgcaaaagaagacggctccgatgtgatgggaacaggcggcgcagatacggtgacgctgaacgtcgggaacatgccgaagcacaaccacggtgtcagcggccaggtgggcgagtttgaccacggcaccaggtgggcgtcggaatttgaccacggtacgaaatggacgtcagaaggcggcgagcacgcgcaccagggcggcatggtggccccgggtgaggtgtgggatggcgattacgtcgtcggttcggacaatgacagccaccgcacccggaactggacaagtcagaacggcaagcacagtcacaccgtcgatattggcaagcacaatcacacggtagacattggtaagcacagccacagcctcgaaataacatcttccgaggtcggcggcggccaggcattcagcattgttgaaagccatatcaagcttatgtgctggtatcgagccgcataa

SEQ ID NO: 438888 - DNA, 2970 bp, Serratia marcescens
atggatcttagtattcgcgtcgcgttcaacgcgatcgacaagctcacccgcccggttaaagccgctagcaaagctgttagcggcctttctgactccctcaagaaaacgcaaaacgccgttaaagacctggacaagcaagccgccagttttgaccgcctgcgatcgcaggccaacgatacggcacagaagattaaccgtgcgaagcgcgagtttaacgggctgaatcagaccgttcgagagggcgggcaactgaccgacgcccaggccgcgcacctggaaaacctgcgcggcaagctcacccgactgacgcaaacctacagccagcaaacggccaagctgcgagaggcggcccaggcagtgcggcagcatggcgtcaacctgtctgccggcagcggcgcggtacaaagcgccatccgtcgaacagagcaatacaaccagcagcttgagcgggagcggcgacagctggccgccgttacccaggcgcaagccggctacacccgtgccaaagatgccgccggcaaactacgcggcgccggcatggggatggttgccggggcatcggttgccggatataccggcggccgcttcctggcgccggccgtgggattcgatgccgaaatgtcgcgggtgcaggcgctgacgcgactggataaaagctcgtcacaactggccgacctgcgcgcccaggcgaaaaagctcggcgccgaaacggcctttaccacccgcgacgccgccagcgggcaggcgttccttgcgatggccggctttacgccgcaggcgattcaggccgcgttacctggcgtactcaacatggcgctggccggcgggatggatctcggtgagtccgcagatatcagttcgaacatcctttcacagttccgcctcgatccgaaggagatggatcgcgtcagtgacgtgctgacgggggcgttcacccgcaccaacaccgatctgcagaacatcggcgaggcgatgaagtacgccggtacggggttatctaaccttggcgtcagcgttgagcaaacaacggcgatgatcggcgtgatggcgaacgtgggtctgcgcggcagtattgccggtactgggttgcaaaccacgttctcacgcctggccgcgccaacgaaaaaggccaacgacgcgcttaaggagttgggcgtcaccgtggccgactccaccggcaagatgcgtccggccgaggacgttctcactgacctttacaaatcgatcaagaaatacggcgccaccgatcagctctcgttcttcaaggatatcgcgggcgaggaagccgcgaagtcattccaggcgctggttttatctgccggcagcggcgagttgcagaagttgctggccgatctgaagaaatcgcagggtgaggcgctgaaggccgccaaggtgatggcggataacctcggcggcgacctgaaggagctggactccgcttgggaaggcttccgcatccaggttgaagaaactgccgacggcccgctgcgcaaactgacgcaggggctgagtgaagcgatcaacgccgctagccagtgggtgaaagaaaacccgcggctggcgcagtccattctgttgaccgccggcgccgtcaccgccctggtggctgcgctggggatcgccagcctggcgaccggcctgctgattgggccgctggctaagctgcgtttgggcttcacgttgctgacgggcgggcgcggtgtgatgggaaccgtcagtgcactgcggggcttcgttggcgtcggcggcaacgccatggcaagagccggcggttggtcgcgtgtgctgacctcgctgtctggtggcttccgtgggctgcttggctcactggcaccgctgcgcagcatgctgatgggcgtatttatggcgccgtcggcagcgctgggttcattggtgcgtggtgtgatggggctggcgctacggctgacgggcctgtctacgctatggggcattctcaccggtgctctttcagcactgggggcggtgctgtcgttcctgctgagtccgatcgggttgattggtgccgcctttgtcgcggccggcgtgctgatttggaaatattgggagccgatcaaggcgttctttgtcggctttggcgccggcgtcatggcggcactggcgccgctgcgtgaagcgtttgcccgtatcgcgccgatctttggcgtgattggtgatgcactcagcagcgtgtgggactggttcaccaagctgctgacgccgatgcagaccagcaaagacacgctggacaaatgcgccagcgccggcgagacgttcgggcgggtgtttggcaccgcgctgcaggtgctgctgtacccactgtcaaaactgatggatggcgtgggctggctgttggagaaaatgggcctgatcccggatggcatcgagcaggccaggcgcaaggccgaagagctgcgcaatcagcccgcgatgtgggaatgggatccgcagcagaaaaaaatggtgaagaaggggtggagctgggccggccctggcctgccgactggcccggcaacggttgatccgaagttgggcggctcgccacccccggcactgaccggcgacacgggcacgcagcgccgcttgaacgagattgccggcaataccaaggcgaccgccgacaataccaacgccaccaaacgcatcgggccgggggatatcgtcttcaaaaatctgccgcgcgcgctggcactgcgtggggcgtaccaggaagcgcgggtgatgccgcaaccggtgccgcgtgtagcggccgctgccggtggcggggtgctctctgtgccgtcggcgtcacagccggccgcgatggcgcccgtatccgcgcctggcggcggtgggcccgtcttccagatggtctttaacgacgtcggccagcgttcggatcaggagctggaacggatggtgcgcagcgcggtgcgcgatgcgatggccagcacagtcaggggcaaccgcgggtcattccgcgatcgagattaa

SEQ ID NO: 438889 - DNA, 144 bp, Serratia marcescens
atgcgccgtggcggtaaggtagcgattcatttgctcccagctttcggtatccagctgcgggtgcttttggagcaagtggccgaacagcatcaggccgtggcacaaaccttccgcctgtttggcagagagggcggccaggtctaa

SEQ ID NO: 438890 - DNA, 381 bp, Serratia marcescens
atgatgccgggcatcaccgcctggatcaccccgatgccgagcccgcccagcaccgcgctcattaacagttgcacgctgccgggggccagttcgcgccaaagcgcgcccagcccgatcgccagcaggctcaacgtcacggcgctgcgttcgctgaacagccgattgatggcgccgcccgccagcgccatcagccccatcatcagcaccggcagcgtggtcaacagcgccgcgccgccaaagctcagcccggtggcctggcgcagcgtcggcagcaacgggccgatcgaggtcaacagcggccgcatgttcaggccgatcaacaccagcgccagcaacagggggttgaaccagcgacgtggagaaggtgaattaacagaatga

SEQ ID NO: 438891 - DNA, 993 bp, Serratia marcescens
atggcacggatgtggatggtgcgcggcgagggtggcagcttgtatgacgccttccgagaacgcagcgtagttgccgtaggctggaatcaattggcagcccatgccaaacccggtgtcggacgccagcagctaatcaccctgtaccagtccgccgagccacaggcaaaacaaggcacagttgtgtcgggtgcatcccaggtctggcgtttcgtcaatgacattcaggatggcgattgggtcatcacgtattcgccagccaatcgcctgtactcgatcggtaaggtcacggggccggccgaacactaccctgaatgggccgagcaagctatgcctctggtgcgcaaggtgcagtggcaagcgcaagaactactgcgcgacagcttaggcactagcacaaagaacagcctgggttcgaccctgaccctcttcgaggtgccgtccagcgcagcaaccgaagtgctggcggcgctgaaaggtaaaccggctccagtcgtagaagatgaagccgaggaagttatcgccgatccattggccgacattgagtccctggcgctggaacgcatcaaggatcgggtcaacgaactcgactgggacgacatgcagcaactggtcgcaggcattctgcgcgccatgggatataagacccaagtttcgccagccggttcggatcggggcaaggacatcgtggcctcgccggatggctttggcttcgaacacccgcgcatcgttgtggaggtcaagcaccgtaagggccagatgggtagccaggaaattcgcagctttcttggtggccgacacaaggacgatcgtgggctatacgtcagcactggcggcttcaccaaggatgcccagtacgaagcagatcgtgcatccattccactggcaatgtggacgctggatcatgtagtgcgtgccctgatcgagcactacgacgccaccgatgccgaaactaaacgaatcgtgccactgaagcggctgtactggcctgcctga

SEQ ID NO: 438892 - DNA, 2031 bp, Serratia marcescens
gtgatttctacagcacaacatatcgaacaattcaccggcacattggtttcccttggcggtagcgcgggcaatcagcgcttgcttgaagcactgggctggcaggacagcatctaccaacacgtcaagcagcaactgatcgacaacggtcgcatccgccctggacgtgggcgtggtggctcggttgccttagtcgagaacgttacatccttgcctaaagctttcaccaaatcatcagcagccatcaaacggcaagctaagaaggccagcaaggaagacaagcatgacgcaacacgggacaaagatatgagacccatagaacaacagttcttcaacgacctggaaaagaagctctggactgccgccgacaagctgcgctccaacctcgacgccgccgtgtacaagcacgtcgtgctcgggctgatcttcctcaagtacgtgtccgacgccttcgaagaacggcaacgcgaattgcgtgaacagttcaccaatccagaccatgactactacatggacccggacgaatacggcggcgcaggcacacaggaatacgaagacaacatcgccgccgaactggaagtgcgcgactactacaccgagaagaacgtgttctgggtgccggtggaggcgcgctggcaaaccctgcgcgattgcgcgcaactgtcgcccaagaccgcgctgccgtggaacaagccgggtaaggacgagcccgaggaaatgcgttcggtgggctggctgatcgacaacgccatggaagccgtcgagcgcgagaacgcccgcctgaagaacgtgctcaataaggacttcgcccgcgtgcagctcgactccagcaagctggccgggttgatcagccacttctcggataccgacttcggtgccaaggaatacaagggccagccgctggacctgaaatccaaggacatcctcggccatgtctacgaatactttctcggccagttcgccctggccgaaggcaagaagggcggccagtactacacacccaagagcatcgtcaccctgattgtggaaatgctccagccgttcaaagggcgcgtctacgacccggccatgggctccggcggcttcttcgtgcagagcgaggaattcatcgaacagcacagtggcaaaccggccaatggccaaagcaaaaaagctggcgggcagatcagcgtttacgggcaggagagcaaccctaccacctggcgattggccgcgatgaacatggccattcgcggtatcgacttcaacttcggcaccggcccggccgatactctgttgaacgacctgcacccagacttgcgcgccgacttcgtcatggccaatccgcccttcaacatgaaggaatggtggaacgaaaagctggcggccgatccgcgctggattgccggcacgccgccgcagggcaacgccaacttcgcctggttgcaacacatgctctggcacctcgcgcccaccgggagtatggcgctgctgctggccaacggctccatgagctccaacactaacaatgaaggcgaaatccgcaagcgactgatcgaagacgactatgtggagtgcatggtcgcgctgcccggccagttgttcaccaacacccagattccggcctgcatctggttcctgacccgggacaagcagaatggcttcgcactggacaagaagaagcgcgaccggcgtaaggagttactgttcatcgacgcccgacagttgggctacatgaaagaccgagtgttgcgtgacttcaccccggacgatatccagaaaatcgccgataccttccatgcctggcagcagggcgaggggtatgtggatatgcccggtttctgctattccgccaagttggacgatgtgcgcaagcatgagtatgtgctgacaccgggacgctatgtgggggcagccgagcaggaagaagatggcgaaccctttgctgacaagatgcagcggctgacttcgcaactggccgatcagttcgcggagagcgcgaagctggaagctgagatcaagaagaatttggcggggttgggttatgggggttga

SEQ ID NO: 438893 - DNA, 1347 bp, Serratia marcescens
atgccgctcgaagactggatggcagcgatcattgactatcgtggcaaaacaccacggaaaaccacgtcaggtattccgttagttacggccaagatagtaaaaaatggtcgaattgaagccccagaagagttcatagcagaggcggattacgatgactggatgcggcgtggaatccctgagcccggcgatgtcgtactcaccactgaggctcctttgggtgaagttgctcagctagacgacacgaaaattgcgctcgcccagcgaattattacgctgcggggtaagcctgacttgctcgacaacacttacttgaggttcgcgctacaaagtgcaccgattcaagaacaattgcgtggccgggcttcaggctccaccgtttctggaatcaagcaaagtgagttgcgaaagctggttctaagctttccaccggttgatgagcaacgacgtattgcagaagtgctagttacgctagatgacaaaatcgacctcaaccgccgcatcaaccaaaccctcgaagccatggcgcaagccatcttcaaatcctggtttgtcgatttcgacccagtcaaggccaagatcgccgccagcgaacaaggccaagacccgttgcgcgccgccatgcgcgccatcagcggcaagaccgacgccgaactcgatcagatgccccgagagcaccacgaccaactcgccgccaccgccacgctgtttcccgatgcaatggaagcgtctgattttggggagattccgaaggggtgggcatttcaagccgctgatttgttaacagaagtcggcatcggcaaaactccaccaagaaaagagccccaatggtttactgaaggtgagggagattggcgctgggtgtccattagggatatgggagttagcggggtttttcagcaacgatcttcagagttcttaacttcggaggctgtctcacgcttcaatgtgcgtgtagtcccagacagaaccgttctgcttagcttcaaattgaccattggccgggtagccctcacagatggcccgatggtgaccaatgaggccattgctcatttcaagttacccaccgatgctgccatttcttcggaatacctgtatctatacctgaagagcttcgactactcaatgctcggtagcacgtcatctattgcagatgcggtcaattcaaagacaatccgagagatgcctattatcgtgacgagccgattcctcatcgatagatttacaaggtcagttgcccccttgttcatggaaatgaaaaatcggcaaaatgagatcacatccctttgtgcgacacgtgatgctctgttgcccaagctgctttctggtgagattgaggtgtctccatga

SEQ ID NO: 438894 - DNA, 1047 bp, Serratia marcescens
atgaattgggaacacctgcgcccattattcaaggaagctctttctcaagaacaaaatctacgcgtggacaaggggcgtgtttacattcgctatatgcactgggctcctgacgaggttctagaaaaaatgctggaaccgtcagccttagaagagatgtttggtgactggatacaggagaggcgggaggaactaatagagtccgcaaaggccatactgaatgagttcggccttgaggaccgatttggaaagctaaaagaggtttacgccagaggatccgtagtgccttttatcggggctggcctatctgtctcaagcggctatcctgggtggacttcctttctcaagcaacacatccgcgagacggcgattgatcctgttgaattcgatcagatgcttaatgcgggacaatatgaagaagcagcgcagaagctggcagattcacttggccccgcgttcaacgaaggcgtggaaaatacctttgggcgttcgcgtgatatttcgggctgtgtacaaatgctgccccatatgttcaattcctgcgtaatcacaacaaatttcgatgatgtagctaagcgttgttacgaggcagaagggaaaccgttttctgaagaactgtctggggagttctcagaagaattgccaaggaagttggctgaaagaaaaagggtccttgtcaaactgcatggcacatcaacgagtgctcgaagccgaattcttacctcttcagagtatgataagcactacggcgagggcaatcagctgcaaagggccatagaggcgatctgcactaggacactgctttttattggttgcagtcttacagttgatcgaactctttcagcaatgaaggaactggtgcaagccaaaggacatgacaacatcgcacgccactatgcgttcttgcctgtgccaaacagcaacgctgaaaaaattgcacgccgtgatgcactgatggaatgcaatatctacccaatttggtaccccgcaggtacgcacgatgaatccattgaggctttcttggtggcgcttatggaggacgggctgtga

SEQ ID NO: 438895 - DNA, 2946 bp, Serratia marcescens
atgcacgaaatgctgacagtcagcgaacccctgctgatcacccgcaaccgtcatgtgcatcgattgctgctgtccggcatcccggtcgaattctccgaaggcgacgaaaagcgcaccgatctggtcaacctgatcgacttcgccaatccacgcaacaatgacttcctgctggtcagccagttcaccgtggccggcaccaaacagccgcgccgtcccgatctggtggccttcgtcaacggcctgccgctggcggtgatcgagctgaagaacccggccaacgagcagaccgacatctgggatgccttcaaccagatacagacctataaggaagagatcggcgacctgttcaacaccaacgtggcggtagtggtcagtgacggcttcacggcgaggttgggatcgctgacggccagtcaggagcgcatgcagccctggcgggcgattgccaatgaggatgaccggccgctgctggaattcgagctggaaacgctggtacgtggcttcttcaagcctgcactgtttctcgactatgtgcgccacttcgtgctattcgaacaggacgccgaccagatcatcaagaagatcgccggctaccaccagttccatgcggggcgcgaagcggtgaaggcgacggtgatcgccgccagtagcccgaacaagggtttgctggaagtgcaggagccacgcgccacctatggcaaggaagtacagcccggcagccgcaaggccggcgtggtgtggcatacgcaaggctcgggcaagagcatcaccatggcctgctacgcgggcaagctgttgcagcaaccggagatgaagaaccccacgctggtggtggtgaccgaccgtaacgatctggatgggcagctatacggcaccttctgcgccgccgaagacctgctccggcagacgccagtgcaggccggtagccgcgaggagttgcgcgaaatgctggcctcgcgcgaggcgggcggcatcatcttcaccactgtgcagaaattcgcattgttggacgacgaggagcagcacccgctgctgtcggatcgcagcaatatcgtggtgatttcggacgaggcgcaccgcagccagtacggtatgaaggggcggctggacaccaagaccggcaagtacgtgttcggctacgccaagcacatgcgcgacgcgctggccaacgccgccttcatcggcttcacaggcacgcccatcgccctggaagacaaggacacgcgggcggtgttcggcgactacgtcagcatctacgacatccaggatgcggtggacgatggcgccacggtgccaatcttctatgaaagccgcttgaccaagctggatgtgaaccaggccgagatcgatgcactgaacgcccaggtggatgaggtcatcgaggacgaggaagacctcaccgcacgcgagaagaccaagagcgattgggccgccctgaccaagctggtgggcgcgcagccgcgtctggaacaggttgctgctgacctagtgcagcacttcgagacacgtaccgccacgctggaaggcaaggcgatgatcgtgtgcatgagccgtgacatctgcgccgagctgtataacgccatcgttgcactacgccctgactggcacgatgctgacccggaaaagggcacgatcaaggtggtcatgactggctcggcagcggacaagcccttactgcaaccacacctgtacagccagcaggtgaaaaaacgcctggaaaaacgtttcaaggacccagcggacccgttaaagctggtgatcgtgcgcgacatgtggctgaccggcttcgacgcgccctgctgccacaccatgtatgtggacaagcccatgaagggccacaacctgatgcaggccatcgcccgcgtcaaccgggtgttccgcaacaagcccggaggattggtggtggattacatcggcatcgccaacgagttgaaggcggcgctcaaaacctacaccgagtccaagggcaagggcgacccggcgcacagcgcggctgaggccctggctgtgctgctggaaaagctggacattgtacgcgggctgatgcatggcttcgattacagcggcttcgagaccgacgcgataaagctgctggtaccagttgccaaccacatcctggggctgaaggacggaaaacagcgttttctcgatgccatactggccgtgagcaaggcgttttccctgtgcagcacgctggatgaagctgccgcgctgcgcaccgaaatagccttcttctccgccgtcaaggccgcgatcgtcaagttcaccacagtggaccgcaagcgttccgacgcggacaagaacagcgcgctcaaacagatcctggacaacgccatcgtagccgacggtgtggcagacatcttcgccttggcgggtctggataagcccaatatcggcctgctatcggacgagtttttggaagacgtgcggcagatgaaaagccgtaacctggcggtggaattgctggaaaagctgttgcgcgacgagatcaaggcgcgggcgcgcaacaacgtggtgcaggagaagaagtacggcgaccgcctgctggaaaccctgcgcaagtaccacaaccgcgcggtggagacagcgcaggtcatcgaggaactgatccagatggccaaggacttccaggctgcgctggaacgcgaagcggcgctggggctgaacccggacgaaattgccttctacgatgcgctggccaacaacgaaagcgccgtgcgcgagttgggcgacaataccctgaaaaagatcgccgtcgagatcaccgagaaacttcgcaacagcaccacggtggattggcaggtacgcgagagcgtccgcgccaagctgcggattctggtgcgacgtaccctgaagaagtggaagtacccgccggtaggtgaggatgccgcaatcgaacttgtgttgaagcaggcggaatcactgtcaaacgtttggtcgaagtga

SEQ ID NO: 438896 - DNA, 237 bp, Serratia marcescens
atgggagtggaaaaagatcgtctgataacggaggggctggctcttcaggccgtggtggaaataacggcggcgatcgtgggcctcagtcatttttgtcaaaaaatagcccgtatggcagcggttccggcgctagtgggttttgggggaatggtaattcaatggctgcaggaaatggttacggcggcaatggtactgggccgagagaggccagagagttcggaaccaaacgctaattaa

SEQ ID NO: 438897 - DNA, 942 bp, Serratia marcescens
  misc_feature (33)..(42): n is a, c, g, or t
atgaaattccttatcagaaaccaccagaagcgnnnnnnnnnnattgaagactcatggtttggcaacagaggttttataaaaaagtgcatagcggagcttttttgcaatggtttcgatgattttatgaagtattattattatgagattatactaaggaataacattgccagtgcaagtgatattgccagacttttaattatctatctgcatggtggcacttatatagatgttgatacgcttccatacattgataacatatatcataaactaaataaacatatagaaaaagagggcattgtcgagagtgactcgcttttgttatttaagaccctatgtcttttaaaaaagataaattcagaagaggcactgcctgaagccgtgttcagctgcgatgaaaatgagttaggcgtagatgctgttgaatttaaaaaaataaaaaggcttatcgaactggatctctctgagttttccctggatatgatattgccattgggtgaaacatacgttcataaaaatttattggcgctaggatcactcagaagatttaaaggtgtttattttaataatttcatgtcctctcacaaaaaatccaaggcggtaagaatcatccttagaacaatgaaaaaaagataccgttttttagaaaaaaacaattgcatatttaactgttatattgatgatggatcaaggtgttatctgaccagaatcttaccatggaggaccgagttaataacaagggactattgtgtgaccccggtcttaactgggccgggtttaattgttgaggttttattggggttggcttatgaggtcttcaatattggatatctgattgagccatccagcattgcggaatatatgcaaaaccctgactttggaattgcattgtttcagcacaacatagatacacctgacggcgcctattccacgtggcgcaaataa

SEQ ID NO: 438898 - DNA, 750 bp, Serratia marcescens
atgattttccatataaacaacaatgttctctacgatgaagaagagaacacgctagcgcatatcgataatgcggcgactaaaatagtgttacttagacccagcgccaggctgttatcactgttcatccgtaacaataatgttcttcttatgcgggagaagttacttaatgaagtttgggtggagcatgggctcaaggcctcaaataacaatctgaataattatgtttcaggcctacgcaaatcccttgcacaattcggcgaagagaaaatcatagtcaccttcccccgacaaggttttaaattcactgcagaaagcattcatgtagaaaatgaaaacaaaaggagtataaaaaccgaatatgaagcggacgataccaaggaggctcgaagaggtgggttcttcaggcgcaaaatcgcctggttattgttgcgtcgttcggtcgtagccatgcttatttgcctactgccttttaccgcgttcatggtttataaacacagcatgcatatcaatgtttatccactgggcaactatgcgtcttgtcagctctacagcatgaaagcggggggcggggacaaggtaaaggttatcgaattcattcagcgagaaagtttgaattgtgccagtaaagcagatgtttactactatgaccgggtgcagcaagaagggataaaagacggtgccgggctgctcacattctgccccagaacggctaataccccctgtttcagcaaacccattgacaataattaa

SEQ ID NO: 438899 - DNA, 492 bp, Serratia marcescens
atgaaagctggggtttataaattgttatggcggtatcgctatggcgcactaatggctatagcgctgtttatcagcgcttgcgccatttaccgattgttttttaccccccggctgcctgaatgcagcgcggtaatgcgcgtggctaatcataacggtgaaagccgccatgaacgcgtgttgctgcttaaattgattccacatgggacacgagaagcgacgctgttgcttaacggaagctttctcgacggcaataataaatatgtgatctccagggtggcgcgtctggaatatcatcgccgtggggacaactataccttctgggtcaaaagcaatatcaggaatccacaggataccttggtgtcagaggcacttaaccgccgtttgccgatgaaaggccagcaataccacgtacgcattgaacaggttgatgcaaaccatttcttgtttgtcgacaatctctctccctattttgtctgttcggtggcattgtaa

SEQ ID NO: 438900 - DNA, 795 bp, Serratia marcescens
atgagatatataattaataataatattaagtatcatgaagatagatcggaattggtttcgctgcatgatgacatcccacctatcacattgacggccacgctgaatcgcctgctttccgcgctggtcagaaataataacctggtgctttcccgcgatgcgttgctggcgcaggtgtgggaagcgcacggccaggtggcctccggcaataatctcaataacaccatttcgattctgcgcaagatgttcgccacgttgggtgagaatgacattatcgtcacgctgcctcgacagggatttatgtttcgcgcatcccagctaaaaaccgcagacagccaagtgaaaggcccggttgaactggctgaaccggttgaaccttctgagagtgatacatcacccgcattgataccccacatgccacggttgaaaaggtatgcattgatggtgctgatcgcactggcgatagggagcggtatctgggcgtggttggcgacaggctatccgccgctccgcgtggtaaacgttggcaagatagacaactgcgaagtgcaatttgtgacttcctatcataaaacgggccccagtgagatagacaggcagcattttcaggaaatgctgaagaaaaataatcatgttcagtgtcatgaaccggcgacgttgttgtatttcgactctcaggccattttgccgaataccaccggtaaggtgagaattgcttatctttattattgcccacaggcaaaaatggcggctggaaaggtccaatgcgagaacttctatgaaagctggggtttataa

SEQ ID NO: 438901 - DNA, 3129 bp, Serratia marcescens
atgagtttattaaaactacagcaagacgtcgccatcctgttctacgccacactgggcaaaaaggctgacgatagcgccctgatctatttcgccaaacagcttgaaaaaggaacttataaccaaagcgaacttgccaatctcttcattctctctgcggatggccggcatcgctatgataacctgagcaccgccgacaaagtgaagtacctctatcacaacgccagcggcatttcccccggccaagacactgtggcgcagtgggtaaaacagctcgatgccggtaaatcgctcggtcagttgacgcaagaactcatcacccagctcagcgattatgccgggtcggatcaaacaatcctgacgcaacagcaacacgttgagaacaccatagcgaccacactctatcccgcttttgtgctggcagcagaacatgcaccggcggcagcggacattcagggcatctattacgtactcggcagcgtgattaatgccacagcggtaaattactggggcagtgtcctcgccgccggccaccaaaccgccgcacagatagcgacctatttcaccaccgtcaaaaccgatatcaaatcgcttggcaatgaagacttcgtgaagaaaatattttttgaagcgttcggcaaccaggccggcgcagacgaggtgcagaagtacatagcgggcttgaacgtcggcagtgaaacccgtggcgaagtcattatgcgtgtgataacggatattcgagcagacaccgacactcagcatgaaacggccaaaagtcattttctggccgccacccatgtctatgcgcctggcgagcgccccgatttgcactatggcgaaaccgtgatgtccttttacctgacggtggccggcgtttccgcagacgcgaccgcactcgatacctttagccgttcgctcgccagcgggatgtcttccgccgagctgttgaaaatgctggccaacgcccaccaattccagggagcggacaactacgagaaaatctacgcttcgctgtatcacgaaaatctgagcctggcgctgtcccaagccttgttgcagaaggccggcaacgatagatatcaagccagcgcgttgattatcgagtcattccgccaggggatttccccagtcgacggcgcgcatgaacctcatccggcagatgtcgccgcctatcaactcagcatcgcccaggcgctgaattacaaacccttcgctgaattatcgctctccaccgacggcgtattgagcggcgcggtgaacaccggcaatcaacattcgttaagcccggtggagttggccgttctgacgcatgtctttcttaatgtgaatgcctcggtcgccgttgatttcagccagtcaaccaaattgcaagaagtgaccttgcaggggaatatgcccactgacgccactgccctcaactcattaaaaaataagggattcgccttgcggctcaatttggacgagaacccttacttcaaaatgactgacaagattgcatttggtactgaacgtgatgcggtaatgatttccgataaattcgatctcgctaatgccaaaatggatcttcttttcggcgcagggggtgccagcctgctctggaatggcaatggcgtaaaccacggagccaacagggtaagcacggccttcaccgcacagaacgcttttgatgcggatggcgtcgtttccgccaacctgatcttgaaggatatttatctgacctcgacggcaagcggcgacactgaaggcgtaatcaaaacgaatatcaaccagtttcaattcttccctcagatcgatcttgcgggttatcgcggcacgggaaatatttatcttgatgggaaatggatcgcgacagaaggcgcaaacattttcgattatggggtaatcaatcaaacagccagtatttacaacaacagcgtcccaactgtggcccatttacaacaggcaccccatgcccagaaaagcggcgacgggtattactggacgggtagccagggattaacactttccggtttcgctgataatgtgcatgttatcaacctgcccgtcttcaacacgctgccttttctcaccattaacggcaatgcaggggcacaaagcaaacttcatctggaattggcgccgcttgccgcaccaccgaacgatatcttcgggccttggggcgtcagtatcggcaaccgcgccatcgagcacctggacgccgggacattgagcttcaccagccatttcctcgggcggcaattgccggaagagctccgattatatgccaacggttcgaaattcgcttcagtctctctggcaggcgaaaacgcgattgaaacgatacgcataggcggcataagcaaattgcaggtgacggtaaaagcagactttggcaatagcctaaaaagtattgttatcgaaccgacattcaatcccggcaatgaagtcattccacgcgtcgaaacggatttgataatggaacaaggcggtagcggcggcggtgagttctataagctactcacttcgctgaagcatcacagcgccttcgacagcgtcattgaggcattagccggggaacaactcaccatcgcctataccaacagccagacgttaacgcttaaaggtaacaccacgctgaatccattggtcatgaccaatgagtttgcgcacgacagcaaaatcaactttgagcgcagtaccatcgaggacatggtcaccatcaataccctcacccctacggataccctcaccgttggcgatccgaatcatccttgggtattcaacgccaagtcatcaggcgagatcgtcatttacggcgaactgagccaaacggagcaggtcaacgcgttgtttgacttgctgactgtcagccccggtgattccgcgcaggacatatttaaccaggctctgacgaaaataatgcatggcaacagtgacgtcctgttgcaaagcgtcggcgcggtcaaattaggcaataatgcttatattattattgacaataataacaatcaaaaacttgatgcccaggacattattttctcgctgggtaataaagacgtctacgatatcacgacccatctccattatcaggcaccgatcatcacgctcgccggcagcaccgccgcacccgcaacggaattagccatggcctga

SEQ ID NO: 438902 - DNA, 867 bp, Serratia marcescens
atgcgtgtacttttgaccggtgctgcagggcagttggggcgctgtttgacagaccgctttcctgctaactggaccttgctggcgactgacagcctgcagttagacattaccgatgctgcagccatagcggttacggtcgaacagtttaaaccggatgccattgttaatgccgctgcttatactgcagtagataaggcggaatcggagcctgagaaggctcggatgattaacgtggatgggccagccttcttggctgcagcggcagccagattggatatcccgctggtgcatatatcgactgattatgtttttgacggcactgcgactgagccatattgcgaaacggcgccatgctcgccggcaagtgtttatggtcagaccaagtttgatggtgaatgcgctgcccttaaagctaattctaagactgtggtaattagaaccgcctgggtttttagtgaatatggcaacaattttgtaaaaaccatgttaagagtaggggcgcagcgcagtgagcttggcgtagttagtgaccaatatggttgcccaacatacgctggggatatcgctagcgtgattatcagcatgttgtcaaatccgcatctgccttatggtatctatcactactgtggagacagtgcagtttcgtggttcggttttgcgaaggccatctttgaagaggctcaagccagctcattatatgcgcatcaggtgaaagttaatcctattgctacgcatgaatacccgacgcctgcctccagacctgcctattcgatactaagcactgaaaagattcgtgccttggaacttagtccaagcccatggagacaacagcttaatcctgttcttaataagatattatctcagtga

SEQ ID NO: 438903 - DNA, 2100 bp, Serratia marcescens
atgaataaaggtagaatcaaaaaaatcctggaaaaactcgatattgggcttaaccaccgtgttccggttatacatcaaacagagtcttccgaatgcgggttagcgtgcctggcgatggtttgcggctactatggcaaaaatatcgatttaatctcgctgagacagcgattcaacctgtctgctcgcggcgccactctcgcaggcctcaatagtatcgccatgcaactggggatggctgcccgggccgtttccttaaaccttgaagaaatcgaggcgctcaaaacgccatgtatcctgcattggaattttaaccattttgtggtgctggtcagcataaggcataaacgcttcgttctgcacgatccggcgcgcggacgcagaaccgttagcctcgacgaaatatcgcaatactttaccggcgtggctctggaagtatctcccaatagtgaatttacagccgaaacggttaagaatcgccttcaactgagaacgttgctcaacagtattcacggcattaaaggtgcgctaggtaaaatattccttttgtcgttagtgatcgagaccatcaatcttgtcatgccgatcgggactcaactggtcatggatcatgccattcccgccagcgatcgcgggctactgacccttatctgtataggcctgttcttctttattctgctacgaaccgcagtcagcatggtacgtgcctggtcatctttaatcatgagcacgttaataaatgtccagtggcaatcagggttgttcaaccacttgctgcgcttgcccttaggctattttgaacgacgcaaactgggtgacattcagtcgcgattcagttcattagacaccctgcgtacaacgtttacgaccagtgttgtcggtgccatcatggacggcatcatggtcgttggcgtcctcgtaatgatggtcttgtacggcggctatctgagttgggtcgtattaggatttactgcgttatatattctcatccgcctgttaacttacggttattatcggcaactgtcggaagaaactttggtgaaaggaggcagggccagctcatatttcatggaaacgctctatgggatagccaccgtcaagatacagggaatgggcgctcgacgaagtgccaactggctgaatctgcaaatagacacgatcaacagtgggattaaagtcaccaaaatgaacttttttttcaatggggtaaatacgtttattaccgcttgcgaccaggtcgtcattttatggttaggcagcagcctggttattgataatcaaatgacgataggtatgtttgtcgccttcggcgcattccgcgggcagttttctgaacgggtggcctcattaacgagctttttgctgcaattgagaatgatgagcctgcataatgaacgtatagcagacattgcactgtatgaacgtgatgctcaaaaaccggacatcccatatcaggcaacaatgcaacccatatcgctggagagtcgaggtttgagctatcgctatgacagccaatctccccccctattttgcgatctcaatatccatattgccccaggtgaaagcgttgcaatcacaggcccttctggagccggaaaaacaacgttaatgaaagtgttgtgcggcctattcgaacccgatgctggcatggtcatcgctgatgggatggatatccaacaattgggattaaataatttccacaaaatgattgcttgtgtgatgcaggatgacaaactgttttccggctcaatacgcgaaaacatctgtgggttcgcagaggatatcgacgaggagtggatggtcaaatgtacccgcgccagctatatccatgatgtcattgtaaaaatgccaatgggttatgaaacgttagtcggagagttgggtgagggactttcagggggacaaaaacagcgtctttttatcgcccgtgcgctctatagaaaaccagggattttatttatggacgaggccacaagctcactggacaaagacagtgagtattatgttaacgaggccatcaaacagatgaacatcacccgagtgattatcgcccacagagaaaccactatcgccactgccgaccgcgtgatttcactggcttaa

SEQ ID NO: 438904 - DNA, 516 bp, Serratia marcescens
atgcaaataaaacaaacctgggctcaacggctttataataaaaataactttcaaagcaaacaattgatcgacgcaattacagaattaacattattactccaaccgattgaggaggattggagtataactggtggggctaataggtacttacaaggcgttcaaatttatgcaaatgatattgatatcataacaacggagaaaggggctaatgaaatatgcaagttaatcaaccctggtatcaaaggggagttgtttaaaaccacatcagaaaacatcaaatcattttattgtacatttactttaaaaggtatcaaaattgaagtaatgggagaccccgagaacaaaagtgaattagcatggaatgaaaacaaaaaatggaagaaaaatcaagagtctcttttattaaatggtgttgaaatacctattgtcagcttagattatgaaattgaaataaaccaagaaattggcaattataatgcattcaaagacacttgctatctggaaaattatagatag

SEQ ID NO: 438905 - DNA, 2946 bp, Serratia marcescens
atggacgcgctcatcgcttcaccctatacccacacattttggaatgagtacatgctcaatccacactcctgcgagtacaacctggtgctggatcagacgattgagggagaattggacgtcggccgactgcgcgcggcgatcgacggggtttgccgtgactatattctgtttcaccacgttctggatgacagcgcctcgcaattacgctgggtaaggtcggcgaaaaaaattgcgctggaaacgctcgatgccgattgcgatgtcggtaagttaatcaatgcgccgttcgatctccgggaagggccgctgtgccgcttctacctgattgagctggctccgcagcgctataacctgatcattgtcgttcatcacatcctgatcgacggcctgtccggacaggagttctacagcgccgtttctgcctattacaatcgcggcacggcggtgacgccgccgcaggcggatgaaacggacatcagcacattgtaccggcgctatgaggcagatatcgcggcgttgaaacacgagttcggttccgcgtcattctggggcgacatgctggccgaatgcgccccgcgcgtggcgttgccttatctccccggcgcagcggccgaagcgcccggcgccggcgaagtgcgctttgcgttgccgttcgctgagtggcaagcgctgaaatccggcgtcaggtatgccaatcctttcctgatcttcaaaacgctgtgggcgctgctgatcgcccgacaatctgcgcaggaaacggtgcatatcggttatcccatcgcgccggagggtggcgaggcgctgttcttcggcgcacaggtcaacactgcggtgtttcccttgaccctcgccccgggagccacgttcaatcagctgtaccgcgcgacgctggcctacagcaaagcgctcaaggtggctggcaagctgcggcacagccaattaccggtttatgacatgctgagcctcagtccggtgcgtcagctgaacgtcaactttacccaggcttacctgaaagatgcgccgctggcgctcgaggggtgtcgcattggcgtcaatcaccggttcaatgtcgatctggccggttcggaactgctgctggagtatcagcccaccgagcaggcctttgagtttcgcctgcgctaccgccccgatctgttcgacgcgacccagatggcggagatggcggagcagtatctctggctattgcagcgcgcattaaccgaaccggatgcgccgattgccgcttggccgcagctgacggcgcaacaggttttgcgctgccgcgacgcctgggagagcgggcctgcaacggccgacgcggaagcgacgctgctcgacggcctggcccgccaggcgcgccgtcacccggaacgcatcgccgtgaccgacgccaaaggatcgctcagctaccgccagctggcgcagcgcagcgatcgtctggcgctgcggctgcgggcggagtatcaacggctgcgcggcgtggccatgccgccggagacgctgatcccgctgtatctgcagcgcagcgcggaggcggtggtggcgatgctggccatcatgaaggcgggcggtgcctatgtgccgctggatcccgccgcgccggcgcagcggctggattatatcctgcaagaggtgaacagcccgatcgtcctgaccgaaagcgcgttgcaggccgcggcgcagcgattggcgccgggcgatctttgcctgtcggcggatgaaccgctcgccgacgcggacgccgcgagcttgccgcgtgtggacgcccggcagttggcctacgtgatttacacctccggcaccagcgggcggccgaagggcacgctgtgcgaacaccggggcgcggccaacatggtgcttggccatacgcagcgtttgttgcgcaatgagccggatgcgctcaactgcctgcagttcgcctcgctggcgtttgacgcgcacgtctttgaggtgttcatggccctgggcaacggccaccggctgttcatcgcgagcgaagcgcagcgacgagatccggcgttgttgtgcgaacagatggcggcctggtgcatcgaggcctgcttcctgccgccggcgctgcttggcatcttccctgagttgccggcttcggtgcgctatctcgcgaccggcggcgaggcgagcgcgcaggaagcgctcgaccattacctggcccgcggcatgcaggtcgccaacatgtatggcccgaccgaagcttcggtcagcgccagcctgaatatttatcgccgcaacggcgcgcgcaatatcggccacgccatcgccaacatgcgttgctatgtggttgacgagcacgataacttgctgccgctgggggcggaaggcgaactgtgcctggccggcgtcggtctggcgcgcggatacctgaacctgccgacgttgacggaggccgcgttcaccgccaatccttttgaactgcgtgagccgtacgggcgcctgtaccgcaccggcgacagagtgcggcgcttggccgacggcagtctggagtacctcggacggcacgatcagcaaatcaagatcaacggctatcgcatcgaattgggcgagatagaaatgcagctgcgcgcgctgcctgaggtggccgaggcggtggtaagcctgcgtcccggcacggcggatcagttggcggcctggtatgtgccgcaacctggcgcggagccggaggccggcgacatcttgcaacggctggcggcgcagctgccgcactacatgttgccctcggcgatgcgggcgctggcggcgctgccgctgacggtgagccgcaaggtcgattaccgggcattgccagaaccgctaccgatcgagccgcaaacggcgtttcgccggccgtgttcgccgctggagattcgcctgtcggcactgttcaatcggctgctgggggcgatgtcggcgtggatgacaacttcttccgcctcggcggcaactccatga

SEQ ID NO: 438906 - DNA, 699 bp, Serratia marcescens
atgcccgcagataaagagtggatgacaaaagaatataataaaaaagatgataaaggagcctttaaattagtacctattcatgcaccgggagtaaggaatggggaaacaggaatgccatggaaaggaatgctgcctccagcaggcaaacattggcaaatgactccttctaagttggatattcttgattcaaaaggagaaattcattggtctaaaaatggaaacccaagaagaaaagtatatcttgctgaagataaaaaactaccacttactgattattgggaccagttcagagatgcgcatcaccaaagtatcccgattacaggttatcccacagaaaaaaacttcgacatgcttaaaaagattattgaagcaagcactaacgaaggagatcttgtattagatcctttcagcggttcaggtacaactatacatgctgcgcacgaattaaaacgtcaatggattggtatagatcaatcgttcttagccatcgaaacatcaatcaagagattacaagacggtttaaacccaatgggtgattttgtaaataagaaagacgaacagccttctttattttctgataataattttgggaactctttgtcaagcagaccttgtattaactacaattttattgtagacaaagatgtatacgaacaccacaaagaagaaatagaatatctattttcactaaaaaactaa

SEQ ID NO: 438907 - DNA, 894 bp, Serratia marcescens
atgtacaatgaaaattcgtttttctctaaaatactcaatcctcatgacgtaattacggcaatacccaattctagaactttccctgagtttttagaacaacgtgtagagacctattcccctgctattaatactttttgtgaattagtgaaaagtaattactcaagctatactttattagaagaaattaggcggcaaggtaggtttgatgctgtatcaagaatgtccttgctcaaaatatttagacggtgcgtgtgtactgtattagataccgaggcaactaaaaaaatcacaaaggtcagcactgccagtttggtttcttcttatggttatttgtttaaagatattgagcagttaagagagcagtttttaaatattagccaatctgaaacttatgcgttatctatgcttttaggtgagtatgatgatcgaggccagcagggctatatactttcagatttattttttgactggtttgaaagtaattttaaagataagttttgcatcgaaggaccccgcggtgctggtagagatattgagttaagttctgtgtttcctgattttgcaggatcgtacccttgcgattttattattcgtgatatttttacgcaagaagtcaaagcaatagggtttgctcgttatgatagtactcggggaggttcccagtctgacgataggactggtggtaacagtgataaagttcataaggcaatgaattataatgctttgacaaataaaaatttcaaaataatatttttatctgatggcccgggcctgacccatagagatacttggcacgaagcatgtgtattagatggttcttgggaaggaaatgtaaggactagtacactcaaaacggcagatgaaaggattactgaggattggttacggtcataa

SEQ ID NO: 438908 - DNA, 246 bp, Serratia marcescens
atgatgcagctaacctttggtcgccagcatttcaccctcgatgagcgcgacgcgctgtttgtggcggaagctatcctgttgcagcgtaaagagcctggtgtcgtcttgccggagcaccgcagcgaaaaacacggcgttattcgtctggcgagtcgccaggcgcagccgcgcctgttccgtgccgggccggtgccgctgacctgcgcggcggccgatactcgcaacgacccgcttaccgactgttga

SEQ ID NO: 438909 - DNA, 1113 bp, Serratia marcescens
atgccacacgctattatgccttgggctcaaattgcacctaactatcatcggaatacgatattgttgggtaatggtgcaagcattgctgtttcaccggaccttgactacggttctctactggcatacgcccacagggcaggtctgcttacacatgatgtgaatcgactcttccaatttttcagaacatccgatttcgagatgattcttcggctagtttggcaggcatccaacgtaaacagatcacttcaaataccagacaatcgcacacatcaagcctatctgaatgtcagaaattgtttgattcaggccgttcgtgatatacaccctgaatatgagcaagttagcgataaattgcctaatatgtaccagttcctcaaagggttcgataccgttttatcgttgaattacgacttgttgatctactggatgatgacctatggattcgacatccaagatggtcatttattcaaggattgtttcttgtggaacggcatcttcgacgatgcttggtggagatttcgtgatacttttagagagcgtactaacaccttggttttctacccgcatggaagcttggccctgtgcagaaatgttgtggagcaggagttcaaggtccacaacgctggagaaggcttgcttgaggcaattcttgaagagtggcgcagcgagcaagcggtgccgctgtttgttagcgaaggaacgatgcagcagaaagtatcttctatccagaatagctactatcggtccaccgtgtaccgggaggtacttacgtcgcagcgaccctccttaacgatacttggttgggggcttggagaacatgaccggcatattctgaagcggatgcgtggaaccggcatccaacgtgtagcggtttccgtttatcgctggaatcaggtctattgcaaccatgcgtatcaggttattcaggacgatctagggcctgttcgtgttgatttttttgacagcgaaagtcctggatgttgggttcatccggtgctgccaattttgccccgatttagacaactcgcgggattaacgtggttgcctgagcgaggacagctacggagattgaaactgggcgcggcgaatcacaacatcgcccagtttttttaa

SEQ ID NO: 438910 - DNA, 1881 bp, Serratia marcescens
atgacggcagtaactcccggcttacgcttgcgctttctcggtttttttgggccacaaaagccacccgctacagtgaccttcggtactggcctcaatgtcatttacggcgcatcaaacactggaaaatctttcattgtcgaagccatcgacttcatgctcggtggaaagccgcctctgcgtgatatccctgagcgcgttggttacgaccttgttctattggggcttgaaacccttgatgggacgtcatttacactctggcgcagtatagatggcggtggttttcggctctacgaagacttgcaccaggcgccaccaacaaacgaaattccgtatacgcagcttgacgaaaaacacagcgataagaacaatacgaacctttcatcattcttgctggatctatgtagccttggtggcaagcgtgttcgcaaaaactcccggaacgaaaccctcagtttaagctttcgcaacattgcgcgtttgatgatcgtcgatgagacggagatcacacaacaaagctcaccgcttattgatggcaatcccaccgccaacacgccgaacttggccacattcaagttacttttaaccggagcagacgactccgcattggtcgccaccagtaataagagtgagccggaagagttatcgcgcaaggcacaattgcgtcttctcgatcagcttcttgaagactatggtgaccggctcaaggagttgacaaagagtccgaaggaactcaaggagcagctagagaagattaacacctcacttcgtcaacaggcggcccaggtaaacaccaccgaagatgagtttcaggaggctgccgggaagcgacgagaattacgcaaaaaactggaagagagccgagagcgacgtgcagaggtaagtgcgatgcttgagcgattcaggctgcttgatagacactacttgtccgatattgaaaggctacgtgccattgaagaaggcgggacgctctttagcgtactgagtgccgggcattgtcctctttgcggagcggcccccgatcatcatccccccgatactgggtgtaatggagatactgatgccgtcgttcaggctgcacgtgtggagattgccaagatcgaagttttgcgcacggaacttgtagctaccgtccaaagccttgagcgcgaaggcgccaactttgatcgcagaatacccactgttgttcgagaattagagtcgatttcggagtcagttgaagaattcctcgctcccaagctctcgacccttcgcaagtcctattcagactttgccgacaagcgggccgaggtacgcgaagcgctggcactctatgccactgttcaagacatggagcgccgtcgggctgatcttgagaagggcactgaggacgaaaaggctggggtggttactaacgcagatctctcaagcactgtggcccatagttttgctaagactgttgaaggcatactgactggttggcacttcccagaggttggggatgtgtacttcgattccaagtctcgagatcttgtaattgctggaaagtcgcgtagtgcttttggtaagggccttcgcgccattacgcatgcagctttcaccctcgggctgcttgctttctgccgtgagcgccacacaccacacacgggattcgttgtactcgattctccattgctggcatacagagagccagatggaacagaatatgatttgaccggtactgaccttaaagatcagttttacgcgtaccttgaagcgctgcctgaggacacccaagtcatcgttgttgagaacaccgacccgcctgatgcaatcatgaagcgtgagcagtctcttatgtttggcaagaatccgcatcatggccgttacggtttgttcccttttatagcggaccctgcacaataa

SEQ ID NO: 438911 - DNA, 495 bp, Serratia marcescens
atgagccaagaacataagccaattaccttcaatagcccacttgaggcgggtatccgtgcggtctcgattctgggtgctgcctatccgcaaacctacgacctccagcggcttgtggcctttgactaccttcttgttcacacgggcgatattggtggaccagacaatttgcacccaccgacgccaatgcgctctgctgaatttctcgtgcgccgcaagttagttgagcaatcactgcttctgatgatgacccgtgacctagttgagcgcgaagtcacatccgagggaatcaagtacggcgcgggtgaaaatgctgcaacgttcctgtcatcagtatcttccaactatttgctgtccctgaaggatcgcgctgtatggcttgtcgaaactattggtgatctgacggatgaacagttcaaagccatgatgcgccgtttcttcgataaatgggtcgaacagtttcagagcattgagcaaagcttaggaggtgatgcatga

SEQ ID NO: 438912 - DNA, 1089 bp, Serratia marcescens
atgactgcgagttggatggacatcaataagccgccgagcccagcaaccgctgttacggcagctcaggtggcgaacggccccattattccaccgcagcaaagactactgacctactcaccagacgagtgggagggattcgtcgaggaatgggcttattactgcctcacgacgaagtatgaacacgtcctgcgtttctctggtgctggcgatatgggtattgatgtcgccgggttcgttggtgatgaacgcctgctgggggtttgggacaatttccaatgcaagcactacggcaatgccatcaggcctagtgatgtttgggttgagttcgggaagatcatctggtactcgtacaaaggtgaatatacggtccctcgtcgctactactttgtttcgccacgaggtgctggtacgtcgcttagccgcctattttcgaatgacacgaagttgcgtgaggaattgttagctaactgggataagcatgtgaaagatgcaatcactagcacacaagaagtgttactcgacgcgaagcttcgtgcctatgtagactcattcgattttaccatcttcgacgccaagactgcgcttcagcttgttgacgatcacagagccacgccggttcacacagcgcgctttggtggtggactaccaacgcggcctgcatctgaaaagccgccccaagaagttgccgccaccgagagtcgctatgtgacgcagttgttcggcgcatacagcgaacacacaggaacaatagtgactgacccttcggccttgcccgtgccgaaactcaaggatcatttccgtcgccagcgcgaggcgttctatgaggctgagtcactgcgcgtcttcgcacgtgatagtgtaccgccaggcacgttcgaagctttgctggatgacattcatgatggcgttattgatacacacgacgggaaccatgctgacggctacgaaaaggtctgcgctgtcaccaaggctgcccgcgacatgcaaattacggcaaacgccctcatcatttgtactaaccccaaggatagagacggaatctgccaccaacttgtgaacgaagagcgccttcggtggacacgatcatga

SEQ ID NO: 438913 - DNA, 996 bp, Serratia marcescens
atgaatgatgcaccttcagacatcatatttcactatccaccggagctgttcaatctcctggtggatgttgtgccgttgctcaatcgctctaagcaggatgtgctggttttcttccggggcgcaggagtacctgacaacataacttctgacattgcagttcacttgagggctgcaccaaaggatgtcaacaagtaccagatggttcgcacggtacttgaacgcctcaacgcgaagggggaacacgctctccgtgaacggcgcgaggtgttgcggcgcgtggtggactttgcgaactttgattcgtgctggcccgcagaccaacttaaggccaaaggtcttgtcgccagtatccgcgaagtcgtcaaccaaaaagacgctttcacgcgcatgaacaatgcccgcgaagaagaacggcaaacccgcctcgctgagtcacagcggatcgcagcagaaaaacgtgatcgtagttatagaatcgagaatgccaagcagggtttatataaattatttggcactactgcgactgcacaggaacgaggaaaattgctggagacggctctcaacaatctttttcaagcctacggtgttctcattcgtaaatcctttcatttggttggtgaggctggtgaagggatcgtcgagcagattgatgggatcattgaactcagtggtgttctgtatttcgttgaaatgaaatggtatcgcaatccggtgggtaagcctgagatttcagagcatcttgttcgcctcatgtcgcgtgccgaggttcgaggtatcttcatttctgccagtgactatacagaaccagccattcttacggcacgtgaatttctgcaacacaaagttgtagtcctatccacgcttcatgagatcgtccgtctgcttgagcagcaagacgacctttcagagttcttcacaaagaaagtccaggctgcgcagatacacaaaaacccgtatttctgcccacacgatagccaagcacaaggtgcgttatga

SEQ ID NO: 438914 - DNA, 585 bp, Serratia marcescens
atgccccgttttatagaaaaggcagtggaatacggcaagacgatttttatcgtcggtgaaaccggctccggtaaaaccacctatatgaaaacgctgctgcgctctattccccgccacctcaggctgaccaccatcgaggataatcccgaaatccggttctatcaccacaccaattatgtccatctcttttatccggcggatgccggggataatgccattgtcacgcccggcagactgatacgagccaattatcgtatgaaccctgaccggatattactggctgaaattcgcgggcgggaagcctgggatgcgctgaaaatcgttggttccgggcatgagggattaatgacttccctgcatgcgggcagcccggaagaatgtattgaaggattaattgaccgctgctatgaaaaccccgactgccggaacatgcctttcgacgtactgttacgcaaggtgcttaagagcattgatgtgatagtcagcattgatattcacggtgacatacgccggatgagtgatgtttattttaaacaccttcatctcaatgacatgaaaggtgtattcagtaaagggtttcaataa

SEQ ID NO: 438915 - DNA, 309 bp, Serratia marcescens
atgtctctgaacgacactaaaatccgcagcttaaaaccatccgctaaacccttcaaagttttcgattctcacggactgtaccttttagtcaatccaggcggttcacgtctctggtatctcaaatatcgtatcaatggtaaagaatctcgcctcggcttaggtgcctatcccgatgtttctctggcttacgctcgtcagaaacgtgatggtatacgcaagctgctaacgcagaatatcgatccatcacagcaacgtatcgcagagaaagctgcccgcattcgggcagaaaacgcatcagtcctggattga

SEQ ID NO: 438916 - DNA, 843 bp, Serratia marcescens
atgcagcgttttcacttcagagggatgtatttactgctcggcctgctgccggggctgtgctcggcgcaaatttattcctatgtaaccaagagtaccggttctcccagcagcgcttcctatgagtttgtgctcgagagttgggatacggacgatttgtcgccaaacccttgtttccagcaggctcagtgcgcggttgggattaaccaccggcataccagttctaacaccggcggtaatgcaggcgtgtcgccatccgcttatgtcgttggttcggcccgttatccgcaaattaccaaattggcgacgatgggcgagctcagtcgcttttaccagagtatcaatgcgctgccaataaaaggctcgactttccacaatggcgaagccattacccaagagtgtgttgggctgttttacaacactcgttcaggctctggggtcggtgacagcaatgcgatcctgatgcccggtagcatctgcggcatcgtaccgccgccggtcggcgtgtgtggcatcgatgagcaacagctcgatcttaatcacggcgtgttgtcagacaccgagctgacgggtaatacggcgcgcggcagcctgcgcgtggtgtgttcgcagaagatgactatcgtcatgtatatccgcgttggcagcaatggccgcctggagctggggaattccggtgtctacagcacgctacgggtcaatggcgttctgggtaaccaaggctaccagttcactgcggatccgcgtggcgtcacggtgccgatcacttccacgctcggcgtgaccggaacggtcaaggccggcgattactcggggcaatcggtcgccattctggcgctgccgtag

SEQ ID NO: 438917 - DNA, 240 bp, Serratia marcescens
atgcccagcatcgcgccgaacagccccgccgcgccgccgaaccaccatttgccgcgcttctttttcttgggcggcgcggcctgccgctcggcgtccggcccgttcagcgcctcacgcagcttgtccgaggtgatcggcagctcgcgaaaacgaatgccggtggcgtcgaacaccgcgttggcgatggccgccgcgctgggcaccgacgccgactccccggcgcccagcggcggatcgtaa

SEQ ID NO: 438918 - DNA, 828 bp, Serratia marcescens
atggctaatgcaatggtggttttcaaagctgaccgcccggcgaataaccctaatctgccgaagctcgatatcactcagcaagagatcgacattctgaaaatgaatcctactgcgtggcttgaggcaaaaagcggggtggtttcaagcggtggtgaggtttctctcgttcgagataaaaccgggcgcgcaaactgggctccagttgccgctctggctccgcgggttattgccgccggtaaaggtttcgcgctgcggttcggccgcgccgcttcaaactcaggcgccctgatcgcgcagggtggttacgagtccctgccagctgatgggatttactcgcagtttattttgtaccgcattccgctccctaacacagagggatacggcggtacgggcggtaatatctgcgggaactacacgaccgtgccggactggctgcgcgtgaggttcgggaatgattcattccagagcgatatcgtgtggatcaaccacggcgacacagctgcaagcatacctagtaactatccgatcaacacagtaattccagggtttcgcgataatcagtggcacattgcagcgattgaagccacgagtacgcaccaccggtgggagcacgacggtgcattgttgcagcaaagcacaatacccgcagccccgtttctgacagcagcctctcggcaactgctcatcggtggtgctggaaatccactgcgtcagggattccagggcgatatcgccgcgaaaatcatcatccctggcgtactctcggttgatgcgaaaaccacgctctatgcgcgattcaacgctctgaaaactgaattgcaagggtga

SEQ ID NO: 438919 - DNA, 2430 bp, Serratia marcescens
atgatcaaaatatccggcgtataccgcgatccggccggcgtagccatgcctggcgctttgatagctgtaaagtcgaaaaacaacacacttgaaacgttcaaatgcttgtgtgtagaaaccgtgacaggtcgcggcggagagtatgaattctcggtcgttcccgatgattatgaagtattcatcacctatgacaatgggatccgccagcggctgggcttcatgcgcatcgaagatggagcggcggatggttcccttaatgattatctgatttatgcagatccggagctggcccggccgccggtttattctgacattaaacggatgtccgaacgggcaaggaatgcagaaattgtatcctcagaatcagcgcgtgcatctgcgggatatcgcgatgctgcaatggatgccagggatgttgctgtagcagaaagtaaaacggcgaaagcgagcgcgcaatcggccattgccagtgaaaagggtgctacagaatcagccgcatcagcggcaaattcagctaaggagtccaaagcagcagaaggtatgtcaaaaaaatattcggatgatgcccgggattattcggagataacacaatcagtatctgatgcctatccagatgaaattgccgcacaaaaagcagtagatgacggaaaggaaactcgtaaatatttttgggtgcattcgcaatcaacgaatgaattagcgctggaatacacggtttcgaatggtcgcattgttccgaccggtcgatggtcaatggctggcggggcggttactgacgcactgaatgaaatgaaaacacgtgtgagtatcgtccccaacgtaccagcggggattgatgatagaattgcgtctggcgttgagttttctgatggccttttcgcaccgttgctacttgatgatggacggcatgttttcattgacgagaacggaattctacaagttgtcgcggctgactctgacattgttgtgcggccctatatcgagactcagccgtatacgctacctgacggggctgtgtgcacaaaaattatcgtcgatccgtataccaacgatattatcgaagcatggactgaagacggtggatattattttgctacgccagacggactaaagcgcgttggtgatttaaagccagcagcacagcaaataaagcaggctactgctgccaacgatttggtgatgaactacggcgcgacgcgtatctccgttgccgatgatctgcgccctgtaatgtatatcctgccgaccttcggccaatccctcgcccaagggtggagcacttacgcagatgacgtgttgatcgccactactcagctttatcccgacaatgcctggatgttcaaatcagaccggggcgccgggaaggagaatccgaatcgcggcccagcactgattgatgaaatcgtttcactgaaagacaccgtaaatgataattggaaagaaaccgcgtgctcatcgtcagcttcacacatcattagtgaagtagaaaaactgaccggaaagcgcattcacatcctacgatttgttgccgctcaaggcagtcaggcatacagaaatctgacaaaagggacgttttcttggtctaccctggtgcagggattaatcgatgctaagcgtatctgtgaacgcatgggatttaagccggtggtgttagggcttgatgtgaaagcaggtgagacggatatcgatgggacacctggcatgtacgccgatttgtatacccgatttctgaggaatttagacaggaactataatgccgaagtgaagcgcatattcggcggtgatcatcctgacgtccctgtctttgttgagcagtgcagctggtggccgtataccgagtgggatattaaaaatgttcggcaagggcagttgagtgcggacgggttgggtaacattcgattcactggccccggttatcaatacccgcatcccggcgatattattcacatcaactcgaagggtcaaaatatgcgcggtgtgtcactcgcgcgagcggtggcgttcgaatgttttggcacgggatatattccgataaagccgatgaatgtctactggtctggtgcaaacacaattgacattatttgcgcctcatctgtagagattattaaagacgtttccgatgttattgtgagttctgcagggctgggtgccggtgccgggtttggtattcgtgcgcgtgataattccgctatcagcatcactgacgctgttccgttcggtaagatcggcattcgcttgacggtagacaatccaacaaatacacgcagtgtgcagattagctatgcgcagcgacggacgggaagcaataaccaatccgggccgattgatggcgcgcgcgggttattccgcacaaaagatggcatcaccaacctttacaccggggaaactgaatatcagtggctaccggctttcacttgggagttaaattaa

SEQ ID NO: 438920 - DNA, 1053 bp, Serratia marcescens
atggtgaataaaaattttcgattgtccggattagacggtataagaggagcgcttgctattatcgtcgcgttatcccattcattcggacattttactggctgggaatcaggtttatacccttttaagaacgtatcattctctgtggacgtattttttatcttgtcaggcatggttctttaccatgcgcatgctattgacattaaaaacggctccctaagccctcaatcattttttcttaaaagattgctaaggttgtatccattacatttattcacaatactgcttgtgccattgtgtctttttatcagcattggaaccccctatcccgaatggctaggtaaatccacgatccaaaatatttttggtgactctttactaatgaatgccattggtattggctttgatttttctagcaaccaaccaagctggtcgatttctgtggaaatgtatattggaaccatattaatatacgttagttgcctaactatggccatgcctattttgtttgtgtttatttctgccaccttgttctttatatttaatatcgcgcctccagaagggcctcagtatcacgcatttcttgtgaatggtgggattgttagatgtcttttttctatgtctatagggattatggcctacaagctcacagtggcaaatttagatttcttaaagtcacacaagaaattgtcaatttgcatgtcctcatttggctttgcagccatcgttctaatagtcatatttattaacttaagtgtcacagagtatataattgcaatcccgttaatcgccctcgccatctcaataattggattaatggatcttccggaatttaaattcttagactccaagattctttctattctcgggcagcggtctttttcaatttatttaatgcacactcctgttatatatctatttttattcctgaaatcatcaaacaattttttgaattcattcatggcaatattgtcaattttgataaccatctccgtctctaagtacacactaaagtacatagaaaaaccattcataaaaatctcaaagaaattataa

SEQ ID NO: 438921 - DNA, 1041 bp, Serratia marcescens
atggctactgaaattcaaaaaattcttgacaaccactctagagtcgtcgaagaaggttacatctccactggcgatctaaaatatcgtagttacgcagttacaaccctgcgcggtggcgtaggaaaatctacgctttctttcaacctggcgttcgaaatatctagaaagcattccctactaatagctgatctgtgcgctcaaacaaacttaaccgaaaacattttacggggcgctgagcatagggttgatattttacgtgcactccagcctgctcttcttggttcagcatttggtgatgttcccgacgatatatcttacaaggttagcagctattgtgattcatttaagggcggaaaaccaacatttataattccgggaagccctgagcttttcgcttttccatcaaccctttaccaacaactacaaatagcaaatgctcagaacaacgctaaagcagtaaataatcttttggatatcctaaataagattctaaataaagaatcggaagaaaagaaacttgaaaaaatcatcatggatacaagtccattctacgctggcggcactcacttagcttggtgtgctgcggatgcggtaattatccccgtacgtgtagacgaacattccattgaatcacttgagcttactcttgatctactctcaaataaaagcaaagacttcaagatttgggatgaaagggcgggaggaagaaatacgccgaaagttgcagcaatcgttatgactatggctggtgctaagagtcagaaaaaattcacacctgatagtgcgtctcggatgtatgttgaaagagccttggctattgcagaaaaatacccacatcttttcgactttgatgaccctcgagatgcatttgtcataacggatgactttatgtcaacggggcgaatcagtggtgcaaaaagcatccctattgccgaattgaaagttaactcattccactcggttgaaggtaaaagacttcaagtcaacagttctgccgagcgttataaaagagaactaaaatacttggtgagtattctttaa

SEQ ID NO: 438922 - DNA, 147 bp, Serratia marcescens
atgacctacctggcgcacagcacagatccgacaaacgcgaccgttccggccgtcgttttgctgtgtgcttcctccgctccccccgccgttttctctgtcgtttccgcggttgccgcttacccgccacgcattgtggtcgtgcgctaa

SEQ ID NO: 438923 - DNA, 918 bp, Serratia marcescens
atggaaaaaatcatccctacagctgttcagtttatcaagcttggtgaggccggtgaatgggagcagcagtgtctgtccgatggcacgcttcggtttggttaccatgcaaccccgaacagtctctgtgttgaggggcgatgggaagatgttcatgatatatggcttaacatccgtgataggcggaaagcagtcgcgaccaatgacgtaaggcagattaaaactttctacactgcgggggcagagacagtattcatcactttttggggcgggtttctttactggtgtcgtcccactggtcaggtagaggtcctgggggatgaaagtcgactccgaaagactattgaggggtggaaaaacaccagtatcgggggcgctcagctaacgacagatcaactgagcggtgacctcctaaaggtgcaaggataccggggaacgatatgcaacgtaagcgcacatggttatgtggttcgtaaaataaatgatgaagatctatctgccgtttcagccgcgaaacaggctgaaacggcatatctgaccgcgataaaaaatctgtgccaattactgacctggcaggatttcgaactactaattgaccttattttttcaaccagtggatggcggcgcaccagcattgttgggaaaacacaaaaaacgctggatcttgagctcgaattgcccaccaccggtgagaaagcatttgtacagataaaatcacatgcgaacgcaggtgctctaagtgagtatgaaaaacgtttcagggaaactgctgcttataaaagaatgttttttatctggcacagcggacctttatccgaaagtataaaaaccgatggtattacgttaatcggccccgataagttagccgagctcattctggacagtggcttaacaagatggcttcgtaaaaaagtttcgtga

SEQ ID NO: 438924 - DNA, 903 bp, Serratia marcescens
atgcagactacaacactctatgtcatcggaaatggcttcgatctcaggcattgcatcccctcaagcttgtggcattttaaggaattcctccgggccacggattcggatatctaccgggacgttgaagaatatctacccgtggacgatgactggtgtactcttgaaactgcattagcaggtctagatgccgatatgcttatcaacaatcttggccatttcatgagttcttacggtgataatgactggagtgatgcaggtcatcatgattttcagtatgaggtagagcatgtagtcagacgcctttctaagagcctgcgctaccaattcggacagtggatccgtcagttgccgataccctcgtgcacaaatgctcctaaccgcctgactacgctggatccacaggcaatttttctgagttttaattataccgatacactaagtcgcgtttacggggttgaatcggagcgtgttattcatatccacggttctgcggagatgaggggcgatgatttgattctggggcatgcttgggagccgggggcccgccgctctctcaacgacagaaccgatattgcagagattgatacccggcttatggaagtgaacagcatcattgatgactatttcttcgcgacttttaagccttctcagaagctcattgctaaacaccggttggtttttgaggagttgaacgaggttaagcaggtggtgattttaggtcattctctgtctgaagttgatgcagcttatttccaagctctttttctgcaaaaatctgttgcagcggcacaatgggtgatagcgtgccgcagcgaagaggaatgggatgagaaatccagtaatcttgaactaatggggatcagaccggcttctgtcagaaaagcgctctgggataatctgtaa

SEQ ID NO: 438925 - DNA, 1476 bp, Serratia marcescens
atggatgctgctgatgaaaagtctaaattcattcttgaaaaaaacacagtctacttcagaagcgaggatgaatgtaagaaagttgtgagtacagatgatttcattttcatatcaagcccaagagtatttggggagcattcatcacagtataggaccccgagtgttttcatagatcataacttacccgataaatcctttatttgtcccatatttgttggacgatttggaattcttaatgaattatgggcatggctagctgatgaactacagcattctaaagtgttagcagctgatggaggaaagggaaaaacctcaattgcatatgaattttgtcaactattgattacaacgagagtagaaggaattgagcagattatatggctcactgcaaaaaataagcaatttaagcccatgttcaacgaatatgtctctgtgcctgagacgcattttaacgacatgtccacattattgaaggagctttgcattagaactggttctgttgaaaatactcttgaagatttatctgtagtacaattgacaaagttagccaagcaaaaccttaaagaatacccttcatttattgttattgatgatgtcgattcaagtacccctgaagaacaaaaaagaatattggaaatggcaaaaaccatttcttctgagtcatcaaaaatattattgacgaccagggttaatagtatttattcattggattcctcaattttgatccccgggatggttggtgatgagtttaaagatcttataaatactttatgcgatagacttaatctacagaaacttaatgataaaaacttagctaaactagaaaaagcatctgaaggatctccattgttttcagagtcaatattgagattgttcaaacaaggaagttcaattgattcggctattcaggaatggacaggaaaaagtggcgaggcagcaagagaggcagctttaaagaaagaggttagcgaattatctttagaggctaaaaaagttctagtaactgtttgtactgtaggctcatgctcgaaatctgaaatcagacaacttactgatctcgaacatactgacattggcagtgcactccaagaactagacctcttattcttactgcatagtgcgccattcattgaatccgaacctcggtatgaatcatcatcttcaatcagttaccttatagctaatatggtttctgagataatacctgaagccagtaattttttaagtaaaataaataaggcttattatggcctacaatctaactccagaagatatcatcctcgagttggtgatgctgtacgacaatgtaatgcattattaaaatcaaatcgatatccagaggctagggaaacattacagagcttgattaaagatcctgagtttaaagaaaataaagatttatactatctctctgcatcgattgagttttccgatcctgatgctgaaccaaaaattgtaagccatgcgtttcagtaa

SEQ ID NO: 438926 - DNA, 1575 bp, Serratia marcescens
gtggcgaacaaatctaatcttgtaaacctagacgcaatgataaaaagggctgattttactcttagtgagaatgaaagaacgtcttttgaaaccttccctacaataccagcaagagagttaaagtcagggggagctattgccgcattattaagaaaacctgactttcaaagagaaacaaatcactggagccctgagcaagtggtatccttgcttgaatgttatataaatggcgacctaataccttcggtaatcttatggagatctgctgcaaatctttttgttattgatggtgggcatagactcagcgtactgagagcatgggttgaggatgactatggtgatgcactcatatctcagaggcttttcggtcataatatttctcgagagcaaataaaatcagcagagaaaacaagagctttagttaacaaaagagttggaagttgggattactatcaaaagttattatctgaagacggagataatcttactgatactcagaaaataagattatcaactcttacatcgcgaggtatctctgttcagtgggttgtaggagatgttgacaaagccgagacatctttctttaacattaatatgaaaggtactccattagacgatattgaagagttattattgagaaataggaaaaaaagcatcccaattgcaacacgtgccataattagagcaggaaaaggccaccgttattggtcttctttttcggaagaaaaaacaaatacgatagaagaaaatgctgcaaaacttcatagattattatttgagcctgaattcgaaagaccaataaaaacactggatcttccgcttggtggttctaaaggggtaagaactgctattcaggtacttaaagatttccttctgattacagattgcaaacagaatggtattttgcctaaattagaaaactacaccgatgatttaacaggtgaagatactatcaggattttgtctaaagcgacttacttaacgggacgtgtaacagggaatggtgacggcagtttagggctacatccagctatctatttttatggtccttctggagtacactctacaccaatgttcttaggaacaataatgctgatagcaagacacctatcaaataataatagaaatttcttcaaaaattttagttccatacgttctagattagagcgtttaatgatagagcacaaagacctaatagctatgataatacaaaagcccggaagcaatcttcgcgctcagaaatatagtttatttcttgattcattaatatcggagctgcagaaagatcatatcattgatgagctaaatttaatatcactatcaggattggaaggaagaataatatctggtgatttcaaaaaaacatctcaaaaaattaatgacgagcaaaaaagcaaagtatttattacatcagcattaaaatcagctataacatgccctatttgtaatggctacatagatagtgtcaaatcagtttcatacgatcatataataagagtacgtgatggtggcaatggaagtgcggaaaactgccagttaactcatccctattgcaaccaatcaataaaatgttga

SEQ ID NO: 438927 - DNA, 1314 bp, Serratia marcescens
atgtggactgaagttacggcaaatgacttctgcgcctcagtgcgagacggcacgcacgactcgccaaagccagttgaaaaaggacggtacttgattacctcgcgtcatattatcggagggaaaatcgacttatcgaatgcctacctaatttcaaatgatgattttgatgcaattaacaagaggagcaaggttgatcgatgggatgtgctaatttcaatgattggcacagtaggtgagccatgccttgtgaaggatgagccagagttcgcaataaaaaacattggcctttttaaaacaaaaaacgaattagatggccgatggctttattactatttaactagccctcaagcacaaacactgattcgtcagcattcaagaggcacaactcaggcttatgttcccttaggggctttgcgagagtttcctattagagtgccaaaagaccgagaggtcatgcatgccgtcacaaatatactcagcgggcttgacgaaaagatcgacctcaatcgccgcatcaaccaaaccctcgaagccatggcgcaagccatcttcaagtcctggtttgtcgatttcgacccgatcaaggccaagatcgccgccatcgaacaaggccaagacccgctacgtgccgccatgcgcgccatcagtggcaaaactgacgccgaactcgaccaggtgccccgcgagcaccacaaccaactcgccgccactgccgcgctgtttcccgatgaaatggaagagtcggagttaggcgagattcccaagaggtgggatgtaaagcgcattggtgacatgattgaattggcatacggaaaagctctcaaatcaaccgaccgtcaaaaaggttatgttcctgtttacggttctggcggcatcaccggttatcataatgaagcactggtaccacatggagcaatcattgttggccgcaaaggaactgtaggtagcttgtactgggaagataagccgttttttccaatcgacactacattttacgtgaaacccaaggtgttgccgatgacttattgcttctatgccatgcaaacacttgggttggacaaaatgaataccgatgcggcggttcccggattgaatcgcgaaaacgtgtaccgacttgagctggttaaaccgcccacatcggttttaaatgccttcgatggtctgattggtcagacgaggaaggcaatgcgagcaaatgaagttgcaagtcaatcgttggccgaactccgcgatagcctcctccccaaactgctttcaggggaactggctatcgataaaatggctgggcttgtcgataccacgggagccatctga

SEQ ID NO: 438928 - DNA, 1161 bp, Serratia marcescens
atggacattaagaagctccgtgagaataaactaatcgtggacaaggtcgaggaagctttgcaggcggcgtactcatccaacggagatttcaatgcggtgctggatgaagcagagccgattgcattcacgagcttgaaagatcccgagcatctatacgcctaccccatcagcgaggtgttgtactggacagatagggatgcttatctcgacgaacttgaccagtgggaaggcagttgtcagatcagtcagcatgacgctgcaatccgcttcattaagcagtctgatcaagtggcagtgttcctcgatctggtagacgccgttcgcttaggacgaatttctccttttgtaggagctggcatctcgaaagcgtgtggttacccaatgtggggtgaggccctacgcaaaatatcgctaaagctcaatggtattgaagtacaagacatcgagcctttgatggcgcaatatgattatctgcaagctgcacagctgctatacgaagcagcagcagatcaggtgaaacacttcataaaaacggaattccgtcagcgggcaggcgcaattgcagggccagttcttttactgcccgagttggcccaaggctgtatcgtcacgaccaactttgactcaatgatcgaagattttttccaacagcgtggccaggcgttggatggatatatgtatggaatgcagcctggcaatgcttttgttcagcgcttacttcgtggtgagcgctgcatcttaaagttgcatggcgatgcgcgccaagacaacacatatgtttttactcaagagcaataccggattgcctacggcgagcctctttcattccaaaatcagttgccacgggcactacggcagattttcatcagccattccttgttgttcctaggttgcagtttggagcaagacaaaacacttgatctatttaaatcagtcgttgatgaggctgcattcgaaatacctgatcacttcgccctactcaatgaaccagctacaccgcaagagcgagctcaaaaagaagctcgattactacaactgaagattcgtcctatatggtattcaacatctattgctaacgatggaagccatgatcacagtctgttggaacaaattttgaggcttgctattgctgtgtcgcgccggcaagtagcatttgaataa

SEQ ID NO: 438929 - DNA, 669 bp, Serratia marcescens
atgttgagaacgtcaattgttgcacttgcgttgattattcctgctattacacatgcggagatgcactgggtaaaaaatgataaaataaaaccggataacgtagatacggttaaaattgtctataacggtgatgtaactccgacactggtggctgagttgatttcagccctcgatgagatcaacgtgaattaccctgccgcaaaatctattaaattattcatcagcagttttggcggtagtatggaaagcggatatttggcatatcaagccgttaaaggatctaagattccggttgagactattaatgccggtatgactgcatcttcagcgacattagtctattgcggtgcgccgaagagatatacttttcctgatgcatccttcatgttacatccgtccgcatcgccaaacctcaaagctgagtggatcaggccgaatgacgttgagtttataagaaaggacgtcgaggacggaaacaaatatttcaaaagtatctatggtagttgtacaacattgtcacgtcaggacgttggaaaaattctttttagtaacgattatgccagatacttacgtccaaaagacgcggagaagataaaactgtctcagggagttgtagaagggatagcatcgacacctgtctcttattatattacggaggtaaagagttga

SEQ ID NO: 438930 - DNA, 522 bp, Serratia marcescens
atgcgtggccttttcgttttgtgtggtgtccaacagtatactcgtgacgagctaagaaacagaaatgccggtaatctcattagcgttaaccaaaaacaacctaacctcaaaattttcgtggaggaaaccatgaaaaaactattacttctttctgctcttatttttagtgcggtatcagcgcacgccgaccctcaaatctattacaaagcacagactagtaatgaatttgatacgtttgtcggtcaactgaatgttgaaaagaccaaacaagtgaagggtttttattgggcatatcagactttcctacgccacggccacgcagtgtatattggccttcaaccacgagtgaagcaaagcgacaatctggcaatattctcggcttttgggaatggtgttacatccacacacgctaattgtaatagtggtgcagatggtggccatggcgtgtcgtgtcgagtcaggtatccatttgatataaaaaagattaccgcctcacaattactaaggtcagttcaaccgtaa

SEQ ID NO: 438931 - DNA, 249 bp, Serratia marcescens
gtggtcatcaaatccggcaacgtgccggtgatcaatatcgccgcgccgaacggcgcggggatttcccacaacgtttacaacgacttcaacgtcggcccactgggcgcggtattgaacaacgccacccacagcggtaagacggcgctgggcatggagatatacagcgaaaaggggaacacctacctgaagggcaaaccagctgagcttatcattaacgaggtcaccggcagcagccgctccgagctgtag

SEQ ID NO: 438932 - DNA, 336 bp, Serratia marcescens
gtggtgcagcgcctgaccaacagcagcgtaacggtggcgagtctgttcacgggcctcaactacagccgcacgctggacggcggctacctgacgctcaccccggcggtttcacacggcctgcgtggactgggagccacccgggatgagccggcggcgccttacgctgcacgtagcgaatttcgcaaactcagcctgagcgccagctacttttatccgctgacgccgtcgctctattacctgacctccgcctacggacagaccagcatcgacaacctgtacagtagtgagcgcatttcctttggcggacaatactcggtacggggttttaaagagtag

SEQ ID NO: 438933 - DNA, 747 bp, Serratia marcescens
atgaaaaaattttttaaaagttatatccttctagaaaaaatagattcacactctcttagaatcttacttctatgtttgattgctattgttactctaggcattatgttttttgtaacttcatttgttttaactggagtacaagaaggtttttttagtcgcagtttttgtttcaataatacctgcatttcaaattttactaaaggttactcacaatcaatattaatattgcaagcaactttcatcttgttggggttagtagctagcataggtggaataattgttgcgttgcttgggtatactaatagtgtcagcgtgtcagctcttggcaaccatatatcacactttaagatatttcaagagtatttatcttacgaaataaataaaagagatcgtctatcagcatcttcatttgatatattcaaatggtataatattatttttaataagtctcgttctggctctacatccatatctcaagactactgcaatctgattgttaaattaaacagtgctataagtgaatcaaatactgcatgttcactagcccaatcaggttctttctcttacgtgaggcatcaaaataatatcacaaatttgcttcgagattttggaataatccatcctcgattacctagaaatgattactatgaggttgaagatcaagtttttgaattgatagacaatatgaatagagagttttgttattcatcatccatagaacaattagcaaaaagactgtatagatag

SEQ ID NO: 438934 - DNA, 1224 bp, Serratia marcescens
atgtctctccctgtacgccatactaaaaagaaaactgtctctgcaataaattcaattagttcattatgttctactcttagtataactagagccgaacttgaaacagcattatcaactcctgataaagaaagatatactccttctgaagttgaaaaaagtgatggtactataaggaatatttataatccaaaatcattgattagaaaaattcaacgtcgcattaacaggaggatatttaatatatacactccaaaaggacgagaaaaaaagaacccccctattatttgggcgtcgtatctattcggttcaataccaaatcaatttttggatgaagatattgaacaaaaagattacattgcatgtgcgcgagttcattgccaatctaagagtcttttaaaagtagatattaaaaattttttcgataatgttcaagcaatacatgttgagagtatcttttctaaatttttcttttttagtgatgatgtatcacaggctttgacaaatatctgctgttatgaggggcatttagtacaaggagcgttaacatcaagctatttatcctgcttatgtctatatgatgtcgaatggaagattgttgataggttatctcgaaaaaatttaaggtatactcgcttagttgacgatataacagtatcatcaacagtgtctaattatgacttttcatatgcaaaagatataattattaatatgctacatgagaaagatttacctgttaatttgaaaaaaacccaacagtattatacatcgactactccattaacggttcacgggttgcgtgtttcattttccgaacctcgtctcccttcagacgaggcaaaacgaattagagcatccgtacgcaatattgaaagcttagccgctgaaagaaattaccgtacaacacatgcttatagaaaggacttcaataggtgcatgggccgagtcaataaacttaagcgagtaaatcactctcaatatgaaagcttagtaaatcgactttttaaactttttcctttaccatcaaaaaaagatcttgatagggtgtctatttccttagccaaccttgaagatgattttcataaaggtaagcatgatacttattggtattggaaaagatatcatcgagtgcatgagcgtataaatattttacaacgaacctttgtccgtgaagcgattatatttcgcaataaaacaaaatctataaaaccgagctacatacaataa

SEQ ID NO: 438935 - DNA, 921 bp, Serratia marcescens
atgaaaacgctgaataaaacccggctgcggcgcagcatgctgttcgttcccggcgccaacgcggcgatggtcagcaacgcctttatctatcaggccgatgcgctgatgttcgatctggaagactcggtgatcctgcgtgaaaaagacgcggcgcgccggctggtgtaccacgcgctgcagcacccgctgtaccaggaggtggaaaccatcgtgcgcgtcaatgcgctcgactccgcctacggcctggcggacttgcaggcggtggtgcgcggcggcgcggacatcgtgcgcctgccgaagaccgacagcgcgcaggacgttgtcgacatggagcgcgagatcgccgccatcgaggcggcctgcggccggccggtcggcagcaccgggctgctggcggcgatcgaatcggcgcagggcatcaccaacgcagtggcgatcgcgcacgcttcgccgcggcttatcggcatcgcgctgggggcggaagactatgtgcgcaacctgcgcaccgaacgctcgccggagggcattgagctgctgttcgcccgctgctcgctgctgcaggcggcgcgcgccgcctgcattcaggcgttcgacaccgtgtattccgacgccaacaacgaggccggcttcctgcaggaagcggcgctgatcaaacagctcggcttcgacggcaaatcgctgatcaacccgcgccagattgagctgctgcacaacctgtacgcgccgaccgccaaagaggtggcgcacgcgcagcgggtggtggacgccgccgaagcggcggagcgggaagggcgcggcgtggtgtcgctcaacggaaaaatggtcgacagcccggtgattgaacgcgcccggctggtgctggagcgcgctgcgctgtccggcttacgggaagaaccggcgcagcacggggaggaagcatga

SEQ ID NO: 438936 - DNA, 741 bp, Serratia marcescens
atgacagttcagaaagaggttattggtaatgcggttctttattgcggcgatagtttggaattgctgcgagctggattcactgctgatgcattaatcaccgacccaccttatagcagtggaggaattaatgccggggcacgtcgttccactccacaggataagtacataggcactcatggccgccagtacactaatttttatggggataatcgcgatgccagaagctggtctttatggatgacattgtggttagggcaaagtatgaagacgctgaatgacggtgcttatgtgatgctattcacggattggcgacaactccccgccacaacggatgcgctccaggccggtggttatatctggcgtggcgtcgtaccttggaacaagaccgcctcaagccgagcgccgcatacaggctattttcggcatcaatgtgaatatgtggtttggggtagcaaaggcaaccttgagaagtctttacacggaggcccttggcctggtcttgtcacacaacgcgtaatacccaaggaaaagctgcatatgacggccaagcctctgagcctaatgcaggagctggttgaacctgttatccctggagggactattcttgatccgtttatgggcagcggtacaactggggtcgcagcagtaacgtcaggacggcgctttattggcgttgaaatgagtaacttctatttcgacgttgcctgtaagcgcatcgaagaagcccagcagcaaatttaa

SEQ ID NO: 438937 - DNA, 516 bp, Serratia marcescens
gtgctcaaacacttcttcaccagatttcaaaaaacactatcccccaaaagatgttgtttgatttttaatagcgttaaattatcgggacggcgctgtaacgaactgttcaaaaaagcaggcgtaactgttggtaatggcttcactgtcacgcctcctttctactttgagtttggtaacatatctttgggcgaaaatgtatatatcaatactgggtgcgtattccttgataatgcatcaattagtattggtgataattcattgctaggccctcaggttagattgtgcaccccgactcatccaatctcacctaaagaaagattaggcgaaaacagaataacttcacagcctatatcaattggtaacaatgtgtggatcggagcaggagctgttattttaccgggagtaactattggcgataatagtgtaattgcagcaaatagcgtcgttaaatcggacatcccatgtaacgaactttgggcgggatgtccggcggtgttcaaacgttcgattaaatga

SEQ ID NO: 438938 - DNA, 564 bp, Serratia marcescens
atgttcgaaatgtctgatgaagcacaaaccatcaaggtttataattttctggctaatacaaaagaatttattggcgtcagcgattgttatattcctcccggtactggactccccgcatactgcacagacaccaaggccccggaggctactgaaggtcgcgtcgcttgcttcgaaaatgatacatgggtattgaaagaagactaccgagggaaaacagtctgggagaagaaaactcgaaaaaaaatggtaattgaccaacttggcccgcttcctgaaactgtcacatttatgaaacccatgtctgattatgatgtctgggatactgataaatgggttaaagatgaaaaggccgaggcaaaccacattatcaatgaagcagaaaacaaaaagaaaatgttgatagctattgcaacagagaacatcaacacgctaaatgatgcccttgagttggacatggctacagatgaagagaaaaagcagctagtcgtctggaagaaacatcgtgttgaattaagtcgaatcgatgtgaatcaagctccagatattgactggccggtcatttaa

SEQ ID NO: 438939 - DNA, 1122 bp, Serratia marcescens
atgaaagaaattatttctccggtcgataccgaagacggcctgtttcatgatggcgatccatcaacaggcacagaaggcaccgtcgtgtccgccaaatggttgaacccggtacaaacggccattatcggcaaccaacaggaattagcctccgtacttaaagaggcggggataaaaatcgacccgtccaagcaagatcaattactggcggcaattaaaaaaataactggcacggcaacggaaggttttttaaaagcgggtgcttttgggcttggtggcggacctgtacatcatgacgatgctttaagtaacatctatcagttttatcgggttaataacacatcaaagaataggcccggagataattcatatggcgtagtcagtttaccttgcgatggtgggccatctgccggttatttggctgtatctgccaacggcgaactgtggattgggaattcatctggtaatacaatgaagtggcgccgagcactatcagagggatttaataccttcccggttggcgcaccaatcccctggccaagtgataccccacccgccggttatgcattgatgcaggggcaaacatttaataaaacccaatacccccagcttgcgattgcctaccctggtggtgtaattccagacatgcgcggatggatgatcaaaggtaagccagccagcggtcgaaatgttttaagtcaggaacaagatggtattaagtcccacacgcacggtggctcagtatcagcgacggacttgggaactaaatggacatcaactttcgactatggttcgaaacaaacaaccgcatttgattacggaaacaaaggcacggatgttcagggcggtcatacacacgcatatagtcaaccaaactatccgggtgggaatggggcatctggtagccagttctctttatcatcgattactgcgaatactggctactctggagaacatgcacatactgtttatattggcgctcatagccattgggttggaattggtgcgcatagtcatacagtggtattaggcagccatacacacggattaaccattaatgcggcaggtaatgcagaaaacaccgtaaaaaatatcgcctttaactatatagtgaggttagcataa

SEQ ID NO: 438940 - DNA, 588 bp, Serratia marcescens
atgaacggccaggattacgccgagctgctggggctgttgttaccgccgaagagctattccctggacggcaggcaattaagtgcggagctgctggcagaagggtattgcctggcgcgcgcggaaataaagtcggacgaggtcttggacgggataacgccgttctttgccgtcagcctgctgtcggactgggagcgggtgctggctatcagcgttgacagcagcatgacaatacaacagcgccgccagcaggtgctggccaagattaatgccaccggcggcctgagccggaaatactttatcaacctggccaaatcgctgggctacaacatcaccatcgacgaaccggaaccctttagagcgggcattaaccgcgcgggtgatcgtctttgggtgccggaaatcatctgggtctggatagtgaatatcgacgatgcccaggtgccggtgtatcgcttccgggcgggtagttcggtcgcaggtgaaaggctcatgacattcggtcaaaacctgattgaaaacatattccaggatttaaaacctgcacatacgcaagtggtctttaattacaaggagaagcccacaccatga

SEQ ID NO: 438941 - DNA, 1071 bp, Serratia marcescens
atggcgtacacaataccgctgctggaagataccgccgccacgctgctgcgggatatcagcaaccagttaccggacgccgacgtcggcaaagacagcgactttgccatccgggcgaacgccatcgccagtgccgtgcagggcctctaccagcaccaggtgtggatcgtgcgccagatgttcccggacaccgccgaccatgactacctggtgatgcacgcccggacgcgcaacctgcagccgaaaccggccacctatgccggtggcaaggtgcagttgaccggcaacgccggtgtggcggtgaaaagcggcctgcagttccgacccaagggcagcagcctgctgtgccaaaccaccgaagatgccaccgtcggcagtgacggcaaggtagcgatagcggccaggccgctggagaacggcactgcaggcaacctggccgacaatacgccggggacgttgcttatcgcgccggagggcatcgacagcgacgtcaccattctgcatatgaccggcggcaccgacgacgagaccgatgcctcgttgctggcccgcctgctggaagtgatccgccgtcccgctgccggtggcaacaagtatgactatcaccgctgggcagttgaagtgcctggcgtcacggaggcctatgtttatcctctgcgtcggggctacggcactgtggatgtggtgattgtggccaacaacagtatgccgtccgaggagaccattaaagccacccaggcgcatattgatgacgtgcgcccggtcacagccaaaaataccctggtgctggccccggaagaggtcattacggatgtgtccgtcaaggtcaaattatcagggctttcgctggatgaagcgagaaaacaaattaccgctgccatcaccgattattttaatcgcctggcaccgggtgaaattgctgttttaaaacaaatcggcggcagtatcaccaatattgtcggcgttatcgattacgattttattaagcccacggggaatattgttcccgtggtagataaaaccaaagtgcaatggattcgcctgggcaccgtgaccgtggataaattgccatga

SEQ ID NO: 438942 - DNA, 351 bp, Serratia marcescens
atggacgcactcattgacagccagaccggcgactacaccggcacacgcacctacgacctgcacaatgcggtttacctgcggttaaaaacgccgctgggcggctactgggccgatccgctgctgggttcccggctgcatgagctggagcgcgccaaagactccgccacgacccgccgcctggcgcagcagtatgccgaacaggcgctgcagccgctgctggatgacaagcgcgccaccgcgctggccgtgggtgtgagccgtccgcaggatggctggctgctgctgacgattgtcgtcacccaggccaacaacgccgtccagaccttcacccatccggtaaaagtgatttaa

SEQ ID NO: 438943 - DNA, 663 bp, Serratia marcescens
atggctaacctgacagatttgattgataagcgcatccgccgcgccctgggtggcattcgcctggcgtatcgcggggtactcaaccgggtcacgacccagggcggcgtccagatgacgcaggtcgcggggctggccagcgaaaccaccccggaagtggagttcttccagcactacgggctgacgtctgtcccgcccgacggcgcgatggccatcatgctgcccatcggcggcgcaacctcccacagcattgtcattgccaccgaacacagccgctaccgcctgcaggggctggagggtggcgaggtggcgctctataccgatgaaggggccagcatcattctcaagcgcaacaaggtgatcgccgtcgagtgcgacgactaccaggtcaaatgcaagcgctacagcatcgaagccgaagagagcgccgcctttgatacaccggaactgacggccacccagcagctcattgccgagggcaaaatcagcggcaacggcgggatggccatcaagggcggcaaaggtgcgaccgccagcttcgagggcaacgtcgagcacagcggcggcacaatcagcagccccgacgtcgagattaacggggtcaaacaaggcacccacaaacacaatacgccgtccgggctttccgacggccccatcagcgggtaa

SEQ ID NO: 438944 - DNA, 1131 bp, Serratia marcescens
atgccttcgctaaatgatggtgccgagcgcattacgttgcgcatcggtggggtctcgcatgaggactggctggacttcgaggtcgattccgatctgcagacacccgccgatggctggtcgttcactgtgggtaacgtcagcgataccctgccggaagaagtccaggccggagccagagcagaattgcgcacgggcaaggatgtgatcatgaccggccaggtcgatgagattgaagatgatatcggacgcggccagcacacgctggcgctgtatgggcgcgacgcgtcggcagtattggtggattgctctgcccccatctttaccgcgcgggatatgtccctgcaggaggtgatcgcccaaatcgtcaagccactgggcgtaacggcgatccgtatccaggcagagaagccgctgccgtcgaagaaagcgagtatcgaccccggcgacactgcctgggatgcgctgaccaaagcagcggaagccagcggcctgtggccctgggtcacagcggacggcacactcgttatcggcggcccggattacagcaccccggcagtcgataccctggtgctgcgcaaggatggccagggcaacaatctgctgcgcctgtccgtcacccacaacgtcagcgcccgctactccgaagtgacggtgctggcccagggacacggcacggcaaacgccgacggcaagcatgaccggcgctgcaccgtgcgcgacacctccgtaccgttctatcgcccgcggattgaggtggtggccgataccgacagcgacgaagaggtacagtttcgggcgcgaaaaatcatggctgacgcgcgtctcgagggtctgctgatcaccgccgttgtcaaggggctgcgcaccgcctccgggcaactctgggcaccggggcaacgtgtccaggtcaagagcgagaagcacggcatcgacgacatttattttgtgatgcatcgccgtttcagcggcggtcgcggccagcagctgctgactacgctgaccctgcgcgaggacggcatctggttaccggatgccttccctaaatccaagcgcaaacgcaaggggaaaggcaccggcaagaaagggcagaagggtctctggaacgactgggagcaaatcaacaatggctaa

SEQ ID NO: 438945 - DNA, 1320 bp, Serratia marcescens
atggttgatatcgtgcatgacctggcgggcgcgttgggtatcgataccttgctccaggcctcgttccggggtatcgagttcgactgtctctatacccgcgacaccctgtccagggatacggtggtgtatgaatacccctaccgtgatggggccgaggtggaagaccagggcatgaaggcgatgaactttcgcctgtcggcgctgttctggggcaaccgttatcaaaccgagctgaaagcctttttaaaagcgctcaaggaagccggatcgggcgagctgatccacccggtgtacggctccattcccagggtgcaattcctggaggccggtgtagaacatgaggttgagccgctcaacgccgtcaccgttgaactggtatttgtcgaagccaccaccgaacaggcgctgtttgcgacttcctacccggaaacctcgaccgatagcctgctggatagcgtgagaaaaggcttcagcgaaaccatgagccaggttaaacaggtgcaggatacgctgggccgggtcagcaacatcatcgcatcggcggagtatgtggtgcagtcgctggccaacgagatccaaagcaccctcggcagcgcgctgaactacctggactacccggcggcctttgtctccgatgtcaaaaccctgctgtcggcctttaccgatcgcctgagttttagtgaggtgacccgcctgtccgactggttgtcggtacgcgcactgggctaccaggcgatcggtctgcaggacaacagattcacggcgacgcagtccaccgataacaacggtgtttacgtctccacactgcatcgcgccagcatcatgccgcaggaagaccgagaccgggtcaatcaggttgtccgattggcggttatcagcgagtgggtggaaatcgctgcagacatcatgcagtacgaaagtgaaaccccgaccctgtccgcaacggacatcgagcgcatcaccaatgatgtccggtcactgattgttgacgctatccaggtgcagcgcagcatgatggctgcacgtcagcagcaggtgcagcaagcatttggcgtgacgcaggatatcagcagtgacgcggcacagattgccgaactgcaggcgttcgcctacacgctgcagcagctcgccagaggcgttatcttgacgctgccgccgctggtacgccgtgaggttaagcgcgcctgtaacctgcatttactggcgtttgaatggtatggcgatcgcacacgcgctgtcgagttggcgcgactcaatccgacgttacgcaatccgaacagcctgctaccgggagacgtgctgtatgccttcgctaaatga

SEQ ID NO: 438946 - DNA, 2016 bp, Serratia marcescens
atggcccgtgaatttgatacccagatgacgttcagggtgcaggatgatgcgaccccgcgcatccgctccctgtccgaagagttccgccgcatgagcagcgcccgcgaaacgctgggtatccggtcggagcgtatgatccagcgtgagattgaccgtaccatggcggcgtataaccgcctgtctcgcagcggcacgctatccgccaccgaacagtcccgcgcattcgaaaaaacgcaggccacggtgtccaggctgcgccaggaaatggccggggccgagcgtcaacaacgcagctggggcaaagcggcattcgcaatcggcagcggcgtagtggctggcgccatgacgctgcgcaagcccatcaacgaccagatggactacagcctgcatcttgccgagctggccaactttgctttcagcagcggcagtgttgacgagcgcatcgcgggtaagaaagtcttggatcagggcgttagagaggcaacccggattggtggcggcactccagaccagacgatttctgcagctgaagcgatgttgcgcgccggtatgaaactggacgaggtgctgaaagtattgggtaacgtcatgatgaactccaccgcgaacctggcagatgcggtggatatggctaacctgcagtcctcaatcagcaattttgggttgagcaaggaggattcgttcctggctctgagcgcgacaaccacagcggcgcagcacggtaaagctggggtcgggttgcttgcgaaagaattaccgggcgcacttacagcaggtcgctcagcgggtttttatggacgtgaaggtttcgcggcaattcctgcgttattccagacggcagcgcaagctgaaggacaggctgaacaaggtattactaatgccagcaacttaatggccgacctgacctccagtaatctggccaataatgccaagcagctgatgctgaaaggcaaggacggtaaaactatcaagggtgtggattttcgtgccctggcgcgtaaggacgcccagaaaggcctgacgccactcgataccgtcaaccgcctgattgaccgagcattggccggcgattccgactatcagaaactgaccaaacgcctggcaacaacgcaagatcccaaagagcgcgacagcattgaagcacagcgtcgtctgaccgaagggcaatatatatctcagctgttccctaaccaatattcaggtagcgcaattcgtgcttaccgtcaaaaccgcccttactttgacaaactgaagcacgagatccaggagcagtttgatttaccggaaggtaagcgttctgcagagttggattatgggctgctcaaagatgaacccaagttacagctacagcgtgcagagaatgaaaagttctatgcaacgagcgatgcgatctctccggtttccaaagtgctgggtgatgttgcagagaccggggccaagctggcccaagagtttcctggattaaccaccgctgcagcaggtgccgcgattgcgataaaggggcttggcctcgcagcagcagctaaaaccggtgccgagcttctgacggggcgcaacggtggtaaacccggcggtgtcctaagcaaactcaaaggactattcggtaagggaggtaatgggatacctgatggtgcagccaccaccgctaaaacgtcgggcctgttgaaatgggtgccattattgggggatctcgcacttgcctatcaaggctcgcaagacttcccattaatcgacattcagcggggcaaagaccaggccgccgaggcccgtgccaggggcggagagacgaacccggacatgatggcgctgatgccccagcccgttggggcgctggatgccctggacgagatccgcaagtggttctccggcagtggccaggataagacggcagataaaaccgctgcagcgccacctgcacccgctgcgccgatcgttaacctgacggtcacgctggatggccgcgagattgccaccacgatggaacaacgactagaccgcgatgggagaagaaaataa

SEQ ID NO: 438947 - DNA, 381 bp, Serratia marcescens
atggactttacccacagcgccagcttgccgatcggcgtcttttatcaggggcagttgcaccgtgattttaccgtgcgggtcagcaccgttggtgacgagatcgccgtcgtggaagacggtatccccgactccggcaccgctgtcggtgttttggcgcgttgcatcactgcgctgggcagcattcctgccgaggacgtcacctatcagctgctgtgcgatacgctggtcgcggaggattacaaagccctgcgcgatgcccagcaagaggcgaaaaaaaagctcagcgggctgaagagcgactcggtgattaccgatacgccatcatccggctcggccaatacggctacagcgaagagcgagtcaaaggacttagcgctgtag

SEQ ID NO: 438948 - DNA, 369 bp, Serratia marcescens
atggcactggaatatacaggctctatcgtgctggaggtcaacagcaccgaagtggaggtgacggagttcagcccccgcgaaaccaccggtaaaaagctggtcaagaccatgaacagcgccggacgcgccaagggctacacgcaagggattgcgacctgggagctgtccatcaccgccgtggtgccggtcgaccagaacatcaactgggcgaagattgccggggcgaaactgacccagtacccgctgaccggcggcaagcgcaccacctatcaggatgtgtttgtgaccgaggtcggcgagcagtacaccgtcgacaacgaagcccgcatcaatatcagcgcctttgcgctcaacaagattgaggagtaa

SEQ ID NO: 438949 - DNA, 1440 bp, Serratia marcescens
atgagcattgatgccactatcccgatcccgacgtacaagccgggcttttacttcgggttcaacaccacgctggcgtcccgcgccctggccaccaacgaccagaagttggttatcctggctcagcgcaccacgctgcccactgcggcggagcggttgacgccggtcaatgtgttcagcgacgaagaggccgccgtctacttcgggcgcggctcccaggcgcaccgcatggccagggccgcaatctatgccaatggctacctgcagctggcgattgtcggtctggaggacgcggctgccggagtggcggcgaccggttccctggcattgtcgggaacggccaccggcacaggccaagcgcggctgtcggtttgcggcgtcaccgtgtcagcctccgtcgccagcggcgacagcgccgaggtggtgatgactgcactggccgatgccatcaatacgcgccaggaattgccggtatcggcaagcgtggaagatattccggcggaaggcggcggcaaagcgaccggcaagcaaattacgctgattgcccgcaacaagggcaccgtgggcaatcaggtcggcttgacggccacggtgaatgctgccgggctgacggcaacgctcaaggccatgagcggcggccagggcgaccccgaactggatgatgccctggcggctattttcagcgccggtcataccctggtgatttcaccgtactccgacacggcctcgctgcgcaccttgtccacgcacctggataaagtctccgggccgctggagcagcgcggcgcggtcggcgtcaccggctggaacggcacgctgtcaacgggcaccacgctgaccaccgccgtcaacgcggcacgcatcacgatgggctggtacaacggctccgcgctgccgaacggcgagctggctgctgtatacgccgccatcatggccagcgagtccgatccggcgcgcccgctcaacacgctggcgctgccggggctggatatcaccggccaggacaagtggccgggacgtaccgagcaggagaatgcgctgagtaacggcctgacgccgttcgaggtcagcggcagtacggtgcaaatcgtgcgagctgtcagcacctacgtcaagaacgcgatgggcgttaccgatcgctcgttgatggatgtcaccatcatccgttccctggactacgtgcgcctggcgtgtcgtacccgcatgacgcagcggttcccgcgtgaaaagctgaccgacacccggctggcgcgtatccgctctgagttgctggacgtgctgtatgcgctggaagccctggagatcgtcgagaacgtggacgcgctgaaagaccagcttatcgttactcgcaacctgcaggacgacacccgcgccgatgccaccattccggcgtccattgttcgcggcctgcatgtgttcgcgggcaccatttatctgctgtaa

SEQ ID NO: 438950 - DNA, 225 bp, Serratia marcescens
atgattaacgtgatcgcccgcgagggcatccgggtgcctaaagaagagatgcccgaccgttacatcaccgacagcgaagcggtcagcgttgagcaatccgcctactaccgccgccgcttgcgcgagggtgatttgctgctggccaccgatgcatcgccaggcgatgcaccggagaccgacgctccagaacaggcacttcccgccaaggcaaagggggttaaatga

SEQ ID NO: 438951 - DNA, 648 bp, Serratia marcescens
atgattagcgagaccgagctggccatgattgaacgcctgcgcgcaggtctggggcagatggtgaaagaagtcagcagctacggcggcgaactggacgacgtcggggccattgtccgggcattaccggcggcatgggtcacttttctgggggtgcaaagttccgccccggtcagtacccataagaaccgttttcgcgtgacgggtcgctttgcggtgatggtcacggcgtacaacgtgcgccaggaagcggctcagcggcgcggtgggcctcggcttgacgaggtgggctgcaaccttatcgtccgttcggtgcgtcgcctgctgacccgccaggacatgggcttgccgattgagccaatgatgccgggccgggtgcgctcgctgttcagctcaaggctcaatgaaaaagcgatgtcggcctatgcctgcgagttcgacacggtctggattgaagaggcgctggagtgcggccactggcctgcaccggaaggcgacgatgaccccgaccgggtgtttgcctggtatcgcgggcggctcgacaagccgtatccgatgcatgaaagcaccgggctggcgtatcacctggatggtcaaggcccggtggtggcgcaagacattatttttacagaggcaaaagaccatgattaa

SEQ ID NO: 438952 - DNA, 435 bp, Serratia marcescens
atgtacgccacccgcgacgacatggtgacccggttcggtgaacgggaagtgatctccctgactgacctcacctatgccggtgcgattgacgatcaggtgctggcgggcgggttatccgccgccagcgacgagatcaacggctacatcgccgggcgctaccgcctgccgctgcccaagttgccgcccattctgaaagggatcgcctgtgacattgctcgttaccgactgaccggcaccgagcgcgtctgcagcgaagagatccgcgaccgttaccgggacgccatccgctacctggaaggcgtggcggcgggtcgcgtcagcctgggcacctttgacgacaccggcgccaccgtgccctccagttctgccggggtgaagttcttttccggtcggcgtacctgggcacggcgctctaccggcggagggggttactga

SEQ ID NO: 438953 - DNA, 909 bp, Serratia marcescens
atgttagttaacgcatcgacggtcaaggccattttcgtcaaccttaaactgacctttaacaaggcgtttgaggcggctccgtcgcaatggcagcgggtggcgaccctggtgccgtccaccggcaaatcaaacgattattcctggctgagcaactttccgaagatgcgcaaatggatcggggataagcaggtcagggcgctggaggccaacggctacaccctgatcaacgacgacttcgaagccacggtggcggtcaagcgcaacgacatcaaggacgatcaactgggtatctatgcacctcaggcgcaggacgccgggttcagcgccaagcagtggccggatgaaatcgtgttcgagctgcttaaccagggctttaccgcgctgtgctacgacaagaagccgtttttcttcgacaagcacgccgtcggcaaggcgttctactccaacaagggtaacaagccgctgtccatcgataccgtggccgctgccagggcgtcgtatggggctgcccgcacccagatgcgcaaggtgaaggatgaagaaggccgctcgctgaacatcctgcctgacctgttggtggtgccgcctgcactggaagacattgccaacgcactgatgacggccgatcgcctggaagacggcaaggccaacccgtacaggggcacggcggaagtgctggttgagccgcgtctgacgtcggacaccgcctggttcctgctggataccaagcgcccgctgaagccgcttatcttccagcagcgtgaagcgccggagttcgtgtcccagaccgacatgaacgcggacgacgtctttatgcgcggtgagttcaagttcggcgcggaagcgcgcggccaggccggtttcggcttctggcagatggccttcggctccaccggcgacgggaaataa

SEQ ID NO: 438954 - DNA, 438 bp, Serratia marcescens
atggcagctactacccaagaccgtaataccccgtaccgcgacggcgaattaacgccgatccccgttgccgccagggagaagatccccgctggcgtcattgtctgcatcaatgaggaaggctacgccatcaacggcaaagaagcccctggcctcatctatgccgggcgttccgatgattcggtggacaacaccgacggcgagaacggcgatcagtacatcctggtgcgcagccataaggcgttctgttgggagaacgacggcagcatcacccaggcgcacctgggcaaacgggcctgcgtgctcgataaccagacggtgacggcggacgacggcagcgccccggcatccggggacgccaaggcagacgccacggcggcgacccgttcccaggcgggcaccatcatcatgatcgacaccgacggtgtctgggtctactaa

SEQ ID NO: 438955 - DNA, 1065 bp, Serratia marcescens
gtgaaatcaccgttacgcctcgccgcgctcagtgttgctatcaaaagtgccgggccgcgtgtgcagcttttccctgcaggtgttttcagcgccagggacggcaggcctcatgatgcgccgcactggtatatcgatgcggcgctggcgcaggtgctgattgatgaagctgcgcagcgtaacacgccgtattgcttcgactacgaacaccagaccctgcacagccaaaacaacggcaaacccaacccggcagcgggctggttttcccgcctggaatgggtggaaggcgaaggcctgtttgctgtcgatgtggaatggacggaggccgcccgcgccatgattgaggcgaaggaatattgctttatttctccgctgttcaattacgacgcccagggcaacgtgaagcgtttaattaacgccgcgctgacgaatacgcctgcgctggatgatatggaggcgctgcttgcagcggcttctcaacaactaacgggagataacaccgtggacgaactgttagaacaactgcgctggatgttgaacctgccgctgtcttcgacggcagacgacatcaaggtcgagctgcaaaagctgattgaccgcctgtcggacaaccagggcactgcagcggccagcgtcaacctgctggagttgctgactcagaaagatgagcgcattgcggcactgtcagcgcagacgacggataacccagacccggccaagttcgtacccgtcagtgtgctgacctcggtacagcaacagctggcggcactgagccagaaagtgaccggcggcgaagtaaacgggcttatccaggccgccctcagcgatggccgcctgctgccggatatgcaggagtgggccgaaacgctgggcaataaagacattgcctcgctgaaggccttcctggacaaggctccgaaggtcgcggcgcttaacgcgatgcagaccggcggcaaatcgccaaccgatgtcctggacaagtctgggctggatgccgacgccctggcggtgtgcagcgtgttcggccatgacccgaaagacgtcgccgcgttatcacaggagatttaa

SEQ ID NO: 438956 - DNA, 483 bp, Serratia marcescens
atggctgaacttatcattgaagtgcctgatacgttgcgacgtgccctggagcgcatggcgcgatcggtggaaaatcgccgaccactgatgcgggcgatcagcgaggatatgctggacgcggtgatggagaacttcgcgcaggaagggcggcccaagtggctccctatccagcgggcgggcaagatactgcagaacacccgccgcctgatgtcttccattgacagcgacgccgacaacaacatggcggtggttggcaccaacgtggtgtatgcgcgtatccataacgaaggcggaacgacacgcccgcatgtgatccgcccgcgctacaagcaggcgctggctttcaacggtcgggtggtcaaaaaggtcaatcaccccggctcggttatcccggagcgccgcttcctgagtctgaccgacgacgaccacaacacgatccatcacaccatccaggactacctggacagcgcgctggacgattag

SEQ ID NO: 438957 - DNA, 1263 bp, Serratia marcescens
atggacgttgatctggggttcgccatgaccctgcagccggagaaggcgatcgcctacttcgagtcgaagggttacaccatcggcttcaactggcacgacgtggaagacgcggcccacgccacggcgttcaccgtatccggtatcctgaaactggatgtcctgaccgatatcagcaccgcccaggccaacgcgctcaaagagggcaagtcccaggcccagttcaagaacgagctggtgcccgaactggcacgcaagggctggatcggcaaggggctgaaagcctccccggacggcgagctggaggggaaaaagctgctgccctaccggttggacaccatcttccgcaccaacatgcagtccagctacatggcgggacgctaccagggcatgatggagaacgtcgccttccgcccttattgggagtacagcgcggtgatggattcgcgtacccgtccgtcccatgcgtcccttaacgggcgggtgtttcgttacgacgatccgttctgggataccttcttcccgccgaacggttataactgccggtgcaccgttcgcgctcgtagcgagcgcgacgtggccaaccacccgatcggcgtcgaatcgacggacgatcgcctggtgaccatccagcaaccctacggcaccgacggcaaaacgcgcccggtcacggcctatcaagaccccaaatctggccgcatctttaccccggatgccgggttccacctcaaccccggcaaagggtacatgcaggaactggggcagcagctgctgcgcaagagcgacacggcaccgccaccgctcgccgcccaggcggtgcaaacggtctttgcctccccgcgtgagctggagacctttgcccgcgacctgtccgaatgggtacgccgcgccgccgccgacccggcactgcgccaggactggcgctatgccggggccttgctgccgtcggtactagatgcgttgcaggttgccccgcaaagcgcggccattaccttaccgggcgcggtggtgcgtgatgccgggagcgtttcgctgtccaatgcctggtggcgtttgcctgcgctgttggcgcatccggatgtggtgctgaagggagccagcggcgacctcgtgtatgtggtgacgcaaagcggcacgccccgcgcggcgcgggtgggattttctgacggtaaacccgtggtaaaagagacctggatgctgtttgacggcgatgaggcggagctgatgcaactgcctgtcctggtgggagagtggcgcgatggctga

SEQ ID NO: 438958 - DNA, 1584 bp, Serratia marcescens
atgcctacattagtcgatattcacggtaatcccctgtcttcaaagacgctcaagcagcagcagtcggagacaacggccagctacctgcggcgccagtgggcggagcacccgtcgctgggcgtcgatatccagcggttgtaccgcatttttcaggaggccgaacagggcaacctgacccgccaggcggactttttcagcgacatggaagaacgcgatggccatctgtttgccgagctgagcaagcgccgccgggcggtgatgccgctcaactggagcatagagccaccgcgtaacgccagcgcgcgcgagaagtcgatggcggcggaggcctccgaatggttccaggacttgccggacttcgaagcgctgctgttcgatatgctcgatgccatcggtcacggtttctcgccggtcgagctggagtgggagcgtgccgaggggatctggttgcccaaagccttccacaagcgcccccagcgctggttccagacgccgcagttccagggtaataccattaccctgattgatggctcccaggacggtgccgcactgcagccgttcggctggatcttgcacaagcaccgcgccaagagcggctggctggccgaaagcggcctgttccgtattctggcctggtcatatctgttcaagaacctgtctgcgcgcgacctggccgagtttctggaaatctatggtctgcccatgcgggtgggtaaatacccgtccggcaccaccgaagatcagaaagacattctgatggacgctatcatgagcctgggccatgacgcgggcggcattatccccgacggcatgttgattgaattccagtctgctgcccagggccaggttgacccgtatcagttcatgatcgagtggtgcgagcgcacccagtcaaaaatcatcctgggggcgacgctgaccgcccaggccgacggcaaaaccagcaccaatgccctgggcaacgtgcataacgaagtgcgtcacgacctgatggccagcgatgcggtacagctggcgggcacgctgacccgcgagctgttgtacccgctgctggtgctcaacggctacggcgatatcacgccgcgccggatgtgccgctttaaatttgatacccgtgaaccggaagacctgacccagacggcgaccgctatcgacagacttgtccgcgccggggtgccggtgacagtggattgggcgctggagaaagccgggatgccgacgccgaaaaaaggccaggcgctgttgcagcctttgacctccagcccgttcggcacggtggggctggggcaagcaaccgcctttacgcggctggctgcattgacggcgaccgacaccccggtggaaaacgaccctgtgcaggtcgctatcgacgatgcgccgccgtcggtggcaagccaggtcggccaggcgatgagcgccatgctgtcaccggcactggcagctctggagggggggcattcgccggatgaggcgatggccatgctggcgacggcctacccgcagctggacgacagcgaactgcgccagctgattgcccaggccatttttgtggcggacgtgtgggggcgactcaatggacgttga

SEQ ID NO: 438959 - DNA, 1641 bp, Serratia marcescens
atggcggctaaattttccatccgagagttccagaaatcgctggcggagttggcttccagcctgcgccgcaccatcgaggcggagtgcatcggcttcgataccggcacagcggcaacggctgagcggcgcaggctcgtcgccgacccgcagaacggctaccgctacttcgtgcaaacctactttccgcactatgtgcgccacgctgaccccagcgagctgcatgtacatctgtttagccgtctgccgcaaatcgtggccagcccgaagggcgagcaggatgccatcgccgccccccgtggtgaggccaagtcgacgctggtcagtcagctgtttgtcttgtggtgcatcatccgcgccatcaaacgctatccggtcattattatggacagtatcgaccaggcgtatccgatgctggaagccatcaaggccgagttggagtttaacccccgcctgctggcagacttccccgaagcgtgcggcgcaggccgcgtgtggcaaatgggcacgatcctgacgcgtaacgacatcaaggtgcaggtcgccggtagcggtaaaaagctgcgcggcttgcgtcacggcccataccgtcccgacctggtggtgctcgacgatatcgagaacgacgaacaggtacgcaaccccgaccagcgcgacaaggtcgagaactggcttaaaaagaccgtgctgccgctgggcggtgccggtgccaagatggacgtcatctatatcggcaccatcctgcattacgattcggtgctgtcgcgcaccttgcgcaacccgctgtggcgtcatgcacggtttaaagccctgcgccagtggcctgccaacatggcgttgtgggacagctgggaggagatcctgcgcaacgacggcgaggatgccgccaacgacttctacaccctgcaccaggtggagatgaacgaaggcgcggtggtctcctggtctgcccgcccgctgctggcgttgatgcttatccgtgcccgtgacggccatggcacctttgactccgaataccagaacgatccggtcagcggtgaaggcgcgatcttcgcccattgcattcatttttgggttaaccgtctcaatgaatggctgttttacggcgtgtgcgaccccagcctgggcaaggccggggcaagtcgcgacccgtcggcgcttctggtgggcggtttcaaccgcgcgaccggcatcctggacgtggtggaagcccaaatccgcaagcggctgccggacaagataatcagcgacatcatcgacctgcacatcgaataccgttgcctcatctggggcatcgagtcggtgcagttccaggagttcctgcgcaccgagctggtcaagcggtcggcggcgctggggtatcccgttcccgcgcgggccatcattccccacgcggataagctgctgcgcatcgagaccctgcaaccccatatggagaacggcttaatccgcctgcattcgacgcagaacacgctgatccagcagttgcgccactttcccaaggctgaccacgacgacggcccggatgccctgcacatgctgtggagcctggcggtcagcagtacgccgtcgtttgagtttcgttccgctaattcatcccgtgcccgccgtgggcgcggcggtttttctaaaggaggctggtga

SEQ ID NO: 438960 - DNA, 219 bp, Serratia marcescens
atgaaacaactgattgatgccgggaacggcgtttatgtcgatcctgctgaggtcagcgccgtaatgacagaactccagggacgtgtgtgcatcctgctgcgcggcatttctcagccgcttctcgtgcgttgtgagtccggtgccacggcggatgctctggcccaggcaatgactgctcgaatcaatgccgtgatggccgaacgtcataacggcgtttaa

SEQ ID NO: 438961 - DNA, 201 bp, Serratia marcescens
atggctaacaaactgattgagctgacggcggagaccaccgtccgagctgacgagataaccaaggtctgggtcagcaacgacggcgacgtcttcgccaggctgcgcgacagcgcaatccacaccgttgatcgccagtacggcgaaaccccgttccaggcgtcagcgcgtatcaaagcccagatagaggcggcgctggcatga

SEQ ID NO: 438962 - DNA, 501 bp, Serratia marcescens
atggcgcatccaaaggaaacccgcgacgccctgcgcagggcgtatatcttcagcagcgtttccctggagctggctgcagcccagtgcggtgtcagctttgccacggcaggacgctggaagaaagacgccaaagagaacggcgacgactgggacgttgtgcgcagcgccaacatgttggcgagcggcgcgccggaggatgtggcgcgatccatcctggccagcctgatgacgcagttccaggccacgctggagaaggtcaacagcgccaacgatatcccggcacaagagcgcgtcacgctgctggcgtcgctgacagacggctacagcaaggccatcgcggccagcaagaagattttgccggagaccagccaactggccacgtcgatggaaaccatgaagctgtttgccaccttcattcaagaacattacccccaacacttgacggcgttcgtcgaggtgctggaagccttcgggccaatattggagaaaaactatggctaa

SEQ ID NO: 438963 - DNA, 228 bp, Serratia marcescens
atggccagaaaacacagcactcgacgtacccgttgtaaccgcattgcgccagagctggcggaactgcgaaaaatcagcacccagctcgacagcatcgagctgcgcctggacaccatgcaaagcgatgccgttaaaggcggagccatcgccggtgcggcggcgggcgcgttcactggcggcatcgtggctgccggtcttgccatgatcaaggctcgattggggttttaa

SEQ ID NO: 438964 - DNA, 243 bp, Serratia marcescens
atgaccattgaaatggcgttcaacattgctatctcactcattgctgctttgggcggcatatggctgcgtagtctgcaggaagaacttaaaaacaacaggtcggaactggcctcgatccgcaacgagtaccaacggcgggaggatgccctgcgcgacaaccagatcatgaccggtctgatgcaggacattaagcgcagcattgaacgtatagacggcaaactcgaccgcaaagccgacaaataa

SEQ ID NO: 438965 - DNA, 618 bp, Serratia marcescens
atggcaatcgtcctgacaacgctggctaagcgcctggctcccggtattgcggggtgtctggtgctgggggccgtcgggtggtttctgcaccaccagggctacaacagcggctacaacctcgccgaactccgctatcaggggaagttaagccgccagcagtccgactgggacatcgagcgccgccagcttgccgagaaaaatcaggccgtgctgcaggccgcgatggccaaacaggcggagctggccgagcaggcgcgcttgttgagcctgagcctggaagctgcgcagcgccaactggccaccacccaacaacagcttaaaaagaggatcaatcatgccgttcaaaccgatggccaacattttactggccttggccctgacagcctgcggctctaccgcgccgtccttggctaccccgacaccggtgctgcaggtgtgccaagcgccaccggcggcaatgctgagcattccaccgatgcccgcaccgccgggggaataagtcccggccccttgcttgaccatgcgaccgaatacggtgcctggtgcctgacgttacgcaacaaactggaagccttaaatgccttttacaccccagggagcgcacccaatgaccattga

SEQ ID NO: 438966 - DNA, 258 bp, Serratia marcescens
atgaccttactgcgcctgctggagcttatcagcaatccgcacgggcggatctcgacgtcggacaccacggtggtgggtgcctttgtcgtcagttccctggtgctgctgtggtgcgccttcacccgccagattaatgacctgttgttcggggcgtatctggcggcctgggtagcacagaaccaggcgtcgaaatttgccgccctgaaacgtgaccgcgaggtgcccaaagatggcaatcgtcctgacaacgctggctaa

SEQ ID NO: 438967 - DNA, 474 bp, Serratia marcescens
atgtctcgctttatcaatctcctgatcgtccattgcgccgctaccgcgaacggcaaagccctgggcaacgccaaagagaacgccgcccaggttatcgaccgttggcacaaagaccggggcttccaccgcgcctcgccgggcaacagcaacggcctgaccagtatcggctaccactacgtgatcgagactgacggcaccctgctgaccgggcgtgacgagtccgaggtcggcgcacacgtcgccggtcacaacgccacctcgatcggcgtgtgcatggtcggcaccgacagcttcacgcccgcccagtgggcgacgctgaaaagcaccatcctgcgcctgcgcgacaaataccgtaacgcggagatctgcggccataaccagttcgccaacaagatttgtcccggcttccatgtgcctgactgggtcgatggcgagtttgcgccactgccgggtcatatcgtcgatccaaagtga

SEQ ID NO: 438968 - DNA, 450 bp, Serratia marcescens
atgcaaaccatccagcccgactatgagcaggtgcaggaattgctgccggaatctgttcaacagattgccagtctgataggctttcccgcaaccagtaagctgatccaacagtttggaggcgtccagtttcggattggcaagggtttgcgcagctccggccagcgccgcattgcgttactgcaggagacgctgacgccggagcaggtcgcgctgctgatgcagcatttcagcggcgaagacctgtatattccccgctgccaggatgcctggcgcgaatggcgcaaccgctgctttttggcggagattgagcagctcaaagccgagggcgagtccctcaccatggcgctgacgctgctgtgtcccaagtacggcatcgccgccacccgcgcctgggagctgttgcgcgccgggcaagccccttccggcggtgagcaaccctccctgttctga

SEQ ID NO: 438969 - DNA, 399 bp, Serratia marcescens
atgaaacgtaacctgatccgcattatccatactggcaaaaatgtccttgcctgggacgacgagacttacagggccgcgctggcgcgagagaccggcaagcacagcgcccgcgactgcagcgacgccgaactggagcgcatgatctgttacatgcgcacccaggggttcaccccgcttgccaggcacggcaaaaagccgaacgtggccgccgggcgcaaggcgatggtcagcaaaatcgaggccatactggctgaagcggatcgtccctggtcatatctcgacggcatcatcaagcggatgctgggcgaagtgaaaccgctggcctggctgaacgatgaccaggtgcgcaaggtgctgcagatgctgattatcgacgccaaacgacacgggaggctctaa

SEQ ID NO: 438970 - DNA, 552 bp, Serratia marcescens
ttgtgtttattgtttttaaaggactttaaaatgaaaaaacaagttttagtctctgcccttgttggtctgacttgcacccttcttagttgctctgctttggctgactgggcaactaaggttgaagatgatgctttcagtgacggccaaaccgctatgatgtttggagctgaaacagaattgaacggcgtggcttttgattgcacaaaaaccgaactaaccctttcgtatgttgaacaagcggacacaaagaaaatcaccgaaggaatccctgtcgacatggtgttcaaagtagatgggaataactccattaaactgaagggacgcaccactgtacgcaataacaactatttcggtattacttcagatgacgccgaggagttaaaaaacttgttggcgcagttgcagaaatcaaaacaaaggattttagtgggaataaaattcccttttaatgaccagaaaatgagctttacgttgagtgcttctggctcgacgtcagcagtcaacaagtttgtgaaggcatgcagtatcaatatatcagctgataaaaaatga

SEQ ID NO: 438971 - DNA, 291 bp, Serratia marcescens
atgggcaaaatgacatttatcgttgattttcctgatgggcaggagccagccattgggtttgcaacgtcaatcctgggcggccagttactctccttcgcctttagcgatctgcgggacgagtgggcatggcgttcggcagctgattccacaccacccgaaggggagtatgtggttgtatctgatggtgaaagttgttctgttgggcgcttcatctacggggagtggctcgccagcggcggtcgctgctttctggaacccgtgaagcactggatgccattgccccaactttag

SEQ ID NO: 438972 - DNA, 483 bp, Serratia marcescens
atgactacatcgacgaatgcgttaccgcaggtcagtgagcgtaagccagtagtcttcatttccggccccatgtcgggaatagagaactttaaccgggacgctttcaaccatgaggccagccaattgcggcatatcggttttaccgtgctgaatccggctattttccccgatggtctggaacaccaccagtacctggcaatgacgctggtgatgctggagcaggcagacgccatttatctactggacggctgggagaatagcgtcggcgctaaagcagaagtgatccgcgccagggagttgaacctgatgttcctggggcaatcctgggaggtgctttgggccgcagctgcgctccgcccagcgacgggccgtccagcaggtggggcttttgatgtcggtggcgttctgcataagccgaccccaccgggtgaatacgactttgggatacaccaaaccgggcaaatgcaagagaggctttactga

SEQ ID NO: 438973 - DNA, 219 bp, Serratia marcescens
atgtatctctgcgtcagcggttgcgaatacctggataacggcgatcggcgcatttaccacctgaccgataacagcaccgtggttgagtgcccgaagttgcctggtaaatcccggttcaagttctacgacggccataaccgcaccatctacaccaaccaagtcagaacggcgatgaaaagtgccgtcgaacgccataaaaagcagtggaggattcaatga

SEQ ID NO: 438974 - DNA, 702 bp, Serratia marcescens
atggacaataaagaaaagtatttgaacaaaattaaaaaactgctgaatctggcacgtaaaagcaccaacgccagcgaggccgccaacgccatgcgccaggctcaaaatctgatgcgtgcgcataagctgacagcgcaggatattgacctgatggaaatcaacgaggccagcagtaaaggggcaccatccaatgcgataaaaataccgggctatatgcggatgcttatcgggattattcgccatgcctttggggttcaaagctatttgtcctggcaaataggcaagcgcacggttgtgttttatgggccggatgaacgtccacaaatagcggcctatgcctttgatgtgctcacacgtcagatgatggcagcacgtaaggaattcagtgccggtcagcgcaaaagtatcaagcgtgccaccaaaactggccgcgcggatgccttttgcgaagcatgggttcacggggcatatcaggttattgaggcatttgccgttaccccggaagaaaagggattgatggaggcgtattaccgaaaaatcagcggtgattttgtcacggttccgtatcgaccggcgaaaaaagtgcgcggggatgaaggtgcacgcggtgctgggttcattgcgggcaccagcgccacgctaaaccacggcgtgggtggtacttcggacgtaaacaacaagccactgcggatagggaggtaa

SEQ ID NO: 438975 - DNA, 192 bp, Serratia marcescens
atgcaagccaagcagtttaacgcctgttaccctgtggggaaatcgtttatttaccaaccctgcaaggcattgcgcggtggttcgattgttaaaacggtagatattgcaagggatttaaaaactgccaccgttgtggaaataaatcttgagccttatttcgttaacacaaagtcattaacgcctacgggttaa

SEQ ID NO: 438976 - DNA, 630 bp, Serratia marcescens
atgtccactaacaacaaagaaaacagcatcccagcgggttactggaaagacgcgcgcggcgcattaatccctgagtcgatgattaagcctatcgacaaagagcgtgatgccttggtgaaagccctggtagcgcgcgccaagcctttacagcagagcttgcgcgactttaaacatgatgcttttgctgatatccaggcactggtcgacctttcagctgaacaatatggggctgttattggcggcaaaaaaggcaacgcgacgctttatagctttgatggtaaatacaaggttcaacgggctatgcaagaccgcatcgcctttgatgaacgcatccaggcggccaaagcgctatttgatgaatgcctggcggactggacacaagatgcaccgccagagctgttggccatcattgaccgagcatttgccacggacaaagaaggcgagatcaatgcaggccgcttactggcgctacgtcgccatggcatcaaagaccctcgctggctcaaagcgatggacgcgctttcggaagctttacaagtcattggtagtaaaagctatatccgtatttatgagcgcgttggcgatactgaccagtatgtgcccatctctttggatattgccggggtctaa

SEQ ID NO: 438977 - DNA, 219 bp, Serratia marcescens
atggctgttattttaaaagtaactattcagcaaaatgaaactggcgtaagcacaaatatttgcgccgaggggccatgtacaccaggagagtcggaacaggctaaatatatttatcacactattgtcgaggcgttacaaaagcgccccggctatcggaacaccggaaaagatgtatgcaccgttaccaatatcaaaaaggggaatgacaatgtccactaa

SEQ ID NO: 438978 - DNA, 291 bp, Serratia marcescens
atgcaagccagtgactttgatagtaacgcgaatgcgtcattaatctctgcaatggtacgagctgaatccgtcattctgtctttatcggctcgcggtattacggtgcagagcattatgtttcacggtggcaatccggttattcgtattaaccgtcatgcgtactgtgaacaactgacccgctcaggcaaagccagttacctgcattttggtaacggtcgccagggcgagtttaaacaaggcgttttcgtccaagacggatgccgggttatctggtctgaatcactacattaa

SEQ ID NO: 438979 - DNA, 924 bp, Serratia marcescens
atgaatgtaatagagaaattaaatcgcctgatggcgaggaagcgctacacccaaagcaaggtagctgcaaataccggattgagtgccgcgaccatttcccagtatttaaagggaacctacaccggcaatattgataacgtcgaagccgctatcaataactttatcacccgcgaagaagataaagagaaaagccgcgaggtaaaagcgaactttgtcaaaacgcagttagccagcaaatgcctgacgttgctgcgcaatacgcaccttgatgccgatatcggtgtgatctacggcagcgctggtttgggtaaaagcatggtgctgcgtcagtacgccaacagttacaaagacgtgatcttgattgaggctgaccccggttataccaccaaggtgctgctgcaggagctgtgtgaacgcctgggcgtcaataaacgcgggaatatccacgaactcagcgagaactgtatcaccgcgctgcatgataccggctgggtggtgctcattgacgaggccgagctgttgccttatcgcgctctggaagcgatgcgccgtattcatgaccgctctggtgccggtgtcgttctggccgggatgccgcgcctgcttcttaacctcaagggccgccgtggcgaatatgcccaactctacagccgtgtgggcatggcgctcgatctggacaaggagaaagcgaagcatgagcgcgccgatttcgaccgtattttggcgagcttattacccgccgatgatgatgaaagcaatatcgatacgcatccaggcttagccgacgccttctataaagcgtcaaaaggcaactaccgccgcttatttaaattggcgcgcggcgtggtacgggccagcggcataggcgatcaaggcatatccgtcgcgctggttgaggaatattccagcatgttaattaattga

SEQ ID NO: 438980 - DNA, 2055 bp, Serratia marcescens
atggattgttgggtaacagtgaaagagtgcgcggggcttccaggtcttcctggtcgtgaacaaaatatccgcgctcgtttggtcaaggcttcgggtggtaatcctgaactgcagcgcaagcgcgaaggcagcaaagcttttgaatttcatattgcttgcctgcctcatgatgcgcaggaagccctccgccagcgtcactttaaatcggtgctggagcagcccggctgtaagtctgtcggcctgccggtcaagcgtaattcagcggttaaaccgcgtgaagaactggagatcatgcgccagtgccccgcactggtggagcgcgaggtggccatgctgaccgacgaccagaagaaagtcgccgatgcccgtgccctgctggcgcaggaagtggagaaactgcgcgccgccggtatgtccagaattgcggcggtgacattcatcgccgacggttcacgccagggaacgctgcccgcgcgggtcatggtggcggctggattggccaacgcccgcaaaggctcaagccgtgttggcgtcagcaaaagctgcctgcaggagtggctgaccatttatctgaccaccaagccaggcctggagcggttggcgttactggcacccggtcagcctaaacgcaaacgcccggaagacgtggtctggttctatggcatgttctggccgcactacagcaaccagaacggccccagcgtcaaagaggcttaccgttcgttcaagcgcgaatggttcgagacgtacagcgaccagcccgccatgttgatggcgctgccatcgtatgacgcggtgatccgtttggtggataagctgccattacgggagcgtatgcgcgggcgagtgacgggttcggcggcaaaagcctttgaagtttatcagcagcgtgactggtcacaaatgccggttaacggttgctggatctcggatggtaagtcgctgaatctgaaggtggcgcatcctattcatggcagaccgttcacgccggagctgacgttggttattgatggtcggacacgttatatcgtcggctggagcgtttccctggcggagaatgccatcgcggtggccgatgcctaccggcacgccatgaagcaccacggcaagccgctgtttgtgtattcagataacggcggcggggaaaccaacaagatgctcgatgcggacattaccggtatttttccgcgcttgcacatcgagcatatgaccggtatccccggcaatccgcaggcgcgcggtatcatcgaacggctgaacggcgtaatgcctgaccgactggccaagcgtttcctgacctacaacggtatcggggctgaccctaacgccgtcaggattcgcgggcaacagatgctgagtctgtctaacgccttgcgggatggacgcgaactgaccgcgcagaacaaaaagacgttgaaaatactgccaacctggcggcaattgattgacgccgttcaggaggagatcgacgaatacaacaatagccacgagcacagcgaattaccgaaggttaacgggaaatggatgtcgccagcagcttaccgccagtgggtactggagcaggaaggtgacgacatcgaatacatgacggatggcgaattgcgcgaaatgtttatgccggaagttattcgtgttgcgcagcgtggctggatagcgctggagaataaccaatatttctcgaaagaactaataaacgttgatcggcaggaagtccgggtggcctttgatattcatgatccgaatgaagtcattatccgccaaatggatggcacctatgtttgtaccgccatctggaacggtaacaccgcctcgccggtgccggtggccaaagtccagaaagccctggaagagcgcgccaaacgtaagattaaactggcagagaccaaaattcaggatgcggaggatgaactccgccccgctctggagcataaggccgacactgatttcagcaagttcattccggcagaatcagagccggagcgcataagcagcaaaccctacttattcgaatccgaatatgaagatgatttaaaaaagtacggtaatcaccgttaa

SEQ ID NO: 438981 - DNA, 288 bp, Serratia marcescens
atgcaggtggccaatcaagaattgccagcgtccctgattcgcttttatgtcgagtcttcaggtaacagagacgcgccgggagcgttgattcgtgcgtgtatggagcttgcaggcacgaattataaaaaacttgccgaacatcatgatgtttcagccgataccctgcgcaatgcgctttatcgccgggcaccaaagcaggaaggcattatcgcgggtgctttagggctgactccagaggacatttggccgaaccgttggccaggcaagtcgaagtcagagcaggtgtaa

SEQ ID NO: 438982 - DNA, 600 bp, Serratia marcescens
atgaattcaattagttacgaagaaaagtccgacgaggtagaaaaaaaccggaaacggatttttaccgagtcgggaataatccaattccctgagcgactcaaactggcaatggagagggctggcgggcttagtaacatacagcttgcgaaacgtgctgagatgtcggaatcggtggttagaaaatacttgaaaggagatacgtaccctacattagatcgcgtagcattgctcgcagatgcctgtaagtgcagtgttgaatggcttgttacgggcgagaatgatagcagtcatgaaaaaacgagtatcgcacaaacggacgcattgcaagggctggatagtgcaggtgagtttattgccgttatatcgcggatgagtgaagatgatagagagagactgctgagcattatatatacaaatggcgtcgcttcattgcttaaattgggggatgagcaaaacgtcaaactcttgcaactacctgattctgttaagtccggggtattaaaactcgctagcgcaccagatactgccatcagagagagtttatcgtcactggctgaaaatgcccacacagcaagtgtagcaaataaaaaagccgtttga

SEQ ID NO: 438983 - DNA, 393 bp, Serratia marcescens
atgggccaccgcagcatgtccgccctgaccctgcggcagaaacatatccgtcagcgcgatctgcgccagcatcttgactacctctttcgctcctgcagcggcaagctggccgctcagtccgtcctgttccggctcacctacgcctctgaaaccctgaaagaccagggctgggacaattatctgctggacgcgaaagagtggaagtccggcgtcgtgccggtaccgtcacagcataacggattctacgtcgtaaaagcggcgctgaataccgcttttgcccaggacggtcccatatccgcccccggtgccgcgccactcacaatcaggacgttatccacaaatttgggggataacctgtgcgcatcgtcggtaaaaatattcacctcaaaatga

SEQ ID NO: 438984 - DNA, 1092 bp, Serratia marcescens
ttgaatagccaatttgcgaatgttgagcaccacatcaatgaatcccgtagctcccggcggggcgaagctaatgcgcttcggcgcgggcaacaaaaaattcatcgtcgctatacgcccaatctgtgctgtcgtgtgccgaaaggcatggctagcaaggtggtggcgcgcatgagcagtcacgactggcggcgtaatgatgacctgatcggtctgcgccggcagggctatatcccctatacccaacgcaataacccggactaccgtcccaaaccgatgcgcattgccgcgcggtcggagagccgtgaagcgctgacggtgctctcgatggtgctgggcgccaactgcgactacaacccggacagcgactacccgtttgagatcatgctgccgttcgaggacgtggccaaagcgatgggggtgctgcacgtatacgaaagcggccgcaaggcgtatgacgtggcgctgcatgcgctgtcggtgctcgagcagctggactacctcatcgtgtcgcgcgggcaggatactgacaccggtcagaacaagccactgcgcatctggctgacggagaaattcttcaccagtcgaggtatccatgttcacgaaattcgcctgtggctggatcagtaccgtctgtgggctatcaagaacgggctgacggaaagcctgcgcaagaaatacgaacgtcacctggtgcgcattacgcatctggggatcgacatcgaacgcaagcactcgctaaaaaaccgcctgaagcaaatcaagcgttgggtggtgagtcccgatctgcagaatctcaagaaagatgccgaaaccgttatcgaggacgaactggccaagcgccagcagaacgaacatcgcctcgacaccctgctggacgataccgccgacaatattaaacggctggccagcgccaagcgtcgccagcagaatggcttctaccaggcctgggtgcagtggacgatgggccgctcgccgctgaaggcgatggagctggagaatacgctcaaacgtgaacagcccggactgctgaacagcgatccggaggcgttctaccggctgctgctggagcgcgccggcgtcatctcagcctaa

SEQ ID NO: 438985 - DNA, 612 bp, Serratia marcescens
atgctggaaactattatcggctttttgaccgtgggggtgagcgtatttgtggcggtgtccttcctgccggccatccagccgcagaacgcggcgctgttacgctgggtacgcggcagtaacgtgaccgtaacagtggatgagctgcgacagggcgaccagtacgaccgcgccgcgcgtgatgtcgtttaccgctttgccagccaccatcacgtcaacgacaaggaagagcgtgcactgcttgacctggtgaaacaccccgggctgttgccggtgacggccctgctgcacccgacgctggtcagactgagttcgcaaatgacgttgtcggccccagggcgccaccagacgcagcgggtgtttgagcgcagtggccacctcaatgcgctgatggcctgcctcacggtgattgcggtgatttttccgccgtcggtgggaattgccctggtgcgcagcagctactggctttttccgctgctcaacgtgctggcatttatcaaatgctgggcgctggtgcgggccgtgatagccgatatcggcgtgctcaacctggtgatgccacagcgtgatgaaccaggtcgaggcgctgacgcccgccggttgtccgatgactga

SEQ ID NO: 438986 - DNA, 270 bp, Serratia marcescens
atggagtgcgtaacggcccggcgagccgatggccggcggtgccgactgcggctgccggccggctttgatgtgcgcgtgcgccggcgcgcggaagttgcctggcgcgactgggtggcgggacttcgcaaggcggtgcggttaaagccgcggcgggagctgctcaagctggatgtaggtcagggctggcggctgctgagcgatgacgagggaagttgctggacgctgctgtcgcatgcgcaatacacgcagcgcctgcagcgcaggccgtga

SEQ ID NO: 438987 - DNA, 783 bp, Serratia marcescens
atgcgaacgatcaccttactggccgccagtcggcttgattttacctcactgcagcaggacggcatcaagctgctggcgctgctgctgatgatgggagaccacgccaacgcggcgctgcacctcaatatcgatgccctgatgtggctggggcgtggcgccttcccgctgtttgcgctggtatgggggtataacctggcacagcggcccgtcactcagcgacaggccacgaggctgtggctgtgggcgctggttacccagccggtctactggcaggcggtggcgccggacggcggcgtgctggatgacatgaatatcctgtttctgtttgccgtgatgacgcagtatctgtgcctgttcgagcggttccatgcaaaaggcggcctcgggtggatggctctgggtggtgccttgctggcaatctgggtcaaccacttcgccgccggaacctttggctgggccggggtgtttgtgatggcggcaagctaccagtgttatgccccggcggacgaagctcgccggcaggggtggctcaccgagtatcgcccggtcgttgtcctgacctggtgtgcgtgtgtcttgctgctgaacctgggtggcggcactattccgatggtagccgggttgctggtgtcggcgattgtgctgctggtctccatcgcactgcggccgctcggcaccctgcgcgaaagacggctgctgccgcgccagttctttcctgtggcctacgttgcccatttggcgctgctctgggcgttatcggcgggagtgtcatggagtgcgtaa

SEQ ID NO: 438988 - DNA, 576 bp, Serratia marcescens
gtgtacctgcagatcaagaacacctctgacaaggacatgagcgcgctgcaggcgaaaatcgccgatgccgtcaaggccaagggctatgttgtggtcagcaaccccgcctcggcctactactgggtacaggcgaacgtactcaaggcggacaagatggatctgcgcgaggcgcagggcttcctgagtcagggctatgagggcggcgtggccggcgcggcgctcggcgcggggatcaccgcctacaactccaattccgccggtgccaccctgggtgtcggtctggccgccggcctgctcggtgctgccgccgacgccctggttgaagacaccaactacaccatggtgaccgatgtgcaaatcgccgagcgcaccaccgccagcgtgcgcaccgacagcgtcgcggcactgcgtcagggcacatccggcgccaaggtacagaccagcacgcagcagggtaaccagcataagtaccagacccgggtggtgtccaacgccaacaaggtcaatcttaagttcgaggaagctaaaccggtgctcgaagaccagttggccaagtcgattgccaatatcttgtaa

SEQ ID NO: 438989 - DNA, 126 bp, Serratia marcescens
atgaaatctactcaaaaaataatgatggtagctctggtcagcagtacgctggctctttctgggtgcggcgccatgagcaccgccatcaaaaagcgtaacctcgaggtcaagactcagatgagctag

SEQ ID NO: 438990 - DNA, 579 bp, Serratia marcescens
atgaaacaaagtgaggttcgtgaagaagtcgcgatgatcgtcaaggcgatcaaggaaagtgatgttgaggtgccatctttttcagaaggcatgcgcccgtctcttatttatttttgccttgttcatttgataatgcttgttggaatgattcctatggtgctttttgagaggcgcatagacagtaatttttactgcagtatgtatttcttctcggttttatttaatttggggtttggttcgcttatctattcgtatcatatgcagtacttgatgatcccggaagaaacaaggagaaaatctcgtctgttggccatgttaagagaaaaagtctctcactatgcttatttccattttggcatattgctaaccgtatcagcctattgcttaccggatggaatggcttcattacttccattagtacaaataccgttattttttataaccgtgtttgttctcctctttgatctggggcgattcaacctccccagcctggcagggttagtcgatgcagcgaaggacgagttaaaaaacaaagagttgcaagagtttctcaatggtgtaaacaaggaagaacgatga

SEQ ID NO: 438991 - DNA, 2877 bp, Serratia marcescens
atggatatctgggtgacgggcaacggcagcatcatcaccatgggcctgaactttgtggcgacgatggtcaataccgccggctggcgcagcatcctgtggctggccgagacgctgggcgtgctgacctgcctgattgcctttgtgcgcacgcatgatgcgaaagtgatgtttggctgggggctgacgttcgtcattgtcacctctgccttgctctcgccgcgcaccacggtagtggtcaacgaccttaaccggccgcaggagacagggcgggtcgacaacgtcccgatggggctggcggtgcctatgtggctgttgacgacaacctccatcaccctgtcgaccgggtttgaggatatcctgcacctgccggcagagcgggcctactcgcaaaccggcatgatgttcggcacgcgcctgatgcaggaatcgttcgtcgtcagactcaagaatgaggtgctggcggagaacttcaacgaatacgtgaagaactgcatcatccccgatgtgcagctcaatcacaaatacacggtcagccagctgatgcagtccagggacatcgatgccctgatattcaaaaagcccagcccgctgcgcggcatcatgttcaacaccggcacggacacggtttacaaatcgtgcatcgaggtcacccctaccatccgcagtcagatagcggcggaaagcggacaaaacggcggcagcttcctgcgactggtgcgacgcatgctgccggggctgcgcaacaataccacggtactgccgcagtacctggaagggtcatacaactacttctttgaggcaggcaagtcgtcgagcgacatcctcaagcaaaacgtgatgattgccggcatcaagcgcggccttaacagctacagtcgctcgatgggtgacatggggtcgctggtcgacatgaactcggaaatgtcgctgatgaagctcaaactcacccaccacagcggctaccagatggcaagccaggtgatgccgctgctgcatacggtattcatggtgatgttcgtttgcctgttcccgttgatgttgctgttgctgtttgtgcgcgagatgacctggccggtggtgaaaagctacctcgggtggttcgccagcctgatgatgtggccactgatgttctccatcctgaacttcatcgtcaacttcaccagtgcctatatgctcaagggcgccggcccgacgctgtccaacgagaaccaggtgatgtctgatgccaccaccctggcgggcgttgccggctggctgacgctgacggtgccgttcctctctaactacctgttcacccgcatcgggcagggggtggccagcgccggttcgtacgtgggcaacgcgctgatgagcgccacggcgggcgatgccgggaatgtggcgagcggcaactacagcatcaataaccagtcggtcgacaacgtcaacggcttcaagaccgacctgaaccgcgtctggcgcagcggtcagaccactacgcagctgggcaacggcgccaccgaaacccgtactgcagatggccagcatgtgtatcagaccggggaggcgatgtcgaaactgccggtcgacatcaacttcgaccaccatcgcgcctcggccgcccaaaagctgacgcgggagagcgaggtgcagacccagacggcgctggaaggctacaatcactcggttactgaaaccggcggcaagctgcgccagttccacgaccagttcggcaacagcgacagcaccacgctggcggcgcagaccggcatgtcgaccgtcgatgcgcagcgcatgaacaaggcgattgcggtcgtagaggcgcacgcgaagcgcaatcatatctccttcgatcagggcttcaccgaacttgaaaccaaggccaggtctctcaacgtaaatgcgggggccaaagcggcgtttgtcgttgatagcgaaaaagcggcgcttgggaaagtagcgtcactagcgtttggagggtccgtcaggggagatcttcatgctggtattgaaggcaccggcagttcaggtagctcggcccaaacctcgcagggtgggcgcaacaccacggatgcaggtcacgatatctccgccagtgatgccaagaccttcagtgaggggctggacgtgatgcgcaattacagcgtcaactacatcggccagcgggtcgacaatgctgcagccggcctgatgcaacaaatctctgccggactgacaaccagcgacagccactaccagcagttcaccgacagccagacccgcacgcacgagttccagcagatggcatcgaacacagatacgctcagcgcgcaggcacgaagcaactacacgcaggagtttgtggggtatgtgcacggcaagctgtctgatgatgaggcgcgcgaggtgctgaccaacaccaacagcgaggcggtgcgcatgcgccgggaagacctggcggaggcgttcgtcgaggacaaactgcgcggacgactggacacgcactatgaccgggcggccagccatgtcggcgacggtatccacgcgcctggtaacgcggcgaaagcgcaaggcggggcatacggtgcggcaatgggagatattgatgccagggttgccgatgcgcacatcaaaaaggacgtgaaggtgcaggtcggtaatatgatggaaaacaccacgcaacgcatgaatgataatgaagatctggttaattatgataaaggcgatgtggaaaaaggtctgaataataataaaacaaactttaaccaacagaataaagattatactataaagcatcaggcggcggaattacatcaggcgaagtttactgatccccgtgatgataaaaatgctgattatttggagcaagcgaaagaactgctgaataaacaaaaaggcggtaaagatgaaacaaagtga

SEQ ID NO: 438992 - DNA, 570 bp, Serratia marcescens
gtgaactggacgacgtccttgtctccctctggtgcccttattggtgcagctttttttcttttcgtgctttttatctttctgttggcattcatcaagaaagcagacggaaaaggtgccaagacagcgcctggcaaagtgatatctgcccggctgcaggcgcagggcgatgcctggcagcgcaagccattcatgacggacagtgagcgacagtttctccgcgcgcttgaggtgcatgctttgccgccgggtttgcgggtatgtccgcaggttcgcctctgcgacatcgtcaccgtttcggcgcggtacaagcccgggagccgggagtataacgccctgtttcgtcagatatcgcagtggcactgtgacttcgtgttggtgcgtcatgacgattttaccgtgctggccgttatcgaacttgacgacctttcgcaccatcgtccggaccggcgccggcgtgatgccatctttgatgatgttttgaagacggctggcattccctgttggcgcgtgtgtcgtccgaacgagtttcttgccactgccccagcgtggctgcaggagctgggcgtatga

SEQ ID NO: 438993 - DNA, 345 bp, Serratia marcescens
atgagaaaactcacatttgtattgataacgctgctgtcagtcatggtgtacgcagaaaaatacggcgtggccgccatcaaagcagtctcgtccgagtctacgttgttcgcgtatggcatggcgtcacaggctgtttccgcggggagtccggcgtctcagcttgtgctggtgctgattgccgtcgctttgattgccgcgttgctggtcgcgagcctggtgaccgctgccgccgtgtttgcagcctatgacctgatcgccgctctgacggcggcggcgatggcaggtgcacacgaggtgtggaaattggccttgccgaagctgtccgggcggggaggtgataagtga

SEQ ID NO: 438994 - DNA, 351 bp, Serratia marcescens
atgacaaaacgacatattaccgccgcagaggttgagcgagatgcgcaggggtactggacgcacccggcgatgcgcgcggttgatctggaaaccgccgctgacttctcgggctggttgcgcgagcaggatctggaagcgtgggtcatgctgatgcgcgatgaagaccccgtgctgttcctggctggctttgatgacgaggattgggatgcatgcggctggatgccgcgaccgccggccggtgatggctggttcctgggctcgctgcacgatcaagacgatggccccgtgtgtatctggctgcgtccgacggcgtcccgatggcgtgatgggattgagcgggttgatctgtaa

SEQ ID NO: 438995 - DNA, 834 bp, Serratia marcescens
atgaagatcaagacgactgcacaggctgtcgtggtcagcgtcgctgcagcgctgtattcgcagttgccggcatacgcttcgccaggcgcggtaacctttaccccggagcagcaagcggcgattggccagattgccgcggactacctgcgtgaccatcccgatctgctggtcgagatgagcgagaagctgcagcagcgcgaaaacgccgccgaacagcaccaggcgttggatgcggtgctggcaaacaaacacatgctgcttaacggcgatgcagcgccgaccgtgcgccctgacggcgacgtcaccctgatccagtttttcgactatcagtgcatctggtgttcgcgcatggcgccggtggtggaagcggtgatggacaaggacgccgcgttgcgtgtggccttccgggaatatccgatttttggtgaacgctggccgctttcgcgtgaggcagcgcagcagggcctcgcaatctggcgcgagaaaggggctgatgcctacgggcgctaccacgccgccctgttcaaaacaggccatgcggaaggccagttgacgcaaaaggacatcaatctggcgcgtgaggctgcaggtggagcagccatcgttagcgagacggcgtcaaagcagaagaatgcggcgacggtcgatttggccagcaacattgcactggcttcgcagttgggtatcagcggcacgccggcgtttatcgtcatgccaacggaaaatgccaacgccgataacacgtcggtgatgtacggcgcggtggacgcgcccacgctgcaggcggccattgcaaaagcgcgcggcaagaccgcgggcaaggcggacaaatga

SEQ ID NO: 438996 - DNA, 2610 bp, Serratia marcescens
atgaagttcgacctttccggattgaagttcaacccgcttaatattatcgacgatgtcgccagcattctcggcgacaaggagaccgtgcggcagacccaaaggatgctggacgatatggattatccccatattcgtgacctgctgccgttcgccgactacatgagcgaagaaaagctttttatcaacaaagattccgtcgggttcgttctggagtcgcaaccccttatcggcggcaacgaacaggtggtcaacagcctggaagccctgctgcaggagtccgtaccgcgcggcacgcccctgcaggtgctgatggtcagcagtggggcgctgcaggagcagattgactatggcctcaaggactttggctggacgggctaccgcgcggacgagtgcaacgacatcaaccggcgtttcgcgctgcatggcgcccgccacggtttccccaatgggctcggacatccgctgacgctgcgcgactatcggttgtttttcacctgggcgcacaaaacacgccgcgtgacagaaaccgatctcattcatgtgcgcgacgtccggcgggccatcagcaatgcgcttaccgccgcggatatttttacccgccacgccagtgcggatgacatcatcggcgtcatacgcgaactctgtaaccatgacgtgtcgcgcctggcgagctatgaaaagctctacgacccacagtctgacctgacggcgcagatggtcgataacagcacctcgtggctggtgaaacccggctatatccggatatcgggcagtgatgcaaaggcacgggacttctccagccgcatggtcagcatgaacctcgaccgcaatccgcatgagcactacctgtggcagaacggcaacatcatcgccgacctggcatcaccgaccagcagcatcgcgtgtccgttcctgttcagcatggtgctggtcaccgacgagcaaatgaaaagccagggggaagccaagaaccgtttccttgggctggattcgcgcgtcaacacgccctacgccaagtttatccccggcacggtgcgccagcatgctgaatggaaggggctggtgaccgagctggacgcggggcgcacggcgctgacgcgatacttttacgggctgaccttcttttgtgaagatgatgacgaggccatgtcccgctatgtggaaaacacaaagaaagcctttgcccgccaggcgatcaagatggtgcgcgccgattacatgcaggtgcgcaacctgctggcgatgttgccgttcaccatggccgacccgaaattgtggcgcgatctcaaccgtaccggtgccacccagcgcgcggagagcttccatgcggccaacctgatgccggttatcggcgacaacaagctgtccagcgccggcattttactgccgagctaccgcaaccaggtcgccttccttgacgtgtttgatgaagacctgccgaacaccaacttcaactggtttctctccggcacctccggagccggtaaatcagtattcgcccaggcgctggcgcgtcaggttattgaccgcgagggctatgtctccattaccgatatcggcgactcgtacaaggcgttctgcagcagtatcggcggcgcctatatcaacggtgaaaacctgcggttcaatccgttcgccaacgtgaccgatatcaaactggcggcggaacgcatacgcgaccagctgtgtattctggccagcccgcgcggcttgcttgatgaggtacacgaatccctgatgatggaagccatcaccgaacagtggccgacctatgagcagggcatgcgcatcgaccatgtagtggactacctcaaaaagcgccagggggacgtggcactgaaaagtggtgcgcagatcgccgggcgtatcgatgagatggtgacgctgctcaacaaatacaccaccaaaggcatttacggcaaattcttcaacagcgacgaacccacgctgaagatggacatgcgctttgtggtcaccgaacttggcgatctgcgcaaccgcggcgatctgctgtcggcggtgttgttcacgctgatgatctggtcagagaacctgatgtacagcacgccgcgcgacctgcgcaagatgaacatcattgatgagggctggaagctgctgggcggctccagcgacaaaatccgtcagttcatcgaggaagggtatcgcaccgcacgccgtcatggcggctcctgcggtacggtgacgcagtccattcgcgataaaaacctcagcaccgcctcgctggcagcctacgaaaacagctcgttcaaattcaccgccatgcaggagttccagtcgttcagcatgttcgagaaagaagaaccgaacgccttctctgaacaagaatgggagctggtgaagaagttcccggcggccaagctggccaaatacagcgcgctgctggtcaaaataggtggctccagcagcttccatcgcctgctgctcgatccgctgagcgacaagctgttctcgtccaaggggcaggatttcacctaccgcgaaaagcggctggcagagggcgcggatatcaaggacatcctgttcgagatggtcgagcgggatacggaaaagcggcgtgagctggaggcgctgctggcgatgccgttatga

SEQ ID NO: 438997 - DNA, 507 bp, Serratia marcescens
atgcgtaagtctctggtgtttcttcccttgctcctgaccggctgcgccggcatgaattccgagttcgagttcgacaagccggcgcgggataccggcgtctggatgtctcaggctgacgaaatgacctctgcatccgctggcaagcccggtaacgtcggtggcaagggcctcaacctcggcggctatcggctgatagataccgggcatgtgcggctggatgttcagccggcactggcagggggcgttgccgcgcctgcgcgcgcaggcgcgggttcatcggtgtttacgtcaacgtcgcaggcccgttccggtgtggctgttcccgccgccaccggcgtctcatgcaacagcccgcgctgctatcccgaacccgtgtcggcgtttcgccggcccgatggcgtggcccgcatctggatagccccctacgtttcccccgatgacaacgtccatatgggcgaggtcgtttataccgtcgccaagcctgccaactggcacggcgtgttgtga

SEQ ID NO: 438998 - DNA, 435 bp, Serratia marcescens
atgaatattctcggtattacaaccagtcccaaatctcgcctgctgtttgcgagcgactggacgcatcatcgtggcgctctggcgctgcgcattattgagcaggtatcgctggcgatattgatcacttttctaatcgtcatggcgctgatgggcgtgttaatggtcgctcaaccggttctccatggtgccgatacgctctttgctgaccacttgcctcctgaagcgctggcgtcagggtttcgaaccttcaccctggcggcgttgtgctttggcatttactgcctgatggtgaagttctcccacgactattacttcgccgccgaacttggctacgacagcgtgttcgactacgaccttagccgcaaacccactgcgcgtcttcgcgtattgcgcgcacgtcagcaggcggcgcaggagggccggaacgatgcgtaa

SEQ ID NO: 438999 - DNA, 165 bp, Serratia marcescens
atgagcgccgtgccggcgtccagcgaaatagtgcgtaaggtgcagaccgtttccaactcagaaacacagtcaattttgcaggagcaactggacgtcatgcgtgagcagctgggcagagaccaaggtcatgctgagccggctgcaggtgatgtccgcaacctgtga

SEQ ID NO: 439000 - DNA, 183 bp, Serratia marcescens
atgcgttcaccgatgaatattgcaaccggtatcttcacggccgtcattgttgcggtctgtctggtctgggttggctataccgctggcgtaagcaaagcagcaaatgacgctgccaaggctacgcaacaaacggaaaccctactgaatgagcgccgtgccggcgtccagcgaaatagtgcgtaa

SEQ ID NO: 439001 - DNA, 1344 bp, Serratia marcescens
atgaacattaaccgttgggtcaagggaaagcagcagaaactgtttaccctcatcatcgccggcgtcgtcgttttcgttgcgctgctctggtatctcaacaaatcaaccgggggcggcgcagctggcgccgatgatgttaccgatggtgaagcgtccgccgaacccgacctgaccggtcaggtggtgaacacgtttgaaggcgcacagggtggcgtgcttttggactcgcagcagcgagaaagggaagccaacaaggccgtcgccgacctcaaagacatggtggctgacttcaacaaaaaactcagtgacgtcaacagcgagaatgccgagctgaaaggccgtatcgacgacatgcttacgcagatgcaggcgctcaagtcgaaagaacaaaccaccgcgccggcggcagcggccgggcagggccagcctgctgcccagtaccgtcttcagcccccgcccgttgcgcgcggacagctcgataacttcacttttgattacagcaaggtcgacgcggcaaaaaagcccaggcccgatagtttctatgtgccgtcaggcaccttctccaacgccatcattctcgaaggcgccgacgtcaacgcgtccgtttccggggaagatcaccttaagccgatgcagttcaagctgaccggcatggcgcacctgcccaacaacaagcgcctgggcaagctcgacaactgctttgtgaccgccggcgctttcggtgacgtctccagtgaacgtgcagaggtgcgtgtcaaatcgctctcctgcgtggtcggtgacaagcatatcgatatggaggtgaaggggcacgcagtgttctacggcaaggctggcatcaagggagtgcccgtgatgcgcaacggcaaaatcctcggcttggcctttggggccggcgcattgtcaggcattggccagagcgttcagcaggtggggcaaaccgttgccggcgtgggggcaacctcaaccatatccggcggcgacgtggctcgcgccggtctggggggcggcgccagtacggcggccaccaagctggccgactactacatccagcgtgccgagcagtaccacccgattatcccgattggcgccgccaaccgcgtggaaatcgtgtttaccgaaggtttcagggcgtcgtttatcgaagacctggaagcgagcgaacaggcggcgcaaaaaggcgcggcaacccacactgcagatacgaccaccgctgcgcaggggaacagcgacttgccgccggagcttatcggcaaactcggtgacgccgagtctctgcaaatcaatgattttatcacaccgacggggccgcaaggcaccaagccgtcatcaggagggagttga

SEQ ID NO: 439002 - DNA, 720 bp, Serratia marcescens
ttgaacagtaaatccctggtgatttccgctgcgctgtttgcctttgccgcgcatgctcaggaagtggatatcaaccccaatgcacgcgttgcggtcaccgtcagcaccaccgaccccaactacatcaccgtgaacgatgaccgggtaaaaggcattctggccacccgcggtgtcatcacgcagcaggccgtcaacgatgccggcggactggtgttcgcgacggttcacgacaagcccttcacgctttatgtcacgaccgaaagcggcttcactttttcgctttacgtcacgccacgccggcaggccgggttgtcgcttatcgtcaacaacaaggccattcgcggcacggcgcaggccagtgcgtgggaagccgataagcccggatacagtgagctgatttctcagcttgtctcgcgttttgtcaataacgacatgccgacagggtttgtctacaccaagaaccgtgaggtgcctttgtccgcatcggttctgcaggcattcggggtgcgccctgtatcagcctggcagggagaccggctacgtatcgtccggctggatatcaccaatcgcagcgcagggcgcatcgaactcaacgaacggtatctttggagcaagggggtcatggccgtttctttctggccgcagcttgatgtcatttcacccagcgtgaccgtctcggccattgtggtgttgaaggagggcggcgtagatgaacattaa

SEQ ID NO: 439003 - DNA, 576 bp, Serratia marcescens
atggaatataacctgaagtcccgccgtgaccgcaatctggcactggcgttggtgattatgcttattatcgccgctatcagcggactgctggcgcatcggctttattccgataaccgtgcgctcaccaacgcgctgctcaacaaccgacaactgattattttaccgatgagcgccaacagcgaattcgggtttgtgggtgagcgcggtgatgcgcgctatctgcggttgatggcgctcagcctggtcaatttacgcctcaacatctccagcgagacggccgatgccgcacacaagctgctaatagcttacgcctgcgaagggcaaaagaaagtgctcgaaccggccctcagtgcggagagaaagagtattgccatgaatgaaggcagctcggtcttctatcccaacaaaattcaggtcaatgcagacaagggcatcgttgatgtcgccggcaatctgcagttcacctacggcatgaacgatgtccggcccgttgagaaaaaatatcgcattcgcctggacacacgcaatgacggcatgtgcttcaacgcctttgtggaggtgcccgttgaacagtaa

SEQ ID NO: 439004 - DNA, 588 bp, Serratia marcescens
atgcctaacaccatacaagatcgattaaatgaggcacttttagcaagggggatgactcctgcagaattagcacgcgccataggtgttggaaatgggtatgtttcaaaacttttggctggatacatatcgcaacccaaaaagaatctttcagccatttgccaagccttacgaattacagaaacttggctgattacgggaaagggtcatgctgaactagaaccggatcaaaccctggaagagcgcaattgcatccagctaaagtttgagaacagggaagatgaagataccaaagacaactatataacatgcttatatagtaatgagactgaaaagctggcagcttacatagtaagcccatcagctagctttgatagtgaagtagctgttattattgataaaagtagaaaaggctccggtttatttcttatagagtttgaaagcgagctttttatatccacaagaatagataatcttgttaatattttatggattcacaacaccggaaaagacatcccagatggaaaatttaaggtattagggaaaatagttcagttacttgaaatgaaagaggatgatctatggccgtga

SEQ ID NO: 439005 - DNA, 828 bp, Serratia marcescens
atggccgtgagatttattttggttgacatcagcaataatcgagtttcttatcggataagagaagatggcgctattttttccgacgatacccatgctgttctacataagaaccttgtagacttcttcaacgagaaggataagggtaagatcttggctgcttatgggatagataatgaatcccccttcctctctcgcggagatacagcgcaaacaataatatttggtttgtttataacatgtttgttaattgctattccattatctcaaaccaaggtattgataggaagctacatccagcctggtggcatcctcatatttccactaacgtttattttcctagatactataaatgaaatattcggaagaagaaaaggcagaatttctgtggtaaccgccgcactatgcctaatgacttcagctttatttgtgagcttcagtcttttacttccagggatggaaaaatcatcacatgataaattcataggggtttatcaaaacctaccgtatctacttatgacaaacgcaatttgcgtattaattgcggatagtgcaaacaacagcatatataattttttaaaagggtattttagaggaggatttctgtggcttagatgtgcaataaccacagtggtggggcagttgatttattccgcaatatggatttcaattttcttttacggtaagactagttttgaagaacaactacatttcataatatcgaactatgagttcaaagttatatattccttcattgtatgcaccccaatgactgttttcctcgtatgggtagctaagaagttcatctattcaaaacccgctaaattataa

SEQ ID NO: 439006 - DNA, 288 bp, Serratia marcescens
gtgatcccgaatcatctcgctctggtgccgtggcacccgtaccggcaggccgtctggcaggccattgcacaggtcgaagcccggcgtgaagcaggcaggcggttacccgtttacccctatgccacggcgtttttccgccagttaaccgggcggctcacaatttcagccaaggacctccgcatgatagacgtgacctaccggcccggcgatcgtcgccgcgccacgcgcaaggaagactatattgacgcgctcgacacgctgattgccagccggggcgagcactgttaa

SEQ ID NO: 439007 - DNA, 987 bp, Serratia marcescens
atgaacagtatcgacctatctcacctgtcagccatacaaatcaaggctgcacgcgagttcgctgctttgaagttcgatatcgacatgaaagccagggattgcccagaaaacatacctgatgacctccatggcccaatgagagggggagagtatggcccttattttggaatgtgtttctttaacagtatcatgcctttcatgcctcgggattccgaaacacaaacaccagaaacattattgatcccagttgctcaaacccttggttgtagttggcggtggtggccagaccgttatctatcaaaaaaagatgaagaaaaaataaaatcacatattttttcggaatatggaataagcagtaccagttatacctgcatacctgaactcggtctattcctacctcatgagggaaagaatcgcgtcaacttttgtcgacaccacaatatcgatgatatccctgccagggtatacacacatcattatccaaaagccgaaagaatggcgatttatatcgtaaacattgccggcggaaaggatttttggtccatactggatggtcgatacatccagaaaatcagtcacttctcctttgcatggcctttacttcgtgcttatggcgtaacaatcaagcaccagtggccaactgagttacctcctttaaaggatatattggctcactccgaaacctctaaggaaacagaaattttttacgagcatgttattgatgttgaaaaaatcaggataaggcttgaaaataattacatccgtgccggcatgatcgatttcccaatccgcaacaaatatgtttatccggcgctatttacagttatttttatgatagcaatgactgctttcgattattcaagtggtggcctagctgaaagtatttttctagccataggcgctttttctgcaggcagcttgtttaccctaatagcccccgttttttggactaaaaaaaggcatttagtaaacgaaaaccgcccctaa

SEQ ID NO: 439008 - DNA, 933 bp, Serratia marcescens
atgaaaacgacacccacgcctcacgacgccttgttcaagcagtttctgactcacccggaaactgcccgcgactttctgcagcagcacctgccaccggcactgctgaaaacctgtgatctaagcacgttgtggctagaatcaggcaactttgtcgaagaagaccttcgcgcctattattccgacgtcctgtattcgctcaagacagggaaaggagacggatacgtttattgtttgattgaacaccagagttcaccagacaaacacatggccttccgattgatacgctacgctatcgccgccatgcaacgccaccttgacgccggtaatgagcaattgcctctggtcgtcccgttgttgttctaccatggtcaggtcacaccttacccgtattcaatgtgctggctggatgagtttggtgatcccgagttggcccaacaactttacactggtgattttccgttggtcgacgttaccgttattccagatgatgaaatcatgcagcaccgtcgtatggccatcttggaactattgcaaaagcatgtccgacaacgcgacctggccgaattactggaacaactggtcaccttactgttggccggatacactactaaagagcagctggtatcattgatgaattacatgctgcaggttggcgatactgcctctccggaaacctttatccgcgagctggcacgccgggcaccacagcacgaggaggttcttatgaccattgcacaaaaactcgaacaaaaaggcctggaacgcgggctggagaaaggccgtttggaaggacgccaggaaggacgccaagaaggggttctcgagggcaaacttgccgttgcccgtactatgctggcgaatggcatcgaccgcgattcagtaatgaaaatgaccggtctgactgccgccgacctcgcgcaaattcgccattaa

SEQ ID NO: 439009 - DNA, 636 bp, Serratia marcescens
ttgttagataagaccaaatccgtttctacggataacaccaccgccgcactcagccacctggcgttctgcgccctggcagcatttgggctggcccgccaggacggcatcgttggcacaccctacgccgaaaatctgttcctgatccgctggctggccaccgcccaaaaacagaagcggttccctaaaagggttgcagtggatctcacctggctgctcgaacgcggccgcaaacacggcacggccggcaaactgcgccagcatctggaatacctgtggcgctcctgcagcggcaatctcgccgcgcagtccgatttattccggctcacttacgcgactgaaaccctgaaagatcggggctgggacaattatgtgatggatgcccgtgagtggcgatcggaaaccacacccacgccgtcccagcaaaacggtttttacgtcgaaaaaacggcgctcaatgccgccttctctcaggatggccatcacctgcagccggtctcttttcgcattgtcggcgatgcctatacgttcattcaggtcatggcagagtatggactgcagacccgccttgcagacagcaggccgacatatcaaacggtaacactggagccaggcgagcacagcaacgcgccaacctga

SEQ ID NO: 439010 - DNA, 450 bp, Serratia marcescens
atggatacggttgaggaattaaacggtacgtatttctacaagggatatacccagttgacgccccagcagctgtggtggcttatcaccgtcgatgcgctccgtgagcatctggggatcagcgttaccgatgccgtcttgagcgctttagggcaaccctggcttcccacgcgccaaagccggggaccgctacaccaggtacgtcaatcgcctcgcgactgtcgcggaaagcctttgccgaaaggtatccgtttaccgacactggtgggtgaaaccccacagcgcctgcacatcagcgacgtgaataactggggaaaatttatcggccgcaatgttccctggctggggtatgccctgtcggcctggaccatttacgcgatcggccgcgatgtgaaagaccgtttcaacctcattgcccgtccggcagacagaattcagtggacctatttttga

SEQ ID NO: 439011 - DNA, 327 bp, Serratia marcescens
atgatgaagacgcccgcgcaaatagagcaagagatcattgattattactatgaaaatttcagcccgcggaagtatgtcttctggggcccgaaagtgccggtaaccctggacacacgcttgcgggaagatctcaagattggttgggatgacggtgacgatgcgatcaacacctacctgtccatatggcatgtcgatccggccggcatggaattcacccattatttttccccagagtttttcggttcaaaggtgcccgaacagcccctaaaaccgctcaccatcagaatgctggtcgagtcggccaaagtcggacgctggttgtattag

SEQ ID NO: 439012 - DNA, 246 bp, Serratia marcescens
atgacgggatttgagctgaaactatggcgaacgggactgggatggacacaggaacgggcgtcaaaggagtttgggatttcgatgcgtacctacatccgctatgagcatgctgatccgccgagggcgattgagttggccatccaggccctgtctctggccgcgatgttgccggatatcgacgcactgtcggcagatacgttacggcagcgtgtaagaacgctggcggttgacatccaatccggctaa

SEQ ID NO: 439013 - DNA, 330 bp, Serratia marcescens
atgagaaatactgccaaagaatccaccgatggcaccttcaatgactgcaccggcagtatggccagtcacgcttccaatacccgctccgacgacgcctccgatcgttccgccgatacccgctccggcaccaccgccgataatatttccgacaacgggtacaatagtacctacggcagcaccagccagccctgcggcggtcgagcctacagcggtacctactgttccaccaatggctgcgccgccccatgtcagaacatcctgaatgatgcccgcgccgctgacatcctcaacttcatgaatcgtcaattcacgcatatctgttctccttga

SEQ ID NO: 439014 - DNA, 2115 bp, Serratia marcescens
atgactaatttttcttttaaacgcctggttaatcagctggatatacatcttttcaaacgaatgcctttggtacatcaaaccgaagcatcggaatgcggtctagcttgcctggcgatgatctgcgggcactatggcaagaatgtcgatctgattgcattgcgacaacaattcaatttgtcagcgcgcggcaccactctagccgggttgattggtatggccgaccaacttgggctatccactcgccctttatccctggacatcaatgaactcggtgcgctgaagatgccgtgcgtcctccactgggagttcaatcattttgtcgtattggtaagcgttggacaaaatcgtgtcgtattgcatgaccctgctcgtgggcggcgtactgtcagcctgtcagaattgtcggccagctttaccggtgtggcacttgaagtctggccaggtagtgcgtttaacgcaaatactgttcgcaacacgttcagtcttggcacgctgacaggcagtgtgcacggccttaaatggacgctcggcaaaatatttagtctttcactggtgatagaaacgattaacctggtgatgccggtcggtacgcaactggtgatggatcacgcgatccccgcaggcgatcatggcttgcttactctcatttgtgcaggattaatgctgtttatcttgctacgagccgcggtcagtatggtgcgtgcgtggtcatcattggtaatgagtacgctcatcaacgttcaatggcagtccgggctgtttaaccacctgatgcggctaccgcttaactattttgagcggcgaaaattgggagatatccagtcacgtttcggttctctggacacgttgcgaaacacgtttacgaccagtatcgtcggcgccattatggacagtatcatggtcattggcgtactggtgatgatggtgttatacggcggctggctgacctgggtggtgatcgcattcacagccctgtatgtactgcttcgtctgctgacatatggttactatcggcaactgtctgaagagtcactggtgaggaaggcacgggcaggttcgtacttcatggaaaccttgtacgggatcgctacggtcaaaatgcaaggaatggcggaaaggcgcagcgcaaactggcttaatctggaaatagatgccattaacaccggcatacgggttaccaaaatggatatgctgtttggcgggatcaacaccttcgtggcagcctgtgaccagatagttattctgtggttgggcaccagtctggttatcgataatcagatgaccattggtatgtttgtggctttcggtgtgtttcgtggacagttttcagacaggatcggttcattgaccgagtttttacttcagcttcgcatgatgagcctgcataacgagcgtattgctgatatagctctgcatccacgggagaaccgtaagcctgaccttccctacgaagcgaaaatgcaaccggctgcgctgaccacacaggctctcagctaccgctatgacagccaatccccccctgttttcagcaagctgaatctcgttattcagcctggagagagcattgctatagtgggagcatcgggagcggggaaaacgacattgatgaaagtactgtgcggtttgtttcctcctgacagtggacgcgtcgaagtcaacggcgttgatatacaacagttgggaattaacaattaccataagatgattgcctgcgtgatgcaggatgacaagctgttctccggctccattcgtgaaaatatctgcgggttctcagacaatgtcgatgatgaatggatgcagacatgcgcccgcgccagctatctgcatgacgtcattatgaagatgccgatgggttacgaaaccttaatcggtgaattgggagaagggttgtctggcggccaaaaacagcggttgtttattgccagggctatttacaagaaaccggcgctgttatttctggatgaagccaccagtgcattggataaggaaagtgaaagcgccgtcaatcaggccatcaaagggcttcatattacgcggatcattattgcacacagggaatcaacagttgcttcagcagacagggtcattaccctaaatccagccggtacaatataa

SEQ ID NO: 439015 - DNA, 141 bp, Serratia marcescens
atgctgtgtctccagctccgcgtcctgcgagaagatatacccgccgccgatggccgcggcgactaccagagcgaccgcgcccagccaaagatatcgtttgcgcttgaccagcacatttatttaatacagggcatgcaataa

SEQ ID NO: 439016 - DNA, 696 bp, Serratia marcescens
atgattgcagccgaaggaagcaaaaaagctcgtatatgcaggcaaaacgtggcggtacgttcgtcgcttcgattgcgagttattgtacacgacccggttactctgcaccgcgattgcctgatacgcgtgttgaaagcctattttgggcgcgccgtcaaaattttgggggtggcgcagacactggcggatgtgcggaaaatactgattcaggagcccgcggaccttctgattggtgtgccctatggagccggtgagaaattgcttgactgggaactgttcggttgtcagcttaagtattatcaccccagcctcatctgccttatgtggacgaatctgccgaaaagtttcgtacggcagttcacgccagccgaacgtatgggcaaaaccctatttttgaaaaagcgggtgtcgataccggttttttgccaggtcgtgtcacaggtagccgcgggggatttgtctagaaatgatgtgtgtcaatgtccgtctgaggatgatggggaagctttaaaaacattgactctgcgggaaagtctggtactgagcgagatgatggaagggaaaagtttgcggcagattgccgcgcggtatcacaactcgctgaagaccatcagttcgcataagtgtcgtgccatgaaaaaactgggggtatccagtaatgcgcagctgttggcgttattgcatgccctgtattaa

SEQ ID NO: 439017 - DNA, 960 bp, Serratia marcescens
atgacactggtttcaaaactaaagaaagtgcttaagaaaaaagaagttgctgccctcgtgacttctgtatgcctaatggcttattcatccggcgcgactgcttttacatgtcaagatagcaccggccgagccactaaaaacccgaataatgctgttattgatatttatgcaaatttaaacccgtctttggagcctggccaagttctggtcgttgacttttcgtcttctattagttgtaagagcgatatgcctggccttagaaataattatgtttctctcaatacaggctcaacattttctggtgttttagataactttacaggtagcttggattattatggaactagttatccattacctttgcagtcccagacaaaaagtaataacttcatgaatggttattacattcctttgaggtcaagacttttgcttacgccagtatcagaagcctctggtattttaataactgctggtgagaaaattgcaactttgaaaatgatacaagtaggtagcgatattggaacgggagctaaccaaaatcaacataattatacatggaatatacacgcagcaaattcagttttcttacccacaggtgggtgtgatgtatcattgcgaaatgtgacagttaccttgcctgattaccctggtacggctgctgtgccgctatctgtccattgcggacaaaaccaacagttggcttattatctgaccggtacaacggctgatacggcaagcaccatatttaccaacacatcatcatccaatcctgccaccggcgtgggcgtgcaactgtctaaccgcaatggtgtgattgctactaataaaaacgtgtctctcggaaaggtaggcaccagtcctgtcagtttgggactgacggcttcctatgcacgaacgacgggtcaggttgtggccggtaatgtccagtcaattatcggggtgacgtttgtttacgagtag

SEQ ID NO: 439018 - DNA, 720 bp, Serratia marcescens
atggaagcctgtggtggtgctcattttatggtgcgcaagttgctcgagttagggcatacgccaaaactaatttccccccaatttgttcgaccatttgtcaaaagtaacaaaaatgactttgtggatgccgaagccatctgtgaagcggcagcacgcccctcaatgcggtttgttcagccaagaaccgagtcccaacaggcgatgcatgccctacaccgggtcagagaatcgctggtcagggataaggtaaaaactacaaatcagatgcatgcctttttactggagtttggcgtcagcgccccaaaaggtccaaccttgatgaggcgcttcgcagaaattctggatacgaacccgcttccaccttaccttatacggctgttgcagaaactgcgtgaacattatgagtatctcattgaacaaattaaggaattagagtctcagctaaagagatcgctggatgaagatacgactggtcggcaattactgacgatcccttacgtcggccctctgattgcaagtctgctttccactcagttaggcgatggaaaacagtatggaagcagcagggattttgcagcttcaacaggtctggttccacggcaacacagcacgggaggacgaaccacattgctggggatcagtaatatatctgcgaacactggagtatcgagccggccgacttgccggctgggtcagggagctgttactacgcaaaaataa

SEQ ID NO: 439019 - DNA, 885 bp, Serratia marcescens
atggacatccatctgccggctgaactgcgggccatctgtgacctcagcacgctgaagctggagtccggctcctttgtcgaagatgacctgcgccagtatttcagcgacgtgctctacagcctgaaaaccatcgacggcgctgacggttacgtgcacgtgcttatcgagcaccagtccagcccggataagcacatggcgtttcgcctcattcgctatgccgtcgccgccatgcagcgtcacctcgacgccggccacaaaacgctgccgctggtcattccggtactgttctataccggcaaacgcagcccgtacccttactcgaccaactggctgcaggagtttgatgatccatcgttggcgggaaaattgtacaccggcgattttccgctggttgatgtgacggtcattcccgacgaagagattatgggtcaccgcagcatggccgctctgaccctgctgcagaaacatattcgtcagcgcgacctggccgacctgaccgacagactgtccgccattctgctggccgggtatctctcttcgccacaggtgatttcgctgatacactatattatccaggccggtgaatcggcagatgcgcaggcatttgtccgtgaattggcccagcgggtaccgcaacatgaggaggaactgatgactatcgcacaaaagcttgaacaaaaaggtatcgagaagggtatagaacagggtatccaaaaaggtatccagttgggtgaacagcgcggtatggaaaaagggcgtcaggaaggtgaacgagaagctgcactgaaaatcgcccgcaccatgctggccaatggcctcgatcgcgacgcggtgatgaagatgaccgggctgaccgctgacgacctggcccaaatttgccactaa

SEQ ID NO: 439020 - DNA, 249 bp, Serratia marcescens
atgtttgggaaagctgaagataaagtaaaagaagttgctggcgaagcgcaggaaaaatacggtgaactgaccgacgattacgggcaccaggtaaaaggagcggcccgtaaagtcgcggcacaggggagtcaggcagctcaggaggctgctgaagtcgtacgtaataatgtggaaaacaatccatttgcggcgatctccatcgctgcgggcattggcttactgattggtctgctcattggccgtaaataa

SEQ ID NO: 439021 - DNA, 270 bp, Serratia marcescens
atgaaacagactatcgcttcggctattgtggctggcattatactagcggcgtctccggtgcaggccgggtttaatggtcaatccgatgtgcagggtaatcagggcaataataacgtcggggtatgtattgaaggcaaaggccctaatgccgggcagtgtgtgggtgaaattaatggtgtctcccggcccaagggcaaagaacagagtgatttaatcacgtctatttgccagttgccgtttatgaaaaaatatgccgcaatctgccagtga

SEQ ID NO: 439022 - DNA, 966 bp, Serratia marcescens
gtgactaagcgcttatattacccctgtgttgtattggtttttatattgttctccatgatgaaagacgcgagcgccttcacatgtaaaacatccgatgggggggttattcctcccggaggatcgcagacaccagtcactgtaaaggtgaatattgggccagatttaaaggccggaaaaaataaaatagctgctttgtctcagattacttgtaagaatgatgtgtctaagtggacggactatttagagctcactactgtttttataccacccgctaccactaatggcttgattggaggggtgacgcttgctggggtcgattatgacttggaacagccatctatcaataagcgagtactgtcagttactggtcttaacaccgttaatgttcctatggacttatatataaatatgaataagaaacctagtagggatattattattaagacaggggacctggttgctcttgtcaatttctatcagacgaatgatcaggcaggttgtcctcagtgcggcccatatcgttggcagctaattgctaataatgatgcttattttagtactaccacttgcaccattaatggcgctaaacaaattaatgttgactttggacggataagtcaagacagctttacagagagtgccaataatgcagtgattaaaaaagatcaagagcttacatatcggtgtgaggatgccactgcgactcaagatattcttattagattggttggcggagcgagtgttttctctccagaagcaataaaaaccacaaatagcaacataggtgtgctcatgatgtacaatgggaaggtagttaagccaaatgaagcctttagaacgaaaattataaatggtttaggaagcgacactttaacttttgttccgatcaaaagcaaaagctcatcgacaaatatatctactgggccattttcaggttctgcaacgttaatattcagcgtgccttaa

SEQ ID NO: 439023 - DNA, 513 bp, Serratia marcescens
atgagcctgaacaggagagtaagaatagcagtgtacctgagccttttgccctctcttttactgtcgttggggagggttcatgccatcgctcagggggagatggttttctatggcacgcttaacaaacctccagtttgtattatcagcaatgggcaaaagattgacattgacttcggcgaaaaagtaggggtgaataaggttgatggtaataattatctgcaaaaaattaattacagtttacgttgtgagcctggcgtggcgggaatggcgctggggctgatactttccggaccagtgagtggtttcgataaggctgcattgcaaactaacatgcctgatttggccattcgtctccagtttcaggatggtacgccgtttgagcttaataagcgtgtagatattaccgtggcgagccctccggagttatacgcggtgccgataaaaagaccggggagagaacttaaatcaggcacatttagcgttacggcgacattgttggccgactatctctaa

SEQ ID NO: 439024 - DNA, 495 bp, Serratia marcescens
atgggaaggcggaaaagagtgaagcttgtgataatggggatgttggcactgtctgctatgtctatcaacgtcagggctgataccgatatctatttcagcgggaccgttactgcgccgatgccttgcacgattaacggtaagcaaaagatagaaaccaatttcggcaacgatatgataaccactcaggtggacggtattcgctatttaagaacggttaattacaatctagcatgtaacaatcaaagttcaaatgcactcaggttgaaagtacaagggaatgcggccagttttaatcagtatgcactacagaccaacatgaatgatttaggaatagagttgcgtgccggcaacaagccgctggcgattaacacgtggtttaactttaactattctgataagccaatattacaggctgtaccggtgaaacgcgcgaacagcaatctgcccgccggctcgttttccgttaatgcgaccttgttggtggactaccaatag

SEQ ID NO: 439025 - DNA, 543 bp, Serratia marcescens
atgacggtgagctcgtacaaggctgtgtgccggcgtgcaattggcgtgatgctattggccggggtgagctggggcagcatggcggccgacaatctgtacctgcatggcgcattggtggcggagccttgcacgctgcgcccgggcgacgaggacatcagcctggatttcggttcggtgatcgataaatacctgtatgcgcatggccgcacggcgggtaaagcgttcgctttagtcctgcaggattgcgatctcagcctggggaaaacggtgaaggttacctttaccggcgcagggagtgtcgcgttgccggggctattggcgccggatggcggtaaacccgccgggattgctttgggtatcgagacgatggcaggcgcgccggtggcgctgaataaacccggcaaggggtatgcgctggcccagggcaacaacagtctgcaactgcaggtgtatgtccagggggagccgacggcgatcgcgcaaaagagcatcggcctcggcaccttttctgcggtagcgacctttagcctggaatatgaatga

SEQ ID NO: 439026 - DNA, 657 bp, Serratia marcescens
atggcagggtgcgacgcgaaacagggcgagtggcgacaggcgatgagcgagctgcgctattacagtgtgctggccgggctggcaatgatggcgccgctcagcctggccaccttgctgtggttgttgcctgccgcgcaggcggtcgataactgggacgtcgagggggccaacggcgtgctgtatgtagaagggagcctgaccgaaagcgcctgccggctggagatggacagcgcccgccaggatatccgcttggcggatgttgccaccgggcagctggcgcaggccggtgagcgtggcacgccggtggcgtttgagctgcggctgcgcgactgcctgcgcagcccggcgaggagccgggacgaacgcacgggggcgctgagctggatgccggatcaaccggcggtacgggtgagttttcgcgcaccggccgatgcggataacccgcagttggtgaaggccaggggcgtgtccggcctgggactgcggatactcgacggccatgggcgcgatgtgcggctgggtagccgtggtgaaccgctgtggctgctgccgggcagcaatgcgctgagttataaggtagcgccagagcgcaccgccgccccgctcagggctggtggctatcgggcagtggtggatttctatctgagctacgactga

SEQ ID NO: 439027 - DNA, 2541 bp, Serratia marcescens
atgatgtttttgcctgctgggaagccgtttcgtttacatattttaagtgcgtgcgtggccttggtcttagggtctctggcgtccaatgcggacgcggtggaagagatccagttcaataccgatgtgctggacgtgaacgatcgcaaaaacatagacctgagccagttttcgcgcggcgggtacatcatgcccggcagttacagcatggtggtgcacgtgaataaaagcgatctgtcggaacaaccggtcgcgttttatgcgccggacgacgatcggaacggcagccgcgcctgcctggcgccggcactggtggagcagctcggcctcaaagaagagatgcgcaaaaaactgaactggtggcaccagggggaatgcctggacgaaaccagcctgccgggcatggaagcgcgcggcgatctggccagctcggcgctgtatctgagtattccgcaggcgtacctggactatgtttcggatgactgggatccgccggcgcgctgggacgaaggcattccgggcgtgctgctcgattacaacctcaatatgcagactcagaagcagctgcgctacggcacgcgcagtgacagcgtcagcggtaatgggacggcgggcgccaacctgggcgcctggcggctgcgtgccgattggcaggcgaatttcaatcgccaaaccggcacaggacagggaacggaaaagcgcctggactggagccgttactatgcctatcgggcggtgtcggccctgcgtgccaagttgaccgtcggcgaggattatctcgattccgggctgttcgacagtttccgctttggcggggtgagtttgcgttccgacgacaacatgctgccgcccaacctgcgcggctatgcgccggaggtgaccggcgtggcgaaaagcaacgcgaaagtgactatcagccagcaggggcgggtgctgtacgaaaccacggtggcggcggggccgttccgcattcaggacctgaacgacgcagtctccggcgatctggacgtgagggtggaagagcaggacggcagcgtgcaggagttcaagatgaacaccgccagcataccgtacctgacgcgccccggctcggtgcgttacaagctggcggcgggcaagccgtcggatatggatcaccgctaccgtgggccgctgttcggcaccggcgagttttcctgggggatcagcaacggctggtcgttgtacggcggcgcgttgctgggcggcgactataacgcgctggcgatggggatcgggcgcgatctgatgctgttgggggcgttgtctttcgacgtcacccaatcgcgcgccaaactgccctacagtggcgagacgctgagtggcgcttcgtatcgcctcagctactcgaaaagcttcgacgagttggacagccaggtgaccttcgccggctaccgcttctcagagcagaactttatgagcatgagcgagtacctggaggcgcgggagtatggacggcgcttcggtaacagcaaggagatgtacaccatcacctacaaccagcagctgcgcgatctggggttgagcgcctatctcaactataaccaccagacctactgggatcggccggccaacgatcgctatagcctgacgctgtcgcgctatttcgacctcggccgcttcaagagtctgagtttgtcgctgtcggcctatcgcaaccgctacaacgagcgcaacgacgatggtgcttatctctcgctgtcggtgccctgggggcgcggtgccacgctgagctacaacgccacgctggatcgcaacgacagtagccatcgggtgggatattacgatcgcattgacgatcgcagcaattaccaaatcaacgccggcggctcgcgcagcggcgcgagcctgagcggctattacaaccgcgacggcgatctggcgcgcatgagcgccaacgccagctatcagcaggaccggtacagcgcgttcggtttgtcggcgcagggggggatgacgctgaccgccgagggcggcgcgttgcatcgcagcaatatggcgggggggacccgcctgctgctggacaccgaaggggtggccggggtgccggtgcgcggctatggcagcgccatcgccaccaaccgctggggcaaggcggtggtggtggacgtcaacagttactaccgcaataaggccagcatcgatttggacaaactgagcgacagcaccgaagccaccaaatcggtggtgcaggcgaccctgaccgaaggggctatcggctatcgcaagtttgaagtgatcgcgggggagaaggcaatggcggtcattaaattggcggacggcagcgaaccgccgttcggcgccacggtgctgaacgcccgcaaacaggagaccggcatcgtcaacgacggcggcagcgtttatctgagcggcatcaacgccggcgaaagcatgacggtgcactggaacggcgcggcgcagtgccgggtgcagatgccgacgccgctaccggcggagatgctgaccaccaatttactgctgccgtgccgggcgctgagcgcgggtgatggcggcaatgaacactga

SEQ ID NO: 439028 - DNA, 543 bp, Serratia marcescens
atgaccaaccgagccaaaggaataacgacgttttgcctattgccgctgctgtttttttctgccgggcaggctattgccgtcatgcagggagaaggccgcgtcaatatgcaaggggccattatcgataccgcctgcgcaatcgccacggaaagccgggaacaggttattcatatggaaaccctcccactttccgaattggcgagagaggggcagggtaaatccatgcctttcagtattgaattagtcaattgcatattggaacgacccaataccgcattgccaaactggaagcaattccaaattactttcgatggccaggcggatggagagttgttcggcgtgaatggcgaggcctctggggtggcgttaagaatagtcgactcggcgggacatatcgccaggccgggaattcctttgcctacgcgtgatattgtgccgggaaattatcgattggattacgctctggcgttaataagcaatcaacaaccattaaaagcagggcgttatttttcatcggtgcgttttaaaatggattattactga

SEQ ID NO: 439029 - DNA, 543 bp, Serratia marcescens
atgaaactgaataaaattatgctggctgcagtcatggcttttggtgtttcttctctggcgcacgcagcagaccaggggcacggtaaagtgaccttcagcggttctattatcgaggcaccatgctctatcgcacctgagtctgtggatcagaccgttgaactgggcgccatctccaacgtagcgctgaaatcgggcggtaaatctaccccgcgcaacttccagatcaagctggaaaactgtgacctgatcactgcaactccaggtaaaaacaataccgttgctgtggccttcagcggctctgtatctgcagcgaacgacaagctgctgggcattaccggtactgccaagggtgcaggcatcgccatcaccgacggctctggcaacgatatcgcactgggtacacctaccaaagcggctacgctgcagaatggtgccaacaccctgagctttgcggcttatctgcagggcgcaacggcttctaccgccgttattaccccgggtgagttccagtccgtcgccgactttaccctggcttaccagtaa

SEQ ID NO: 439030 - DNA, 756 bp, Serratia marcescens
atgatttattgtataaatgacagcatcctctataacgaggaggaaggtacgttggcgcatatagacaacgccaataataaaatagctttactcaaacctgccagtcgcctgctttcattatttatcaggaataataacaagctgttgctacgggaaaggttgttaaatgaggtttgggtagagcatgggctgaaagcgtccaataataacctgaacaactatatttcaggattgcgcaagtcgctggcgcagtgtggcgcagaggaaatcattatcacctacccccgccagggttttaaactcagcgtcaaaagcattcaaaaaataaatacaaaccaaggagaatatacagaaaatgaaaaaattggacctgagatagttcctcccgccctccctcaaaaggggggactgggaatgtggcaggctatccaacgcttaattatgatcgccgccgcgtgtttagtgccttttgctgccgtcgtattgtatcaaaacagtacacgtatcaatgtttatccactggggagctatcagcactgccaaatctatggcatgacgttaggcagtggggatcttgataaggtgaagcgcatgattcaacaggcgggcctaagttgccaacaacgggcggatgtctattactacgataatatttttaacgagaactcacaaagcaacgaggagcaaataaccttctgcccacgcgatgcccatagcccatgtatcaataattacaaagatcagaacgagcgttag

SEQ ID NO: 439031 - DNA, 492 bp, Serratia marcescens
atgaaaacagtgagttatagttttttttatcgttaccggtatctcatgctcgcgctgctggcgatggtgggttgcgcggtctccgcttacgcgctgtgggtaaaaccccagatcccggagtgccgggcagtcgtgtgggtggccgatcagatgggtggggaagcgatgcggcgcgcactgttgatcagcgtcgtgccgaatggcgcccggcgcgccaatgtgatcatcaacggcagctttttcgtcggcgatgcccggtacaatatcgatcgggtagtgatggcgaattatcggcgaaagggcgacaactatactttaaccatagcggcgaacatcaaaagacctcaggactctttggcgtcgcctgagctgaatcggcgtttgccgatggcagggttgcagtatcatttgcgtattgaacggatagacagtcggcattttttgtttgtcagcaatgcgaagccgctatttgtctgcaccgtggcctcgtaa

SEQ ID NO: 439032 - DNA, 792 bp, Serratia marcescens
atgagatacataattaataataatattaaatatcatgaggatagatcggagctgatctcgctgcatgatgatatcccgccgattgtgctgacggccacgctgaaccgcctgctttccgcgctggtgcgcaacaataacctggtgctttcccgcgaaacgctgctgacacaggtgtgggaggcgcacgggcaggtcgcttccggcaacaacctcaacaacaccatttcgattctgcgtaaagcgttctcttcgcttggtgaggaggagattatcgtcaccctgccgcggcaggggtttatgtttaccgccagcgagttgaagacggcggacagtatggcggaaaatctgataacgccggatgcggcggcggtgcagactgaatcgatcgcggagcaacccgccgtggttcagcgccgtgggtttaaattcgccgccgttgcgctggcgttagcggcgctggctagcggcatctgggcatggttggaggcgggctacccgtccgttcgcacgatggtggtgggtaaaatcggcaactgtgaagtcagatttgtctcttcctatcacaaaccggggccgggccaagtcgatttggcgcatctgaaaacgatgctggaacagcggaatcatatcgactgcagtgaacccggcacgctgttttattacgatagttcttcgataacgccaaatagtacggggcgagtgaggacctcgtatttctactactgcccacggaaacagatggaagcaggaaaggttcaatgcgagaattttcatgaaaacagtgagttatag

SEQ ID NO: 439033 - DNA, 924 bp, Serratia marcescens
  misc_feature (883)..(892): n is a, c, g, or t
atgaaactgatctcgaataaatacataggcgataagtatggaaaaaataaagggtggctaattggtttgttaattgtgtcacctgtttttttttcttataaagccaatggcaaggatgatgtaatatatcctgtggtttttgataatgaaaaatcactgaacgaaaattttttgccgttaaaggaaaaggaaaaccataaaatcgcatctaaacattatgaggtaagctcaaaaaagaatacagcgaataaaaatgaaagcactgatagtagtatttttaagggaaagtcaagaaataaggattacttaagctactatgaagaagagcgaattaacttaaataatggattaagtgaagatggcggcaaagcaatcaaatatcaacagcccagtcgttattataatttaaggcaagtgatagatatggcaataagctggcatcctgctataaaaaggtctagccgtgatcttgaacgaattagagaaacgataaatgaagctatggctgcttactatccatctttcaatgtaggtattcaatctggattgcaaagtaacgattatggtagtgggaatgaaaatacaaacaaactaaaaatggcagcagaacaggttatttatgattttggaaagaccaagtataaagtaaggttgaataaattaaatgcattacattctgaaaatgagttggataaagaaataaataatattgcatatcaagcggtaacaatatatctgcaagtggtgaagtataaaaaattatataaaatagcagaagagcaactcattggttttaataagataaataaaatcgcaaaactacgctctgagctaggagcaagtgcagaatctgatttttctcaatcaaaagtgcgcttggctnnnnnnnnnncgcttggcttctgcagtggctttgttaaatga

SEQ ID NO: 439034 - DNA, 660 bp, Serratia marcescens
atggaggattcaatattgataagtaaggcaactagcgagaaagatcaattattggtggtgttagggagagatgcattctttaggtgtgctgtaaagcacattgcagaggaagtatttggaaaagataaagtcttaacatatcgatcatcaaatgattttttacgagctttgtcagataacgataaagtaaatacagcaattgttgattacgatgtattgtactccgagaatttttcattgttagacgctataaatgactacttcccaagattaaatacgattgtagtgatgtctaatccaaatatacaactaatttcacttattagaagcctgagtattaataaaatcatatctacaaatgatgatatccactcctttattaaagccttatcggtggagaaacatgaagagtattacagcccgtgcatcatcaaaaaaataaaaaaaatgccaattaaaccgccattgctaaccataatggagagatatgttttaaagaatctaattaaaggtgtatcgcccaggttaattgcaacttggaaaggtattagtataaagacagtaagtacccataaaaataaagcattaaataaaataaatgtaggaagaattaatgatcttgttttgaacaagaaaagaaatctgacgcttcgtcgataa

SEQ ID NO: 439035 - DNA, 294 bp, Serratia marcescens
gtggccaaagtcggcggaaagaaagagttaaccgggaaaaatgacattgaaacagacatcagtaaccagtgcgggcggctgatttccaacgcgatcgtgtattacaactcggcgatcctgtcgcgattgctggaacgactggaagcagaaggcaatgccaaaggcattgaagctctggcccgaatatcaccggtggcctggcaacacattttgttgaacgcacattataccttccagagcagcgatgagattattgaccgggatgcgctggctgctgggctgaagctggggtaa

SEQ ID NO: 439036 - DNA, 348 bp, Serratia marcescens
atgggcatgccttcgcgggtgcgcaagcgtataagatccccttcaaattcagtgaacgtggccaccatcgttggtcttaacacgctgattgaacacgatgataccctttcccgcctggcgatcctcaggcaggatgcacgtgaattcggctggcgtcagatggttcaggagcgggaaaaatgggccacactggcgccattgcattgcaaagcctgtgacatcctgccagcactgaatatttctcagcagaatctgctttactacgccagccaggcaaatttctacaccgttttttatctgctgtactatcatgggttcgttaccgccagttcagcgataacctggtga

SEQ ID NO: 439037 - DNA, 153 bp, Serratia marcescens
atgccggaattctgtttctggatggagcaagattttggggcagggtcatcaattgaattaaagattggggtgagtaaacacgccagttacctggacgggctcttcctcaaaaccgagcttgcgaaacttccgcatctggtgccctacagatga

SEQ ID NO: 439038 - DNA, 897 bp, Serratia marcescens
atgttttattcacctttgaggtacccaggtgggaagtcgaaactcactgcttatgtgcttgaaacaatgaagctaaatggcctcgaaggtgggacatatgtagaaccgtttgctgggggctgtgccatcgcttggtacctcctgctaaatgaccatgtgcgtaaggtgtatatcaacgatttggatcctgcaatccatgctttttggcacagtgttttgtatcgaacagaggaactctgtcaactgattagctcaactcccattacaatggatgaatggtatattcagcgtgagatatatagagaaatctccagtgattttcttaaacttggttttgctacattgttcttaaatagaacaaatcgctctggaattattaaggctggagtgattggtgggaaaaatcaagagggagattacaagataggttgtagatttaacaaggaacgagttattgagcaagttaacgcgatagcgtctaaaagagagagtatcaggctctctaatttggatgcggcaaattttattgatgagtatttgccagagattaccgggaatgtattggttaacatcgatcctccttattatgtcaaagggaaggggttgtatcaaaatttctttgaacataatgaccactaccgcctttttgaaagtgtaaggcgtatcaagcatccttggattgtcacttacgatgatactcctgaaatttgtgggatatattctgagttttctcctgagtcatttggattgacttatacggcgcagacgaaatgcaagggttccgaggttatcattcactctcccaatttgcataagacggactttaagccagatgtcagtttctcggaagtcaaaagatatcatcgtaacaggagtaaggaaaactccaacatttga

SEQ ID NO: 439039 - DNA, 1527 bp, Serratia marcescens
atggcgaaggaaggcataaaatggtgggaaaaccgtgtgttacgctcggtggataatttaaagttgtggcaggaaaatccgcgactagatccttccagccgactcgttaaggtgagagattttgtcgaggaattaatttccgatgcgaatgacaaacaggattttatagaattaataacttcaatagcgaatcgtggatttgagtcattcgatcctatagttgtatggcaagatgataatgataaaaatttttatgttgctgaaggaaatcgaaggacaatggccttaaaattactgagagaccctgaaaaggcgccaatgtctatccgtaaaacgataattaagctatcaagattaattgatagggacagtatagagaaaattagagtttgtgtttcaccctcatatgaagatgcaagatggtatattttgcaacgacactcaaacgcaagtcaccaagtcaaatggcaacggctgcaacaacagcgatttatcataacggtttatgactccgtggggcaggatatcgatgagacggtaaggataaccggctttaaacgggcatcgatagtagaagccttacgctatgttaaaataagggatattgcgactcatcaagaagttaccaaatacttgacagtggatgagcgagagcaagtttatagtcatagaataagtatgactgtacttgaacgttggtttggcaatagtcaggtcagagaggcgtggcatatagagtttagcgatgtgggtgttattattaatgctaacctcaacgatttttatatcgcctatgctaagttcctaaagttaatgttaaataaaaacaatgaccttggtgtaatagttaatacacgtacgattgattctcattttcaaaccatcttcgattatttacctgaggttcgcttaaagcaagatgtggttgaggttacggctggggctccttcccatacggacttggctccagtgactccatcggtaaatgttgctggcgttgttggtggatcccaatcagatgcaggggcagaaccaggagaaggctacggggataagccgcgcttgaaaggtaaccctaaccgcagacagttaactgatgcttatcatgaggttaaggtcagaagctataaaataagggcgctttttgaagagttgcaaaaattacctcttcgtaagtaccctaacgttgcagcggcttcaattcgaatatttcttgaactctccgttgatgagtttatcaacgcttctgagctccaacaagaagtggccaagcgctctaaaaaaacctacaatgacgttacattgaaacagaagcttgttgccttacgtgacggattgattggtgatcaagaagctgacaaaattattgatacattactacacaacggtaacgattttagcttgaatacattgaacgagtatattcatggaacgaaatcatataaagttgaaccccagttcttgaatcgcttctgggatatgttgcttccattattcagtatatttatcagtttgaaggaaatatga

SEQ ID NO: 439040 - DNA, 405 bp, Serratia marcescens
atgatgaccctgaaatatcctgaaccggctgttcggccgcatgggcagatctatcgtgaatcgtcgttgtttactctccctcctcagggcatggtcaccttaaacgaaacggatgcgctggcgctggagacgttctgtgcagctatccgcgatcggctgttggggccggccacactgaccgcccacccgcatcgtatcgggagtcgtaccagtgtggcgctgcatctcgaggggcgacaggggcgttgcatcgatgtgctgatcaccgtggctggtaacacgctatggccgcagccggacgaatatagccaccctcgctggtatgtcacggtgccggacgcggccgatgtggtgtatctgttgcttcatctgagtgagctgtgcgaacggttccgtgttaattag

SEQ ID NO: 439041 - DNA, 555 bp, Serratia marcescens
atgaatgttgaaaacggaagttttgcattagaaataggacgtattattctctacgctatgatgccttttgctggtctattcgccttaattatagtggcacgagcaatggaaatcgtttattacaggaatcactataaaaaaacgataacaaaatcgataaagaataacactctaaaaaacgaagatttatatcttttcctcaagaaaagggatgtgaattataagccattagatcgagtgctacgacagttatttgaaagttctctaaaagatgagtttgcaagtgaacatacccatcgactcagggaacttatcttatggttcgaagagcaagaaggatttacagaaatccccagagatgttcgagaacaccttgaattaattcagaaacaaaacccagatgccaggtatctagtcaatcgactagcaacaagtctaaaggacctttatcgtacgcagtccctaagggaagccagattgcgctggttcagctatttatctgggattattggaataatgggggtcatttatggtgtcctacaatcatggcactga

SEQ ID NO: 439042 - DNA, 615 bp, Serratia marcescens
atggcacgctcggttcgcacggtacccacgtgggcggcatcgccgccggcagccgcgacggcggcgccatgcacggcgtggcgttcaacgcgcagatcatcagcgccgaaaacggcgatcccggcccggaggacggcatcatcctcggcaacgacggcgcggtgtaccaggccggttgggatgcgctggtggccagcggcgcgcgcatcatcaacaacagctggggtatcggcattaccgataaattcgccaaggggggcaagaatcccgcttaccctcatttcaccgtcgacgatgcgcaaaagcagttcgatcagatcaaacagatcctgggcaccaagcccggcggcgcctatcagggcgcgatcgacgcggcgcgcagcggcgtggtcaccatcttcgctgccggtaacgattacaacctcaacaacccggacgccatggccggcctggcctatttcgtgccggagattgcaccgaactggctgtcggtcgccagcttgcaggacccctctaatagcggcgactacagcatcagcaccttctcttcccgctgcggctacaccgccagcttctgcgtttcggcgccgggcacccgggtatacagctcggtga

SEQ ID NO: 439043 - DNA, 2145 bp, Serratia marcescens
atgaataatgatttcctagatgatgtaatagatagtaaagaagcggaggataagtatttcctgacccgctggaggtcggctattgttcaaatagcccatcattatcggctaaatatttcagagcagaatatattaataactgaactatggagttataatttaggaagagagaagataattaaaaatatggccaggcaagccgggctttcgctaaaaatagatagtggtaaggattacatattcaatacttggctctttcctcaggtgcttgagatgagcaatggacagctagctatacttaaaagtattgattctaaaggcaattacattatatcatttatcgaagatgatggattagtatcagttgttggtcgtgatgatataaactcgaaagttagtcgtattgttacactgcggcctataaaaactcaacaagaccctcgttcagataaatatataataccgttcagaaaacattgggcctggaaaattgcgttccctaatctaaaaccatattatgtaattatacttggttcatttttcgtaaatatccttggtttggctggaataacatattcgatgcagacttatgatagaataattcccgctcaatcaattccaactatgtgggtattgtttattggagttatgctggcttttgtttttgattttcttttgaggataatgcgatatagtataattgacatgcttggtaagagagccgatttaataatttcagatcgggtttttggtcgctcattaaggattaaaaatggttatcgtcctaaatccaccgggacgtttatatctcaattgcgtgaattagaacaagtaagagaaatgatgacctcgtctacagtcatagcgattgcagatttacctttcttcttcttattcttagctgttatttactctttggcggggattgtttttttagtgccattagcggggatggtactgatggtcttacctggattactttctcaaaaaaaactttctattcttgctaattcatctatgcgagagtctagtctaagaaatgctattttagtagaaacagtacaagggcttgatgatataaaatatttgcaagcagagtacagatttcaacagcagtggcttcattacactaatgcaactgcagacaactcaataaaaataaaaaaattaacacatactctaacaacttggtcgttttttattcaaaatagtgtttttgtatgtgttgtattggtaggaacaccttttgtgatggaggggcaactatccacaggtgctttagtagcatcatcaattctcagctcccgtatgatggcgcctatatctcaaatagcaaatatacttactcgatggcaacagacaaaagtagctatctctggcattgataacataatgaaattgcccgttgatcatcaagaagactcaagaatggtacataaaccggcaatctatggaaaatataaaattcgtgatgctgctttcatacacaatgatgagagtactatggccgctgtaaagataaaaaaactagatattaagcctggtgaaaggatcgcgcttcttggtagaaatggctctggtaaatcatcattgctgagtgctctagcaggcatgatgcttaaaacaaatggagaattgattcttgacgacatcaatttatataatatcgacccatctgacgttcgtagagatgttgggtatctaactcaacactccagattattttatggcaccataagagaaaacttaacattaggtatgccattatgtaaagatgaagatatttttcaggctataagtttaacaggtgcaattaatttcattaatcaacttcccgatgggttagattatcttcttcaagaaggtggtagcgggttgtctggagggcaacagcagatactattactcagccgcttacttttaaggaatccaagtgtgattttattagatgagcctactgcagcactagacgagcttacagaggacgagtttgttaataatatgaaagattggctaaaaggtaagactgttattatcgcaacacataggaaaaaaattctagagttagtggatcgagtcatagtagtttcaaatggagaaatgcttttagatgagaaaaaaaaggatgttatcgcaactctttag

SEQ ID NO: 439044 - DNA, 987 bp, Serratia marcescens
atggatggaggtatattaaagaggctatatgttaaagaaggacaaatagttacgcccggtgaagctttagtacagatggatacgaccagaacacaagcatcagtctcagaaacaactgaaagatatcatgctttactagcccaacaagcacgccttaaggctgaagttaacagcacaaagatagttttcccagaagatttgaaaaaaaaagcagatctaattgaagctgaaactagactttttgagtctagaaaaaaacactttgaagactcattggttagcttaagggactcaaggcttctgttacaaagagagttagatataaattctaagttatcaaaattaggagcgtctagttctgttgatgttattagattgaaaaaacagttggttgatctaaatatgaaagaggctgaccttatctctcagtattatttaaagtctcgagaagaactatctaaagtttcaacagagataagttctctgagtcaagttattctcggcaagaatgatttgttatataaatctactgtcagatctcctgttcgtgggatagtaaaaaatatagttactaatactatagatggtgttatatctcctaatggcattatcatgtatatagtccctttggacgacagtttactaattgaagctaaaatttctcctcgtgatattgcatttattcgccctggacaatccgcgagggttaaaatcactgcatatgaatattctatttatggagggcttgatggagaagttgtaactatatcgcctgatacaattaaagatgagcaaagacctgacattttatattatcgagtttatataaggacaactaaggactatcttgaaaaaataaagggaaagcgtttttacatcagcccgggcatggttgctagcgttgatattcgaactggaagtaaaactattttagattatttggtaaaaccttttaataaagtaaatgaagctcttagagagagataa

SEQ ID NO: 439045 - DNA, 462 bp, Serratia marcescens
atggaaaaatctagtgaatataataaagtttgtatctcaggtaaagagttttacattataaagttagaaccttggaaacgtttgactttcattgctgactttcaaaaagaatttctagttcctgtgattaatagcattggtaatggtaagttaagtaatatattaaacggtgatgaattacctgataacgaggtgatgtcaattattagttcactgtcacaaaccatcgatgggaaaacggtagagaaatgggcaaaaagaataacggatgaaggtgtcgtaatctatattaatgataacaaggaaaaggtaaagctgtcttttgttcagttgaatgatatttttaaaaaccctattgatattattgttttaatgaaggatgcaattatctttaatatggagggagtatcaacgctctttgatagtttcaaaggaaatcaaagtaatgaggaagggatttaa

SEQ ID NO: 439046 - DNA, 2424 bp, Serratia marcescens
atgaaattcgacacttctctattggccggcgcgtccagcgaatccgatctgtcgcgtttttacctcaataatgacatgccggcaggcacgcaaacggtcgacgtgtatgtcaaccagagttggaaagggcggttctcgttgcagttcggcgaacataaaggcgatattcgcatcgcccatcgtgacgccgccctgttgggcatcgatatgagccgtttgtccatcggggtggacaaggggccgatccccgtccaaacgttggtgcaaggaggaagggcggacttcgatgtggggacgttgagccttaagctgacggtgccccagtcgcgagtgattcgtgcagaggccggctatgttgacgccaaattttgggatcgcggcgtgcctgcgctgctgctggcctataacgccacctattaccacgtgcagtcgttgcagggcgacaaggcgtcaaacgacgatttctataccggtttggaatcgggggtcaatctggcgggttggcaattcagagacagcagcaatttccgcagcagttcgcggcaaggcagcgattggcaaaataatactcgctatgtgcagcgtggcttcgccgccatcaaatcgaacctgacgatgggcgatttctattcgccgggtgatttgttcgactcgattcgggtgcggggcggcgctttagcctcggatatcaacatgcggcccaattcgcagcagggcttttcgccgatagtacggggcgtggcgcagagcaatgccctggtgaaagtattgcaaaacggcaacctcatctatcaggagaacgtgccgccgggcgtctttacgctggacaatatattgccgaccggttctgcgggggatctgttggtcgtggtcagggaagccgacgggcgggaacaatcctttaccgtgccgttttccgccgttcccaacatgttgaagcagggcgtcagcaaatacggcctggtggccggtaaggtcaatcaggcggataccgactatgcgcccgctttcgtgcagggcacgctgcagtacggcttcaataatctggtcaccggttacgccggtacgatcctcagcgaggactatcgcgcctggctgctgggcagtggctggaatctgccgttcggcgcggtatccgtcgatgtgactcaggcctcgacgcatttgcaggatcgcaacgagaatgggcaaagttttcggatcgcctacagcaagtttttggacgctaccgcaaccaacttcacgctggcggcataccgttattcgaccaaaggttattacagtttcaacgatgccatctacacccatcaaggctaccgcgagcgtgacaagcgctttcacgattattggaacgatcgggatgacgatgagcttgccccgctggatttgaatacctgggacgccgttcgcgccgctcgtccgcgcaataccttcaatttgaacctgaatcagaggctcgcagacgggtggggcacgctctatttctccggcacccagcgcgactattggtcggatacgaataaaagccgggaataccagctcgggtattcaaacgccttcgcgcgcgtcagttacaacatttccgcgagtcgcgtgagaaattccgatcgcaaagaagagacgcggttttatctctctctgagcgtgccgttgtcgatgttcgacaacaatgcctatctcagcaccagcttatccgccaccgattcgcactatcagcaaagctcgctgagcctgagcggcaatgcgctggaatcaaaccgtctgagttatgcgcttgccggcagcaatcaaagcggcggcaacagcatggcgagcgtgaatgccgcctatcgcgccaacgcgacgaccgttggcggctcctacagtgaatcatcagactatcgacagttgggcatgagcgcccgcggcagcctggtggcgatcccttggcatttgctggcgtccaacgaaatgggcaacaccatgatggtggtggacgcgcccaaggccaaagggctgatggtgaacggcgacgagagcatcgtcactaacgacgaagggctggctttggtgccttacgccacgccttaccggcaaaactccgtgacattgtcggataccggcaacagttccggcgccgagatcgtcggcaatatcgccaacagcgtgccctatgccggcgccgtcaactatttgagattcgaaaccgatcggcgtcggccttatacgctgcgcgcctttaagcgcggcaataagcccctgccatttggtgcggaggtggcggatcaaagcggccatgccattggcttcgtcgggcaggccagcgtcctgtatctgcgggtggagcagcagccaacgtcgctggaggtcaggctgaatgacggtgtctgcaagattgaacgcccgaaaatctcgatggacagcgcagccaacacatgtcgataa

SEQ ID NO: 439047 - DNA, 633 bp, Serratia marcescens
atgacaactacaatagagggtgcattaataaatgagcattctttaaaatacttttacagatggatttgtcatatcgtttttaaccagctagacgtcaataatgaaaaccctaaaaaaatgtttgctggcttaatgagaacgtacaatcttaaagatggagctataagtatattaaattcggcttttgttctctcaactcatttaagtatattagatccagtggagcaaaagctggtattcaaggttaaaaaaagggctctttttttaattaaaaaaagcattaaaggagattttaaaaacaataaagaaattacaaccttatttagacttctttttggaggaaaaactgccacacttataagtttagaaatgaatctgaaaaaaagttgtcaaagaatagacccatctattacagccacaataaagaaatataaaagcaatgagcttaaattcttactcccctataccacaaaaactagtggctgggttaccagttttttggattttacgatagctaagttagagcaagaaaatgctgataagatagccgaaaatttacgcttccttttccctgaagttatatctataatagagcaagcttcttcttcgatagatataggggagtttcactga

SEQ ID NO: 439048 - DNA, 204 bp, Serratia marcescens
atgctgaaaaattttgcgttttttcgtgcgcaaatcaacggcaccgttcccaaccgcagacaatgtcaatggggcggcagagcccgccccaagaggtcttaccacatcagccggccgatcaatggcgcggccacgaccgtgatgataccggccagcatcatcaccaaactcgacaccacgccctcctgcggccccagctcatag

SEQ ID NO: 439049 - DNA, 1101 bp, Serratia marcescens
atgaaagaaaaaataagcaagattgataaaaatttctatactgacatttttattaaaacatcatttcaaaatgaattcgaggcagggggagttataccaccaattgccaagaatcaagtatcaacaatcagtaacaaaaataaaacattctattctctagctcactcatccccacactactctattcaaaccagaattgaaaaattcttacttaaaaatatacctttaagtgcatcgagttttgcattcaggaaagagcgctcatacttgcattatttagagcctcatacccaaaatgtcaaatattgtcatcttgacattgtttcattctttcatagcatagatgtaaatattgtacgtgatactttttcggtatacttttccgatgagtttttggtaaaagagaaacaatccttattagatgcattcatggctagtgtgactctgactgcggaattagacggggtcgaaaaaacattcattccgatgggatttaaatcttccccatcaatatctaatattatttttagaaaaattgacattttaatacaaaaattttgtgataagaataaaattacttatacacgatatgcagatgatcttttgttctcaacaaaaaaagaaaacaatatattaagcagcactttttttataaatgagatttcatccattctctccatcaataaattcaagttaaataaatcgaagtatttatataaagaagggactatttctttaggtggatatatcattgaaaatattttaaaaaataacagcagtggaaatattagattgtcgtcttcaaaattaaagcccttatgtaaagcactatatgaaatcaagaaaggtagctcttcaaagcatatatgcattaaagtatttaacctaaaactcaaaagatttatatataaaaaaaataaagaaaaatttgaagccaagttctactcatcgcaactgaaaaataaactcttgggatatcgctcttatctgctttccttcgtaatattccataaaaaatacaaatgcattaatcctatttttttagagaaatgcgtatttcttataaatgaaattgaatctataatgaacaggaagttttaa

SEQ ID NO: 439050 - DNA, 1761 bp, Serratia marcescens
atggatttatacaactgggaagacatatggagaataataagtagcattaactccttcaactttcagaaaataagcgaagatgaaatcctgaaatttttagatgaaaatatttcatctagagatggcgactacaaaaaatacatcactcgcattactgatgtaattgacacaaaaccatacacctataaagagaaagtaattaattatattaagatagcattgaaaggtcatattttcacgaactcaggcgaagatatcctccatcagtctgatggaacaaattcacataaatatattgaaacaattattaagttgctcatttcgttatcacgaaccgagttcataacacctaccatatatatagacgaacccgagataggactacatccaaaacttggcgagcaatttattacaacaattcacataacttataatagatataaaaaaagcgttcccgaaaaggaatcaggaaaatactcaacaccttatccttgtttaattttcagcacccatgcaccaaatattttaaagcaaactattaaacttttttcaacagatcagcagattttgcatttttctaaaaagaataaatactccacaaagatatctaaattaaattcacaatatagtgatttgcgttttataaatatgtttagcgataatgaagctagactttttttcagtgagtatattcttttcgtagaaggttccactgaaatggaagtcttccaaaatagttctttagctagaatttatcctgatttaggcaggattgacatatacgccagtgatgatgttatgttgagaaatataaacccaacttattctcaagcagcaattccatttttaattgttaaagatatagacaaggtgattaagcttgactataaaaatgaaatattaagtctggatggtgatatttctctagttaataaactaatacgaaaaggcagtttaaatttttataatccatccttaataaaaaaaattgacagcgcaaaggaaataataagagcggataagtctaagaaggaaatgtcggttgatggcttgtttttcaaaacatttagaattgaaaattttgtgagggatttcaataaactgttaaaatcatttaaccttaattatatgacaactacaatagagggtgcattaataaatgagcattctttaaaatacttttacagatggatttgtcatatcgtttttaaccagctagacgtcaataatgaaaaccctaaaaaaatgtttgctggcttaatgagaacgtacaatcttaaagatggagctataagtatattaaattcggcttttgttctctcaactcatttaagtatattagatccagtggagcaaaagctggtattcaaggttaaaaaaagggctctttttttaattaaaaaaagcattaaaggagattttaaaaacaataaagaaattacaaccttatttagacttctttttggaggaaaaactgccacacttataagtttagaaatgaatctgaaaaaaagttgtcaaagaatagacccatctattacagccacaataaagaaatataaaagcaatgagcttaaattcttactcccctataccacaaaaactagtggctgggttaccagttttttggattttacgatagctaagttagagcaagaaaatgctgataagatagccgaaaatttacgcttccttttccctgaagttatatctataatagagcaagcttcttcttcgatagatataggggagtttcactga

SEQ ID NO: 439051 - DNA, 1761 bp, Serratia marcescens; identical to SEQ ID NO: 439050

SEQ ID NO: 439052 - DNA, 1101 bp, Serratia marcescens; identical to SEQ ID NO: 439049

SEQ ID NO: 439053 - DNA, 441 bp, Serratia marcescens
atgaatatgctgttactgctaatcgcggccgggatggggctggtggtgcagaatctgctgatggtgcgcatcaccgaaagcgtctcgaccatccttatcacgctggtgatcaactccagcgtcggtttgctgctgctggtggggttgctgctggccaaaaacggcctcggcgcggtggcggaagtgaccggcgccgccaaatggtggatgctgttgccggggctgctgggatcgctgttcgtgttcgccggcatcctgggctaccaaaaactgggcgcggcggccaccatctcgatcctggtcgccagccagctgtgcatggggctgttggtggacgtctaccgcgccggcccggcggcgctgcgcgagaatctgccggcgctgttcggcgccttgttgctggtggcgggcgcttatctggtggcgaaacgcagcttttga

SEQ ID NO: 439054 - DNA, 519 bp, Serratia marcescens
atgattatacgaaatgcgacgttcaacgatagcgcggcgattgccgctatctataacgacgcggtgttgaacagcaccgccatctggaatgaacaaaccgtggatgcggccaatcgcgcggcgtggatcggcgaacggcaggcggcgggttacccggtgctggtggcggtgaacgccgaggacgaagcgatcggctatgcgtcgttcggcgactggcgggcctgggacggctatcgccacaccgtggaacattcggtgtatgtccatcaggcgcatcgcggcgcagggattggcaaggcgctgctgctggcgctgatcgcacgggcgcgggaaatcggcaaacatgtgatggtggccggcatcgaatccggcaatcaggcctcgattaagctgcatctggcgctggggttccgcgacgtggggcgcatggaacaggtgggcgccaaattcggccaatggttggatctgacgttcctgcaactgaggctcgacgaacgggcgacgccgcccgcgcgctga

SEQ ID NO: 439055 - DNA, 570 bp, Serratia marcescens
atgaatattaaattagacaatctaaatcagctgatcggcgcacgcattcgcattgaacgcgaggcgcgccactggtcgctgtccgatctggccgaacgggcgggcgtctcacgggcgatggttcataagatcgaacgcggcgagagcagcccgacggcgatgctgttgggcagactggcgggcgcgttcggcctcagcatgtccaagctgatcgcccgagcggaaacgcaggaaggccggctgctgcgccgggaagatcaacctatctgggtcgatcctgagagcggttatgtgcggcgccacgtgtcgccccgcaccgatttgccgctcgatctggtgcgcatcgaactgccggccggcgcggctatcccgatgccggcttcggtgtacgcgttcaaacgtcagctgatctgggtcttatccggcgcactggtctttatcgagggtgacgcgcgccatgagatggccgagggagactgccttgagctcggcccgccggcggactgccgatttgaaaatcagagcgaccaaccgtgcgtgtatatggtggcggtgctgagcgccgcctga

SEQ ID NO: 439056 - DNA, 294 bp, Serratia marcescens
atgggggatcattttggcaaagggctgttggcgggattaaaagcggacaacctgaaaccggaggcggagctgtcgcgcttttgctccgactacaagcgcggtttcgtgctcggctatgcgcaccatttggcgcagcgctgcggcgacgagaaccgggcggcgttcgaggccgggcagctcagccgcgcctatgggcttggcagcgagccgatgagcgagttcttctccggtggcgacagccggttggcggagaagtttttccgcgccggctataaccgcccggcgcagggttag

SEQ ID NO: 439057 - DNA, 588 bp, Serratia marcescens
atgagccagccaagaatctccgattacccgattgatgcgcaatttatcgagcgctggtcgccgcgcgcgatgaccaacgacgccatcgacgatcaaacgctgctgagcttctttgaagcggcgcgctggtcgccttcggcctacaacattcagccgtggcgctttgcctacagcaagcacggctccgacagctgggagaactacctggagttcctgatcgacttcaaccgcggctgggcgcaacacgcctcggcgctggtggtgatcgtctccaaaaccaccagcctgaacggcgagcgactggtggacaacccgacccacgcgttcgacaccggcgccgcctgggccaacctggcgcatcaagcgcacctgaaaggttggctgacccactgcatgagcggcattcaccacgacaagattaaggcggcgctgcagctgccggacgactatgcggtgcacgccatggtggcgatcggcaaaccgggcgacaaatcccgcctgccggatttcctgcaggagaaagaagcgccgtcgggccgcctgccgctgggcaacaccgtcagcgaagggctgaatttcacgctgtga

SEQ ID NO: 439058 - DNA, 897 bp, Serratia marcescens
atgttcgctacgctgcccgtcaacgcattacgcaccttcgaatccgccgctcgcctgcgcagcttcaagctggcagcggccgagctggcggtgacgccgacggcgatatcacaccagatcaaagcgctggagcagcagttggggtttgcgctgttcgagcgggtgccgcgcggcgtgcggctgacaccgaagggggaaacgctgttttccggggtgcacggcgcgctgctggacgtcgccgccacgctcgaaggcctgcggccgcagcccagcgcaggatcgctgtgcgtttcggtgacgcactcgttcgcggcgctgtggctggtgccgcgcctggggcgcttctatcaggcgtatccgcactatcttgtgcgcctggaggcctgcgccgaggtgatcgatctgcagcaagacgccagcgtggacgtggcggtgcgctacagccgcgcgcactatcccgcgctgcatcaggcggcgcggctggaggaaagctttggcgtctacgccgcgccggggctggccgccgccgagccggaaaatccggtgctgatcaccgtcaagtggggggattcggcgctgtacgacagcggctggcatgactggtgccgggccgccggggtcgattggtggcgacgccatgcggcgatgcgcagctatcacgaggagcattacgccctgcaggcggcggtggccgggcaagggtgggtgctcgccagctcggtgatggtgtccgagatggtggacaacggcctgctggtggcgtaccggccggaggtgcgcgtaccgggcgccgcatacagcgtgctgtgcgcgccggggcgcgagcggcatccgccggttagggcgtttctggcctggctgcagcaggaactgccgcaggacaatggcacgaaataa

SEQ ID NO: 439059 - DNA, 636 bp, Serratia marcescens
atgaatgcaactcatcaacccaagcgtttggcggtgctggtcggcagcccgcgccgcgacggcaacagcgccacgatggcgcaggcgatcatggcgggcgccgccgaagccggcaccctcgccagcctgcattttctcgacgattacctgagcggttttctgagcgatgaacgccatacgccgccgccggccgatcgctacgccgagctgttcctggagcacttcctgccggccgacggcgcggtattttgcacgccgatttactggtacggcatgtcggcgcaaaccaaggcctttttcgatcgctcgttcagcttctattccaatgcctaccctcaggcggccgacgtgcaccaacgcatgagcggcaagcgcatcgggctggcggtggcgtcggaagagacctaccccggcgcagcgctgggcatcgtgcatcagatccaggagttcagccgttacactcattcagccttcgtcgggctggtgcacggcgccggcaaccagcgcggcgagatcgcccgagatccgcgcaacccgctgcgggccgcccgcgagttggggcgcgagttcttcactcgcccctattcggattatcagatggacagcccgcgcagcacgcaggtttgggcggactga

SEQ ID NO: 439060 - DNA, 1380 bp, Serratia marcescens
atggcgaagcgtgcccatattatcgttatcggcggtggtttcaccggcgcggcgctggcgatccagctggcgcgcggagcggtggatgtcacggtgatcgaaccgcgcgcggcgccgggctatggcgtggcctactcgaccaccgaaccgacccaccgcatcaacgtcccggccgatcggatgcagctggcggatgaaccggcgggggattttgaccgctggtatcgcctgagcggcggattggtggccgatccgcaggcgttgtggcgcgacggtaaagcctatccgcagcgcggcgccttcggccgctatgtcgaggaacgtttccatcaggcggcgcagtcgggccgggcccgcttgcggcacctgcgcgatcgggcgctgcacctgcagccgcaggcgcagggcgcgaccgtcatcaccgccggtggcgaacggctgtggggcgactatgtggtgttggcgaccagccatccgccgcccgcgctgccgcggcagatcgccccggagctggcgcgcgatgcgcgtctgatcgccaatccctgggcggcggaggcgctggacgacgttgaacccggtgaggcgttggcgatcgtcggcactgggttgacgatggccgatacggtagcggcgttgcaccgccgcgggcatcgcgggccgattaccgccttctctcgtcacggcctgctgccgcgccccaatgccgaaggggagtacccgacatggtcgtttgccccgcccgccggactgcgcgatggggtgcggcaggtgcgccttgaggtggcgcgcgccgctcggcaacgggtgccgtggcaggcggtgttggacgcggtgcgcgcccaggggcagcgcctgtggcaagcgttgacgccgaccgaacagcagcgctttctgcggcatctgcgcgcctattgggacgtgcatcgctatcgccttgcgccgcaggtgagcacgctgctgtcggagcaacaggcggcgggcacgctgcaggtattggccgctcgtttgcggcgggcggagcgaacgccgcagggcgtaaggttgacgattctgccgcgccaaggcgcagagcgggcgctgcaggcgcagcggctgctgatcaccacgggcccggcccatgccggcctgatcgccgccagccccttgctccgttcactggcggagcagggggcgctgcgcgccgatccgctggggctggggctgtgggtcaatgccgacagccaggcgatcggcggcgacggcctggccaacccgcgcctgctggtggccggcccggcggcgcgcggccgcttcggcgaactgatggggctgccgcaggtggcggaacacgccgaaagcgtcgcgcgtcatctgctggcggcgatcgccgccggagggtga

SEQ ID NO: 439061 - DNA, 1173 bp, Serratia marcescens
atgactgagtcagcgaaagaacgcatcaacgttttctggtttctgccgacccacggcgatggccgctatctgggcacggcgcagggcgggcgcccggtagacctgccttacttgcagcaagtggcgctggccgccgataaccttggctattacggcgtgctgatcccaaccggcaaaagctgcgaggattcctggctggtggcggcggcgctggcgccgatcacccgtcggttgcgctatctggtggcggtgcgccccggcctgcagccgccgagcctggcggcgcgcatggccgcgacgctggaccggttgtcggacgggcgcctgctgatcaacgtggtgaccggcggcgatccggtggaaaacaaaggggatggcatcttcctcagccatgccgaacgctacgaggtgacacaggaatttctcacggtgtatcaacggctgctgcaaggggagaaggtggatttcagcggtaagcatattcgcgtcgaaggcgccgaactgctgttcccgccggtgcaggaaaacggcccgccgctctatttcggcggctcctcgccggctgcgctcgacatcgccgccgggcagatcgacacctacctgacctggggcgagccgctggctcaggtggcggaaaagctggcggcggtgcgccagcgcgccgagcggcaggggcgtaaactcagctacggcattcgcctgcacgttatcgtgcgcgaaaccgaagacgaggcctgggcggcggccgagcgactgatcgcgcatctggatgacgacaccatcgcggcggcgcagcagatctttgcgcgcatggactccaccggccagcgccgcatgagcgagctgcatggcggctcgcgcgagagtctgcgcatcgcccccaacctgtgggccggcgtcggcctggtgcgcggcggcgccggcaccgcattggtgggcaatccgcagcaggtggcggcgcgcatacgcgagtatcaggcgctgggcatcgacaatttcatcctttccggctatccgcatctggaagaggcccaccgcttcgccgaactggtgatgccgctgttgccgctggcgcagccggcccatcagacggcccgcacgatcaataccggcccgttcggcgaaaccatcggcggcgatcgtcgtcccggcccggcgcagcgggagggctga

SEQ ID NO: 439062 - DNA, 1920 bp, Serratia marcescens
atgtacgatccccaaccgttcgccgccgacaaaccggtgctgatcgatccagcgtcgctcgctctgcaaagcgtgctcgatcggctggcccccaccgatgccaccgtactgatcgtcggcgaaaccggcaccggcaaagaggtggtggcgcgctatctgcaccaccacagcgcgcgccgccatcgcccttttttggcggtcaactgcggcgcgctgacggaaagcctggcggaagccgaattgttcggccatgagaaaggcgccttcaccggcgccgtcggcacccatcagggctggttcgaagcggcggaaggcggcaccctgctgctggacgagatcggcgaactcaacctgtcgctgcaggtcaagctgctgcgcgtgttgcaggaacgggaaatcacccgcgtcggttcgcgcaaaccgctgaagatcgatgtgcgggttatcgccgccacccacgtcgatctggccggcgcaatccgccaacggcgcttccgcgaagatctctattaccggctgaacgtcgcggcggtgaccttacccccgttgcgccagcggccggaggacattccggcgctgaccagacactttcttgcgctgtacgcccgccggctgggacggccgccgctgcagttgacggtggaagcgcagcaggcgctgctggactacccctggcccggcaacgtgcgcgagctggagaacacgctgcataatgcggtcttgctgagccaggaggggccgatcgccccgcagcaactgcggctcacgcaacgcctggcggatcacggcggcggcggtgacgacgccatcgatcgcttcgtgcagcagcagttgcaaggcgacggtaccaagctctaccaacgggtgctggatgcgctggtgcgcaacgccttcgaacgcagcggcggcaaccagctgcaggcggcggccttgctcggcgtcagccgcaataccctgcgcacccatttggcgcatcttggcctgatcaaaccgcgccgccgcagcgtcggcgcgcccgcacattcgccggccatcagcgcagcgccgctgcccgaacgcgaactgcgcatcggctatcaaaaatttggcaacctcggcgtgctcaaggcgcggcaaagcctggaacagcacttcgccgcacagcgcatcagcgtactgtggagcgagtttcccgccgggccgcagctgctgcacgcgctcgacggcgatgaaatagacttcggcaccaccggcgaagtgccgccgatcttcgcccaggcgcagggcaacgcgctggtgtatgtcgggtttgagccgccggcgccgcaaagcgtggcgatggtggtgccgcaagacagcccgatacgcagcgccgccgatctgcgcggcaaacgcatcgcgctcaacaaaggctccaacgtgcactatttattgctgcagatgttggacgaacagggaatgacgttgaacgatgtgcgcatcgtctatgcgccgccgaagtatccgctgtcggcgaccgacctgcaggcagtggacgcctggatgatgtgggatccgctgctcagcgacgcgcagcgcagcggggaactgcgcgtgatcgccgacggcacccaacgggtgctcaatcagcaattctatctggcgcgccgcgagttcgccgagcgctcgggcgatctgttgcagccgctgatgcaagcattgcagcacaccggccgctacattgccgcgcagccgagagaagccgctcgtcacctttccgacgaactggggctggcgagcgcctcgctggaactcgcgctgtcgcgccgcagccacgagatccgcgccatggatttgcaggtgatccgccagcagcaaagcatcgccgaccgcttctacgccctggggctgttgcccaaagcgatcgccgtgcgcgaggcggtttggccgctgggatcttag

SEQ ID NO: 439063 - DNA, 726 bp, Serratia marcescens
atggattgttctaacaagttcagacgcaatattttagatgagataatcgctatcattgaaaaagccattgatacacaaagccatgtatcaataagggcgctatccattaagtcagggtattccatcgggcatttacagcggatgttctatttgtatgaagggatgaaaatagggacctatatcagaaagcgcagactaagccgcgcgacgttattgctgaaatgtaccgatatgaagatctatgaaatcgcgttgctctccgggtttagttctcagcaatcatttagccgtgcgttttcaaatcaattcggttgcccgccgagaacattcagaaccctgcgcgattggccttttctcaattatcaaccgattattggcttcgataaagagcctttccccagcagcatcgtgtacttgaatttgcatgagtattacgagaataaaaggatcgtgcaactgctttcgccggtaatcagccgggggcagatgaaggtaaacgtaaagaatccaataacctgtagcctgtacaacgcatcagcaaagtacattgcgatcagacgcaatgaaaaaaagatgagcgaaaacgagttcatcctatcactctatgagggggtgttggcttccctggatatcttcatcacgcaaagcgtaatctttaaaattcacgatcactgcccaggtgaaaaggaaaacgtcagcatgtggtatttcatcccgataaaatga

SEQ ID NO: 439064 - DNA, 888 bp, Serratia marcescens
atgtttataaccaaagtcattgaggagctgctcgcctgggtggaagaaagtgggttcaatgagaagctcaccgttgagatgctgtcagaaaaaagcggatattcacgcgggcatatccaaaaagcgtttaaagatgaaacagggatgactttcgggagctatgtgaggggcagaaaactcattcgcgccgcatttatgttgaaagcgacgaacctctctatttccgatatcgttaaagcgctgaactttcagtcatatcaatcctttgaacgggcgtttcgcaagcaattcagaacctcgccgatgcagtatcgcaaaagtaaatcgtgggacgtgtcctccgccatcccattgctgtttctcgacggcattcccgagcatcgctatgtgcacctgccaaaatttttcgacgattcaggggatggcgttgatgcagagatagatcacttccatcctgcggtttccgcgctgcgattggcggcaattgataacatgaaaaaaacggatagcggcgtgattaactttttcaattttggcgcgagcatcaagaaagagaattacgtcagcatctatttgaagaccctctatatttctgaagaagactgtcttggcagcgtgcttgcctctctggccgacgcccagggaaaaaaagacatgcaactttatgcagagttctgttttgacggcgcaagcgatgaggcgcaaaaattcacgcaaagcatctacaccaaatcattcccgataaataaagttggcatgatcgatcgctttctcattgaaattatcacccccaaaggcggcgatagaatagagatgaagacctatatccccattgtctttcctatcaagcacagagagaaagaggtagcgccagggccagcgcggtaa

SEQ ID NO: 439065 - DNA, 2340 bp, Serratia marcescens
atgattagaacatcgtttggtaagagagccgcaataatcacgttcttttgcttgctggttttttctggcgtcgcgttaaccgtggggggaatttggctgatcgccctcggcggatcgttctactatgccattaccgggataggctacatcgccgccgcagtgctggtcctcaagcgcagcaaatcggcttgttacttaaccggcctgctgtttttgatgacggtgctgtgggcactttgggaatcggggcttaactactgggcattgttccctcgcctgctggtgcccgccggcctctctattatcgccgcgtttttacttccctcgtacctgcacagcgccaagagtcgaacgcaggcttacatcgccggttcggcattatccgtggcctttgtcgctttctttatcggcgccttctttccccatggcgaaattacccctgctggcgacgtgacgtttatcgagagcaaaagcgacaatgcgcctgccgattggagcgcctatggccgcacgacggaaggaacgcgctacgcgccgttcaatcaggtgaaccgttcaaccgtcaaagatctgaaactcgcctgggtttatcgcaccggcgatttccggccgggcgtggaccaaaataccccgctcgcgattgatgatgtggtttatagctgcacgcccaacggtcttatcaccgctatcgatgccgatacgggtaaagcgcgctggaaatttgactcgcattccacctcccccgtttggcaacgctgccgcgggcttggctactacaaaaatgaggatgttgcgccaggcgctctgtgcgagaaaacgatcgttcacaccacgatcgatgcccgcctcattgcgctggatgccaaaacgggccagaaatgccccgccttcggtcaaaacggtgaggtgaatctcggccagcatatgggggaagtcaaaccgggttattacttccaaacctcggcgccgaccatcgccagagggaagattatcgtcggcggctgggttatcgataatgtaatgaaaggcgagccttccggcgtcatcagggcgttcgacgccaaaaccggcgagttggactgggcgtgggacttaggcaacccgggcatcaccaaggctccgccggccggaagcacctatacgcgcggcacgccgaatatgtggaccaccgccgcctatgacgacaaattaggcttgttgtatgcgccgcttggcaatgcaacgcccgactattacggcatgaatcgcccggaaaattcggatgagtacaactctgccctggtcgccattgatattgaaacaggccgtgagcgctggaaattccaaaccacgcatcacgacatttgggattatgacctcgcgtcccaacccgcgctggtggacggttttgatgagcaacatcgcccggtgcccgcccttttgctcggcaccaaacgcgggcagattttctacctgaaccgggagaccggcaaaccgttggcgcaggttgaagagaaaggagtgccgacgcaaggcgccgcagaggaagagcacctctcgccaacccagccgttctccgtcggcatgccgaccattggcgccgaacgcctgaccgaagaaaaaatgtggggcaccaccctgtttgaccagatggcctgccgcatcctgttcaaacagatgaattaccagggcgacatgaccccgatcggcacccgcccaacgctcgagcagcccggcaatttaggcggactcaactgggggagcatgtcgattgatcctgtgaaccatatggcttacatgaacgatgtgcgcatcccgaatgtgttttggttagtggcgcgcgacagctatgaacgcgtcgcgaagcagtacccgcaaaaagtgatcgatggtcacgggccttcccccatgatcggcacgccatacggcatgatcacgttgatgtggatgtcgccgctcgaagtgccttgcaaccaacccccttacggcacgatcaccgccgtcgattacaaaaacaaaaagatcgcctggcagataccggccggcaccgccgaaaaaatggggccgctgggcatcagatcgcacctgccgatgccggttggcatgcccacctacgcgggcaccatgacgacagccggcggcctggtcttcttcgccggcttccaggactattatctgcgcgcctacaacagcagcaccggcaaagaagtctggaaatatgcgctgccggtcggcgcgagcgcgacgccgatgagctacgtttcgcctaaaaccggcaagcaatacatcgttattgtggtcggcggcgccgcgcattcgtcagaaaccggcgattacgtgatggcgtttgcgctgccttaa

SEQ ID NO: 439066 - DNA, 1641 bp, Serratia marcescens
atggaaacattcttcaccatattgatcttattgctcaccgtctcgttgtccggcgtcgtgacgcgcatattgcccttccaaatcccgcttccgctgatgcaaatcatcgttggcgccgtgttggcctggccgcagtttgggttgcatatcgacttcaatcccgagcttttcttgatgctgtttattcccccgctgctgttcgccgacggttggaaaacgccggcgcaagagttcatccattacggcagagaaatcctttgtctggccctggtgctggtgatcatcacggtcgtcggggtgggttatctgattcacttcctgctcccgtcaatccccctcgccgccgcgtttgccctggccgccgttctgtcgccaacggacgccgtggcgctgtccggcatcgtcggtaaaggacgtatgcccaaacccgtgatgagcgtaattgaaggggaggcgctgatgaacgacgcctccgggttggtttccctcaacttctccatcgctgtcgcgctcggcgcgatggcgtttaccctggagagcgcctttctgacctttcttcaggtctctattggcggggtgctgtgcggcatcattattgtctttctctataatcaaatggttaagttcatccataaatggatgtataacgattccgccacccagattattttctcgctgttactgcccttttcctgctatctgattgcggaaagaatcggcgtatccggcatcctggccgccgtcagcgccggcatgatgattggccaatccaaagtgaatcgcagcatgccgctggtgcgtttacgcaccaataatatttgggaaatgctcgagttcgtgtttaacggcatggtgtttattctgcttgggctgcagctgccgggcatcttgaacttcaccgtggcgcaaaccggtatcgatcattccatcagcctggagacactgctggcttacgtggtgatcatctattttagtttgatcgccgtgcgtttgatttggctgtggctgatgaaggtcggcagcgcgaccctgatgcgcaaagatccgctgttattttcgaaattcagcacgcgcgatctgttcgtcgccgcctttgccggggtgcgaggggcggtgaccctggcgggcgtgctgtcaattccgctgtttctattggatggctcgccattcccggggcggtatcagctggtgtttatcgcctcgggagtcatcttgctgtcgatcgtcgtcggcatcgtcacgctgcccttcctgttgcgcggcaatctgccgccggaagaagatcaggaagaggctttctccgtttcagaagccttggcgagcgcggcgaccaaggccgtcaacgaaaccaaggaaaagctgctcgtcgccccgccggacgacgccacgccggaactgattgaagaaacgacgcggcggatgctggacgtgctgcaacgtaaaattctgaccaaagaagacgttaagaatatcgtggcgctgaagcggctggaaaagcagctgtacttagcctcgttgcacgcagaaagagaagagctgtaccggctgcgccgcatgaagaaaatcagccatgagaaacagagaaagctgctgcatcgcattgatatcactgaggtgctgatcgctgaagacagcgtttaa

SEQ ID NO: 439067 - DNA, 756 bp, Serratia marcescens
atggatttttgtaaccggatttccgtgtgtttattgacgtttaattcatcgcgcctgctgcgtgacgtgttgcaacctgtagcggcgttcgccgatgaaatcatcgtggtggattcgggcagtactgacggcaccttggccatttgcgacgacttcaatatcaagcctctttatcacccgtttgaaacccatggccggcaaatgaattacgccatatcccgcgcgcgacatgactgggttttgtgcctggacagcgatgagatcatggatgatgaagcggtcgacgcgatgcggcttttcaagcgcaccccaggccccgacaaaaataacgcctatcgcattcgtcgcgattggtttgtgttggggcaggcggtcagaacgctttatcccgtctcgtcaccggatttccccattcgcttttttcatcgtcaggtggtgaagttcaatgatgcgccggtagatgatgcggcggaagggggcgcatccaccttgatactggccgggcacgttaaacacgacacttttttctcaatcgaggaagtgtttgccaagctgaacagctatacggcgcgcgtggtgaaatacaaggcgataaggccatcgattctccgaggggtgattagcgccatcggcgcatttttcaagtggtacattttcagcggcgcctggaaagcgggccgggtcggggccgtgaccggcgtttacgcggtgtcctacagctttttgaagtatttcaaggcgtggtaccacagatag

SEQ ID NO: 439068 - DNA, 243 bp, Serratia marcescens
atgaaaatccagctgtcgctgctgtttctcagcctgttggccggcaaggctgcggcgtttcagtcaaaagtgcccgagccgcgcaccgaacaggcgcgtgcggcggaacagaacatcgaaaatctgttttacggctttcacgctatggacgcccagccggtgaatatcggccgctgtgaggcggtgccggtggcgggatgccagtgcgccttctgcacccagctgcggcaggccgggcgctga

SEQ ID NO: 439069 - DNA, 630 bp, Serratia marcescens
atgaccgagcgacgttattactacagcgacgatttacagggccaggcgcaggtattgagctgtgagccggccgaggcgggcgcttacgccgtggaactggacgccacgctgtttcacccgcagggcggcgggcagccggccgacgtgggagcgttgaacggcgtcgccgtgctgcgggtgcagcagcagggggatagggtgttgcactataccgcggcgccgctgccgatcgggccggtcaatatgcaggtcgacgaagcgcaacgccggctgcacgcccgctggcactccggcggccatctgatcggctggctgggggaaacccgcggttggcggccgatgaaagcgcatcattggccgggagaagggcgcatcacgttcacgccggggccggacgtacagacgctggaggcggcgtttttacacgcggagctggcgcgcctgatcgccgccgatttgccgcgtcgccaacaggcggtggacgggatgcgccagatcggtttcggcgatctgcccgcctacggctgcggcggcacgcatgtcgccacgttgggcgaggtgggcgcgatcgcgattaccggcgtaaagatgaagaaagggcagctgatcgtgcagtatgcgctgggataa

SEQ ID NO: 439070 - DNA, 936 bp, Serratia marcescens
atgagcacaaatctttcttacgcgctgttggccgaaatggccgttttcgtccaggtcgtggagagcggcagcttttccgccgccgcccgcaaactgggcgcttcaccttccgccgtcagccgcagcgtggcgaagctcgaacaggcgctggcgctgcagctgctgcatcgcaccacccgtaaactgcggctgagcgaaagcggcgaagaggcgtttgcgcactgccgcaccctgctggcggcggccgacgcggtgatggcgatcggcgggcgcggcgccgcagagcccgaagggctggtcagcgtcagcgtgcccaaggcggtaggccgtttcgtgctgcatccgcacatgccggcgttcctgcgacgttatccgaaggtggacgtgaggctgcggctggaagatcgttatatggatctgatcgacgaccgcgtcgatctggcgctacgcattaccgatcgcccgtcgccgggcttgatcggccgtcagctgatgcgaatagaccacctgctgtgcgccacgccgcactatctggcgcagcacggcgcgccgcagcacccgcacgatctggcggcgcacagctgcatctatctgggagaaacgccgagcgacgcgcaatggaagttccgccgcagcggcaaaacggtgacggtcaacgtgcgcggccgctacgccgccaaccacaccggcgtgcggctggacgcggtgaaacggcatatcggcatcggcagcctgccgtactttaccgcccgccaggcgctcgacgagggcgagatcgtgcaggtgttgccggaatgggatttcctcagcagctatcacggcggcctgtggttgctttacgcgcccaaccagtatctgccgcccaaactgcgggtgtttatcgactatctcgtcgcctgcctggcgcaggagccgcagctaaagcgccttgcgtag

SEQ ID NO: 439071 - DNA, 648 bp, Serratia marcescens
atgacaatcgatctttttgaagacgcgctgccgccgccgtggcgtgaagagatcgcccccggcgcggtggtgatgcacggctttgtgcgcgatcacgggccggcactgctggcggcggtgcagggcgtggtggcgcaggtgccgtggcagcatttgaccacccccggcgggcacgtgatgtcggtggcgatgagctggtgcggcaacggctggaccagcgacagccgcggctaccgttactcggaacgcgacgcgcgcagcggcaaacgctggccgccgatcccgcctattctgatggcgttggcggacgaagccgcgcagcaggcgggctttggccccttcgtgccggattcctgtttgatgaaccgttacgatccgggcagcaagctgtcgctgcatcaggataaagacgagcacgacttcggcgcgccgatcgtctcggtgtcgctcgggttgccggcggtgtttcagttcggcggcctgcagcgcagcgatcgggcacggcgcatcccgctggcgcacggcgacgtggtggtgtggggcggcccgtcgcggctctgtttccacggcatcctcccggtcaaggaaggctaccactcgctggtggggccgcaccgcatcaacatcacgctacgcaaggcgctttag

SEQ ID NO: 439072 - DNA, 879 bp, Serratia marcescens
gtgattaagggcatcactctttcggtcgtcgcctccatcttgtttggcgcgatgtattacttcacctctaccctcaccccgctgaacggcgaacaggtctacggctggcgcacgctgctgacgctgccgttcctgacgctgttcatggcgctgtccggcgattggcgcaaggtgagcgacacgctggtcgggatcggccaacggccgccgagtctgctgggcctgctgctcacctcggcgctgctgggagtgcagctgtggctgttcctgtgggcgccgctgcacggcaaggcgctcgacgtgtcgctcggctattttctgctgccgctgaccatggtgctggcgggccgtttgatctaccgcgatcggctgtcgctgctgcaaaaactggcggtggcgtgcgccgtggcgggggtgggcaatgagctgtatcaggcgggcggcgtatcgtggccgacgctggtggtggcgctggggtatccgctctactttattttgcggcggcgtttcggcaccgacaatctcggcggcctgtggtgcgagctgacgctgatgctgccggcggcggcctggttcgccttcggcgacggcggcgcggcggcgctgcagatcaatgccgagctgtattggcgcattccgctgctcggcgtcatcagcgccgtggcgctggtgtgttacatcctcgccagccgcatgctgccgttcagcctgttcggcctgctgagctatgtggaaccggtgctgctggtgctcgtcgcgctgctgctcggcgagagcatcagccaaagcgaatggccaacctatctggcgatctggttggcggtgctgctgctggcggcggaaggcgcgcggcacctgctgcgccgccagcgggtctga

SEQ ID NO: 439073 - DNA, 747 bp, Serratia marcescens
atggatttcaccggcaaacgcgtgtgggtgaccggcgcggcgcgcggcatcggtgagcagatcgcccgccactttttaacccagggcgccgaggtggtggggtttgaccgagaattcgccaatccggatctgccttacccctgcgtgacgctggacatcagccggccggagcaggtggaggcggtgtgccgccaacagttggcggagaacccgcgactggacgtgttggtcaacgccgccggcattttgcgcatgggcaataccgaagatctgagcgtggatgactggcaccagtgcatcaacgtcaacgcctcgggggcgttttacctgttccgcgccgtgctgccgcacttcaaggcgcagcgcagcggggcgatcgtcagcatcggctccaacgccgcgcacgtgccgcgcgcgcagatggcggcctactgtgcctctaaggcggcgctgaccagcctgaaccactgcgtggggttggagatggcgccgttcggtgtgcggtgcaatctggtgtcgccgggctcgaccgacacgccgatgcaacgcggcatgtggcagaccgacgatgcgcagcaacgcaccatcgccggcttccccgagatgttcaagctggggatcccgctgggtaaaatcgcgcgtccggacgaaatcgccaacgcggtgctgttcctggcctcggatttggccagccacatcaccatgcaggacatcgtgatcgacggcggcgccacgctggccgcctga

SEQ ID NO: 439074 - DNA, 1191 bp, Serratia marcescens
gtggcgacactgacgacagaaaaccaaaccttctccgggtttgagtacgccgaacaatcgacctttttgtaccggtcagaattccgttccctctccgcccacggcgtgtttgagcgtatcgagacgccggcgttcggcggcgagcaggaaggcagcgcgctggcgcagcatattcgccaggcgctggcgcgcgccaaagccgccggccaggcggccccggtggtggtgggcgccattccgttcgacacgcgccggccttcctgcctgtatatacctgaagaaagccgattcgtcgccaacgacagctttatccgcgccgcgcgcccgatgctgcaacagccgcatcgcctggtcgcctgcaccagtattccggacgagccgcgattcaaacacgcggtcgcggaagcggtcagccgttttaaacaaggcaagctggacaaggcggtgctgtcgcgcatcctcgatatcgagctggagcagccggtggccggccaccggatcctcaataacctgatggtgcagaacccgaccggttaccacttctctctgccgctggccgatggcagcgtgttgatcggcgccagccctgaactgctgatccgcaagcagggcggcgagatccacaccaatccgctggcgggctcggcgcgccggcaggacgatccgcagcaggatcgcctcggcagcgagcgcctgatgcgctcgaccaaagacaaatacgaacacaaactggtgatcgacgatattcgtcggcatctgacgccgctgtgcgccaccctgagcgtacccagcggcccgtcgctgctcagcaccggcaccatgtggcacctgtccacccgcattcgcggtgagttgctgaatccggatctcaacgtgatgcagctggcctgcctgctgcatccgacgccggcgctgtgcggcttcccgaccgaaagcgcccgccagctgatcgccgctctggaaccgcacgatcgcggcttgttcagcggcatcgtcggctggtgcgacgccaacggcgacggcgagtgggcgatcgtcatccgcagcgggctgctgcgcggcaaccgggtgcggctgttcgccggcgcgggcatcgtcgccgcctcgacgccgcagtccgagtggatggaaaccaccgccaaactgggcaccatgctcaacgctttcggcctgaacagcggcgcgctgtag

SEQ ID NO: 439075 - DNA, 693 bp, Serratia marcescens
ttgcccacttttatccgcaatatcgaatttttctcgccggacggctatccgggccaggtggcgcgctgccggtttgcgctggcggagtatcgcgacgacagttttcctgaggcgggctttgcgctgccggatcatctggcgcgcgcggtgccgaaacgccgtgcggagtatctggccgggcgtgttctggcgcggcagctgctggcgccgctcggtttcgccgacttcaccctggcgcgcggcgaagatcgcgcgccgcagtggccgccgggcatcgccggggcgctgagccataattcgcataccgcgctgtgcgccgtacaccgagagagcgggctgggcggcgttgggctggatgtggagacgctgctgtccgtggcgcgagcggaggagttgtggagcgcgatcgtttcaccggcggagcgcgagacgttgctgggcgaaacgctgccgttcaacgagctgctgacgctgacgttttccgccaaagagagcctgttcaaagcgctttacccgcaggtgcgccgatatttcgattttcttgatgcgcggatggtggcggtggatgcgcagcggcagacgttcgaattggcgctgctcaccacgttgacgccgcattgctgcgccggacggcgtttcgccgggcggttttggcgcgaaggtgacgatgtcacgacttttattttttgctaa

SEQ ID NO: 439076 - DNA, 1230 bp, Serratia marcescens
atgagaaaaaaaacgttattgctgtgcctgcctttgttattcaccgggaacgcgctggcggacgccggcggttatcaactggaacaggtgctggtgatgagccgccataacctgcgcgcgccgctggccaacaacggcagcgtgctggcgcagtccacgccgaaggcctggccggcctgggaaacgccgggcggccagctgaccaccaagggcggggtgctggaagtgtatatggggcactatttcaacgcctggctgaagcagaccggcctgttgccgcaagagggctgcccgaccgccggcagcgtgtacgtctacgccaacagcctgcagcgcacggtggccaccgcgcagttcttcagcaatggcgcgttcccgggctgcgacgtcagcgtgcaccatcaggacaagatgggcgagatggatccgaccttcaacccgatcatcaccgacaccagcgaagccttcaaccagcaggcgctggcggcgatgaacgccgcgctgggatcgctgaagctggatgcctcttatcagcagttggcgaagatcatcgactacaaggattccgccgcctgcaagaccgacaaacactgcgatctgaccaaagaagccagcgtgatgagcgcggtgccgggcaaagagccgggcgtctccggcccgctgcgggtgggcaactcgctggtggacgcctttatgctgcagtactacgaaggtttcccgatgaaagaggtggcctggggcaaaatcgccacgccgcaccagtggcagcagctggcgcagttgaaagacggctatcaggattcgctgttcacctcgccggtggtggcgcagaacgtcgccaagccgctgttgacctacatcaacaacgcgctgctgggcgagcggaaaccggacgcgccgaagctgacggtgctggtgggccacgactccaatatcgcctcgctgctgtcggccatgcagttccagccgtatcagctgccgcagcagtacgagaaaacgccgatcggcggcaaactggtgttccagcgctggcgcgacgcgcagaacgaccgggaattgctgaagatcgagtacgtctatcagtccaccgagcagctgcgcaaggcgacgccgctgacgctgcaaaccccgccgcagcgcgtgacgctggcgctgaaaggctgcccgatcgataaagacggcttctgcgcctggagcgatttcgaaaagaccatgaaaggcatcctgtaa

SEQ ID NO: 439077 - DNA, 1464 bp, Serratia marcescens
atgtcccaaacccaggaaaagatctggaaagcgatagcgccgctggcggtgctcgcgatcctgttattgataccggtgcccgacggcatgccgccgcaggcgtggcactatttcgccatctttgtggcgatgatcgtcggcatgattctggagccgatcccggccaccgccatcagctttatcgcggtgaccgtcagcgtgctcagcgccaactgggtgctgttcggcgcgcaggaactggcggagccaggcttcaaggccggtaaagaggcgctgaaatgggggctagcgggcttctccagcaccaccgtctggctggtgttcggtgcctttatcttcgcgctgggctacgaggccaccgggctggggcggcgcatcgcgctgttcctggtgaagttcatgggcaagcgcacgctgacgctgggctatgcggtggtgatcatcgatatcctgctggcgccgttcacgccgtccaacaccgcgcgcaccggcggcacggtgttcccggtggtgaaaaacctgccgccgctgttcgattccttccctaacgatccctcttcgcgccgcatcggcggctacctgatgtggatgatggtggtcggcaccagcatcagctcttcgatgttcgtcaccggcgccgcgccgaacgtgctgggcatcgagttcgtcggcaagatagccggggtgcacatcagctggatgcagtggttcctggcattcctgccggtcggcctgctgctgctgatcatcgcgccgctgatctcctactacctctacaagccgggcgtgacccacagcagcgaagtggccgcctgggcgaataccgcgctgggggaaatgggtaagctgacgcgcaaggagtacaccctgatcggcctggtgctgctcagcctgtgcctgtgggtgttcggcggcaaggtgctggacgccaccgcggtgtgcctgttggcggtgtcgctgatgctggcgctgcacgtggtgtcgtggaaagacattaccaaatactccagcgcctggaatacgctggttaacctggcgacgctggtggtgatggccaacggtctgacgcgctccggctttatcgactggttcgcccagaccatgagcacccacctggacggcttctcgccgaacatgacggtggtggcgctggtgctggtgttctacttcgcccactacctgttcgccagcctgtcggcgcacaccgccaccatgctgcctgtgattctggcggtcggcaaagggttaccgggtgtgccgatggagcagctgtcgatgctgctggtgctgtcgatcggcatcatgggcgtgctgacgccttacgccaccgggccgggggtgatcatctacggctgcggctacgtgaaatcgaaagactactggcgcctgggcggcattctcggcgtggtgtacatcgccgcgctgctgctgatcggctggccgatcatgagcctgtggtactga

SEQ ID NO: 439078 - DNA, 885 bp, Serratia marcescens
atgcgatctctgccgattaatccacccgcccgccgagccgagccggcctgcgacttcgcccgcgccgcctttcgcgcgctgttggtggaggtcaacctcacgcccaaaccggggctggtggatcgccataacaccggcgcccatcgcgacatggatcttgggcatttctaccgcagcgcccgcgccatcggcgtgtggctgccacgttttatccagcgcggccgcgaagacgcctgccggccggcggagcggcagttggcgcggctgcggccgctcggcctggcctgcgaaaaccagatgtttcgcgccaccggcggcattaacacccataagggcagcgtgttctcactcgggttgctgtgcgccgccttcggccgcctgcagcagcagggccgggccatcagcgccgcatcgttatgcgccgaagtggcggcgatgtgccgagggctggtggacagcgaactgcgatgcaacaacgccgggcagaccgccggccagcgcttgttcgctgcgtatggcctcagcggcgcgcgcggcgaggcggaatccggttttcggttggtgcttgacggcgcgctgccgctgtatcggcaacggctggccgccggcggcgacgaacagcgggcgctgctggacagcctgctgtggctgatggcccacaacgatgacaccaacgtcgcctcgcgcggcggcctgcgcgggctgcgctggctgcggcaccgggcggctttgctgctggcgcagggcggctcggcgggggaggcgggcctggcgcgcctgcggcgcttcgatgccgattgcattgcccgcaacctcagccccggcggcagcgccgacttgttgatagtgacctggctgctggcgcagctgggtgcccaagaataa

SEQ ID NO: 439079 - DNA, 549 bp, Serratia marcescens
atggccgccgtcgatcctcaactggccgccgaacgtgcggtcagcctgccggagctgcttaccagccgcgaatgccgtcaggcgcgccagcaggcgtggctggcgcagcacgagtgcacgctggtggtgctgacgctggtggtgcccggcccggtgaaggacagcgcgttgacgcgcggcatcttcaacctcgggtgggcggcgctgctgcggctgtgcgccgaacagggctggccgagcccgcaggccgaggcgctggcgctcgccactggctgcgaggggtttgtggcgctgtgcgccgacgcccaacgggtgaaagattgcgccatgcagctggaagtgagccgcccgatcggccggctgtgggatatcgacgtgctggatgcgcaggggcgcattttgtcgcgccgcgacatcggcctgccggcgcggcgctgcctgttgtgcggccaaccggccaagatctgcgcccgccagcggcggcatagcagcgagcagctgctgcaagaaatggaaaggatgttcaacgatgcgatctctgccgattaa

SEQ ID NO: 439080 - DNA, 1509 bp, Serratia marcescens
atgatgaaccgccaacaacgattgatgaccttcgccaacccggcggatctgccgggctatcaggacgtgtccaaagccaatctgcaggcgcgtaaaccgcgcgatctcaagctgtgcgactccttgcaggaagcggtgcgccgcagcgggctgcaggacggcatgaccatctccttccaccatgcgtttcgcggcggcgatctggcgctcaatcaggtgatggagacgctggcggcgatggggttccgcaacctgacgctggcctccagctcgctgaccgactgccatgcgccgttggttgagcatatccgccacggcgtggtgagccgcatttacacctccgggctgcgcggcccgctggcggacgccgtatcgcgcgggctgctggcggagccggtgcaaattcactcgcacggcggccgggtcaatctgatcgaatccggcgagctgaagatagacgtggccttcctcggcgtgccggcttgcgatgagttcggcaacgccaacggctacagcggtgaagcctgctgcggctcgctcggctatgcgcgggtggacgccgaggcggcgggcaccgtggtgttgctgaccgagcagctggtgccgtatccgcatcatcccgccagcctggcgcaggatcgggtggatctgatcgtgcagttggagcgggtgggcgacgccgacaagatcggcgctgacgccacgcgcatgacttcgaacccgcgcgagctgctgatcgcccgccgcgccgccgaggtgatcgccggttccggctacttcaccgaagggttctcgctgcaaaccggcaccggcggcgcctcgctggcggtgacccggttcctggaggacaagatgcgcgcccgcggcattcgcgccgcgttcgccctcggcggcatcacctcgaccatggtggatctgcacgagaaagggttgatcggcaagctgctggacgtgcagagcttcgatcgggcggcggcgacctcgctggcgcgcaacccgcgccatatcgaaatcagcgccaaccagtacgccaacttcagctccaagggcgcgtcggtcgatcggctcgacgtggtggtgctgagcgcgctggaaatcgacaccggcttcaacgttaacgtgctgaccggctccgacggcgtgctgcgcggcgcgtccggcggccactgcgacaccgccgccgccgcgcggctggcgatcatcgtcgcgccgttggtgcgcgggcgcatcccgacgctggtggagcaggtgaccacctgcgtcacgccgggctccagcatcgacattctggtgaccgaccacggcatcgccgtcaacccggcgcggccggagctggcacagcgcctgcgggaggccgggcttgaggtggtgagcatcgactggctgcgcgcccgcgcgctgcagctgaccggcgaaccgcagccgatcgcgtttaccgacaaggtggtggcggtggtgcgctaccgcgacggctcggtgatcgacgtggtgcatcaggtggcggagtaa

SEQ ID NO: 439081 - DNA, 588 bp, Serratia marcescens
atgtttgattctttttcattagaaaaaatatttcttgatgtagggtgttctaccgggacaacaatgaataagctgttatcaacgacacaagttaagcattgttatggagtcgatgtttctgcatgcatgcttgaaaaagcaaaagaaaagtgtgagccttacaaagaaaaagttacattaagtgatcataactacctaagcggagtaaataaaaacatctgcgatattatgagacctgattttgttattctaaatcttgtgcttcaatttatacgtccaccagaaagagaggagtttataaaaaatataaagtcatcatgttccgatcaagtcactatgattgtcttcgaaaagattatatttgaggatcctgtaataaatacaacctacattgaatcgtacttaaaatggaaatatagtagaggatattctaaaactgaaattgaaaacaaaagattagctctagagaataaattgataccatatcttgattctgagaatataaaattgtttaatcgctgtggtttcagtatggtcgagcattgtttctcctttttaaactttagaggatatctatgtcgttgttaa

SEQ ID NO: 439082 - DNA, 828 bp, Serratia marcescens
atgtcgttgttaatagcggatgttttaaatgacagaatttatgtaaagctcagtgaagatgaagtaattcatattgagtcggcctctattattaatgagaatatatttcatgaagtgaaaaataaaaaccatgatgttattgaaaagataaacgatgtgattcgagatgaactcgactttaaaataagccaggatattgacgaagtgattttaattaatgaagataagtataatctaaaacaaaaaagcatgatggcattctccaatgtgaagtgtatatatgcacatagaggacgacattggtttgatatatttgatgaaaatgacacaagctttacagaagtactgagtcgatacttaaaaacttatgacattcataatcttgatggcctgtatttgatttttgaaaatacaaatgtgaccaatgataatgacctaggtattaaattagccaatttcctaaaaacaattcaggacaactttgcatctaatttgcttaaaaatataacagatgaaaaatggcgttttagaatagatggggttgaactttacctactcgttttctcaaatcattacccaaaaaatcactctaggtatttaccgcttaacaataccatttcatttcttattcaaccagatcaatcgtttgatcggtttgctgataatgattctaatcttataacaaaagataacaaagaaaaaattagggaaaactataggaaagaagggtgtatctacaattatttactttctgagtcaagtgaccatagagctaaatttgtaaaatcaactgatactactaatgttataaactggtggagtaactag

SEQ ID NO: 439083 - DNA, 768 bp, Serratia marcescens
atgaacaatgaccataaagtgtggctgatcaccggcgcctcgtcgggcctgggcaaagccctggccgaagcggccatcgccaacggcgatcgggtggtggtgaccgcccgccgtctcgaccgcctgcgggcgctggctaagggccaggaggatcgcgtgctgcctttggcggtggacgtcacggatgccgccgcgcgcgataaggcggtcgccgataccctggcgcggttcggccgcatcgacgtgctggccaacctggccgggcgcggtgtagccggcgcctgcgaagagttcagcctcgaacagctgcgcgagcagatggagctgaatttctttgcggcggcggagatgacccgcgccgtgctgccgcagatgcggcgccagggcagcgggaacgtgatcaccgtaagcagcatcgccggtctggtggcaatgaacgccgccggcccctattgcgcggcgaaatttgccctcgaaggctggacggagtcgctggccatcgaggcctaccgcccgtcgattgcaccgtttgaaacctacctggcgcagtccgccggccgacagatgggcgatcccgccaaagcggcgcagcgcatgctggagttggtcactctcacggccccgccggtgcgcctgatgctggggcgcgacgcttacgccatgtgggacaccaccctcgccaaacgccagcaggagcttaacgcctggcgcgaacggggtgaagacaccgcctttgatggcgcagaactcactgaaattcaactgtaa

SEQ ID NO: 439084 - DNA, 570 bp, Serratia marcescens
atgagtcaacgtatagggtacgctcgcgtatcaactgacgatcagaacctagacctgcagcgtgacgtgcttaagcaggctggatgcgacgttatctaccaagatgcggccagcggtaagagcacagcacgaccggagcttgagcagtgtcgcaaggcgcttcaggcaggggacactttggtggtttggcggttggatcgcctcggacgtagcctgccggacttggtgcggattgtgaccgatcttgagcaacgtggtgttgggtttgaaagtttgatcgaaaagatcgaaacggacagcgcgatgggaaaactgactttccgtgtgtttgcagcgctggctgagttcgagcgcggtttgatcctagaacgcgcgcaagttgggctgacagctgcccgtgctagaggccgggttgggggccgtaaaccgaagttggatgatcagcaggtgtgtgaaatcaagttattactgcgagatcctgatatccaggtggctgatgtagcccgtcgttatggcgtgtctcgaacgactctttacaaatacgtcggcgttatcatgccacgtcaatga

SEQ ID NO: 439085 - DNA, 1311 bp, Serratia marcescens
atgagtaaaagcgacgctgtcgtatctctttttgctggagcaggcggtttctccgccggctttagccgggctggactaaagccgcttttcggggctgaaattaacgctgacgcttgtcagacttaccagttaaatattggcagtccctgtcatcagcttgatctgagcacagtagagcctgtgcagcttgaaaaacttgctggcggccatagaccatttgttgttatcggcggccccccgtgtcaagggtttagcactgctggcccccgaaatgctgccgatccccgcaaccagctcatctttaattacctcaatatcgttgagaggttatccccccgctggttcatcttcgagaatgtcgaggggctattgacttcaggccgtggcagggaccttgcgcgtctggttcgcgagtttgttgaaatggggtactcgatccgtctgcagaaagtgaatctcgcctcgtatggcgtgccacagacgcgcaagagggttttaatcattggcaaccggctgggtatcgacttccagtttcccgaggagctgttttcgtttgacagcgggaaggcaagaaagctttctggtaagcccatggcccccaatttggccgaagcgatcgcagggcttggttcggcagcaagtgcaaggggggcgctggttccgtacgcgagtgatgatccggtcaacgcattcgacgctcgcatgagggagggcaatatcactggtaccgtgactcatcatgtaggagtggagctttccggacgcatgcaagtggaattgcttaagcctggccagacgatgaaagaccttccgtcagagctttggcatgacagttacaaacgtcgtgcaaaccggagggtttcggacggcatgccgacagaaaaacgaggtggtgcgccatcaggaatcaaacgtctacatggaaatttgcagagtctcacgattacgagtgccgccgctcgggaatttatccatcctactgagcaccgtcctctaaccatacgagagtgcgctcgcattcagacttttcctgatagttatcagtgggtcggcaacaatgcaagtgttatccagcaaatagggaatgcggttccgccgctagctgctgagctgcttgctaaccatttgaaatatattgacggttcgtttggcgcggatacacgtccagcggacggaagggccgcgaaacttttagggtttgttcttaccgaagcacttgggatgagcccagctcttaaatcaacagaagtgctactcacagaaatgtatcaagggagtattgttttcgatgatcacacgacaacggcttag

SEQ ID NO: 439086 - DNA, 1140 bp, Serratia marcescens
atgatcacacgacaacggcttagcgcggaaaggtcgcgccagctaacaagactgcttactatcgcgaacactgcaaacattcgggctctcatggaacctagcgagctggcgaaggtaattgcacttgtggccatcgacatcggtaagggcggtgaaatggcgcgagttttccccgcgctttggccgaaggtcgtcccgcagcaggagtactatgacatagcggttgattggttcactgcccctgatgtaacagttacgtcctttgacgtggttgatatgcttgattctggtgcgtcactggatcaggacttcatgacgtacctgacgtgtctgaccgaactgcataagcggcggcgtaagtatgggctgattcttcaacagcagcccctgccaaccatggtgcaggtttctccccgggcgctcatggaatatgggccggattttcccccggaagcgcttgcttcatggctcacttggcgcaaatttttctacgatcttgacaaccggtccgcacaggaaaccggctatctttttgagcctatccttgcagctgctatcggtggagaacccaaatcggctcgtgagcgtgttgtcagacgtgccgatgacccgacgaagggccgacaggttgattgctggaaggtgttgccggatgggactctgctcgcatacgaactgaagctgcgcgtgactattgcagccagtggtcaaggtcggttcggtgaggagatttccttcgcccgtgattgcagaagctcgggtgcaaagccaattcttgtcgtactggaccctacagagaacgacaagctgactggtcttcaagccgcgtaccgtgaggcaggcggcgctgcttacgtaggggatgctgcgtggaatcatcttgaggacgaagctggcgtaacgatggcgtcgttcattgagcgatacgttcgggtgccggttgcttccgtgtctagttttgagaaagctattgaaggtgatatgtctaagcgcagcctcatcctgcgagatctgcaagcgaagctcgaaggcaacgagttgactatctctcttggagagcatcaacgtcgtatcgaacgccacgaggatcagagcttggcaaccgacgcggacgatgacagcgaaccgccggaaatgtga

SEQ ID NO: 439087 - DNA, 195 bp, Serratia marcescens
atggtcgccgtcggctatgagttcgaactgacacccattgcctgcatggtgcgtctgcgcaatgtgctgaaggttatgagtgatcctgagctggccagccgggcaagatcgctgaccagaagcgcaagcacaggcggaacaagtcattttcagtcgactaagctggaaatggtatttttcgtggcattgctatga

SEQ ID NO: 439088 - DNA, 1575 bp, Serratia marcescens
gtgaattttatactcgtaagcagcctacctaatattccgcataaacaatgcgcttatcttgttaaagatagctggaatgactggttttattggcaaacacaattcacattagtttatagtgatgctgaaagtaaatatcataatatcggctcagtgaaaattgggcaagatcggatgaggcgttcatctaacggctctactgaggagacatccatagcattcaaaccaattttgccagaatcattcgacagtttgaaaaaagattacttttcattaggtcagagtgaaaattattatgaaacacttaatgcgttaccctctgatagtaaacgcgagatccttacaggattacgtgatgtagcgtttgatataaatatatatcatgagtacagtggtcacgaagccatgattgaatctcttttaagggacattagtgaaagacacgtgcttgagggtctacacaaattagccagaggtcaaagccattttaatggatttgatttttcatatttatttccatatcaagaccatgccaatagaccagtgtctttgcggtttaacattgagccaaaagcatcgccacctagcaatattcaggctataattggtaggaatggagttggaaaaacaactttatttgctggctttattaaagggataataaataaaaattccattcctgaacaaaacgttgggtggttaactacccctgacgaaaacggaaggttagttaacaagcctgattattttacctcactaactttattgtcatacagcccatttgataagtttggcccagttgacttggacgatattccgtcaggcgttaagtaccaatatattggactaatgagtttcacgcaggataaaaattatttaacacctaaatcattcggggtacttcataatgaattttgtaaaagcatgaaagaatgtcttattggtgttagaaaaaagagatggcaagattgtctagagattcttgaaaatgacccattatttaaagagtcagacgtatctaaacttgcagactttgatgggaatagtgacgataactcttgggagaactacgtaagaaaatatttggaaaaattaagttcaggtcatttagttacgttactcagtattacaagattgattgaggcaatcgaggatagatcactaacacttatagatgaacccgaagcccacttgcacccacctctaatatcagcatttattcgcgctgtatctcatttgatgagcgatcgaaacggtgtagccatcgtagcaacacactcgccagttgttctacaagaagtccgatcagattgtgtgtggatactaaatcgtacaggcaagtacatgagtgctgaccgcccccaaattgaaacctttggtgaaaatgtgggaacacttacccgagaaattttcagccatgaggtaatcaatactgggttttacaaaatgattatagatgcatctaaaacccatgaaacctttgagtcattaaattcgcattttgatcagaaattgggcggagaagcgagagcactagctcgatcactcattaataacaaaaaaaagggtaactga

SEQ ID NO: 439089 - DNA, 840 bp, Serratia marcescens
atgatacatttgcctctgccgttattcgacgatgtcgatatatttaagcgatgtgcgaagatgcacccagccattacagaaatggatttgcagattgcaattccatttatccaacagctatatgaacagtatcataaattgatgcagaatgggaaagtcactaacctacctcgctcagaggattttggaaaattcactgacgacttgatgaaatctctttatagtgaacaggttgtgggaaagtctggggtatgccgggatgaatataatagaatactagcatcagcgcctcataaaaaatgcccaatgtgctctgaaagtattgttactgcattagatcatcacgtgccaaagcaaacatatttttcttttgctataaaccctaaaaaccttgtacccatttgctctagatgtaatgaagcaaagaaaaacacgatgccggataagttagataaacagttcattcatccatattatgacgacttttcaggggaaccttggtttgagatgatttttttgaataaagatccaattgagatagatttcatttgcaatcccaaaatcacttttagcatagaaacacaagagaaacttaaaagtcacttttcaagactaaagttaaatgaactatatagatctaatgcgatagttaaattagaggacatgaaaaataattttacgccatctttaatggtaaacgattggatatctgttcgtgatgaaatagagtatttactaagaacggttcagcgacgaccggactcttgggagtatgcgctttacacaaggttactaagagagagatggtatattgaaggtggattcaataacattgactga

SEQ ID NO: 439090 - DNA, 756 bp, Serratia marcescens
atgcgaccaaaattactatattccacgttccgaagaaatgacttaccagcttggcgatgccctacctgtcttaatgagacattggaaatcgtacctgaaagctttaagatagctgagacgagcgagaccgctacttgccgagacgaattatggtttgatgaagaaatggctaaaggtgtttttagttgcctgttgcgctgtagccgccaagcatgccgggaacatgtggcgctatctggacaagtcatttctttagaaacattcaatgatgaaatgacggagcgttggtatgagtcaggttaccgccctatacatttttatcctcctctcccacttttccaaccaccagataaatgccctgaagaaatttttgatatgttggcggagatttctgcgctcattcctgctcaccgtgcatcagcggtaaatatcatgaggactgttctggagattatgctcgatagtattggagtaccgagagagaaaacagaactcaataaaaaaggtaaaaaaattcggctaaccacacatgagcgaatttgtgattattcagctatgttggagccaaaaaatgaggcattcatggctctgaagtggttggggaatcacggtagtcacggtggttctaaggtaacaagatcggctattgatgatgcttgcgttgttattgaggatttgattgagtttatattttctgagagccctgatgtaaaagagaatattgcacgcattaattacgcgtatgctccaaaatag

SEQ ID NO: 439091 - DNA, 627 bp, Serratia marcescens
atgagtaatatttcattcattgctgaagagcaagatttaatgaaccacgcaataacagaaggccatactttctggggggatgaaactcttagtgctcttaaaaggaagattaaagattatttacgtgaaagacaaaaagaatgctgttgttattgctcaaggaatatcgatgatgaatttaacatggtgcttgatatcgaacatattattccaaaatcaaagattacatcggaaatgtttgaaatgaagaacctagcggtatcttgtaaaagatgtaatatgagaattaaaggggaagatgtatcatttattaatgatgaatttcagcattttaaagaaactggtgactactatctatcagctaactataaatttattcatcctaaccttgatagttgggatgataatcttcaatacatggtagttcaagtcaataggagaaagatagtttattatcacgtcgttcaggatagtcctaaagggagttatgcaaaaaaatactttgagttggataaaatacaagcaaatacttttgatgaagcacaggacgccactagtagaaaagagccgatagatcccgctgtcgccgaagaatattcaaggttagtaaatgctatgttaggctga

SEQ ID NO: 439092 - DNA, 1176 bp, Serratia marcescens
atgcttaatgctaaaaaaattttaatttctcaaaaagactattttattctagtggggaaaaatgggagtggtaaaagcaggctgctgcatgatctggcagagagctttcatgatgtaggctacagcactgtcacagtgtcaaatactctatttgataaatttgaagttcatccaaaaagccttaattataactacataggaagtaagttaggtagaaacttccctgctcaagcaataaagaacactctatcaactgaaagccaaacaaaagtaagtcgtattttttcagttttaaattacataggttatgaacaaaaaattggtattaaggtaaagtttagaaaaaaattcaaagacgcaattagatattctaaaaatgaatctggcgattattatccgattttttttgatagtagcgaccaaaaaatacctgatgaacttaaaatggcaattgataaagctattcatcagataaagcatggctatagtattttggcatggttgaccagtaatgataacgttttttatgagggcaatttcgattcttatttgtgtttattaaagtttgagcgagttttaaaaaaggcaaaaataatatctaatatagaggtgtttttaagtaaagacgattatgcattccctctaagtcaagcaagttcaggtgagttatcgtttatcgctttgcttgttcatatttcgttttgcgtaaacgataattcttttatatttattgatgagcctgaaaatagtttgcaccccaagtggcaaaacgaatatttagagcttttaaggggggcgattggttataataaatgtaaggttgttgttgcgactcattcacctctaattattacttcaatatccgagagtaatcaagtttcaatttacaagcgtggagttaatggatttaaagaagttgattcgtacgatgataatgctgaagaattatatattgattacttcgatacattgacacctaaaaatagagcgctatctaacagatgcgtggacattatagatcaacttactattggggaaatttcattacaaactgcgagggaccgtttgtcaaaatttgagggaatggcaaatgattccgctcaaaaagaattcattctaggcgtaaattcattgcttacgaaagttagttataaaaacaggaaggctcatgagtaa

SEQ ID NO: 439093 - DNA, 1755 bp, Serratia marcescens
atgactgtacgtctagagaaaatcacaataagcaactttcgttcttgtaagtttacagagttacttgtgcgcccatacacggcgctggtaggatataataatgcgggaaaatcaaacattatacttgctataaaatggcttttagatgggtcaactttatcaactgatgatttatatgagccagaaaaaccagttcatgttgaagcggaaatatctggaatagatgaagtagccctgtcattgttgagtgaggaaaaccaagaaaaaataaaaaaattcatcattaatggaaatcttaaattcagaagaaaacaagaatttgataatgggaaaacaaagaaaagcctagaggtatatgacggcaactcttggaaaaaaaatccaggtgggattgacggttcgatctcaaatctttttccagagccaatacacattcctgcgatgtctgacgccgtcgaagattcaacaaaatacaaaacatcaacaacaattggcaaaatactttcagcaatagtttatgaaattaaaaaagagcatgaggataggttctctagaaacatatcagaaattgacaagtacctctcacatgatggctcatccagactagccggcttaaacaaaatagatggtggtataaatgaaaaggtgaacaaatttttccctgatgtcagtgtcaaacttcactttccaacaccatcacttgaagatatattcaagtcaggaacattgaaagttttcgaaggcagtattcaaggtgatgtaatgagggatattaatagatttggacacggcactcaacgctcaatccaaatggcactcattcaatatttggcagaaataaaacaagaaagccccgaagtgagaaaatcaaacaccttgatatttattgatgaacctgaactttacctacacccctctgcaataaattcagtgagagagtcactaatcactcttagcacgcttggatatcaagttgtcatatccactcactcggccagcatgctttctgcaaaacatgcagctaatgcagtgcaagtcttcaaaaacgaaaatggtacattggcaagaaaaacgattacagaaaagattgatgaattattttcagcttcatcatcacaattacacgcagcatttaacctatcaaactcatcttacattctattttctgaagaggtgttattagtcgagggaaaaacagaaacaaatgtactcccagccatttacaagaaaataaaaaacaaagagattgacaatagcaaagcatgcataatagcagttgatggtaaaggtagtttgtttggcatggctgaagttatcaatgccatagggataaaaacaagaatattagcagattgtgattttttatccctgtatcttaactcccccaaaggagctgaattcgtggagcacggcaacaaactaataggagccatcaaggtattggttgaaaatggtgagcttgacataaggaaacctatcactgatataaaatcattaaaatcgttatcaagcaatgaatttatgctgctatgtgaaaattcagaaacaaagaagaccatagatttattacatgaaaaaatgaaattaaacggcatatatatatggaatttaggtgatatcgaaagggtttatggattcaataaaaaacaatctcagtgggacgaattggtcgaatgtctagatgatgaaacaaaagacataaaaaaaataattacaaactataaagaaatggaggattttataaattggatataa

SEQ ID NO: 439094 - DNA, 642 bp, Serratia marcescens
atgcaaaaagtaggaaacactaccgataccgcagatgcaaatggcgagtataccaatggtaatgttgctcaggggataccccctacaattattaatgctgagatgttaaatacattccagagggaaatggtcaatgtagttgaaggggctggtctagtgttaaatccggcgaataattcgcagctaattgaatctattaaatcattgttggatatggctatccctccaggaattccttttccttggccgcgagcgtcaattcctacaggatggcttaagtgtaatggtgatccatttgataaagggaaatacccaaaattggctttagcatatccgaatggaatgttgccagatcttcgtggtgagtttattcgaggatgggatgatggccgaggggttgatgtagatcgaggcatattgacttcacaagagtctactcaaatttatgataaggcaggctggacgaactcgccagcagggggctatgttaccgttgaaatgactaatcctgacgggaccggaacaactaatggttcattctctacccagcgaaagaacgatgcaacaagcgatcctggaagcacaaggtatccagtccgcccacgtaacgttgcattttgttacatcgtaagggcggcataa

SEQ ID NO: 439095 - DNA, 1032 bp, Serratia marcescens
atgaatagggttaactactttgatcagctaaagatattttcagtaatagctgtgatactcttccacacgtctgttgaatattataccttcaatgcacatggctgggtttccgctatcgcttactcagcagttacgcgattttgcgttccaatatttttcatgatttctggtgcaactctaataagtaaatctgattcgatagtttcgtatttcaaaagaagattttctaaaataataccaccattaatattttggtctttaatttactcattcgttctttcaaaaacaaatggcaataacttcaatatagtaaaatcgcttggggaaatgattacaactccagtatatattcatttttggttcatttacgcaattatcgggctttacttgattataccagtatttatgagcatcagtgaagacagaaagattattatatgtgcgtactatacaagtatatggtttttatttgcatcacttcttccctatggaagattggttggccttccaatacctgagtatataggaacgccgtacatgtttaacgagatgtatcaattttttaactactctgggtacatgactcttggattcttggtatcaagggtcgagttcggtaagaaaaacgttgcaattaaaatgcttttgctattaatttccttgtcagccgtcttgttttttatggttgttcacgacagcataatgaaagggaaaattacgcaagatctctgggaatttaaaacccctctggtggttattttttccatctctgtatttttatttttcaaaaacatcaagaattctaaaacaaataaatacggtgataaactatcatccgttgcaggcttggtattccctatctaccttgttcattatttatatatttttttaatagttagacattttggctatgttttccattcattgcccgtggttattcagataccacttgaaacagtgataataacattatgcagctttataactgtattcgttatgagcaagataccttttttgaatcgcttaatttaa

SEQ ID NO: 439096 - DNA, 1068 bp, Serratia marcescens
atgaatatagttgaaaacatcaaggttgaaagtaggccgattaagtggttggcagatggtttgaaaaatggaactattataattgataatacttttcaacgtcgttatgtatggatactgaaagataaagtgtcgcttattgaaacaatcttaatgggctatccaataccagaagtatatctatggcaaaatgaaaccaacccggaaactggagatactacacactcaatagttgatgggcagcaaagattaggtgccgttcaaagttatataaatgatgagttttccttggagaaaaaatccctagatgaagctaaccataaagagagtttctgcggaaagaaattctccgagttgacggcagaggaaaaaagtagtatttggaaatatgatttttcagttagatttatcaataactcaatagatattgatgcgataacaaaactgtttttgagattgaatcgaactaatacgaccctaaacccacaagagttaagaaatgctgagtttaatggtgagttcattaaattagctgatgaaatatcaagaatggatttttgggggcagtatgcattatttaataagtctgacctcagaagaatgcttgacattcaatttattagcacggtgttgatttttattcgcatggggattgcagaggaaacaacacagtcagcaattaataaagtatatgatcaatataatgataactacccagaggccgagcaagatcgagctctttttgaaagcttaatagaggtggtggagaagttgatctgccataataatgcaacaactgaaatagccagaaagaaaacacacttatatactattttcaatttggcgtattttttattacagacggaaattgataaggataatgactacaacaaggttgctaacgcattaaatgaatggtttgataagtacgaaaatgagggctcctttgatgatgactacaaaaatatgttgctaagtgaatacaagaaattatctcaagagggcgttcagaaaaaaacaaatagattaaaacgaatggagatattacgagattacataacgttgtaa

SEQ ID NO: 439097 - DNA, 600 bp, Serratia marcescens
atggataatgtagaggtttttaggcgtgccttgttgaacgaggatgttagttacgtttatcggaaatatcttctagggcatgatgtatggtattttagagagaagctgaagcttgaaaactttgcacatcgttatgatgattttaaaatacttatgtcacaaaagctagatgttcatataaataatatagctattgttggtagtgcgaaactaggcttcagtattactcccactgatgaaaaaatgtttagaagattttccgaagattcagatatagacatcgtcgttgtttcaagagagatttttagaaactcatgggcggcttttttagatatacactctaaaaaacacctcgcaggccatgtaacaattgctaagaatatatttagacacttcgtttctttaaagcaagttgatgcaactaatgacttctttagaacttggaccggaaaaatggaaccttgtcaaaaagaattgcaaattgtctactctatacccaatgagattaattatagaatatatgagtcttgggaggatgtcgaaagatatcatattaaaggtttagagcggctgaaaaaaatgattcaagagggacaataa

SEQ ID NO: 439098 - DNA, 1047 bp, Serratia marcescens
atgagtatattttcaattgatgagtctggttacactgggcgagatcttcttcaaaagtcacaaccttggcaaggagccagtgcagtaaaaattagtcatgatgatgctctctacctgatcaaacaacattttcctaaacacaaagcccccgaattaaaattcagctcacttaaacggagagatagttatcagaagccaatttttactttgcaaaaagaacttcttgctaatttcccatgtgtaacttgtattgcagataagcgttttattctgatgcaaatgtttattgagtatgctgtagagcctttttactatgatcatgggataaatttgtacgaaaatggcaggaatgtttctatggcgtcaatggcttactatggttgccatggctactttggtaaagattttgataatatcctattatcttttcaaaatgcgatgcatgaaaaaacacatgcagcagtaaacacccttattgcgagtgttagggcagtgaattggcggttattaccagaggtactggggccactagctttggaacatccagattgtattgatgcaataattaatccaaatatttctaccgatgctgcatttgttattcttcaagcactaatatcacgaactgaaattatgtcagagggggagtatagtatcgagcatgatagatctaaaaaccttttgcaatacaatgaatatctttccatgcttatcaaatgtcagacgccaatagagtttaaaatgtctgaaattgctagcattaaattcccattaaagctaaataatgtacaacaagttgattcaaagctaagcccagccgttcaattatgtgatgttttaattggcagtgcaatatcaggagtgcaccaattaatgcatgataaatcaatgtcgttttattcccctttaaagctgtatgaaaatagccagataattcattttttgcctgatatggattttgaggagcaacaaaaattcaggcgcaacagtcaaggtaatgagttcattgatttcattgctgagcaatttaataaatttggaggctaa

SEQ ID NO: 439099 - DNA, 696 bp, Serratia marcescens; identical to SEQ ID NO: 433389

SEQ ID NO: 439100 - DNA, 132 bp, Serratia marcescens
atgataaataaaataattgatgcagggatccattgcataatcatagataatcaaccgattagcatcaagtatgctgacaccttcttccagtgggtcaataccaatatcattgatcatcgcgtcgaaacttga

SEQ ID NO: 439101 - DNA, 381 bp, Serratia marcescens
atgagaaaatatttattccttctttttcctctttttatctcgggttgcccaaccggtgacaggtttaatctctatcaagcacaaagtaagatcgtagacggtaaagtctgcgttttttttaatgagagcgatatcgtaaaaaacgaatccatactgaatatcgccatctggaagcagggtagtgatgactatgtttacgaaaagtcatatgcctacaacccggtaacgttggaggccaacaagtgtgttccaggtatcggtgagtttaattttatcgccggtgaaggatacaccgtgttggtaagaacgccgctgaattcgtatcggagcagttttggtgtgtggaatataaatggaagagttatggtaaaggcggattag

SEQ ID NO: 439102 - DNA, 294 bp, Serratia marcescens
atgagggtaacgcaagccaatatatttatcgatcagattccccctaaacgcgtaacacaaattccagccaatcaggaggttatcgctgcgccgacgatattcgaaaacaataccgttattatctcgcaacagttgacatatgaaatcgtaagtcaggtgatcaaaatgtatttcactctgagaatatacttcttcgtacagatcataatattcacgggtaactcgctcgtcaatttcattatagaaccttcctgttggaatgacagttacgataacatcattccgactttttag

SEQ ID NO: 439103 - DNA, 339 bp, Serratia marcescens; identical to SEQ ID NO: 433034

SEQ ID NO: 439104 - DNA, 1137 bp, Serratia marcescens
atggcaaaggatttctctttcaaaaacactttcacccccattcagaagaaagaaagcttatttgccttattgggtataagtgatatcgataaatttgaaaagctgatttccgatggtgtagaaaaagcttactacataaaaccaccaattgaaaaaaagaacggtggtcatagaattgtctacgcaccaaaccgaatgctgaaatcgattctaagaaaaataaacaataaaattttcagccaaattaattttccagattacctttacggctctattcctgacaaagaaaatcctcgcgattatattttgtgtgcccaacagcattgcaaatctaaaatccttgtgaaaatggatatcgaaaattttttcccaacgatgaagtcaaaatttgtttatcaaatttttagagaattattcagattttcagatgaagtttccaatatattaaccactttaacaacatatgagggtttcgttcctcaaggtgcaccaacgagtacttatttagccaacttatatttttatgattgtgagccaagtaaagtcagttatcttcgtaatcttggattcagatatactcgtttgattgatgacataacaatatcccgtttaaataaagatggagattggaagtttgttgagtctgttatttctaactttattaaacaaaaagaattgactgtcaataatgagaaaacaaaacttctatctgctaaatcgccacaatcatttaaagttcatggattatgtattgaggatgatgctccacgatttactaaaactgaaagaactaacataaaaacgcaagtacatcaagttgtaaggactggttatgggcgagatcaaatccgaatgcaaccaagttatcacaagaaatatttctctgtgaaaggtaaaataacgaaacttaagcgtgtagattgccctgattatccagttcttaaaaaacttctaaaaaaacattgcgatcctcttcctgagcataaagaaataaaaagaattaatcgggaaagatacaaaagtaggtattttcaagttgtttttcgtttagatatattaaaaaaactatatccagttgaagcaaatgagtttagagcacggctaagacaaataggtccaactaagaatgagaattaa

SEQ ID NO: 439105 - DNA, 2760 bp, Serratia marcescens
atgagtactctttttaaagggctgacacgccccgctttaatccgggggttgggcgttccgctctaccccttccttggaatgtgccttatttctgtattacttggtgtatggattcatgatgcaatgtatgcactcatattgccagggtggtatgccatcaagcgagtaacacagatcgatgagcgtttctttgacctgctttatctacgaactgtaatcaaaggtcatcccttgtcaaacaaacgcttcagtgccgtccattatgcggggagccagtatgatgaagttgatatttccagagtggacaattttatgaagctgaaagaccagtcttctattgaggagctgataccgtactcttctcatatcacagataatctaatcgtcacaaaaagccgtgatttgctggctacctggcatattgacggcgcttactttgaatgtgttgatgaggaggatctgacgttactgacagaccaactcaacacgcttattcgaagctttgagggtaagcctgtgacgttctacacacaccgtgttcgtgtaaagaaagaggttcagtcttcatttaacagtaaaatcccatttgttaaccgggttatgaatgattattaccgttctctttctgagcctgaatattttgaaaacaaactttatctgacagtctgttataagcctttcaatgctgaagataaagtttcacattttctttcaaggaataagcggaataaaaatatttttgatgaacccattaacgacatgaacgaaatttgtggcagacttgatacttatctgtccaggttccactctcgccgtcttggtttgtttgaagaaaatagcaaggtattttctgaccaactttccctttttcagtatctgctatccgggaagtttcaaaaggtaagagtaactaatagtcctttttatacttatcttggcggtaaagacttgtttttcggtaacgatgcagggcaaattacagcttctgatcacgccagatatttccggtgcattgaaataaaggattactttcaggagacggacgctggaatttttgatgcgctgatgtatctccctgttgaatatgtctttacatcgtctttcactacgatggataagcaagcctccatcaaggcgctggacgatcagattgataagcttgagatgactgatgatgcggctaaatcattgctggctgatttgcatgttggtctggatatggtttccagtggttacaactcttttggtaagagtcaccagacgctgattgtttttgctgacacgccggaacgtctggttaaagacaccaatatagtgaccacaacccttgaagaccttgggcttattatcacatattcgaccctgagtcttggggctgcgtattttgctcagttaccgggtaattataacttgcgccctcgcttgtgtacccttagcagtcttaattttgctgaaatggaaagcttccataacttctttacagggaaagaaaaagggaatacctggggtgacagattaattaccttgcgcggttctggtaatgatatttatcacctcaactaccatatgaccacggaaaaccagaatttctttggtaaaaacccaacgctgggacatacggaaattcttgggacatcaaacgtaggtaaaactgtccttttaatgacgaaagcatacgccgtacaacagtacggtgcgccggagtcctttccgtctaaccgaaaggtcaggaaactgaccactgttttttttgataaagacagggcgggtgaagtcggcattcgcgctatgggaggtgaatattaccgggttaagggtggcgcaccgaccgggtggaatccagcggctctgaagccaaccaagcgtaacatcgcttttatgaaggatttgataagactgatttgtacgcttaataacaataccctggatgattaccagaacggcctgatttcagatgcagttgagcgtttaatggcaagggaagatcgttcattccctgtcagtaaacttattccgcttattcttgaaccagatgatgcagaaactaagcgtcatggtatcaaggctcgtcttaaagcgtggaaacagggaggtgaatacggctgggtcattgataatcgcacagatacttttgacgtatccaatctggatgtttttggtgttgatggtacggaatttctggatgataaagttgttgccccggtagcttcgttttatctgatttatcgcgtaacaatgctggccgacggccgacgactcattatttatatggatgagttctggcagtggctgaacaacgatgctttcagggatttcgtttataacaaactcaagactggacgtaagctggatatggtgctcgttgtcgctacgcagtcgccggatgagctgattaaaacgccgatagcagctgctgttcgtgaacagtgtgccacacatatctatcttgcaaatcctaaagccaagcgtggggaatatgtcgacggcctacaggtaaaagagctttattttgacaaaattaaagctattgacccgctttcgcgtcagttcatggtggtcaaaaacccacagcggcagggcgaacgcgatgactttgcagcctttgcaaagttagatctgggtaaagccgcttattatctcccgattttaagtgcttctacggagcagctggagctgttcgatgaaatctggaaagaagggatgaaaccggaagactggattgatatctatcttgaacgtgccaatcgtggaattaattaa

SEQ ID NO: 439106 - DNA, 750 bp, Serratia marcescens; identical to SEQ ID NO: 101027

SEQ ID NO: 439107 - DNA, 1056 bp, Serratia marcescens
atggcaacttctaggtttttccaagccgcccatgacgttattgttaaagttctcgaccagtctttgactggtcagttagataacttttcttcaatagcgtatcaattgggtaagtatggtatttctatttatatattgtggtatgcctatacagtaattgtagggaaacagaaatctcatgttcaggattttatctggaatttatttcgtttttggctgatccttgtttttgtcaggaatatgggcggttggctagatagcgctaatcaggctatagatggactaaaggaaacatttgcaggaggtgacccttggaaatgggttgatgaactttgggaaaaagttcagcaagttgcagcatatcttatgtcaaaagatacttccacgtatgttaaaacagacggcgctattgcggcgatattaacatatgctggcggtatattagcgctgctattaacatctatagtttatcttgctgctgaagttacacttaaaatgctaactattactgcgccattgtttattgtttgcctttcttttggttttttaaggcaaatgtttaatagctggctacagttaatatttagctcatgttttatatttctgttttgcggtttggctattaaagcgggaatgactttccttaatggcatcttgaccatatctatagcaaatgcagacgaactaaatctcatctcgaccggtgctcaagccggggttgcgggtgcattcatggcctggattatctggcaggccaaaacctatgcttcacagctcgcaggtgttggcgttgagggggcattgcagggggctgctgctatggggataggtgctggcgtatttggtgcttcccgcatggcgcgtggtgctcttggcatggggagaaacgcaggtattggcgcatggaagggcattagtcgtcagaaaggggggcttggtcagtctccgggaatgtccggtaagctgggtaatctgaccgggcaggggttaaatattggtgcaaaaaaactgcgtagtgccgcaatcgaaatggctaagaagaaatatggagggtag

SEQ ID NO: 439108 - DNA, 729 bp, Serratia marcescens; identical to SEQ ID NO: 149325

SEQ ID NO: 439109 - DNA, 930 bp, Serratia marcescens; identical to SEQ ID NO: 101029

SEQ ID NO: 439110 - DNA, 1212 bp, Serratia marcescens; identical to SEQ ID NO: 101030

SEQ ID NO: 439111 - DNA, 1044 bp, Serratia marcescens; identical to SEQ ID NO: 149322

SEQ ID NO: 439112 - DNA, 1836 bp, Serratia marcescens; identical to SEQ ID NO: 101031

SEQ ID NO: 439113 - DNA, 204 bp, Serratia marcescens; identical to SEQ ID NO: 101034

SEQ ID NO: 439114 - DNA, 336 bp, Serratia marcescens; identical to SEQ ID NO: 149317

SEQ ID NO: 439115 - DNA, 471 bp, Serratia marcescens; identical to SEQ ID NO: 101036

SEQ ID NO: 439116 - DNA, 774 bp, Serratia marcescens; identical to SEQ ID NO: 149315

SEQ ID NO: 439117 - DNA, 657 bp, Serratia marcescens; identical to SEQ ID NO: 101038

SEQ ID NO: 439118 - DNA, 657 bp, Serratia marcescens; identical to SEQ ID NO: 101039

SEQ ID NO: 439119 - DNA, 2322 bp, Serratia marcescens; identical to SEQ ID NO: 101040

SEQ ID NO: 439120 - DNA, 819 bp, Serratia marcescens; identical to SEQ ID NO: 149307

SEQ ID NO: 439121 - DNA, 261 bp, Serratia marcescens; identical to SEQ ID NO: 101045

SEQ ID NO: 439122 - DNA, 486 bp, Serratia marcescens
atgttcatcagagcttatttaagagcatcgacggaagatcagttcgccgatcgggcaaaagagatgctggagcaattcgttcaggagcgaggacataaaatcgccagttactaccgggagaacatcagcggaacaaaacttgaccgcccggaacttgggcgcttactgatggacagtcaccacaatgatattttgctggtcgagcagatagaccgcctgacacgtctcagcaacagcgactggatgacgctaaaaaaacagatagaacaacatgagctgcgaattgtcagtcttgatgtgcccacatcatggcaggcactgtcagataaggacccttcgcaaacagacccgatagcgcgtgctgttattacagctatcaacaatatgttgatagacctgatggcggctatgtcacataaagactggctaagccgccgtcagcgtcagaaacaggggatcggggtctggggagcaatggaacagtga

SEQ ID NO: 439123 - DNA, 561 bp, Serratia marcescens
atggaggcacgattatttgcattcgtcggcggagacagcggtctttggcggatcgttggaaccgaaaccatagttggcaagtcactgcctgaagccaaaaggctcaacgtaatatctgcctcagagttgcagcccgaaaccaatgcgccctgggtacttcgcggaataacaagcaatgaacggtatgtcatgcgcgaagagaagaacgaaattgtggcgaagcagcaagggctagcgcgcccagaagcaacttgcgctgcgttgatactgatccgaaaaaacgcagcctggtgggaattcacgcaagacgagcgccggagcgttttcgaaaagtcaaagcacatccaaatcgggctcaactacttgcctgcagtagcgcgcaagctccaccactgccgcgacctctctgaaaatgaaccgttcgattttctcaattggttcgagttcgcaccaacccatgaggctgagttcaacgcattgctttccgaactgcgtgcaactgaggaatggaagtacattgacagagaagtcgatatccgtctcgtgcgagaggcggcgtag

SEQ ID NO: 439124 - DNA, 354 bp, Serratia marcescens; identical to SEQ ID NO: 164873

SEQ ID NO: 439125 - DNA, 882 bp, Serratia marcescens; identical to SEQ ID NO: 164874

SEQ ID NO: 439126 - DNA, 753 bp, Serratia marcescens; identical to SEQ ID NO: 95287

SEQ ID NO: 439127 - DNA, 870 bp, Serratia marcescens; identical to SEQ ID NO: 95286

SEQ ID NO: 439128 - DNA, 1224 bp, Serratia marcescens; identical to SEQ ID NO: 151423

SEQ ID NO: 439129 - DNA, 774 bp, Serratia marcescens; identical to SEQ ID NO: 195090

SEQ ID NO: 439130 - DNA, 702 bp, Serratia marcescens; identical to SEQ ID NO: 195089

SEQ ID NO: 439131 - DNA, 1107 bp, Serratia marcescens
atgagtaagcttttcaccccctacaatctgtctggcctggcgttaaaaaaccgtgtagtcatggcaccgatgacccgcacccgcaccatgaatgacgtgccggatgaggtcgtggctttgtactatgcacagcgtgcttctgctggcctgctcatcaccgaagggatgccggtttcagaagaaggccggggttacctttatacccctggtatctacaacgacgaacacgtccagggctggcgtaaggtgacacaagcggttcacgccaaaggtggccgtattttcgcgcagctctggcacgtcggccgtatgtctcacgtctctcttcagccaggccacatagcgccggtttcagcgggcaccgttcaggcggtcaataccaccgtttttgcgctgaccgaatccggagaaccgggcccggttgtaccaagccagccacgcgcgctggaaacgcatgaagttaaacgcatcactgcagacttcgtgcactccgcacgcctggcgatggaagccggctttgacggcgtggaaatcatggcggcaaacggattcatctttgaccagttcctcagtagcgaactgaacacccgcaccgacgaatacggcggctcggtggaaaatcgtcagcgtttcctgctggagaccattgacgccgtggcggaagccgtgggtaacagccacgttgccgtgcgcctgtcaccgttcggccgcatttatgacctcgcgccgtatgaaggtgaagagcaaacctggtcagccatcaccgacgcgctcggtcagcgggaactggcctacgtacacctttactatcagccggtgtacatcaaagcgccacttccggaaggcttccgccgccgttttcgcaacacgtttaaaggcaccatcatcgctgccggcggttttacccgtgatatcgcagagcaggctctggaagatgatgagctggatctggtggcatttggtgtgccctacatcgctaacccggatctggttgaaagaatgcaaaacggctggccactggcagaaagtgaccgcgccacctactacggcgtcagtggttccccggaaaaaggctataccgattacccggtctggcaggcgcaataa

SEQ ID NO: 439132 - DNA, 330 bp, Serratia marcescens; identical to SEQ ID NO: 219404

SEQ ID NO: 439133 - DNA, 339 bp, Serratia marcescens; identical to SEQ ID NO: 219403

SEQ ID NO: 439134 - DNA, 582 bp, Serratia marcescens; identical to SEQ ID NO: 104060

SEQ ID NO: 439135 - DNA, 558 bp, Serratia marcescens; identical to SEQ ID NO: 120952

SEQ ID NO: 439136 - DNA, 2985 bp, Serratia marcescens
atgccacggcgacagatactgagcagcgaagagcaggaacgcttactggttataccagatgatgaaattattctgacccgaatgtgttttctgaacgaaccggatattgcgctcattaataagcaccgaaggccagcgaatcgcctgggctttgctgtattactctgttatctgcgtggacctggatttattccggacaaaagcagtgctcctcacaatggcgttgtatccagggttgcttcccgactgaaacttcagcctgatttatggccggaatatgcatccagagagcaaacccgctgggaacatctgaccgaactttatcgctacctggaactatccccgttcagccggtcaatgcaaaaagactgtatccgtcatctgcacccctatgccatgcgaactgacaaaggatttatgctggcggaagaaatgctcagctggctacataacaataatgttattttcccttctgttgaagtgatcgaacggacgcttgccgaagtcgtcacgctcgctaacagatcggtattttcgacacttaccgcgcaactggaaaagcagcataaatcagcactcgacagcctgctcatatcagagggtgaacaaccttcccgtctggcatggctgctacagcctccgggtaaaataaacggtaaaaatgtgctgcaacatatcgaccggcttaattccatcgctgcgctggggttgcctgatggtattgcactttccgttcaccagaacaggttgcttaaactggcgcgtgagggccggaaaatgagcagcagggacctggcaaaattcaccgatgtcagacgttacgctacgctggtttgtataataacagaggccagggccaccctgactgacgaagtgattgatctgcacgagcgtatcctgggtagtctgttcagcagggcaaaacgcacgcaggccgaacggctccagcaaacgagaaagcttattcagagcaagctgaagcagtacgttaccgtcgggcaggcgttacttaacgccagagaatccggggaagatccctggactgcaatagaagatgtccttccctggcaggaattcatcaacagcgtggaagaaacgcggtttctttcccgtaagggcaatttcgacgcgcttcatctgatcaccgaaaaatacagtacgttgcgtaaatatgccccgcgtatgctgtcagcattgcagttcatggcgacacctgcggcgcaggcgctcagcgatgcgctggacaccataacggaaatgtaccgtaaacaacttcgtaaagtgccgccatcagcgccaacagggtttatccctgaaagctggcgaaaactggtgctcacgccttcaggcatcgaccgcaagtactacgagttttgcgtactgaatgaactcaagggtgcattacgttccggtgatatctgggtaaaaggatcgcgccgctacaaaaattttgatgattatctcatcccgactgctgagtttgagaaatcccgacataatgaccagttacagttggccgttcagaccgatagccaggcataccttcaggcccgtatgactcttcttgcatctcggctggaagaagttaacgcgatggcgcttgccggtgatttgcccgatgtagatatctcagataaaggcgtaaaaatcactccactggagaacagcgttccttcaggtgtttcgccctttgcagatttggtctatggcatgcttccccatccgaaaattacggagatactggaagaagttgatagctggacgggatttacgcgtcacttcgcgcacctcaaaaataataacgtcagaccaaaagacggaagactgttgctgaccaccattctggttgacggcatcaaccttgggctgacaaaaatggcggaatcctgccctggggccacaagatcgtcactcgaaggtattcaggcatggtacatcagggatgaaacttattcagcggcactggccgagctggtcaacgcacagaaagagcggcctctggccgcattctggggcgacgggacaacatcgtcgtcagacgggcagaactttcgggtaggcagtcacggacgttatgccggtcaggtcaatcttaaatatggtcaggagccgggcgtgcagatttatacgcatatctcagaccaatacagcccgttctacgccaaagtgatcagccgggtgcgcgactcaacccacgtgcttgatggcctgctgtaccatgaaagcgatctggaaattaccgagcattacaccgataccgcaggcttcactgaacatgttttcgccctgatgcacctgctgggattcgcttttgcgccaaggatccgtgatcttcatgacaagcggctgtttattcatggaaaggccgagcgctatccggggcttcagtctgtcatatcaacaacctgcctaaatatcaaagacattgagtcgcactgggatgaggtattgcgcctggcaacctcgattaagcaggggacagtcaccgcatcactgatgatgaaaaagttagccagttacccaaaacagaatggacttgccaaagcgctgagagagattggccgcatcgaacggacactatttatgctggactggttccgtgatcccggtctgcgccgacgcgtgcaggcggggctgaataagggtgaggcccgtaatgcccttgcgcgagcggtctttttgcaccgtctgggtgaaataagggatcgtgggctggagaatcagagttatcgcgccagcgggctgacattactgacagcagcgatcacgttgtggaacacggtatatatagaaagagctattgagtcactaaaacgaaagggtatcccgataaatgagcaactggtctctcatctttctcccctgggctgggaacatatcaatctgagtggagattacgtctggcgtaataatcttaagctgggatccggaaaataccgctcattacgtacagtcgataccgctttgtacaaaaaacagtcttag

SEQ ID NO: 439137 - DNA, 663 bp, Serratia marcescens; identical to SEQ ID NO: 101064

SEQ ID NO: 439138 - DNA, 711 bp, Serratia marcescens
atgatatatttaaccgaattaatctgtcaactctacaggttgacagatcaccataagctgaccgctgcaacgtttaaaaatcttgctgatattaagttagttgaacctacagcggatgcagacaccatattgcagcttgaaaatatatttagcgaatactcactgagatatattgacagggatctggctgagattctgagtaacataataactacagataaaaaacactctctggatttcgattttaacaaattacagtctctgactgcctcgaaaagtttcggttgtggatggaacaaggtaataaatggtagttggttcaaaaacctttactcatggggggaggggatgtatcccgccaaaaacctgaaagctgaaaacatttcagactgggaggataatatatggcacattgagcatgaaggtttcaaccctcgcgattctatcaatgttacatattactcctggcttgaccgctatgtagcttcaaacagtggtggttcacatcatgcagcaatggttgtatatcaatctgtcagagacaaattagagtataaacgagaagcggttattgaacaactgagcataaattcaaacaccgttgaaatacttgaccagaactactattcattcatattccagataaaacgccctagtaataagacagaaatttatacatcagaatatgaatttatagatgctttaaaatag

SEQ ID NO: 439139 - DNA, 357 bp, Serratia marcescens; identical to SEQ ID NO: 101061

SEQ ID NO: 439140 - DNA, 243 bp, Serratia marcescens
atgtggcgtccagaactggcgctcaaggtgaaaccatgtgacgacacaaaccatcccgccaatccagaaaatagccttactgaaagcccccaatacagccagggtaataacagaaactacatgcagtgcgccagctgtgacaaggcgaagataaaaacagaaccatttaacgtgtcggataaacggattgcccgtttttactctacgttgctttttacgttccctgtcaatttcatgccttag

SEQ ID NO: 439141 - DNA, 903 bp, Serratia marcescens
atgagaataaaagttatgaaaaatgtaactgaaaaaacgaagattcgtcacaggaacgaaataaataaaactctggctcaacttccattggcagccaaaagggttctgtgtctggccttggtttatgttgatccaaaaaaagaaatgaaaatggggcagacctttaaaattcgggctgatatgtacgcaaagatagccggaatacatccttctgttgcttataagcaagtcaaggaaggtgctgaattgttaaatgtcagtaaactttcccttacggggaatgatatgaaggaattagcaaaggaacttggtcttccaaattcgaaaaacatcgaccgccttgacttatcgattactgattattgtgcatataaccaaaatgagggatttgtaattctaagatttggatacactatcacgccttatatatcaagattaattggggcggaaaataaattcacaacacaactaattgcgtcctcattaaaattgagaggggagtattcgtggtcattgtatcagttaattaggaagaattactcaacgtttaaagggaaaaattcatttagcctatctctggaagagttgaaggatgaacttattgcttacaatattgatgataatggagatattatatataagtatccagagtaccctatattcaagcgagaggtaataaataaggccatcaaagaaataaaagaaaaaactgaggtgactttcctgtcttgcgttgtcgatgaaaaagaaggaaggaaagttagtaagttacgatttgaatacgctatagatgaagataaatttgccgaatcaggctctgattttcctatagagttatttgacgatgatgattctgcttttcttgaggagtttgatagaaaagtaccacccaaaaagaaatga

SEQ ID NO: 439142 - DNA, 516 bp, Serratia marcescens; identical to SEQ ID NO: 101058

SEQ ID NO: 439143 - DNA, 543 bp, Serratia marcescens; identical to SEQ ID NO: 101057

SEQ ID NO: 439144 - DNA, 267 bp, Serratia marcescens; identical to SEQ ID NO: 101056

SEQ ID NO: 439145 - DNA, 342 bp, Serratia marcescens; identical to SEQ ID NO: 101055

SEQ ID NO: 439146 - DNA, 549 bp, Serratia marcescens; identical to SEQ ID NO: 149335

SEQ ID NO: 439147 - DNA, 264 bp, Serratia marcescens; identical to SEQ ID NO: 133514

SEQ ID NO: 439148 - DNA, 180 bp, Serratia marcescens; identical to SEQ ID NO: 133515

SEQ ID NO: 439149 - DNA, 366 bp, Serratia marcescens
atggcgtgggtgacggtgagacaggccacggaactgacgggaaaagcccgaagttccctgtatcgggatatggctaaaggccgcgtatcataccggacggaggctgatggtggtcgtgtcgtagataccagcgagcttatccgggtgtacggtgagttaagactgattgagactcatgatcgggacgggttgagactgccggatgagactgaaaaaacggtatcagaggcgctgattgcggagataaaagcgctgcgggaagaggtggccgggctgcggcaggaaatgcaggccatgagactactggaacacaaaacggagacagcagagacaccgcgccggtggtggcaatgggggaagcgctga

SEQ ID NO: 439150 - DNA, 282 bp, Serratia marcescens; identical to SEQ ID NO: 133516

SEQ ID NO: 439151 - DNA, 495 bp, Serratia marcescens; identical to SEQ ID NO: 219329

SEQ ID NO: 439152 - DNA, 462 bp, Serratia marcescens; identical to SEQ ID NO: 219328

SEQ ID NO: 439153 - DNA, 138 bp, Serratia marcescens; identical to SEQ ID NO: 95295

SEQ ID NO: 439154 - DNA, 507 bp, Serratia marcescens; identical to SEQ ID NO: 95294

SEQ ID NO: 439155 - DNA, 261 bp, Serratia marcescens; identical to SEQ ID NO: 95293

SEQ ID NO: 439156 - DNA, 315 bp, Serratia marcescens
atgtccgcccaacaggcatgcccctacttcttctttgagggtcctccccagtttataattgacagcgttaacctcaaggcgacgggccagcacttgataagcccagtatgccggagatgggaatgcctcaattctaccccatggaactccaggcagaatatcctgatccggagccgggaagtccagattgacaactgcttgtccaatgaagactgctccacgttgtgtcatactgtctcctggccatatctggcgttcagccagtggatcaattcgttacgttctgcgggttccatccgctcgatacggttataa

SEQ ID NO: 439157 - DNA, 351 bp, Serratia marcescens
atgatgcagctgttccgtaaaggtatccaggctcttcagaattggcgcctggaggaggaaacactaccagaagaggacagtcaggcctatcaggtcagcgttaccgggcaacataacatccactgtgaagttgtgaataaggaaggtgacccctgttttggtgtcatgttcgaaatcgatcagggtgtgcctgccttacacatcaacaccggcggggatatgttgctccacattcattgtgcccataacggactcgttctgactcctgatgcaagcgatcagcgctttgataaggctcccgtcgatcgcttctcttataacagcccatccctgctgttatctgccgactaa

SEQ ID NO: 439158 - DNA, 579 bp, Serratia marcescens
atgatatcggatatgacttggatcgatctcggtagtcccgttcctcgggagcaaccgttcaattatcaacctgttaattggcatgctggggaaccgcttttcctgacgcctcctcttgagaatgaagtgttccccgcatttagtgacgtgatcaacagtcgcagaactcggaggttttttagccgagtcgacccgggccaactttcccactggctttggttgaccaacagggtcatggctatagggcactcttattatgggtttccactttcgcaacgccctgtgccttccgctggggctatacatcccattcatattgttctctctctacctgatcaggatgggtggcaactgtacctaccggatatgcacgcgctgaaacctctgcttgccccagaacaggcagatagcctaatctggcgcgacgccggagttttgattgctcaaatggcacttgttgccgaagcgctggcctgtaatttctgcccaatgggtattacaggccaggattggtgcaccagattaaaactggaaggccgtttgatgggtactggactggcggttttgggttcgcgctga

SEQ ID NO: 439159 - DNA, 642 bp, Serratia marcescens
atgctaacatctgacccacgttatcaacttctagcagtatatagtgcacaacatctccgtgctgttgctggcagagtcattgctcgtgctgagctgacacctctgaatttttctacgctgctctggcgctcaatgtggcaatcaccaattccacctcttttacaccctgaatcaggtcacgaatttttacaggaaaacggctgcccctatccacgaccttatggccttgagtcgtggatcacgaccaacaataaaggtattcttgatttccagtctgctaataagattatttatttggctggttttattgaaaaagactggggtcttagcaggcaaatgccaatatggagaaaacacgcaacgagtcggatcaatggctatgcatataatattgttcagatgtttatgtatgatgggctttcggatgcttatccaactgaatactatgttacgttcgactacgatcttttgagtgacgagttgaaaaacacaaggcttaatcgctgggtgtctacataccaaaaaaatcgaaagatccctttgtcgttgcatcaatggaaattactcggatatctaatgcgagatcaatatttctatggcaaattacgcttgagacagttaaagggttatgtacatctttaa

SEQ ID NO: 439160 - DNA, 402 bp, Serratia marcescens
atgagtatatacaacgtatttattagccactcatggagttacggtgatttttatacgcgtttagttgaaatgctacggtctaaacctgggttttcttttaaaaactactctgttcctgaggaaaatccaatttttggtgccaaaaccgatcgtgaattggaagcggctatcgaggaaaaaatgcgactgtcctccgtggtgttgatcatggcgggagtgtattcaacctatagcaaatggatcaatatagaaattgaaatggccaaacgcttaggtaaacccattattgcaataaaaccgtttggcgccgaacgtatttctacggcggtacgagccgcgtcgcataaagaatgtgcctggaataccaatagcataacgcaagctattatcgatttggcctga

SEQ ID NO: 439161 - DNA, 960 bp, Serratia marcescens
atgagaaaggcattatttattggtatcaatgagtatgagaacgtgagttcgctttcgggttgcaacaacgatgctatcgccatggcttcagtattgcagcggcacgccagcggaaccccaaattttagcagcaaggtgctgatcagcgcagaagattgcgttactggggaaagcattaccgagaatatcaaagcgcttttctccggtgagggcgaggtggcgctgttatacttcgccgggcatgggcaatttgatacgagtatcgatgagggaatgattattcctcaggattattcgatgcctaaggacggcatcagaatcagcgatattttggggtgggctaacgcagcgagcaaaatccatcataaaatcatcatcctcgattgctgtcaaagcggcgctgccggcgaagatcgcacattgaaagggggcagcagcgtcttgggcgaggggataacaatattaaccgcctgtaagaaagaagagtttgctgtagagtacggtggccatggaatattcacgaacttgatgcttcaggccctgcatggcggcgcggccaacctcctcgggcaaattacccccggaaacttatactcttttgtcgataatgcgttgggatcgtgggcgcagcgtccgatatttaaaaccaacgtttcacgatttactgcgcttcgtgagaccgcgccgttagtcccgctagatatattacgtcagttgcccgcttggttcccggagcaagagtctgaatttattttggatccgagttttgaaccaaccgagagtacttatgataaaaacaacggagaaatatttgcaaaactgcaaaaatgtaaccggcatagtttgattgagccgataaatgaagaacatatgtactatgctgctataaattcgacggggtgccgcttgaccgccctgggagcatattattgggagcttgctaaaaaggagcgtatctga

SEQ ID NO: 439162 - DNA, 489 bp, Serratia marcescens
atgagcgtatttatcagttacagacatacggacagacttaaagcgaatgaaataaacaacaagctaagaaatgccggcattgaaacctacctggatgtgctggatggcgagtcgcaaactaccaatgacattaccaacgtcattactgagaatatcaagagaagtagtcatctgttagcgatagtttcgcaatcgacggtgctgtcctggtgggttccctttgagataggtgaggcaacgataaccaatcgacgtatctgcacgtatcatcatggtgtggacagattaccggaatacttggataaatggccgaaactgagccagatgggggatttagattttttcattagcgagtacaagaaagatagtcttaattccagagcggcttttgagagtttcgaacttaacaagtcgcagttctctcgcgataaagggagtgctgatgccttccacaaggcattgaaagaaagaattttcttaggctattga

SEQ ID NO: 439163 - DNA, 894 bp, Serratia marcescens
atggaagaaccttccctgcatctggttaaggcgtttgtcgccgtggcggaatctcagagcttcgcgaaagcggcgctgagtcttaatatgaccccttcctcggtcagccggctgataaaaaagcttgagcagcagttggatatggtactgatcaaccgcacaacccgaaccatggcgttgaccgaaacaggtcagcggtactttgccgactgcaacgccgcactcgagcaactgaggtttgcctatgaacgggtacgcgatggccaaaaccaaccgcagggaacgctgcgcatcagcgcatccatgacctttgggcgtgagcatatcgcgccgtacctgtcggcatttatggaacaattcccccaattgcggttagacctgataatgaccgaccgctatgtcgatatcatcgccgaacgcgtcggagtcgccattcgtatcggccggctgcaggattcaagcctgttggcacgaaaattactggacaaccgcaggattctggtcgcttcgcccgcttatttgcagcgctggggaacgccaaccactctggaagagttacagcaacatcagtgcctggtctccacagcaagtcatgatgggcgactctggcgtttattcgggccggaaggcgaaattgtttttcatcccaaaggccggatgcaggccgataacggcgatgcggtcaaacaattctgcctcgacggccaaggtattgcctttcattcatccgtgacaatggcgggatccattcgccgcggtgagctggtacagttgctgacgcactggacgggaagagaaaccggcgtttacgcggtatatccaccgggaaccatcgggccggcggctcgcgttctggtcgatttcctttgccaaaagtggcgggaatcgccttaa

SEQ ID NO: 439164 - DNA, 594 bp, Serratia marcescens
atggcgcgagtcatcaaggttccactcagtgtcgatattgaaggcggctattccgatggaagcaacagcatggaaagtgtggtgacgcgttttatggatgccggagctgtgggaatcaacattcaggatggcgcagattctcctcatcagcttgccgttaaaatcgctcaggcgcgaacggcggcggaatgcttgggaataaagctatatatcaacgctcgaaccgatgtgtatgcacgcgcattggcgcctgttgaaatgcgggtaagtgaaacgttgtcgcgcgccaggctatacgctgaagcaggagcagatgggatatttgttcttggggtgacggatcctgaggatatcagggaaattgccgctaatacccgtctgttgttaaacgtgattgtttggcccagcttgccgactgcggatcatctcagcatgctcggcgtgcgtcgagtcagcgtaggctcttggataccgcaaaccctctgggcgcataccgctaaattggcggcggattttctgagagagggcagttccgacgccttgtttaatcaggctgcggcgtacggtcatatcaacggccattttcccgaatag

SEQ ID NO: 439165 - DNA, 1440 bp, Serratia marcescens
atggctccagataacatagaaaccaaagaggaagaatttctattttatgaaaaaaaagaaacgctatggcagtacctaaaaaaagctgataaggaggttgtttattcagaggagcttcctccattttttaccttgttacctgacatgcaaagctaccgagacctttacgacgggtttggccgtgagggagccgaactattcttacgtacagtaaacgatctttctcaatataaagacactgatgaaaagtgggtaaggaaagccattgatactgaagtatttaaacttggttttatgcgtaactccgagccgttcttcgcttatcacaatgccaacagtattattattggagaagagctaaaaagtgatgttgctatatccaactcgttggagcttaagttccagttagatggttttgaagagcttcatcaactgtcattaaaatacaatcaccaaagtattataccgaagcgaatttttgtgctgataggtaaaaatggtgttggtaaaagcgagtcacttaaagcgttttgccgaggagcactgcaatacaaagataaagggttgtcattggttgatgatgacggtaagcgacctctaatcaatcgcattatcgcaatagcgacaccaggtgaaacctcaaacacgttccctcctgaaagaagagcgacacagaagctttactatagacgattaaatctgactcgaaaagggacacataatattggtgattgccttgtacaattagcgagaagtgcagatgagattggtggaaacactcgaaaaaaccttttcttggattcactttaccaagcaggattagactctaaaaatatatttttacagttaaaaacagaacaaaaaatcaatctatggagttttttacaaggagacggagagcaagattctttgatgcgttgggctagtattgagcacaacctagaccctaaattaaaaagaggcgacggactctacccgcttagtagcggacaattaaccttctttaaggttgctttactgagttgcttgttcattgaaaacggtacgtttgtattgatggatgaacctgaaacgcacatgcatcctaacatgattgttgatttcataggactactagacttcctattagaaaaaacaggctcccaggcacttatagcaactcattcagcgtattttgttcgtgaagtatcaaatgaacaggtagctgttctctcaatatcagatcacaggctcgtaactgataaaccgaggttaccaacatttggagcaactgtagattctatttcacagtttatctttcaggaagatactgaaataagactttcagaaaaactctacgataaagtgaaaggcaagagtttctctgacgtagaagaaaagctaggcaatgaaatttcgctatcagccttaatgcgattaaaacgcatgatggaggattaa

SEQ ID NO: 439166 - DNA, 1407 bp, Serratia marcescens
atgagttttgagttatatgaatacaaaattgaggatctaggtaaagttatcactggtaaaacaccgccttccaaaattagtgatgcttttagcgcacaaggtattccttttgtaacgccaaaagatatggacggtcgtagacttatagataaaaccgaaaggtatttgtcttcccagggtgtcgaagcggtgcggaattgcttactgcctcaaaatagtattgcggtgtcttgtattggttcagatatgggtaaaacggttttattacccggtaaaagcattactaatcagcagataaatgccatcgttgtagattcagaacgttttgattacaagtatgtctattattatctttcaactctgcaggatgatttcaaagcaattgctggaggaagtgcaactccaattttgaataaggggcactttagccaatttaaggtttcattacccgttaaactcgtgcaaaataaaatcgctttaatacttgactccttggatacaaaaatagaagtaaataccgaaatcagccatactctcgaacaaatggcccaagccctgttcaaaagctggtttgtcgattttgaaccggtgaaagccaaaatggcggtgctggaggcgggtggttcacaggaagacgcgactcttgtggcgatgacggcgatttctgggaaagatactgatgcgctggcggtttttgagcgtgaacaccctgagcaatatgccgagttaaaagccacggcagagctgtttccgtctgcgatgcaggatagtgagttgggggagattccggaagggtggggtgtagaaaattatcgtactttttgtgattttgttcaaagtggcgggacaccaaagagatcagaacaggcttattgggaagatggcgatattcgatggctatcatcaggtgaggtcagagataaaatagtctttgatacaaaagaaaaaataacggaagttggattgagaaatagcatcgctaagctttggccgaagtattcaactgttatggcgatgtatggagcaacagctggtgaaatttgtttacttgcaagtgaaatgtctgctaatcaggcttgttgtgctctttactctaaaaaatattcgttctttatttatttttcattgtgtaatagcgcatctgttattgcatcgaaagcttcaggttcagcccagcaaaatttgaataaaggtataatagaaaacgcggttttctgtaagccaacggacagcctaatagagatttataataaatcgattaatgacttaatgttaatgtggatttcgaatgttaaatgcaataataatttaacccaactccgcgacaccctcctccccaagctcctctcgggcgaaatcaccctacctgaagccgagcaggcggtaagtgaggcggaaaatgtataa

SEQ ID NO: 439167 - DNA, 387 bp, Serratia marcescens
atgtttgctaaatcctttattgctctcgacggtaacggtcgcctgaccggggctcgtactgcgcagatagcgccttacgatcgctatacctgccatctgtgcaacagcacaatgcaataccatcctgaatacgacaccgaacgcccgtggttcgaacacaccgaaacgggtctcaccagcaatggtcgacagcattgtccctatgccaatccggatgcgggtgaaatgcaccttgttagacgcctgcaactcctccactgcaatgccgctcccagggccagtaaagccgattggcactgctcacaatgtgtgatcgattactatggtgaacgctattgtctgacctgtagcaccggagacttcagccaaccaacagatgcagcatga

SEQ ID NO: 439168 - DNA, 186 bp, Serratia marcescens; identical to SEQ ID NO: 433558

SEQ ID NO: 439169 - DNA, 1821 bp, Serratia marcescens
atgctattttcattactccataacgatgtaatcggacggagcaaccatattcttcaacagataaaaaataatgttgattactacgtaaaaactcgcgactttgatattgcaaagatcaaacttgataacataaacaccttaattattactggtgccccaggggttgggaaaacaactctggctgaacagttatgtcttcattatattcttgaagaatacgaactaatttttatagaaagtgacattgaagaaggtgagagggtactatcagcggataaaaaacaactttttttatatgatgattttctcggcagaaattatttggatgctttaagaaataaagaagactctaaaatcgtaaggttcatgaatagaattagaacatgcaatgaaaaaaaactaatactcacttcacgtacaaccatactaaatcaaggaaaagcctcaagtgaattattctatataaacaataccgaaaaacatgagtatgaagttgaggttaaaaatcttaacgtattagataaggcaaaaatactctataaccatatatggttcagtaatctcccaaacaacttcaaagattgtttttggttagataaaaagtataagaaaataatatctcacaaaaattacaacccacgattaatatcgtttataactgattatgataaagtttcacacctcacgccagatgtatactgggattatattattgaaagtttaagtaacccatcagcaatttgggagcacatgctgactaaacaaataccaaaatgtgtgtattatctgacttacttagtatctcttaacaatggaagtatatctgaaagtatattacgtcaatgctataataattttttagatttaagcggttttgattacactcgtaatgattattttgaatttcatgactgtacaaaacatgccgttaaatcgactttacaaagaaagttggaagatggtaaagagccgatgtatgatgttctaaatccatctatatctgattatttaattgaaaaaatagatgacaactcttcatccattccaacatatttctctgcattgacaacaatgcaatctctgtataatttaaatacgttgataaacaaaaaaataccaacatatttatcttctaacatagtgaatgtttcactggataatatccataattataaaaatgaagattatataatagaatttgtaagaattgtaatttccagtactaaagtacctcacctcgataaactaagagctgtaaagattataaaatcagaatattttaaatttgaaagattttatgctggtaataatttcaaaatattgacaataatcaactggattgctttaaatgacccagattggcttggttatgataatatcaagaattatgttgagttctctttattagtaaatggcgatgatttggatcatgaagatttaaatattttggcccaaataacaaatacacttggcgaaacagcactatccgatagtattcacaaactactattagattactggcaaggttatgtaaatgaatttatttcagaaaacaatgactttactgaatactatgacatcaatgaagaaaacacattaaaatcaagagctaaagatcacatcagtgatttactttcagaaagtacattgtactttaacactcaggaagttgacgacattattgaaaaattagacgtacaaaacataattcaacgtaatattgaaaacactccagactgggatgaatattatcatgatgagaaatatagttaccaagatagcggatttgatgaggtagatgatttgttttcgagagaatag

SEQ ID NO: 439170 - DNA, 264 bp, Serratia marcescens
atgttgaccgtttccacccccaccccatctaccccgtcgccggtgcatcctggcgtctataccccgcgcgagcgctttatccgcctgccggaagtgctctacaccactggtctgtcacgctccaccgtgtacgagatgatgagccgccggcagttcccggcccaggtctccctcggcggtaaaaacgtcgcctggctggcctctgaggttgagcagtggatggacgaacgtattgccaaccgtcatcaggggagtgccgagtga

SEQ ID NO: 439171 - DNA, 798 bp, Serratia marcescens
atgcttttagataaaaatatttatgcttttcgtgaaaacacgggcatttgggcaaagccagattatgcgggtatcccctatagtgatggggaaacgcaggaaaatttattattgagtatcattcaaaatactcaagatcgaagtgtatcttccgctgagctcaaagctcaatgcacagattgggtaacgacctaccatttttctagcttgcgttcaaatttgttacggccgctaaaatccatcctgcagcctggtgctaagattttggaaatcggtgcagggtgcggagccatcacgcggtttttaggcgaaatgggatgcgaggttgtcgcattagagggaagcttgcgacgcgccgcgatcgccagaaccaggactgcaggcctggacaatgttaccgtagtcagcgaaagatttgatgatttcgagagtaatgtgctctttgatgtgattactttgattggcgtgctcgaatattctaacctattcagtcaaggtgaagacagtgcagtgagcatgcttgaaaaaattaaaaagcgccttaaaccaggcgggaagttgatcattgcgattgagaaccagcttggcttgaaatatttctccggtgcgcgagaagatcacctgggccaggcgatgtatggtattgaagggcgctatacgaaagaacaggcagaaactttcgggcaccatatcctgaagcagaagctcgtaagcgttggtttgcagactatagaaacgttgctcccgttccctgattataaactgcccgtttccgttgtgacgtctaacggtgcctga

SEQ ID NO: 439172 - DNA, 150 bp, Serratia marcescens
atgatgcatctgcagagacaatttttcgccgggtttgacggtgattttacgcacctggaaccgatccccctgcgcaatcgcatcatgctgaccccagggacgataaacctcccggtgttgtttactttcaggccgcttgctgcgttttag

SEQ ID NO: 439173 - DNA, 549 bp, Serratia marcescens
atgctttcgttgtactgcggaaaagcaactgagagttggtgggaaactcaaatgttcggcacgctttccggcctggttattggggtggtaggaacagtgttgggggtgtttttaacccagtatttttcccataaaaacgcatctaagctggaaagtgaaaaagcacgtttgctttttgttaactctcatttcatcaaaggtattttagattttgtcgacagcgaaattcttaatatgcaaaaaatacataacgattactataagttgcaacctggggaggaactaacggatgacttaacccatcgtgaacgggccgcttcagtaatttcttcagtggctatgtttaaggataaagagcttgatgatattttcggtgctcttttagaacaaagaaataaggtaattacttctcactctataaataaactttctaaagggggtgataggctgagttctaagcagcttgtcgctacggtagagcaaggtattaatctagctgcggacttaaaactgcgaatttcagaattgtgttcctatgtaagtaggtga

SEQ ID NO: 439174 - DNA, 702 bp, Serratia marcescens
atgcatccaaagttgcaaagttttataaactggctcaagccattttcttttttgaatgtttttttctacttaatgattctaatagtggcttttttgtctgtatttttttctttttatttcctctttggtcgtggaaacagtgctcagccacttactcttttagctgtgggagctgcgttgttaacattaatttataatgttaggcgtcatatttctgaagattacttcaaagaggctcgggcttaccttgagaaagcatatgatactttgaaaccctccgtgccgggggagcccccaatcaatgataggctattatggttaacttgcgctaggatgctgaaaatatctgaaaacctatcaaagaagatattgttcgattcacatagagatgcgtatatcgaagataggcagtattggcgggctaagttttgggatataattaaacctttcccttcagaatattatgcggaaaaaccggagcacctcataatgcacaattcagaagatagggctccgttggccgagtcttctctttacgtcatatacaagtttatggagtgggcaaaggattaccaagatcctcttgataattataggttcactgacgaagaaatagaaactatgcaagtaagagggccgagagagttgggggacttgcttgcaaaacatcgtgaattacgtaaaaaaagtaatgggtgttaa

SEQ ID NO: 439175 - DNA, 531 bp, Serratia marcescens
atgatgaccaaggcaaaatttttcgagcttcttaaccacatggctaaacgtgaaaacgcgaaagcggaagatttcactatttacactctggttgaatcggaagaacgccaggccgaattgctggctaccgctggccgtcgcgaatggttcttcaacgctattggcttttccgttcgcaactgctggcatgtctgtgcgcaggatcacaacactgttgaagcattcaaccgcaatctccctaagttcacacgctggttgaatgagtggaaggagtcgaaatcagccgaagagcgcatcgaagctcaggcacgcagcgcatcctccgcgaaacccgatgcaacccgaacggtgcgcggcaaagtaatttcatcaatcaccgggcgcgcagtgtcctacggccggcaccagatcggtaagtaccacgggcgcaggaatatccacttctcagcatcgaagtacagcttcaacggtctatcttccagcgatattgcggcggggtgctattcgataactgcgtttgctcgggggtga

SEQ ID NO: 439176 - DNA, 168 bp, Serratia marcescens
atggtagttgccgagcacgtgccgcccctgcaccaccgaaccttcgtcggtgatggcaaccagcaccagcgtgcgcagcgtttcggtgtcgaccttatccagaacatcgagcaggatgcgccggatcttctctttgtcatgctcgattgccgggtcggtctcgcctag

SEQ ID NO: 439177 - DNA, 267 bp, Serratia marcescens
atgagcaagcatagcgaacaaaaagctttgaaatcggtgttggccgaaatggataggcaagatgccaaatggggagctgaccgcgagcaccatccctatgtctggtcggcaatcctgagcgaagaggtcggcgagttcagccaggccattctgcacgatgattttggtggcacccacgcaaataccgcgcgggcggaaatggttcaggtagcagccgtcgccctgcaaatcatcgagtactacgaccgtatggggtacccagaatga

SEQ ID NO: 439178 - DNA, 666 bp, Serratia marcescens
atgaaagagcgcccagtgattttcaactcagaaatggttcgcgccattctcgacggccgcaagacccagacgcggcggattgtgaaggttcagccagagccatcaaaaacacgggcaggagacttttggttttcgtctaaaaaattagaaagcatggttcatgtttcggacttcatgcctggcaactcacctattgccgattgccaccttttctttcaagagcattgttgcccattcggccaggtaggcgatcggctgtgggtgcgcgagacgttcgccggtcactatctcgatgatgaccaaattcaggacatcaaagacgacagaaacaaagcggaagacctttgcgaataccgcgccgattactcagatgatgctgactgcgtggacggatggacgccatcaatccacatgccgcgctgggccagcagaatcacgctggaaatcaccgccgtgcgcgttgagcggctgaacgatatcagcgaagaggatgcaaaagccgaaggcgtgaaagccggtgtttgccctggtcacgaacacatgatgcaccaggtggcattcagtgaattatggcaatccatctacggcgcagaaaactggagcgccaatccctgggtatgggtgatcgagttcaagcatgtggaggtgcgtgatgccagcaaatga

SEQ ID NO: 439179 - DNA, 483 bp, Serratia marcescens
atgacaaccatcaagcggtttacccctgactatatcatgcacgcggctcgctttgagccgttcgccagagaggcggagcacggtgaatatgttctgtttgatgcccaccagcaagtagtgagcgccctgaaggctgagcgcgatgcgctggcagatcgagttaatgcgctgactgtggagaatcaggcgctgaatgaatcgcttgactcaatttgcaatgcatacaacgaggagctgacagatctactcgatatcgcagtaaaaatggcagtcaaacttcaaaccccagccacctccgcagcacttgcagctatcgaagcgcgagcaaaggttgaggctattgagctgcttatcggcagaaagaaaagagagctcgccgatatgcatcctgatactcacgcctttggtatgacatctgcgctcattcgaaaccagatccgctgcttggaatcattcgccaccgaactgcgggaggccaaatga

SEQ ID NO: 439180 - DNA, 186 bp, Serratia marcescens
atgccgaagaatctgaaactggagatggaaacactcaacaagatgttggagagccagattcaggagagtcacgatctggcaaaaaaggcggagcaaaacctaaacgagatcaagaggcagctggagccttaccagttcaacaacctgatggacagcaacctgaagcgtgatctcttcgccttctaa

SEQ ID NO: 439181 - DNA, 771 bp, Serratia marcescens
atgcctcagccattacctaagtatgtagaaatcaatgatgaactcacagacagactaagtgctgatagtgtgttgtcagaaatggaattctatcgttacattaaatcgatagagtctattaaagacaaagctatgcagaactatctgtttgcgatgacatacgcggcctatggtgaaaaagaaaaagcaatcccattttttgagcaagctatcagtgatggtgtaataattgctcctaacaactacttggcttacatcaacaatgtaggcacgttcacagaggttagggatctttctttgcgcttagcgcaactgtatgtaaataaacaaattttgcatactgcctaccaaagttgccttttcagtggtgatatagagcaggctactttatacgctgtaagatacataaatattgctgaaggtaaggagagccaggaaatggctaagactcttgcagaagcaaaaaaagaagtaagtaagttcaaggagatagtagggctgtctgatgacgattttaagaaaattgctggcaacgctatacatgtccttgagcatcatggcgcgaaaatatctgggttagcatatcagagcatacaagaggaacattcttcatcatatgtggtaatggtgaagggaaacgatcctgaaaaaattgctgaaatgaacattgatcttgcatttgcccttgctgactgcgaacaacttacagataaacggttcagcgcctggttcagagggcaggagggtgaaggcaatgtccgtaactcctga

SEQ ID NO: 439182 - DNA, 312 bp, Serratia marcescens
atgccctggaagaacgaacccaacatcctatcaatgctgattgcgttcggcatgaccctgctgggagccattgccagttactcgttcaaggtgctgaacggcgaggcctttagttggcgcacgctgtttctgcagctcttcgtttctatcttcgccgggttaaccatggtgatgatcgccctgcattacgactggccgtcagaagtgatgggtggcgtgtgtggcatggctggctggtctggggcatcactgattaaggcgctggaacgtcgattcctgaataaagcgagcgatagcaatgaatatcagtaa

SEQ ID NO: 439183 - DNA, 441 bp, Serratia marcescens
atgaatatcagtaaaagcggcattgagctgatcaagcgcttcgaaggcctgcgattgaaagcctatcaggattcggttggcgtctggacgatcggttacggatggacacagccggtagacggtaaaaaaatcggcctcggcatgcagattgatctggcgactgccgatcggttgctgaaatgcggcgttgtccagtatgagcaaggcgttaatcagttggtgaaggtgcacataacccagggccaattcgatgcacttgtgagctttgcgtataacctcggcctgcggtcgctgagcacatccacgcttctgcaaaaactaaacgctggagacactcaaggcgctgccgaccagttcgggcgctgggtaaatgctggcggtaaacgtctggatggtctggttgcacgccgtgcagcagaacgcgagatgtttttatcatga

SEQ ID NO: 439184 - DNA, 540 bp, Serratia marcescens
atgtcaatgtttatttattatttgggtgcgggtatgaaacgaatatttttagttgttttattaatgataatctcaagtgcttcttatgccgaaactatggaagggtatggtaaatctaaatggggaatgacgccgcaacaggttgtgatggcagaaagtggaaaagctcatttgcttgaaaatccaataaagtataaggggaaacttgggctagtcgctatagatagtgttgagattggttcaagttcttacgaagtgaattatctatttgatggttcggataaattggttcaggttaatgtttctgcaaaagaagaaaagaaccatcttatcaatgaggataattttaaaaatgcggagtctcttttaacacaaaagtatggaactccaaagtatagggatgaaggtgttaaatcaatttggaatacaaaagggacaactattgaattatcacatttttatatagaaaaagtagttaccaaagttacaataaggtacttgcctgaggaaactacaaaaatagaaactaataatatttaa

SEQ ID NO: 439185 - DNA, 753 bp, Serratia marcescens
atgaaaaaaattaaatggttgctaatactcacactcactatagttttaataaccattctagccaaaccaattcttctatatcgagagcagatggattcaactctttctttaaaaaactcagactggggtgactttggttcatttattggtggggtatatggttccttattatcatccataacactattggttataataataacgtcttatataacaaactcaatcaataatgaacaagtccgattacttagaaatgaacagcacttttcaaatttttctaaactactggaacaccttcaacatagttatattaaattttacaatagctcagacggtgttaaaagtatccatgatttttataaacgtttcgaagtgtggttagcaattagtgtaattggcacaggatatgatgaggaactaaccgtcaaagaaaacttatttaataatgccataaagcggtttagcgaaaacgaacaatataaagacctattcctaaaagaagcaaagttattcaaatgcatcattgaggtaatagaaaaatctcccagtgaattgtcagacgcaatgaaaattatttttgaaaccactttgtctgaaactgaacgattttctttatccacctacacttacgcccattacccagaaactagagcttttttaaaaagctgggtatcgttaacaattgtgcctccccagagcgttgcacaagccaagcaaaacttaaaactcaacgaaagaaagtggatagactga

SEQ ID NO: 439186 - DNA, 1830 bp, Serratia marcescens
atgcgtcttagacaggtaaggttatctaattttcgtggctacaaagatgaagcgatgattgatatagatgatgctttgacaggtgttataggtaagaatgatgcaggcaagtcaacgatattagaggctttggagatattctttaataaccaacaaataaaaatagattcaactgacaggaatgttttttcacaagatggtacggcatcaataagttgtatattcgatgatttacctaatgaggtagtcctagactcaacttccaaaacaacattgcagcaagagttattattaaacgaggatggattcttggaggttaaaaaatcgttcgatttaactaagaaaacaccttcggaaaaaataactattcttgcaaaccatccaacaaacaatggattgtcagatctacactcattaaaacaatctgatttaaagaaaagattacaagagaaaggtatagatattaaggcggtgccagatcagcgttctaatgttgagataaggaaaacactatacgccaatgaaaaattagtgttggcaaggaccgaagttgctgttaataaagaggatgctaaagcgatatgggaggcattgtctaaatatcttcctgtttacgctttgttccgttctgatagaggaagtaatgatcaggattcggaagttcaagatcctatgaaattagcgattattaatgcattgaaagaagttgaaggccgtctggatgagataaaagaacatgttcgtctaagggccttggatgtggcaaagcgtacactagaaaagcttgaggagatggatagttctttagcgaaagatttaaatccggattttactaaagagccggattggaaaagtttatttaaattatcattggcttctgatagtggtatttcagtaaataaaagggggagtggtgtcaggcgtttgatcttgctaaatttctttagggcggaggctgagaaacactacgcatcagaaaatacatcaaatgttatatatgcaattgaagaacctgaaaccgctcaacatccgggcaatcaacaaatgctaataaaagcattgtataaactctcacttagagataggtgtcaggtcattttgacaactcatgtgcctgctcttgctggtctacttcctctgtcagggataaggtttatagagaaaagtgaggataacagtgttactattaataaaggtgatgacgcaacttatgaaaaagtagcatcaaccttaggcatattgcctaacaaagaagtttatggtgctaatgcttttgttatggtggaagggtatgcggatgtaatattcctgaatagcttgagtgataaattaaaagctgctggatacttaacgcatagcttacaggataaaaacattaccccattaattagtggtggctgtggaaatctcaagcattgggttaatttaaatataataaaatctttgaatagaccttgggcagtattcttggattctgatgatttaggtgatgggagcagtccggaatttcttaagaagttaccagagatagatgggtatagagaaggtggtgttttctgtcaccttactaggaaacgagagtgtgagaattatttgcatcctaatgctatttttagagcgaaagaagtacatgtaaatgtaactgattttgacgatatgaaggtaataataaatcaacatacgcaaattagaaaagttcaagtgttagagaaactgtggcctcatatgactgctgaagaaattttggaaagggatcaatatcagcatagtgatggctctagacgaaacgaattacttgaggtttgtaagcaattaattgagttggtttga

SEQ ID NO: 439187 - DNA, 267 bp, Serratia marcescens
atgcatacaccaccgaggagtcattttactaaagagatcggtttaaccggcatgtcccgtggacgccaacaacggatcaccgggaaggtgctccttcaggttgaaacgctgaaagagcgcgagaccgagcaatgcgggattgtgactgaccggcagtatttcaccgtgtggcgcgatgcctcactggaggaatccttcaaagttcagcacggtgtggggcttgttgcccctgaacttgtggctaaagcaaaggggcgagaagcgtga

SEQ ID NO: 439188 - DNA, 711 bp, Serratia marcescens
atgtgtataagagacagattgcaagcaatcgagttcaaaggtgacttactcagacatgtggagacttttgatggtgattcaggccactgggatggaactgacaaaattagagttaagctgaggggagcgataagaaagcattatcttgcgcagcaagattatcattgtgcttattgcaatagattcaggcaagacttccatgggtattgctgggatatagatcatattatccccaaagacacacaccctcaattcacctacgagccgcataattatgcactgacatgcaaggattgcaatactaagaaaggtgagtttaatgttttagaacctagtgttatagctgctgtaaaatatcctaaaaatagcaatgattatataataataaatcctcattttgatgactacagtgttcatatggctgtggattataactttaataaacaggtttaccacattccaaaaacaaaaaaaggaactgagacatttaggatgtgcaatctatcaagattcacagaggtaatagcaaaaacatcagaggttgttgaaggtgaaaatatcactataggcttttcagatacagagtttagagaaatctatataaattataaagcaataatgaacaataatgaactaactccgagtgagagaaagcaacgactcatttcaagattgactgaattactaggagttgacatgaacaatatgtga

SEQ ID NO: 439189 - DNA, 684 bp, Serratia marcescens
gtgattaacagagaaatatccattgcttcaataattcttgctatgttgtatgctagtagctttgtatttagttatggggtttcagggtactatggttatccaaaagagataatatccattgatataagccagcttttgagttcaagtttcgagtttggaactatacttctttcttttgctgctctctttaacttgagaattaaggatcaggatattggttttttcaaaagaatatttgtttatatctttgtgataattatttcaatgattccttgggttcttataagtccaaaaggatacttgatgcagcatggctacaaagggtacttcttcgcaatattgatacttccaattactctaatatatctcgtcaactcatttggtgattttttggatggtgattataaatttaaaagtagaacccagatatttgtaacggtattttccattcttgctgcgttttatatttctgggtggctttctgcaaataacaaatcttatttgtttaaaaatgacgaaaacaaggtgttactggccgcctatgccgataaatatatatggggtgcctgtgttaatgaatctgctgaatattttgttacgaagcaagatgatggtattaagttaaaaagagtaactggtagggatgtagatgaacttaaaatttgcttcagacgtgctgaataa

SEQ ID NO: 439190 - DNA, 822 bp, Serratia marcescens
atgcaagaacttgcaagcctcgctaatggctcagtacgcgaaattcaggaattggcactgaccgcgttcacgccgaaaactgatatcccggtagcagtggttcctgacaaccatgaagtaaaaacgctcgagcattttcagcttcaaccttcgctgattcgtcaggcagtacgtcttatttcggtgtcctcgctgatcgcctacgttcaaaagttcgctgatccgcgtactgcaatcttcgccgacaaatctgaaacccgcattgaggccgtgctggattaccactctgcggcaaactcaccagagtgggcaaagcatcgcgctgtgtacgactgcccctattccgatgaatggcaggagtgggcatcccgtgacaagcgtcccatgaaccagaccgattttgcagagttcctggaaaaccacatccaagatatcgcgccggtcagtgataactataaaggcccttccggtacagaactgctcgaaatggtgctggctttccaagagacgcgtaaagctgagttcaagtctgtgcgtcgcctgcaggacggtacgttccagatgtcctacagcgatgaaaaggatggctctggtaatacttccctgcctgaaaaaatcagtctggctatcgcaccattccacaacggcgcgccttaccaggttgaggcccgtatccgctaccgcctgaaagacggcggcttagctctttggtacgaacttatcgaaccgaaaaaaatcgttgagcacgcttttactgagatcgtcgtagacctggaaaaccagctcgaaaacatcccggtttatgaaggctcaattaaataa

SEQ ID NO: 439191 - DNA, 195 bp, Serratia marcescens
atgatttacgaagtagtcgaaaacgggccggactccacagattacgtcgtcgccacttttcgggatacaccgcgtaaggattacgactcgttttaccgctcagcggaagatcgagctaatacagtggctgcaagcctgacagaaaataatgcttatctcggctacgggtacaccgtgcgccgggcagttgattaa

SEQ ID NO: 439192 - DNA, 156 bp, Serratia marcescens
atgttatatcaactgagcgtgatatttgtgctggcggtcgcctgggtgcttattgcccgccgggccgccttgacggtgggattggtggataagcccaatgcgcgcaagcaacatctgggacatattccgctggtggcggcatcgccgtatacctga

SEQ ID NO: 439193 - DNA, 585 bp, Serratia marcescens
atgattgagcaaaagaaacaggaactttctttgtccgacacagcaaaagaaacgattccagatcgcttaagggaattgattgcgggccgtagcgttagaggtgcagcaaaggattggggcttgtcgttctccactttaaacaactatctcacgcgagggactgagccttcactcaatgtggcgctaaagatagcagaagtggagcatgtcagcgtggaatggcttgcaggccttagtgactctcgccagggtgttcaggccagcgtttcggcaccggcattatcaccaggcaacaaaatcaagctgcaagaggatgcttatcaaagcattaagattatatttgagagtttagatagcgatgagttagctcggttaacacgcttgctgggccgcaagggcgctgatgcgttgacgttgttattggatgaggaggctttccaactattaaacttatctggtgatgttcgtaaggccgcgcttttgttagaaaaattgccgcactcacgacttgaagagattttggtcgaatgtagtgaagttcagcaagacccaactctaaacgtacaacaaaagcaggccggttga

SEQ ID NO: 439194 - DNA, 1218 bp, Serratia marcescens
atgcgtttgcaatcaacctttagcggtggcaaaggtagtccaatgcatgattggtacccatatttagagggttattctcccgaatttgtgaaatgcttgatttcaagatttgctcctaaagccaaaacaatattagatccattttgtggttctggtacaacagccattgtttccgctttagaaggtttaaataattactattgcgaagtaaaccctttatgccaatatattattaaaactaaactaatagcattaaaattaagcgaagaagaaaaaacaaaattagtaaaagaactttattctatttctaatgaaataactgatgtactaaaaccttctgcaaccgagacagatctagagaaatcatttaaatccgtttttggtaatacaaaattttttgaggatcgcatattcaaagatatagttagttatcaatgttacattagctctatcgaagatgaaaatcttaagagacttctgacaatagcagggattagatcgttaattccttcctcgttattggtaagacgaggtgatttacgattcaaaacacaaaaagaattagagaaaggcaaccaggactttctctttcatgtacaaaaaagcttagaattaattgccagtgatttattagacattacggaaggtagtggttcagccactttcttatgtgatgatgcgaaagaaatatctgggaacaatctgattgaagctgtaataacaagtccaccatatttaaatggcacaaattattttagaaatactaaaattgaactttggtttatagggaaattaaagtccaaattagatctaagacattatagagatttagctattaccagtggcatcaacgatgtaactaaaggtaaaagcttatcttcaaataatactattatctcagaaataccattattagctgaatgtattaaagaactaagcataaaagagtatgatagtcgtatttcaatgatggttgaaaactacttttgggacatgttcaaattcttatcaaaactcccaaaattactaactaatgatgcggctatctgtatagatttaggtgattctgtttattgtaatgtctacatccctacacaagatattttgaaagaaatgatgtcaaaattaggttttgaagaaaacgaaagggtcattcttcgtgaacgaaaatcccgcaatggaacaaagctagtccagactgttcaggtttttaaatga

SEQ ID NO: 439195 - DNA, 1140 bp, Serratia marcescens
atgaaaaataaatattttagtaaaaaatgggagcaattcaagaaagaattgccccatcaatcaggtgaaatggtaaagagaaattggggccataactggcactctatgtgttcataccaagggaaacttaagccatcaatcgctagatctttaattgatacatttatgccatcaagtaagggacgtatattagatgtcttctcaggtgttggcaccattcctttcgaagcaagattacttggtcatactgcatatggatttgatattagtccagcagcagttaatatttcacgggcaaaactagaagttataagtaaaaatgaaattcaagaggtaatcaataaattatctgattttattgatcataacagaaattcaatagattataacgaacataatttaataaggtttaatggttcgattgaatcctatttccatcctgaaacttttaaggaaatactgtgtgttcgtaaattctttttaataaaaggtgaattagatgcatctgaatcgttagtacagtcatgtttattacatattttacatggtaatcgtccgtatgcattgagtagaaaatcccatcctattacacctttcgcgcctacaggagattttatatacagtaatttagtcatgaaattaattaaaaaagttgaaagagtcttgcaaagttctgacggtatcccagatactggcagcaaagtattttatcaggactcaaccaaaagctggcctgaagaagtaaataatttagatgcaattataacatcacctccattttatgatagtacccgattctattcagcaaattggatgcgattatggttttctggttgggaaaaagatgacttccaaacgaagccaaaagattttgtggacgaaacgcagaaaaaaagctttgaaatatatgataatatattcaaacaatctcaacaacgcttaaaaaaagatggtgtttttttaatgcacgttggcaaaagtaaaaaaagtgatatggcagggcaaattgccaaaattggtagtagttatcttaaccttatagatatatttgacgaaagtgtagaacattgcgaaagccacgggattaaagacaaaggcacgacaacccatcatcagtaccttgtctttacgaaagattag

SEQ ID NO: 439196 - DNA, 1005 bp, Serratia marcescens
atgagcagaaggcaagcatacactagggttgaaaggatcaacttcaatttacctgaacatgttaaaggtaaaggtgatgtaggatatcgcgtatttgaatgcttgaatccacaatgtcgtaacatgatacagattcaaactgaggatttaccacctgattttgagtttgaatgcgaagaatgcggttttcaacataaagcaggtgaggtaattaacatttatgaatataatttaattaacaatacagaaaaccgtgttattgaaaatggtgagttttcaatattgcatgatgattatatagctgaagcatcagagtataaatattgtattatttgcggcttgttaaagcctttgcaatcttttgatatacactcaagacgtaaaaccggtaggcagggcgaatgtagattatgcaagcatgtatataattctataaaaaatcaaacgagattgactgagcagcatagagaagcgtctcaaaaaagaagactatatgtgcaattcgattctaaaaataaaattgatgttaacgagatatatagaagatttgataataaatgtttcaaatgtggtatggatttgagtgctgatttagcagccaactctgagaaaaaaatgggtaatttggatcatacattgcctgtatattacttatggcctttgactactgataatgccacattgctctgtagagtacataatggagaaaaagcagagaaatggcctagcgagttttattcaaggcaagaattggcatcactctcaagattgaccggggttgaagcccgtattttggctggggcaccaatatttaacccagaagcaattgatattttaaaaaatccaaaatttgtagaaggtttagtcgataagttttccagatatccgaatgaggtatataatttacgcaatcgaattaagagagtcacagggttcgatttcttcgataaccctaatttgaaaatttctgctaattgggttatcgaagccgataaacttacctaa

SEQ ID NO: 439197 - DNA, 558 bp, Serratia marcescens
atgaggccgttcgctgttatattcagccagccagttctcggtgatttcccgtgcttcattcagtgtcttgaacaggcaaaaaaccagggtttctgtccggtacgtccggttaaaccgttcgataaacgcattttgtgttgctcatccggcttgataaattccagcggcacaccatgctcttcagcccattgcgcaagcgtcagagacacaagttctggatcattatccatccgcatcttcaacggatatccacggtttgtgacaatcctgtccacccgttgggctgagatattcaggccgatttctatcggcagtgcttcgcggttaaaatcgtccaccacattgaagtgtctgctacagaccagcgcatcatgcataaaatcaatgaccagctctggtttagcgcttccggcgttgccagtggcgcggggttgcgtactggcagacgctgctttcccctgcgacgaaaattcagtttcagcaggcagtaaatccggtgaacgcgttagtggttccaggtattgccctgcctgcgcagcagctggaacaacttcttaa

SEQ ID NO: 439198 - DNA, 1512 bp, Serratia marcescens
atggacttaatgaaagtaagcatcaataacataaaaaacatcaagagagcagacattgaacttccaatagaaggaggcctatatagtttggttggggggaatggatgcggtaaaagcaccctaatgctaattatgtcagtgctaatgagttccaaacgtttcaatatgcttcaaggtgaagattatgatagtgattcaactatagagatttcaatttcaactgaccgatatgaagaaagcaatcattggttcgtgaaaaaaagacaaaaaaatgatgagaatatgtggtggtgttccagtagaccactttcctacaaaggtgtttatgaaggaagcttgttctatggaacaagattcagagactcaactattgtagataaattacttcgtaataaacttataaaagacgaccaaattgttgatgcttttgactatgtaaaagataaccttagcttcattcttcatggtgattacaatcattataaggacatgaagaagataaaaaacaaaaagatatctgaaaatttcgaattaagcaatctaccatatttcatgacaactgccaaaggagaccttcttagtcagtatagaatgagctcaggtgaatgcttgttgatctcactcttaaactacatttaccatacattgataaaccaaggtacaaatagaagcgttactgacagaacattcttcattcttattgatgagatagagctggctcttcatcccatagctatttccaggctaattggatatttaaataaattgttagaaacataccccaagctatgtgtttatttaacatcacactcacctgaagtcattcgcgctctaaaaccgcagaatatgtttttgattaataacaatgatggagtgctggatctaattaatccatgtttccctagctatgctatcagggaggtctatcggcatgatggatttgattatttaattctagcagaagatactttagcctcgttagttattgatggggttttatctgatagtggacttaaaaatagcagattaatacatatatctcctgtaggtgggtggcaaaatgtcttgaacctccacctggatttattaagaaacaatgtcattggcgtaaataagaaaatcataagtattctagacggtgatgtaatcaccgacgtggataaaaaggaaacatataagaatttatccaagctatttttaccaattcaaagcattgagaaattcattttcaacattgttttcaataatggtaatgataaattaaggaaaactataaatgacaagtacttccctattaaatctttagatgacctcgcatcggagcacaacaaacaatatcctggaaccccaaaaaaccctgacaaactattttatttcagagtaaaaaaagacctggaagtcaggaatataaatgagtcatacttcattagaaatttaagtgaggatattaaaaaagaagttgactttagtccatttacacagaatcttcatagactcctgtcctcacaatga

SEQ ID NO: 439199 - DNA, 759 bp, Serratia marcescens
atgaatatatttgcgacgcaatttctaaaaaaagaaggcctaataatactcataatcacattgctcgggtatggtgtggcactgtcctatgaaattggttatgcagtttacttttcattcgatacagaatatattcaggtagatattaaatccatatacactggtatacttggtgtttcttcattcttccttatcgctctagttttcatcacggtcttgaaacaaaagcagaccagtgatagacggaagttaacccaaattatagtgtatgtagtactgatcggactactgtccacaccgacagcgccgaaaataatttttgcaaacgttataactgccataactctatgcactggtgtttcagttttatatatatcctactactacttatcaaaaaaagaaattctcacagtacccgttctgattggaattgcttgtttgtttataattgcaatgtcaacaacggtaggaatatctcgcgcatctactgagacaagtttcagtgtatttaagtatgaaaacggcgagtatgccatcataagaatatataatggcagcattgttggcattaaggttgagaacaataaactatctcacacagataaaatctacatgccaagctcagaagtaaaaacattgcagacaagaacaattcaagtaccaagcaagccagggctattaaattataaaatagaataccctgaattccgaaagaggactttaggtgatcttatactgaaagaaagtgacgagaagtaa

SEQ ID NO: 439200 - DNA, 384 bp, Serratia marcescens
atgagcggctggctctcaaaactggccggcgggggaatgttgctcctgctggtggctatctttcttggcggttacagctcgctgttgtcgcaccggttggagctggcacgccagcagactgtagaacagcagaagacgctggcacaacaggccgggctgatagccacgctgcagacgcaagatgcgcagaatcgcgtactgatggcggcgcagcaacgacgcgagcagcagctgcgcatgcagcacgacaccgcccaaaggaaataccgtgaagcgattaaaaacgatccctgcgctggtcggcctctgcctgccgctgtgcttgagctcttgcgcccggccaccggcacaacccccggcgccgtttatcctccttccccctga

SEQ ID NO: 439201 - DNA, 600 bp, Serratia marcescens
gtgacggctcggcgctcaattctcaacagccttgtttcccaccaggtgctaacatggtgtattgcaaattaccgaagctgttactccgaggtgaacatggaaatcacaactgtaaatcaactgatcgcagctggctcaggcttgctaggtgtcctaatcggggctggcgtttctggccttgtcaactatcgaattgaacacagtaaacgtgattatgaaaagaaatcgtataccgcaggtttcttagcagaaatcgaggccttacaaatgattatcagggaacgaggatacttggaggctttttcaagtctcttggagtcgccagagattcaaagaggtgagtttgttggaacttactacgtattgattcctgatgactacgcacgcttttacaatgcaaacatgaataaagttggcgtgcttggcccagaaaaaacaaagaaaatcatacaataccatcaattattgcaagcgatagttcaagatttcaaaccagattcatatgtaagtcagtttggtttcacaaaagaagctatagaagaaaatcttcatttattgaactcagcactatcccttggtgatgagatcttaaatggttga

SEQ ID NO: 439202 - DNA, 228 bp, Serratia marcescens
atgagtcttgtcaaagttacagatagttgtgtcatcgacttccgggaccacgggaactattatagtggcacagccaaaggaggagatgtaatcggtgacatggcggcaataattgccacatccttaaatgacctgattgaaaagcttaagggtgttatgattgaacctgtcccagacatggtctgggagagcatccgagaccaattaactaaagatggatatcggtaa

SEQ ID NO: 439203 - DNA, 294 bp, Serratia marcescens; identical to SEQ ID NO: 102300

SEQ ID NO: 439204 - DNA, 294 bp, Serratia marcescens; identical to SEQ ID NO: 102210

SEQ ID NO: 439205 - DNA, 405 bp, Serratia marcescens; identical to SEQ ID NO: 102211

SEQ ID NO: 439206 - DNA, 816 bp, Serratia marcescens; identical to SEQ ID NO: 102214

SEQ ID NO: 439207 - DNA, 405 bp, Serratia marcescens; identical to SEQ ID NO: 214315

SEQ ID NO: 439208 - DNA, 1341 bp, Serratia marcescens; identical to SEQ ID NO: 180751

SEQ ID NO: 439209 - DNA, 270 bp, Serratia marcescens; identical to SEQ ID NO: 136048

SEQ ID NO: 439210 - DNA, 576 bp, Serratia marcescens; identical to SEQ ID NO: 180749

SEQ ID NO: 439211 - DNA, 495 bp, Serratia marcescens; identical to SEQ ID NO: 180748

SEQ ID NO: 439212 - DNA, 369 bp, Serratia marcescens; identical to SEQ ID NO: 180747

SEQ ID NO: 439213 - DNA, 204 bp, Serratia marcescens; identical to SEQ ID NO: 136047

SEQ ID NO: 439214 - DNA, 258 bp, Serratia marcescens; identical to SEQ ID NO: 102309

SEQ ID NO: 439215 - DNA, 255 bp, Serratia marcescens; identical to SEQ ID NO: 102310

SEQ ID NO: 439216 - DNA, 267 bp, Serratia marcescens; identical to SEQ ID NO: 125559

SEQ ID NO: 439217 - DNA, 1359 bp, Serratia marcescens; identical to SEQ ID NO: 136042

SEQ ID NO: 439218 - DNA, 720 bp, Serratia marcescens; identical to SEQ ID NO: 226859

SEQ ID NO: 439219 - DNA, 528 bp, Serratia marcescens
atgctggtgacgccagaggcgatgaaccagagctggtccatcgattttatgcacgatgcgctggtgtgcggcagacgcttccggacgttcaacgtggtggatgattttaaccgcgaagcactggcgatcgaaattgacctgagtattccggcgcaacgcgtcgtgagagtgctggacaggatagtggcaaaccgcagctatccgcggaagatgcgtatggataacgggccagaactggtctcactggcactggcgcaatgggccgaagaacatggtgtgttgctggaatttatcaagccgggaaagccgacgcagaatgcgtttatagagcgttttaaccggacatatcggacggagatactagatttttatctgttcagaaccctgaatgaagcgcgggaaattacggagcgctggctgactgaatataacagcgagcggcctcatgaatccctgaacaacctgacgccggaagagtaccggctgatggctgaaaccccggaaatctcaaaaagtgcgtggaactaa

SEQ ID NO: 439220 - DNA, 225 bp, Serratia marcescens; identical to SEQ ID NO: 423497

SEQ ID NO: 439221 - DNA, 576 bp, Serratia marcescens
atgttttgcgaaaagaaagtagcccaaatggctgcctacctgctgctgaaaagcggtgggcgcatggcttatctcaaattgatgaagcttctctatctatctgatcgagaatacctcatcaagtatggcgatctgatgagtggcgataaattttactcaatgaaacttggcccaatactatctgaaacgttaaacctgatgcgtaatataaacaaggttggcggggatgaatgggcgaagtttatctccagcaaaggcaatgacgttctgcttcaacctggatttggtgagcgttttgaatgggaagaagaacttggagaattgagtcgagctgacgtgaaaacgctcgatagcgtatttgacaaatacgggcattactacaagttcgacttggcaaaccttactcatcttaaggaagtctgtcctgaatggagagacccagggaagtcgcgcctcccgatctatacaaaagatatccttctgtactcaggaaaaagtgagctagaagctgaaaatattctgaagaatatgagagaatcagagcttcttaaaggatttagcgctcaactgacatga

SEQ ID NO: 439222 - DNA, 336 bp, Serratia marcescens
atggttgatgattttttgaaatatcggtacggctgggaaaaattccatggtgctgtacattcactctgtagccatggtgatatcaaagaacggcttgaaaatgcttatgttttcaacatatctcatatccgtgatcagaatgacttaccagagccactacataaaaaattcaaggaccttgtttcctcgctgactcacgttcaacctgaaggtgatgaagggaaagcaagagccacgattaagaaaatggacgagttaatgataaacaaagccgttgaagatattattagcctctacgatagcatttgcaggtttatgccaaaattgcatgcttag

SEQ ID NO: 439223 - DNA, 483 bp, Serratia marcescens
ttgatcttcttcctgcttggcgcttttgccattcgctacgcttccctcatcgccaatctgggtttcggttcgctgctggcctccttgatcgcgttcatcgcgctgcagtggggattccacggctattctggcttgctgtataccgataccggaagtttctccctgttactggcggttgaagccatcttcttgatcgtcagcctgtcggttctgctggccaagacgaatctttcctggctgagacgactcggcgaattgagcatggtcatctatttgatgcatatcctcgcggccagcggcttacgcatcatactgaccaaatttatgcatatcgaccattggccaacacaagcgatcgccggcacgctattcgggctgatcgcccctgttatcgcctatgcgctgatacagcgtctgcaccttacttttctcttggatcgtcctcgcttcaataaccgtctacgaaaagaaaaaatctcctga

SEQ ID NO: 439224 - DNA, 321 bp, Serratia marcescens; identical to SEQ ID NO: 103996

SEQ ID NO: 439225 - DNA, 747 bp, Serratia marcescens
atgacagccttcaagagtcaatgtacagcgttctcccgccccattgatgcaggtcaactgctcaggcaaggcgcagcggggcggtctgatcaggcaatggacagcgcctggctcgtcagcctgcgtgtaccacaggcgcctcgatcaaacaccgatcctcacgttgtagccgagtgcccgcagccccttgctcgtctgcctgttccttggcggaaactcgtctgggcgcgcccagacgacgatttccccgaggctgctcaggctaacgtgcggaattgcccagtcgtcgctgcggatcgcgttccagagtcgggccgaaacacttccgttgccccagacaacgtagttcaacagtatccgtccggccaacacaccttcccgacaccgccgccgaaggccatggcccatcaagcggattttccatgcgccctcagcgccgtacctacagcaaatctttcaaggctcaggtcattcaggagtgttctgaacccggtgcctccatcgcaaacatcgccttgggctacagcctcaatgccaacctcgaccacaaatggattcggctgcctacccagaaaaccacggctatccagccagcgttcatcccgttgccttctcaaatgctcggcgtgggttcgcatactcaagcgcgctgctgcgatcatgagtttgatccagtcggcccgtaataatgggcacgatccgtatgcctatctcaaggatgtgctgacacggttgccgtccctgtaa

SEQ ID NO: 439226 - DNA, 570 bp, Serratia marcescens; identical to SEQ ID NO: 164821

SEQ ID NO: 439227 - DNA, 2796 bp, Serratia marcescens; identical to SEQ ID NO: 214835

SEQ ID NO: 439228 - DNA, 198 bp, Serratia marcescens; identical to SEQ ID NO: 136037

SEQ ID NO: 439229 - DNA, 489 bp, Serratia marcescens; identical to SEQ ID NO: 136038

SEQ ID NO: 439230 - DNA, 963 bp, Serratia marcescens; identical to SEQ ID NO: 104004

SEQ ID NO: 439231 - DNA, 621 bp, Serratia marcescens; identical to SEQ ID NO: 36226

SEQ ID NO: 439232 - DNA, 1266 bp, Serratia marcescens; identical to SEQ ID NO: 138559

SEQ ID NO: 439233 - DNA, 903 bp, Serratia marcescens; identical to SEQ ID NO: 138558

SEQ ID NO: 439234 - DNA, 261 bp, Serratia marcescens; identical to SEQ ID NO: 16909

SEQ ID NO: 439235 - DNA, 1089 bp, Serratia marcescens; identical to SEQ ID NO: 16908

SEQ ID NO: 439236 - DNA, 918 bp, Serratia marcescens; identical to SEQ ID NO: 199893

SEQ ID NO: 439237 - DNA, 1542 bp, Serratia marcescens; identical to SEQ ID NO: 30088

SEQ ID NO: 439238 - DNA, 501 bp, Serratia marcescens; identical to SEQ ID NO: 105788

SEQ ID NO: 439239 - DNA, 570 bp, Serratia marcescens; identical to SEQ ID NO: 34949

SEQ ID NO: 439240 - DNA, 669 bp, Serratia marcescens; identical to SEQ ID NO: 36186

SEQ ID NO: 439241 - DNA, 630 bp, Serratia marcescens
atgactactgcaaccgtatcaaataacacaattcctgatggttacatggcagaccgtaagggccgcctggttcctgttgagcaggtatccccttttgatatcgaaatggacgcctttgttcgtgcccaggtcaaagaggcagaggatgaaagcgagcgcatcaaagcgtttaaaaataagtcttttgatgactgctatgcctggctcgatctggttgcggagaagtacgaccgtcagcgcggtggcctgaaaggcaacgtcacgttctcctcgttcgacggtagccaacaaattcgaattgccgtgcaggactcgctgacgttcgggccggagctgcaggtggctaaggacattattgatgagtgcctgagcgagtggtcagagggtgccaataaaaacctgaaagccatcgtgaatgatgcgttcgccgttgaccaggagggcaagctcaacaccggacgcatcttatcgctgcgtcgcatcaagattgatgatcctcgctggcttaaagcgatggactgcatttctgagtccctgcaggtggcggtcagtaagacctatattcggttcttcaaaaaagacagtagcggtgagctgaatagcatccctattaatatcgcggcggtgtga

SEQ ID NO: 439242 - DNA, 2967 bp, Serratia marcescens; identical to SEQ ID NO: 59353

SEQ ID NO: 439243 - DNA, 633 bp, Serratia marcescens; identical to SEQ ID NO: 16794

SEQ ID NO: 439244 - DNA, 840 bp, Serratia marcescens; identical to SEQ ID NO: 6027

SEQ ID NO: 439245 - DNA, 162 bp, Serratia marcescens
atgcgggagctgtcccgcgctgcaggcctttcccctgatacgctcaaaaatgcgctgtatcgctcttaccccaaaggcgaaaaaattattgctaaggcgctggatacacagccgtccgccatctggcccagccgttatccgcaacagcaacaggtggcatga

SEQ ID NO: 439246 - DNA, 300 bp, Serratia marcescens
ttggctctgctgcagctcgcgggagagtttttcgccgagctgctgcgccgcctgcagctcgcgcagcgctttagtcatggccagggcgtgctgctcggcctgctggcgcagcgtttcattcagcgcagacttatccgcagccaactggccgatggtgttgtgggctttcgtcaggtcaccctgcagttgagcgcggccggcagattgtcccaggtagtacgcaccaacgccgacgccgagcgccagcagataggaaagaaaatgagtttgcaggtgactaagcaccagtctgagggttaa

SEQ ID NO: 439247 - DNA, 183 bp, Serratia marcescens
atgctgctgttatccgagccgaggctgcagcagaagtcgcacaatcaggcgctgatgcttatcctgatgtcgctgctgcacaagccgcgatcgacgctggcactgaaacgcggcgttatttctctgttcgctctaccatttcaacgcagtgggttgatgaatatgagaacgttaacggcgtag

SEQ ID NO: 439248 - DNA, 504 bp, Serratia marcescens; identical to SEQ ID NO: 52325

SEQ ID NO: 439249 - DNA, 504 bp, Serratia marcescens; identical to SEQ ID NO: 52325

SEQ ID NO: 439250 - DNA, 321 bp, Serratia marcescens; identical to SEQ ID NO: 103996

SEQ ID NO: 439251 - DNA, 525 bp, Serratia marcescens
atggagccacaacaggaagggattacgcgggcgttaacgccgggcgaagtcaatctggcacgctcggtgtttggcagcaccattttctatcagagcgtgttggtccattgcgacagctacctgccgtttgggttgcagaatcagtacacggtgatgagcccgaatggggagctgtactttcgtaggtcactctatgaaagagattatgcgagccaagatcctgaagctcagcatcttttcattcatgagatggcacacgtttggcagcaccagaagggcatgtgggtacgcactcgtgggcttctcagttgggcgttaagttatcaatatcggcttaataaacctttgctgcgccactacagcatggaacagcaggcatcgataattgctgactatttcattctcaagagatatggggcgaacaccttcttccgcttgcaaaacaggaaactcatcgggatagtggacagaaggacattgtcacaatttcaacccatcatcagaagtgcagggctgccactatga

SEQ ID NO: 439252 - DNA, 276 bp, Serratia marcescens; identical to SEQ ID NO: 237174

SEQ ID NO: 439253 - DNA, 327 bp, Serratia marcescens; identical to SEQ ID NO: 423498

SEQ ID NO: 439254 - DNA, 231 bp, Serratia marcescens
atgacactaacaacctttttgtcggtttctggctgccaacatcaggatgatggcgccaagcgtatttatcacctgaccaataaagccacggtgatcgaatatccgcgtttgcctgtacgttctcgcttccagttctatgacccgcgcggaaataaggttcacaccaatggtgagcgtgtcgcgatgaaacaggcagtggaacgccataaaaaactctggaggttccaatga

SEQ ID NO: 439255 - DNA, 378 bp, Serratia marcescens
atgaaacgatataccccagattgttcaatgcatatgtcacacgaaatggcgtttatgcgtgagacaccagacggcgaatatgtggagtatcaagaccacctcgccgtaaaaacgcagcgggataatttggctgctcgggtttctgaattggaattggtgcttcaagggttgccgcaggcagctattgatggcggttggacggcaaaggatattagcgattatgcccgattattggagaccaagctggctgtgccagtgcggttgccaacggtctaccttgtcagcgacggcaagttatccgacaagatgataaaggctgatgaggccgtcgaagccatccaagccgctggttttgccgttgtgagggacggccaatga

SEQ ID NO: 439256 - DNA, 750 bp, Serratia marcescens
atgaataactatcctgaatatgtacctgacgaattcattagatattatgagtttgagcttatcagctcagaagaaaagatagcagcaaataaaatgatttttgatgccagaatggcttttgtttggagtgctctttccaagagagctaacgaatgcaaaataccatacttcttttatcaaagtcttgtaatgaatatagttgaaatatcaaaagggccaagtgaatgggatttgttaactcaaaaggaaaaggagttaaaagtaaatagaatatctaaactttctcgtcagttatcagaagagatagatggaacgccgttggatgatgctcttacagaatactttaatcataagcattatattgaatggtttaagagtcacaacaaggatgaaatgtccataaatagaatgaactatcacttggataaattctgcaaagaaactaaacatggttatgttggtggtaattatccaggcgttagtgtcgcgtcagcttggatggcggctggggttaatgggcctcatataagcagcatgcttatagagttacacagcaatgctgctgagtttgaaatttcatcaattataaagcgcaaggcaaatccgaagaaaagtttttttgtaaggcgattgagctcattttttgaagagtcgtttaatctaaagttgtatgcgctaacagcaaacctaagtagcttgtttcttgacgaagaagtaactcaggaagaagtgatcagtattacaaagtga

SEQ ID NO: 439257 - DNA, 942 bp, Serratia marcescens
atgctgaataaaacaaaggcggccatgccgggccgccaatgctactacacaaaactggtacgcaatcagaatagcacgctggcagaagtggtcaatcggtgttgtattgaagagtgtagttcaacgatttttttcgttaagtcttgcgaattactcgttattcacggggaagccaaccctttgcattcctttctggcgtcgggagatttttctctttcaaaatccgcagtattgcaggttctgaatgaggcccccaaccatcccaattaccttcccagcagttgttacaacagaaagctctaccatatagttgtaatacacgcccttggtagagatctgggccgaatctcgtttccgaaccacaaatttcgcacttgcaataaaaatgccctttgttatcgattcgcattgtcgtactccttatctcatccttttggctcgatgccgcgttgctgtagttctttacgcagtatccgcttgatccaggtggcgagggatgaatcaccatccttgcgcatctcatcttccagttgggaacgaagctcatgcgcgagacgtatctggtattggtcagtttttgttttttcacttgacattgtaattacaaagaccctattgttagttggtggttgtaattacaacgtaactttagatggtttgcaactgctaaaaatagcgaagccccgaagtgctagaacactgccggggcctcttaccacaatgttagatggagtaacgattatggctgacactcagtctacccaaactcgccctaaatatcacttccgtttcctcgctatcgcccggattaacccggctgctacgccttgccgcctgtcggttgaggctgcaacggaacaggaagcccgcctttccctggtacggctttacatcttgtccctggctgcacgtttgcccgttcaggaggtggcccatgcttaa

SEQ ID NO: 439258 - DNA, 195 bp, Serratia marcescens
atgcttaaatatttccgagtttcaggctatgccgttaataagcgcggcaacaccatcggtattttttacgatgtgcaatcaaccgacacccagcaggcaactatcaaggctgagaaaaacgccgaagaagatgggttccgttatatccggctgaccagaacgattttgcgggaggtgagccatgaacgttcatga

SEQ ID NO: 439259 - DNA, 204 bp, Serratia marcescens
atgaacgttcatgaaatggaatttaattctgctatccgcaaatcagatcaacttatttcacttcttatggcgctggaggatagtgttgactctttagaccagacggaactggaaagtctaatttcccttgccaaagatttatctgtacgggtatcagcctggctttgtgaagagcagaaagttagggaggctaaccatgcgtaa

SEQ ID NO: 439260 - DNA, 210 bp, Serratia marcescens
atgcgtaaccgccctgggacaattgctttagatatggcgctgtatcgtgcaacgcttaatagctcactttttgaagtgattatcgatgctgcatataacgaaaaagtgtcgaaggttgttattgatttaataacaatagcctgtgacgccaataatcatattatttcagacttgcacaaggaggccgacgatgaacaatccgaagcctaa

SEQ ID NO: 439261 - DNA, 474 bp, Serratia marcescens
atgacagaaaaagacatcatgggtgctttgttcatccagcagcgtatccaaatcatgcatatcgggaaacatcatgacgaatacgatgatgcgtacctctatgcatgggagtcaggcgtatatccattaatgagcgatacggatgggagcgtaccccgtaagccacatgagccttatgctgagtttttcaccagctccaaggcaaaggttgagttcttactcaaacgccttgatgacgcctggcgtaaaaaagagggcctcacattctatggcctggaggatgaattaggcgtcagaagttacagctcgaaaggttgggacagaagcgaccttattcatatttgccgctatctctatctagacggctgctatgataaagagttctgggacacccttgttgaaaatggtaaatgccctgcggaagcattgagccttaattcagaatacgacagagaaattgaaatttatttttaa

SEQ ID NO: 439262 - DNA, 630 bp, Serratia marcescens
atgatgcaattgactgataaccaatacagaactgtccgcgtttacgggccattacgccagttcattaaggacaaccgcaaaggggtaatcaagctgtgcgtgaacacgccacaagaggcgataaaggcgctgtgtatcgtgttgcctggctttgaaatcttcatgcagaccagcaagaaccgggggctaacctttgcggttttcaacggtaagcgcaacattgaacgcgatgagctgaattttaacggtacggaagagataaaaatcgttccggttgtcatcggcagcaaaaaggccggtatgttccagaccattcttggcgctgtgttggtagcagttggtgcctttggtgcatttactccatgggggcaagcattgggcggcgcgacgtggggttcttatgcaatgcaggccggtggcgcaatgatgttgggtggagtcgcacagatgttgtcacccatgcagggaggtttagggcgaagggaagacccggacaataaaccctcctacgcattcggcgggccggttaacaccgtcgcccagggcaatcctatacctattgggtacggcaagcgccgggtcggtggtgcaatcatttcagcgggtatctatgcggaggatcagcagtga

SEQ ID NO: 439263 - DNA, 1572 bp, Serratia marcescens
atggcggactctaaagatgcatctgttatagacgagttgctaatatcgttggggttaaagactgattcagactcttttaaaaaaggaactgatgctgttggtcagttgaaaagcggtttcttgcaaattgctgcgttaacaggcaccagcttgggattaaaaaacttaactgtagacttagcatatacggttaagaatatggagatgctcagtcgtgccactggttttaccattgataagttacgattcctaaagcatgcgtttatcactgcgggattgagtgagaatggcgcggaaacttttgctaggcaactaaaaagtattgatctacagatcaaaagcaatacgttagcacaaggcgcttacaagagtggaacctttagtccacaggaatatagtaaaaagtactcgcaaaaccctatggatgcgatgcagtacctgattagcaatctcaatcaggaaaagaatgaggccatcaggaacgaagtactaaatactctgggtatcacaggtgagtctcaggagtttttttataatggaagtgcagggcttaagcgagcgcagagatcgtgggctcaatatggacaagccttaccggatggattggttgaagatgctgacatttttattgaaagaatgggtattttaaaaacgcagtttagtcaactgagcgagaccttaggatctgatttgctaccggtggttaataaattcctaaaagctgcgaatgtattaatgggtaaaaagtatgactccccggaagatatggtaattgacggagctaaagctgcgtggcggcggggcaaagattatgctggttttactcctgatggtaatttgaaggttatcaaggaatccggcgatacggggtcgttgtgggactcaattgttgcacgatggaaagcggggggccaccataactacagtaaggccaacaatcgagttgcagagcaacgggcacagtcttacaaaaagaataacatagaggaaagtgccttattttctgggcttgaaagtaagtacggattgcccggtgggttgttgaactcaacgtatcagactgaatccggcggaggaaaatatctttattctaaagcgggggcattgggtccattccaattcatgccagatacagcaagagatatgggcttgaatggagatgatgtttttgaccttgaaaaatcagcagaggctgctgcgaaatattataaaatattgttgcgacgctataatggtgacgttgcaaaagcaaccgcagcatacaatcatggcatgggaaatattgataaaaaaggtctgaatgacctgccaggagaaacacgaaactatatacctaaagttcttggagggttagatgatgccgattatcttgctgattataattatcgtcgaaatcaggcccctactttcgaccgaacagcaggggggcgttctataacggtacagcaaactaatcacaataccattcatgcttctagggccgatcctgatgaagtgagccgtattttgcagaatcagcaaaccgccagtctagaacaagccttggcgcaaactaatacggaaaaatactaa

SEQ ID NO: 439264 - DNA, 315 bp, Serratia marcescens
atgttgtcacttgccagccaaaatgggttgctactgatggttggtaaagggctaagtgatatgggggtggctgttgctatgtcttcgacggatatgacagtgattgagcgtttgaaggaattggcgctgaaaaaagggaatatagtccggcaagctgatggagtacccgtcagtgagaatttgtttgaagggcaaatttacttctttctggtactgattgcccgcattctggaggaaaacatcggccctttctggagtctcaacaaaggagaatgcaacgaggaggaaagcgagcaacccccaattccgtcgtaa

SEQ ID NO: 439265 - DNA, 387 bp, Serratia marcescens
atgagtggttggctgcaaaaactgacgcagggcagtttggtgctcttgctgctggtggctatttgcctgggcggttacagctcattgctatcacatcgtttggatctggcacggaagcagtcggcggagcagcagaaggcgctggcgcagcaggcaaagttgatcacctcattgcgcacggatgacgcccgcaatcgcgcattgatggcagaacaacaacggagagagcagcagctgcgccagcagggcgaaatctatcaaaggaaatacatcgatgctatcaaaaatgacgagtgtgcccgcattgatgctcctgttgctgtgcttgacctcctgcgcggaacggataccacagctgccggaaccgatcgttctattgccccctga

SEQ ID NO: 439266 - DNA, 1134 bp, Serratia marcescens
atggatactaacaatgaatttgatagttttgttacaacatttctctcctcaactgttttcataagggatggctatgcatgcattgaaattaatgatgatgtttcacctgatctttttttaagctggctgaagaagttcggtataaatacagatatagatgtgaatgagaaggagtttaccttttctattggtgtatctagctttcgtgatgactctgtcatatatccatcactgaattctttatggcgagagtcttgcgcattattaaaggtgccaacttgctttcttgtcttaaaggaacgagtatcatcactatttgaatgtgaagagattagttctataaggcagtttgttacatggcgagctgttttaaaagagattcaaagctatgattttagtaataaaataatatggtatcttcctggtgatgatggtgggaaagaaatagttgttggtgtgcatgataactatataagagctaaagatattgccttcagtaaaagctcattgagtagcgctaataagctactaagtgtgatggagttgaaggatgcacaagagggggaaagaaaattaattctaaaaaaagctgttagtgattttgttggtgacaatggttcaattgacgatattatctctgctggagagagagtatacaatcgttataatgatctgcttgacttatacactaagcgattttcagtaaataaaattctttctgaaatagaatcgaagaatcttgaatatacaacaaaaataaatgattttatttcatcgagtcaaagtaaggcgttcactatccctggagcccttattgctgttggtgcactggcaaaaactagtggtttttgggaaggtgcattggtagtgattggtttgtggatgattcattacataacaagaacttcaaatgatgtccatagagaatcatatgaaaatcttaaaataggtcttggtgaagcctttgagagatataatcagtttgacgaaggggctgaggttagaaaagccgcaaagagaacacttaaagcattaaacgcaaaaattgatacggctggtactaggctaaataatattgataatcttggcagaacaatgatagttataggggtgttgtatcttgttctgaaataa

SEQ ID NO: 439267 - DNA, 1191 bp, Serratia marcescens
atggaaagcaaaactgtaaaatgcgtaggatgcgggcgagaaaatgattcagctgatggtgtatgcgtatgtggttatgatgagtctctagaacaagaggatatcgtttataaaccgcataatgctataactgcgacgttagatctagtccctggcgctgtaggtacagaattcaaagcgacgactggtgaaatctggggattggatgcggaggatgttaaatctttcatactacaggctgagagaaaatttagattaaaacgcaagaatcatgggtttattacaaagaatgatctgccaaacagtactgcctcagcgttacgaagatatattaatggaaccatagattttaagtcatttgtaaatgcattcatgcagaatataaagactgaagccgctcttaataagagacgccctgctggtggatccataattttcatacattatcatacagataatgaagttgaaggtttaggtcgtctttttattattatggttgataatagtagcgtatttaaatttaatgagcagctggtgccagaggtgttgccttctatagatatggatgctctgcgtcaagcagtattaactgatttgactctgtttgattctatatactcagaaaataatggggagccatatctacagtttatagcagggaagtcaagtagtaattttttcaagaaagctataggttgtgaggaagatctcgataataaccgcagtgttgaagaagctgatagagccgtcaaagatttcattgtgcatatgaaattaaaaacagttgataaaatgaaagttttagatgcagtaaaacaattaatgcatgaaaaacttaaaagtaaaacaaacaataaaatatcaacattagatattgaagtgactattgatagggttttagatgaacagtcccctgccaagggcaagttcgcaaaatttgcagctattggcgaatataaaattaatgagtattttgaaccaagcataaattctgaaaaaaaattcgggaaggttgctcttgctgatgaagaaaatgactatacttgcagtatctctgtaaatgccataagtactgatgatacaactaaagctaaagctatttataaaaaaggcgatgggttattagttataaaattatctgatccagatattgttaagatggatcagattttccaagacgacaaaaaataa

SEQ ID NO: 439268 - DNA, 351 bp, Serratia marcescens
atgaacactgacaaactgagcgaactgaaagcggccgcaatggctgcaactccggggccgtggggtattaaccgcataggcaatacgattgtcagtaaccagtcccatcctgtagcaacggtatccgatgcgttccaccggcaattagctggcggcggcgttggtaatgatgctgcattcatcgccgcagctaaccctgttgtcgttctcgaactgcttgctgaacgtgatgctgacaaaaagcgcatcgccaagctggaacgtgccaatcaatcacaagacgaccacatagatcagctgcaggtcagaatcgaatcgctggagaagacaaacgccgttttaggtcgatga

SEQ ID NO: 439269 - DNA, 1611 bp, Serratia marcescens
atgagcgaattgattttaggaaatgaattctttgctccggcaccaacggatttagttgataatttgattggccggtacaaagccacgcgtgaaaaaattgagggcttggcaggcgttttaaatggcccggtggggaatgagattatcccatatttcctgcatggaaatcaggacggtgaacgctatattcgtcctgtagcagctatttttaagctggaaggggctatcgctaacctgaatgcgtcttactggcaacaggcattatctcttaccgatgtatatgaatacatgcctcagaaacgccgtgacgaatggaacgaacaaattcgtgaaatgaaaactcccgaatttgaagaagagaccgttcgaccaacgattatgtcgctgctcaattctcgccaaaaattttttggtgagcgtgttgatggcattttcaaaatgttgtcaggcgaacatgtcacaaatcgcccagagggttttgggaagcgaatgatcattgctggcgtccgctccagctacgaaacgatcaatcattcgacggctggatatattcacgatctgcgccaggtggtagccaaatttatggggcgtgacgaaccgcgccatggaacaaccgaagcaatgctcaaacaggcatatcgacaaacagggcaatggttgacgttggatggcggtgcgttgcgtatccgctgctacatgaagggcaccgctcattttgaagtgcatccagacatggcatggcgcctgaattgcgtgctggcaagcctgtatccatctgcgatcccctctgagtttaggcagaagccgaaaaagaaactcaaggatttcgagatgattttgcggccactgccattcgctgttatctctgagctggtggcgctgcgcaatgccccaacgggatattggggtggttggtcagggcgagaatggaaagctggcataactgaaaataaaaacagccgccaattcgggcatggtgattttgataaatttgccagagcggaagccgagagggtactgatttccattggcgcttcaaaaatgcgacaggggcacagtatctggtttgagttcgattatgacccaacggacgtgatcggtgagatcatcgcgtctggttgcatcccagaccagaaatcacaccagttttaccccacgcctgagagcctggcgcgccggtgcgtcgaagaggcccagatcgcgtctaatcattcatgccttgagccaagcgcgggattgggcggcattgctgattatctgcctcaagaccgaaccacatgcgtggaaatatccagcatgcacagcaaggtgctggaggaaaaggggcatcgagtagttaacgccgatttcatcaaatgggcggagtgcggcgggtgttttgatcggatcgtaatgaatccaccgttcagcgatggccgggcgttggcacatgtgaatgcagcagcatcattgacaaaagcaggaagccgtctggtagcgatattgccagcgggtatgaagggcaaagaaatattacccggttggaaagttaactggtcagaagagatcagcaacgaattcgcgggaacaagcatttcagtagttattttgacagcagaaagagaggtatga

SEQ ID NO: 439270 - DNA, 3507 bp, Serratia marcescens
atggctgcaggaaactctaccctcaatctggcgctacgcattaccgccgatctgaacgatgccaagcaggcgctcggaaccctcaccagcgatatcaccgccaccggtaccgccgctgacaacagcagccgtaaatgggctgaccatgccaatgccgtggagggcgcagctgctgcagcacgtgaacacacacaggcagaaaaaagcgctgctgattctacgcgagcgacaggtgatgttgcgcagcaaacggcagaaagctaccacggctatcagcgcgcgctgaaccagacgcgcgaggcggccaacgcagcgcaaaacaccatcgaagacctgacgactgacctggcgacccaacaggccgcactggctgcattggtcggtcgtattgatccggtggtcggtgcctatgaacgcctggatgcaatggaggagcagctcaagggctttaatgcatctgggttgcttccgggcgaagaactcgacttgtatgccgccaaagtcgacggcatgcgtctgcaggtggaaaaagccgcctatgccgcaacggaggctggtcgccgtgagatccagatcgcccgcgaaactgcccaggccgaggcgcaggctgcgacggcaaaagaagccttcatcactcggctgcgcgagcaggccgaaacactgaacatgacgaccaccgagctgctgcagtataaggccgcgcagctcggtattacggctgaagccgcaccgttcattcagcgcatcaatgagcaagccacggcaatgggccacggcggtatcagcgccgggcagtattcccaggcgatgcgcatcctgccaatgcagatcaccgacgtcgtgacgtcgttggccagtggtatgccggtgtggcttgtggccattcagcaaggtggccagatcaaggactcgttcggtggggtcggcaacacattcagggcgctgaccagcttgatcaccccggcccgtttggccatcggtggtatcgcgggtggtgttgctgccctgggcgttgcggcgttcagtgcggccaacgaccaggatgaattcaacaatagcattcagcaaaccggcaacttcgccggtgtcagcgttggccagctgcagcggctgacgcaggccggtggccagatgagcagcaactacagccaggtgagggatattctcaacggtctggtcagcagcggcaagtttaccggtgagacgctggacagcgtttcccaggctgcatctgcgatggccgaactgaccggcgactctgctgaccaggttgtggctgagttcgtcaagatgaccaacagcgtatcggattgggcagtcaacagcagcgagcagtatcactggctggactccgagacctatcaacgcattcgcgcgctggaagaccagggactgaaagaggacgccattgaggtggcgtctcaggcatacaaaaaagccgcggtcgaacgtctgggggaaataaagacccagctgaattgggtcgctcgcgggtgggatgatgtcaaaaacgcggcagcggaagcctggcaaggccttaaaaacggaaccagttcagcctttaacttcgacacacccgatgaggcgcgggttaaggaaatccaaagcctgaaacagtggttggccagcgctggcagctcagatatcgaaattgctgcaaaaggtccatctaccgatgccgttgcccaggagaaaaaagccaggttagcagcgttggaggcagaagctgcagcagaggcaaaggttcgtgccgagaaagccaagcgtctgcgagtagaacaggatggtattaacgcagcgaaagctctggaagatgtttggaaaagcaacgcctctgaagcagacaaagaagccgcagcaattgaacaacgtcgtaaacaataccagcagatgtgggcaacgcctggtggacaagacacgttaagagatcgaggggtcacatcggccgacggtcagaatttctccggcggccagtgggatgctgatgttaaagcccttgatcagtctggcaagaaagccgagcagtacaacaaacagctgcaacagacgctgaaccagaaaaaggcgatcacccagctggcacgcgtagaagcggatatcacgaacgggtcgctgaaggatgccagcaaagtcgaacaggataaggcccgcgctacggccaggcagattgatgctcaggaagcagccaacaaatccgccaaagctggcgcatcggcggcgcaacagtctgcagcggaaaaccaacgctttgtcgaccagctcgagaagcaagcctccaagcgcgtcgagggggccgccgccacgcgcgcccaggaaatcgcgacccgcaacctcacagccgagcagcgccgccaggccgaggcagcaaacgcggctattaccgcccaggaattcaaaggtcagaacctgcagttgcaactgcagctcatgcgcgataccggcaacacggccggagccagtctgctggagacccaatccaaatttgccgatatgcgccgcgagtttgaagcaagtggcaataccgaggggctcagcctgattgacaagctgctgccggtcgctgaaacaaaaattcgtgtcgatgacatgaagaaacagattgaggatctgttcacctaccaggcacagcaggaaaccagcattcaggcgcaggtccagggggggctgctgtccgaaattcaggggcggcaacgcctggttgaactgcatcaggaggtcggcgataaggtcaaaggctacctgccgcagctcaaagagttggccaatgcacctggcgaagccggtgacaaaatcagggacatgatccggcagctcgaagagcagctcggcaagctgaatcaggcgggtaatgagctgaccatcgcattccgtgatggcctgcagggcgggatagaaagctcactcgtcggcctggcaaaaggcacgatgaacctgagcgatgcggtgaagaacctagcgctcagtatcgtcaacagcatggcacaaatcgccgcgcagcagctggcacaaatggcgacttccagcctggtcggcagcggtggcggcatgggcggcctgttcgccagcgtattcgccgccgacggtggccacgttcgtgggcctggcaccacgaccagcgattccatcccctccatgctttctgactatgaattcgttacccgtgctgccgtggttcaacagcctggcgcgctggacttcctgcacagcttcaaccggcatggcatggccgcattgaatgcctggctgccgcgcgctcatcatgcgacaggcggcctggctggcattcctgcacctgcagcgccgatgccgcaaacagtgcctgacacggcgcctggcagtgcagcaccgggcacggcgatgctgcaaccgctgcagcagacactggtacttgatgccgtcgatgccttcaccaaggggatcgggacagtccagggcgagcgtagcgtcatgacggtcctgcgcgccaacgttccaactctcaagcaaatgctgggggttaaatcatga

SEQ ID NO: 439271 - DNA, 495 bp, Serratia marcescens
atgaaaaaggcagcccccaaaccggcggcagagtcggaaaacgacctggacgtattgctgtctacccgcgatatcactatcgcgggcaaatccatcaccgtccgcgagataaccctggtcgattcgctggtgttgcatgactcactggcacctatggtcgccagcctggccgaagtcatgcagaccgaatacccacggtttgagcatgtacagcaggtgctggcaaaacatgccaccgtgctgccggtgctgattgcccattgcactgaccaaccggtcgaatgggttcagacattgccggggagtgaaggtctggcgctgatggactggtggtgggctgtgaatcggcgtttttttatgggcgctgccacccgcatcctgcagctgcagctggccagggcgaagacactgtcggattcggctgcatcttcgcaaccctcatccgggcaggccacaaccccgaccgcctcggccactacaccgcccgccagttga

SEQ ID NO: 439272 - DNA, 756 bp, Serratia marcescens
atggcgcagcaagttgaaacctattactacggccagggcaaggtgttcctcgctcgtcgtttaccgaacggccgtccgggagcctggcgctggattggcgacgtttccgcactggcgctcgcgctgacagtagagaaattgtcccacaaggagtcgtactccggtcaacgcaccacggtgcgcagtttcccgaccagcaaagacggcacagtgaccagtacctggcatgagctgtcagcggagaacctgtccatcgtgctgtacggcgaccgggtgactattcctggcggtactgtcacggcggaattgctccccgccggtatcactactggtgagcgttataccctggcccatcagcgtatcagtgatgtcgtgatcggcacgttggttgaaggtacggattatgaagtggactacacctacggtgccatttcgttcctgaccgaccaaaccaccgcgccgtcggtcaactacaagtacgccagcagcgttaacaccacgctgtttacctcacagccggagaatctcgcgttgcgctttgagggtattaacttggctgaaggtggcgcggcaaaaatcttggagttgtacaagttgtcgttcgacccggtttcaacgctggcgttgatccagggcgacacctcactggccggtctggagaccacggctggggtactgttcgataacgcccaaccagcagatccaacgctgggtcggtttggtcgtgtcatcgatgtcggggagcctgttgcatga

SEQ ID NO: 439273 - DNA, 204 bp, Serratia marcescens
atgcctgaagtgaaactcctgcagccgcatacccacgcgggtaaagccgttgcagccggtgaaaccatcaccgtaactgacaccgaggtcgactggctccggggtcaaaaaattatcgaggtggcgttacccgtcgtgaacaacgacaaccagggtggtcgccgtaacaacaaactggaggcggataatggcgcagcaagttga

SEQ ID NO: 439274 - DNA, 525 bp, Serratia marcescens
atggcgctgacctggtacatctcgctggctgaattagcggagcgccccggtgcggttgagttgtctcaaacgttcgccgggctggggaaacccatgccgcgcccagaaatattggatgcgctgctgcgtggcgaagagacgtcgtcctggccaccggccgaggtggaagtcgcactggctgcagtagggaagatcggcgatgccgttgaggagacccaggggctggttgatggttacctgctaaaacgcggttataagctgccgctcgcgaaggtgccgtcgatcctgaccggttgggcgcgcgccatcacccggtacaagctgcattcgcaccgcgtgtccgaagagaaaaccgatccgattgtccgtgactaccgcgatgcgctgaagttcctggaacaggtggccgccggtaagttcagcctcgggctgggggattcgctgcccgctgcaggtggtaccccgcaaatcaccggaccgggccgcaccttcagcatggatacattacgggactacggcaaatga

SEQ ID NO: 439275 - DNA, 378 bp, Serratia marcescens
atgaatattccggttctgatcaccgcgcacaaggtagaggcagcaacgctgccgcgccagttggtcatgcacggtaccgtggatgacgaaatcaccccggccgttgacggcagcaaactcatcatcggtgtcaccagcgctatcggcaacgatatcggtgaagcggcggacgtgatccgctccggtctggcgattgttcgttatggcgctgacgtcaccgtcgggcaaccgctgacggccgatgacgaaggccgtgccgttcctgctgctgcgggtaacttctacatcggttttgcggaatacgccggtgcggaagacgacatcggttcggtgtggattgcgccgggtcaaatggcggcggccgctgcgggcggttaa

SEQ ID NO: 439276 - DNA, 1137 bp, Serratia marcescens
atgaccacccaaaactctaccgccacactcgctgtttttgcgccaggtacccataccgcgatggatgggcgcaccatgacgctaacggccgaagactgcatcgacatggccaacagctatgatccgaccctgtctgaagccccttttgtgatcgggcatcccaaactgaccgcgccgtcctacggctggtctcgccgtttcgagtatcgcgacggtttcttgtataccgagccgcaccaggtgaacccggcgtttgccgaagctttcaatgcgggcagctataaaaaacgttcgctgtcgttttaccttccgaacacaccaggcaaccctaagccgggccacttttatccgcgccacgttggcttcctgggggctgttcctcccggcgtaaaaggcttgccggatgccgagttcgcagaatatgccgaaggtgacgatgccccggtgtcgttcgccattccctgggaaaccgaagtcctgaccgacttattgcgcggtgtgcgtgattacatcgtggaaaaagatggcgctgaacgtgccgaccaactgatgccgcagtggcgtctgcgaaccctcgaagagatcgcagccaatgcggtggatgactctcgtatctcaccattggcgtatgccgaggagaccaatgtggacccgaacaaaaagacccccgttacggctgagacactcgcccagcgcgaaacagagctggcagagcgtgaagccaaattacgcaaagatgaagaagctgcgaaagaacgcgaagcgaaagcacgtcgcgaagcgatcgtcagctatgccgatggcctggtgaaagccggttccattctgccgcgccaaaaaacgggtgtggttgaggttctgctcagcctggacagcgcgccactgtcgttcgctgacggtgaaaccacggtgaacaaaacgccggaagagctgctgcgcgatgtgctgaatgaaaagcccaaggtggtggatttcagcgagaaaacgcgccaggaagacggtgccgcgctggactttgccgacgttaccgtcgtggcagacgccgccaacgcctatgttgctgaacaggcacaaaagggtcgcacggtttcctataccgatgctgtcaatcacgtgaagaaaggagctcagcaatga

SEQ ID NO: 439277 - DNA, 564 bp, Serratia marcescens
atggccggtgcgacgctgacgtttgactaccaggatgcgctgaatacgctgctcagcacccaagcggcgctggctgaccccgcgccgctgctggctggtatgggcgagaagctgctggagtttcaccagcagcggttcagagagcaaaagtccccggatggggagccctgggcggatctatcgccgcgttacaaaaagagcaaacgcaaaaacaaggacaaaatcctgactttggatggcccactgcgtaacacgcttcggtggcaggtcaatgctgaagagctgttgttcggtaccgaccgggtgtacggtgccatccaccagtttggcggtaccatcgaaatcgctgcgcggagccagcaggcgtactatcggcagaagaagaacggcaaggtcgataaccggttcgttcgcaagtcgaagtccaatctggccaagtggcatactctcccggcgcacacggtcaccattccggcccgcccctggttgggggtatctgccgagcaaggtgatcgcctggtcgaactggcgaagaattacctgcaacggcaattaaatccgtga

SEQ ID NO: 439278 - DNA, 1212 bp, Serratia marcescens
atggccggtaatgttgcctacggctcgctgccgttccgcgagcagcttgcctttttccgacgcaagctcaacaccaagtctgatgcctggacggatgtttacggtgccgagcatgacaacgagtttatggtggccggtgccaaccgtgacgatctgctggcggactttcgccaggcgattgaacgcgccatcgccgacgggcgcacgctggccgacttccgtaaggactttgccagcatcgttgcgcgttacggctggagctacaacggcggttttgaatggcgttcccgtgtcatctatgaaaccaatctccggtcatcgtatatggccggtcggtaccagcaactgatggccatgcgggattcccacccctactgggagtatgtccacagcgacgccgtcgaggagccgcgcgaggaacatctggcctggaacggtatggtgctgcgctgggacgacccttggtgggtgtatcatttcccgatcaacgcctggggttgtcagtgcagcgtgattgctcgcacggaggacgaccttaaacgcatggggaaagccgggccggataccgcaccgaccatcaagttcgtgcagcggaccatcgggcaacgcagcccaggcgggccgcgcacggtgtttgtgcccgagggcattgaccccggcttcgagcatacgccgggccgcagcaaatatttcagccaggtgccatcgccccgaggcggttcacctactgcgcctgcagcacccgatgaaacgccgccagcgccgccgctaccttcgccacgtccagcgcgtgatcctgctccaaccggggatggtcaagaggcatttctcagtgcctttggcgcgacagccacacagcctgttgtcttccgtgatgccgctggccagcgtatcgccatcggtgcagagatgtttgctgcccgtgacggtgtgggtcaggtaaacgacgctgcagaccaactgttgctgttggctcaggctatccaggctcccgatgagatatgggcgcaagtggtttggcagcccgccatacagcaagccgtggtgcatcgtcgctacctggcgcgtgttgaggttgctggccagccagatccggtgtcggtgatattcgagatcggcactgacggctgggccggaaatatctctaccgacgatgccctgctgcagtcgatgcgccagggcgtcttgctgtatcagcgaggagacgagtga

SEQ ID NO: 439279 - DNA, 297 bp, Serratia marcescens
atgagttttgccgacttcctgcgcgaagaccagcgcctggtcatgttgcgctttctggccgagatgccgagctacagctccaacagttcggtgatttaccaggcgttgacgcgttatggccatgctccgagccgtgaccaggtcaagaccgagttgcgttggctcgaggagcaagggctggtgcgtatcgacgatattgagaccgtgctggtcgcacgcctcaccgagcgcggtgccgacgtcgctgccggtcgcgccattgtccacggtgtcaaacgccctggcgcgggaggctga

SEQ ID NO: 439280 - DNA, 621 bp, Serratia marcescens
atgagatgcctgttatctggtctgtttctgctgctcagcgcttgtcacccggtagctgccgccatccctgaagatgcgcggcaatatcagcgcgaactgacccgcaatgcccgcgtggtctggggactggatgcgccggtggcaacgttcgccggtcaaattcatcaggagtcgacctggcgcgccacggcaaaatcgcctgtcggtgcgctgggactggcgcagtttatgcctgcgacggcgggctggattgcaggcatctaccccaaaaccctcggtgacaaccagccgttgaacccgtcctgggcgatgcgggcgctggtgacctatgaccgttggcactatgaccgtatcactgcagcgaccgagtgcgaccgttgggcttatgtgctctcggcctacaacggcgggctgggctgggtgcagcgtgaccgcaagttggccacctctcgtggtcttgacgccggtcgatattggaacgtggtcgagagcgtgaacgccgggcgttccagcgccaatttccgcgagaaccggggctacccgactcgcatcattcacgtgtggcaaccgctctatgagcgggctggctggggctcgggggtctgccatgacgatgaataa

SEQ ID NO: 439281 - DNA, 348 bp, Serratia marcescens
atgcaagagactcgtcagttgtcgccacaagaagcacatgatttccttaactctagaatcactactttagaagaagcggttcttgcccaaaaacataggtctgatgtccatactgcgttcttggctgcactggtcattaccatccagaatcctgagaagttgttgaaaatatggcaaaacttctcctacgattatgaggataaaacaatcgccaattatggggcttcacttgataaaactcgtgaagaaaagtttcgagccgatattcgtgatgcgcttcaaagttggtctgaagttgtagaagaagcaattaagctgagacaacctcaggaaggtcagtcgaattaa

SEQ ID NO: 439282 - DNA, 498 bp, Serratia marcescens
atgagcaaatttgaagatatatgcgcagcgtataaggtttcaaaagagaacttcaattcctaccgaaaagagagcatggattttgcaattcatttgggggggagataccgtcagtacctgggagtggaaacggatcactttcgatgggtacctgaatcaaagcaagacgataagagcactgattttaccatccctggcgcaatgcatcttgatgacgatacctactggcatttagggctgaagcttcgtgtttactcagctaagaatgtgatgccacagcaggatgtttttattgtcttcatgtttaaaaaaatcgctgattgtgaatatgcgataaaagttcgcgctgctgacagtcctcacacgatagaaaccgataaagatgccagctataccgttttctttaattacttgcaaaatctgattcttgaaatctataaggatgatttgactaactttttacagtctgagcagcaatcaagacgtatcggtttttga

SEQ ID NO: 439283 - DNA, 216 bp, Serratia marcescens
atggcaattaaaatagagaccatcatagtgattctgccaagtggggcaatgggcttgaagatggtggcaggaaacactaaagatgccaccgaaaccgaattaaaactgttggaggaattgaaacctgcatttcaacaaatggcgctgaaagagttaatagacagagggtttaaacctgtaattaactttcccagcaaagacaacactcatcactaa

SEQ ID NO: 439284 - DNA, 207 bp, Serratia marcescens
atgagcctgcaatgcaaaacctgtagtgaatacgtagaggagctcgatttcgagcaggcaagcattatgctggggcatgacggcacctggtgtgtggaccttatcctgacctgcccgcattgcgggcagacctacaacgcgtttgtgcccaccagcgagctccagcctttacctcacgatgattattcggaggggatatgtctatag

SEQ ID NO: 439285 - DNA, 258 bp, Serratia marcescens
atgcacaacttcaaaataaactggctgaatttgattccgctgagcctggcgatgctgccgcaggcgcgcgctgcggaagccgtggccccggagcagtggctgctggaacaggtgcgcattggcgaggccggcaacaaggacgatctggtgcgccagtcgctgtaccggctagagttgatggatccgaacaacccggacgtgatcgccgcgcgcatgcgtttggcgctgcggcagggcaatatggcgctggctgattag

SEQ ID NO: 439286 - DNA, 564 bp, Serratia marcescens
atgaataagacggccacggtacggatcacctccagcggcggcacctatctgcgcacgcgcgagaaagtccgtgttcagattggccgcagctatatgattgccggtcgactcagtgacgcgagcaatgccgatgtgctcgggatgactatcggtatctcgttatcaaacctaccgctggcgtacatgcgcacgatgataacgaaccagcaggccatcacggaggcctggcgttttggtacccgtgacagtgcctggacggggcctgtcgccggtggggctgtgggtgctgcggcaacgacgtatgcggattatgtgcctgcggcaggcttgttcaaagtggatgagggggttgtttacgggtatacacgcgggaagctggacaagacggctacggccaccacgggcaagttggctgacctggtgaactttaccgcgccgatcgttgttggtggcggcatggcatccggcactgtatctccctgctatggctcgctgcttgatatgttgttcctgcatacggcatcagaaccggatgccgtactggcctcacgcttcggcatgtga

SEQ ID NO: 439287 - DNA, 243 bp, Serratia marcescens; identical to SEQ ID NO: 15164

SEQ ID NO: 439288 - DNA, 678 bp, Serratia marcescens; identical to SEQ ID NO: 54015

SEQ ID NO: 439289 - DNA, 1200 bp, Serratia marcescens; identical to SEQ ID NO: 6086

SEQ ID NO: 439290 - DNA, 885 bp, Serratia marcescens; identical to SEQ ID NO: 54013

SEQ ID NO: 439291 - DNA, 1797 bp, Serratia marcescens; identical to SEQ ID NO: 120698

SEQ ID NO: 439292 - DNA, 1386 bp, Serratia marcescens
atggatgtcgtcagccggattgagcgcgcaagaaccaaagctttttatcagttgctcgtggacaggctcggagtagaggcctggactgtgcgaaaagatgcctatttgaagcgcatacgtgctcaggagtcgaggtttaatatcaagctgccgatagagcctcagctcttctctccagcagaggatgacatcgactggtatatcctgatgtcgtatctgtctcatgattttccgttgagcgactcggcctacagcagtagacgggtctgtccctatgcaatggctatcggagctgttgcagatcaactgcgcaaagtccccaacgttgaaggtgtcctggacaaaatgctggcgaataacaacaagcctgaaacccagcttttcgagctgctgacggcttcgttctacttaaagaacggctacgaggtcgccttcattccggaaaacagcattgtctggcccgacgggaaaaccaagaaatctcccgacatgctagtcaagtcaggagagctggagttctacgttgaatgtaaacgggcggataagcaaaccaggtactcaaagagcgaagagcaggcatgggccaatatctggcatgagttaagcgaacacatgcacgaagttgcaccgtggaacatcatcaacttggttttccatgagcaggttgctgacgtgacgccggaagaggtaatccaagtggttaatctcgccctcaaaggaggaacaggaaaagcaaaggagagggctatcagtgtcgaaatccgggccatcgacaagttaggactcctgcgtcactatcgagagttttcggttagacccaatagccctcaacaagagttgctggtgttcggtgatatggacagcaatgagaagcgcagcatctcaactatcgcgcagcaagttgttcggccaggaacccaagacgacgttctcaacatgtttgtacaggatgttgcccagtgcgtgggagctcaatggcgctgtgagcatgaagtgtcacttggtctgcgatccaagcatttcaaaagcttgctcaacgatggcgttaagcaggtccccccagaccacgtaggtgtagtgcatatttggtatgagacctgcgaaggtatagagattgaggaactccgtagaggtaagcacatcgagaatatctcggcatatgatgcttcccaaacaaccgtgctgggtgttttcctacacgccgtgaattactacccattcgaggataactatgagtgggctgagactgtacaagactttggctgcgtgcccggtttaatgggactcttccctagacaggctttgatgctcgcgtttgactcgacgccggaggtcgaaggcgccacacactgggggcaggacaaggccgcaaaatacacgcgctga

SEQ ID NO: 439293 - DNA, 246 bp, Serratia marcescens
atgtctcttcctgagttgaatcacaggattttggtcgccgcaaaacgcaacggctgggtcacagacgaagagttcaatcgtacacgcccggtactcaacctagaaaacaacatagccgaacgcttggcctcaccagagctgggctctgacctcaaacagttatcccaagcgagcggtgataaagacaactttgtgccaccggagcaactcatgaagtacatccgggaaaaattacaggagaactaa

SEQ ID NO: 439294 - DNA, 792 bp, Serratia marcescens
  misc_feature (759)..(768): n is a, c, g, or t
atggtcacgcacaagactgtaaaaaggagcctgcttgccctgagtgtagcggctactctcttcatcgccccgacagaggcaatagccgctaacggactccagtctcagatggataaactcttcaatgagatgagcaacacaacaccaccaggagtttatgaaagccaacggcgtggcgttctagctggtggccggttcactgccaagactcgactctttgacgagaacctagttagccttgccccaccatcgtggaaagctggttgtgggggcgtcgatctgttcggcggctctctttccttcattaacgcagatcaaattgtccagctcctccgggctgtcgcagcaaacgccaagggatatgccttccagcttgcgctcgacaacgtttttccggacggagccaagtggatagagaacttccagaagaaagtacaagcgctcaaccaacatctgggcaattcctgccagctcgctcaaggtttcgtgaacgacctaaccagtggcatggatctcaaacacaaaactgatgcttccatcaccgctacaacatccggcctgtatgaagatttcttcggatccaagcaggaaaccagtggcaagagtcccctagaggaactgaaagctaacaagcctgacgaatacaacaagatgattggcaacatcgtctggaagcaactcaagagcaacaacgccaatacttggtttcaatacggggataacacgctgcttgaagcgatcatgtctttaaccggcacnnnnnnnnnnaaccggcacagtcatcattggtga

SEQ ID NO: 439295 - DNA, 1116 bp, Serratia marcescens
atgttgagacgagaaaaccaaggggatttgtttgatgaccaagtggtgctgccatccctggagtcggtactgaccggcagaccttccggtcagcgttgtgacgatagaactacgtacttctcagcgccggatgtggatttgagtcgatatgaccacatcattgtgtgcctatctggtggcaaagactcaatagctgcgtatttgcggctggtggacatgggagttgataagtcaaaggtggagttctggcatcatgatgttgatggtcaggagggtagttcgttgatggattgggccttcatgcgtgactactgccgtcagcttgggcaggaactgggcataccaatgttcttctcgtggcttgagggcggttttgagggcgaaatgctcaaggagaatgcttacagccacccccatcgcgtagaaactcctgaggggctcctggtgctgcctagagaccataagcgttctaagccgggtactcgccttcgtttccctcaacagtcgccatcattgcaaacaaggtggtgctcatcagccttgaagattgatgttggccgcagagctctcaacaaccaggatcgcttcaaggggaagaagatccttttcatcactggtgagcgcagagaggagagtgcaaatcgatccaggtacaaccaacttgaggcccacgcctgtgacagaagatatgggaatactgcacggttagtggatgcctggaggccagttcttcactggactgaggaggaagtatgggaagtgatcgaacgtcaccgcatcttggctccagtcccttatcgtcttggttggaaccggtcgtcgtgcatgacctgcatttacaactcacagcgtatctggtccacgatccggcactactggcctgatagagctgggaagattgcactgtatgaacaaacctttggggtaacggtatcaagaaaaagaatcgacgtaatggatttaggttccgctgttgcgccgatacaaattagtgatgtggaggcgttagagcaggtatccagaggcgattacacgctcccgatttttgtgcctgaggggcaaaagtggtttctccctggtggcgcatttggccgtgaggcctgtggttctgattga

SEQ ID NO: 439296 - DNA, 189 bp, Serratia marcescens
atgttcgtatcaaagcaggacctgattcaggtggacggtgaattggtccccgtttcggttcgaaaatcccgcgcatcagttcatgtggttggcctgttcagaggccgccagatcacaggcaagggccgcacagagtcagaggccaaatcgagctggagacagttcgccgagtatgaggcaaatagttag

SEQ ID NO: 439297 - DNA, 195 bp, Serratia marcescens; identical to SEQ ID NO: 101167

SEQ ID NO: 439298 - DNA, 627 bp, Serratia marcescens
atgtttgatacgactttatcttgtgtgaatgccgctcttttttgcgccgcaaacagtatcatgtgggtacagagcaggttcgttaaaatatctccaaactcccctcccttgtggattgcgttaatgagtccagacacaacctatccggtggtgatactcacaatgctggcaatgccgggaatagaattaatgaatggtgctgagtttaacgtctttatgttgagcatctttgtcattatcgggctctttcacttgctggcccggcagggaaagtcaaagggggctcgacttgacttggttggactcgacccgatgctttcctggtggctagaccggcaaggcaatgtctacccccacctgatgagtggcaaagaaggtgttcccgccctgtgttgctccaaggattcagccgaactcctgcttagtcagtttctggctttcggctctcagttcgataaccccatcaatgtccgcactccgttcaagctccctcgtttgataaataaattgaccagcaagggatggcttgttgacaccttaccttcgacgcgaactccttttcttatacgagcaatgcatattcccacgcatggcgatcgctcaataacattcatgccgatcacgtaa

SEQ ID NO: 439299 - DNA, 1032 bp, Serratia marcescens
atgcctatcctaccacctctgccacgaccacaacggcgccgcattcacaaaatcatccatgccacccgtgataaaggacatgctcgtcgcttgatggccatcttgctgttacatgaaggacgcacgatcaccgatgttcatcaccttaccggcgctgcgcgctcgaccatcggtcgttggcttcggtggtatcgagatgaaggcatagatgcgctagaagccttaccggctggccgtgccccagtcttacctatcgccaagattgtcaccctactggtgctgctcatgcagttttctccgcaagattttggttatcagcgcagccgttggtgtactgaactattggctataaaaatcaatcggttaacagggctcaatgtggcagcctccacgctccgccgatggttacctcgtatgggcattgtctggcgcaggcccgtgccgaccttgcggataaaagacccagcctatcaggaaaaaatggcgaatatcgacgccgcgctggcccgctgtgatgccgataatccggtgttttatgaggatgaagtcgatatagacctcaatcccaaattaggagccgactggatgttcagagcgcagcaaaagcgggttgtcacaccggggcagaatgccaagcattatctggcaggcgttctccacgcaggcaacggaagggtactttacgtcagcgggatcaagaaaaactcatcgctatttattgccatgctggaaaagctgcgccaccactaccgacgagccaaaaccatcacgttgatcctcgataactacatcattcacaaaagcaaacagaccgagcgatggttgaagaaaaaccctaagttctgcctggtattccagccagtttacagcccttgggttaatcacatagaacggctatggcacaagttacatgaaaccatcacgcgcaatcatcaatgcagagggatggcaaacctgctggcccgagtgaaacacttcatggataccgtgtctcctttcccggggaatggctatggcacagcgaaggtgtag

SEQ ID NO: 439300 - DNA, 1485 bp, Serratia marcescens
gtgatctactattcggaacagctatttagcaccgtatcctattacctcaaccgggcggctcaactgggtatcatgacctggcccctgtctgagtcctgggatgatgtctccctggagcgcgcatttctcaagacctgctctgttcataaaactcagcacaaacccactcccaactgggccttgttgcatcaggaactcaaaaaaccaggtcaaaaaggcgtgaccctcgagctgctatggcaggagtacgccgagcgccatccaggctcccactacagctacaaccacttctgtcggctctataaagagtgggcggcgctgctgcaaccctcgatgcggcagacccatattgcgggcgaaaaactctttgtcgactactgcggccagaccatgcccattgtcgatccgcataccggcgagatcctttaccgggcccagatctttgtcgccgtgctgggggcctccaactacacctttgccgaggccacccgctcccagcagctcgatgactgggtgatgagccacaagcgcgctttcgagttctttggcggtgtgccgcaattggtggtacctgattgcctcaagagtgccgtcagcgtggcgcgcaataccgatccggatctcaaccctacctaccagatgctggcggcccatttcggtacggcgatcatgcccgcgcggccccgcaagccgaaggataagtccaaggcggaggtgggcgtgcagatcgtcacccgctggatcctggcggtgctgcgtcatgaaaccttccatagcctggcccagctcaatcagcgaatgggtgaactgctgacccggctcaaccagaaatccttccagaagctgcctggctgccgtgcctcactgtttgccgagctcgatgcaccggcgctcaagccgttgccggattatccctatcactacaccaaagtagtgccggtgctggttggtaaggactaccacgtcgatctggaaaagcactattactcagtgccctatgccttgcagggcaagcggctggaggcgcatctggccgagcataccgtcacgctgtaccacgcgggcaagatcgtggccgaacaccagcggagtcatcacaaaggccagcacagcagcctgcgtgaacacatgcccgcgcatcatcaggcactgctggagtggtcgccggagcgactgcttggctgggcggcgtccatcggcccctacaccacgcattgggtggatggctttatccggcaggcagagcattcgacgcaagcggtgcgcccttgcctggccttgctggggcagagcaaaacctatggcaaggagcggctggaagcggcctgcctccgggggcacctgaccggcgccaaccggctgcacaacatccgcagcatgctcaagcatggcctggaggagcaacaactcattgccaacgagcgacaggatccgctgcaagacatccgtcatgacaatgtccatggcgagcactacttccactaa

SEQ ID NO: 439301 - DNA, 756 bp, Serratia marcescens
atgcaattacacctcgatgaacaactaagccgcctgcacttgagcggcatgaaacaggctctgaaccagcagcaggcccagagcatgctgtacctggatatgggttttgaagagcggctgcaactattactgagccatgagctggtgcagcgggagcagaggaaaaccaaccgcctggagaagcaagcccggttccggctagccggacaggtggagcagctcgactatcgggcgggtcgaggcgtgagcaaagcgcagatccgccaactgctggaaggacactggctgagtcatcaacaaaacctgctgctaacgggcgcggcaggctgtggcaagagttacctggcgtgtgccctgggccgttactttatccggcaaggagtgggcgtgcggtattaccggctgaaaaccctacttgaagagatgcgactggcccaagcggatggcagctatccgaaactgctggagcgggtaagcaacataggggtactgatcctggatgactggggcatggagatgctggacgcgagcgaacgcagcaacctgctggagatcatcgatacccgctacggcaacgtctcaacgatagtggcgagccaattgccggtggagaagtggtacgggatgatcggagaggcaaccttcgccgaggcgatcttggaccgactgatccacagagcggtgcgcgtgaccttaacgggagaatcgatgagaaaacagggcgccaacttgaccgatgccgatcaggcggagtaa

SEQ ID NO: 439302 - DNA, 933 bp, Serratia marcescens
atggaaaaagcgattcaaagatacttggctgatgaccggcaatatcaagacagggttgccgtagccatcagcctggttgaagagaaaggcgctgagtacgaagttctttgccaacagagggctcagttggggggctggcaaaaaattataacattccggcagtttcgtaggcacatcgccgctatacgttctgcactgaaaggacataacagcgatttgcgatatttgcgccgagggagaggccagctaaaagatgaattggtttctcgggtcgtgaagcaagcgattgatggtagccagttcttggaccgaatcatccacgctcaggaacggcttgatgccgcatctcgactccacaagagcaacacgcgactggtggacatggggcaaaaagccttaaacgaaatccgtgaggcttcttccagtgtttcgtcagcacaaacaatggaggttctcgatcttgtgactgacaacaaggggatttccgtcatgtcgtcgatgtccagctcatcggccagcagtgaaatagatgatgcgaagagagcagtcaaagccttctcaaatgcgctgggggagcatcgtgacatcgtgggctctctacatcactcaatgtcaacggagtttatcgatctgggtatggactttgccggtttgaatgatggcttcgacttggggagcgtcttttcgctgttcagcttgtcgtctgccagttcgtctctggacaaagtagagtcttgcgttgaatcactgatgccagcattaaagcgagcagcctccaattcggaagcagagtatgcccgtgctaaagaagagttctttggtctaaaacggcaggcctgtatccaggtatatgagctcttgctgacaaatgatgtagaggtgtcagtcacacattttgagtcagccgtggacagctacagagttgggaattga

SEQ ID NO: 439303 - DNA, 939 bp, Serratia marcescens
atggctgctatcaactcactccgtgccctcaaaggcgtaactgcccccgaagaactgaaaaaaggggatggattcactatctctccgctgcttctgctggaggaagaagggtttaacacccgtggcgctttctgcgataactactacgagcgcccggacatcaaggctggcattcgagtgctggcagatgcctacaagcgtggcgactatgttccgccaatcatcgtcaaggttatcgacggaaaggtgtatgtccgtgaaggtcatcgccgtcgccgtgccatcctgcttgctatcgaggaaggtgctgacatccagttcgtgcaggttgtagagcatagaggtgatgaagctgaacagagccttctgatcgccaccagcaacgacgggctccctctttctccgcttgaacgagctgtgatctacgctcggcttgcaaactgggggtggagcgaccagatgattgcccagcgtgttggccgctcggctgagcacgttcgtatcgcccgtgcccttctggagatgcctctggaactgaaacggatgattcaggaaggttctgtggctgccacctacgctcaggagctctacaacgagcacggcaccaatgctgttgagatcctgaaaaaggcgaaggaagaacaggacaatggtaatgatggcaagaagaccccgaaaaaactgaccaaaaagtctgtcgagaaaggtccacgtctgggtaaaaaagtggttgaagccatgcaccgaggcgtgagctctatcaccagtcgcctggacaacatcaagccgaacgatgacggagaaaccttcacccttaccctgagccgggaagatgtcgatgcgttccaagagctgaaagccaagctggctgaactggagcccaaggcccaagagaccaatgaagaccagcaagagctggatctggcgggtaatcagtaa

SEQ ID NO: 439304 - DNA, 198 bp, Serratia marcescens
atgtgtcattataaaaatttggggcggctgtgcttcttggttggcttaattgtagggctaagttcgctgttggtagctcactccgacattcaacgaacgctcggttttttgcttgggatgattggttatgggctgttttctggtttgtccttgtatgtggaacagataaaaaatagctcacccaagtctcccaactga

SEQ ID NO: 439305 - DNA, 336 bp, Serratia marcescens
atgaggaaaaacatgacgtttaaagaactgtatgagcttcaatgcaaggtctttgaacctgcaacagccgacttttcaatgagtgagttgaaaagcctgttaaatgaactactcgacagcttccctcatgtggatgatggcaaaggcaatagaatgccttataaacccagccaagatgagtcagtaatgtggtttaaatgttatgaccacataatcaccttgattagcctcaagcgagacgagtcgaagaataatagaacgttttggatttcaattgttgcaatacttgtctcccttgcatccgcattagctcagctttatccgctcgcaaaatga

SEQ ID NO: 439306 - DNA, 240 bp, Serratia marcescens
atgggtagcattaccctcgcggggcggcagattttcgttctcaacgagaacgacagatacccagagccgcagcaaaatagccctccgatgttcgcgatacgtgaagacgaggagcagcagcactggctatatgtgtggcacaaggggcgctggccgctcgtgtcagaggtaccgtttgaaactgagggcaaagccgttgatgcggcgctcgcattcgactttgcctcgctgtataaataa

SEQ ID NO: 439307 - DNA, 195 bp, Serratia marcescens; identical to SEQ ID NO: 436095

SEQ ID NO: 439308 - DNA, 909 bp, Serratia marcescens
atggtagcagtaaaccaaactgggaaagcctattacggttttcgcccagcgttagatctatcagcgtctattctcgaccctcaggctctttttgctgcatacaaggcgcgtgtggttgcagatggtggcactatcccagatgaagccggttgcctggcccggttctcatttttgctgaataacggcatgtatgagaaaaccgcgttctgtgcagcgcctgcatttggattgaaagttgacggcgttggaaatgtccaaaccgtttataacctgctcggcgatgctggcgatttaatcgcaggctcgcagggtacgccgccgttacccatgacttacgatgctacatcccgcgcggttataattcagatcacatcaggtggtgggtggtatctcaaaagccgcgcgagccttgtcattcataaaagttcgacttatctgctcgctggccgcatgagcgatctaaatcgcgctgacaacaacggcattactgcaggatacaatctgacaggtttgccgatggcatatcttcggacaatgataacgaacggtcaaaaagagacggaagcctggcggtatggtacgcgagatagcggatggcctgcgggtagtggtggcgcgctcaatgccgcaaccaatatctatgctgactacgtgccatctgcgggccttttcaaagtggctcaaggggttattgagggttacgagaaagggaagttgcttgtgacctccgcacctgcggcgactggcaaactggccgacttgagcagttacacttcaccgatgttgatcggtggtacgcagttggcgaacaacatcgtcagtgcgtgctacggggcattccaggacatgctctgtcttcacaccgcagacgaatcagacgcgattcttgcgtcacgattggggatgtaa

SEQ ID NO: 439309 - DNA, 2544 bp, Serratia marcescens
atggctgttttaatcagcggtaaactcattggccccaatggcgacccacgcccaaatgtaacgattatgctggtggcggtaaaaacctcatcggcggttgttaaacaggcaccgtctatttcgacaaccgcagcagatggtagctactctttatccgtagaggttggcacccataacgtaatgattgaggcgcatggtcggccatttgaaaaagcgggacaaattactgtttataacgattctaatccgggaactttgaatgattttttgaatgcaccaggacaagatgaattgacaccagctatcgttgcaatggtggacgatatgcgagttgaagcggtgggcgcagccgcgtcagcaaaggtttatgctgaggaagcaaaagcgagctccgaaatagctcaatctggcacggatgcctatactgatgttgccgaagctcaaggagcaattgactcaggtaaggaaacccggcgttatttctctgttcgctctaccatttcaacgcagtgggttgatgaatatgagaacgttaacggcgtagcgacgccaacaggccgctatctcagcaatgggaaatacgttgatgagattgctgcctctgttatttcgttgcttgcaaaccttatggagacgaataagagaactgctgcattgcgacaataccaatcagagcagtggcaatggacagtagaaagtgctctcggcccttctcagactgcgatggcgttagataatgattttgggctttggcttgctgggttaaagtcatcaattcaagattacgtcgaacagttaattccgaaaaacatcgcaaatcgttatcaaaatatgcagttcgtcctcgttgcaaaaaacggggtggatggcctattaacaattaacgataacggcgatgtaagaattgtcggtatggatgacgttctgcaagacagattagactctatatgctcgacaaacttctcgcgccgaattgttggcttccagtatgtgattttcgcgaaagacctcaaatctgcattgttcgcaattgatgacgatggcggggtgcatatccccggcattgacggcccgctccaagacaaccttggcgaatctctcgcatcaattaaaagtgccggaggcatgccgtccgctgcgtggcgcggtgaaattgtgtggtctgagcgccctgtgttaacggcacaaaagctgtcagcatcaggattcgtattcagttacatgccaggcggcgaggcaactgcgggggctggtgtgatgtatgtcccgtccctgcgtgaaatgcccgttgacgctgaagaatcacatggtggtggttcagcgggccaatcgctgaatctttcagccgatttagccggttcaaacattgtcaacaggaaccctgcttttcgtggccgcttattagcgggtgcgcgaggcaaaccggaaggaaataatattaaccctgtgacggttgatgatgtctcgacgatgaatgacatgagcgacccctcatatcgtcaggggaacattctgccaatgtataacgcattgatggatatgggggtaggcaatatcgtctttatccatgccccgttcgctgctggtggtcgctcatttgtgcaaatcagccgaggtaccgtgccatatgataacggcctgaaatacgtgaaaatggctaaatccgcctctgatgcagtgggcaagcgctatgtattcaagttcctcggattcgaacatggcgaaactgattccgataatggcgactgtcggaatccaggggactatcttgcgaaagaaatcgtttacttccccggtattcaaatcgactttaaagccatcacgggccaagccgacgacttcctgatagttatcggacaggttggcagccggattaacacaaaggccggggccgtcgatgaagaaggcaaccctacgggcgaaagcgtcgttgtccagccgtattctgtgcctgccgttgatcagcttgcctatgtgcgtcagaacccagccacggcgattatgtatgggcctaagtacatgctgaactggctctataacgacaattcgctgagccatctaaacgcgaagggtaaggttttgcagggggagtacacagcccaggcgattcactggcatctgtacaacgcagagaaaaaaggaacatggacggggttgaaagtaaaaagccttaccgtatcaggaaatattgcagatctgctttgtgatgtgccttacgcgccgatcgttattgatacgacgttcatcgcagactgtttgaatcagggtattagccttgagaaaaactcggcagcggttcagagcatcacaatcgttgacggtaacattattcgcgttgagtttgataaagctcccgcatcagacgactacatgctgatcggatttacaaataccgcgctaagttcaagcggccacgtttatccgcttacatgcttccgtgattcgtcgtcggttaaatcccgatggatcacgcgaaataataccccattcccactatacaactggctgtgcctcgatcgcctgccaatgaccggagaattttaa

SEQ ID NO: 439310 - DNA, 552 bp, Serratia marcescens
gtgcaaaaaaaattagactcgctgctcgcggcagcaggcattgagctgcccgatcagcagaaacagcagctgctgggctatgtcggcatgctggataagtggaacaaggcttataacctcacgtcggtgcgcgatccgcagcaaatgctggtgcgccacatcctcgatagcatcgtggtcaacccgcatctgcagggctcgcgttttatcgatgtcggcaccggccccggcttgccgggcattccgctggcgatcgtgcgcccggacgcgcattttacgctgctcgacagcctgggcaagcgcgtgcgtttcctgcgtcaggtgcagcatgagctgggcctgaacaatatcgagccggtgcagagccgtgttgaggagtttccggccgagccaccgttcgacggcgtgatcagccgcgcgttcgcttcgctgcaggatatgctgtcctggtgccatcacctgccggcgggcgttagcctggaatccatcgtgcggttgcaggtgcctgaattggaaggcgaacgccatctggtgattcttaaggcaaactga

SEQ ID NO: 439311 - DNA, 1464 bp, Serratia marcescens
atgctcagtctggagacgctcgatctgctgctggcgatcgccgaaggcgaaatgatcgaggagatgatcgtcggcatgctggcggcgccgcagctgtcggtgttctttaaaaagtttccggcccttcgccgggcgctggatcgcgatctgccacgctggaaactgcagctcaaggagcgtctgcaagaagctatggtgccgccggcgctggcgcaggaattttaccgctaccaacagtgccagctggagaacaacacccagttctatcacaacctcaacgacacgatggagctgctgcgccagctggtctcgccgttttatgaacaggcgcgcgcgctggtggacgccgccgatctgcccaatcatccgctggacgacagcttccaaaccctgttcctgcagcgctggcgcatcagcctgacgctgcaggccaccatgctgcaccaccagctgctggaacaggagcgcgagcaactgatggcggaactgcaggagcgattggcgctgagcggcgcgctggagccgctgctgtcggaaaacgacaccgccgccggcaggctgtgggacatgagcaaaggccagctacagcgcggcgattaccagcggctggtggagtacggcaactttttgcagcagcagccggagctgaaaaagctggcgcagcagttgggccgcagctatcaggccaaggcggtgcagcaacaggacgcgcagccggagccgttcagggtgatggtgcaggtgccggccacgctaccggaagaagtgagcggcattcatcagagcgacgacatcctgcgcctgctgccgccggagctggcgacgctaggcattgaagagctggagttcgaattttatcgccgcctgttggaaaagcggctgctgagctaccgcctgcagggcgacgtctggcaggagcagatcctgatccgccaggtcacccatcagcagcaggatcaacagccgcgcgggccgtttatcgtctgtgtggacacctcaggatcgatgggcggcttcaacgaacagtgcgccaaggcgttctgcctggcgctgctgcgcattgcgctggcggacaaccgccgttgctacatcatgctgttcgccaaccagatcgtgcattatgagctcaccgccgccagcggcatcgaacaggcgatgcgctttctcggccagcagtttcgcggcggcaccgatctggcggcctgcctgaacgccaccgtcactaaaatggcggagagcggctggtttgacgccgatgcggtgatcatttccgattttatcgctcagcggttgccggaggaggtaataaagaaggtgaaacagcagcagcaaagccaccagcagcgtttccatgcggtggcgatgtccgcctacggcaaacccggcatcatgcgcatcttcgatcatatctggcgcttcgataccgggctgaaaagccgtttgatgcgccgctggcggcgctag

SEQ ID NO: 439312 - DNA, 267 bp, Serratia marcescens
atgaaaacatcacgctttagcgatgcccaaatcatcgccatcctcaaacaggccgagtctggctcacccgtccctgaactctgccgcgagcatggcatcagttccgcgaccttttacaagtggcgcaccaaattcggtggcatggatgcctctctcatggctcgcctcaaagagctggaggaggaaaaccgccgcctcaagaagatgtatgccgaggagcgcctcaaagccgagattatcgccgaggccatagcaaaaaagtggtga

SEQ ID NO: 439313 - DNA, 708 bp, Serratia marcescens
atgaatgttcatcattattttctcattaccaacggtactacatctctctgcacaccattgtatagcatgtggctactacctttatctttacttcacttccaagcaattaccaattccatgacagcatgcatattccttttgattctaaagaatttgaatttatttttatattggttatataaaggcgagtttttcgtgcgaccgtcaacaccattgaatatttttttcctcaccttcccttcgccatgttactgtatagttaacagtcagagaaaggatgtaagaatgccttcgtgtatagcatgccgtattagtcaaagaataattccatcttgtatagtttatgaaactgaaaaactaatttgtttcttggaccatgacccaattaacacggggcatgtactgatttgtccaaagaaacattatgccagtatcactgacctaccagactcactaatttcagagtcttttattctagcaaaaaagattgcaaaacatcttgagttatcattgaagtgtgatggggtatccttgcttcaaaataatggatgtttcaatgatctaggacacttccatttacatgtattcccaagattccttaatgacggtttttcttgggtttcgtccagcgaagaaatcaagagcatagaagagcttagaaattcaatggggatttttctaaatctcgataagacgcataaccaatga

SEQ ID NO: 439314 - DNA, 912 bp, Serratia marcescens
atgagtaagtatttcgggcggtactttcatcttgaggtgaaaactgccggaggagagacactcatctatgaacctccgatggaagtgagatttgctgtggataattattatcagcattctgttggtttggctcggataacaatctatggtgtgtcatctcgtgcgcgagagatgattcagatccgtaataacaatgagcatcactttggcatagttacacttcaggccggctatgaggaacaatttggtaatatttttttcggtcgaattaatagtgtccaagtgttcaaggatggagttaatacttgtatacgactgaattgcagttcggtaagttctgagtgggataatgccacttatcagacgtggggggataacactccatatcttgaagttattcgagatgtagcctcattattaggggctccagtcgagttcgtcggcgatttctcagaccttcctgttttgccctttggtgctaatggtggtggaaaactttgtcgattatggatggatattctggctcgcaactttggattctcgtggttgcacacttcaaatagaaccgtgataaccagaaaaggaggctctcgatcttggagtaaacatgaattaagtgcgaatagcggaatggaaggggctccgcgttggtatgcagataggctggaagttgatgtcaaaatgaatcatttataccagccgagcgatcgtatagatattacttcgagtttttggacactgaattttagtggtgcgtattacacagattatcaagacttatacggataccagatgcgtactggtaccttttctttgctaaatacttctcatgaggggagttattggggagatacctggaagacgacattgggctgtatttggtataaggaggcagataatggcggatcctaa

SEQ ID NO: 439315 - DNA, 681 bp, Serratia marcescens
atgatcgcattcaatcacgttgttccggtacttaatctgtcggtgttcaacgtcagacgggcaccggccttcgcgtttgagcagagcaagcgcgcgaccataggcgggcgctttatccgtgttgatgaatcgcgggatctgccacttcttcacgttgttgaggattttacccagaaaccggtatgcagctttgctgttacgacgggaggagagataaaaatcgacagtgcggccccggctgtcgacggcccggtacagatacgcccagcggccattgaccttcacgtaggtttcatccatgtgccacgggcaaagatcggaagggttacgccagtaccagcgcagccgtttttccatttcaggcgcataacgctgaacccagcggtaaatcgtggagtgatcgacattcactccgcgttcagccagcatctcctgcagctcacggtaactgatgccgtatttgcagtaccagcgtacggcccacagaatgatgtcacgctgaaaatgccggcctttgaatgggttcatgtgcagctccatcagcaaaaggggatgataagtttatcaccaccgactatttgcaacagtgcctcccagaccgcggagcagaggattcccgctcaccgctgctttctccgtcttctgctgatcggtagcagcggcggccagcgctctcattag

SEQ ID NO: 439316 - DNA, 405 bp, Serratia marcescens
atgagcaacgcttcacaggcttggctccggcaggatgccatggtcggcggtgatcacaaatggctggcgggtggcgactggacgatagagcactacgccagtctggcaaaatccgtgtccgccgcccgcatcagtcatgccgaggggtacgccactcccttactcgactggacgcaagtccagagactggacaccgccggcgcggctctgctggtggaaattctcgggccagactcgatactcgaccggccggaggcagctccaaatctgtcctcggatcgcctcgccctaatgagagcgctggccgccgctgctaccgatcagcagaagacggagaaagcagcggtgagcgggaatcctctgctccgcggtctgggaggcactgttgcaaatagtcggtggtga

SEQ ID NO: 439317 - DNA, 612 bp, Serratia marcescens
atgagttttgctagcttaatgagagacaaggttaacgtgttgaaagctgatggcaccaaacacgaggggatcaagtgttcagtgtcaggtagtgacaccatcatgattatgagccctacgtttgctgttgatcatgatgacctggttgtgagaacaaccagccttggccaagatgaaacctataaagttattgatcctaagttcagtgaagggagcggcagtggcgctattcctccacactacaagttgaaggtcaaaaagctaggtatcccagaagccaaagcagccgtccagagcatcacctataacttcaatggccacaacgctcgggtcaataacagcagcgtagacaactccgtgaacactgtgcagatagacaaccgtgcgcagacctatatcaatgagctacgcgaggtattgaagactgctccgttgagcgattctgaacgtgaagaggctcttgaagtagctgatgcgatagaggctcaatttgaatctggaaagcccaagaaaagtgttataggtgcattgctagctggtctcccgtccattgaatctgttttgtctatcgctgcaagtatcgctgaacttgtgcaacaacccgtcgcttga

SEQ ID NO: 439318 - DNA, 516 bp, Serratia marcescens
atgaatgatgtattgacctggagcggggatattcacgatatatttaaaagggaatcaagggaaatgaaaaataagaagttgatagctttgataatatccgctgccacatcatgctcgtcagtttacgcagctacattaccggccaatgaggtgggctcatatatacttgcaatgaacactatgtcaccgatcactgcaaagtacaccatccagtacaagcaagcagttgagcagaaatgcaatacggttcttggtgttgaacaactcaactcgacggcattcaccaatgttgttcaggcaatggtgagtagtgagactgtcgatagaatggggctggatgctgctggtggctctctccaagatactttgtctatgatcgggaaaaacgtcacttgtagcgacctgaacgcgccatttaaagctcttctggatgataaagacttcactagcaagcatcagcacttatcgaaggttttgcatacatgggatgatgtggtttcgcaaagcaaaccatga

SEQ ID NO: 439319 - DNA, 1398 bp, Serratia marcescens; identical to SEQ ID NO: 134201

SEQ ID NO: 439320 - DNA, 804 bp, Serratia marcescens
atgtgggcagcgctcatcgttattgttctggtttgcggttatcactacaccaaatgccatttaccatcaaggtataaacaaaacaaagccgttggttggaatgcctactttgacgttgctctcaaaggtggcgagtttctaatcagcggcattttgttggctttcgtttgtgtatttctcatgtttttgctgatgtttgtccttaacatcttggcttatcttggcgtgccataccaaaaattcacctttgcgtacgacctatggaaaacaagatttttcgggatgagtatgttctcggccttgagtcttggttgtactgtcattatgagtgtcgcccaggcatcgcaagctaccaagaattttaaagacccacagaaacgagttgatatctttcgagagatcgctgctcatagcgcggtagaaaacatccttctagagtccatcgagaaaggtttgttgctgctggttacgttgaagtccagaaaagtctacgtagggatgattgacgaggcgagatttaaccagcttgataccaatacattggttatgatcccgtttatgtcagggtatcgtcacaaggacaccttaacgttctgcgtggaacataactatgtaaaccactatcaaagcgagggtatcacgttaacctctgagcctttgtcagtgtatcagttccgccatgtattgccgtttgaccaaatcgaatcattctcactcttcaacgttgatacttacgaaaccttccaagaaataataaagcagaagaaagaacaagacggcgagccagaaatagaagctgcatga

SEQ ID NO: 439321 - DNA, 240 bp, Serratia marcescens
atgactagattaattactctcgttgctcgcgcgatcatctctccagagaagatcctcaagaaaatcgcggacgtgacttcaagctgtgacaacgcaccgaaaaaggcttatgatgacaagttcttcatcgacagcaatggttcggtcgtccttaaccgcaataacgcagaagtccaaaaggcttttgctgacaatatcgctggattgagcacaaataagaccgacaagaagacaaggtaa

SEQ ID NO: 439322 - DNA, 450 bp, Serratia marcescens
atgatggcagctaaaaccaaatacttcgcaatcgatgcaaacggcgcacgccacacccgcaccagcgcacgcacctatacgcacatggttgtagtgctgtgcagccaaaccaaactgcgcgagcaactgagcagcgaggctaaccgcataattcacgctcgcaaccacgctttctactgcaaagaagcggctacacctccagcgccgaatatgggggagagcccaaagcgccgcgccttctacaacgaggtggccgctatgacctgtgagcagtacgtcaacaagcgcgtagctgaggagctggcggagctgaacgccaagggttccggagagtacgaagatttttaccgtgatttcgggtggtgcggtcgcctggatctggctcagaagctggccgctaaatgggcaggtcgtggcaaggttgagatcctggaagcccagtccgaataa

SEQ ID NO: 439323 - DNA, 162 bp, Serratia marcescens
atgaacactactcacgatatgggcaacaacgaaacagtaaagaccggcgttttcccaaacggcgacggcacgtttaccgcgatgacgttcaccaatagccgggatggtttcaaaaccgaagcaggcgcgcaacgctggtttgctcgtcagatggccgactaa

SEQ ID NO: 439324 - DNA, 753 bp, Serratia marcescens
atggaaactaaagacatacgacgcaataacttgcgcgatctgatggacagttatgttcaggcaggtaaaacgaaagctgagtttgctgagatggcgggcttgccgcctgcgcaactaagtcaactaacaagcagaacaccggcacggaatgtcggcgatatcgttgcgcgtaggatagagaagagtttgtcattgcgtcatggatggctagatgtgcctcatgacgttgtagaagcatcacacaacaaagaaccagggcagtcaccctatccgactaataatttcaccctaaatactgtcggaagcaattatactgatcatccatacaggatagagctgttggattcagagcatagttgtgggagtggccatatgaacaatgattatcctgatatagttcagtctattgagattgatccggaatatgcaaagcggatgtttggcggccgaccagcagaatcgttgaagatttcaaccgcatctggcgacagtatgaaaggaactatatcgccaggcgaactggtagtgatcgacatcaccgtccgatctttcaagagtgatgggatatatgcgtttacatatggcgcagcatcgcatatcaaaaggctgcaaatggtcaaagataagctgttagtcatcagcgataattcctcctacgaaaagtgggagatcgatagcagtaatgaagaccagttccgcattgaaggctttatcgtaggcaagtggctaatggaatactcacgcttaggttaa

SEQ ID NO: 439325 - DNA, 234 bp, Serratia marcescens
atgagcaacgatttactccgctggaggcagtcagcttcaaagggcgattggaaacgtcttgctcagctctctcgtactactaccgggtatttggaccagatcgcttatagcaatcgccgcgcctctcccgatatggctgagagaattgagatggctacccgtgaatttcctgaaatcaagcctgtttcaaaagaagttttggtgtttgcggtcttgaaagagaaggccgcgtaa

SEQ ID NO: 439326 - DNA, 444 bp, Serratia marcescens
atgatggcagctaaaaccaaatacttcgcaatcgatgcaaacggcgcacgccacacccgcaccagcgcacgcacctatacgcacatggttgtagtgctgcacaacctggagaatgcccgcgtttacgcagcctccgagaaagctcgcagcagccacggccgcaactatgactaccacgctcgcgaggctggccctaaccctcaattcagcaacacgccggagcagatggccgagcaccgccgaatcgccgacatgtgccgcgatcactatatcgaaatctgcgtgctttccggcatcgagcgcatcaacaaggcgggcgtgggtgagtacgccgaccagtggcgcgacttcggatggtgcggtcgcctggatctggcgcagaagctggccgcgaagtgggcgcactacggcaaggtcgagattctggaagcccaagccgattaa

SEQ ID NO: 439327 - DNA, 468 bp, Serratia marcescens
atggcaggacgacgcccgaaaccgtcccacctcaaggtggtcaccggcaatccgggcaaacgtaaacttaatgataaagagccgcaaccggcgagagaaattcccagcccaccttcgcacctgacggactgggggaaaacggcctgggggaaaatgactgtgctgctggacggcatgggcgttctgaccgttgccgatacttttgcgctcgagcggctctgcgatatttacgccgacatattgcaactgcgcaacacgatcgccgacgagggccgaacttatacagttcaaacggaggggggctttttgattaaggctaacccagcggttgccatgctggcagacgccgatcgccgattcaaaagttatttggtggagtttggtctgacgcctgccgccagatcaaaggtgaaagtaaatggtggagagaaagaagaagacccgctcgccgaattcttcggcacctga

SEQ ID NO: 439328 - DNA, 2937 bp, Serratia marcescens
atgccggcctttgaatgggttcatgtgcagctccatcagcaaaaggggatgataagtttatcaccaccgactatttgcaacagtgcccttcagctgactacggcgcgctttctgggaacgtttcttcctgatctccttcaaattccctcattcatccgtttttacattgcggcacagttgaacatcagccgaccagagatcctttcccggtatgctgaaagagacaatacccgctgggagcatcaggggcttatcaagctctattatgattatcatgattttggtgatttcccctggtcattcagactgaagcgtttgctctatactcgcgcctggctcagcaatgagcgtccaggtctgctgtttgattttgctaccgcatggttgctgcaaaataagatcctgctacccgcagcctcgactctgacaaggctgattggcgaagtacgcgaacgggcaagtcgacgattatggcgaaggctggctttgttgcctgacagctggcagaaaacacaactggacggtttacttgaaatacctgaagggcagcgtatgtcggtgctggaagagatgcgaaaaggtcctgtcactatcagtgggccgtcatttacagacgccctggagcgatatacccgactgcgtagcatggagttttcccggctgaatttctccggtctgcctgccatccagctgcggaatttggcccgttatgccggaatggcttcggtgaaatacatttcaagaatgcctgacgaacggcgactggccgtgcttactgcgtttgtgaaagcacaggaaatttcggcgcttgacgaggccgtggatgtgctggatatgcttattctggatatcacgcgttctgcaaaaaatatcgggcagaaaaagcggctcaggacccttaaagatcttgatcgtgccgcgctattactggcacgggcatgcacgttattacttgatgagaacaccgatgaagcagctctgcggcaggctatttttcgccgcataccaaaggacaaactggctgaatccgtcggcaaggtaaatgagctggcgcgcccgcaagatactcattttcaggatgaaatggtggaacaatatggacgggtgaagcgcttcctgtccgcgatgttgcgtgacttacactttcaggccgccccggccggggagcacacgttgtcagcaatccattatctggccgaactgagtggctcaaaaaagcgaattctcgacgatgcaccagagcaaatcatttccggcccctggaaacgtctggtctacgacagagatggtaggattctacgagcgggttactcgctgtgtcttctcgagcgccttcaagattctttgcgccgtcgtgatctctggctggagaacagtgaccggtggggggacccgcgtcaaaaattgcttcagggagctgaatggcaggcacaacgcatcccggtatgtcgggcgctgggtcatccatcagacggaactaaagcagcagaacaactggctacgcggcttgatgacacatggaaatcagtggcttcacgttttgcctgcaacgcagcggtcagcataagcaatgaaggtaagcatccctcactgacgattagcagtctggataaactggatgagccaccggcactgatacaattgaatcgtcgggtaagagaactgatccctccggttgatctgactgagctgttgcttgaaatagatgcccgaaccggttttacccgcgaattcagccacgtcagtgaatcaggtgctcgggcgcaggatctccaggtcagtctgtgcgcaacactgctggcagaagcctgcaatatagggcatgaacccctgataaagcataatattcccgcgcttactcgccatcgtctgagctgggttaaacaaaattatctcagggcagaaacgctggtcagcgctaatgcacggctggttgattttcagtccacgctgccgctcgcggggtactggggaggtggtgaggttgcctccgcagatggtatgcgttttgtcacaccggttaaaacggttaattccggaccaaatcgtaaatactttggttcaggacgcggtatcacctggtacaacttcgtctccgatcagtactccggtttccatggcattgtcgttcccggtacgcttcgtgattccatctttgtactggaagggcttctggagcagcagaccgggctgaatccggtagaaattatgacggacacggcaggatccagcgatatcatttttggcctgttctggttactgggctaccagttttcccctcgtctggccgatgcaggcggggcgatattctggcgggcagataaaacggcacattatggtgccctgaatgagctggcccggggatgtgttgaactgtcaaaaatagaatcccaatgggatgaaatgatgcgaatggcgggctcactgaagcttgggaccatccatgcatcagagcttattcgttcactgttgagaagtagccgaccatctggtctggctcaggcgattatggaagtgggccgggtcaacaagacgttgtatcttctcaactatatcgatgatgaggattaccggcgtcggatcctcactcagctcaaccggggagaaggacgccatgcagtggctcgagccatttgctacggacaacgtggtgaaattagaaaacgctaccgtgaagggcaggaagatcaactcggtgctctgggtctggtgaccaatgcggttgtgctgtggaacacactttacatgcaggaggcgttgtcacatcttcgcaaatcgggggaaacacctgaagaggagcatctggcaagattatcgccgctgatacatggccatataaatatgctggggcattatacgttttcgttaccggaagatattctgaagggcgagttaagaccattaaatttcaatacaaacaatgaattaacctcttag

SEQ ID NO: 439329 - DNA, 582 bp, Serratia marcescens
atggccaatatcaaagtcaccgtcgatgacaaggcggtaagccaacgtctgcagcagctgctgcaggtagtcgaaaagccccggccgctgatgctgcaggttgccgaaacgctccatgctcaaagcatggcgatgttcgagcagcagggttttcccgccaacagctggccctcactcaggcccagcaccatccgctcacgttcccgcgccggccactggccagggaaaatcctgcaggtgaccggccgcctggcggcatcggtcacgccggcctccggtgacgactttgcgcagattggctctaacctggtctacgccgccattcagcacctcggcggtaccatcaagcgccagggccaggtgcggctgcgcaccgaccgccagggtaacctgatgaagcgcggcaacctggcgacgttcgccaggcgcagccacaagcaagccgtcgcgcgcgccgtcaattacagcatcgtgatccgtccgcgtccgttcctgccggtgacggaaaatcagcagctcaacaagccggcctttgaggcggtgatgggcgtgctgaatgatgcctttatgaagtcccgctaa

SEQ ID NO: 439330 - DNA, 582 bp, Serratia marcescens
atggccaatatcaaagtcaccgtcgatgacaaggcggtaagccaacgtctgcagcagctgctgcaggtggtcgagaagccccgaccgctgatgctgcgtgttgccgaaacgctccatgcccaaagcatggcgatgttcgagcagcagggttttccggccaacagctggccctcactcaagcccagcaccatccgctcacgttcccgcgccggccactggccagggaaaatcctgcaggtgaccggccgcctggcggcatcggtcacgccggcatccggtgacgatttcgcgcagattggctctaaccttgtgtacgccgccattcagcacctcggcggcaccatcaagcgccagggccaggtgcggctgcgcaccgaccgccagggcaatctgatgaagcgcggcaacctggcgacgttcgccaggcgcagccataagcaagccgtcgcgcgcgccgtcaattacagcatcgtgatccgcccgcgtccgttcctgccggtgacggataatcagcagctcaacaagccgacctttgaggcggtgatgggcgtgttgaatgatgcctttatgaagtcccgctaa

SEQ ID NO: 439331 - DNA, 1128 bp, Serratia marcescens
atgcaggcagtggatcatgcgcacgcattcggctttgccaatctggcgcgcctggatattgcccaggatttggtgaacgggttacgcgaaggcctggccgccggccagacgccggaatggttcgtcaagaatctggagccggtactgcgtaaaaagggttggtggggcagcgaggagaaaatcgacaccgataccggcgaaatcaccacccgtcagctcggcaacccggcccggctcaataccatctaccgcaccaacacccaggcggcctatatgtcggcgcgccatgaatccatgctggctaacgcagaaaaccgcccgtactggcggtatgtggctgttatggatgcaaagacccgtcccagccatgcccggctgcataaccgcgtcttccattacctcgatccgatttggcagtacatctttccgccgaacggttttaactgccgctgccgcgttgaggcactgaccgagcgagaagtgaagcaatggggttatgttatttcgcgcaccgacagtgaagttgtgcagcaggtgatgaccggcgaagacgagaacgggcgtccaaccttcaccccggtgaacggtgtgcggttcagtggcccggatggccaggctgtgaccttcttcccggacgtgggctttgatgtcaaccccggcaaagaggtgtggaaagccaatctggacaagtacgatgttgagctgtcgcgcccctatgtcagcgcgggattggccggcccggagttgactcatatgctgagcgatgtagctctaggtaaccacaccggcgagatactggccgccggcgtgctggatgccggcgagatggcgacgctgggcaccgccggacgtaccgcctggctggcagagtaccagcttgccgcccaggccggtgccggcacgttgccgactcagcagcaatgggccggcgttcagacggttatcgagtcatccaccgtcgcggtgcgtgccggcgagctgctgcacctgttccgccagctcgatgaggggcaatggtggcaggcgacgctggacgcgggcctggtggtcaacacctttgcgcctgtgcaggcgtcaaccctcgatgccacaatccgccgtggcacggtcttgaaggatgcacgctga

SEQ ID NO: 439332 - DNA, 297 bp, Serratia marcescens
atgctgtcggaggtgccggtgcctgggccggttacctggccaccggtcgccgccgccacgctggcagccgcacccaggccggaggacgcgctgccggcggcgctggcggacgcaatggccgaggccagcgttgccgcgccggtcgtgaatgccgtcgtcaacgccgtggtgagtgccgtgatgccggtggtcagcgccgtggtgaacccgcccgtcagcgccgtgctaccggcagtgattgaggttcccatggcggtggcccccgccgtggaagcggtggtgatggccgtcgcgtag

SEQ ID NO: 439333 - DNA, 768 bp, Serratia marcescens
gtggtatttgaattaataatgcgaaaaggtagcgaacgactttgggatatggcagaacgttgtctctattatacctatcatcatgagctcgacagagtttccccatggttaaataagattgtatctgaaggtattaaaggcggattgcaagcgtggggaagaatatctgcattggctgtattgtcagaaaaaatagaaagtcgtgattttatcaaacaattaaaagaattaagcgatagtgatgcatgggaaggtgctgtcgatgtttggacacatcgtgagaattttcaacggcatcaggatttatgtcttgctggtttggatgctgcgttaagtgatgataatcaatattcctcagaattaatagcgtcaatgggtggtatttttagagggaaagagccggttattattttacccatgcaagtgttagagcgttatttttcattagtatttacgagttcagagtcatcgaaaattgatttgttcgattttggctcgtggttaaatattgtttcatgcatagaaccattgtatgcattgagggctacggagatttatcttgaatatgctcgtacaacaaaagtctatttacatgattacaataataatttaatgcagctattgactcgtttatttgcacaagcagaagagcaggaagaatcggatggcggagaaatgctatatcgagtggttgttttgcaagacactatgttggccttgggtgttgatggggtgagtacatggttagaggccgctgagagagcataa

SEQ ID NO: 439334 - DNA, 1035 bp, Serratia marcescens
atggccatctgcgccatgatgtgcggttttgatacttggagcgagattaccttgtttgctcaagagcgagagccatggttccggcgctggttgagcttgcctggcggcattccatcacacgacacattcaaccgcatttttgccactctgcctcccgccagtctgaaatccatttttcaagcgtggatcggcgacatcatgggcgatgataagctggttggccaactagcggttgatggtaaagctcttcgtgctaccgctaaagggcgaggtgccaacgctgttcatatggtcaatgtctggtcaactgagctggggatgtgtgttggccagcaaaaagtcgctgacaaatctaacgagatcacggcaatacctgagctactccaacttcttgaattaaaagggtgtttagtcagtattgatgcgatgggcacacaggtaaaaatcgccgacaccatcctcaaaaagtcgggtgattacctgcttgcagtgaaagacaaccaacctagcctcaatactgaagtaaaagaacagttccaagcgtattgggataagaatgaaaccgatgtttcggggcacggctttactgaacaatttgactcagaacatgggcgaaaagagcatcgacgttgttgggttctgatggttgatgaaagcatgccagtttgccagcagtggaaagcgaagacgatcatagccgtgcaggctgagcgaattgaaaatggcaaaggctatgatttcgtgagattttatataagtagccgagcgttggatgccacctcagcgctgaaggcaacccgagcgcactggtcggtagaaaatctgctgcactggactttagatattgcgttcggagaggatcaacttcaggccagagcgggcttcgctggggaaaacttagcggtcatcaggcagtggatactgaacatgctgaagcaaaacaaatcacgtaatctaagcatggccaacaagcgcaggctctgctgtctgaatgaacaatatttgttcgaatgtatggggttgttcaaagtataa

SEQ ID NO: 439335 - DNA, 882 bp, Serratia marcescens
atgctcaacgacgacaagcgcgccgaggaacaggcggccgagctgggccttgatcttccccaggacaagctgccgtcttacaagttctacctggcgcatcaggtgctgatggatgatggcgcggtcaccagctggccggcggtgcgtaccctctactggttgatgcgccagcgcgccaagaacggcaaggcatttgccaccgaaatgcagggcgacccgcgcacggacgaagaccggacgtttatcaacatccagttctttacccagcgctggcgcgactggctgattttcggtgcctgtgacccctctatgggccagggtgagaccagcgacccctcggcaattcttgtgggcggctgggacaagcagcgcagccggctgcatgtgatggaagcggagatcaagcgccgtgtaccgtccaaactggaagccgacctgatagcgatgcagcggcaattcaggtgcctggccatcgggtttgagaacaacaacgcctacgagcactcgcgttcgacattcatcaaaaatgcgctgcgccagagcgtggcgctgccgctcgtgggtgtgacggccaaagtaccgctggaagtgcgcgtcgaagggctggagccgtacatcaacgaccagctcaacccctctattttgttcaatccaggtctgacgctgttgctgtcggagctggaaacctggccagagccgcagaccggtcaccactatgatgggctgtcggcgctgcagctactttggatgattgccgtctcccgcggtgcgggttcgttcgcctgggagccgataccgcgccgcgaggcgtcccggtacagcggcgatcattttcttgatgatgacgacgagccggactacggcggtcgcggtttatggtga

SEQ ID NO: 439336 - DNA, 801 bp, Serratia marcescens
atggctaccaaagccgtgtcactctttgccatttctatccggctagcctgcaacatcttcaaggtcagcgaaggctgttatcgctatcaacccatgctcgccgatgaaaaccagcttattgcggattggttgctgcgtatcaccaacagccagcggaactggggctttggcctctgcttcctctacctgcgtaacgtcaaagggtttgcttggaaccacaagcgggtctaccggatctatcgggagcttgaactgaacttgcgcatcaagcccaagaagcgactggtacgtgaaaagccgcaggctctggccgtacctgcccagcctaaccactgctggtcgatggattttatgcacgatcaactgagcgatggtcggtcagtgcgactgtttaatgtgatcgatgattttaaccgcgaggcgctgtgcattgaggtcgatttttcattacccgcttcacgggtcaagcgcgcactggagcaggtgattgagtggcgtggcaaaccggcgatgatccggtgcgataatggaccagaatatatcagcgaagtgctcaaggcgtgggcggcgaaacaggagatcaccttggggtatatccaaccaggcaatccccagcagaacgcgtacatagagcggtttaacagaacggtacgttacgattggttggctcatcatctgtttggcacactggaggagctccaagagtttgcaacacaatggctgtgggtttataaccatgagcggcccaatatggcgctggatggttataccccaaagcagcatctgacaaaggctgcatga

SEQ ID NO: 439337 - DNA, 300 bp, Serratia marcescens
ttggctctgctgcagctcgcgggagagtttgtcgccgagctgctgctgcgcctgcagctcgcgcagcgcttttgccatggcctgggcgtgctgttcggcctgttggcgcagcgtttcattcagcgcagacttatccgcaaccaactggccgatggtgttgtgggcttttgtcaggtcgccctgcagttgagcacggccggcagattgacccaggtaataggcaccaacgccaacgccgagcgccagcagataggagagaaaatgggtttgcaggtgattaagcaccagtctgagggttaa

SEQ ID NO: 439338 - DNA, 285 bp, Serratia marcescens
atgtccgcgctgataagaacgctgttgcgccgcctgggcgaactcatcaccaatccggccaccggccgcttgtccacctcggacaccatggtattgggtgcgttcctggtggcgtcgttcgtgattgtctgggttacggtgaccggtcacttggaagagtggcacctggccgcctatctgggcgcgttcgttttccagtctcaggcgtcgaagttcgtcgccatcaagcgagacaaggccaaactggaggtgggcgatgctgttaaccctcagactggtgcttaa

SEQ ID NO: 439339 - DNA, 204 bp, Serratia marcescens; identical to SEQ ID NO: 273119

SEQ ID NO: 439340 - DNA, 234 bp, Serratia marcescens
atgtggtgggctgttgcgaaattcgttgcggtaattgtggcgtcctacgtgctgaatacggcgttggctccgcgtcagaagagtaacacgccggaagcggcgacagaggatgactggaacctgcctcaaccgaccgaaggcacgccgcaatgcatcttctttggcgattgctggagcgaggactggtttgttcttgcctatggcaattatcgctatgaagccattaagaaataa

SEQ ID NO: 439341 - DNA, 198 bp, Serratia marcescens
atgaagtaccccaagggcagcgtggttaagttgccgactcggccaggtcggggcgttgttctcaacgtgttcccaatgcaggatgagcgatttcgttacggcgtcgagtgggacagcggcgcttaccaggtctacgacgagaaagagatccagtgggcgactgttgaccgccccaaagtgtacgggagtttggtatga

SEQ ID NO: 439342 - DNA, 303 bp, Serratia marcescens
atggcgacgctgggcaccgccggacgtaccgcctggctggcagagtaccagcttgccgcccaggccggtgccggcacgttgccgactcagcagcaatgggccggcgttcagacggttatcgagtcatccaccgtcgcggtgcgtgccggcgagctgctgcacctgttccggcagcttgatgaggggcaatggtggctggcgacgctggatgcgggtctggtggtgaacagctttgcgcctgtgaaggcgtcaaccctcgattcaacaatacgccgtggcacggtcttgaaggatgcacgctga

SEQ ID NO: 439343 - DNA, 234 bp, Serratia marcescens
gtggacattaagcccgaagaccgcgtgaagctgctggccagcctgtcggatgcgttcaacaaagctgtggccagcagcaagcgggccatgccggaagtgtcccgcctggccatcgcgctggaagtgatccagctgctggccgcgtacatcaaagacaatcacccccagcagttgcagccgttcggcgacctgctggaggggttcggcaaagagatagagaggatttatggctag

SEQ ID NO: 439344 - DNA, 198 bp, Serratia marcescens
atgaccaggcgaattgtactgaccggcccgcacacccatcagggcgtggcgcttgctgccggcaccgagattgaagtggacgacgcaacggcgcagtggctgattgagcacgccggcgcgaaaaaagcgggcgtgaaccgcaaaatcaaaaccgagaccggctccgccgactcaccgacccaggaacaggaacaatga

SEQ ID NO: 439345 - DNA, 207 bp, Serratia marcescens
atgctggcgaccgaacggcgcgacctgggcattgatgatgacgacaagtgggacattttggacggcattgcgccaactgatgagttcgccatccatccacttaaccctcgccaggcgcgccaattgttcattgcccgatttaatgagctgtggcgcatccgggttgagcaacgccggcaagagatgctgggagattcaacaccatga

SEQ ID NO: 439346 - DNA, 1368 bp, Serratia marcescens
atgttgggcgacaatgcacacagtgatgttgctatgtcgacagccagggggctgtttgcgcatcatttgcctgtggatcaacaccgatatgatgagagcctactggcggatcgtgagcgccttgcggtggagaacaaagttaatcgggtgatcgctgaagataatttcagctttaactgggtaagtagtgcaatttatttattcacgcgtcggctctattggtctttggtgataaaccaagctaaaaacgtttatttttttgcaagggaaggcgagtttcttcaaaaggcgtttgacaaatttcaagctagtttgccgaaaaatttttcgcgtattactagtcattatatgtatgtgtcgcgtcgagcaacctacttgccttcattggggcctatgagtggcagcacattcaacaagttattatatcagtatggttcatgtagcctggctgcctttttgaaaagcattaatctcgatgattatgtatctgagcttaaagtgcgttttcctcaggtggattttgaagagcagcatttgaatattgctggattgccggcgttttctgcgttaatagatgatgaattctttaaggctatctatgaacgcgagcgcaaagaacagaatatctatctcaatgactactgtgactcgttgatggcagaaaaacatgatgaatgggttcatgttgttgatgtcggctggaagggtagtattcaagataatttggtaaaagcgacccagcgcaatatgtctggttactatttcggtatattggatggggctgaaacccataagaacaatattaaagaggggctgctgtttgatcatcagtgggggcagcgccttggtgatgatatgtttaacgagttccgtgcaggttttgaagtttttatgggggcctcgcatggcagcctaaagagatatggtgttgacatcgataattttgttttcgaccataacgactcagagctcgctttcttctatgagcaaatagcgccattccaagagcgtgcattgcatcaattcaatggtttttcaaaaatagagcgtgtttattcgctatctgatcatgagatcagcaaagcggttaaaaagttttactttcgtggcgtgatgttgccgagtcgggttgaacgtgaaaaattttcgttgatcaaacactatgagaattttggcgtattcaactttagctcctttgggcagagtaaacgttcccccctgtcttattttaagcgcttggtgagaaatcctcgacacaccattggttctgcttggtggaaacctctggatttccatgcaaatggcgtatggtatttgaaatatccttattttttggtgaaaaaaataaagtttaaaggggctaaataa

SEQ ID NO: 439347 - DNA, 855 bp, Serratia marcescens
atgaccgtagcagtaaataacgtagtaaccctgaataccgatattcaaaacggcaacgtcgcagcattgaacaccgttatgatgttgggatcatacaagggtgttaagttcacccttgaaatgaaaatgacttacaacctgatcctgagcttcacccgaaccggcaaacgtgccgagtttagtcagtcttaccttgcggcttatttgtcttgctctttgagaaccgccgccaccgtgattgccactctgaaaacactgggccttatttcagccgatccagaaaaccggggaaggggagatgtagacttgctagaggcgttgccaatattggcggatgacgcgaagctgtccgaggtgaagagggtaaataatcgtaagtctaaaggggtaaaaaatgaatcaggtcctactgttggaaataaagcacaaagcgttaagccttcaaatagcccaacagagagcacgcctgagaatacacacgacgctcgccctgttgggattgacgatagtcacagcgccgagcctgttaacactgaacaacctgcacagccttcacagcttcctcctgtaatcgttgaggaacaacctgcacagccagaagagccagaacagccagctgaggcagaggaagagttagaggaagaagaggaagagccagacttcaactcatacgccgctatggcggcccctgtggctctctctggatgggtgacaacccacaacgccaccgtagaactgaaagctgcctacgaggcgcacaggaacacctacggcgaatcccacagcatcccgagctatgcacatcacaccccgagttactcaacggctgaatatgacgccggggaagcattttaa

SEQ ID NO: 439348 - DNA, 1011 bp, Serratia marcescens
atgccaaaacaagcatttgaaaagctggatatggtaaccccatatatggaccgtcagatcacgggcaacctgttgactgatttgggcctgttcgaccgtgaaacctcgcagactgcaaaggttgaggttgattacctgttgggcgaacagtccaaactgctgaacaccacagagcgctacggcagtgacctgaatgacgtttcccgcgaccgcgccaaaaacttcactgttgagctgactcacgtagccacaagtgggaagctgaatgccagtgatttccaaggtcatcgcgcctttggtacagaccgcgaaacaaccgcgcttgagctgatcgcagctgagggggatcggcagttcgaatcttttgcccgaacccgcgaaaagatgttcgctcaagcgctgtttgaacacaaagtcgtggactcccacagtaacgagggcctgattgactatgccgacgtgttcgacaagcaacagggcaatgaaaccctgaagactgcaccgggtgaaatcgctcttgagcagctggacgcctttaagcgccggatccgccgtctgatgggtgcatcaacccgaaacatgccgggattcatccttgtggcagacgacgatctgtacagcgctatcaagtgggactccgcaaccctgtccctgctgaaagacggcttggtttctcctaacatgttgttcaacaacaaagagaaaactccgggttatgaatggtttactgttaacgggttgaccgtggtgcaagcaaataaccccgactacgcgatcggcgagggagaaggcttcttgttcccaatgactcaccgcagcgtcggcagctatgcccgcaatatcgtaggccctgcaagccgaaacttcgatcaagcggcaagcggtcaggttcgcgacttctacgcttacgtactcgaggataagctgaacaatccagaggtttacagcgagttcagcttgctgccggtcctgtaccgcccggacttcgtgagcaaaatcacgctgggttaa

SEQ ID NO: 439349 - DNA, 792 bp, Serratia marcescens
atgagcactgtgattcgtctgaacggggttactctgccgggtacaggatatttgcatatttcacaatttttggaaatcttcgtatctgtcactgatggattgaagggcatgtattcgttcaccgaaagcgaagaaaaatcgttgattaattacgctggcggccagaatctcattaaatacggaaaccctgtctttactcctgacggaattaaagtttcacggcaaaattattttgacactggaattatgcctagtgggaacggatttacacacgttattgttgctatacctaaaaaagatattccggtaggcgaaggggttttcatcatcagtaactatttcaaaccaggtggaacagggaacggaggcgaaaattcagcgtatgcgctcaccgagatcgggaacgctcgctggcgaaactatgttcaagtgaacagtgccggcgtggtttacgccgatatgagtgtttctgcattatcagacaccgaaccagccatttggggaggtgtgacgtctattggtagtggcagcaccgggggaaataaggtgttttatggattcaataataatctcgctattgggactgcgggcaacgtgtcaacgataaacattgctgggcaaggaacgaagttgatcggcggccaccgtggccccgccgacttcttcacgcttgagagcaactatgttcaagctgtgttgatctacgaccgggcgttatctaatgacgagttaaatcaggtttatcacgatttgcgccaatacggcgcagggcgggggatcgctgggctgtaa

SEQ ID NO: 439350 - DNA, 1836 bp, Serratia marcescens
atgtcatctgaaggattgccagttgatggcgtcgtcggcacagacattgtgctgggagctcgcagtacacaacaagcaacagacgaagcaaagagcagcctatctgcggatagcgccgctcagtcggctgatgccgcgtttaagtttagtcgtgaagcgaaagcagcagcggtaggggtatctgacgatgcagaccgcgcagaggcagctgcagaaaacgcccagaacatcgcagacgccaacacatatcacatcacaccatcagatcctgatggtacaatcgcagggatagcaggaactgaatcagggaaatattttcgtgttgctcaggggataagtagtgatacggcattcatttattatcttaatgataacggtgttgctattcctgtgtctgcattaacaggcgaagctgcgatacagagaatgtcaatggaagttgattcagttaagcgcatgacaggggaaataacccccaagcaaaatattgtaccgatcgcgtatgatgatgcagggaatatacctatttggcttattgatggtgatttggacgcaaagggagtttcagaccaattcgcctcaaagctggacgggcgagtaattgctaagggattagatgagggggagtataaaaacactctaacgccgctggcgcaggatgacgccggtaatgttcctgtttggttggataatgggaatcttgacgctaaggggtttggcccaaaacttcaacagaaaatccaagaaacaaacgttgatgcattccagccacgagaagcgccaatcggttcaacgctgccgatttcgaccgatgggcggacgctttacagtactgctgcgttgatttcgaaaataattcacggcgaaagtaagcaacttaaaatcctgatgactggggactcatggtgtgagtatgtagcgatccctcaagccatatttgatctatgtcagcgtgattattctgcggcatggtcgtcttacatttcagttaacggtcagtttatgttgaccggtacatcattcactaagtcgccaggttggacgatgtatgacgcatcgctcaaaccaaattggccgccagtgaatggcagcggccctgacggtcagtcagcgacaactaccgccactgatcagactatgagcctgactgcgagctgcgatgaaatacgcctactgcaccaggacttaagcggagcgtttcgctatcgcttagacggcggtgcgtggactaccattactgggagcaacacggggcaatcgctcataaccaagacatcggtttcaacattgggcgttcacacgctcgaaattgataccactgtgaatacgggtcttgtaggaattaacgggttttactgcccgtcaaaaaccaaggctggtgttgaggttatcaaggtgggtaatgccggcattacaggtgatgggttagataactttaaggataacattcctcagttttcaaatctgataaaacctgacttgatgatatttattcttggcactaacgacttccgaaatggcagaactgttgagtcatttaaagctggcttacggaatcacatcaatgcctggcgctctagcaatccaaatatgggatgcgtgcttgtaattcctgctcgttgtagtgcaaacgggccaaatccatctaccgtctatcgagacgcgtcggctgaggttgcattcgaatttggcgtggagtggtacaacttccatgacgattggtctacatgggcagtaatgaacacgttcggtgtgtgggtcgatggtctgcatttaaatgatgcaggcgctacggcttttgctaaaacaatcaatcatcgatttttggctaaataa

SEQ ID NO: 439351 - DNA, 264 bp, Serratia marcescens
atgagactgataaacgaatacaccccacccgctccggaagatttggagctgctgaaattagatctgggttacaccggtaatcaaatggcagatatcgcaggagttgccagcaacagccagtggcgaaaatataccggtggggcagaaccgcgatccatgtcactgcatatcctcttcttcatggctgctcaactttccctgtcagaggatgatttaaaccgcgtgttgaagaaaatgcaggaaatcggagctggaataaaataa

SEQ ID NO: 439352 - DNA, 1017 bp, Serratia marcescens
atgggttactttagatttatacttgctgccttggtgtgctctaatcatctatggataatcggtggcgtgggaagatatgctgttttctcattctatatcctcagtggttatcttatgactacagttgtatgtgagcgctacggaacaagttttgatggcataaaaagatatgctgtcaaccgactacttcgaatatatcctatttatttattggtgtttttccttacaattatatctataattattttgggtgctgaaaatacgcatgtgatagaccccaatctatctataccctcgacaattaaaggttggcttatgaacacaaccttaattggacttaactttaacgttcaagaaagaacaataccgccgagctggactttatttatagagttgtttttttatgcagtaattccatttgcaatccgtctaggttcaaaattcatcactttctgggtaatcatttctgttatttaccatgtatattttttgcatacagctacagatgccggactggattggaactcaagatacgggactatatttgccggttcacttggcttttcccttggatgcgcagcaagattcttacccatgagctggttgaggtttaaaggcgctgttgttatatcaatacttgggttggtgcttagctacgcagtacctacatacttcatgttggctgggtatactgataaagattggagatatatctcaacgtacacattttacctttcaattgctttctctttgctatttattgttaactcaataaacattaatcaatcgtctttcggaaggttgcttggtgagttatcttatcctctttaccttgtccacatacctgctggattcattttggttaatatgttaaccattcaaccgagaacattttacacctttgctttatgctttgttttttctattgccatttcactatatcttcatttaatagatcgcaagataaataaggtaagagacaaagttaggcctattgctaaaaaatcgcccgcttaa

SEQ ID NO: 439353 - DNA, 924 bp, Serratia marcescens
atggctaagaacgaatttttacccttcggcacagcggcaaacgccaacgttttaccgaatgctgactatcaggcgctaccggcgcgcgcgtcgggcttcggttcgggcgtagcgaagtccgaggaactcaactccgtatggcgccagggctcgacaatggccgctgtgctggggcagtttatcgccgataaaaccggtcaggatgtgctggacgatggcgatgtgaatggcttgctggataagctcaaggtggcgatgggcggctgcctgatcggcattcagcgcttcaccgcatctggcacctatacgccaacacctggaacgagatacgtgattgtcgaggcagtgggtggcggcggtggcggcggtggatgctcatcaccaggaggagaaagtatatcctgtgcggctggtggtaactctggttcctatgggaaaggtcgttatgcagtcagctcaaatattgcagtgactatcggtaacggcggagatggtggcattgcatcgagcagcagctctggtgcaacgattggttcggcaggtggggaaactaagtttggaacattgctaatctgcccaggtggaaattctggcctggcagcgaactcttttcaaatcccaaatatatgccaatcaatacctacgaaaagcccaagcgtaactggagctaacatcagttctgttgatggagaggctggtggaaatggattcgcgttaggtgcaggaatttcaggaaaggggggaggtaaccctttaggatcaggaggaagctcggcaggagttgctgggagcaactcggttaaaggttacgacgcaacaggttatggagctggtggcgggggggcatttgcagggcctggcgcgcaagggaagaatggagggaatggcgcgcccggactggttattgtgtgggagctttcgtaa

SEQ ID NO: 439354 - DNA, 336 bp, Serratia marcescens
atgagccggccggacgttaaagcccgcgtgcaggaactgcgcaataacgctgcgctgttggtttcgttcaacgccggccacctggcggagctgtcgtataaatctgcgcagttagcgctgcagaataaaaaatttggtcaggtcgcgccgaacgtgaagaacgccgcgcagctgaccggcatcgacatgagcacgaataaaaccgaggtgaatgtcgatctggccggtttgagctacggcaaagtttgcatcgtgaccccggcgaactgcccggcggacgtgtgggctgctcacatggaaaagctgcgcgagggaaagccgacggcccagtcataa

SEQ ID NO: 439355 - DNA, 546 bp, Serratia marcescens
atggacgctgatttaatttcttatgagtcgatgctggctacacgagagtctgcagattgggcgttttggaacatggtagcaacgtgggggacgctggcagtatctactgcgacactggtattagcttgcttggctttgcaatcatggaaaagacaagaggaattaaaagtgaagcaagcttttaaggcttcattaattcaacttagaaatcttcttatttatatgccatataaaattgatacagagatgttgagaattgggcgtgagatattaaaagggaagcttaaactattcgggtcgggtttaactgatgccgaatttgcacgtcttaaggactatgctcaggaattcttgtatctcgaagaaggaatgaaaaattgttgggattgctgggtatcaacagagaatctcttgaatggtacggaaattagccagctatggatgaaaatccataaagtgcataatgaatacgtcgaaggagtagggagtaaagatgaagttataaaaaatataatctctatgctagagaaaaaattcgtattctaa

SEQ ID NO: 439356 - DNA, 387 bp, Serratia marcescens
atgaacggctggatgagcaagatcgccggcggcagcctggtgcttctgttgatggtggctatctttcttggcggttacagctcgctgttgtcgcaccggttggagctggcactccagcaggttgcagagcagaaaaagacgctggcgcagcagacaggactgatcaccacactgcgcgcggatgacgcccgtaatcgcgcaatgatggccgaacagcaacggagagagcagcagctgcgccagcagcacgacaacgcccaaaggaaataccgtgaagcgattaaaaacgatccctgcgctggtcagcctctgcctgccgctgtgcttgagctcttgcgcccgtccacaggcacagcccccggagccgttaatcctccttccccctga

SEQ ID NO: 439357 - DNA, 222 bp, Serratia marcescens
atggacaaatatagctcccagctctcgtactgggttgcatcacttctggccgctgctggcgccatgacattgcaagattgggctgtgttggtagggatcctcgttgccgtttttacggcgggggtaaactggtactacaaacgcaaattggtcaataagctcactgctgtcggttatgacaaagagcacgcgaaagcagcctataaagcgatgagcgagtga

SEQ ID NO: 439358 - DNA, 1614 bp, Serratia marcescens
atgttaactagtatcggtgttaaaaaccttaggagcttttcagagcatacgtcgatagagcttaaacctataaccgtgttaattggaaagaacagcagcgggaaaagctcattaattcgtttactacctcttttacgacaatcgtttgaaacaaccacaacaggtcccatactttggtatggaaatcttgtcgattatggtgacttcaatcaagccatctcaaaatccaatttagacaatgagagaattgaatttagctttggcattacatgtgatacatcaaaaagtttaagaagatataagaaaagtgttaacgataaattcccacctctaaatttcaatgtaagtctcatagtcacagagataaataaaaaaacaacaacagaatcaattggttttactattgataatacaaaaatatctgttacaactgatttttctgacagtagcgccactataacaattgaaaatgaaagcattcatttaaaaacgaagcatatgcttgatgctattttagatgcgaaattttttccatcacttttttggtctgaaagttcagaaagcaccaaacaaccagaaagtattgactggtctgattttgaatcatttattttacttgcagattttgggcccctaggccgtcgaagaaaggctgaaagacaacatcagttaaagattagtcaatcagctgcggaggcagttcaagaatacttttatcataatgccaataacgataatatagccagccaactgtcgtccatcagtgcatacgccaaagacagactcgaacatggtctgagagctattttcagtaagcatcgtaggtttattgataatcttgataacccagccataaaaaaagaaataatagatactttacatgccttcatacttctaaaggactacaattctcttgcgtcaatgttgaacgaaagtttgaaatcatctttttctaccgtaaaatatttagggccaatacgagcaaatacagagagatattatagatttcaagattttcaagtcgaagagatggatcatacaggttctaattcagcaatgattttgaattcattctctgatcaagaaaagcatgaattccagtcctggactcttgacaactttggatttatagtttcagtaaatgttgttggctcacactacgccatacaaataaaaacagacaatgatagtgatgagtataatattcgcgatatgggattcggatactctcaaatccttcctgttatcatgtcaacatggctcgagatgaaaaatattgaaagtaatgacgaggaagttttaattgtaatagaacaacctgaacttcatctgcatccagcataccaagcaaatgttgcaaaactttttgcaaaagtaatatctgcagcaagaaaaaacagtaaaaacatcaaaataatatttgaaacacatagtcaatcgatgatcgatgcattaggggaatcaatagaaaacaaaactataggtaaagatgatgtttcagttattgttttcgaaaaaacaaaggaatgtggcacctcagcgacacaaacattttttgatgatgagggttatttcataaattggcctgttggttttttctctggtaatcaatga

SEQ ID NO: 439359 - DNA, 1104 bp, Serratia marcescens
atgataatagaaattataaatactgagggggttaacctccatgcggagcctgttcactcagccatttcaaatttatttacctcattcaaagaaggaaagcatatattaattgcatcatctgaattccttgaaaatataataaatgacgaaaaattcggaattctcattagaaattcggcgtcttcggcactagcaagattacgagaaaacagaagcctatttaacaaagttaattaccactgcaaaacagacctttccataccttattcgctccctcataaaaaaaatggtgagggattctttacagttggatgcaacttttttcatgatagtttatcaacacagtgcgctaggctactttgcgaagatattcgtgactatcagttatacactataattgccagtcactttaaaaaaacacaaaacctagataatatgcatatttccctagaaataataaatggtggaggcgcaaacaccaaattaaattttgataaaatcaccgccaaaggattactctgcctttgcatattagatagtgacaaaaaacatcctagtgccggttacggagatacatccaagaagttcgcaggaaacactcctccagcgcattcaaaacatttaattttagactctcatgaaatcgagtcacttatccccatgaatacaataaaaatagcattagaggagaaaaagctagaagagaaatataacaaatcctttgattctctagactcaatagtaaaattcaaccctgaggccaaaaaatactttgaccataaagaaggcctcacagtaaacaatgcagttattcttgatgaaagataccaaagaaatttttggactgattgtatcaaaaaggcacctggtttaaaacggaagaaatgcctgacgactttagaatgcacatgtaaaaaaccatgctttgcaataaatggctttggcaatggttttttaggtgccgtgttacctgtaatcgaaaaaacctcatttcataaactagatcgacagcttaccgaacaaataaaaaaggagtggaccactattggtgttagtttatttagctgggggtgttcctcgggtaaaaaaattcgttcttcttga

SEQ ID NO: 439360 - DNA, 225 bp, Serratia marcescens
atgcaagatttagaaagagaaatttatgatgttctcgcaaaatctgaagccacggtagggctcggctcgtctgaaactgcgaacaaactgatcgaggtagcgcgaccgttttacaagaaagccgatcacaccggtaaatacagcatcataaacaggctcaacgcaatgagaaaggagccagggattcccttcccggaaaacctcagtgaagtgctaggaaattaa

SEQ ID NO: 439361 - DNA, 537 bp, Serratia marcescens
atgacaaaacctaagcgcagaacaagagaaataaataaaacgagattgatagtgtgtgagggggtctctgacaagaaattcttggagagagtaaagagtttaatcgcgacaagagatggtgggttgcgtgtatccattgattcctctggtggtggagggcctaagggggttttaaatactgtgttgaatacgcaaggactatatgatactaagtacatgcttgttgactctgatatacctataacacaagcgattaaaaagacctgtgataaaagagatataaaaattgtgcaatcaataccattttgcttggaaggaatgttattgaaggcaagtgggtttaagcaggaaatcaggagctctaaacatgctaaggaagaaatgagcaagcgctatgggcttggtgttaccattacagaacagtggtatgaagaatatttgactaaagaattcttattgtcagtcattgaagataaaaccaatcttgcttcagacgtttttcgcagtataaggggaatgtttctcttaaacccgtaa

SEQ ID NO: 439362 - DNA, 1284 bp, Serratia marcescens
atggctactgcaattctcagatatgaagtaaaaaacttcggtagttttgggagtgatgggggagttgttgaattgacaacgacctctagagatccccataaagagttatggagggatgtgtgtggacaaaatgtgaacatgatcacagctataatgggagccaatgcttcgggtaaaacaactttactgaagccaattccttttctgacatggttattttggaaaattccagaaagactatctgaagatatgtatcttccggttaatcgtggtcttcaaaaaccatgcgagatcaaagtagacttcattcttgatgatcatttttataaatatgagctttccgcttgttcgagttttatctttaaagaaagtctatacaagaaaaacgatagcaataaatttgtttatttattcaagagggatgttgacatgaagtctcttgatgaatttggcaaaaaggtagaggggatacaaaaaaaaccttctaagaaagggctggatgaatgcttgaaaaccattagatacacttataaggaaaaaagtgatttattccctttgggactggctgaaggtaaaagaacaccctgtaataccagtattatttcttcggctcgcagagtaggggttgatgttgcagataatatcgccatttatatggcttctaaatccaatgttagtttttttgggcgtaatcatcctgaatatagtgatatagaggatgcatccgaattcttttatgactcgcccgagtctatgaaaatggtaacaagtatattaaagaaatgggacctgggtcttgatgatatcaggatagagaaggaggaagtcaaaggagaagatgggaaggtaaaagagagttatcttctcttcggtatccatacgttagaaaatggaacgaagtttgagttgccattctatcttgagtctgcagggacccagagcgcatatataagattgtttgatattataactgcactcgctactggagggcattgttttatcgatgagttaggtgatgatttacatcctcatatggtcaagccaatattggaactgtttagtagtcatgaaagcaatccacttggcgctcagttagtttttgcttgccataaaccagagttgataaattatcttgggaagaatcgtgttattatttgcgagaaaaatcataatattagcgagtgtttccgtttggatgagttccccgcgtcggaggctcgagccgatgataatttagccgcgaaatatttagcgggtgcctttggtggagttcctgatttatga

SEQ ID NO: 439363 - DNA, 795 bp, Serratia marcescens
atgactaactttatacaaaatccaatcaaggggattttaaaaggaaagtggatttatattatccccttatcattaattatttttttgccagttattttttatatatttaaattcttctcacttccattttctgataaaactcaagactggactaattttgcttcatacctaggtggtatgtatagtgccgctttcggattggccagcaccataatattatgtctaacgctttatttcactataagacataatcaagctcaattggagcaactaaaaaaagattcatttttaaatcttttcataagttacatccaagcacttaatgataaacttgataaaagaaaaaataaaatatacagcataggcacaaatgattcagcaataatttccgtatcggaagacatatatataagtgaacttagaaagagatataatataaattattctgtagaactccagaataaccccgcgaacacaccatcaccatttaaattagcatctgaaacacttacagatcttaaaataaagtatccacaagaaattacttctttccttaatgttctattgatgataggaaacactaaagataacgaactcaaggaagaattaatccgtctttttcattcattaacataccgcgatagaactttctggctcatcatgtatgcttaccatgcccttgatggagccaagctgataatcatgcagaacgcaacattgatcgcactagctgatggcctaacaggccagcaaactggcccctttctgccccctcaggactcaaatcatcaataa

SEQ ID NO: 439364 - DNA, 1257 bp, Serratia marcescens
atgagagccagtgaagtctttactcctgggagttttccagccattacctttgttgacgaccatttaaaggaaaaggaacagcagcttttagatgttttagaaacaggttcaatgctgatttccatatcaggcccatctaaatctggaaaaactgtttttgttgagaaattattaggcaaggaatcattgattcaggtaactggtgctggtatcacatctgctgaaggcctatggttgaaagttttcgatgtactaggaacacctataactaagagcaccacaacaggaaacacatcatcaataaacgcatcaggtaaagttagtggtcaagcaggcattatctttgccaaagcatcagcagaaggtaacatcggcggagcgatcgctcagcaaaacgctgaatcaaccagccaatctattgattacttacagcttcttattagtgaagtcgggggaactgacttcattatattcattgatgactttcattacataccaagggatgtacaatcagaattagcaaaacaaattaaagaggcaatcaggaatggatgtaaattcatatgtgcatcagtcccataccactccgatgatgtaataaaagggaaccctgacttatcaggtaggtttttctcaataaactttgactattggggaggcgaaattcttgagcagattgcaattaaagggttctccaagctaaacattgagtgtaacaaagatgttataaagaaaatggttgatgaatctgctggctcacctcagctcatgcaatacctttgtttaaactcttgttttgaacttggagcccgagaagttcaacaagttatcctgccattccccgacgatgcagccatactggatagcatatgtaagagaaccgtcctagccacggacttcagctcagttataaataaaatgttagatggtcctaaaactaggggttcagaaagaaaagtctatattatgaaggatggcagccaaggcgatgtatatagaatcctgataaaggccattgccctaagcccaccacagctaaattatcgataccatcaacttgtagaaaggataactaggatttgcacaaatgaaataccaagtgggtctagtataactagtgcctgcttgcactcatcaacacttgcaaataattcatctaacgaaaatgtaattgagtgggattctgaaaatgacgtactagatatcagagacccttatttgctattttttatccgttggtctgagtcaattcaataa

SEQ ID NO: 439365 - DNA, 543 bp, Serratia marcescens
atgatgagaaaaatagcactgcccctgacgctgctcggcgccgccatgctggcaccgccgctgcaggcggcggatgggaatattaatgtgactggcagagtcaccgaaagcagctgcgtgctggatgccagttctaaaaaccagaaggtgaataagggggtgcagagcgctaccattgcgacttggttagggggcgctggctatatctatgtgcagttggcggactgcccggacagcattagccaggtacgcatcaggtttgaagggacgttggctaatacccaaaaatactcaggaaaagtttttgccaccgataatagcgatcaacccgatgccgctaaaaatgtgggttttataattcaaaagtcaggggaagttgcatttcaaaatttgctgggggtaaatgagttcagcccagctattgaattgaaaaaaggggcggtgaatgagcttaaattcagtacgggatataccaccgataacaaaatgcctactgcaggggttgctcgtactcgcctacagtttagcctgatttacccatga

SEQ ID NO: 439366 - DNA, 525 bp, Serratia marcescens
atgaaaaatatcatcaaggggctgctgctggtggggggcggattggcctttagcgcttatgctgcagacggcagcgtggatatggaattaacgcttgctcatggcacctgcaatttaaccgcaggcagcaaaaatatgcaggtagcgctggggaatattgcccgtaccgagctgacatcaattggtgcgactagcaagccggttgattttaccgttgaagcaaccgactgtgccccaggcttggccgtatttttccgctttgatggcgttgctgccggccaaaataataaagcctttgcattaggcagtggctccgttgccgagggggttggggtacaggtggccgatgtttccccttacgaggagtatgtcaaaattcctaatgcaagttatgggtatggagttatcccaagaaatgatggttctttttctaaaccatttaatgcacgatatatcgctttaaccgataaggtaacacccggcacggcaaacgccaccgctcaactcaatctggtctatgactaa

SEQ ID NO: 439367 - DNA, 543 bp, Serratia marcescens
atgatgatagcaacagtgagaaaaagaatgccgctgctggcattattcagcgcagcaatgttatccccgccgctctacgcggcggatgggagtattaatgtgactgggcgggtggtggagaatgcctgtgtggtcgccgccgaatcgaagaatatcatggtggattttggtgagcaggcgggtaattcctcattgggcagccgtggctatgggcaaaccataaggcttctggattgtccttcgggggctaagcaggtgaagattagatttgaaggtaccggatacggctatgttttcgcccccgataatcaggggcagccgggagccgcacagaacgtagggttcgggatatacaatgcggattttgctgatattggagttaacggtgaatcgaagccttatgagcttaaaaacagcggttccggcagtgcgaatgatcttcattttggtgtgtcgatacgttggcttggcaagaaccagagccagcccatcccacttggtgaggcgacgggcactattcagttcagcattctttataactaa

SEQ ID NO: 439368 - DNA, 552 bp, Serratia marcescens
atgaataaagcaatcagaagaatcgttcagggcttgtcaacttgcctgattggcctggcctgtacggcacaaggtgcagacggcacgatcaaaactaaagtgaagtttattcaatttacctgcaatctgacggccgccagcaagaacatgagcgtaccgctgggggatattaaccgcagccagttggctaaaaccgggaacctgagttcgccggtgttgtttgaattaaaagcgaccggttgcccgagaacaagcaaaaatacttctgttgcagtgcgtttttcaggcacggcagcagcaggggatagtcaggcttttgctttggatcaagacagtgtggcgtcgggggtcgcagtgaagatagcgaatgagagctatgatggcgtttatgattatttcgttgggcctaatgtttattgggggaggagcttttatccaaactctgagggtgagctaaccatgaagtacgcggcgcagtatgtcgccctggatgatcacgttacccccggtacggccaacctgacgacccaaattgacttgtattacaattga

SEQ ID NO: 439369 - DNA, 246 bp, Serratia marcescens
atggatcaggcactgaatttttcactcagctatgcgcagctgacccgggaagcagaagatgcgattaaaaaatgcaatctgaaccagggcgggatgggttacaccctagagttgggtaaggcttctgtcattctgagtttctggtacggtctggcgctgcagggctatccgggcacaataatggatgaacgtgttgatgccgaccggctgcgcctgcatgtcctcatctataagagagaggagtga

SEQ ID NO: 439370 - DNA, 825 bp, Serratia marcescens
atgcccctcacctatgtctatgccgatcagggcagctatgaacctttggcgcgcatcgacggccacacgccggcccaagtattttacttccacacggcgccgaacggcgaaccggaaagcctgaccgacagcgacggaacgctgcgctggcagagtcacagcagcgcctggggccgcataaagtatgaggaaaatcagcaagatctggattattcccaaaacctgcgcctgcaggggcaatacctggatcgggaaacgggattgcactacaatttgttccgctattacgatccggatatcggcagatttacccagcacgatccgataggtttggccggcgggatcaacctgtaccaatacgcgccgaatccgctgggttgggtggatccttggggatggaagccacgatgcgcagcaaccaaagccaacgatcataatcaggcagcttttggtcgacaatggcaaggtcgaggtatctacaaaggacgagactcttggtcaaatatcatgttgaaagaaggtgacattgtttatggcggcgctccagggcaatctggtttttacttcaacaaggcgacgctagatgctgcaggtggcagtagagccaagctatgggaaagtttgcaggtgcttccacatgaaaaatttggttatagatctaaaatacaagcatatagagtaaaaagagaaacgattgcaggaacaggtaaagcgatatctcaagacccaacgagattcggcgaaggcggaggaactcaatttttcctttctaactataaaactgttcttgagccaattgataagccttttgaaattggattgtaa

SEQ ID NO: 439371 - DNA, 1839 bp, Serratia marcescens
atgaggacatggatagaaagcgaagcggatattcaagtccgtgcatgcatcgatggccatcgtagttttgcaatgatagccggcgcaggcgcgggcaagactagttcactggtagatgctcttggtcgggtccgggataatgaagggaatatccttagaaagcatggtcaacgcattgcttgtattacctttaccaagcgtgcggttgaggtcatcaagaaaagattggggtttgatgagttgtacctagtttcgactcttcatggatttctgtggggcttgattagccatttccacgaaaatattcgtcaagcgttatatgaaagccgtattccaaatcttatagacaaggctagggaagatgataacggtggtaacagcaaaaaggcacttaaagctcgcgcaaaaatagaacgactgacagaacagcttgcccttctcgaagcagtcaatcattttgactattctgacactagcttcagtgattacgaaaaaggacagattgggcatgatgatgtcatagaaattgcaacctacttgcttgaaaataatcaaacgcttagacggatcattggcctacgtttcccttacatcttcgtcgacgaagcacaggacacatttgagggaatcgtctcaggactcaatctcgtctgtgcgggtgatgaacttcctatgattggctattttggtgacccctggcagcagatttatgaccgaagtgccggtgattttgcgccaccagacaaaggtaaagtcatcaagaaagctgaaaattttcgctgttctaaaagcgttatccgacttctcaatgcttatcgtggggatgttgagcagtatgctgctggcgaaaatgctgaatgtgaaggtagtgttgaatttttgctaattaaagcagaagagccaacagaaccacgcaggcgctattcagaagaacagattgagcgggcgctagctcgtatggatgctgctgtcgaaaactggggttgggcaggtcgcgacgatgtcatgaagctcttcctggcacgtcaaatgatcgcgcgacggcttggcttcgctgatctcaatcgcctcttcactggagactatgcctcatcacgggctcaagatgcttttgaggaagggacccatttccttcttaaaccatttctttcgacgatttgccctctcataacagctcaaagccaaggtgacgatcgaaaaattattaatctacttcgtagagatagtcctgctttcgcgagcgatggattaaatgcggaaaagtcactgaaagtgatgattgagacttcgaggtctttggttgagcagttgcatgctttgtgggataccgagacgattggaacgatccttcacttttgcgtcgagatgcagataatccagccctcagaaaggttgagtgagcatcttgatcgtcctccacgtactgagcctttcaatgaggagcttcacagtttcgacaaaggagattggctcgcagactcattttttaaaatggccacagagggagcctcccgctatttcgaatatcttaacaacaataccgcctatagcactcaacatggagtgaagggcgaggaatatccaaaggtattggtcgtttatgatgatgtcgaagcagcatggaaccaatacagctttagtaaaaccctaactcctctcaccgctggtgaaccctctgatcggcaacgctctgtaactcagaagctcgtgtatgtctcgttttcccgtgctgaggaggatctacgtatagtacttttcacagctaatccagagggcgctcaagctgaactaattgaaagtaaactattgtcgcctgatcaaatacgaattatggcctga

SEQ ID NO: 439372 - DNA, 2106 bp, Serratia marcescens
atgaaagtaagtcgtgtagcgattcggaacttccgtcgattggaaaatgtgcagattgacattgaagagaaggagtccatttttgttggtcccaacaacagtggcaaaacttctgccactgcggtttttcgttgctttctgggggggcgagatttcaagatctacgacttttctgtcgcccggatagcagatttcgacacatttggattgaccggagatgagacgctcctccccaaaattagtcttgacctttggttcactatcgatcctgaaagcatcggttttggtagagttttcacattattgccaaatctttcggatttcacgagtgtagggattaggctgtcgtatgaggtctctgatgtaaggaagttatacgagaattacaacgctgcctatcctcccaaggaagatggaacgcgctctaagtcgctttcgcaatatctatctatcgacggaaatcttggccgacattttacggtttgttactactcactagacgagaagattcaggagggagcaccgtctgagatcttgtcgagttatcttgatcctgacgaaggcaaacgtcttcttaagcagctcatacgtgttgagttcgtggacgcgcagcgcaacattaacgatgacaacagcagtcgcagtaataggctctcttcggcatttgccaccttctaccaaaagaaccttgagcaggttgaccatgccgctgatgctcacagcgtaatcgatgcgaataacaaacagctgactgatcactatgcaaagcaatttgccccactgatcaatctcatcaagcgccttggtgtgccgtcaattaatgatcgcgaattgcagattatatcatcgcttagccccgagactgctcttcgggggaataccgaattgctttatattgaccctagccggaagcatgaactacctgagctctataacgggcttggattcaaaaatctaatttatatggccattcaggcgcgtcacttccattctcaatgggtaatgaccaccgagaacagacctctgtgcctgatgattttcattgaagaacctgaagttcatctccatgctcaggtacaacaaacttttatatccaacatttggcaggtaattaatcaatccgctgagatggctggagaaccgaatctcgtaccgcaacttgttataaccacgcattcctcgcatatcatggaggctgtggattttgagaaagttcgctatttccagcgctgccattgtgagggtgaaacagaagctgctggcattcgcaatgcgtcaatggttcgaagcctccgcgctttccagccgaatgtggagacaattgatggtaaggttatcccaccatcagaatcgctagccttccttaaacgctatttacgtctaacacactgtgacctatttttcgccgatgctggcatccttgttgaaggcgctgttgagaagttgttaatgccgaccatgattgagcgtgctgcagagcgattacggactgtgtatctcacagttttggaggtagggggagcgtatgctcaccgtttcgagggtttgcttagcttccttcatattccctatcttgttatcacagacattgattcagtttcacctaccggttatcccaaagcctgtcgagcagatgttgctggagcaaaaacgtccaacgcgtccctaaagaaactttgtgggctgacaacaattgaccaactgatcgcattgacttgcgcacagaagcaacacaacgataaggatcgttgcatcgcttttcagacagatgttttggtcgaggaaaatgatgccagcgagatgttacgtccgcgcacgttggaagaagcaattgtatatgagaattttgggctccttcgatctggtaatttatctattggcattactgtgcgagcgtctctcagcgacgcttaccaggatatttacgatagggttcggtcggataatttcaaaaaaactgattttgctatggacatcttggcttgcgctgagcaatggattgtccctggatatattgccgaagggttgaaatggcttgagtcgcgcctattacccccgctaccagttgtggtggatacagaagcctctgtcgcggcgggagaatag

SEQ ID NO: 439373 - DNA, 435 bp, Serratia marcescens
atgtccagaactccagattcacggttacgccatgagggctttcgcaaagcagaggcttccctgagacttgaaggaatggaccccagtggtacgcctctgtacgagtccgttaaggcacgtattatttcaggcgagctgacgtatgagcaggggcgttctgagatttttgcatactacacaaaatcagataccgccgggcctgtgaccgtgggagaaatgctgacagaggagtttttaaaaccgctgagtatgtctcatgatgaactggcggaagctattggtgtttgcaagcaggatattgaagatattatctgtggtttgcgtcgtcttacggatgatgaggctcgcgttcttgctgacatatttggtactgatgaggatttttggagcaatctgcagatgttgcaagatcatagggaacaacgacgtaagtaa

SEQ ID NO: 439374 - DNA, 1392 bp, Serratia marcescens
atgaaaatagtaagtaagctcacctttttaggtatcatacttttcttttctataaattcctatgctggtcaattagatagtagcgggctacttgatactttattagataagtttcaacaagtagccagtacatggacaacagtaattgctgactatgcaaattggctcttctgggggctggtattaataagtatggtttggacatttggtatgattgcgatgcaaggggaagggttgacaggcgtacttgctgaaatagttcgcttttttgccgtcattggctttttttattatcttttaatcaacggcccatccatatcgcaatccataattaattcaatgagacaacttgcagcaaacgctttaggaataagtactggtatttcgccctcaagcatagttgatatggcatttgcgatattaacaaaggtcagttcagccgcatcaatttggtcgccaatgatatccactattatgataacagtcgcgataatcgttttggtagtgatgtcccttatagcgataaatatgttaatcatgttggtttctgcatgggtgttatgttacgcaggagttatattgcttgggtttggtggttcgaaatggacctctgacatagcaattaattacttacgaactgttttatcgattggcattcaattattcacgatgacattaattattgggattggacaatcatttatagatcaatatttttctcttattaaagatgatgttcctgatcttaatagtcttatcgttttgcttctggcgtcaattatcctgttagtattaacgaataagctaccactgttgttatcaggtgttgtaggaggggcttctttacaagggattggtggatttggggcgggtatgattaccggcgctgccgctactgccatcagcggtgctggagcaatggcaatgggggcatcagctcaagtcagcggcggagcctctgcattgaaggcagcgttcgagtctgcgcaagctgccatggccgaagaatctggttcaggcggtggaggcggttccggtggaggatttggcggcggggaagataccggttctgtagatacttctggcggccaaccctcaggcggttccggtggttcgtctgctgggagcagttcaggtagcgccagcggaggaagtcaggggtttgcttcattctcacgagctgggcgcatggcaagccatatgggaagcagtatggctaacggagctgctgaataccagacaatgaggcgaagtagcgattcttctcgtgtccaacggactattggaggggagttggcgactcagatacgtaaacaaacagctactcgtcgggataaccgcgaacatgatgattttgtcgaagatagcttatccggcaataataaatcttga

SEQ ID NO: 439375 - DNA, 795 bp, Serratia marcescens
atgaatttaatgttccgagtagtttcatcacaaagagggattttagccgctaaaaaagctttaatagttcctttcgtggcgtccgtcatggcattaccggtgaaggccggaattcccgttattgatggcactaatgtggttcagaccacaatcagcgcagttaacaacgttcaagccgtagcaaaacaaatccagcagtaccagacgcagctgcagcagtatgaaaacatgctgcagaacaccgtagcacctgcggcctatatctgggaccaggcaaattcaacaattaataaattgttgcaggcacaggatacccttaattactacaagaaccaggccgggagtctcgatacgtacctgaaacgatatcaggacgttaactactacaggtcattaccttgctttaacagcaatgttgaatgtaccgcgtctgaaattagcgcacttcgtgaagcggaacaaaacagctcagaggcacgtaaaaaggccaatgacgccgttttcaaggcaattgacgaacaacaagatactctgcagagcgacgctgacaacctggcagacttacaaagccaggcaaccggcgcacaaggtcaaatggaagcaattcaggcggccaatcaacttgccagcgcacagacaaaccagttactgcaaatccgctctctcctggtagcccaacaaaacgctgcagcaacactggcacaggctcaggtagataaagaatcacaacagatagccgctgatgaaaaagcgttagctggagagaatacaccaagcccgaagcgaatttggtga

SEQ ID NO: 439376 - DNA, 990 bp, Serratia marcescens
atgatgattaaatatgtaatggatgctccatctagggaaccgactcaaaacaaaaaagggtcagtgaaagttaagagaaatacgagatatatagataaacttttggcaatccaggagtgtagtgctctggaagccaatgaaattggttttattgctcggttcttaattcaagcaaccctaccacacagcaatccaggattgaatgagtggtgccgtaaaaatggtaatttaaccatgcatatgattgcaccatcagcagtaggtttgcctttcggttgctatgctcgattgctattagtttgggttagttctcaagcagttagaaataagtcaaaactggataaaggatttattacagaacaggaagcacgtaagcttgaattgggtcgctcccaacggcgtttcatggaagacttaggtcttcgctcaaccggtggaaaaaatggttctataaatccatttcgagaacagatgcggcgattatttaaaactacggtcagtgttacgtttgcagagttaaatgaggaaagtggatatgtttgtgaggatgaaatgggagccagagtagcggatgtatcccatattttgtggagtgcaaaacaaccagagaaagattttctatgggagtcttgggttgagttgtcacctaaattttttcaactgataacagataaacctgtcccattggatatgagagtattgcgtttgattaagcgctctccgatggccttggatatatattgctgggcgacgtatcgtgtgagttatttaaagcgaggcacaattatcccttggctaggtttgatggagcaaatgggttcaaattattccgatgtcagagactttaggcgacggtttaacgatgggcttgaaaaggtacagcgggcatggccagggctagacgctacaccgaccgacaaaggacttcttataaaaccaggtgctcctcaagtacctcgaaggaaaaaatacagaactgagggatattga

SEQ ID NO: 439377 - DNA, 1035 bp, Serratia marcescens
atgaaaatatttgaaacggaagaaaatgcgcaaaaaagactagggctgtattacatccctgtttgggaacatactgatgaaacggtagtgcatgccatccgcatctttagggaaaaatggcattcatattctgataaatctaaacggtacaacatcataaaattgatcaaagagttgattgatccatctgtatcggaatatttaagtcgacttccaaatcattatttatctttttgccctacctcaataaaaaattgtaactatagcgatcttgttaaactcagaggcttttcttatacggccgatcaaattcactttcatctgagaaattttgttaaccatagttctcatacagagcaagacatgtttttcatatccactcaggacatgctcaaatcattttttatgtattgtgaaggaaacagcccaaaaaattcaaagctagcccccgatctctatgtaaatatggaaagaaaaacgcgaatttgtgccttatgtggaaacccgactgaattttcatcatttattagatcatggaaagagaatggagttattgaaggtgaagaaaacgaagataatgagaaatttggaaaaaaaaagagaccagacttcagtcaaacatactgtctaaatcaccgaccgaaactgcacgatggttcttggaacgcgacctacaaacaggcaaaacgttctacaaagcaatttgagcaagaagtcttgaggctacggagacaaattgcccatccagatcgctacaatgcaaaatctggagataatttagttgatgagtacttttatcattacctctttgattcttcactggacccaactaatgtcgctgaactgcgcaacttagcacgcagaatggtagattcgcgactgactgacaacaaaaagcgaatactggttcttcataagcaagggctttccaatcgcgaaattggtataatattagggggcttaacaggtagtgtactaacaaatcaagctatttctaaagccttaggaacgattcgtgatgagttcatcttataa

SEQ ID NO: 439378 - DNA, 1191 bp, Serratia marcescens
atgttgactgacaccaggctgcgtcaccttaagccgaaggagaaactctataaagttaatgaccgtgatggtctgtatgttgcggtcactccggctggaactatttcatttcgttataactattcaataaacggaagacaggagaccgttacttttggccgctatggtgttggagggatcacgcttgcagaagcgcgtgaacggctcaatgaagccaaaaaaatggttgccagtggaagatcacctgcgagggaaaaagccagagataaagcgcgtatcaaagatgcggagacttttggtgcgtgggctgagaaatggttacgcggttatcaaatggctgaatcgacgcgtgatatgcggcgttcggtatatcaaagggagttgaagtcaaaatttgcccagcagaaacttagtgagattacacatgaagacttacgtgcattaaccgataacattgtcgagagaggggcgccggcgacagctgtacacgccagagagattgtattgcaagtctatcgctgggctattgagcgcggtcagaaggtggagaatcccgctgatctggtacggcctgcaagcatagcgaaatttgagcctcgtgacagggcattgacgccagttgaaatcggtctgatgtatcggtatatggaacgggtaggaacgacgccatcaatcagagcagcggttaaacttttgctgttaacgatggtacgtaaaagcgagcttactaacgcgacctggagcgagatcaattttagtgaagcattatggacgataccaaaggagaggatgaaacgacgtaatccacatttggtttttcttccccaacaggcaatggatattttgattgctcttaaaacctttgccggtagctctgattttatccttccttcgcgctacgattccgatgcacctatgagtagcgctactttaaaccgggttttgacactgacgtatcgtcaggcacagaaagaaggggagttgttgcctaagtttggtccccatgacttacggcgtactgccagcaccttgctacatgaggccgggtacaatactgactggattgagaagagccttgcccatgaacaaaaaggggtacgagctgtttataacaaggctgaatatcgtgagcagagggctgagatgctacaagattgggcgaatatgattgatgaatgggtaagtaattga

SEQ ID NO: 439379 - DNA, 672 bp, Serratia marcescens
atgcgggtgggtatggaagatattaaagcagccagcacacgattaatcctatcctctactggcctcattctctttttagggggctgggcatctttcgccgactccatcccgatcggcaacctggggctaaaattaacctctctacatgttgctcctatcatattgattgctttttggctctttagctggcagcgtttttttgtgttatctcgggacgctaacaaaccaacaattgacgctttattactcaaaatcgtcaatgcttccgaacttgcccgatctgtattccctcctaaattgttcggcttacctggagcaaatgggatagtaaaatgggggtggcctcatgcagaaatcccgcgggaagctccacacaatcatattttttataagagaatgttttataagcgtttattcatgtttcaatactttggaaatgacgtaaacgacaatgggctatacgttcactttggccctgttgccgtcaatattaataatggagttgtaacaccactaagccgtggttattggaaatgtatttggtttgaaatcaaggcattagtaccaagaatttttgatacctctatcatcggttttcattactttccccacatattcgcctggatcgcttttacctatatctgcatttggagccttggcctagtgatatag

SEQ ID NO: 439380 - DNA, 1161 bp, Serratia marcescens
atgaagataaccaaggctgatttttgcgtaactattgacgacactttaataacagattttcgcgatgtggttaatgaacaggagtttgcgtacagctacttcataaacagagatggtaaaaatcaattcagccctatctgttcgtgcatggattggattagcgtttctgttcgctatcttatggacttccctgagttctctgaaaatattgatgtcaaagccatgcaggtttattcccttatatcatctattgacataatagtggaggcgttgcagcagcttcatcgaattattgaaagtgaccataagttgacgaaatggccttttaggaaatctgtgagtatctttaaaaataaaacaccttatctttcatccgaggatgatgacgcatactttaaaagtattcgagctatctttggtgctcatcctacaaatcttataaacaaccagggcgaacgactgtttgcaagttggcctcactttcatacttttaatgaaaatgatttcactataagcctttacaacaatacacctggaatagatgacattattttcggtattaagtttggtgagcttattgcatacgttgaaagtagatataattatctatcaatgttaaagaattccctaatagcaatccgcaacaagcattacaacacattatccaaacaggctataccgcctactaataacattcatgctgagttgaagttgcttctttcagaagttgcggtgcgaggtgacaatgattattaccgaatggaagtagaagagttaataagtttgttcgaggggaatgttcaagaggcacatctccaaggtgaagttgaagcttttttgagtaaactacaccctattgttgtagagattagatataatcttcaggagatgaatattgaggatttaacaaccacgcatggtgtaatgatttccagacttccgaaaaatgccttgcattacgttcttcagaaaatgtttacttggctccattctgataggcatgatccaatgaccggttattacttcaacgagctaaataattattcagtagggcgttacaacttttgttcggaggatgatggcagtacaactctgttgaagctccgaatgatgttatatcggtatcatcaacaaaaagaggattatacacggcaaaagtaa

SEQ ID NO: 439381 - DNA, 1026 bp, Serratia marcescens
atgaataacgatattctaacagcatttaaagcttcagatttagttgataaaaacattaactttcttattggctctggtgcatcagcaggctatataccgactttatggattaaggaggatatatcgtacgaagatgtacttaccaacaaaaaatatcaagaaatcgaaaacgtcatttatcactcttactacgttgatattttatccaaaagcttttgtataagcccagttaattttaaagaaaagttaaaattcaaaaaaacatttatcaattacctgaaattcattaaaaacctttcttctttggttgataaaaaaagtgctaaccaaatacgcagagcaaacatatttacaacaaactatgatctttttttagaaaaatcatctgacttactattaaagaacaacactagttttatatttaatgatggaggtagaggactgcacacgcgccaccttaatataagtaatttccatacatccacatggcaccagggaactaatgacctttataaatttgaaatacctactatcaacctcataaaaatgcatggttcaatatcgtggaataaagttaacgacgatactattagcatacgctatctcgataaccttcctgatgagctttctattgaaacagatcactacttagacatagaagagacaatagaaaagatagatgaattatattactttgatggcgctaaaaacgctattgagctttctcgagaggatgaagatagattacaaagatttagaaatgaatatgataaactagcaattgttaatccaacaaaagcaaagtttgaagaaactgtcttccagcaacattattaccaatctttacgacttttaagttatgaactagaaaagccgcaaacaattttaatttgcttcggattctcattcaaggatgaacatataagagaaataatccaaagatctttaagtaatccttctctgatcatctatatattttgttataaattaaaagacaaagagaatattaaaaaaaataatcaatag

SEQ ID NO: 439382 - DNA, 1776 bp, Serratia marcescens
atgcaatttttaataggaaccgtaacttcagtcaaaggaacatcagtcagagccttgattaatcctaacctttatcaaaccacatatattcatgatggtaaattatatcgcggagtttccatcaacgaatacattgtaataaaaaaaggatatcatgagatagttggtaaaattgaaggggaggaaataattgaaaagaaatcttataaccaagagcaatccaacgcagataaatatgaaagatttatcgatcttaaaattattggatacgtgcaagataacaatttccagtcaggaataaaatatctccccatgattcaagatggcctttacctggcatcagacacattaataagtgccatctacacattcaacggtaaaattgactcaaaatccatcgaaatagggaaatccttgttggaagatatacctattcgaatacctatcaatgggatattcaattcccacctcggtattttcggaaacacaggtagcggcaaatcaaacacccttgccaagctatatatagagctattcaactcgtttaaagataaaatattcactagctcaagatttatgttcatcgatttcaatggcgaatataggactatgcataattcatttattgattgcagttcatatgtagaacttgacacacacattcccgaggggaaggataagttatttttgaagcaatcagagttttgggatgcagaattactttcagtattattctctgcaaccgaaaagactcaaaaaccattcttaaatatattaacaagaaatagaattgaatatggggaagagcttaatgattattttcagagaaccttgcagatcatgttcggtcaaaaccagcatagagaaacaataagtgttttgcgtagtatcataagaatcatcaatccagataacgaggaaaacataaactctgaacttgcagcattcagttggttttcacgaggagaaagcaacaaatactatttaggagcgtattttccaaatacgccagatgaatatttggcacatacacctatactcagaagcacctcgataaactccgagcgactttcagcatttgaacaattatcagtacgcgcaacattgcaacttatacagtcagtatcaagaaactatgttcaatatgaacacataagccctttaatcggaaaaataaatgcatctgcaaaatcccttgaaaaagtcattaaaataattgcagatgttgaaattcgccctacaccattaacattcatatcattaaaaaactgcaatcaagacataaagaaaacaataccaatgatgattgcgaagtgttctttcttagaacataagcgagttgaagaaaaagaaaaaagcttccatttgattattgatgaagcacataatatcctttctgaaagttcagccagagaatctgagacttggaaagattacaggcttgagctattcgaggaaataattaaagaaggccgtaagtttggtttttttataacaatttcaagtcagcgcccagctgatatatctccgaccattgtatcccaaatacataattatttcctgcatcgtttagtaaacgacaacgatatttttctgttgaaaaattctttaaacaacctcgatagttcttctcgatccctaattccttcactgccttcaggtgcgtgtgtactgtctggtacggccttccacactcctgtagtaatacagattgagagactatcaaaagagctagccccagagagcgataccattgatttagatgcaaattggtaa

SEQ ID NO: 439383 - DNA, 741 bp, Serratia marcescens
atgcttcgaggaaggggtcagacagtcagccagatcgaaactttgcagcggggattgatgaatatctgtctcatttgcatgaaaaggttttattccaagaggatagatagtacactatatgtactacatactgaaaagtacctcaccatgaatgacaaaaaatttaaattcattgtttgttttcttgtattttttactttctctgttgtaaataatgaagtattagcttcaaataaaacagttggccctcaatccactgaaaacagccatattgacgttacgcaaagtactcaacctgtcaacccaaagacttactctgggtcaaaggaattaactgaattaacgtccctaattaattcccaaaaagtagaaattgaagtaatgagagataaaatcagttcactcgagaatactagtgggatgaattttgccgtatggaccggtatcttattggcttcagtggccgtaatactgacagtgcttggtattgcaatggctgtgttttcattttttggatatagaaaaataatggatagtgttaaagaggtggcgacaaccatatctacaacagaagcagctattgtttcagaacgacttgcacctacagttacagaggatgttctgttaaaacttatagagggtagaagtttcgacaaaataattttcgaagctgtgcaaaaagtaacgtatcgaggaatacgattctcatcagaggacatgcttgaggaagagccaaaatga

SEQ ID NO: 439384 - DNA, 501 bp, Serratia marcescens
atgattatgactaactctaacgaatggttttctctcccagatgaactaatttccttaattaataaaatgcaggagcattttcctattcccgtaggtgcaatcgctaaagaattaggggtaaaagttatgaaagcaactttgcccgccggtatctccggtgaaattaaggaagagaacgggacttttgtaatacgggtcaatcgtcatgatgtaaaagaaagacagcgtttcacagttgctcatgaaatagcgcattttttgttgcataaggatcgtattggtgatggcataaccgacgatatactttatcgctccaagctctcagactatatggaaattcaagccaacagacttgcggctgatattttaatgccttggcatttagtacaagtgaaattatctgagtatagaaatctccgtgacgaagaaaaatacgaaaaaatagcgaacgaagcggaagtgtctaccacagctataaaaattcgtcttggaaaaatataa

SEQ ID NO: 439385 - DNA, 1131 bp, Serratia marcescens
atgtttacccataatgataactttcactatgcctacgctccaatattatcacttagtccttctgaaatgatggcgttagaacaattaccaggaaaggataaagataatatattacctattttcccattaaaaggttgggcaagttcgcaacagcttgaaaactcgatcttgagaattgaaaaatctattgataacaggaagtggatagcatccatagataaagattatatattgaataacaagacctttcttttcactggcaaataccctagagaggttttctatcaactcaaagaattattaaaaccaacaaatggatatgagaattggtatgattttttattaaaaaaaccacaggccatacctgtcgtaaatttagacgaatcatcagaacttgagttacaaataaaaaaattacattctcttgatagaggactcgtttttgtatttgaattaaaaagcatgactctatcatattatcacgatgtaatttatctaatctcaaaattgggaattcagaattttttatttatttacgatataggaacaattaacggcgattataataactattatcaaccaatccttaacctaataaataagacaaaagaaataataccttttgtaagagtagctatatcgggaacttctttccctttcaattttgctggttaccatagaggtgaaaacccaatctttgaaagattattatttaacaaattaaaacaaagcattacatcatttccagccatatactctgatcgaggtagtgcgagaattgaaaaacagggtggaggcggcaatctccctcccccgagaattgactatgctttgaaaaacgactggcgtttcattaggcatgaatttgaagaccccaaatctcctagtgagggagaaaaagaggaactctattctttgtgtgctaaagaaattatgcagcaagaatattggtcagaaaacttgcacctatggggaactcaaatgattgaattaacttctaaaggtgacaagtttggtataaactcgccgcaaaaggcaactgcagtcagaataaatttgcatttatatacgcaactacactacaacgatgaattagaagatattgatactgatgaagagtgggaagattag

SEQ ID NO: 439386 - DNA, 951 bp, Serratia marcescens
atggaaatatataagttgattgacagtgaaacattgatgagaaagggatttaccagcgaggtaatgcgatctcccgaattgcctaaaaaatggcatattcctaaaaggaatggtggtgtcaggacgatttatcacccttcatccaaagtaaagcttatccaatattggcttataagtaatatattctcaaatctgccgattcataattcagcttatgcatttgttaatggacgttcgatcaaaagtaatgctcttctgcatgcaacggctaaaaataaatattatgtcaaagtcgatttaaaagatttttttccctcaataaaatacagtaactttgagtatgcatttaaattataccgcgatcgcatagaattttcggatgtatatgatgcagagttattgcaactgataaaaagtatatgcttcatttcagatgaaagccttccaattggatttccgacatctcctataattgcgaattttgtcgcaagagagtttgacgaaaaacttactttgaaactaaattcgatagacaggcttaatgctgtatatactagatatgcagatgatattatcatatctactaatctgaagggagcgagcgttaaaatattaaatgctataaaaagcacaataaaaagaattgagcctagttttaaaataaataatgacaagatacatatttgtagtgcttcaggtggaagtataattgccacaggattaaaaatatgccatgatttccatgttactttacataggtcaatgaaagataaaatacggttatatatatctctattatctaagggcagattaaagcaagaggattataataaactttcaggttacattgcttatgccaagagtattgaccctcatttttatacaaaattaaacagaaagtattttcaagagattagaggtattgaaaactcacataataaggtaatttaa

SEQ ID NO: 439387 - DNA, 954 bp, Serratia marcescens
atgttaacccagctcaaaaaagtcggtacagaagttcatagagctactaatttgtttgcaacttatgttgaaaaaaacaaagtaaaatgtcccggggatgtgaaaaaatttatttttctatgcggagccaataaaaataatggtgagccttctgcaaggcgcatagaactgatagacttttctgagaaacatcttagcaattgtcatttctttcttgccgaactggtattcaaagagcttagtaaagatgaagaggaatcatcctctgataacttattagatatagaagctgacctttcaaaacttgccgatcatattataattgttttagaaagtttttcatcttttaccgaacttggggcatttgcatacagtaagcatttacgtaagaagcttatcattattaataacacaaaatttattaatgaaaaatcttttataaacatggggcctataaaggcaattacacaacagtcccaacaatcaggccacttcttgcattataagatggttgaaggatatgaaagcatcgagcgttcagatggagtaggtcagatatttaatcccttacatgaaatattatcaaaaaatgaacgtgcaattgctaggacacttaagaaggaggacctagatccttccaataactttaataaagattcagttagatttattcatgatataattttagcttgtggcccgttaaaactaagtgagctcattgaaatagcgataaagatatttggaaaggataggctctataggaaagaactgctaaaacatcttggtattttaatggctataaaaatcatttcatgtaaggatgaactttactattccctttataagcaatattattttaaatatgattttgatatggataacatatcatcaatgtttaaagttttttttcttaaaaataaattgggtagggttaatattaatggaaatatataa

SEQ ID NO: 439388 - DNA, 978 bp, Serratia marcescens
atgcgagatgaatcactcgattcaatcagagggctggcgataatttttgttgtcttaggccatgtaagtaatttgccagatgaaattaaaaaagccatctatttattccatatgccacttttcttcattgtttcgggatatctttttagcataaaaaaatcacgcgataacctcccaggatatataaagtcgaagtttcgaagactggtcattcctgcatggttcatgggagctatttgcggcttaccgtttattgtactgttagcgctgggtaaaatacaattcagtgaatttttatttaaagcccaaggaacatttttaggataccctaccgccgatcatacattcaattgcactccaatttggtttttgttttctatatttataacagaactgatatcggcttttttttcaaagacaaatgtgtcattcatttatctatccatcctatcgctcgctttcattataataacatcaaatagttttacgttcataccgtttaacgcctttgtctccatatcatcattgtttttcttttgcattggaattttaattaaaggaagtatttacaatgttattaaatcgaagaagccattagcaatcccattatttatcgctttcatcacgtgcttctcactgagcagtcaggctgttgacatgtcagcaaaccaatatggagaaggctacacaatcatattaaatatccttggctctttagcaggagccacatttatcatatctatttccgggtttataaccaacaaggtattaatctggtttggtaaaaatactttacctatagtgggctttaattattttgccaactccatagttactaaagcgttagaaaaaatcagtgtaaataatttcattttcagctttgtcattcaagttatcttgctagttgctgttatacacgttgtaaagaaattaaaatacacatcctttgtcatttaccctaaaaaaacaaacagttag

SEQ ID NO: 439389 - DNA, 1107 bp, Serratia marcescens
atgcatctgttttggggtaatgcggggtttatggtgagattaattccagtcattttggccgggggcaacggtagccgtttgtggcccttatcaagagaagcatttcctaaacaatttctgacggtcgatggtagcgggcgcagtttgctgcaacagacgctgttgcgtctggaaggtctgcgtgggggagaaatcgcggcgccgatcgtcatttgcaacgaagagcaccgttttttggtgacggaacagctacgagaaatcgactgttcgaatcctcacattattctggagcccgcagggcgcaatacggcaccggcagtcgcgctggctgcacaccacgttctcaaagacgatcctgatggcgtgctgttggttttggccgctgatcatttgatcacgcagatagacgcgtttcatgatgcgttgcgcaaggctatcgaattttctttgcgcgaccgtttggtgaccttcggcatcattccccagcatcctgaaacaggctatggctacatcaaacgcggagcgcagctgtcacctcattgttttgacgtcgagcgtttcgtcgaaaaaccctgttatcaaaaggcgcaagcctatctggaaagcggtgactacagctggaacagcggcatgttcatgttcacggcgaaaaagtatctgcatgaactggcgcgctttcgccccgatatctatcacaaaacgctgttggcgatggaaaccagtcggcgcgagctcaacttcatttacattgatgaagaaacctttctccgttgcccctgtgagtccatcgattacgctgtgatggaaaacaccgcggatacagtagtgatgccgatcgatattggctggagcgatgtcgggtcgtgggccgccgtgtgggaggtggccgaaaaggacgcccaagggaatgtgctccgcggcaatgttatcgctatcgactcattgaacaactatgtttacgctggcgacaagctggtggccacgcttggcatcaacgatctggtgatcgtacagactggcgatgcgctactgattgccgcgcgagacgcggtgcaggatgtgaaacaattagtaggcgaactgaaggcgcgcaagctgccgtgttga

SEQ ID NO: 439390 - DNA, 1008 bp, Serratia marcescens
gtggcattatataatatttccaacaaaatattgacacctttagagagaacctcattttctattgagggattgcaagaacgttatgatttgcaagcggcaattaaaaataacatcaccatattggcacccgattgtcttgtcatagccgaagaattttctgactgggaagatagtcggagaaggattgacatattagctattgataaacaggcaaaccttgtagtaatagaattaaaacgtgatgagtttggtgctcatatggaactccaagcattaagatatgcggcgatgatatctactatgagtttttctaaagcatgtgagtattatcaggactacctttctaaaaataatattgatattgatgctaaagaaaaaatactagactttgttgagcttccagatacggagcttgtcgactttggtaaagatataagagttatattagcatcggctggatttagtaaggaacttactactacggcgatttggttaagagataaaggtgttgatattagctgcgtgaaaattacaccttataattttaaaggtgaggttctaattaatgctgaacagataataccggtccccgagctgaacgaataccaagttagatttagagagaagcgtatagagcagattgccaactctaaaaaatcagaaaaggattactcaagttatagatacaaaggacttgtcctaaataaaaggaatcttgctttggagatctttactgattggatagagaagaataatcctgctaatttcgatgaactgagggaaaaattatttggagtcataaaaaatcgtacgatagctttagctgaatgtattagtgatgagagaaagaatagataccatatgaatgacgatgatcttattgagctcgagtcaggtgaaataatagtcatatccaatcaatggggtataggtaacattgaacgagttttggattttttccgcaaagatggctttgttgtcgaaaaagttgaggttgaacagaaataa

SEQ ID NO: 439391 - DNA, 1410 bp, Serratia marcescens
atgcaaccatcggcacccgccgcaggacagttcaaacgcagcatgaaggcccggcacctggtgatgctgtcgctgggcggcgtgatcggcactgggctgtttttcaacaccggctacatcatctccaccaccggcgcgctcggcacgctgctggcctacctgatcggcgcattggtggtgtatctggtgatgctgtgcctgggcgaactgtcggtggcgatgccggaaaccggcgcctttcacgtctatgcttcgcgctatctggggccggccaccggctatgccgtcgcctggctgtattggctcacctggacggtggcgctcggctccagcctcaccgccgccggattctgcatgcagtactggttcccgcagtcgccggtgtggctgtggtgcctgatcttctgcgcggccattttcctgcttaacgtggtgaccacccgctttttcgccgaaagcgaattctggttttcgctgatcaaagtggtaaccattctggcgttcatcatactgggcggtgccgccatgttcggtcttctgccgatgaaagacggcacgccggcgccgttcctgcataacctgaccgcttccggctggctgccgcacggcacgctgccgatcctgatgaccatggtggcggtgaacttcgctttctccggcacggagctgatcggcattgccgccggtgaaaccgagaacccggaaaaagtcgtaccgctggcgatccgtaccacggtgatccgcctgatgctgttctttatcggcacggtcttcgtgctggcggcgttgatcccgatggatcaggcggggatcatcaaaagcccgttcgtgttggtgtttgaacgcatcggcgtgccttacgcggccgatatcttcaacttcgtgatcctgaccgccatcctgtcggcggccaactccggcctgtacgcctcggggcgcatgctgtggtcgctggcccaccagcgcaccctgccggcctactttgcgcgcgtcaatgcgcgcggcattccgatcaacgccctgaccttcagcatgctcggcggcgtgctggcgctgctgaccagcgtgatcgcgccggacacggtgtttgtcgccctgtcggcgatctccggttttgcggtggtggcggtgtggctgagcatctgcgcggcccactttgctttccgccgcgcctacctgcgcagcggccagccgataagcggcttgaaataccgcgcgcccggctacccgctgacgccgatcctcggctttgcgctgtgcctgctggcctgcatcgggctggcgttcgatccggagcagcgcatcgcgctctactgcgggctgccgttcgtcgccctgtgctacctcacctatttcctgacccggcgcgccgggcaaaaaaacgctttgggagaacaacatgtcggttaa

SEQ ID NO: 439392 - DNA, 204 bp, Serratia marcescens
atgaacaatgaaacattggtttctaaacactattttatgtttatcctaaaaaacaataatggtagtgacatcagttgcgtttcagaagttatcgcaactaaagaacaagccctaagctatttttcatccgctgtagaaggattaaatattgagattatagaaatatcaaatgaggacaactggaaagaagaacataaccattga

SEQ ID NO: 439393 - DNA, 309 bp, Serratia marcescens
atggcaaatgtaaaaaccttcacccgtcagattgcctctaccacttggctaatgttgggtttgatgatgttaccgggtttcgctcacgcagccggtggcgatccaattaaccaagggcttcagtggttaattgatctcttaacgtcaggcattgcccgttcttgcgcaatcttagcgatcgccgtgttgggttacttagcttgggccggacgtctccaagcccgtaatgctgggtttgctatcggcggtatcgtgctggtatttggtgcggcgtctattgccgacgcaatcattgctgtagtccagtaa

SEQ ID NO: 439394 - DNA, 525 bp, Serratia marcescens
atgatgaaaaagcgggatgctatatttttatctttgcttataggaaagcgactaatagcactggctgcattgattttagctgtattgtcaactttccattacattcctaacgtcttgttggatatagtgatccctcatataaattcagtgatggatatagatcctattccaaatcggttttctgatattaatgtaggtataaattttacattcttaccttatctgtttctaatttttatttgttatccatttaatttcatacttgtttccactttgataagtgcgggcggcgatttggtcgagttgttagctatccgtcgtgaattgggtgttattggatttaaaaaatataaagcttttgcagcaataaaacgaaaaaggattgaaggtatttacgacgctcaagagcgccgcagggcatataaagaaaaacgccgggaagcaatgaaaagaaaatatggtggttctgattccggtgccggtgctttattggcaggtattttgttaggtatgttccttagctga

SEQ ID NO: 439395 - DNA, 510 bp, Serratia marcescens
atgctgaagcgttggaacgtgattttcctgattttatttttaccgttgcaatatgccattgctgatattcatggcgaaataatacgaattatcgacggtgataccgttgatgttttagttaataaaacgccagtaagggtgagattagttgatattgatgcccctgaaagcaagcaacctttcgggcagaaatcgcgccaatttctggctgatatgatctttcgtcaacaagtaaccatcgttgaaaagggaaaggatcgctataaccgcgtgttaggtacagtttttaaggaagataacactaatgtaaatgaatctcaggttagtaacggtatggcgtgggcctacagataccgtggacaggcgacgaatccagccatgctagaccttgaacaggacgctaggcaaaaacgccttggcctatggtctgatccgcaatcaagcattgtagagccttggaaatggcggcgagttaacaataaatttcgtgcgcacgaaaccgcaaaatga

SEQ ID NO: 439396 - DNA, 1212 bp, Serratia marcescens
atgaaacttaatacgcgacaggtagacgctgctaaacccagagagaaagcctataagctggcagatggtgctggtttgtatcttgaggttgttccctctggttcccgatactggcggatgaaatatcgcttcaatggaaaagagaagcgtatggcttttggtgtctatccagcagtgtccctttcacaagcgagggcactacgtgatgaagccaagaaaaaactggccgagggtatcgatccatcgtttgcaaagaaagaagaaaagctggttcgcgatgtgcagctcaataatacgtttcaggctgtggcacttgaatggcacggaacgaaggtgagccgatggtcagaaggttatgcctccgatatcatcgaagcattcaataaagatattttcccttatatcggccagcagccggtaaatgaaatcaaaccgctagttctgcttaatgtgctgcgtcgaatggaaagccgtggcgcgacagagaaggccaagaaggttcgccagcgctgcagtgaagtctttcgttacgccatcgttaccggtcgtgcggaatacaaccctgcagcggatctaaccagcgcgatgtcagggcatgaatcgaagcattatcccttccttactgtcgatgagttaccagacttctttaaagctctgtctggctatacaggaagcccgttagttgttcttgccgctcggctgctgatccttacgggagttcgcactggcgagctccgaggtgctttctggagtgagtttgatcttgaaaaagctgtgtgggaaattcctgccgaacgaatgaagatgaaacggcctcaccttgtccctctctctactcaagcgctggaaatcgtacagcagctcaaagtgatgtctgagcaatatcctctggtgtttcctgggaggaatgatccccgcaaaacgatgagcgaagcgagtataaatcaggtgttcaagcggattggatatacggggaaggtaacggggcatggtttccgtcatacgatgagtacgattttgcatgaagaaggattcaatatggcatggattgaaacccagcttgcgcatgtcgataagaattcgatccgtggaacgtataaccatgctttgtatttggaaggtaggggagaaatgatgcaatggtacggagattatctcaatatgttagaatttacgatcggagaggccttaaaatatgttggtaatatataa

SEQ ID NO: 439397 - DNA, 267 bp, Serratia marcescens
atggatctgtatgtggggctgatgatgatatggttcaacctgtcggccgtgttgttgggagcaatgtgggtgatacctgtgtctccagattggcattctcgggagcaaggtcgattttggttgatagggtatcttcacaaagaaagtggctcgtttcgtgtcggtgtatgcatgttttgcattgggtggggatttcagattaggggagcctcctggtctctggaggtgagtgatatcggagcgctattgctgggcgtgccttattga

SEQ ID NO: 439398 - DNA, 342 bp, Serratia marcescens
atgctcgaagagttgctcggaccagaacgccgcagacgccattcttcacagaaaagaattgccattgttcaggagatgcttctgcctggcatggcggtatctcataccgcgctgcttcgaggtgtaaatgccaaccagattttcgcctggcgcaagcagtatcaggaaggcagcttgaccgcgattaaagccggggaggtatcgtttctatctccgaacttgcgcggtggtgaaacaaatcaaaaagctgcagcacctgctgggcaaaaaaccatggagaacgaattgctgaagaagaccgccaaaaaagtggatagcgcgtgcgcacttaataccccgtag

SEQ ID NO: 439399 - DNA, 408 bp, Serratia marcescens
atgatattgctggtcgttagcggtgcgctgctcctgttgtggttgggtgtgacagccttgttggtgggagggatgtgggtgttgcctccactttcttcatcaacatcggtgtcgacaacgggagtgtggtgctttttgtccggtgagctgggggtgtggggaacgctgcgcgcgggaatggcggtgggggctgtggtgtggtggtgtacgacggccggctatcccttgccgccgacggtgtgtgatgggctgggtctggccgtcggcggcgtgatgttgattgcgttgttcaatgccgggcgcaggctacccctgtcttctgctggagaactgttgttctgtggggcattgagtgcagggtggatggggatgttggcactggcgctttatctgttgctgcgaccatga

SEQ ID NO: 439400 - DNA, 444 bp, Serratia marcescens
atgcagtctcaattggcttcagctgtcggcatggaagtgcacctgcgagacggtgggtttccttatttctgtgacgtgttgtttcgggctggggtgctaaacgtaacctggttcctgccaacgtgtcagagcctgtatatcaccaaaaataatcgtgtaagactttcggggttttcgctatctaccactgcaacaccgtcacggtttgataataagcgtctttttgaggtgattaatcatgaaagcaatgagggcggccatgtctttcgcgcgtttttgtcagggctgtggtcggcgggagtggtgcgctatacggtggattgcattgcgcggacggtgacgtattacggcgccgacgatgttcaggtcactcaacgttatatgacgataatggaaatgcgctctccaccctgcgtaaccggtaagcggggtatacagggttga

SEQ ID NO: 439401 - DNA, 576 bp, Serratia marcescens
atgttttcggccgtatcggggctggttggacgctacagtgtgagcgatagcgtggccattaaaagcggtatcaaactgggctatgcctacatgcgcaatcgcatctcttttggtgaacatgcgcctgacgatgagtatcgctgggatatgacatcccgaaacggtttggttgcacccatgctgggcattgaatatgccaacgggcttgatggcggaaaccgtattcatgcagagggtagtatttcatggatgtacgtttcatcctttagcacgaataatcgcctgataaatattcataacgagaaggcgggaacctggtccttgctgggtgaatatacctttggtgatgtttatcgattattgggctggccaatggatgtcatcgcttcgaataaattaggcggcttttatggtaaggggtatcgcgatattgatatggggtttatgaacaataccgagttggcaaccggaactcgcatcaggcttcttaatcagaattatgatgtgcgcgtcggtgtcgggtatttgataaacggcaatggtcaaggtatatcgctggttatgcgaatgaattag

SEQ ID NO: 439402 - DNA, 573 bp, Serratia marcescens
atgttatctgttagctttagcgtacattctccttatcggaacagtgtgaggttcatacgtccgcttattctcattgcggggctaagtgcattatcccctgcgtgggctgatctgggtgtcgtgaacctctatatgcgtgcgacgttggtctccaatgcttgtaccgtcagcactgactctgccaataaaacggtaaatctgggggtttgggcaaccaggcagtttgcggaaaccccgactcccccttcactggtgcgttttaccatcagtcttgaagactgcgggccagctgcatccggcgtcaaagtcagttggagtggtacgccacatgccagcaataacgagctgtttgcactgacaggggatgcgggcgtagcaaagaatgttggtgttgaattgctggactggaatcgcaagcgaattgcgccgggttacaccacgccggcctatggtttgacagccaatacatccagcgtatctatccccttctatgctcgctacgtcagggcgggaggcagtgtcacggcggggacagccaactcgatggcgacttttacgctgagctatttgtaa

SEQ ID NO: 439403 - DNA, 969 bp, Serratia marcescens
atgggtgctactggtgactctgtatatgcaatatcatgtttaagtggttgtgggccggtcactacaacaattagtgataatatgagctcctctgaaaatacagtggggcatgaaaaaaactcttcaatggttagcgatccagtaaaaactgtaaagtatgactctggaactgctgggaattggggggtttggtatggggagcagccattgggttatcacagtatcccctctacgtggcaatataaaaagatagatgattatatatctattgcattgcttcaagattctgcgtgtgaacaaaggtatttccctttctatggttatacgcgagacgcaaatacgtgtggtaatgttgtatatgcgcagggggaacaggtttcttggagtgatgcaaattggcagtcaagaattaaggttacgaaaaaaattgtcaatggaacgtactctaaaaaaataccgattgcagagtggggacagtgccaaccctttggatgcacaagtaagaatatggttatacgtagagttgacattgacttgaatattactgtccctcaatcttgtgagcttaatgcgggtcaggtgattaacatcgattttggtaatgtatcttccggtgcttttaaaaatgcaggggcaattgctgaaggtattcagccacagtcgaagacggttagcgttaaatgtgataatattgccggcaatgcccaattgaccctgcgcatgcaggcggataaaaccagcggtaatattgtagtctcggatgaaaataatgatgttgggttccgtgtgaccaataatagcggaacgacattgatacccaataacttgtccagtgttattccctttaccctggatagcaatgcgcgtcagaacgtgattattcaagcctacccggttagcgtgacgggtaataaaccgaccgaagggccggtgacgtcccgggcatatttgcgtgttgatttcccctga

SEQ ID NO: 439404 - DNA, 558 bp, Serratia marcescens
atgttgaacaagcagcgttttatcaaatctgttctgggtctggctctgttgtccgcaggcaccgtggcgtcagcggcaattgtcaccggcggtaccgttcacttcaccggcgaaattgttgatgcagcctgcgcagtcagtgcggattctgttgaccaaaccgtcaaaatggggcagtaccgcacgaaattgcttgaaggtaaaggcacctactctacagctgtgccatttactatcaagctggaggactgcgataccgaagtgtcgaaaaacgcttcagttgcgttctatggtaatcaggcagcggatgatgcgaccgtgctggctgtgagtaataccagtggcggcgcggctggtgcggcaaacggggtgggtatcgaaatccgtgattacaccgataaagttgtggagccaaacggtaacgtcttctcaacggcgcaaaaactggttgacggctccaatgtgttgagttttagcgcgcgctacaaatcaacggcggctaccgtcagcccaggcgctgcgaatgcggatgcgaccttcaaaatgcaatacaactga

SEQ ID NO: 439405 - DNA, 861 bp, Serratia marcescens
atgactgcaaaacaaccacctgaaagaaaaaaagataagagcgaaagcgaaaaaacttgctttatcataatgcccatagctgatgctagcggatatgactctgggcacttttctagagtctacaatcacttaataaaacctgcttgtgaagcggcaggttttaaacctatccgtgcagatgacgtcagcagctcccactttattgttgtagacatacttaaaaagatagttgaatctgaccttgccatatgtgatttgagtggtagaaatccaaacgttttatatgaactaggtttaagacaagcatttaataaaaaaaccgttttaattaaagacaataaaacagaaaacatttttgacgttcaaggttttcgctatgcgcagtatgatagcaccttaagaattgataatgtaaagaatgaaatacttaaaataagcatggccctaacagaaacatatgaagcaaacagtgatataaattcaatagttcaattactccaaatagaacctgcaaaaattgacaacaaaacagagttaaatgaaggtgatacagtactatttagagcgataacagaccttaaagaatcaattgaaagtttaacaataaaacaaagtaggttagacgagaatttatcgaaaaaccggaaaattaatctagttaaaaatataaaaaacaagggacttgaaattggtgaagattactatctattagatgataataggaatacaataacatatggtaaattcgaagaaattgactatcataataatgagctagtttttagagacctcaaaggtaggttgttccagacacacatagatgatcctgaactttcaagactaaccgaaattccattttaa

SEQ ID NO: 439406 - DNA, 1194 bp, Serratia marcescens
  misc_feature (969)..(978): n is a, c, g, or t
atgaccaatatcatactattcgagccagccaatgctaataatcctagttcaaatgttgatgagtttattgaattttgtaagagtaatattttcaactcgaagttagcgatttcatggaaaagcaatgtatggaagagatattatagattcaataaatttgacatgaacaataatcgaaatagcaaagatagattagatggtagtttcattgatttcgctaaagcttatatgtttcatattcactcgtttaacaggtcaaagtcaaaccataatactttgtcaatgttgaaaatcattgagtttgttttattgaaattatacggagaagctaatattattaagtgcaataatatcatttttgatgaatgtgcaaggttagcatctgccaaatattcaaaaatacaagcagttggaattggtaaagaacttgagaaactatgttcattcttaacaggaaacagaatgacgacctcatcatactttttctgggtaaatccgttaagacataaaataactcagagctggaaaggttatgaaccttcactcgaaggacactcaaaactaccagacataaaatccgtaatagctattgctgagattttctcaaaagacgaaagccaattgtctacaagggacattttcactacttctgttcttgcactactcatgtgcgctccaggaagaatttcagaaattttaagtcttccagcagattgtgagattactgaaaaagatgacaaaggcattgaacgatatggtttaagatttttttcagcaaagggttatgctggggatatcaaatggattcctacagtaatggtccctgtagctcaaaaggcgatagcccgtttaaaaaaactgtccatccatgcaaggtctgcctcaagaacaatggagggccaaggcactgagtcatccaaatatgcactcgttaccacaaagcctcagaattttccttggtatgatcannnnnnnnnngaattaaatattcaaatgctttatgtcttttatttgacaggcaactgtgtcagaagacaagaaaagattttacatcctttttcagacccacgcctgagttttttagaatggatattaatgctattgcaagtattaaaggcacaacaaacctgttcaaaagacacggctatgtcaatgaggatggtattccctattcaattaaaactcatcaattaa

SEQ ID NO: 439407 - DNA, 1314 bp, Serratia marcescens
atgaaatcaagcactttaaaaaaagagaatgtagtttttgcaatgatgaaggggtataggttcaggatttcagataataaatggcaattagatataaataattgtgtttgcccacataaggttgccgataaaatgccagagtcgatgcgtgttggttatcttaataccttggcatatttttcgtctgaatatagtgcaggctacataaagaatataaatcacatctttagccaatggctaagattaatggatcttgaaatgattaattccaaagcggtttatcaatttaatgttagcttaggccctgagaaaaaccataagctaaattcaataaagaactttcttaataaatggaaaaaactcggttatgaaggagtagataactcagctctgagaatgctggaaaaaataaccattaaacctaatttaacaggggaagccgttaaacgaagagatccgaatagtggaccactaacggaagaagagctgaaaatcatacttgaaagtatcagaaaattgttgaaagaagataaaatccctctgtttatgtattgctacgttattctattagcaacaacgggaaggaggccatcacagctaacttcgttgaaagcgaaagatctcatcagaacggaagagggttgttttctaaatataccgaaagtaaaacaaaggaagaacttcagaagtgagttcagcatgatgagaatcgacgatagcctgtatgaggaacttataaccttgattgatctgaaccagaaacatatcgaagatagggtcaagaggaatattagtcatttaaaaaatgaattacctatactcatggacattaaacaatatgtattaattgatactggacaaagtttagataccatcatgacaactgattttttacatatgaagaattcttttatctcaaacaaactaaataatttgactactaaattcaacattgggtcatcaagtaataacggccctatacggattaatgcaagacgatttaggtataccctgggaactcgtttagcaaaggaaggtgcatcagttgaagtaatagctaaagcattagaccataaatctataaactcatcagggatatacgtaaaaaattgtccagacaatgttcatgatatagacaagatgcttaatcctttttttgaaccgctatcaaagatatttcttggagaagaacagtcaaaaaacaagaagctctttactgaatatattttaaattcgttcggattttttaatgataaaaatgaccaaattgaatgtttcacttgtaaaaactttagagcctggagttcccaatga

SEQ ID NO: 439408 - DNA, 1206 bp, Serratia marcescens
atgtcatatcaaataaaaaaatttgtgatgagcaatggcgaacgaggatgtttggttctcgataaagaaacacagttgcctgtttattatcaaaatctctatcttacaaccaatgtcaggaatagaagtgcgaccgcatcaacgatggagatagttgcaacaaacttactaatactaagcaatttcctcaaaagcaggaaaataaatataattgataggattgaaattaaggagttcctaagtgtagcagaagtggatgacctgatccgttatgcaaggcagagatttgataagcaaaagattacaaatgtaagattaataaaagggtatcagattgcaagaagaactttcggttatagaattcatgttttttcgagctatcttaattggctgtgcggtttacttcattctattaagggaattcatgctagatatgaagtcgagagtttcattgaaagtattagagcacatctcccgctaaataaatctcttagcatgaatgacagaaaagataaatcactgagcaaagaagagataaaaaaactgtttgagttattagaaattgaaggaagccaaaatccttttcagaaggatgttcaagtgagaaacagactcatttttaccttactattgaattgtggtttaagagcaggagagctattaaatctaaaagttaatgatttaaatcctagggattacacactaagtattttcagaagacatgattgcattgaagatcgaaggctgaatcaacctttagtcaaaactggtgaaagggaaattccattgtcggacgagttagcattggagattttggattacataaataactatagaaataaatacaccaaaaagaagaagcatgacttcctgtttgttacacacagttcatgtaaaacagttggagaacctttatctgtttcagcatatgaaaagataatttcgactattaaaaaatcaagcccggaattaaagaatttatcaggtcataaattgagacactcctggaactatttctattcaagtgaaattgatgattcgaatttagatatcagccgaaaatcaggtttgaggtgctatctcatggggtggtcaaaagattcaaagatgtcagaaaattataacttcaaacacatatcaatgaaagaaaaggaagttattggaagagtttatgactctttgaggaaaataactaaaggggaatga

SEQ ID NO: 439409 - DNA, 942 bp, Serratia marcescens
atgaaaaattatatttatattgacactaatattataagtgatttcaaacccttcacacctgacaaatggcaatcattcaataaagtacagaagaaatatcacttccctttttcacacgctcatttattcgacctaaaaaatagcccagaaaaatacttagttgaagacttggatctacttgaacgcatatctgataggtatggaataaatgaaatagacgaaaatggtaaatttgtaattaaaaaactaaactcaaaactatatccattttttaattctgttatagaaactgaaataaaagatgaagaattagctaaaaagaacaggatttttttcttacctggttatgataagcataaaatcgaattatcgaaaatgcacaaggattcattcctaacccaaatgattgataaaaataacgggattttagatggaaactttcccaacttactaatgacttatttaactgaaaacatggattctccaaatatttataaaagtttaagaaaacaagtccaagacttgatttctcatgcaaaaaaatacaatacatttaaaaatctcccgaaagaattcgtcggatttcttgagatattttcaggttcaattaaagaagaccagatttttgaaaagttagttgactatagaaaatgggcattgaaatttacaggtaaagatttcagtaaactttcacaaccagaacagatagttgatatatatatgtctttagatatagtgaagggttttagtgaagatatttctaaaaaaaaccgttgggtaaatatgtatagagatgcacaacattgcggcaatgcaagtcaatcaaaatattatattactaaagaacaaaataataaaaataaatttaacttcataatgagagagtttaatttaaaatgcagagaaattactcttgaagatctcttgaaccgaatctcgtag

SEQ ID NO: 439410 - DNA, 636 bp, Serratia marcescens
  misc_feature (271)..(280): n is a, c, g, or t
atgttatccaacaggttttatgttttgagagtatgtattcctatttatttacttccttttttgccacctataagacaacaattcatattagaaagtgaatgtgcggatggttatattagtatttacatgattattgataagttaaaaattgaaaaacctgttatcttctatggaatcttcgctgcaactttaagatgcaataaattaaatgatgaagaattaagtgaacaaaaaaaacaaatagtaaaaagaaaaacaccagaaaccgcannnnnnnnnnccgcaaagatatctataatattttcaggtggaactaaacttgcagataaaatatatctaacccaagcagcgtttaatagcaaagagcctaatcctcaaatttctgatgaagaattattatataatgaatttgaagtatacaaggatattagtgctggcgattttgaagtaattatattggatgatgaaaaacacaacttaatccccactgaaaatgaagaacagacggaattatttgaaaaatgtatccagtgcgtctttgaccatagaaatagtttactttctagcattaaaaatttagcgacagcgcaagaaaaagcaaaaccgaacaatcctctttctagatttaaatcataa

SEQ ID NO: 439411 - DNA, 687 bp, Serratia marcescens
atgagtcctgaagattttcttactcaagtagagttagagcgtagctggagagaggaagagatacgctctctcaataatattatggagagatctgatgataataacgcatatatgatgcgaagagcagttgtttgtttattgtatgctcacattgaggggtttgttaagttttccttcaatctatatattgatggcataaataaaatggaactaaaatgtagccaagttaagcctattctagcagcggcagttcattattctgatttattaaaaatgaacaatcccgatattaaaaataggatttttaaaaaagttttacccgatgattcccacttacatcgaatttgtcgatatgaagaattttttgagaaaatttctaatgttatggatgagacaatttttattgaagatggttatgttaataccgaaagtaatgtgggaaaagaagttctccaaaaattgttatatcaagttggattgtctcatacatctttaaataatgttattggaccattaacacgcttgaagaataaaaggaatgatatatctcatggtgttgataaagctaagattgaatatgatgagtataaagtgtattacgattgttctattaacattatgggcgaactgatcaaggttttgttttctgcttatcagaaaaaggactttatgcttgttaaacaatag

SEQ ID NO: 439412 - DNA, 1116 bp, Serratia marcescens
atgaatcctgaagatattcttgtcgaaatagaatcagagatggataaggttcatacacagagtcttgatctctcttttaatgagttgatggatatgtatgaaaatggtgagcttgatatcagtcctgactatcaaagactttttagatggactgaaggtgcaagatcaagatttatagaatcattattacttgagatgcctgttcctcctatatatgtggtagaaacagaaaatggagtttatcaattaattgatgggcttcaacgcttctcttcttatttacatttaagaggggaacttagtgctgaacatatggatatagccaaaggggataaacttgttttttctgattgtgatatcgttaagagtcttaatgatctaacttatgatgatcttcctttggcattaaaaattaaacttaagcgttcttttgttcgtgtcgaagttgttaggaaaggtagtgataataaatttaaatatcatatgttcaaaagattaaatactggcggagaagctctaactcaacagcaggtaagaaattgtactattaggatgctggacccgaaatttaatgatttcatcattgaactttcgacttatgatcattttaaaaaatgtatttcttatttatcagagtctcaacgacttggtgcttttgaccaagaattagtgttgaggtattttacatttaaaaataacagagctgctttcaagcacgatatttctgattttttaactgaatatatggaaaacgtatcgtctggaaacattccttttgattacgatgataatgaaaggaatttcaaaaaggtattcgaagtgctctcaaaagcacatggagagaggatctttggtcgtcttggtgccgaggacaaattacaatcaaacttcaatatttatcatttcgagtctattacaataggaatccaatctgtaattaataatattaatgagcatgatgatgccgtaatcgctaagattagagatggtattctttcacttaagaaagatgaagttttcaaagctcaaacaactggtggtggaaaaaactctccaggcccgcttaaaagtagaattgatgtagctacaaaataccttgaggaagctttgaaatga

SEQ ID NO: 439413 - DNA, 585 bp, Serratia marcescens
atgtttcattgttcatcttcaactaatttacctttagatgacaatagtatagatgcaattattacttccccaccatattgtactcgtattgactatggaattgctacatctccagagttaggcgtattacttggtaattaccccaaagcaatagatgaacttagaagaaagttaacaggtaggacaactattgataaaaaagaacttgaagttaattgtgtcggccctatggccaacagtatattaaaagaaatattagagcatgactctcatgcttcgtcatcctattactataaaaacttcgcacaatattttatcgaaataaaaaaatctcttgcagagataaaaagagttatcaaaaaacacggatattttgtatgtgtcgttcaagactcatactataaagaaatttattgtgatcttgctactatctttacagaaatggcagaagaaaacgaccttcaacttattcatcgtcaagattttatgtcaaaatttttaatggctaatataaataataaagcaaaaaagtatagagataaaatgaccgctaacgagacagttctggtttttcaatcaaaatag

SEQ ID NO: 439414 - DNA, 525 bp, Serratia marcescens
atgcccaaagacgatcatacaagaagctatagatacgctcattacaaaccagatttacgaagaggattttgtgcttcaaccgggaaaatgaacggtttctcgtttgaatacgccaacatttcattcaaggcttcgcagcttggaaaaaagtattcatggaaaaacttagagccgttcatcatcattgatcccccgaccatagttaacagaaaagccgacacgtctatttttttcgttggaatggatgtggaagacatacagcttccctcatcggaggctatctcatttgtagctgatgataaaacctgtggtaaaagctatgtggacgtagcgatgcgatggatagaaaccattccttggatagataaaatagttaacaccatcaaaaaactacgcaatccattgttaaaggcatttaaacagtcgcccaggattttttcggctaccccccttcatatacacaatccccctctttctgctgctgaaaaaactataaaatcaaacgtttttaggtcgaaaatttag

SEQ ID NO: 439415 - DNA, 579 bp, Serratia marcescens
atgaaatacttcatgatgaagcgtgttctggtagcaatctttcttcctattgtcgttgcttatttcggtggggctaaagtaatgactgtatattgggtccccctgtttttcatcagtgcgatgctctgtgcaacagcatatggtaaatatgttgtcagaaagaataactctgcaacagtcaattatcttaatgacaataatgatgggatctatcttcataaattcaatgattgtgaaatccggttagacaaaaataaacaagaggttttccttaaaaatagcgaaggagcaaatacatattcttttgaggaaattaaagagtggagctacaacattacctatggtggtgaagttgcaggtgctggattaagcagtatcagagaaaacggtaaaacattaggtcaaaacatcgctgatacaggtctctttatccgtgtaaaagacgttcgtaaaccagaatggcatatccggttctatcctcgtaatgattcttttaactctcgtaagggcattaatgatctcaaagcacaacttaaccaatggatggagatctttgaccagaatttgaatgctgcatga

SEQ ID NO: 439416 - DNA, 564 bp, Serratia marcescens
atggtgaaaccattcccacttcaaaagatatatatagacgagaaaaacactactcatttgaatttactttgtattccttttgaatatattaaagaaaacagcaggtttataaataataatgttgatattttacaaagaatcattgagtacaaaaatgaatgtaatttacaagatctatacatcgaaatggatttcaatcttgttaagataattgagtgtccatgttcatccctaattggaaaagattattttctttttcttgagaaccacagtttgctaaagaaaatattattgaataaaattgagcttgatgaggatgatattgtaagagaggttgttcttttgattcaattatttgattgtaaaaaagctctgcaagtaattcagtatattctttgtgaggatatattttgtaattctatagtaaaaaaagtatttgatagatatatagaactacttgataaggaaaacaatttttataggttcaataacttcaggtatgtcagggagctagttctgcataaacgttctttagaaagtttaaacatagaactatcatgctaa

SEQ ID NO: 439417 - DNA, 1221 bp, Serratia marcescens
atgttgaaagggggcaatgtgagccgtgattcttacgagatccttcatgaacagatacacggatggttgcatagaaaaaacattgcatcttctgtaaggcgtgtttcaactctaccggtagctattgctacggatattggtttaaatcgtaaagaaaaccaagatagagttgctgttttaaaatttagaccatttagcaaaactagggatatggttgtagttgctcttgccgatggtatggggggcatggaaggtggtgcaaacgcagcgtcattaactttatccacattttttacagaaatcataagaaactctaacttacccatacgcacatgccttgaaaaagctgtattgaaagctaataattcggtgctaaatgtttacaaaggcaatggtgggtcgacattaacagctatcgcccttgaggacgatgagaatgttacagctattaatgttggtgatagccgtatttatggcgtttcaactgaaggaatcgttcagttaagtgaagatgatactttagctgcactagccagaaaatataacaatcatcatggagaggaggtagaagggattgattcaagatttggaggggaattagttcagtttattgggttggacggggttttagaaattcattatcaccatgtaaatattttaaaaaatggaagtgttcttttaagttctgatggtgctcattcaattggtaaggaaaacctaaagagactttatgctcattcttcgaatactggcatttactcaaggagggtgattgacctcgctagttggtttggtggttttgataacgccagtgtggctgttattgagttatctagtttattaaaggagcttgatgtttcttctggtgatgtaataaatctttgggatccatttggtgagttgaaaataataagtgtttctcctgttatacaaaatgaaccaagctcttctgaatctgatgttcaaaaggaattggaagttaacgatattattaaacgtaataatgtgttactcgccaaggagagggaggctcttgctgctgaagtaaaaaaaaccgctataaaaagaaagtcaagggcgcgaagtaaaagcaaggttgctccaagtgacgctgcaaggaaaaaagaattgaatgggaatgataaattggaaaatatttctcaatttgacatgcctttttctgaaagtgattctgtaaaaggagatgagaatgacaaataa

SEQ ID NO: 439418 - DNA, 1071 bp, Serratia marcescens
atgacaaataaaactctcccggaacgatataagtgtacaaaggatcgtgagtccggaggttttggcagcgtagttaaatgtttggatgttcatttagataggtttgtagcaataaagtcaattaacgatcctgaagattctggaagaatgagggatgaattttcagctttgatgaaaatgagatcgaagcatgtggttgagttatttgatgttatagaattcgagggtggtgatatttcaatcgtcgaagagtacattgatggtccttcattgcatgatgtttctgacgacattcgagatgctaatcatcttgtgaaaatattatggcaaattgcatctggtatttctgaaatacatgcgcatgatattattcatcgcgatatcaagccggggaatatgaagattgaccaagaggggcttgttaagatatttgattttggtttgtctaggaatattgataacgcaaaaacagtaggttttaaagggactccaatattcgctgcgcctgagctatatatgcagaatgtgaatttcacaaaagctattgatacttatgctttttctgttacagcaatgtgtcttgcaaagaccccgatacctgatgaaatgacaaggtatccaaaaattttaacatcgaatccttttgataattcagaaatacagcttcctaattttcttaagaatttgttgtacaggtgtctggattctagtccgcaaaataggcccagtatgtgggaggtttgtaatggtttgaaaaagtttctactctacaactctcatcgtgcattgctaatatctatctcggaaaataaacctgcaagagtcatctctgccaccaataaaactgagttttatgataatcctggtgtggggagcattgagattacatactctggttctgagttttatatctcaaatatttctggtgaggtgcatattaataacattaaagctaggcagcataatatcttgccaaactcttgtgtaataatactggggccttcagggaaaagttctgtcaaacgaatttttattacctttgatctttcgcatccggaggttgtattatga

SEQ ID NO: 439419 - DNA, 1062 bp, Serratia marcescens
atgatagagttaggggttggagctaatgtaaatcggtatacaattgttagcgagattggtgagggggggatgcaaaaggtttatttggcaagagataatatactgaatagacatgtggcacttaaaacgccaaaaaataaatcagcagaaaaacgttttcatagaagtgccgtgttggcttcaaaagttaatcatcctaatgttgctaaaactcttgattattttactgatggtgaacgggagtttttaactgaagagtttattgatggtgttgaccttgataaggcattgctaagtagttacaccagtgtagatccgtatttaacggctaaaatatttcataatttatcaaaggcactttctgcctcgcaccatgtcaatgtgatacatcgagatctaaagccatcaaatataatggtggtgggtggcattagtgctacagaggttaagataactgattttggcatatctaaaatggctggcgatgagattgacgaagctgcaaaaaatggacagggttctataacgtcatcacaaacagctatgggtgcattaccctatatggctccagaaattataaaaagtcaagggcaagtatctaagccatctgatgtttgggctttgggtgctatgatgtttagaattcttactggagagtatccttttggtatcggctatatggcgataccgggaatacttacaggcgtgcatgttccttaccctgatttcataacatcgaatcgacaattcgaacctctagcaaaagaagttatgaggattattgaaagttgtttagctatggacccagcggaacgccccactgcagatgatttggttaccttatgtggacaattatgctatccagtctgcgaaagagaggaaggtgtaattggtgatacgagattagcttatgggtttattaaagtagctcaacagcctcaggttttttttcattatgatagcgtatatggaaaaaaacctatcaataatgataaggtgatttttgccaaattccttggtggagggcatgatagagctcacccagttattaaagctaaatag

SEQ ID NO: 439420 - DNA, 903 bp, Serratia marcescens
atggctaattattactacgaggatgtattcagaaaagcaatagaagatcttgaatcattttataaagaggaatatgatttttctgtcaaagtgaattattctgatgatttgtggcaacatgcttcgattgttgggaaaaatgaaaattcaaccattaggttctctaaagattgttgtgcccggaaagtaactgactcaacagagctatttgtggcattattaatcgtatgtcatgaacttgcccattatttaaatcatcataattattacagttcaactagcaatgaagataatcgaatcatagaggcatgggcagataattttggctctaaaattttcatggtacttataacctatggcagcaacattatacgtatgcgtgaaatattttccgtgcctagcgatgctggtgaaaggattaacttaattggaactgcatttaaaaatatctgcaatatgttttatagaaatgaaagcaaaaaatatcattatcgggttgaaagaatgatgcatatttgtgcggggattagcagtttccttcagtttcattgggagaagctagaccttcagttaaccttgaatatttatctaaggctttacaaacattcagggatgtacgatatgattgagactgattatcattctttcccagtaagcaatgatgatttcaataaggttattgatatacataagccacttcaaaacggtaatgcagcgattactttgggtcttaagaaaaaatatagaaaatatattgacacatcattcgttgaagatatttactttgcaaatctatacagggatacattctcttttagtgctcaggctcaactggaaactggtgaataccccgaagatttcaaaaaaatgatgctcgataaactggagaggaaaaattcgtga

SEQ ID NO: 439421 - DNA, 525 bp, Serratia marcescens
atgacaacaagtggggacggctggttgaataaacctggctggctcctagccaaatcgccagtgcataccggtaccagcatcaggcaggcggacagcatcgtggtcaccaccttcccggcggatgtggtgcaggatctgcaagactttatcctgtggcagccggatgcgctggaaaccggggttgaagctgtctatgtgatggtcagtgatccgctggactcggggcgttttacgcgtcagcaactggataaaaagtacaagcacgcgagtgactttggtgttgcggacaccagaaaaaacagagagactctgactcaatatcgcgatgcgctcgaggcccatttgaaggataaggatacggtagagaaagggacttatagaagagaaaaaggggctaaggtgtttttcaactcaagaacaaataatgtcgttgtgcttgataaaaatggggtgtttatatcaggatggcatttaacgccaggaaccccacagtataatggctatataaatacaggagtcttatga

SEQ ID NO: 439422 - DNA, 480 bp, Serratia marcescens
ttgcaggggcgatacgacctgtatgccaacctttatcatcatgaatttgtcggctctcaccattcgctggtgctgaatgtcgccaacggtggtgggcaaggctggtacgaattccgtaatgatggtaacgcctacaccaacggcgcctggcacagcagctccgatgcccgcatgaaaacggacatcacccaaattgccggtgcattggataagctggccaatattggcggctacacctacctcaaacagggcgtgccggaggccggggtgatcgctcaggaagtggagagcgtattgccgcagtcggtgacccaaaccgaattgaagctcaacgacggcagcgtgctgaaggatgcgcggggcatcaatatcaacggcgtggtggcgttgctggttgaagcgcttaaggaagagcgagcggcccgagaaacgctggaatcgcggttggcagcgttggaaaaagcgattacgtgcgcctga

SEQ ID NO: 439423 - DNA, 699 bp, Serratia marcescens
atgaataatacaaatgaaatcaatagattagattgccttgcgataataggctctcatgctagaggtgatgatgattcaaactcagatgtggatctccttggtatcatatccaatgataaccatcatcagatgatgaatgcaaaaaaaataaacctctccacatactctgaagtatatttgagaagtatgatgagtgctggtgatatattcgccttacatatagtaaaagaaggtattcctctaataaactcttctcttttttatagcatttgcaatgattttaaatataaggataactataaaaaagatagaaaaatagcttacttgatggggagtatgatactattaaaagcagaggctataacaaattggaatattgctaataaaagaatcacatggtgtgtaagaacttacatcctgtcattaatggcggaacaaaaatctcctatattctccaaggaaggcatagcattttatggatgcaatttgcatgattctatttcttatcatgaatatttggcgttagttaacgctaaactacagaaagggtattctgtgcttatcatcaacttgctaaagcgttttttagttgagatagctgaaaattgccctgacaacgaagaggccaaagatttattaaccaatgaaagtatacttgttaatactttcgaacagatgatgttcgatatataccactag

SEQ ID NO: 439424 - DNA, 1242 bp, Serratia marcescens
atggataagaaaaaggaatttaaggatttccttaaaaaaatcagacagcacaggaaggaaaattactgggatgtttcatttgaccctgatatagatctggatcattttgaaaacgcgattctgactgacttttgtaataaaaaagatgtagtaaacaaagggagggtaacattttccaataaaaacatctctatcgaagctcatgaattttcaagagaaaatacagctatagataaaagcattttgattcaaaaaattgattttgattgctgtgacttttatgggaataatggaggaaaaaaaataacaatcaaggactgtaaattccataagtgttatttttcttttagtgtttttaatgatattaactttatgaactgtaagtttgaatcgtgttctttttcacaggctaaattttatagatgtatatttgatgcaagttgtacattttataatatttctatatctgggggaaagaccaaatttattaacacagagatcaatccgataggattgtttaaaaaaatatacaaaccctttgaagataagcccgaaagctataagggaaaagatataaataaagagagatatctattggccaggagtatagtgaagttatctcgaaatattcttgagtcaaatcactcatgctctaatgatgacttatactatttgtcattaaaaaacttacatcttgttaagctcgaagagaaaaaactttataatgcaagtaagatttcagatattagagaaaatataaaaagaaagaaattagattgtggctctagagaaaacaaagaaaaaagatatattttcactaataaaattaaagcatggttctttacttttaaaaaaccagcatatttctttgaggataaggttataaaattgtttgggtttatgaattcttggggggggagtcttcagaggttgttttttataggtttttctatacttgtattttattgcttgatatatatgtgcatggataatggttctgttaattatatggtgagtgatagtagaataagtgtagtacatgctgagaagtggtattattttttatcttcactgattaaaagctttgatgtcacattccttgcaggttatacaaaacatatatctaattctgatggtttattgaaacagtacgttttgctaagtaacatgctacttggactgttctggtatgctgttgcgataccatcattgattaataaaataagtgtcacaagactatga

SEQ ID NO: 439425 - DNA, 531 bp, Serratia marcescens
atgttgataatgaggatgagttacaacgatctttcaaaaaacggaggagaagcgaagctccacgtctatgggctaggtactttccccgttttttctggtaggcagccgtacacaaatgatcccaactgtacctacattgagaacagtgcaatacctgttggtcgttattgggtggttgacagaccgagaggtagtctagccaatcaagtccgttcgtgggtacttgaccagtacacaggaaacgatcatagcgactggttagctctgttcagtgctcaaacaatgagtgacagcatgtttgtaaataagatcgcacgtggtagttttagattgcatccgctcagacccgatggccgcggttatagtgaagggtgcattacgtttgtgagtcgtctggagttttacaaggtccgtcacttcatccttggaatgaagcttattagagttcctggggcacgcagtacgttgatgacctatggttttgttgatgtgcaaggggagagcaagtttgaaaagtgcatcgctcgttaa

SEQ ID NO: 439426 - DNA, 1341 bp, Serratia marcescens
atggactttattaaagaatttgacgttgcaataagactaggcgttaaagggaatattgagggtacgttgttgaatgctgatagtgattatgtattcgaacttgcagaaactctatatcttataacttgctatcactttcgctttgatggaaaacctaatgagaacttttcattcgtcgctaactcgtctttaagtggggggcgacatccctgttcagctccagggtgtagaatagacaaactcgatcagttaatatcattctcatctttatattctgacgaagtatatatacaaaacccatttgaagaaatagtcacaagtggagtcgataacttatgcttagcttctcgacaagagcttgttgcaggaatatataattacctatatttaaagccattaataaaaagaggaattataaaatacgcacagaacatggtttcactttgtcatgaccatcatatttcattagctgaaccgctacgtgaaaaaatcataaataaagaaaatcaactttacaatttacttcacgactttctacttgaaaattgtgaagttgcgttggatatgacagatactaataaacctttttttgaaataaaaggttcaacaagtatcattgaacatggaactatgtatttttacttgctagaaccacttggtgaatacatagagcatttatgttcaaaagtaatgccatacaaattcactaaaaaagaagtaatagatgagggaatattgaggttagtaatagatccaattataaaagatctgtcggatcaagagtggcattcagcgttttatggaacgtcctatttatgcgataaccagatccagatggatatagcaagcaaattaaatagtgctgtatacaaagccaattcaacctcatttggctctgctgttaatcattatttacctacaatccaaagtaaaagcacggacgatatcttagcattaagggataaagaagctgaagcatttcatgtgtatagagataagataaacacattaattaaaaaaggtggtggttggagtgaaagagagatatcggagttattcagggaacagatactcccagaaataaacattatagaaaagaaagttagagactggaaaacaaaaaccagaagtggtttaagagataaaattataataggttccggagcaatatcttttggtttatactcaggaatgctcccacacgattttagccacttatttgctgcggcaggaggaggtgctgctctagtcagcgctgcgattgatttaagtaaaacattaaagggaaaagaagaagctagaagtaacgatttttattttctatggcacgtcaacaaataa

SEQ ID NO: 439427 - DNA, 1101 bp, Serratia marcescens
atgaacgatgtatcatacgtacctattttaaagactaaacgcgcagagttttctgcactaaatcaattgaatcagcgggttaagtctaagtttatccccttgttcgaaattgagccagttcccttagatccagagacggatgtaccagataaaacatataatgagcacttaaatgatttcggtaagaaactagtttcaccatgttccgaaatctcaatgatctacctagacgggcttctcatcgaagaacaattcatcagtgcaggagacgaattccctatatcaaatgctgtaaatcaagcaagggcccatggtttacatgtggtaccagttagctcccccacccgtagctttaattatttacgtgcaatagatgaccttgttcaagatgaaatatgcttacgtctaacagttacagatcttgcaaatcctcaattaatctcttcttatatttctcgtcttaatatccccattcaacacattgatgttgtaatagatttaagggatacgatctctgatgactcactacaatctgggcaaagtaaaacgctagctatagggttaattaataatctacataatttggggagttatcgccgtgtaattttagccggtggctccttcccagtagatctaagccaaatttcaattggtatttattctcagcctcgttccgaatggattttgtggcaacagctacatcaaagccaagaactcgccagagaaataatttatagtgattatggtgtacagcatccagactatacgagattagcgactcgatttcctagcgtctcggcaagcgtgcgttacaccggcgatgacgacttttgggttttcagagggaaaaaagctaatcaatacggatacgatcaatatggcgcacatagccaagcgatcgtttcacaccaagagtattcagggccagcatttagcgctggcgataaagaaattaacgaatacgcacaagtctacgcccaatatttacaaagccctgcatcaaatcataaatttggaagtgctgaggtttggagaaaaattgggcaaaaccaccacataactaaagttgttgatcaactcgccagtttatacgggctttaa

SEQ ID NO: 439428 - DNA, 579 bp, Serratia marcescens
atgagagatattgacgttagacgagctgtccacacgaagatccttaaggaacatcacaaggatccagacactcttataattgacgaattcgtaatgaatttaggttcaagccgtgcagatattactgtaatcaatgggttaatgcatgggtatgagctgaaaagtaaaagtgacacactcttacgcttaccatctcaggttgaattttactcatcggttatggacaaggtcaccctggtggtttctgagtgtcatgcacaagaagcagagaaaattattcctacttggtggggtataaaaattgctactgaaggtgcaagaaatgcagtccacttacatactgagcgcatgaatagaatgaacccatccgtagataaaatttctctttctatgttactttggaaagaagaaatgcttgcaattcttgaatcatatggattacaacgtggcttgaagagcaagccacgtaggtttttatggttcaaactgtcagaatgtttagaagttaatcagttacgtgatgaggttagggctaggcttaaagcccgtataaactggcgagttgatcaacaactttag

SEQ ID NO: 439429 - DNA, 180 bp, Serratia marcescens
gtgattgtcagcattctctcttacagcaccattattttctctacgctgcttggctatctgatatttggcgagcggctgtcttatatcgccgccgccggtatggcgctgatcgtgttgtccggcgcgttggcggtgcgcaagcgtgcttcggccaagtccgagcaggcggcggtggcataa

SEQ ID NO: 439430 - DNA, 852 bp, Serratia marcescens
atggataacaatcatcaaaaattcgattcacagtcgattgccaatcgggtcagggagctgtttttacattacgggattggaaaacgtcagcatgcccgcgaactcagccgcatcttggatctgagtttttcacatgcgcaccgcaaattgaaagggcaaagcccctggacgctggaacagatcaacagcgtcgcggccgcgttgggagaaacgccggcggcgatcgccgatttgagcgccgaacacgagacgaccgagccaaacatggcgcgtgatgccatctttttcgtggcgggggtggcgatcccttgcgtcgggcacattggcgacgaactttctgccgggcggccggcggagtttgtggcgctgcgtgtggaggggcaatggcatatctatcgcgccgaagaggcgccggcaggtctgcgttacggcgtcgaactgatagaaatccggcccggctacggcgatgacgagcggttgagcatcgcggtattggacgattcgcatcaggcggccgatgagctggccaagtacctcggcggctgcggtttcaacgcagtggcgttttacgatgtcgacagcttctgccaagcgttgcagcaaagcctgttcgacggttacgtggtggactggctgatcggtgaggaaacggcggatcgctgtatcgccaccatccgcgcctccgacaacccggacgcgccggtactggtgctgaccggcgaactgggcaccgaccgacgcgagtcggagatcgctcaggcgatgcgcgagtacgatgtgctcggtccttatgaaaaaccggtgcggctccatgtgatcgaagccgcactgcaacgctgttttaatctttag

SEQ ID NO: 439431 - DNA, 615 bp, Serratia marcescens
atgagcatcacggcgcaggtaagtatcgcgcaaaaattgggcttcacctcccaccagaatgctgttccgatgttacgtgagcttgtcttgcataacgaatccgatcaaacctaccaagatctaacgttgcacctgcaaacagcgccgtcggtgctggaagcaaagcaatggaatattgactgcctgctgcctggttcatcgattgatattcgtgaacgagatgtaaggctcaatgcggaatggctggctgaacttactgaaagtgtgatttgcgaagtcacgttaactttgcggcaaagtgacaaagagctcttcacgcttcattatcctctcgaggctttagcgaagaatgaatggggtggcaatgcaatgtccgaactgctgccctctttcattatgccgaatgatcctgctgtagatcgccttatcaaagctacatctgatgtcttgcgcaatgctgggaaaaaagatgcgttggatggctatgaaagtaaatcccgaacgcgcgtgtgggaaatggcttctgcactatggacagctgtttgtaacctgaatatcagctatgcactcccccttcttccaagtcgctttttgactttcgatacagatcaataa

SEQ ID NO: 439432 - DNA, 774 bp, Serratia marcescens
atggggctcaatgctctggtaatccttagcgaagggcatgctttcgctggtttctggcttcaaccgcaagagtttgcacaactagttactgacgacgtatcttctgtccgtaagcgtgttgatttaaaagaaatggtagtgtttgaaactacgttggttactaaagcacagcctccttcctttactcaagctttcgaggaagctttaaagcatcttactgaagaggagtttcacgcagccattgatacccgtcgcgcacgtatgcaaaagattcgccctctggctctggggagcactcgcttagaaagtcggttagattcagagccgaatgttcgacatggctttgaagatgcacctgtacttccttcttttgaacttgacatagagatggaaggtacgaaagatgccgctggccgtctcgtacagtggcaacgtaaactactcgatttgacgacccgtaaccgcttattgcatttacctgacagtgctaaaagtattcgactgatatgcgctaatcccggttacctagaagacaaactggcagagggaaaacgaatccgtattgtctcattacctgacctcgagttgggggggcgtgatgcggaattatatcgccagcaaacaaatgcagacctccgggaggagtatgcccaacaggctttggagcgtggtgaagttgtatcacctctcgaaaaagaacgcctggaatcatcacttattgatctgtatcgaaagtcaaaaagcgacttggaagaagggggagtgcatagctga

SEQ ID NO: 439433 - DNA, 384 bp, Serratia marcescens
gtggacactttgtctattaaagggatttttgaagttttcattaacaattgggttccaggtatcttcaccttcattttaggtatctgttattcaaatattattgaaaaaaagaaacttaaacagaagttaaagaatgatattcttgagatcttcataccggtcttcaacgcaggcaacgagatctcattcgaaatcgcggagaatgcttacaggaatatgagaggtacctttcagtcatacaagagaatatatcctggcatcttcaataaagaggcagagagtgagcttgaaggcctactaaaagaaggtttcctcataaatggcgaagttaatcagcattactttgaaccagccaatattgagaatctgattaaaagattgtag

SEQ ID NO: 439434 - DNA, 1275 bp, Serratia marcescens
atgagtgttataaaagatttcttagaacaatatagcaagcagtatgattactattcagagttggcaaaaattggctcaaacttgcttgagcaggaattggaaaagagaggaattaaagccatagtttcattcagagctaagcgaccagaccgcttagaacaaaaacttaatcaaagaaatgaaaagtcagcatatgcagatgttgctaatatatatgaagatatagtcgatctggccggtgttcgagtggctttatatttcccaaaagacagggaagtagttgatgaaactattaattttttatttaacgtccgaaaaaagaaaaatttcccagaagcatcccacaaacctaaatttgaaaaaagattttctggttactgggcatctcattaccgtgttaatttgaaaaactctaaccaaaataagaaacgttacgaaagtgcattatttgaggttcaggtagcatcagttctcatgcatgcctggtccgaagtcgaacacgacctcgtttacaaacctctagcaggcgatttgtccgaagaggaacttgcaatcctggatgagattaatggattggtgcttactggcgaaatagctcttgaaagacttcaaaaagccataacaaaaagaaccaaagaaaaagataatatttcaagtagatatgaattgacaagctttataactaattcacttaataagaattatataaacaaacttaaattaggtgatactaaaattttatttaattatctcaaagataattctagtataagcgttagtgaactttctgaatatttgcgtaaaattaatcaaagtgaaaaagaaacgatcacagatcaattgcttctaatgattattaatgattcatataagagcgttggaagtaatttaaatctttcaaattatttcaaacatgctcttggggaacataaggacgtatcagggtttgagtcatttgttaaaacatggattttactagaaaaagcagtgtctttaattcacaatcaaaacaatcgtcagcacaaaaaattcttcacagcaaaatttgagccattagtttctgacggagtgctgacgcgggaagagtcaattgaactaaaccatttcaaaagaattagaaataacttacttcatggtatagaaacacctaacgataaagatctaaacgaaatgttcgtaagattgttagcattaaccgagaagattatctcatctattaaaaatgatgatgataaagctaagttgctcaaagaaataaagacattgagtgattga

SEQ ID NO: 439435 - DNA, 843 bp, Serratia marcescens
atggattacattgaaaaaagaataaacagtctgctggcagatgcggcagctttagaagcaaaactaggtgtagctgaacaacagtatgatgaatggatagctaaccaccctgacgtagatgtctcatttgaatcccaagaggaaattaatgaattaaaacaatcttttacatggaatttagaatcattataccttagcaccctagcttaccttgatgaaagaaatcttaatcattgcattggtatttttctaaagatgtttggtgaagatattacttgtcttaagcattccggtgagtttgtaaccggcgaggatttcagagaacctcagaatgtatttttggcaaaactaaatgtttttctttcatctttcgagtttactgagtcagcatgggagaaacgtaaaagaaatgcaggccaaatatatcttaagaggattttaagaaatactcatttgattaccgcgagaatggaaacgccccctaaaaccgaaactgaagtttataacgcagtcaaagatactttaagtgttatttttaacaatagtattaccccgaaaagtaattttcttaaaagtttcaaagaatacaagcctgatattttgataccagaactattcactgcagtagagtacaaatatgcgtctacagaagaaaaactaaagtcgacaattgaacagattgctgctgatgtcaagggttacaccggagataatgattacaacatattttatgcagttttttatgtcacaaccgacttctggggactggagaaattcaggaatgtatggatcgaaaataagttcccacaaaactggattcctgtttacgtagttggaaaataa

SEQ ID NO: 439436 - DNA, 1173 bp, Serratia marcescens
atgaaaccaaagcagacctttgctaatctttccgtgttggctgatcagttgcgcggcaaactagagacgatgaataccatcctgctctatgcctacaatggcacaggaaagacacgactgtctatggcgtttaaggatgcgggtaaaaaaacaattcaccgtaccttatcagttggtgatcatgtaggggaaccattaacaattaccgagacgatcggcgatactctatattttaacgcattcactgaagatctgtttcactggaacaacgatctcgatggcgatgcagatcgacgcttgctgatcaatagggattcgcgcttttttcagggactatttgagttagagatggacaaccgtattcgtccattgttgcagcgttatacagatttcgattttcgcattgatacagaagaatggtcgataagattttcacggatagtggatggtcaatctattgataacataaaggtttcacgaggtgaggaaaatatcttcatttggtgcttcttcttggccgtagtacagctagcgcttgatggtgctgaggtttatcaatgggtaaagtttgtctatattgacgatcccatatcttcattggatgagcataatgctatcacggttggtagtcatcttgcgcaactactgaataaggctgataaccctttgaaagtagtgatctcgtctcatcatcctttattcttcaatgtcatgcacaacgagcttgatgctcgtaaatccaaaaaggtcgctgcctattttttatcgagatctagggctgatgggagttattctctaagctataccggtgccacaccgttctttcatcatgttgcgatactgaccgagttgtacaaggtagatcaatccggtgagctatatacatatcatttcaatatgttgcgttcagtgctggaaaaatcagccagcttccatggtttctcaaatttttcagcttgcattgcacaagatgctgatgatcctgaaagaattttgcattcgaggcttatcaatatcctgagccatggtaactattctctttttgagcctcagcctatgcttgatgagaataaaagttatttcagaaagatcttgcatgatttccttaaacgatatccatttaaccctgatttatttcctcaacagattgaggaaggtgaagagaaactatga

SEQ ID NO: 439437 - DNA, 1374 bp, Serratia marcescens
atgcgtcgtaaagtgcattatgtaatcgaacctcagtatctttggaccagtattactgaattggcacgaacccaagatgcgaaattgcttaatacattacaggcaggcttcaggtacattgaggaagagtctttcgccagtgttttccgtggcttgttctcagagatcaacctagcctcagaaaaacttggaaaaacatacggcgacagaaatgaccgtctttgtaagataatcaaagagcttgctgaggggcttcagcagttctctaccgacagtgacacgttgggggatgcttacgaatatctaattggtcaatttgcatcaggctcaggtaagaaagccggggaattctacacacctcagcgcatttctgacattttatctgccattgttacgttggatagccaggaaccagcaactggtcaacgttcgcatttggacagtgtgtttgatttcgcctgtgggtccggatctttgctcctgaatatacgtaagcgcatgggacagcatggtattggtaaaatatacggtcaagagaaaaatattaccacttacaacttggcacgtatgaatatgctcctgcatggagtaaaagattcagagtttgatattttccacggtgatactttgctcaacgactgggatctactgcgtgagaccaacccttcaaggatgcctaagttcgacgctgtggttgctaatccgcccttcagctaccgttgggaacctacagaaacattagctgatgatgtgcgttttaaaaatcatggcctagcacctaaatctgctgccgattttgctttccttctgcatggattccattttctaaaagaagatggcgttatggcgataatcctacctcatggtgtacttttccgaagcggtgccgaagctcgtatccgtacgaagttactgaaggatggtcatatcgatacagtaattggtctacctgcgaacctgttcttttctacgggtatcccagtatgtattctggtgctgaaaaaatgcaaaaaaacagacgatgtattgttcatcaatgcatctgaatacttcgataaaggtaagcggcaaaaccaactgcttagaacagacgaaatgcctaacggtgaaatcgggcacatagaaaaaattattaatacttatcagttccgcaaagaagagcctcgctatgcacgtcgcgttagcatggaagagatcgagaagaatgattttaatctgaatatttcacgctatgtgagcacggccgaggacgcagaggaaataaaacttgattcagttcatgctgaattggtttctctggatagtcagataaaatcagcaacccaaaaacataacgaatttttaaaggagctaggattacctctcttaccataa

SEQ ID NO: 439438 - DNA, 999 bp, Serratia marcescens
atggaaaattatctggatgttgagtcaagtagtatgcatggtagagagaacgatactacgctaattgttactgaagactttgatatcgtacaaacacagcgtcggttactttcagttttaaagaaaatactacgctctgaaagtgaggcttttaaagtgactcagtccgggagctacaatagaatgagctatttactgaaggaagctatcggtggattaactttactggaaagtagcatcagtaagtatcaacagttgcatcccacgatacgactattcagttcaattctcaaaacatataacctgacagaactgtcagtaaccgaagccacgactataaacgatgtgttgagacgttttcgggaggaagcacaatcagtcactcataagaggcagctacgtaatttccagcgggctgccagtaaaaatctgaagggtgcactggactatgtggaccacctttttgaacaacatgcccgtttactggtggtccgtgttgacctgtcctggcggaaagactttgtaaaaaatcagaccatttcaaccgctatggcacgtcagcatcgccagcgcttatttaaacgagtgcagtcacatccattgtttcaggattgtctggggtatatctggaagcttgagtacggacaatacaaaggttttcactatcacacgtgctttttctttgatggcagtaaagtcaggggagatatcacgttggccagacgaataggagaattatgggaaaaagagattacagatggtcagggactgtattttaactgtaatgctataacgagtacttacgctcggtcgggaattggtgatattcattatactgaccaggagaagcgtgtagtcttgcagaaggcgatcgcttacatcgctaaggttgatactgctgtacggctgagtttgccacagagggcgcgtacgtttggacgtggggagtttattttacgaaaggataaaacaagaggacgaccgcgctcgcataaataa

SEQ ID NO: 439439 - DNA, 204 bp, Serratia marcescens
atgaaacatgaacatctgaacgatacgaacccactgaaactggtggacctgaaatttatctgcgaaagtacggggctttccccggcttatatttacaaactgatgagtaatgacctgttcccaaaacccctgaagctgggacgtgcgagtcgctggtatctcagtgaatttaaggactggctggaaagtcgtcaccggatgtaa

SEQ ID NO: 439440 - DNA, 1023 bp, Serratia marcescens
atgcgggaagacaggaaaaagaaaaacacagcccggaaacagattcgctcagacagctattaccagcggttattaaatattggcggatgtcaggagtcgccccccgttgaacagaaggatctcgcatggtttgatctcagccactacgattatgtgcgtcatctgagcctcaggcaactgatgacggaactgatagtccgtggttcgctgtgttccgcacccgatattgtgacgtgggatggtgctgtgctggggcctggagagatttttcagacctgttatcctgaaatcattgcgggtaaccccgaactacacccgttgtttatctctcatgagcagataccggaactgaactttctgcccggcccggatgcaccagcttctccagtgctcaccttaccggtccgggaactgagtatcggtgatatcgatgcctgctaccatgcattgtctgctgccgacatggataaggagttttttttacttgaggagtcccggcatccttgttatctggaacgtataagtaaaagcgatattgagcctgatacaccgttgaccacacttcagacacaagcttctggaagtcatattgaacagatttatctttctgttgacccttcgttttcaaagtctcagcttatcgacgccttcagggtgttattaacagaacttgatagccagtacgggatttttaaaccgtctgccgggcaaaataacggaatacgccagaagctgctgtatgacatccaggcttatcagctcattcctctgattgacttgttgctgtggcagctcaacaacaggaagaagataccgttaaggaaaatctataaccttctgcaaaatcaggcatttgatgcttcgtcagtcagaacaggttactccgaaaccaatttccggagcagttatctgaggaccttcgacctggtgatgaacctgggaaaccccggtgagattttaagtaaacttttagagaaaacagaggattatgatacatcgtattacgatgctacccatgtataa

SEQ ID NO: 439441 - DNA, 1179 bp, Serratia marcescens
atggccccggtacatgattacgagcgtgaagccaggttacggcacgaaaacgccatgcagcagtatgagactgaacgggatatatgggaggaagagcttaaggcactgaaaagtttactgaaaaaacagacaaaacatcaacaaccactggaggagataaaagaacgtatccggaaacaccggaacgacagaccggaggagcctgcccggatacagttgctgggcagtgacatcaccccggcggcattgcagtatcagctgcacaaaggcggaggttccatggcgttgcattcggctgagggggatatcattctgggcggccaggccatacagaacctggcgatgctgaatgacctgtgggacggggccccgtttacggtgtcccggcggacttccgaaagcttcacggtccacggagccagactaagtgccagtctgatggtgcaggatgcgccactgcgtaagtatttcagccgggcacagcagcaggccaggggcagcggttttctcgcccgcttcttttttgcccgtccggaaagtgccatcggaacccggacaggccacacgctggaaaattaccagcaactgctggcaccgtatcatcagcgtatcagggcattactggaggcttatacagagcaaacggtaaacgtcgtgccatccccccggcagaaactgactttcactccgaaggctcagctgcggtggatggatatgggggagtattttgaacgccagatggcagaaaatggtcggtattaccatttacgcgattttgcgtcaaaggagggcaataaagtggcacgattggcggctctattccatctcttcagtggtgaagaaggagatatccctgaaacgacgttaatacatgcgcagaaagtcagcgaatggtacctgaacgaggcgcttgtcctgttcgggccggagccggagttgcctcagcatatccgggatgcggagttattatggcaatggttggaggagcgttttatcgataataacgctcaggctttaaaacggagctgggtcagcccccgggtacccaaccgactccgtcagcccgggcgcctccagccggcgttgttgtatctgcaccagcaccggcgtatcacgttgtggcaggatcagcatacaactctgattgctccttacgactgggttccgtatacccgctga

SEQ ID NO: 439442 - DNA, 468 bp, Serratia marcescens
atgatgaaagtaaaaacaatgcttccactactctctctttttgtcctgatcccggcagcctgccaggcattcggaaacaacagcgcctggagcagtggatggaaccagggcatcactgaattcaccattctcggtaaaggtcagtctcagctctatcttgcctgtgacaatgagggggccagccctgccacccttacttataccgatatgaaaggccatcaggtcagtatggatactgatgctcagttgcaggtgaaaattgacgagaatgaagccattgacatcagtgagtcaggcagccgggctggagaaaacaaccttgcgctggcctggacgcaactacgtaacggtacacaggtgacggtttcaggcacacacgtcagcaagaccacgtttacgctaaaaggcgcacgccaggcattgcctgaatttggtacccacggctgcgtctcaaaagcctcactatga

SEQ ID NO: 439443 - DNA, 357 bp, Serratia marcescens
gtgaaaataacgacgtgcctgatggccttctcgctcgtgctgtccacaccggcattagccgcaaagccactgccggtaaaagtggaaaccagcaatcttgtccatcctgctgggacccgctacgcaaaagtggtggtaaccgcgctcgatgacagcgtgaaagtgcaaaatatagacgtgaaccggggtaactgccggataaacaactacaaatcaccgttttcgactaaagaaaccattttacccaccctgttgcactatggtcagtccgtcagtgtgaacttttacaatgactgtgtcgcttcagaggtggtcgttaccaccgataaaggtgcatggcgctacacctaccactaa

SEQ ID NO: 439444 - DNA, 213 bp, Serratia marcescens
atgacctttcttaaaatgctggtgaccgccctgggtcaggccctgtcctggtgtggcgggcatcaggccagattgtatattgaaacccaatttcgtcaggccggttacgatgacgacagtattgatgcagccagagaagcagtcacactgcttgtgactgcgctgataacggccttgatggcgcagatattacggatcctggacaacttctga

SEQ ID NO: 439445 - DNA, 324 bp, Serratia marcescens
atgccattcacactatcccatgaatgggggctacaaagcgatatcaccccacgatttggcgcaagattagttcaggaaggcaaccggctgcattacctggctgacagggctggtttgacgggaagctttagcccagagcagctgcaaagcctggaaaatgctttcccactgtttatagagcagttagaaaatatgttgcgttccggtgagctaaatccacagcagcaacatcagatgaccattcagcttacaggtctaacttgtatagctgatacccttagtagctgcggctacgtttacctcactgtttatcctgcccaataa

SEQ ID NO: 439446 - DNA, 234 bp, Serratia marcescens
atgaacctttacaaaggtaacgggaatattttcttgctggaaacgtcgctctatttcgtcgataacatggcctgcagcaccatttccagagttaatgaccaatttcattggcttcaatgctgttgcatcaatatacttcagcaaatgatctacataatcggtgagaatggatatttgttgataactaccacgtttatccttcactaccgcaggaaacgtattttcttccgctaa

SEQ ID NO: 439447 - DNA, 180 bp, Serratia marcescens; identical to SEQ ID NO: 438044

SEQ ID NO: 439448 - DNA, 213 bp, Serratia marcescens
atgtcaaaaaaacaaacactatcaaatacaaactatagttcgcctgactggctgactatccgtgaagcagtcgaagtgataaataaaaaaggactgaaaattaaaaaaaaagtgacatttacaggcatgcattacatggcagcattcatctctctatttactttcagtcgccaattacattacgaaaaatacagagatcgagctacaaagtaa

SEQ ID NO: 439449 - DNA, 585 bp, Serratia marcescens; identical to SEQ ID NO: 207906

SEQ ID NO: 439450 - DNA, 234 bp, Serratia marcescens
atgagaaaacccgattattatgcatatgttacccaggaaagtcagccggatactcagggcgagaaaaatacgtactggacaaaagtcggcgttgcctttgctcaccacggtaaagccggtctgaatattgtcctgacgcccggtattgccgtctccggcaaactagtcctgctggaaccccgcgaggaaaacagtccgcagcagagtacggctcctgtcgaaaccgcgcagtaa

SEQ ID NO: 439451 - DNA, 663 bp, Serratia marcescens
atgctttccaccactgcctttctggcggcggccatgcagtgcgccgccagcattcatccgtccacggcactcgacgtggcgcgggtggaatccggttttaacccgtatgccattgccgagattgttccgaactccggagaatcttccggcgataaacacgttaattctcaccagccagccagtcggggagaggcagagcatattctccgccgcctgatggctcagggccgccgttactctgttggactgatgcaaatcaccagcaccaatttccgccattacggcgtcacggccagcgacctgcttaacccttgcatcaatctgtcggtatttgagcgcattctcgccgactgttaccggcgcggcggcacactgaaacgagcactcagttgttactactccggcaactttgaaaccggacagcgacgggaatccgcctttaaccagaccagctacgtacagcgcattggctatgtcgtcccgtccacgcgggaagaccggcaccgtgcccctgaccggagtgtacagccctctgtccgttatcccgccgttgtgctgcgcggcgagcctgtcggtgccactgcgccggtcctgacttctctgcattatcccggtgccgtcattcgcggcgctatccctgttatccctgatgaggataaatga

SEQ ID NO: 439452 - DNA, 711 bp, Serratia marcescens
atggcaattacggtctattctcgtacattcaaaaaggaattggacatagttcaattgctaaacctttacttatcaaataacgtacttaattttagtgatttcaaggaatttgttgcgtttgatgcagagtgcccaatttgcaatgtaagcggtgcaattgttgtttcagaaggttattcgaaaacaacaaataaaatagttagccaatctcatttttcgtttagaacaaaagacggaacagacgcgcacaaaatattttgcgatcattacaatggcgatgataagcaaatagattcttcaaatgatggttttataaaattaggcacttccggctctgagattacaagtataattcgagagcttgtatgtagaggtattgaacatgaagagttcaatcaggaagatattagaaatatgcgacggtggtttactgaattacgccaatcaggcactttttctgttaactacagccctcacatgatcaacctagtaagagccagcatgtattcccgcaaaggagaagatacatatattgtcgatgaagagagaaaaaataaatcttggtttgatataaacgatgaagtttatcgttctttaagattcaaatacccatcattgatgatcgatatgaccaataagaataatgctattttctataatcttgtgaatagcaccacatttactaaacaagcgtatcggttagtagcatga

SEQ ID NO: 439453 - DNA, 261 bp, Serratia marcescens
gtgttcgatcatgacatggctcgcatttataacgttgagattgaagggaaacgtttctatgatagcgaggacagatatcgtctggattatctgagacgaaaaggcaatactcctcacagcattcacatgaccatgacagaggggcagactgaagatttcattggtgcctgggatgctcatgacgatgatgttgataacgaagaaagccgtttttactctggctcaccctcatcatggcaggacatattcgatattccctga

SEQ ID NO: 439454 - DNA, 1161 bp, Serratia marcescens
atgaaacgaagaactcgaattaactacacgccagaacagaaagcgattatctgggacagatataagcaaggggattccctgcatgatatcgccagaatgttcgacagttaccattcttcgatcatgcccactatccatcagactggtggataccgtccccctgtccgaaagcggcaccggttagcgctttcgcttgatgaaagagaggagatatccagagggctggtagcaaaacgtagcatcagggacatcgctgacaaattatcaagaaccccctcaacgattagccgcgagatcaagaggcacggaggtgcaaaacaataccgtgcagcaaaagccgatgctactgcgtgggaacgtgctctgagaccaaaaccttgcaagctaattgaaagccccacattgtgtaaaatcattgcagagaagatgcatcaggactggtcgccggaacaaatcgccggttggctaaaacgctattatccggataatcaggaaatgcatgtgtcacacgaaacgatttataaaacgctttttatacaaacccggggagcattaaaaaaagaactgcagcaatgcctcagaagcggaagagcagtgcgtagatccagaacgtcatcgcttaaagggaaaggattagggaaaatcccgaatgcgatacctatcagcgaaaggccaccggaagccgcagacagagccatacccggccactgggaaggtgatctgatccagggcttgaaaaactcctatatcgtcaccctcgttgaacgccattcccgctttgttatgctggccaaaatcagtgacaacaagaccataacggttatatctgcactgatcaaacaagcccgggaattacccgttgagctttataaaacattaacatgggatcggggtgctgaaatgaccaaccacacccgatttactgtggccacagacattcaggtttatttatgtgatccccaatctccctggcaacgtggctcaaatgaaaatacgaacagattgctcagacaatattttccaaaaggaactgacttatcggttcatagccagcaaaggctaaacagtgttgccagacagctcaacgaaaggccgagaaaaacgctagactatgaatcacccgcagagcggttcaatcagtgtgttgcatccatcggttga

SEQ ID NO: 439455 - DNA, 1080 bp, Serratia marcescens
atgctgacgaataaattgttttctttattgacaaattcaaacggtgatactttgattaagagcaaaaatgaaattatcgaagagttggggttgaatacgttaaatatcaatgagtatgaaggcaagaacttcgaagtatacaagtatttcgaaagtgaatttgagaaacttatctgtacaaatgctgaactctataggatagagcctgtcattttttatatagataactctacgatatgtaacgcttttgctacaaagcgtaatggttataacattatgggaatcactaaaggttatcctattctttttggagataaactcaaggaagacttttttgatagtttaatatttgctgcatttttaaataatgaaagtgtttcagatggctttgcgtcgttatataaaaatgaaaatttctcatttagtaaattcatgcttgattgctcaattcactttacgttccatcatgaatttcgtcatttactccagtttaatgtaatcaaagataaaacagacaatcatctcgcagagaattgttttgaacgacctttcgatcttaaaaaacatattctagaatacgatgctgataaaagtgccgctaacaaagttgtgctatatgctgcaagtgttcttagaaagtttggctttcggactgatggtgagtttttagcattaatatattgtgcattaggtagtttatttattactagagtgttgttcaattatggcttagttgggcaatggcaagaacctcttaaacctaatccgatgaaattttataccaaaaagaactggcatcctcatcccgcgattagggcactcaacttgctggatagcttcaatgtgtttatttcagatgggtatcctcatcttaaaattgaaacccaaaaattgataacaaatagtatggggattacgaagttgtacctagataaattattaccaaatgtggatacagcaggtttgatctttggggatatgttctcagaaatagaaaaatctaatgaatacaataactacttacataatgaagctttgagtgacccgataatacaaaaactgattgataagtcactatga

SEQ ID NO: 439456 - DNA, 1665 bp, Serratia marcescens
atgattactgtcgaagaatggcagcccgcagatggattgacgctggaacctaatgcgaaacgtgcagcgaaagcgagtaaacgttgcctggcactgactgccggaccgggggcgggtaagacggaaatgcttgcacagcgtgctgacttccttttgcgaacaggaacatgtcgataccccaaaaggattctggcgatctcatttaaggttgatgccagcagaaaccttacagaacgcgttgaacgcaggtgtggacgggatctggcttctcgctttgacagttttaccttccacgcatttgccaagcgcatcatagatcgatttaggccggtactcacgggtgaatatgccttagatgctggttacaccattgtagacaagaaaagcggggcatctcgtcacgaaatagcattcggcgatctggttccctgtgcaattaaaatattgcaaacgtcacaaatagcccgaaatgcaatccggcaaacttatagtgacattttccttgatgaatttcaggactgcacaaatttacaatatgaactggtaaagctcgcttttcagggaaccaaaattcgactgactgcagtcggtgacacaaaacagaaaattatggcttgggcaggtgctctggacggcattttccagtccttcacagaggactttaatgcggtgccgctcaacatgtatcgcaatttccgctcaaaaccaacattgctgcgtgttcagaacgaaattattcgtaagttagatcctgactctgtaatgcctgatgatcaactgaaaggggacgaaggggaggtttttgcctggaaatttgaagacagtcaaactgaagctatctatctggctgacctaattgatggatggataaataaagagcagctacctccagctgaaattgcagtcctggtttcaaggcaaccagatttgtatgctgatcacctcttcagagagttagagcagcgcggaattccctaccgcaatgagcagcaaatgcaggacatcacggtcgaaccagtggctcgtttaatcgttgattacctgtcctgtctttatgcgcagcgggaacctaaagcctggatccgcctgatgaaccagctggttccctttgctgatgaagagattcagaccagcgtacgaaaaggtcttgatcaacttataagaaagcatcgtaaggaagtgtctgatgcaaaaaaaacggaaacgcccttttctgaatggtggagatttggtcgcgctcttttaaagcatataggtttacagacgcttgttgcattatctcctgattatgagtcccatgagcgtctgaaacaggttattcgcgatgccagagaacgtatcaaagatttattggaaatcgaatctgatttacccctcgcattaaaacgatttgcagatgatcaagctgtgcgaattttgaccattcacaaaagcaaaggattagagtttgattcggttgtaatcatggctgtagaaaatgagactttctttggtaaagaagaagaaaatcgctgcgcgttttttgtcggtgtttcgcgagcaaagagacgccttattttaactcatacgaacaagcgtgatgaaccggctaatgctaagcactggaaagtttttcggactgctcgattagagtattttgattatgttcttccgtttgtgaggtaa

SEQ ID NO: 439457 - DNA, 1905 bp, Serratia marcescens
atgaagcttgaaacgattcgtttatctggttttcagtcgtttggacatgaatcaaccgaactgagccttgaagatataacatatgtcattggccctaatggttcaggtaaaaccgcagttcttcaggctttgtgtcgactttttgcattcgacccttcgttaaggcggatccagcgttcagatttccacgttccctttgatgaggaggaggttccgcttgagcgccagctgtggatagaggctgattttctgtttcccgaactggaagatgacgaggacaacagtaccgtagctccccattttagtcatatgcgactggacgagccggatggggttccgcgcgtgcgttttcgccttaatgcgactatagggctggatggagatattgaagacgctttggtatatgtcctggaagttgatggagatgacttgcctctgaatgtcgctcaggttccacgcgctgaacgtaatcatatccaggtacactatctgcctgccagacgcgatccggctgaccatattacttacggtgcgaatgcattactagggcgtttacttcgcgctgttcgttgggacgctgagcgcgaaacgattaaagggctgaccgatcaaataagtgacagccttgcggcaaacccctcggtgaatgctttcagtgagagtttaaaggcaacatgggcaacgctgcataaaggtaaattttttgctgaccctaaaattacttttgtcgcatcagaaattgaatcgctgttaaggcatctgtctgtttcatttacaccaagtcacgatggctcatttgtcgatttttcaaggctgagcgatggccaaaagtccatgctttacctttctcttgtcttatcgtctcaggctattggcagggctgttcttgcagaagaagatgtatcgtttgatcccgataaattacgtccaccagtcttcactctggtagcccttgaggagccagaaaacagcctttcaccacattacttgggccgcattgttagctccctaaatgtcatgacaaaaaacctggatgcgcaagctctcattgctacgcatgcgcccacaatgctgcgacgggtagtacctgagttcatacgttatcttcgactgaatgagtcacgagagacacaggtcacttgtattaaattgcctgatgaaactgatgaggcacataagtttgtgagggaagccgtccaggcgtttccggaagtctatttttcaaggctggtagtgcttggcgaaggtgatagcgaagagattgtgctgccacgcttgcttcaggccaagggtgcgcccgttgatgaatcagccatcacgatagcgcctttgggggggcggcatgtaaaccatttctggcgattacttacagcgttaaagattcccttttttacactgctcgatcttgatgtagcccgccatggggcaggatgggggcgaattaagtacgtaaatgaccagttttccaaacgtcaaaggcgttacaaacttcctgaatctcacggaattccaaaatgggatgatgaaaaacataaaattcgagacttcgaacattatctcgacatgcttgaagagcgcggcgtgtttttctcctacccgatggatttagactttgcaatgttacttgcgtacccagaagcctataacgttgaggaagagaagcccgacaatgcaactataaaagctgttcttggaaaaagtcattacgattcatctcagtacagggatgttgaattagcgctttttaatacctatcatcaacgtttcaagctcggcagtaaacccgcagctcacattgaggcgttaactcagctaaatgatgctgatctacttaaaagcatgccagattcactggacaggttggctgatgcggttattgccaaactctcggaactgccagaatga

SEQ ID NO: 439458 - DNA, 2310 bp, Serratia marcescens
atggagttatggatatttatagcggcgatttatgtaatttatctattgtttttcaaaaagaaaaaacataaatctgcaggatcttatccttccaaaaccgtgaaagcgccacctaaagaatggcttgctgacatcaagaaaaaagaggctgttgtgagaaaagatgacagtgaagatgatgatctggcaacttttacactggacagcggccggagtgtcgaatacagattaacaacgattcaaccacagaatccccctaaaactattggtactttggctcgatgggtgctgccgggtgaggtgactactgtgggtggtgtgaagatcaccgatggtaacttctacttcggacagcggatgaagcccgccgggcaaagcatgagcggctattatgatgatggcagcgaggcatcattaattgacggcacgcttaagatatacccaaaaccttatctttacgaagataactcattgggatactggcccagttattcctcgctttcacctgatgcgcgcggcgcgtatctaaactggctggcaagtgacaggcatgatgcagcatgccctgtaggttacgtttttatctatctgtatggcctggaaagaaaggcactggttgacagccgagataataatacttctggcgctgagttccgtacgctatttaatgaagtatgccggttacgaacggttttcattgaaaatcgctccttccggaattactcgtcccagttactggaagcaatgtctattctgcgcccggacgttggcctggtcgatgttcttgaccgtgatttgagttccagcaaagatatgctgtttaagcttgcgctggcaaaggctgtggatgctggagttcctgtgtcagccgatctggcgctaacgtgggtaacaaaccacacggagtattcgttacgaactcccgctcgccgctgcgcgaaagaatttgctgcacttttcaaacggcgctataccctcaaatacggtgagggtatggttgtcaaacctaataaaacgcgactgcgtctggattacacccctgcaagtcccagcttgcgcggcgttcgacttcctgtaccagacttgcccgaccctagtgcattgaagggcccagtccagaaaatcatgacgcttgcagagatctgtacagatgaactggatgcttacagccgctatcttggaaggaaaggtacgtcagaaaatgatactgcggcaattatgttgctgccagtggaaatcattaatgaaagcgcaggaaaagttttaagtacattcaaacgctgggctgatgaagtgatcgcgagtcgcatggggttaaccaccgttgctgacttctgggcatatatggaagccaagtgtccggcgaaaatcaataaaaaagaggccgacctgatgcaggcctttgcactgaaaatgggctactgcctggcacctgatccgctttaccaccatgtgaaagcagaagctgacggcgcactggttttatttgccgctggtgagggaacgcgcttaccaccatctccgacttttatctcagcggtgatgacgctaaggctgggctcaatggtggccttaatcgacaatagcctagatcaggccgagcagaaagtgctggaaaatgctatcgaccataattctggccttaacgaagatgaaaaacgctctttacacgcgtatttgacatggcagcttcataccccggcaaacatgactggaatgaaaaatagaatagcgctgctgagtacgatggaaaaatcagcagtaggtaaggttatcgtgggggtcgcctgctcggatggcagaattgagcctgccgaaatcaagcaactggaaaagatttattccggcttgggattagacccttcaactatctccggcaacatccatcagcattctacggcagaggttacccagctgtcgtctgcatcagagagccctagggccgctgagttcacgctggacgccagcgtgctgtctcgccatgagtcggccacagacgatgtccgtaaattacttagcgcgattttcaccgaggacgatccggaattgcgtgagagcactcccgtagccggggcgcaggatggtggccttgataatacacatagccagctttaccacaggcttctggaaaaggaacaatggcctcgtaaagaggcgacagaactgtgcgagaattttaatttgatgctcaacggtgcactagaggttattaatgattggtcctatgcggtggttgatgcaccagtgctggatgacgccaatgatgatatctgggtagatctgcaaattgccaaagaattagagggatag

SEQ ID NO: 439459 - DNA, 1317 bp, Serratia marcescens
atgtctgtgacacgcataagagttaaagaacgggatgctattatccaatcactgaagtctggtgtaacgccaagaataggcattcagcacattcaggtgggccggatgcatgagataacggccctccaccaggatattgagcggatagcggacggcggcgcaagcttcagacttatcatcggtgaatatggatcaggcaaaacgttctttatgagcgtagtacgttctattgcacttgaaaaaaagctggtaacagtcagcgcagacctttcccccgacaggcgcattcactcatcgggaggtcaggcgcgcaatctctactcagaacttatgaaaaacatgtccacccgcaacaaacctgatggtaatgcgttactcagtgttgtggagaggttcgtcacggaggcgaggaaggaggctgatgcggatggcactccagtctcgtcggttattcaccaacgcctggctgctctgtcagacatggtggggggatatgactttgctaaagtcatcgatgccttctggcgcggacatgaacaggatagcgagacgttaaaatccaatgccattcgctggctgcggggcgaatacaccacaaaaaccgatgcccgcaacgatctcgacgtccggacgattatctcagatgcctcgttctacgattcattgaagctggtaagcctgtttgtccgtcaggcaggctatgccggattactggtcaacctcgacgagatggtaaacctttataagctgaacaacactcaggcgaggacggcgaactatgaacagatcctgcggatcctgaatgactgtctgcagggttctgcagagaatattggttttgttcttggaggcacgccagaattcttgtttgatccgcgtaaggggctttacagttatgaggcgctgcaatcgcgtctggcggaaaatcggttcgctcagaaggcaggtgtgattgactactcgtcacccacgctacatcttgcaagcctcaccccagaggaattgtatattttactgaaaaatcttcgccatgtttatgcaggcggagagcccgagaagtatctggtatcggatgatgcacttaccggttttctgcaccactgcagtaaaaccataggggatgcttacttccgtaccccccgaaataccatcaaaggtttcctggacatgctggccgtgctggaacaaaacagctcgataaactggcagacgctaatctcgggtgtggcaattgaagatgacaggcccagcgatatggatgacggcattgcacaggatgaagatgatgatgacggcctggccaacttcaaattatga

SEQ ID NO: 439460 - DNA, 6414 bp, Serratia marcescens
atgaatatagcagtaaggaacgtagacaaagtcagagtatcacgtgcgggacacacttttcatgaaaggtggacagcgcggcgagctcttcagcttgtgttcccgaaggataatcttttcgcgatagtgatcgaaggcctatcccctaacgaagatctaaagcttggaaaggaggcagaggatatagccgaccttgttctttattatggcaatggagatactttcgaaacctgcacagcccagcagattttgcagttcaaatacaaggaagcttccgagcccgtcacatcatcctatctgaaaaaaacgatcaagaaattcgccgcaacactgcgaaattttaaagccagcatttcggatgaagacatagtgaagaaactgtcattcgggttcgtgacgaatgcggaattttctggtgagctttgggatgctatcgcgtgcttgaaatcgggtcgcgcaccggggtccaatagcgccaagaagcaacttgagtacctcaaaacctggtgcaaggaagagaaggtcgaagcggaggacattttcctgctcatcgagtttcgcgctgcaacaaatgatttgcctgcgcagaaccgattcttgcgacgaacaatcagtgattggtcggctgactcaagcggactggctgcaaggaggctgtttgcactcgtagagcttgtccgagagaagtcgcaaatcgaggggcagggcaagaattctatcaggcgtgaagatatcctcgatgctcttgaatgtgatgaggatcagttatttccagcggatacgcggtttgttgatgttggtgatgtcgttgagcgcagcgcctctcaagatgtcaaagacgagatcgaagccagcaatcttcccgtattcctccatgctgacggcggtgttggaaaaactgtcttcatccagagcctgaccacatatctgacagatactttcgaaatcgtggtgttcgactgtttcggaggcgggtcgtatcgctccgaagcccaggcacgtcaccttcctcgggttggccttctgcaaatcgtcaatgaactggcgacccgcggactctgcgatccactttttccaaccgacagcgatcaatatgggttgatcgaaattgcccgcaagcgtttcaagcaggcgagcgagactgtcaaaagtcagtcttcactgcaaggtatactggttgttttggacgcagcagacaatgcgcagttggaagccgaggcgcgaaatgaaatcgccttccctaggcttctccttgcatcgctgagcgcagaacctatcgaaggtgtgaagcttctgcttactgcgcgtcctcacaggatggaaagtgtaatcggaaagagccagacgaagcgtctcgcgctcgaaccattcacgaaggaggaaacttggagctttcttgaaacaaggcgtaaaaatatcaccgatgtagaattttccgcagttttcgcgcgttcgcaaggaaatgcccgcgtccttgagtacctcgtcgaaagttgggactcgcatgtgtccggcaatgcgccgcagagagaaatatccgtcgaagaattgatcgcacaaaaatgcgtgaagatattccgggatctacatatggcaggctggcttgagatcgagattcgcgaattcttcgccgctttgtcgcttcttccaccgcccattccgttaactgaacttgctgaggctctgggctggtcagaaacgcaagtcaaaagcgcggcatccgatcttgcgccgatgcttgagctggtcaaacatggtgcgatttttcgcgacgaacccactgaaacctatatcaaggaccactatgcaagagaggctgcagcccagcagtccattgcacaaaggctcctaacgcgccagaaggattcaatgtacgctgcagaagcgcttccgcatttccttgcggtaattggcgacagcgacagagcttatcagcttgctggttccgatgagtttccttctatgatcgagactgaatatggacggcgaaaattgaaacttgcgcgtctttatgcggcattctcgcttgccatacgagacgacaacctagacagagtactgagcttgaccatgcaactctcacaggtagcctcggcaaatgcgaggggtgatcagtttatccggcgttctccggcactggcgacgatccttggagattctgatgcctctcgccgcctgttcaatgatcgatctggctggcgcggtgggcgtgatgcacgtctgatcgtcgcttacagttttaccgatgaactggacgaagcgcgcattcatcaaaacagggccattgggtggataaattggcatcttaataatgatgatgagaccaaacggtttgaccgctcggggccggaggcatctgacgtcgcggcgattatgttcttgagtgtactgaagaacgagtactcgtcgtttaaccggaatatccagatatggagtttcaagtttgcactttccgtaattgaagaactgatcactctttgcgcacaacacgaagtctcgaatggaagtgaggctttgcagaccctggccaaattcgcagcatcgaaaaggtgcctgtctcttaccttgcaaatcggtctcctgtctaaggagtgtggcctttcgaaaagccaactcaaggctgtttcgctagcgacgagtttgctttcacagagttacaagaacaaagttccggaagataactccgactataaaatggagctgcagggggctattgctggtgcggcgatggactccttaatcgtgaattcaaggcaggccgcgaagcggttgctcaagttatgtcgacaccgtaggccatcatgctacgactatggcgaacgtcatggcattaacggggtttggatgtctgttcaatcggcttgcatcacgtcctggtcgtcaggcaaagagctgtcttttcatcatcttttgcctgaggaagtgaaaacagggcgaaaggcaaaatctatagccaccgaagctgacttcagcgcgttccttgatagcctcatcatgacaagagaccacaacagggggcgaaagggtcggaagccagagaagcgcaagcagttttccgggcatgaacgagaagatattgtgaagggcgtggcctgcgtcctgcagctagtcaaacctattgaggcagcccttctgtcgaaggttacgctttcaaatgacgttctggccgaattcttgactgtctggaaatcttcgttgagacccgatgtccactggagagctgaaaccggaagagacaatgttgcgcgacacgtcggcattgggcttgccagactgctgcttcgccattgcgaaacggtcgaaaagaaagaggctgaagagctcatagaaatcattggcttgaaccggttttcgctgggtgacaagctaagcgtactcgctcttatcgctaggtgccccaatctgtccgatgtcgcaggagcgtactccgcgatgatttccagcgacatagtaaaggatgactacatcgaacaacgcggcgagtcctaccaggatttggctgcatcgttgctaccgatgagcattggtgaagcacaagagtactacgcacaaggtttggttcaacttgatcagatgggtggtaatgacttcgacttgatttactccgccttgcactacgccgcagaacagcctggagggtttgtgaagccggaggtctcgcaccggctcatgaacctttgtcagacgatcttccagcatgagccatcaaagttcggatggacactgttcggacgtgccgccgcttcatccatcggctttccggcgatatacaagctgatacgctgggatgatcaggatgttgtggattattcctacggacttccacagcttgcctgctacctcgcgaaagcgggacatcttgatgcgcgccgtgcggcggtgcttcttacaatatgtgaagatcatggctggcatgagtggcaagtcggtaaggggttgcacgatctgctttcgattgccaatcctaaggaaaaggctgcaatcttctctcttgtggcagcgaagctcgatcaagagcacagttttggtgggtgggaagggctatgggagagcctgctgggctgtgtggatgccgttgaagagatcaatgacgagagtttgcgtgatcatctccaaggtcagtgggaagctgcgcggcgtaggcgcgttatcgaaaataccaaaagaaattatggtggggcgagcgctgaatacggagtacaggagcgtagcaagaagcaggatgaacaggctcgaaacaaagccgtcgcggcgattgttgccaaatgtgactttacatctgcatcatcggtggatgcggcaattcaagaagttgaggccagtgatgggctgctgttcggtagcagaagtcgcctgctagaggaactccagactgcttgcccgtatgacaaaagggtcaagtttcttgaggcactttgtgagtctaccgagcttgaatttgatcgcgcactcgaccttataatcgaatgcgtggaggtttggggcaatagttcggtgcatgcaacgaagagcgcacctgatctgatcaagaagctttttgcattcaagggatccgagcttttcgagctccactattcgggcatctccagacacatccttcgtctatccaaactctgcggcgatccaaaattcgtgttgcaaactgttttagaaacggtagcgaaggagcgccttgagctcggaggagacgaatggcttcaactggcgaccagtctatctcgccacactgacccttcgacggctttagatgcttttgagaacttgctttccagttcagttgcaaaggttggtgatgaaattggcgaaggtgagtatcgcgctgcgttcgcaggcaagagtgacgaaagtgacgtcctcgctgatatcatctggcatctgcttggtgatagtgatgcctttgtcagatggagtgccgcacgaagtctgaagggcatgcttgatatcggattgacagaagatatagggtgcttgcttgatcgttttgattcggttgacaactcatctctggcctcagataagcatcattttgcttttctgaatgcacagcaatggctgttgatgggattggcgcgcgcggctctgcacaatggagaaaagctcaaacctctgagttcaaaaattgcagcgctagcaaagcgaaccgatttgcacgtgctcaacaaacttcatcttgcccgatgccttagacatatcgagggcgataaattcatgagttccgaactggagaaactgtgggtagatgttcaaacgcctctaaaaggtatcgttgaacgcgatggcttgccggtcaataaagaccgacgaactgattttgattttggatatgaatttgataaaaccgatattccaagcttggcaagactttttgatatatcgaaaaatgaagccagtgattacataaccgatgaagtgatcaaacgttggccaagtgcaaaaagcatttccgattttcccgaaacggttcgctaccgtcccgacgaacagttcgagacctatgctgaacacattcaacggcatgctcgcctttttgcagtaaccacactcgtgaagaccttgcccgtggcacggcaatgctattatttggatggcctgaacccttggcaagaattcctacaagacgaagatgtttcgtttgatgatggctcatggttatcagatcataaagactgtgttccagaagaggctcgggcatatctactcggcgagcgcaaagaaaatcaagaaacgcttcttggcaaagagtcgctgtttgcaaaggtcggtttttcccaagactcggatgatcagttcctaccgctttacggttactggacttcaccggatggcgtacatgtccgtatagattccgcgctgattaaggggcgtggtgcggtcgggcaatgtacaaagttttcaaggtcccctgattacgatctttggttgccacgttttggttcagatggacgtgttgatcgctacactgcgaataatccgttcaacccattgatttgggaaccggagaaatatcccattggtattgacgagggtgaagagtgggccgctcggggagctaaagcccgtccaaaactagggctgtctctcaacaagttgcttggactggcctccgatgatgatgaacggctgtggcatgatcatacaaatagactggtattgaagagcggagtctggggtgagtggaggcaagaaccagatgctcatagtaaatatcgggatgaggggactatcctgtgggcagaacgtgactggctcgacgaagtgctcaaatccagcaaacgaggcctcatcttcacgctcagtttctcaaaatacaaatcaagcgactcatctggcatccgagaacggtatgtaatcttgaagcgatgtggtgtttccccccgcatttggtatgccaagaaggcatctaaaagggagtaa

SEQ ID NO: 439461 - DNA, 165 bp, Serratia marcescens
atgcaaaaagcccgctcaggtttccctgagcgggcttctctaaatatggctcctctgactgggatcgcctttgccaataactggctgaataaaaagctaaacctgaattcggctcttgtcaagaccaccaaagtgaccaccaataggccgggttacataaattga

SEQ ID NO: 439462 - DNA, 1347 bp, Serratia marcescens
atggcaacgtggcaacaaggtaacgcaggcggcttgctagctggtattggcacaaacaatacgaacgccccgcaggccagtgatgcaaatgctgctctcggcttcatcagagacagcaatgaacgctctcggataggagagaacaatcttggtctgcaattggcaaatgctaccggttctattttcaactcctggaagcaaggccaacaggcgcagcgccagagcgagttccagcaggcatacggaaacgcctactcatctggtgaccgctcagccatgcgaaaccttgctcagcaatatccagagcaattcgaagcagtaagaaatggaatgcagttcgtagacgaagaccagcgcaactcagtaggaagtcttgcagcgtccgcacggattgcagcgcaaagtcctgaatcaatggggcgatggctgcagtcaaatgctggcgaactaactcgcgtgggagttgatccggcgcaggtcgctcagatatatcagcagaatccttctggttttggtgagttagtagatcatctcgggatcgcctcacttggtcctgaaaaatactttgacctccaggcgaacaatgccaagttgcagcagactggtcaaatcgcacaggctaacttgagtcttggtcagcaacgactccagcaacaatctcagtatcagcaaggacagctagatcagggtcagcagcaacttaatttgacttcacaaaaaaaccaggccgacattgcaaataagcgcctcgaacttagcctgaaagcgggagagaacggcgctaaatcccttgccacgcagcaagcctcggtgcagaagatgcaggactatgttggcgcgcaccaaagcaatgctaatagtgtggccagcatgtacgacacagtgaatcaggtgaaaagcattcctcctgaagtgtttgaccgcgtgttcgggtttggcggaacagtcaattcccgtatcccaggaaccgaatcagctgacgcatgggctaaaatcgagcagatgcaagggcaagcacgacttatgggcgtaatcggcatgaaaggtacgggtccagtctcagattcagagggacaggctgcagctcgagcattcctcgctataaaccaaaacatgtcaccaaaggcggctcgctcggcaatcgataactggcagcgagttctgcagcggcagacttcatatctgcagaagcaacagccggtagttgatacctatcagcagaaaatcgacgccttcaacaattcgcagagcgggagtggagcagctccacgtgctggcatgagcgaaggtggatataccttccttggcggcgacccaagcaatcctaatagctggagaaaagactaa

SEQ ID NO: 439463 - DNA, 933 bp, Serratia marcescens
atggaaagcgaactgatcatcgacggtcaggttattgacctgtctgcagataagccaaatgagaatgctggcgacactacagataagagcgcgccgacagatatcgatccacaaaaaccagttgagccagaggtaattaataaaaccgataccggcggcagccagtcaggcgataagggagaaagcgaaggtgaatctggtgatggtgacgtagatggatattcactccgtattggtgatgaagacatcccacttactgaagaggatgacgatcacgttgatggtcagcctgcgccacagtgggtgaaggagcttcgcaagggcttcaaagaaacacagaaagaaaaccgggagctacgccgccagcttgagcagattcaatccaagccagcagaagcgcagcaaccaccatcagacgccattcctccaaagccgacccttgagtcgtgcgagtacgacgaagcagcgtttgagcaggcgatgactgattggcatgagaagaaaggccgtgctgagcaggttaaacaacagcagcaacgtcagcagcaggaattgcagcaacgactaacagaacgccttacgaagcatcaggagcgagcatcaaagcttccggtgaaagactatcgcgagatggaagatatcgttcgccaggagattccggttatccagcaggaaatcctgattcatgccgccgacgaaggttccgagctcgttgcttatgcactgggaaagaaccaacaactacgccagcgtgtagccgctgagacagacccaattcgcgcagcattcctcttaggccagattagccagcaagtgaagttggcaccgaagcctaagaaagccatcaagccagagccggaggttcgtggtggcggcgctgatgcgaaacaagatgatttcaacaaactctgccccggcgctaaaatcgaataa

SEQ ID NO: 439464 - DNA, 1476 bp, Serratia marcescens
atgacagatcaatgcagcattcctgaagcgtttgaggaatacctgcagccagccagatttaaagttgctcatggcggccgaggttccgccaagacgcgaacgttcataacaatcctcctcaataacgtcatctatcacggatggaagcttatctgttttcgcgagtacatgaagtccattaaggaatcatgctatgcggaaatcgttgaagagattaatcgccgcaacctgcactcactggtgacggttaataagactgaaatattcgccaatagcggtgggcgtatcagcttcgacttccttcgactaaacgtggaaaacatcaagggttacgcaaacttcgatgccgcgcttgttgaggaagccgagaacgtatccaaggactcatgggaaacacttatcccaacggtacgtaaagagtattacagcgctgagtatgggcggatagttgagtcagagatatgggtggcatacaacccgaagaacaggctcagtgatactcatcagcgatttgttaccaatcgcatctacccagactatgacgaaaacggtaatcgctactgcatcgttaagcagatcaactacaccgccaatccatggttcccggaaactctgcgcagggatatggagattatgaagaaggctaatcatgagctttaccggcatgtgtaccttggtgagcccgtgggagcgtcagagatggcaattatcaagtttgaatggttagaggctgcaactgacgcgcatatcaaactcggatggaaagcaaaaggcgcggtgattgttgcgcatgacccatcagatacaggtccagacgctaagggctatgcgatgcggcatggttcggtagttaagcgcattcaggaaggtatccatatggatatcaacgaaggtgcagactgggctactgatttggctattagtgacaacgcagatcacttcctctgggatggtgatggcctaggtgctggtctacgtcgtcaggttactgactcattcgctggaaagaagatcaccgcaaccatgttcaaggggagcgaatcaccgttcgatgaggatgctccgtaccaatccggggcatgggctgatgaagtggtccagggcgacaatatacgcactatcggtgacgtgttccgcaacaagcgtgctcagttctactacaccctggctgacaggctctatctgacgtaccgcgccgttgttcacggttattacgcagaccctgacagcatgctgagcttcgacaaggaagctatcggtgaaaagatgcttgagaaggcattcgctgaactcacgcagatacagcgcaaattcaatggcaacggaaagcttgagcttatgacgaaggtagacatgaagcaaaagctcggcatcccgtcacctaacctggccgacgccctgatgatgtgcatgcattgtccggcgatggcgccagaagaaacggaaatctacgttccatcatcctccggttggtaa

SEQ ID NO: 439465 - DNA, 444 bp, Serratia marcescens
atggctcgcccaacaaagtatcaagaggcgtatgccgagcaggctcgcaaattgtgcttgctgggctataccgacgccgaacttgctagcttcttcgaggttagcgaggcaacgatcaacaactggaagctcgaacaccatgagtttttagagtccataaaaaagggaaaggctgtagctgatggggaggtggcaagcaccctgtttaatagggcaattggctacacggcaaaagaaaagcgagaagagaaaaccgctgacgggttcaaagaggtggatgcagagaagcatgtgcctggtgatgtcacggcgatgatcttctggcttaagaacagacagaaagataagtggagagagaagcaggatgttaaccatacatccgatgacggttccatgacgccaaaagcaccggtgtataacgtggtgaaaagcgagacgcaatga

SEQ ID NO: 439466 - DNA, 162 bp, Serratia marcescens
atggcaatagatacgccaattcccaggttctacatcgcatgcgttaatggctgcgggaaatcgcttgaggctggtgaaacctacatctgccagcagtgcaacgatgagatagaccgtcaggccgatgaggttatcgggaacgcggaggatgaagatggctaa

SEQ ID NO: 439467 - DNA, 366 bp, Serratia marcescens
atgactgattacagcaagatgaatgattttgagattaacaaagcagttgctgagcaactgtacaaagacaagccttcattgattgtgcagcgcgacgtgccaagtcggccggcggttacagtattctgcgacattggtgatggagaaatagtttctatcctatgtgctgattactgcaacaacccggcaaacgcatggccgattattgttgataacaaaatcagccttgaccatttaggcaagtctatctggggagcaaaagcatttgttcctgtaggtgaaccaaagccacgttacgcagaggaaaacccactccgcgccgccatgattgtcttcctcatgatgaaggatgccgaaaaatgctaa

SEQ ID NO: 439468 - DNA, 255 bp, Serratia marcescens
atgaaagacgcaagttttactgattggatggttatcggactgatggttgtcggttatctgttcattttgttcagggctgtggaatggttcattggaattctatttaattcctgcaaccgctgggttaagagaaaaaacaaacagcaacttgccattgaggatttgcttgatgccttccctgtaaaagctgacgaagcaatgaacattactaccaatggcggctatcgaatcaggattaccaaagaaaaggagtga

SEQ ID NO: 439469 - DNA, 309 bp, Serratia marcescens
atggaaaagctacgcgaagagtttgaaaagtggctcgaagagactcacggcctgtacggcgaagatgttgagtggcaagaaggcagaaactgctatgcgaagttcggcatccatctggcgtttcaggcatggcaggccagccgagccagcatcgtggttgaaagcataactccatctgatgcgccttcaggcttgatttatcagattggcggtgccggtctcagtcatgacgaatcaatttgcgagggttactcagctggctttaatgaagccatccgctctatctgcctatcaatcaaaggggagtag

SEQ ID NO: 439470 - DNA, 180 bp, Serratia marcescens
atgtacgacttaaattatgcaattaccgacccagaagacatttcgctgtgccctctgtgtgacggtcctatgtttgttttcgatgagacaaccatcatccacgccagcgattgcaaatgcttagcacacactagctgcgctgaggaagctctcggaaactgggatgacgacgaggattaa

SEQ ID NO: 439471 - DNA, 222 bp, Serratia marcescens
atggctaagcgtaagagcaacagagcggcgcggcatcttctcgcacaggggaagaatgcgcagatttatcgcgtcagtaaccggcggcagatgaaccagatatttgatgatcagccagggtttgcatggcagacaaagccatcagcgagccagaaccgcgcacgcaagaacgcgtatgacttttccggcatcgtttatggcgattgccgcaactacagctga

SEQ ID NO: 439472 - DNA, 480 bp, Serratia marcescens
atggataaattcagcgaactgaaagccacggttccggtcaacgtgaaaaaccgtgaagctgtttcggctggctttgtaacgcatgacaacaccgggggctatttcgtcattgagtgccaagaatgcggtgcagtttatccgagtcagcaggcagatggcggcggacagattgcagatactggtgactatgatgacgctatttgtcctcactgcggagaggaaagcccagaggagtgcgaaaacgtagggttggcgtggaatgttcagcaagccaaaatcaccgtcctgctggcagagctggaagcgaaggataagcgcatcgccgagctggagcagcgactggctacgccggtgcggttgcctgagcgctattccgtagattgcggcgtatgtgcagaccccaatggggaatggctcagtcataacgatgtgatcgccaccctgttcaccgctggcttcaccgtagagagggatgagtag

SEQ ID NO: 439473 - DNA, 192 bp, Serratia marcescens
atgagaacaaaacaaagcgccctactccgctttgatggtcgcatgatcaccatctatctcggcgcggctgatgatgaagagtatgccggtaagatggcgattctcgagcagatcgttaagccaggagtgaagttgatcgccgagcagtcaactctcgtttcacatactccggcaaacatcacaatccagtag

SEQ ID NO: 439474 - DNA, 552 bp, Serratia marcescens
atggatgctaattatatatcctatgaaaatatgattgcggctagagacgctgtcagtgttgcccaagaggctgcaggttgggcttattttactatgttgttaactgcagtgagtacgactatttccttgattacattaggtatagcttggagagctgttgatacttggaaaaaacaagagaaactaaaaattaaaatggattttaaaaaatcactgatggcacttaagactgcgtgttattcatatcctgattacctcgacaaagtaaaggtagtttatgggcaaaaatacgtcgactcttgtttcgaattaactaggggagatagagatgcagctaatgaggctaggaagtttaaccaattcaatcaggtttttttgaattgttgcgattcttgggtggcaacagaacatttattttcaaagtcaaaaataagtgaaggttggagcaatgtaattgatatggcgaataaattttcggaaggagaagttaccgggttggagctccaaaggtcggtacatgagttatatagtgagaattttgtttttaaataa

SEQ ID NO: 439475 - DNA, 771 bp, Serratia marcescens
atggatatcagacaatacacagaacttgtaaaacttatagagtcaagtagttttaatccttgggcaatagctgtaatgatattacttagcggtcttattgcttatttttgttcatttctaagcgcatctcagtctgaaaaagggaaaatgagtgcaattaatgaaaattttgagacattaaaaaaccaactaggtgaaaatacaaagctaactaaaagaatagaaacacaattctctgaaaggctatggattaatcaacaggtttggttgagaaagcaagagatctacgaagatatatttactcagcttgatagaatttctagacatgcaaagcttgaagtcagccattattggactgcatcacactataatgaagggccagatattcaatatggcatgagcgatgctgaagccaatgagatatataaagaatggaaaaaggaccaggaagcttacaacgaacatgtcaatagtgaagcatttaaaaatgggaaaaaagaatcagccgaactacacaagaagtcattaaaacacttaatagaaattacatttataaaaagtgttttcctatctagtgagactcagagtgctatagagtccctggtaacagcagccgatcgtagttattatgatgaagattcatggtacgattacgttacaactttagattccacttgccagaaagtcatcggcacagtcagaaaggcatgttcaattgaactatcaataaatcaaccaagcgaaacagtaaactccactttaactaattga

SEQ ID NO: 439476 - DNA, 870 bp, Serratia marcescens
atgattggaatagctcttcagaatgcctttcgcaaagagtcattggctgctcgtggtgaaatagcactattccgtgcatttatccgtgcgttcaatgcactcggttccaacgcactggcacaagaatatcatggtaatcgttatcaagtgaaatttggtgctactcgaggtgcaggacgaccagtccctcgctgtgaattatgtgacgtaatgatcatccattacccagtgggaaaccctagtgctgcacgcgttacttttaatcaagcaaaggtctcttctaactcattaaagtgtgctccaatggtgcttgcaccatacaaatttcgtgcaaatttagagcagtgggacttactatcaaatcgccccttaataagtgcaacttctgcaaaaattcatctccccgacgatctactttctagtgctctactaccatcagtaggtacatttggagttttttatcctaaaggtccggggttcgattttgcttactttgttgcgaacggacttagtcccttgaaaaacggttacaagccgtcgggtacactccagtggaaaactcgattaggacaagttcgcaaaattgctcattatgaagagataactgcaacttgttgtatggaaacctttgggcggtcacttgaattgggcttgataggtacacctcttcagcaggttttatatggttcaacgggagccactgaaatgcgaatttggttgggaagtgtgctatcgtcactcagggaaatacaccctgattctgatctacctaatgagttgatcgaagggtttgaattgccacgcgaagaaccctcttcgaaagttgagcgatcaactccacgtgctgtagtattggtcagaactgagtag

SEQ ID NO: 439477 - DNA, 1437 bp, Serratia marcescens
atggaagagcctaaagtattcatttcatacagctggagtgaccaatcacaccaagaattagtaaagcactgggctgacaggcttgttgctgatggggttgatgtcgttcttgatatttatgaccttaaagaaggccatgataaatacgcatttatggaaagaatggttacagattcttctgtaacacatgtgttagttgtgtgcgacaaaaagtatgctgagaaggctaatgctagaaaggcgggagtcggcactgaatcgcaaatcatttcaagcgaagtctatgaaaaggttgagcagtccaaattcataccaatcgtttgcgaatttggagatgatggcgaaccaattctacctgcatttatgaaatctcggatgtggattaacttttcgagttcagaagctgagaatgagaactgggagcaactagtcaggctgctatacggtaaaccacagcatgtaaaacctaaaaagggtaaaacgccaacatttattactagcgaaacacctgttcccacaagtgaagctttcgcaaaatttaattctttgaaacaagctgttctactagataaaaaaggtatcaatcactatcgacgtgactttatcgattcttgtataagttatgcagatactcttcgagtacgggaacgaccaactgtagacttaatgggggaaaaggtcgttgaagactgcggaaagctaaaagcaatacgtgatcatctttgtgactgggttcttcttgagggagaaattacagatcctgagcacctatcagaagcggtaattgaagttctcgagaagctgagggagttaaaatcacgcccccctgaaataaacagctggaatgatacttggttcgaggcccatgcagttttcgtatatgaaacatttctatacatcattgcagcactattaaagtcgggtgcttactcaatattacatgatatttattcatcccattatctcttaccatcaacagatagatacaggcaatcgaattttgaaaaattcgattgtttctatggttactcggaaagtttacaatctgttttagcggcggaaggtcgaaggctaaacgctccagctgctgagctcttaaaacgccaagcggatcgcgaagatttgccatttggcgatataatgcaagccgaattattaactctattaatgtcattcattactccagatactaggtggtaccctcaaacccttcattactcgtcctatggtaatggttatccattttttgttagggctgcacaacataagcactttaaaaaattatctaccataaccggtatcgactcggctgatgacctaagggcgaaagtaaaggaaggtcatgagcgactagaaactgggctgtggcataactttcactttgaaagaaatttttggtcatccatgaatatggatgagctcgacaagcttaaataa

SEQ ID NO: 439478 - DNA, 885 bp, Serratia marcescens
atgaatcgaaccccaccagtagatgtgatacgcaaattacgaaatgaagttggctttggatgccccattgacggatgtgcaaatccatacttggaatggcatcactttgatcctccttggcatattaagaatcatcacacccccgaaggaatgattgctctgtgtatacaccaccataaaaaagctgatggtggtgcatacacaaatgatcagctaagagctttcaagaataacaagactcaggcagataaagttaaaggtcaatttgattggttgaggaatgacttgttagcggtggttgggggaaatttctactacgatactttaaaagtattacagatagatggacacgatgtagtttggttcaagcgtgatgaagaaggctaccttagattaaacataaaaatgctaagtgttcttcctaaagaaagggctttgatcgaagacaatatatggacaaatattggagatcccaaagatgtcaactctccaccacaaggtaaagaacttagaatcgactatgagaatggtgatcacctatcagttaagttctcagtcgtaaaaacagcaggagaagcgtacaaaaaatataagagcacatgtcttcaggccaataatgaaatcaattatccaattaccgttgtagaggtgtactatataataggcggagaaggtatcgaacttaaaccatcaggaactaacattcaaaaaaacaatattaaaggttgttttatttcacattgtggaaccggcatgaatatacaaacaggcctaatttatcgccaaaatccatcattactaccctatcaacccgaatctcgagtcggtccttgcccctgtggtagcggattgagattcaagcaatgtcatgggttactcgtatga

SEQ ID NO: 439479 - DNA, 690 bp, Serratia marcescens
atgtcctatctcaagttaaagatgcaggcagaccgagccattgccctaagtattgagaggtcccttggacaactcaagaaagacactaccagtactgtacagagttttaggtctggtgccgagcgagcaagttggtatggttcctgtctgtttgatgactacaaagacgtatgtaagcagttgaggcaagaagatacccgcatgttgttatcaattcggcaggtgtaccagcgaaaagacgtagtactggatatggtggaaatctattttaatattaagcttagtaggatcagtgccccaggtcagcataaaattatgcaagctatcactgaaaaacttgctaaccatgcatcagaaaagttttctaaattgtcagttgcgtatacgatcgcaaaactaattactgaatcccacgacttcaaagaatcacatattaacatcatcaataaaagtagtttagttgccgtaagcgttttaagtttctatggaaaaatgcaaacagccgccatttctgcaagaaaacttcaattttcagatcctaactattactctgctctctacaaagaaaacctagaattgctgtactttatgatcgagccagaaatgaaaaaaatcatctacctaactaattcaggatctaataatgaagaggaaatcattttcctgatgaacaagatcctcacaaaatga

SEQ ID NO: 439480 - DNA, 765 bp, Serratia marcescens
atgggtatgcactgtattttgtggatcgtcatggtaacgatattgtggccttggcctgcgagatcgacagtcgacgacaccgtcgcgttcactgttgaaaattacgcgctgcgttacccgtatgcgagccctacagataatcaggccgctctggccgggatgctaaagagcgcaaaagtgaccggccactattggaaatcgagcagagtgctaaagcttactcgctgcatgaccggcgtgacgtgctatccctcaccgcattttgcagatgatatgatagaccacacggtgactgtgcggccgcatatcatatcgggcgcgccgacgcgcttcactttcaacctccccgtcagccaccgtggtgcgcagctggacggggtcactttgatgttgcctctgaaacctgtgtggcgtcagcccagcgtgcaacaggctttgcagcgtgcagaggttgccttaccggagtatgcaaagacccgacacgctttggagatgggggcatcggtgtctgttaatctcgcgctgccgaaaacgctgggggaatttggaccgacgctgaattattgtgcggggataccgaacccgttgagctggagccactcaggggtgctttcgatgaggatcctcgttcagcaggcatcacacgcaaataggccatggccgtttatcgaaagcccctggacttcggctaattttggaacggaagagagctgtgcaacctggcggcctgaggtagagaacagctacctatggcataacgagtag

SEQ ID NO: 439481 - DNA, 2442 bp, Serratia marcescens
atgaaatccaagcagcctgtagccaatgcgccaagcgttagcgaattgagtgcgaaaattgaaaataaccttaaatatcaactatgtgtgaccttacctgcggcaactgaaagcgacgttttcaatgcggtggcgctgaccgttcgtcattatcaatatgatgactttctaatttcacaacaaagacagcgggcggagaaaaagaaacgcctttattatttgtcgatggagtttttattaggccagtcattgcgcaataacctgatcaataccggcttgttgaagaatatgcagcgtgcggtcaccgaactgggattcgatttcgagcgcattgtggatgaggaacccgacgcggctttaggcaatggcggtctgggccgtttggccgcctgtttcatcgactcgatggccacattggatatcgccgcctccgggcacggcatcaaatacgagtatgggcttttcaaacaggcaatccacgacggcaggcaaatagaacagccggatgactggcactctacgcgctcgccgtggctggtagagcatcatgcccaacaaatgctgatcccgatcggcggccgcgttgaacatggcgaagacgccgaaggcaactataacccgatgtggatggactggcggatcctcgtcgggatcccgcacgactatttcgtttccggttatcagggctcggcgaccaataagctgcgcctttacagcgcgctggcttcagactccttcaatattcatatcttcaaccggggcgactatatcaaggcggtaagcgagaaaatcgcctcggagaacatttcgaagattctctatccggccgatgaagctctgaccggcaaggagcttcgtctcacgcaggagtatttcctggtcgcttgcactctgcgcgatgtgctggccgattatgcgggggaagaggcatctatcacggcactgccggagcgggtggcgatccagctcaatgacacccatccggctctggcggtggcggaactgatgcgtctgttggtcgatgagcaccaactgccgtgggagcaggcttgggacatcacgcagcgaacctgcgctttcaccaatcacacgctgatgccggaggcgctggaaacctggtcggtgagcctgtttgaaaaactgctgccgcgtcatctgcagatcgtttatgagatcaaccgacgttttctggcgcacgtcgccgcgcgatggcccgataagccgcagttattgccgtcgctttccctgttcgcgggcgataacgacaagaagatgcggatggctaacctggcgatcgtcggcagtcatcgggttaacggcgtggcgaaactgcattcggagttgatcaagaaaagcctggtgccggacttttattttatctcgccggaaaaattcattaaccagaccaacggcgtaacgccgcgtcgctgggtgcagcaggctaacccgccgctggcggcgtttttgcatcagcatctgggtgacgaatggccgacggatctgcagcagttggcggggctcgagaaattggccgacgatattggcgcgatcgacgagatacgcgcgataaaacgtgcgaataagggcgccttatgtcgattaatcgcacagcgtcacggcatacaactcgatccgatggcgatgttcgactgtcaggtgaagcggatccacgaatataaacgccagctgttgaatattctgcatgtcatagatctttatctggagatcaaagagggcggtaagactatcgcgcccaaagtgcatctgttcgccggcaaagcggcgcccagttatgcggtggccaagctgatcattcagctgataggcgccgtggcgcagcgcattaatcaggactctcgcgtcggcggccagctgaaagtggctttcctcgaagactataaggtttcactggccgaacatatcatccccgcgaccgacctgtccgagcagatatcgaccgccggcaccgaggcctcgggcaccagcaacatgaaattcgccctcaatggcgcactgaccatcggcacactggatggagcgaacatcgaaatccgcgatgcggttggggcggataatttctatctgttcggcgccaccgccgaggaaatcgacgatatcagacgccatggctatcacggcggcgatcattatctcaacaacccgcgcattgcgcgcgtggtggattcgctgacttcgggcctgttcacagccgataacgagctgttcgcgccgttacgcaatatcctgctcaccggcgactatttctgccatcttcaggacttcgagagttatcggctggcccagcagcgggcggcggccgatttcgatgagccggggcagtggcaccgtcgcgcactgttgaccatcgcgcgcatgggcggtttttccagcgatcgcaccattcgcggctacgccagggatatttgggggatgaattactga

SEQ ID NO: 439482 - DNA, 453 bp, Serratia marcescens
atggagactgccaccaccgcgctgcgtctgggcgcgacgcttgagaacctcgagacgttgagccgcgccttccaacgtttcgtggcgccgttcgcgcttgatcccgcggcgatatatcagctggatttggcggccagcgaggcattcagcaacatcgtccggcacggcgtcgattacgacgctcggcaaacgattgaggtgactatgtcactttcttccggcgcaatcactctcacgctcatcgatacggggcgtccgataccggcggacattctgcaggcggtggcggataagcaacggtcgttccccgagcccggcgccctggaaaattggccagaaagcggaatcggattgatactgatttattccatgatggacaaagttcgttaccgtaccgccgacggacgcaacgagctgattctgactaaaaatacgatgggcgagcgaacctga

SEQ ID NO: 439483 - DNA, 846 bp, Serratia marcescens
atgcaaaatcaaatcgcattaccattagttcccattaagcatcagattggtgatgatggatttgaagttggggtgatgagtgacggaactccatatttaacagcaagtagcctagcttttatttgtggttctgccagaagtaatataataaccttggttagtgattggcaaaacatgcgacataatcctcgtggccaagcaattagtcaaataatcattaggaatggtggtgacccatcccaaagtttgcataaagaaataagggtgaagggcacagtttatcatgcaattcctgctgatatatgtatggctgtattagaatatttcgcctttgatagcaagagtcaatctgacatcgcaagagataactatcgaaatcttgcaactcagtcgttgaaagagttcatttacaaaagaacggggtataaagcaactggtgcattacccgcacatttagcaaggtatacaaaaaatagagcaaaaataccttacactcatttttcaatgcttaatgaaataacgttaagcttgattgccccgctagaagaagctggatacactttacctgataatttaatccccgacatttcagagggtagaatgttttgcgcatggctaagaaaaaacaggaatgttgagcctaaaaacttccctcgctacaaacacgaatatctagatgggagagtggttgatgcatgtctttaccctatagagttcatggatgactttcgtcgacacttccacgaagaatggttagctaaaagggctccagactattttaaagaaagagactcattggctcttgagtttgttgaaagtttgatgctaccagctccaaaacaataa

SEQ ID NO: 439484 - DNA, 1083 bp, Serratia marcescens
gtgttgaacatcaagcacagggtctttattcaatccttggcgttgattatactattttggttcactacttatgccttcacccatctatttgagggaatgagagtctactcctctgcttatagctttgaagctaactatgcaaataaaggcttctcgcttatatgggggaacaacaatgttaaacaactggcgctgattactctaaacctattgacgttgtatgttatttatgtaaaacgccatgaaataacggcagagtatgcactaagagtcatcattttcactacgctggtcttctccgcttactgcttagtctggcttctggccagaccggtcgcgcatgctatacaggttataatgtataatagtatgcataatgccaatgctattttcgactccagactgagcggcacctttggtgagccttcattcgccggtattttcatcggcgcaacgatagtccctctcttgatggccaagggattccgattgaaactgctctctatcttaatgatgcttttcctgattaaaaatggctctacatcaggttatttcaccctacttacatcactgtgtggcacattcattttcagcccgcgtttcaatctggtaaagaaagttctattttcaatttcactcatcattgtttcaaagctcacttttattttattcctggataaaataacagcgtatgcagataaaaaagcgcaaacggtctctaacctcgtccgttctgcctccaactacaatgctcttgaaattatgtacaatacatttgggctgggagctggcatcggcagcgtgcgaatctcatctctcgcgctttctctcattgctaactttggggtaatagggtcgttcctattagtcggttttatcatatccaagattattcgctcccaaagaaacattatcggcagcgaggcccattcagtgcttaaattcatgcttttctcggcatttttaggctcttgtgctgccaaccccgactactcttgcgggttcatctgggtgctcatattctgttgtttattaacggggaaaacacagcctgcggcgctgagttcgccgcacagcaaataa

SEQ ID NO: 439485 - DNA, 909 bp, Serratia marcescens
atggcaataaatcaaaaggacatcaaattgttgtgggggcgttccggaaatcgatgtgcaatttgtaaggcagagttgacacaggataagaactccgttaactccgcatttacattgggggaacaggcacatattgttggagagaaggatgatgcggctcgaggaaaatcgcatttaactctggatgaaagaaatagttaccacaaccttattctcctttgcccaaatcatcatacggaaattgataggaatgtagaagattggccagtcgaaaaactctataacgttaagtcggcacatgagttatgggtttcagagactcttagtagagttgaagataaattttttctagctaagcaagtttcagtaacttcaataattgacgccgcagtaaaatattgtcgtttagaaaactggcagaattggaccagttttgcattatcaccagatccgacatggcctaaaaatttacccgatgatatatttgaatttcggcaaaaagtcatctctgctatatggcctgaggagtttgatgaactgcggagagccactgaaacattttccataacccttaacatagccgctcaaattttcatgagacactctagtctttatgaagacacttattatccagataaattttataaaactggcggctggaatgataattatgaagaagatgttgaaatatataagcaatggattcaagaatgtcataattggttagtggaagctacaaaatcagccaattggtttgctgacgttgttcgtagagatattaaccccatgttctttgcagagaaaggccgattcttaacaatggagggtgatattttaggttttaaggctaaattacatgtttataccaaagaacaaagagattcacggcctgactcacttgatatctaa

SEQ ID NO: 439486 - DNA, 828 bp, Serratia marcescens
atggctaatgcaatggtggttttcaaagctgaccgcccggcgaataaccctaatctgccgaaactcgatatcactcagcaagagatcgacatcctgaaaatgaatcctactgcgtggcttgaggcaaaaagcggggtggtttcaagcggtggtgaggtttctcttgttcgagataaaaccgggcgcgcaaactgggctccagttgccgctctggctccgcgggttattgccgccggtaaaggtttcgcgctgcggttcggccgcgccgcttcaaactcaggcgccctgatcgcgcagggtggttacgaatccctgccagctgatgggatttattctcagtttattttgtaccgtattccactccccaacaccgagggctacggcggcacgggcggtaatatctgcgggaactacacgaccgtgccggactggctgcgcgtccggtttggtaacgactcgttcctgaccgatgccgtttggattaaccacggaggaacagctgttagtgacccaagcaattatccgatcaatacgactattgcaggattccgtgataatcaatggcatattgccgcgattgaagcgacgagctcgcatcatcgctgggaacatgacggcgctctgttgcagcagaaagaaatccctgctaagccgttcgcaacggctgcatcccgacagttgatcgtcggtggcgccggcaaccctttgagtaacggtttccaaggggacattgccgcgaaaattatcatccctggcgttctgtcggttgacgcaaaaaacacgctctatgcgcgattcaacacgttgaaagcagaactgcaatcgtaa

SEQ ID NO: 439487 - DNA, 963 bp, Serratia marcescens
atgaaaataactgttatcgtagctgcgtataacactgagaaatatatttctgaatgtgtggattcagtcttaattgacaattcaaatgacattgagttaattgtaataaatgacggctccactgatgctacagggtcaattctggataaagtaaacgatcaaaggctaaaggtattacacactaaaaatagtgggcaatcagctgccagaaacgctggattgtcaattgcgaccggcgaatacataatgtttcttgacagtgatgataaattggagaaaggcgctataagtagaatttccagcataatagaaaaacaaaaaccagatataatcatgtttgaatcaaaggtgttctttgaagatgatgatctagcatataggttcaacccaaaatacgaaagaaacgccaacctgtgtgacaagttaacaagtggggttgatttttttaaatcggcaataaacgctggcaattatatagtcaacccatgtctttacatttcaagccgaaaagctcttaataatgtaacttttaatgacggcataattcatgaggataatatatttacgaccatgcttcttcttgaaaacgaagttactgtttattgtatcaatgaaaaactgcacctgcgccgcattagacatggttcagtaatgacacagcgcaaaggagatgcccatctaaaaggttactatgcatgcatacaggagttagcaaataacaggcctaaaaacttcccattggtaacaaaagaatacgggaattttttagctcatatggtcgagtgtttcaaatgcacaaataacgacatcatttcagacttgaacaatgagctatcgaaaagtaagtctaaagacaatgaagaaataaataggcttaaaaatgaaatattagaattaaaaaattcaacctcatggaggattacaagcccattaaggaaaatgatgtcgttaataagaaaatag

SEQ ID NO: 439488 - DNA, 930 bp, Serratia marcescens
atggctaagaatgaattcctgacctttggcactgcagctaacgccaacgtattatcaaacgcagattaccaagcgctccccgatcgttcgtcagggtttggctctggcgtcgcgaagtcggaacagcttaataaggtctggcggcagtcatctgtgatgaccagtgcaatggcgcaatacattgccgatagcaccggtaatgacgtgctcgacaatggcgacatggcggccttgaatgatggcctatcaagtgcgttatctggtcgcctaatcggcgtgaaggttttcaccacatcgcagacgtatacccctactattgggacgaaaaaaataattgttgaaatggttggggggggcggaggcggcggcagtgttattgctggtactgcttcaggaagccaggtagcagctggcgccggagctggtggggagggtggggcctatggcatggctgtgatagatcctgtttttagctcagcggcaattacggtgggcaaagcagggacttcttccacgacagccccaactgatgggggaattacttctattagtgtttcggggagtgttgtcttatcggtatcaggcggagccaccggcgcaaccatgacagggccgtttacttatccagcaactttaggtgggcgaagagttacaggtaacgcattttttgggagttttttgtacaagatagaagggaagcctggagcactaggtacaatattctctggagacagcgctgctggcggcgagggtgggggaagttacctttcaaatggttctcctcaagggttaatcaataatgatttagcaaaatcctcttatagccccactggttatggatgtggcggcactggtgcctgtgccacgacaagatcacaggttggtggcgatgcctcggcagggatagtaataattaaagagtatgcgtga

SEQ ID NO: 439489 - DNA, 948 bp, Serratia marcescens
atgtttactattgaccgagccaccatcgactcctccggcgttttccttgtcggcgaactggagcgcatggatcagacgctgaacatgccgctgacgtctgtgaaatggacgcgcgatatgccgctgcgtagcgacatctccatcgctgatgaagtgtcatccttcaccaataccgatttcgccagcgtcggcggccctaaccctaccggcaaaaactggctgggtaagaaggctacagccattccgggtattgagcttgatattcagccaacccgtaacaacctgaccccgtgggcgcaggaagtgggctggactgtgctggagctggcatccgctcaacagctggggcgccctatcgacgtacagaaatacgaaggtatgaagctcaagtggaacatggacaccgacgaacaggtatacgtcggcgattctgagctgggtgtttctggcctgctcaacctgccatccgtgacgccgatcgccgcttctgcagcgtggacagcaacaaccgatcctgacgtgatcgtgcaggacatcaacctggtactgaccgacggctgggtgcgttctggttacgcagtatgcccggcaaaaatcggcctggcgccggaacttttcggcctgcttgcaagcaagaaggtttcctctgccggcaatatctcagtgctggagtatgtgaagatcaacaccatcgccttccaggagaacggcgagccgctggaaatcgtctccatgaagtgggcctctaagcgtggcgctggtggcgcgcatcgcatcgtcgcatacacccaggacgagaagtttgtgcgtttcccaatggtgccgctgctgagcacgccgcttgaatatcgcggtatgcaacagctcaccgtgtactacggcaagctgggccaggtggaaacgccttattccaacaccatcgcctacctcgacgtgccggcggcctga

SEQ ID NO: 439490 - DNA, 522 bp, Serratia marcescens
atggcgggcacaaaaaaaaccgccaacggcggccagttattttcttggcccaggtatgtgaacctcagaccagcatttgcaattcggcagacatccggcgtgaccggtcatgccgtccagcgtcggcgggttgtgccagtacacgaacttatcccgcatttttttatgcgatggtcgcgtgccggcgccctcaatgcgccaccagtacccctcagagccaacagccagcgcgcgggcctgcgtcagtgcgccagtagcccgccctatctccgtgcgtgcaatcatccttgccctgccggcggcaacatcaccggactgcatgatcatctcgtacagcgcgtctgggcgctcaccgttaatggtggcttgtatggcgcgctgttggatttctcggacacgatcggctgcttccaacggcagggacttcatcaactggatttgccggtagacgatatcctgtgtcacctggccgatcggcgtgttgccgaccacatcccgaagcccctcggaaatctgctgtga

SEQ ID NO: 439491 - DNA, 1272 bp, Serratia marcescens
atgagccaggttgatattcagatcccggataagctggtgccggtattcaccgctgaaggtaagcggtatcgcggatcgcacggtgggcgaggcagcgccaaaacgcgcacctttgccaagatgtcggcggtaaaggcttaccagtacgctgaatgcggtatcagcggggtgatagtctgcgggcgtgagtttatgaactccctggaagaatcctctatggaggaagtcaaacaggcgattcgtgaaacgccgttcctgaacgattatttcgacatcggcgagaaatatattcgcaccaagaatcgcctggtgtcgtatgtcttttgcggtctgcgccacaaccttgacagcatcaagtctaaagcgcgcatcctactagcctgggttgacgaggctgagtctgtatccgatacggcctggaacaagctagacccaacggtgcgagaggaaggcgtgtttgctgatggttctccgtgggcatctgaaatttggatgacatggaacccggaaagagacggcagcgccaccgataagcgattcaggaagaatttgcctgataacgccgtgatggctgagatgaactacagcgataatccgtggttcccggaggtgctggagcaggttcgccagaatgacttgcgccgcatggattacgcgacgtatgcctgggtatgggaaggcgcctacctcgaaaactccgataagcaagtcctggccggtaaataccgcgttgcagagttttcagatgacttgtggaaagaagccgaccgccttttcttcggtgcggactttggtttcgcccaagacccgagcacgctcattcgctcgttcatccttggaaacaccctctacatcgagtacgaggcatatggcacgcacgttgagcttgatcatttgccagccttctacgacaaaattcccggctcacggaaatggcctattcatggcgattgcagccgaccagaaaccatcagctacctctctcggcaagggttcatcatcgatggtgcgacaaagtggtctggtagcgtagaggacggcataacgtacttgcgcggctttgacgagatagtcatacacccaagatgcaagcacaccgccgaagaggcgcggctttattcttacaagacagaccgaatcaccggagagatcctcccggtcattgtcgatgccgataaccactgctgggatgccatacgctacggtcttgatggctacatcaccagcgaaggcgatctgggtgtctgggcagcgctcggcaagcagcagtaa

SEQ ID NO: 439492 - DNA, 189 bp, Serratia marcescens
atgatggcgaggcttcttaactttttcggaaaactgttgttgctcgctttcgttgtcatttgtgcaaagcaggcgctcatttacgtagggcttgagaaagaagggccaagcctatctgagctcatgaagccggagccagcgccgatcgagttcacgattcaggactacagccagcaggtgaaaaagtaa

SEQ ID NO: 439493 - DNA, 177 bp, Serratia marcescens
atggaaggaaaaaatcaaagagatctcattgcaagtctttatgaagagctagttatcgccagggggctgattaaagagatttgcactgagagagatattccagagcccaaggcatcattgcagagaatggaaagtgccataagagaggcaaaggaatacatgttggataatatctaa

SEQ ID NO: 439494 - DNA, 762 bp, Serratia marcescens
atgataaatttactgcaacttgtatttatcaatttgcatatttatcgcactgctaaatggtgtgaaaatctgagtatggaaactaaagacattcggcgagcgaaccttgcagccttattgaaagaccacttggaaaagagcccgggatcaacacgagctgagtttgcggagctatgcgggttggctcctgcacagttgagccagttgttaggggaaaactcattccgaaatattggcgggaatttggcgaggaaaatcgagacggctctgaaacttcctgttggatggctggatacactaaagtcggaagcgtcggaaatggattcgaatgtcagctatgtaggtaaatcgaaatcatccagagagttcccgctgattagctgggtaagtgctggatgctggctagaggcgatagagccttaccgcaaggatgagatagacacatggccggaaactaccgtagatgccagtcctggatcgttctggctacgtgtgaagggtgattcgatgacagctccatcagggtttactgttcctgagggcatgatcatcctggttgacccggaaaaggagcacgttagcggtaatcttgttgtggcaaaactggctaacgacaatgaggcgacattcaagcagtacatggtcgatgccgggcgaaggtatctacgagccctgaacccacaccatccgccaactattatcaacggtgattgtaagattatcggcgttgttgtagatgcaaagtgggagcacttgccgtag

SEQ ID NO: 439495 - DNA, 333 bp, Serratia marcescens
atgagcaaagcgacatacttaaaagatttgaaccacgcgcacttcatcgaaagctcatccaggagcaagaaagccagagcgccatacaaaaacatggataaagaccgctggcttgaggtctgtaacgcccataaccgaaaagtactccgcaaagctaaacgctctgtcggcaagtccaataaaaacggctgtcgtcgtactgctatgggccttcgcggctttctcaacgaactggacatgtgggcgcagtttaccaacgtcaatcgacaaggttccggcataccaaagcgcatccaccgcattaaccaccgaggggtaatttctcatggataa

SEQ ID NO: 439496 - DNA, 357 bp, Serratia marcescens
atggataagctgagcgaactgagcaagccggtggcgtggaagttcaagaatgccgatggtggtgaccgtgtgtcgctggagcgaaaggcgaatatttacggccgtcacaatttccagccgtgctactcgcaagagtacgtatccgccctccaacacgaatccgcggttaactgggaggcggcagcatcgctgaacgttgaaaatcaggagctgaaaaagcgcatcgcagaactcgaacaagccatgcgccacatccacggcgcagcgttggatatcaccgtaccgagagcagcaatagccaaagccgcagaattggcggttgagtacgcgaccatgaaggagcagagcaatggataa

SEQ ID NO: 439497 - DNA, 414 bp, Serratia marcescens
atggataaattcagcgaactgaagcgcctggcagaaaaatgcccagtacagcgttttgaaccatttatcggtcgcgcaggaggtcgaggaacacaggcgatattcaatgccgataccaagggcgaagttataacttggtctggctttgattcgtccgatgttacatcacgaactggccgcgaggcgatagctcgctttgttgcagcagtagatcccgagactgttctcgccctgctggcagagctggaagcgaaggataagcgcatcgccgagctggaagccaagctggctacgccggtgcggttgcctgacacacgattcatcaaagttggcgatacggatgtagctgtcatgcatgcggccagcgtcaaagagcggattcagcgcgctgggttcaaagtcgaggggggatga

SEQ ID NO: 439498 - DNA, 1077 bp, Serratia marcescens
atgttaattaattccagttattacagtattgcagaacttattgatatgctttcccgccgagacttaatagttaattcaaattatcaacgcgcagctggattatggcctgagggaccgagcagctatttcattgatacgatattagaagggtttccattccctaagatatatctttatgagtttatgaatcgctcggatcgtaggataaaaaaagaaattgttgatggtcagcagcgtataacgacaatacgcagatatattgacaatcaatttcgggttaagggcgatagtcaatattcagggttgttttttcgggagttaccgatagatgttcaagaccaatttatgtcgtataccgtttctgctgacgtaataagaaatgcaacgcgtagtgatatactgcagatgtttagacgaatgaatgcttacacactaccccttaataatgcggaaaaacgtcattcttcttatattggggagtttaagtggttcattaatgaagcgtctgatagtttaaatgagtttttcatcgagtatggtgttttcacagatagacaaataataagaatgactgatgcggaatttatttctgaatgtctgatttctattgagcgaggtatagttagcgctagtcctactgatttgaaccgcctttatcagcaaaatgatgatgtttttgttaatcgaaatgagttccatcaaatgttaacggaaaccttttattttatttctgctaattttagcaacctcaggcaatcatttatgatgaagccttatgctctacactctcttgtcactgcattgttgcatgcaagatatggtattcaatctattacagatgaatacgcaattcagtcattaggggtttacaccactgatattgccagagctgcaaaccgcctagaagctttggctcttgctcatgaatcaaaagatgtatccggaccattccacaaatatgtatggggaactgaatctagtaccaataaagcacaacgaagagaggcaagagttttgacaatcttatcggctctcggttgtcaaattggagatcaagagtatgacaatatcttttga

SEQ ID NO: 439499 - DNA, 651 bp, Serratia marcescens
atgacaatatcttttgagaaggcattgtcaaaactaaaagcaagaacagttgtgcttgatagtgcttttgaaagaaatttgcttgttgcaaatcctaacaaatgcgcagatagatatgctgttcaagaaggactaatgtcatcattgtggcaggcttggtgtatttattgccgaactattatatttggttcgttaactgatgggctaacggtaaatggaaatagagtatcttcagcttattctcatttaactgatagggagttggtttttcttgcgcaaaaagcctcgcagggagcaaatttagcagcagccatcgtgagatcggcacaaccgcatatagaaatgacttggggggatgctcttaaactaaacccggttataactgctttcaatcccactaattcaggtgttcttataagtggattgggtgcggttagtcttctcttagatttgcaaaaatttagaaatgcaaacgcgcatataacatccttcacaataggtgaggttaaacgtgctcaagttagatacacacacacaaagtttcgtcatccatctgatacgatgttttggatagatccccaaactaatgattatttatggaagtcatggattgaggaaatagagctgatttctgacgcaatggctcagtag

SEQ ID NO: 439500 - DNA, 702 bp, Serratia marcescens
atgaaagccgcctcgccgcaaaaaatggaggtgtttacctttggtgagcccagcgcggtgctcgatcaccgtgacattctggattacgtggaatgtgtgaataactgccgctggttcgaaccgccggtcagttttaccgggctggcgaaaagcctgcgtgccgccgttcaccacagctcgccaatttacgttaagcgcaatattctggcctcaacgttttttccgcatcctctcttgtcacaacaggatcttagccggttcgcgctccgcttccttgtcttcggcaatgcgtttttagagctccgaaagagtgtcaccggtcgcctggcgtcatcggcgaaatacacgcggcgtgacattgaggaggatatctactggtgggtgccatccttcgaccagccgcacgcgttcgcgcccggctcggtgctccacctgctggaaccaggcatcaaccaggagctgtacggtattccggaatacctcagcgcgttaaattccgcctggttgaatgaatccgccacactatttcaccgcaagtattaccagaatggcgcacactcggggtacctcatgcacgtgacggacgccgcgcaaagcggttccgatgttgaggcactgcgtgatgcaatgcgcagttcaaaagaactcggcaacgttgaaacctgtttttctacgcaccgaatggaaagcctgacggcataa

SEQ ID NO: 439501 - DNA, 405 bp, Serratia marcescens
atggacttcgcaacgcagaccgaatcaatctgccagctcaccgaaaaatataacgctgagtacatcggtatcaatgcgaccggtctcggtattggtgttttccagcttgttcgctcgttttatcccgccgcccgtgatatccgctacactccggaaatgaaaaccgcaatggtgctgaaagcaaaagatgttatccgccgtggctgtctcgaatatgacgtcagcgctaccgacatcaccacctcgtttatggtaatccgcaagactatgcccagcagcgggcgcagtgccacctatgaggccagccatactaacgtcgcctggacgaccatgcacgcgctgttaaatgaaccgctcaccgctggaagcggtcaggcaacatcatccattctggagttcaactaa

SEQ ID NO: 439502 - DNA, 798 bp, Serratia marcescens
atgaacattgatatggtttatcttaaagatttatctctcctgttattacctttgctgatatctggaggggcatggctatttttacgttggttaaaaggatatgattcccggcgacgttgccagtttgaccgggtcagcgatgttaaacgcttgtccgtcctgatgcgtattcagaaattgcaggagggaccgcagaatggcatgacgtcactgcaaactaaaactctgtatgaaagtattggtatccgcctgccggtatgggtggcacatcagctagtggactatttgggccgtggatcggtggcattgaacgaccttgtgttgaacagtttcttgcgctgtacttttctcacttcgagtataaacggcgtgtttaccctggatacccgcaagttgttacgtcagtatgtttcgcggtttgtcttcctcatcatcagcgcttcagctatcgcctatggtttctatatcagcgtgcgaccgccgctggagaaaagtgaaaccaatactcttttatctttattcttctttgttgcctatttgatattggcgtttttcatcgtgatctggacgactaatgaatggaaaaacctgtggcgcgccaaggttttctggctgggttggaaaccccacctgtgtcaaaacgaagcggagtatcaggtgcgttgtcggcttgagcggaacgttacggtacaagaaaaggcgcctgatactgctttagaaaccgttgccgatttgtcaccgaccgaaaagccactgcgtggatggctgatgcgtaggctgggcaagaaaaataattaa

SEQ ID NO: 439503 - DNA, 1050 bp, Serratia marcescens
atgactgatattgtgcagttgctaggaaaggaagcggaagatctgctgcaacaccgctgtaccactatccccgccgagaatctctacctgccgggcgccgacttcgtcgaccgcgtaatgatcgataacaaccgccccaacagcgtgctgcgttcgatgcaaaccctgttcaaccacggccgcctgggcggcaccggttacctgtcgatcctgccggtcgatcagggcatcgagcactccgccgccgcctcgttcgccgccaacccgctgtatttcgatccgaagaacatcgtcgagctggcgattgaagccggctgtaactgcgtcgcctccacctacggcgtgctggcgtcggtatcgcgccgctacgcgcataaaattccgttcctggtcaaactcaaccacaacgaaacgctgagctacccgacccagtacgaccagaccctgtacgccagcgtcgagcaggcgttcaacatgggcgcagtggcggttggcgccaccatttacttcggctccgagcagtcgcgccgccagatcgaagagatctcgatcgccttcgagcgcgcgcatgagctgggcatggtcacggtgctgtgggcctatctgcgcaacccggcgttcaacaaggacggcgtggactaccactccagcgccgatctgaccggccaagccaaccacatcgccgccaccatcggcgccgacatcgtcaaacagaaaatggccgaaaacaacggcggttaccgcgcggtgaaattcggctataccgacgatcgcgtctacaccaagctgaccaccgatcacccgatcgatctggtgcgctaccagctggccaactgctacatgggccgcgccgggctgatcaactccggcggcgccgccggtgagaacgatctgcaggaatcggtgcgcaccgcagtgatcaacaaacgcgccggcggcatgggcctgatcctggggcgtaaagcgtttaagaaatcgatgaaagacggcgtggcgctgatcaacgccgtacaagacgcctacctggacaagaaggtcaccatcgcctga

SEQ ID NO: 439504 - DNA, 1092 bp, Serratia marcescens
atggcagcaaataaaaaccaacactatgtaccacaatgctatttaaaacgcttctcaagcattccttcaacatcttcaatatgtctttataatcttgatagcaacaagttaattcaccaagctcccataaaaaaccaatgttcccgagactatttctatggggatgacttaaaaatagagaaagcattgcaaccatttgagagcgaatatgccaacctagttaaaaaaatagtctcccctggatatacattaaataataccgacaagaattttttgctagatttctggctacttcagcacatgaggactgaagctgcttcaaaaagattggttgaaatgtcagaaggtattattgaagttgcaggtatagacgactataaattccagattaaagatgcagtgaatcaatcaatgaaatcatttctcgacacgcgctatcatatatatgatttaaaagtatgcttattaaaaaacaaaacaccaaaagtattttatacttcagatgatcctgcaatactcacaaaccgctggtatttccatgatgaacgtgcaaaattccaatcatttggccttgcatctgcaggaaccttattactcttaccagtgacaccccatgttatgatggtggcctatgactctaatgtttacagcatgaatgaatctcgcggatgggtgaaaataaaaaacaaaaatgatattgactcctttaattcattccagataattaactgccgaaaaaacatttatttaagcacccctaacgaccaagaaaatgtatatgcattgcatcaaaaaataaaacccataagacctatagtgaaacacaaattcaactacgctatttttgatggatcagatggaaatcatacccgatataaaacggtctctaaaaatgaagtcctagagcgaaaggaaaacacactaatacactatcaacccgtccaagtcgccccttctgaatggccaacccaaatatcgtggagaaataaagggtttgcatatactaatgatacaggtgtaggttatgtgagatctccttacgacatccctttttcaagagatcccttttataaaatcccaacaagaagataa

SEQ ID NO: 439505 - DNA, 1086 bp, Serratia marcescens
atgacacagaaaaaccgccagggtatttggcgcggcattgccttgttggcgctgttgctggcccaatcggtgtgggccgactgttattacagcgataagtcggacgttaaaaacgatctgaatatcactgcgcccattgtatccagcaatatcaccgtgggggcagaagtggcccggggcgctacgctgtatacgcaaaattttaaccccactttcaggaatgtgtacgtcgaatgttcgacggcgcaaccgttcatcgcgatagacatgggttatgagccgccgccgcatcctctgtcggagtggagcggcggttttggcaaggtttatcagacgggcgtgccgggcgttggcgtgtttatcgataaccacgctttgtctttcaccctgccgtacacgtcgcggagcacggagagtcataccctgtacgggtggtcgtcgaatcttttcaaataccgcattcggctgataaagaccggcgatattcaacccggcaccatcaccggcgccgatttgccctgtttagtgacccaggttgggccggcaagctcgccgtttaccgctatgcggctgtgttttaccggctcgatcaatatcgtcgcgcagagttgcaccacgcccgatgttttcgtcgccatggggaaatacgatatgggacgagatttcaccggaaaaggcagcgtaaccgaatggaaagacgcctcgatccgcctgatggattgcccaaaattttacggtacggccgaagcccattattccgatagcggcaacagcggcatcgtcagcgcaaccgccaacagtttaggggtgtcgttagcgcccaatacggcggtggtcgatggcgacaacggcattatggggcttaaagacggcagcggcagcgcaagcggcgtcggcatccagttggcctatggcgcgtcatcgccgcggccggtgcagttctcgcgggaaattaaggtgccgctttcccccgccacgcccacgtctttcaccatcccgttgcaggcgcgttatattcaaaccgagcctaccgtcacgccgggcgccgccgacgcgaccgtgacctttaacatcaattattattga

SEQ ID NO: 439506 - DNA, 1785 bp, Serratia marcescens
atgaagctgacgacctttaagaacggcagcaggctggcgataccggccatcttcgccgcgctgtttctggtggcttcgaccgtcacgctctattactacagcgccaccctgtcgaagaaagggctgtatgccatcgccggcacgcaggagaactactcctggtcgatcgccaagttctccatcaagctggcggaattcgacacgttcgtcgagcagcagagccacgcgccgcaggtggacaacgacaacctgcggctgcgattcgaaatcctctattcgcgcttttacgtgctggaaaccgtctccgaatccacgcaaccgctgtacgccgagccgggctacccggaagtggtcaagcagatgcgcctgcagatggatcgcatcgataaactgctggataacccgaaaatcgacttcaatcaggttttcgcggccatgaaggccattaagccttacgccatcgaaatggccaacctgaccgaccacgccgaggtgaagcagcgcaccgccgcctatgaggactacatcgagaaacggcacatcattttctatgggctggtgattgtcatgttctcggtgatcgcgctgatcgccatcaccctgatcgtgttccgtcagcagcggctgaccattcgccagcaggccaaggcgatcgaggcggagaaagcgacccgcaccaaaaacgccttcctcggcgccatcggccacgaactgcgcacctcattgcagagcgtgatgtcggccatcgacgtgctggtgaatacccgggtatcggcggagcatgcggacaccttccagcggctggagaccgccgcgcagcagatcgaaagccaaatgaaagatctgaccgactacgcgcacctcgacagcggcatgatggagctgcgcatcgtgccgttcgacgcgcagaagctgatcgcggagaccgccaacgaaatcgctactttgacccgcaaagagcaggtcaagctgagctgcgaggtggagtgcagccacctgttggtgcattccgacccgctgcgcatccggcagattatcgtcaacctgctgaccaacgcctacaaatacaccgaaagcggcagcattacgctgcacagctgtctgcgccgtcaacccggcggcagttcgttgattatcgaagtgaccgacaccggcatcggtatcgaaaaagaccagctcgatcagatcttcaaaccctttacccagttggatcagtcgcataccaagcaatatgccggcgtggggatggggttggcgatcgtgcacggcctggtgacgctgctcgacggcaccatcacggtgtacagcgaaatcaagaagggcagcacctttatcgtcagtattccggtgcagatcagtgaagaagaacgcgccgacgagcccgccgccgccaatgcctctctgcagcagaaaccgcagcaggtgctggtggtggatgacaacaagtcggtgggtgacgcctttgcggcgttgctggataagctgggttaccagcacgaactgtgcgactcgccggaacgcgcgttgcagaaactgctcagacgcccttacgacgcgctgttgctggatctgcagatgccgggcatcgacggcgccgccctggccaggcagctgcgcaatcgtcgcggccccaaccgccatgtgccgatcatcggcatcagcgcctacacgccggagcaactcacggcggatcagcgcgcgctgttcgacaactacctgatgaagccggttcggctggatgcgctgtcgaacgcgctggccgaggtgttccccgctaaagattaa

SEQ ID NO: 439507 - DNA, 1668 bp, Serratia marcescens
atgagaaaattaattttagaaacaataacaataatatctcattcaacaaaatccgcgaggcaattcgagttcggaaggaatctgactctaataacagctaatgatggtaatagtgttggaaaatcaacattagccaaaatgatcttttggtcattcggctgtgaacctttattctctaccgcatggaaagcattagattgttcatcaattattacttttaacattaacggagagtcatactcaatacatcgttataaaaatgaaattggttttatgaagcgtggagaatcactcaaaacatatgataaaatcactggagaattctcgagggaattcgcagaactggttggttttgatgtgttactacccaagaaagatagctttttattggaagtacctcccccagcatattattttttaccgttttatatcgatcagaaaagaacatgggtcaaaccgtgggattcttttacaaacttacaacagtatagtaggtgggcacagcctgtaatatcgttccacagcgctcttgtttcaagggagcattttgttgttgaggaggatatttataatgtaaaagcacagattaatgaagtgctaaataatattagtgaattaaataatgccgtttccattctgaaatccaacataattcagcaagagtataatgttgattcggaaagtttatctaatgagttaatgagcattgaaaagctaattaaatttaacttagagaaaacatcaaaattaaaaattgacattgttgaattggattctcaggtacgccttgcagagtctataattactgaactgaataaggattatattttctctgtagaaaatatgaatgaaggtagtgttgagtgtccaacatgtggaacaattcatgagaattccattgctcatagaagtagtatattaattgataaagaagtggcggagaggcaactcggtttacttttagaagaaaaattacaaacaaaaaagagtttgaaagaattgggggaggagctttctgaactaaaagaacagttaaaaaatgctcagctagcatttgattcaagcaattctaaagcgtttaccgaacttgtaactaataatgttgataagcaggtcgatttcattgttgaaaagaaatctctggatcttattacaaaacaatcggaagagaagggtttaaaaaaggcacaaaaagctttaatgactaaagagaaaaaaacgaaaattaaagaggatttctcagatacattctttaaatatataacaaagctgaaagttaacattgatgcctctcttataaaaagtccgcttgattataacaaaatatatgaggtcggtggtgcggctgaagatgctagagccgtcttaggatattatttggctttgtatgagcatattgaaaatcactgtcaagaggtagtttcacctcttgttattgatacacccaatcaacaagagcaatctacagaaaattacaataaaattgtcgaggcaataaccaggggggttgatgacaataatcaatatattatttgcgcaatgcaacatgacgcattggcaaaactttcggaaagtgccaaaataattcgtttggatgaaagtaaaatactttcaacttcagaatatgatcatgcaaagaatattgaaagtgagtttctttttatttga

SEQ ID NO: 439508 - DNA, 1098 bp, Serratia marcescens
atggacagcgaaaccgatatggataacccacttgcatcacctcagcgagaatctgctggtgcagattcatacgaccgttttgagtatcaataccactgggctttatgccaagcattttcagcatatagtactgccaaagactttgccgtattcatggaatatcatgaagatgttattattgccaattcgcttgataaaacaaaagttaaattcacattcaatcaagtcaaggcgaatgcctcaggtagttatacgactaataatctcactaaacgagctaaagggaagagtgatgataaaccctctcttttagggaaattatgtgtttctgtgcataataaaaaatatctagagaaagttactgagttaaattttgttagtactgttggtttcaatttttatcctaaagatggtttgaaattaagagctatgggcctctcagatttggatgccgatgattccagttcgatagtgagtgcattgaaaaatgaagtgaatgattttgactcattcccgaaagagatattaagattcgtttgttccgatataccgcttcaaagttattatgaacataccattacaagaataacagatagtgtggaagttgtctttccaaagcatttgttaaaaccaaaagatatatatagagttttaatggattcacttagaattcgtgggaaagatacttttgattatgataaatgggatgaggcactagctcacaaggcacttacttataatgatatacacaaggttgttacaaaaggtattgctggagacagttctggagttaatctagatgcagcaaaatatattattgatgacctgaaactgagtggtttagagaagggtaagctgttaaaagaggttaatttatattcgctgcgtattttatccccatcattagctatgttggatgctcaaagtagtattcaaggagtcattgttaatggtcaaaacctattggaaggaaacattaattatgaaactctccgagagcttggaaatcaactaccaccaaagatagttaatttattcgattcagacagatcagtgattgcagcgattatctatgaaattatatcgagtgattcataa

SEQ ID NO: 439509 - DNA, 636 bp, Serratia marcescens
atggccagattcgataatgccttatccacttttgagcatgcaatatctcgctcagtggaaatgataagtctttatgatgccttagtagcattacggaggaaccaaccggagaatgatgacgccttaaggtcagcatatttccaagtagtcagttcatttgatttcctagcccatgaaattgctgccatagagggcagatttagattcgaatcttctctgaaaactagaaatctgtcactgccaatggaaataatcacaatttctgatgttgctgacagggttaataatgctgaaataaaaatcaggcaggtaaattcattcaaagcatttgtagatccgggtaagctagcggaaatgctgtcgtgttactgcgatagaccatgggataagatagcagacgcttacaactctacaaaggatgagccagacaaaaagactgcttctgacttaaaagagagattaaaaaatgtctggaaaagaagaaatcagattgctcatgaggcagatgtgaatcctgctatggctggtatttcactatggcctatcacaaaagaagacactgagttaacagtagaatttattaaagatttgggcagttgcttaccaatggttataacccagtctctagatgcatag

SEQ ID NO: 439510 - DNA, 1065 bp, Serratia marcescens
atgaaacaaatagcgatgtttaatcacaaaggtggtgtggctaaaaccacaatgacttttcatttagcatggatgttagcgtctctaggtaaaagagtaatggttgttgattgtgatcctcagtgtaatcttacaggtgtttttttaggtgaaattgatgctgaagagtatccatttgaaagtcagaacccacaaagaccaaaaaatatcagagatgcagtaagaccggcattcgaatcacggccatactctatagaggcgactgaagtttttgagtgtcctcttcaacagaaccttttccttcttccaggccatgtcggtttatctgaatatgaaagccaactagccgtttcacatgagctaagtaataccctttctgcgcttcaaaatatacccggagcgttgcaccatgcaattaaaaaaacagcagaaaagaataatattgatttttcaatcattgatatgagtccaagcctaggtgctataaatcaaaatctcttcatgacgagtgattgtttcataattccgatggcacctgatttattttcatcaatggctttgcgttctttatctagaacattacctaaatgggccgagtggggaaaaaaagcggctaataacctaacgctaaaggaagctgattacccattccctgatgtgacaccaaaatatttgggctctacggttcaaaacttcaggaaaagagccaggggtagtgaagaagcaaggcctacacaggcttttcaaaactggtttgataaattggccacaactagaaatactgaattcattcaggctcttggaacagtaaatatgctgcttgataatgaggtatatttaagctcgaacgctcctaccacagagtttttaatggaaattagttcattagatggtttaattgctatagcccaagagttagcaaaacctgtctttgcattggatctaaaagaggatacaacattcagagggaatgtggctgacacttatagggacaaaattaatgatgtccgcgaggccttcgaagtcggctctcaaaaagttattgaacttacggataaattttaa

SEQ ID NO: 439511 - DNA, 570 bp, Serratia marcescens
atgccaggctttatgatgtcactgtggcaccagatcgtgctgtctttaccgctgttcgtcctgatcgcgttgggttatgggctgattcgctgggggaaatggccttccagcatcaccgatggcctgacgcgcttcgtgttttccctcgctttgcccgccatgctgtttcgcatgatgtgcgatttctcgcagcgcccggcggtcgacgcccggctgctgatcgcgttcttcggcagttgcctgctggtgttcgtgctcggccgcctggtcgcccggcacctcttccggctggatggggtcgctggttcggtgtttgcgctgggcggtattttctccaataacgtgatgctcggtttaccgatcgccagcgtgatgctggggcaggcggcgatcccgtcggtagcgctggtgctggtgttcaacggcctgatcctgtggacgctggtgacggtgtcgatcgaatgggcgcgcaacggctcgccgacgctgagcggctttgccaaaaccgcccgcagcgtgctgaccaacccgttgatgtcggcatcctgtccggcaccctgttcagcctga

SEQ ID NO: 439512 - DNA, 819 bp, Serratia marcescens
gtgaaatatctgcttcgttatatctttgcagtgtttctcaccctttgggtgggcgcttgccacgctgacgttaaagtgaaatgggaaccctccagcgacggaaaaacattgagatttaccgtgttgtctgcgacatcaaacccgtttccggcagagtttacgctgaagtgtgggcttttttctacatgttatgtcgatgcgcatgtcggattacttaccgaagtctatcgatcgcctaacatcgcttcatccccaggaacgcagaaagcctcaacgctgattgccgcctgggctgcgagatcgccggttgggttcattggcaactggggagagctggtggagaaaaatggcggccagccaccttgtatcatctttaatctcatggggggcgtgagtggttcgggatcgtttggcagtacatgtaatggttcggtgaacccgcctgaacccccaaaaccgccggtgtcatgttatatgatcggcgatatttatctgcgccacggttctctcgccgatagtgaagtgacgggtaaccgagccgagagtacggcctacgtctattgcaccggggccgctaaagtgaaggtgcgagccttagccgccgtcggcagcgacagctacaccgtcaatttgcgtgctgacggcagcctgaaatcgatgctgagtgtcaatggggttgtaggtaactcaggggtgacgttgaatgtacctggggcgggaggaaatacggtgaccttctcctctttactgattgcagcgggaataccggccccaggggatttctccggttcggcggtagcggtcgtcgatattctctaa

SEQ ID NO: 439513 - DNA, 504 bp, Serratia marcescens
atgaagataaccgttgtaaaagcgggagcgttgctggcttgtagcctgcttctgcctgcgcggcagggatgggcggcggacaatgaggctggcatgtcgttcagcggcacgctgaacgaaccgccttcatgcgtgatcaataacggccagcaaatcgacgtggattttggtcagaaggtcgggatcggtaaggttgatgggcagaattatctgcaaaccgtcaattaccgcatcgagtgtgagccgggtggcaacggacagacgctcggcttaaccgtggtggccgccgccagtggatttgacgacgccgccgtgccgacgaatgtgcccgatctggcggtacggctcttgctggcggggaatgctttcgttctgaataaacgcgaagcgattgacgccgccaatccgccgacgttgcaggccgtaccggtgaagcgaccgggagccggattaacgccgcaggcgtttagcgcccaggcgacgctgttggccgattaccagtaa

SEQ ID NO: 439514 - DNA, 579 bp, Serratia marcescens
atgcgttttgtgatggcgggttgggccagtacggtgtggcgtcacggtatggtgagaaagcatgtgtgcatgacagcgcgggcttggcctgggtttttcaggcgctacggtttatggggagtggcgctggcggggacgatctttctctcacccgggcgggcggcgacggccccaatctttatctccggcacgatcaccagcaaaccgcagtgtgaggtgaacaacaatcaaaccatacgggtcgagttcggcgatgatctggtgaccaccaaggtcaatggcagcaactatcttcgcacgatcgattatgtgctggagtgtaaaaacaacagtaaaaacgcgatgaggatgaaagtagtgggcgttgctacagcgttcgacagcagcgcgattcaaagcagcaaaagcaatctgggcatcgcgctgcgggcgaatgatatgccgttggtcatcggcagttggttgaactttacctacccgaacaagccggtgttgcacgcggtaccggtgaaaggcagcggtgttctgaccgccggcttttttagcgcgggagcgacgctgatggtggattaccaatga

SEQ ID NO: 439515 - DNA, 798 bp, Serratia marcescens
atgaaaccgttatttattttttgcatgctgtttatttcgctccaggctaaagctagctgggagttagatgtgaaatactttccgcaagataatcgagttaaagttaatgttattcggtgggatgtggatgattccagcaggaaccttttatataactgctgggaccctatcgcggcttctgatcagcgctgtcggcttttcatagcatttgacaacgaagagcgcggtgcgaccttgctcggtgagccatttaatatgggcaaagaggtatcagatttaagaacgatgggggaagtagccgctgtttttgcccgaaaagggtatttgaatcaagagagaagcggtggagcgcaacttattggaagaagaaactgttttgcattggcttggaagtatcccaccggattccatggccccttgccgaatggaaccgtagattgcgcgttgccggaaattaccccgacctactgcagtatcagggagccctatattgaattggatcacggctcggtaacaagtgagagggtaaatggccataccgtcagccactcttttagggtggcctgtaataataattttaaagtattgattgttgcgcagggtggaaaaggcgatctgccgttaggcggtggcatcatcagccacctgaaagtcaatggcgacgatctcggtgccgggcatgcggaagtggtcggcccggcagggaaaagctttacgttaagctcaacgctgagcggctttcccagcggtgccggtgaatttcaaggttcgaaagtgattattttaagtcttccgtga

SEQ ID NO: 439516 - DNA, 471 bp, Serratia marcescens
atgctttgtttgaccggcgcattttgcctcttggcggccagcgtggcgcaggctgccactacggtgtcggttaaggtaaccgtgttggcgccgctgccctgcgtgctcaatggcaatcaaccgatcgaggtgaatttcggcgatgaggtgatgacgacgcgtattgatggcgaaaactaccttacgccggtcgattatgaattcacctgtaacaagccggaaaagaacggcatgcgattactgcttgccggcgccggggcggggtttgatggcaaattgctgcagaccagcgtcggtggcctgggcattgcctttttgaacaatgggtcgcgtatcgcgctgaacagttggcaaaacttcacttttccctcattgccgaagcttgaagccgtgcccgtgaagcaagcggacgcagtgctgccgaccggtgagtttacggcgtccgccacgttgcgtgtcgattatcaatga

SEQ ID NO: 439517 - DNA, 630 bp, Serratia marcescens
atgtgtggggctttcaataaatattgctccacatttcaggattgtattttactgattagagtattaatcgatatgaaaaatatcattttgattagtcagtgtcagtttatgcaactggcatttaaaactgtttttgaaaataagtcagactataaagttgagtgtctcagtactggttgtaaaattgataaagaatgtgccagtacaaagattttgattcatgtaacagatgaaaactattccgagttgttggtgttaatgagaagttggcagtttttctggttaagaaaatccatattcattacgcagaagcgcctggcgaccctcatgaattattcattggtgaaaacactgaggtttattgatgatagcgcaagcgttgaggaatttgagcgggaaatcgttgtggggagctggtcggagtctggtgtagaaaaaggcgatctgttatcacaagctgaatatactgtgctgaggttcgcagcatcaggcatgagtttaacggcaatcgctttcaggacccgaaaaagtatcaaaacaatcagcagtcaaaaaatcagtggtttgaggaaactgggtttagagaatacccctcactccctgtttaatctgtttaatttattttactga

SEQ ID NO: 439518 - DNA, 1695 bp, Serratia marcescens
atgatattcgatcgtgtttttttcttgtttgtcattttgctttttattccgcttgctatctatatccctaatcccggcggaattggtttggtgctgccgtttaatctgttgttctatggtggcgcggctttattattgggcgtttgctggcgagcaacaccgctgtgccaggtgtttataacgccaacctgccgcgcaataataaccgcctgcctgctgttactgttgccggtggtatttatccggccggaatggcaaagcaccaccttatcgcggctggctggcttatttgccggggcggtgttttatttcacctggctgcagatacgtatgacggctcgccagcgccatgcggtgttgtatttgattttatcagcggcggtggtacaggcgctgatagtggtgttgcagctgtttgcgccatatcttgcccaattctgggtgcccgctaacggtgggcgcgctcttggcatttttcagcaacctaacgtcactgccagcttaatcgcgaccggggccacgctggcgttggcggcgtttgtgctgccggggttccaactgctgaatccatgtagagaacgctggcgccgccgtgcgttggctgtggcgctgttgctgttgccgatggtactggtgtggctacaatcccgtacaggttggctggcgggcgctctagtgctggggctgtttgccctgtgttttttccgccgttattcgcagaccgccaccacggcttccgtactaattgttggcggcgtcatcgttgcggcactggtgttgtggttggcgggcaatatgggttatgccagccacgccggctccaatcatgcgcgcctcaccatgctacgtgatacgctggcgatgatcgtcgaaaagccgctgttcggttggggctacggcggttttgagtatagttttcagcattttcgtatcaatcaaacaccgcctacggtagtgacagaaattgcccgtcacccgcataacgagctgttgctgtggtgggtggagggtggggttgtcgctctgctgggcatgctgttgctggtgtgggcggggctgaaattggttgcgcgtgcccactggcgcgacaagcgggcttacgcctgcggcaaagccaactctggagaagcgttggcgctgagcatcgctctgctgccgatagcgttgcattgtcagacggaataccccttctacctttctgcgttgcattggctggtgtttttgatgctgctggcaatgctcgatcgcctggtcagcccgcggctgggcaaaggtggggcgctgaaacgatggaagtacccaatgctgttgatgtcgctgtcgggcctggccttttccgctgtggggttgtactgtggccagatactcacccaggcggagcgcgcggggctgcaggagatgcgccaggtagaggcgatgccggcgtgggtaagctggacacaggcagaaagagtagagtttgatcggcaactggccacgttgatgaccttcaatctttcacaggaagagcagttgttggagagctatgcgcagtgggcgcaagcatatcttaatcaccgtatcgacaagaacgtttatgcgaatctgctggttatcttgtaccggcagcaacaatacgtgcgtgccgacgaattgagacgcgaggcggcgttattatttccctttgacaggcgttttgagcagcacgctttctaa

SEQ ID NO: 439519 - DNA, 825 bp, Serratia marcescens
atgatgaaactacactcgtatcattgcgttatcctcgcggcccttctggtcgccccagaatccggtgcggtctcctggccaatggttcttagctctaggatattcaactgcaagccgcacggagggtatgagtgcggcacttactctatggcagggactgctgggaagatagaaattggggtgccgaccgccggggcgagggtgggttctggggctgcgtggtacggcatacattgcgagcgggggagcaaggctgatggtgttccgtactcggactgtaggtggatctggggcagccacggtccgtccgagccgccgagctgcgtgttcaaatcaagggacttgtacgactggaacttggctcggtgcgatgtgccatcgacttggagtcattcgtcacacgtcggtgcgagccctgggggtgaatgtgcggctttcggtatcgagcacgacgggctgatccaaaccccgtggggcgactttgacgcgaccgcagctgccaacgccggttcggccgtgtgcgttaaaggatccattccatctctgccatgtaccattgggtccgtggcagagattgaccatggctctatcggcccgtacacctcggatgttcgttcgactacagtcgaaatatcgtgcggggctcatccaacgatcgacatcgtgggcggaccggacgtcgtcctcggttcgggcataacaacgcgactcagtactcaattggtaaataacaacatactacgtgtcgaatcgcggatgtctgtattcgagggaactccaggggggtacagcgcgtcgaagatcgtggtcgtgtctccaaactga

SEQ ID NO: 439520 - DNA, 477 bp, Serratia marcescens
atggtgcgatacggcagcatttttctgttaatggccctcagtggcccggcgacggcggcggacaatatgcggttctctggtgttctcatcgagccaccgccgtgcaccatcaacgacggcggcaaagtggatgtcgatttcggcaaccgcgtgggggtcagcaaagtggacggcgttaactatcagcagccggtgaattacaagatcacctgcaccccgagggccggggcctggaacatgacactgaccgtggtcggtacggcggcggattacgatacggcggccgtggcgagcaacatggatgacctggcggtgcgcctgctgcaaaacggcaagcggttcaccctcaatcagccaattcctatcaagcgggatgcgccgccgctgcttgaggcggtgccggtgaaacggccgggggccacgctgcaggaaggggagtttgaagcgacggcgaccctgttggcggtgtaccaatga

SEQ ID NO: 439521 - DNA, 498 bp, Serratia marcescens
atgaaggcaaggtttagacagtgtttgcccggctacggattagcggtgttggtgttggtgtacgctccgctgctacaggcggccagcactaccatcaaagtgacggtgaccatcgtcgcccccccgccgtgcgtgattaacaacaacaacctgatcgaagtgaacttcggcaacgacgtgatgatcacccgcatcgacggcagctataagaaacagccggtggtgtactcggtggagtgcaaaaacgcgccgaacaacgcgatgaaactgcaagttcagggcaccgccggttttgacagcgaagtgctgaaaaccaacaaggacgggctgggggtggcgctactgcgcaacggcaaccggcagcctatcaacagttggattaattttacctacccgaatctgccgacgctggaagcggtgccggtcaagcaggccggtgcaaccttgagcggcggtgcattttccgccggggcgaccatgaaggtggaataccagtga

SEQ ID NO: 439522 - DNA, 654 bp, Serratia marcescens
atgcgaacaagaacgcggcgatggagctgcggttatcaccgccatgaatggctgtatgcgctggtggttactgcggcggtgctgatggtgccgttgtgcctgacggtgatgctgtggctgctgccgccggcacaggcggcggacaactggcaggtggagggcgcccatggcgtgctgcatgtgcacggtgaactgacagaaagcgcctgccggctggagatggcctctgcgtaccaggcggtctcgctggggaataccgtcacggcacagctggcgcaggccggtgaccgtggcgtgccggtgaacgtgcaactgcagctgcgcgactgcctgcgcacgccatcgaacaaccgggatacgcgcagcggtaaccgggtctggagcacgcagcagccggcggtatcggtcagttttatcgccccggcagacgctgataaccctgagctggtgagggtacagggcgcctccgggctggcattgcgcatcaccgacacacagggccgagatattcgcctgggtagccgcagggcgccgctggtgctggcggtgggacaaagtgcgctgaattacagcataaccccggagcgcactcgcgcgccgctacagcccggcgcctatgcggcggtggtggggttccagctcagctatgactaa

SEQ ID NO: 439523 - DNA, 750 bp, Serratia marcescens
atgaaaaccaaccatctagtgacattaattgccggcggcctggcgggcctgctgggcgcccaacaggcgagcgcggctatcgcgctggaccgtacccgggtgattttcaatggcggcgacaagtcggtcagcatgagcatcagtaatgagaacaaacagctgccctatttggcgcagggctggatcgaagacgccaacggcaaaaagatcagcagcccgctgacggtattgccaccggtgcagcggctggagccgggcgccaaaagccaggtgaaggtgcaggggctgccggccgccaatacgttggcgcaggatcgcgaaacgctgttctatttcaacctgcgcgagatcccgccgaagagcgataagcccaacacgctgcaactggcattgcaaacccgcatcaagctgttctaccggccgaaggctattgcgataaccaacccagaggccagtgcgccgtggcaggaaaagttgacgctgaccaaacagggcgacagctaccaggtgaataacccgacgccgtactacgtgacactggtggatgccagcagcaagaaaggcggtaccagcgcgccgggcttcgaaccgctgatggtggcgccgaagggcagtgcgtcgctgaaggtcgcggcctctgcgctggggaatactccggtgctgacctatgtcaacgactacggcggccgcccgcaattgacgtttagctgtaacggggcgagctgccaggcgatggcgggcagcaaataa

SEQ ID NO: 439524 - DNA, 2547 bp, Serratia marcescens
atgtcaactactccgtcatatggctgtatagggaaaatacgaccgcgaattttggggctgttgattgcctttattctggcggggaataccgcctgtgttgcagccgctgatattgaattcaataccgacgtactggatgtgacggatcgcgccaatattgacctggaacagttttctcgcggcaactttattatgcccggtgattatctgtttgccgtgcatattaataaacagacattaaccgatcagccggtggcgttttacccgccggatgacgatgccaaaggcagtgaagcctgtattacgccgcagttggtagaacaactggggttaaaagaagctgcattattgaaattgacctggtggcaccaaaaccagtgtctggatccccgcagcctggaagggatggaagtgcgcggcgatttaggtgcggcggcactgtatctgaatattccgcaggcgtatctggaatataccgcagaaaactgggacccgccttcacgctgggacgaggggatcccggggctgttatttgattacaacctgaatgcgcaaagccagcgccaacaaaagcagggcgcgcagagctataacctcagcggcaacggtacgcttggcggcaatctgggggcctggcggctgcgggcggactggcaatcgcggctggaccgccagagcggcgctgcgaaatcgaccagcaccagctgggattggagccgttactacgcctatcgcgcgttgccgaagctgggcgcccggctgacgatgggtgaggactatttaaactccgacattttcgacagcttccgctttgccggtgccagcctggtgaccgacgacaacatgctgccgcccaacctgcgcggctatgcgccggaagtgaccggcgtagcgcgcagcaacgccaaggtgattattcgccaacaagggcgtgtgctgtatgagacccaggtggcggcaggcccgtttcgcattcaggacatcaacgatgccgtcagcggccagttggatgtgcgggtggaagagcaggatggcagcgtgcaggagttcaagatggacaccgccagcattccgtacctgacccgccccggctcggtacgttacaagctggcggccggccggccggcggactgggagcaccacagcaacgggccaatgttcggcaccggcgagttctcctggggcgtgagcaatggctggtcgctgtatggcggcggcgttgcaggcggtgattataacgcgctggcactgggggtggggcgcgacctgatgatgttcggcgcgttgtcgttcgacgccacacagtcgcgcgcacggttgcctcagcagggcacactcagcggcggttcatatcggctgagctattccaagcgcttcgacgactacgacagccaggtgacctttgctggctaccgcttctcggagcgcaattacatatcgatgagcgaatacctggatgcacgcacgtacggcacgcggcacaacagcagcaaggagatgtacaccatcacctttaaccagcagttccgggatctggggttgagcgcctatcttaactacaaccaccagacctactgggatcggccggccaatgaccgttacaacttgacgctgtcgcgctatttcgatctggggcgtttccggaatatcagcctgtcgctgaccggctatcgtaacaaatataaaggcaccaacgacgacggcatgtatctgtcgctgtcactgccgtggggcagtaatggctcactgagttacagcggcagctataaccgcaacgatgccagccagcaggtgggctattacgaccggcttaacgagcgcgatacctatcaggtgagcgccggtaacgcgcgtagcggcgccacagccagcgcttactacagccatcagggcgatcttagccaggtgaacgccagcgccagctaccaggccgggcagtacagctcgttggggctgtcgatgcagggcggcgcgaccgccaccctgaaaggggcggcgttgcaccgcagcagcatgagcggcggcacccgcatgttgctggacaccgacggcgtgccggacattccgatccgcggctacagctcgccgaccctgagtaacgcctttggcaaggcggtggtggtggacgtcggcagttactaccgcaaccagttcagcatcgatctgaacacgctgccggaaaatgccgaagtcagccagagcgtggcgcaggccaccatgaccgaaggcgccatcggttaccgccattttgaggtgatcgccggtgagaagtcgatggcggtggtgcggttggcggacggctctgccccgccgtttggtgccacggtgcgcaacggcaagcggcaggaggtgggcattatcaatgacaacggtgaagtgtacctgagcggcatcaacgccggggatgccatgagtgtgagctggggcggcgcagagcagtgcggctttaccctgccgcagacgttgtcgccaagccagatggctaatcttttactgccttgtggcccgcaggccaagggtaagacgttaaccacttttgaagagtag

SEQ ID NO: 439525 - DNA, 546 bp, Serratia marcescens
atgtattcgcagtacggcaaaaagatattacacagtgcgatgttcgttaatctgttgttgtgttcctctttggcgcaatccaccaatcaggggcgtggcgaagtgaccgtgaatggtaggatcatcgcctccgcctgcgccattgataccgaaagccttgaccaaactataaccatggcgacattacctatcagccaaattatacgcgatggtcagagcgaactgcatgagttcaatattaagctggtgaactgcacattagagaagtttaaccctgcgctggatgactggcgctatttttccgtgacttttgacggcagaaacgatgccggattatttggcatagacggcaatgcgaaaggtattgccttgcaaataaccgataggcaggggaatgtcgccacaccgggaatacccatggaaaaaaatgaaattaaaccaggcacgatggaatttaattatgacctgcggttgattggcaataaccaggtaatgaaagccgggagttattactccacgatgcgctttaaaatggattactactaa

SEQ ID NO: 439526 - DNA, 525 bp, Serratia marcescens
atgaaactgaacaaaatcatgctcgcggctgcaatcactctgggcggtatctctatggctaacgcagccaaccaaggctcaggcaccgttacctttaaaggttccatcattgatgcgccgtgctctatcgaaccgggtagcctggatcagactgtgaagctgggcgatattgcctccgcacaactgaaaaacggtggtaagtctacgccgcaggatattctgatcaagttagtgggttgtgatgtggaaaccgctaaagacgtgaccaccaccttcactggcgcagagtctgaagcagcgcctggcctgttggcaatgaaagggagtgcacgcggtgccagcattgctatcaacgatattgacggtaaactactgcctctgaccaaagccagcaaggcgcaaaaaattgaagacggccaggcgaccctgcgcttcagcgcacacctgcagggtgacggcgcatctgctgccatcaccccgggcgaattcaactctgttgctgattttaccctggcgtaccaataa

SEQ ID NO: 439527 - DNA, 783 bp, Serratia marcescens
atgtcattagcacagaaaagatatctttgggagataaccctagaggcaatcgaatattataacagaccagtcacaactaaagaggtgactgattacataaaaaatgagatacccaactacaaagagacaaataccccacaaaatataagcatgttgaccgtaaactctcccagtagggtcaatcaccattcaagtttaagtgaacgcctatctaacgaaggtttcccccgtgacaagctgttcaagataggccgcgggctttatgagatatattctcctgaaaaacatggcatctggcgaatgtataaggaaaatggagagtataaaataatggaacactctggaacactattgtatgaaataaaaaaaatagaagaagacaatggcattaatgagacaacaagaaaagcattaatagatgccagaataggtcaaggaaactttagaaagcaacttattgatatttttaaaaagtgtccagtaaccggagtaaccatgtcagacatgcttagagcaagtcacattaaaccctggagtgaaagtaataacactgaacgactagatcctcacaacgggattattttgtccgcacacattgatgtattatttgataaaggtcatatcagcttctccaaaaaagggaaaatgctcttaaaaaaagatgatgtcgtggaagaaacgattagggcattaaaaatagaagcaaatgcacaaattaatttcagcgaggaatcaaaaatataccttgaatggcatagagatcattttcagtttaaagagtaa

SEQ ID NO: 439528 - DNA, 1224 bp, Serratia marcescens
atgctcggcaattatgcagaagaaggttccaaagagcatagcgacatcaaaaaggtgctcagagactttctctctcgtaagcgatcagcaattccaaagcagtacgtattcttggattttgaagactatccaaaattcaccttcaatgctgagggctgtgcatcagactttgcagaaaaatttctaaaaagattgacagcacaaacgcttgagaatcctttctatgcgctttatgacaaagagctcagatctctaggtcatactcgcctgacggcaaactatgcgctgctgagtcgcccttcagttcaggaatctctgatcggcttattactcaaagcccgtcttatcaaagatcagttcctcacggcccgagcgttactggatttcattttccagttgctcgcggcggatggctacttgttcgacaacttgtttgcaggcagtgataacgagctgttatcccgtatacagggttttgacccaagtaatctgcacacgcgcaccgtcgatgagtttgtgcttcagcatgagctgggcattgaagatgagcgtttcaatgcgtttagatctaaaattaacgagcttggtttttacgaggtaaccaaagcaacgtcttttcttcgccttttctatttgcttcggggtgacaaagagctcagcaatgagtttgtaacgcctatccaaaacgagttcacaaacaatctggtagaaacctatgcatctgtctggatgcgacatcgtgatttcgatggttcaggaaagatgcgcaaactgcttggcagtttctacaaagaaacgctgatcgcagcgcttcaccgctattgtaatcgtcatgccccaacactcgacaaagacgagtatttagtttctgagcttaatggctacaaaacggcggtgtctcttgaagttaaggccgatttttcagcaatacaaaacagtacactcgaaaaaataggcaccttcaatgtgtatctgaaagtcgatgaacaatcgcttaagccaatgccaattagcgtcaagctacttgagcttttggtcaagattgggcaggggtatcgccctaacaagcacgacaaaaatgctgttttgttacttgatgaagcattggaacagatgctgacagtagctaagcaaaaagagaccttttttattctcaagggtgataagcgctacaaaatcgtgaaagaagaaagtgactattttgaagtgagtggtatgcactaa

SEQ ID NO: 439529 - DNA, 738 bp, Serratia marcescens
atggcgttaacagatatcaaagtcagaacagccaagccaacggataagcaatacaaactgaccgatggcaggggtatgcacctgcttgtccatccaaatggttctaagtactggcgtttgcagtaccgttatgacggcaagcaaaagatgttggcacttggggtttaccctgaaatcacactggcggatgccagaacacgtcgtgacgaagcgcgtaagctactagcgaatggcgtcgatccgggagacaaaaagaaaaatgataaggttgaacagagtaaagcacgaaccttcaaagaggtggcgatcgagtggcatggcaccaataaaaagtggtctgaagatcacgcccatcgtgtgctaaaaagtcttgaagataatctcttcgcagcgtttggtgagcgtaatatcgctgagttaaaaactcgtgatttattagtgcctattaaagccgtagagatgtctggacgtcttgaggtggctgctcgtcttcaacagcgcactacagccatcatgcggtatgcggtgcaaagtgggttaattgattataatccagcacaagagatggctggggcggttgcttccagtaatcgacaacatcgtccggcgctggagttaaaacgcatccctgaattacttcagaaaatagatggctataccggcaggccgctaacccgctgggcaacggaacttactttgcttatctttattcgctccagtgagctgcgttcgtattga

SEQ ID NO: 439530 - DNA, 261 bp, Serratia marcescens
atgcagttcagcgagcgcagcggcggcatctcgctccgccgggtgatcctgacgttcccagaggctatcgcctctgaagagcgtgacccgctgctgctagcgaagatcaccgaaaagctggcggtcatcgtgcgtcacctgatgcaacgctttgccaacccgaacgaggcccgcgcactgctccaggcgcagcagatttcggcagaaaacctggaaatcaaacggcatgccgatccgcttattgattttgtggttacctga

SEQ ID NO: 439531 - DNA, 582 bp, Serratia marcescens; identical to SEQ ID NO: 30066

SEQ ID NO: 439532 - DNA, 573 bp, Serratia marcescens
atgaatcaacgcatcggctatgcccgcgtttcgaccgacgatcagaatcttgacctgcaacgggacgcactccggcaggccgggtgctcgaccatctacgaggaagcggccagcggcaagagcgcggcacgcccggagcttgagcagtgccggaaggcgctccgggccggggataccctcgtcgtgtggcggctggatcgactcggacgcagcctgcccgatctggtgcagatcgtggccgaccttgagcagcgcggcgtgcagttcgagagcctgaccgaaaagatcgagacagggagcgcggcgggcaagctgcaattccatgttttcgcggcgctggccgagtttgagcgcggcttgatccgcgaacgaacccgggcgggcttggaagcggcccgcgcccgtggccgatccggtggccgcaagccgaaactggacgccaagcagatacgccacatcaaggcgctactgcgcgacccgaacacctgcgtggccgaactcgcccgagattacggcgtgtcacggacaacgatttacaagcattgcggcgtggtgcagccgcgccacgattga

SEQ ID NO: 439533 - DNA, 903 bp, Serratia marcescens
atgccaaaagcaaaaaccgccgcgccgtctggcgttgagcgaatccagcgccccgagccgctcaccttgcgcggctcgacgctttttgagggggacgccctgaccgtgctgcgccgtctgccatccgggtctgtgcgctgtgtggtcacttcaccgccctactgggggctgcgcgattacggcatcgaagaacaaatcgggcttgagagcaccatgccccagttcctgcatcgactggtggccatcttcgccgaggtgcggcgcgtgctgacggatgacggcaccctttggctgaacatcggcgacggctacacaagcggcaatcgaggttatcgagccccggacaagaagaacccggcccgggcgatggacgttcgacctgacacgcccgagggcttgaagccaaaggacttgatcggcattccgtggcggctggcgttcgccttgcaggatgatggctggtatctgcgcagtgacattgtgtggaacaagccaaacgcgatgcccgagagcgtcaaggatcgcccggctcgctcgcatgagtttctattcatgctcaccaagtcggagaagtattactacgactggcaggccgtccgggagcctgcggacggcggcggtctgcgtaatcgccgctcagtctggcatgtgaacaccaggccttttgccggtgctcacttcgccaccttcccgcctgacctgatccggccttgcatccaagcatcgaccgagccgggtgattacgtcctcgatccgttctttgggtcgggaaccgtgggcctcgtgtgccaggacgaaaaccggcaatacgttggcatcgaactgaaccccgaatatgtggccttggcggctgatcgcctgcaagggcaggacagcaacgtgataaggatcgccgccgcatga

SEQ ID NO: 439534 - DNA, 1005 bp, Serratia marcescens
atgacgacccctaacaagatcaattttccgccgccgaagttgcaaatcgacttcgctttcgcccttaagcggttccgggctgtctatctgcaaagcgccctgctggaaaccgtgcgggacatggacattgccgagctggacaagcagcttgccgagtacgtccccccggcagacttggcgacccttgcgcagtacggcttgcgggctgaactgctgttcgccgtgcctgccgtcctggaggcgaatccctacctgctgggttattaccggctgctgatgggctacagccagaaggagttttacgggcgcgacaaaggcttcggtgtcggttacttcaagtcgatggaggaaaagggcaagaccagcaagacggcagccgctgacctacccgacttatgcgtggcgttctgcgccactgcatcggcgctgctggccggtgttggcccgctgcgcgtcagccgggaattgctggatgatttgaccctgctaaccgtaggcccgcagctacgcggtggggccaacaaccagcgcggcaccgatggcatcgtgcaggtgttcgagatcatccgggagatcgtcgcccatgccgccgctgaggtgcgcgaaagcgccatcgaggtgaatagcgccacgggccgcccgttcctgatcgagttcgcgccagaccctgacatcatcatccgcgaggaaatggagcaccagcattaccgcaacgtggttgctatcgaggtcaagagcggaacggatgtatccaacatccacaaccgcatcggagaagcggaaaagagccaccagaaggcgcggcagcgcggctttaccgagtgctggacggtggtcaatgtcgggcggctggacatggtgaaggcccgcagcgaatcaccatcgaccgatcgcttttattcgctggccgccctgtcgctcagggctggcgacgagtacgacgacttccgccgccgtgtgctgtcgctaacggcaattccatctgcgccgcttaccaaaacctag

SEQ ID NO: 439535 - DNA, 618 bp, Serratia marcescens
atgaaaaagatagcttttctcgcccaaaagggcggcagcggtaagacaacgcttgcagtgcatacggccgtagctgccaccgaggcgggcgagagcgtcgtcgtcatcgacaccgacccgcaaaagagcgccaccgtttggggcgatgctcgttcccaggaggtgcccattgttgcgactgctgctgcttccgagctggggcgcgtcctcgaggccgccgaccaggagcgcatgaccctggcgatcgtagacaccgcgccccatgcggccccagacgcaacgcgcatcgtgcgcgctgtcgatctggttgctattccagtgcgtcccaccgctttcgatattgccgcagccggcagtgccgtcgatatcgtcaaagcggccggcgttcgcgccgtgttcgtcctatcggcctgcccgttccgatcccctgaaatcgcagaaacccgaaccgtcttggccgaatacggcttgccgatcgcgccggtcgaaatcatcgaccgtagagccttcgcgcgagccgtggccaccggccgggccgtgactgagttcgagagcgacggcaaggccgccactgaaattcgcgccctttgggcgtggcttaaggagcaaatgcaatga

SEQ ID NO: 439536 - DNA, 282 bp, Serratia marcescens
atgaacaaaccaacagggcttgcagccttcacccgtaaaggggccgcttccgcacagcaaaccgcaacagaccaggagccgggcgccgagcagtcggcagaaacccgtcagcgtggacgagggaaaggcgacgtggttgccctgacagtacgcctgccgcgtgccgagtgggagcgtgtgcaccagctcgccgtctccgagggcgtcagcattcagtcgcttgctgttgatggactgtcgaaggtttttgctgagaagggtttgccgacgctatccgtatga

SEQ ID NO: 439537 - DNA, 309 bp, Serratia marcescens
atggcatccgcgaacatcctggccggcttcaagccggaaaccgtcgagctgctgcacagcttcgcggcctacgtcgacgaaatcgacggaaccgaggccacaccgaccgagttggccttgagcttgatcgaggcagatggccggccgggcgagttccaggccgagcagattgtcggcgctgtgctggctgagcatcgccgctttcagcgctggttgcgcgatcgtaggacggtgttgatgcaagacggctggcaggcctgggccgtgcgtaacgcgagagccggcagaacggccgcgttcgcggtatga

SEQ ID NO: 439538 - DNA, 648 bp, Serratia marcescens
atgccgcgcctgatgctggcttggatgaacacctatgctgtgcgattcaatacggcagagatcccggtaggggatagcgcgagcgagtttctgcggatgcttggcaagaccccgaacggggggagaaacagcgtttacacgaccttccgcaagcaggttcaggccttgtcggcttgtcggatcaccctaggcttcaacgccaacggacgcgcgcacacctacgaaggaaagcccatcaagcatttcgaggcgtggatcgcttcaacagaggaacagcgccccttgtggcccggttcagtaaccttctcggatgactactaccaaaccttgaaatctcatgcggtaccgctcgatttgcgcgccttcatggagttgaaaggctctgcgcttgcgatggacgtttacacctggctagcccagcgactacaccgcatcgaaggcaggcccgtcgttctgcattgggcgagtctgcgcgagcagttcggccaggagtaccaagggaaagaccccgacaaagacttcaagaagaagtttttgcatgccttgcgcgctgtgctcgctgtgtaccctcaagcacgagtcaagcaggtgacgggtggcgtgatgctgatggcctcgccgccgccgatccccttcaaaggttcatag

SEQ ID NO: 439539 - DNA, 873 bp, Serratia marcescens
atggcacgtgaaggcattacgtttgagcaggtcgccgccgccgctgatgcgctggttggcgaagggcaacagccgactatccgcgcgatccgcgagcgtttgggcaccggcagtccgaataccgttcacaaacatctgactgcctggcgcgaggctcgcccggtggcggctgccgctgcgccggaactgcctcaggcattgacggctgctattgccgccgagatcgagcgcgcagccgcccaagcccgcgccgagatcgagggccgcttggtgcaggcccagggcgaggccgtcgagctggctgccgctggtgaggtgatcgaggccgagcgcgatgctctggccgagcaggtggcagaactcacccgcgagcgtgacactctggcgggcaaggccgagcagcaagccgccgacttggccgaccaggcgcagcgcatcgagcgcgagcaacaggccgccgaatcggcgcgggtggagctggccacggcccgcctcaagatcgaggcacaggccgaacggcagaccgagcaggccgccgagatcgagcgcctacgcgccgcgctggccgatgcgcagcagggccgcaccgccgccgaacagcaggccgccgtgctggccgccaaactggaggcatgcgctgaacgggtggcccgtgcagaggcccgcgtcgagcagatcgagcagcaggccgccaaggcggcacaggccaacgaagaagcccgagccgctgccgcgcaggaagcccggcaggtgcaagcagaacgcgacgaagcccgcaaggtggccgccgaggcgcgcgagcaggccgcgcgcctggcggggcaactcgaagccctcaccaccaaggaacgaaaaaccgatgaaagaccgtga

SEQ ID NO: 439540 - DNA, 630 bp, Serratia marcescens
atgaaagaccgtgaccacaacgaagcgatggccggcatgtttcaggccgaaccccgatttgccgccgactatctgcgccaggtgttggccgatggcgaacctgccgacgtgcgcgccggtttgcggcaaatggcggatgtgctgcgcgtcagccaggccgctgcgccgactgattctgcgccttcggcgggcctctttgaccgggccggcgtgcgctacgaagtggcgtgtgatgtgatcggggcgttgattgcccactacgccgaaatcatgggacgcgagcgcgagcaggcgcagccgaatgaggcggttttgcgcgtggccggggcgatgaaggcggcgctggccggggagcgggacgatctcgacccgcgcgacagcgccggcatcgaggcggcgatttcgcgctatgcgccactggcgcgccggctgtatggccaagctgaaaacgaccacgcccgccaggagcagcgccgcgccgatttcgaccaggtgcatgcttcgctggccttggaggggctggccatgagcgcggatgatttggcggtgcaggcgctgctgatccggggcgacctcacccacgatgaggcggtgcagtgctaccgcatcttgcatcgccatgcgcagtaa

SEQ ID NO: 439541 - DNA, 285 bp, Serratia marcescens
atgcgcagtaaaaccgactggccgcccgaggtggccggcgtactgtatttgctcgaattgcagccgccagaggcggcgatgctggtgggctgctttctggcggctgtggcccatcccgatcatgcggccgagctggcgatgttcgataaattgccgtcagaggcccggatggccgtcggtcggtttttctcgtttttcctggcgggcggcctggacgatgccgggcgcgaaaagctgcattcgcacatgcaggcatggtttgtccgtcagcgccgatttcggtga

SEQ ID NO: 439542 - DNA, 252 bp, Serratia marcescens
atgtctcccgccgccctatctcccgcacagaccgcgcattccgcgcgggccgtgctcgcggccaacatgatccgattacgccgggaaagaggctggtcacaagaagcgctcgccttcgagtgcggcctacatcgcacctttgttgcgcactgcgagcgccaagtcagaaacatctccctggacaacctggagcgcatcgccaacgcctttggcgtgcaggcctatgccttgctgatgccgacaggcatttga

SEQ ID NO: 439543 - DNA, 342 bp, Serratia marcescens
gtgttggccagcctgttgattggcgcaattgaaccggccggcgcggcctccctggtcggcggtcaaaccgatgattccgtgtgcgacctgggcagcgcgtcacagaacgcccgcaagctgtcggcagcgggcgacttcatccgcgcgcagtgcaaaaacggtcaaatgttggtgggttccggcatcgtgcctgccggcgggtttgactcggaagtggtgcgcctggcgcgcaccttctgccgcatggcggacattcagacccggcgcacgcagggcaacatggccggcctcgtcatggagatcgacgaggtacggtgcatcatcgggaagctgccgacatga

SEQ ID NO: 439544 - DNA, 255 bp, Serratia marcescens
atgagaaaaacgctgctgactggcctcttggccgttgtggcagcaaacgtggttgccgctgatggcggagctcctttgcgcggcggtgtttgcatcggcccgttccggggcgctgattctgtcgtgcactgcgagcacatcggcaaggtgacgatccgccagatttacgaaaagggctttcgggtcgttcacatgcaggacgacaagaacacagccagctacgttgtgctggttatcgaggagcaggcgcgatga

SEQ ID NO: 439545 - DNA, 303 bp, Serratia marcescens
atgagggcgaaagcgtggcggatgccgtttgccgggcggcgctggatgctctggcttcccgtgccggcgtcggtatggctggcactgcccgaatggcaacacatccccgccatgttgttcggcggcctgatcgtgtggattcccttctggctcgcgtggtggctcagtgatggcttcgcgggcatgtccaggtggccaggaactggagcaccttcggtatctggcggggtgaacccgcacaccggcaagccatgcacggtgtatcaccatccgtggggaactacttacgtcggcggggattga

SEQ ID NO: 439546 - DNA, 258 bp, Serratia marcescens; identical to SEQ ID NO: 231742

SEQ ID NO: 439547 - DNA, 765 bp, Serratia marcescens; identical to SEQ ID NO: 6031

SEQ ID NO: 439548 - DNA, 798 bp, Serratia marcescens
atgaaatatataataaatctaactatagttttcgacccagaagatcgattattaaagcatagaaacaataaccaattaactatcgggttatctaacccggcaacgcggctgctaagcgagttcataaaaaataataaaatcgaattgactcgcgaaacactaattaaacacgtctgggaggattacggattctctccctccagcgccaccttgagcaaccatatcagtgagttgagaaaagcctttgaagcacttggggtaaacaaagaaactctgatcacagtgccacgggtgggttttaaaatggatgcggaaatccatcccgaaaccaaaccaccgaaagaagatgcatctgtgaaaatgattggacccgctcttaccccaagtgagcaggtaaagcaggaaaatgtaacgcctgacttcacagattcgggccacagaagaacgctgcagagcatgctgaagccagtcctggctataatcctcgccttgctcgccattgctgcagcgataaaattgatgactctaaacagtaatgaagagccaatgctcgtaggttttcaggataaatgcaatttttatacccagggtaacaataagcaaagcagtgaacagtctgctcatgcgcgaaaaatgctctccgatgaaaagatagactgtacgcaggtaaatcgagacatctactatatagaggcacgccctgctaatgacaaactaaaggtttactttatggcagtttgtaccaaaagcaccagtgtgaactatcaaaattgcaataactataaactagttgagtaa

SEQ ID NO: 439549 - DNA, 483 bp, Serratia marcescens
atgaacagaataatcgtctgggtgtctatttgtagcattattgccgcgggactgtttttcttttacctaaacagtcttagctggaaaccgtttcgctgcgacgctcaagtgaattcgaacattgcaacaaagaacagcaactggattgagttcaacgcgaacataaatgtcatttcccttcataaagagcaaagtgaaattattgtgataggctcccttaaagaaaaaaatgaaatttacacggtctacaggacaatttttgtcactcataaacccgcggaaattaatggttataatataaccgtaattacgagtgaaaagcgcaatcctaaagacaacacgccagatacactctggcaatattacgtattgccagaggttcgaggggttcccttctatctagaaacaaaacacttaagagaaaattcagttatttataagcgagtggacaccccattttttgtctgcactatagaacagtaa

SEQ ID NO: 439550 - DNA, 699 bp, Serratia marcescens
atgcagtccggtgcgtgtgaagcgctccgaattatcagcattgcccgacgtagtgcagtggaagcccgcacgcaggcgattaaccaacttcgcgcactgctggtgagtgctccgcaggatgttcgtgacaaactctggaaatcgaaaccgcacgaatgcgtagtcgcctgcatttactacgaagtgccggagtcctctccactgcgtatagccctgtacagcacgcttcgaagccttgcgaaacgatggatggccctgactgaagaattgaatgaactggacaaatctctggataaactgacccgcaaatatgccagtaaccttcgtaaccagtttggcgtaggaccgcagacagctgcaacattgctggccgttgcaggtgataaccccgaacgtttaaaaaatgaagcggctctggcatcgctctgtggtgtaaatccgttaccagcatcatcaggaaaaacagtcaggcacagattaaaccgcggcggctcgcgtgaagctaacaatgctctgtggacaatagcccttgtgcgtatgcgtagtgatccgcgcacaagaatttatgtcgacagacgaaagagtgaagggttatcgaccaaagagatcctgagatgcctaaaacgctacatcgtccgtgaattctatccattgattttatcggatcttgcctatgcgaaccgcttgaccttgacatag

SEQ ID NO: 439551 - DNA, 951 bp, Serratia marcescens
atgaacggcgcccaagccaaaaccgataatctaaaagagtatatggcaactaagcctaaaggcgatttgctgtttgatatctctgaacgtgaagccggtatgctccaacagtcgattgaacaagacagcaaaaaggcatggcaacgcttcgatctttaccgcacccagttatcagagactgaacagcagttagagcaggctgctgcaaatattgcccgcgccccggaagacgaccagttaatggagctctttgagaagctacgcgaactggataagcaacgtgaaaaacagcggcaaaaatatctttcattgctggaagatgctaaacgaattaagcaacagcaactggattgcgttcgtcaggtacaaaaaatgcatgatgttgcccgaagtcagcatggcttgagtagcgcctttaaaaacgctcaagaaacgattaatttactcgatcgatacagtgatgtattaacgcaggcaagagtgaaaacactgtcagcgaatttcgaaatagcctatcgcaaactggcccgtaaagaagatttacaacttagtgcgcacattaatccagagacgtttgacgtagagctgattgatgaacaaggatccgtcataaaacgtaagctgctttctgccggtgaaaagcaaatttatgcaattgctattcttgaggctttagcaaaaacctcaggccgtgatttaccggtgattatcgatacgccattaggacgtctggattctcagcatcgggataaactgattaaccactatttcccgtttgccagccatcaggtagtgctgctatctactgatacggaagtggatgagcgttattttgttgatcaattgcgtgatgatatctctcatgcttatgagattgtgtttaatgcacataccaaatcgtctgcactgaaacctggctatttctgggaattaactaaggaggcgatctga

SEQ ID NO: 439552 - DNA, 366 bp, Serratia marcescens
  misc_feature (90)..(99): n is a, c, g, or t
atgctcccgaatcgaatggtgcttagtcgtcagactgaagagcagcttaaaaaattgaaaggatatacagggattacgcccaatgtcgcnnnnnnnnnncgactggcatttttccgttcggtagagagcgaattccgttattcgcctgagcgggataccaagaagctggatggctcgctggtactggataaaattacgtggctgggggagacattacagactacagaattggtgttgaagatgctttatccacacatgacgcagaaggatatgattaaagcctgggcagcacatgttgaggatgggattgcggggttaagaaactatcgctcggtaaaagattttgtatatggagtatacaaataa

SEQ ID NO: 439553 - DNA, 534 bp, Serratia marcescens
gtgtttgagagtgaacatcaccgctcaacaattatgcaacttgcgtcgcttaaccacgatatttcaatgctttgtactgagtttttactttgggatctatactcctacgcatgtagttacggtagtaaggaaaaaccgattcctattgtattggatgaagtgcagaacctcgatcatcgcctggagagcccattgggcaaaatgttaacggaaggacgcaagtttggggtatccctaattttggcgactcaaacgctaagtatgctgcgtaaagatgagcaagatcgtttattccaggcgtgtcacaagctgatttttgcaccagcaaaaacagagacaaagacgtacgcgaaaattcttgaactgagcatgccaggtacaaagcaggctgagtgggaaaagcaactaggagacctatccaaaggacagtgtttatcagttggctaccatttggataacggtcagttgaagatgagtgttaagaaagtgaaggtttcctccatgttatcccgcctgaacaattctaagggttga

SEQ ID NO: 439554 - DNA, 753 bp, Serratia marcescens
atgttgacttgcaacgacaccattcgcaaagagcgaactggcattatcggcgcctataaatttgcgacgtgtctggtgcaccaatctgatatcacctgggttccgctctcagttggtgaaatgatccgcgtgtcgggtaacatcggcctgaaaatgaccgacagtgacttctcacgcaatgtgcagagatataaaaaaggcgcgatttcagatgatatactgctggtgggctttaaagagggtaacctttatttgcttcctgtcgaagtgaaaacaggctccacgccagactacaaaaaagcagtacagcaagcgaatgagcttcgccgctatctaacagagcttttgagcgacgagacactggcgtcgaagctataccgaggcttgtttatccgccaagtgttgatgcaaatcgacaaataccgtctgtacaacgtattcagcaatgactatttcgaagccctgctggcagagaaagaagagtggctacgcggtaactacgcgattgcggagcttgagaactatccagcaggtctagtggttagccaccttgaaagcggaagctgtttcgaacctggctataacatgcaggatggcgtgttgaaggttgaccttcctatgtctttgctgccttcactggtgcaacacccgcttcaagtattaatgaacgaaaaggacatcgcacagatctgccatgtgccggcggagtatatgttggtggagcctgttttcacttcgacaggaagcaaataa

SEQ ID NO: 439555 - DNA, 570 bp, Serratia marcescens
atggccgttcggcagatggccggggaaattgtaaggcccaaacaccgccagcacgccgtgcggacggtggcgcagcaccgaagcgccgtcggccatcgccgtctggctaaaaccggtgcgcgtctgataggcctgcagcgaaatgcccactttgccgatcatcgcctgaatttcagtcagcgtttcccaacgcggcttgcctgtctcgcggctgatggtttccgccagcgactgcttgtgttcttccagcaaggcggcgaagcgtttcaccagctgttcgcgctgctcgaacggcgtgcgcgcccaagcggggaacgcggcgtcggcggcgttagcgcgccacagcggctggttgccgaccggatcggccttgccgaactcggcgccgcggccctgccgccagacgccgttaatcaacagagcaggatgggacatcatgctttctcctgtgcaataagggggagcacccgcaccgggctgccctgttcgacgcccagcgccgcagcggtggcggcgttgatatgcaggcggtcgtcatacagatcggcattgaccaacagtgcgcggtaa

SEQ ID NO: 439556 - DNA, 708 bp, Serratia marcescens
atggttgccggaggcccccacgccaccgaacggcgccgcgctggacgccccggtcagcggcttgttccagttgacgatgccggcgcgcgcttccagcaacagccgctcgaacagctcgcgctgcggcgagaccaatcccaccgacaggccgtagcgcgtctggttggcgagccgcagagcctcgtcgaaatcgcggtaacgcacgatggtggtcaacggcccgaagtactcttcgtccggcacgccggccacgccggtcagctcgatgatgcccgggctgagcagcgaactgcccggctccagcagacgcatggccagcagcgatttgccgcccagcgccagcaagcgctgctgcgctttcagcatgttttccgccgcggcagccgacaccaccccgcccatgaacggctgcggttcggcatcccaacggccgacgcgcagttcgcccgccacctgaaccaaacgcgcgataaaggcatcgccttccgccccttgcttcaccagaatgcgacgcgaacaggtacagcgttgaccggcggagataaacgccgactggatagccaagttgaccgccgcgtcgcgatcctcgaaaccgtcaacgatcagcgcattgttgccgcccatctccagcgccaggatcttctccggctgccccgccaattggcggtgcagatggtagccagtcccggcgctaccggtgaacaatag

SEQ ID NO: 439557 - DNA, 1008 bp, Serratia marcescens
gtggatggcatcttgcaagcggataactttggcgatgcctacaccggagaatatcgcggcatggcgacactcggccttaacagcccgttgcgcttgggcgatcgccttgagctgcggctactgagcagcgataaacaccaacgctattaccgcatggcataccaacttcccgtcagtccttggtcgacacgcgttggcattgcgcactcttacatgaattatcgtttaggcaaagatttcagcgagctgcaagcccacggcaacgccgccatcagcagcgccttcgttacccagcccctgctgcgcagccgcctcctgaacgtcaacgcacagctgcaattcgatcacaagacgcttcgcgacgatatcgatctcttcgaaaaccgtagccgcaagcgtatcggtttgtggacgatgggcgtcgacgtcaatgcccaggatcgcctgtttggcggggggcaaagcgtagcatcgctgtcttatagcctcggcaatctgcacattgaagatccctcagctcgccgctgggacggacgaaccgcaaaaaccgaagggcagttcagcaaactggcactgagcgcggtcaggttgcaaaacctgagtggtgacttccagctgtatacccagctcaacgcgcaatgggcccctgacaatctggactcctctgagaaattcagcacgggcggcccctatgctgtacgggcttacgcgccgggcagcggcaacggcgatctgggttggcaagccagcatggagctgcgctacgccctaagacccggctggcaactgagcacttttatcgaccaagggcaagcgcgcctcaacaaacacccctggacgccggaaaagaataacgtgcacctgtccgccgccggttcaacgctcgtctggggaggcgaaaatcatcagatcgccttgacggcagcctggccgctggctgcttccggccctggcagcactcaggataaatcaccaagagtttggctacaggcggcccgctatttctag

SEQ ID NO: 439558 - DNA, 3216 bp, Serratia marcescens
atgaacaagatctatgcattggtctggaacccggttcgggagtgctggaacgtagtcaatgaacactgcagccgccgcggtaaaggcagcagcaagcgccgcctggcggcagcactttctctgctgagcttgctgccgttggaacaggcgctcgccctgcccagcgggcaaaatatcgtctccggcaagggcgacatcaccaccaacggtcctgatatgaccatcaatcagcacagcgacaaattaatcacccaatgggatagtttcaacgtgggtggcaacgagagcgtgacgttccgccagccaggcgatacatccgtggcgctcaaccgtgtcatcggcgtgaacggcagtgacattcagggcaaaatcaacgccaacggcaaagtgtttatcgtcaacccgaatggggtgatatttggcaaaaatgcgcaggtcaacgtcggggggctggtggcttcgactcgcgatatcagtaatgccgacttcctggcgggaaaaaaccgtttcgtcggcagttcgcaagcggaagttattaacgaaggccggctacaagcggctgacgcaggcagcattgcgctactgggcgcacgggtgaataaccagggtgtcattcaagcaaacctgggcaccgtcgcactgggtgcgggtgacgatattacgttgaacttcgatggcaacaaactgcttaatctgcagatcgatgcagcagcgctcaatgcgttagcgcaaaacggtggcgtcctgcgtgccgatggcggccaggtgttgatgagcgccaaggctgcgggcgatgtgctgagaaccgtcgtaaacaatcacggtgtcatcctggcagataccgtgcgcgagcaagccggccgcatcgtgctggatggcggcgacaatggcctcgttaacgttggaggcactctgagcgcgacggccaatgccggcaacggcggctttattgaaaccaaaggcgcgcaagtggtcgtacagccaacggccaaaattagtactcgttcactcaacggtaaaaccggtagttggaagctggcctccgccgacgttaatgtgaaggacggcggcacgctcaatgcccaaactctggaacaaactttagaaaacagcaacgtagaactggtcagcaccaaaggcgatgtcagcgtttctcaacaagtccgctggcagaatgccaacaaactgtcgctgacggccgagcaggctggcatcaagatcaacgctccgctcaaagcgaccggcgcaggcgggagtttggcgttgaatcataaaacaggctacaccctgaacaatgatgcggcggtcaccctgtccggcgccaacgcttctttcagcgtcaacggtgaaaattatcgggtaatacaaacgctgtcacagttgctggatgtcaacaaagacctgaacgcccgttatgtgctggggaatgccattaccggtaacagccgtatcaatgccatcggcggcgattacgcgtttaacggtatctttgaaggattgggcaacatgattcaggggctggagatcagcaacaatggcccttatctcggtttgttcaactcgtccaccggctctatcaacaacctgaaactggattcgctgtcattcacaccaacacaattcacacaatacaccggggcactgaccgggctcaatttcgggaccgtttccaacgttcatgcgacacgcatcaacattcgtggcggtggcgacatcggcggattggtcggcatcaacttaggcaaagtgcttggttcctcggcctccggcaaggtaaccggtaccgccagctacagcaatctcggtggcttggttggttttaacctgggtacagttcaggatagtcgggcaaaggtcgatgtattgagtgtcgccggcgcttcccatagcaaaatcggtggcttggtgggcgacaatagcggccacatcgttggctcgtcaagcgaagggaccgtgagtgccttaggcgagcaaatggaaatcggcgggctggctggtaccaacaacggcaccatcgcccattcggttgccaacgcaacggtctcaggcaaacgcaacagctatataggcggcctggtcggcacaaacaacggcaaaatcgacaatgcaacagccaatggttctgtcaccggcgaggaaacatacgccataggtggcctggtcggccaaaataacggcgttctgaatgctgtctgggcgactggcaaagtcgttgacaataaagggcggcacatcggcggtttgatcggcattaacaataaaaatgcgcgtgtacaaaatgcacatgccaaaaacacagtcattggtggcgataatgccaacatcggcggattgattggtgataactacggtaatctgacggacgtcagtgcggaaactgaagtctatgccggtaaaaatagcctggcgggcgggctgatcggtaacaacaataaagcctccgttaccaacgccaaagcgcagggatccgttaacggcctggacggcagcttccttggcggcttaatcggcctgaacaacggcggaacgcttaaagccgtcaccgccaatacccaagtgcgtggaggcaacggctcttacgccggtggactggtcggcctgaaccgcagcggttccatcgcgcaagcggaagccttcggctcggtaagcgcggcggccaacagccgggtcggtggcctggttggcagtaacgagcaaggcagcgtgagcgattcaacggcaaacgtcacggtctccggcggcaatgccagctatgttggcggtgtagccggctacaacaaaggaacgctgacccaggtcaatgcacagggtgatgttcatggcgctgccggcagcgacgttggcggcattgttggcctcaacgatgtggccagcctcattgagcatgccagcgcgtctggtgacgtaagcggagaggttcgcagtgcagttggcggtgtggtcggcagaaatggcggcaccgtcaagaacgtggttgcagcaggaaaagtgaacagcgttggcgtctcccagcgagggggattaatcggcattaacgtcggccacctgtacgattccaccttcacgggctcaatagcaccgtcatcaatggacggacaatgggtcggcagtctgattggttcgcaattcgggggagacgtgcgtaataacaacgcatcaggatcgtctgaagatcaacctctcttcggccgcgccttgagcaaactcacccagtaa

SEQ ID NO: 439559 - DNA, 1605 bp, Serratia marcescens
ttgctcgtcgatgttctgctgccgctcggccgccttgacgttgatgttgccggtcttcgactcgacgctcagctcaccgccgctggcgacctggctgccgatcacgtcggcatccttgtggctgaccagcgtcaggttggtgtcggacttcagctcgctggcggtgctgctctggtagctgttgtcggccttgtgcgaactgctggtgatgttgaaggcggtgccggtgcgcgcgtcgattttgtccacggtggtgctcagcgcgttgtcgatgcgcaggccgccgtgggtggcggtgacttcgccgcctttctggccgcgcgccttgctgccggtaatggtgacgccttgctgaccgttcaggcgcagggtgccgccgctggtcagctcggaagcgtggctgatctcgcggcgattgctgttgtttttgttgtcgccgccgccgatgccgccccaggaggttttgtcatcgcgcaccgctttggcgttggcggttttctgcaccccgacctggatctggctgtctgcatcgatcgtcagatcgcgctgggcgtggatcttggcgccctgagtcgagacattgcgaccggctttcaacgtcagttcgccttggctgcgcagttcgctggccttcaggctttcgctttcgttgctgctgctccatctgccggtgcgcaggctggaggtgtgattgcgctggtagccgcgctcgctggatttatccttctccaccagcccggcaaggtgtacgtcgcgcgccgctttgacgctcagcgcacggtcggcgctgacattggcgcccagcagcttcacgtcttcctgggtgctgatgagtttggcgctgccgctggcggcgacggtgctgcccgcctgctgcagctgctcgcgttcgcgggtgacgtcatattgccaggagtagaaccagcgatcgtcggtatggccttgcgtctgcttcaactgctggccgtcgagcgtcagcttaccgccctgcagcgtaatgtcttcgccgcggatatcggtggcggtgaggtgcgcatgattatccgccaccaggctgatgttcttgcctttcagctcggtgcgggtcagcttctggctgctgctgcgatcgttgacgtagatgccgccacggtaattttgatagttatcaccgccgtttttgttgctgctggcgtcgtcgacgcggctttcgctgcggatatcataggctttcaccttgagttcatcgccggcgttcaacgagccggccagtttcacgccgctgccctgcgcggtgttgatgatgttgatgcgcccggcctgcatgctgccgaggtagtagctgtccagcgcggtcggcgtctgttggctggcctgcaccgtgccgtcgcgcgctacccggttaaggccgctgatggcgttgatcgtcgccgaggtcactttaccattcgaatgtttgaaatcttgcaagatcacttcgccgcggctgtcgatcttcggcgcgatcagatccagtacgccgccggcgttcagggtgccattgaggctcagggtgttgcggttaccgaaggtgctgtaaccctgcagcacgccgttttccaccagcgggttgccgaccaccagtga

SEQ ID NO: 439560 - DNA, 672 bp, Serratia marcescens
atgagaaccgtagaggttcgagcatcgcgcagcgatacgacaacgcgcagcgttgcccgcagggtgaggccacaggccgaatcaatcctgcacgacccaccaattcagaaaaaagcgccttttggcgcttttttcgtttctgtaatacccaaacctgactttatcctcttgccaacagagtttaccgagttgtgcaggatgagaaccgtagaggttcgagcatcgcgcagcgatacgacaacgcgcagcgttgcccgtagggtgaggccacaggccgaatcaatcctgcacgacccaccaattcagaaaaaagcgccttttggcgcttttttcgtttctgtaatacccaaacctgactttatcctcttgccaacagagtttaccgagttgtgcaggatgagaaccgtagaggttcgagcatcgcgtagcgatacgacaatgcgcagcgttgcccgcagggtgaggccacaggccgaatcaatcctgcacgacccacccattcagaaaaagcgccttttggcgcttttttcgcctctgcagcaccccaacctgaatccctgctttctcgtttcaacactgcatcgatcggcatctcgctcttctctgaacgccatacgcccccaccaggacattatccgtcgtgatctgcgtggtcaatgtctgtttttttaa

SEQ ID NO: 439561 - DNA, 678 bp, Serratia marcescens
atgcttcagcggcgtcgactatgtagagcagccggacgacaaaggggtgttcaaaatcgccaacgattatggcgacgacggctggaacgatcaggtcgacgacgagaaaggcaactacgactatctgatgggcgccgacgtggagttccgcaataccgccgtgacggaggagctcaagtactgggcgcgctggctgttggaaaccttgccgtgcgacggcttccgcctcgacgctgccaaacacattcccgcctggttcttcaaagagtgggcggatcacgtgcgcggcagcgcgcaacgcgacctgtttatcgttgccgaatactggtcgcacgatctcagcgcgctgcaacaatacatcgagttggtggacggcaaggtgatgctgttcgacgtggcgctgcacctgaagtttcatcaggcgtcgaagcaaggcgacggcttcgacatggcgcagatcttcaccgataccctgaccgccgccgatccggcccacgcggtgacgctggtcgccaaccacgatacccagccgctgcaatcgctggaagcgccggtggaaccctggttcaaaccgctggcctacgcgctgatcctgctgcgcgaacagggcgtgccctgcgtgttttaccccgacctgtatggcgccagctaccgcgacaaggggcgcgacggcggtga

SEQ ID NO: 439562 - DNA, 843 bp, Serratia marcescens
atggatggaagtcatggttcaagaaatagctgggattatgcagagtttatcagggcattgattaacgaagtttcctctatttcttcatacgatgccagtgaagtacttgagcgtttattattgcttcctgaatgtgaaagctatcgggatcatctattacatgcccaaagcaatcagagaattcgttatagagaatcacagtttaatcatgccgactggaagcaggcagtgagtacattggtgaatgaaacacctgtcaacgtaatggatctttattcattgttgctcgatcatataagggatatttcaaaccgaattgcttacgaaaataccgatatttataaacaattctggaatgaagacaggtatggacgtcctcagacgcctaaacctgaagagagttgccgtaatatttttctggatttactccgtgccaggcttaatccattgagaataagttgtgaaccagaagggcacatggtttctgataaaagggcagatataattgttttactaccgggcataaaggtacctattgagatcaagcgtgattatcatcgtgatgtctggactgcgcttaatgggcaattggacaaactttatactataaaccccgatgcggcaggttatggtatctatctggttttttggtttggttctgctcggccgaataccctaactcgtttggcgaaaaatatgaatcaacctgcaaacgccagtgcaatggaaaatatgcttaatgaaactgtgccggttgaaaaaagagaccgcttatcagcgatagttattgatgtttcaggtgaggtcatactacctgttgaagagccgaaatcatctgtataa

SEQ ID NO: 439563 - DNA, 1569 bp, Serratia marcescens
ttgataaccaaagaacttgtcgatgaaagttattttatacgccaacttgttgatgtaggggattttgatgaatcgtatagactgtcagttatactcttagataagttagaaagaatcacaactaagagtgataattattttattttgctggcaaatatctctggtaatcttgttgatattggtcaaatgcaaaaaaatagtgaggcatcaaaactcggttttaacttgatgaaaaataatcaggaagaatttatcaaggtacagggcgagtgtcatttttattataattatggcaacgcgatgtccaaccttgtcaggataaataatccccatgatcatacattccagacaatagaggagatggtttctttaaaaaatatttattggcgagctttcatgctatcttttgatgagccggaagaatatcgagccgaacttgcagtcaatctagccaattcactaagaagccaatttagacttagcgaatctttgagatattatgatcttactaatcgtaaggaattagatataccacaggcttgggtcaatcgttcagcagcacttattgagttaaatcttgtttcctcttcattctcaattaaacaactaaaagagataagagaggggtatatccgagcatctgtttcaaaaaatatcccacctcaatgggaatcattttatctaggacgtatagctcagactaacgataaaatatcagaatatgcaggtgatggcgaaacggacgaacacgatgaggctcttacgcaacaagagttcgaagagttaagtccataccgacagttttgtcttagaaattatctgactttatcagaacatagcctatattgtccatgtataggtagcgccacagataatcttgttatatcttcgggaggcggcgtaacaggcgattttatcatccccatggagatggtattaaatcgccttaaatcggagttttcactcgcgcgtcatctctattttgattatcttcatccacaaaatacggattacattaagtacgagagtcattttctggaattgtataatgacgaagttttagggatagaaattgaaaagctcaggacggcatttcgtctttgctttggtattctcgataaaattgcggtagccatatgtgaactttataatctttacccgacgacaaaaaaagggacacctcagaagaatatctattttcagagcttctggcagttggatgttgataacagaagacaattatttgaaaaggtaaaatcacccggacttctggcattgtacagtattgctaccgatctgaataaagataagggcggggagttggctttctataaagaatggcgaaatggtttagagcataagtttttagttgtacataaaagtgataaacctgaggatatttacgaatcttatcaattaattaaagatattctttttatcaaagaaagtgattttattcgtcattttgagcatttgcttcagataactcgttctgcaattttctcgtttgcttttatggtcaggcatgagggaatgcactcagtacgatgcgggattcttttcgattga

SEQ ID NO: 439564 - DNA, 180 bp, Serratia marcescens
atgtccctgcccgacgagaaaatccgtagtatcaagccttctgataaaccctttaaactgactgattcacacaggctgtatttgcttgtcaatccgggcggctcgcgcctctggtatctcaaatatcgcttcaatcgaaaagaatcccgcatcgtactgagtgcattccctcatgcctga

SEQ ID NO: 439565 - DNA, 312 bp, Serratia marcescens
atgaaagaactgtctgttatcgaaatgaatgaagtgtcaggcgcttattcctgggatatgagcaatggactgtcggggttgattggcagcgccgtttccaatgccgcggaagccgtttcatccatcgctctgggcgcctccgtgggcagcatggcgggcgccgtcatcggcggtaagcacggcggcatggtcgccggcggcatcctgggcggcgtagccagcggcgtggccgcagccgttattggctgggacaccacgctggaatactccaaaaaaggcctcgatgggctgattaacggcaccatcagctaa

SEQ ID NO: 439566 - DNA, 537 bp, Serratia marcescens
gtgcagcagcacctcgaatgcctgttgttgattgaagcgattgaattggtggctggcgcgcatcgccagcttttcctgcgcggcggcgaaggctatctggttactgaacggcgtcaacatcagccagctgtagaccttaccctggtgttgcaggctccacagcggcagtttcagatcccagttggtatccagcggcgtcatttccgtcgtcaggtaatgacgccagaccgcgttgtccagcgggatgcggctgccttcgccgatcggcaacagcaacgtttccccctgtggcatacgataccagttcagggtttgcggccgatcgctgctgaagctcaggcgcagatcgccgccttccagacgggcgctgacgttgattgcgcgttgcggccatcgccagctggcgcgtcgtggcgttgcggtaagatccgttacctgctgcgcagtctgcgccagattgatcggcaccgggcctgcggcgatatgcagcgtggcagggtcgagttcaaattgcacgtcgccttgctgcagcagtaa

SEQ ID NO: 439567 - DNA, 753 bp, Serratia marcescens
atgttcaaaaaaatcttattacctacattgtttgctgcttctttgctttgctccattgaatccacattagcgatagatttgttacaatataacaaaatcaacacagtaagcgggctggtcaacgataaagcggtcactgacaatcttaaaagcatactgggtcaagactatgaaaagtacatcaataattttgatgtattcggtgagccccacgcaactccaggcggtgggttatttgttgagggctggctaaaggatctttacctggaaaatgcctctgctttggtcatcaatcccgatgggaaaatttatgccgcctgggttgtacctgattctgatatcataaattacaaatcatctgataaagatgctcccattaataatgacatccagcattgggctgaacgcttcaaaaacatgcaatttgtcacagtcaacaaaactaaaaaagcgagggcggaaaaagaatattttgatacgcagtcattctctatcaaactcacgactatttgttccagtaaagacgactgtaatgatgcaacttatgatggaaagcgtaaaaaagatggcgctgctttaaccttacaaggaaaagtgacacgagctgattgcaatacaaccccatgcccaatacttagttatgaatttaaaaacgcatcgacaatttacatgctcagtaaaattgataacactctgacagtcataaaggacggtaagatattaatgaatcaaaaaggaaagtgggtgaaataa

SEQ ID NO: 439568 - DNA, 2208 bp, Serratia marcescens
atgagcatatcgcaacacccgctttcgcggcggcggtttatcgtcggcgctggggcgttggtgatcggcgcctatctgccgtccactggtgcgctggcgcgttcggctgccccggctgcctccggcgaggctgcgtttgacgccaatgctttcgtccagatcggcgtcgacgggatcgtcaccgtcatcagtaaacacaccgagttaggtcaggggatttatactggcttagcgacgctggtcgccgaagagctcgatgctgattgggcacaggtgcgggtcgttgccgcaccggttgacactcaaatttataccaacccttctctcggttttcagggcaccggtggttccagctcggtgtccaacgcctatgagcagatgcgtcgcatgggcgccatggcgcgcgcgatgctggtgcaggctgccgcacagcgttggaaaacctcggtacaggaaattaccgtgcaggcgggcaagatctgccatgccgccagtgggcgcgaagcgggcttcggcgagttcgctgcgttggccgccactctgcctcgccccgatcccgccagccttatgttgaaggatccggccaatttcaccctgatcggcaaaacgcgcggcctgcaccgcgtcgattcgctggcgaaaaccaacggcagcgcgcagttctcgcaggatatccatgagccggacatgttgaccgtcaccatcaagaagccgccgcgcttcggcggcaaggtggcgacctttaacgccgaacgggcgctggcggtgccgggggtggtggcggtgaagcaaatcgccaccggcgtggcggtttacgccaaaaacacctgggcggcgatccaggggcgggagcggctgaaggtgacgtgggacgacgcgcaggccgaacggcgcaacaccgaggagatctacgccgaattccgtcaggtggcgcagaaaaccggcgtggtggcaaagagtctcggtaagccggacgaggtgttcgacaaggccgacaaggtgatcgaggccgaatacaccttcccgtacgtcgcgcacgcgccgatggagccgctggacggctatttgttctgggacggcgagagcgtcaaggcgcgctacggctgccaaatccaaacgctcgatcacaagcagctgtgcgagctgttcgagttgccgccggacaaggtgcagattgaaaccattctggcgggcggcagcttcggccggcgcatcgatttcggtaatgctttggtggggcccgatctggttgccgatatggcggcggcggccaagggcatcggtcccggccacggtgtgaaagtggtgtggacgcgcgaggacgacatccgcaacggctggtatcgtccgatgatcctgcaccgcctgcgcggcgccatccgcggcggcaaggtggtgggctggaccaataccgtggttgggcattcttggacactgaatagtccattgactgctttggtggtcaatgggcttgatccaatgatggtcgagggtgccagcgaggtaccttacactttcgacgctttccgctgtgatgcgcacatcgtgccgggcaaggtgccgaccacctcgctgcggtcggtcggcagcacccacaccggccatgcggtggagagctttatcgatcagctgttgcaggaaaccgggcaggatccggtcgaagggcggctggcactgatgggcgatgcgccacgcgaagcgggcgtgctgcgcgcggtagcgaaagccgctgactggcagggcgccaaggtggtggacgggcgcgcgcgcggtgtgggcgtcgccaaggcgttcggtacctatgtggcgcaggtggctgaggtgtcgatcggcgaaggcggcatcccgaaagtgcacaaggtgtggtgcgcggtggactgcggcgtggcggtgaaccccgacgtgatccgcgcgcaaatcgagggcggtatcggctatggcctgagtatcgcgctgtacggcaatatcacgctgaaagacggcgtggtcgaacagtccaatttcaataacttccgcccgctgcgcatcgatgagatgccggaagtcgaggtgatcatcgtgccctcgagcgagaaaccgaccggcgtgggcgagctggggataccgaccatcgccccggcggtcggcaacgcgctggcgctgctcgggcggccgcgtacctcgctgagcctgccgctgcataatcctcggcgtagcgctgtcatctga

SEQ ID NO: 439569 - DNA, 459 bp, Serratia marcescens
atgatcactttaatcgttaatgaaaaaacactgaccttcgatgatgaccctcatacaccattattgtggtttctacgtgacgaagccggcctgaccggcacaaagttcggctgcggcatcgccatgtgcggcgcctgtaccgtgcatctggacggtgtgccggtacgatcgtgcatgacgccggtctccgccgccgtcggcaaaaaaatcaccaccatcgaagccgtgggcgccacgccggaaggcaaggcggtgcaggaagcctggcttgatctggacgtggtacagtgcggctactgtcagtccggccagattatgagcgccagtgcgctgctggcacaaagcaagaacccgagtgatgcggaaatcgatgcggcgatgggcggcaacgtctgccgctgcgccacctatgtgcgcattcgcgccgccatccaccaggccgccaaggcgttgggttag

SEQ ID NO: 439570 - DNA, 294 bp, Serratia marcescens
atgaacaaacaggctgagcggccgccgcgcgaccggctggtgttggaatattcgctcgaggcgccgccggaaaaagtgtggcgggcgctcagcgttcccgaattgcgtgagccgctggccgccacgccgggcgaggcggtgagctatcgcttgcgcgacgaccaaccgccgtttctcgaaagcgtcgtcaccctgcagatcgtgccggaccccggcggcggcagcctgctgcggattatccaccagctcgatgccgccaacgatggcccgccgacggtgatgcgcgccgcctga

SEQ ID NO: 439571 - DNA, 510 bp, Serratia marcescens
ttgtcgctacattcacaagattggataaacatagctattgccacgggtacttctattgctgcaatagctagttgttttgccgcaagaggctctatgaaagcagctgcacaatccgagcaacaatatgagaaaaatgctcatggagaaagaactcgatggctaacatctacactaatttcgatggctgatagttgtaacacacttgtttcagcatacggcacattaagtgatgaacaagctgaccttagcaaaatgataacgataatttatcatgctattgaaatgatagaggatcaggatgttgatactgagaaaacaaaaaaatacttatggtacttccttcacacctcaattagagatgagttgagcagttcgaaagggctgaaaaaatggagtcctgaagatatatttttcgtctatcctgacagcgaagaaatttatgcagaactaactacaaaatatgaatttgtaaagaaaaaactggtcaatattgtcaatgacaacacataa

SEQ ID NO: 439572 - DNA, 537 bp, Serratia marcescens
atgataaatagcacacagagtcaagcaaggtctaaattaataacccttataatcgtcttaggtattacaatgatatcgacagttgtttcattctatgttctagtagccaaacccaacaaagggatacaatttaattctgaactagttagatcaatgcttgaaaaaagtcgcattgagaatgagaatttattgcaaagagcagaggccttgtcaagtgcttatagagcagagactatcaatcaaacctcaggccaagacgctaacgaaaacgaagaaataacaaagctaaaattacaaattttaaacatggaagacaaaatggataatctatataaatctttggatacatcccccgaaaaaacactatcaatccccatgatcaataaggacataaaacttcttgaagaaaaagtaaataatctatctgaaagtttcgaacatcaaatggatcgtgcatattacatatttatgtggatttgtggaactttgggaattggaatgattggcgtaataataacttccctcaaaaaaaactag

SEQ ID NO: 439573 - DNA, 246 bp, Serratia marcescens
atgacaaccatcaagcgctttacccctgactataaaatgcatgcagttcggtttgaggctttcgcgcgtgaagctgagcacgatgaacttgttcagtttgatgaccaccagcaaacggtgagcgccctggagactgaacgcgatagcggctatttacgaaactgcagccggagggataacgactcatgtggaaaaagtatcaagcataccttgatgaaattgttgaagaagtgggtacctcactaa

SEQ ID NO: 439574 - DNA, 786 bp, Serratia marcescens
atggccaaaaactcaaaggaagcctacggcgccagcggtaaaaccaacgtgctgatgttcgagccggaaaatctgcacctggtatccgataaaacgcacccgctttacgatgaacgcatccaccttcctctccatgaaccaacggtgcttagcatcatgaagttgggggtgctggagccggtcattatctggaaagaccctgagacaggccgttcctgcgtagttgaaggtcgccagcgggttaaaaataccctcgaagccaataaacgtctgcgggaagaaggcaaaaaacctcttctggtgccggcggtcgtcaggcgtggatcaccgtttagcgttgccgaggtgatgattagtgccaatgaaatctttcaggcagacacgccactgggccgcgccaagaaaatggctgatgcgcttacgcggggccacgacgaaaaagatttagcgctgatgtttggcgtcggtgtgcagacgatccgcgccacactcgccctactcgatgccactcaggcagttaaagatgctgttgaatctggcgacattaccgttacccaggcgcgccagctggcgaacctcacacccgacgaacagcgcgaaaaagtgaaagaggttgaagcggcaaccgctggcaccaaaggccatgaaaaggcacgccggcagcgccaggtgattggcgatgccaagccccgcatgaagtcgagaaaagaaatcacgaaagccctggaaggtgcgaacggtgattacgctcaggcgctccgctgggtgctgggagacgacgaatga

SEQ ID NO: 439575 - DNA, 639 bp, Serratia marcescens
atgaaagaaaatcggcgtgagcgcctgaaggcttggttctcagagaaaacgatcccagccaaagaaaaaagttacctgtcacaactcatgacgggtaaggcctcatttggtgaaaaggcagcaaggcgtcttgagcaaagttatggaatgccatcaggatttctagacggcactaatgatgaacaaatagccgaacaggaaagtccaaactttaaaatcgaggttcttgatgttcaggcaagcgccgggccaggagtgatcaatagcgaagtggttcagacaatacgctctattgagtacaccgatgatcacgccgtgcagatgttcggagggaagcaagcatcacagataaagatgatcaccgttgatggcgatagcatggctggcacgattgagttgggtgatgcgatttttgttgatgtaagcaaggactacttcagtggggacggtatctatgtgtttatctacaaaaaccatctccatgtgaaaagacttcagatgcttccagatcacctccttgtccactctgataatcctgagtatatcgactgggttatcacagaagaaaacgaacataaactcaaggtgataggcagagtactccttagtcagtcacaagcctttaagcggcatggttag

SEQ ID NO: 439576 - DNA, 1038 bp, Serratia marcescens
atggctgagctgcgttacagtaaaaaacagataaataaagctggtgatatccttagaaatcatgatagtacttatgaggaattgttctgggctgttgaggtccttggtaatttacgagagatgtacgttcacccactaaatgcatttcagaccaccttgagacgaaaaatgaaggttgctgatgaaggcgcaatggcttctcagaggcttaaacgcatcccatcaatagcagcaaaattggccagaactccaggtatgcagttagctcgcatgcaagacattggaggtcttcgtgctgttgtaaaaagtattgatgcagtgagagatttagaacaaagctatgtaaacaatggcttaaacagatttaaacatattttaaaatcgcaaaaagattacatagcattgccaaaggattccggttatagggggatacacttggtatatcaataccaaggtggtacgaacgcacaccacaacggattgcttcttgaaattcagattagaacaaaactacaacatgcgtgggcaactgctgtagaaacaatgggtacatttgttggtcaatcgataaaatcaagcgaagcagatcaggcttggaatgattatttttccttggttggcagtgcattcgctatcatggaagggtgtccacaagttccttgttatgcacatctaagtcataaagagacctttagggccgtagtagaacaaacagaaaaattacaagtcattgataaactgctggcttttagggttgctatcggagatatagcaagtaacgcaggtagttaccatcttcttgttctcgatacatcatcagagaatgtaacggtgaagagctttggtctaagaaggattactgaagcgaccgaagagtatcttgagtgggaaaagcgagcagaagggaatcaatatatgcaggtggttttggtttctactgaaagtgttggcaacttgaaggccgcttatccaagttatttcttggatgcaggtgagtttgtaaagtacttgagaataattcaagcagaatgcttgtaa

SEQ ID NO: 439577 - DNA, 195 bp, Serratia marcescens
atgaaggtgatcattgaatcgcaggagggcattatctggatgcgtaacgcacaaactggtgaagctatgaattcaacaggttacgtaaaggacggcacacagcagaagatcattgccgccctcgaagaagcactttttcaggctaaaattcaggccgggttagctgattctgatatagaacacgatggcggctaa

SEQ ID NO: 439578 - DNA, 156 bp, Serratia marcescens
atgcagattcagatgactatgaaaacttacaccaaagaatggaagcggctggcttctcgagaacaatcaccacccaatcaggagaggtttaccaccttcctgatgctgaatattcatatacgggtgatcaaacgacggaatttgtacgtgatctag

SEQ ID NO: 439579 - DNA, 564 bp, Serratia marcescens
atgaacgatgaccgaggggcgaaagccatcagaactgagtaccaagggataacttttcgctctcaaacagaggcgagatgggccgttttttttgaccgaatcggggttacttataaatacgagccagaaagaatacagctgtcgtccggagagatttatatacctgacttctatataaaggattttgaagcatactttgaagttaagccatcaaatgagcaaattgtttctgaagaatgcaggaaggcaaggctactttcccacgataaacctggacaacgggtctggttatcgataggagctccagcagcaaagtctccgaacatacttgtacttgaacgttggggcaaggacacacctatagagcacatactcgctaatcaagaaaatagattctggattcatgaagatagaagagatgaaaaggtttattggctacatcatcaagaggtccagggctttgtaattggtgggccaggagaagagaccgaccacatgcgtgaaccaatgaaccattggaacgttgaagcagcctatgaactagcacggagcgcttttcgatga

SEQ ID NO: 439580 - DNA, 528 bp, Serratia marcescens
atgaactatccaacggtatctgttaatggtgtatcggtacgagtcgatgaggaagggcgttatagccttaacgatctccacgcagcagcggtagcaaacggagaggctacagaacagcagcgaccaagtcagtttttacgtagtgttcagataaaacgcttcataaaagcactaaaagccaaagtgcaaaaatgcactttggaacaaatacaaccacttaatgtgattaagggtggcgatgagcctggtgtatggggtgtagagttaattgccattcgatatgcggcatggattaagccagagtttgaaatcgaggtgtacgaggtatttcgaaccgttgtacgtatggggatcggcgccatgtccagactgaataaaatcgaccacattatcaattccgaaactaaggcgatcagccagtgcgccagccaaatggcgaagtggggtgtcggcggtcgaaaacgccttcttcacactgcccgagagcgtgttgctgatgaagtgcagatataccttcctggcttttga

SEQ ID NO: 439581 - DNA, 168 bp, Serratia marcescens
atggtaagtatccaccattgcagtgccaatcccagagaagaaatgccagatgatcataactatattgacgacatagaacaggcggaagataaatccaggagagagcgttttgctttttgcttccacttaagaaataacaagctcaatgaagtgaccactcctgaatga

SEQ ID NO: 439582 - DNA, 570 bp, Serratia marcescens
ttgtcagattatgattttaaaacagcaacctataacatagccaaacatgaagcagggcactggttgtgcgctaatagtctaggttggtcgcctagagatatagttgttagagtgccttcgcatcccaaagggcattatggctatgccttgagcgcttacagaacctcgctcgctggaatagaggatgtgcgtgagtattcaatgggaagagtgaaggtgctttatagcggagcttatgctgagaattttaacggtgatgatttcgaccacgaccaagttatgagcgacctaatgcgtggcggaggtgcaaactctgattttttgaaggccgaggaaatttactttttttactacaattgtttatcaaatccacgcggatgggaaatcgagttcaaccctataatctgcgatgttcagcttttaatcgacatgcgatatcattttattgatgccgttgggagaaagtttgagaagttagcctatcaaatgggacaagagttaaccatgactcgcgatgagttgatcaagatttatcaggacagtccgatacgcctgtctcacgccacatga

SEQ ID NO: 439583 - DNA, 306 bp, Serratia marcescens
gtgacgctgtgcggtttcaacctcgccaagtccacggcgcacgccaaagtgctgaactttacctccaacgtcggcgggttggcgctgttcatcatcggcggcaaggtggtgtggagcattggtctggtgatgctggtggggcaggtgctgggggcgcgtctgggcgcgcacatggtgctgacccgcggccagaaattgattcggccgatgatcgtgatcgtctcgctggtgatgagtctcaagctgctttacgacaatcacggcgcagagattcagcagtggttgacggccttcgcgcacggttga

SEQ ID NO: 439584 - DNA, 858 bp, Serratia marcescens
atggcgagtaagcacaaaattacggcttatacttctgatacgcgcttatacgagtgggcaacgaatgcggcagaaaaaaaggggatgaaaaggtctgcctaccttgagtcgctgatacgggaggaaatgcataggcagaaggtggaaacaggggatgcctcatcccggctaaaagcacagttcaccatctttgaaaacttcactccgcgagaagaaatactgagcgcctatgccagcgttaactatgatgcagacgctgagcttcaggctaacttttttatgcaaccaatgactaatcctcaggagaaggcaaaaaacttcctttcctggttagaacaaaaagcccatgaaaatatttctgctgacttttacctggaagctttaaataaatatattcgggaacctgacagtgagtatcgcactgtttttttgaaaacgtgcttcaggggatggattatcaaagataagaaaaaaacgtcattgctctgtaactctcagacaacctatttgccgctgcttgtgacggaggcgttatgggataagtatgatgggcgttatgatttctttaacatccgctacctcaggcaggcggatatgattaaaaggaaaacggaaagaattttttcagacaagtatatcggggccgcgctaatatttgaaaaacaacatcagcataaagactcaggtggcttttttatcccggtattacgtaacccggtttcactgaagcaaaggttaatctcaccacctctgatgaagaggtttggcagcgcgaattatttattcaccggtgtgggagtgggcaataacaaagaaagatttttcctcaagggactggagcacatcaggcagtgttaa

SEQ ID NO: 439585 - DNA, 222 bp, Serratia marcescens
atgaacacatcccctgctctgctgaacgaccagcttgtcgatatgacattcattacgacctacactcaatgcagtgataaatggttttacaaactcatcagcgaaggacgattccccaaacccatcaagctgggtcgcagttcccgctggctaaggagcgaagtggaaacctggatgcaacagcgtataactgactcgcgtggtaactgcgtaggtctgtaa

SEQ ID NO: 439586 - DNA, 723 bp, Serratia marcescens
atgagcttcatttacggagatgaacgcattaccttcgagcgtaagccccgaccgttggtgaatgggcgcattctgataaaagttcaccctgactgccgggttgtggtatccgcaccgcaggatactgatgaccaacagattctgaatgctgttgaaaagcgtgggcgctggatctatcagcaactgagggatttccgtaagcagctggaatatatcacgccacggcagtatatcagcggtgagagccactattacttgggcaaacagtacatgcttaaggtgatagtggctccctctgatgctcaaggcgtaaaaatgttgcgcggcaagctggaagtcactttacgtcataagagcgctgaaaaggtcctgcagctgctgactgactggtataaggcccgtgcacgggaagtattcaccagaaggctgagcgctatgcttgagcaagcgttatgggtcagtgactcaccaccattgcgcattcttaccatgcagactcagtggggaagttgttcccccaatggaagggtgactctgaatcccaatctggtaaaggctccccgtgagtgcatcgactacgttatcctgcatgagctctgccatctggccgagcataaccatagtgaacgcttctaccggctcatgggacaggttatgccggactgggagaagaccaagaagcgattagatgggatggcggggatgatattttctgatttgtga

SEQ ID NO: 439587 - DNA, 3279 bp, Serratia marcescens
atgagcatgcaaatcgcgccaaaattccaggaagagtatagcgccaagctcccggcgctggctctcttgagtaatttaggctggacctatatttcacctcagcaagccttgtctgcgcgagcaggcaaggcagatcaggtggtcttgaaccagattttgcgtgaacagttagccaagaggacgtttatctttgccggtaaagagcatgccatttctgacaaagcgattgatagcctgattgccgaagttaacagcccggcattaaaccaggggttgattaccgccaatgagcacttgtacaaccacctgttgtacggcatctcagtgacggagtttattgatggcaaacgggcgaacccgactatatcgttgatcgactggaacaacccgcagaacaacagctttgttttcaccgaagagttcagcgtgacacgcgctaacggcattgaggcacgcaggcccgatattatctgctttgtgaatggtattccgctggtcgttatcgaggctaagcgcccggacggcaatgctaaaaaagggccgactattgacgaggggatctctcaaagtctgcgaaaccagcgtcatgatgaaattccgcgactgtttgcctacagccagatcttattgtcgataaacggccatgatggacgttacgggacttgcggaacaccgaccaaattttgggctacatggcgggaagaagatatctctgatctggagatgtttgccatcaaaaaccgcaagctcacagcacagcagatggagtcaatcttcagccaccgtccggttgcatgtctggaatggtaccaagatctgacaacagcgggcgatttggctgtaacgggccaggaccagctgcttatcagtctgcttttacctgaacgtctactggatatggttcgcttcttcacgctgtttgataagaaagccggtaaggtcattgcccgatatcagcaggtattcagtatcaaacggctgctacagcgtatcgaaacgaagaaccctgatggcagccgcaacggtggggttatctggcataccacgggttcaggtaagtcactgacgatggttttcctgagcaaagcgctgattctgagtgaaactctcaagcagtgccgcattgtcgtggtgaccgatcgcgtcgatttggaaaaccagctcagtcgcacctttatttcaaccggggaactggccggtaaaagggataaaaccgatgccatcgccacctctggcaagcgtctggccgaacaaataggcaagggtacggagcgcattctcttctcgttgattcagaaatttaacacggccacccgcctgcccgagtgcgtgaataccagccccgatatcattgtgctaattgatgaaggccaccgcagtcacggcggcgagagtcatcaacgtatgaagctggctctacccaacgcggcctttgttgcttttaccggtacgccgttgctgaaagaggataagaccacgaataaatttggtcccatcgttcatgcttacaccatgcagcgtgcggtggaggacaagaccgttaccccgcttctctacgaagagcgcccgcccgagctgaacgttaatgaacgagctatagatagctggtttgaccgtatcaccgaggggttaacggataaacaaaaagccgacttgaagcgtaagtttgctaataaagggcaggtctataacgctgacgatcgcatccaccttattgcactggatatcgccaaccattttgtcaaaaacatcgacgatggcttgaaggggcaactcgcctgtgacagtaaagcagcagcaatcaaatacaaaaagtatcttgatgaagccgggctgtttgagtctgcagtggtcattagttcgcctgacacgcgtgaagggaataccgaggtggatgaatctggtatccctgatgtgaccaaatggtggcaagataacgtcggctctcaggatgaacaggtttacacgcgcaatgtcatcgatcgttttgataaagatgattcgctgaagctactgattgtggtcgataagttacttaccggctttgatgaacccaaaaatgccgtgctttacatcgataagcctcttaaagggcataacctgatccaggcaatagcccgcgttaaccgcctgcatcctaagaagaaatttggtctgttaatcgattatcggggcatcctcaaagagctggataccaccattgacgattatcagaagctggcatcccgcacgcagggcggttttgatattgatgatctggtggggctgtacggccagatgagtacggagtacaagcgtcttccgcagctgtataaaaacttgtgggcgattttcgcgggtgtaaaaaacaaaaacgatattgagcagctgcgtcaggtattggtaccgcgcacagaagaaaagttcggcgaaatggttgatgttcatcttaaagtccgtgaagatttttatgaggcactcacacaatttgccagttgcctgaaagtggcgttgcagtcggctaccttctttgaggataagagtttcagcgaagaagatcgccagcactataaagagacgctgaggcaatttaccagcttgcgccagctggtaaagcaggatgccggagagacggtagattacgatcagtacaccgaacaggttaaaaagctgctggataaacatgttgttggcgtagaagtccgcgagcctggtggcgtgtatgaagtcagcaaaatgggacagcggcccgaagagtggggcgaggataaaacccgtaacgaaacggatattatcaaaacccgtgtaacccgcatgattgagcaggatttacgtgatgatccttatgcccaggaagccttctcgaagttactgcgtctggctattgaagaggcggagaaactgtttgatcaccctctcaagcagtacatgctatttcgtgagtttgaggagcaagtacaggatcggcggctgaacgaaatacctgatgtgtttgccggtaatcaccatgcgcaagcttacttcggcgtgtacaaaaaagtgctgccggaggtttttgccgttaccgattctcaggtcatcgataaatgggtgaagcttgcttttgaagtagaccaggctgttgatatctcagtggctgagaactcgatcaatccgcaaaatatcgaggctgacatccgcaagaagcttctgccgatgatgtttaaagagtgtaaggcaataggtggcggaatggatcaggcgaaaaagattgtggaaatgatcgttcagattacccgtgtagggctgagcggagtgtaa

SEQ ID NO: 439588 - DNA, 924 bp, Serratia marcescens
atggctgagctatacgataaagatgtgcgcaccatcaacgagcacctgatcaacatcttttcagaaggcgaacttggtcaaaattcaactatccggaaattccggatagttcgccaggaaggaaagcgtcaggtttccagagagatagagcactacagcctcgaagctatactggccgttggctatcgtgttcgttcagttcgggggactcagttccgccagtgggccacgcaaaccttgcaggaatatctgattaaagggtttgtgatggatgatgagcggttgaagaatccgcccgtcggctcttctgtggttcccgactactttgacgagatgctggaacgcatccgcgatattcgtgccagcgagcggagagtctatctgcgggtacgggagattttcgcgctggccgctgactaccagccgtctcttaaagagacgactcttttctttcaaaccatccagaataagctgcactttgcctgcaccgggcgtacagccgctgagctaatccaccagcgggcagatgccagccaacctcatatggggctcaccagctataaaggcaatgacgtgcgaaaaggcgatgtcacagtcgctaaaaattacctgacccagaaagaggtcagtgagttgaaccgtgtggtgaatatgtggctggactatgccgaagatcaggcactgcgccgccagcaggtctttttgcaggactggcaggagaagctggatcagttcttgcagttcaacgaccgtcatgtgctccagggcgcgggcactgtcagtaagaaaatggcagatgaaaaagctcagggcgaatatgcacgatttgcagagcagcggcgtttgttaaaagaggccgagggtgaaaaggatattaccgagctactgaactggaaagccgataaagacaagggaacatcatga

SEQ ID NO: 439589 - DNA, 1230 bp, Serratia marcescens
atggcttatagttctgttgaagcaaagtcaattcaggaattatgcaaagtcattgattgtgaacacaaaacagcgccatatgttgaaaaatcagattatttagttgtacgaacaagtaatgtacgaaacggccgaatggtcatggaggacatgaagtatacaactttggagggatttaaagcatggactcaaagagccgttcctgaagttggtgatgttttatttactcgcgaagcccctgccggggaggtttgtttagtccctaaagacaaaaaagtttgtatggggcaacgaatggtcatgcttcgacctaatcgagagaaagttgatccactattcctgtcacttgttttggcaacggaaaagagcaagtttgatattttgagactatcgatcggttcaactgtatcaagaataaatattgctgatataaaaaaacttagaattgcagctccacctcttctagaacagaggaaagtcgcccaaatcctttctacatgggataaggcgatagctaccactgaacaattgctcaccaacagccagcagcagaaaaaagccctgatgcaaaagttactaactggcaataaacgcctacagggttatagtggtgattggaaacaatatcaattgtctgacattagtaaggtcattgtcagccctgtagataaaaaatctgttgctggtgagattcctgtagaaatttgtaactacacagatgtttattaccatcatgaaataacgaaagaaattaacttcatgaaggcaacagcaagtaataatgaaattgaaaagtattctctgaagattggtgatgtaataattactaaagactcagagactccaggcgatattgctgttccggctttagtgtcagaggagttaaatggtgtcgtatgcgggtatcacttagcaatagtaagaccaaataaatctgccgtctctggtgcatttcttaactatcttttttcaatgccaaaaacacgatactattttttcactttagctacaggggcaacaagattcgggctgtcaataggggcaattaacaaagcgcagttttctataccaacagtagatgagcagcaaaaaattgccaacctattatctatatcggataaagaaattaaagcgctaaaacaaaaactccactatctaaaacaagaaaaaaaagccctgatgcagcaactgctcaccggtaaacgccgggttaaggtgggcgccgcatga

SEQ ID NO: 439590 - DNA, 1323 bp, Serratia marcescens
atgatgaagaatgaacgcttcgttctacctaaagatgctagcttttatgctctctataagcgtcgaagtgaggcgggtaacggtgaacgtatcgatgtagctctacacgcaattgaagaagctaacggcactaagctgaaagatggcagcaagagcgtgttccaggaaatttcatttaataccaataagcttggtgatgaaaaacaaaagaatctgattttgaagcagttactcgaagattttactcatccagagctgaatcttaagcccagccgggtggggggattagatgtaattggtaacgcttatgaatatttgattggcaagtttgctgcgaatagcggccagaaagccggagagtactacacgccacctgaagtgtcagatctgctcgcagcgctgcttgacccacaaccaggggaatctatctgtgacccaacctgtggttctgcttcactactgatgaagtgtggtaagtgggtcgctcaacaacaccacagtaagaattatgaactttacgggcaggaagcgattggctcaacttggtctctggctaaaatgaacatgtttctgcacggcgaggataaccataaaatcgagtggggtgatacgatccgcaatcccaagctactcgataaaaatgccgatctgatgctgtttgatgtggtaaccgccaacccacctttctcattggagaaatgggggattgatgatgtggctgacgatcattacggtcggttccgccgtgggcttccgcctaaaaccaagggcgactatgcgtttatcctgcatatgatcgaaaccatgaagccgaaaaccggacgtatgggcgtggtggttccccatggcgtgttgttccgtggttccagcgaaggaaaaattcggcagaagttgatagacgaaaatcttctcgatgcggtgattggtttgccagaaaagctatttttcggtacaggtatccccgccgcaattctgatctttaaaaagcagaaagtagacgataaggtgctgtttatcgatgccagtcgtgagtttgaactgggtaaaaaccagaacaaattgagcgcggataatattgccaaaattgttaaaacctaccgtgatggcgataatgtcgacaagtatgcttatctcgccagtcagcaagagatccgcgacaacgactacaacctgaatattccacgctatgtagatacctttgaagaagaagagcaaatcgatctgatggtagtgcgtgccgagcgcgagcaactgcaatcgcaattggctgagctggaagtggagatggcgaagtatctggaggagttgggttatggcttatag

SEQ ID NO: 439591 - DNA, 276 bp, Serratia marcescens
gtgccgctcggcgtggcgaaagacgcctcggtcaccattccgaaagggcagatgaaaaacctgaaggccagctacaagctgacccaacctacgctggaagcgccgctggcgaaaaaccaggtggtcggcaccatcgatttccagctggacggcaaaaccatcgagcagcacccgctggtggcgatgcaagaggtgaaagagggcaacttcttcagccgcatctgggatatggtgatgatgaagctgagccagtggttcggcgggatcttcggctga

SEQ ID NO: 439592 - DNA, 1410 bp, Serratia marcescens
atgaatggcaaactactgccagaaacctggttggcaaagctcgcaattgattgctttgaccaaatctcaacaacaaacagcaaagtgaagagtaaagactgctcaccggaagggctatatcctgtcattgaccaaggtcagaattacatttctggttatattaacgatgaaagtaaggttattaaagtagactctcctatatgcatatttggcgatcacaccaggatagtaaaatgggtaacccatgattttgtccctggcgctgatggtactaagttactacagccaaaagccttcatacacccacggtatgcttactatagtttacgcaccttaaatatcccagataaaggctactcacgtcatttcaaatactttaaagaattagaaattaatctacccggacggttggaacaaaaaatcatcgctgaaaaactcgatacgctgctggcgcaggtagaaagcaccaaagcacgtcttgagcaaatcccgcagatcctgaaacgttttcgtcaggcggtgctggctgctgcggtaaatggagacttaactgctgaatggagaatgaacaataattcaaatattgttgaagaagaaattgaaaaaatcaaaaataaattgatagcaaaaaaaatagtcaagaaagatttaacatactctaaacttgatagaaaatatcaactaccttcagattggctatatgtaaagttacagtcaatagctactaaaattactgatggtgaacataaaactccgaaaagagaatctgctgggcaattattaatttcagcaagaaatattcaagatggctatctcaaactgtcagatgtcgattatgttagtgatgctgaatttcaaaagctaagaaatagatgtgatcctgatagcggagatgttcttatctcctgctctggttcaatagggcgagtatgtcttgtagatgagaactccaagtatgttatggtgcgtagtgttgcattaatcaagttaatgcaagattttgttatcaataaatatataatgtatctacttcaatctccgttattacaaaaagatatagaggaaaactcaaaatcaacagcccaagcaaatctgtttcttggtccaattaaaaaccttggtatccccctccccccggtaacagagcaagctgaaatcgtccgtcgcgtcgaacaactcttcgcctacgccgacaccatcgaaaagcaggttaacaacgccctggcccgcgtcaatagcctcacccagtcgatcctggcgaaagccttccgcggtgaacttaccgcccagtggcgtgctgaaaaccccgacctcatcagcggtgaaaacagcgcagccgccctgctggaaaaaatcaaggccgaacgcgccagcagcagcggtaaaagagccgcgcgtagaaaagcgtaa

SEQ ID NO: 439593 - DNA, 1416 bp, Serratia marcescens
atgactcccattccgtcttgtgtattcgatgtatatgccttatcgcttccccgaggtctgggatttggggatgatcctccagttagcgcttggggtagtcatgatcatgtcacagtctgtgcactgacacgtaattgtcacagcggaaagcatggcattcttataatgcggcgtcgtgaggacgatgtatgggcagtgctacgctgggagtcagattcatatagtgaagaagaggctttcacaattatacgtgaggcatgcgatgaatctgcgagtcgcgtccctttgcctccgggtacacgcaggcgcgcaccgctttgggatgttgaaggtagagaaccaagtaacatattcaaactacttggacatccttgtagagcgcctggcgcatggatgcttaatcaattgtatcttgcaatgccaaatccggatactcactgggcaagagagtgccagactgataattttcatacacgtatttgggaagccatgctcctggccagtttccgtgaacaggggttgttagtcactcaggagtacccctctcctgattttcacgtaataaacaggtcaggtggagaagcctggattgaagctgtgacagttaatccatcggaccgttatgaccatgccaaggctaaacctctgacgtttcctttaaaccgacaagacagggtatcgggaattgcggctgaacgttatgcgcggaccctaaggaataaactgcgcaagaattacactagtctcactcatgtcgaaggaaagccgtttgccattgccatcgcggactttcacgctcctggttcaatgatgtggagccgtgaggctctaattacctatctctatggattttatggaagagaaaaagaaatagatgggaaggttgtggctgtagcagaaactgtcgactgcatcaaaagcgaccccaaaatccgtgctggtttgtttaattcacacgataacattgctctctcagcggttattttttctaattctgcgactttatccaagctgagcagagtacctgtttcttccggcgcattgatcaaaggctaccggtacataaggattggtgagttcgctaatgactcggcgggagccttacgtggcatccccttcagtatggatgtagccagtgaccaatatcgtcgtctttgggaaccctatagttatgagccatggacttcagaaattgaaatttttcataacccaaacgcggaaaatcctataagttctgcgctatttccagaggccacgcattggcttccagttaacggtgagataatttgcaaacgctttttcaagcaaagcattttaaaaagccaaaccattattcaacacgcagatgatccagttcctaacgcaaatagcctcacgtttcaggaaacttatgaggcagacgataaaattatttga

SEQ ID NO: 439594 - DNA, 1806 bp, Serratia marcescens
  misc_feature (1710)..(1756): n is a, c, g, or t
atgaaaatatcatatctaaaatcatcaccatctttggttgaagtcttaaaaaataactatgaggctttcataattcaaaaatataaattcagtcattgtggtttgtttcatgatgagaaaaatgtttatgctgtaataaaaaatttagaagagtgcaataccacattagatgaaatacaaaaactttatgaccatgaatttagaacattaggtgtaccaggtccgatttttattggagaaaaaagagatgattttataaaaatagattttagaaatatctacgaaaaagtaagtttatttggccagccatttaatacctccgacttccacaataatataagtatggtcatacctcctaaattccatccatttcacgtggatatgaagtggtctgacaacacatttacttttacctttaataaggtcctaactcaatctgaaagtgatgaaattattttgctatgcgaaagtctaggtttttacggttacaactacaatattaatacagattatgaactgcctgattacaaatatcaaaaaaaggaaagcaatactcaagggaatcttacactggttgcaggacgataccttaaaaataatcaaccaaaagaaattcttgaaaaatacgaagaagatcaagagttttggatcgaaaatagagttaatattttttcaaatgtaagctttaccagagatgaatgtcttagtgattcatttaagaagagtcaaaacaggtgctttgtagatgccagtgtttttccaagaaataacataagagaatatctttcactatatgacaccgtgatcattgcaatcccattagtagatagacctaataatcagaatttttacgaaatttttaaaatcaacaggattgaactattagagttggttcgacgtggtcgtataaaatttgtcgcattccaaaacctccaacgttatgattcaaattttttggcggacgttctgtctgttgactcagaatgtgttttgttttcaaggagattagcttctgcctcattattagcaattcgagaaaaaacagggttgtttggattttcttttgatagcgaaactcaatataaaatattgaaagaatgttacaactcaaaaattgattcgcttaaaatattagcagagtcattatctaataatatagcatttcttgagtatggaataaatcaaaaaggtgcattgggtgttagtcaattttgcggggcaaattttgctacgcagatatataaactacgtggctgtgattatggtattgagttgatgtcaagcgcaatgtcacttgagttttcactgggattaggagcacatcacttcccctttgaacacgcagattactctgaggtaaatgcctgtaaaatacttaacggtatatataatggagttcagcaatcacaacatgagattcgtgaagtagagatacagagtttattatcaaacattttcaccattaataacgacatgaatgtccttgagttagatgatatcttaagcaaatacaacagacgcatgattccagcaatattaaaagaatatgcaaatctgacaccagaagagttaagctttaaaatttactctttgaataaagaaatcacaaaaattgaaaagaagaaagaaagtttatccattttagacttatcaggttttgccccagtcattgcaggagcagttatggaatacaagggactctcaggtgcnnnnnnnnnnnnnnnnnnnnnnnnnnnnnnnnnnnnnnnnnnnnnnnctcaggtgctggttatatcgcattactgccgtgggtttttaaagtattaa

SEQ ID NO: 439595 - DNA, 435 bp, Serratia marcescens
atggttttaaatgataattcatatcatcaagaaaaatccgatactgcgtgggaaacggcttttgaagcgcagtcagaggaggctttctcagtatgtttatccgaaaatgttgttctcgaagctgcggcgatcacaaaacccatacaggggagaaagaatgttgagataacaatggctacagccagtaaactatattcctctcttgcctttacctcccgtgacatgctagaaaacaagatcgttttacaatggcgggcagtaataaaaaaccagatcaatctgactggagtgaccatcttaacgacaagagacgatggactaattgaaaagataggcatttatcacagccctcttaatgcgctacttgagttttctaaagaaatgggatgccgcacaaaagaagctctcggagaaaactattttcaccgcgattag

SEQ ID NO: 439596 - DNA, 273 bp, Serratia marcescens
atgttctggcgaataataaggggcgaagaaaattatgcttcccgcttcatcgggctgatgtgtgaaaaagagccgcagttgaaaatagcacagcaactggagctggacttctaccggatcctgaaaaccaaagacaaatcacagctaaacaggtggtttacccatgttagtgaaagcggtcctgttgagcttcagcgtgttgcagccgggatggaggctgatgcagcagcaatatgtgaagccattaccagcaaatggagtcaaatggagtaa

SEQ ID NO: 439597 - DNA, 1980 bp, Serratia marcescens
atgaagaataaaacgatgtctcacggctggctgtccccgttgatcgacgagctacgcccttcggacagccgcatcaacctggtgatccgcgccctgctctccagcgcgatcgccatcgtgatctcgcagacgctgcaggtgccgtggctggcgctgtcactgatcgctatcttctttatcacacagtccaatatcgtgatcacccgcgcaatcggcatcctgtttttcgtcagctccacgctggcgatcggcgccgctatcctggtgctgaaattcacctacgactacccgatgctgcgcatcctgctctccagcgcgctgtttttcctcagcgtgttcctgatgcgggtgaccaaggttggggtgctgttcttcctgatggcgctggtggtgatctacacgcaaagctttgtcgatctcactccgcaggcggaagtggtgatacggctggtgctgtgggtatgggtggcgatcaactacgccatcctgctcaccctgatcgtcaataccctgctgctgccggccgaaccgctgaaacagctaaagggccggatgaacgcggtgttggacgaaacccgcgctatgttggccaacggcggcgagacgcgcgatctgagcgccatctcgcagcacgccaccgagctgcacaagctgctgcgcttttcggtgatgcgcagcgatcgctgccgcgccaacgaacccggttatctggcgctgatcaccttggtgttgcagctcaatattctggcctaccagctgccgccggctttcggcgcggccgcgcgtcaattggcgcaagagatagacgccgcctgccgcgcgctgcaaaccgcgatcagccacgacagcgcgctgcgattttccgtcgcgatcgccggcagcgacgatccgcaggtgccggcgccgctcaatgaaatggccggcctcctgcaggtctacgccaaccgcagcgactacgccgacgccctgcaggccgcgccgccgccaaaagtgcccttctttacccctgatgccctgaccaacccggtttacatccagttttcgttgaaaacgctgctgaccgtgctggtcgcctacgtgttttataccgccgtcgattggtccggcattcataccatcatgctgagctgcctgatcgtggcgcagcccagcctcggcgccacacagcggcgggcgcggctgcgtctcggcggcgcggcgatcggcagcctgctggcgctgatctcggtggtgtggatcatgcctcacctcgacaacctcgtcggcttgctgctgctgacgctgccggtgatcgccctctccgcctggatcgccgccggctccgagaaaataagctatgccggggtacagatcctgttcaccttttccctggcgctgctggaaagcttcggcccggtcaccgagctgaccgagatccgcgatcgcctgatcggcatcgtgctgggggtagggttcgccaccttcattcacgccacgctgtggccggaatacgaaggggagtcactgcggcagcaggttgccaacgtgctgcgggaactgtcgcgcttcctcggcggcgagaacacaaacgccatcggcatctggcaaaagatcgagggctgcgaagcggtggtggcccgggtgacgctggagcccacctggcagctggcggacgataatcatgaaagcttcacccggcatatccaactgatctttaaccagacgcgcagcctgttgctgaccagcgaaaagctcaacacctatctggcaggcggcggcgcggcgctgtccgcgcaggaacgccaggcgctgatcgaggtgcaacgtcagggcgggcgcgttctcgccgagtatgcggcgcagctttcccgcgcgccgcaagcgttgcgggcgcccgactttcatccaccgtcggccgccctgcacgccgacaccgtgcgccatcttgctcaggagctgagcgacggagtcaatcgcctgcccgcctggggcgacgcctag

SEQ ID NO: 439598 - DNA, 1038 bp, Serratia marcescens
atgacccaaccacaaacctccaacaagcgcagactgctggtgcttaccatcctggcgttgacgctcatcgtggccgccgtcgtcgtctggcgggtggaaaacgcccccactaccgacgatgcctacgcctatgccgacaccatcgacgtagtgccggaggtgaacggccgcatcatcgagatgccgatccgcgacaaccaggaagtgcggcaaggcgatctgctgttccgcatcgatccgcgcccttaccaggacgcgctggcggccagcgaagcgcgcctgatcacgctgaatgaacagatcaagctgacgcagcgttcggtcaacgcgcagcagtacaatgccgaatcgatgaacgccatcgtcaaacgctcgcaggcgctggtggcgcaggcgaccgacaccctcaaccgccggcagaagctgctcggcaagaactacgtttcggcggaagaagtggaaaccgcccgcacctcccagcgctcggcgcaggcggaactgcaggccgcattgctgcaggcgaaacaggcggaagccgccgtcagcggcgtcgaagccctggtcgcgcagcgtgccgaagtgcaggccgacatcgccatcgccaaactgaacctggagttcaccgaggtgagagcgccgttcgacggccgcatcgcctccctgaaaaccaccgtaggccaatatgcctccagcgccaaaccggtgttcacgctgatcgacacccgccactggtatgtggtcgccaacttccgcgaaaccgacctgaaaggcgtgcatcccggcgtgccggccacgctgtatttaatgagcgacgccggccagaccttcagcggcaaggtggaatcgatcagctacggcgtgcagcctgacgacggcggcacagtgctgggcgggctgcccaacgtgtcgcgcaacatcaactgggtgcacgtttcgcagcgcttcccggtcaagatcgcggtagaggcccccaacccggcgctgttccgcgtgggcgcttcggcggtggccaagctgaacctgcgccatgaagaataa

SEQ ID NO: 439599 - DNA, 624 bp, Serratia marcescens
atgagcgacgagatcgcgcagcacgctttccagacggcgctggcgatggaccacgagcgaaccctgtccgccattcaggggcgggttcgcgcctttgccgcgccgttcggtttcaaccgctttgtgctgttttccgcctccgcggcggcggaggcggggatcgagcatatttattgggtcgagggcgactggttcggtgagggggaggcggtcgatgcgctgacctacgtgcggcactgcccggtgactcgccacatgctgcgggccagcgagccgttcttctggaccaagaccccggcgcagcagggcgagcgctaccgggtgcctttctggcggcgcggcggctgttcgaaccggcagccggtgagggggggagccggctgtcggcgcgcgagcgcgaggtgcttagctggaccgccattggccggcggcaggcggatatcgctgcgatgctcggcctgtctgaacgcacggtggaaaaccacctgcgccgcattcgccagcgtctcggcgccgccaccaccgcgcaggcgatcagcgtggcgatccgcctgggcgaaatcgcccccgagagccgttagcccgccgccatttgccgcagcagccacgcgcgcagcgccatga

SEQ ID NO: 439600 - DNA, 2307 bp, Serratia marcescens
ttgaattatctcgcaattcaaaccggtattctttccattctcaacgatcaccccaacccaggtttggaagccttagccaccgcggccggcgcgcagttacggttaccagccaactcaaacaatctgttgacgttcaattttcaaatgttgctcggcgactatctcggccgctatagacaacttgagcgcattgatactctcggcgatggcaaaaccaccgtagtacgaatccgcgagaacgaatgcgttagcgccaagatcggccgtgaccgtttctcgataaaaacctgcggtgcgaacagcgaattcatcccccccgaagaggtgcaacaggcgcatccctcgggaattaacaccttaacattagtcacacctaaactattggcgactggagatggcgatgggacgatccgcatctgggatctggcgacaagaaaaaccgtggggggcccgctacatctgcccgatagtgacaacgctaagcatgtaagcaacaaggtgcgtgccatcacggcatctggcgacaggctttatgccggatatcaagacggtacgctggccgtgtggaaaatatccggagccgagtttgaattattgtcacaacaattcgataagaaaaccaactccgtgatggccaccgccgtcgcccccaaaaatgctctggataacgtcgccatcgccacaagcagggcagtcaaatggcagacgtttagccaaggtaaaccgcaacagtccatcccattggcggccatcgcgccagagaccgagtacagcaaaactttttacagtatcgacatcagccccgatggacgatttatcgcagccggcagcagggatggctacatttatatctgggacacttcacgcctttctccgaccaagaataacgtcgaaaaggatgtttcgccgcgagccgacgcccccttgccaacatcgtcgttcttttactggccaacgattatcaacgcgcatcagcaaaccgtcgcgcaactcaagtatctgcaaaatggcgacctcttgtcattaagctgggatgggagcctcaagctgtggctgttttcggccaataatgccgccgctcccaccaaccgcacccttttgcaatttccgcggcagttggtcagcgtcgcgatcgagcctgatgagcaaaccgcctatgtcaccagtgaagccggcgacatactcaaagtcaatttgcgcgttgacagacatcctttagggcaatttttacttagtcctcaagctcctgcgctgtttgtcgacagtaaagcaaaccgtcagctattcactgtacaggcgacagagctgacgcaatatcggttggatgccaatactggccaaccatcggtcattcggcagttgccggtatcgaacgtcgtcgctctcgcgtggtccccctcagccacgacgctctttgctgcgcaacagcaaggcgttgaggtgtttcgcaatgtgctgatttcaccttcccaaggcgagccgctggcgtgcctgctgcaaccgccaggccgccgcatcgccgccattcgcgtcaatgatgccggcaccctgctggcggttaccctcgtcggcaagaacgggcgagagctcgccaataaactgtatcgcctcaccgcgtcagccccccatggattcacctgcaaagaaattaaaactcagcgcaacgtctactttccattgccctggttcaaacccaacagcgacgaaatcatgaccataaatgacaagaatgaaatcgtctcatggcgattcaacgctcagccacgtgaggaacttgagatagtcaaaacccgcgtcattcaggttgcgagcgaacgttctgaatccagcaatatgcgtgcgccgatcgaaacactggcgttcgattcttcaggccaaacgatgctgctgggcgacttctcgggcaagatatattccgcaacgatgaacggggaggactggtcgttcacacagaagaaaaatgattcattttttatcccccatctattggccgtcgcgggtgatggcaacaccgtcgccatggcggacaacaaggggcagttgtccgtgttcgtcgcaggttcagccatgcacatcgcacaagacttccacacgacgccaatcaccgccctcgccctttctcaggatggagaatggctggtttcttcatcaagcgccggcacagccatttgggatctgcgcatgaaaagctggataaaacaggcttgtaaatgggcgaaccgcccgacattccagcctggagacatcgacaaatacttccactatgcgtccattaatgacccgtgtcccgacaatccaccgaaatga

SEQ ID NO: 439601 - DNA, 999 bp, Serratia marcescens
atgaaaagcaaagtgtttaaccgcagcctgctggcgggcgttgtcatcagtctctgcagcggcctgttgacgcccgccgcgctggccgcctgtgcgggcaccgaactcagcgcctgtcctgcgcctttcgatgcgcaattgccggacacgcacaagatgctcacctggagccagagcgaccgggtgatcggttttcgtaatgactaccgcaactatgcgggggatgtatttcaccacggcaatgccataccgctggtggcttccgctaaaccgttaaccgacgccagttatcgggtgaatggcaaaacctaccacctgcaggactatctgcagcgccagaacgtcagcggcatgctggtattgaaagacggcaaaatcgcctggaaatatctggggcagggcaataccgacaccacactgtggacgtcgcgctcggtgggcaaatccgtggtcgccacgctggtgggtgtggcgattaaacagggcaagatccgctcgctcgacgatctcatcacgcaatacgaacccgatctgaaaggcaccgcgtgggacggagtgaccctcaggcagctgatcacccacacctccggcgtggtgtggaatgaggattacaccaacccgaaatcggacttcgcgcagctgaccgagtgtgaagccaggcccggtgcctatgcctgcgtgcgcaagctggtggccggtttgcagcgtgcgcacccggccgggcagaactggtcttactcctccggcggcgcgtggctgctgggcgacgtgctggagcgcgccaccggcatgccgctggcggcctatctgcagcaaagtatctggcagccgtacggcatggcgagcgatggcgtgtggcatgcctacgccaaaggccacacgacgtgggcgcgcacgggttcaacgccacgctggaagactgggggcgcttcggcgaattcattctgcataacgggacgttgccgaacggcaaacagatcttgccggaaaattgggtag

SEQ ID NO: 439602 - DNA, 501 bp, Serratia marcescens
atggcgcgcctggcagatccccagatcggcctggtcgtttgccagcaggctttccgcttcgtcgcgcgaggcgttaatcaggctcaggcgcgtgttgcgttgggccatggcggtaatcagcgcctgcagcaacgcgcggggggtaaagggatcgtagaccagcgagatttcctgcgccgcgctcttgggcacgtctttggcaaacgcctcaaacgctttcacctggcgcatcagcaggtgcgcctggcgctgcaactgttcgccttccggcgtcaggtgcaggctgcgcccctcgcgcaggaacagcgcatagcccaacccatcctcgagaaaatcaatcaaatcgcgcagcgtcgtgcggtctttgcccagcttgagcgcggctttcgccaggctgccgtgctcggccacggcggtgaaggcttccagttgggcaaaggaataaatcaggctcggcacgcggttctcccgtcgatttttcgggggattttcccccattag

SEQ ID NO: 439603 - DNA, 1071 bp, Serratia marcescens
ttggtagcggtcgtacatcatgttcatggtgatgcgcagccccagcggatcgatgccccagccccagtcgctgcgcggcacatgcgggtttgccagcgatttcaccacgttggcggcgctgctgttgttgtcgttcatgtcggcggaggcgcagcgcgaggcgtagtagctgaaggagacgaagtcgacggtgtgcttcaggatgtcggcgtcttccggttccatgacgatgctgacgtctttctcacggaatacgcgggcggcgtaggaggggtaagcgccgcgcgcctgcacgtcgataaagaacaggttctcgcggtctttctccagcgcggcccacacgtcttccggcttgctggaccacgggtagaagttgccgccggccagcatgcagcccacctggttggcggggttcacttcgtgggcgatgcgcgtcgccagcgcgctggccaccagttcgtggtgcgcggcctggtatttcacctgttcggggttttcgtccgcttcaaacaccagcccggcgccggagaacgggctgtgcagcaggatgttgatctcgttgaaggtcagccagtatttcaccagtccgtcgaaggcatcgaagcaagtgcgggcgtagcgggtgaagaactccaccatcctgcggctgcgccaggagccgtattcggtcaccaggtgcatcggcacgtcgaaatggcaaagtgtgaccagcggctcgatgccgtattggcggcactcttcgaacaggctgcggtagaaggcgatgccttcggcgttgggcgtcagctcgtcgccgttggggtaaatccggctccaggcgatggaggtgcggaacacggtaaagcccatctccgccatcagcgcgatgtcgtcgcggtagcgatggtagaaatcgatggcgtcgtggctgggataaaactcgtcgtcgcgcaggctaaagcgcttctccagcccgagtttgaccgccatgcggttggcgccgtgcgggatcatatcgacggtggtcagccctttgccgccctcgcgatagccgccttccgcctggttggcggccaaagcgccgccccataa

SEQ ID NO: 439604 - DNA, 525 bp, Serratia marcescens
gtgtttatcgtcgatctgccggagaacgacgtcgactacgcccgggcgggcgctttgccgctgcaggggacggaaagcgagctgccggcgccgccgcttggcgtcaggcagcggcgggtaacctttaccggggatcgccgttttcctggcgtggctggtgcgccgcgccactggttgcgcagttcgccggacggcagccagatagcttttctgatgaaggacgacggcggcgtggtgcagctgtggacggtgtcgcctaacggtggcgagccgcaccaggtgagccgcagcgagcatgacatccagtcggcgttcagctggcacccgcagggcgggacgatagccctggtgtgcgacaacagcgtgatgctgtgcgaggtggccagcggtcgcctgcagcgtttgacgcagcgcagcgtgcagccgccgtcgggggatgccgtggtgttctcgccggatggcaagaaagtggcgtttatgcgcgagatagcggggttcaaccagatcttcgtggttgaggcgtaa

SEQ ID NO: 439605 - DNA, 267 bp, Serratia marcescens
atgccagcttatcaaatttcttacgatctgcggaagcagaaagactatgcctcgctcattgagcgtatcaagtcctatgggacctggtgccatcctctcgaatcaacctggattatcgtcaccactcaaacagcaactcaagttcgcgactatctcaaagccgttatggataacgatgatggcttactcgtcactggtttgcggggagacggtgcgtggtatgggctttccgacaatatctctcaatggcttaaaaacaacttataa

SEQ ID NO: 439606 - DNA, 882 bp, Serratia marcescens
atggttcaaaaccaaagaatcagcggggctggcaactcatacgctaaacgatatctggcgatctatgagtacccacatattggctctatgcccattgctaatatcacggctcagcagtttatcggagcgttagagccaacacacgctgccggaagacccgaaacggttaaacgtctaagccagcgtatcaatgaggttatggattatgcactcaattccggtctggtttctgtaaaccccgcagcacgaataggaagaacattccataaaccgaaggtaaagcaccgtccagccctaccaccagagcaactcccccttttgatgaaaacgttggcatttgccaatattggacgccaaacccgctgtcttatcgaatggcaattgcttacgatgatccgaccagccgaagcgtcaacgactcgctgggatgagatcgactttgacgcgaaagaatggcgtatccctgctggtcgcatgaagatgaagcgtgagcatatcgttccgctttctgagcaagctttggctattctggaagtaatgaagcccattagtaagcacagagattatgttttccctggctaccgtaatccgcttgaaccaatgaatagtcagacagcaaacatggcgcttaaacggatgggcttcaaagatctgttggtggctcatggaatgagagcgattgcctcaacagtgcttaacgagaaaggctttccaccagacgtgattgaagctgctttagctcatatcgatactaacgaagtcaggatagcctataacagatcacagtatctggaacagcgtagagagatgatgaacttgtggggagagcatgtggaagcggcttcttttggggcaacgagtattacttctgtggctggataa

SEQ ID NO: 439607 - DNA, 207 bp, Serratia marcescens
atggcgcgtcagacaaagcctcttaacaacaccgaagtcaaaaattccaaagcgactgaacgtgccactatcctgtatgacggggacggcttagaactactggttaagcccggtggctcaaaactctggcgattccgctattacaaacctttcactcgcaaacgcgccatgattagctttggtgcttaccctgctgtatctctctga

SEQ ID NO: 439608 - DNA, 147 bp, Serratia marcescens
atggcgatggcggcgctggggttgaccacccacatcagcgccgtgcgccaggccggggtgaaaccgattctgctagccacgctgctgttcgtctggctgctggtcggcggcggcgcgataaatcagctggtgcaacactggttctaa

SEQ ID NO: 439609 - DNA, 363 bp, Serratia marcescens
atgcgtttaaccgatcaggtgcccggtaatcttatgcagagcgtgctgatgatcagcgtggtgcctcagggggcgagaggcgtcactttgttgctgaatggcagcgtctatgacggtgacacccgctatgttgtcgaccgcattttgatgatggactatcgcaagcaaggcgataattacacgttacgcctgaaggaaaagctgagaaaaccgcaggataatttagagaaagaggcgttgaataggcgattgctgatgtcggcgccggtactgcattggcatgttgaacaactcgatagccgtcattatctctttagcggtaactacgccccatttttcgtttgtgcgacgaaaggggaataa

SEQ ID NO: 439610 - DNA, 798 bp, Serratia marcescens
atgtggagaaacgtgttggttggtatgttgatattttttattttttcaaacaaaggcatggctgcatgggagatatatgcggaattcaaacctaataaacagtattattatgtgacaataacaaggtttgatcagtatgatccgacgccgaatccactgcacgggtgcgcgtatctgggggggatgaaatgctggatttatattgggtggtcagataatgttggtaccgggaatggctatatggccgggttttccgtgccgggtatgtccgaagccaaaactatgggcgatttggggaagctaatagtggacaatggctacttaaaccgcgagcttagggcaatgtatggtggccccagtcagaaaggtgtgcgtaactgtttttggcttagctatttaaattttggctcgatgatgttgcctaatggcccggcgctgtgctcgcagcctgaaattaccccgacgttttgtagtatctcagagccttatattgagctgttacatggggccgtcaccgggaatgcggttaacggccatacgattagcacaccgatatatgtctcttgcagcgaagactatccgatcgccatagtttctgccgataaaaataccacgattgatcttggtgctgggttgaagagtgatttaaagattaatggcgttaattttaataacgggtatgaagatactgtcggccccagtggaaaatcgtttgttttaagttccacattatatggctactcaggcggagtggggaacttccagggttcgaaagtcataatgctcattctgccataa

SEQ ID NO: 439611 - DNA, 852 bp, Serratia marcescens
atgtccgaactggatccctccctgcccatgctgaaggcaaagaatacgcatctgatattaggtctgcgagatatcattgacgaccccagggaggttcaacggcaatggaaaaaactggataataccagcgctatccaaaattatttttcttcggtatgggtttatggcgactgcaatttctacgatctgagtcaggcgtatcattttgacgacgacgtgaaacaaaaaacgtcctttatcggttatcttgacgcgacccggcgcccccgattgctgtcgcctgcggacggtgcgatctcccacccctctgccccctatgcactctgcgtcgtcggtggcggtcaagatggtttccaactggctcagaccttcgctcaggcccatttcccctctggaatgacggggatattagtcaccggcgccatgatgcccaaagttgaatacgacaagctgcaacacatggcaggaacacgccatcacttgcaggtgcttcgattcgttcccgaaccgttagaactgctacgccgggcagaatgcgtgatcgccatgggcggatataacaccatcacggaaattttatccttccataaacgcgcattaatagtcccgcgtacccacccccgccaagaacaatggatacgcgcccgcctattggcagagaaacagctggtgtcttgtttgcatccgcaaacgttgaccctgtccgccatgaatgcgtggctggcggcaaaaaccccctcgccagagccgcgtgacgtcttgaattttaatgggttggagacatttgctctcaggatagaaaaactgctccgggccaaatgcacaaagcaattgcagaggaaagccggatga

SEQ ID NO: 439612 - DNA, 1260 bp, Serratia marcescens
atgaaggacaacatgctccccgctccgcgctatatcggctatgtgctgaagcgctatccacgcttttcagaaacctttgtggtcaatgaaatactggctcacgaacgtgccggtatgaaaatagacattttcgcgctggggccagtggaggaaacccattttcaggatgctctttcccgtgtccgggcgccggtatcgcgactgattgataagcaacggaacacagaagctttctggcgcctgctgctggaggctagacgaaaacttcctgagtttacttataaattatataaaattcagcacgataacgttcacgaggtagcccaagccatcttattggcgctggccgtgtgcgagcgtggcattcagtgccttcatgcacattttggcacccgcgcgacgacggtcgcacgcttggctgcctggttcagcggtatcagctatacgttcaccgcacacgccaaagatatttactaccagtatgaagaaaccacggatttagcgcagaaactgcgtgatgccgcgcaaaccgtcaccgtatcggattacaacctggcttatctgcaacggcaatatggcgccgccgcaggaaaaacggtcagggtatataacggtatcgaactggctcattttccctataccgcgccggttgaacgtccccggcatattttggccgtcggccgcctggtggaaaaaaaagggtttgaggtattaatcgatgccctgcaactgctgcgatcgcgcaccggcgcattccactgcacattgattggcgatggcccgttgcgggcgacattgcaggctcgcattgaggcggcggaattgggcaacgtgatcgtactgagcggccaacagcctcaacccgacatcatcaaagccatgcaaaccgcctatctggtcgtcgcgccttgcgtggtgagcaaagacggtgacagagatggcctgccaaccgtcttgttggaggcgatggcactagggacaccggtcatctccacgcgggtcgccggcattcccgagctgattagcgacgatgaaaccgggttatgcattgcgccgaacaaccccgcagagttggcagaagccctgctgcgtttattcaacgaaccggcaacctgtctgcggctgtccctaaaagccagagaaaaaatcgagcgggatttcgacatcgatcggaacgcagcacggttgcgcaccatttttgccgcttccattgtgcaaccggcgcgatgccttggcgaaaacagaggaaaaccacgatga

SEQ ID NO: 439613 - DNA, 1143 bp, Serratia marcescens
atgagaatcgcttatatttgcgccgatcccggtattcccgtcttcggctcgaaaggcgcatcggtgcatgtccaggaaatattacgggggctattgaagcgaggggtagatattacactttatgcccaacgcccaggcaatgccattcccgatgagtttcgcgctattacgctgcaaccgttgccaggcttgccttcagcggcgtcggcagaagctcgcgctcgccaagcgttggaaaacaatgtggctttgagtgcacaactggctaatgcagcgccctatgacgcgatttatgagcgctattcgctatggagcgatgcaggcatggctttcgcacgccgagcgggtatccctgggatactcgaagtcaattcaccgctgctcgaagaacaacgcatttatcgcgaacttccgttggaacaggaggctgagcgggtactgcgtaccgtgctaagcgacgccgataccgtgatagctgtctcgccgggcgtgaaatcctggctcagcactttcacctcctcgacaagtcacatacatgtggtcgcgaatggcgtaaatctggcgcgatttgctgtgccaagagcatctcattcccaaatgaccatcggttttctgggcacactcaaaccctggcatggtttgcactcgctggcagccgctttcaccctgctgcgcgcacgcggaagcaatgcgcagctatccattatcggcgatggcccggaattatcggccattcgccaccagttgcagcgacaaggattactaccttacgttcgattttccggtgccgtgccgccggatcaggttcctgccttactggcggaaatggacatcgccgtcgccccctacccacagttggcgggattttatttctccccactaaaaatttacgaatacatggcggcagggctaccgatcattacgacgcgagttgggcatttagccgacgtgatcacagcagaaaaaacgggcctgctggtggatcctgactcaccaccggcgctatgcgccgcattggaacgactgctggcagataaaacgctgcggctaacgttgggagccgccgggcgagagaaggccgaacaagaacacagctgggacagcgtaatcgctaaaatctggcgcctggcggggttaccatga

SEQ ID NO: 439614 - DNA, 1854 bp, Serratia marcescens
atgaaaagccgaaacgccataccacaagccaacgggcgcgatgtcatccgcacttttttaccctatatccttaagcagcgtaaattgctgatgggatctttcatcgccttattgctcactacggctattcgtctattggaaccttggccgctggctttcgctatcgacacattactgacggacgccatcgatgaaaaaaccgatggtcatctgggaaaaatagctcattggagcgccgacaacggattgtggctctgcgcaggcgccgttatcgccattgccattctcaaagctgccgtcagctatttcagcaccgttggcttggcgctggcgggcagccaggtgctcagcgaagtgcgcaaagatctctttgcccatttgctgcgcctgcccctggcctttcaccgcagcgccaaaacaggtgacttgaccatgcggctgatcaatgacatcggcatgttgcgtgaggttagcgttaccgcgctaatgccgcttttttccagcctggtgattttaatggggatgttcaccatcatgctgatcctgaattggcaattggcattcatggcgctgattcccctgccagtgctgttgtggatgacgcgtcgcgcaggccaaaacatcagccgcatcagccgcgcccagcgtaagcgagaaggcatcttggccgccaaaactgctgagttcatgggcggcatcgccaccgtgcaggcgctgtctttagaagccgtaacattgaaaagtttctacggtgacgactcgcaaagcctgcaacaaaatgtacgctcgaaacgcttgtccgccgggctggaaagaagagtagatattctgatcgccttcgctaccgcgctggtgctgttgggcggtgccaaaagcgtgcttggcggccgtatgtcccccggagaactgttgattttcctttcttatctgaaaaacgccttccgccccgtcaaggagtacgccaaatacaccagtcgtctgtcaaaagcgacgactgcgggagagcgcattgtcgatctattaaaaagagagccggctatcgtcgatacccccaatgccgtcgaactgcccgccaccgtcggagatatccgcttcgacgatgtacatttcgattatgcgacagaaaaaccgtgtcgtacggattcgactctacaaggcgtcagctttcgcattcccgcaaatcattcagttaccgtgacaggtccatccggtgccggcaaatcgacgatcggcagtttgttgctgcgtctctatgatcccaaaacaggacgcattgccatcaatggtaaggacattcgtcactataccgtcggcagcgtgcgcaaacgaatcgggtatgtgcctcaggacagtctgttgtttggcgtcagcatcagggaaaacctcgctctggcagccagtgaagatatgagcgagacggagatgttcgccgccacacggctcgccaacgcgcatgacttcattatggcgctaccgcaagggtacgacacgattatcagcgaacgcggaagctctctttccggcgggcaacggcaaaggatagccattgcgcgagcagcaatcaggcaaacctccatgctgatactggatgaacccggcgtcggcctggacggcaagaatgaacaagcggtaacggatgcattgttacgtttgatgcagggacgaacctgcctgctcataacccataacctggcgctcgcagccagaaccgacctcatcctgtttctggataaaggacgcatcgtggaacagggaacccaccaagaattgttggccgcgcagggacgctatgcggaattctggcatttgcagcaaagcgctgccgtaaagggaaaaaatcgcgatgatgaatga

SEQ ID NO: 439615 - DNA, 2286 bp, Serratia marcescens
atgatgaatgatgcggatcgccaactggtggagcgagacagcacgttacccggtttaaggatactgctggatagtaacgccttgctggagatattgagaaacttggcgccgctaaaggaggccgtgtctgtaacgttagcctatttgcgctataagcccggtaccagctgcgccgccagcctaatcgtaacgttaagctcgggagagtctcggcattacttcgccaaagcgctgcccccccaccgttttcagcaatcatggttgcatcccaaacgacaggcgctgatcgctgctggcgatcctaatgcgccgatggcgctgcctgatgtgtccattatcctgatgcatcccgcacatgatcgcactctccgcgcactcagtatcctgttggatgacgataagcgcagagcgcttttcaaagaattgctgccgacaacgaggaatcccgaatctataaattggcgctttatacgttacaaacctgaacgccgcgctgttatcgtcctttctcatgaagaaaaacggctggcggtgctgcgttttggcggccccaaagaatatgggtgcatgctgcaaggagccgccgttggcgccgctctgggccatactccgctgataaccctgcgcggcgctgatcggatgttggtaacgggctggatagcaggaaacagtcttgatccagagcataacggcgtacccgcaccaacgctgatggcagcggcaggcaaagttctggcaaaaatccactcggcgccattctcaccgccactcgtgcgcacgaatgcggaaaatattcaggcgctgtggcgcgttatgaatacgcttagcgccatctacccgcaagcgacagagccatttcaaaaactcgccgctcaagtggctcagggtctgacagcagccaaagagactccagtgttgatccacggcgatttctccgccgatcaattagtgttatcaaaccatgacggtaaattacggcttttagactgggatcgttgctcctgcggctcccccttaacggatctggccacctttcaggctcgcctagaattacaggtgatcggccagctcatatcgcgcgaacaagccgacgcctccatttctgcattcctgaatggctatactacgcatcgcgaagtggagccgcatttgctgaaaagctactgtgcctgggcgttgctttgcctggctaacgagcctttccgcacccgctcgcccaattggccgacacaaatcgaggcgttgctggcacgtgccgagcaattcctcgcccaggccgactcttcccccacgccattcatggagccgttgctaaaccaactgatgcatccggcgaccatcgcagaacccttgcggcaatcgctcgccctctctgcgcaaagcatcttgcaagactgcaccttgctgcgtcataagcagggtcggcgcgccattattcaataccaattcatgccccccaactcaccttccccatttatcgtgttggggaaataccgcaaaaagggggtaaatcaccacggattttattgtcagcaagcgctttggcaacagggttttgacgagcgagctcccgtcggcgttccggagccgcttgcgctcatgcctgcctggaacacctggctgcagcgaaaagtgctcgccgacgaattgcatgaacgcctacggcctgaagagccacagctggcttattggggggctcgggtcgccgaagcactgtctgtttttcaacaacacgccggggtacgagacatcatcgcggcacagcggtggcacatctcagacgagctggcggtattgcgtcagtgcctgcaaaaagtcaccgctctttatcctcactgggcaacacgcctcttacaactaacggcggcctgcgaaaaactcggtatgtcattggcggcagggaaaacaacctgcgttcatcgggatttttacccggatcagatcatgatagaacgctcacccgcacaacggctgattttgcttgatttcgatctctgtcgcctaagcctcgcggcgttggatgccggtaattacctggcgcatatccgtgaattggctctgcgtatttatggcgacgatacggcattgaagccgcacgaacaggcgtttatacaagcatatctcacgcgctcccctggcgtcgaactccatgaagttcaaggattcgccatcctctctctcgtcagacatatttttttgagcacgcaattcgactcacgcaggcacaccacctcacatctgctcgacatttgcgagcgggcattacacccctggctgccccattaa

SEQ ID NO: 439616 - DNA, 1338 bp, Serratia marcescens
atgacttgttttcactccccactctccattggggtcgggttgttattaaccccattgttttcgtgcgctaacgacacgttgaacacgatgttgcagcgccaagagaataaggtgacgctgagttcatctaattggaaactacccaggcacaccgaaaagcgcgtactcgatcttagtatacagctcaaaatggaatccttttctctgcgcaataaaaacctacgccgggatgaaaagcgagagaatgaaatgaagtggggtccgcaagtgcgccttgatagttggataatgaaaacttcccctgtttatggacgggtagaacttgaatggcaacgaagaataaaacgaaaatcgggtaccccccctgaaaaaaccactcacctggagctaaaccaagcctacatcggcctggcagacaccctcattccccatacacgcgttcaactgggccgttggctttatcgcgatgagcgagaatggctgctcgacgaaaatctcgatggtgtcgcggtaagaaaccgggtgggcaaatggcgtattgatacactcggcggcaaagtaaattactggcaacgtgatttgctggatcgcaccagccgcaacgaaggaacgaacaatatcgccgcgctgctcatccacagaaaacaggccgatgacgaaatggcaggaggatatgtgatcacgcaaagctcccctggcaacgatatacatagacaaaacaatctgggattacgttcgcatagccaaaacaaacgtgcgctgcaacattggctagaattggggcttgcggatacctacaaacccggggggcattatcgcggatacgcactggatataggcggcacttatgcatttcgcgacgtttcactgaaaccccgattaactttcggctacgcactgggcaatcaatattatcggcaaaccggtctgcacgataatgaagccacttttggtggcaaaacgaaattcaaaatctatggcgaaacgctcaaccctgatctcagtaatcttcagatcctgaccgcaggtctgggcatgcacgtgacgcaacaagctaccttggatctggtgtatcacgactatcgccaagccaggctcaccgagctttcgcaaaatcgcatcgatttaaagcccaagtacgatcggcaaaacacgcgccgtctgggtacgggtctggacgttattctgggttgggaacccgtcgacaatgccaagctcgaagcacggctgggcatgttcgcgccgtcaaaacgatttacgtcttccgcaaagaggaataacagcccgcgcagcgataccgcttactccgcaggtattgagatggaaataaaattttaa

SEQ ID NO: 439617 - DNA, 942 bp, Serratia marcescens
atggccatcggtcgcatacggcggggtattcggcaacaacacgccggtcaggccatagaggttgctcagactttcaccggaaaatttcagctgtacatccaggccgccgaggttcagcggatcggacaaggtgcccgcgaccaccacccgggtgctgccggagcgcacatcggcctgcagcgggaagggcaaatcggcgctctgcagcgacagcatgccgccaatcttgccgctgccgctcaacggctcgccgttatatttgcctttcacctgccagccgaaaacgtaatcgggggtgacggccttgtcgccgccctgtttgccagtcacttcactgaacggcaacggcttgccgagcggatcgatgacggcgcggaaatccgctttcagcgtggcgtccttaaaggcgatctgccccttgtcgaatacgatgtcgtgaacggtgaacgaccagtcggaaggcggctgcttgggatcctggccggcggccaggtcaaacgtccagttgttgtcgccgttggccaggcgttgcaacgaagcattcggctgcttcagccagatgcgcgggatcagcagctctttacccagcagcgccagcggcgcaatgctggcgtcgacgcgctgcagcgtcaccatgctgtcgccgggcatgtttttcggattacccagccacacgtcttcggcgtgaatatgcggccagggcacccaggcgcgccaaccgccctcatccggattgcgcgaccagtcgacgcccagatcgccgcgaatggcaaacggtcgccgcagttcggccgacactttgtcgttgatggtgggcttgagtcgattccagtcgaaggtcgcgatgaagatcgccagcgcgacgatcagcagcagcacaatgccgcccagccagctgaaaacctttcctgttcttgtcatagcggctccctcagcgcataa

SEQ ID NO: 439618 - DNA, 2475 bp, Serratia marcescens
atgaaacagccaaatgagaagaaactaaaaaatagcacaatatcatggttacctattgataataaaaatcattcacacaaatctatctatacttcttggtgtaactcagacttcctttttaaggaagagaatttagcgagtgatgttaatggacttaggccaccacaaattggtggtatctatgcagcactaggttatgaacgctctgatgatatgtctgcggctactatagtgatgcctaccggaacaggcaaaacagaaactattctatctatcgttgtcgctggtcacttcaataaaactttagttgttgttccatcagatgccttaagagaacagactaaagataaatttgtacgcttaggtttactaagagagttaggattaattacagaaagaactattaacccaatcgtttctacaatcaagaatggtattgataacctagatgacttaagagaaatactttcatcaaatgtaattattacatcagcagcagcactctcaaagttcaaaaaagagttctttctcaaattaactgagagttgtactcatctcataatcgatgaggcgcaccatattactgctaaaacttgggctaacattaaatcccaattcaatgggaaaccaatatttcagtttacagctacaccattcaggaatgacggttcaagaatagaggggaggataatatttaactaccctctaaaaaaggcgcaaaatgacggttacttcaagccaattgaattccatccgataagagagtttgtagaagacaaatcagatagagcaattgctgaaaaggcaatagaattacttagagaagacttaaaggctggctttgatcatatagtaatggcgagagcaaatacgattaaaagagctaacgaaatatttgaaatatactctaaagaagttgacttaaaccctgtaattataaacagcaaaacaagaaagaaaactgaactactaaccgcaataaaaaatagagagcacaaggtaatagtatgtgtagacatgctaggtgaaggatttgatcttccacagttgaagatatcagcgattcatgaccctcataaaagcataaatatcatgctccaatttacaggaagatttactcgttcagctaaaaacgtcggcaatgctaaatttgttgccaatatagcaaaccctaacgttaatgaaagcttagaggaattatataaggaggactctgactggaacaatattgtgagtgatataagtcacagaaaaatcaaagatgaaaaagaatatcaagaattcagaggagagttctccaacccgagtaaactccttgatttgggactaacaccaagtattagtacaacaatgtacaaaatggctttcacaatttgggaccctgaacgattcagtcttttctctaatacacaggcaaaaataattgaccatgtgctaaatgatgataaaaacatactaatactctcagtaaaatcatattcccctgtcggttggtccagttccaaagagatatttgatgaatcatgggatttatatatagcttattataataaaaaattaaacctattatttatacattcatcagccaaagatggattagttaaaaggcttgtcaaactaatcgcaaaagatgcattacaacttagaggagaacatatttttagatcattgtctgggctaaagcgcttgaagcttcaaaatgtcggattaaataaaaacaaaaaaggattacgttattcaatgcatacaggaacagaaataaatgaccaaatacctgatatcgaagccaatagagctattaaatccaatatatttggcaaagggtatgagaatggtgaattcgttagtatcggctgttcatataaaggtaaagtatggtcaatggatagtgattcattagacaaatggattatttggtgtaataaagtaggttcaaaggtattagataactccattgatactaatacggtcatgaaaacagcaatgcaaactgaagagttgacagaatacccagacatagcaccacttgccattgaatggcctatagagttacttagaaaaaatgaaactaaggttactattagctctaaccgttgggaagagaaattaattgattgcgagttattattgtcagaatggaaaaacacagataagaacgcaaaaaaactaaatttcttcttgaaaacccgacatggccaaagcaggattacctctgaaataacctcattaggagaagttgtattcactgttcaagacagccttgatatcacgtttggagaacaatcattacaattgtccgaatttttaatgagcacccaccgactattttcatgtgtgacacatcaattattgacggcggtttcaggtactatccaaatgaagactacgcatataggtatgatgttaataatacagagggttgggaatgggaaggtgttgatatatctgttgagtcacagactcattcaaaactga

SEQ ID NO: 439619 - DNA, 993 bp, Serratia marcescens
atggtcaagcgtctggatttggcagccgtagcgcgccttaacgctctcgccgtcccagaacagatagccgtccagcggctccatcggcgcgtgggcgacgtacgggaaggtgtattcagcctcgatcaccttgtcggccttatcgaacacctcgtccggcttgccgtggctcttcgccaccacgccggttttctgcgccacctggcggaactcggcgtagatctcctcggtgttgcgccgttcggcctgcgcatcgtcccaggtgaccctcagccgttcccgcccctggatcgccgcccaggtgtttttggcgtaaaccgctacgccggtggcaacctgtttcaccgccaccacgcccggcaccgccagcgcccgctcggcgtcgaaggtcgccactttgccgccgaaacgcggcggtttcttgatggtgacggtcagcatgtccggctcgtggatatcctgcgagaactgcgcgctgccgttggttttcgccagcgaatcgacgcggtgcaaaccgcgcgttttgccgatcagggtgaaattggccgggtccttcagcgtcaggctggcgggatcgggcggcggcaacgtggcggccagcgcggcgaattcgccgaagcccgcttctcgcccgctggcggcatggcggatcttacccgcctgcacggtgatttcctgcgccgaggttttccagctctgcgcggcggcctgcaccagaagcgcgcgcgccatggcgcccatgcgccgcatttgctcataggcattggccaccgagctggaaccgccggtcccctggaatccgaaggccaggtttttgtagacggcggtatccaccggcgcggccacgacccgcacctgcgcccagtcggcatcaagctcttcggcgaccagcgtcgccatgccggtatagaccccctggcccacttcggtgtgtttactgatgacggtgacgacgccgtcggcgccgatctgaacgaaggcgttggcgtctaa

SEQ ID NO: 439620 - DNA, 513 bp, Serratia marcescens
atgccaacagttgaaggcaaaattttgctgcaacgttcccctgacggtaatgtttcacctctgagcgttgcctctgatgggatcgcgctttcccctgacggcaaaacgctgtactacagcccactttcgggacgacacctttactctgtgccaactgacttattacgtgatatacgcgtcactgagcaacagctttccaaaaaggtaacagattggggagagaaaggggcttcggatggattggaggcggatgctacgggcgcaatatatgccagcgattacgagcataacgcgattcgaaaaatgagcaaggatggacgttggaccactattgcccacggaccacagcttctctggcccgacactctttcaataggttatgacggttatctttattttatcgtcaatcaggtccatcgtcagccaggcttccataaaggggaagataagcgacagaagccttatgcgctgctccgcatacgtatcgatgctgctcctgccgaaacgcggtag

SEQ ID NO: 439621 - DNA, 270 bp, Serratia marcescens
atgcgtttcaccagcacttcggcgtactgcgtcgggtgcagcgtcaggaacgcggcgccgaagcaggcggagaaggtcggcgtcggcgcggtgatgccgcgttcggtgccggccagcttggcggtgaagccggacaggaagtggtattgggtctgctccggcgtcaggcgcgataccggtggcagcacgccgaaggcgtcggcggtcaggaagatgattttgcgcgcgtggccggctttggacaccggcttgacgatgttctcgatgtga

SEQ ID NO: 439622 - DNA, 627 bp, Serratia marcescens
atgagtaaggtaagctatagacgctatacggatcttccggcgctaattcagattttaacaaacagaaaactgactcttctcgatccttctttctgggacgacaaaaatgattccaactttcttgcgacctataaggaaaagaaggcgttacagtcagtgcttgcattatgtttcacaaaagaatcagagacataccatcattggagggttttttcatctggggcttccggagtatgtgttaacttcaaccctgagcaacttgagacagcgttttcagcggttgaaggggtgaaatttaaagaggtagactatcttaccttgaaggagttacgtaaaaatcctccaacgattgcacgtttaccgtttgttaaacgaataccttacaaacatgaaaaggagttcagagcattatgggaatcaaagtccgttaaacttgctgccctcgatgtcccgattgacatttcttcaattactagaataactcttagcccatggatgcatcccagcttgcgggggaatgttattaaacttctaaaattgatagatgggtgcccaagcatccctatttggagatcgacattaattgaaaatgcggaatggaaaaaatatggagcaaatgcaacgtaa

SEQ ID NO: 439623 - DNA, 3558 bp, Serratia marcescens
atgtataagtttagcagttatgaatattcaccctatgagacccgaaagatattacgtactaggtttacatctaatctgactgtaacaaatacacatccacgagaaatcaacgaagagaacctggtagatgatattctggcagtggattatctgtctaaaacggacataaaagataatgcatatttaatcacttcgaagtcagactacgaaaacactaaacagccacaacatattgatatttcgtttgacgaattgattagtcaaggctgggtcaagttagtatggggcaagttacggaatatcggaaatatcagaaaaaatatctatagcgttaaggatgataaatattcagccataaaatcactgctcctcagtcttggcaaaaaaacgtataccatcgtcgcggatgcagatggagaaaacgaaaagactcaagtatttgatcatgacaactttagctgcctttctcccgcgtgggttgccgcaagattatgggagattacgcttaaccagtctcagaacaatgctgatgcattgaaaaaatggctttcactttgtagtttattagataaccctccggttgtatccagcattgtttggcgtaaacaagatgctcagacactcatccagactatccttgcagaacttaagcaagaaaaaggatttacacgatgggataactgcaaagaagttctggaacgtgaatatacaatacttaaagaactcacgtcgcaccctgtttattaccatgttaaaacacctccctcgacgctggtcggaaaagctatctggtcagagtccagagaagtggaaggttacttttgggaatcgtttgatacttatggagaaatgcataatttaatgcatctgttattacttcagataaacaatgatatccactgcaaagtccctcattatttaattgaacctctaatagatatgtctgccgagtactgtgaaatgctgttttcaatgttgcttcagacgaaaaacatgcccgccctattggttgatattttgttctacccgccgagctcagctttagcttatttgctcatcgcaaaatggccaatacacactggaacatgggatcgcaaactcgttgagactgatttgcagcacgctcgtgaagcgtgtattgatgatgcattaagcattctgacaaggcacgtatcactcggcagtactccaccctcagagatggctgacctttacaactggttgataggtaacaacagtgaaaaatatattgataacctgaaaacagtagacttaaccataataaattttagaaaagcattaagtcagttagacaggaatatcatatttgctatgatttcgcatcttttggaacatcatgaaatagcaggtatttattctccggaattcgccacgctgctggatttatgctccacggggcagcttgaagaaaaaatagatgcgggaaaaattctcaaactttactcggattcattgctgaaagatacaatcggaagatctgttcacaggatagggagcgacgaagctaacgctcttcataaaatattaaagtcaagcgaagacacatatgaagcttttctgtatccatttgatgtcactgctcttataaaaaaaataagcgaagacgataatatatactctgaagtagataaaattgcacattcactcagaactcatattcgtattttatgcagagcgctttcgaaatctgatgctcagtctaaaacacaaatagttaactcattgataaaacatgtaaaatctggggctttattacataaagaaaaaggacgaatagatgcattttccccgcgttttgatcgttatatatcttcaccatcatatataactatggcttttgatctttcgattgcgttacacctgattaacgctgaacagcagaattatctggttaacgcaatatgtgaaactgatgaacctagtatgttagcaacattacttccaattgttcctttctccttgcggagtaagataaccgaaagaatcaatgaattaacacctgaagatgcaggtgagatttattccctgacagatatgcagtcgaggatagatgaactgcttacagccggtgctgttacagccgcagaagcttatattaaagctgaacgaaatttaaaaacactggggaaagtaagaggcagagaaatacttcgtttgcagtacgatctccgattgatgtttttaaagaaagaatgggagaaaataattaaccacccgatgcccgcagacatcaccccgcatgaaaaagatgaggcaagcgacgttttggctcactttcgcgcgctcgcattcctatcttgtgatatacccaatccgatattttctcgcaatgaattcgaaaggttgtttaataaacagccctcgattgcacgggtgacaaactggcttgcagcagaactgcaaatattaattcaaggcgacacattcgagctacttacaggagaagattacagcgcaggagtggccgcagtttctaagctggaagcaatgttatccaaagtaacggaagataataacaatgagacattaaagtgtaacacagccctgatatacctagtactcggtgagacagagaaagcacttaatattctatctggctttcaattcattatgctgcaggatactgcttcagcatataaggcagtatcttattacagacttggcagactcctagaagcaaacgcagcgcttgatacggcagaacatatttttggtatcactggcgtattggcggctgccagaaattatatagccaagggctctgtagcgctttctttgcctcaagtcattcttacggaagatattattaaagtggtttcttctgcaattttgaaattcaaagatatgaatcctgataacaaagcggagatcttaaagcagaagaagaactcctttgctgaggttttagttgatcacgtaagagcagcttctggctcgcttatagcattagttccaacaatgaagcaaataacagtagatggttgtgaggatgatttatccgctttattcaggcattttttatccggccggcttgagtttttaggctggaccgttacagaacaatcacgtggcggatacagtggtaatctcaaccccggagaacgggatttgactattagctggggaagcaccgagctgtccgtcattgaagctgttatttgtagtaaacctttgacccaagatactcaaaaagctgatttgcttagccattttcagaaattactgggatacacgcatagcagggttatgttccatataacctacgcttacattgaagataaaactggtattttggaatttctgaaaaccagcgccaaagaacattctcctgatggttttaattttatgggtctcgaagatataccccatactgattctcgcccacctgggtttattgcgtcctacaggggagattttgaaatctttcaggtagtgtttttgatactgaatatgggacagcaaaggcaaaagcgtgcagcaaaaactgctgccgcaacaaaaagaagaaaagcgccaaaaaaaattgaggccaaataa

SEQ ID NO: 439624 - DNA, 639 bp, Serratia marcescens
gtgatcgcctcctcggccgccggctttgtcgatctgtccgacaagctgaaatttgacccgcaacaggccaaccggctgttggatgaagcgggttggaaaaagggcggcgacgggctgcgggaaaaggacggcaagaagctggtgctgacggtgtatgaatcgttgccgcagccgcagaacaaggcggtgttacagctggtttctcagcagtgggggaaagtcggcgcgcggctgaacattctggcgggcgacgccggcagccgggtggcggataatctcgacccacagaaaaccccggcgacggtggtggaggtggggcgcgccgatccggacgtgattaaaagtcagttttacccaaccaaccgcgacgggctgctgcagaagggcggcaccagcagcaacagcaactttagcgatgacaagctgaatgccctgctgctcggcattgcctccgaggttgatgcgcaacaacgcctgcagatcgccggcgaggcgcaaaactacctgattgaccaggcctacgtgatcccgttttttgaggagccgcaggtgttcgctggtgcgccttatttgaagggggtgagtttcgaagcggtcggtcgcccgagcttctacggcgcctggttagagaaacattaa

SEQ ID NO: 439625 - DNA, 546 bp, Serratia marcescens
atgatcttcacccacacaccacgactcatccttcgtgcattcaatagcaaagatgccgatgcactctttgactacctctcatcaccccgagcgccctgtttttatgatgaaaaactcgcttcccttgcagaagcaatggaagaagtcaaaaaacgcgctctcgataccagtcagttcgctgtttgtcttaaagagagcgacgagcttatcggccatctgttcgccgataacagcgaagagccggatcccaatacctggagcgttggttggcactttaactcgagttatgaaggccagggttttgccacagaagcagtcacggcgttgtttgattatttatttactcaaaaagcagccagacgcctgtatgcctatgttgaagactataatacggcctcacagaggctttgcgatcgtcttcatatgtttcaggaaggttgcttcagggagtttgtgtcgtttgcatctgaagatggcggcgaagagctgtatgataatacgttcgtatacgcgttgcttaaaaaagagtggctgacacgcacttag

SEQ ID NO: 439626 - DNA, 1281 bp, Serratia marcescens
gtgagccaagagagagtattcaaagatttagtttccctttatcgaggactctcttgtcctcatttagataatggggaatttatatttgaaggttctcttggtgataatcttttacgtctcaagtcgctgtgggtagacgcagcatcaatggcagcattctgcatcaaattccgtgatgaagagcgtagtactgaatttgaagaagactttcctaatgtaaatcatcttgatgatataaggctggcagtcaaagttcctattgggcacttccaatttaaatctggattgtcagaatatcttagcggtgcgaatttctttaacctggccacaatggagcctaacgtttaccttgctaaggaggattatctttttggtgagcagcctaattgtataaatatatcaaaagttattgttatatctgagatgattgactgcttgaaaaaattatctaactttcatgataaaacagaggttagtgggttactgaagcttgtttttgtggacacaaccgctgagaatgggaaggtaaccccgccaattgttattgagccaaagataaaattgacacatttggaatccccaaagctggacttgactgttttaaataaagtcttgtctgaagatgagggtaatatccatgttgatgagaaaaaagcattatttagagtgtcgatatttgaaattcttaaaggaattgataataatcaggataagtttgattttttggtggaaaactggaatgaattactggagctttataggggtaattttgaagcttatataacaaagttctcttttttgaaacaaaaaagagaggcttcagaggcttatatatctttatcggctaaattatctggtgctttatcgtccatatcagggaagctgtttgggttacctgtatcgttaggtgtctcgctcgctgtatataaagcagaaggcaaacttgaaggggggctacttgttggtggtgttctggttacgtcatggttgatatttgtaacggttttagaacaaagaaatgttatttctgctataaaaggttctgttgatggtatctttagccacacaaaaagtgataagaaaagcgagttgtctattcttatacgcacgcagaaagaacaattaactaagcagtcacgtagactaaatagggctatgtggttatttatacttttttcttgggtgcctacgttatcagctgcctatatttatattgataaattttacccaaacgcttttcataaactttatactgttgtgtctgctttcttcacgctttaa

SEQ ID NO: 439627 - DNA, 1959 bp, Serratia marcescens
atggaacagaagttttttcgaatcccatttgccagcaatggcgataaacagcagataccggacgacaaaaacccagaggggtttgtaagtttcattgagggctggggggaagactatcaaaaagatctcctgacggatgcacatgctaaacctgtagaacgcaaggcaatgaatagcattttaaatgcgattacactggcgctgcggcaatatcagactgatggctttcctgagtgggttactgcagcaaataacggtggcactgcatatccctattcggcaggggtcgtcgtgcggcatcgtcagggcggggcatttatatcttatgtgtcattggcggataataacacgactgagccgggcgtaaaagatgctaaatggcaggcatttatttatcgccgcgccactcaagatgaggctgatgcgggtaaagatggttcgttgattattacgcccccaacgcttcagcagtcgatcaaaaatgctcttggtgacataaccactgagctggcgccattccttctgccggttggcatcattgccgcgtggggtagccctgtgccgcctgatggatggattgaggcaaatggtcaggcgtttgatgtagcaaaaaacccgaagctgcacgcagtatacccgtcgggcaatgtgccggacttgagagggcggtttgtccgcggctgggctcatgggagtggcgaagatcctgaaccaggtcgagggatccttagccttcagcttccagcagacatgaaccactatcatttaatagggcgagcaaatgcagatagcggggaacgtggagacgattttacgatgccagttcgcggccagaattggcacgggcaatcttatggcgctcgagagttttggtgcccagatcagttcccgcatttcagtcagatcccgaatggtcaggtaggccaatcattggcaagtggtaaccccgtaaaatatgacgattcagcagatatgaatgcaccacatcccgttaacgttgcgttaatgtatatcgttaaaacggatcaggcagataatatcaaaccagaccctacgccgacgaatattatcgtcacgccgtcatcactgaacattggggctggaaagacgcagcaatttactgctcaggtgctgcccgctgatttggctcccaacttcccggttacgtggatcagcacgaatacggccgtaggtgccattaacggcaacggcctgtttacggcggtagggccaggtactacggatatcattgccagcgtcagttcaggcctgagcgtacgcgtgactgttagggtggatattctgctcacgtcaattgcgctggctgctattcctgatcaggtagcaggaaacacctacgagctggtcgtaacgaagacaccatcgaatgctacagaaacgctaagctatgcttcaacagacagcgctgttgcgagtctgactacagatgggcgactcatggcagcgggtgagggaaccgccacggtcagcgttacgggaagtgtatcgggggtgagtgccaatcgggtcgtgaaagttacggcagctccggtggtgtcggattatctggcaatcaaaaacaacctgtccgaaattgctgacgcggggaaaaaggcgcaggaagcatcgcagaaaaatcttgggttgggaaaattggcgaccaaagatgcgatcactgcgaaggagactggtgcggttcctgtgtctgataaaactctgccagcaggtaccgatttaaatacgataactgaacctggcgaatacttccagaacgtgacgagcaacgccacactggcactaaactaccctgaggcaatggctggcgcattgaaggtgtatcaaactggcgttgatgtcggcgcttgccgccaggtgtatatgccgtacaactcgacggttgaacaccgccgttatgcattcggcgatccgctggtgttctctgcatggaaggcgtattga

SEQ ID NO: 439628 - DNA, 552 bp, Serratia marcescens
atgagctacacacaagctgaaaaattacaaaccctcatgttgtgcgatatctacgaaaaacttggcattgatggtgattataaccctcaattaatccgcgcagcattggacactgataactactgggctattggctgggcttatcaagatttagatacaggggaaagcaaccccaaagaggtgacattcgtcactgatgtcctcgatatgtactcaatcctgcaatacacttatgagcgcttaacaaaagagaaacaagaacagttggcgaaagacgttcaacactttaatccaaaacacgatatcgtgttcggggggttcgactggaacaacgaaggtaagtatgtttctgtaaccagaatgttcaaactgctagaacggtttaacactcaaaatatcgagaaaaattctcattccccaagagtggaactttatcgccgcatgctcgaagagttcctcccaatcagaaaagattttgttcataacgaaggcatatcttacgaggccctgtgcaaggtgcttaatgctcaattgcacccatcacatcgttaa

SEQ ID NO: 439629 - DNA, 525 bp, Serratia marcescens
atgtggtcgtcctgtgattggttggcacgttcaagttcggcaatgtgctttttgtcagcatcacgttcagcaagcagttcgagaacggcagcagggttagctgcggcgatgaattcagcatccttaccaacgccgccgccagccaattgccgatggaacgcatcagataccgttgctacaggatgggattggttgctgacaatcgtattgcctgtgcgattaataccccacggccccggagtagcggccattgcggccgctttcagttcactgaatttatccatgcatcacctccgtttgtgcagagtacaaagtgcggaactcgtgatcgctatccgttgcgaaagcaacgctaagttcagcatatttttcttctgtgatacgttcccagtcatgccagcaaccgtgtccactgttccagtagcgcatttcccaatagacagggttggccggtgcagacggcctggcgtaaatagctccccacggagtcgcacattcgccagatcgatcatatgggcgctctga

SEQ ID NO: 439630 - DNA, 732 bp, Serratia marcescens
atgcctgagaatattctttttgtttttgaaggtgaaaagacagagcatattattgctcgtaactttgttaggaattatatacaaagtgaaaacaaaacagttgtgaaggtttctttctgtggggaaatttaccagctttataaaaagatggtaaatgatgattttggtattgagtatgtggatgtttttcctcttctccaagagagagatgatgagttgaaaaagttcaaaagagatgatttttctcaaatatatttattttttgattatgatccacatgccactaatgctaataataatgcgatacaacaaatgcttgacgttttttgtcaagagacagataaaggtaagctttttattagttatccaatggtagagtgtattcgctattataatggtgtcgaaaatgattttatgaactctacaataaagcttgatgatgttcatcgctttaagaaaacggttgatgcttatgctaacaaaaaatataataatgtaccccagtggaatattaagatatggaatgaggttataagaattcattgtgtaaaagcaaattatttagttcatgccgatgaaggctttccttcaagggaaattatgcagaattctattttggaaaagcaagttgaattagagggtaactctaaagatgtgttagtgattagcgcttttcctttaatgcttttatctcattacggggtaaatactgagtcaaaattagtcggttaa

SEQ ID NO: 439631 - DNA, 1125 bp, Serratia marcescens
ttgcaaaaattcgaggtttcaggatttagagggttcgagaataattttgttcttgatctaacacaaaaaagaaactatgagtttaacgatgaggctatcaataatggagttgttaaaacaagtgtcatttatggaaaaaatggttcagggaaaagtaatttaacgcacgctatatttgatttgatttcgcagttaagtgaggagtcaaaattaccttctttttttgcaagaaattatttgaatgcaagaaatagtaaaggttttgcttcatttaaatatcattttaagtttggtaaggattatgttacgtatttttacgataagaaaacagcaaggagcattttgagagaagggttggatattaatggagaaaactatgtctatctggatagagataaaaataagatagcagatataaaaataccaggaacggaaagtttaaataaggatttttctggagtggacgataatgtttcagttatatcttacattaataataactctatctttccagaaggcaatgttacaaatcttttcaagaagttcatttcctatgtaaaaggaatgttgttctttaggtctcttttagaggggaactcatttataggtgttgaagcctcaggtaaaagtatatgccaagatatagtggaacatgataacatacaagagtttgagaactttttaaattcgaatggtattaaatgtaaattaaaagaaatagaaactacaagcggaaagagcattggttttgattttggagattctgttattccatttacagaggttgcctcaactggaactaaatctcttgggctttttttcttttggatgcagcgtatggatcaagtttcgctgatctgtatagatgaattcgatgctttttatcaccatgagttatctcaaagtttagttactatccttagggatttaaatgcgcaggttattttaacaacacataatacaagtgtcatgagcaatgatattctacggcctgattgttattttattatggacgaacaagctgtatcttcactaaataatttaacagataaggaaattcgtgttgcacataatctagagaaaatatataaggctggtggattcaacaagaagagtggtggttaa

SEQ ID NO: 439632 - DNA, 282 bp, Serratia marcescens
ttgaaaaaaaacaatattatagattacataaatcgatataacgacgccatccgcacgccttcgctgctgggagcgccgttcatcgtcgccgacagcgaactggtgatgagcatgccgcgctacgccgcgcaaaaattgcggcaggcggcggcgctggctatccaccccctgccgtttccggtgccgccgtatcagatcaaaatctacctgcaccgcaagaacggcagaccagaggcctgccgctggttgcggcaacagctgcaggcgctggcggcgttataa

SEQ ID NO: 439633 - DNA, 1140 bp, Serratia marcescens
atgaaagttgtcgatttgttcgccgggtgcggcggtttaagtctaggtttcgagtcagcaggactagatattgtcttggctgtcgagctttgggaacctgcacgtaaggtttaccagaaaaatttttctcatccggtatatgatctggatctgagtcaagtagttgacgccgtaagaattatagaaaaggaagaaccagatattattataggtgggcctccttgccaagagttttccatggcaggttcaaggatcgaaggtgacaaggcaaaactgacttataattttgctgaaataatatctcaagttaaacctaaatggtttgttttagaaaacgtgccaggagcaatgaaaagcattacatggaaaaatagccgggctattttagaggaaagtggctatggtattaccgaaacgatattaaacgcatcatactttggtgtccctcagaataggagaagattttttgccattggttgcctaggtgaggaaaataatttcattaaaaaagaaatagagaataaaatcaatcctactccgttaactattagagaatacgccggtaaagagtttgatattgagtattattataggcaccctaggaattgggggcgtaaaggtattttttctatcgatgagcctgcccctactgtcagatcaaccatcagacaggttcctcctggttataatgcccaccctgatgatgcaggcccattggagaatgcaagagcacttgatgtgagagaaagggcaaccattcaaactttcccaaaggattttgatttcttcggcacattaactgatcaaaacataatggttgccaatgctgttcctgtgctattagctaagcatattgctgattctgtcagaaaatacgaaggagtattagttgaacaggatcttgagatatttagggggtggcttaaggaatgtcgtggatatacatcaagaactgctagtaatgtattatcaagactcaagagagtgtcacacatagtaaatattcgcagaaaaataaaagatgcgtcattattaattaactcattgaataaaagtattgagtttaacgaattaactattagtgtaaaatctcagatcagaaaggcaataaagttgaaaggagagtttgactccatttaa

SEQ ID NO: 439634 - DNA, 1173 bp, Serratia marcescens
atgatcatacataatgatacacagagaaaatcacatgaaaaacaatggaatatcgttgaagcattaagagaagcatttgaaaaatgcgtaagtgaagaaaaccccgttctatcaacgctctttgataattctttcgatgagattaaaacatctgttatttgcaataaagataaatgtccggaaagagaggaagctttcgagttatataaacaattaatttccgatggtgaaataaatgttcaacgggttaattctgatgtagagttagcatcattgcttgaccctgcaacagctgaattacgcctacgcactgaagccaatatatttattggtggaagtttgcttgatagagggataacgataccaaatttaatttctttctactacggtcggaatccaaaaaagatgcaagcagacacagttcttcaacattctagaatgtatggagctagagataggaaagatttagctgtaacccgcttttacacctctcaggcagttttcaaccgtttgaaacatgtacatgaatttgatagcgcccttcgcaaggcattcgaaaatggcgattcagaaagtggtgttgttttcatagaaaacgatgcatcgcaaggagtaattccttgtgcgccatcaaaggttagtataagcagagtcgtaacagtaaactcaggcggatattatttgcccgcgggatttgagttatctaatagcatagttaaaaataccttgactgaaaaggtaaatgatatacttcttccgctaattaaaaaaaataataagggtttattgtcaatacctaaaagcactgtcttttccgtattggatataataaagaaatctttggttctgaataacaatgaggatttctattgggatgcaatgtacggattagttgattactattgcaagtcaactaatgatgatactataaaaatattaatagaagaaaatagagagttaactaaagatagatcaggtgacaaatctggtttatctatcgttggaggaaagaaaataagagagcttctatcacagcaaaggagccaacctgcaatggtatttctaaaacagaaaggagggattgacaaaggttggaatatcgattctgagttttggtggccaatactgatagcaccaacaacatctagtccttgtatatattctatgccatag

SEQ ID NO: 439635 - DNA, 900 bp, Serratia marcescens
  misc_feature (856)..(865): n is a, c, g, or t
atggaattctacagcagaatatgtgacaagcaacaatatgataaagaacttgaaaaatgcatctttcaagtagtgtccaagcttgaagagactacaacttccactgatagtcctggagttttgcttggcaaaattcaatcagggaaaacaagaggttttcttgggataattgctaaagcgttcgaccacaattatgatattgccctagtgctgacaaaaggtacaaaaacactagcgaaacaaacagtcagtagaattaaaaatgatttcaaagattttattgaaaatgatgagctttctatttttgatataatggaaatgccagatagactaacaagatctgaaataaataaaaaaataattatcgtcgcaaaaaaagagataaaaaatcttgagagattaaaagcattctttgaaaaagaaaatcacacaggaattcttgataagaaaataatattaatcgatgatgaagcagatatggggagcataagattcgtcagaaagaaaactcaaggctctaaaaatggaactatagagcaaggaaaaatagcacaaaaaatggatgaattgagaattttggtaaaaaacatgcgttttctgcaagttacagcaacaccatactctctctatttacaacctgaaaattactcaaatccattcttatttttgccaaaaaaaccagcattcacagaacttcttcccatacacaatagatacgtaggtggcgatgattactttggagagtataattcatacgatccgagatgctatttgtatgttcgagtaacagaagatgaacaagaagcgctacgttcaaagaatgaaatagatttctcccctgagactattctttccnnnnnnnnnntcagggataagcacattgaagaaagcaattgttag

SEQ ID NO: 439636 - DNA, 222 bp, Serratia marcescens
atgaaagtacttagtcaatatgaagaacagtacgttagcggtggcgatctgaacgcggcctgggatgggctgttggacggcgccatgaccggcggcgttgcaggcggtgtggggctgggtctttatggcctgacgcatacgcagcaggaagtggccgactacgcgaaacatttccgcgagactatcggctccacttcgacctcggtcggcggcagcctgtaa

SEQ ID NO: 439637 - DNA, 543 bp, Serratia marcescens
atgatagcaacagtaaaaaaagtgccgctgctggccttactcagtgcggcaatgttatctccgccgctatacgcagcggacggcaatattaacgtcaccggccgggtgttggagaatgcctgtgtggtagccgccgagtcgaagaatatcatggtggatttcggtgagcaggcgggtaattcctcgttggccggccgtggttatggtgggcaaaccataaggcttctggattgcccttcgggggctaagcaggtaaagattagatttgaaggtaccgggtacggggatgttttttcccccgataatcagggacagccgggagcagcacagaacgtaggcttcgggatatacaatgtgggtgattactctgatattaaagttaacggtgaatcgaagccttatgagctgaaaaacagcggttccggcagtgcgaatgatcttcattttggtgtgtcgatacgttggcttaatggcggcgagagccagcccatcccacttggtgaggcgacgggcgctattcagttcagcattctttataactaa

SEQ ID NO: 439638 - DNA, 156 bp, Serratia marcescens
atgatgccgaacaaacggggcctgttaaaattggtggttatttgtgccacggtaatatcactggcatggataacccgcagctcgctgtgtgagctgcgtatccgatcgggcactacggaggttgcggccattttggcttacgaatccgaacggtaa

SEQ ID NO: 439639 - DNA, 654 bp, Serratia marcescens
atgccacaacaactactgatcccggcaaaggttactgaagttttcgctcatctgaacgaaactgagaataatcacgccctgtactcagagatggttaatggtaacgatgtgaccctagaggttaaaggcatctctctggcgcctggttaccgtgttacgcgagttgataatcgcaatacgaaaacgatacctcaagaacatttcgagttggctcttatcaacgatttaacaggagaggtcgtatattacaatcgcgtaatcattcaaccagatagctacttgaactgcagaccagtaacgcaaattctggtgtggagaacccagaagccgaagcatcgtgcagtgctgcatgacttcgctggtatcattttcatggattacctattggaacgctacgacgttatcgtatctgatcgcaaccaaacgcatgagggtatgtcgttctggcaagcaagaatgtacgacgccctagatcgtggcctatatctttatgcgtacgatatgatgacttgcgagcttcgccatttgacgaatgagatcgaattggagaagggtgaaacatggctatggggtgatctggagcattaccaaaatcgtcttgctataatatcaaaattcagccttccagttacaaaagacgagaagcccgcgtaa

SEQ ID NO: 439640 - DNA, 1023 bp, Serratia marcescens
atggataagagagtgatatttgcggttgctggctcgggcaagaccacgctgctgatacggcagttgaatgagggccggcggacgctgatcctgaccttcaccgtgaataatgaaacacatctgcgggcgcagattatcagacgctttggctttatcccggacgggaccagggtgatgacctggtttgagtttctgcacggtttctgttttcgtccattcctgcaggagcagctggcatcgcgtggcctgagcttcgaccagccccctcccagaatagcgcgcacgaatgcacggcattatcaggatcccgccggacgactgtatcaccggaggctcgcacacctgctgacagcccgggggttgctgccggatatccgtacccggcttgcccgttactacgatgaactgctcgtcgatgaagtccaggactttgcggggcatgactttaattttctgctggagctctgccgcgcggaaatctctgtgctgtgttgcggcgatttttatcagcatacttttgacacaagccacgatggtaacgtcaatgcaacgctgcatgacgacataacccggtacgaagcccgcttcagaacagcgggtatcatggtggattgtgagacgctcagccggacatggcgctgttcagctacagtgtgtgaattcattaccggacaactgaacatccacatttcggctcatggaacacataccacccggattgaaacagtcacggatgcagagcgtattgcggacctgcacggggacgacacggtgataaaactcttctatcgtgaacatcaccgttacggctgccactcactgaactggggcgtcagtaaaggactcgaccacttccaggacgtctgcatcgtgatgggagccagtcactggaagctcctcaaccggcaggaactggcggcacttccgccgtcctcccgtaacaggttatacgtggcctgctcaagggcacgcggcagcatctattttgttccggaaagccatctgaggaggttcagaaactga

SEQ ID NO: 439641 - DNA, 942 bp, Serratia marcescens
atggcaaagatccaggccagaaatgttgacgatgtgctgtttgcacgcattgagcagtcagccatgaaaaatgaacgttctctcgaaggggagatccgcctcgcgctggccaggcagtatcctgccgtgactacgcccgtggaaaccttgaccaaccggcaacggtggcaaaaggaatgcggtgtgcgtctgctagcactatttgatcgcctgtcctctgacggatttttcccgggatcggggcatgatgggcagacactcatcgcagactgggtgcggatagcacaccagttaaacgtgtctccgggactgatcatggacagtatcgatggcgccggcgagttaacccgggatctggcagaactgatagaaagacggttcagcaccagtgcggcgtggctgacaaccggtgatggactgatgtttccactggtaaaactcggtacccacaccggtgtaagctggcaggaatttttcctgccggacgatgaccggtatatctttgaactgatccgcattacgggggggcgtcatgacggcaccctgctgatcctgcgtcagaatgaaaagctgggtacgatcactactggcctggtaacggagactttttatcttggggccggtatgggcagcggcggctacggcaatctcaaacggtttttgctgttcctgaacatacactgccaagatctagtgatgaatgcgtatgtgtttgagccgccagaggccgactttgatttctggtccgtcatggggcagcaccatccggtctggtttcgtgacgccaggcgtcgctcaccgtcccgctggcttcagcaggtattgaatggtgaagatccgggcgagtggtttgccggcggatggacatccgttttgaaagaggtggcgcaggctagaaccagggaaaacccttcagcacatgacgtcagccatgatgaataa

SEQ ID NO: 439642 - DNA, 438 bp, Serratia marcescens
atgcagcatcgccgcggcgccattctggagctgctgcaaaaacactttcgccggcgtgacctgaccgatttgctggaacagctggtcacgtcgctgcaggccagttacaccactcaggagcagctgacatcactgatgcattacatgctgcaggttggtgaaacccgcaaccagggcgaattactatcaaccctggcatcacgggtgccggaatacgaggacacgcggatgacaattgcagagaaactacgccttgagggcgaaaagcgcgggctggaaaagggccgcttagaaggttggcaagaagggcgtcaagaaggcgagtgcgatgcagcgctgcaaatcgcccgcgccatgctggcctgcgggctcgaacgcgagtcggtaatgaaaatgaccgggctgacggccgacgacctggcgcacattcgccactga

SEQ ID NO: 439643 - DNA, 582 bp, Serratia marcescens
atgaacgtgaatttaaaagaaatttcgggtaactgggagaaaggtgtcgttctcgacaaacacagtaagtccagcgttgtgacagggcagaacgagtacgggcataacgtttatgacaccatccgaacggacgtaggtgaggctttatttcagcttaaataccgttcggactggaaccaggttcagccgcttgcccagtgcctttatgataacgcctattccctctttgataaggtcgggttcattgttcctatggccgcttctaacgtacgggcgcgtcaacccgtaacagaagtggcccaggtgctggcgcggttagccggtgttccctgttttactactatgctgctcaaggctgctggcggcgtatcgctcaagaatcttaataccaaagaagataaagttactgccattgccgacagtttttcctgtgaagaggttatcgagaatgaggggcggtggaatgttttagtgattgatgacctctaccacacaggcgcatcaatggaggctgcttgtgcggcgctacgtggctataataaaattaataacatctatgtcgcggcgctaacctggagataa

SEQ ID NO: 439644 - DNA, 558 bp, Serratia marcescens
atgacaacgacagttttcgttgctggctcaataaccatcaagaaactcgatccgcttatcgtcgagcggttaaagaagattgttggtaagaactttgatgttgttgtcggtgacgcgtcaggcgttgattcttccgtacaactggaacttaaacaattgggttacagtgccgcaacggtgtttaccagtgatcccaaaccccgacataatttcggtgcgtggcccgtgcaggtcgttaagtcagactatcgccccggtagccgtgagttctacacggccaaagatattaagatggcagaagcagcagactgtggccttatggtctgggatacaaaaagtccgggcacgttaagcaatgtcattgagctgctttcgaaaaagaaaaactcagctgttttcatcaataagacaagagagtttgttcttatcaaagaacccaaagatattgataagctgatcagcttcatgtcgccatcatcccttgaaaaagttgaagagaagataaaactgtccgaaaggctggcgcagctgaataatgagcagatggctctaatctga

SEQ ID NO: 439645 - DNA, 189 bp, Serratia marcescens
atgaagagactacattcagcggttttttctgtgctgctattgattatggcatgcctgttttttggtctgtattggtacggcgatgatagtctgcgcccttccgtgctaatgatagtgttcgccgtcatcagtctcactggtggcgctctaaccatgatcagctatgcgttgtctgcaaggaagaactag

SEQ ID NO: 439646 - DNA, 348 bp, Serratia marcescens
ttgtccaacacgttgactctcttgctcacggcgctgtttgccggcggcaacgaattcaaccaacgtcgcctgaaaccgatagccatgatgattaacaccatccgactcatagacagcattggtgatgttgaaattgatggaaacggtatcgccgaccaggcacttatcggcaatatgcgaggctacggcatcaaaagcggtgaattcgattttggtttggttaccactgcgctttctcagttcagctacggtgaaacggcagtaccgtgtggcatctttgactacaacgacaggctgagtgatcagtcgaccaacgagtgcattgtgttgcatgacattctcctttga

SEQ ID NO: 439647 - DNA, 309 bp, Serratia marcescens
atgtcgatttatatggaattacgctgcgaactccgaggggagttaccaatttacgagtcaaaatgttggtcagaagttgaccgcagcctgtgggtaatggcattaaacacccatgagtccacagaacagaccacaacaaaacttttaagtatggccactcatgccggttggcaaagtattaatggtgattggatatgccctggctgccaaaaaatctggcatttacagagcagatgctggcagtcgccgaaaggcatgaccaataacagtcttagtttcgcatgcgaaacttttgaagaggatttctga

SEQ ID NO: 439648 - DNA, 843 bp, Serratia marcescens
atgacagcaaaagtgatcacgatttgttcacagaaaggcggcatcggtaagacctttgccacaacggaaatagcggcagagctgcagcgtcgcagctatcggacatgtgcagttgatggggattggatgagcgcgctgacgtcgcgccaattccctgatggcctgccgctggaaatcgatgccaatccttccgggcgcgttcttgcgccgggtaccgcacacgtcaatcgcatctacggtgaagaaccctttgagccgctgcgactgcatgatgggcgtgggtttatgggggcgacggaacagctgaacgatatcaacaaccgcaactccgattgtatctacgatttccgtgcccgcttcgcggaactgcgcgaccaatttgactatatcctgattgactcgtctccagtctggtcaaacttattgatggccaatcacctggtcgctgactatctgttgatccctacgctgctggaaaaaacatcccgcctcggcgccgaaaaacacctgcgcacgttgaagaaaatcaaggagcggtataacccggatctcaaactgctggggatagtggttactcaggcgacggtggccaactataagaaagaggtgctgggtggtcgttatgcgagtgtcgataccgagaatctcaagatgttgctggagatcctggaagagaatggtttcgggccggagcatttgctggagatcattccctatgttcaaaccaaagtccgtgaagccattgagctgaactacaccatgaaagaatacgcgccggacagcccattggtggctcgttacgacgcgctggttgacactatcattgcacggacagggggctga

SEQ ID NO: 439649 - DNA, 1140 bp, Serratia marcescens
atggccaaaaatttcaaagcccaaatgcgtgaaaagcgcgaaaaggccgcgtcaccgcaaacgcaggttgaaactcccgcagtcgaacgcgaactcgcgttaccgcgtaatgacctgaaccagaacgacctgaaggtcaatcgagttgagcacgaggaccctgcaggtcagataattcgtgttccaatcgatgatgtctacgctcttgagcaagttcgccccgaagaagactttgaagatgaagtcatcgacgggatgaaacaaacctacggcgattttggcattttaatgccgcctcgttgtttccctcgtgataagcgtgggtatcgaatctggatgggtgagacccgttggcgttctgcaaaggcaaaaggggatctgttcatcgacatctatgtcggtgcaccgcctgaaaatgagaagaagcgcatctatgggcagctgatcgaaaaccttcaccagtctgggctaaaaccgttggccacagcaatacagctgcaggcacttcgcgatgtgcatggtgaaacgcaagagtcgatgtcccgtattttgggtaaacccaaaacattcatcagtaaacacatgcggttgattgatgcacctgcgccggtcatcgctctgctgaaagaaaaggtgaccaaggatgtcgacctggtctatacgctgtgccaaatcaacgatatcagtccggagagcgttgataaactggccaaactggttcgggatggaaagctgacgcgccagggcgcgattaaagagctgaacgtcctgaagggcaagccgccaaagaacccgccgcctccgacgccaccaaccaactccgggacagaaactcaggaagagaagaaccgtaacaaagatgtattgacgaaacagccgggaacttcgacaaatcaaaccggcaaccccgccggcgaacagcagaatgccggcaacgaacagccccctaagacgcaaccgctacagggcgagtctaacgtcaaaatcactcgtgttatggtgaagtttgaaggtggtgaaggctatttgctgactgaccggatacccgaggaatatggccaggtttggatagcgctgccgttaggtgaactgtgcatcgatgccgcagaaatatctatcctggggatcaaagaggtatag

SEQ ID NO: 439650 - DNA, 438 bp, Serratia marcescens
atgagtaaagcgctgtttgcagacctggcggagcagtttttatccgtcgctgtcaaaacctgggtgatacgttcagaattaccggccgctgctgcggccgatgttttgcttaccactgcaatccagcagggcttcctggaagaccgtggacgccctttattgggtaatacactcaatgagtgggggaagaacaagaaatacccacgctgggccatacagagcgctatggctctccttttggctgatgggtggaaacccgtcacccatcctgagtgggctgcctatgcggctatacacgttcagtctaaaaaggggagatcgctgacccaactcctcgatgttttgccggaagggctggacattgatgtggcggccggctggatctgcgcggcgacggaagacgctgccagatatcatgagaggaaaaagctgcgatga

SEQ ID NO: 439651 - DNA, 321 bp, Serratia marcescens
atgacgttttctgatattgaggccgcactgtccagtaccgggcggcgtgcttacgccggcgtaattttagctttcctgcttgatgctcacgatcgtggtgctggtctggtcgagaaacacactgtggtggagaatgtcgggatcacagacactaatgtttcggccgtggcgcgccgcctggaggaacaaggaataatcgagatcctctactgggatacaaaatccgacaatcccacatggtccagcttacggaacggtgcctggtcagcccccggttatcgtctgctgccagctgtactgcagttgtatcgtcgttgctga

SEQ ID NO: 439652 - DNA, 315 bp, Serratia marcescens
ttggccatccagctgaatgtccccatcagcgcgctgtccggcagtgagcgtcaactggtcaacaatccccaatccggcgacgaattaaagcaccagccgtttgatatcacggagtctgaatacgtctttccgacggttatcgccgcgaaactggccattgccgatgacctggcaacgccgctggccaaactctcggacgacaaccgggcatttatcgatgacgttctggcgcaaacgctgatccgacgcgaggtccttgcccggatcagagaacacttccgcaaccgattatcaggagcagaccatgcgggttga

SEQ ID NO: 439653 - DNA, 447 bp, Serratia marcescens
atgaacacacagaacgtcaacatcaacgtcaacaccgccacgaaggaacactctgaaagatatgaaacggcgggattgtgcgaaccagaagcctcggcaccgtgggtaaagcccggcgtgcaatatcccgccgccgttcgagcgttggaaatggagttttgctatttagacgacctgaatgatctgtatgcgcaaagcagcacgtcacccgacgagctggagcaggcgctctatgtgattttcggccggatgactgagcttgtccaaagctgcggggctgattataagcagccggacaaaccgcgagttgcctacgaaatgatccaatactgggtcagagggcaacgggttgcacagcgtgacttcggggaaatcggtcagcgcgcttgggagcatgcacgttacagactggcgcaagagatggcggtggagcactcgtataactga

SEQ ID NO: 439654 - DNA, 414 bp, Serratia marcescens
gtgaataaatcagagcgtcacatcattactgccaagctgggcgcagggtctccggaacagtgtattgccagcgcgcgtgcggaatacaagcgtgacagcgcgcggcttactatttttcttcatctgacggtgctgttttttgtggcggccgtcgcactctggatggtcagtcactggtggtttggacatgcatttgtcaaagagtacgctgcggactcgcgtgagtttcatatgatgaacatgtggaacgtactgatgtacttcatgcctgccatgtttgccgcgctgtcagccgggtgcctcgcggtcgcgctggtctttgagagtctggggctgtttagcctttatatcaccctgctgtggcaaaagtgctgcatgtaccgccagtctcgccagcgccgggaggatgcatga

SEQ ID NO: 439655 - DNA, 1224 bp, Serratia marcescens
atgtatattccgcgccccgcaaaactgctgttccagcatgacgacggctggagccgctatctcgacaaacacggtgacaccctcagcgactggaccaaactcgccgtcgagcgcatgctcgcctgcggcacctgtgccatgggggttcgccgctactgctgcgcctcaccggattgcccccatgcccgcttcttctgccagagctgtaagtccaaggcttgcagcagctgtggcctcaaggccaccgagcagtggattgccgagcagcagcacatcctcccagactgcgactggcaacacatcaccttcaccatgccgcatctgctgtggccgttcttcaacaacaactggccgctgcttaatgagctgtttcgctgcgccacccgcgccatgctccgctgggcacgccaacaggggatcgaagtcggtatcttctgcgcgctccatacttacggccggcagctcaatcagcacccgcatatccacgtctccgtcacccgcggcggcctcgacataaaacacagcacctggcagctgctgttctttaaaaagaaagaggtagagcaaatctggcgcaacgccgtggtttacctgctgcgcgacaactatgcgcaaatcaaccccggcgacctgccgggcctcggtcatatccgtaacgaagaccggtggcaccgttatctgcatgcccagtatcgccgcgcctggaaagtgcattttgccaaaaagacccgcggtgcctggcgcagcgtgaaatacctgggccgttatctgaagcgcccgccggtggccgcttctcagctgcgccactatcgcggcggtgccgtggtccatcagtattacgatcaccgcacgcagcaacacaaacgccagaaaatcagccaggaagagatgttgcagcgttacgtcagccatattccggcgcggcattttaagatggtgcgttactacggctttctggccaaccgcaagcggggctcgctgctgccgaaggtctacaacgcgctggcgatgacggtacgggaaaaaccaaaacggcccgggtttgcggtgttgatgaaaggcttcctgggcaccgatccgtaccagtgtatcctgtgcaaaggtaggttgcgttttgccggcgccgtggcgggcgagcacgccaccaaactgctctctggccggctgcagcggatggcgaaaaaacgatggcttcaggcaccggctctggataagtgcgcctaa

SEQ ID NO: 439656 - DNA, 582 bp, Serratia marcescens
atggtattgaagattgcaggtcattccctccactgtataatcttcggtctcttggttcagaggtctggtcaaatgtctgtaggtgatgatgggctgcgcgatgctatcgcgttctacacggagtgggtatacaacgtttcagtgattgggccgggcgtggcggcggaagaatggcaggcaccattattcacatatatcatgacaaagaagcagtttaatgagcttaacgtgatatgtagacgaaacggatggccacctcaaactaatcgaggaatcaccttctacccccatgtaattaaacacattcttaattccaggacaggcaaagactgtcttacgtggtcagaggtagttgaaatcatctgcgcggcgcttaattcacgaagctccgttgtactaaaacgcgattataaccagcaagttatcgtgctgaattctgttgatgttttgagagttgggagaacaaaagaaaagtacagaggggcattgattgtggaggtgtccataaaagacttggccccgatcaccgcttatcacgcgaacgagtccaaagtacgcactatcatgaaagatagagggtaa

SEQ ID NO: 439657 - DNA, 435 bp, Serratia marcescens
gtgggggatagtttgctgcaggtgatcccccacgacatcgatcactacgccctggtgctgtgggtgcctaacgacgccatcccctacatcgccaccggtgacaaggtcaatgtgcgttatgacgtcttcccggcggaaaaattcggccagtttgccggtacggtgtccgtcatctccaaagccccggcctcaccgcaggaaatgctcacctatcagggggcgcccaaagcggcgctgaccgccgccgtgccctactacaaggtgatcgtcattccggagaaacaggccattgcctatgacggcaagcgtctgagcctggaaaacggcatgaaagcgcaaagcaccctgtttctggaaaaaaggaagatttatcagtggatgttgtcaccattctacgacatgaaacacagcgcgacggggccggtcaatgagtaa

SEQ ID NO: 439658 - DNA, 639 bp, Serratia marcescens
atgaggaaagttgctgtttatagttattgcagttttgcattacaagggatggttggtattgctcatgagtcaaaattaatagtacatttattattagaaaatgattccttgataccttacccatactttaacaaaaacattgagttggatgatgtttttgtacatgtgcgacctggcataactggggacctaaaattaataaaaaaaatcatgacatcgggttcatcatcgagagttattgctatggtggacaatactgtaagtgtacccattctaaaattgcttcgtgccatgggggtaaccttcattttttcgttacgcgattcattgatgaacctaggtaatttcctgcaggattcatcgagttcttactatgttagtgaggaattgcaagaatcattcaagacaattaaagcaccatcctcaagaccatctaaatgggatctattcgatggtgttcagtatttaacacctatggaaacggaaataattcttgatttaatccaaggaatatcgccctggcgggtagcaagaaatcggtttgtttcactcaaaacagtcagtacacataagcttaatgcactgagaaaaatggagctccgagggctcaatgagttttttatcacgcctcagcgttaa

SEQ ID NO: 439659 - DNA, 291 bp, Serratia marcescens
atgctttatgacgagtttcgcattgttgattccaacgggctgatctatggattaatctttaaaaaggtggggtatgatggatggttctacctatcagattgcagagagtatgagcggcgacctggcgaacacatcactaacgatgcgtttgagatccccggggccgcaggttattttttatctaataaagagcaattccctgctttggcaacgttggattgggagcggcttagtgtgttatgtaatggggaagagttctatttagagccttggtctccctctgcgaaataa

SEQ ID NO: 439660 - DNA, 543 bp, Serratia marcescens
atgaaacagcttaatatcgtcattgacgacgagaaccgttatttcgccgagggcctgcggctcagtattgaaaagtatgcaaagagaaataatagaaccatctgctttttagcccctggcgctgcggaaccgcctgatatggtgcttgcctcctcccggcggcgcgcccagcgctggcgcagaacgagccaaggtggtgctccgcaggtcgtcaccgttaaagaacggcctatttcagcagtgaaagatgctgtgcgcgtgctttaccgcacggatgatcagatcaagctgtttgagttgctaaatgaggcattgtctggttctgactctgttcttgtcaaacctcagaccctgacccagcgcgaacggcaggtggtgaactatctccgctgcgggtttgatcaatcgcaaacagccaggctgttaggcgtcagcgtaaaaaccgtgcacagccataaacgatcggttatgagcaagttgatgttaaaccgcaatcatgagtttatttattggctgttgtcccaagagggagaatattcttaa

SEQ ID NO: 439661 - DNA, 546 bp, Serratia marcescens
atgatgatagcgtttggcagagcatgccgatatgtgctgggtgcgatagcattgtcaacggcaatgctgggaaatagcgttgcagccgaaaatatgcgctttcatggcgcgctggtggcggagccatgcgttattccgccaggtaaagaagtcatccagctcgatttcggcagcgtggtggataagtatctttatcttaatcaacgtactcatggtatcccgttggttattcagttggcggaatgcgatctgagtctgggagcgacggtgacgctgacctttactggtaatgaaagcattaagctgccagggatgctgttaccggaagctggtagccaggccgcaggcattgctatcggtttggaaacgccggaagggcagcctttaccgttgaaccggcccagcgctgcataccccctgcgcgccggcaatagcgaagtgcaattgcgtgcatatgtgcaaggtgagccgcaggcgatagcgcaaaagagtattacccatggcgcttttaatgcaacagcgacctttattcttggatatgaataa

SEQ ID NO: 439662 - DNA, 828 bp, Serratia marcescens
atgcgattcctgatacggttacttcctgtttttatctttttgggttggtctgggtattcttatagttatgatgtggaaataaattggcagctttccagtgatgggaacgagatgcgttacacgatactgtcggtaaactccaggctaaccgatgtcagtaaagtgaactgcggattacttgcatcatgctatgttttcatgagaggtgacaacgttgcttattctcgaagctttcctaaaatgtcttcatttcgtggaatgcataccgttaaaagcgttgctgatgcatggggacgaacatcacctagtggcgtgatcactaattggagcaaactagttgagaagattaatgggcctccctgctttgcttttgatatgcgtgggccaaccggtggtgggtcgtttggcgatacctgcggaggatcggcaactccccccccagtcacccccaaacccccagagccgcagatctcctgctatctgagcggcaatatttatctgcagcatggttcgctggctgatagtgaagttgccgctaacaaggctaataccaccgctcgcgtgtattgcacaggcgcggcaaaagtaaaagtgcgcgcgttatccagtattggcagcgacagttatatggttaatttgcgttctgacggcagtttacaatctctgctaaccgtgaatggtgttgccggtaatggtaatggtgtgtcgttggatgttcctggcctgtcaggaaaagacgtggtgttttcttcaatgttaatcacatcgggaacgccagcgcccggcgatttttccggctcggcggtggctgtagtggatatcctctga

SEQ ID NO: 439663 - DNA, 504 bp, Serratia marcescens
atgaagatgacagatggcaaagcgttgcgcctgctggcctgcactcttttcttatcgacgctgccggggcatgcggcggacaacacggcggcgatgacgttcagcggcatccttaacgagccgccggcgtgtgtgatcaataacgggcagcagatcgacgtggactttggcgaacgcgtgggtatcagcaaagtggatgggcaaaattatctgcaaaccatcaattatcgcatcgactgtgaaccgggggggagcgggcaaacgctggggcttacactgatagccaccgccagcggttttgattcagccgccgtgccgaccagcgtgcctgatttggccatacgcctgctgttggcggggaatgcctttgtgctgaataaacgcgtggcgattgacgccgcgaatccgccggtactgcaggcggtgccggtcaagcgtaaaggaagcgaattaaaaccgcaggcgtttagcgcacaggcgacgttgctggcggattatcaataa

SEQ ID NO: 439664 - DNA, 513 bp, Serratia marcescens
atgtatgcaaggcattgcttgccctgtctgggaaaaagttatggcgtactggcattggctattgcgggactgatgattatccctgcatcgcaggcggcaacgtctccgatatatatatccggcacgatcaccagcaagcctcaatgcgttattaacggcaaccaaacgatacgcgtggatttcggtgacgatctgatcaccacaaaagtagacggcagcaactatattcgccaggtcgattatacgctggaatgccggaataacagtaaaaatgccatgaaaatgaaagtggtggggacggcagctgcgttcaacagcagtgcgattcaaagtagtaaggccaatctggctattgcgctgcgggctaacggcaatccgctgacgatcggtagctggctgaattttacctaccctgataagccgttattgcaggcggtgccggttaagggcagtggaacgctgagcgccggggcttttagcgcggcggcgacgttgatggtggattatcaatga

SEQ ID NO: 439665 - DNA, 564 bp, Serratia marcescens
atgaatagggaatattctatgggccattctcacgcaaaattaatgcttccttgcatattagccttgttgctaatggcaaatgactctcaggctgcttattcctctcagggattggggcgagtcaatatgcaaggagccattattgataccgcctgcgccatcgccacggaaagtcaagagcaggtgatcgaaatggatacggtgccggtagcggatatcgttcgcgatgggaaaggaatatccaagggtttttctattgagttaactaactgtgtattgtcacgcactgaaaaaaaactaagtgactggcaacactttcagatgacatttgatggcgataatgatggcgggttatttggtgttgatggtgaggcgaaaggtgttggcctgcagatagccgatgcttacggaaatgttgccaggccaggtagtccgctgcccgctggggaaatagagccgggaagtatgcgtcttaattatgaaatgcgcttggtggccaataaaaaaacgctgcgggcgggggcctattactctgcgattcgattcaaagttgactactactga

SEQ ID NO: 439666 - DNA, 543 bp, Serratia marcescens
atgaaactgaataaaatcatgatggcagcagtattggctttcggcgtagcgtctgtggctcacgcaaaagaccagggccacggcaccgtaacctttaaaggcgcgatcattgacgcaccttgctcaattaccccggaaaccgtagaccagaccgttaacctgggccagatttccaacgtggcgctgaaaaacggcggccagtcctcgcctaaaaacttcgtgattaagctggaaaactgtgagctgactgataccactcctggtaaaaacaataccgtttccatcaaatttaccggtgccacctcggtagaggacgacaagctgctgggcattaccggtactgctaaaggcgctggtatcgccatcaccgacggttccggcaagctgattgaactgggtaaagcgacagcggcgcaaaccctgcagaacggtaacaacaccctgaacttctctgcatatctgcagggcaacaaggcgtctactgctgttatcaccccgggcgacttccagtccgtggctgactttaccctggcttaccagtaa

SEQ ID NO: 439667 - DNA, 963 bp, Serratia marcescens
atgacactggtttcaaaactaaagaaagtgttgaagaaaaaagaagttgctgccctcgtggcttctgtatgcctaatggcatactcatccggcgctaatgcttttacttgtcgagactcccggggaaccaccattaatagtgatataggttcgggctcgcttgatgtatatgctaatctgacaccgaatgtacaagctggtcaagtattagttgttgatttatctcaatctatattttgtaaaaatgacatgccgtcagccaggaatgacttagttagtttgctagcaggctcatcatatggcggtgtgttacagaattttagtggtactcttacttattacgggagtagttatagtttcccaacgacctctcagacaaaagaagtgaataatacttcgggctcttatactccgtggaatacacaattgaatttgacacctgtttctacagcctcaggtgtacttgtaaaccaagggacacttatagcaagattagtcatgagacaggtaggatctaatatctctaatgggggagatgttcacactgctacatttacctggaatgtttacgcaaacaatacggttgtcgttccaacaggtggttgcgacgtatcatcgcgcaatgtgacggttaccttgccggattaccccggaacggctgctgtaccgctgactgtccattgcggaaaaaatcaacagctggcttattatctgactggcacaactgctgatacggcaagtaccatatttaccaatacgtcatcttcaaacccggctaccggcgttggcgtacaactgtctaaccgcaatggtatagttgcgaccaatagaaatgtgtctctcggtgtggtcggtaccagtcctgtcagcctggggctgacggcttcctatgcacgaaccacgggccaggttgtggcaggtaatgtacagtcgatcattggagtgaccttcgtttacgagtag

SEQ ID NO: 439668 - DNA, 579 bp, Serratia marcescens
atgaaaaaaagaaaatatttaacgcaagatgaaatcaaccgattattgcaggccacgcgtcatgggaaatacggcattcgcgacgaatgtttgtttcagatgtgttttatccacggctttcggatcagcgaaatctgtcggttgacgctgtcggatctgaatctgaatgatgcgatcattcacgtgcgccgtctaaaaaatggtctgacaacgacccatccactgctgccgattgaaatacggttgctggaaaactggctaacccagcgtcagggctggagcaacgccgatagtccctggatttttctctcccagaaaggcggtccgctatctcgtcagcaggcgtataacctgctgcgtcgttatggccgacaggcggcgatcccgcttagtctgtaccctcatatgttacgtcacgcctgcggttatgcccttgccaatatcggggcagatactcgtctgatacaggattatttggggcacaggaatatccagcacaccgttctgtatacggcaagtaatgccgagcgctttcagggattatggcagggaaaaataaaggaaaacaagtcaaaatga

SEQ ID NO: 439669 - DNA, 192 bp, Serratia marcescens
atgcaggaagcgctgagctggatgcgcagtaatggagaagaaaccggggttgaagatatcgcccggttatccccactgatgctcgggcatatcaatatgctggggcattatacgttcacgctctcggaggatattttaaagggagaactgagagcattaaattttaatataaacaacgaattatcttattag

SEQ ID NO: 439670 - DNA, 885 bp, Serratia marcescens
gtgcaaaaaaaattttcactcctaggtctggcattcttttcagcacatgtattagccactccagaatccgtagtaagtaaaggtgcgggcgataacatcgcgaaaatactgaccgcacagtacaacaatacgaccaaagattgtggaaatgaagcatccccagcattcctctgctcaggtattatgctcaggggaacaacgcactccactgactacaaattctggcagccaagtccgttatcaataaaaaatggtggtgtgtctttttcatatctgagaaaagatgcaaaattcaaacgcctggcttatggttataagaatggatttattattcacccctcagtacaaatacctgatggtagggttgactttcccgtactgtgcgcatttcctgtagacagttacacaaatgaacgttctgagcatggttgtggggaaaatgttcgtcgaggaggagggaaaggaaaaccttgtgatgaacaaggtgtgacgacagcggatgactggattaaaaactacagaaaagaagggggccaggacttttatcagtgtggatataacgtaactcttaataccgacaagcctgcagttaatttcttccagatgctggaaagtataaaaaagatccctcatgcaccgaatattcctcctaaacagaatgaaatcaggatttcaacatggagtgaaactgaaccatccaaactaccaatagaggcgctcttttactctgaaaactctgggttagctgatgcgcagaaggaccagcgcgattatgaacgtgcaacgggtcatttcattcctattgtcaaaatactattaccaagaactctgaatgagaatgcactatttaaatataaccccaaggatcaggttgttctggcatag

SEQ ID NO: 439671 - DNA, 705 bp, Serratia marcescens
atggctgctgttgatttatataatttttattctgagttttcagtggagagttttgatgatatccacaagcttcttcaatcggtgaagtccgccatagaggttgagtggtattatcttgtttactcagctactaaaagcaatataaaagagccagttatcattacaaactatgatgaatcatttttaacagaacagggagaaaaacagtgtatcagccagaaccccatcgtggagtactgtttgcaaaacatcatcccattggtgtggagtgaaaacaccgctgagacaacatcgactttcttccatgatcttaaaagatatggaattcgccatggtgtatctttcccattgcatgggataaataatgaatttgggatcctgacactgtcatttcattgccaaattaacgattacacaaataaaataaacaaacatatcagtaatttaatggcgttgagagatgtgattttacattaccttcacattctaaaatgtaaaaacacaaccattaaactaagcacccgagaaaaagagatatgctcttggtatttgattggtaaaacaacatgggaaatatctaaaattatcaactgctcagagtcaaacgttaacttccactttaaaaatatgcgtcggaaattcaatgtaaactcaagaagcgcagccatcatcaaagcgatacagtccggtcaactcacattatag

SEQ ID NO: 439672 - DNA, 867 bp, Serratia marcescens
atgaaacagattgccgttatttcacttcttggtatagtgctcctttcagcagatgtatttgctgcaacagactctgaagttaataccgataaaaaagatgatattgcggaaatactgaccgcacagtacaacaatacgaccaaagattgtggagatgagaaatctccggcatttctttgttctggcgtgttactgaggggaactagacccgggtttgatttctggaagatcaatccattgtcaataaaaagcaatggtgtatcattttcttacttacgtaaggactctaagttcaataatacattttccagtgttaatggttttattctttttccagggaaaatgacaccagcagaagatgaacagtattcggtattatgttcttatgcccttgatgcaaatacctgggggcggcagggcaattactgcggtgcaccgccttctccagtgaaaggacagtcgtgtcaagattttggggtatttactgctcatcagttaaataaatccattgtcagaaagacagcttggggagtctgtgcatttgatgtcagacctacggcaaaaaatccggcagatgcattttatcaaacgttacttgcgatgccgtttcatgggaatggattaaattataacgaaattatcgttaagccttgggatgaaaataatccaaagagcatgcctgttgaagcgctgttttacctgaataacgggggattaggtaacgcacagaaggatcagcgtagctataaaaatgccacaggtaaatttttgcctatcgttaaaattgaacttcctaaaggtatcaacgtgaaacaatcgacagaggcggtctttagctacgagccaaaagatcaggtggttgagtaa

SEQ ID NO: 439673 - DNA, 573 bp, Serratia marcescens
atggataacttactccccgttggtaacaccgacgatatcgaacagcttaaggccctgctggttgcacagcaggtgcttatacagcgcctgtctggtgagataaccggatatggccgggagagcgatgcgcttcgggggctggtcgccaaactacagagaatgttgttcgggcgaagcagtgagaaaaaccgcgagaaaatcgaaaagaagatcgcgcaggcagaaaaacggataaccgaacttcaggataaactcggtaccgtgcagtcgcaactgacctcaatggtcggtgatacgggacaggagaacgtggtcactccgggtcgtaaacccctaccggcaacacttccccgcgaacgtaagattatccagccacaggaaaccgagtgcccggcctgcagcggcaggttgaagccactgggcgaaagtctctccgaacagctggatatcattaacacagccttcagggttatcgaaacgatccgaccaaaactggcctgcagccggtgtgactgtatccatcacgctatctcgccgtctgacttgatgtgccgtaaatccacgtctgaataa

SEQ ID NO: 439674 - DNA, 348 bp, Serratia marcescens
atgataacaccgccagccggcatcaggacctggatcgttgctggtatcaccgacatgagaaacggcttcaacggcctggtctctcgtgttcagtatgtcctcaacgacgatccgttctgcgggcccctgttcatcttccggggacgtcgcggcgatatggtaaagctgctgtggtccgatgacgacgggctctgcctgttcaccaaacgtctggagcgtggccgcttcatctggccgatgacccgcgaaggcaaaatccacctgacgccagcacagttatccatgttgctggagggcattaactggaaacatccgcaaagaacagaacgttctggacttcggatataa

SEQ ID NO: 439675 - DNA, 609 bp, Serratia marcescens
atgaatgatcgggcatggatacacgaagcattgcatcttcgcttcgatagaaaagtggtttcaaaacaaataagtaaacgagtcaatatccccagaaccaccttacagagcctttttcgtcgatttacccactctggtctgagctggcctgtgcccgctcacatatcaccagtgcagcttgagcaacttctctaccccggaaaaagcccgcaatataaaggagttcctcctagggaaatgcaggaaaaacgccggcggccgaattttactcctgagttcaaacggcatctcgtggcattgtcgatgcaacccgatgctaatgtcgcgcgtatcgccctggaacacggcgttaatgacaacttgttgtttaactggcgccatcagcataaaaagggaaaactgttctgcgtagatagcctcagcgcggaactgctaccggtgagtatcgtatccccttccgtagcatctgagcccctgacaacgtcgttacccgatgatacgctccgttgcgaagtggcgttacctggcggcacggtaaaactgcacggcgctgtaacgccagcgttgttacgagtgttactcagtgagctgaaaggtggtgtccgatga

SEQ ID NO: 439676 - DNA, 1578 bp, Serratia marcescens
atggaaatggacacattaattaaaatattagagttattgaaatggccaatcgcttttatagtcgcatcattaatattcagaaaaccacttgtgaatctagtcaataaactagagagattaaagtataacaaaggcgattcttgcctagaagcaactataacaccatccacagaagtaactactgaaaaagcaatcgcacaatctacgaccataaaaactgttgatgaacctacgattgatagagatgatgataaaaatgacgatattcaaaccacaaattggatagactcggtaaattatgagcttaagaaaccggatatagatggagccagaaaagcatttgaacagtcccgtaaagaatgctcatctgagaatgaattttacatgagaaagtcgatcttcctttatttgatttatgataaaacacacaatgaagatatactaaacgaactagaaaaccacattaaagatgcaaaaacagaagaacaagccgccgatgcgtcgatttggtatgtaatgtgtctggaaatgacaaaacaatataaggtctctatatcattcttattaaagcaacttcaaaagttaaaaaacccagaacaaataaccgccacaatagttagcctttcggactcttacttactagattcggagcctgaaaaggctaaaaaaataataatccagcgcttaggtgaaaacttatccaataaagattactcactattatatagtaaattatccgaaatcgaggaaagtttaggcaatggtcaaaacgctgctctttgtctagataaagctgtagaatattcacctaatgacaaagaactatttttcaattctgcatataaggcaagtaaaaatgacttacctgcaatagaaataagcaactacgatatattaacattcatagatccagaaaattcgctagctctaaataatttaggtgttagcgctgatactatcaagttagaatctattgccgcacggtattttgaaaaagcatcgaatttaggcaatactttagccatgtctaacaatgggttgaaattactcaacgctggcttaattaatcaagctgagagcttaataaacaaagcattggaagataaatcccctcacaaaaatgtttattcgttattaactaagataaaagaaaagaaagagaaagacgataataaatgggcagacgtaaagaataatgcattcaatctgcaaaaaaaacttagagcgtatacacattgcttatataaaagagatgaaaataacatactaaccagtggatgggttgtcgatggtgacactcaagcaaaactagaaatgttagatattacatctttcaaaatagaatttgaaaataaaaacaaaacgatcaatattgttggcaacgtgcaaaatttatctctaaatggtgtttatatagaaaaaccgaaaggacaagaaagtaactccatgttaacacgagagcaaagtaaaagcatttctgtttttggctattataatcacgaagatgacaagctagtgttcttccctaaaaaagcagatgatgaattaaaccttgttttatcaagggagataaaataa

SEQ ID NO: 439677 - DNA, 627 bp, Serratia marcescens
atggcgaacattaagatcgcattgggaatctgtcaatcttttttgttcgactggaagaaccttatggatttcaaaaccggaggccgtgcggtcatcgaccgtctaatcgaggcgtatggcttcacaacacgacaggcgttatgtgatcacttaggtgtatcaaagagcactcttgcaactcgctatatgcgagacattttccctgcggaatgggttattcagtgcgccttagaaacaggagtttccttaggatggctagcatctaacaagggaccaatgtacgaatccccgacatcagatatcatttcagtgcctagattcaaacttatcgatgggaatatatatgagtctaattattatatttttgataaagcatttattcctgagcgttccatagaacccattgcaattatcgatagtgaagttatttatattgcagaaaaacattttgatgaaatcaatgatggaaaatggttaataagcatagaaggaaagattagcatccgtgatctaattcgaatccccggaaaaaaattacgtgtccatgacggtaagtttcatttcgattgtgatgttaatgatgttgaaccattggcggaaataaaatttatttacatgccattatga

SEQ ID NO: 439678 - DNA, 759 bp, Serratia marcescens
atggagttttggggctatatagacggttttttgggtttttttaaagatagcaatctgaagaattatagtaacattatccaattctgtgtggctctaggtacaatattatctgtagtgactgctttatgtctgtctctccggagtaataaagtggcattttttaatgataatttttccctcttgcttgaacagcataataacatggctggtcaattgttggctaataaggaaaattacaagcagaaggttgatgatgtattgactgatggttccgataaattaggactttctgatgcaaataaaaaaatgcatcaaaacgatcatttctttggtagttattttagagttctatatcacttgcttaagcacatagatagaaactatcattcttgggatctaagtggtaagaaacggaagtattatacgagcttggttcgctctttcttgaactcggaaataacgcttttactggcaataaacgtatctcatgcagataagaatagtcagtattggggctatagagtattggtggagaaatactctttattggagcacttaatactggatggaaatgtgtttattgaagcgttatctgatattgcaaatactgaacatggattcgcaggtttgcttgaagaggacggtggggagtataagtcaggaatgcagattcttgatgaaatttgcctggcgtttaatgaaaagtgcttcggtaataatgagtggcttagcatatataaggaagttaatgctaaataa

SEQ ID NO: 439679 - DNA, 642 bp, Serratia marcescens
atgaatcatgatttttggcatgccatcttagccattctgaaaggcctctggaaagataaccctacattttacagcacaatcatagccgccttagtagcggctgcaatagcaataattagcatcagaaagcaaaggcaaacatctcgagaaaagaattcattagatttcgaatcatcatacaaacgcagtgataaggtcgaagatgcttggcagactctactcgatatattaaaagtgaggaaaacaatccccttggaaatgtggggtcgtgacgaggttagacaaaccaaggaagctcgtgcgctcatgaccgtttttaacgagtgggaaagatgcgcaaatgcgatcagaaacggtttatatgatgatttgttcctctataaagttttcggctcgacagtcatttttttggctaaggagttcgaaccatacttggcggctcgtcggagtataaacataaaattctatggaaatttctgttggttagcagaaacatggatgattagaagaggatgggagcaaggcgaaggtaatcttaaattaccatttaatgttccatttacacctagcttagcgatcccccccaagaaagtggtacggagcgaaaaaaaagttgtgaatatcaagcgtcctagcccctga

SEQ ID NO: 439680 - DNA, 375 bp, Serratia marcescens
atgtctggcaaaataacatctgcgcttgtgatcctgctggcgctggcggccgttgtcggcgctggcgcctggctggccgcgcggcactaccagccaacgattgaccgcctcaacgaggcgctgacgcaatgccgcgataccggcaggcaacaggcatctacgatcgccagccagaacgctggcattgaggcgctgcagcgtaaacgggatgagctggaagccaaggcaaaggcggcgcaggcaaaagcccgcagggaggcgcagggagactatgagaaggcaaacgatgttatggcagagcgaaccactggcaaagtgtgcgaggcggcgtctgctgcgtttgacgcagagctgcgccgggagcgtgctaaatga

SEQ ID NO: 439681 - DNA, 582 bp, Serratia marcescens
atgagtattgcaggggttgatttagagcctatcaaaatcctcgaacgtatctgcgaggtctacggtttttcgcagaaaattcaattagctaatcactttgatatttcagcgagttctcttcagaaccgctataacagaggcacaatctcttatgactatgcagccctctgttctatcgagactggtgcaagtcttaagtggttgcttaccggtgagggagctaaatttgaacatcccgccatggaaaaccgcccaattgagcttgattcattcaccattgagaatggcgaactgataaaaggtaagctcctgagcattgatcctgactttttccgtaagaaacccactgacggaattgcagttcgtaccgatgggagattgcacttcatagataaagcagcttcgttagctgatgggacttggctggttgatattgaaggagttgttagcgttcgtgagatcaccgtgttaccagccaaaaagctgcacgttgcaggtggaaaaataccttttgaatgctctgttgaggatattcaaactcttggtcttgttgttggcatctacagcgaggtgaatggatga

SEQ ID NO: 439682 - DNA, 240 bp, Serratia marcescens
atgtcagatgtggttttatttggaattgacttagccaaaggtgacgatatttccgccgttaccgtgttgcttaacaatgcccgcattgatgagcgtaagaaccaagccgatctcgctgctgttcgtctggtgcgtttggctgctcacatcactaaaaacggtttaacggctatcgaagcagtggagctgctgcatcaagaggctgaggccatcgagagccaagcgcaggagctgcactaa

SEQ ID NO: 439683 - DNA, 225 bp, Serratia marcescens
atggcggactctatggattacgcacaagaacatcaggcgctggtactggaagcgcagatcgccaaggcccgcaaatcttcttccctgccttctgcgttcgtttgtgaagaatgtgatgctcctattccgtccgatcgccgtgtcgctgttcccggcgttgatacatgcgtgagctgccaacaacgccgagaggcacaaagccatctttttgcggggaaggcatga

SEQ ID NO: 439684 - DNA, 2214 bp, Serratia marcescens
atgagccaagcggcacccgtttacgcttacccatggaacgcaccgcgcccggcaatcgccgggccggtaagaccgcttaccggtgaggaacacgctcaggggcaagctgttttacgcaatatccattccctgccgcgctttcttagcgccattttcctgtcacgccatgattacttgctgaaatcaaaagggctacatgacgccaataaatggcttgtgttccagtttgagcgccgcatatggccccgtattgaggcggttaacgctaagaatgggatgaacttagcggcttcaccgcggtggatggcggaagttgataattatgctggcttgccgggcatggatgacaaagagctgaaacgccttgcggatcgcgtggccggtcaactgttgtctatctatgagagccgcgttgaagaattcattaaaagcaacggcggtgacaatacagggctgtttgaagatagtacccaagcctgtttttatggccttaccgcgccgatggttcgcgccttcaatatcaccccgatgcactggaacaaataccgcaagggcacacttgatgcccggtcagcgatcgccagtctgtcccggttggtagatgcggaatggtgggaacgccagttaaaagcccagcgcacgcgctggcgcgaggcgttgctgattgccgtcggcaatgtgaaccgtggggcgtcgtcctatgccagtaagcaggcgatccgtgatgtgaaagcacgccgtcagtctaactttgattacctcaacagccgcgagttggagaacgtcgaaaccggcgagcgattcagcctgatcgagaaggtcatggcgagtatctctaacccggagatccgccgtatggagctaatgacgatagttgccggggttcaacaggcggccgagattaaaggtgataaggggatgtttatcactatcaccacgccatccaaatatcacccaacacgcaccgtcggcaaaaacaacccgaaggtgcagtttaaccacaattgggatgatgaagcgtacacgccaaaagacggccagcgctatcttgtggacttgtttagcaatattcggacggcatttaaagataatggcctgcaggtctacggcgtgcgcgttgttgagccgcatcacgatgcaacgccgcactggcatatgatgctgtttacctccaaagaacagcgccagccggtgatcgacatcatgcgccgctatgccatggccgaagatggcgatgagcgcggcgcagcgaagaaccgtttcgactgcaagcacctgaacaaaggcggcgcggcgggctatatcgccaaatacatcgcgaagaatatcgatggttacgcgctggacggtgagcgcgatcatgaaacaggtgagctgttgactgaaacggctgcagctgtcaccgcgtgggcgtcaacgtggcgcattcctcaatttcaattcattggcctgccgtcgcgtggcgcgtggcgcgaatgtcgcaaaattcgctctatcagtctggccgacgagtttgacgacagcgtggaagcggtacgcgctgccgctgatgccggtgattttgccgcctacattctggcccagggcggcactaatgtttcccgcgacgatcagaccgtgcgtgttgcccgcagggttgccgacgaactcaacgcctatgacgaagaagtccagaaaattgcgggaatttacgccccgcatattggcgcagatcgcatctatgaaacccgcacaacgcaatggcgcattgtcgccaaagctgttgccgttgagcctttgactttgcaaagcgcctccggcgcgcctcggagtcctgtcaataactgtgggttggtcgatagcaaaggcgctaccaatacgcagggtagtgagcctgtagaggccgtggcggtgttggaacacccgccagagacaccgattgactggaatgatatgaccgttacacggtctgttatgcgtcgtatacgggctattccgttgcagataaagaaatcacaacgcagttttgacccttatcgggtgctggatgtggctccgtcggcaagattgaccccggcagaacgcgatcgcattaccaaaatttactcagagttagcactacaaaacatcgtcccggaacgctgggaactggaggcgttagcacgtggtgctaaagtcaaatttggtgatatttcaatgaagtatgcaccggttaatgattgggcaggcttttaa

SEQ ID NO: 439685 - DNA, 225 bp, Serratia marcescens
atgaaacgagatttacacttggccggggcgttattggagacgctgaaacccacagcaaaaggccgcagaattaagacggtagattttatacatgccgccaatcggttaggtacgcacgtcaccccagatgaggcgaactactacatcaaaaatcggtctggtcacgttttcaagttgattgaagaaggccgttatcagcacaacacatacctttatctgtgctaa

SEQ ID NO: 439686 - DNA, 318 bp, Serratia marcescens
atgttaaaagaaaatgaaacaatcaaactaacaggtgaagaagctgttaatataatcaaggaggttaattatttattgatctcacttggtaatatcgcacattattattacagcgagccagttattagtgacgataagcggttagagtatgagagcgaaacaactaaatttatagacaagaataaagttacacataggctggcagaaattagaaggatattatccagtaagtttgataatagtcttggtgatgatgatatggatgatatagagagagctacagaggataccccttattgggagaagccgggggactag

SEQ ID NO: 439687 - DNA, 267 bp, Serratia marcescens
atgctcaaaaaaataagtgattggatcttatctaatagccattatgaagttaagtacaatgctaatgattttacagatagtctggttgttgatatagatgatgatactaagattgcgcgttttactgtgtgggatgatgcatcttgtatgttggagatcattgatgttgaaaccgggaactatataattaatgaacgaagagaattatcaggcgaggaaactgtaatagaagcatttaaagagtttgtatcgttgcttagaacttag

SEQ ID NO: 439688 - DNA, 2142 bp, Serratia marcescens
ttgaataaattcaacgaatttcatttgcggcacgcttatctttgcccgttttttttgggcatggtgccttgcctgactctggcggcaggcgaagagtcgatatgggtggtagctgacggttcgtcctcgggcaacgttccacagggctacgcggcccaacaagcggaggtggcaaccaaaacccgttcgccgcttgtcgacgtgccgcaattcgtctcggtggttaatcgacagcaaatggacgtgcaatcagccgatacggtcagtcaggcgctgcgctacagcgccggcgttgccgtagaacgcttcggtgcattttccagcggcgtggacttcgccagaatgcgcggctttgaggcggactactatctggatggtttacgcgtcatcggcaataccggcatttgggggccacagattgaaacctgggggttgcaaagcgtcgaagtcttgcatggcccctcctcctcgttatacggccagggcggtgccggaggcgtaatcaatatgatttcccggcggccttccgctaccgagtcgaatcagcttaaattggatgtcggcaacgaccgtacgcgttccctcagtctcgatgccaccggcgcactgaccgatgacgaacagtggttgtatcgtttcgatggcctggcagccacgcgcggctcgcagatagaagatacccggcagaagcgtctctatctggcccccgccatcacctggcagcccaacgaacgcacgcgctggaccgtgctgactcactatttgcgtgaacccgagtcgggctattacaacaccttgcccgcccaggttctggggctgttgcccaacgcgcgcggcaagatagataccgataaaaattacagcgatccggcgcacgagaactcaagccgcacgcaatatgatgtgacctcactgtttgaagtgcagttgaacgatcgctggcgattaaagcaaaacctacgctattcccatgtagactctgcggtgcaacgcgattttacccgcgccatcacgccggacaaccgccttttgacggcggtctaccaagattccccgagtcaggcggacagcatcgtgatggataaccaggccgaggtgaaattcgctaccggcgccatcgcccaccaagggttggtcggcatcgactaccagaccggtaaactggataaagactggtggggatcgcaaaccgtgacgttcgatccttggtccggtcaataccgcccttcattcgatcctgttccggtttcacgcacgtcgacaacgcaacgttttcaccgcaccggtttatacgggcaggacgaagccagctggcgcggatggcatttgctgttgggcggccgtcatgactggtcgcgtatgcgtaccagtgacaatctggtccatacccaaacgcaaaccaatgacgccgcctggagctatcgtgccggattgagccacccgttcgacagcggcctggcgccgtgggccagcgtctctaccgccttcgatccgctgaccggcaccgacgctcagggctcaccgttcaaacccacccattccactcagtatgagatgggattgaaactgcagccgcccggcagcgcaatgatgaccagcctggcggtctaccaactaacgcagcgcgatgtgaacaccatcgatcccctcaatcccagctattacacccagactggtgaagtacgttctcgcggcgtggagctggaatcgcgtgcggcgctgaccgatagccttaacctgatgctgtcctatgcctgggtcaacaacgtcgtgactcaagccaacgataacaccctggggcgacatccggtcggtgttccggcgcaaaccggctcaatgtggctggactatcgctttactaaagggccgctgcaggggctgctgatcggcggcggcgctcgctacctgggggccagctggggagatggcgccaacacctttaaagtgcctgccgtttggctcggcgatatgaccgttcgctatacgccgggtgcctgggacccgcgcctgtataacctcgaattggggttgaccatcaacaacctgaccaacaaatcttatgtcgccagttgcaccagtgcgccttactgcagcatcggcatcgaacgcagcgtcaccggttcgataagttggtatttctga

SEQ ID NO: 439689 - DNA, 729 bp, Serratia marcescens
atgacgcaattgcgcacttctctcggctgcgcggtgagactcagccgcccgcgcagttcgccggtcaccaaacaattggtggtctttccgcatgccggcggcggcgttgcgttctaccagcactggcgagagctgctgccggacgaggtggatctgttcatcatgcaatatcccggccgggaagaagcgcaaagcgcgccggcctgggaaacggctcagtacgccattgcgcgctgcgtcgatgcgctgcatgcctcgctgggcatcgcaccggcggtgattttcggtcacagcatgggcacgctgcttgccctgcaggttgccgcggcgctgcaaacgtcgcgctttcgcatcgacaccgttttgtcggcccagcgcgcgccgtcagaactgaaattactccagcaggaaagccagcgacaaaaagtgttggaccacatcctggcattcagtgaaagcagcggcgcgttgacgctggatgcgctcactcgcccgcttgtcacccgattgatacagcaagacctacggctgctgggcgaactcagcgcagaaccgttgcccggcctgcagccgcgcatttggggcggcgacgacgacccgttggttagccgctccgcgctgtcgcagtggaaaaaagaactccctggcagccaggttcaactccttacgggcgatcacttttatttcatgcaggataccgctgcatttctccgccggctgcttcagtaa

SEQ ID NO: 439690 - DNA, 558 bp, Serratia marcescens
atggaaattatacagggcaataataatgtattgtctgagttaattacgcttggcgattatgttcgggaattaatcggttccggcaaaagcactgcgggaattgaacgtgttctggcatcgaaagacggctataaaaatgtcacgatcctttccgttatagaaatggccaatattaccttcaaagcgaaaacgaacaatgcgcctaacgtgggtgatgccaattcacacactgacctgctggtggatcagcaagggcgtgatatcggcacgatgaagggccaggggtggaaaatcgcgtcactgcctgacgacagcgtgatttcctggtatcacgaaaccgctgaaacgccgctgggacggatcgaaaccgccggcatttggaactccagcgccatttgggcaggacaatggcaatcgctgttcgctgccggcgttagcggggatgtcatggggaaaatcggcgttcgtcagctttatcaggatattccgcgagaaaaatatctgacgctgatcgttctgttgccgttggatcagattaaaagcttaattaaaaaataa

SEQ ID NO: 439691 - DNA, 2880 bp, Serratia marcescens
atgcagcaggtgaacagcaatgaccgggatatcgccttggtgggcatggcctgccgtttcccgggcgccgaggacgtggaaagctggtggcataacttgatcaacggcgtcgaatcgctggttcgcgtcgacaacgagcaacttgactcggccgacgcgggctatattcccgtcgccgcaccggtagccggcgacatatcccgcttcgacgcgggattcttcggcctgagtgcgcgcgaagcgctgctgatggatccccagcatcggctctttttagagtgcgcctggcacgctctggaaaacgccggagtaacgccgggtgagcttgacgatacaggcttgtttgccggctgtagcagttccgattatttacgtcaggcacagggctctgcgttgctcgacaaactcaacccttcgccgttcgagcggcaaatcgcgagcgataaagattacctcaccagccgagtggcctggcacctaggcatcggggggccggtgtgtaatgtacaggctgcttgtgccacttcgctggtggcggtttacgaagcggttcacgcgttgcgcagtggccgttgcaatatggctatggccggcgcttgtaccctcaggctcccgcaacatgaaggatatttcgcgcagcaaggcatggtgttttccaccgatgggcactgtcggccgttttctgcagatgccagcggcacggtgttcggcagcggcgtcggcattgtcgtgctgaaacggctgtctgacgcacaggcggccggtgacgacatcattgcggtgatcaaaggcgtagcgatgaacaatgacggcgcgcgcaaagtcagttttaccaccaccagtttgcacggccagcaacgcctgctgcgccaagctatggacgatgcccgcctggcaccggaagattttcgcgccgtcgaagcgcacggcacgggaacgttggccggggatcccatcgaatttgaggcgctgaacggcgttttccgcgagcggacgacgcaccgggctttctgcgccatcggtgcagtcaaggctaacgtcgggcacctggaaacctgcgccggcatggcgggactgatcaaggccgcgctgcaaatcaaacacggttggctcacgccgcagatcaactttgactcgccgaacccggaaatggcgttggcggatagcccgtttgagtttctctgttccgctcaacgttgggatcgcgacgatccacgcaacgccatcggcgttagcgccttcggcatcggcggtaccaatgcgcatgtcgtgctggcaagggcgccgaaaacgcctcaaatgcgggcggcgatagcgccgttggcgactgtcgtgccgatcagtgcgcaatcggagcaggcctggcatcgcttggtcaaacgttatcaacagcggccatgcggcgagaacgacgaacgcctggcctggagcgcacaaagtggaagaaagtcgctgcgttatcgcggcactctgcatatcggcgagcagggcgtgttgagcatgaaagaaagcatggtggatacgggaaaagggcgtttgtcggtggttttccaatttcccgggcagggaagccagtttatcggtatggccagcgaactgatggcgcaggatgcgacattcaaaacgctgatgaatgacaagctgcagatattgcaaacacaggctgcactggatctctccccgttgtttaccggccaggcggcccccgaaacaattaacaacacggccttgacgcagccggccctgatcgccgtcgagatcgccgtggccgaactgttgaaacattacggcgtcgagccggattgggtcgtggggcacagtttgggtgagattgccgccgcctgggccgccggtgtgttctcggcgcaagacgcgttggtgttcgccgcccggcgcgggcatctgatggccgggctgcagcctggtgcgatgctggcggtagaactgagcgctcagcaagcccaaccctggcttggcgatcggctgtctctggcggcggaaaacagtgagaacggctgcgtgctttctggcccggtggcggcgattcgcgcctgcgaaggacagatgcgggacagaggagtacgttgcaaggtgctgagcgtttcgcacgcgttccactcggcgttgatggatcccattcttgatgaactggccagcattgcgccgccgccgcgtgagtcgacgtcaaaggtccgctacgtctccgcattgctggcgaccgaagtcgctcccgcggcgctcgatgcccgctattggtcacgccatgcccgtgaaccggtggattatcaccgcgccttgcaacacctaccgcggcgcggaaaaacgcttttcatcgaagtagggccgggatcgacactcacggcgctggtcgcgcagctaaaatccgccggcaccgtaacggcggtgcgcaccttgccgcgccgcgacgaagcccagagcgaaaccgccgtgtggatccaggcgttgcaaaaaatctggcgtgccagcgtcaacgttaactggcgccgcctgtggcaacagcctccttcccgcattgcattgccaatgtatcccttcgatccggcgcaatggtggttgggcgagcgagatatgcaggggccggaagccgggcgaacatcgacgacggcggataaacccgatccgcagatggcgcgcatctggcgcatttggggcgacgtgaccggcgtgaaccctgattccaaccactgcgacttttttgacgccggcgggcaatcgctgatggcattgcggctgatggccttgttggaacaagagtttggccggtcggtaggcatggccgatttccttaagcggccaacgccgtggggcataaaacaacagttagaccaggctggagcattcgagcaagaatcccattaa

SEQ ID NO: 439692 - DNA, 1098 bp, Serratia marcescens
atgatcatcgtaaaagacgctttgcggaacaaagtggaaaccgagtcacaggggcaccgcaccgtgctgtatacagcaagtggtcaacccagttatatgcatgtgatctctcgctttacgctgcaagaggtcacatcagggttaggagaggcggttcatcctgcctttatcgtcaacggccaacttaaagacgcctttttttatggctgttatccgggaactctggtcgatggagaactggtcagccaacccgatacggctccggcgagctggcacgatctggccacatttcgtcgggcggtggcgcgcaacggcgccggatggcatattggcaccaatgcggaatgggccgcgctgatgttctggtgccgccatcaaggatggccggagttgggcaataccgagagtggccggtcgcatcacgatcgccgtcagtatggtaaacgatgcgacggcggtgccgtgggcgatggacagggcgatccgacaacctttaccgcatccggcccgggagcctggtatcacgacggtacgccgtacggcatcggcgatctgtgcggtaatttgtgggaatggcagcacgggctgaaattggtcgcgggggaaattctgctcttgccggataatgacgccgcgatgccaatgaccgaagatgaagacgaacgctggcgcgcggtcgacctggcgacaggggcatgggtgctgcccggcagtggagggacggctaaattcgatgcagtcgcacccattcgtacaggcaatgccggcgcgccgcttattaccgactctattcagcattttaacggcgatccgcaggataacggatatccgcctggattgatggacgatgcgttcgatcgtattcgcatggcaagcggggcaccgttaccggatgtgttgaaaattcttggcattgtccctcatcaccggtgtgcggacggcgatcaggtttatctgcgtaattacggtgaacgcattctgatgcgcggcggcgcctggtattccggcgccgccgccggactgaggacgctgtgcctgagccatggtgcggggcacgctagtgctacggtcggcgcccggccagtatggtgtttgtaa

SEQ ID NO: 439693 - DNA, 459 bp, Serratia marcescens
atgatgaaagcgctggtaccaaaaccaacgatcggcgctgacgcggattatcgcatggcgataaagcgaccgttcgccgtccgcaggcaaatcctgcgccagatcgtcgttcatcagcgccagcgccgcctgttcggcgtccggctgcgcgctgaaatcgaaccactccggcgcctgtacgcgcgcagggtcggctatcaacgggagacgctgcaccggctggccgtcctgcgcctcaaagaaccgcgcctgaaccgtatccgcttcggccagcccctgacggatcgcgcgctccagcgccgaacgatcgatagcgccgtgcagttcggtatagtgcgccaccgcgaagctgttgcgccgcagcgcgatttggtcggcgatccagatccccggttgcgccgcaaccagcggataatcccgatactcgacctgagtatccggcaaagaaagcgtttctga

SEQ ID NO: 439694 - DNA, 825 bp, Serratia marcescens
atgtccgaaataatcaccgatctggcgtggtacccgccggcgtttccggctcaggggcgtttacccacccaggctgcgctggttggggccaactgcgcccggcaggacagccatgagctgacttaccgacaggcgttatgcctggcggccgggcggcgcgtggcgcccccctgctgcaagaccctgcatatcagcctgtttttcgacggcaccggcaataacctcaatcacgacttatatattgctaagccgaagcacccgaccaatattgctcggttgttccgcgctaccatcggccagggctacgccggggggggggcggataacacagaggagctactggatgccatcggcagcggcgaggataaatactacaaatattatattcccggcgtcggcacgcctttccccgaagtgaacgatctggatttcagcatgatggggctggcggcggcgacccacggggaggatcgtatcaactggggcctgctgcggcttatcgacgccctgaagaggacgatggggagcgatcccctgtcggacgacgagagctggaaggcggtggacaaaatggcgacctcgatggcgtcctttgggctgaccggcagcgctaaccgttttgagaccttccagcgcctgctgaaggagatgtcacccgagctgcaaaaggcgctgatacccgccgagcctggaaagccgaagctgctagggatcaaactgtacgtgtacggcttttcgcgcggggcagcggcggcgcgagcctttgttcgctggctcagcgagctgctgccaaagcctgaagaggggcaggacaagcccgaatag

SEQ ID NO: 439695 - DNA, 534 bp, Serratia marcescens
atgaaaatacggcattacctcgtggtactgggtgcgctgctgctggcgggctgcagcctgccgacggcgaaggccaaaacccgaagcggtggcggtgggattattgtcgccatcaatcacaccaaatgggcgatcaaccatttcagcgtcgacggtcagtcgggcattgatgctattgggccctatcagggcggcggtggcggctgctgctatggcgtgccggcgaaatggcgaccgggtatgacggtaaaagtcgactgggaaagtggtgaggcatctacaaaagggtttccgggatttgcagatacggaaaagtacttggcttgggaaaagaaaatgagtgcgaataaccagcagcacagcacggtggtaccggtgcctgactatacggggcagaaaacctgcgggatcacggtgcattttctgccctgcgatgaggtgaaggtgacgaccagctgtgtgagccccggccgaccgggctatccgatcaacgagccgctgcagatgccggagccaagagtatgtccgaaataa

SEQ ID NO: 439696 - DNA, 198 bp, Serratia marcescens
atgaaggctcagaataagcagcacagcaaggtggtgccggtgccggactatacggggcaaaagacctgcgggatcacggtgcattttatgccctgcgatgaggtgaaggtgacgaccagctgtgtgagccccggccgaccgggctatccgatcaacgagccgctgcagatgccggagccaaaagtctgtccgaaataa

SEQ ID NO: 439697 - DNA, 339 bp, Serratia marcescens
atgaaaacacgacactacctcgtggtactgggggctctgttgctggcgggctgcagtcagccgacggcgaaagccaaaacccgaagcggtggcggtgggattattgtcgccatcaaccacactaaatgggcgatcaaccatttcagcgtcgacggtcagtcggggatagacattatcgggccctatcagggtggcggtggcggctgctgctatggcgtgccggcgaaatggcggccgggtatgacggtaaaaatcgactgggaaacaggggtgggcgatatggacggatttccagggtttggtgatgatgcgaaatatctggcctgggaaaaaaaatga

SEQ ID NO: 439698 - DNA, 489 bp, Serratia marcescens
atggaaatcatcatctcagatcgcagccattcggaagcattggtcgatatcatcatcgaaatggaagaatattatttcggccccgacgtgataaaacgccaagaggtgctcccttacctcaataacgccctgtttggcccctactcaggtattactgtcgccagtgcttggtcacaaggtaaggtctgcggattttgtaccttttgcatcatgcaccctgcccctaagctcagcggtcaaatgtttatgaaagagctgttcgtcagccgcactgccagagggttgggcgtaggcaaggcaatgatgcgttttatcgcaaccattgcgctcgaacatggctgtagccgtctggactggacagctgaaaagtccaaccccaacgcagggcttttctatcgccggctgggcgccgacgaagtcacggccaaacagtacttccgtctggaaaacgacgcgttgcgtgctttcgctcgccccaatactgagtaa

SEQ ID NO: 439699 - DNA, 258 bp, Serratia marcescens
atgatcaacaaccaccgctgcgtacggcagcggtggctggacaaagaggcaacatgcccgcaggcggggcgaaaggcggatttagcgcagctcatcgcagtacagcgcgtggccgtaaacagagaaaccggctgccagggtgagaagaaactgcgcgaggcggcgatggcgaagactgttcatcagtgcgatatcctgtcgtatgagaggctcaacgtaggggatatcctcaccgatcgccctggcgagataaaataa

SEQ ID NO: 439700 - DNA, 297 bp, Serratia marcescens
atgaaaggtaattcaaatcgcggtaactcaatcgtcagtttcgatattgcatccccggttaagacgttcgccaacgtggggccggatccaaaggttgaccgcctgctgccgcgaattatgggcaagacgcctaatcgtatcatctcagaagtggtattcggtcgcctcaccctggctgatttggagctggtccgctacgacgtccaccataaccgcccccagacaaacattaatcggatgatcgttgctgccgtcagttacgcaatccaagagctaaaacaaggaagtgaagcatga

SEQ ID NO: 439701 - DNA, 390 bp, Serratia marcescens
gtgtcgaatatcgcagacctgattaagaacgttcaaaaccatgtggcagagcaaaagcgaatcctcgaactggaagccgccccagaggtcaccaagagcaccaaggcacaggaagagctagaagccctgatcgctcgctctagtgagttcctcgaagctgtggaagctaccgaagccaccaagggccgcaaggtcaaatcacgcggtatcgcgatggtacattcagctcaaggcggccccgccaataaccgccccgagtcgctcttgatgaaatccaagctgcgccgtgtggagatcagcaagagagggatcaccgtcctaacgccagaacaagaggccaacctgaagggcgtaatcatgagcctgaccaagaataaagaggccgaataa

SEQ ID NO: 439702 - DNA, 900 bp, Serratia marcescens
atgaccacagcagtaccagcaaataacagcaacaaccccgcagtaatcacagtttcaagtaagaacgtcggcaaatataccagtgataatttcatcaaggtggatcagaatattctccacgctaccaaggtgaatggcgtcaagatgactgccaacatgaagttggtatacatggcaatgatgagctggcaccgggccggaaagcccgccattctgtctagcgaatccgttatgacaatctgcggactgtctagcgataaatcggccagaaccctgatcaagagtctactggaggcaggcctaatcaaggatgttaagcgcggttaccatgaagccagcgtttatacacctaacgaatacgtgattgaaactgaagggggagatcgaaatgctgcaagccgtccagctagaaagggtaaacctcagctgcatgttgtccaagaccaagaacaacctgacgatgctcacagcggcgacgctggggatcctgtccagcatgatgttactgattcagaacagcccgatgtaattaatacacctgagtcaaccgaagtaaccgaaccgcaaaatgaaggggtaagcgttgatagtattcttcctgttgatgactgcgatcacgatgatagcgacgcggtgacagctgccgaacctgaccagttggatcagcagatcgctgccgcagaactgtatggcttcaagtatgatttggccgagattatgcgccattgccaagggagccgtgccaaggctgccgtgcggttgcagggtgagatcggcgtattccaccgccaacgcattctagaagcacagggggccgcgcaggcctcagattgggcatctaacgatgatggttacagcattgatgatgattggaacccggaggacggcgacgcctactga

SEQ ID NO: 439703 - DNA, 207 bp, Serratia marcescens
atgaaggaaatcacagaccgccgaacaattcggcgaatggaaaagtggcactccagagaggtcacttttaaccacgacataaggactcgcctcgaggcgaaagcagaggcggagggccgctctgttcaatcattaatccgtgaggcagtagccttttacttagtttcgggagagacaagcaatgaccacagcagtaccagcaaataa

SEQ ID NO: 439704 - DNA, 210 bp, Serratia marcescens
atgaatgcaaataaccctctgccgcaagccgtattcacaccggtgacgcgccatgccatcttcatcgtcgctaccctgtcgcccgttcccgcccatctggcggcggtgcgcgcctggtgcggcgacattgccgccgtggtgcgttcggtcggcaaacgcgcgccggcaggcaatctcacctgcgtctgcggcttcggctccgaagcctag

SEQ ID NO: 439705 - DNA, 1167 bp, Serratia marcescens
atggatttgaaagtgattaccatgaagataaccaaggctgattttggcgtaactattgacgacactttaataacggattttcgcgatgtggttaatgaaggggagtttgcttacagctacttcataaacagaaatggtaaaaaccagttcagccctatctgttcgtgcatggattggataagcgtttctgttcgcaatctgatgaacttccctgagctgtctgaagatattgatgtcaaggccatgcaggtttactcccttatatcatctattgatattgctgtggaggcgttacagcagcttcaccgcatcattgagagtgatcataagttggcgaagtggcctttcaagaaatctgcgaatgtctttaaaaataaaacaccctatctttcacatgaggatgatgacgcatactttaagagtattcgtgctatctttggtgctcaccctacaaatcttaaaaatagtgatggtgagcgactgtttgcaagctggcctcattttcatgctttcaatggaaatgatttcactataagcctttacaacaacacgccagggaaagatgatgttgttttcggcattaagtttgatgagctcattacatatattgaagataggtataaatatctaacaagcctaaaggattccgtaatagcaatccgtataaaacattacagcactctatccaaacaaattataccgtctactgataacattcatgctgagttaaggttgcttctttcagaggttgcggtgcgaggtgataatgattattaccgaatggaagtggaagagttaataaatttgttcgaggggaatgttaaagaggctcatctcaagggtgaagttgacgtgtttttaagtaaactacaccctattgctgtagagattagatataatcttcaggaaatgaatattgaggatttagtaactacgcatggcgtgatgatttcaacgcttccgaaaaatgccctgcattacgttcttcagaaaatgtttacttggctccactctgataggtatgacccaatgggtggttattacttggacacgttaaatgaatattcaggcgggcggtacaatttttgttctgaggatgatgacagtacaactctgttgaagctccggatgatgttgtatcggtattatcaacaaaaagaggcttag

SEQ ID NO: 439706 - DNA, 1458 bp, Serratia marcescens
atgaaaaacatgagacaagagcgaaatctaagcgcacttgcagaagtgagaaatataattgcacaggaaatatataaaatatccgtagtgaagcagtatccagatgagtttttgcgcattatcgaactatatcaaaatgtatcgaaaaaaattgtcgctgctggtataatggatgagagtgaaagtctctataggtttaagagaaagttggttaattgtgttgtcgaggagcaaagcgcatctgaatgtagagaaagcctcatacctataatcaatacaattgccgaagaaaattatgacaaagaaaaagagatggcaaccagtctgaaaaaaatctcttctgaaatatttaaatccaaccgaggatttaactccaccattcctcataagtacccgcctgaattactgatagaatggcgcgattacatagacatatatgaattttattataataaaaattacgaagttaaacatactagggagaaagttaaagatgactcatctttcatagaaaaaggtgaatacataaatgtaatcacatcctacccgactccagtgactatagtcaggccatatgcaaggcgactgctaagcacctccgaattaaaggaaactatcgaagttccattgagtgcatatagcaaagatcgaaaaccaaaggtttttgtcgcagaaaacccacttgacatgaaaaaggcgatcctcctacatatggcaagctacaatgacataagtcatgtggaaatcactaaagaactgaagttctcaataaatttacaagaacccatatcacagaacgatctagagttaattataagtagaattcgaacccaaatctctttggcgcaaaattttaactcccaatctcttcagctcattgccacaacagatgatgagataaatcatgcttttgacattgaagaactgtcagcaccaagttatggtgaaaaagaactcatcatgagtgcaaaaaaacctgagattcctgatttcaaagtggcactgaaggtattagccggtttatcacttatgcaaaaaaccagtcttatgctcaataagtcatcaggttgttatacttggagaaaaagaaaaggtattaaaaccagtacggagattgatattcttcgatttgaacttaacaaaaagttcgcaacagaagaaaacataaataccaatgcagatgaaattaaaaacaactaccttagcgaagggtataaacaagtattagatggtgtaaattatcacctcgaatcatttcaacataaacgcgttcaatttgacgtcaccctgaatgctgaacaacgtttagctttaaaagatgctccagagattaacttagatgctctacatgatgatgatattgaactagccaaaaagaaaataagcgcacataaaaagcaagggcgagacgcttctgttaggattagaaaaaatggaagctatgtcatcacatggtaa

SEQ ID NO: 439707 - DNA, 225 bp, Serratia marcescens
atgagcaataacactggcatccatgtattcaccgatgagtcgctggctctacatgattacgagctggcgctgaaagtaaaccaagcaacagcgactcacgtagctagaacgatcgtgagtatgaatgcaccacagcaactgcgttcgctcagtgctgtcggacgcaatgagctgatgtttgatgatgagacactattgaaaatcatcagcactgtaaaaaaataa

SEQ ID NO: 439708 - DNA, 186 bp, Serratia marcescens
atgctggagtatatcattccgagtgagaaattatctatttctttcaaaacctatttgctggacgtggttattggtagctacaccaaacttgagagagatcccaatctggcggatgttgcatcatcatgcagttctgccgtaatcacgggtaaggcttttcctacaaaaaccacttatcgtatatag

SEQ ID NO: 439709 - DNA, 825 bp, Serratia marcescens
atgatgcgcgttttggcaattgtgtttataactgtggcaataaatttatgtattgtatattactgggcaagttatgatttaaattggccattcaatggatggagtagggaggagcttggtcaatttggagattcttggggtgttttgacatcgatattttctgtgtttgcgttctgcggcgtggcttactcaattatattacagagacagtctttaagtcaggttactcaagatgcatgtgaaaatcgagatttcttgaaactgcagaggtttgaaagtgttttttttcaaatgctaggtttattgcagggaattattgaggatatagatatctcgtttaaaacgccaaacagagaaccaaaaaaaggacgtgatgctttccattatctgtatggtaagttgaaagggaatgatgggtttggtcaaagagtttactctcaacataaccgaccagacctgcatgatttcaccgaaataaggaaggatgtgattaggcattatgatgccttctataacgtaaggcagcagaacttggctcattattatagaatgatttatcatatttataaattcatagacgaggcatcattggatgataaggtaaagtgtgattatgctaatattttaagggcgcagatttcaaactatgagttattgatattattttataactgcttgggggaacatggaaggaatatggaatgttatgcaatcaagtataagctatttgacaatatgcctattaaggaattagccggttctggtcacaaatatttgatagactttaaagcatttggcagccaaaagatttaccatcccgattga

SEQ ID NO: 439710 - DNA, 681 bp, Serratia marcescens
atgaaaacgttctggtttggtctgtcgataactcttgtttattttattattcttggtgtctcagttgttgggttgaagttggatgtaatgacgtcttggaatgaactgggtgatttcttagcgggagcattttcacctatagctttcctttggcttgtcattgggtatttgcagcagcaaaaagagttgcaacaaaacacgagagctttggagttacaagctgaagagttaaaaaactcggtagaccaatatcgtgaaatggtcaccgtagcaagagatcagcttttaatggatagggaaaatataaaccaatctagaatggataaggaaaatcaatataaaccaagaataaaacccccactaatactaccttatgttacctcgggcggagttaattataaatatcgaggtgtattggagttggctggtgaagatgctgaaaacttgtcaatacaaactgaaccgcacttcagtccataccatggatttagtgctcattcaatgaagagcggtttagtacagttgggcgaatctcaaatgcttaatagtggtgaattaccgaaagaaatcgtcctcacaataaaatatgagagtaggttgggagtttcctacgttgataaatacacgtacttattagctgattcggggtgttactcaattgtagatgatgagcatatataa

SEQ ID NO: 439711 - DNA, 339 bp, Serratia marcescens
atgtacgctacagaaacgcacttcttggacaatggctatgttttcaacattccgccggttccctatcgccgtcgcattgcggttccattgcttttggccgtcgctaaaggtgggaagtcacgtgctaaacacaaggtgattttcaatggcgtaaatgtggcggaagccgcggctgccggcattgttattcccggtgccccctcgatgggggatacgggaacgaatagctggaatggttacattcaggctaatgaatctgtttctattcaaggggtcggtgaaacaaatgatggtggtcaaacgccaaaatgcatcactgttttgatcggtgctgagtaa

SEQ ID NO: 439712 - DNA, 399 bp, Serratia marcescens
atgagcgagcaagtgattgagtttagctttgacaccattgcgatgcaggacaacgcgggggcctctttagcggaactgcaatgtcattataaagtcgatggcgttgaagtctggaagaattacgtggagctttacaagttcaatgacgatgagatgtttggcaactatagcgcaagcatgttggcaatccccgttgacgccaatggaaagccgctgccgacggacgtctatctacaagtccatggcgttaatgagcgccagcttcttagcgccgttgtgtgcatccatggcgagtgcgttgggttccaggacattgtgggtggtgaagtccggcagcgtgatggcgtttggggaccgacagtgcaggcaaactatacccgactcaccaaattggcctga

SEQ ID NO: 439713 - DNA, 189 bp, Serratia marcescens
atgatagccaccaaagacagggttcgcattgtcgaaacccgggtgttgtccgatgactggtacctgctgaaaaaaccacctttgattttctgcggcgcgacggcgtctggcagcggcaaagtcgcgagacctacgatcgcggtgatggcgcggtcattttgctgttcaaccggcaggcgcaaacggtga

SEQ ID NO: 439714 - DNA, 159 bp, Serratia marcescens
atgggtaacatgttgatcaacgtctcagggcagaacacctcgcgggtaataaccgattcgattaccgaagagaatgcaggtaattcctattctgctttacaacagctgcccggcggcctccagaatatgctcggcggtcaggccgtactcctgctgtaa

SEQ ID NO: 439715 - DNA, 708 bp, Serratia marcescens
gtgaggctcaataattgcgaaaccccgcagtgcgctaacactaacggggtctctatgtcagtaatctcggagaaaaccaacgtgagtattgtagcaaaatcagaattcaacttccaaggcaaagcgctcgtgccagtatctaacatttctggcgtgtggttcacgtcggcagatttggctaaggcgctgaagtactccaacagccgagcagtaacaatgctctacaacaagtatgccgacgagttcaccagcggcatgtctcaggtactcgaagtgagtacctcaggaaattaccggaaaaaagtgcgagtgttctcccttcgcggggctcacctgatcgccatgtttgcacgtagcgatgttgcgaaagagttccgccgctgggttctggatattttggatcgcgaagtcgagcactcgccaatcgccaagcagttcactgatgaagagctgatcagtctttcgtacatgtggatttggatggacaaggggcagcgggtgagcagagcgatctacccggctatgaagcagatcggttcgacatattccgggtatttctacgacctaggccatgagatgcgacacctgattgaaaagacgcgtgaaacgttgatacgcgaaacggcaaatattgatatgaacagcttccatgctcgtcacgcggcaccaatgctggacagactgaatgggaaaggggagttgcactga

SEQ ID NO: 439716 - DNA, 171 bp, Serratia marcescens
atgcaaaaagcaaaagatatgtaccagcgcaagattcggttcccagaagagatttgccaagcgatacagaagaatggtgagaagcagtgccgacagtttaataccgaggtgatttaccagttgaaaaaggcgtatggcctgactgaagaggtgtgtggtgaggctcaataa

SEQ ID NO: 439717 - DNA, 711 bp, Serratia marcescens
atggaaaaattaaagccatcttatttcttccttatcctagcatttggaacaataaccatttcaggatgtggagtttctcggcttactggcgatgatggggtgaatgattggttaaaacaacgatctgaacttgtggagaaacacaaaaaacaaactgaagatgattcaatcagaagagcagaaaaaataaagcaggatagagataagtttgagctggaaaatccagaagttccactatctgggcttggcggagtttttacaggggaaaaaacatctggattgcgagatgcactaaactccatgccgtttgttactagaaatcctgaaactgatgacccgcagaaggtttatgttaaagttggtgcggcgcaaatatcatttaagcaagttatattttcaataggcgagcaaatacaagagtgtcagcgtgtaacagcatatacaggttatgatattgaacgttattgttacaagtcattagagacaggggtttataaattttccagaatgctaaaggatgtcgatactccgcaatcaacaaaaagggctgcgcttattgatggttctattgggaatgttatttatttcgaccatgtgtctaggttggcaaaaatgcataatgaaatgtgcaaaaaacaaaatgacaacggctatgttacaatgattactgtatctgcaccttgtaggaattataaaggcgcagggatgtaa

SEQ ID NO: 439718 - DNA, 639 bp, Serratia marcescens
gtggcgtggacttggcatgcatacggtctgcaacatgccacaacggaagaagacgaacgtgatgagcttatcgctgatggagtcgaaaattccccactctactcgcaagagtacgtctccgccctgctggcagaaagagatgcatttgaagcttcagcgatggctctgcgggatgaatggagggcgtcaaagaaaagcaatgcattcctcaaagagcaattggcgcaattggcaaacttcaatcccgattgggacatgcttgaagcgtgcagagaaagctggcgtgaagtagctgctgcacttaaggaagccgaggcaaatctggaagcgaagagcctggaatgcaggggaatcgagcaagagcgagaacttttccgcattgagcgcactgctcatcagcagcatgcgcaagaacttgaaaagcgtgtagcagagctgtccgagcttgaaatccaggtgaaggtttgggaatcggcagcgactaatcatcttgctcgggcagaggaagcagaaaagtggctggctacgccggtgcggattcccaagccatgcgcgtttaacttatgcgatcttgttgatcgagacgctgtaattgcatcgttgcgcgaacagggattcaccgttgagggggatgagtag

SEQ ID NO: 439719 - DNA, 195 bp, Serratia marcescens
atggtcacgataaaactcacagacaaggaagctgaacacgttttcatgaatgccgatggctggatggacgccggtgcgtgcaaggatgggttagagccagaagaaatggcggcgctcaagaaaatgacagaccaaattagaactcaactctcgggcaagaagaaaaaccaacggcaggctaagggggatgcatga

SEQ ID NO: 439720 - DNA, 906 bp, Serratia marcescens
atgcgccccgacctgaacatgttgtatgcccttgaagcgttgctggaggaaggtagcgtcgtcggcgctgcgcgacgcatgaatctgagcccgccggcgatgagccgcgcgctgggacgcatccgacacaccgtcggcgatccgatcctggtgccttcagggcgagaactggtgccaacgccgcgcgccatcgagatccgcgaccagctcaaagatgccctgcaacaagccaccgcggttctggcaaaaagcggcgatatcgatttacgcaggctggaagcgcgtttcaacgtccgggccaacgacattttcattggcatctatgccggcaaactgctcgacatcatgcaaacgcagatgccttgcgcgacgctgtgctttacccctgaagaaaacgatgtcgacaacgaagcgcttcgcaccggacgaatcgaccacttcatcagcgcatcgcgcccgttcggcaaagagatgcacgttcagcccttgttttccactcacatggtcggcgtggttggcgcgaatcatccgattctcgcggaggatatcacgccggcgagccttgtccgctggggacatatcggcgtatcgcgccgcggcaaaaaccatggcccgctggatgaagcgttggcccggcacgggttagccagaaaggtggcgttggtggtccctacgccaagcagcgccctgctggctctgaacgcgaccgactttattctgtccttaccggaacagctcgctcacgccgcgcggcaagccggccttgacatcgccacgttcaaactgccggtagccctggcagatatacttatcacgcagacctggcatccgcgccaccagcacgatccggctcaccagtggctgaggcgcaccatccgtacacttacagaatcgcgtataacataa

SEQ ID NO: 439721 - DNA, 2061 bp, Serratia marcescens
atgccgcccgccccccaccttcgccagacaagagcgccattcatcaatctgctgtcgcatctggacttcattacgccacggtgcgcctatatcgtccgttcgattgccgctgcgggactggcgctggccgtcgcctaccagctcgaactggatatgccttattccgcggcttccaccgtgctattggtgatcaatccaacgcaaggagccgtcatcggcaaaggcagctggcgcctgatcggcacgctgatcggtattctggccgcgctgttgctgatgtcgttattcggccaaatgccgctgcttttcatcatcgcctttggctgttggatggggttgtgcgttgctgccatgacgctattgcgtcatttcaaaggttctggcgccgtcgtcgcgggctataccgtcgggctggcgacctatggcgcgatggggcacccggaaaagacctttgagcacgtcattggtcgcggttcaacggtggctatcggagtcgtttgcctcggcctggtggtttctttattcagcgcacgcggcatgcgcgagaaactggccgctcactacgctcgcctggcggcgaacacggcgaagatcatcggcgacagcacgcccgccgccgagccggccagggtgcacatcatgagcgatatctacagcatcgacgacctgctggctctgggcaaagccgagtcaaaagagcttgcacaacgcgcagcggcgattcgcgatgccatgtcttcgcttttcagcgcactggccggcgggccaacgccgcaggactgccctccagaagccctgaaggcgttgagttcgccgctgcaggccgcctggctcagcgccggcgatgctttagcggagggcgccgatggtgcacggcgcgccgtcaccattttacaggcagcccgcgcgcatcttatcgaacagcgtgacgcattgaatttgccaaatatgcgggaagaggcggcattgctcattgccgcggatcgacagctggagcaggtggacgattatctggccgcgttggtcgggctgtcagcgatcgatcgcccacgcgcaccgctgaaaaaaagacggacggtacattttcaccgcccgttagccagcgccgcgcagaacggctttcgcgccatgctgacccttgttctggccggttttttctggctggaaagcggctggaattatggcgacatgatgttgctcgtcctggcgccttattgcgcattggtcgctaccatgggcaacccggccgccggcgcctggcagtttctgaaaggcactatgtacgccgtgccggcggcgtttgtctgcgcattcggcatcctcccgcatcttgacggcctcccgttgctggtcatcacgctggcgctgttctggctacctgggatctacgcgaccacgctacctcggcatatgctggcgggcctggcgtatctggttggattcaacacgctggccgccgccgacaatcccatgcattacaacctgcatgattttctgaattacagcgtcgcctggatcgcagcgaccgctttcgccgtgttgagttttcagctgcttctgccacgcaacccggaaagagacatcgagcgtttacgccatcgcgtgcgcaacgaaacattggcgcttctgcgaggcaaatctccggacgccgtcgtctggcaacaacgccaacagcaccgaatagcgcagcttggcgcgatgctcaaaagcagcccgcaacggatagccgcggagctcgcccccgcgctggcggcgatccacgttgggcgagaagtactgcggatcaaaaaaacgctcgcctctcgccgactgccccctacgccgcacaccgtggcccagcgggggatggtgcgtcttgccgccaccgcaggttcgtcctcccgcacaatacgccatgcccggcgtaccgcacgccagctcgcaggcatggcagaacgctatccgcagcagcggcaagacattcaaaaaaccatggcggccttcgccgatattttttggctgatccagcgccatgcccactatttcaacgcgctgcccgcgcaggaacgcctccatgagtga

SEQ ID NO: 439722 - DNA, 192 bp, Serratia marcescens
atgagtgagttcgccatcgccgaaacctatgtgtcgccttttttcatctatgcctgcgtcacgctccctatctatatcaccgtcagggcgctgctggcgcgcagcggattgctgcggtgggtatggcatcccgccctgttcgaattcgccgtttcgctgatgctgttggcagccttaatcctttacgtttaa

SEQ ID NO: 439723 - DNA, 921 bp, Serratia marcescens
atgtccttgcccgtcaataaattattcagagttctgttcacgctcggcgcctgtgccgccgcgctatcgctggtggtcgcgctttggaaggcttatgtcatcgccccctggacccgcgatggccgggtcagcgcggatgttgtgcgcatcgcgccggaagtggccggcaccgtcctggaggtcgccgtcgaggataaccaacgcgtcaaacgcggcgatgtgctgtaccgcatcgatccgcagcgtttcaaactggctgaaacccaggcaaacgcccaacttgccgcagccgaagaaacgttgcaccaacgccaggaagaagcgaaacggcgccggggcctcgacgagatcgtgcccctggaagatatccgccgcgccggacgcagcgtcgccatcgcccaggcggacatgcaaaaggcgcaggccgccttgcatatcgcccagttgaacctcgagcgcagcgtgttgcgcgcgcctgcggacggtttcatcacccaccttcgtttgcgccaaggcgactatgcactcgtcggccaggccaacatagccttgatcgatgccaccagtttccgggttaccggttatttcgaagagaccaagctgcgtcgtatcaccgtcggtgcaccggccagcatccgtctgatgggcagcgacaaaccgctggcgggccatgtcgcctctatcggacgcggcatttccgacgacaatggcaacctgggcgataacggcttaccgaccgtcacgccaaccttcagttggatacgcttggctcaacgcatcccagtgcgcatcgcgctcgacgacctgcccgccaacgttctgctcgccgcggggatgaccgccagcatcgatattacgcccccggatcaggaaaacgtggcacacggacgcctgaccgattggctgcacgccatgatgtaa

SEQ ID NO: 439724 - DNA, 1419 bp, Serratia marcescens
atgaatcatttatcaaacagttgtcgctatctgacaatggcaggcatcacgtttcttatcctgcaacttggcggctgcgctgccgttggccccgactatcggcctgaaccgcccgcccatcccgccggctggtcgacaacggaaagcacccattacgcgcaggaacaagaattggcccattggtggcgcctgttcaacgatcccgtcttgaatcagcttgtcgacagcgcgctgctgcataaccaggatctggcgatagcgcgccagcggctgttacaggcgcgcgccgaaagggaacgttccgccggcttgctcgaaccagaaatcaacgccggggcagaaaccacgacggcacaatggtcgacaaaattggataacgcccccacaccggcgcgttctaaaacctatcggctcggcctggaagccagttgggaaattgacgtcttcggcggacggcggcgctcgctggaggccgccgatgcccaagtgcaggcggtggaaaatgacgggcgcgccattttggtcagcctgctggcggaactcgccgacgactacgcggcgctgcgcaccacccaacaacgtctgtcgatcgcccaggacaacctggcggcattgacgacggcggaaaggctggcggtcaaagcctattctcacggtttaggcacggcggcagaagtcgctcaggcccgtgcggagcgtgaaatcaaccaggccagagtgcctgaattcgctggcgaagccgagcgcctgatgcatgctatcggcgtcctgatcggcgattttcccgcaacgcagcgcggcatgttgaaccgtcaagaagcagcgctcaccgtaccgcccgcgctaccgctctcgctgccttcggaggtggtaagacggcgcccggatatccgggcggcggaacgtcgcctagctgccgccaatgccgggatcggcgttgcgatcgctgctgattttcccagattcaccatcccgttgggcctggatactaccgccagcctgctgcatcagctcttttccgcccaaagcttcgcctgggtgctgagtggttccgtccagcagtccgtttacaacggcggaaaaaacaacgctgcagtgcaggaggcgcgagcagaagccgaagcgcagcgcctcatttaccaacagcaggtacatttggccttcagggatgtggaaaacgcgttgtccggcctgagaaccgaacggttgcggcacgccgccttgtccgccgccgaacgcgatagccgagttgcactcactcgcgccacccggctctatcgtcaggggctcagcggctatctgcccgtgcttaccgcacaacgcagcgcctatcaaacccgggatgcgctcgcgcttaaccaactgaacgatgttcaggccatgatcggtctttataaagccttgggggccgggtggtaa

SEQ ID NO: 439725 - DNA, 639 bp, Serratia marcescens
atgcaaaacattacgctcatcggtatcgacctcggcaaacatactttccatgtccacgcgcaggataaagacggccatgccttgctgcgcaagaagttttctcgtacccagctcaccgcttttctctccacctgcagcgcggccaccgtcgtcatggagtcctgcgccggcgctcactttatggcgcgccatatcagccagctcggccatcaggttaagctcatctcgccccagtttgtccggccattcgtcaagagcaacaaaaacgacttcatcgacgccgaagccatctgcgaagccgcctcacgcccttccatgcgcttcgtgacgccaagaaccgaagaccaacaggcaatggcggcgctgcatcgtgtccgagatgcgttcgtcaaagaacgggtaaaaaccaccaaccagatgcacggctttctgttggagtttggtatcagcatgccacgcggtagagccgttatccgacgcctgaccgccgtgctcgaagagcatccgttaccgccgtatttaacccggctgctgctgcaggtccgtcaacattacgtctatctcagcgaacagattgagggcgtcgaacaagagttaaaaacgcatatggcggatgacgaggccatatgcgcctgctga

SEQ ID NO: 439726 - DNA, 378 bp, Serratia marcescens
atgcgcctgctgagcattcccggcgtcggcatgataaccgccagcctgttggccacgaagttgggcgatgggaaaaattatgccggcagccgggacttcgccgcctcgacggggctggtgccgcggcaatacagcactggcgggaaaaacacgctgatgggcatcagcaagcggggagataaaaatttgcgtcgcctgctggtccaatgtgcccgggcctttatgcagcggctggagcataacccggggcgtctggctgggtgggtgaagattcagttgacgcggcatcactcgaacgtggtggcctgtggactggccaataaactggccaggatagcctgggctatcacggcgcatcgcaccgtttttagccaataa

SEQ ID NO: 439727 - DNA, 1053 bp, Serratia marcescens
atggcaaatcttgcaatttatcagtttttcagttattttaaccaaaaatcaatttcgggtaaaaataaaatgaaagatttttttgtcgtttttacttattttacaagaaaacatttaatcacgctagtagcaatggttttgacaatagtttcagtgtttggagttttgttttcaagtcttcaatctgttgtatcatcactattagaaattataaaggagaagaaagatttctttttatatgcgccaatttttctagcattattgttttcttttgttactgcaatgatttcttatttaaacaaagggattggtgggagaaatattgaaaaaacgagccatgttctttataaagaaatattaaaattaaataaaagattgacggaagttgaagatagatcttcttctggggtttcagttgaaataacggagagcgaaagaaataagttaatatccgatgccaaaaaaagaataattggaaacacaatacttctagcagataatagcctaaagaccgatatatttaatttcaagaagagctatagcttacataaactccatactgatatggttctaagattagagtccgaaatagacaggctcaatcgacgcggcggggttaaccttgcaatcggaacgacaattgcgttaacagggatattatcccttgcttactttctttacagcgcaccaggcatagtagatgggttggactttttcattcatcaccttcctaaattatcatttgtaatagttgttgagctgtttgcttatttttttctgcggctctataaaaatggatttgacgagattaaatattttcagaatgaaattacaaatattgagatgaaagtcatgtctctaaaatatgctcaagagttcaagagcgaagatatgataaaagagttggcaatgcacttgatgaagacagaaagaaatttcatattagaaaaaggacagactacagtttctattgagaaagataagctgcaaaatctttccgattcaaagctaacaagtgtaatatcggaaattataaagctaaaacaaaaatga

SEQ ID NO: 439728 - DNA, 714 bp, Serratia marcescens
gtggccgattatataaacagcaacatattatgtgagtcatatgttcatgttgagcctggatggttgaaacaggtaagtgctgtaattcgtaaagaaaagttatcactaattagaaacgaaatagaggattttgctgacaaaagaataaaattctttttatctgatgatgttttaattgaaattaaatttactgaaggttcaattaaagcaaaggtaactgcttatggtccaattattttattgatcggttcagcaatattaaattactcaagctttagagaaagtgtgaagcagttggcctctgatatgtatcgtgcgtcatcaatgttatcctcagaaatgcttttccagacaaactctagaaacaagagtgaaatccttcgtattgaagccagaaaaggaatcgttgggtccatagaaagaattaataataaaattgattccattaactctcaattagatggtaaagaattatcacctacgcgtataaatagcgagttacttgatctaaatgatatgatcctaacgctactatcgaacctaaaaaacgtagaagatacaaaattagttgcttcagcattaagtgatggtgtatctaaattatcaatacgtaaatctcgctttaagctcaagaataagctcgatgaatcaatgtatgcaagcctcattaatgagaggaaaagtattattaaaaatctcgcccaatataaatga

SEQ ID NO: 439729 - DNA, 525 bp, Serratia marcescens
atggagccacaacaggaaggtatcacgcgggcgttaacgccgggcgaagtcaatctggcacgctcggtgtttggcagcaccattttctatcagagcgtgttggttcactgcgacagctacctgccgtttgggctgcagaatcagtacacggcgatgagcccgaatggggagttgtactttcgtaggtcactctatgaaagagattatgcgaaccaggatcctgaagcgcagcatctttttattcatgagatggtacatgtttggcagcaccagaagggcatgtgggtacgcacccgtgggcttctcagttgggcggtaagttatcaatatcggcttgataaacctttgctgcgccactacagcatggaacagcaagcatcgatcattgcggactatttcattctcaagagatatggggcgaataccttcttccgcttgccaaacaggaaactcatcgggatagtggacagaaggacattgtcacaatttcaccccatcatcagaagcgcagggctgccattatga

SEQ ID NO: 439730 - DNA, 345 bp, Serratia marcescens
atgtcgttgccggcgggcagtcgcatctggatcgtggccggcatcaccgacatgcgtaacggctttaacgggctggcttcactggttcaaaatacgctgcgtgacaatcccttctcgggccaggccttcatcttccgggggcgccgcggcgatatgattaaagtgctgtgggccgacgccgatggcctgtgtctgttcaccaaacgcctggagcgcggtcgcttcgtctggccggtggcgagaaacggcaaaatccatctgacacccccacaactggccatgctgctggaaggcatcaactggaagcatccgcaacggatggaacggcctggcctgcggatataa

SEQ ID NO: 439731 - DNA, 939 bp, Serratia marcescens
atgtcatatccacaaacgaaactatctggtctgactggttttgctaaagcggccagcgttacaggggggtggtcaggttcagtggtgagtattaccacgctagatcaacttaaaaaaaatatcgctgacaacacaccgcgagtcttggtgatcgacagaaacatttccgcaccaaccctcacaaaagttccgttaggcgccaataaaaccctggttggctcctttcaaaatcgtacgctgaataacattcatctacgtgccatggcgagttcgaaaaatatcatatttcagaacttggtatttcagcattcacaaagcatcaaggataatgatgatattcaattataccttaactacggtagtaagtattgggtcgatcattgttcgtttgtggggcatagttggtcatcaaatgatggaagtctggataagcttctgtatattggtgataaagcggattatgcaaccattagtaactgtttgttttcaaaccacaaatatggtctaattctcggtcatccggcggacgataataacaccgcctataacggcttccctcacctgacactatgccacaaccatttcgaaaacatggaggtccgtgcacctggcctgatgcgttacggttatttccacgtttataacaactatattaaccatttccaccttggttttacgctggcgcaaaacgccaatatcctttccgaaaacaactattttggtgcgggtagtgagaataaaggcatgttggatgacaaagctaacggtacttttactgatacaggcagcgttcccgccatcacaaatcagaaatcgccaaaagcgaattggacagcgtcgtccaattacagctacacccttacaaccgccgtgcaggcgaaagcctttgccactactaatgccggagcacagtctgcttcgttggtatttggaggataa

SEQ ID NO: 439732 - DNA, 825 bp, Serratia marcescens
atgacaagaaatttgaataaggatactacaatctgcatgtctcttgccgcaaggccaagtaactttggtactcgtttccataattatctctatgatgctatgggattggattacctttacaaggctttcactacaaatgatttaatgtcagccattggtggtgttagagctttagggattcgtggttgtgcgatttcaatgccctttaaggaagaatgtattccgatggttgatgaaatagatgcttcagccaaggcgatcgactctgtgaacacaatcgtcaacactaacggtcatctaaaagcttataatactgactatatcgctatctctactctcctagataaatatcaaatttctaatgatcatagttttatcttgcgtggcagcggagggatggctaaagctgtcgcttgtgcactaaaagatgcggggattactaacgggataattgctgcaaaaaacgaaaggacagggcgagaactagccgatctctacgattttcgatggtgcaaagatattgatggtctgcaggctgatctaattattaatgctactccgatcggcatggcaaatggagctgataccgagatgctttcatttactgaaaaccaaatcgagagtgccaaaattgtttttgaaatagtagctcttcctgctgaaaccccactgctgaaacttgcaaaaattaagaataagacggttattactggggctgaggtttttgccattcaggcggttgagcagtttgttctttacaccggggttagacctgatgaggggttgtttcaaaaggcagctgaacatgctcgagctaatccatga

SEQ ID NO: 439733 - DNA, 213 bp, Serratia marcescens
atggcggagcgcggaggagttgtcgttgagcaggccacgtttcaccgctgggtcatccgcctggtgccgctgctggataaggcgttccaacggcataagcgcccggtgggtcgccgctggcgaatggacgaaacgtatatcaaagtcaggggcagtggaaatagctgtaccgcgcggttgatacacgtggtcagaccatcgacttcctgctaa

SEQ ID NO: 439734 - DNA, 144 bp, Serratia marcescens
atgacgggattcaaatcgttccggtgggcgcagaccatcctggcagatattgagttggttcacatgatacgcaagggtcagtatcaacattcggatggtgacgacctgtccccggcagaccggttttacctgttggttgcctaa

SEQ ID NO: 439735 - DNA, 231 bp, Serratia marcescens
atgatgtggccgaataatcaggacactaaacttacatccaaaatggaggtgtttagtgaatcagaagcgaaagtttacgccagaattaagaaggaagcggtgcccttggtgctgacgcaaaattactccattgtgcgtgccgcaacttctttggggatcagcgccaaacgttgcgcaattgggtcgcccccgcgcttcagcgccatgaaagtccgcttagtgaccccctaa

SEQ ID NO: 439736 - DNA, 459 bp, Serratia marcescens
atgcatgacgataagtacgacattgtctattttcccgaccgcccgctggggatgcgcctggcgatgctggtgcgcctgtggcgcggcatcgtggatgacgccgtagcgtttaccggtatgacccaaagcagctggacgacgctgatgcagctcagtgtggcgggggagaaaattaccgccacggatctggcccgggcgcagggcatcgatccgccgcccctgacgcgcacgctggctcagctggaaaaagagggttatgtcacccgtacgccagacgaaaaagacaggcgggtgaaatttatctcgctgacgtccgcgggccaaaaagcgattaacgcggtaagtgaaacggtggagcgctgccagacgcagatcgcgcagggcattccggcgcagcaaatagaacagttcagccagacggtaaacctgctggccgccaacatgatcaaaattcggtag

SEQ ID NO: 439737 - DNA, 1062 bp, Serratia marcescens
atgacccctgaacaacgatttacccgctgggtaaatgtcacgctggtgctgtttgccgcgatgttttgctattttctggccgccgacatctgggtgccgcaaaccccggactccaccgtcatgcgcgtggtgaccccggtgtcatcccgcgtgtcgggctacgtaacgcatatctacgtcagcaacaacagtgtggtgaagaaaggggatgtgttgttcgaaatcgacaataagccttaccaaaatcaactcgagcgcgcggagattgcttatcagcaagcgattctcgacaaccagcaaattgacgcccaaatcagcgccgcgcgggcaaaaatcaaagccgcccagctggatgccgataacgccggacgcagctatcgccgttacaacggcctaagcagcgggaatctgatctcaaaacaggatctggacgcggcctttacgcgctggcaaagcgcggtgcaaaacgttaacaacctccaggcggtactggcgcagctggtgatttcgcggggtgaacgcggggaccaaaacgtcacgctgcaaaaataccgtaacctgctgaacgacgcccggctaaacctggattacacgcgcgtggttgccagcagcgacggcattatcagcaatttgcaactgaaagagggctggtatgccggtgctggcgcccccgcgctggcgctagtcaacgacaagctcgatattgtggccgacttccgagagaaaagcctgagcaaaacccggccagggacaacggcgaatatcgtttttgatgggctgccagggcaggtttttaaagcccgggtgaccagcaaagatgcgggtgttttgccggggcagcaggccatcaacgggcagctttccgcgccggaaacctcaaaccgctgggtgagggacgcgcagcgtatgcgcattcatttgctgcttgaagacgggaaaacgccagatctgccggcgggcgcgcgggccacggtgcagctctacaattcgcctgccgctttcgcttcgtttatcggcgggatgcaaatctggctggtgagctacctgcattatgtttattaa

SEQ ID NO: 439738 - DNA, 1062 bp, Serratia marcescens
atgtttattaaatttattcttggcccgctgaaacggaatgcgccgacgccattcagcggcaatgatttgcgccatatgttgcgcatcgtgatggcgggctgcgtggggatgtttgtttacagctgggttaatacgcagtacggggtgttctacgtggtttaccccatcatgctcaccgggctggtgcccatttttaacggccatatcgcccggcagatgattgccaatgcgctgctgaactgcgtagaaatgacgctgctgtttgcggtgttggttcattacccgctgccgatgacgctgattgtgttcctgatgtacatgacgcgcttctacctgatgagccgggggccgctcttcctgtttggctcaatgggcgtggtctgtttaagcgtgatggcaaactttctaagctacccgaccaccgacatgagcgacctgatgttttctaacagcattggcagtcttttggccgtggggctgtcggcgcttagctgctatttgctgccggacgtagagccgcgcaagccgccgcctgctatccaaaaagacgggccacgggtcatgcatgaaacgctgctagcctcgttaacggcgaccatcttattcaccgtgttccagttttatacgctaaatgactccctggccgcgctgatggccgggatctttgccttgttccccatgcattttcgcggggcgattctttcgtcctggtggcgtatcgtcggggtgatagccgggtgtctctacgcgattctggtgcagctggttatctacgattttagccgccacctgatcctgctgatgccgttgattagcctcggcctgctgctggccgcgcgaattcacgtttttgagaaggtcgggccgggcgtgggtttttctattctgaccacgctggcgcttatgttcgggcaatacatgcacccgaaccaggatatcgtttttagcgcgctgtaccgtatttcatcggtttcggtggcgattgtcggcacgctggccgttacttttattatccataaggtgctgaataactttgcctcaacgcgctatatcgttaaatga

SEQ ID NO: 439739 - DNA, 168 bp, Serratia marcescens
atgctgctgaaggttcgcaccgagaactctcggacgcttgaggccttgctggcgcatctgtatgatatcaccggcgtggtggcgaccagaacctacatcgtgctgtcgacctatcttgagcgccctgtccagccaggcattacccacgactggccggaacaggattag

SEQ ID NO: 439740 - DNA, 663 bp, Serratia marcescens
atgcgggtgctgattgagctgccgcccgtaggtatggagtgcacagaagataccgacttcgatcccctattggcgcgctcagcggagcatggcgcgggtggcgcagcgaaacaggtcattgagcaggggccagttgttgttgaagaacggccacagcaggtgaggcatggtaaaggtgatatgttgccagtcgcagtcgggcaggatgtgctgctattcggcgatccattgctcggtggctttgagaccccagctgctgcaggctttggacttgcagctctggcagaaaaagcgggaatgggtgcagtccggcgaggcgcagcaataacggcgcacgcccatggcgcaggtgccgtaggcgagcatactttcgacgacgaatttggtccagtcgctgagggtgtcgccgtgtttgtcgagatagcgcctccagccatcgtcatgctggaacagcagctttgctgggtctgggaatatacatggtgcagagtctacaaggcggcaggggacatgaaaagggcgtcggcgccagccggctcacggcacaggcgtgctcattttatgcgtgtgtcaacgcggcggggggcatgtcacgccccgagaggcttggtacgctcaggcggcgtcggcgttgagatgaggctggatcttaaagacagttga

SEQ ID NO: 439741 - DNA, 522 bp, Serratia marcescens
atgctcactgaaccgcttcgggagctcttcaccctgacgtcctgccactggactcagcaggaagataaggatgacttctggtacggactgcggctgctcgccgttgatggtacgctttttcgcacacccgatacgccagaacttgcagaccattttgagtacataaagcatcgtccggacagacacactgagtacccgatggtcaggctgtgcgccatgatgtcactgcgcagccggttgatccatgacgtgaaattcggcccggcaaataccggcgaagtcagttacgcgaagcagttatcgccgcggtcgaaaagcctgacgctgtttgaccgctgctatttatccgcagagttactgattaactggcaacgcagacagaacgatgcgcactggctggttccccagaagggaaatacgaaataccttgtagtggaaacgttcggagaaggagaccatctggtggcgatgcaggtctcaccgctggcccgaaaacaggactgctcgctgcctgaatactga

SEQ ID NO: 439742 - DNA, 1146 bp, Serratia marcescens
atgaacgcagtgacgagcgcgagacctaccgcaacggctaccattgcccgtcagtacaacacccggctcggcacgctggacctgcatatcccgaagctgcgggaaggctcatacctcccccccttcctcgaggcccgcagactgtcggagaaggcgctcaacgcggttatccaggaagcgtggataaacggcgtctccccccgcaaggtggacgccctggtccagtcgatggggatgaccggcatctcacgcagtcaggtgtcgtccatctgccgcggtatcgatgagcgtgtgcaggcgttcctgcagcgaccgctggcaggagaatggcctttcctgtggctggatgcgacctacgtgaaggtgcgcaagaacggccgggtggtcagcgtggcggtcataatcgcctgcgcggtcaactcggacggtcgccgggagattatcgggaagggcatcggtgagtcagaagcgaaagcgttcaggctggccttcctgctgagcctgaaggagcgcggcctggaaggcgtgaagctggtcatctccgactcgcacagcgggctgaaagcggcgatacagcaggtgttttgtgccagctggcagcgctgccgggtccacttcatgcgtaacgtgctgagccgcgtcagcagggccagtctgtcggtggtccgcgcggcgctgcaacaggtgttcgtgcagaccgacgagaaaagtgcccattcgacctggcgtgaggtagccgggcagctcgaaaaaagcgcgccggcagtcacggagatgatggacgaggcggaggcagacgtgctggcgtacttggccttcccgaaagcgcaccgggtgaaaatccactccacgaacacgcttgaacgtctgaacaaagaggtgaaacggcgtgctgatgtagtgggtatcttccccaacgaagagagcgtcatgcggctactgggtgcggtgctgacggagcagagcgaggaatggctgctgcagaaccgctacctgccacaacacagcatggcggagatagaccagaccgctgaagagcgaatcgccacgggaaaaaaaggccaccgggataccggtggccataggttagtgcttcagcaaaaaacggtgattagccggctgctgcattcggtgacaaggaaatag

SEQ ID NO: 439743 - DNA, 213 bp, Serratia marcescens
atggcgctcaccatcctgccgaatttacaccacgtccttggactctaccgtacagaggtgtcaattgttggcggcgtgctgccctgcgccgagtggactgccgaatcggatgaaactgatgatcttcacctctacgccaacaagtttgattgtttggggacaatgctggatcagttggtcacagctcatggttgcgtgataagatccaagtaa

SEQ ID NO: 439744 - DNA, 873 bp, Serratia marcescens
ttggcccagcgcgagcggctggcctacatcgattttcggctctacttcttcggtgagatcggtcgcccagacctgattgagcgcttcggtgtggctccagcaggggcgacacgcgatttggctttgtaccgggaaatcgcaccgcataacaccaccttcgatggtagcaacaagatctatcgcatcgggcaggcgttctccccgttgttcgagcacgcatcgctgcgggttctgtcggccttagctcttggctttggcgatggcgtgaacggcccaatgaaggcgctgcttttatgcgaatcccccgcagctctgagcatccccaagatggatgtgttagccacgatttgccgagccatccatgccaagcggcccatcgtcatccgttaccactcgatgagcagaggagagtccgagcgggtcattgttcccttggcgctggttgacaccggactacgctggctcgtccgggctttcgaccgtaagagtggcgagttccgcgacttcgttgtcacccgcatcgaagcgccgacgctgatcgatgaggaacccaagagcaacgagcgcccggataacgacatccaatggactcggatagtggagctggacttggtgccacacccgcgtctcgcccgccctgagatcatcaagatggactacgggatgaccgatggctcgatccggatacgcgttcgcgcggcggtggcaggctacatgctgctgcgctggagtgtggatgcttcaccaaatcacaacctaacagaagaacagtatcgcctttggctcagcgatccgctggccttgtatggcgtcgaaaacgcaaagatcgcccccggctactgtgccccggcgaccagcacaacacgggaatag

SEQ ID NO: 439745 - DNA, 3132 bp, Serratia marcescens
atggcaatcaagaaatcggacctctactcatcgctttgggcatcttgcgatgaactgcgcggcggtatggatgctagtcagtacaaggactatgtcctcttcatgcttttcattaagtacgtatcggacaagtactgtgactctgatgactttgccccgccagtcaccattccaccaagagccagcttcaaggacatggttgccctcaagggcaagagtgatatcggcgacaaaatcaacacacagattattcagccgctgattgatgccaactccagccttgcacgcagtgacttccctgatttcaacgatccgaacaagctcggtgaaggtcaggcgatggtggatcgcctcagcaacctgatcggcatcttccaaaagcccgagttggatttctcgaagaaccgagccgataacgacgacattctgggcgatgcctacgaatacctgatgcggcactttgcctcgcagagcggcaagagcaaaggccagttctatacaccatccgaagtcagtcgcatcatggccaaggtcgtgggcatctcccctgccaatgcagtggcctcgaccattgcgtatgaccccacctgcggctctggctccttgttgctcaaggtggccgccgaggctggcaagcacatcacgttggaagggcaggaaatggacgtgaccactgctggtctcgcccgtatgaacatgatcctgcacgactttccaaccgccaacatcttgcagggcaacacgctggcctcgccgaagttcaaggatggcgagtcgctgcgtacctatgactacgtcgttgccaatccgccgttttcagacaaaacctggagcactggcctgacccctgccagcgatgcgtaccagcgttttgcttggggcgaaccgccgaaaaaacaaggcgactacgcttacctgctgcacatcattcgctcgatgaagagcaccggcaaaggtgcctgcattctccctcacggtgttcttttccggggcaatgccgaggctgtcatccgcgagaagctggtgcgctcgggcatcctcaaagggatcattggcctgccgagcaacctgttctacggcacaggtattcccgcctgcatcctggtgctggacaaggaaaacgcgtcagcacgtaaaggcatcttcatgatcgacgcctccaagggcttcatcaaggacggtgctaagaaccgcctgcgtgagcaggacattcacaagatcgtcgatgccttcaccaagttggcagagtcgccacgctactcgcgcatggtgccgctgaccgagatcgcagatcccaagaatgactacaacctcaacctgccacgctacatcgacagcactgaacctgaagacatccaggacatcgatggccacttgcgtggcgggattccagagcgtgacctggatgcgttgagcgactattggaaggtgatccccggtgtgcgcaataccctgttcgagtcagccgggcgctctggttatgtacagttgaaactgcccatcgccgaggtgaagaccaccatctttgcgcatcctgagttcaatgcattcaatcagacagccacccaggtgtttgcggattggaagcaagccagcacgccgcagctaaagggctttgcgcaaaacgatcatccaaagcaactgatcgaggcactgtccgaggatttgcttgcccgattcaaacctacgccgctcgtcaatgcctatgacgtgtaccaacacctcatggattactgggccgagacgatgcaagacgactactacctgattgccgatgctggttggcaggttggtgcgcaaccgcgtgaagtggtcaaaatcaaagacgcgaatggaaagctggtgtggccaaaagaaccctttgattacacaaagagtaagcgccgattcaaatccgatctgattcccgcatcaattctgatcgcccgttacttcaacgccgagcgcgatgccattgaagatcttgaagccaagctgacagatgtcgagcagcaaattcaggagattatggaagagaacagcggtgaagaggggctgctggccgaggtcatagaaggcgaaggcgacaagcagaagatcacagctaagacagtcaaagcccgcctgaaagagatcagcatagatcccgagtacgccgacgagcgaaaggcgttgcaggactactccgcattgctcgacaagcaaaccgatatcaaaaccaaactgaaagcagcacaaggtgatcttgacgccaagctcgatgccaagtaccccaagctgactgaggaagagattaagacgttggtggtcgatgacaaatggctggagacattagctaactccatacaaagcgagcttgaccgcgtgtcgaatgccctcactagacgcattcgacaactggcgcaacgctacgctatgccattaccggtgctcaccgataaagcagcgcatctttccaagcgcgtaaacgcacacatccaaaaactcggtgcatcagatgcgcaagggctaatctctggcgagtcacgtcttccgggatttgtcgcggagtggaaggtcaaaactttgggagaccttggttcaacgtatggaggactaaccggcaagaccaagaaggattttggcgatggttcgtcacgctacatcacattcatgaatgtgatgtcgaacgtcgtcattgattgctccgcatttgatcgcgtcaaggtattgccttccgaaactcagaatcgcgtacaaaaaggagatctacttttcaacggatcgtcggagacaccggaagaagtagcactgtgtgcggtattgaacgaggaggtatcaaacctgtacttgaacagcttctgtttcggattcaggcttcgtaatacagaagaggttgatagcttgttcctggcttattatcttcgagggaaggtgggtagggagctgatgaaatctcttgcccaaggatctactcgatataacttatccaaggtcgcgctgctgaaatcagtgctccgaatccctacgctcggagagcaaaaagccattgctgaagtgcttcaggatatcgattctgaattggaggttatggatcaactcacggcgaaaaaacgtgatctaaaacaagccatgatgcaatcactgcttaccagtaaggctagtcgggtatga

SEQ ID NO: 439746 - DNA, 1317 bp, Serratia marcescens
atgagcgttgcggagatgttttccgactttatcggcaatctggccattagcaacgcagaaaccatcagcacgcgctatggcgagctgacggctgcgttgaacaagcagtttcgagacacggaatcaaaagccgcgaacacgcttcaggtcggatcgtttggccggaaaacgggcatcaatggcatttccgatctggacatgctgtacatcatgcccaagaccaaatggggtgattacaacaaagccggtgggcaactgagtttgctgcaggatgcgaaagaagcgattctcaggcactacccgacgacgaaagtaaaggtagatcgcttggtagtaacggttacctacacaaatttccacgtcgaggttcagcctgtttttgagcaggatgatcaaagctatttgtatccagatacgaaaaatggtggcagctggaaaactaccaagccacgagcagagatgaccgcagtggcggatttggatacgaagaaaaatgccaatttaaggcctttgtgcaagatggcccgggcttggaagaacctgcacggtgtcggaatggggggggtgctactggatacgctggcctacaactttctggcctcaaccacggatttcgacaccaagagcttcctctactacgactggatgagccgggacttcttcaaatacctgtctgaattgccagagcaaaccgagtatgctgcgccgggtagccgccagcgagttaaggtcaaaaagaaatttcagaaaaaagccaagaagacccacaagctctgcttggaggccattgaggccgagcaccagaagaacgtcaacgataagtggaagaaagtttatgggcgaccattcccagcagcggcgacggtggctcaagaggtcatggctaagagttttgcacagagctgggatgactccgaggagtttatcgaggacaaatttcccgttgatattcgagaatccatgcgactggattgcgaggtcaaacagaacggattccgtgagttcttcctcagcgatatgttggctagaaggattcctttgatgaccaaaaagagcttgcgcttcgaaattacagacgtttcggtgcccgaaccatatgacatttactggaaggtcttaaatcgcggcgatgccgcccgtaagaggaattgcatcagagggcaaatcatcaaagatgatggattgatgcagcggacggaatccaccagttttcgcggcgatcacatcgttgagtgctattgcgtgaagaatggtgtggtagtcgccaagaaccggattcacgttcctattaatggggagcagaacaatgacgactga

SEQ ID NO: 439747 - DNA, 579 bp, Serratia marcescens
atgacgactgaccatatcaatgtactggaaggccagttgcgcgagtgttatgggcgagttgtctattcccacaaaacacacgagaaatgcgctgacattctgcttgagcggcaagggcgaattaaattctggcagattgtgatctctgcagcagtgaccggtggaattgtgtcgacgttcttcgggacgaaggaaattggggcagcaattagcaccctgctctcagcgagcctgcttgccttaaatgcctacaccaagaattacgaccttggcgagatcgcgcagaagcatcgccaagcaggctcagagctttggattattcgagagaaatacctttcgttgctcactgatatccgtgtgggagatgtggcgctcggattgattcgaacaaaaagggatgcgcttcaggatgaactgcatgccgtctatgtcggagcacccagaacaaacttcgaagcttacagtagggcacaagaagcgttgaagaagttggaagacatgactttttccgatgaggaaattgatgcctttcttccgaaagaattgaagagaatttccaagggggaggccaatgcctga

SEQ ID NO: 439748 - DNA, 3102 bp, Serratia marcescens
atgcctgagcaagcccgatctgagcgcaagacgcagaaccgtgttgccgctctgtttactgatgcaaatcgccctgactgccttgggttcgatcacctgggtgagtggagtaaacgcgacaacaaccgcagcatcgaggcagattttttgcgcagcaatctcaagaggcgtgggtattccgatgcgcacatttctgctgcactgcaaaaactcctgaccgccgccgactccaccggcatcaccctgtatcaagccaatctgcgaacctaccagctgctgcgctatggcgtaccggtacagattgcagctgggcaggcgcatgagaccgtccacctcatcgattgggaaacgcccggcaacaacgtctttggtctggccgaagaggtcactttgcgaggcggctacgagcggcggcccgatctggtcgtgtatatcaatggtatcgccgtcgccgtcattgagttgaaacgcagttcggtggaggtagccgacggtgttcgtcagctcatcactaaccaggaagagattttcaacaaaggttttttcagtacggtgcagttggtgctagcgggcagcgattcgcaggggttgcgctacggcaccacgggcaccccggagaagtttttcctcgagtggaaagatcgcaaggataaaggcgccaccacatcagaaccacttgcagagggtgcgctgctagacaaaccactggcacagatgtttgacaaggtgcgcctgctggacctgatccgcaatttcatcatcttcgatggcgggcaaaagaaggtgcctcgcgtccaccaataccgcggcgtgaaagcggcccaggagagggtgaggcagcaggaaggtggtgtgatttggcacacccaaggtagtggcaagagcattctgatggtgctgattgtcaagtggctgttggaatttgacccacacgcccgggtcctggtcatcaccgaccgtgatgagctggacaagcagatcgtgggggtgatgcgtaatgcaggagtgattggcgaagatgcggcatcaccgcgcatcacctctcgcgcggaacttgttgaaaagctaggggcagccacgccgcgcctgatgtgtgcgctgatccacaaatttgatacgaccgacctgaagggcgaccctccgagggtggttggtcgtgtatacgtcttcgtcgatgaatgtcaccgcacgcaaggcggcgacatgaacaagcagatgaagcggtggctaaagaacgccatcttcatcggtttcaccggcacgcctctgttgcgcaaagacaagcaaaccacccgcgaggttttcggcacttacatccatacctacaagtttgacgaagcggtggctgacaaggtggtgctcgacctgaaatacgaagcgcgtgatgtgccgcagcgactgacttcaaaaaaagccatcgatgcttggttcgaccagaagaccaaggggctcaacaacttccagcggtcggttctgcggaaacgttgggcgacgatggaagagctgatgagtgccggtgagcgtaaacagcgcatcattgccgacatcatccacgacttcggtgttcagccgcgtctgaataatgatcggggaacagccattctagtggcagcttccatctacgatgcctgccactacttccgtttgttccagaacacgacgtttggtaagtactgcggaatcattacgtcctacgagcccaatcacaccgctatttcgcgcgagcccaaggacagcgacgagcgttacaagttcgacacctacactctgcatgtcctgcagaaaaatcagaccaccaaggactacgaggacaagaccaagcagcgtttcatcgacgagcctgccaatctgaagctgctaatcgtggtgagtaaactgctgaccggtttcgatgcgccttcctgcacctacatctacctagacaacgagctgcgcgatcataacttgttccaagctatctgccgcacaaaccggctcgatggtgacgacaaagactatggccacattgttgactacaaagagctgttcgagaaggtgcaggactccatcgccgtttacacctcggacgagctggacatcgatgacggtggcgatgatggtaacgtagccgtgaaagattggcttaaggaaggcaaggcgcagctcgatgctgccagggagacgttgagctacttgtgtgagccggtggccatgccccgcaagatggagcagtacctccactatttctgcggtgatgccaacgatccagaagcattactgaacaccgagccgttgcgaatctcattctacaaatccacggctgtattcctgcgagcctatgcggcaattgcgcagaatttggttgaagcggggtattcatcggcagatatttccttgcttgaaaaggagatccagttctacagcgatatccggacggcaatcaagaagcattcaggtgaagagctggacatcaaaccttatgaggctgatatgcggcacctcatcaacacttatatccaagcagatccagctgataatttggggaaccttagttcgttgtcactgaccgagcttatcatcgagaccggtattcacgatgctattgcaaagaagctcaatcagaagggcaagctgtctaaaaatgcgattgccgaagggatcattaataacattcgcaaagtgattgtccgtgaccaattaacagatccaaagttttatgaggaaatgtcgcagcttttggatgacctgatcgagcaaaagcgagacgacactgctgcatacgaagaatttctaattaaggcagaggcgttagtaagaaagatggcggcaaaaaatacagtaggccatccccatgtgcttaatggtcatctagaggctattaccattttcaacaatctggcgagtatttcgacaaccacgttcgtttctccgacagatgaggatgccaaggcgatgctcgcacttgaacttgatcaggcgatgcgtgagaaggctccagctggctggaaaggggatgacgtccgagagaagcaggtgctgaatgctctgttccccatcatgtcgcgggatcgggtcgcgacgctggccatttttgaaatcatcaagaaccaaccggggtactga

SEQ ID NO: 439749 - DNA, 717 bp, Serratia marcescens
atgaacgagacgatccaactgggcgagatttcaatagcggtaaccaggaaggacattaagaatgtccatctcacagttcatccgcctgatggacgtgtgacccttgccgccccatttaacactcgtctggaagtagcacgagcctatgctatctccaaattggcctggattcgtgatcagcagagaaagcttggatgtcaggcacgggaaacaccacgtcagtttgttgagcgagagagccactatgtttgggggcgacgctacctgatgacggtggactaccaggatgtaaagccctccgttatcctcagcaacaagcggattacgctgattgttcgtccaggcagcagcacagaaaagcgtgcggagttgatgcatgagtggcacaagttattgctgcacgaggtcgttccaccactggttcaaaagtgggagcgaaagctcaaagtgagcgtttcaggctattttctgcaacgcatgaaaaccaagtggggtagctgcaatcactcagctggaaacatccgcctcaatacggaattagtaaaaaagccgaaggacttgctggagtacgtcatcgtgcatgaaatggctcatttgatcgagcctacgcacagtgagcgtttcatcgcaatccttgaagagcattaccctcgctggcgagaggcccgtgccgagctcaacgaattgccactggcggcagaggtttggaaagagtga

SEQ ID NO: 439750 - DNA, 2406 bp, Serratia marcescens
atgcaaagcgttcgtaaggttgtcaaagtttttatagcatctcctggggatatgaacccagaacgaaaaatagcaagagaggttgtagaagaaataaatgcccttcacgctgatacttatggatatcaagttgagatggttgggtgggaggaaactgttggttcaatggggaggccccaagaaatcataaatagagatttagctcgttgtgaactttttattggaatgatatggaagcggtgggggacgccccctgatgtaaacggaatatttacttctggatttgaagaagagtttactctttccattgaaagatataataacgaaggtaaaccccaagttagcatgttcttcaaagacattgaggaagagttccttagagatccgggtgatgatcttaaaaaggtattgaaattcaaagatgagttaattcagggcaagaagattttatttgagacattcacaaatgataaagactttgaaaagaagctacgtaaaaggctagttacatatattaatgagttagcgcataatgatgcaaaatccaaggctgaggaaaacaaaagtcaatcctcaatagaaatcgttgaagccaaagaggaagaaagtaaggtagagggaaggtcaccattcacggaacaaagtttttccttcataaataactttatcacaaaattgaaaaaagaaggttgggaaagcaccccaccaacagatattgcttacttcaaacttctctctaacatcctaaataagagcaataatgatgacactagcctaggggctcacgactcaaacttaatttatttaaatagcgaaagatatcaattggggcatagtgaaagactaggcctaattatgtctggatttgaactgtttgatcatcacacagttccattatggaagtggatttcagaaaacaataatttaggtttagaattttactctgttatagctaaagggcaaagaagaagaaaggtgatagatgcgttaagattaatctctcaccaaataacagtcaatagaggttttttcttagaggaatggtttgcaggagacactagcgattcaattaaaacatcagcattgaaatatctctctgagttaggaacagaatcagacattgatataatactaaaagaatatgaaaacaaagatatcagcacaaataatgctgccgtagatgctatcataagtataaggatgagagatagtgtcgcaaaaggatttgcggcaataatggagtaccaacctatttctattagtaataggttactcaaatatataaagaaaaatggacatttcttacatgaactagacctgagatcaggtttatttaacaaaaacaaggaaattagaggtatttgtcttgacttgttaatagatagaaaaatatctgatggaacactatttatagatttgatgtctcacgaagattatgaaatcagacttaacaccttggtctacttaacttcaaataacaactacaatgagaacaaagagaaagccaaatcaattttgaaatttaaagataaagacggaaaagaaaaagacgataaatacaaggagtttttaaaaagaaccctacacttagagactaaagacaaccttatagaacaaagggaaacatcatatttacttgaagctgatgcactaatcgcacttgcaaaaaaggaaaagaaaaaatacatagaagaaatcagggggttaattaaagatggctgcgagtcacattataaaaatatagtcaacagcttcaaaagtgagaaaacattagccatacttaaaaatatcgaggctagtgtaagaaacaacatagcagccgcttgtgcagactggcttttccagtgcatggataaatctgacatattaatccttcgagatttcctttctaggaaaagcactgtcatgacaaatgtcattgctaattacatttctaaattcggagaatggcaagatattgagctaatttataatgcaaacttcacccagccaagctactctattctagggttagccgcacaaaataataaaatgatgaacatcgctgtgtcggccatgataaaaataggtaagggcagagaggatgagttattagcgctacctatgaatagcaatttaaaggcacggttaatcgctcaattaaatagcaaggagttttcgagagtatcaagtaatgaaataaaaaaactattaaatgatgaagatataaatataagggaaaaactctcccttaaaataattgaatgcctacccaaaaaagatattgaggcaataatgaaagattatttatatcaagatacttatttttacaatgtcgtgcattggttggatttaggtatatcacttaaaagagatgtagcgcaaaagtcagccagatcagcactccaagagttcttagatgaatga

SEQ ID NO: 439751 - DNA, 1020 bp, Serratia marcescens
atgaaatatgtccctgtaggtgtcgacattgcaaaacaactgatgcaggttcacttcattgatgagagtagcggagagatcgtagataagcaggtaaggcgagatgctttcctggaatatttcagtaatcgtaatccctgtcttataggtatggaagcgtgcggtggttctcagcactgggctcgtgagcttcagaagcaaggtcatagagtcagactgctaaaaggtaaattcgtcaaagcattcgttatggggaataagaatgatgagatggatgccagagcgatctggatggccgttcaacaacccgtaaaatccatcgccataaagacggaggagcaacaggcaatattggctctgcatcgcatgcgtcagcaattggtgaagtttcgcactgcacagataaatgctcttcacggcatgttgctggaatttggtgaaactatacgcaaaggcagggcttcattggcgaacatgttccccggtgcactggagcgtttgaaggaacgcttgccagcatatttgatcaacctgcttgatgaacagtaccagcgacttgctgaactggataagcatattgaaggtattgaaaagcagctcacagcagtggcgaagcaaaatgaaacctgtcggcggctattggatatccctggtgttggaccattaattgctaccgctgcagttgccacgatgggggatgcttccgcttttaaatctggaagggagtttgctgcttttgttggtctggttccgaaacaaacaggaactggcggtcgggtgaaacttctgggtatcagcaaacgcggagatatctacctaagaacaatgtttatccacggagccagagcggcatcattgcaggcaaaagatcccgggccctggataactgaactgaaaacacgtcgaccagtcgcagtggcgatagtggccatggcaaacaagttagctagaaccgtatgggcgatagcttcccacgaccgaagatacgagagaaatcacgtcagcgttaggccgtactga

SEQ ID NO: 439752 - DNA, 354 bp, Serratia marcescens
atggataagaaatctgctcgtatccgtcgtgcgacccgcgcacgccgcaagctccaagagctgggtgcaacccgcctggtggtacatcgtaccccgcgtcatatttacgcacaggtgattgctccaaacggttctgaagtactggtagccgcttctactttagaaaaagctatcgcggagcaactgaagtattccggtaacaaagacgcagcagcagccgtaggtaaagctctggctgagcgcgcgttggaaaaagggattgcgaaagtatcctttgaccgttccggtttccaatatcatggtcgagtccaggcactggcagatgctgcccgtgaagctggccttcagttctaa

SEQ ID NO: 439753 - DNA, 882 bp, Serratia marcescens
atgcgcatactggtaactggcggtaatggccagctaggccattgcttggcggatacattgcctgacaattggcagatcattagcctagaccacaaacaacttgacattgctgattggcctgcagttcagcaaactgtcgcggcgttgaatgtagatttcattgtaaatgcagcagcttatacgttagtggataaagctgaagaagaaatcatcgctgcggaggctgcaaatgttatcggtccagctaatctggctatgattgctgagagcctaagcattccactgattcatatttcgacagactatgtttttagtggcgcagaaaaaggtatttctttgtgtgaaaattcaccaacggggccgctaaacgtctatggacaaaccaaactgcttggcgaacaagccgtactaaccacgtgctcacgcgccgtggtgatccgcacatcctggttattcagtgagtatggcagctcttttgtgcataccatgcttaaattgggaaagacacgtaaatcgcttgctattattaacgatcaatttggccgtcctacctatgctggtgatttagctaaatgtattctcactattattagccaaggggttaatgaatccaagctatatcatttctgtggagataagattgtttcgtggtatgagtttgctgcggagattttttctttagctaagttgtttgatgatagttatagatttatggttttgtcttctattaacagtgaacaatataaatgcgcggccaaaagacctaagcatgcgatacttaactgcgaaaaaatatatcgtgaacgtgggatctgcaatagcaattggcgaatgagcctagacaaagtagttccgaaaattatttaccagatgaataattaa

SEQ ID NO: 439754 - DNA, 285 bp, Serratia marcescens
atgagcacaccacgatttacacctgaatttaaggaagaagccgtccgtcagataacggaacgctattattccgttgacgaagtgtctgaccgtctgggcatttctgcgtacagcctctacaagtggctacgagctatcaaacctgataacagcgaacagcatgcccgggatttactggaagccaaaagcgagatcctgaaactacgggcacagctaaaacgtaccgaagaagaacgggatatcctgaaaaaggccgcgcggtactttgcaagggagcccgactga

SEQ ID NO: 439755 - DNA, 165 bp, Serratia marcescens
atgaaacccactctctcacgtgaactgacgctcgacgcgctgatgatggccgtctggcgtcgaaaaccagacggtgaggtcatcgcacatagtgatcagggtagccagtatggcagtgacgactggcagcacttctgccgggccaataacctgctcggtgcatga

SEQ ID NO: 439756 - DNA, 213 bp, Serratia marcescens
atgagccggcgtggcaactgctgggataatgcggtggccgaatcgctcttcagttcactgaaaaaagaacgtatcaggaagagaatatacaaaacccgggatctggcccgggcggatatcttcgattacattgaagtgttctacaaccgggcccggcgtcacagtcacctcggcggcgtcagtctggaggcctttgaacaggcctcgtcgtga

SEQ ID NO: 439757 - DNA, 444 bp, Serratia marcescens
atgcaccttgcgccatggctggcctatccggagcaggacagcacggcgttcaaagtcgctgacggccagcacctgaaggcgtatgtggatgattcccggcagtgggtcgtggcggagctgccgcccggcacgcgggtgacatggaataaggcgattcataccgacaccctgaccggggccaaagggcgtcagtatgcgcacatcacgctggaggagccggtcacgggcagcatgagcctgaaagccggtgacagggtgtggacagtgtgctacagggggaatctggttccggcctgcgatagcgccatccgcccggccggggacccggtggaccatctggtgtattttcaggtccccagcgaggacgggcatgaaaaacgctatcaggtgcacattgaatgcctgacagcggacgacctgccgcacttcctgagcaacccatag

SEQ ID NO: 439758 - DNA, 543 bp, Serratia marcescens
gtgtacctgcaattcatcatcggagacatacagaagggcctgataaccacacagaccgaaacggtgatggcgctgtccgggcaggctgtgaaggacaaagagggtaaacgctactggccggaaggatcgtcgcgcaggctgctggcgaagtcggatttgcagctgctgtcccggtatgatctggcaggtcggggttttgatacggcagaagacagcccggcgagctttgatcatctcgacgggaagacgcagccgaaagggctggtaaagacgatttttgagcggttcttcaacgtggcgaacaacgacgggaagtatggtcatcagctggtagccttcaactaccggcagctgctgaacaaaatcgataatccgaagcaggactggtattacccggaacagtaccggcggacggtgcagaaccggtcaatgcgcgatcacctgtacagtctgtgcgtgcccccccctgcgagtggtactactcctaataaaataacggctcataaagaaccgttatttttacttatcgtaatagatgaatga

SEQ ID NO: 439759 - DNA, 852 bp, Serratia marcescens
atgaaaattgcgattacaggatctactggaaagttagggcatctggttattaacaaactgaaagaaaaattagcgccatcacagataattgctctggcaagaacacctgaaaaggctgatgcttttggcgtcactgtacgtaaatttgattacacgaagccagaagaactggttgattcactaaaagatgttgatacattactacttatttcagcaaatgaaattgggaagcgtgcaatccagcataaaaatgttatcgatgctgcagtaaaatccggcgtgaagcatattgtttataccagcttcttatatgctgatagttcaccattaaaccttgctccggaacatgttcagacagaattagatattaagaactcagggattgattatacgattcttcgtaatggctggtattcagaaaattatactgattcaattaaaacggcactgcaactcggcgcattctatggctgtgcaggtaacggaaaaatatcatctgcacctagaaaagattatgctgaagctgcagtcatcgctttaacacaagacgggcataagggaaaaacttatgagcttgccggggatgatttctatacactgacaaatctctccgaagaaataaccaagcaaagtggaaaagaaataccttactgtaatctttcagaagatgattattcttcagctttgaaaaaagctggccttccaaaagactttgctgatgcaattgcatcatgggatactggagcatcaaaagatgcactattcaatgatgaacgcaatctatcaaaattaattggaagaaaaacaacaccaatctcagattgtgtaaaagaagcgctgagtgatatttaa

SEQ ID NO: 439760 - DNA, 1020 bp, Serratia marcescens
atgaagtcttcaaaaaaaatagcttttatggcagttttatctttttccatactatcacaagtttcactagctcaggttgatatcatgaatgataaagaatttaatgaggttagagagcatttgaaatctgatttcccagggattcctgataaggatgtgttgcagtacttaaaagatggtggtaactataaaccagcgcctgaacttttaagtttgagtggtgttcctaagggggtaataaccgggcatactttggtgggaagtaaagcttaccctgatgtagaacataaatactggatttatattccagctaattataatgataaaaaacccacaaggctgatggtttttttagatggtaaatcttatttagagtatggaaaggataagaagtattcatttccagtccctaatgctttagataatttgatttatcaaaaacaaatcccgccagttatagcggtatttattgatccaggtagtaaaggggatgggctacctatttatggtggcaaggacaatagaagtttggagtatgactcagctgatggaaaatatgctaatttcttagttgatgaggttttgcctctggttcagagtagatacaatatagctaaagatcctgagtgtcgtgcagttatgggggctagttctggaggttctggagcttttggtgtggcctggcataggcctgatgccttcagaaaagttatttcctcaataggtagctatgttaatattcgtggttctgactattatatatctgcagtaaggcaagaagaaaaaaaacctataaaagtgtttttacaggatggtaaaaatgaaatcgatacggtttttggtaactggaaactagctaatgaacaaatggcatcatctttagattataagggctatgactatagatttgagcaaggtgatggggggcataattatgttcacatggcctctttggctggagatgcatttcgctggatatggaatgataaggcagatgaagatagctgcattataaaataa

SEQ ID NO: 439761 - DNA, 126 bp, Serratia marcescens
atgcttcatactaccaatcccgtcattaaacacaaagccgatttgctcaatctggctgaagaactcattaacgtgtcgaaagactgtaaaatcatgggggtctctcgcgataaattttaccgttaa

SEQ ID NO: 439762 - DNA, 474 bp, Serratia marcescens
atggacagtcaccacaatgatattttgctggttgagcaaatcgaccgcctgacccgactgagtaacagcgactggatgacgctgaaaaaacagatagaacaacacgcgctgcggattgtcagcctggatgttcccacctcatggcaggcactgtcagataaagacccttcgcaggctgacccaatcacccgtgccgtgataaccgccatcaataacatgcttatcgacctgatggccgcaatgtcgcataaagactggctgagccgccgtcagcggcagaaacagggaattgagcgagcgcatacattgggtaaataccggggaaaacatgccgatcaggagcggcatcagaaagtcctgtactaccggcaggtcaagaaactgagcatccgtgaaacggcagatgcaacgggctacagtgcttcacaggtttgccggatacaagcgctttataaatataatgaatcttcctga

SEQ ID NO: 439763 - DNA, 2988 bp, Serratia marcescens
atggcaaggaggcagattctttctctgtcggaaagagaatcattactggcattgccagatgatgagttaacgctgacacgaatggcctatttcagtgagcatgatctggcacttatcagtgctcaccgtaaacctgccagccgttttggttttgccgtccttctttgctacctgaaaaatgtcggctttgctccggataaaaaaatcccaccctctgatgcgctgctgaagcatatcgccagcaggctaaagcttaccgtggatctctggcctgcttacctttccggcagggatacgacccggcgtgagcatttaaccgaactgtaccgctatcttggcgtaaaggcgttcaccggaaaaatacagcaggactgtattacgcacctgttgtcgatggcgacgcgcaccgataaaggtattctcctggccgaagagttactggtctggctccggcagaacaacgtgatgattcccgcgattgatgtcgtggagcgtacctgtgcagaggccatggctggcggagataaaatcgtatttcagactctgaatgccccgttaactccggctcacagggatgccctggatcgtttacttgagtcatcagataatcagccttccaggctgacatggcttctgcaaccgccgggtaaaatcaatggtaaaaacgtgctgcaacatcttgatcggctcagcagtattgaatcgctggcattacctgaaggtatagatcgtaccattcaccagaaccggttgctgaaactggcgcgggaaggccgaaagatgagcagccgggatttaacccgattttcagcagcccgccgtcatgcgatcctggtctgcgtgctggaagaagccagagccacactgacagacgaagtgattgagctgcatgagcgaatgctgaacagcctgttcagcaaagccaaaagaacacaggctgagcgccttcagcagaccggaaagctgatccagtccaaactgaggcagtacatcgatgttggtcaggcgctgtctgatgcccgcgactccggtggcgatccatggctcgcaatagaaaacatactcccgtggcctcaatttgtcgccagtctggaggaaacacgccatctcgccagaaaaaataattttgacccgctgcatattattactgagaaatacagcacattacggaaatatgccccgcgcatgttgtccgctttgcagttagtcgccaccccggcagcgcaacctctggctgatgcactggttgtgatcaaggatatgtaccgtaagcagtcacgtaaagttccggcgacagcgccgcttgagtttgtccctgaaagctggcgcaaggtggtgatgacacctgcgggtattgatcggcagtattatgaattttgtgcgctcagcgagcttaagggggcgctgcgctccggggatatatgggttaaaggttcgcgccgctacaaaaattttgatgattacctcattcccgaaaaggactttgacaaactcacaccggcgctgccactgcccgtatctgctgattatcatgagtacattgccagccgtatgaccctgcttcagtccagacttgaagaggtcaatgctatggctgcccttggtgaactgcccgatgtggaaatatccgacaagggcgtaaaagtctctccgctggataactgcgttccggcacaggtttcaccgctggcagaactggtttacagcatgctaccgcgacctaaaatcacggaaattctcgacgaggtaaactgctggacgacgtttacctgtcatttttcgcatataaaaaatgacattacccgtcccgatccccgcctgctcctcaccaccattcttgcggatggcatcaatcttggcctgaccaaaatggcagaagcctgccccgggagcaccaaatcatcactcgaagatattcaggcatggtacatccgcgacgaaacctattcagccgctcttgctgagctggtaaatgcgcagggaaaaagaccgctggcggcattctggggagacggaacaacgtcatcatcagatggacagaatttcagaacaggcagctcaggccgctacgcagggcaggttaacccaaaatatgggcaagagcctggacgtcagttttatacccatatttcggatcaatatagcccattttacacctgcataataagtcgggtcagggattcaacccatgtgttagatggcttgctgtatcacgaaagcgacctggaaatcagggagcattacaccgatacagctggtttcaccgatcatgtctttgccctgatgcatctgctgggctttgcgttctgtccacgaatcagggatctccacgacaagaagctgtttatcaaagggaaagcagaccagtattcggcacttcagtcgctgatatccacgaccagcctgaacctgaaagaaatcgagattcactggcgtgaggtgctgcgtctggcgacctcaataaagcagggaacagtgacggcatccctgatgctgaaaaaactggccagctatcccaaacaaaatggcctggcaaaagcgctgagggaaattggccgtattgaacgaacgctgtttatgctcgactggttccgcgatccggcacttcgtcggcgggtccaggcggggctgaataaaggagaagcccgtaacgcgctggcgcgcgcggtattcctgcaccgtctgggtgaaatcagggatcgtaaaccggaaaatcagagctaccgcgccagtggactgacgctgctgacggcagctatctcgctgtggaataccgtctatatggaaagagcggtcgatgccctgaagcgcaaagggatgaagatcaacgagcaactgctgtcgcatttgtccccgctaggctgggaacacatcaatcttacaggcgattatatctggaaaagcaatcggataccggcttccggtaagtttcgtcggctgcggccagctaaagtaggaaggtcaaaaaacgaccttaacgtacaataa

SEQ ID NO: 439764 - DNA, 411 bp, Serratia marcescens
atgaaattatttccggagctctatggttttgttgttttctctgaacagccgctgctgtccttcatgaaaaagaacggtatagggaatgatttgctcgcctttatgacgacgaatgatgcggcagacaagttgaccgaggcgggggtcattgtccctatttttgaagtgcctgaggggttgtatgaggtgtctttgcagtgctcggaacccgccgagaacatcgccaaacttggggtgttcaggtcagagggtaaattgagcatctgcggtatgggatacttggcggattttgacgtagaagccttgcgtagcaaagagaaaatccaagacttttcggtcactctaggagtgtttgagttgtactgtgccattgatgaatccaatgagaaaatttcattaattttggattag

SEQ ID NO: 439765 - DNA, 1404 bp, Serratia marcescens
atgcaactgacgctccagatagtcataaccgatgaatcaggtgtaagtcgaacggaagaactgatggtattgcagaggtcggaagatgctctgaatgatattggattatcggtttcagagtcgaagcggttgctgaataccgtccagcagtcgatggttcaacagcaggcggatgaatatactcgccagcatatccagtgtcctcattgccttgcggcgcgcaggatcaaaggccaacagaaaattcagtaccggacactttttggcgttattcctgtatcggggattagggtataccggtgccgctgcgaagaaagtgcaacaaagaccgtcagtctgctcagtgactgggccggcgatcacactcatccggcgctgaaatatatagaaacccgctgggcctctctaatctcgtatgaaatgacaacccgtttgctgaaagatgttctgccggtgggccacagtctgaatgcctcaacggtgaggaatcgcctgtgccaggtggcacagcgtcttgatgctgaagcagaatcacattccggttttctttccggttgcccccgtgactggggaaatctgccaaaaccaggaaaaccgcttgtggtgggtattgatggtggttatgttcgcgatcgggatgacaaaaaacgtaattttgaaattattgccggtaaatctttttcagtggggaccccggcggacacgcgccgctttggttttgtccagaagggcgactgccatccggaacgccgactcatggcacacctttcggcccagggaatgcaggccaaccagcagatattctttttatccgatggcgcggataacctgagggaactgcagttcggtatgtaccctgagtcaattcatgtgcttgactggtttcatatcacgatgcggctgacagtgttaatgcagtatgcaaaagggctgcaggcatcagatccggagacaggcagtaaggtttcggcgcttctggaaagcagtaaacgatacctctggcatggcaatgttgtcactgcactggagcatattgatgattgcgttatgtactgcgatgaccctgaactcaactatgcaaacctgaaatccctgcaaaaacagctggatgaaatgtatacctacgtccggaacaatcagagaatgatcccaaactacggagaaatgcgccggtacggggagccggtttcaacggcgtttgtggaatccacgatcaacgaagtgatcgccaggcgaatggccaaaaagcagcagatgcagtggagcagaaaaggcgcgcattatttgttacagacccggacagctgttctgaataacgaactgcaggataaatttgccagctggtacccgggttgctcaatagacgatcagaggaacgggaaattatccgcgatggcagcatag

SEQ ID NO: 439766 - DNA, 240 bp, Serratia marcescens
atgaatagcttcgacgcgaacgtcatgaagccagtgctcaaagaagttgtattcataggtaaagcgatcgccagcatcaaaagcaaaatcatcaatcacaacccggaatgggttatcaggaaagccaatgcccccttcgtaggagatgccgtaatctttgccataaatgtgaaactgatgaaggtagtcatcgccccagccctgcacgatctggatgatatagtgaagtgcggccagtga

SEQ ID NO: 439767 - DNA, 435 bp, Serratia marcescens
atgcgctgtcgaaacaaccgtctccagagcgcctccacgaccataggctatcactggggtaccacaagcttgagcttcgacaggtgtaatgccaaagtcttcctcagcagcaaaaacaaaagcctttgctttctgcatatgttctttcattacatcattagtttggtagcccattatttctacgtttttagtcgctttagatcttatctttttcatttcagaaccatctccaataacgaccagttttttatcctgcatgtgactaaaagcttcaacgataaggtcaatttttttatagggaaccattctcgaagcggtgagataaaaatcatccttattatcacaaacatcaaaatttctaacagacaccggaggataaatcacatcagcctgccggccataaactttctgtatacgccgagcaataaaacgtga

SEQ ID NO: 439768 - DNA, 339 bp, Serratia marcescens
atgaaaacacgacactacctcgtggtactgggggctctgttgctggcgggctgcagtcagccgacggcgaaagccaaaacccgaagcggtggcggtgggattattgtcgccatcaaccacaccaaatgggcgatcaaccatttcagcgtcgacggtcagtcggggatagacattatcgggccctatcagggtggcggtggcggctgctgctatggcgtgccggcgaaatggcggccgggtatgacggtaaaaatcgactgggaaacaggggtgggcgatatggacggatttccagggtttggtgatgatgcgaaatatctggcctgggaaaaaaaatga

SEQ ID NO: 439769 - DNA, 2091 bp, Serratia marcescens
  misc_feature (1734)..(1743): n is a, c, g, or t
ttggtactaactgattttcaacgtaatttatgggatgatcttcaagctggagaagatgtgattactgtcgcacctacttctgcaggtaagactcatattattctacattatttattgtcagaagtaattaacagtgatggtgcttttgctgcaattgtcgtgcccacgagagctctaattacagaagtgtcttcaaaaatattcgaaatggcaaaagaaagaggatatgaaaaagatatagaaatttgtactatccctaaagatgaagttttttctgatcgtactttttttgtcatgactcaagaacgtttacatgaaatccttcttcgcggtgatatatattttgattttcttttcattgatgaagctcataatatttcggatgagggccgaggtgtattactccatcttacccttgaacgaattctcgaagatagcagccctcaaattataatcggcatgccttctcctcaatatcaaaatagtttttcaagcatttttaaggaagtcaaatttactaaagcaattactgcacattctcctgtatctaaattgatctttgaggtaagagctaaagggactaatttagaaattagtaagcgtggttcagatgataaaattacattaccaaaaaaatttaaaaataaaaaactagctgatattgtgctaaggcttggtaaaaatgaaagtaacataatatatagaaatcaaacaaatcattgtgaacatattgctgacgaaatagcgaaaagaattactgattatgaggttaatgatactctaaatgaggcttctgaatatatacaacatttcatccatgatgatttcactttagtagaaaacattaaaaagggtgttgcatttcattatagcccgctacccacttctgttagaattcttatcgaaaatcttgttaaagaaggcctcattaaattcatatcgtgtactagtacgctagctgagggtgtaaatcttccagcaaagaatctgtttatgttgaatcccacgtttaaaaatggcctttataataaaacagtaagaattgaggatgtaaaaataaacaatattactgggcgtgcaggtagaatgttgcatcatttttccgggaatatatttttggttgagccagacgattggacctttaaagattattttgatgaagacgataataaaaaagaagaaaagataccaacatattataaattgattaatgaaaatacaaatgaagtcctaaggactctgactggatttcaacctgatgatgaagaccattctaagttctattctgtagctaataaattaattaagtcatatggtaatggagatctggactcgacattctcttcaccagatattaaattagatgattatactattaatggattaaagcaagttattgaaacggcatatttaaatcttaaagttcctcctcttattttagaatctaatccaacaactggatatattcaacagaataaggtttttgagtttttaactagcgaaattgaccttaacgattggtctctaccatatccatggtctgacgaattttacgatagaatacttaaaatcgtatttaaattgattgagcttggtgtatttattcctagcggaaattacactgcggattatatttgttacattgctaaaaaatgggttcaaaataatagtttaaaggatatgattaattctcaaatcgaatgggataagaataatatagtaaagaaaaatagnnnnnnnnnngttaaaaacataataaacgtaataaataatgatattagattcagactttcaaatgcagttaagtgttattttactttgtttgctttggcagcgagaatgaaaaaatcagatgctcaaagtattaagttacattactatcttgaaattggcgccagcgatgaaaggatgatgtctctgataaacttgggattatccagagaagcatctaaagagatttctgataatacatctaaatcgcgaatgtataatggcataagcgatttgattcagttactaaactcatcggaaattaatggtatacatagagttatcaaaaaagagatagagcatttactcagccgttcttga

SEQ ID NO: 439770 - DNA, 195 bp, Serratia marcescens; identical to SEQ ID NO: 438477

SEQ ID NO: 439771 - DNA, 1200 bp, Serratia marcescens
atggccgcccgtccgcgtaagagagaaaaccggcatcttcctgacttcctctattatgataaagatgccggggtttaccgatttacgttaattaatggcgtaaggaagtcgttagttgataattcaacaaggaaacctttagatcgcgccacatcgattgcaatagctcgtgaatataacaatcgtatgcgaccagaagtcgcagtttctgttgactttttaattagggagtctggcggcattcaaggggaggcattaccattttcggaacatgtcgatcatattatgaatcgcgcaataaaagacgaaaagccgtctgaaagcacttgtgatgattggagaaacgatgccattcgagtgaaagaattttttgcggatattccagcatgcgatatcgaactggagcacgtcaacgcctatattaataactatcatgcggaagcatcggcaaacgtgcaaaaccgtaaagtcagtttcctgaagaagttatttagctatgcggtcgatgaatccctcatgcttgataacccggccacacgcaagaaaatgcgccggattgatgagaagcgacggcaacggctttctctcgataacttcctggccatacgtcgcagtgccgcaccatggttgagaaccgctatggacctcgcgctacaaacgacgcatgccagattggaggtctcccggatccgctactcaatcaaggagcctaaaaacggcgtgtgtggttgcgtatggctggatcagccggagaatggtatttacggcatgctgtatatccaccggcaaaaagttcagaaaaaagaggcatcgcatgttgctataccgatcggtggcgaactgaagcgaattattgacgatagccgggataatgtagccagtccatacattgtccatcggataccggccaggagcgtgaagcccagtaaagaggtttcgcacccgactcaagttgcacccgactatctcagccgggcattttcagatctgcgtgacaggctaaaactatgcgatcacctagagatggatgaacgcccaacgttccacgaaatccgcgcactggccgcgcatttgttcgacaaccaagggattgatccgcaggggcgtatggcgcacagcgatgccaaatctaccaagatctataccagcaatcacattgattgggttgtcgttcctcatggggaaattaaggcaggatag

SEQ ID NO: 439772 - DNA, 588 bp, Serratia marcescens
atgaatgatctgatgattgacctggaagccatgggcactaagccaaatgcaccaatcgtggcgatcggcgccgtgttctttaaccctatgacgggtgaattgggcccgcagttttataccgcggtaaatctggcaagcgaactggccgccggcgccgttcccgatggcgataccatcaactggtggctgaagcaaagtagcgaggcccgcgcggcgatcaccagtgacgaggcaaaacccatcgctgaagccctcgatgcgttgaccaattttgtcacccgcagctgcgagcagccgaagtatctgaaggtttggggcaacggtgccgccttcgacaacgtcattctgcgtgaagcctacgagcgctgcagtaaggcgccatgttggaactggttcaacgatttggacgtgcgcaccatggtgaacctcggccggcgtgtgggattcgacccgaaacgcgatctgcctttcgacggcgaacgccacaacgcgttggctgacgctgtacaccaagcccagtatgtttcgctaatccaccagcgggtgatccctatgcctgatgaagagagtgaaaatgaacctggctga

SEQ ID NO: 439773 - DNA, 822 bp, Serratia marcescens
atggcactaacgaccgagaagttgaatagcagcgatgaacaaatctgcgacggagactctgccgaaactatcgagaaaaacccgaaatcgtgggctgcgtggaaacgcgaatctgaacggctccaggccattatcgatgctaaccaggtggcggcgccggtgggctatttcgtgcgccaccgttcgacatggaacaacccatcaacgtggtcgatgtggactgaatgcagtggtgaggattacgcagaatactgcaaacgcatcgctaccggcgaggccgacgcggggcggttctatgaggcttgcattctgtacgatgcgcctccggtgccacaatcgactaacgcagcggactggggaatcaacatgcaaaccggcacgccgatcctcgtatacaaaaactgctgcgtgattgagtcagagcaagcgcactacgtgctttcgctcatcaatggcgcagcaatgccagcgccagcagtgccggtggaaatacgaaacgcttatagagctgaaggcctcgctgaggtgttgaaagacgcgagagaatacgcgccattaactgctgagcaatggggtacgcttgtcaaaaactggcatcagacattcatcgggctatcaggtgatgcgaacgcctgccgcgccgcaatgctggctcaacctgtaagtagcggttacaagttgccggatggttggaagctggttcctatagatgcgacacgggctatgattgacgcggctcagagggtggaagaagacggctacgacgccatgcacaaagcaatgctggcagcagcgccggaggttcgacgtggcgatgcctga

SEQ ID NO: 439774 - DNA, 183 bp, Serratia marcescens
atgacactaacgcctaatcagcggacgtttgtctgctctgtgctgatggcgctgctcggcggcgcactggggctcggcatctacaacgtcgagtggttccggttcgcgatggccgcagccggttcgatttgcctgctggctttgctgactcacttcgctatggggaaaactaaatggcactaa

SEQ ID NO: 439775 - DNA, 303 bp, Serratia marcescens
atgacattagaagaccttctcgaactaaccccggcgcagcttaaagcgtggaaacagattgaatcaggggtgaaagccttcaaaaaagccgggggtgcattctattcggtgcttgagtcggtacacggctacaacgggaaatacgtagacgagatcaccggtgacgaacgtgaatcgcattacccaactgctgatgtccatatgcataccattttcgacgcgggcctctctgggtttgcagatgacacgcacttcattcacttgaccgacaaaggcgaagcgctgcttgagggggatgcatga

SEQ ID NO: 439776 - DNA, 399 bp, Serratia marcescens
atgtactccatcacatgcaatggcgtcgttgaggaaattggtggcgattcgcaggggtttgtgcgcgaagaggttcaggcagagttggatagctgggaaaatgggagcgttggaatccctgacggttactcagtatccgcactctactcgcaagagtacgtctccgccctgctggcagagctggaagcgaaagaccaagcacatcgggtgcatgctgcgaggctgattagtgaacgcggggttttacgtgaacgagtcacggagctggaagccaagctggctacgccggtgcggttgccgaccacttccggccgcctgggcgtggcatacacccgggtaattccagaagttatcgaagctatccgcgccgctggcttcaccgtagagggggatgagtag

SEQ ID NO: 439777 - DNA, 657 bp, Serratia marcescens
atgaaagagcgcccagtgattttcaactcagaaatggttcgcgccattctcgacggtcgcaagacccagacgcggcgggttatggctgtgcagccagaatccaatcagttcggcctgctgcgcattaccgattccacaaaacgcagcgacattggcaaataccattgggcagaatcaaatgcgaccggcacgcatcaacgttcagcgcttttctcatgcccattcggccaggtaggcgatcggctgtgggtcagagaggcatatcaaggcccgttgttcaacttcgaccagatggagacttatctcgaagacacctccaaatttgaacgcccggaattctgcgagtaccgcgctgatggtggtaagacgccggaatattacgacgctgacgataacctgcgctttggctggaagccatcaatccatatgccacgctgggcctcccgcatcacgctggaaatcactggtgttagcgtggagaggttgcaggatatcagtgaggaggatgcgatagccgagggcggcaccaagcatttcaacattgattggttcgggccactgtgggcatccatctacggcgttgatagttggaacgctaacccttgggtgtgggttatcgagtttcgtcgcgtgggaggtagtgatgccagcaaatga

SEQ ID NO: 439778 - DNA, 297 bp, Serratia marcescens
atggcctgtgaatgctttaaaaaaacaaccgcgcttttcaaagagcgcatttctgcaaagattggtgaatcacttggtgaaattgaagaggccaattttgagcactctttatggcatttcaatgggggcgatcattccccggtggcgatgaatttcaaatttcgctactaccgcaagcgcaagggcggcggactggcagcaaaccagacaaaagcagatcacctttgcatgatgagctactgccctctctgcgggactaaattcgaaggcgatgaaaagcggccggaggccaaatga

SEQ ID NO: 439779 - DNA, 987 bp, Serratia marcescens
gtgagttatttaactttcaagaacattattatttatcgactatctcgggatgttgatttatcgccggaaaacattgaaacccacctggcaccattcgcccttacaccatgtggtagtcaggacttggcgaaagtaggctgggtctcccctatgggcaagaaaggtgaatcattatttcatgccgttaatggtcaggtaattctttgtgccaaaaaggaagagaaaattcttcctccggcagttatcagccaagaattacagaagaaaatagaaaaactggaaggcgaacaacaccggaagcttaagaaaactgaaaaagattcccttaaggacgaggttttgcagagcctcttgccacgcgctttcagccgttttaccaatacgctcctgtggatagatacggttaatagcctgattatcgtcaacgccgccagctcaaagcgtgctgaagacaccctggctctactacgcaaaagtctggggtctctgcctgtcgtcccgttgacaatggaaaatccgatagagctgactttgactgaatgggttcgctcaggccagccgccagctggtttcacattgcaagatgaagcgcaacttaaggctattttaggggaaggcggagttatcagctgtaaaaaacaagacctgtgcggcgatgagattgctactaatatcgaggccggcaagcttgtgacaaaattagcgctcgaatggcgtgaacgggtaactttctccctcacggataccggcagcctcaagaaattgaagtttactgaaagtttgcttgagcaaaatgatgatatcgaccgagaagatttcgccgcacgctttgatgccgatgtcgtactgctaactggtgaactgtcagagttaatcaatgacctgatcaaggcactcggcggggagattgggtggatatccaccagcagaaattaccgacaacaacatccgcaagtattcgatgaagcagagggcggagataaataa

SEQ ID NO: 439780 - DNA, 168 bp, Serratia marcescens
atggtgatgttcgaactcaagcgagttgggggagggctatacgagaaggttacccgcgaagagagatccccgcaggcaataaatcagttgcgaatttttcggcttaagaagaccactacgccaatcatttcaacgcccgctcctatttctattaaagggactcgctga

SEQ ID NO: 439781 - DNA, 582 bp, Serratia marcescens
atgcattggtacgaacgagccagagatttggccgctcagcaaaaggtgtcacacgaagccattgcggaaagaattggcagaggtagatcgactgttagcggttggttaagcggtgatagagaaccaaaactcgatgagatcagcatgctagcaaaggcgcttggggtgtcttcacggtggttgcttttcggagagcctgaagactttaaagccaccgaacaacttccctccagggatgaagtgcttgttcctttatggaacaaagacgggccaacagatggcgcagtaacagctccgagtgacgttggggtgaataatcgtgcatatgtaattgaaaaagatagcggttgtgaggttgctccatctggaacaagggtgattgtcaatgcaaagctaacccctatatcaaaagactatgttgtcgcaaaagttcaagatgagttatctgtttttaaatacttagaagtcgcggggaaaaaattcctgggcgtcgatgatcagcgagtccctttaatagaaataggagcgggcgttgaaatgattggcgtagtggtcttcttaagccgaaaaattcgcaactga

SEQ ID NO: 439782 - DNA, 822 bp, Serratia marcescens
atgactaatctaccagcgaccgggatcactatgaccagcctagagctggtggactacatcaatgctgagcgtgagtcgaaagcgatcgccgccggcgcctcgttcccgagcaagggccatacccgtttgcgccacgctgattttatggcgaaggcgccgcgcgtattgggtgaaaaccactcaacgaaatttttcgctcagtacaccgacccgaccgggcgcgagcttccatgtctgcacttacccaagcgcgaagcctgcctgatggccatgagttacagctacgagatacaggcgaaggtgttcgatcgcatgacggcgctggagcaggccaacgtaccggcgccacagctgccggcgaccaagacagaccagatccaggccgggttgttgatcgtggaatctgctaccaagctgctgaatctctctcagtcgtcacgcctgggggcattgcagaagctgcaagagctggctggcctgccggcattgatgccggtatacgccattgatgcgccatcggatgccgttgacggctccagccggccgacagcggcgatcaccaccctgttgaagctaaacagcagcaccatgagcacgccggtggcttatcgcattctggagcggctgcggatagtcgagcgtaaaagccgcccaagtcggcgccacggtgaaaagcacttctggtcgatcaccgctaccggtctgcggttcgggaaaaacatcacctcaccgaataacccacgggaaacccagcctcatttctatgaatcgcgcttcccagagttgctgcagcgcatctacgacgagtggaggcgcggctaa

SEQ ID NO: 439783 - DNA, 183 bp, Serratia marcescens
atggaaacggaagttatcaagccctgggtcgagaactatcgagatacctatggtgtggttgtccgcacagtcggtgtcgacgtagtgaatcagcgggtgatcttcatgcgtccgaactacgacaaggaatgcgtccaaccacggcgggagtggggccgtaagtttgtgaaggtggatgaatga

SEQ ID NO: 439784 - DNA, 189 bp, Serratia marcescens
atgacaatccgaactaatagcggcattcaggccggcagcctttaccgcgatcgtaattttgtggtggtgcgggtgcatagcactgatatggaccgcgggacggtcacctacagccctgtagggcaggaatgggcgatcaccacagcaatgattattttccagtcacgttttatcaggtttgacgtatga

SEQ ID NO: 439785 - DNA, 1092 bp, Serratia marcescens
atgagcagaatatttgaagttgttcaggcaatgtctgggcagaaaaactgcatagtgatccccgggccttacctggattattttgccggtgatcagcagtcctttgctctggccgctgtgctgaatcagctggtgttctggacagggaagtcgtcacagaatgatggctggttttacaagacacatgaagagcttgcgagtgaattacgcggtgtcagtgaagaccaggtgcagcgcgttgtgagcaagcttcgtaagaagtatttgccgggtgttattgaagtatctacccgtaaggtaaatggcaccccgaagaatcattatcgtatcgatggcgataagctaattgctctgattttcccgccagtagtggactccgcagaatcgcggaatggaaaacgtgaaactacggaatcgactacgcagaatcacggaatggaaaacgcagaagtgcgggaacaacgccgcgattctgcggaatcctatctctatacagatcactacacagatcaccacaaacagatccaaaacacttttggtcaaccgccggcggcggccgaccagggggatgttgtttctgaagaaattcacatcactgaccaggccattctggtgctgaaacacctgaaccaactgacgggcgccaaatacaccacggccaaatccaccctgcagaacatccgggctcggctggtggacggacacacgctggaggaactcaagcaggtggtggaatacctcgttgatcgctggctgggcacggagtgggccaaatacctgaaccctgaaaccatgttccggccaggtaaattcccgggcaacctgctggcggctacagcctggcatgacggcgggcggaagcccgagcaagcccgttcggcgccggcggcctgcgcagagcgtgacgcggcctatcgacgtttcatcggtaacagtctgccgcttcaaaaccctggcgagctggagacgttggcgagaactgaggccagcaaagccggcgtacgcaccatgcagccgagttacgcggtgccggcatggaaccgcatttgggcagattgcgcccagcgcctgaacggaggaaaagcagcatga

SEQ ID NO: 439786 - DNA, 543 bp, Serratia marcescens
atgagtctggtttacgcgagcaacacgccagcagagcacaaagaccgctggcaaaccccgattgagatattcagcgcgcttgatgttgagtttggtttctacctggacgctgctgcagaccacggcaacgcgctgtgcgctcgttatctgacagagcaggataacgcgctggcggtagattgggagagctacggcgctatctggtgcaacccgccatacagcgccataacgccatgggtggaaaaggccgcggaacaatgccgcgcacagaatcagccggtcgtgatgttgttgccggcggacacctcaacaggttggttttcgttggcgctgcagtcagtcgatgaagtccgccttatcaccgatggacgactggcgtttattaattccgcaacgggcaagctggggaagaacggcaacagcaaaggcagtctgttgttcatttggcgcccatttatcaagccgcggtgccagttcaccacggtatcccgcgacgagttgatcgggatcggtactgatattttgcgcgaggtagcggcgtga

SEQ ID NO: 439787 - DNA, 822 bp, Serratia marcescens
atgaatattgaaacggcattgaaacactttagcccgaaaagtttgcatatctctgacatgtcccgagctactgcaagtgaagatttaacgggcactgacattatggctgcgcttggaatggtagaggcgaaagctgcatttgggatggcgctgtgcttggggaaatatggcgtcagcaaagaagaccgggatcgctcggtcgatatgctaacgcaatttgccagccaaaaggcgcccagggcgattaagcgagccgccggcgccaaattaggccgttgtctgcgcatcatggctgccatggcctacggtgaattttgccggtctgcgttatcagcagaatcctgctcgtgttgccagggccgggggctggttcgcaaaacccagataaatcgtaacgagctggcgatcctatgggaagaaaataaattcagaattaagaatgggttgtggatgttgaaggaaagcagccagccaccagcaaagactgtatgggaagatgtcgccatggtggtctgtccagtatgtagcggtaaaggcaaggttagcgctcgttgccgttgccaggggaccggtaccgttctggataaaaaggcgagtgaacttcaaggtgttccggtcatgaaggaatgcccgaaatgtaagggtaggggatttaaacgggttcaaccgtcagtcatacaccatgcggttaaaaagctgatccctgaactgcctgagcgtacatggcgttatagctggaaaccgttttacgaatcgctgcttaccaaatgctaccaggaagagagcgaattggagcgtattttcagtaaggtcacccggtga

SEQ ID NO: 439788 - DNA, 372 bp, Serratia marcescens
atgaaccgagcgatcgcaatgattgccgctgtgttgctggtggcgctgattgttgccggcaggttggcgttttacttccacagcaacgcagtaaaggctggtgagcaggttaagcagcaggaaaagacgctggcgcagcaggcaggactgatcaccacactgcgcgcggatgacgcccgtaatcgcgcaatgatggccgaacagcaacggagagagcagcaactgcgccagcggggcgaaatctatcagaggaaatatcaggatgctattaaaaacgatgagtgcgccagccgcactgctcctggtgctgttcttggcctcctgcgcggaacggacaccgccgccggcgccgatcgtgctgcttccccctga

SEQ ID NO: 439789 - DNA, 630 bp, Serratia marcescens
atgaaatcgttctctcaacatcttgagtctgggttggtcttcgtcccggcgctgggcattggtcgttatcccgtcccgttgaaccaacggccgtatgacgacagctattttcacaaataccagctgatggctgataccccgatggggcatgcgctgacgaaatcgcgcgttgcgttggtggatcgccatcacggcgatggaatggtgctagatgtggggatcggtgccgggcagtttgtggaggcccgccctcagacatgggggtatgacgtcaatccggttggcgttcaatggttaaagctgcgcggtcgctgggccgatctgtatacggctgatgagtttccggcgttgacgttctgggacagcctggagcatatcgacaagcccgaactggcggtagcaaaagcccggcagtgggtgtttgtgtcgatccccatcttcgccggcggcgatgccattatggcttcacatcactatcggccgaatgagcacatttggtatttcacgcatgatgggttgctgcggtggtttgctgagcaaggctttacctgcgttgagagtaatacgattgaatcagacctgggccgtgttggcatagggtcttatgccttcaagaggactgcagtatga

SEQ ID NO: 439790 - DNA, 366 bp, Serratia marcescens
atgaaagtgctgaattacgatgccattggccgttgcgttgtggcgaaaagaaacattgagcggttgattcaggaactgtcagaccgccagatggcggtcattgatcttggtggcgtttgctttatgggcacccatctggtgatgcaggactcaatcgttgaacgtgctgcatctttggctgttgagactcgccgcctttacgacgccattcacagccaggcgctggagtataaccactgggcccgactggcagagtatccgccgatctcggttacgcggcatccgttgccgcatacagacacggcgcaaaaagaattgtctgttcagaccaacaaggtcccgggccatgccgccccgcacgcctaa

SEQ ID NO: 439791 - DNA, 1908 bp, Serratia marcescens
gtggctgacagctttcagttaaaggcgatcattacggcggttgatcagctgtccgaacccatgaagaagatgcagcgcaacgtcaaggggttcggtaaagagttttcctccattatgaccggcgctgcggcggtgggtgccggtatcgttggggcgctgacattgccgataaatcaggccattgagtttgaatcggtgatggccgatgtgcgcaaggtcgttgattttgataccccggcacagttcaagcagatgagcgacgatgtgctgaacctgtctacacggctgccgatggccgccgaggggattgggcagattgtcgcggccggtggccaggcgggcatcgccaaagaagagctgctttcctttgccgagtctgccgtaaaaatgggcgtggcattcgaccagaccgcggaagagtccggccagatgatggcgcagtggcgtacggccttcaaaatgacccagacagacgtagtcgggttggcggataagatcaactacctggggaacaccggccccgccagtgcggccaagatttctgaggttgttacccggattggcccattgggggaagtggccggcgtggcgtcgggcgagattgcggcaatgggcgctaccattgccggcatgggggtggagtccgagatcgcctcgacgggcatcaagaatttcatgctgtcattgaccgcgggtggcgctgctacagcttcacagaaacgggcgctcagagcgttaaagatcaacccgaaaactctggcagccgacatgcagaaagatgccaagggcgccatgctcaaagtgctggactcgctggctaaggtccccaaagcaaaacaggctgctgtcatgacagcgctgttcggcaaggagtctctgggggcgatcgcgcccctgctgaccaaccttgatctgctgcggaaaaactttgccaaagtcgctgaccagcaggcctacggcggctcaatggagaaggagtacgccgcgcgcgccgccacgacagcgaatgccatccagctgttcaaaaaccagatgagcgcggtcagtgtgacgatcggcgatatgttcctgccggcgctgaacaagggaatcggcaagctgatgccatttatcgaacaactgcgtgattgggtgaaggcaaatcctgagttgctcaagtctgttgccaagtttggggcatatttgctggggactgccagcgcggtgggtgcggtgaaaaaggcatttggcttgctcaataccgtgatgaatatgtcgccgttgggcaagttggtgacgttgctggtattggccggcgggctgatcgtcgagaactgggataccgtgggcccgaccatacaatccgccctggccgagatcaacaaggtggttgatgccatcggtgggtgggagagcgtgcttaaaggcatcttggctttcatggtgatcaagtggtccgttgacatggtcagctccatcggcagcgtgacgaaagagatggggaaacttgggaaggttacgaagggtaccggcttgttcggcggtggtgcgatggcacttggccgtctggggacgatcggcgccgcgctcaccgccaaagagtacgtggccgatccgctggaggagcggttcacctggttgaaagacaacgtggtgacacgcacgctcaatgatctacctggtctcgatagcgttgatgcattggggaaaaagctgctgccctggcgcagagaggaaaaccaggggcggcagtatcaaccttcggtttccctgcttaggccggtcaatccctcgccgcaacagccgccgggcggtgaatttacgttcaagtttgagaatatgccggcaggtatgaaggttcagacggacagcaagctgcctcccggtatttcctacgatgtcggctataaccgatttgccaaaccttga

SEQ ID NO: 439792 - DNA, 411 bp, Serratia marcescens
atgctgtatccagttgctattgataaaggcgattcatccttcggcgttcgcgtacctgatattcctggttgcttctcagggggcgacaactatcaggatgcgatcgagagtgcgcgcgaagccatcgaggcacatattgaattgttggttgaagatggcgaagcagtaccggtgggaaccaacgttgaaacctggttatctgatccagattacgccggcgtcgtctgggcgctcgtagatgtagatatcacccggcttatgggaaaagcggagaaaatcaacgtaacacttccttccctgctgatccgtcgcatcgaccagtttgtcgccgcgcatcctgagtatggtagccgttctggcttcctctcacgggttgcagctgatagagtgataagccgggaaaatcgttaa

SEQ ID NO: 439793 - DNA, 180 bp, Serratia marcescens
atggatagcaggaatgcaatagcaatgattgaagccgatgggtggtatctggtgagagtgaaaggcagtcatcatcagttcaagcacccaacgaagaaagggctggtaacggtaaaacatccacagaaagacataccgctgccaacactgaaaagtatcaagaaacaggcggggctctaa

SEQ ID NO: 439794 - DNA, 696 bp, Serratia marcescens
atgagaaagataataattactctagttgtggctgtttttcttactggatgtgcaagtaataatggaccatatgtaactgtagactcattatcttcaggaaagtcagttgggaaaaaatacatagtcctgccagctagggctgagctaaagcaaaatgaccagctttattttgctcaggtggaaaaatatttggatagggttctgaaagaaaaggggtatcagaaagttagtgataaaaatattgctgaccaagctatattccttaactattggcatgatggcggggtaagcaatacgcgcgaagaggttgtgccaatttgggggcagaccggagtaagctctgcaactacatatgggactgtcacgccaagttatggcgggggtggcaatttaagcaccaccactacctatacgcctacatatggtgttactggagcagtaactcagcaggttaccgataccttctactctacaggtttcaaagttgaatcatatgatgcagctggtcttcgatctggaaaagaagagtcattgtggagaacgacggcagtaagcacagctttggacttgaacgacagaagagacttaaaaatgctgttctttatttccagaccattctttgcagagaatctaactgagaaagcaagtggttatgcaacgggtgatggcagccaaatgaatgcttatttccaataa

SEQ ID NO: 439795 - DNA, 378 bp, Serratia marcescens
atgaaaaagttgcttatgctgctggcagttttgtccctgtcagcttgcgatgtaaatgatgctgatgttgtgtcaaaaaacctgagcaccgcctctgataacttcgaggttaatcgccgcgtcgtcttctacaacggaattaccggtgattacatgttgtctatcgaaggactgtgctcgaaggacaacagcagcactgccaatactttgggtatcgtatgcaaggttggcccgaatcaatacaaaaagcaccttctcggcctgtcagacaacgtgacattcttcattgaacagatcgacggcgtgaaggccagcccatatttctatcgggtgaccttcaaaccttcagtaattgctccggatattgatatcagatga

SEQ ID NO: 439796 - DNA, 501 bp, Serratia marcescens
atggacaataagctgagcgaactgagcaagccggtggcgtggattcttggcactcctgcctgcaagcacttaactactgatgaggagtacgcaaattggtacgttgagaagatgagcgccgcgcttcccctctactcgcaagagtacgtctccgccctgctggcagagctggaagccaagagcctggaatgcagaggtgtccagcaagagcgagagcttttccgcgttgagcgcatcgctcatcagcagtatgcacaagagcttgaacagcgtgtagccgagttgtccgagctggaaactcgcaaccagtgcctaatcaagaagaatgcggacttgacgcagcagaatatcaagctgggtgagcggctggctacgccggtgcggttgaagaaggtcgattccagcaacgtgccatttgccggtgatggctttaatgctggcgttgattattgcgccaaggctgtccgtgccgccgggttcaaagtcgagggggagcagtga

SEQ ID NO: 439797 - DNA, 213 bp, Serratia marcescens
atggctaagcgtaagagcaacagagctgcgcgtcggttgttgtgcatgccggtatggctgagcaatagaaagcaaatgtcaggctggccatcgacaatccgcacagtctatttcgccggcaaaggcaagcgatctgcacgccagaaccgcgcacgcaagaacgcgtatgacttttccggcatcgtttatggcgattgccgcaattacagctga

SEQ ID NO: 439798 - DNA, 729 bp, Serratia marcescens
atgaaagagcgtccagtgattttcaacggcgagatggttcgcgccattctcgacggccgcaagacacagacgcggcgtgttatgaaagataagccagagccatcaaaaacacgggcaggagacttttggtttccgtctaaaaaattagaaagcatggttcatgtttcggacttcacgcctggcaattcacctattgccgattgccaccttttctttcaagagcattgttgcccattcggccaggtaggcgatcggctgtgggtgcgcgagacgtttcaaggcccactaattcccgaggatgagttgagtgagtatctcggtgctaatccagataagttccaatctcctgcgtactgtgaatatgcggctgatggcggcgcgaagcctgagtatgtcgattctgatgagaatactcgttatggctggcgcccatcaatccacatgccgcgctgggccagcagaatcacgctggaaatcaccgccgtgcgtgttgagcgcctgaacgatatcagcgaagaggacgccaaggctgaaggcgtaaagccagctggcgacatactgccggattacccagacacattcctgacgccaaagggcgactttgctacagctaaagttgcattccagcgcctctggcaatccatctacggcgaagaaagctggagcgccaatccctgggtgtgggttatcgagttcaagcaggtcagcgaggagtcccagcatggctaa

SEQ ID NO: 439799 - DNA, 300 bp, Serratia marcescens
atgggtgagttaagggctggcggtatcgcgatggtgctcccttcatcagatccccatgtaatgattcataactcttgggttggctgcagtgtcaggctaattcgctttatcccacgcctaacattaatcactgattgtttagacatgaatgatgggaagccattcatgcataggcaggatgtctggttgattactgatggtgaaaattctggtaccactccgcccaaatacttaatgccaatggatggagaagatttcagttgcgatttccaggcgatgaaagaactggaggctagctga

SEQ ID NO: 439800 - DNA, 201 bp, Serratia marcescens
ttgaaaattgttacccgccttgaggctgccgcgagtggcctcaacaagttttataccggcaagccctgtaagcatgggcacttgagcgaacgctgggtgctaaacggcgcctgcgttcagtgcaacgttgagcgcgtagccaagcagcgccgggatttgattaaaaccatgaaggctgcgcaggaggtggcttatgggtga

SEQ ID NO: 439801 - DNA, 225 bp, Serratia marcescens
gtggataagctacgcgaagagtttgaagagtggtttaacaaagaaatggttctgcacatcagcacatccaatgagactgttgttcgtttgatgtggaaggcatggcaggccagccgagcaagcatcgtggttgagcttccagagatggaagattttgagctgcttgatggatacaaggtaagggaatccctccgctctatcggcctatcaatcaaaggggagtga

SEQ ID NO: 439802 - DNA, 240 bp, Serratia marcescens
atgggtagcatcatccttgccggccggcagatattcattctcaacgaaaacgacagatacccagaacctcagcagaacagcccacccatgtttgcgatacgcgaagacgaggaaggccagcactggctttatgtttggcataaagggcgctggccgctcgtgacagatgtaccgtttgaaacccagggagcggccgtcgatgctgcgattgctttcgactttgccacgctgtacaaatag

SEQ ID NO: 439803 - DNA, 477 bp, Serratia marcescens
atggttcagagatataaccctgattacgtcatgcacgcggcgcgctttgcgccgtttgcccgcgaaaatgagcacggtgagttcgttaaattctccgactatgaagttttgaaggctgagcgcgatgcgctggcacaacgggttgagatgctggctgtggagaattcggcgctgaagtcccgcagcataaaactattcaatcttggttatctgcgggggcatgaatctaccgtggaggggtatttcgttgatgtccatcgcaatgacatcgacacataccacgatgacgttgtagcggaaattattgaagacgaagacgaaaccccagccactgacgcagcacttgcagctatccaagcgcagggagtggagaaggccatcgagcgactgatgaatatgttcgcaagcaccgggcatattggcgtacctgtcatggctcttgaaggcctggctaaagagctgcgggaggccaaatga

SEQ ID NO: 439804 - DNA, 498 bp, Serratia marcescens
atgaaagagcgcccagtgatttttaacggtgagatggttcgcgccattatcgacggacgtaagacccagacgcggcggattgctaaagctgacaactccaatcacttgcttggctgcccattcggccaggtaggcgatcggctgtgggtgcgcgagacgttcggagattgcggaaatcgcctcgtatatcgcgctgattctaacgacggcgcggcatgcaaggttaagcgatgggttccttcaattcatatgccgcgtgatgcctgtcgcttggtgctggaaatcaccgctgtgcgcgtggagcgcctgaacgatatcagcgaagaggatgccagggctgaaggcgcgccgacagagttatgcattattggcgagaaacactacatgggttttcgcactctctggaaatccatctacggcgttgatagctggaacgctaacccctgggtatgggttatcgagtttcgtcgtgtgggaggtagtgatgccagcaaatga

SEQ ID NO: 439805 - DNA, 189 bp, Serratia marcescens
atggcgaaagttatttttaacgataccggcattgaagaagaacatgagatcgactttgaggttcgtgcgggacagacaataacgcttattcgtgatggtgtgaaggaaaaatatattgtcgatattgtctctgggcctatttatgaaaacacatgtcaccccactcttattagagtcagacaaatttaa

SEQ ID NO: 439806 - DNA, 498 bp, Serratia marcescens
atgaaccatctaatgcttggctttgaaacgctgggtaagaagcccagcgcccctatcttgactatcggcgcggtgctttttaacccacacagcggcgagcttggcgagcagttctacaccgccccgccaacgccagcagtggtggataagccgagcctgccaccacatgtttatcgcgatctgctggatatgctgcaagagacggcaattgcctatggcggtactcagcaacaacgagcgcaactcagctatgcattaagcattcacgttcaacctgaccatccgcacacccgcgcctcaatgctggctcaacctgtaagtagcggttacaagttgccgccgcatgtttaccgcgaactggtaaatagcctccgtgataccgccttgaagttcagcggtacagagcaacttcgggagcgtctgaatacggcattaagtcaattcattgagcctgatcatcctcatatgcgcacggcagcgacgaaggggaatgattag

SEQ ID NO: 439807 - DNA, 195 bp, Serratia marcescens
atgaccagctatcgtgcatacctaaatatcgccagaattgcggctgaatgtgaaaagcgtggatggtatgaaaaggccgctgaagcgtgggagaagtccctcaagctcgcgcgagcagtcgatgttccgtggattaaaacccgcatggagttctgcaccaacgcggccgcgcgctgctggggtaacgctcaatga

SEQ ID NO: 439808 - DNA, 765 bp, Serratia marcescens
atgaacgcattaaacggcaaggtggcggtgatcggcggcgccagttcggggatcggcaaagcggcggcgctgctgttcgcccgccagggcgcagcgctggtgttgggcgcgcggcgcgagccgctgttggcggagctggtggaggacattcggcgcgagggtggccgggcgcttgcggtggtgggcgacgtgcgcgacgaagccttcgccgaacggctgacggcgacggcggtcgacgaattcggcgggctggatatcgccttcaacaacgccggcaccttggggccgctggggccgtcgctggcgttgagtgcctcagagtggcgcgaggtgctggaaaccaacctgtccagcgcctactacggcgccaaatatcaaatccccgccatgctggcgcgcggcgcgggctcggtgattttcacctccaccttcgtcggccacaccgcggcgtttcccggtacggcggcctatgcggccggcaagtcggggctgatcggcctgacgcaggcgctggcggtggagttcggcgggcgcggcattcgggtgaacgcgctgctgccgggcggcaccgatacggcgatgggccggcagatgagcaataccccggaggcattggcacaggtggccgaactgcacgcgctgaagcggctggcggtgccggaggagatcgcgcaggcggcgctgtatctggcgtctgacgcttcttcattcgtcaccggcaccgcgatgctggtggatggcggggtgtccatccagcgcggctaa

SEQ ID NO: 439809 - DNA, 306 bp, Serratia marcescens
atggaatatgaagcgtataaggttcgcggctacggcttcggactgaaaaaagagatcaccggcgtgctgggtcgtttccccacgcaggaagaggcgcagaaagtcgcggatgactacacgcaggcctgcctgccggataacctgccggacagttacgatatgggcatggtccggccggtcgttgccggcgaacctgtcgccgtcgatccggacgtgtttcgcggtccgggcgtaccgttcactatcgatgctggccatgccccgacaggccatacgctgcgcttcggcaagccctctgacaggtaa

SEQ ID NO: 439810 - DNA, 273 bp, Serratia marcescens
atgaacactatctggaaatatgtacttgagccacaaatcaccctggatatgcccgccggcgcgacgatcctcagtgtgggcacgcagggcgatgatatctgtctctgggcgcgggttgacactgaagcgccgactgagccgcggcgcttcctggtggccggcacgggaatgccgctggctgagtccttcactggcgccaggttcatcgggaccgtgcagatggtgcaggccagcgtaaacctggttatgcacgtttttgaaacggaggtgtag

SEQ ID NO: 439811 - DNA, 1365 bp, Serratia marcescens
  misc_feature (1303)..(1321): n is a, c, g, or t
atggcgaaacctgaaattgcaactgaaagaacccgtctgagtattccctttgacgatcgccaacgtgcaatacgtgcggccggcaaactggctgatggcagtaatgctctggactacgtgaaggaagaaaaggtgtggtatgcacagccgggggccaacctgagccggctgaaagagtggatttttgaccccaataaggtgatcgaagaaccgcccctggatattcaagccattgaagatgaatttacggcgtggcttgaagagcgcggtgccattatcaaagaccccatagagttcgatggccagaagcattatgtcgatacagtggacggtaaagctggttcaagaaagggggtgtatgccgcctttctggatggccgacctgcagggtggtacagggactataagaacggtggtgaaattcagaaatgggtatctaccggcgcagcccctaaccctgaacaaatggccatgctccgtgctgatgctgcggcaaggcgtgaacaaagagctgcagcgcaagcggataagtttgatcagaccgctaaccggttgatggaagaatataaccggcttccggatgccacgggagatctgacatacctgaaaaacaaacaggtcattgccgctaacggccttaaagctgatgagcggggcaacgttgtgatccctctgtttaatgctgatggcgagttcaggacccttgagcgcatctggtccgacggtagtaaacaccttgaaaaagacggccaggcatgggggagttttttcgttgtgggtggccaactgaaggatggtgacaacctgctttatgccgagggatatgcgacagcagccagtatcagcgaagccatcaatcagcctgtgatcatgacggttaatgcaggcaacatggtggaagttgctggccgcctgaaagacacctttccaaacagcactcattacttccttgctgacaatgacatttataaagacgagaacgttgggctagaaaaagcgacagaagctgcagagctgactgccggccatgttctggtccctgcctttagcaacccgaaagaagggcttactgactacaacgatttgcatgtctctgaagggctggagcaagtcagattgcaggtagaaggagccattaatcaaatgaacagggtagacactatgccgactgataacccgaacattactgacgttaatcacagctcgactgacagcgctgccgttgcagctcctgaaaaagccgcgccggtggccagcacccctgaagctgctgaaccggtggaagccgcgccggtggccagcnnnnnnnnnnnnnnnnnnnctcctgaaaccggtggaagccgcgccggtggccagcacccctga

SEQ ID NO: 439812 - DNA, 705 bp, Serratia marcescens; identical to SEQ ID NO: 8686

SEQ ID NO: 439813 - DNA, 762 bp, Serratia marcescens
atgccaaaattcgctgcaaatttatccatgctgtttaccgaactgccgttcctggaacgctttgccgccgctgcccgggcgggatttgaagccgttgagtttctgtttccctatgagtatgccgccggggaaatcagacagcgcctgcaggagaaccagctgcagctggtgctgttcaataccccacccggcgacgtcaacgccggagaatgggggctcgccgccatccccgggagaagcgcggaggcccgacgcgatattgagctggcgctggagtatgcctgccagctcggttgcccgcaggtgcatatcatggccggcgtggtgccgccgggagcggatcgcgcagcctgcgaggccgtgcttatcgataatctgcgctacgcggcggagtgctttgcccgccacgacaagcggatactcatcgaagcgctgaatccgcagaccaaaccgggctatctctaccacagtcaatatcagacgctggcgatggtgaaacgggtcgacaggccgaacctggcggtgcagttagatctgtttcacgcgcagaaggtggacggcaatttaagccatcttattaccgaatatgccggccagtatcgccatattcagattgcctccctgcccgaccgtcatgaaccggatgagggcgaaaggcactgttgcaaagttagcgatgaggcagccttttgtcttattcaaaggccttacatttcaaaaactctgcttaccaggcgcatttcgcccaggggatcaccataa

SEQ ID NO: 439814 - DNA, 705 bp, Serratia marcescens; identical to SEQ ID NO: 8686

SEQ ID NO: 439815 - DNA, 765 bp, Serratia marcescens; identical to SEQ ID NO: 6031

SEQ ID NO: 439816 - DNA, 252 bp, Serratia marcescens
atgatagtctggatcaacggacccttcggggccggaaagacgaccctcgccgagagactgcgcgatcggcgacccggatcgctgatcttcgacccagaagagatcggtttcgtggtgaaggcgaccgtcccgaagccgggaagcggggactatcaggatcttcccgtgtggaggggcttaacaattgcggccctccaagagattcgaaggcattactcgcaggggctctgttgcaaaaatcgtgaagcttga

SEQ ID NO: 439817 - DNA, 861 bp, Serratia marcescens; identical to SEQ ID NO: 230847

SEQ ID NO: 439818 - DNA, 765 bp, Serratia marcescens; identical to SEQ ID NO: 6031

SEQ ID NO: 439819 - DNA, 1314 bp, Serratia marcescens
atgcatctcaatcaagtttttggagtttcaagagatcctgttgctagttatattgagcgagatgcagttgatcaggcgttgtctgacgctctcggaacaacaaagcaaatagtcgtgtatggttcatctaaacaaggtaagacagcacttttgcaacgtcacttaagtgaagagcatcggataacctatcactgtggaccgactagttctgctgaagatatctaccgtgcgttcttgagagcgcatggtgtggaaattgttactgaaagggtcgccacatcgtctcgagaagccacagcgtcagttaaaagtactttttcagcaatccttccttttttggccaaaacggacgtggaagcaagtgcagaaggtacgttgggccacgaaaggcaagtaactacacgaccaattgagtttaatttatcggcagcccaggatgttggtgagctaattgaacgtgtaaatggcagggatagattctatgtccttgagaattttcattatctttctgttgaagtgcaaggccaattagcttttgatttgcgcacatttgaagaaatggggattagatttatcattcttggtgtttggcgtgaaaataatcgtctaatacagttcaatggtgatcttcaggatcggatggctgaagttcctgttgagccttgggaggaggatgatttcgagcgaattgctcaaacaggtgaggctgctttgaacatttctatagacgcgcgaataaaagaaaaaatattccatgaggctcatggtagcgtggctgttgttcaagagcttctcaagaaattttgtgagctgtcaggcattagaacggtattgcctgtgttggaaaatttaaataacaatgatcatttgaatgcagcaattagcgctaaggttgctgaatactcatctcgtcatgttagaagcttggagtctatagcagcaggaagcagaagcagacgaccaagtgaagatgcggtagctttatacctacaatactatttggttcaagttttacttaatagaacttatgcagaactgaaagatggtatagagaggaagaccttacaagagttaatacgagaaattcattcgcatcctgataatgttaggacttctgatgtcacaggtactttaaaaagattgcctgtactgcaaaccaatcagaatatagtgcctccattactcgattatgatcatgggacacgtaggttgaagattgttgattctacgttgtattttttcattgataactgtgatgctgaagatgttatggccgaaataccgcatcctgactctatagccacggggtcatag

SEQ ID NO: 439820 - DNA, 615 bp, Serratia marcescens
  misc_feature (530)..(555): n is a, c, g, or t
atgaacatatccttgagggggggcgttcgctcagacctcaatttttgccacatcagccgaattgccctgtgtgtaatgaacataaatgaattggtattcatcgataattttgacaatcatgtagtggtcatgagcgaagtcgttcgactgctcaagtcatatcgccaaatgcaatatgtcagcacagaagctggaggagttctgataggagaacgccggggacctcacatcgttattactcacatttcggaaccagggccgggtgacatcaggacacgtaatcggtttgaaagaaaaggtgaccatcatcagctgaaagtagatgaactgtttgaacagtcaaatggctttcttgtttatttaggcgaatggcatacacatcccgaagattttcctcaaccgtcttatacagacatgaaatcttggctgactggactgatcgcaacagagacaatgctcctgattattgtaggcagaaaatctgagtgggtaggaataaaaaacggaaatgatataaaaagtataagagnnnnnnnnnnnnnnnnnnnnnnnnnngttgcactcatttttcagatattagtcatttttaacagtatagtttatgtgttaaaataa

SEQ ID NO: 439821 - DNA, 186 bp, Serratia marcescens; identical to SEQ ID NO: 98271

SEQ ID NO: 439822 - DNA, 360 bp, Serratia marcescens; identical to SEQ ID NO: 98270

SEQ ID NO: 439823 - DNA, 780 bp, Serratia marcescens; identical to SEQ ID NO: 98269

SEQ ID NO: 439824 - DNA, 3525 bp, Serratia marcescens
atgccagcaacagctgatgaaattatcgaagctattaaggaagcttcagctgtaggttttcgcgggcgcctgattgcacgcgggcaagcccggtcggtgatctggcgagacggtgacttgccgccggatgcaccggagtttagcgcactgctcagtcaggaccttcaaggctatgcttatgccctaatcgatctcggccttcgtcttcgagaacttaatggagacgacgcctatgcgcgaattgcttttgaacaggccggaaccgcactcgagtcggctattgctaaaggaaaacgcgacagccgggatacagattttcacttcgtaatggctgctgcaagctatcaccttgcgcatctttcagcacgagcctattcgttactcgcaatggttggtcaggatgataatttttcaccaatagagagggctcttacacaactgatccggcgtgatttgcgtactctgcgcgataatgcgttgggctttcggctcagaggtgatggcagtgacgtgaaaattactgaaatcctccaggctcgcctaaacttgccgcaagacgagaacggtgacagtgagtcagaggaggacatcctttttgatgggcttgatttggcactgactgacgcctatatgtcggccatttctctctaccttctcgctgtagaaaggggagaatcacgtttgctttccagggctattgaaaaattaagaattagtctaagtatatgtgctcagtttaatatgctaccccagtggtggctaaactttattaccattcatctgttatctgacctttggtcagatacattccatgaaagattgccactggttccagttggtggtgacgctgctgaatggcccgcgcttcgggaactgtttattgcactgcttcaaagacgacctcgagccgaaattgatctctggccatcgcagagagaggccgccggacgctctgttaatgacaatgacgatttggttgtttcgttgccaaccagcgctggaaaaactcgtattgctgaattgtgtattcttcgctgtctggcgggtggcaagcgtgttgttttcatcaccccgcttcgtgcgctttctgcacaaacagaagccaccctctccagaacatttgggccgcttgggaaaacaatatcaatgctgtatggcagcattggcgtaagtggtatggatgaggatgcaattcgccagcgtgacatcgtcgtcgccacgcctgaaaaacttgactttgctctccggaatgacccgtcaattattaatgatgtaggactttttatttttgatgaggggcacatgattggggccgatgaacgagaggttcggtatgaagttcaaattcaacggctgttgcgcagacaggatgccgatacgcgcagaattgtctgcctctcggcaattctacctgatggtgagcaactcgatgattttgccggttggctccgtcgtgacaagcccggaggaccaatcaaaaataattggcgaccgacccgcttgcagtttggcgaggtcatatggtccgctccagcaggtcggcttaatctcagcgttggttatgaggcggcttgggtatcgcgttttatcgtcagcagacaaccgccaaaggttaaattacctaataaaaagcagcgaacaaaaatgtttccctctgataacaaggagctctgcttagcgacagcctggcgtctaattgaagatggacagaccgtacttatctactgcccacttcgccggagcgtcgaaccgtttgccgagacaattgtcgatctgcatcagcgcggactactgccatctttatttgatgctgccccggacattctggatacggctatctcgctgggagaagaatggttgggggcacacagcccgatacttgcctgcctacggttgggcgtggctcttcatcatggcgcattgcctacggcttaccgcaaagaaatcgaacgtttgctgcgagatggggtacttaaagtgacgatctcatcaccgacgctagcacaaggtcttaatctttcggcaacagctatcgtcatgcattctcttcatcggaatcgcgagcttatcaaagtgtccgagttcagaaacgtcataggcagagcagggcgcgcatatgtagatgttgaagggctggtgatttatccaatattcgataaagtaaataaacgccagactaactggcataccctcacatctgacacgggggcccgtgagatggagagcggactaatacagcttgtctgtgtgttattgattcgcatgcatacacggcttggtggggatttaaaagcactcactgaatatgtgaccaacaacgccgtagcgtgggaatttccagaaattatgaccgaatctccgcaagaaagagatattgcgcaggccatctgggaaaaacaactttcaacgcttgatactgctattctgagccttcttggtgagaatgatatcccgggtgaccagattgaaactgctcttgatgacattcttcagtcttcactttggcaacgcagtttgcagcgttatagggatgagaatgaacggattttgctgaaatcgggactcctgtcccgcagccgctacatctggcagcgctcaacggcagcagggcgccgggggtatttcctgtcgggggtaggacttacaaccgggctacgacttgatgctattgccgctaaggccaaccaactattgattgatgcgaatgcggctataatgggcggtgatgccgaagaggcaattgctgctatcacggcgctcgctgaagaggtctttaccttctatccgtttatacccgatccattgcctggcgactggagaggtattttacgttcctggctattgggtgaacccatgactaacgtcgcgaatacgcaggcgtctgaaacgcttcaattcgtcgagaatgggctggtgtatcgacttccgtgggcaatggaggctattagggtacgtgcaacagctaatggagacctcataggtgatacagataccacgctagacgattatgagttaggttttgcggttgctgctgttgaaacaggtaccttgagccgttcgtcttcactgcttattcaggcgggttttagctctaggcttgcagccataaaagtggttacagacactactgccgattttcaatccggccaggagcttagaaggtggctgaactctgaagaagtgataagccacacggataatcatgactggcctacacctgaaaccagagtgatgtggctggaattcttgggtagtctcagccccaaaggcagccaggtttggagtcgtcatcgttataacggaatggtggactggagagatactccggcagtgatcggcacaccattgcagctttacactgttgatggtattcatcacgtactggctgatgatggcactcctctgggaagtataaatggcagaattaacacaaacagaagaggtcttcttagagttgaggtggatgatgagaatggtcgtgccatgttcgattatttaggaccggacgactttatttctacctga

SEQ ID NO: 439825 - DNA, 243 bp, Serratia marcescens; identical to SEQ ID NO: 71832

SEQ ID NO: 439826 - DNA, 816 bp, Serratia marcescens
atgacatttacgctgaaaaacctcaccctggcgctggccgccgccggcacgctgctgctgaccgcctgtggcccgacggcacaggacgatcaccacatcaaggtcggcatcagcgccggcatcgatcagtcgctgtgggcggtggtgcaaaaggtcgccaagcagaaatacgatctggacgtggaggtggtgaccttcaacgactacgtgctgccaaacgaagcgctgaacaacggcgatctggacgtcaacgccttccagcacaagccgtatctcgacaagcagatgcaggaacgcggctacaagctggcggctgtaggcaacaccttcgtctacccgatcgccggctattcgaagaagataaccgcactcagccagctgccggacggcgcgcaggtggcggtgccgaacgatccgaccaacctgggccgctcgctgctgctgttgcaaaaacaggggctgatcactctgaaagacggcgtcggtctgctgccgaccgcgctggacatcgtcggcaacccgaaaaagctgaagatcgtcgagattgaagcgccgcagctgccgcgcgcgctggacgatcagaaagtgacgctggcgatcatcaacaccaactattccagccagatcggcctgtcgccggccaaggacgggctgtttgtcgaagacaaaaactcgccgtacgtcaacatcttcgccagccgcatcgacaacaaagacagcgagaaagtgaaggatctggtcaaggcctatcagaccgacgaagtggcggccagcgccgccgacatctacaagggcgacgccgtcaaaggctggtaa

SEQ ID NO: 439827 - DNA, 645 bp, Serratia marcescens
atgattaaggtaaagttatataaaactgacatgcccgtttctgcgagttatattaaggagcgagttaataacaacctttacgatgaacaaaaggggtttggttttcatatcattaaagatgacggtgatattgaggttatgttcacattgagaagtgtgaataaacagtatgttgaatatgcaagtggtgaacattctgaaattgaaactgtatcatatctcaatgtaaagttttgcataatgtttgataaggggatagcgatgtatgttttaaatcctccgttaagtatgaaaataccgtatgcaatgatacataaaatttttggtgaaaatagtgggctgaagcctcttgagattgatttaaaaaatctagtcattgatttttcgaaaaaatttgacctaaaaatcaaatccgtatcattttcaaacatccaattggatgcattcacccttgcaaagacaaaaatagtcagttctcagagggttagtgatttacatatcggtaattacatgaatacatctgctattttagatgctattcatttcacagttaatggaattgaaaccgaattatcaagaactggacggtttcgagttcgagaaaaccagttatcaacattactagccatgcttgaaaaaaattaa

SEQ ID NO: 439828 - DNA, 1284 bp, Serratia marcescens
atgaacaagtatcaggctacattgttttctaatgaaagtgacatttatactgcactacattcaaatggcgcaaggattactgatgttactttaaggaaaattgcatttcagagggggatagttttcccaatgaacttgtcgaaagaggagcttattgagagaatatcagatcttccattctcctttagtcatattcgagagattcaggataagcttgcgacaaaatcaagtcaggatgtattttctgtaaaaagaatttatgatggttttgatattgagaaacttttcgatgtggtgaatagagttaagcaaaatcggccaaagttactcggtcatgaaaaaatagatcatgggggagcattacagtcctatcatatttcaattgattatacagagtttgatttccgtcgcggtaagtttcagcaaaagaaattatatagtgggacaatattatttattgaaagaaaaggctacgtttcagttagatataattatactaaaagaatatctgagatattgaatgagatactcgacaattactcatctacagtttctaacgatataagtattaatgaaattgatttttcaaatattactgatgcagagttgcgtaacatttttgcaatccacctttatgactttgagggtgactataagtacacagggcttgagtatttaaatttagagaaagtacgtgtcagtagaattaagtctagaatggataccgctcctatagataatctaaccaagaatatcaccgactcagattttatagaaagtgaaaatgatgagcaagaaatgtcctcatggacttcagcgtctgattctccaagcgaaggtgatgacgaagatgatagcggtgaaattgaaatcgctaaggatgatgaggaaaatcttaccttcaacatcaataatgcctcatatgatggcctctcattagtcaatgctaaacaaattaatgagttatgttgtgatggattttatagaagccttataagatggaagtcattagttccttcactcaaaaactcaataattacattcgaattaagttttgatgacaaatatctaggtaaagatataaagtttagagcgctgtataaagaatcacctggaccaaaccctactagagagaagcttagtgatgctgagtttgatcaagtgatccaaaagttggaagaaaaaatatttcttatcaatgatcacattattgaacagcacagtataagataccctgaaactcaatctgtgatttttgactcgtcgaatcaggaggtcggataa

SEQ ID NO: 439829 - DNA, 1092 bp, Serratia marcescens
atgggtggagaaactaaaaatattgatgagattgccggtattatttctagtcgaatttttgatgaactcggctggcaatgccaaaaaacaacagatataagttgggactgttgcttaaagtctcatcttagttcaaaacaacgtaaggcagaagaacctagtaaaacgcatcctactgatgttgtgtttaaatataaagatccttattctgatgtgattcaatatattcaaacagacctgaagtcatactgtgcaagcacgctcaatggcactagaaaaatcctaaatacaatacggagtttgtctcagcaagtagcttgtgcaccaagaagtcctgagtggcggagtttatttttagataacactcatgaagaatatgaagttcatggtatgttattcatatataatcatgataacgaatatgattctgatttgattaataagttaaatggtgcagccactgcagattatgatttcccagaaaaatcaatgttggctatttttgatccagtaatgattaggtttttgttggatgtgacattgcatattgaagccagaagggcaatttcagataaacattctcaaatggaaagtttactctggcagaaaattcctgaaatagaaagttgttcattcttttatccagataaacataataagatcgcctctaaagataggaatctccctgccacaatagagatgataacttcaggcatgcttttttatgaatataagcatgattatgtgagagacgacgctggtgatagagtggaaagtaaaatattaaatattttctggaaggagaaagtgaattctaatagtcattttgtttttcttcttgagtatatattcaactatcaacttttgaatcaattcgataaaatatatatcgttacccctttttctcaaaactcagatgtttttttaaaaagtgctattaatgattatgttgggatctattctttttctcagtctcatattgatactttaaagaataaaatagtttcaataccattcgttaatcaaaagctatctatttttgaataccaggtggctagtaagtatattgcgagagaatgtcatttttcataa

SEQ ID NO: 439830 - DNA, 429 bp, Serratia marcescens
atgactttaactactgagcagttgaaacacatcctcgataacccggacgagttttcgttatcgcaagtacaagaaatggccgttgaaatcctttctaaccgtgcgttagcaaccacaaaggctatctctgatgtgatagcagaacgccagctccaacaagataaaggcagagacaatgcccacgatgacggttacatcgacggcgtgcttgctctcgcgggagcggcatttgcagtgtccggggcagggtttaatcgtgtcggaacttaccgactaagagcaagaaacctttggccgttcccgaaagaaacattcaagccggccggcgatgtgaatcgtcgccatgatctggtgcgcggtgccgcaatgattattgcagaaatcgacaagatggatcgcgccacagctctggaggccgccaatgcttaa

SEQ ID NO: 439831 - DNA, 348 bp, Serratia marcescens
atgcttaaagattatttgcaacatatcggcaacaccatgttttctatgtaccaagagccgtttagccatgattgggacatatgtctaacccgcctaatggatgaaggggaagttattacagcaactcaacatctcctcgttttttccctgcacggtaaaagttacggcgtatggacatgcaatcgctggtacagctacggccatttgtatgaggtgaatgcccaatacgctccaagagagtttcagttccgcccacgctttcgcacgatgcgccgacttaatcagctgcataagcgccatcaactacatcaattccaaagagaaatcattgggggagaaatcgcatga

SEQ ID NO: 439832 - DNA, 399 bp, Serratia marcescens
atgctgaagacacctgtagctactgccattgcggccctcaatccccaacacaatcacattcaagattttcatgtgctggcgcatctcaatcgagtgcgtgccttcgcctggggtggccgtcgttgcgggaaaacctatgcagcccgccaacaggagctgatccgcgcagcgttcaagctttccgcaggcgcgacactgcgacttcttcataccagaagaaatccgcagaaagggcgaatattcagctacgacctagccggcggcgaagacaagtctgttgagtgtgtatttaagcgcaactatgccactggcggtttaacactggtatcggtcaatattttgtcgcgtaagtggcaaaactcgccgtggttttacttagacgagtggccgtgggcgtga

SEQ ID NO: 439833 - DNA, 603 bp, Serratia marcescens
atgtttcacaagccgctcgcggcgcgcacgataggaattgatgttgatagtaatgcgtttttgttgacgcgcggccgctggaaagaaaaaggaatgaccccgccgaagctgaatctttatcacggcgatgctgttggctttctgcaacgggagttggcggacgggacattcagccaacacgggcgggtgctgatttatgccgacccgccctaccttccagaaacccgcaccagccgcgcgcggtatcgtcacgagtataccgtcgacgatcaccgccgcctgatcgatgtgctgcgcaccgtgcccgccaacgtcatgatctccggctatccgtccgcgctctacgacgagttgctcggcgattggcgcagcctggaatttcaggtgatgacgcgcggagggccacgcactgaaaagttatggatgaattatgcccaggatgctgcatacagcgcggcgtttgccggcgcgaactatatcgatcgacaacgcatcaagagaaaagccgaacgttgggccagaaattatagcgatctaccggcagcggaacgccttgccatactggcagcacttctttctactcatcaaaatggggacgtttag

SEQ ID NO: 439834 - DNA, 1101 bp, Serratia marcescens
atgagcttagacgcaatgcgctgggccaagaaggtaaagacggggaagtcatcatccaagtcagtgttgacgtggttggctgatatgagtggcgcagatcactgtgcgttcccgtccatcgatgcattggctgaagcatcagaactgaacaagaaaactgtgcaggcaagcctgaagcacctgatctccctcgggctgattgaagacacaggagagcgcagggggaaaacccgtcaggtacctgtttatcgtcttgttggcgttgaagaaagtatcactgacgcagaacacacccaaaaacgggaatattaccaaaaacgggatcgtttgatggggcagagtcaaaaagcaaacacacccaaaaacgggaacattaccgaaaacgggtgcgtttcagataaggcacccgaaaacgggatggttaaagaaagcgaaacgatcccgtttttggacggaaacacacccaaaaacgggatccggaatctaccaggaatcttaaacccaaaagaaaaaccccccataaccccccagagcgatgcgggtgcagagaacccatcggctgaggctggggaagttctcgattttctgaatgaaaaaatcaacggcaggacgccaaagcgcgccgacacgttgcgggaaattaccgagcgtctggcggacggcaacagcgccgccgaactgaagctggtggctgaacaccgcgcaagtctgctgctgggcgatccgaagatgggccacatgctcagcgccaagatgattttcgatgccgtccggttcggtggatatttggcagccgccaaagcctggaatgagaaacgagaaaaacaagcgtttgcagccgccgcaacggagcgccaacgcgtcgagctctcgggatttagggtagtgggtggatcaacggaaaaaatcccagaaatagattttgatgaagcgttcgaccgcctgatccgtgatgcgtccattcctgaaaatgaagctgaaaagcgtgcgctgcagcaggtacggaaaaatgggtttgggaacgtggacgagaacaaggcccgtcaactgtggcgcccaattttaaccagagcttacgcaatgtcaggagttcaggcatga

SEQ ID NO: 439835 - DNA, 216 bp, Serratia marcescens
atggcagccttatggtttggtggtgatgcggatgtttacttcgccgtcgcaaccaacaagcatcggctgatcggctggctcactctcatacccttccattgcgatataggcacccgcgatagcctgaccaagcgcttccacatcagttacgccatgacaagccgtaagggcatgcttcagagcttcgcgcgcctgggacttcgcgccatcgggtaa

SEQ ID NO: 439836 - DNA, 2106 bp, Serratia marcescens
atgaaaaaactgtcacgtaactggtctgggaatgtgggtcagtccatcgaaaaagcccgcacactggccgccgaatactcccgccgtgatgtacccgacaacgcaccggccgatctgcgcgactcggccagtcagggactggaaacgagcaaggggtttgcgttgtctggccgtctgctgcaaagcgaactggtctacggttcagatgtgccgctggcgcagttcggcactgtgctgatcccgctggtactggcgttcacaaccctgcttctgtactggctcccggcatggctggcattcattccggccgtcttatgggcgctgtttgccatcatgaccggtggttttacgctgggctggtttgccggcgttctggcgctgctcctgctctggggatctgatatttcgctgttttcgatgggcgggacagcgcagatgctccagtttggcaccggtatgacgctgacgctgatttcgctggccgctctgccgctctgtcaccttctgcgccgcgccgagcgctttaccatcatcaacgatgacgctaaagccggcgcaatcattctgtccgcctcacgtcaggcaaaagcccgcgaaaagcagacagaacgcgccgcacgcgacacctcgccgctgatctggctgggtgaggcgcagggcgtgacatgggagaagggggatattatggcgcccgatccggcgtcacgcgttgccctgtcggccgctgacctgtccacgggattgcttgtgctcggtggcaccggcaccggcaaaacgtccggcgtgttcaggccggttatccgtcagtggtgtgagcacaattgcggtggcctgcttctgatggacggaaaggggcagttaccggccgaactggccgaaagcaacaggggaataacgctgctgaccccggataacccggaaacgcctgtcccgctgatcgatggcctgaatgccgaagaagtggccgccgtgctggtttctgtctccggcaaggggaatgataaaggctctgactggacatttgcggcagaaaaacagttccgtttctctgccctgctcgttgagctggctgtcagcgttcaggctgcaccgtggacgctggccaccattgcccgctgcgtgtctgatacggcattcagggacacgctgattgaggcggtaagcgcccgtacagaaacactgtcacctgaactgaccacggcggcgctggatttctggctcaaggaatacccggagctggcaaaagccgaagggtataccagttctgtgcaggggattgtgaccgcgtggctttctccgctggtcggccacaggaaaatgcatggctggattaatgccgccgaaggggttaacccttctgatgtcctgctcggagcgcggtacggcatagggattgattcatcggtatatggcgaactctgcaccgcagcggttaacgggttcatcaaaaaacgcctgtacaacgaggcaacgcggcgcggggataactggaaagcagacggcacaaatacggcggccatgattgtgatggatgaagcggatgtgctgctcgatgaaaccgatgccggcattctgccgcgtgggcgctcactggggctgaatttcgtggttggcttgcaggccgtggaacaggcggaagccgctttcggcgggacgcagaacgcgccaaaagccctggcgatgctggcgcagctgcgctccgttgtcgcgctgtcatcaacccatcacaccgcgcagtatgtctccgatcgtgtggggttcgggctgccacttgagccggtatcgctctctaccgtgccggatatgcgctataccgtactgcaacgggcggcggcctcaccgtttaacgacgaggaaaacgagttccgcagctcgataacgctcgatattccgcatgtgattagtcatacggttggcaaaatgatggatcacaaaaatgcggccggcgaacgtctccagttggcaaaagagcctaagccgtggatctcaccgcaggaatgcaacatgctcacggcgacggagggcgtggccgttgtggtactcaaccgcgccggcgctccccgccgcgatgcgatagagctggttcccgaatatcgcgccggctga

SEQ ID NO: 439837 - DNA, 1440 bp, Serratia marcescens
atggcgattgcacgactcagcatgaaagcgggaatgaaaggccgtggcgcagaccactcggcctacatttcccgtgagggcaagtatgcaaatcgtctggaacggggtgagcggctggaggccaccgaccacggtaatatgccggagtgggcgaaggacaatccgcaacagttctggctggccgccgatgcgtatgagcgcaagaacggcacctcataccgtgagatggaaatcgccctgcctcgtgagctggacagcgaacagcgtgaggcgcttgtcagggactggacggagcaggaactgggcgacaaacacgcttatcagtgggctatccacgttcccaccgccgctgatggtggcgaacagccacacgtacacctgatgttctccgaacggcagcgggacgggattgagcgcgatccagagcagtatttcaaacgctataacagccggaacccggaagccggcggggcgcggaaggggtacggtgagcatggcggccagccgcgcacgctggagcagcggcgcgaggaacttgtcgccctgcgcggccgctgggaggccaaagctaacgaacatcttgagcgagccggccagcgcgaacgtatcgacatgcgcagctatacagctcagggcaaggacgccattcctgaaaaaaagcagctaccgagtgaatggcgcgacgagcggaagcgtgcagaaatactggatttccgcgctgcaaaagccgagcaggaacaggctcagaaagacgccggcaaggtgctttatgagcacaacagcgcggtagagcactatcgcggcgttgtggccgcggtgccggagcaccggctgaaaaactcctcaccggacagcatcgctctggatttgcgagaaaaactcgtcgggcagcgcgttgacagcgatccggccgtagtggccgcacgggagcaggaagaaaaaaccggtaaggcactggagaatgcgcggcaggaacgggacaaaacccggcaggaagccgagcagcagcggcaggagcagcaacgatgggaagaagaaaaccggatgcgccgctggctccatgacaagggcatcaaaaaggacgagcgttataccggactgcaacagcaacgggaaaaatcagagcagcaggcacaggccgccgtgcagaaggagcaacaggcagaaatgcagcaccggcaggccgtcactgcgcgggaagaaaccgaaactgatgtccgtcagcaggccaatgaaaaatggttcgagcatcatcatacggccgtgaaagaggccgccgccgaacgccagcgggaacttgagcggcaggagcgggagcagcagcaggcaaaacaggctgaatatcagcagttgatcgcccagcaacagcggcaacgtgagcaggaaaaagagcaggagcacacgccggaacggcagcacgggcgcggaatgagcatgtaa

SEQ ID NO: 439838 - DNA, 459 bp, Serratia marcescens
atgcacgaaaatgaatggctggagaaacggcttgcatatattcgcggactgaacgcaccgaacgaacagcagcgccttttgctgatgctggcgcagttgtcccagccaacaccgaatgaccgccgcaagctgggagtgctcattcgtgctgaaaaagccgcagagagggcgctaaaggctcgcgctgatgccgctaaagtgctgaatgccgaacgtcgcgccgtccgcaaagcgcgtgaccacgaactctacaaggcggctggtctgatgggcgtggccggcgtggttgaccgtgaaaccgggcggctcaatgtggatgccggcctgcttgtcggattgctcatggagctggctgccggtacactgccggaaaacctgcaccaggaagcacttaaatctcgcggtgatgctgctatcgctgcccgtgagaaaaaaaataaaacgaatcaggctggctaa

SEQ ID NO: 439839 - DNA, 702 bp, Serratia marcescens; identical to SEQ ID NO: 229663

SEQ ID NO: 439840 - DNA, 126 bp, Serratia marcescens; identical to SEQ ID NO: 229662

SEQ ID NO: 439841 - DNA, 264 bp, Serratia marcescens; identical to SEQ ID NO: 106556

SEQ ID NO: 439842 - DNA, 300 bp, Serratia marcescens; identical to SEQ ID NO: 229660

SEQ ID NO: 439843 - DNA, 162 bp, Serratia marcescens
atgacagagaaaaagcaatcagcaaatgccaagcgtcaggcggcgtttaaggccagacagagagaagccggccgcactcagcgggtgctgtggctgaccgatgaagaggtgaacgccgtcaaggcgttactggataaaatgcggggggatgaacgtccgtaa

SEQ ID NO: 439844 - DNA, 294 bp, Serratia marcescens
atgattgctgtactggcatttcgtgaactgagtcgcccaagcttcaatcgcgttaacgccgccgcaggcgtttatgacacgctcatgggtgaaaaaaccctgcagtcgcgggtcattggcgatctcatgctcaaccgccggcagtatgccttcaggcgagtccttgaactctttcggcagcgtggaaaccatcacgcggcctgtcatgtacggcaccagcttttcgtctaccgggatcagggcaatacccagatcatgctgtaccgctgctttgactatcgctctcatgcctga

SEQ ID NO: 439845 - DNA, 228 bp, Serratia marcescens
atgaacaatttaggaattgcaatcaagggcgttggtatcccagaggtagccaaggcctgcggtgtaagcgagcgagctgtttataagtggataaaaaacggccgcttaccaagaacagaatttttcggaaagaccgcttatgccgagatcatcgaaaacatgtccgctggcaaataccacgcgactgatttgttaaatatcagtctgcaaaggctattggctaattaa

SEQ ID NO: 439846 - DNA, 369 bp, Serratia marcescens
atgatcgacatggtcgaatatcgtggtggttggcttaagatttatagcgatgatccgaatgcctacgggcttcgcgtcagaggtgacagcatgtggccacgaattcactcaggcgaattcgtcctaattgagccaggtacgactacccacccaggtgatgaagtgtttgtccgcaccactgacggccacaacatgatcaaggtgctcaactacacccgtgaaggtgactaccagttcaccagcattaaccaggatcaccgccccattaccattagccgtgacggagttcagaaggtggagtacgtggcaggcattatgaaagcatcacgacacgtcgataacgatgctgtaactgactctatgatttaa

SEQ ID NO: 439847 - DNA, 1305 bp, Serratia marcescens
atgacagctgaaatagcggttttcaataagtcagcggttgctctagcagctgactctgcggtaactatatccggtggtgatggtataaataaaatatacaacggtgcagacaaactatttgcactaagcaaacatcatccagttggaataatggtttttggttctgcaagcatctgtgggattccatgggagatgataataaaggaatttagaaaaaaaattggtaacgaccactttgatacggttggagagtatgctcaaaaattctgggatttcctttgcgatggcgaacacctcatcccaatggatcttagggaaaactatttaatcgacacgtttacgaatagattttttaacgcattgataaatcatatcgatcaagaaagaatacaaaaatttattgatgaaaatgggattagaccaacaatttcagaaacttataagatactagaagaggaggctaacagcgttctttctgggctatcaactacagagtatttagaggggtttggtgaggaagatatagacgccgcgaaacccttcgcttttcctatagcaagggaagtatgtgacaataaactattaaaagaggatggaacaccaataccagaatctctttatgaggttattggaaatttatttgctacaattacatgtaaaaaatcaaacttcggacctaacaccggattggtatttgctggatacggcgagcttgagtatatgccagcaatattagcatttgacgttcttggtttttttcaaaacaaactaagattctcgcaaaatttaaacaagagttcttctggtggtgtttcggcaataaaggcatatgcgcaagaggaagaggtagaaacgtttctgcatggcataagtaaaaacctaagagactttatgcttgcaggatttgaagtggaaaatggtcgattactgaacgacatttcagagagaattaatgccacttctgcaactgagcctgagaaagaaaagctgatcaatgacttctccaataagcttgctgaaacactgataagctacaatggtattatctcaaatcatatcaacgacaactttagctcaaaagtgactgaaatgattgagtttttgccaaagcaagacttggcctacatggctgaatcgctagtcaatctaaccgcgttcaagagaaagatctctaatgacaatgaaactgttggcgggccgattgatgttgctataatatctaaaggggatggtttcatatgggtcaagcgcaagcactattttaacaaagaccttaaccaccacttcttctcacgtaactattaa

SEQ ID NO: 439848 - DNA, 912 bp, Serratia marcescens
atgccgaacatactcgccaagccgccgagggcaaagcggaggaatctcagcggtgaggttgccagccaggtaaatacacgcccaactccttttatccccttggtggctgtctgtagtggtgaggatgcaaatgtcattactgcgcggctggtattccctaagccttgcttagagaatgtcagcgcgcttttccctgcctcaagtaatgagcggctgaagctcccgacttgctttttagtgataggcgtcgtactggcgaatttcagcatgctgagtgagaggttaggcagcaggcgtatacctaacatgcgggtgctgaaccggagcagggcaaacgggccgagcagcccgactgcggcgatcgccagcgtaccgaaaacggtcgttgcaatggcggctgctgcccctaccttaacagtggcggcgcttatgttggggtgcgcttttaaaaactcagcgacgccgtgcaaaacgttgctgatgcctttggccgtttttcgtagccaggcgtcgtttttttcaaacagttcaacgctgatattttccatggcggcatgtagcatcgtcatgtcgcctttcatgttatccagcattgtgcctgagacgcgcgcggcttcgccatcgtactcacccggcgcgccgcgcattttttgcagcttgccatctgataccgcacgcatcaactcaccgaatccagtgaccgcatacatgccggcaatatctttgaaaatcttaccgcgatcgacgttccccatttttgacgtcttcttgtcgatatctttcaaaatatcgaccaggtcgcgcatattgccgtctttgtctttggtttcgacgcctagttttctgacggttgggctgttgccaattctgctgagaatagcgcgcattgccgtaccggcctggctaccttga

SEQ ID NO: 439849 - DNA, 294 bp, Serratia marcescens
atggaatcagtcgcaacaacacgcaacgaagctcaggcgattcagagcgacatcatgagccgcattgcagctatcggggtgacaagcctggccggggcgatcggcgttgataaatcgcaggtgagccgctggcagagcaaaggggggctggtggagaaggcgagcctgctgctggccgctaccggcttcaagcgttcggaaaccatgctgacgttcaggggcgaggaaaccgcagaactggcgcgcgggttaatggcgatgctggagcacatccgggaaccaaagacggaatag

SEQ ID NO: 439850 - DNA, 693 bp, Serratia marcescens
atgtccagccggtcggctgcggcaagaacaatggcgctccaggatttggctaaggaagtttttcaagacaagacattcgaagatgttctgatgggtattggcatcgtcgcaactcgatggatgaccgaaagaccaatgatcttcaaaggtaatgttgtgcaggcccatggtcgcaagggaaccttcagtcctggattcggggtcagcatcgctgatgcagtgcaagcgtcttgctcggcttatccgttcttcgaaaggaaagtgattgttaccgcagcaggagataaggttgagttgatcgatggaggttactgcgcaaacaaccccaccttgtttgcaatcgccgacgccactgtcgctctgaaaaaagatcacaaggatatccgggttataaatgtcggtgttggtatctatccagaacctaaaccaggtctccttatgcggattgctaagaaatggctcgcagtccagctgcttcaaaaaactttagagatcaatacacaatcgatggatcaactacgcgacattctattcaaagatattccgacgattcggatcagcgacacattcgaacggcctgagatggcgacagatttacttgagtacaatttagataaactgaatacccttcgacagcgtggtagggagtcttttggagctcgtgaggcacaattaagagagtttctgatatga

SEQ ID NO: 439851 - DNA, 894 bp, Serratia marcescens; identical to SEQ ID NO: 98276

SEQ ID NO: 439852 - DNA, 1746 bp, Serratia marcescens; identical to SEQ ID NO: 98275

SEQ ID NO: 439853 - DNA, 717 bp, Serratia marcescens
atgtggcaagcccgtttctaccagtccctgccgcgtatcgtggcggattaccccaatgcccgctggatgttcctgaccctgaccgtgcgcaactgtgcgatcggggatctgggcgagacgctgagccggatgaacacagctttccagcggctgaaggatcgaaaagagttccggccagttcagggatggatccgcaccacggaagtcacccgcggcagtgacggcagcgcacacccgcacttccacaccctgatgatggtgccgccctcgatgttcacgcgtgactacgtcaaacatgagcgctgggttgaactgtggcgggagtgcctgcgggtcagctacgatccgaatgtcgatgtccgggcagtaaaaccccggaagccgaagaacggcgaatcgctggcctgcgcgaccgccgaactggtgcgcggcgcggtggccgagaccctgaaatattccacgaagccggccgacatggtggccgatcctgaatggttcctcgaactgacccgccagacgcacaaacgccgctttgtggcgaccggcggcgtactcaaagacgtgctgaaactcgatcaggaaaccgacgccgacatggtgatcggggatgatatttccgagggcgatgatgacggttcccgcatcgcgttcgagtggaagaccgaggtcaaaaaataccggcgttcgccgacgaaagataaaaccgaatcagactaa

SEQ ID NO: 439854 - DNA, 1035 bp, Serratia marcescens
atgccggaattcttcagcatcctgacccatgccggcgccgccaagctggcgctggccgcgcagaccggtcagcctatggcgatcagcgcaatggccgtgggtgatggcgacggcgccacaccaacgccgtcaccagaacagaccgggcttatcggcgagcaataccgcgccgcgctcaacgcgctgactatcgtgagcgaatcggccaacgtgatcagcgcggaaatgataattccgccggagttcggcggattctggatcagggaagtcgggctttatgcggatgatggtgtactggttgccgttggtagcctgccggacacctacaaatcgcatcttgccgaaggctcggggcgcaattcagtgatccgtgttgagcttgccgtcagcagcacaaaggacgtgcagctacttattgaccccactgtcatcatcgcaaccgtggagtacgtcgacacgaagtttcgcgaagccaagaaccgggcggacgacgcctacgcgctggcggaaagcaaagcggcatttgatgatatttacccgccggggatcagtatcttctttgcaacgaacctgaaccctaacgaaaaatggccgggcaccacctggcactataccggcgagaataaaacagtccgcatcggcaaggccgatggttcagacgtcggtgctgagggcggcagcgatacggtgaacattacgcgcgccaacctgccgcaatcggtgctgaatgtgtcgggaagcacaaacgagcaaggggcgcaaacgctgaaaacaacgccagcgggtaagcataggcaccaagggggaatgtccgcgcctggcgagacgtgggacgaagattatattgtcggctccgacaatgacagccgaagaacgcgcaactacaccagcgaggcggaagaccatatccacgaggccaccgtgccgccgcacgctcataccgtttgggctcaaaccgaggcgctcggccagggacaagcgatcgacgtcgtcgaaagccacatcaagctaatgtgctggtatcgcgccgcataa

SEQ ID NO: 439855 - DNA, 495 bp, Serratia marcescens
gtgcagcgcagcgggcaatatgccatcagcggccgcatggcggataacgatcgcgcggactcgctgggaattctggtgggcatcagcattgccggactaccgatggcctatttacgcacgcagatcaccaaccagcaaaaagacattgaggcctggcgctacggcacgcgcgacagcacctggaatggctcgggcgtgaacggcatcgcgatgggcgcggtcagaaccccgtatgcggattacgtgccctccgccgcactgtttgacgtcgacggcggcgaaattcgcggctacgaagcgggcgagctgaaggcgagggatacgtcaacgacgggacggctggctgatttgacgtcattcccgcagccgatttatgtcggcagcacgtttaccggcggcaaggtaaatccgtgctacggcacattgcgcgaagccattttcttgcatacggcagacgacagcgacgccgtcgccctgtccaagctaggcatgtaa

SEQ ID NO: 439856 - DNA, 687 bp, Serratia marcescens
atgaaagagcgcccagtgattttcaactcagaaatggttcgcgccattctcgacggccgcaagacacagacgcggcgggttatgaaagttcagccatccgagcacttccaccctatgaatatgtcccttgaattggattattccgctcgctggtatacccctggcgtcgtcgataaagacggttatctgaaaccggcaaagaatcagattttcggcgttgcaggcgaggatgagggttatgcgtgtccgttcggagcggtaggtgagcggctgtgggtgcgcgagacgttcatggacttaaccggcaccggcattgaagccactaccggaaagtttgagggattcgcatatcgcgccgacaccccggctggaagttatggcgatgaagtccgcaaagagtatgggctgaagtggacgccttcacttcacatgccacgtaaagcatgccgcatcctgctggaaatcaccgccgtgcgcgttgagcgcctgaacgatatcagcgaagaggatgctagggctgagggtgtcgcgccatcgcaacacatcatcacgccgccagaagcgctatatcgcgttgggttcctgaatttgtggcaatccatctacggcgaagaaagctggagcgccaatccctgggtatgggtgatcgagttcaagcatgtggaggtgcgtgatgccagcaaatga

SEQ ID NO: 439857 - DNA, 213 bp, Serratia marcescens
atgccagcaaatgaactgaagccgtgcccgttctgcggcgggaaggctcgcgtggtcgattcgagttactcaggctcggctatccacgttagctgtcgctgcggtgctcagatgtttggcggcaggcaacattttggcagcgaacgcgaggcaactgaagcctggaacatccgggccggtgactgcgctagggaggtggagcgtgaggtatga

SEQ ID NO: 439858 - DNA, 186 bp, Serratia marcescens
atgagcatggcaaacgacacttacgaatgctgcagaaggaaatgcaagctggttcacctgcactctgagcgcgtcatggttgaaggtaagccgatcggtggcgtacccgttaaggattcaacctgtccacgctgtggctgcaaagagttctatatcgttaaacgcgatgatgaggatggcgagtga

SEQ ID NO: 439859 - DNA, 243 bp, Serratia marcescens
atggcgcgcctgggtaacggtaatgtcgccagattcaaccgcatctttaacggcctgagtggcatcaagcagggcgagtgtggcgcggatcgtctgcacgccgacgccaaacatcagggccaggtctttttcgtcgtgaccccgcgtcagcgcatcagccattttcttggcgcggcccaacggcgtatctgcctgaaagatttcattggcgctaatcatcacctcggcaacgctaaacggtga

SEQ ID NO: 439860 - DNA, 801 bp, Serratia marcescens
gtgctctgcgaggacaagcaattccgccagatcgtcaccattgaagatgcgttgcgcggcggctgcgacctgttcgacctcgacgagctgcgggaggaaaacagcgatgaagattttgacaacctgttcatgtgtaacttcatcgacgatacatcgtccgtcttcccgatgggcgaaatgcagcgctgcatggtggacagctgggagcactggacggacgtcaagccgtttgcgttgcgcccggtagcgtcgcgcgaagtctggatcggttatgaccctgccagttctgaagatggcgatagcgccgggtgcgcggtcatcctgccgccgctggttgccggcgggaaattccgggtgctggagcgccatcagtggcgcgggatggattttgcggcgcaggcccgcaacatcaaggcgctgaccgaacgttacaacgtgagctatatcggtatcgacaacaccggcctgggccgtgcggtgtcgcaactggtgcgccaattcttcccggctgtgaacgccatcaactacagcctggaaatgaaaaccgacctcgtgctgaaggcccgcgacgtgatccgctccggccgcctggagtttgatgccggcgcgctggatatcgcccaggcgtttatgtccatccgcaagcaaatgacggccaccggccgccgggcaacctatgtcaccagccgcgccgaaggcgtcagccacggcgatgtggcctgggccgtcatgcacgcattatttaatgaaccgctcgaaggggcaaccggtagcaatacaggttttatggagatctactaa

SEQ ID NO: 439861 - DNA, 261 bp, Serratia marcescens
atgacacgaatgctaatcagagcagccgatggagccgtgcacactggtagcgcagtgtcattcgtcctcggcatcattaattatttttcacagagcgaatggatcatcctcggcgtcattttcggcatgttctgctctgcgtttggtattgccctcggtacttactttcgctgccggcgcgagcggcttctgcgtgactggattaaaaaacgcactgagacgatcgacacggaagaacttgaaatgctggagcgtgagtga

SEQ ID NO: 439862 - DNA, 465 bp, Serratia marcescens
atgatgatggcattaggcatgttcgtgttcatgctacaaaccgttccataccaggaatttcagcaccaaatgtcatggcgacacccgacaaacagccgtgtcgggcttcgaccgcaaagccagtttttggggccggacgatgaaacgatcacattgagcggcgtcctattgccggaactgaccggcggccgagtgtcgctaatggcgatccaactgatggcggaaacaggcaaggcgtggtcgcttatcgaaggcagtggcgcgattcatggcatgttcgtgatcgagagtctgacccgaagcaaaaccgttttctttcaggacggatccgccaggcgcattgagtttaccatcacgctgaagcgcacggatgaagggttaaaagatatgttcggcgatttatcccagcaatttgaagacctcgccactcaggtatctgacactgtcggggggcttttatcatga

SEQ ID NO: 439863 - DNA, 312 bp, Serratia marcescens
atgtatgcgccgggcggtaagccggacggcttgcagcttatcccgctggccgaggtggcggcgaaagatgaatttttgaacatcaagaacgtgacgcgcgacgatcagctggcgtcccagcgcacgccgccgcagttgatggggattttgccgaataacaccggcggattcggggatgtggaaaaggccgcgcgggtatttgcgattaatgagctggccccgttgcaggaacgcctttgcgagctaaacgactgggtaggggaggaggtgatcagcttcaacccgtatgaattgctcaaaagtgatcagtaa

SEQ ID NO: 439864 - DNA, 264 bp, Serratia marcescens
atggcgatccagctgatggcggaaacaggcaaggcgtggtcgcttatcgagggcagcggcgcgattcatggcatgttcgtgatcgagagcctgacccgaagcaaaaccgttttctttcaggacggttcggccaggcgcatcgagtttaccatcacactgaagcgcacggacgaagggttaaaagacatgttcggtgatttatcccagcaatttgaagatctcgcctctcagctatctgacaccgttgggggacttttatcatga

SEQ ID NO: 439865 - DNA, 219 bp, Serratia marcescens
gtgaaggtcatcagcaaacttctccactccctgcgcctggagagcggcaagtttggcacctacctcttcaacaatgtcgtccaggtatgcgtgccagttactccactctgggcactctccagttacagccttgtaaatcgcggctatagcgttccgtgcggcatcgcgttcagcttcaagatcgctcactgcctgctggtggtcatcaaactgaactaa

SEQ ID NO: 439866 - DNA, 255 bp, Serratia marcescens
atgcccaccgtattggtggcgcctttccccgcctctgtgttgagcttgtcgagttcaacggcttgcgccgcctgcacgccggaaagcgccgccttggtgttttgcagcgcggtcaggcgcccgtcgccttcttttcttgcctgttgcgccgagctgacggcggtgttgagcgcgccgcccgcggtgcccgacaacgccacgctcaggccgctctgcttttgctcgaaggtttctttgcgcgtgcgccgatcgtag

SEQ ID NO: 439867 - DNA, 414 bp, Serratia marcescens
ttgaccaccattgctgcgcactgcaccgccggtattttccagcaagccaaaaatgcgcagtgtcacctgttgctggccgtctatcgtcccgccggcgttattcagcgcttgtgcgtcaagttgaagcgcctcaccactctgcattttcccatcgcggttgttcagcgcatcgctcagcataaggcgttgttgtttctggctgtagagcagcccgccctgcgtattgtcgagcgaacgggcggcgatactcagcccctcgccggccagccactgaccgccagcgttattgacggcgccggcgtgttcgccgtctttggcacccgtaacagcaagctgcccctgcgccaaaaccttgccgttgcgattatcgatatcctgcttgatgcgcagcgccaggtcgtgtgccgactgtag

SEQ ID NO: 439868 - DNA, 273 bp, Serratia marcescens
atggatatccaacgccttgccggcaccaatgaggccgcgttgattatccaggcggctggatgtcagatcgagattgccctgaccgatgacctgtccctgcgtgttatccaaccgctgcgccaccagacgtacgtcatcaccgctcagggttccggacgcgttattcagatcgctgcccgcctcaagcgtcaggccgttcccagccagcaggttgcccccggcattattcaccgcgccattagcatggagcgtgagccccgactgggtttttaa

SEQ ID NO: 439869 - DNA, 564 bp, Serratia marcescens
atggcaccgtcactgttatccaatgagcccgctagggtaaaacggctctcaccatcaccggtctgtgaccaggtcgcctgttggttgaacagattgtcagcatctaccgtccagcgcccagccttgactttggcctgctgtgcatccacattttccgtcgtactcacggccagctcaccgctgtcaacggtggactggcgcaaggcaacgccgccgtcacgtgccgtcagcgcggtacgaccagtcgcaacctgtgcgccgctgatatccacccggcgtccggacacgttgacgctctttttactgagcagaccgccactggcgcggatatcgccctggctatcgagctgcagattggcatcctggaccagcgtgctgtcggcattgctgcccgccagcaggtggccgctgctctggatgccacgcgcggcgttcaggtgcacatccccggccgccgccagcgtaccggactgcgtcaacattccctcgcgactctgcgcggccagttggctaccgctgtacactttgccgtgcgtctcgatgtcgccttttgccgccagctga

SEQ ID NO: 439870 - DNA, 621 bp, Serratia marcescens
atgacaaaaaaaaacaatcaagagtttacccatctagatttcgaaaatcacatccatctgcctcatggctacttaaggatacctatacctgatgaaaagtataagtgcttacccggtgtttatgaccgtgtatgtagcgtaatttatttcgcatcaagaatcggaggtaaatctgatagatttggcatttccaacaatgccttcagcacagcaatgtttcgggcgtcacttagcgaattcatcgctcttgacgattatataatacaaaaccatagtaaaagactgtggcttaatgagcataagaatactgacccagtctttcatatgcttaaattgctcaggaattataatgttcatattaacaataacaaaattgactcatgccaatttcaagttacaactcttattgaaccagacaaaacacatacaatcagtaaatattacatatctaacttaagcatcgtcgaactaaaaaaactaaatggcgcatcacgttaccattcctctttaagtaaaatgatagatatatttgaaactgagcaacacgaatatggaattggtcaactaataatgcactgcactcttattaatatgaaaaacctcgataccctactaacttaa

SEQ ID NO: 439871 - DNA, 1080 bp, Serratia marcescens
atggctgataaaaagtttctcacgctgatcactgccgccggcgcagagcgcctggcgaatgcagcggtgacgggaacgccggtcgccatcgcggaaatggccgtcggcgatgccggcggtcaactgccctcgccgaacgccgcccatgctgggctgattaacgagcagtatcggggcatgctgaataaactggtgattgctgacagtgacgccagcatcatcgaagctgaaatgatcatgccgccgcagatcggcggcttctggctgcgtgagctggcgctttacgccgatgatggcgaatgcatcgccgtcggcaacatgccggaaacctataagccgcagctggctgaaggcgccggccgatttcagatcatcagaatgcaactgaaaatcagcagcacggccgacgtagaactgattgccgatccgtcggtaatcctggctaccgctgaggacgtcaagggcgcggaagatgcggccaaggactacacggacgaagcgatcggcgagctgggcgaaagcgtaagcaaggcgatcgctgccgcagtaaaaacggcaatccgtgacgcctgggagcaggacaaccccgtcggatcgtcgcgcctgttcaatcagaacgtgaaccctaacactaaatggccgtggtcaaaatgggagtacgccggcgaacacctgacgatcagaacggcaaaagcggacggttcagacgttggcacccagggcggcagtgatacggtaaacatcacgcgcgccaatctgccacagtcggtgctgaatgtgtcgggaagcacaagcgaacaaccggcgcaaacgctgaaagcaaaaatggcgggccggcacgcgcaccagggcgggatgcgagggccaggggcgaaatacggctcaacaatatcaggcaccgataacgacggcgaacatacgctgaactggacgagcgaaaatggcgatcatgaacatgatgtcgatatgccgccgcacgcacataccgttttggcgcaaaccgaagcgctcggccagggccaggcgatcaacgttgtcgagcgccataagctgcaaatgctgtggcaccgagtggaatga

SEQ ID NO: 439872 - DNA, 663 bp, Serratia marcescens
gtgcccaatcatgatgtgataaagtttgaacaattcaaatataaaaatttttatcttgatgagctgtggtttttatcctatggaataataaataaaactgagtctttaaataagattgttagcccgccacagaaaggaatggctatttataacaattatgaaataactgattttattttggggattttaagtaacgctgcaaatataaaaaagttaataactccggccgaaagaaccaaaggcgaaagcgcctggaaatatacatttaggtgtgatagggctcgatttgttagagactttttggccgatattgatatttcagaaataatgaactcaagggctagaaactcgctggaacattttgatgagtacctagataaactttgtattgatatgcttaatggaattgtcagtacagaaaggcagaatatctcgttcaatatggctgtctctgagctagatgtgcatcaaccacatgcttaccctgtgagactatacgatgcgaaagagaaaaaatattacaacatgagtgctgtggttaatctcggtaagattaactctgaagcaaaaaatattcatgaaaagattttgggaattaaaagaatggtgggggacgaacgaattgaacgtcctacaggttggcttctaacttatgaaccataa

SEQ ID NO: 439873 - DNA, 759 bp, Serratia marcescens
atgttaaatgaaatattatatcagagactagaagctgtgctagatatgttgaatgcaaactatcgtgcagtaataaaatcaccctctgctgtaaaaggcgtgtctagaagtgattttattaataattatttaaaaaacgtagttcctcaaggtcttagaattagcacctctggcgaggctattgataatcaaaataactgcacgggagagttggatataattctcgagaatggtcacttccctaacattcctaatgttaatgttgactcggctagactattttttgctgagggagttgctgctgtgatagaggttaaatctaatttgcaaagtcaatggagtgaggccgtgtcaacgggaagaaaagtgagtgaaatcactcgtgattttgggaatactacagtttccactcatggtggtgggcaaatggttatattaaatacagtctttaacaatcccaatctccctaaggctaaaatggctccagaagcgaggctgctaaaaaagataccatatttcgttgttggctatactggttgggaaaaagttgagaccttgaaggttaagctttctgaaaactatggagtgatatcagggatcttgcaacttgataaaggtgtttttgttggtgatgacagttttaaaaatctagaggcccatggaccacttagtctgttagcatttataaatgtaatatatgaatcatttaattatataaaaagcacgaacgcagatattctttcatatggaaggggttaa

SEQ ID NO: 439874 - DNA, 2481 bp, Serratia marcescens
gtgaacccttatttggatgaaccattccagccctccccaaatccgcaatcgctggccgatatcatcgctctgtacgctaacgagcgccgtgacctagccgaacacaaagaagctctggccgaagccgcctggcgcaaatttttcaacaccgaagaacgcgaccctgagctgcaagacttcctccaagaaaaacggctgggccaggcccaactggcgaaggcaatgcaacagcatgatccagcgctggccgcccaggcagacctgaacgctcaaccaaaatttatccgccaaccgctgcaacagcgggtcgattatctacgccgggaacacggcgacgatcgggccaatgcgtttttatgcgacatcgtaaaaagcgaattggcacggttggaggcggtacgtaaccgccagcaaagtatcggatttcgttacatggcaggccgcgacggcctggacgccctattggatttgcctcaactgtaccaagacgaggtgaaagggttggccgtgaaagttgcagcccatatggaactgcgatttatcgatctctatgacgagatagtcgacgaccccgacaacatcccgctggatgatttgttgcagctgtaccgcctggttgccgatgaagcggcgaagttgtccgtacagccgccgggctatcatgcgttactgcaccaaggcacccgccgcgcggagatcccctatcacctgatacacggtgcgctggcccgcctgcgctgctcggactggtggtatcgcaaattatggcggctgcgctgcgaatggcgcgaagcccagctccgctccgtctgcctggtaagcaaacacgcatccgtctacatcagccacgacgccttgctgcataagcgcgaacagcgccgcaaagccatggagtttttcaaggcgcacgaactggtcaacgacgacggcatcaccctgtcgatggaagacgtgatcgccgccagcaacagcaacccgaaacaccgccgtaacgaaatgatggcctgtgccaaaggattggaactgttggcagaaatgcgcggcgactgcgctgttttctatacgatcacctgcccgtcgaaatatcacgcgacgctgtcgagcggaaagcctaacccgaagtggaaccacaccaccccgcgggaaaccagcgactacctggtgagtctgttcgccggtatccgtaaggctatgcaccgcaaggggctgcgctggtacggcgtgcgcgtcgctgaaccgcaccacgacggaacagtccactggcatcttctgtgctttatgcgcaagaaagaccgcaaggcgatcaccaccttgatgcgcaatttcgccattcgtgaagaccgcgccgagctggggccaggcctgggcaagaacatcaagccgcgttttgacgccgagctgatcaccaagcgaaaaggcactccgacgtcctatctggcgaaatacatcagtaagaacgtggacggtcgcgggctgaaagacaccatcagcaaagagaccggcaaatcgctgaaagacacggtggaaaacgtcaccgcctgggcgtcgctgcaccgtgtgcaacagttccgcttctttggcattccatcacgccaggcttaccgtgaattgcgtttgctggccggacagctcaaccggaagcaagatccacagcaacccagaaaacccggtaggcaactgctggccgataaacaaatggacgcagtgttggccgctgcagacgtcggctgcttcgctacctacataaacaaacagggcggcgtgttggttccacgcaaataccatgttgtccgcaccgcttacactctggcagacaagcccaacacctacggcgatcacggcacgcaaatctatggcatctggtcgccacgcctgggcgataactcccgcatctgcacccacaccggcgactggcaaatggtgcgcaagacggccagcgacaccccgaacccagcgaccgacgccaccggcggcgatcgcttcgggtttgacgttgaccgtcagggcggcccctccgccccttggactcgtggcaataactgtccccttgaacaagatacgaacagtttaggggcagggattgcctcgcataaagagccacaaagtatctattttgaacagttgggatacagggaacggcgcgaactactgaagcgattacgagactccgaccagaaaacacctgctgatcgacgtcgaaatcggccaccgacgtttggcgagcgtgcaatttcaccattacaggatgaattgatcggaaaactggaagattacgccttcactttggggatagatatcagtcgagtggcactgcggcgcctagtcatagggcaaacggttaatattgacggcgagcgctatcgcgcaggtcaagatggtgtgctgtaccttttaaaaaatatacgtaagcatacaaccaaagacttaatttctagatttagaaattctttaactaaattggccacgataaaaaaatcgtga

SEQ ID NO: 439875 - DNA, 294 bp, Serratia marcescens
atgttagaccggctagagaaaagagttgaacgtttagaggctgatacggtgcagatcaagcttgatttgacgaagcttacaacgcgctctgaagagttctcgaccaaaagcgacctgcttggacttaaagcagatatcaacaaagagtttgctttagttaacaaagaatttggtacgttgcacaaagaattctccactattcatcagcagattgcgaaccaaacgaagtggattgcagggatcgtgtttactgctcttggcttaggtatcgctgcggccaagtacctgttttga

SEQ ID NO: 439876 - DNA, 543 bp, Serratia marcescens
atgcacggatttaatgatatttttttaatggcgactcaagctattggccaagattattttaatctcccagtatttgggggaacaaatgttttgcgtgaaaggcattactgctacgaactttatcatcagttgcgcttaagatggcctgaagatgaaacaaaaatcctctcaggagaagttgacaaagcggctcatcattacatgagggatcttataggttcagaacctattccggattttctcatacatatccctggtacaatgaccaacgatactgtgattgaagtaaaatcagcaacatttagccataggggtgtaaaaaaagatctttttaacttatcacgttttattttggacgcagggtatgaaagagcaatattcttgctcttcggaccagacttaacaatagatctcaccgaacgtgttaaaaaaaattatgacattcttctggaagagggtgccacattaggaaaaattgaattttgggttcatccctactgcggagaaggggctcgacactattgtactttggagcaactttag

SEQ ID NO: 439877 - DNA, 858 bp, Serratia marcescens
ttgagcactgaactttctataaaaatagattatctagctgaaaggcaatcccccaacgaactatttgaagcgctgggaatttacatctctgcctatgaagagtttgctcaattaatttcaaactcaattggaaataaccaggatttcaaatttaaacttagcgagttaagtataggctctatcagagcacggcttgctgccgttagttcttattttgatgaaatatttatgtctaccgcatccgatgctggcagggagcttttcaaaagcctgtcggaaacttccgaaacagctaccgaagaagatgtagacgcgattgcatctagaattcagagtgaaatcaacggtaatggaattgttgaacctgagattgatagagctaatttaagtcgtgcacttaacaaattttcaaaagcaaattctcttatgaagccaggtgagaaagttattatttatgaagataataattcttctgattatacttcattgaatttagactggcgatttactggtgacttaaactcgatgttcaaagggacaacacagcggctagagtgtcatgatattttatctgttaaaatagcagttaacgagggaaaacagctatggactttcataagcacctcgatgaataggacattcacggctaagattgtagttcctgattggattgaaaaatatcagagcggtcttattccagcaatcggtcccaaagacatattaaaagttaagcttacttatgatttatttgctccttataggaagaatgtctcccccgctattacaaacgcaaaaataacaagcatcgatgagattattaggagtaaaaatgaccaccaatatgaattcccatcctaa

SEQ ID NO: 439878 - DNA, 441 bp, Serratia marcescens
atgaccaccaatatgaattcccatcctaaccaattagaaaccaaggagatatatgccgatctaaagtcagagtatatattcatattcatcccatttatacttttgattttagtgaaactatatttcggaagtgcgagagatatcattctcgcctctgactggtcattagcctcatgtataatactggggcaaaacgccgcaaaaatatctcgtgccgtagccaactccaaagttagatccaaccaaagcaattttggactatacatggcaaaatcattcctgtgtgttgtcatatcattatttttttactttgcaatgatttataagccgagcatgacaataggatacattcaactttttatttttatgctggctagctatctacatttcagagacgggtttgcttataacctaattttgcgttctattaaagatagataa

SEQ ID NO: 439879 - DNA, 591 bp, Serratia marcescens
atgcacgcagctaaacatagaattgtcaactatgaatctaaagcaattgagtcttacgatggtttagattttgattatcaaccaaacttattgttctcagtcttatgttcttataaaaatccatgtaagggaattttattaaaacgatttgatcttgttggtggttacattaaaaacgaaattgaaataatgattgctaatgcaccgaagatgaaacttcaagctgaagatgagctctgtaagctgattggctacagattggtttctacgaacaaattaaaacaccgctcggggaaatacatcattaataataaaaaagatattttaaaattagttgatcggctaatatcaaattcaaaaaatgaaaaacaaaatattgatctgggagatgtttactttaccaaggatgggtgtgatgatgtgatgggttttagctatgagaaaattgttgaacgttatgacttgtcatgtagtttaatttccattgtaaatggtaataggaaagattcattgttttctgaaataagttttatggttggggaaattgttgagtattacaaggataagctgaataaaattagttatcattaa

SEQ ID NO: 439880 - DNA, 1581 bp, Serratia marcescens
  misc_feature (28)..(37): n is a, c, g, or t
atggtatgtttcaacgaggattgtcacnnnnnnnnnngtgatcatgtgcatctggtgtcagaaaaggagttgaagcagatctatggtcggcctgatgaaccttattttgttaaaataggccatatttctaatgcggagtctatccctgctttaatcgacgtgaataaattaataactcgacattcagcagttgttggtactactggttcagggaagtcaacaacagtagctagtttaattaatgcattatcttgcaatcaaaaatatccctcagcaagaattattatgttggacttacatggtgaatatggaagggctctgggtgacgtcgctaatgtatttaaaataaatgctgatcctaaagctaaatctcaagagaaagaactaagcattccttattgggctctaaattttgatgagttatgtgaaatatgttttggtggtttttccagtgaaaaagataagaatatagttcttgaaagaatccagaagtacaagagtaattcattatacagatctccaaggactggagcaaaccaagatacccttagtgctgatacaccgattccttttagtatccattcgttgtggtatgaattattccttgagacatttggaacttactacaaagcggatgggggactgcctataaataatttagccttcgaatcagatagcaatggtgcacttttaaaagggaatgcacaaagaggaattccacctgtattttgcaatgtagctaatgaaactggcgagaagaagataaattatctgcccggttcattaaatattggaaagcaactccttttattgggggcaaagctaagaatacctagatataattttatatttaagccgggggtctggagtccggatgaaaatggtattattggtgaggatttggatactttattacatggatggataggtgataagccagttacaatattggatctttctggtattccttctgatatcttacaaactgtaattggtgctttgctgcgtatattatacgaggctcttttttgggggagaaatctatctcaaggagggaggcataggccgttgttaatagtgatggaagaagcgcataattatttgaaaagcgatgatgatagcatggcttctagaatggttaaacgcattgtaaaagaaggtcgtaagtatggcattggagctatgatagtgactcaaaggccatcggaaatagattcaacgatattatcgcagtgtggtactttttttgcgttaagactaaataattcctctgatcgaagccatattacgtctgcaatgtcagatagcttggacggtttaactagtatgttgccaatactaaggacgggggaaagcattgttataggtgaatcagtaaaactaccaatgagggcattcataactccaccgcctaagaataaaagacctgacagtcaagacccaataatttatgataattcccctcaagatgagtctcagacccctgggggatggaatgtaaaatcagaactttcgccgaactatgacgaaattgttgaggcttggagagctcaaaaccctaaaataagtaaagttaaataa

SEQ ID NO: 439881 - DNA, 156 bp, Serratia marcescens
atgaccgccagcggcgcacgctccacctataccgcgagccgcagcgaagaagccagccacgccgatgtcgcatgggcaatcatgcacgccctattaaacgaaccgctcaccgcaggcagcggccacagtagcccgaacattttggagttttattaa

SEQ ID NO: 439882 - DNA, 978 bp, Serratia marcescens
atgaaaactattgatatttatagggcagcaatatctgatatagaatcattttatgatcacaggtatggttttaatgtcaaagtcgatttttatgacgatagtggcatgcatccagcatctataataggaagtaatgaaaactcaaagctcagatttacgaccgatgcttgtgaattagaaatttcaactgacactgattttttgtttggcttattgattgtatgccatgaattagcacattatattaatcgtcacaatcattataaaactccaaaccatgaagctcataggttaatcgaagcatgggccgatatgatgggcatgaaaattttactattactatttacccaaggaaatgaagtaaataagcttcttttcgaaagaaaattcccaacagatattaactacttcctaataacgatagggaatgttttttcatttacagcaaaaaatcttttcaataacaattcattaaaatatcatcaaagaattgaaagggtaatgcattgtgccgctggcgtcaattcattcttagattcattctataacaatagaaacatggcgcgctcgctcaatgtgtatagaaaaatatacactttcggcggactagattggttaattagtagcgaatttaataatggcaacttaacgaaggatgattttgaattattacaatctattcatagagagattcaaggaaaagaatgcgctattactcccgggttaaaaaatgagtacaggaagtatatagacacatcttttagctcatctaatttcgaacttacttctaataaaaaaagtattttgtcggagatgatacttagggaagtatctgaagataataacattgacaacgtactctttctaataaatgaatatattcagtcatccctgaggcaaagcataaacaaatccgaatatataaaaacactgttgcccccctatattaaaagcgacacgttcaaaggaggattttga

SEQ ID NO: 439883 - DNA, 585 bp, Serratia marcescens
atggaaaagttttatcatatcaatagtcgaaaaggaatttctaaagcatggcaacctggcgatacaattgctttaaacggatacaataattacattaacaacattattgactgctgtttgtatgttagaaatgacccacaacctgaaatggctattaatcacgtactaagactggaatcagatgatgagaaagttttgaatgccaaaaacatcagcattcagcaaagggatagaaatttaggacatttgcgtcgggaatttgtttttgagagagttaggagaaacaattaccctttgcttccatcaagaatgacatcaacttacttagtagaaagtatcgaagaggcaaaagcttggagctctattctaaacatagagagtaatgacttctcaattttggaggtggaagttttaccagaaactaaaatatttcatacttatgctgggcatattgataatttggaaaatgctctgaaggatctggaaattgaagctaatgctcatgcatactggagaggaacaaaactcggacatgctgagatactagcctccggtccacttttagtaattaatcacatctcttaa

SEQ ID NO: 439884 - DNA, 849 bp, Serratia marcescens
atgaagaatgatgagctggccacacgacgcgcagaggcgatagccggcgatcggtgcttcacgaaagggcgcctgcgcgatgaattcagaatgaagccggctcccggtgctgagccggtgaaatggtacaaaagcgcctatggcggcaagtacgccgtataccgcattgcagactgtgttccgatgcgggaaaaacgtccgccgaccgagaagcagcagcaggccggcctgcgtctttccgtcctgtcccggcttaacagcaccagtggccggatggcacggcgggcacacgactggctgagtctggcgccgctctttctggataccgaaacgacggggctgggtaataccgcggaagcgctggaaatcggcctgaccgatgcggccggccgggtgatatttgaaacccgcctgaagcctacggtcgccatcgaggcgcaggccgctgccgtgcatggtatcgatgagccggcactctgcggcgcaccatcctggccagatgtggcgctgcagctgcgccacgccatcggggcccggccagtgattatctttaacgccccctttgatacccgcattctgaaacagacggccgccgcacatggcgatccggccgactggctgggagaactgacagtgtattgcgcgatggagctggctgcagggtattttggggccaccaatcgctatggcaccatttcgctggccagcgcggccagtcaggcagcattgacctgggaaggggaggcacactcggcgatcgccgatgcacggatgacggccggggtggtgaacgccattgccgcataccatctggcattgctgcaggagcaggaacggctgcaggcctga

SEQ ID NO: 439885 - DNA, 942 bp, Serratia marcescens
  misc_feature (11)..(20): n is a, c, g, or t
atgatagagannnnnnnnnntgatagagataatggtctcgtactgccgttttttagtaaatacatggactctgttcaaaaattagatctggatttttgcattacaaccaactcgcattttcaatgcggcattatttatgatgaaaaattgatatttatgtcttatggcacatttgatagactatgtaagttatctgacttaatttttcggtcagggatgataacagggaaaagtactaatttaaacttttatgacttgcatctcgttactaatccatttgttgggtttaacaatgagataagagaggaaagtgagtccgaatcacacttatttatgtttattcttgattgtctaatgctgtttatagttagtcacgaagtaggccacttcattaataaacatggcgatcgagcaaaaaagcaatctattgacactatctttgatgatgttttaggacataaaaaaatcaatagcgcagagctaatatcaagccacgcaagagaattagttgcagatggttttgctcttaatattgttaaaaaacatgtacagtctgcatttgatcagaaggtatcttatcttgataacttgcttgatttttatagcagcaaggaaggcggaattgcattttcattgctattaatactgtgctacttcaaactttctgatggcttatcaccccatgaacattttcaatcgacacatccctcaacggcggcacgagttcgatttattctcagttgtcatattgaatcattagtcaataaggatgaagaaaaaacttttgggttttactatggtttaatcataactcaattgaaatcaatatttgcatctatgggagatgactttgagttaacttggataaaggatacgaactcacctgaaatgaccgagtggtttaatgatgtttataaagagcatccaaaatggttagcataa

SEQ ID NO: 439886 - DNA, 336 bp, Serratia marcescens
atgctggcggtgatggtggcgccgaccgtcggcatcaacccgctggatccggtgtggatcgccaccctggtcggcatcgtcaccatcagctccgccggcgtggcgggcgtgggcggtggcgccaccttcgctgcgctgatcgtgctgccggcgatgggcctgccggtgacgctggtcgcgctgctgatctcggtcgaaccgttgatcgacatgggccgtactgcgctgaacgtcaacggttccatggcggcgggcaccatcaccagccagctgatgaagcaaaccgacaaagccgtgatggacagcgaagacgaagtcgaattggcgcatcgctaa

SEQ ID NO: 439887 - DNA, 1014 bp, Serratia marcescens
atgaatgacaatatcaagatttttttacgttggtttttttcaggcaacttttttaaatcgttaaagaatgctatcaatgaagaagggcaacgtgggggaaatgctttccgcattgttttttttaatggggatcaagggcttgttaatgaatttatacaatgtaatgttccacgattatcgaaaggaaatataaatgatgagcatgttaatttttttaataaagaattcttgtgtcatgtaaaagaaatgatagttggtgaaatctcattgcttgatgataactcttcatctattaacaataggattcaattacatgtgaacttcgttgataatccagattttacagtttccgattttatgataagtcagtatgcgcggtttagaaaaagtaatagttgcatatcatacgtgaaagccttaaatgggcaggtttgctcgtactgtgataaggggattattgattgtacggatagccatttctatggtgatttagaccatattcatgacaaatcgacatattattactacgcactaaatatctataatttggcaccatgctgtaaggtttgtaaccaaaaaaagggaaagtatagcgtaattttcaatccgttgactatgaagcttgatgatgtttttacatttcgcgttgatgattcagacttgttaaatataactgtgcactataatgacaagctcgatgtagatattaagcttaagagtttatcgccggaaatggatcctgtattggaaaatctgaataaaagacttgcactaaatgatagatataaaaattctggcttagttttgaattatctatctcagctaaagaaagtttacacgcaaagttatttagatgaggtgactaaattgcttggtgatagctatgataatgatgatcttaagagatttttattaggggacttctccattagtgatacgacgaaaatacaaccactaacaaagttagttagagacctttcaagtcagataggtttattcgaaaatgatgtttga

SEQ ID NO: 439888 - DNA, 1665 bp, Serratia marcescens
atgattttaaagtatgttcttataaagaaatatttgtggtataaagatttcaatatcaactttgacaataaatatgattttgtatttgaagaagatgaagtgacattgtctattgttttgaatgagaacaatgttcctgacgattttttttctcataacattgatatgagttgtttgataggtggtaatgggagtgggaaaacttgtattatgacatttcttgcatctttgggaggcgaaagctctataaagttagatgataatgaagaatacagagcggtgttttttttagatgatatatattatgttttaactgccaaaggaaaggagcgaacgctaagaagtggttcagctaaattgtcccgagaaagaatggttgttactctggctaaagataatattgaaaagatgaatatgtacgagtcatattatctttcgtcaaataatacgaatatgattaagtccggctttgctatggtagagaatgatttttctgtcggtaacgagaagaggtacaaaggattacataataccgaagaagcattgcatttcattaaatgcgttcctttcgatggtgaattggggaaaatgtgcaatgagaaaaaaatccgcttagttattagcgatagatggttggggatgctgaatctatctcgttaccttaataattctaataggcatgtgaatttgactcgtgaaataaaaaaaatgaagaaggtaggttctagtgagttaattcttgcaagaatgattattcttcgtgttatatcctcaaatcatcataaaaaagatagcattcttaataggtttaatagtgaagcttctggagaacgcaataaaattctctcggagattgattctgattttttgaacgaatacaaatttgaatatggagtttttcgcgatggatttctggaggatatgtctagaaagctatcagctatcatgaaggtctctgaaaatgaaattactttagacttctctttgtctgatgaaagtggtatttctgtgttgagagagttattagaaatatctctaaaaaatgagatttacgcagatggatataagtattacttttatcctccttttagtacagggcaatggaaacgagtagagctagcttgtaaaattaacgatattagtagtaaggctaagcacggttcatatttaaatctatttattgatgagcctgatgctgatttacatccggaaatgcagactaagttggtgtcgtggatgataagattaatgagtaaaagagataatcactttaatatactgatatcgtctcacaatcctttaatattatccgatttccctcggagaagggttgtttttatagggggaggtaatgcgaagaacaataaggataaaacactgggtgctaacgtgtatgatttgtataaaaatagttttcttgttacaaacgcgattagtgattttgtaagagaaaaaatagaggattctatcgctcataaaaaaatagacgatttatcttttctgataaatgaagtttcagagccacttatagtaagggcattagtctcgcactttgataaaataacgcatacgaaaaagaatgacaaccatagactgaccacttttattggtagtttaagtgaagccgaaagggcatttttaaaaagagagttaaacaatgaatga

SEQ ID NO: 439889 - DNA, 732 bp, Serratia marcescens
atggaaaaacaggattggggagccattcaaaagctgttcctcgccgaatacgccaaaaccaaaatctccccgaaagaatggtgtgaggctaacggctacaactacgccaccgcacgccggcatataaaaatccctgcgcaagggaaagaggaaaaagcgcaaaaaaaaatgcgcagtgtgcaagatgcgcaaattcccgaaaatcccgcgcccgttacgcccggcgtttcaactgctggtagcgatgaggaggggaagggcaaagaaagcccaagccttttaaaaccacagcatgaacaatttgcgcagaacattgcgcagggcatgccacagaaagaggccgcgatttgcgcaggctacgcgccgacgaatgccgaatcgcaagcctcaatcctgatgagccggccggacgtaaaagcccgcgtgcaagaactgcgtaataacgctgcgctgttggtttccttcaacgccggccacctggcggaactgtcgtataaatctgcgcagttggcgctggcgaataaaaaatttggtcaggttgcaccgaacgtgaagaacgccgcgcagctgaccggcatcgacatgagcacgaataaaaccgaggtgaatgtcgatctggccggtttgagctacggcaaagtttgcatcgtgaccccggcgaactgcccggcggacgtgtgggctgctcacatggaaaagctgcgcgagggaaagccgacggcccagtcataa

SEQ ID NO: 439890 - DNA, 210 bp, Serratia marcescens
atggccggcttcttctctgaattgggggagtcgcattattcaactaagaatgggcttgagtccatcccaaccaactaccttcacctaagcgacgctcaaatggttagtgggaatggccaattcttcaagcttactgatgggctgctaagagtgaaacttgttgagatagatggttatttccttggtagaatctctatcgaaaaccagtaa

SEQ ID NO: 439891 - DNA, 648 bp, Serratia marcescens
atgttgaatgattatttttttgacttctcaaattatgagtttttgttctttacgcccttaaaggaagactcgtcatttttaccaattacggttgtttttgctattgggttgttctttctaaaagaagtttttgaatttgttaaaaaatacaaagcaaataatagaaagatatttgcaatgaaaagattgttttcaagagagtgcgaaaaaaacttgtggactataaaagtattacgccgtgttctaagcgaaattaatgaagagtatgagagcgggaaggaggtaaagttgaagtttagtgagtatgagcaaggctacgtttatatttatagagatgatggttcaatgacaggtctttcgataactaaaacgcatagagaactaatggataagaacctaatggaagcggcagtttcaaacgagacgttatttaaaaagttagagggggcctgtgacgcattggcagagttagagcatattagagactctttccttaatattgaaaactcaagtaaagagtttggcaacccgctattggctggttttttgggttatgctttggaagaaatgctgactatccaacagtctttaaatgaattgtataaatattgtacaggaaatgagcttgaaaacgctcgtcttcgttag

SEQ ID NO: 439892 - DNA, 1551 bp, Serratia marcescens
  misc_feature (1509)..(1518): n is a, c, g, or t
atgcgtgataatttgactaaaaagccagagctaaacacatcgtcgcttaaaattgacaagttagttaatcgagtcaatgagggggagattaagatacctgcatttcaacgaggatatgtatggcggcaaaatcaaattattgacttaatgcagagtattgctaatgattttcctataggaagcattctactttgggaagccaatgaaaaagaaaagttgcgctcaaccagaaacatagcgggttatttactccctgaaagaggagagaactggcctgtaaactatgttcttgatggacaacagcgtttatcttcaatttatggtgttttcagtggggatacgcaacaagatattacgacaacaaaatacaatccatccttagatatattcgaaatttattatgattttaaaacaaaaagatttttaagcaaaagtgaagtgagcgataatcaaacatgcatccttcttagaaatgtaattgatcctttaaaattagtggatcaactcatggctatggattctaagtaccatcaagatgcaaaagctttatcttctaaatttttaaactatgaagtccctgtagttcaaataaaaaacagaacaaaagaagaagttggtgttatatttgaaaggattaacaatacaggaacaaaattaaacacattagatttaatgactgcatggacatggactaatgattttcaccttattgattcaattgatgaattagttgaggatcttgaagaaaaagggtttggcagtattgataatagattaattcttcaagtgatttcaggaatgttgattggttccacaaaaactgagaatatcttgagacttacaggtgataaagtaagagagaggtgggatgatgttaaagagtcaatgaaaaaagttgttgatttcttagcaactgaaatccagtgcaaaaatatagacttcttaccctatcatcagcagctaatacctttaggaagaatgttttataaggaaaagaaaccttcagcagaactacttgaagctgctagaaggttcttctggattacatcattttctgatcgttactcttcaggacaaacaacggcaaaaatggatgctgacattgccagtatcgatacgatgattgatggcgattactccgtactgaaaagatacactgttagctgcacagctaaagaaatgattggtactaaattctcaaaagcaaaccctttaactcgaagtgtacttttacttttgacaacacttaatcctatagatcttgcaaatggaactaaagttgatgttggtaaagcattgtcgtcatataacagaaaagagtaccatcatatatttcctaacgcttttttgaaaagagccggatactcaactaacgaaattttttccgtggctaacttttgtttcttatcttcagcatcaaataaaaaaatctccaataaaaaaccatcagaatactttaagaaggttgtgcgccaagacaaaatccatgaaatcctggaaagcaatgcnnnnnnnnnnatcctaacttcctgcaaaaaagggccagtttga

SEQ ID NO: 439893 - DNA, 300 bp, Serratia marcescens
atggacgatgtattaacactaacacttttcacttcaggtttttcagactcgttgtcatactccgtctatgcagaaacggagtttatagataactatgaagtttttactattcccaaagtaacgaaggtagggatagattttgttgataagcacaccggggaaaagctaagaatcgcagtgtcccatgagggaataccctttgcgattaatgcaaaaggcaaattcgctcagctttctacgattccctgcctaatagataatgacaaatacgatagacacatgcgagctgtcagaaggtaa

SEQ ID NO: 439894 - DNA, 210 bp, Serratia marcescens
atgtcaatcgcaatggctggattaggtaactttgcatttagctcaaaagatcgcctgcgcaaggcgctcaaagagaacacggacagctataccatcagtaaagacggtcacgttcagttgaaccttaatgacgaaaaagtcattgaagctatcaaagagcagatcaaactgctggagaagattcaagaggataaaagaaacgttggatga

SEQ ID NO: 439895 - DNA, 837 bp, Serratia marcescens
atgaatacgataattcttgctcttgctgttctaagtggttatttatacgtaataaattcggtctcagcacgatacatatttaagcgctcagaaggttggagcgcttatttttatgttgcagcttggggagtgctgtttaccgtcgtggcctggttgttctgctccgcgctcagcatgctcgatatgttcagaacgatttacaattggttaatagaagcaggcttaatcaagaaggattcgatgagccgtgtattccctctttctccagccaacgagttcaagtttgctgactttaagtttgccctattcggcgtcacatccatgcttttcgccctgatcgcgggattaataaaccgctggatgaactaccgtaatcaagatcgccgaattgaggcccttattaaggcagtccatcatgatccattcgaaagcatgctcattgaaggcgctgtaagaaagatgcctgtcatcattacactgaactcaagaaagttctatgtggggatcgttgactgccctgagttcgagcacggtaaggtagattacttgcaattgttgccattactgagcggctacagagacaaagacgacctgactataaacatcacaactaattacaaacgacactacatcgatagtggcattgttggtggtgttgctgacgggcacttatcacttgccgattttcgaacactcataccgaaggacgaaatagaaggcatttccttctttgatacgcacacctactctcaattcaaagagaaagaagaaagcgatcgacagcactgcacagccttaactcaagcatttatgccacagagcaaaggtaaacagtag

SEQ ID NO: 439896 - DNA, 1092 bp, Serratia marcescens
atggtgaacgctatgatagagaaaaagtacagcgcagtgatcaccgccgccggcgcagaaaagctggcaaatgccgctgttactggcgcgccggtagccatcaaggaaatggccgtcggcgacggcggcgggcgtttaccccagcccaacgcagcaaacgctgggctggtcggtgagcagtaccgcggtgaactgaataagctggtgatcgctgacagcgacgccagcgtcatagaggccgaaatgataatgccaccgcagatcggcggcttctggctgcgagaactggcgctgtacgccgacgatggcgaatgcgtcgccgtcggcaacatgccggaaacctacaagccattgctggcagagggttcgggccgcttccagataatcaggatgcagctgaaggtaagcagtacagccgccgtagagctgattgccgatctgtcagtgattttggcaaccgcagaggatgtaaagggcgcggaagatgcggccaaggactacacggacgaagcgatcgtcgagctgggcgaaagcgttaacaaggcgatcgccgccgcagtagaaacggcaatccgtgacgcctgggagcaggacaaccctgtcggctcgtcgcgcctgttcaaccaaaacgttgaccctaacgagcgctggccgtggtcaacatgggagtacgccggtgaacacctgacgatcagaacggcaaaagccgacggctccgacgtcggcaccgagggcggcagcgacacggtgaacatcacccgcgccaatctgccacaatcggtgctgaatgtgtcgggaagtacaagcgagcaaggggcgcaaacgctgaaagcaaaaatggcgggtcggcacgcgcaccagggcgggatgcgagggccaggggcgcaatacggctcaacaatatcaggcaccgataacgacggcgagcacacgctgaactggactagcgaaaacggcgatcatgaacatgatgttgatatgccggcgcacgctcataccgtttgggcgcaaaccgaagcgctcggccagggccaggcgatcaacgttgccgagcaccataagctgcaaatgctgtggcaccgtgtagcctga

SEQ ID NO: 439897 - DNA, 2448 bp, Serratia marcescens
atgagtaacaacgtcaggttgcaggtgctactcaaagccgttgaccaagcgagccgcccgtttaaaagcatccagacagcgagtaaatcgctgtctgcacaaatccgcgacacccggcaaaaccttaaagagctgaacgcacaggccgggcgcgtcgaaggattccgcaaatcgagcgcgcagcttgccgtcaccggtcaggcgctggcaaaggccaagcaggaagccgccgcgctggcggtgcagttcaaaaacaccgagaagccgacccgcgcacaggcgcagctgatggaggcggccaagcgttcggccgccgagttgcagctcaaatataacgggctgcgccagtcggtgcagcgtcagcgccaagagctggcgcaggtcgggattaacacccgcaccctcgccgccgacgagcgccgcctgaaatcctccatcagtgagaccaccgcccagctcaaccgccagcgggaggcgttgtcgcgcgtcagccagcagcaggcaaaactcagcgcagtgagtcagcgctatcaggccggaaagcaactggcgggcaatgtggcgggcgcgggcgctgcgggtgtcggggcggcaaccgtgggcggttttgcggccaaaaagctcctgacgccggggtatgattttgcgcaaaaaaactccgagctacaggccgtgctcggcgtggcaaaagactcggctgacatggtggcgcttcgcacgcaggcgcgtcagcttggtgataacacggcggcgtcggcggatgacgctgccggggcgcaaatcatcattgccaaagcgggcggcgacaaagatgcgatcaccgccgcgacgccggtcacgctcaatatggcgctggccaaccgtaaaaccatggaggaaaacgccaccctgctgatgggggtgaaatccgcttttgggctggcaaacgaccaagtcgcgcacattggtgatgtgatttcgcagaccatgaataaaagcgccgccaacttcgaagggctcagcgacaccctgacctatgccgcgccggtggcgaaaaatgccggtatcagcgtcgaggaaacggcggccattgccggggcgctggcggatgccaaaattaccggctctatggccggtacggggagccgcgcagtgattacccggttgcaggctcccatgggtaaggcgaatgacgcattggccgagctgggcgtcaaaaccgccgaccgcaaaggcaatatgcggccgctgttcaccatcctgaaggaaatgcaaaggagcttcgataaaaacaagctcggcactgcccagcgcgcggagtacatgaaagtcatcttcggcgaagaagcgtcgtcggccgctgcggtgctgatgggggatgcggcttccggcaagcttgaccgcctgaccaagttgctccgggagtctgacggcaagacggaggagctggtcaaagtcatgcaggacaacctcggcggggatttgaaagagcttcagtccgcctatgaggccatcggcatcgacatgtatgaccaactggaaacgcctttccgtgagctgacaacccgcgcgacaaagttcctgctgaaaattgacctctggatcaaaaacaacaaagagcttgccgggacgctggccaaagtcgcgctcggtggccttgcgattgtcggcacgctgggggcgattggcttggcatcgtggccagtcatcatggggattaacggcatcattgcggttgctggcgcgctggggacggcctttagcgtggcgggcggcgtagttgcctctgcattgggcatcgcctcggtgcctattcttggcatggttgccatcgtcggctcggttattgccgttatcgtggctggggcgctactggtccgtaaatattgggagccgatttcggcctttatggccggtgtgggggaggggattaaaatcggtctggcccccttgcaacccctgtttgacacggtaagtggtgccgtgagaactgtggttgactggttcggtaaatttattacgccggtgaagatgtcagccgaggcattaggcggcttcacgcgagccggtaagattttcggtgaaggactggcgctggcattgtctgcaccattgcgcgtattggatacgctgcgtcgtgggattgattgggtgctggaaaagcttggcgttatcagtaacgaatccagcgacctcgacaagaaggcgcagaaggccaatgactacgccaacggtgcgagcgggcgcgggtattccccgtcgggtggcttgctgacgggcggctatgtgccggttacggccgggggcggaaaatcctatgtagataacagcgtcaataatttccatgtcggcagtcagcatcccggcggagtcagcgcggcggaaaccaagcggatgttgctggacgtggtggaagaacgggagcgcaagcgccgcgcggcgcaacgctcaaatatggcgatggattaa

SEQ ID NO: 439898 - DNA, 357 bp, Serratia marcescens
atgaagaataacacgcttagaatattccttttgacgttgttttttaacatggttgtttcttattttattggttataagtacaaggaatatctcaatgcttttctttcccctgctatttactatcaagctgtggtgtttatttcattgacaatgccgttgattatttcgggtgtttataagttattttctaagcattgggttatgtggcgattgaataattttaaaaagaaagacattgatgtgtcaaagttagatgaaccgactaaggaaatgtatctggaaattgtcaatcaggacattccaactaagaatcaaattaaagagatgcatgaggccttgcgtgaggagttcaagtga

SEQ ID NO: 439899 - DNA, 600 bp, Serratia marcescens
atggcatgtgattatggggtgcaaatgagaattacgaaaaaagaattgctagcggcgatgtctaccaatgatgggttcgaagttatcaaggatgagtacggaaaaaataataaggcagccaccgagggtgaaacacctattttagttaggtggaaagggcagatttttttcatttcatttaatgaaaatagtcagcccggaaaagataagctagatgacgatgactttgcttataactcagtagctgccgatttttctgttacggtgattgtcgttggtagccacccattcgatgatgatataaatgaaagtgaagtaattgatgtgaatgttaagtataaaattgcaaattacataaacatgagatctcatttgaattcagtcgttgtttatcgtgaggatgcagacctttttgagatttctgctcgccacagcgtatttaaaagggaaagtacggcacatcatattaatggtgcgattatgaccatggtgcttacatgtgtagtaacctctgcaaagactcgagaagcgatagagtattaccgtgattcttcagacgtgtttttagaaaaatgcaaggggataagtaatgaagaataa

SEQ ID NO: 439900 - DNA, 363 bp, Serratia marcescens
atgagtgttgaagctaaaaccattactcaagacgacgggcctgatatgggcgataacgtgaaaaaacgtaccattactctatcttcacagccgtctgcactcttatcgaaagaggggtttgccctttatgtgggcaaaactccggcggctatcgttgcgatggctaaagcagggaaactccccgcgttttacatggctgacccgctgaaaccgggtagcaaagctgagttgtggattaaccggaaagagtgggacaagtacgctgatcaactggttgaagatgcggcagaagaatggcatgggtggaaagaccgtatcagcaccagtaaaccgggcagggggcgcaactataatgcagcctaa

SEQ ID NO: 439901 - DNA, 396 bp, Serratia marcescens
atggaaagtctgggttctctcgacgttttcgtccgggtcagtgaaagccgcagtttcacggtggccgggcagcagctggggatctccgcgtcggcggtcagcaaaaccatcgcccggctagaggagcggctcagcgtgcgtttgttccaccgttccacccgcacggtcaacctgacgccggaaggggccctgttcctggaaaggtgccgtcgcattttgagtgaggtgaaagaggcggaagccgaactgttgcaaacgcggggaacgcctcagggcaagctgcgcatcagcctcccgtcgctgggcacgcttttcatgccaaactgggggacttcaagcgccgctatcctgagatcgagctggatattgattattcggatcggctggttgacgtga

SEQ ID NO: 439902 - DNA, 918 bp, Serratia marcescens
atggccgatcgctttgaggaactgaaaacttatattgctgttgttgaggctggcggttttgcggcggcttcaaagcgcctggccttggctaaatctgcgatcagtcgccgcatacgagatttggaaattcggcttggtgccccgttgctgaaccggagcacccgacagatccatctgacggacacagggctgaagttttatgagcaagccaaacgcatactgactgagttgaatgaggctgaaaatgccgttggagggcgacataacgatttacaagggcggttgcgaatcgccgctcccgtttcgctgaccgtacattgccttagccgggtggttggtcaatttatcgaggcgaatccgaatctggcactggagtttgatgccgacgacaagatggttgacatcattcgtgatggatttgatctcgccatcaggatttctaaattgcgcgactcttccttggtagccaggcggatcacaaccattcgccatgtctgttgcgcgagcccgtctttgctagatcggtacggtcgtccaaatagagtggaagacttggcggcattgccgggcattcgctatagcaacgttgaagaaagttattattggcgctttgctggcggtcatacgccaatggtgaaatcgcggctctgtttttccaacggtgatgctgttcgtgaggccgccatcgcgggtttggggatcgctatgttgcccactttcatcgcgcatgaggcgatcagaaaaggtgagctcgaagttgtattacgtgagcatatgcgtcctcccattggtatgtatgcggtttttccttcatcacaaaacatgcctgcgaaaatgcgcgcattcattgattttttacttgctaatttcagtgatgagcctttttgggatcgcgatatattgaccaatgagagatga

SEQ ID NO: 439903 - DNA, 570 bp, Serratia marcescens
atgacccatatcattggaatttcaggaagtcttcgcagcgcttcctttaaccattcacttcttcaggctgctgtgcaattggcacccgagagcgtgactctggatgttcgtcgaatcaatgggataccgctttatgatgctgatgttgaagttaaatctggcattcccgcttctgttgtcgaattgaaggaggcgatcgcggtagccgatggcgtgctccttgccacccctgagtacaataatggtattccaggggtattcaaaaacgccattgattgggtttcgcgtccagacagcgatatacgacgcgttttcggcggaaaacctttcgccttgattggtgcatcgccggggggatttggcacaatcctatctcaggaagcttggctacccgtgttgcgagcacttggaacccgaccttggttcggcggacggcttctcgtttcccacgccaaccaacaattcgacgtcgatggcaatctgaccgacgagtcgacgcgtcttcgcttggagggattcttgagtgggttcgtggagtttattcgttcgaacgagccttccatccgttag

SEQ ID NO: 439904 - DNA, 744 bp, Serratia marcescens
atgaccccaattaagattgctttcattgaaggcgatgttgagatcccttctttggcctatcgcgattgcgatgagtctaacctaatctgtaacgtgaaagagagttatctaatgaccagtgaatctatccgtgatcctaaggctgaccacctcctgacccctgagaactgcgtgttcatcgtgatcgactatcaacccattcaggtgagttcgatccgttcgatggaccaaaaggaattggttttcaacatcacccatagcattaaagctgtgaagaattataacgtacctattattcattcggcggtaaatattgcgacgggcttaaacaaaccgccaattaaagagatcatggcgctactccctaatgaccccgttattgatcgtacgacggttaatgcctgggaagacgtcgaattcaagcaggcagtgcaggcaactggacggcggaagttgatcatgacggcactctggaccgaagtctgcctggccttccccgctctggatgcactcagggaagggtacgaggtctatgtcgtcgccgacgccatcggcggaacttcagtagcggctcatgagttggctctacgccgcgtcgaacaagcgggtggcaaactgatttccaagacacagctctggtgcgagctgcagcgagactgggctcgccaagagaccgttcctggtttcatggacgtattcgagaactgggacggctttaatccagagaaagatttcaaaggctaa

SEQ ID NO: 439905 - DNA, 531 bp, Serratia marcescens
atgtcaaacgtctacaagaaaatcgctaacataaaagaagcgcaggctgctagcctcgcgaaaccggccacgttcagcagccctttggctctcctgctggaccttctgaaaaaacccgcggatctcgagcatgtccgccaatttacggcggacaatttcatctatgtttcactcaattatgaacatccggaactaaaagccatcatgccttgggcagggacgacagcaggaaccgaaggcttggtccagaccttcaaggatgtgaacgcctactggtctacactggcattcgaattacaggacacttttgagaatgccgacggtgctgccgtcttcggttattttacttatcgctctactgttttggataagactgtcacctcccccctctcgattttggctcgcgccaagggcggtaagttaactttcgtacagttcatggaagataccttcgccacagtacgaagttttcgcgagagtggaacctaccatatcaaagccgatcccagtggttcgacagtggaaatttga

SEQ ID NO: 439906 - DNA, 879 bp, Serratia marcescens
atgaatgccaataaattaaaaaaaagtgtcaccgtcttattttataatatcgatggagacgattcattttatgaaaatctacctctaaactattttaccttgtgcgagtcggaagaaaaaaccaggataataacctcacgcgataaaaggcacctgataaaattaacgccccctgactctataaacaaaaatgatatctttggtgtaactgttgttcgtgaaagaaacacttggcaaactaaggcaaccaaagatggttcgattacaggaattcatcttaaccaagggattattggcgacctatattatatttacatcttgccagcatataagactgtgtttggttttacttctggccctagcggaacgttgaagagtgtttgtaagttcattcttgaacaactaaatacaaacagaaaggcaaaaataaaaatagacctcattccaaaagagaaagagtatatttcgttgaatgattacgaagaatttaatagcctacacttcagaatgaactcatcttatctaaatgatataacggatgatgcacctaattttttcaaacaattgagcgcaagtccttatatcgctccaggtatgcaactttcatttgatttagcgtttaatgatcaaaatgataatttatttactaaagataacgtaattgaaattataaactttctatctgaccatgatgggtgttccgtattaaaagtcaaagcaaataatagtgatggaaaagccagtacaatcgacttttcggagacgtttcttcactttaagaccgatgttaatactcgaaacaagtttattgatgaagaaactgcgtcccgagtattagatctggcgttaacagaactgttaaaatttaagaacggctaa

SEQ ID NO: 439907 - DNA, 300 bp, Serratia marcescens
atggcgaccatgaaagacgtcgccgaaatggcgggcgtttcaacggctaccgtatcgcgtgcgctgatgaacccggaaaaggtgtcaacgccaacgcgccagaaagtggaacaggccgtgctggccgtgggttattctcctcatgctctgtcacgcaatatcaaacgcaacgaatcccgcaccatcctggtgatcgtgcccgacatctgcgatccgtttttcgccgatgtgatccaggggatcgaacagaccgcggcccaacaaggttatctggtgctgatcggcgactgcgcgcagtaa

SEQ ID NO: 439908 - DNA, 564 bp, Serratia marcescens
atgaacaattccatacaaaacaggctcagagaagctttgactgcaagggggatgacgccagcagaactagcaaaaaccatcggtgttggtaatggatatatttcgcaattactttcggggtacatatcccaaccaaagaaaaatttatcagcaatttgtcaggctcttcgtgtaagggagcaatggatgttaacaggccagggtccagctgatacccaggagaaattttatgagttgacaaaaataccagtaaaaaactcgactacgtctaagcaaatagaatgcgtaggacttgaaaatagaagtagcctagaagcatacactttagccccatctagtctctttagtgccagctataatgtcataatcgaaaaagtattctgcggctcaggaatgtttttaattgaacacaaggggaaattctacatgtcaataagaaaagatagtttcatatcggtggaatggcagcatctgacggaggaaaaaataccaaataatgagttcgtggcaatagggaaaataattcaactacttgaaataaacaatggagatggtgatgattaa

SEQ ID NO: 439909 - DNA, 1437 bp, Serratia marcescens
atgtcttattgcgatacatctgaacaggtcgttatcattggttggcccggccattgtctgatggttagggcttttgcttgcatcgtaataacgtctactttagcccgcttggcgcaggcaaacctgcactacctagcctatagctatgcggtcagggatgaggccgagcaaattttcccctttaatgtcgaatgccagacgtcgtatcagctggcttggcctaacttcgggcgctattatgaacaccgattaacaggtgatttgtggagcactgacgtagcccgtcaactcagcacgcgtcacttgccgcttgctcgggtagctatcacgatcttcaataccttcctctgtagtggtgatagagagtttggcccacaacacttgcccgaagaaggggggcacaacggcttatctgctgacaagatcctagcggcggcacaaatgctcaggcgtgaatctgcacgtctggatggcactttccctgtcacccatgacttttacctcaagttgtatcagctctcgcagctagacttctccaaactccggcagacgctcctatttgatgaggagaaaaacgcgaattcggtgatgcaatcaccggtactggcgcggagccacagtgtggtgttggtcggcgaccgccatcaacacatctatcgattctgtggtgcggaaaaggccctcgatgcaccggcattggacaatgtggaccaactttacctgacacacagtttccttttcggtcctgccgtagctcaggcggccaatattctgcttgcccgacaaggcgaaagggggtctgtgggtggggaggggagaaacgacaggggagtagggagcactcctgagtacgtaaaggggctgtttgttaccatattgagccgaacggtggcaggtgtcatcgacgctgcgcttggtaccggtctggccggcaagcaggtgcactgggttggaggtatcagcagctataaaactgaagagctggaagatctgtactggttttcggaggacatgcctgagcggatacagtccccgcatttttcccggggctaccgcaactttgaggtgtatgagttggttgccagagcaacgagggatgttgagatgaaccagggacttcggttacttgagctgtacttcccactgccacaaaaactgcaggtgatgcgtaaacatacagttaccgaagagagtctgacgcaggtaacagtttcgacagtgcatcgaggcaaaggtttggagtgccctgtggtggtgttgaatcatgattttgctgatatcacggctcccctgatggccgactgcgaacgtactgatgaaatcaatctgttgtatgccgctgtcactcgggctcgggaaatgttggtactgaatgaattgctccaggtggtgatggacaacgagggtaatgatatcgccggagatctggcatgctga

SEQ ID NO: 439910 - DNA, 552 bp, Serratia marcescens
atgatgagaaaaatagcactgcccctgatgctgctcggcgccgccgtgttggcgccgccgctgcaggcggcggatgggaatattaatattactggcagagtgacagaaagtagctgtgtgctggatgccagttctaaaagccagaaggttaactggggaacaaaggaagctagaccatatacagtcatagggggcgctagtttcattcatgtgaatttggcggattgtccagacagcattagccaggtgcgcgtcagatttgaagggacgttagcaaatacccaaaattattcagggaaagtttttgctactgataatggtgctcagcctgatgcagcgaagaatgtgggctttctaattgataatggtcctcaagctgggagcggtgcatttcaaaacttactgggggtgaatgagttcagtcctgcaatcgcattaaagaaaggagaaccgaataatcttaccttctggaccggatacaccaccgattggcaaaatccaaccgcaggggttgctcgtgctcgagtacagtttagcctgatttacccttga

SEQ ID NO: 439911 - DNA, 534 bp, Serratia marcescens
atgaaaaatatcatcaaggggctgctgttgatcggtatggtcggtagcggactggcatttagcgcttatgccgcggacggcagcgtggatatggaactaacactcgctcatggtacctgcaatttaaccgcaggcagcaaaaatatgcaggtagcgctggggaatatttcccgtaccgagctggcatcaaccggtgcgaccagcaagccggttgattttaccgttgaagcaaccgactgtgtaccaaacttgaccgtatggttccgttttgatggcgttgctgccggccaaaatgataaagcctttgcattagacagtggctctgttgccgagggggttgggatacagctggccgatattagcaattcagatgagtatgtcaaaactcctaattctactaatggatatggaagaaccccagggaaggatggaactttctctaagccatttcaggcaagatatattgctttagctgataaagtaacccccggcacggcaaacgtcaccacccaactcaatctggtctatgactaa

SEQ ID NO: 439912 - DNA, 552 bp, Serratia marcescens
atgataacaacagtaaaaaggaagatgctgccgttggtattactcactgtggcaatgctggcgccaccgctctatgcagcggacggcaatattaatgtgttcggcagagttgtggagagcgcctgcgtaatcgatgaaagttcaagaaatcaggttttgaattttggtgcggttacttattgggaggtggagaaggcatttcatattgtgctaaaggattgcccggcgagtacctctcaggcacaggtaagattcgaaggtttgaaggcggattggggatggggatacgtctttgcagccaataatactgccgagccgggtgcagcaaaaggcattggttttcttattcgctattaccctgaggatagcgatgctatataccttgcccctaacggactcagtgatgccattacattacagaccggtgcaggggtggccaataaattggcgtttactgctgctgtggccgggaattttgaacatgagcatggatttgttggcgagcctggcaaagccgtggctgatgttcaatttagcattgtgtatccatga

SEQ ID NO: 439913 - DNA, 513 bp, Serratia marcescens
atgaaaaaaatgatttattgtctggtagcttgtatgctcggcggttattttatcacggctcgggcaagtgatggtggcttgcagattattgctgacgttgtaaaaccggcttgtaatctgcagaccagaaacctgacggtaatgctggggaacatcgataccgctgaaatggatttttggaatggagccagcgcctttgtgccatttaaatttaagttcttggattgtgttcccggtacgcctgtttcggtgacgtttgaaggtgacatgaagcagggtatattcgcgttagatgattcagcggaaagcgccaaaggtgttggattggagatttatagctcccgcagtggtggcccttactttcctttttacccaggctacgggggccatgcggggatggttaaagaaaatggtgctgagattgaattttatgctcgttacaaagcgtatgctctacccataacatcgggcaaggccaacgccaccatccagtttagcgtgagctatttttag

SEQ ID NO: 439914 - DNA, 564 bp, Serratia marcescens
atgatagcaacagtaaaaaaagtgcctctgctggccttattcagtgcggcaatgctggcgccaccgctccacgcagcggacggcaatattaacgtcaccggccgggtggtggagaatgcttgtgtggtagccgacgagtctaagaatatggtagtggattttggtgagcaggcgggtaattcctcattgggcggccgcggttattggcaaaccataaggcttctggattgcccttcgggggctaagcaggtgaagattagatttgaaggtaccgctattagcgataatgggtgggggtggtatgacaaagattctactttcgcccccgataatcaggggcagccgggagctgcacagaacgtagggttcgggatatacaatacggatgatggctctgctattaaagttaacggtgaatcgaagccttatgagctgaaaaacagcggttccggcagtgagaatatccttaattttggtgtgcagttgcgttggcttgacaagagcaagcccatcccacttggtgaggcgacgagcactattcagttcagcattctttataactaa

SEQ ID NO: 439915 - DNA, 342 bp, Serratia marcescens
atgaatgtacaaggcaagaccgcgctggtgaccggctcgaccagcggcatcggcctcggaatagcgtccgtgctggccgctgcccgcacgcccgtcacctgcaacgccatctgccccggctgggttctgacgccgctggtgcagcagcagatcgacaaacgcatcgccgccggtaccgatccgcagcgggcgcgcgatgagctgttggcggagaagcagccttcgcaagagttcgtcacgccggagcaactcggtgagctggcgctgttcctgtgcagcgatgcggcggcgcaggtgcgtggcgccgcctggaacatggacggcggctggctggcgcagtag

SEQ ID NO: 439916 - DNA, 1695 bp, Serratia marcescens
atggatcatagtgtacacaacaagcttatctcttttatttggaacattgccgacgattgcttacgcgatgtgtacgttcgaggtaagtaccgcgatgtgattttacctatggtggttttgcgacgtttggatactttgttagagccaaccaaggaagcagtgttggcggaagttaagttccaaaaagaagagatgcaagctacagagctggatgatgaacccttaaagtcagtcagtggatatgtgttttataacacgtcaaaatggacattgaagtcactgtttaatactgcaactaacaaccagcaaatactcctggcgaactttgaagagtacttgcttggctttagcgacaacgttaaagaaatcattgaatgctttaacctaaaatcacaaattcgccacatggcttcgaagcaagttctgctagatgtggttgaaaaatttgtctctccttacatcaatttaacgccagaaatcgtggaagatcccgatggcaacaagatgccagccctcaccaacttaggtatgggctatgtgttcgaagagctaatccgcaagtttaatgaagaaaacaacgaagaagctggtgagcactttacgcccagggaagtaatcgagctgatgactcacttggtttttgaccctgtcaaggaccaacttccactcactatgactgtttacgacccggcttgtggaagcggcggtatgctgactgaatctcagaatttcattgaagagaagtatcctaatgacagcagggatatctatctatacggcaaagaaattaacgacgaaacctacgctatctgtaaatcagacatgatgattaaaggtaataatcctgaaaacatcaaagtaggctctacactatctacagacgagtttgcatcctcgcggtttgactttatgttgtccaacccaccttacggaaaaagttgggcatcggagcaaaagcacatcaaagacggaagtgatgtgattgaccctcgctttaaagtaagcctgaaagactattggggtagcgttgaggcactcgatgccacaccgcgctcaagtgatggccagctactgttcttaatggagatggtcagcaagatgaaagatccctgcgtcagcccgctcggcagccggatcgcatctgttcacaatggctcatccttgtttacaggggatgcgggcggtggtgagagtaatattcgccggtttattatcgaaaacgacttgctggatgcaatcgttcaattacctaataacctgttctataacacaggtattactacctacatttgggttctcaataataataaaccttcctcacgtaagggcaaggtacaactgattgatgcgagtttactctatcgtaaactgcgtaaaaacttaggcaataaaaactgcgaatttgcacctgagcatattgcagagatcactgatacctaccttgcctgcgtggatgttgaaagacaattagatacaaacaatgaccctgtcggtattgccagcaaggtatttagcaatgatgactttggttactataaagtcattattgaacgcccagaccggcgtaaagcacgctttactcaggaaggtatttcaccactgcgctttgataaacaatttagcgatgttatggcacatttgtatgctgaatatggtgatgatgtctataaaagtacaaattttcgactggtgtga

SEQ ID NO: 439917 - DNA, 819 bp, Serratia marcescens
atgaataatggactaaaggattttatttttaaaatcttattttcgttgtcactgactgtatctttgccagcgtattcatctccctgggagatagagacggaggtgtttccggggaatatttatgaaattagagccaggataacgtcatgggatactggcaatatgaccagtaacccactgtatcactgtccaggtggcgatgcttgtgagctctatatcctatattctgatatttttggaataagaaaccctgacgaggctatatggttagatgcgcaagcaagagaaaagaaaacgttgggtgagttgggcgagtatctgatacaacaaggtttatttaatagaacaattaccggcagaactgctggtggaggggggacaatatgtttcttccttggctatcttaacactggtgggggctctctatatttgcgcttacctggcggcccaaatttttgcaagcacccgattacccctacttactgtgatttttatctgccgaatattgagttgaggcacggcgtactcagcccggaaaagaccaacgggaatatggccaaagctacgttgaatatgcagtgcagctctgatttgcaggtgcgcatcgtgtcggcagataattccggcagtatttttttcaatggagttggcggttttcgcagcgacttgcaggtggacggcgtaaatataggcaacgggaaggtggtgacggctacaccgacggggatttcactgagcttgacctccacgttggctggttatgaaggtagtacgggaacatttcagggttcaaaaaccatcataattgctttgccatag

SEQ ID NO: 439918 - DNA, 531 bp, Serratia marcescens
atggtaatccacattatttccgatgacaacttctttgctctaggttgcgaagaggcaatcaaaacctgcaacacttacaaaacaaaaaaaatacatccaaatagcgtatcactggaatgtatgaagcaagaaatcacttacgatgatgttgccttgatcgcaacaaactcattttttgaaaccaagaaattattaatcatcctttcatgcattggcattagagttttagtttttgaagatttcatgataaaaaaaataaatgattctgttaataaaaaagcatgtctaaaagcattgttattcaaaatagaaagaatttgcagcctaaataaacccacttatgaaaaattaacaaaaagagaggttgccgttatgaataaaatccttcaaggtaaatcaatgaaaagtatatctacatcattaaaaatctcattaaataccgcttatacgcataaaataaacgcgcatgtaaaaataggcatacgaagatacaaaaaaaccatgaagaatagagattacttattgccctga

SEQ ID NO: 439919 - DNA, 567 bp, Serratia marcescens
  misc_feature (13)..(25): n is a, c, g, or t
atgctcaatgggnnnnnnnnnnnnngtgtagtacatctgcccgcctttgagagtagatgtcatcgtagttttgatgaacaaggcttaactttcttacctatgatgattgcgcgtgacgcagtcaaatcccaagggaaatacctttcccctgggagcggtgtttcccttttttacaggagaaacatcatgtctgcactttcactatggccttctcagcctgaactctcgttcattgaccgcttccgcgcgtgttggcaccgaatatacccgggtcatcctggcgcagaagacgtcattgataccgagtggtttactaatgaaacccgcaacgtcagttgccaggcgatcattttcccgctgtcatccggcggttggagtgccacactcgtatcgcgtaccggttattccagaagggatttttcctactcctgtaagtcgtttacgcaaccattttcatcccggatagaagcgcttcgtgcagcggaacagttggcaaaacagtttgttcatctgcgccatcgttattatcacggtacgcaacatctggtctgtgtacctgcggcctga

SEQ ID NO: 439920 - DNA, 288 bp, Serratia marcescens
atgacgattgaacaacgttactggcagaccattgccggcaggttactggccaaatattttggcctggcgttaaacgataccgatctgtgtgaagcggagtgtgtgatggctttacaggaaacgggagttcggccgtttgaggcgattaatcacttggtagataaataccatctggtgcgcctcgatgccaatccctttaccccatcatcgccgtatctgcgcccgttagaagaacggggcgcggtcgatgaaatcgagcaacaaccattactaccctcggcaggatag

SEQ ID NO: 439921 - DNA, 681 bp, Serratia marcescens
atgaccgactcacctttaaccattcccacttggtatcgcgatctgctcgcagaacaggctatgggcgacggccatgcgcccatctggcaacatctgctgagtttggtgccagaaaacgaactatccggtgtcagagtactggacttcggctgcaatcaaggcgggtttctacgtcagttacaccaaatccggccatttcgcgaaggagttggtgtcgatatagcattcaagtctgttgaagaggcaaaccggctgaaaggaaatctaccgatcgtttatcaaaccaacacgcggcttaagggctgggatggccacttcgacatcgccttcagccacgaagtcatctatctgatcgagaacatcgcgcagcatgctgacgatatgcttcgggtgctgaaaccgggtggtgtttactatgcagtgaccggctgccacaccgataatccgttgtggcctcagtggcgggaaagagtggctgagcatacgcatactgtagtgcaggagcgctcgctggccgactatgcgcgtattttctccacggccggattccttgttgctgcccgcaggctgggtttttcgggtttcgtaccttatgaaccggacggctggatgccgaatatcactgcagccatcgactactactgtaacaccaaaacggtgtttaggctggtaaaaccctaa

SEQ ID NO: 439922 - DNA, 1080 bp, Serratia marcescens
atgaaaacctctcggttaatagatcgtatacttgaactcgctttcttatactttagaagaagccctgcaggcctacttcttagttccggtgtttcacttatgctgggaggaccttggctggctgcaaaattgattttccgtaaagagaacgctgatggtacctttatcgctggcgaaataagtacatcggaaacagaatggtgggtcaatgccatatgtttagttttcggtatactgctcgtagccgtcggcttgtacttcgcttggattacatttcaagagcagcgcagaaaattagtaatagctttagagcttcgtgggttgaaccaaaccgcagatagcccacttaaaaatgcaatttcctctctgacgttgggccgtagggagtcgatattcatagatgtacgccagcaggttcaaggtaccacggcgcaaaagcaagaggctatcagtgccgtaaatctgattcctactcgtctcaagcaactcaaagatggtaaagatcgtgatgatcttagcgtctatgcaggtggtctagcacctgttccacttttgtttcttacagggaatctaatcgccgctgaaagtaaagtccattggtttgactgggacaggaaggcatctatgtgggtatcacctgatgaaggcactgactttgctgacgctttaccgataatctatgagtattcatatgaagaagtagcattggctttttcagtttcatatcccatagatctcaaagaaataaaaacctcattccctggaattagtattattgagttaaaattagaaaatccaaccccaggaaaaataattagtgaaaactctatccagcgactaatgcaagacttcatgaactgcataaccatactaaaatccaagggtgtgaaaagaattcactttatcctagcagcccctagtgtcctctcaatcagacttggatcgtgttatgcaggacgaaatatgcctgaattaataatctaccagtatcagcaagctcaaaaggagaccccttatccttggggagttcgtatgccaaattcagaaaccaaccaaggtgagcttgtcattcggtcatag

SEQ ID NO: 439923 - DNA, 1389 bp, Serratia marcescens
  misc_feature (1340)..(1366): n is a, c, g, or t
atgaataacgaaaataaagcggttattggtgttgatgttggttcaggtagtgttagagccggtattttcgatttagaaggcaacttgcgaacacgcattgttcagaaaatcaatgtcttccgtcggcaaggtagtcatgtggagcagtccagcacagacatctggcgtgctgtttgtcactgtatcaaacagtcccttgaaaagacagaaacacgagctgaagatgtggtagggctaggttttgatgccacttgttccttagtcgtcgttggcgaaaatgggtatccccttgccaccagtgctgatggcgataccgatcataatattattgtctggatggaccatcgggcaaccgagcaagcagatagaatcaacaaaacacaacacccaatattgaaatatataggtgggaaaatttcaccagagatggaaacgccaaaacttctctggttgaaagaaaatcgtcgtgaaatctacgacaaagcatggcaattttttgacttagcagactatctgacctggcgggctacaggagatctaacccgctccatttgtacagttacatgcaaatggacttggcttgcccacgaaaatcgttgggatcctgattacttccgaacgattgggctaggagatttagttgatgaaaattttaaacgtataggccaaaaaatggcagcaccagggactccctgtggtgaaggtctgacggattttgcggccgaagaaatggggttgctagctggaacacctgttgccatcggtatgattgatgcgcatgcggggggattaggttcggtcggtgttaccgatggtgcattgaataatttggcgtatgtctttggtacttcttcctgcacgatgacaagtactcaagagccgattatggtacctggtgtatgggggccttattactcagctatggtacccgggtactggctcaacgaaggagggcaaagctctgccggggcagcaatagaccagctgattgctatgcatccaatgagtactgaagcaaaagacatggcaacaaatgcaggagttacattaccagtatttctcgccaatttagcgcaagaaagatcggaaacagcttctgctgctattgaactgtcttctggcgtttatgttgtacctgattttcttggcaaccgtgccccattcgctgacccttattcacgtgcagttattgctgggttagggatagagcgggacttggatagtctagtttcactctatatcgcagggcttagtggtattggttatggattacgtcaaattatagatgcacaacatgcacaaggaataaaaacggatagcatcgtaattagcggcggggnnnnnnnnnnnnnnnnnnnnnnnnnnngagctacctgttatatcaactaa

SEQ ID NO: 439924 - DNA, 750 bp, Serratia marcescens
atggcctcattcaatttatccaacaatactaccctcgagggtaaggtggccgctatcactggcgctgcttctggaataggcctagcttgcgcaaaaacgttgcttgcggcgggggcgaaagtagttttgattgaccgcgaaggtgaaaaactagataaattagtcgccagcttgggcgatagagcatttgctttacaagttgatttaatgaagtcggaacaggttgataacgtattgcaagatatccttcgtttggttgggcgtcttgatatctttcatgtcaacgctggggcctacattggaggtcctgtcatggatggtgaccccgatgtttgggatcgtgtgctcaacttgaatatcaatgccgcttttcgttgcgttcgtgcagtactgccggaactgatcagacaaaaatctggtgacatcattttcactagttctattgctggtgttgttcctgtcgtctgggaaccaatttatacggcatccaagtttgctgtacaagcattcgtacacaccacgcgccggcaggttgcccaacatggtgtacgcgtcggtgccgttcttccggggccagtggtaaccgccctccttgatgattggccaaaagcgaaaatggatgaagcgttagctaatggtagtctgatgcaaccgattgaagtcgcagagtctgtgttgtttatggtaacgcgttctaggaatgtaactgtgcgtgatttagttattctcccaaacagtgttgatctctaa

SEQ ID NO: 439925 - DNA, 1014 bp, Serratia marcescens
atgcagatcaaaaaaacgaaaaaaataacaatctacgatttggcgaaactcactgatgtgtcggctagtgctgtgagcgcaattcttaacggaacttggaaaaaacgccggatcagtaaaacgctggcagacagagtgatgaagattgccaaagaacagggctatgagttgaatcgcccggctagcatgctacgtagtaaaaaatccaacgttattgggatgctggttcctaaatacgataaccgctattttggttcgatttcagaacaatttgaagaaatggcgcgagagcgtaatatgctgccaattatcacctgtactcgtcgtgatccaaagctagaattggaggcgactcgagctatgctctcttggcaggtagattgggtggtagctaccggaaccacatttcctgataagattactgaactttgcaagcaagcaggcgtaccagtaattaacctcgatcttcccggaaaaatggcaccatccattatttcagataattacagtggtgcaaaaaagttaacagtaaacattttgacaagaagtgctgttcgttacggttcaatggaaccactgttctttattgggggccgtaaaacagatcacaatactgctgagcgcctaagaggatttattgatgcacatgttgagcgtgggatacatgtcccagaaaaaaacatactcgtgaacggttactcaatgaaaaacattgatcttatcttggaaaactcttttaatggcgataatattaatatacctggtatttttgtcaattcgactatttcacttgaaggagttgtgaggtggttagcactacatggctttaatgaaataaaacaacctcctcttggatgttttgattgggatccattggtatcattattaggaaataacatatctatggttcgtcaagatgttcaggcaatgttagatgcagtttttaaaattatcgacaccggccatgtatcaatagaaacaattgaaatagctccgatactggtagagaagtga

SEQ ID NO: 439926 - DNA, 633 bp, Serratia marcescens
atggaatgtgtagaggctggtgctgctgaacttcatatacatcctaggacaatagagggagtagagagtttatcgagtgttgatgggactatagaagccatccgtaacatatgccctggcaccttaattggtgtatcaacgggcagttggatcatggctaatgcagaaagcaccaaaaaggccatagctgcatgggagatcaaaccggattatgcctcagtaaatctatcggaggaggatgctcctgaaattattaacttacttcatggcaaaaatataggaattgaggcagggctatctacaattgaagatgctgaacgattacttggattatgttctcgtgacaaaattttccgggtattgatagaaatagaagagcagaaaatccctctcgcaaataaggttgcattagaaataatagcactcttgaaagggtcagggttaaataaacaaattctgcttcatggttttgactctacagcatggcactttgtaaaaatggcaagagaattaaaattatctagtagaattggatttgaggactgccttttcgggccattagatgatgaggtaactactaacgctgacatggttaaagctgcgtttaatatattacatcaaagccatctatag

SEQ ID NO: 439927 - DNA, 702 bp, Serratia marcescens
atggccgcttatggtaatcagcatagcaatactcataacaatgtgacggggtatagctcaaaaggaagtattaatggttacagtgtgggggtttacggtacctggtatcaaaatgatgaaaacaaaacgggcttttatctagacagttggatgctctataactggtttaataatgaagttaaaggtcaagagctcagtagtgagtcttataaatcgcgtggtattacagcctctgttgaaactggatactcatttaaactaggtgaggcaaaaacacatacaggaatgatcaactcattctggttgcaacctcaggcacaaataacctggatgggagtgaatgcgaatgagcataccgaatcaaatggaactaatgtccaaagcacagggaatgacaatattcgaacccgcctgggtatgagagcatacttgcaggggcatagtattattgatgaaggtaagaatcgtgaatttgaaccctttgtagaagccaattggatttatactaaaaaagattatggtgttaggattaataatgttgcagatagcgtaaacggcacaaggaacattggtgaactcaaagttggtgtcgagtcaaaaatcgataatcgactacatttgtgggggaatgtagcccaacagatgggaggaagtggatacaatgatactcaggctgttattggagtgaaatacttattttaa

SEQ ID NO: 439928 - DNA, 684 bp, Serratia marcescens
  misc_feature (5)..(14): n is a, c, g, or t
atgannnnnnnnnngataatcgatgttgcagcagctcgttttgactatgagttagaactcgaacctgaagctaaagttgatttcaaaattaaagccaaacaattcgtgaaaatctatgggcaaatggcctctatcatgccttatgagatggtgacttgggagaaactgttctggttcttgaaattcctcatacctaagctgaaagttgaagaccctgatgcagatgccattgatgagcttttagattctgttgatttgagttcctatgggctgcagcgtgtgaagctcaatcacacaatcaagttgagcgatgaggaagcggagcttgatccacaaaacccaaacccacgtggagcacatagcagtgaaaaggaaaaagatccattagacgaaataatccgcaccttcaatgagaggtggttccaggggtggagtgctacgcctgaagagcagaaagtgaagtttataaacattgctgagagcattcgtaatcaccctgattttgaaactaagtatagaaataatcctgatccacataacagaaacttggcttttgaaaagatgctcaaagagattatgttgcaacgacgtaaggatgagctggagctttataagctgtttgcaggagactcagcattcaaagcatcctggacacaaagcatgcaacgaatgatcggtgagtaa

SEQ ID NO: 439929 - DNA, 357 bp, Serratia marcescens
ttgtatgccgtgttaatcaagggacaacgcaactatcaacctgtcatcaggaacgtctgggactccttgatgtcactatccatcaagttgatgggctttttagtaagtggggaaataactggtgggacatttttcttagcaatctgtcacttactcaacgagcaattgctgcagagcaaaaaaaccgaggtatcgtactacgtgtaccgaataaatttggacactcattattgttgctctactggggagtacatcctgccgagacgagatccacatatatattgcaacggcaagaccatgagtatctggttcaacgtacaggtggagaacctgtcatgcgtcatgtcacagtggtag

SEQ ID NO: 439930 - DNA, 1902 bp, Serratia marcescens
atggaagccaacacgcgtaagctagaaagaatttttgatcaaaccatcacctatcaagtgccactattccagcgtccttatgtgtggacgtgtgagaaaaattgggagcccttgtgggaggacatccagacacttcttgataagcaacttaatggtggtagagctcaccctcattttttaggggctgtagtattggagcaggtcgcgaacccgacgggatccatcgaaagtcgtcaggtgatcgatggtcaacagcgattcactacgctccagttgttcctgatggcggcgcgtgaccatgcggtagcgcatgaacagactaaatatgtcgaacgcttttcagatctcgtgaccaaccgacgtagcaagatcgatcacgatgacgaagtgttcaaagtatggcctactaatagcaatcgagaagctttcaaagtagttcatgaggctgggtcacctgatgccgttgataagcaaattacactacggcctgatcttcgtgatggtgctaataacattattgacggttacaaatacttttatgcgcagatagggcagtggttaaacggttcgtttgatgatgaggaagatatccaggcattaagtgaaaagtctctcgatgatcgttttgattctctctggcaggttgttaaggactgtcttcagattgttgtgatcgatttggaccacaatgacgagactcaagttatctttgagacgctgaatgcaagaggggaggaccttcttccagcagacctgatcaagaattacttgttcaggctcgcggaagccaggggggataatgttgaacagctttatgcaaataactggaaatcattcgagactgactggtggagagaggaagtcagacagggacgaatcacccgcccccgagtggatgttttcatcaaccactatttaacgatgatgacgcgtgaggaggtcaagtcttcacatatttttaatgcattcaaggcatttgtcaggcagtctgagtcgagctcggacccggtttcaggccctaaaacagcggcagagcatattgctcaactttcacgttacgctgaggttttcaagagattttatcagtctgatagtcatccccgcttagcaacatttatgcgccgcttagatgctgtagatacaaccacagttattccatttttgctgtatgcatacgctgaattagtccccgttaatgttacggagtttgatgcaattcttgaattgcttgaagcgtatttggtgcgtcgcatgatctgtggaatgaccagtaaaaactacaatcgctactttgttgagcttattaaagcggtggacaagaaagggctcataacggcagaaaatgtagctgagcagatgaaaagaagcgctggagatagtactcgattcccggacaatagtgtactggttgcggccattacagatttgccgatttatggccggctggctcaatataaagtgcgaaccatacttgaagcacttgacgcttatgcgtttaataaaaaaagtgaagcagagccattaccaggtggattgacgattgagcatgtgatgccgcaaaagtgggcagataattggccgctttgccccgacgataaaactgatccactgattgagcagaaggctattcagaggcgagataaactattaaatactataggtaatttaacgcttattacacatagactgaatcccgcattgtcgaattctgcatgggccttgaaacgcccagagctactaaagtttagcaagctcaatttgacgcaatactttcatggcgatcatgctgtgcagtggggggagaaagaaattgaaacccgtactttttatctgactgagcaactcaaaaagatatggccaatgcctgcggtttctggagatgacaaagccacaacggattaa

SEQ ID NO: 439931 - DNA, 1542 bp, Serratia marcescens
  misc_feature (627)..(636): n is a, c, g, or t
atgaacaagttttacaaagttaaatggaatgcatctagatcatgttgggttgtttgctctgaaattagcaagaatatttcaagctcagcatcaaagctcttatccgcaacttctatttgcctgctaaccattgggactgcatctgcagctacgtgtattaatagttcttgcgatatgggtaactatagtcccagtcaaaataaaaacaaagtcggccaggttgtcgtaaatggggcagggaacaatatcatcttaagtggtgatgctaaaaatatagataaaggggtggagtcatatgttcccaaacaagcgagagatgtaatctcaggtattgatggtcagcagaatctaactgttggttcaaaaagctttgctgttacttccccagatgtgattactaatacaaatagtaccgttcttacatatgatagcaacaatataagcacctcaaattggggggatagcattgtccaggttccacagaatagtggtgatcaacaatattacgatgtgcgttttggtacggctagtaatggcgggaaattagatctaaaaattggcatggattcatcattgacaaatgacgaaacgaataacatatcaattgtcgcaaagaactcaactttnnnnnnnnnnactttactacaagctgaagatggtggatatgttgtatggtcgtcaaagaataaagtacaccaagggcttgctcctcaataccaagaaggagatgtaactaactccattaatataaaaacgcctgaatatgcaggaacattttctattacatggaaagatggaacgagcagttctttcactgtaacagatctcgactcgttgaagaattacaatgatgcactaatcaatgctctaaattctgggaagttgaattcacaggcagattatgactcagcatttgccaagagttttagtacggttagcaaggagtatgattatactagaaatatagataagggggatgatactactttattgaccggagagcgatggtcaatggcggcaagtggccaaggggctgttgctgaagttgctcaatcgggtcagatcgatcagcgattcagtggagtattggcagaaaaaggcggtacagtaatcgtcaatggtaaaatttctggcatattgaatacactggtcattagagatcagggaagtcatgcagtcaataatggagtcatatcaggtgggtattacacagagaataactacgacacatttaatggcttgggtaatttagataacaatgtgaacgtatacggtgagagcagaaacgttgtcgtcgaaaacaatgccagctttgataacaatgggattatcaatgttgccggttggacatattccaatagtgaagggcgagataactttggtatactcgtcaataatgggtctgccattaatggtaaagatggaataattaacgttggtgttaataataatgctactctaggatccactagtggtgcacaactgactggaaatgcaacatttatatcggccgctcagcgcaatattcgaaatcagatgtaa

SEQ ID NO: 439932 - DNA, 564 bp, Serratia marcescens
  misc_feature (514)..(523): n is a, c, g, or t
atgcaaacccaattgggtagtgatgattcgttaactgataaactcgtaatcaaaggagatacgagcggatcatcaagggtgtatatagaaaacagtggcggtaaaggtgcttatgtcgatgatggtatcaaactaattgaagtcgatggaaattcagcaggtaatttcacccaggcaaaccgtgttgttgctggcgcctatgactatttcctccagagagggacggtaaatgggcaatccacaagtgattggtatctcgtgaaccaaaaacctcaaccggagcctcaaccagagcctcaaccgaagcctcaaccggagcctcaaccagagcctcaaccagagcctcaaccggagcctcaaccagagcctaagccgaaacctaacccgaaacctaaccctgaaccacagaaaaccattcgccctgaagtggcgagctatgcctcgaatattatggcagctaataatttatttagtacaacactacatgaccgtttaggtgaaacacaatataccnnnnnnnnnncaatataccgatgcgctgactggcgagaaaaaagtaactag

SEQ ID NO: 439933 - DNA, 468 bp, Serratia marcescens
atgtctacccaatctcagcaagcatctaccaaaactgaatatttcaacctgactatcaaaggcatggggtacctcagcaacattcgtcaagtcaatgggccgaatggcacctttatcagctgtgtcgtcaatggactctccggtcctaccgataacgccagttacacgcgtttcgatgtgatggtcgccggtaaagaagccagcagccttatcaaccgctgtcaaaagtcagttgatgaagacaaaaaagtcctgattggttttgtgctcagcaatcccaaaacggatattttcacgctcaacagcggcgaacatgccggtgagcagcgcgtcagtctcaaagcccgccttatcaaggtcgattggatcaaaatcggtcaggaaaaggtatatcaggctgagaaatccgactctacgccgcctcagcagggttccgcacagcaacaatacgcggaaaactctttctga

SEQ ID NO: 439934 - DNA, 447 bp, Serratia marcescens
atgcaaaggggggatttgacgcaaaaccacctactttatccgggcgacatcctctacattccccgtaatgacgatttgaaagttttcgttatgggggaagtgaaaaaacagactacgttgaaaatggatcgcagcggtatgacactaacggaagcattaggtaatgctgaaggaatggatcagaactttgccgatgcgacgggggtgtttgtcattagaccattacgtggtatggaaggtaaaaagctggccaatatctaccaacttaatgcgtctgatgctactgcgatggtaatggggactgagtttcaccttcagccatatgacattgtatacgtaactaccgtaccgattgctcgttggaaccgcgtcgtcagccaattgttaccgactatcgttggtttcaacaacctgaccgaaggtacacagcgtattcataattggtag

SEQ ID NO: 439935 - DNA, 141 bp, Serratia marcescens
atgaaattcttcttcgtggcgatatatattttgattttttattcattgatgaagctcataatatttcagatgaagggcgcggcgtattgcttcatcttactcttgaaagggtatttgaagatagtagcccacaaattataa

SEQ ID NO: 439936 - DNA, 216 bp, Serratia marcescens
gtgcaaaacagccacgtgatcctctacccggaaggcatggccaaactgaatgacagcgccgccgccatcttgcagctggtcgacagccacaccacgctgaacggcatcatcgtccagctgaacgcccgcttccccggcgccgaaggcttggcggacgacgtgctggagtttttccagcgcgcctacgaacaaaaatgggtgaccttccgtgactga

SEQ ID NO: 439937 - DNA, 531 bp, Serratia marcescens
atgaacttctatactttcaatagctttacatttggcgataacttgatttgttttcccgatccgaaatcaagattgtccagcttttttatttggaatgaaggtgatggtaatttcctatcctactcactgccaaaagggaaaatgccaagcgcttcgagtagcgatatttttaatttgcatgactattttcctgccagtctcggaattccaatcttttcaaaaagagctaagactgtatttgaacgcaaggtttcgtctgagatgttattctatgaatgtgcggtagaaaacgtaactgaaacaatttttctgtgtaaagtgaataattattttcaaattattgatgaggaagcctcgacgttcagagaacttgaagatggaagcaagctcattgatgtgcctgcttacaagtgtgacagggagttctttattgctagggatagcatctattgtgaaagaataattgtctctcagcagtttgttgacctatgtaatgaagaacagctaaacataggctttgagcgttgctaa

SEQ ID NO: 439938 - DNA, 1518 bp, Serratia marcescens
atgacaccatcaaccaaaattgatactacaagtctacttacgatactgggcgttattgctgctgtatgggcccttgttacgccaaacgctcgactacgtttaaggttctgtctggcgtggtgggattgggcaattgttgggtttgcattcttactaaataattatttggtgtttgcaccagctttaaagtcactaggcttatattttagctttggcccatggaaatggggattagatagttcaagtgccgtatacctgatatcactcgcagttgctatttacattttatttcgtttaaaaaaccctaaactatcagctggaagaacagaaatatttcttaagctagttgaaaatttgcaccttactaaacgatacgatgatcttgcacaattgttagcacctcaactagaaaagttaatatcaataattgataggccggtgaagaatcgactttgtggtaagatagctaacattctccacatctctaaccacgagacagctgccgaatatgcacgtgaagcattatcgagtattgtctcatcacctgagctgaccaatcactttgcacttgcgcacccatccctctgccttgagttaatcaagatcgagccaatagttcgttctgaatttacttctaatttcatcagtgcattactcgattcacctaatagtcgtctatatgttgagcttaaaaataatcttaacgttagtcgaggacatcgtttgttgattccaaaaaacaatcgtatattgcattttttcttttccaacgctaagtttgcagctaatttagcaacataccgtagcatcggtgaatatctctattggcggttagatgaagatgagaaaattattgggtcacttaataaacctttaggttcctattacgatatttcgaagtataaatgtcctatttactctggagttacgctgtttgaaatcatggttcatgaaggtattcatcaagggctacaggatcatttatggctgcattactatgcacattttgcaaagaaaatcataagaaatatgaatagacaatcagatgaatgtattggtgaatgggaaacaccttttcatttccttctatgtcatttatttagcgtcgctacagattgggcagaacaatgcgaatggattgatgaaaaggagattcctcaagaaaacaaagaaaaagacaatttcgatcttcattatatttccaaagagtctaccaaattacttggctctatgctgcagttggttctacctaataaaaaactcaccttgagatctagaaaagaaattcttggtagtgttgtatcttgttatattagattaaaaagagataaaaagttaaatgacgtcgctgattcactattaagtttcacaactagaggtgaatataacttagcaccggcgcattatcgtaaagagcttctaggagtattcaatgcacttgatgatcatagattaagaggtgatgccccggaattcttggcggctatagagtctgccattcaagcaaggccgaactag

SEQ ID NO: 439939 - DNA, 600 bp, Serratia marcescens
atgaccgagatatctcaaaaaggtgggtaccgctcaacaaacactcaaaattttttcaatacctcatcattggatattgtgcgctcaccttcaatttttatgagtttagtttcaataatttcatccggtgattatcttcgagagaatggttcctcggatgattattcatcatatgatattgatgagaagatagattataatgatgtaattaaatacagagataaaattgaagattactacctctataatggcatgatcgaacagtcgtatgttactttgaacgaaaaaatcccaaccgctagggaaaaggctttaggtcgtataaactcttgctacaaagactgcgttggcgaaataaaaatcaagaacaaagaagccttaaagaaaataacgaacaaagaagataggaaacgcttcgaaagagaacttataaagactaactcggatgatataatagcctgtgtcattgaacatgtaagacaaacatgcattacttccatagacgcaggaacagtaacaatagaagaaatagaaatgcatgccgagtgtattgtcttccatgcctttgtagagtgtaaggttctggaaaaaccgatatga

SEQ ID NO: 439940 - DNA, 1707 bp, Serratia marcescens
atgtttctaaaggagctgattgtcacatcaccttatttaggggaaataagaagagttttgtttcgtaaaggtgttaaccttatattagataaaagcacaaccgatctatcaggcacaggtaatagtgttggtaaaacaacagttttaagatctctggatttctgcatgggagcaaaacaagaatctttctacacagatcctgaatttaaaactacaaacgcactcataaaaaacttcctgatagataatgaggttgagttcacactgactctaacaaccagtaagggtgatgaattaataattacaagaaaagccctacccgaaccgaaagttttcggtaaaatcaatgacaccgaatacaacaatctcaagaatttttgtcatgacctaaagattgcattatttttcagtgccgcagacaaaccaagcctacgtcaaataatgaccagaattattcgtgacacttcagataaaatgtccaacactttaaaaacattgtataataaaagttcgacagctgaatatgaaactctaaacctatttatttttggattcgaaaacccttctattctttcagaaaaacaaacaacaaataggaaactaaaaaagctagagtcagaactttccatattaacaaaaataagatcgaagaactcactagagcaatcacttgaaattataaatcgtgatattgatgagaggaatggtgcaattgaaaactatgacctcggcgaatcttatgattctcagatgcgtgaactaaacgctattaaactagaagtttcagggttatctttagatttagcatctttgaatatgaaaagaagcttaaacctacaagctattgatgaactacttcaacagaaagacaactcagaccctaacgatttaaaggccctatatttggaagcaacaaccagagttgaaaagttaagcaaaacatttgaggatgcgttaaatttccataaccagatgatctataaaaaggttgagtttatacagtcacaaatggaaggtttaaatgaaaaaataaataacaagagcgatcttttggcctcttggttaactaaagagtcgggcattcttaaagaattatcaagccttggcagcctgagtgacttacagttactccaaaaagaattaaacaaactttacgagtacaagggtagcttcgaaaactcattggagcaaataaactcttatgaagaaaaaatagggcatcttacttctaaaatagatgagatatctatcaagattgacaaagccatagagaatttcgatactaaaataaaaatcttcaacaagtatttttctttattcaccagaaaactctatgaagaagagttcattttaacattctcagaaaaaaacggagtatatgattttaaggtagatccagtcggcgtcgtcgcttcaaaaggtaacctaggggacggtaagaaaaaagctcaggtttcggctttagatttggcatatttggcactacaggctgaaactcaatctaaatcggtcagattcgtagctcacgacggaatagaggccatacatgcaaaccaaatcagagtgctatttgacatagcatcatcaatcgatggccaatatatactagccattttgagcgacaaattatctagcattgagaaggactttattaatgagcatacaatattagagctaagtgaagaagataagtttttcaaatgctaa

SEQ ID NO: 439941 - DNA, 555 bp, Serratia marcescens
atggcgcgcatcggcctgattgccatcgtgctgctgttcatcggccacttcgccgcctatacctatctgcgccctctgctgcaacaggtgttcgtgctcagcccatcggcgatctcgctgcagctgctggcctatggcgccatcggcctgctgggcacctttctcggcgagcgtctgggggagtacagcctgcgcgccacctttatcctgatcgccgccatgctggcgggcattctgatcgtttcgccgctgctcagcggcctcgccggcgccacgctgatggtgttggtttgggggctggcgttcggcgccgtcccggtatgcgccaccaactggatgttcgccgcggtgccgcaggcgccggaagccggccaggcgctgctggtgtgcgtcatccagatcgcgctggcctccggcgcactgctgggcggcgaggtggtggactggcagggcgtcagcagcgccatgctgttcggcggcgcgctgatcctctccgccacgctggtgttcggcctcagcttgcgctccggcgcgattggcgctaaacagtgttaa

SEQ ID NO: 439942 - DNA, 780 bp, Serratia marcescens
atgaagacattgttgaaaaatacaggtttgatttttaatcttaccaagcgggatgttgaaagtcgctatcgtgggactagtcttggtatcgtatggtcgctgctaaaccctgtgattatgctttctatctatagctttatttttggctttgtttttaaagccaagtgggggctgacaacgacagaaaattacactttgattatgtttaccggtctgctgacacatggttttattgccgaatgtcttggcaaggcgacaacaatatatgtatataatgtcagctatgttaaaaaagttttatttcctcttgaatccttgtgctgggtgtctgtttttggcgcattattccaattctttatgggatgcattgtttttgccattttttgtattttactaaagcaacctgttagtctaatggcattattagttcctattgttattcttccattgattttattatcatatagcatttcattatttttgtcatcgctaggtgtttatattcgtgatatggggcaggttgtttcagttatcattgccttaatgttatttatgtcgcctatattttatcctattactgctgttccagaacaatatcgtatgctgatttatattaatccgttaacgtttattgtcgaagctttacgtgatgtcgtcctgtacggaaaattattcagtcttgaaggctatgcactctattggggtatcagtattgtgctgtacgtattagctataacttggttcaaaaaggtaaagagaggctttgctgatgtcctctaa

SEQ ID NO: 439943 - DNA, 219 bp, Serratia marcescens
atgagcatcaacctgaataatgcgcctttgtggattactgcgaaggcgctggaaaaattaaaacagttccgcgccggtcgattattccccaaaagaacctatggcaaaaaatacctgacctttcgtgtaaataaacgctggcgcttactttcaaaagacgacggccataattggctgttgcttacccacaatgattacaactgcgtaatagataaataa

SEQ ID NO: 439944 - DNA, 510 bp, Serratia marcescens
atgattacattcaatgacttcaaagaaaggcgcaaagcccgaaaagaagagtggaaagcatacgtacagcgagttagagaatgtgcagggaagctcattagcatctatatcgattccctacaactacctaatgaaacatggaaagactcagcgggaaaggattgtccatatgtttttattcaggatttagaaccgcgtactggagaagggaatcacgccaaacctgaagaactgacggtaaaccctagttctggagctaggtttgttctgtttacaattactgatgacgaccccaacaagcccaagtatgaaagcacgcgaatttcaatctcactctctggagatgctctagaagtaagcattgaaagtttgaataccttctctcctattgattccgatgagaaatactcagaggtgtgtgagttcattaaagaaagcatacttgaatctataggcggtaatgcttttggaaaaaaacaattcgctgaatcggtaaatttatgggattga

SEQ ID NO: 439945 - DNA, 444 bp, Serratia marcescens
atgaataaaactttctctttcacaacagatactgctaccttgtcaatttttgatttggtgtctttaaaacatagagttagcgacgatgccgattggtggagcattccagaggatgaactggaagaagtgaataaaggtaacgtgttgtttttgaatctcggtgaggacggtcagtatacggttcgagttgttgataacataagtgagaactacaaatcgttatttttgaatgtgccttcaggaaaggtttttgttggggcaggggaagatactagcggtggtgaccttgaacctgacggttctgactatatgtcaggtgtatttttgattttagatataggcaattacgaagtgagatttagaagagactctctcgatatagtcatttcacttattaaaagtagtgaaaataaaaatgaagagagtgcattaattaggatctga

SEQ ID NO: 439946 - DNA, 129 bp, Serratia marcescens
atgttggctctgctgctaatacttacacctgattttttgagtattttgtacttccttttagttgaatgtgaagtgttattgaaaaacaacctcgctttagtggggcttattttattttttaaactgtaa

SEQ ID NO: 439947 - DNA, 903 bp, Serratia marcescens
atgcgcgaaatgcctgaaaaggcattccatacctgcgtaacaagcccgccatattacgcgctgagagactacggcgttgaaggccagatcggcctggagccgacgccggcggagtttatccaacgattggttgaagtcttccgtgcagtgcgtcgcgtactccgtgatgacggaacgatctgggtaaatatcggcgacagttacgcggcgagatttagtggcaataacggatattcagacggaagaaccaatcggcaagagcggcgcgcggcaggagtgccagcaggggttaagccgaaagatatgctcggcatgccgtggcgtctcgccttcgccctacaggacgatggttggtatctgcgccaagacatcgtttggcacaagactaacccgatgccggagagcgtacgtgatcgctgcacaaaggctcacgagtacgttttcttgctgagtaagaggccaaagtattacttcgaccatgaagccatcaaggagccggtaacggggaactcgcatccgcgcgggaaaggtgtcacgcctaaaagccaagccaacgcattcggaaatcgcaacaacgcatcgttctcggcggccgtctctggattggtagagctccgtaatcgtcggacggtgtggtcagtgccaacgcgaccattcaaaggcgcccattttgcaacattcccgccgtcgctgattgagccgtgcattttggcaggatgcccggccggtggcgctgttatagacccgttcggcggtagtggcactactgcgggcgttgctgcggcatacgggcgtaaggcggtgctgtgcgagctgaatcctgaatatgcggctttggtgccgggcagggttagcgacatagcgaattcaatcaccgaaaaacgaaataccaggaacagctaa

SEQ ID NO: 439948 - DNA, 1035 bp, Serratia marcescens
atgaaagcattagtgttggcgaaggcgggagaaatcgctatcgaggacgtccagcttgccgaggcgttggggcccgatgatgtacagataaaaattcattccgtaggcatttgcggcagtgatgtgcactattaccagcatggccgcattggcccgttcgtggttaacgccccgatggtgctcggccatgaagcctccggggtggtgctcgcgacaggtaaaaacgtcactcacctcagcgtcggcgatcgcgtttgcatggagcccggcattcccgatctcaactctgcccagacgcgcgccggtatttacaaccttgacccggccgttcgcttctgggcgacgccgccggtgcacggctgcctgcgcgaaaccgtcatccaccctgccgccttcacgttcaaattgccggacaacgtcagtttcgctgaaggcgccatggtggaacccttggccatcggcatgcaagcggccaccaaagccgggatcaaacccggcgatatcgccctggtgatcggcgccgggccgatcggcgtggtcaccgccctcgcggcgctggcgggcggctgctcggacgtcattatttgcgacctgtttgacgagaaactcgccgtggcggccagttacgaggggctgcacgccgtcaatatcaaaaccggcgacctggcggggaaagtggccacgctcaccagcggcaatggcgccgatgtcgtgtttgaatgcagcggcgcaaaaccggctatcgcaacgctggccgaacatgcggcgccaggggcgaccgcggtgctggtcggcatgccgatcgatgccgcgccgctggatatcgtcgccgcgcaggccaaggaaatcaccttcaagaccattttccgctacgccaacatgtacccgcgcacgctgcggctgttgagcagcggcaagttgcgcgtccagccgttgataagccaaacctacaagttctccgacagcgtggccgccttcgagcgcgcggcggcgggacatgcctcagacatcaaaatcatgctggagatggagtaa

SEQ ID NO: 439949 - DNA, 1062 bp, Serratia marcescens
atgaaaaaaccgctaaacccgtggcttgacctatgcaggtccgctgcaatcattatggtcattctctcacacggcagaacgtttctactgtcagcatttccagcggcgcaaacttttaagttcggtggcttcttaggggtagaactgttcttcgtcttatccggatttctgatcggcagaatcatattcgagaaggtgaaagcagccagaacaccactcggctggatccccgcgttttggtttcggcgctggatgagaacctatcccagctatctactttttttattactaaatttattcttcattaacaatatcaggcctgaagcactgcccaacatactggccttctccacgttcacgcagagcttagtccatccacaccccaccttcttcggtgaggcctggagtctggctgttgaagaagttttttatttcttattccccatagtgatagccgtttttttattcataacgaaagatagaaaagtcagtattctcttggccattgccgctatgatactgatgtctttgctctttagagtgaacgcagcgctgaatacgcaactgacgtttaacgaaattcgctcaacatcgttatatcgtcttgactcgctcatgattggcgttattttttcctggctgtttgtatcaaataaaatcaaccggttcttctgggtagggttattacttattcctatcgcgatagccatcgcgtctcagcctgatgctttcatggatgaaagcaggttcctgaaagtctttttatttgatattgccaacattggcttcgcttgcctgataaccgcgttctacaatacggatattcccaatgcagtgaaagcggtaacctccagaattgcacgctggtcttacgccgcctatctaaccaatctgcccgttttattagccctcaatcactacttgccgaaacccgattctgctatcggttgccttgcaatgtggtcactgtttgtcgccatgacaatgctcagcgccaagctggtttatgaactctttgaggtgagaatcctgcggttgagggatcgcctgaaagccgcatga

SEQ ID NO: 439950 - DNA, 10017 bp, Serratia marcescens
atgaacgtgctcatcgcttcaccttatacccacacgttttggaatgagtacgtgctcaatccacactcctgcgagtacaacctggtgctggatcagacgattgagggagagctggacgtcggacgattgcgcgcggcgatcgacggggtttgccgggactatattctgtttcaccacgttttggatgacagttcctcgccactgcgctgggtaaagacggcgaaaaaaattgcgttggaaacgctcgatgccgattgtgatgtcggtaagttaatcaacacgccgttcgatctccgggaaggaccgctgtgccgcttctacctgattgagctggcccctcagcgctataacctgatcattgtcgttcatcacatcctgatcgacggcctgtcggggcaggagttctacagcgccgtttctgcctattacaatcgcggcgcggcggtggcgccgccgcaggcggatgaaacggacatctgcacattgtacgagcgttatgaggcggatgtcgcgacgctgaagcacgagttcggctctgcgtcattctggggcaacatgctggctgaatgcgctccgcgcgtggcgttgccttatcttcccggcgcagcccccgaagcgcccggtgccggtgaagtgcgctttaggttaccgttcgccgagtggcaggcgctgaaatccggcgtcaggtatgccaatcctttcctgatattcaagacgctgtgggcgttgctgatcgcccggcaatccgcgcaggaaacggtgcatatcggttatcccgtcgcgccggagggcggcgaggcgctgttcttcggcgcacaggtcaataccgccgtgttccccttgaccctcgccccgggggccacgttcaatcagctgtaccgcgcgacgctggcctacagcaaagcgctcaaggcggcaggcaagctgcggcacagccagttgccggtttatgacatgctgagcctcagcccggtgcgtcagctgaacgtcaactttacccaggcttacctgaaagatgcgccgctggcgctcgacggttgttgcatcggcgtcaatcatcgcttcaacgtcgatttggccggttcggaactgctgctggagtatcagcctaccgagcaggcctttgagtttcgtctgcgctaccgccccgatctgttcgacgcgacccaaatgacggagatggcggagcagtatctctggctgttgcagcgcgcgttaaccgaaccggacgcgccgattgccgcttggccgcagctgacggcgcagcaggttttacgctgccgcgacggctgggagagcgggccggcaacggccgatgcggaagcgacgctgctcgagggcgtggccagacaggcgcgccgtcacccggatcgcgtcgccgtgaccgatgccaaaggatcgctcagctaccgccagctggcgcagcgcagcgatcgtctggcgctgcggctgcgggcggagtatcaacggctgtgcggcgtggccatgccgccggagacgctgatcccgctgtatctgcagcgcagcgcggaggcggtggtggcgatgctggccatcatgaaggcgggcggtgcctatgtgccgctggatcccgccgcgccggcacagcggctggattatatcctgcaagaggtcaacagcccgatcgtcttgaccgaaaacgcgttgcaggctgcggcgcagcgattggcgccaggcggtctttgcctgtcggcagatgaaccgctcgccgacgcggatgccgcagccttgccgagtgtggacgcccggcagttggcctacgtgatttacacctccggcacttccgggcggccaaaaggcacgctgtgcgagcaccggggcgcggccaatatggtgcggggccacacgcagcgtttgctgcgcaatgagccggatgcgctcaactgcctgcagttcgcgtcgctggcgtttgacgcgcacgtcttcgaagtgttcgtggctctggacaatggtcaccggctgttcatcgcgagcgaagcgcagcggcgggatccggcgcagttgtgcgaacagatggcggcctggggcatcgaggcctgcttcctgccgccggcgctgcttggcaccttgcctgaacttccggcttcggtgcgctatctcgcgaccggcggtgaggcgaccgcgcaggaagcgctcgaccattacctggccagcggcatgcaggtcgcgaacatgtatggcccgaccgaagcctcggtcagcgccagcctgaatatctatcgccgcaacggcgcgcgcaatatcggccacgctatcgccaatatgcgttgttatgtgattgacgagaaagataatttgttaccgttgggcgtagaaggcgagctgtgcctggccggcgtggggttggcgcggggatacctgaacctgccggcgctgacggcgtccacgttcgtcgccaacccatttgaactgcgggaaccgtaccggcgcctgtatcgcaccggtgacagagtgcggcgcttggccgacggcggtctggagtacctcgggcggcacgatcagcaaatcaagatcaatggctatcgcatcgaattgggcgaaatagaaatgcagctgcgtgcgctgcctgaggtggccgaggcggtggtaagtctgcgtcccggcactatggatcagctggcggcctggtatgtgccgcaagctggcgcggagccggaggccggcgacatcttgcaccgcctggcgacgcagctgccgcactacatgttgccttcggcgatgcgggcgctggcggcgctgccgctgacggtgagccgcaaggtcgattaccgggcattgccggaaccgctgccggtcgagccgcaaacggcgtttcgccggccgggcacgccgctggagacccgtctgtcggcgctgttcaaccggctgctggggggcgatgttggcgtggacgacaacttcttccgcctcggcggcaactccattatggccatcaggctgtgccacgaagtgaataaactgccgggggcaaagatctcggtactgacgttgaatcagcatccgacggtggccgcattgagcgagcacatcgccgcccaacggcaggcgccgccggatgagctgccgatcctctccggcgggctgcgggaggcgccgctgtcgcttcagcagtcacggctgtggtttgttcagcaactgtcggtgaatgccacgcattatctgtcgccggtgctgctgcggctgccgccggatgtcgatgacgaacgctttgcggcgtgtctgcaggcgatcgtcgagcgccaccagatcttgcgcagcctgatccgccagaatgaccggggcgaagccagtcagtgggtcagcgacaccgtgctgccggtacctttgctgacgctgagcgccgatgaatttgacgctgcgctggcgcaagcctgcagccagccgatggatttgacgcgcgagctgccgctgcgcgccacgcgctaccgttaccgcgatgcggcggagcgggaaacgaccgtgtgcctgttggtgttccatcacatcgtctttgacggctggtcgcttgaggtgctgctgcaggaattggacgcgcgctatcgcgggacgtggcgtgaggcgacagagccggcgttgcaatacctcgactatgcgtgctggcaacaagcgccggaaaatgtgcagcgccgggcggatgaattggccttttggcggcaagcactggcaggttgccagcaactcgatctgccgttggactttttgcggccggcggtcttcgacgagcgcggtgacaacagcgaagtgccgttgccggcggcgctggtgaaggcgctggatgcgctggcacgcagagagggggtgacgctgcatgcggtgatgctggcggggttcatgctgctgttgtcccgctacagcggccagaacgatgtcatggtcggtacgccgctggcgaaccgcaaccgccccgaactggagaatctgattgggttcttcgtcaatacgctgcctttacgccggcggctcgatccgcgtcatcgcgtcgccgagtttgtgcggcaggtggcggccacgacgctgcaggcgcagcagcatcagacgctgtcgctggaagcgctggtggacgatctggcgctgccgcgcgatttttctcgccatccgctgttccaggtcatgttcgcgctggagagcgagggcggcgcgcaggcgcgcccggactggctgtcggtggtcgatctgagcgcttatgagcgcaccgccaagttcgatctgacgctcacgctgacgccgcagggcgagcagatgcgtgcgcgctttaacttcgcttcggcgttgttcagcaaggcgtcgatggatcggctggccggctactatctcgccgtattgcagcagatggctcaccacgacgactggccgctggaaaacatccgcttgcaaccgcaaagccaggcgctgccggccggatcccccttcggctatgcgtttgaacgcagcctgcaacaggatttcatgcagcatgcgcggcgcaatccgcaggccgtggcggttgtcgacgagcagggggagatgacttacggcgagctgcatgaggcggcgttgacgctggccactcagctgcgcgtgcaaggacgggtgaccggcgacgccatcgccgtcatcgccgacaaagggcgccggcagccggttgccctgctggcggcgctgatgtgcggcaaggcgttcttgccgatggaggcggcatggccaccgcagcggcggctgaaagtgatggcgcaggccggcatcaatacgctgctcagcgatgcgccctgggcctgcgccgagatcaacctgatcgaactgaatgccgcaggattggcggcgcagctgccgctgccggaacagcgcctgccggcgctggatgccgggcctgacagcctggcctatatcattttcacctcaggatcgaccggtacaccgaagggcgtggcgatcgaacatcgcagcgcggtgaacatgctggaaggcgtgcgccggtatttcggcctcaatgagcgggatcgcagcctggccctcagcgcgctgagcttcgatctggcgatcttcgacattttcagcccgctgagcgccggcggtgcggtcgtgatgccggccgagcgggacaggagcaatccgcaggcctggtatcaattgatgatggcccatcgggtgacgcaatggctgagcgcaccggcgctgatggagctgttgctggattacgtgaacggcgcggggttaacggcagggccggcaccggcgctgcgggcggtgatggtggggggcgattggatcgccacctcgctgccggaacgctgcctggcctgggcgccgcacggccgtttttgcagcgccggcggcgcgacggaggcggcgatcttcaccatgctgtacgaggtcccgcgcggtcagaacattcggtcggtcagcattccttacggcaaaccgttgccgcaccagcgttgctatatcctggacgccgggcgacggcccgccgcaccgggggtgcgaggggaaatctatctggcgggtgagggcctggcgcgcgggtattacggcgatccgcaacgcaccgccgagagttttttctggcatgacgagctgcaggagcgggtgtaccgcaccggcgacgcgggccgatggctggaggatggcaacgtggagttcatggggcgtctcgatcagcagatcaagctgaacggctatcgcatcgagctgggggagatagaacatgcggtgctcgcctatccgggcgtgaccgcctgttgctgcgtgctcgtcacgcaaccgcagccctgcctggccgcgtactacgttgccgatgagacgatcgccccccaggcgctggctcagcacttgagcagccaactgcctccgtacatggtgccgcaggcgctgatgcagctggcgcagctgccgctgaccgaaaacggcaagatagcccgacaggccttgccgcagccggaaagggcggtgcgtgagttcgtcgcggcgcagggcgaatgggagaacgcctgtctggcggtgtggcgcgatttgctgcagcggcaggatatcggcgtggaggacaacttcttctcgctggggggcaactctcttctggctattcaggcctgttatcagatcggccggcggctggcgcgtgaggtaacgctgagcgagctggggcggttcccgacgatccgttcgctgtgtcgcgtgttgcagcaacaggagcagggcgccgcgccggtgtcgatcccgccgctgcggcaacgcgagtatccgctctcttcttcacagctgcagctgtggtttatcgagaatctgaacggcggcggcaatctttaccatgtgccgatgctgttccgtctcggcgacgaggtgtgtctggcggcttacgagcgcagtttacaggcggtcgtcgcccgacatcaggttttacacagcctgattgtccagatgccatcccaaagcgccgtatcccgagcctgtgaactgacgctttcgctggagcgcgtgacgctggaggcggcgcactggccggacaggctgcggcaggatatcgaccggccgttcgcgctgggggcggaattgccgatcagggcggccgtttaccgggtggcgcagccggatggtgggtgggtgaattacagcctgattctggtgcatcacctggcgtttgacggctggtcgcagccggtgctgctgcaggagctggacgtgctgtatcaggcgcagcggcaagggcgagaggccgggctggcggcgttgccgttgcactatggcgactatgccgtctggcagcggcgctggctggattccgttcaggcggatgaggcgaaagcctattggcgccaagccctggcggggtggcaggcgctggaaatgccgctcgatttcgtgcggccggctcgcttcgatcatcgtggcgccaaccacgtcatcgcgctgccggaggcgctggtggcgcaggcggcgcagttcgcccggcagcagggcgtcacgccgtttgcgctgtatcttgcggcctttaatttgctgctcggttacttcagcggccagcaagacattctggtcggtacgccggttgccaaccgaccggcggcagagacccgctcagcgatcggattcttcgtcaacacgctgccgctgcgctcgcaaatagacgatgcggcgtcgctgaacgattatgtgcatcgcgtctttgacggcgtgctgcaggcgcagcggtatcagaatttgccgttggatcagctgatcgaactgctgcaggtgccgcgcgatctgtcgcgccatccgctgttccaggcgctgttcgcgctggaggaggcgggggccgcgccggcctggctggcgccgcaggatctgctggcgcactacctggcggccaaattcgatttgacgctgagcatccagtcggcgccgcagggcgggcgggcgatcttcaactatgccaccgccttgtttgcaccggctacgctggcgctgctgggggagtattatctgacgatcctcacgcagatcgtcaatcacggggagctgcgcgtcagccagttggcgctgatctcggagagtgaaatggcgcggcagcgcgccttccatcaatcctgtccgccggcctacgatttcgaacgcgccatccatcatgacttcatccgtcaggctgagcgcgatccgcagcgggtggcaatcgtcgatgaatggggcgagctgagctacggtgagctgtatcggcgggcgctgacgctgtcgttgcagctgcgtgagcacgcggacatgcgcgccgagaccatcgcagtgatggtggacaaagggcgggcgcaaatcattgcggtgctggcgatcctgatggccggcaaggcctatttgccgctggacggcgcctggccggaacgccgccgcctggatatcgtcgcgcagtcgcagacccgggtgattctgagcagccgggagtggggggccagtggcgaggccaggctgttgacgatcgatccgcaggggggcgtcatggagttgccgccggctccgccgggcgaggctgttttgccggcaccttccgcgctggcctatgtgatcttcacctccggctctaccggcgcgccgaaaggggtggcgatagaacatcgcggcgcggtgaacagcatcatcgatacgttgcaccagctggaactcggcgcggacgatcgcgggttggcgctcagcgcgttgagtttcgacatttcggtgttcgatattttcggcctgctgtcggtggggggcgccatagtgatgccgtccgaaaccgaacgctaccagcctgaggcctggcatcggctgttgatgacccagggcgtaaccttctggaactccgcgccttcagtgatgacgctgctggtggagcagttggagtccgccgcgtcgcaggcgcagtggccgcagctgcgcaatgtggtgctggtgggcgaggtgatctcccgccaactgccggcgcgtattcgccaatggcggccagggtgccggatcgtcagcgccgggggcgcgaccgagagctccatttggtcgatcctgtacgacatcccggaaacgccgatcctggcgcccagcgtgccttacggccaggcgatggcgcatcagcgcttttacgtgctggatcgccatcagcgcgtactgccgccttgcttgccgggagagcaatacatcggtggggccggcgtggcgcgcggctattaccgcaatccgtcgctgaccgaagagaagttcatctaccatccggaactgggggagcggctttatcgcaccggcgacgccggccgctatttgccggacggcaacctggagttcctcggccgtatggattttcaggtgaaaatcaacggctaccgcgttgagctgggagaggtcgagcaatgtgcgctggcgttcggcgcgatcaaatcctgctgcgcggtcgtgctgtcggaggcgcatcggcagcgcctggcgctgtattacgtcagcgaggcgccgctggatgaatcggcgctgctggcctttatgagcgggcaactgccgttgtacatgctgcctgcggcgctgatgcggctggacgctctgccatataactccagcggcaaactggatcgcaaggcgttgcctgcgccggcggcgagcgaaccgcaggcctatgtcgctcccgcgaacgagctggaacagcagctgtgcgcgctgtggcaggcggcgctgcagtgcgggcaggtcggcatgacggacgatttcttcctgctgggcggcacctcgatcaaggccatttccctgtgtgtcggcatgggggaactgatggccgcgccggtgccggtggtgcagctgttgcaaagccgcaccctgaaaaacctgctggccgccaacgaacgccgcctggtcttgccgcttaaccgttgggcagagggcgcgcccgtcgtatggatgatccacccggcgctggtgggggcggaagcgtttcacgctttcgctcagccgttgcaggggcgattcaactgttacggcgtcgacaaccataacctttaccatcaaccggccatcgactcgctcggcgatctggccgaacggtatctgaacgacatgatcgccgccggcctgctgcaaggcgccgggccggtgcgcattctcggttggtcgctggggggcatcatcgcgctggagattgccgcccggctggaggcgcgcggctgccgtaacgtgcaactgtatctgctggacagcttctaccggcaggccacggcggagttgcctttggagcagctgttgccggcgttgggcatcgagggcgaggcggcgacacgcgccatggccgcagggcaggcggagcgacggctgtctgaggggagtctgagccgcaggctgcaaaccacgaaggtgacgttgttcaaggcgatggagggtaacccgcagttgccggaagcggtcacggcgccgctgctggcggtggaagataatgggcttggcgccgcctgcgagcgactgcaggtcatcccgctggcttgtcatcaccacaacatcctgctgtgtgaggcggagatcgggcaagcgcttaacgagagtctctga

SEQ ID NO: 439951 - DNA, 1416 bp, Serratia marcescens
atgtcctatgcgttgattgataatgcatcactaacagcggttgaaagaacattaggtgatattgccataaggaacctagataccattaatggggatctagccgctttcgaaaatgttattcaagcgatacttttttacgatgagctaatttgtgtagacaactataaaaaagaacatcgtgataaacgcatcgtcaaattcgactttattcaatttttatcggaaagtgattttgagcttagtgcgcttgatcgtcttgcaaaggctgaagctcgccaaatcaacccagagattagaggggggcagtttgttgatgatgattttggacaactgatagaaatgcttaagttgaatatgatttgcacatgggatcttcggtctagtgtgtattacttgacaatgaaaatgcttggccagccagatactcctgaatacgaaaaatatagtgagttaagtgcatctattttcaacgaattagctgatgctgctgataccaaaggatattggtcaaccgatataaagctagtaagttcatctggacatgagtttactgagagtgaatttaagcgagagcgggaaaatgcttctaatggtaaaggagggatgactcgggcacttgaaatgtttatagcttcactgaattggatggcatataaatctatttattacagtattgttgccaagcatcttaaagcagattcttttatccatcctataagacatgcatatcagttacactggatgaaaaaaactggtgcattcggtcatgactatacagcgaagataattgaatcattatctgggaaaatcaatgctgccagatctgatatcgtcaatcacgggcgcatatcgacattttcattagatttacccatattttccgcatggctagcaaatgaagcaggaaatgttgatcaagtaataaaatcggctttagaactaaagtcacatgatcattttcgtacttgtagagaagtaattcgtgagattcatatagcattcgatgagtctggagtaggcgcagggaataaaaagcttacaaacctgttaaatgatttagagaaaatatcaggcgatgttaagcgaaactacagtgttccgtctaaccaaggcattcaaggaagtttcttaattaagtcgatcaattccctaacaggtttatttggtattccaagtataccagataaagagttttctcttagtactcctgaatttatgaagtctaaacaacataaggcgttttctgccgtgttcaaagatgtcactaacgagctcacaagtattgaacgtttagggggggttcgcgataaattagcttctaattttgttattgatagaaatttgccttatgttgagcagaaaacagaaaacccgcatttccgaaatataagtagtaattggaaaaaaccaatgtaa

SEQ ID NO: 439952 - DNA, 846 bp, Serratia marcescens
atgcgtattgaaaacgccgtagcgtcagaagttttagagagaatcctttcttcttatggttttaccatgcagaaggagcttgctgaaaaactggagatttccagcagcaatgtggggggatggcttttgagggggcaagttccgggcacagttattgtgaggtgtgcccttgatactggtgcggatgttacctggcttgtaactggaaagtttgcaaattcgaatattgaagttggcaaatccacacttcatggcaaggccctgtatgaaaaaatccaagctgcagggggaaagcctgtattgcggcggatgttagacgcgtacgggttccgaactcaaaaagagctcggagactttttggacatttccaccgcaacaatcagcacttgggtcaggcgtgaatatttccccggtgatgcggttgtggcgtgtgcgttagacactggtgtatcgctactatggctggccactgggcaaggtaatcctggtaatccagacgctgtgtcatatgagcctgttttcgtagctcttcgcagagttacgatcacgtctggaaggttaaccgaggaagggcaatggatagctgatccatcatttatccctgaaaatgaaaagtcgctacgctttgtagaacgaggaagtgatgcttggttaatagctttcgacaggaataccattggcaatggtaagtggttacttaatattgatggtgttcacgatatttactctgtatcccgtattccaggaaataagataaaggtgtcaggtgcctcgtcagagtttgaatgttttgcttctgatgttgaatgtattggtgaagtgattaaaacaatttcaagcaattaa

SEQ ID NO: 439953 - DNA, 354 bp, Serratia marcescens
atggcttttactgaaactacgcgtactgcgccgctgacaccgggccagcgggccgacggtttacagtacatcgccgaattgcgtcgggatgttttcaagtgcgacagcactgcggaaataaaccgatttttggcagacgtgcgcaatggaagcgatccacgacataaggacaacatccgggctctgagcgccattttctttttggctggtatcaagaaagagcgccacgggctgagtttcaatgaactgacgagtgaggagaaaaaagcattggttgatgcaatgaataaattccgcgcagtcgtgagtttattcccgaagcatttaagcatgccgagagaaataactttttaa

SEQ ID NO: 439954 - DNA, 273 bp, Serratia marcescens
atgagaaatatgcaaaaactgccaatcaccatcgggatcgatctcgccgccggcgacgatgtttccgttgtgcaccagaccgcctaccagttggaagaaatgctgaagcgcgcccgcatggatgagcgcaagaaccaggccgcggtgatgtccaccaagctggagaatctggccaactccatcatcgccaaggatttgagccttcgtgatgccgtggagctgctgcgccacgaagccgaattcatccagaaccaggcgatggagctgcactaa

SEQ ID NO: 439955 - DNA, 219 bp, Serratia marcescens
atggccgatgcaatggacatcgaacaggaacgccagcagctgatcctggacgctcaaatcgaacaggcgcgccggaaaccggccgccccttccgcctttctctgtgaagagtgcgacgcgcagatcccagaggcgcgccgccttgccgttcctggtacagcccgctgcgccaactgccaggaacttcacgaaacaaaatcacgccactaccgggggtag

SEQ ID NO: 439956 - DNA, 825 bp, Serratia marcescens
atgctgaattccgcgttgaaatgggtgggcggcaagcgccgcataatggacaccctgcgcaaacacctaccaaccgcaccaggccgccgcctggtggagccgtttgtgggttccgctaccgttttcctgaacaccgacttcgattcctacctgttggccgacatcaatggcgacctgattaacttccacaacgtggccaaagagtacccggaagaattaatcgcgcttggccagttgatgtttgccaatcacaagggccaggaaggatatttagcggtccgtgccagcttcaacctccgcatcgaagtcagcaatatcatgcgcgcggcgaagttcctctatctgaatcgccacggctacaacggcatgtgccgttacaaccgccgcggggaattcaatattccattcggcaaggtggacgcaccctatttcccagagaaagagatccgcgccttcgccgagaaagcgaaaaacgccgttttcctgtgctgtgacttcaccgaaagcattgaaatggcggcgcccggcgatgtcatttactgcgatccgccatacatgcctaagacgaagacaaccggctttaccgattaccacactgaaggctttggcgaactgcatcagtacaacctgatgtactcgctgcgtgccgccgccgcgcgcggttgtcacgttgtggcctcaaacagcgatgtcgccgaagcgctgcagtgttatggcgagtttgagatccaccacatcaccgccccgcgttccgtgagttgcaaaagtgatgggcgcgggcgtgtcggcgaaatcatcgcaacgatgggggccgccgcatgctga

SEQ ID NO: 439957 - DNA, 927 bp, Serratia marcescens
atgaaaggaattgacttgttcgcaggactcggcggctcatcaacgggcgcgcgtaaagcgggtgtggacatcgtttgggcggccaatcactggcaagccgctgttagcgcacacacgatgaaccaccctaacactgttcacgcatgccaagacttacaccaagctgattggggagaggtacgggatttggttccaaatctcgatctgttattagcctcaccgtgctgtcagggccatagcaaggcacgcgggaaagccaacggtaacccgcaacacgatgccagccgttcaacggcttgggcggttacggcggcggctgaagtgctcaagcctgagcaaatcatcgttgagaacgtaccggaattcctgcagtggttgctgttccctgactgggcgcatgcaatgcagggactgggctattcactggcatctcacatcgttgactgcgctgaccttggcgtacctcagaacaggaagcgcatgttcatcgtctgcacccgcagcaagaatccgcttgtgctgaagttgcccaaactgccccatgtctctgccgaatcattcattgatttcgattctggccgctggtcactggtcaataagccaggtcgtgcagcagcaacactcaacagggttgcaaatggacgcactcaatttggtgaccggttcctgatttcctactacggcaacacaaaatcaggccgctctctgcaacgaccaataggaactatcacgacccgggaccgctgggctttggttgatggtgactacatgcgtatcctgacaaaagatgaaaacatgctggccatgtctttccctagcgattacatcaagccgccatcgcacaagttggttgtgcatatggctggcaatgccgtgccgccggaggcgatgtatcaaataataagcgctctcaaggcgcaggcatga

SEQ ID NO: 439958 - DNA, 2475 bp, Serratia marcescens
atgaacaacagccgtcaaggccgccacgcccccactccgccgccgccctacacgggcagcggcgagcctgcttttgaatgggcttattcatggaacgcaccgcgaaaaggcgtaggctcgccattcgtcagtgcggaagaacagaaaaagcgggatctcattaatgccgatctcgccgccgcctttgaacacctgaacagccaacctggcctggtaaagcgacagattaactcccacttcttcaaacttgagcaatctcaggggatccagcgagcacatgcgtacttaacgcttaattttgttaagcgcgcattaccacgtttggaactggtcaataagcagtaccagatatcaaaaatgacggctgacaacgccaggtacatggcgcgatttaatcaccttgctgatatgtcccgcagtgatgttgaggcgcttgcagaggatatcgccgcatttatagcgcaggagttgggcctggtcgcagagcaatgttccggttgcagtgatttgaaggcaatgtggttgctttaccgccgcgcggggatcatcactcgcgactttcgccaactgccgccgctgtgggaaaaactgaataaacgctttttcagcgaagaagatgccggccctgccgtatcccggatgttgtcgcctcaatggtggctcaaccgtctgcgccgcacctctgcagaatggcgcgagcacttgaatattgcgctgtccaacgtcagcaaaaaagccaacctatacgccagcaaaacggcgatcaccgagtggcgcgagcagaagcgacgcacccgcgagtttttaaaggggatggagctcgaagacgaagctggcaaccgtataagcctgatcgataaatatgatggcagcgttgcgaatcccgcgatccgccgcagtgaattgatggtgcgcatccgcggcttcgagaatatttgtaacgatctgggctacgttggcgagttcttcaccataaccgccccgtcaaaattccatgccaccaacaaacacggtcatcgtaatcggaaatggaacggcgccagcccagccgagacgcaatgctatctgaggtcggtgtggtcaaagattcgcgcgaaactccaccgagaagatttacgcattttcgggatcagggttgccgagcctcaccacgatggcacgccacactggcacatgctgatttttatgcagcctgaagatgttggccaggtgcgtgaaatcatgcgcgattacgccacgcaggaagatgcacgggaattgagttctgccaaggcccgcaaggcacgcttccatgctgaagtgatcgatcctgaacaaggcagcgccaccggctacgttgcgaagtacatcagcaaaaacatcgacggctatcagttggatggagaactggacgacgaaagcgggaagccgctcaaggaaagcgctgccgcagtatctgcttgggccgcgcgctggcgtattcgtcagtttcaattcattggtggcgctccagtcaccgtttaccgtgagttgcgcaggatggccgaccatgaggccgcgattggcctcagcgtagagtttgccgcagtccacgacgccgcggacgtcggcaattgggcggaatatatcaacgcccagggcgggccttttgttaagcgtgacgatcttgttgtccgtacctattacgaggccgcagaagaaaccaacggatacggcgaagacgtgatccgcgtgcgtggtgttttctctccgccagttggccaagacgtgccaatcatcacccgggtaacccaatggaaaattgtgccgaagaaagcgccggttttgggtgttgaccttcagggcgcacctgcgccctctcggagttctgtcaataactgtacgggggatcctggtgggagtatggccccgccggatataggcgaagccgactatgccagctgtgatatcgattttggtgagttatctgccaaggaacggcggaaggtactggcaagaatcagggacgaaaattcaaaaacaagaataagcagaccacgggccgcagatgctccagccggcgcagcttgcgctatggagaaaatccggggccgagtagaagaaattgccggcattcagatcagcgattctgagtgccaactgttagccaaaggtatgacgatgaaaattgccggtaatcactactacggcaacagccgcggtgatctcttcacggcacgcgcgccggtacgggcgggtgcactaatgcagcgtttcaataggttgcgccaaaaattgaccgggcaaaccggagatcgagatctgctgctgaagcagatggaaaaagaaggcaataagcagcgagaaaaaatagcgcaggagctgagtgccgccggcaaacaggcaccagccattgaagaaattgaccgtcttctgcttggcggaacggtgaagatcggcgcgttttacttttgcgcgggggctgatggtcggctgtatggccgtcgtaggaaataa

SEQ ID NO: 439959 - DNA, 183 bp, Serratia marcescens
atggaatcacttgaaaaacaaaaacaaaccttaacgcgtgttcgattcatagctgagctcgccctcatagctccgcgacacgcatctgatttgaagctggctctggggatgatcatcgacctgtctagtgaggtattaccggacaaagactacgacgggattttttataacgctgacagataa

SEQ ID NO: 439960 - DNA, 1035 bp, Serratia marcescens
atgattcctcttactagagtctttgacattcacaaaagcattggtggattagagatttcatatgaaggggaaagtttgaggaaaaacaaccaagccctatggatcgtaagtgttaacgtagaaaattcaggtaacgctgaaataaataaaaatagttacgatggcgacgcacccttaggattgattattgatggcggtaagatagttgataccccaactgtgacatccacagatagctatataagagaaaatattaagtatagtgctacagataaagaaataactttctctccaataatcattgatgctaatagcggattcactaccaatctactggtgttgggctttgaaaataaaaaaccaagcgttagcattaaaggtaaaatagctggcatcaaagaacttcacctcagaaaacttgatgatgaaaacgtaaggaacactgtgtggtatagggaaatttttgcgcccgggatttggtgggtacaattatccaggatggttttatacgcgatctcttttattttatcattgataatactcgcatttatgattgcgtacatgggttctataagagataacataaagaaaagaaaagacaaatcaaaacgacaagagaaaattaacaaatacaagcaagatgatgctataagtaaagaaagacgagtaatatcagaaatatatattgctaaaggaaacattggcctacttagcgcttataactcgatgaaaactgcagtctctcgtgcccaaacgtatgaaaagcttgaaggcaagatcgataacaatgatttaagacagatattaaaaggcgcacacccattagattggagagaaaaaaatcactattcagaattgatagaaagaaatgtgatatcattcggtgatgatgacataaaacctttatttaatgaaaacacattagacgaatttacaagtctcattgaatacttagagttaaacattgaaaaagaaaactctaattatggcatattggaagaacatttaatcagagagtacaaagaaaccatgtga

SEQ ID NO: 439961 - DNA, 1719 bp, Serratia marcescens
atgttcctgtactttcaggggttacgcatatcccgcattgctgaaatgctgggagagaaggctgcaacagtacacagctggaagaaacgcgacaagtgggggagcattggcccgcttgagcaaatgcaacttaccacaacagcgcgctattgccagctggtgatgaaggagcacaaagaagggaaagacttcaaggaaatcgacctgatcgcccgccagggggagcggcttgccaggatcgggaaattcaatagcggtggcaatgaagccgacttaaacccgaacgtgggcaaccgcaacagcggcccgcgcaaggcgcctgagaagaatgttttcagcgacgaacagacggaaaaactgatcgaaattttccatgattccctgttcaaatatcaacgcaactggtttgaagccggcgccaaacaccgcattcgcaacctgatgaagtcccgtcagatcggcgcgactttctactttgcgcgcgaagccctgatcgatgccatcactacaggccgaaaccaaatcttcctgtcagcgagtaaggcgcaggcgcacgttttcaagcagtacatcatcgagtttgcccgtgaagtcgatgttgagctgaagggcgacccgatgaccctcggcaacggcgcgtgtctctacttcctcggcacaaatgcccgcaccgcgcagagctatcacggcaacctgtacctggatgagtatttttggatccctcgcttccaagagctgcgcaaagttgcctccggcatggcgctgcacaaaaaatggcgccagacgtacttttcaacaccgtcgagccttacccatagcgcctacccattctggtccggttccctgtacaacaaaggccgcgccaaggctgatcgggttgatatcgatctcacccatgccaacctggcgcgcggcgttctctgcccggatggccaatatcgtcaaatcatcaccgttgaagatgcagttaacggcgggtgcaacctgtttgacctggatcagctgcggcttgaatacggcccggaggattatcagaacctgctgatgtgtgagtttatcgacgatatggcgtcggtgttcccactcactgaaatgcaggggtgcatggtcgatagctgggagcagtgggatgacttcgaagcgctggccatcaggcccttcggttatcggccggtgtggatcggttatgacccggccaaaggctctgcgtcaggtgacagtgccggttgcgtggttgtggcgccgccgatggtgcctggtgggaaattccgcattttggagcgccaccagtggcgcggcatggattttgccgcccaggcgaaaagcatcaagcttttgaccgagtgctacaacgtccaatacatcggcatcgactccactggcgttggccacggcgtctatcagcttgtgaagcagttcttccccgcggtgcgggagttcgtctatcgcccggaggtgaaaaacgccctggtgctgaaagccaaagacatcatcacacaccggcgcctggagtatgacgccggacacaccgacatcacccaatcctttatggccatccgcaaggcgatgaccgccagcggtagccggccaacgtatgaagccagccgcagcgaagaagccagccatgccgatctggcgtgggcaactatgcatgcactgttcaatgaaccgctcgaaggcgtcacggcgggcaacagcaacattgtggagattttttaa

SEQ ID NO: 439962 - DNA, 834 bp, Serratia marcescens
atgacacttaaatcaaagcgttttcgtattgccgtagagggtgcgacaaccgacggccgcaacattagccgcgaatggctgacgcagatggccaagaactacaacccatccgtatatggcgcgcgggtaaatctggaacacatcaagggatatcaccccgatagctccttccgtcgtttcggtgatgtaaccggcctgacagcagaggaaattaccgaaggtccactggccgggaagatggcgctttatggcgacatcgcaccaaccgcggacctggtcgaaatggttaagcaagcgcaaaaggtttacacctcgatcgaggtaaaccccaaatttgccgataccggcgaagcctacctgatcggcctggccgtaaccgacgatccggccagtctggggaccgaatacctcgccttcagtgcgtccgcatccgcaaacccactggctaaccgcaagcagcataaagacaacctctttactgcagcagaagaagccttgatcgaatttgtggagcaggaagaccaaaagcccggcctgctatcccgtattacagcgatgttcgccaagcgtaacgccaatgacgacgcccgcttttctgacgtaaatcaggctgtggaactggtcgccggcgaagtacagagcctcggtgatagcgtcgccaagctcaacaccaatgctggaaaagtgccggcactggaagcccagatcaccgcactgagtaagcaacttaacgacctgcaggccaacctgagcaagcaggaccgcaatccgaagtttcgcccgttaacacctggcggcggcggtgaaagcaacggagaaaaaaccgactgctaa

SEQ ID NO: 439963 - DNA, 1065 bp, Serratia marcescens
atgcgcaatgaaacgcgatttaaatttaacgcctacctgaccaccctgggtgagttgaacggtgtagccgtcgaattcagcactaaatttgcggtagagccttctatcgctcaaaagctggaaaacaaaatccaggaaagcgccgcattcctgcagttgatcaatattgtccaggtgccagagcaatcaggccaacgtttggggctgggtgtgggcacaacgatcgctagcaccactgacacctcaaccaaagagcgtgaaaccactgatccaagcggcctggactccattgagtacaagtgcgaacaaaccaacttcgacacttcgatcaattacgggaaattggacctgtgggccaagttccaggatttccagaaacgcatccgtgacgccatcgtgttacgccaggcactagaccgcatcatgatcggatttaacggcgtgaagcgtgaaaagacgtcgaaccgcaccgccaacccattgctgcaggacattaatattggctggctgcagaaataccgcaccgacgccccggcacgcgtgatggataaaatcgtggatgacgaaggcgctgtagtttcgcctgtgatccgcgtgggtgagaacggcgacttcgccaatctggatgccgttgtgatggacgccgtgaacaacctgatcgatccgtggttccaggatgatacggatctggtggtgatttgcggccgcggcctgctggcggataaatacttcccgctggtgaaccagtcgcagccaaacaccgaagcgctagccgctgatctgattatcagccagaaacgcatgggcggcctgcaggctgttcgcgcacccttcttcccggccaacgccatgctgattacccgtctggataacctgtccatctactggcaggaagacacccgccgccggctgattatcgacaacccaaaacgcgaccgcatcgaaaacttcgagtcggtcaacgaggcttatgtggttgaagattacggctgtggttgcctgatcgaaaatatcaagctcggtaagtttgcggcgccagcgccggaagcaccggcgggcgaataa

SEQ ID NO: 439964 - DNA, 663 bp, Serratia marcescens
atggccctgagcccagcgcagcgccatatggtctatgtgcaagcaaaagaggccgcccgccagggcggcgctctaagccgccatgccaatggttatgaaatgatgctcctgaaaattgaagaggacagccgccgactgaagcgggtgcaatctcaggagaaaaaagccgaagttaagcgcgaaattctcccccattactccccgtgggtggccggagtgctgcagaccggcatgggagcgcaagatgacgtaatcatgcatgtgatggtctggcgaatcgacgctggtgactacaacggcgccatcgacatcgcggagtacgcactcaagcatggcctggtcatgccaagccggtatgcacgccaaaccgcctgcgcagtagctgaagagatcgcggacagcgccctgaaagcctacgacgccaaacaaccggtaaatctctccatcctaacgcgcctcacgagcctgatcgaagatcgcgacatgccggacgaagtgcgcgccaagctgcacaaagtcatgggatacgggttacgcgataacgaacaacctgagttagcgcttaatcagttaaaccgtgccttccagctacatgagcgggttggtgtgaaaaaagacattgaacgactcgaacgcgagttgaagaaggccgagaacggctaa

SEQ ID NO: 439965 - DNA, 465 bp, Serratia marcescens
atgaaatttgtggcaccaggccagtccggcgaggaaaagcaggtaatcaagaacacgcaattttggccagatgtcgatctgtccgatttgcagcagtctatcaggaccgatggaacaatcaccccgcaacgcctgcgtcacgcggcactgaatgccattgcggaagtgaatggcgaattgaccctgtggcgacaggcgcagcagaccgccggctttaccgctctggcaaatgtgccggcagaagagttggatggcgaaagcgttttgcttcagcactacagccgcgcagtgtactgcatcacaaaagccaatttaaacgaacggtatcgcgattttgatgccaccgggactggcggaaagcgagccgacgaaatggacgaatccattgatgaactctggcgggatgctcgctgggcaatgcggctgatccagggcgaaaaacacatgactgtagagctgatctga

SEQ ID NO: 439966 - DNA, 204 bp, Serratia marcescens
atgaaagtgatagcccaccaaaacgacactgttgacgagctgtgctggcgccactatggccgcactgcggggctatccgaagtaatcttattggccaatccaggcctggcagaaatcgggccatttattccgcacggcacgccggtagaaatgccggacattgcgccgacacccacacagcaaattattcaactttgggattga

SEQ ID NO: 439967 - DNA, 369 bp, Serratia marcescens
atgggcgaaccagtaacaagcggcaccactttattcgcatttggcgggatcacacttctctccgtcttgtctggcgatgccgcgccaattgtcctcggcgcctttggtggcgcctcattgtttgtgttggcgtcgcaggagttaacgctgaagcgacgcggcgcgctatggataagcagctttattgccggttgcctgttcgccccgatagcggccgcgctgctgaagaaagccaccgggctggatgttgaggtcaagctgggcgccggcgcgtttgtcgccgcaggtgtagccatcaaaatcttattggttgccttgcagaagctggacggggatagcccgattttccgcatattccgggggaaataa

SEQ ID NO: 439968 - DNA, 498 bp, Serratia marcescens
atggcccgcatcgtcaccactcctaacattaacgcctatctggacacgctacgattcagtgagattggcgccacgcttttggccaggtcggacgacggctacaacgtgatcgtgaccggcatcgacggtaagacagaaaccttttccagctaccgagatcacccgttcgctggcggccgtcccggaaaagtgtttaacagtcgcgggcagcacagcacggcatcaggcggctaccagtttttgatcaaggactggggccattaccgcaccgcactgaagctgccagactttgggccggtatcacaggataagtgggccatccaactaatccgcgagcgcggcgctctggctgacatcaacgctggccggatagagtcagcgttgaaaaagtgccgcaatatctgggcgagcctgccgggtgccggatatggccagcccgagcacaagcttgaaaccctgctgaaaaaatacgtcagttatggcggggcgctggcatga

SEQ ID NO: 439969 - DNA, 339 bp, Serratia marcescens
atgaccgccgtcattccacgcagttggttgatcgtggccgccatcgtcctggcgctcgccgcggcgttagggtggaaaacttggcgattgggcacctatgaaaaagccgtcagcaatcagcaagtaaccatcaaggcgcagggaaaaaccatcgaagggatggcggcacagttatcagctaaaaatgccgagatgataaccctgggcttgatagccagcagtaacaaccgggcgcaggccgagttgcgtcagcagatgaccaacacggccgcccttctgtcacaacgtgaaaatctgattgcggggttgtatcgtgaaaatgcagagcttaaagcctag

SEQ ID NO: 439970 - DNA, 432 bp, Serratia marcescens
atgaacaagccggaatcactgagaaaagccctctctgacgggatcgaatatatggggaaaaacccggacaaactgcatatctttgttgatgagggggctgttgtttccagcctggcgccaaccatttcattcgaataccagtacaccctcaacctggtgataaccgacttttcagcagaccaaaacctgctgaacgcagtgattttgtattggcttcgccgcaaccagccggacatcatggcgaacccagacagcagagataagggcttcacgtttgaggtggatattctgaataacaccacctgtgacatcagcataaacctgaagctaactgagcgcgtgatcgtgaaagaggcaggaggccaaatggttgtagaggcagttcctgaaccggaaccaccttacgccgatcagtgggcgcccaatgagtga

SEQ ID NO: 439971 - DNA, 447 bp, Serratia marcescens
atgagtgattttattcagattgaagactggctggccgccctcgcctcacagctaaccccagcggcgaggaaaaagttaactcgccagtgggctaatgaattgcgccgccgccagagactgcagatcagccagcagcgcaacccggacggaactccctacgccgagcgaaaaccgcaaggccgcagcaaaaaggggcggatacgcaggaaaatgtttagcaagctgcagaccactcgctttatgaaaacagcaactacggcagacgaagccgccgtttactttgccggcagcgttatgcgcattgcgcgcgtgcaccattacggcttgcgtggcaaagtaagtaagcgcggtccaaccgtgaaatacgacgctcgccaattatttgggctgaatgatccagccataaccgccgtcggcgatatcctgctcgagcacttcagtaaataa

SEQ ID NO: 439972 - DNA, 840 bp, Serratia marcescens
atgaaatttgaaaatgataaaaagaaagagcatcacattggaaatgaatgtaacacaaaaaaagacactattatcactgtcaatgttgatggtgtcaaaaaaaccattttaaaaataaaattaaagaaaaatggtgatgtcatgctgtttattaagcatgctgagtttttccgcgatgcggggggcgagccttcgttttcaaagaaaatatcacagcaaagatattcaatacatcggagtatggaaagcaaagagaaaataaacttcataaaacaaacgctagaagtaaatggcgatggaattataaatactcatttggtaacgcctgccatcaagaacaactctgggtttattcaaatatttagtcgcagaatacctaacctatcccctgagcattacagcgttgataataataatggtaagtttattgaagagtcgcttggggcgttcaaaagtaataaaatgactctcatgttttctattttcgttggcgcttcggcgttgacagttcctgattcactcaataatgttaatgttcgtagtttcattagaggggagttccgttttctgatcgtctggacttatattttagtcgcctctcactcatctggtacgctaatgcattttggctcagttaaaggtagtgatgggaaagccattgggcaacagcatggcgtcaatgctaatggcgcggtagcaattgccattaaaggattttatcacctggtatatgagtatattcagactcttcaccgttctgaaggtattcctattgaagattttctagaggtttttaataagactggctttgtcaagggtgatggaagcatagcttcatag

SEQ ID NO: 439973 - DNA, 594 bp, Serratia marcescens
atgaatacacaactttctgaactcctgcgcctgctgacaaatctgatccgaatcggaaccatctccgaggtcgatacagagaacggcctatgccgtgtgcaaacgggcggacttgaaaccactccgctcaaatggttgaccatgcgcgcaggcagcgcacgcacatggtgggcgccgtcaatcggggagcaggtgctgatcttgagcatggcgggcgagttgaccaccgcgtttgttctgccggccattttttcggatgcccaccccgccccctctaattctgtggccgccttggttgcggagtttcccgacggcgcaaggttcagttatgaccccgaggccagcgccctgaccgtcgagggtgtgaagacggcgctatttaaggcggctacagggatcagattggaaacaccaagggtcacctgcactcaactgctggaaacagcacaactatcagtgactgagggcggaacgatgaagggagacattacccacaccgccggccacttcacatctaatggcgttgtcgttgatgagcatgcgcacagtggggtgcagacaggcggcggcacatcgggagggccggtgaaatga

SEQ ID NO: 439974 - DNA, 351 bp, Serratia marcescens
atgatgtatcagggcatgaacaccaacagcggccgcgccgtcgaagatatcgatcacattcgtcaatcaatcagcaaaattttgctgactccaatcggcagcaggctcacccggcgcccgttcggctcgttgatgtcagagctgatcgatcagcctcaaaacgacacaaccagattgcagctgatggctgcagcatacagtgctatcaaccgctgggaaccgcgcgtatcactgacggccgtcactgtgaccacgcagattgacggccaaatgatagtggacgtctccggcagcaggaacgacaccacggcgagcatcaatatttcaattccttacgggagctcatcatga

SEQ ID NO: 439975 - DNA, 909 bp, Serratia marcescens
atgagtgtgatcgacctttcgcaactgccgccaccacaggtggttgaaaccctaagctttgaagacctgcttgagggcagaaaggcgcgcttgcttgagctctatcctgacgatcagcgcgaggcaatagcgcgcactctggagctggaatccgagccgatcgtgatgctgctgcaggaaaatgcctatagggaaatgctgttgcgccagcgcatcaacgaggctgcacaggccgtcatggtagcgtatgccatcggtagcgacctcgaccagcttggcgccaacaacaacacaccgcgactggtgatcgcccaagccgacagcgaagccatcccgcctgttgaggcggttatggaatcagatgcagattttcgccagcgtatcccggcagcgtttgagggaatgagcgtcgccggaccaaccggcgcctatgagttccacgcactaagcgccgatggcaaagttgccgatgcctcggcgatcagcccggcgccggcgctggtcactgtcacgattctttcccgcgacggggatggaacggcctcccccgaattgctggcgaaagttgacgctgcacttaacgatcaggcagtacggcccgtagctgatcgcctcacggttcaatctgccagcattatcaactatgggattgacgccgtgctttatgtctatccggggccagcgcaagaaccaatccttgccgacgcgcaaaagcgcctgaatgcctatatcaacgagcagcggcgccttgggcgagacatccgcttaacagcaatttatgcagcactccacactcagggtgtgcagcgtgttgagctgcgcaacccgccaactgatgtagtgttggacaaaacccaggcagcaaactgcacaagcacaaaagtcgcaatcggcggatcggatgaatag

SEQ ID NO: 439976 - DNA, 609 bp, Serratia marcescens
atgaatagcttgctcccaccaggatcctcaccgcttgagcgccgcgcggcggaggcatgcactgcagttagtgatctaaaagtgcccctgcgcgacctatggaatccggacaaatgccagattgtgtttctgccgtacctggcctgggctttctcggtcgataggtgggatgaaaagtggacagaggaagagaagcgaagggctgttaaagacgcattttacatccatcgccgcaaagggacggttgcggcaattaagcgggtgatcgaaaacatgggatacaccatgacaatcgcggaatggtgggaggtggctgacccggctggcacgtttcgtttaacgattgatgttctcgacgttgggataaccgaagaaattgtgaacgagctggaacgtttaattggagatgcaaaacctgtcagtcgccatatcagcggaataaacctgataacagcatccaggggacaggtttacacggggacaacctgctatttgggggagattgtgacgatttacccagaaagcggcccgcctgactttgaattgaaatacgacggacgcacacattacgacggacgcaacgtttacaccgggatcacacatgactaa

SEQ ID NO: 439977 - DNA, 2106 bp, Serratia marcescens
atgactaatttaaacgagcgctctcagtgggagccgacaattaaacaaattgacgacgccgaccgggtaaagggtgggccgtcgggtgcggcaaatatccaggccgggcaattggcggcacgcaccaactttttaaaaaacctgttcgataccctgctgggcatgtcatcactgggagaaggcccctataaagacgtgccagcagcccaggccgatatcaacagtgggaagttgaagccgggcgaagtgttcagtgtgcggtcaaccgatcctgatgtatgggtcgaagaatatagaaacagtaacggcgttgccacgcccaccgggaaagtgctgaaaagtggcgaagccatcgacgcgttggtcagcatcatccgcaactcagaaacagatgatgacattattctaaaaatcaaagacaaatacaattttgtttttggctacctgaccgagacattatttaaaacgccgggatttgaaatcggaaccgaaatactcaacgcatgtggtataaaaatcacacggaatgaaaacggaaaatttcagttacgggatgctaataactttattcttttcgagtttggcgagggtggtctgcgtttacccaatatttcattctcgttgagcaatgacggacgattcagggttaaagaccaatacggctttgtgttctttgagctggacgcaaaggggaaatatcgtttcccgcagaaagacgaagaaaagaagacgagcacggcagatatcatccccatgctgaacagcaaaaacctgctggcgtccattaatgctaacgccccatgcaatatcgccgtacagcggccgactgcggatatcaatctgatcgtcgttctgggacagtcattcagcactggcacacgttcgcaaattaccttgcccgccgagtttgactatctgggcaatctgtcgctgggtgcatcgccacgcggcggcgatctcagcggaacggcggaaacctatgaacctaccggcggtaacagcttcgagcctctgcgcgaagtctcacaagccgttgacggcgtaattaacgcaaccgggccatacggcgaaaccatctcgtcgggcctgttgaacaccctgaaaatgctgcataacgatgaccaatggacggtaaacgatgacggcaaacagtttgccatcgtctgcgccggcgtcggcggtaaaaatctggcgcagctgtcgaaaggtgcgacgccaaacctgtacggccgttttttaacggctcttcagggggcgaaagccgcggcggacgcgatgggaaaaacaatcgtctgtgccggtgtcgtgtttatgcagggggagaatagcggaggcaccgcctatgacgtgtattacgggcagctggagaaataccgcaatgacgtcattggcgacattttcgagacattcggtccgctccagcaattaccgccgagctgggctaattaccagatgggcggcgcgtatgcgactgacgggcaaaatctggcgatcggccgggtacatgtcgactttgtggaaaaaacacccggtgcgctgtttggcgggcccgtgttcccgtacccagacccaggcgatcacatgtatgccaactcataccgctggttcggctgccagatgggaaaggtgatttatcgcgggttccgctataagccggtggtgttccgcatgaccagcgcgatttataacggcaaccgcatgctgatcagcattccgtgccctgtgccgccgctgcgtttcggtatgccgtatgaccaatcggaagcccaggactatcacgacaagggctttctgattaatgacgcggttggggagttggtcggcgacgatctggccgtctcaatcgttgccgatacggtcattcaaatcaccgcccgccgggatttcgtcggcccggtgcgcgtgactctgggcgacaaaaagcaccacaacggcaaccacagcattattgacagcgatccacagctggcgcgctattcgtgggtgtacggccaggaggggcaacccgccggcgaaaacatccccgcactcattaacaaaccgtacccgctctacaactgggcggcatcatattcactgatggcagtaaaagaggacgcactatga

SEQ ID NO: 439978 - DNA, 786 bp, Serratia marcescens
atgaacggcattgaaacactgatcagcggatttgattttcaaaactcgcacgcctactttgatttgccggtgccgcgcggctgtcggggattttatctgtttggcgacatgctgggtaaaaacctagtcgatggcggcgtacagccggcgatcgtaggctctccggtgcgcgcaacggcatacagcacccggtttacggccaatgactttatcgacaccctgctcgccgaaacgcccgatgcgtcgtacttcgccatcggcaaaatgtacgcaaacccggacggcctggaatggcgatctgagtgggtcggcaactacgccgccaccatcggaaatgtcaatttacccggcagcggattggtgtttgaggccaaaaccgcgcaggcgcagatggtcggcggctcgttctccggcgtgcccggtacatcgagcaaccctaacgtcgcggtactgccgaaagaagccggattgccaaccaatatcgagacaggcgtatggcgcgtgatgtacggttccgtcagcgcgacgggcgataaaaagcgcatcatcagggacatgacgcgcaatgtcaccgctgaaaaagatatcgtggcgggcaatgtgcgcgacatgcgcaatacgaccacgcaccgtatcggccgcggtggcgatgattctaacgccaagatggacaccgagctgatgatggtggtggtgttcgacagcgtgctgactgcagaagaacagcaacagcagctgaattacggcctgctctgggcctccaagtttggcctggccctgaaatag

SEQ ID NO: 439979 - DNA, 1092 bp, Serratia marcescens
atggcaaagtattacagcatcatcacaaaccgtggggcagagcttatcgcgaacgccatcgcaacaggtgaaaaggtcaacatcgccgcgatggctgtcggtgatggacggggtgaactccctatcccgtcccctgaacaaactgaactgttgggcgaacaatatcgctcgctgttaaacagcctgaagatttaccccggcggcaacaacaccatcatggccgagatcgtgatcccggccgaggttggcggcttctgggtacgcgagtcggccctgttcaccgccgacggcgagatgctggccgtggggaacgtgccggaaacgtacaagccggagctggccgagggctccggccgtgtgcaaacgatacgcatggtgctcaccgtctccagcaccgagcacatcgaactcctgatcgatccgtcggtcgttgtggcaacggttcaatacgtcgatgaagccgtacaagccgcattgaatgctgcggccgatgcgctggcggaagccagggagaaagtcaccttcgatgaaatgcaccctatcggtaccgtgagattatttgccagtgtctttgatcccaacgaaaagtggccggggacgcattggatttataccggcgaaaataagtctatccgaatcgctaaagaagacggctccgatgtgatgggaacgggcggcgcagatacggcaacgttgagtgtcgagaatatgccgaaacacaaccacggcgtcagcggccaggtgggcgagtttgaccacggcagcaaatggacatcggagtttgaccacggtacgaaatggacgtctgaaagcggcgatcatgcgcaccagggcggcatggccgcccccggcacagcgtgggatggcgattatatcgtcggatcggacaatgacaaccaccgtacccggaactggacaagccagagcggcaaccatagtcacactgttgatattggccagcacaatcacacggtagacattggtaagcatgaccacagcatcgaactgatgtctgccgcggtcggcggcggccaggcattcggcattgttgaaagtcatatcaagctaatgtgttggtatcgtgccgcgtaa

SEQ ID NO: 439980 - DNA, 1176 bp, Serratia marcescens
atggctgaagattatcatcatggcgttcgtgtcctcgaaattaacgagggcacacgcacaatcacaaccgtaagcaccgccattgtggggatggtttgcaccgccgacgatgccgatgctgcggccttcccgctcaacacccccgtattgctgaccgacgtactggccgccagcggcaaggccggcgaaaccggcaccctcgcccgatcgctggacgccattgccgatcaggcaaaacctgtcaccgttgttgtccgtgtcgaacagggtgataccgaggcggaaactacaaccaatatcatcggtggcgtcgacgcaaccaccggcaagaaaaccggcatgaaagccttgctggctgcgcaaagtctgttaggtgtgaagccgcgcattctgggtgtgcctggtcacgatagtaaggccgtcgccactgaattgctgtcagtagcacagagcttgcgcgcattcgcctatctgagtgcctatggctgcaagacggtttccgaagctatcgcctatcgcgaaaacttcagccagcgcgaggccatgctgatctggccagactttctgagttgggacactgtgaccaatgcagacgcgacggccttcgcaaccgcccgcgcattggggcttcgcgccaaaattgaccagcagaccggttggcacaaaacgctgtcaaacgtcggcgttaatggcgtgaccggcatcagtgcagatgttttttgggatctgcaagacagcgccaccgatgccaacctgctgaacaagaacgatgtcaccacgctgatccgcaaggatggctataagttctggggctcccgcacctgttccgatgatccattgttccaatttgaaaactacacccgcactgcgcaggtgttggcggacacaatggcagaggcgcacatgtgggccgttgacatgccgctgcacccgtcactggcaaaagatgtcctggagggcatcaaggctaaattccgcgaactgaaaactgccggctacatcattgacggcaacgcctggatcgatgatgcagtgaacgacaaggacacgctgaaagccgggaagttggtcattgactacgactatacgccggtcccgccgctggaaaatttgctgttacgccagcgcatcactgatcagtacctggtcaatttcacccagaacgtgaacagctaa

SEQ ID NO: 439981 - DNA, 516 bp, Serratia marcescens
atggcattaccacgcaaattgaaatatctgaacctcttcaatgaggggaacaactggcaggggatcgttgagtccctgacgctgccaaagctgacgcgcaaacttgagaactaccgcggcggcggcatgagcggtagcgccaaagtcgatctggggttggacgacgacgcgcttgatgttgaatggacaattggcggcatcgaagccctgccgatcaggcaaatgggcgtcgcaaaacttgatggcgtcatgctgcgttataccggctcaattcagcgcgacgacactggcgaagtgcaggcggtcgaggcggtgatccgcggccgccataaagagctggattttggcgaacacaaacagggtgaaaactcgaccaccaaaatctctaccgcggtgacctacttcaagttgaccatagccggcgaagaaatttgcgagatcgacacggtgaacatgatcgaaagctttggcggcgtcgaccgcctggctgagcaccgccaggccatcggcctgtaa

SEQ ID NO: 439982 - DNA, 291 bp, Serratia marcescens
atgaccgaaccgaccaaagtgccactggacagcccaattcagcgcggcaagaccgaaatcaccgagatcactctaactaagccgcagtctggcgcgctgcgcggtgtgaagctggccgacctgctggaaatggattattacgctgtggcaaccgtattgcctcgcgtttcctcgccgtcactgacgcaacaggaaatcagtgaaatggatccagctgactttacgcagctggccggcggcatcgtcagttttttgttgccgaaatcggcactggaatcccggccggtttaa

SEQ ID NO: 439983 - DNA, 2544 bp, Serratia marcescens
atgagtgaccgcaatctaagactgcaggttatcctgaacgcggtggacaaaatcacccgcccctttaagactatgcaggccagcaataaagcgctggccgctgccgtcaaaaactcccgtgatgaactgaagcgactgagcgccgccggcgaccaggtgaacaccttcaattcgctgcaggcatccattaagaaaacagccgacgaactggccggcgccagactgaaagcccagatgatgacgcgcgaaatgggcgcgcttgaaaaccccaccaaaaagcagaccaaagcattagaggatcagtggcgcgcggtagataggctggagcaacggcaaaagaatgaagtatcgcaaatgggccgagtgcgctcagagctttaccgtatggggttatcagccaacgatggagccggcgccacaaataggatcgccagcgaaaccgcacgctataaccggctactgcaagagcaggagcgccagctaaggcgcgctggcgagcaacagcgcagaatgaacgctgctaaagcccaatatgacaaaaccagggagctgagaaacaacatcgcggggactggtgcaacaaccgtagcatcaggtgtagcgatgggcgcccctgttttagcggcagtgaaaagctatagtgccatcgaagatgcaatgaaaggcgtagccaagcaggtcaaccctcttttggatgacaagggggagcgtacagctaaatattatgaaatgcaaaaggctatcaaagccgcggctgaacaattacctatggaaaatggggccgtggattttgcatcactggtagagggtggcgcaaggatgggtgtcgcaagcgacaaagatccttggtcaaaacaaaaagccgatctgcttggattcgcaatgacggcagcaaaagcggctaaggccttcgagttacccgccgatcagcttgcagacgaccttgggaaaatagcattcctataccatgtgccaactcagcgaatcgaggagcttggcgacgccctgaactatttggatgacaacgcacaatcaaaaggcgctgacatcatcaacgttctgcaacgcatgggtgacgtggcggacaaactggattacaaacaagcggcagcactagcatcaaccttcctttcgctgggtacacaacccgaagtagctgcatcggccagtaaggcaatggtccgcgaattgggtatcgcgtcaatgcagggaaagagatttatccaggggatggggctactcgggcttaatgcaaaagacttggaaaaagggatagctacaaacgcaataggcacaatcaaggacgttttatcccgcattaagcggttacctgattcgcagcacctaagcgccatgaccatgcttttcgggaaagaatttggagatgacgctgccaagctggcaaataacattggcgaattggatcgccaattggcattagtgcaaggcgggcaggccaaaggctccatgcaaagagaatcaaatatcgataaagattccctgtcgtctcaatacgccctgatcaaaactggccttagcaatatgtttagtgaccttggacaacaactgcgcgcgccattaatggacattatcaactggttcaaaagtgccataggatggactcgccgcctggttgaatcgcatccaaaattggcggctgggttcatgaaaacggcggctgcagttactgcaatcacagtggcatttggcgggctaatgttgggagttgctgcggtgttagggccatttgcgatactgcgattttctttatccgtgctgggcattaaagggccatcggcgatgatgctactctccaaatccatcagaggggttggctccgcaattatctggatgggccgcatgatgttagcaaaccctatccttgctgtggctgcagccatcgccgccgcagcgctctatatctggatgaattgggacaccctgggtccgaaaataaaaagactttgggacagcatcagtgcatataccagtgagaaatggcaggccatcaaggattacatttcgggcgtttggaccagcataagcgccaaagccagcaagacttgggaagaaataaagcgggcggccagtagtgcagctgaaaaaattggtattggcctgaaacgaggattggacgtcattaccgccccgctgcgcgccgtcatggatggctttaaatggctgctcgaaaagctggacctgttgccgcaaaaaaacgaggcattagcccaaacgaatgagctattgaaaaataaccccatagccaagaaatatggctcggtcggagagccggcgccaacaggttacacggccaatgatatggccattcgttttactggctccagcatgaaacccgttaaggcaccaagcggcggtaacttctactaccagcccaagatcgatctcagtgttgacgccagaaataaccagaacggcaaagctgtagcaacagacgcggtgaaagcgctccgggagcacatgcaaaaagacgcggccaaggcgcgcagtaatttttctgatcgagatctggggtgggaattatga

SEQ ID NO: 439984 - DNA, 462 bp, Serratia marcescens
atgatggcactagggttatacgtctttatgcttgaaactgttccctatcaggagctgcagcatcagatggcctggcgctacccgaccaacaaccgcgttgggaaacggccgtcagcgcaatatgtgggcccagaaaacgacaccattacactaagtggtgtgctgctgccggagatcaccggcggccgcctgtcattgttggccctgcaaacaatcgccgatctcggcaaagcatggtctttgctggatggcagcgggaccatttacgggatgtttgtcattgaagggttggatctaaacaagtccgtattcttcaaggatggcggcgctaggcgtattgagttcacgctgaagctaaagcgtgtggatgatgacctgggcacaatgctcggcgacctgcaggagcaacttagtatcatgaaagaccaagcgataacggctattggagggcttctttcatga

SEQ ID NO: 439985 - DNA, 1098 bp, Serratia marcescens
atgaacacgccagactggttgagcggccgggatagcgcgccagcgttcaagatcaccctcaatggcaaggacataaccacaagactggaaagccggctgatatccctcacgttgacagacaaccgcggattcgaggcagatcagcttgatatcgaacttgacgatgccgatggcgctattgatctgccttcgcgcggtgtccagttggagctgcagctgggctggaaaggcgaaccaatgatcaataaaggcaccttcactattgacgagattggccattccggcgcaccggacaaggtgacacttcgcggcagaagcgccgacttcaggaacacgctgaatatcaagcgtgaaaagtcatattcaaaaaccaccatcggcgagatcgttaaacaatttgcagcccgccataaactggagcaggcaatcagtccgcaaatggccactatcgttatcgaccatatcgatcaaacgaatgaatcagatggcagcttcctgatgcgcctggcgcgccgcgtaggcgctattgctgcagtaaagtatgggaagttgctattcattaagcagggccagggtgtgaatgccagcggcaagccattgctggcaatgacaatcgtgcgcgccgacggcgatgaacaccaatttaccctggctgacagagaggcctataccggagtttcagccagttggctcgacacaaaagcggccaaaccacaaacggtaaaggtaaagcggaagcgcaaacgcaagacgaccaccgccaaagcgccggctcaggataaacagggagaatacctggtaggcaccgacgataacgtttatgtactgagccggacctacgcaaatgcgtccaacgctcgccgggcggcgaaggcaaactgggagcgaatccagcgcggcgccgcgcaattctcaattaccctggctagaggccgggcggaactttacccggaagtgcctgtattagtgaagggtttcaagcatcagatcgacgctgcagactggacgataaccacggtaacgcacacagtggcagatggcgggtttaccacggcgctggagcttgaagtgaagataaccgatctcgacatggagtga

SEQ ID NO: 439986 - DNA, 1089 bp, Serratia marcescens
atgaccgtaagaaaattgagcaccggcaagtggctatgcgagttctatcacaacgggaggggcagcaagcgtacccgtaagcaattcgccaccaaaggggaggcgctcgccttcgagagctatcagctcgaccaggcaaaggccaagccctggcttggcgataaggaagacaagcgaaagcttagcgagttgatcgatctgtggtacaggctgcatggctgctcattaaacgacaaaaaagggcggctcggaaaactagtcattatctgtaacggcatggggaacccagtagcatcagagatcaccccaaaggactgggctcattatcgagatcagcgacttcgaggggaaatagataacgggtatagcaccagtcttgaaacaaggaaagtcagcacaggaacggttaactgcgaacaagcttttttgcgggcggtattcaatgaattaaaacggctaggcgaatggacgctgccgaacccattggaaaacatcagagagtttgatcagccagaaaaggaaatggcatggctgaacaatgaaaaaataaaagcactgataaacgcctgccatactcatggcaacccagagctaacactcatcgtaaagatatgcctatcaactggcgccagatggaatgaggccgcaaaactaaggccatcgcagatatcaaaatataaaatcacgtataccaacaccaaaggtaagaaaaacagaacggtccccatctcgaaagaattatatgacgagctcacaatactggatgaaaaagagtttgatccttgctacaagcaattttatcgagtgatgagactggcgaatataaccttgcctgaaggacaaatgacgcatgtgctccgccatacctttgctagccacttcatgatgggtggggggaatatcatagtcttgcaacgcatccttgggcactcagatatcagggtaacgatgcgctacgcccatttcgcgccagaccatttagaggaggcaatagcgctcaacccactggcacagacgtacaaagaaagtggcggcaaagtggcgacagaggaagaaaaagggtgtaatacggtagaacaggatgcgtga

SEQ ID NO: 439987 - DNA, 1158 bp, Serratia marcescens
atgcccgcaggcactctaaccctaacgaacaattccgctgtagtgaaaggtaccggtacggcctttaataccgagctgaaaaccggtgatttcatcgtgagcgttgtcggtggtgtcacctatacgctaccggtaaaaacgattgataacgccactcaggtaacgctggttaaagcctatgacggcccggcgcagtctggtgctgcctggtatgccgtgccgcgcgatgcaatgaacgccatcaccgctcagttggctgcagagacggcgaaagccctgcgtgggctgaacctcgataaagagaactggcagcaggttttcagcggtaccggaaatattaccgttaagttgccggacggtggcacctatattggcccggcctggaacagtattacggcttcgcttaataataaattagataagacggttactactgcccaagagattaaaggtgctctatctttacaaggctctcttattactgggcaagcggcaaatcttgatgtgggtgggtatgctaggttcagaaagtcggtcacgtttgatgattacatgttgctcaaaagtgcagtgcaattgagccctgcagaaaactctgctacgtcaattactgcgaccaatacttttacaggcaattcaggaacagttcaaggaccagcaattacatcacagattaaggctcagggtgttgttaagcaaatgacaatgtcattgcgtcaagagttaaatgtcaccgactatggatttatctcctttcaagattgggctgggaggtggcatgaggttcgtctgcaaaataatggggatatgaataatttgaccggaaactgggttaccggctcagatcgtagaattaaaactgaagtagaagaaattgcagaccctatagcactcattcgcggtctaaaactctataccggcaagcgcgatggcaagccctttatcggtggtattgcacaagaaattgaaaagaaccttcctcaggtcgttgctgaaggcggttctttagagttgcaaaacggtgaaattgttgaacgagtaaaatccgtcgattattcaacgctgggatatgtggccctggcggcactgaatcaggctctggacagaatcgatcgccaggatgaattaatcaaagaactcatggagaaagtacaatga

SEQ ID NO: 439988 - DNA, 735 bp, Serratia marcescens
atggaatggctaattgaactaagtggaaaaagttcatcaggtgcatacaatgttaactttttagcaaaagaaaacaacatatacattagtgacaatcacagaacggcgctgtggtgttggatgcagcaactaaaaaaaggcgataatactgccatattccatatcgacagacattatgacactttgcatttaaacggtgaatatattaaaaaattccccgcagtttttaatttaaaaagtatagaaaattatttgggtttgaaagttattttagacaaaaaagaaacgccgctaattagatgggataattacctatcatactttatttcttctcgtgagttaaaaaataatatcgaatgcatttatcttgcaacgcataaatatggtgacaatccccaaaaccctcacggacattctataataaatgttgagacgtatgagcttctacaagatctagctgacgctattgataaccatgaaaaaattattgtcaacattgatctagattacttctttatctctcataatgaggaatatctacgcttcatcgatgattctttcatcaaagaattattcaaggtagtgaagaatggtattgataataaaaaaatattatgcctaacaatttgcctaagtcctgagtgttgtggggggcagaaagataattggagcaatgcagaacaagtcttagacatcgcaaaaaaagagttaggaattgaaatttgcttaaagtag

SEQ ID NO: 439989 - DNA, 669 bp, Serratia marcescens
atgcacaactttgaaattggcttctctgaaatcaataacaatcctgctatcgctgcttacaacttcgataaagctgttgtcgttgcgtgtgatgtgcgtggtgctaagaaaacttggaaagcgatgggaacaaacctgaatgttcataaaccacgtgaagattctaagggcaattatgttgctatgatgactggattttttgttgaaatcgttgaacagattgagtttccgactgagcagaaagttgatgatgttcgttccgaactggacattatgagagaagaactagaagcgctgaaaaaagaaaacgctgatctcagaaatgagaacagcgcttataagaaacacatcaagggtgatgaattatcgtttgaagaagaaatgagtatcgtgtctctgaaattttcagcatcgaccaaagttgaagaaactgataaagacattaaagaattaatgaacggtgttagcagcaccgattctgaagcgagtacaaatttttctaactcagaagtatttaatttaacaaatccagttgaaattatcaacaaaagcacaactgttactgccgatcaatcaactgagaatcgtcagaaaattgatcaaccaattgaaagaaccagttcaatgatgtcagcacgtatgagacatttatcgagaatagcagtttga

SEQ ID NO: 439990 - DNA, 1140 bp, Serratia marcescens
atgcagcaacccgccatatcgaaaaaaaatcatgatattgaagtattgagaaccgtcgcgatcgttttcgtcattctggcgcatgtcgcggggatactcagcccggattcgcgctactggcgaattctggactatgcacgcttcggcagcggcgtcgatctcttcttctgcgtatcgggctttattatcacttcgtcaattttgtcaacggtgccaaaagacaaaagcctcagtgcttttgtcaattttaccgtgccattctggaaaaaacgtttttggcgactcatgccttcggctattttctggatcgttatcgttctgctgctggcctctatttggggcgggaaaggtcagattattccctttgagagcatgtcctcctcggcgttgcatgcccttactcaaacgcagaacttttactttatcgagtgtcggccggcgggcacctgcggcgaacttggcatttactggagtttgtcattagagaatcagttttatctgctcttacccctactcgctttcttcttgactgacaggaagcttgcgctctttttctttatcgttttcatcacccaagttttcttgccgagaacattgaacgcggcaacgccagtcatgtggccgttacgaacggatgcggtcgcactgggcgtcattattgccatctttgcacataacgccccctcgtcacgcccctgccccagactgcttgagagcaaaaccttctgcgccggggctttcatgatcgcattgctcttactggcgttgctttccagccctcaaccgctcctcagtttttcggtcggtatcaccgccatggtttccggctttttagtgttactcgccagctataaccgcggttgcttttcaagctatcccgccgtccgcgtgttttgcgattacatcgggtcccgatcgtactctatctatttaacccatgtggtcgcgctggccctaaccaaaatcctcttcttttccgccgccacccgctacgacggcctgcatactgccctgtacctgacgtttttcttgaccgcaacgctgctgatgtcggaattcaattacagaatcattgaaatgccgttaagagcgcttggcaggaagagtaagccgaaaaaaccggtagcacctttcgtttag

SEQ ID NO: 439991 - DNA, 270 bp, Serratia marcescens
atgtcagaacaaaacggcggcagcctcgtctatcaggtcgatatcgacactgcaaaaatgatcaccgggagccgtagggcatctgttgttcttgaggagatggaaaaacagtcaggaaaggcagaggccagcttatcaaaactcgagcaccaggctggttctacaggcttaactcttggcactctgccacgtgtcgctaaagctgagcagatgaccaccggcggcagtgcgcaatattgggtgggcaaggcggggttagccctggcttaa

SEQ ID NO: 439992 - DNA, 363 bp, Serratia marcescens
gtgaccagtggtgacctggccgatccgttccggccacgctatgccgtggatttgcagctgttggacgcagacggccagccggcaaaaaacacgccgatttatccagcggtgccgctgccggtgccaatggcgggccaggattcgggcatgttccagtttccgccggtgggaacgctggttgaggtggcttttactgatgggcggcctgataagccgtttatccggcagacgctggcccagggcaacacgctgccggatgtgaagcccggcgagcagctacagcagcagcgggaggaggtttcccagcgggtgaaggggattgggagcggaaaaccgaccaggcgatccgtgaaaactccatga

SEQ ID NO: 439993 - DNA, 786 bp, Serratia marcescens
atggatttaaaagccacaaagaattatgctctcaattttttcatagccaacccacatttaggaccatcattaattttattcctgttaggcgtaaccttccttttaacaatgaactttgctgctgtatccggtgccttattcggtgccagcgcttcattattgggtgcttggatttcggattttaactcccgtaaaagagagattgaatcaaagatacagaaagaaagagatgctataaagttcttaactcctgaactgttaagaacaatatcaagagtcctctacattcaagaacgagcaataatcaactatagtatgaatgcgactgaaaacaataagaatgctgatttagggcaaccgctcaaccacgaaattcacgacttggtaaacttaggcgatcaaaaagaagattttatcccctaccttcctctcctataccccaacgcaccacaagccaaatatttggatggggaaaaggccattaagttaataaattactatgattcactatataaattagagtcattcgtaaaagactggtggcgtagaccgggccaactaccatctaacattttcaatgaaataagccatctatcagaaagaagccttttattatctctagaatgtttagcagagcttcgaataaataagagtgatgatggttttcctcatagtaatactctttccgtaaaaatcactaatgcactggacatggcagttaaaacaagagcgcgatgctatgatgactttgagaaagcaaaggggaaacaacatggaagatattaa

SEQ ID NO: 439994 - DNA, 1044 bp, Serratia marcescens
atgaaaagtgcagcaaaaaagttagatgcaaaaaagctttatgagaatgcgattgtatcgatacaactcggcattgaagacttcaagctatcccaactccccgaaaacgatggcggcaacccttttagagcactttcatccgttcgcaatcttcatgctggattgttattgcttttcaaatacaaaatagccatatcagtaaacactgatgagctggcttatgaattaatccatagtcctcctaacaaaatattgcctcatccagatggtagcggtggagtgacttggcaacctgaaggcagatttaagaaaagcactatcgatgtttccgaaattaaagaacgctttaaaaattttggggttaccgttgattggactgttgtcgaaaaacttcaggaatgccgaaatcatttagagcatttgcaccctcacaattcacttggtgaagtagcagaatttgttgctgatttattccctgttgtacgagatttcattacaagtgagcttcatgattttccacagaacgtactaggttctgcatgggacacaatgctcaaacacaaacagtttttctctcagcaactcattaacagcctatcttcttgggaaaaggctggagtcccagctggtatggaagagtatcttgaacattgtagctgcccagagtgcggctccaagcttttgaatgcttcacatatgaatttagctgctggcgaaactgtttctgaggatgagaatttatttaatttcatttgtacttcctgtggagaaaccgagttgatagcgcctttattgatagaggctttacaacgtgagttcttttattggcctccagatggagatgagcctacatatgaaatgtgctatcaatgtggacatgaaacttttttaatagctgaacaaagttgtagatggtgcgaatgtgttttagaacgtaaatcatgctcgatttgcggtgaaatgcttacacaagatgaacaagataatgaaggattatgtagttaccataactatttatcctcaaaatatgacatggatgattaa

SEQ ID NO: 439995 - DNA, 192 bp, Serratia marcescens
atgaatgacaatatcaagatttttttacgttggttttttttaggcaacttttttaaatcattaaagaatgctatcaatgaagaagggcaacgtggggaaaatgctttccgcattgtttttttaatggggatcaagggcttgttaatgaatttatgcaatgtaatgttccacgattatcgaaaggaaatataa

SEQ ID NO: 439996 - DNA, 3846 bp, Serratia marcescens
atggcgatcttcgatctcgataaagatgaattactcggactctcagatactcttttggaagagttaattgctcgtcttgcagaagccgaagtggtggcctgcggtcatagcccggcacgggtgcgctggtcgggatcgatcaacgcacctgatggtggaattgatgtccacgtgcaggtaccggttgaacagctcaacaccgggtatattgaacgaccggataccgtcttccaggcaaaaaaacacaagatgcgtagggccgatattctgcgagagatggctccttctggcgtcctttcacccatgatatccggccaggctacaaaggggggaagctatatcattgtcagtctggatgaagactgttccccctctatgcttgccgaacgcgtcaaggcgatgcatgaggccgtcaggtatgattcccctcacccaactcttcatctggctttctatgatcgcgcaaagttggctcagtggatacggcagtatccgtcagtaatgctgtgggtaaacagaatactggggcggggatattccggctggcaaccatatggagcatggagttgccccccagagggggcggaagataccctgatttccgcgtccggtatcacgatctcacttccgtcagaaaaaggtcaccccctaaatattaaggatgccatcgggccgatacgccagcttatccggacaactcggaaagccgtgcggattactggtttatcgggcgtgggtaaaacgaggattgttcaggccttgtttgatgaatccgtaggagccgatgcactggaccgaaccctggcggtatatgccgataccggtgacgatccgagcccttcggctgcagctatgctggaacgcctcatcgctgaccagcgtaacgcaattatggttcttgataactgcccgtctgaactacatacctccctcgcggcgagagttacctctgtgggtggcaggatcaagctaattaccgttgagtatgatattcgggaggataaacctcagaccacggaggtgatccacatcgaggcgataggaccggaagtggcggaaaaacttctgctacggcgtttccccggtattggacaattgaacgcccgtcgaatcgctcagttcgctgacgggaatgccagagtctcgctggctatcgccgagagagtggaggaaggggaatcgctggccgttctgtctgatgcacagctcttcaacagactttttgaacaacgtcatgaaccggacgagggattacgggagcaggccgagctactttcgctggtctactcgttttcgattaacttctctgaaacaggcgacaatgaactggagaacctaggtacgctcgcgggctattcacacaaccagctgtaccggacgctcaaaaaactggccgatcgccatattcttcaggccaggtcgcactggcgagccatcttaccccatgctatcgcgaacaggctggccgcctccgctctggacagctttccggtggcgtttcttcgttcaatctttgaagtgccgggacgggagcgtctgcttatgtcgtttgctcatcggctgggccttttacacgatcatcctgtggcaaaggatattgcggctgcatggcttcagccgggagcgttgctgagtaacttgctagcgttagaagacttacccgctcgtatgctggtgtacattgcgccggtggtgcctgacgttctgcttaaccggattgacaaggatcttcgggctacagactttaaaggccagaaaagacattacgatccgagctggggcactatcctcgaccttttgcaggcactggcctgggagtcttcatactttgaccggtgcgccagccttctgctgcaaatcgcggatcacgaaacggataagcctggtcagaataatgcacgggacaaactcaccttgttctgtcagccctatctgtcaggcacacatgcttcactggagcagcgaatagcgcttctggagcagtgtcttacttcaggtttatcacagcgtcgcgcactggggctgaaaatgctttctgccggacttagcggtccgacgtggacaggttcgggtatctgtgagtttggtgcccgaccgagggattatggtgcagagccagactatgaggcgttaatgacgtggcggcgcgcgttcatcgcgattgctgttcgcatcgggaatgctggtgatatacgtcttgccagcggtgcacgaactattctagcaaattcactaagtggcctgtggtgtgacaagaggatgggctcagtcctggttgatgccacacgtacactgcattcccgtcttccctggggagaggggtggaaggcgattcggacaaaactgtactttatgcggaaggatcctcaggtctcgcccgtgctgctggaaacgcttgatgctctggaaagggagctcagaccaaatgatttgctttcctgtatccggctttatgtcctgagtaaaggccgctacaactgggtgcttgatgacgactttcatcgaaatgacaaggaccaatacgctgaagcagaggagcgactgatggccagagcagagcaactagggcgtgaatttgccgcttcaacactttgtctttctgatctgagaccaaatctattctcttctgagtggatgccttaccggaacgcattcgggcaggggcttgctgagggaactgcaagccctcgtgaaatctggcaattgcttataaaagaactagaacaggattctacagaaaacaaagattttccggtaattataggctttatcgaaggtgttgatcgtattaatgaaacgctagcccatgaattgctggagcactgcgctgtgcatccttcactctgtcgagttctggttaatttgcatccccagcgagattttacagaaacggacctcaaccgatgcatgtcgcttctgaataaacaagatactcgtatagttatgtttgacgccattttttggcaaaaaaaataccttcaattgccagtaccccaagtgctcgaactggccgaacagttgttagccaaagaaaacggtgctgaagtgattctgaatggactagggatgaggttacacggcaaaaaagcggcagagtatatgcctgggccggaacttcttcaaatcggtttcagggcagccattcaggttttacagagagagtctgacgctcggggcagtcttgcagatgtctttatggagtcggtcgtggcggcggcattgcagttagacgacaatgaattgctcaaaaatcagtggctggatactgtcttttcagcaattgataaacattacggctatatgaacgagtatcgtaaaaccatagagacaacggtggcacttatacctgaagcgtttctctcccgtctgtttgcagattctgaggaccaaaggagtatgcggttgttctttatgcgtggaaggattggggatactactccgttgctttcaggcgttgacatcgaaaccttgattgactggtgctccagcaatgacgatccgagtatatggacatttgtgccgcaggggttagaactctgggtaagaattcctgacacaagcaggatggtcttacatgaaaatgctgtcaaattcctgggggcagcacctgaaccttccttggtacttgagtcttttgcagaattaacgagtcccacaaactggagtggcagccttgcaaacacatggaagacacgggctgacgctttcagtgaactcattgaacacgagcgggacgacatttcaagcgttgcaaaaaaaatacacgagaaattgatgcttatgattgagcgtcaaaggaatcgcgaacaacaggaagatcgtaaaagtgaacagcggtttgagtaa

SEQ ID NO: 439997 - DNA, 1080 bp, Serratia marcescens
atgagtgttgtgaaattggtcaaagagcaggttctaggctacgttatatcgggaatactaggtgtagttgttataatagggcttttccattttacttcacaacctatacgatcttctgatgttcgcgaaaaattagtagaaatggctcgagcctgcatgcagcagcaacttgccacaaatttgacctctgtggtatttgactcagtgacaagtgagtcactcgacctaagcacatcaaattccgtagtagtctacggaaaagctgtgagcgctaatggtgcccttagccgcttcctgatgatcttcgaaccctctggacagagtttaatagataaagtgattggcagaccaggattctacgatattgggtactgggcaattatcccaggcgcagagaatgatgaagtcgtggcatcttcaatgaacattgaagacctcgataaagacggtaacaaggacatactaatccgtttaaagtcaacttacgcggatggcgtatctaaagggcttcttatccttaaaaaggataaacatgatgtatggcatttaatggggcttccatcaatgacaaagatcatgcattccattgccgcgggtcaatcccccctgccgaaaggacttcaacctgcactccctccaatacattggtttagtaatgacaaaaaactaaaacctaagccaaattataaacaataccttgactgggaaattgacgaatccaactggcaagccactgatgccattgggaaccattctttttggatgatcagaaatggcacgaagataaaaatgtacgagaatgaacaagcaggctacaagcaatttggtgtactggcaaacatctatgatgacgaggcaattcaggggaaccatcatctcatggtcagtttttttaagattgagaataatagtttgattcctgatcagcattggaactgggcctatcctatgttctctattggattagaggatagtcaagcagtggatctgagtgaaatgcaggaagcgggtttgcaagctcatgttgctggtggttcagttgtcggcttgacagagtttgggaaaatggactcagattaa

SEQ ID NO: 439998 - DNA, 132 bp, Serratia marcescens
atgactatttttaataatgtactgatggataaaaaatttctcatgtatgtctcatgtgaatttgagcgctatgttgaagagttgaacaccgcgattttaacttaccaagcacagatgggtgaaaatcattaa

SEQ ID NO: 439999 - DNA, 609 bp, Serratia marcescens
gtggcaaaattttactttaacgcgaagttatggggagcgaccgcctcaattcccgtaatgaaaatgcttgcggagcaggcagaagcaaatatatcccgtgtgctaaacgatgccgataaacccgggaccattgagtctggagagtttcaagatgaaagacatcatgaagatggaggggtttcaacgtatcaacgcacatactattcctgtggatcatgcatagggtatgatgaaaatgaagttaaatctgaatataagcatctgatagcgcaacttacacgtcgctcagcttttcttaccatttttggtctgtttgaacaccgtatggttgattgtctagaacttatggatcacctatcatgtaaaattacggataaaaaatacaagacagttgaggattgccataaacgcctcaagcagaatttcggcggtgaaaacattaaggatatcgatcatctatcggtgatcagaaacatcatggctcatagcgatggtgttgcagataactataaaatgctttcctgcaagcaaaccaaaaaaatgacgctcaaaagcgactcttgcgagccattcatcgcgctaaggctgagaatgctggtatttcaatga

SEQ ID NO: 440000 - DNA, 744 bp, Serratia marcescens
atgcatgatatgtatagaagaaattatgaatattgttgtggagtatttggtgcctttttaattggtcaaattccatcatgtgaagccctttgcagaacagcaatagagggtagtgttaatttacactatataagtcttggagattcaatgaccaagcaaatttcctacttcaaaaatcacatagaaactgaacgtaaacagaataaaaactggaagcgcagcattgaagattctacatattctgatgaggctaaagctgaacacctacagagaatttctgataaagatcgcactttagatcactatgaatatgcactaaaaacatcatttgcgttaagcaacattgatttcgatatagttagtctaaaatggcccagtatttttgaacgtttcaaagaaataggacaagaagtaggatatagaaccatttatgcagccttatgttctcaggcacataatgatgcggaagactctctaaataaaataatggctagaattacagaaaatgtaagcggaatggaagaagctcaatggattgagcaatacaatttttctctatatatggctcttactgctttagattaccacacattcgcctcaataatgtacattgcaaaatttgagattgacgtaaaagaaatgatagagttaaagcatagtattaccaattcaattttatatgtaattgataacggtcctcgtatggtctcggaaaaaataaaaatagaatcggcgaaagtttaa

SEQ ID NO: 440001 - DNA, 825 bp, Serratia marcescens
atgacaaataccttggtcttacagatagcgctctcttcagagactgaaaagctgctcacgcaaattgtcaccgtttgcgcgcagcaaaatgtggctttcttcgttgcgggcgcaacggcacgcgaagtgctaatacaccatatccatggccgaaggcccgggcgcagaaccagcgacattgatatcgccatctttgtcgatgattggtcgtcgtttacggaactgcaggcggctttcatcgccgaaggcgcaacaaccacaaaaggcaacccgcaccatttgatctgggcggaaaaccacttggatatcattccgttcggcggcgtagcggaagagaataaaatcgcctggcctcccgaccgagcgatagtcatgaatgtcgacggcttccgggaagcctttgagcatacggtcgtcgtgcgcttgtttaacggtgctgaactgccgttttgctctttaccgggattagccatgctaaaaattttcgcctggcaagcccgcggacatgggaacgggaaggacgccatcgaccttttcaccatcattagcgaatatggcaacattgaagaagaacgcatttgggacgccccgcttgaagaggaggacctggacgcggatctggagaaaatgggtgcatttctgcttggtctcgatattgccgcacttctgcaacaaagttcacacggcattactgccgctcaattattgtcgctgcaaagccataaaattgtcgatgcgattgtctcctcaaatacccgggaaaccccagatcgcattgaacaactggtcgaggatttttggcgcggcatcgcgttcagagaataa

SEQ ID NO: 440002 - DNA, 1023 bp, Serratia marcescens
atgtctaaaccagaaaccgaagatgcgcttttgaccgcagtaagcgaaaatttgccgaccaacctgcacctgacggtgaaacgctcttcgaacaatgaggactacgacggtctggcaatcctgactgtcggacgcgatcaaacctttgacttcaagatagagataaaatcgatccaccggaaagaaaatctctttttgctgaaaaaagcatggcacgacgatgcaacagaccaacgtctgcttatctgccctcacctgaccgccgctcaagccgagatttgtgaagaactgcgtctcaatttcattgatgccgccggtaatgccagcatcgttactaaagggctgtttctgcgtatttccggcaaaaagccggttaaatccctcactaatagtgataatagtgcagccaggatcagtgaaggaacactaaaactactgctggtgttgttaaacgacgaacaggcgatcaatgcaacctatcgcgagctctccgccgctgcgggcatctcactggggatggtcagtaaggcgttcgagtatctggaaagtcagcgctattaccgcaaatcgaaaagcggacgcagattattgtcacctgaatcgctgacagcactttggctgcgtgaatatgcagtcatgatccgaccaaagttaaaaaggctcaatctggtcgcgccaacaaactggcaagacctgacgttgaagccaaacgagatttggggaggagaagcggccgcggcgctgctaaccgaaggttatctttaccccgagaccttgatgctgtttacccacaccccattgcagcaacgtagaaaagagctgggtatgcttcctcagcaacatggcgggctgcaaatgaccggtgcattctggggtgagacgctgaaactcaccctacgttctcaggccatgctcagcatcgctgaattactcgccagccgagatagccgtaatctcgaagtcgccaggatgataaatgacaaataccttggtcttacagatagcgctctcttcagagactga

SEQ ID NO: 440003 - DNA, 744 bp, Serratia marcescens
atgattaccgaattggccaagaatgaacagggacgagattttgccgttggcgatctgcacggctgcctggatgagttacgtgtgctgcttgagcatgtcgggttcgacacacgccgtgatcgtctggtcgccgtgggtgacttaatcgatcgtggcacgaacagtttggggtgtctgacattacttgagcagccctggtttttttctgtgttgggcaatcatgagaaagtgctgcttgattataggcaagcgaccgagagccagcggcaaagtgagatcgctcagagatggaagatgatgggcggggattggttttttgaactggacgatgcgatgcggtaccgctgccagcagctagccatgatgctcccttgggtgattaaactcaccgtcgctcaagtcgattattgcgtgattcatgctgaggtgcctcctgaaatagattgcctcgaaacgttccttacagggttgcaatctggagacccggtgagtacgcatagctgtctttttgggcgccggcgtaaccgtgccaagtacgatgggccaataatgaatgtcggttatgtactgtgcgggcatacgccaggtgaaggtgcgcgccaattgggcaatatgtgcaacctggattatggcgcgtttgatatcgccaaccgtggggcgctttgcctgctcgaactgggaacacaccgccgctatttgttgagaaaagacggtattgtcgagcaggcatttgatgctgcttaa

SEQ ID NO: 440004 - DNA, 516 bp, Serratia marcescens
atgtgcgcaacgcggcaatcgttaccgaacagaacaggatgtaacggaaaatgggtgctgctggccgctgccctggcatccattccggcggcagggctggcggcgaccgcgccgatcatcatttcaggctcgatcaacgccaaaccgcagtgcgtggtcaacgacaatcaaaccatacgcgtagcgttcggcaacgacttgatcaccaccaaagtgaacggtgtgaactacctgcgcaccattgattacacgctggaatgtaaaaacgccggtcagagcatgatgaagatgaagttggcaggcgtcgcggcggcgtttaatagcacggccatccagaccgacaaggccaatctggccattgcgctgcgtgccaacggcaatccgttgccgatcgggtcttggatggctttcaactaccccaacaagccggtattgcaggcggtgccggtcagcggcggcgtgctggccaccggcgcattcagcgcggcggcgacgctgatggtggagtacttatga

SEQ ID NO: 440005 - DNA, 489 bp, Serratia marcescens
atgaagcgaacttgtagccttttggcctatgggctggccctgtggagcttacacggcaacgcgttggcgggcgaggcgctgatggcgttcagtggcactttaaacgccccacccccttgcgtcatcaacaacggccagcgcatcgaggtggaatttggtgagcaggtcggcatcagccaggtggatggacagcgttacctgcagaacgtcaattacgacattgactgcgaggggagtgccgggcagacgctggggttgacgctggtggccgccgccagcgggtttgatacggccgcggtgccgaccaacgtccccgatctggccatacgtctgctgctggcgggcaatccgtttgtgctgaataaacgcgtgccgatcgaggggggcaataagccgaggttgcaggcggtgccggtcaaacgaccggggggggcacttaagccacaggcattcagcgcccaggctacgttggtggcggattatcagtag

SEQ ID NO: 440006 - DNA, 825 bp, Serratia marcescens
atgaaacaggtaatgttctgcttattaatttttttctgtcagcaaagtgtcgctggcgtaaacgttgagtggaaattggaaagtgggggggctttattgcgctttacggtcctgtcggcagactttgttggtgcaccgagggagagcacggtggactgcggaggcatcttcaatgcgggatgccagataacgatgtacccaggggggtggggagatcccgcctacacatttgctcttccagataaaaataaaaagttaaacagtgaattggttgcttcgtggaaccgctcgcttcctgatagtggagcaatagttaactgggaccaatgggtgaagaataatggcggcaaggcgccctgcattatcttttatgtaggtaccaaatcgtatcctatagcgggtgggtggtttgctgattcgtgtgcaggaaccgtcaccgagccgccggtagagcccccccctcagcctgtttcttgttatctgaacggtaacgtctacctgcaacatggtgcactggcagagacggatatctcgggcaatcgcgctgagaccgtcgcttatgtcatttgcacgcgtgcggcaaaagtgaaggtgcgcgccctgagcagcgttggcagcgacagctatctggtgaatctgcgcgccgacggcagcctgaaatcaatgttagccgtgaacggctttgccggtaatggtggggtgacgctggatgtatcgggtgccagcgcgcagccggtcacgttttcttcgctgctgatttcatcgggaacgccggcgccgggggatttttccggttcggcggtggcggtggtcgatattatctaa

SEQ ID NO: 440007 - DNA, 705 bp, Serratia marcescens
atgacacagaaacagaacggtttggcgtactcttacatacgattcagctctaaaaagcaagagcaaggcgactccgtcagacgccagaccgaagccgcgatcaagtatacgttggataacaatctgattttgtcagataagaacttccaagaccttggcataagtgcgttcaaagaaggaaaccgcccttctctcgcggacttgttaagcgccatcgaggaaggttccatcgagactggctcgacgattatcatcgaatcactagaccgtttgtctcgtcgaggaatcgaagtcactcagcagatcattaaatcaatcctgcatcatggtgtgttcattgcttctttggttgatggtctgttgctgaacaaagaatcagtgaatgaccttgtgagtgtgattcgaatcgccctggccgctgacttggctcataaggaatcagagaaaaaatctcagcgtttgcgtgaaaccaaaggacagcaaagacaagcagcgctagaaggaaaaccgataaataaaatccttccgttctggttagctcgaaacaaagatggttattgcttctcagagcgattggagaccgtaaagcggatcgtcaacctgaagcagtctggtcatggctctaacaaaatagctcagactctgaacaaagaaggttataaagctttgcgttctagcgaatgtgacctgctccccgttgattaa

SEQ ID NO: 440008 - DNA, 915 bp, Serratia marcescens
atgaatgatgcaaaaaaaaagagggtagatttaaacaataattggccaaaagagttactattcccaagcgaagtgctattaaagcaaaagatgagtgataatggtctttgccaaatattttcaccagctcaattaaaacataccaataatacagagttccataatcttcttagacactaccttgagtgtttaaatcagttgcctttaagaccagacatcgcttttgattgtatctggaaagcattggatgcagagtttttcaggcttaagaatatgtccggctctcgcaatggtagattcagtgtcttttataatcatatcagcaaaagttctgaaacctgcaatagttatgcctcactaactgatataattccgttgcaaacgtgcgaatttgttgctaagcggatatttgaaaacaatatttcttataaatctaatcctagcgataccaatgtcaaaagttttagaaatagagtgattggtagtttaactgaatcggtctacactgatctgctcaataagtatgagcctgactggctatctgataaagcaacaacgcaacgtaatgtaggcagattacttcaacgacttttgaagggtgatgaactaagtattgtaaatgagaagtatcaacttactactgaaaatagagccctcttcttaactgcggtcacgatgcctcagtttcgtaatgagcgttttcatggggaaactaaccctccgtttagaagtagttctgcaaaacttaaaacatatgcccatgcatattatattttccatgttgcatacattcatttgcttgaagtttttctttatcgtaatttcaatgtaattgacattgataccacgcaaaaagccatcgatgaaaataaagagttattcttaaaagtatttagtggcgttatcaataagtaa

SEQ ID NO: 440009 - DNA, 501 bp, Serratia marcescens
  misc_feature (325)..(334): n is a, c, g, or t
atgggtataaaaagcataatcagcgcaaccctgcggtggtacaccataaagattacgaccataaggatcggcggcaaatttatcacggttccatttttttatagaatatggagggttggcaaaaattacatcaaactgcttgagccggtcattttcaataaacttaggttcagccagagtatcaccgcgcagtacatcaaattcttcaatatcgtgcaagaacatattcatacgggctattgcggaagtcagcaggttcacttcctggccataaaggtgcgcagaacacgttgtccaacaaacaggctgatgacatatatcaaannnnnnnnnntcagcgaactttttaatcaggtattcgtaggcttcaccgagatcatcctgggcaacagatttaatgccaagaggaattttactgaaatgctcgataagatcagccagcagatgatcgggcaggcgctctttattggtccactgtgcatcaccgaagacgccatgtaa

SEQ ID NO: 440010 - DNA, 804 bp, Serratia marcescens
atgcttgcacttctggataaagtgtatatatctctaagcagagaaataggatttaataatgcagaagctgtcatatttcagaaaaggtttggacctattgttgaacttcttgaaacaactgacttagagattaatcacaaatcaaagtataaattggttgtgaattcaaaaacatggattttcaatataattagggatcaaaataaagttcgaggtacaaataaaacatcagacattatgattgaacttatttctgagtttatgaaaaacaggcagctagaggatctagggaaaaaattaataatgtttgacaccataaatcagtttttctctcgtcaaagtggtgcgggacgtctgttaacaaaactatatgaggatctacagcctatattaaaccaatatcctgactattggttacagagagcaaaagctatgggtaaaattctcaataagccaaaagacattttagatgctattgattacgctaaaaaagcgtttaccgatggtaataggcaaaagactgtgatgaatgccgagttcacgattgccaatctctatgggaaaatatgcgatagaacaaaatataaggatttgactttaatcgctgaagctatattctggtatagttctgctataaaaaaatatcattataatcaaaattacctcaattcaatgcttgagataaccaaagataaaaaaggatacttatattctttatgcgaaaatgttatgctctccaagctaaagcttaaaaatgaatctcaggttgagtttaaccaaatatatagctttatccgacagtaa

SEQ ID NO: 440011 - DNA, 741 bp, Serratia marcescens
atgtcatcgatttctgggattgatattgttacagggttgctcatccccgtagttctgtatttgataaagaaaattattgactggacaggaaaagtcgttggtaacccacgacctaaacgaaaataccagtttgataaaattcctgcggataagaaagtagagattttttcaaaaattgatgcattaaaagaaaaaacaacaacaccgcatgttcttgttcagatgaaacttttatatgaacaactgggaatgtatttgcctgtgtggcattgtcaccaactggtttcctgtatggcggctgaaaatattagctcgctggatgtacgtctgcgaggttttctgaaaaacataattatcggtcactatcctgagaaagggttcagcgttaacaccaaggttgtccgcagatcctacgtgataactaccttgttcgggatatttgcagttgctatgtttatttatgcaggatgggatgccatctcttctttctggagaagcaaagagacagggttgtttatcttgtttttattgatttatgcttccgctattattactgttataggttatataatttcccagattgaagatatctacctgggatctaaatttgggcatttattcgagacttggctcaggaaccatccgccgtgtaacgatgtgaacccagatacttctgcagcaatgccaactgaggaacaagcatcatccgaaggcccccaagaagattctctcgcgatttaa

SEQ ID NO: 440012 - DNA, 645 bp, Serratia marcescens
atgacttataataacaatgaatcaattgacaagatgacgcgagatgagttgacagaatattatggtgaacacaaaaacaatttatatgcagctcatcgtttatggtgcctagcaaatccaggtattccagacaacttctcttcagaatttgtaatattgttggagaaacttgaaaaactggttgagctaaacagtaatcctgtcgaaccgctagatattctacaccgaacactaattgactcaatatatattgattgtcgcgctttattctgtgaaaaaaagggtaagctccccgataattacacattgcaaaactgttttagaatagcagggattgccccaattgatagcgctattgattgggttaatcagattatagatgaagtgtgtttcaatgacgaagtggttaaggattattcttttaaagaatgggttaaatttgttaccgacaagacagttgctcacaaggatagtttaacagaggaagaaaggaatttaataaatcataagtacaaattcctaacaaatccatataacttctctatttttcaatctagaatttttgaaatacattgtgtttatgaaaaagttataacgcacttttgtgaaattgagctatttaaataccaaataaaaaataaatag

SEQ ID NO: 440013 - DNA, 1023 bp, Serratia marcescens
gtgaattcttttttccaggaaaacgatgatggccgccgccaagccctcttggcggcccagcaagcccatcctcaacaattacctgcatacattattgaaaaagacttttacgttacatgcgtactccacgttctttatgtagatatagctcctaaatttacggaaagaagtgaaaccccttttgtgtttaaaggaggcacttccttgtcgaaatgttgtaatttgataaaccgaatgtccgaagacattgacctatcattttccatggacttgttggcatctaacgaagtttctcgagacccctgtagaggccgtaagcaaatggagagagaagccgatgagatcgacctgaaggcaagaaattttgttttagaggagcttattgaccctttaacaaaatcactccaggcgtttgatcagcggatagagatcgagatagaaaataatgagcctctacatattgggattcactatccatcagttatcgagcaaggtaatgcggtacttcggcgagttttacttgagactggaagtctttcgcagaacaacccagtaggaaatgttgacatttcacacatgctaggtgagtgtatccagcactttgaagaaccaaaattttcagtaacttatctcatgccagaacgaaccttggttgagaaaatgtttggtgtccattgtaacttatcaaatggtaatccgagaccaaaatatgctcgacatttatacgacattttaaaacttcatgagagagacagcacttggtgtgagaacaaacaattgttgcttgaccatgttgaattttgcgatattcactatcgtacaaatttagattactgcaatacggcgcgaaatgggccattgcgactctgccctacagacagtaatatgcttaatcactatcaacaagattgggaagagatggctgatatgtttccaaatggcaatttgccttattcttttgaagagttacttagtggcataaaaaaaatcgaaatgcatattaatgcttcctgttatacctga

SEQ ID NO: 440014 - DNA, 687 bp, Serratia marcescens
atgactataaaaactgtcactttcaagatacaaagagcccctaaagtttcggagttggtgtcaggatatgttaatcatattcacccaggtaagccattcactttagagcagcttgcttctaaatacgacctatccaatacggatcggcaagctgcaagtaaggctcttcagcgtttggttgcggacaagaaagtcacacgtcttgctaaggggacttactatcgtccaaagatctcaaggtttgggcccttacctttggatactttagaaattgttaaggtagtaaccaaaaccaaaaaagctacaatagttcctgctggcgcggcagcagttaaccaactaggcttggatacccaattgccaatggtattaaattattatgtttcagtcagaacacgtactcaattgacacataactctgtgaagtttcaatacaaagaaactctacaatattttgtacacaatttgaagattgggaacaaagagacaaaaaatacagcactgttaatctggagcgcacttacgtatttagaaagttcagctcaaccattgtatctaaagaaattactaaaaaaatttcgacaggaattcaaaccagaattacaagcgaaatttatttcagcgctaccaccatctatgcgttgggcaaaagaactctttgaatctaccaccatggacaaggaataa

SEQ ID NO: 440015 - DNA, 576 bp, Serratia marcescens
atgccatttgagccagtccttgttgagcttatcttttttaccaccctcttcagctttaaccggagccaggtcaacgttcataaccacttcaactgcatcaaaaccgagcttttcaccgagcaaataatacatctgcacacaggcttcgcgatcgtataccacaaccatgcctttcatctttttcggcataacatggctggtaaaatgctcaacaatgtcattactcaccgcagccatgcgtctcggagatttcagcatgatggccagcttgccggcgcgtctggacaatgctgctttttcttcttcatccaggttgttttcggtagccagttgctcgaattcttcgttgatagcatcacgatccactcggagttcagccaaccgaggttcgaatttcaccgggttagtcgcgccgtcacggatcgactgcttatagctatagcggctcatatagcggccaggatcttcttcggcaccgaacaacttaaatgtattacgatcaatgccagaaatcggagtacccgtcaggccatagaagtgggcattgggcaacgcccagcgcattttctcgcctaa

SEQ ID NO: 440016 - DNA, 363 bp, Serratia marcescens
atgctggctatttttttaccgtcttatccttttcgcggcgtaaaagctccctacctgtgggtgttttatcggttgttgagcactttgcaggaaaaaagcatttttatcaccggcggtgattacttgcgcgagcctgggctatggagtgaacaaggacgctgggagttcgatgtacccacgatgaataatctgggctattcgttgccgactcaggatatatttgatcgacatgagtttgaactactggatgatggcctgtttgctcgattgttgaatgaaacgcacgaaaatccaatggctgcgttcaatgtgtttcttactcagcgcattcccgagttggagtctgagcatatgagagaatag

SEQ ID NO: 440017 - DNA, 912 bp, Serratia marcescens
gtgccgagcctgatttattcctttacccaactggaagccttcaccgccgtggccgagcacggcagcctggcaaaagccgcgctcaagctgggcaaagaccgcacgacgctgcgcgatttgattgattttctcgaggatggcttgggctatgcgctgttcctgcgcgaggggcgcagcctgcacctgacgccggaaggcgaacagctgcagcgccaggcgcacctgctgatgcggcaagtaaaagcgtttgaggcgtttgccaaagacgtgccgaagagcgcggcgcaggaaatctcactggtctacgatcccttcacaccccgcgcgctactgcaggcgctgattgccgccatggcccaacgcaacacgcgcctgagcctgattaatgcctcgcgcgacgaagcggaaagcctgctggcgagcggccaggccgatctgggcatctgccaggcgcgccatcgcagcgtgggcgacgccatggagtggcgcgccctaggggcgatagagatggatttttacgccgccaaaacgcttttccctggcgcggaacagccgctctcgctgctggaactctcgctcacgccgcaggtgatcatgcacccggattctgacgaaccggtggcgcgccgcctgcaaatttccgggcatacaatatttaccaacgagctggaaatgctacgcgccctgctcgaacagggcggcggttggggattcctgccgacgcatatgcatgcggaacagtggaaaaacgtcaacacgctgcgcaccgaagtgggcagccaggggatcagccaaaccatggtgaccatctggaagccgggcaatgaccggcgggcgctgattgatgagacgttggggttgttgccggggttgtggcggggggttgggggtgaaaagtcgcggttagattag

SEQ ID NO: 440018 - DNA, 1317 bp, Serratia marcescens
atgaaaagcaaagtgtttaaccgcagcctgctggcgggcgttgtcatcagtctctgcagcggcctgttggcgcccgttgcgctggccgcctgtgcgggcaccgaactcagcgcctgtcccgcgccttttgatgcgcaattgccggatacgcacaagatgctcacctggagccagagcgatcgggtgatcggttttcgtaacgactaccgcaactatgcgggggatgtatttcatcacggcaatgccacgccgctgctggctgccgctaaaccgctaacggacgccagttatcgggtgaatggcaaaacctacagcctgcaggattacctgcagcgccagaacgtcagcggcatgctggtattgaaagacggcaaaatcgcctggaaatatctgggggagggtaataccgacgctaccctgtggacgtcgcgctccgtgggcaaatccgtggtcgccacgctggtgggcgtggcgattaaacagggcaagatccgctcgctcgacgatctcatcacgcaatacgaacccgatctgaaaggcaccgcgtgggacggcgtgaccctcaggcagctgatcactcacacctccggcgtggcgtggaatgaggattacaccaacccgaaatcggacttcgcgcagctgaccgagtgtgaagccaggcccggaacctacgcctgcgtgcgcaagctggtggccggtttgcaccgtgcacatccggccgggcagaactggtcttactcctccggtggcgcgtggctgctgggcgacgtgctggagcgcgccaccggcatgccgctggcggcctatctgcagcaaagcatctggcagccctacggcatggcgagcgacggcgtgtggcatgcctacgccaaaggccagcatgacgtgggcgcgcacggcttcaacgccacgctggaagactgggggcgcttcggcgaatttattctgcataacgggacgttgccgaacggcaaacagatcttgccggaagattgggtagcccagtcctccaactggacgcgggcggcgggctcggtatcggcggcgcatcctgacggtatttacggctaccagtggtggaacaacgaagtgccggtgaatgcggccaacgttgagcctactccgcaggcctccctcaagcattctctgtgggcgctggggatcttcggccagatgattatggtcaatcaggcggagaatctggtgatcgtccagtggtctacctggccgcaggcggagccttctttcagcgcgcaaccgctggaggcatcgctgatgtttagtgcgatagcgaagggactgcgtcaaagctggtaa

SEQ ID NO: 440019 - DNA, 474 bp, Serratia marcescens
atgacgctggtgggagctgcgccagaattggttctggcggcacgattggcgattgccggctgtaaaaccaaccccgctctttgtctgaatcaagccggtatttatgcggcggatattgtggctccagaggcgattattggtactggcgccataaccaccggcagcacattgattttggggaaaaccgaagacagcgtgaggaagttgagccgacagctggtgaacgcttccgatgaattatacaaaacaaaaacgttcaacactcagccggttgccgattttatcaaaggagaaacagcagccggggcgaatttgtcgactaaaacggcagattatttgcgtgaaatacagaaggttaacactaaccagttggtcaaggtgtttgatccgaaacagaacgaaagtaagctaaacgtgtttggtcagcagttcgagcaggtgttaggtgagggtggcggcggctttgttgaataa

SEQ ID NO: 440020 - DNA, 513 bp, Serratia marcescens
atggcgccgaccggatcgatgacgatcccttcccagcgcagcacctggttaatgttggcgttcggccgcaccacgcgcatcagcggggcgatcaccgtcggcccggtcaccaccgtcaccgcgccgatcagcgccgccagctccggcgggaaatccagcagccaccagctggcgaggctgatgaccagaaaggtgaccagcatgccgacggtgaccagattgcgcaccacgccgccgaggccgcgtatctcctcgaaacgcagcgtcagcgccccttcgaacaggatgatcgccactgacagcgacaccagcggaaacagcagatcgccgaacagcagatccggctgcaccagatgcaccgtcgggccgagcacgatgccgaacagcaacagcggcaaaatggccggcaggcgcagcagccaggccagccactgcgcgagcagcgacgccaggccgataagcaccaacatgagcggggcagataattccataagcgagatccctttcaaatga

SEQ ID NO: 440021 - DNA, 237 bp, Serratia marcescens
atgttccacagcgcctggatatcgagccgcgccgccagaatgatgaacagcgccgagatcaggatcgccgacagctcctctttgaacgccagaatatcgctggtgtccacgtcgcgcatgttggccagccagatgcccatcaccgtgacggtcagcaggccggattcgtcagcgatggcgttggaaacgccgaaggcggtcagcatgatcgccagcaccgccaggttctgcaggtag

SEQ ID NO: 440022 - DNA, 1212 bp, Serratia marcescens; identical to SEQ ID NO: 227171

SEQ ID NO: 440023 - DNA, 993 bp, Serratia marcescens
atggggttgttcactttggaagaaaaggaattcaaaaaggttgctaaaactacatttatgcgagagtcgatccttgaacgcagggatatccagtcagcgatagccaagaatatgagcgattttttgcctgattgcctggtaatccaggaagagtttaacaattgggaaaatagtcaacgtagaattgatttactctgcatcgacaaggcgtttaatctggttgtcgttgagctgaagcgggatgagcaaggtgcgcatatggaacttcaggcggtaagatatgccgctatgatttcgcaaatgacgtttaatgatgctgcagaatgctaccaaaaacgtcttgatagcgcaggtcttgctaagaatgcggagcaggagatactcaagttttgtgagcgagaggaaagcgagattgctgacttcaatactcaggtaaggattgtactaatctcggcagatttctctacggaagtgactaatacggtactgtggttgaacaatagtgggctaaatgtcagctgtttcaagttaagcccttatatgcatcttggtaaggtactggtaaattttgaacagataataccgctgcccgaagcaaaagatttcttggttagacagaagcgtaaagaaacggaggccagggatgccaaagaaaaaggagagaaggattattcgaaatttatctataagggaggggtttataataaaagaaatttggcatatgaactgatgaacgactggatcatagatgctaacccggatgatatgcaagcgatagcctctgtttttggtgatgatatccatcgcagtctgattaaggttgaacaggatgtgattgcgtcacggcgtaagcgcttccatgatgaaaccgttgagcttgcctccggtgagatagtactaattaccaatcaatggagtattggctctattcaaaagctgataaataagtttgccagtcttggctataacattgagatgcaccagcaagagtga

SEQ ID NO: 440024 - DNA, 423 bp, Serratia marcescens
gtgacgacgctggtgccgagcattccgcagtgggagtacagcgagacctacaacggcatcgtgcacagcatcatggcggtgctggtggcctcgtcggcggcctatctgatctccgagaacgtcaactcctacctactctgcaaaatcaaagagttgaccaactcccgctacctgtttgtgcgcgtgatcaccagtaccgtagtggcttcggccatcgacagcgtggtgttctgtacgctggcgttctacaacgtgctgagctgggacatcatcaaaaccatgatcctgtcgcagttcctgatcaaggtggtttacgccctgctgggcgtcgggccgatctacgccacccgcagtctgtttaaccgctacatcaataccgaacaagcaaagggcaatgaatatgcatatccaaaagcaagataa

SEQ ID NO: 440025 - DNA, 4548 bp, Serratia marcescens
atggataacttgcgcttctcttctgcgccgacagcagattccattgatgcatcgatcgctcaacactacccggactgcgaacctgtcgcggttatcggctacgcctgccattttcctgaatcgccggatggcgaaacgttctggcaaaatctgctggaaggtcgtgaatgcagccgacgctttacgcgcgaagagcttctggccgtcggtctggatgccgccatcattgacgatcctcattatgtcaatatcggtacggtgttagacaacgccgactgcttcgacgccaccctgtttggctattcgcgacaggaagcggagtcgatggacccgcagcagcgcctatttttgcaggcggtctggcatgcgctggaacatgccggttatgcccccggcgccgtcccccataagaccggcgttttcgcctcttcccggatgagtacctaccccggtcgcgaagcattgaacgtgacagaagtcgcgcaggtaaaaggtctgcaatctctgatgggcaatgataaagactatattgccacccgcgccgcgtacaaactcaacctgcacggcccggcgttatcggtacagaccgcctgctccagctcgctggttgccgtgcatctggcctgtgaaagcctgcgcgcaggcgaatccgatatggcggttgccggcggcgtggcgctctctttcccccagcaggcaggctaccgctaccagcccggaatgattttctctcctgatggtcactgtcgtccctttgacgcctcggctgagggcacctgggccggtaacggtctcggctgcgtggtgctgcgtcgcctgagagacgcgctgctgtcaggcgatccgattatctcggtgatcctctccagcgcggtcaacaacgacggcaacagaaaggtcggctataccgccccttccgtcgcagggcaacaggcagtcatcgaagaggcgttaatgctggcggccatcgacgacaggcaggtaggttacattgaaacccacggcaccggcacaccgctgggcgacgcgattgaaattgaagcgttacgcaacgtctatgcgcctcgcccgcaggatcagcgctgtgcgctcggttccgtgaaaagtaacatgggccatctggataccgcggcgggcattgccggactgctgaaaaccgttctggcagtcagtcgcgggcaaattcctcccttactgaattttcacacccccaacccggcgctgaaacttgaagagagcccctttaccataccggtgtcggcacaggcatggcaggacgaaatgcgctatgcgggcgtctcctcctttggtattggcggcaccaactgccatatgatcgtcgcctcgctgcccgacgcgctcaacgcgcgcctccccaatacggatagcggcagaaaaagtaccgcgctgctgctcagcgccgccagcgacagcgcgttgcggcggctggcgacggattatgccggggcgctgagagagaatgcggatgccagctctctggccttcacagccctgcacgcgcgccgtctcgatctccccttccgcctggcggcgccattaaaccgtgaaaccgccgaggcgctcagcgcctgggccggtgagaaatcgggggcgctggtttacagcggccacggcgccagcggcaagcaggtgtggctgtttaccggccagggctcgcactggcgcactatgggtcaaacgatgtaccagcactcaacggcgtttgccgacacgctggatcgctgtttttccgcctgtagcgaaatgctcacgccgtcactgcgcgaagcgatgtttaaccccgattcggcgcaactggacaatatggcctgggcgcagccggcgattgtcgcgtttgaaatcgcgatggcggcgcactggcgtgctgaaggactgaagccagacttcgccattgggcattccgtcggtgaatttgccgctgctgttgtctgcggacactatacgattgaacaggtcatgccactggtttgtcggcgcggcgcgctaatgcagcagtgcgcaagcggcgcgatggtggcggtatttgcagacgaagacacgctgatgccgctggctcgccagtttgagctggatctcgccgccaataacggtacgcaacatacggtattttccgggccggaagcccgtctcgcagtattttgcgccacgctctcgcagcatgacattaactatcgtcgcctgagcgtaaccggtgcggcgcactccgctttactggagccgatactcgatcggttccaggacgcctgcgcgggactgcacgcggagccggggcaaataccgattatttccacgctcaccgccgacgtcattgatgagtcaacgctcaaccaggcggattactggcgccgacacatgcgccagccggtgcgttttatccagagtattcaggtggcgcatcagctcggcgcccgcgtttttctggagatggggcccgatgcccagttggttgcttgcgggcagcgcgaataccgcgataacgcatactggatagccagcgcccggcgtaacaaagaggcgagcgatgtcctcaatcaggccctgctccagctttacgctgccggcgtcgccctaccgtgggccgacctgctggcgggcgatggacaacgtatcgctgcgccatgttatccgtttgatactgagcgttactggaaagagcgcgtctccccggcctgcgagcctgccgacgcagcgctgtctgccgggctggaggtggcgagtcgcgccgcgacagcgctcgatctccctcgcctggaagcgcttaaacagtgcgccacgcgactgcacgccatctacgtcgatcaactggtacaacgctgtaccggcgatgccattgagaacggcgtggacgccatgaccatcatgcgccgtggacgtctgctgccccgctaccagcagctactccagcgcctgctgaataactgcgtggtcgacggcgattaccgctgcaccgacgggcgatacgtccgcgcccgccccattgaacatcaacagcgggaatcactgctgacggaacttgccggttattgtgaaggttttcaggctattcccgacaccatcgcccgtgccggcgatcggttatatgaaatgatgagcggcgcggaagaaccggtggcgattatcttcccgcaaagcgcctccgacggcgtggaagtgctgtatcaggaattcagctttggccgctatttcaaccaaatcgccgccggggtattacgcggcattgtccagacgcgtcagccccgccagccgttgcgtattcttgaagttggcggcggaaccggcggcaccaccgcgtggctgctgccggaactcaacggcgttccggcactggagtaccatttcaccgatatctcggcgctgttcacccgtcgcgcccagcagaaattcgccgactatgattttgtgaagtatagcgagctggatctcgaaaaagaggcgcagtctcagggtttccaggcacagtcttacgatcttatcgtggcagcgaacgtgattcacgccacccgccatattggccgcacgctcgataatctgcgccccctgctcaagccgggcgggcgcctgctgatgcgcgaaatcacccagccaatgcgtctgtttgacttcgttttcggcccgctggttcttccgctacaggatctcgacgcccgcgaaggtgagttattcctcaccaccgctcagtggcaacaacagtgccgccacgccggattcagcaaagtggcgtggctaccgcaggatggcagcccgaccgccgggatgagcgaacatatcattctcgccacgctgcccggtcaggcggttagcgccgtaacattcaccgcgccatcagaacccgtgttggggcaggcgctgacggataacggtgattatctcgccgactggtctgattgcgcaggtcagcccgaacggtttaacgcccgctggcaggaggcctggcgtctgctttcacagcgtcatggcgacgctctgcctgtggaaccgccccccgtcgccgccccggagtggctggggaaggttcgcttaagctggcaaaacgaagccttttcccgcggtcagatgcgcgttgaagcccgtcatcctgctggcgagtggctgccgctatcgcccgccgcgcctcttcctgcgccgcagacgcattatcaatggcgctggacgcccctcaacgtcgccagcattgaccaaccgcttacctttagcttcagcgccggtacgcttgcgcgcagcgacgagctggcgcaatacggcatcattcacgatccgcacgcctcttcgcgactgatgattgttgaggagagcgaggatacgctggccttagcggagaaagtgatagcagcgctcaccgccagcgcagccggattgattgtggttactcgccgcgcgtggcgagtcgaggaaaatgaagcactctctgcatcccatcacgcgctatgggccttgcttcgcgtcgcggccaacgaacagccggaacggttgcttgccgccatcgatctcgccgaaaaaccccgtgggaaacgctgcatcaagggttga

SEQ ID NO: 440026 - DNA, 591 bp, Serratia marcescens
atgaaaagcaaaggcacatttaataagatagggttgtacatactatctttaatgctgttgtttgtttttattatcatcttaagtgcaaaaattccgatgtgttatggtgactcatgtgaatttataggtttttataaattagccatcgacaatgtaataccaataatatgtttcttctttatttttttagcatgctatttttataagaggtttcgctcattaattaaaatcaacaatgctgacactgttacaataacatcctgccaaagtgagagttatgaaagtttaacttttttagctacgtatatagttccttttatgggtttcagtttcgatgacattcagaaaaatattgcttatcttttgttagtaataatcattggtttaatcttcatcaaaacggataaatattatgcaaaccctacgctagccctttttggatataaattatatagagttaatgtttcttatacaggaagcgttgaagttaaaaatgttattgcaatatccactgatattttggctgttaacgacaaagtcttttacagttttttagatgattatgttttcatagcaaggaaaaaacaatga

SEQ ID NO: 440027 - DNA, 483 bp, Serratia marcescens; identical to SEQ ID NO: 388245

SEQ ID NO: 440028 - DNA, 690 bp, Serratia marcescens
ttgctgatcgatcagattgaattctgtgatgtgctggtccttaataaagttgaccttatcagtgaagcgcaaaaagaaaaactgatggcgattttacgttcgcttaatccacgggccagaatcgttgtttcacagtttggacaggttccgctgggcaacatacttaataccgggctgtttgatttcgagcaggccgctcaggcacccggctggcttaaagaactccggggcgaacatacgccggagacagaagaatatgggatcaccagctttgtctttcgcgcccgccggccttttcatccgacccgtttctggcaggtgatggaaaatgagctggatggagtcgtcagatcaaaaggttacttctggctggccagccgtccggaattcgcaggttcatggtcgcaggcaggtggcattgcgcgccaggggctggggggcatgtggtgggctagtgtgccgaaaggacgttggccagaggatgctgagtcactgaagttcatcatgtctaactggatagatggcattggtgatgcccgtcaggaactcgtttttattggaatggatatgaatgaatcagaactgcgcaacagactggattccgccctgttaacggatgcagaaatggcagaagggcctcaaaagtggcggcattattccgatcctgttgagccctggttcgaagaatga

SEQ ID NO: 440029 - DNA, 207 bp, Serratia marcescens; identical to SEQ ID NO: 74992

SEQ ID NO: 440030 - DNA, 1650 bp, Serratia marcescens; identical to SEQ ID NO: 227179

SEQ ID NO: 440031 - DNA, 1131 bp, Serratia marcescens; identical to SEQ ID NO: 74990

SEQ ID NO: 440032 - DNA, 1383 bp, Serratia marcescens
atgattaaactaacaaacacgcttggtatgcaaaaggagctattagttccggttaaagagagcaaaatcggcatgtatgtatgcggcgtgacggtttatgacctttgccatcttgggcacgccagaacctttgtagcttttgatatgattgtccgctatctgcgttttcgcggatacgatgtgactttcgtgcgtaacattactgatatagatgataaaattattcagcgcgcccgtgatacgggagaggactggcgcagcctgacagagcggatggtgcatgaaatgcacattgattttgcaaagttaggcatcctgccgccaaacatcgaacctcgtcccacagagcacatcccacaaatcatcagtatgatcgaacggcttctgcatcgacaatttgcttacattgcagagaatggtgacgtcatgttctccactgcatcggcaaaaggctatggaaagctttcgggacaggatattaccatgcttcgtgccgggacccgcatcgaagtgaatgagtataaacgcgatccgctggattttgttctctggaagcgggcaaaacccggcgagcccgtctggccatcaccctggggtgaagggagacctggctggcatattgaatgttccgcaatgaactgccattaccttggtacccatttcgacattcatggcggtggttctgacctgatatttccccatcatgaaaatgagattgcccaatccacctccgccaatgatggcccttacgtaaattactggcttcacaccggcatggtgacggtgaataaagagaagatgtcgaaatcgctgaatagcttttttaccctgcgcgatattctgaatcggttcgatgcccagagtgtgcgcttcttcctgctaagcgcacattatcgtaagccgctgaattatagcgaggagaatattcacctcgcgcgcgcctcgctgacacggctctacaccgcatgccagttcgctgacgggtctcgatctgaacagcacgatgcatggcgggccagattctgtgaggcaatggatgatgatttcaatacaccccaggcgcttgccattttatttgaactgacaagagagattaacaggctttgcggaacgaatgatgatgaagccgcagcacttgccaccacgctgaaagacctggggaatgtgctgggtttgcttgaacaatcagcggatgcctttttgaaaaaccgcagtgatcttcatcctgcagaactgcaacttattgaaaagttaattcaccaacgcagtgaggcacgacgtatgggcaaatgggacaaggccgatcgtttaagaaatgaattagcggagcaaggcattgatcttgaagatgtcggcgaaaatacctcatggcgtatccgataa

SEQ ID NO: 440033 - DNA, 1200 bp, Serratia marcescens; identical to SEQ ID NO: 74987

SEQ ID NO: 440034 - DNA, 423 bp, Serratia marcescens; identical to SEQ ID NO: 74986

SEQ ID NO: 440035 - DNA, 936 bp, Serratia marcescens
atgagtattgcagccaaacaaaccttatgccccggaatgctaccggatattcagtccactaagggtgacggtgagggcgagtcattatcctgggttggcatggaacaaattgccctgccgatagacatcgcaggcaggccggtatcagcaaaggtcaatgctggcataaaccttctcagttcacctgaagctgaaaaggggatccatatgtctcgtctttatcttcttctggacgaactgacacaaggggaaatcacaccggcattattgcaacatgtgttgaaagcatttctggtatctcatcagggacgtagtgatgaagccagtattgagatttcaggggatttgttactgtcgcgtaagtcgttaaattctaatcactccggctggaaagcttatcctctgactctgagcgccgaactcaggcaatcttttacggttaccctcaaagtgggtatcccttattcgtccacctgcccggcttccgctgcacttagccgccacgtcgcgggtttgcagtttagcaaagactttggtaacaggatcgacaggctcccggcagcagaaatagccgactggcttgttgagaaaggaatgccggcaaccccgcacagccagcgaagctgggcatgggtgagtatccgtcttaatcctgaagcaaaatcactgcctgtgattgaactgattgattatgctgaagttgctctcgggacagccgtgcaaacggttgtcaagcggagcgacgaacaggcttttgcggtggctaacggtcagaatctgatgttttgcgaagatgctgcccgtcggctcaataacgtttttcgttgtgcacccttttgtgaagcatttgatatcagggttgagcatcaggaaagcctgcatcctcataatgccgttgcccgtattcactggaaaggaagtaaaaatgttacgtaa

SEQ ID NO: 440036 - DNA, 738 bp, Serratia marcescens
atggatttctcacatgctaaaaaaagtatcaaacatgaaattgataaactggccgatcatgtcctgattgtgccggaacaaaatagtcatattattgttagtcatgcaggcactacgacggaagtcgccatgctgcgtaagaatggggagacccagtgttttatttccgggccgcaggagagtttctggctggtccaaacagataatattaattcccgttgccttgaatcccaaatagaaaaacatttactggcgtgtttgccgcaaggagtaaaagacataacgataacgttacggccggaaagtattaatggggacagttatcactattcgcatggactgaaaaaacaccgcggaaattgccagagaatagcgcatgggcatcgctctgcgatcagaatttttgtggatggtgagcgaagccatatgtgggaacagaagtgggcaacgcgatggaataacgcttatctattaagccgggaagatgtcgttacagtgacaacactttcaccgcgtggcgttgcatactggcataaggggctgacatgttcttcctggcggagttctcagggatactttgaaatcatgctttgttctgaggtagtagatattctgccgtgtgataccacggttgagtcactggctttatttatcaggcagtcaattgagcacggtttacccgcagcgaaaatagaagtccatgcctttgagggagtggggaaaggcgctattgcctga

SEQ ID NO: 440037 - DNA, 810 bp, Serratia marcescens; identical to SEQ ID NO: 74982

SEQ ID NO: 440038 - DNA, 828 bp, Serratia marcescens
atgctgaatatgctcattgaacctttccgctttgacttcatcaattatgccctgataatcgcgctgctggtctctgttccctgcgccctgctgtctgtttttctcgtgctgaaaggttgggctctgatgggggatgccatgagccatgccgtgtttcccggggttgtactggcctggattgtagggttgccattaggcaccggagcttttgtggctggattatcctgtgctttacttaccggatatattaaagataacagccgcataaagcaggatacgctgctgggtatcattttttcgggtatgttcgcctccggactgattttgtatgtctcagtccgtccggatgttccgcttgaacatatcctctttggcgacatgcttggtataaacgccaccgacatactccagacgggcaccattgccttatttatactgctgattaccggaattaaatggcgtgatttcctgctttactgttttgatattcagcaggccagggtcagtggactacggacgggatggctctattacggattactgagcatgatttcgcttactgttgtcgccacgctaaagtccgtggggattattttatccgtctctttgcttatcgcgcccggtgctattgcagttcttttgacgcaacgatttagcaacgcattattcatcgctgtggctttatcggctctggtatcaacgaccggcgtttacctctcttatttcattgatagtgcgcctgcgccaacggttgttttgctttttgccctgatatttatagttatttttatatactcaagctttaaatataatgagaaatatctctga

SEQ ID NO: 440039 - DNA, 861 bp, Serratia marcescens; identical to SEQ ID NO: 74980

SEQ ID NO: 440040 - DNA, 822 bp, Serratia marcescens; identical to SEQ ID NO: 74979

SEQ ID NO: 440041 - DNA, 915 bp, Serratia marcescens
atgcttcaactaaagacggtaaagataatcctgttaagcacctttatcacaggactgacagctattcatggcgcttatgctgctgaaaagtttaaggtcatcacgacattcacggtaattgctgacatggcacagaacgtggcaggggacgccgccgaagtcagttcgattacccggcctggcgcagaaatccatgaatatcagcctacaaccggagatataaagcgtgctcagggggcacagctaatcctttcaaatggcttcaacctcgaactctggtttcaaaaattttatcaacgattgaaaaacgtaccggatgtggtggtcactacaggtatcactccaataagcattaccgagggtccgtatgatggaaaaccaaatcctcatgcctggatgtcgcctgataatgcactgatttatgtagataatattcgtgatgcgctggtgaaatacgatcagggaaatgctgaaacttacaaagccaatgcggacgcctataaacaaaagatccgtcagacgcttgaaccgctgcgtaaacaaatagaaaccctccctgccgaacagcgctggctggtatcgagcgaaggcgcattttcttatctggcacgcgatctgggactgaaagaattctatctatggccgattaatgccgatcaacagggaaccccgcaacaggttcgtaacgtaatcgataaagtccggcagaataaaattccggcggtatttagcgaaagtaccgtttccaataaaccagcccgtcaggtcgcacgcgaaacaggtgcacattatgggggcgtactttatgtggattccctgagcgcagcaaatggcccggttcccacctaccttgatctgctgaacgtcactacccggacagtggtacagggtttgcacagcggaatgaaggagtaa

SEQ ID NO: 440042 - DNA, 1650 bp, Serratia marcescens
atggttgaagggcaactgactaaggaagggttttattacgatttcgctgtagataaaccttttactcgcgatgacctggggatgattgagcagcacatgacaagtctgatcgctgaaaacccgccgattattaaagagcaggtcacgcgggcacaggctattgactgttttgagcagcggggcgagaaattcaaatcaacggagttgatggaaatactggcagataagtcggtgacactatgccatctcaggcagttcacggacggctttaatggcccattggttccggatcttcgttttctaaaaaatatgaagttgcttaacgtatccggtgcttactggcgtggtgaagccaacaatgtacagctacagcggatttatggcacggcatgggccagcaaaaaacagcttgatggctggcttgagaaaacggcagaagcggagaaacgtgatcatcgcaagctgggtcgggagctggatttgtttcattttcaggacaatgcgccaggcgcggttttctggcatcccagggggtggacaatctttcagtcgcttattgcctatatgcgtagccgccatgaggtggcgggttacgttgaggtcaatacgcctgatgtcatggaccgcagcctgtgggaaatttccggtcactgggataattatcgtgatcatatgtttacgacacaaaccgaggatggccggaatttcgctctcaagccgatgaactgtcctggggcggtatcgctgtttaaatacgggatcaagagttaccgcgatttacccgttcgcctgtctgaatttggtaaagtccatcgttatgaaccctctggatcgctgcatggcttattacgggtccgccattttactcaggatgacgcgcatatcttttgcacgctgcaacaggtcgagggggaatgtaaaagtatccttcagttggtgcttgatatttataagcaatttggatttgaagaggtcgcaatcaagttatccactcgtcctgaaaagcggatgggaagcgacgcagactgggataggctggaaaacgcgctctcagcctctctggaagcgcagggattacaatggtcggtaaatcccggtgaaggtgccttctatggccctaaactggagtttgtgttacgcgacgcgattggtcgtgactggcagtgcggaacgctacaggtggatatgaatctgcctgagcgatttgatattggctatattgccgaggatggctcgacaaaacgcccggtgatgttgcacagggcgctcttcggctcccttgagcggttcaccggtatccttcttgaacattacgtcggtaaactgcccgcctggctgtcgccggttcaggccgtggtcatgacgattaccgacaagcagcatcactatgcggagcaggttttgaaggcgcttcgcaagaaagggctgcgttgtgaggccgacctccgcaatgaaaaaattggatttaaaatccgtgaacagactctggcccgcattcctttcctgctgatcgttggcgatgcggaggagaatgcggcgcgtgtcacggtgcgcgatcgtaccgggaggtgcatggggacgctgttactcaatgaggcggcagacgctatcaaaatatgttgccagccaccggaggttcaccttgattaa

SEQ ID NO: 440043 - DNA, 903 bp, Serratia marcescens; identical to SEQ ID NO: 137618

SEQ ID NO: 440044 - DNA, 1347 bp, Serratia marcescens
atgaagcctttattactgaccaatgcattaataatcaatgaagacttgcgctatccggccgacatcctcattgataaaggacggatccagaaaattgcctcgcttattccctcccgaacggaatggcaggttattgatgtgcgagggaaatgggtgatccccggtatgattgacgatcaggttcatttccgcgaacccggtctgacgcataagggaaccattgccagtgaatcagctgccgctgtaatgggaggcattaccagttttatggaaatgcctaacgttacgccaccaacaacgacccttcaggcgctgcgtgagaaatttcaacgtgcctcgcattcttcgctggcgaactacagtttttacttcggcgcgacgaacgataatcttgacgaactgaaagcgcttacggcttcgcaagcctgtggggtgaaggtgtttatgggagcttctaccggaaatatgctggtggacgatgaacagatcctggaaagtattttcgccaacgcaccctgcctggtagcaacacattgcgagcataccccgacaataaagcataatgaggagacatggcgggctcgtttgggggacgctattcctgctggcgaacatgccgctattcgttctgtggacgcctgcctgacatcttcccaccaggccgtctctctggcgaaaaaacatcgtacccgattacatgtcctgcatatcaccaccgcagatgaactcgctctctttgatgctgctcccacgctggaggcgctgcgccagaaaaccattacagctgaagcctgcgttcatcacctgttttttaattatgacgattatgaaatgctggggcataagctcaaatgtaatccatccgtaaaatcctcttttcatcaggaagccctctggagaggcgttaatgaaggcattattgacgttatcgcgactgaccatgcgccgcatttgctggaggaaaagcagaatgactattttgctgcgccttccggcttaccgctggtgcagcatgctcttcctgcactgctggatatgagcagcagggggatttttaccccggaaatggtggtgagaaagacaagccatgctgtagccgagcgcttccagctcaaagatcgtggctatatcagagaaggctattgggcggacctggtggttatcgatccgtttagtcatcaacagataatccgggaggatgtggcatacaaatgcgggtggtccccctttgaaggccggattttgtcaggcggggcggttgatatgacgctggtaaatggccacgttatctggaatgggcgcaccatacagcagaagtacggcctgccactggaattctgtcgctag

SEQ ID NO: 440045 - DNA, 1023 bp, Serratia marcescens; identical to SEQ ID NO: 74974

SEQ ID NO: 440046 - DNA, 336 bp, Serratia marcescens; identical to SEQ ID NO: 74973

SEQ ID NO: 440047 - DNA, 1185 bp, Serratia marcescens
atgtcggtcaaaaaaatagcagttattggtgcaggcgtactcggcctgtccgtggcccgctccctggcgcaacagggagcaaaagtcactgtttttgagcgtagccatgtgggggcggggacaagcagcacgacttttgcctggattaattcaaatggcaaaacaccagaaagttatcatcatctcaatgccctggcgattgacgagcatatccggctacaacaggaacggaccacagaaggtcattggctaaaagcgactgggacttatgaatgggcggctggtgcgccagagcaaaaacggttacaagaccgggtcagccgtcttttggaactgaactatcctgttcagaacctttccgcagatgaacttaagcgcaaagttcctgaaatccgcgtgggatctcatgccggagatatctggtattttccaggtgaatgcttactggtaccttccgtttttatggcatggctggtgtccgagcttcatgttcataacgccgaactgaaaacacaaagcgaagtgacagagttaactgaagaaaaaaatagggcagagataagccttgccaatggcgaacgttggcagggagacagtatagtcattgcggcgggaagatggtctgccgaactcgcttcgctacttgggcagcaactggcaatgatcgatccgaaccagccgaataaaatcgcatgtggttttctgggctatacgcgcccggtgttaacccagatacaggcgaatttaatcacgccagggttaaatgtccggccagaaggaggggggcgattactgcttcagtgtcccgaccttgacagctttgccaatcctgcaaatccggcaccggtagatagctatatcggtgaagaaatgcacaaaaggctacggaagctatttaataatatggaaatggcacagctggaacgtatagctgttgggcagcgttcccgaccggcagatggtcttccagggcttggttatatctctggtaagcgacgaatctacctcatggtgacgcacagtggtatgactctggggccgttgatcggacggctttgcgcggaagagattctccacgataagcgttcttcgcttttgagtgatttctctcctgaaagattacttgggaaaacggcaaaggattttcctgcttttactacgttacatttcccggctgcacagtaa

SEQ ID NO: 440048 - DNA, 150 bp, Serratia marcescens; identical to SEQ ID NO: 264707

SEQ ID NO: 440049 - DNA, 951 bp, Serratia marcescens; identical to SEQ ID NO: 74969

SEQ ID NO: 440050 - DNA, 840 bp, Serratia marcescens
atgaactggcttcatgaatgggttctagcaccttttgtcggcttcggttttatgcgccgggcgctttatggttcatttctgctttgtttaagcgcttgcccggttggcgtttttttaacattacgccgtatgagtctggttggtgatgccatgtcacatgctatcttgcccggtgctgcatttggcttcttactctacggattagatatattaccgatgactattggtgggcttgtcgcagggctgatagtcgctatttttgcaggggcggtttcccgcttaacagtgcaaaaagaagacgcttcaatggctgctttttatttaatctcactcgcagtcggcgtgctcattgtatcgcttcgaggctcaagcgtggatcttatgcatgtcctatttggaactgtgcttgcactcaatcacgaagcgctgttgttaattttctctgtcgcgctgctcacacttctgctggtttctatattctggcgcgcacttattgctgagtgccttgaccctttatttcttcgctccgtttcacgattgggatcgccagtccattttattttcctggccctggtggtactgaatcttgtcgctggttttcaggcactcggcactttgctctctgtcggggtaatggtcttgccagctgtgacggctcgtttctggacgagacgtgtagcaacaatgtgcatagcctctgtcctgataggaatgcttgcatgtataagcggtttgttattttcatttcatttttcactaccttcaggaccgtcaatcatattatctgtgggaattatgtatcttgtcttcttttcactacaaatcgaggaaattatttaa

SEQ ID NO: 440051 - DNA, 738 bp, Serratia marcescens; identical to SEQ ID NO: 74967

SEQ ID NO: 440052 - DNA, 1974 bp, Serratia marcescens
atgagcagcccccttaaatcggtgtttaaaaaggagcacagcgatgagatcagtaaccacagcgtgaaccccgtcttttctgaggtagtcagcgcttttatgtcccgtcgccgctttctgcaaatgggaatggtggcgggcgctgccgtctcctttccttatctagtcaagccagaaaacgccttcgcggcgaaggcaaatccctcagcattatctaaagcggtgtcactgggcttcaccagcattcccgtttcgacagcagacactgtcaccgtgccggaaggctatatagcccgtccgttttatcgctggggcgatgctgtgggcataaagggtaatctgccggaatttaaattcgacgctagcaacaccacctacgaacaggcggcgcaggccggtatgcaccatgacggcatggcctggtttagcctgccgcagggcaaagagaacccggcacacggtctgctggcgctcaaccatgagtacattgataacggcatgctgtttaaagacggtaccgccaactgggatcttgataaggcccgtaagggtcagaatgcgatgggtatatcagttatcgaggtgaaaaaagataacgtgggctggcaggtagtccgtccctccagctttgctcgtcgcattaccgttaatacaccaatgcaactgagcggtccggcgcgtcatcaggcgttgatgaaaaccgccgccgatcctcaaggcgaagtggtactgggcaccatgcaaaactgcgccaatggtaaaaccccgtgggggacgtacctgacctgtgaagagaactggtcggatatttttgttaaaaaagcgccgcgtaacgtgctggagaagcgctacggcattagcgatagcgatgaatcctaccgctggaacgaggttgacgaacgtttcagcgtcgataaaacgcccaacgagccgaaccgctttggctgggtggtggagattgacccctacgatccgacctccacaccgcgcaaacataccgcattaggtcgctttaagcatgaaggtgccgccgtgacgctggcgggggataatcgcgttgtggtctatatgggcgacgatcagaaatttgaatacatctataaattcatctccgagaacaaatatgaccctggcgatcgcaaggcaaatatgcagttgctggagtcaggcacgctctatgtcgccagattcaatgacgacggttccggcgactggctgccgctaatcttcggtgaaaatggccttgatcaaagcaagggtttcgacaatcagggcgatctgctgatcaaaacgcgccttgctgccgatacggtgggcgcaacaaaaatggatcgcccggaatggatagccgttgatacccatgcgaaaggcagcgtgtattgcacgctcaccaacaattccgatcgcggtaaagagggcaaagccccggttgacgcagccaacccgcgcgccaacaaccagttcggccatatcatgcactggcgcgaagagagggcagaccccgcctcagcgaaatttacgtggaatattctggtgctcgccgggcgtactgacagtgacgatcctaaagcgaaaggctccatgcagggggcagaattcggcagccctgatgggctctccttcgatcaccgcggcgtgctgtggatccagactgatgtttcctccagtacgattaataaaaaggcgtatgaagggatggggaataaccagatgatagcgaccctgcccggcaccaatgagtatcgccgctttttgaccgggccacgcgggtgtgaaattaccgggatcgcctttacgccggacaaccgtacgctgtttattaatatccagcatcccggcgaaggcggcgacgacattaccgatccgagcaaccctcgggctatctccaactggccagattcaagatcagacggacgaccacgttcttcaacagtcgttatcactaaatcgaatggcgggataatcggtacctga

SEQ ID NO: 440053 - DNA, 1005 bp, Serratia marcescens; identical to SEQ ID NO: 53712

SEQ ID NO: 440054 - DNA, 468 bp, Serratia marcescens; identical to SEQ ID NO: 97050

SEQ ID NO: 440055 - DNA, 1020 bp, Serratia marcescens
atgctcatgtcgtaccgttatcactgggcgatgtggggagccatggtagtgctgattgggttgatgttattcagtattaccagagggacagtttcactgtcgctaatgcaggtgctgggagcactgaagctggtggatgagccggtatctgccatggtcagcagaattgtgacggatttacgcgtaccgaggatgttgctctctgtgctgacaggggcgggactggcaatggtaggggcgttgttacaaactaccacccgtaacgatctggccgatccttttttgttcgggctatcctccggcgcgtcagcgggggcggtgctggtgatcacccgttttggtgatcgacttggtgtattaacgctccccgtatcggcgtttgttggtggtgtgtgttccgccatagcagtaatgctgttgtttcattttaaaaagcaacgcggagctgagcatctaattctctgcggtcttgccatctcttttttgttcggggcgctgaccagttatttcattttttcgggcgatcagcgagctgccagctctgtgctgttctggtcactgggtggtctgggattagccacctggaataatttgcctttcgcagtgttcagcctggtgttgctgtttgcttttgtcctgttacggtggcgctctctggatggtgtgctggcaggagaacagacagcgttgtcgctggggattaacgtgagtcgtctgcgcatcgagatttttctttgttgcgcactggcaacatcgttgatggtggcattaaccggcgtgattggatttgttggcttaatggtgcctcatctgtgtcggcattttgcaggagttaagcatctgttgttgttacctttgtgtggcgtctggggtgcaatattactgtgtggcggcgatatagtcagccggacgatactggcaccgcaggaactaccaattggcattattacggcgggcattggagggttgtttattatcatgttactcgcacgaaattcgtccagaaatacggcctgttaa

SEQ ID NO: 440056 - DNA, 957 bp, Serratia marcescens; identical to SEQ ID NO: 135621

SEQ ID NO: 440057 - DNA, 237 bp, Serratia marcescens
atgtccttgtgcatacttgtatggccaaccacttttatcaagcactgcaaaacaaccggcattgtaagcagcttttatatcgacatctgtatcaccaatcattataactcgctcaagatcgtcaatatcaaattccttcatagcataatgaattcctttcccatatggtttcgttggcctcacatcctcgtagcaaaccagcatatcccattctatatcagggtatgcccacgctaa

SEQ ID NO: 440058 - DNA, 273 bp, Serratia marcescens
gtgccgctcagcgaggtggcgacaaaggatgatttcttcaacatcaaaaaggtcagcgccgccgacctgctggacgcccaccgcatcccctatcaactgatgggcggcaaaccggagaacgtcgggtcagtgggtgacgtagaaaaagccgcaaaggtgttcgtccgcaatgagctgacaccgctccagcagcgcatcaaagaagtgaatgactgggtcggcgtcgaggtcatccggtttaaaaagtacagcctcgacaacgacgacgaatga

SEQ ID NO: 440059 - DNA, 1620 bp, Serratia marcescens
atgagaattgaaaggggtacagtatggcacacctacacaatgcaatcgcccccatataaagatcctgaaaaaatggctcgcaacctcattaaaaccggggcattcctgtcaatactgactcctagcaatgtattttattacttagaaaacgaaaaaccaaagaaattaaaacttcaaataaccccaagcaacaacaataatgcaatttcactacagggacacgaatcaataacagaagatggtgtatgtaagtttacacaacgaagcttaatttcagccattaaaataagactatctcaaaacaaaattctttattcaaacgatgactttcactccaatggtttaatttgcaatataaagccaatagtaacaaaagaatccgaagaaaaaacattactactcccttccctaaggttgtttgaaaatggtttttctcatgttacattcattgacatcgaagaatacgatgaagaactgagtcagtttatcatcaaaagagtcaatctccctctaacacttatcggctccataactactagtttggactacataaaactatcttattcaatagactattcgaaatttaacctactcataagattgctgctaaaattcaatcgacgaaacgaattaaaaaagttaaaacattcggccagcccaatatctataggtaaatattcggcatctgggttatatgttgactatgcggaagttctaaaaatacaacacaacctaagtgatctggcacgatatatggttgcgatcgtttaccattcaaacagaagacaaacgctaaaggagctcttaaatggccgtgacataacaaagttctttggtggctggcaaggaaagccgaatgtttatatatttgaacataaaaatcaaaaaacaaaatcacttgataaccatagagaaaacaagaagctaatatcatccatactagctagaagccaacagttttacaataacaggaaaaacataataaatgagtaccgagattatcgagcttttgatgacttcaattacttctccgaacagtcggcatctcttactctcatgtcaaaagaaacagctagaggaaaggggcttattgaaacttatactgaagaaaatctcatccttgataatcagattaaaagtgatcttcgcggtttaatatctttcttctatgaatccaaaataaatgaaataaaagaagaaaaaacccatcagggattaacgaagattcaagaagatataatttattttgaagagtggttacgccttgcatcaaaaccatatggtgaaatacaagactatgccatggggatattcaaggcgcccgatataaaccaagccaaaaacaatgtcagcacattactcaaggcaagaatacaagtggtgaaacttgaggatgccagagtcagtgagcgaagcaacagacttctaacgatagcgtttggtctgatagcatcaacgtctctgtcaccaataattgcaaagccagtttttaatttactagatatagctgaccaagaagtatggaagaaattgagtaatttcgaggatgccatttactttctgacaaccgtacttttagtgttaccaagcatttggttattaaacaaaataagtagatag

SEQ ID NO: 440060 - DNA, 3132 bp, Serratia marcescens
atgaaatttaaatccgtggatattgtaggttttcgtgcatatgcattagaaggtgatggggcattcgacttttcaaatccagacggcaaagtgtccaactttatagccatatatgctccaaacggattcggcaaaagttccttttatgatgctatggaatgggcaataacaaacaacataggacggtacatcagagaaagtcagcgtacaaataatgatgcggcatcactctatttgaataatagcgagtcatcacaaagaatattaaaaaatagatatattgcggaagatgctccctcatacgtaaaagtgcgtgcgactgggaacaaggagtttgagcgttccgtcagacgtcccgcgctaggccagcgcgactacacctatgatacagcgcgaacagacaaaaccactaagcatttagcagacatcttcttgtctcaagatgcaattgatgtattcttaaaagaagaacgaccggagcaacgctatgatcgtttcatgggggcgtttggcggaaccgacgaaaaataccgtagcagcttattttcttcaataaaatcttgtaatcgagagctaaagcaattaaacgatacaatttcagaactcgaaggaagtttgcgtgagcccacgctggattttagtgttgacgaagttaataaaactatagatgaaataaacctcaatggaggaaggtttcctaatattgaaagtgatttttcagagttggaacagactgaattaatgtctttgctttctaaacatgtaattgaattaaatactaagctaacctcattacggcaacaggaactgaatattgacacctgtttgggaaatctacctatccttgcccagtatcgtgaccatcaaacgaaactcaatgaagacttggaaaaaatacttgcaaatagagatgatattagttcattatccaaggcgcaagatactaaaattaatttagagcaacaacttcgagattttattaatgaaactcagctgatatccctaattttgtctaaccataaaaaattaaataagacaattgacgacatcgctactcataagcaggaactctctgctctcgatatttcacttaaagacagaaatgtatcaaacagtgcaaaggcccagtcagtagaatctcttcgccaggagcgcctcgacaatgacactcagttgtcgaacttgatcgatgcattaactaaggtcgaatctcagttcgtcgaaattgacactcaaaataaagtaattcttgtcctcgatgctaaaattaacgaatgcgagagacgaatattaactgcggaaaatcttaagaaatcattattggaggaactgtcaaattactctaaccttaaattcggaaggtcggccatatcagacgtaactcaagcgttacttaagccagacaccgaatttgtagtaaactatcaccagcacttggaactaaaagaagaaatactaaaccgaattaagacaatagatgaaaacgccaaggatttaagagggcaatctaccgatttgttctcgctaattagtatggcaaaatcacttttgtcaaaaactacctctgatacgtgccctgtgtgcaatgcgcaatatgagtctcatactatacttctggagaaaatccaatcgaatggcagcattgaagcggcgctccactcgcttctagagaataaatcagaccttcagaataaaatcattcagatcgatggcattttagaccatgggcaaagctatctgacaactcttaaatcaactgtagttgctactatcagcgaacggctctccactactgagtctgaagttgagcgcctaaatcgcgaattggcatacgcgaagcaagaacggacggtgaaaacggatagcttgcatagcctcagagcagcagctcgaaaccttggcaaagaagattacatactattcttgaaccaagccatttccagcatcaaagcgactatcgttaaaatagacagcagcctggaggaagtgctcgcctcaatcaaagctagcaaagaagtgaccgacaccgtagcttctaatagagctgaaatcctagcgaaattaggggcgatggaacaagacgatatttatattctgtataaaaatcttaaaactcgatacatactccctgatggggatattgttaatattttttcacgaaaatataatgacctaactgaaagccaaaaaaatctaaaaaatgaattatctgctattgcagaaattatcaaaaaaattcaaacaaacttaattcaatctgacgtatactcatccgagacattactccttgaaggattaaattcacttaaggaagaactgagtcaagttcaagactcggcaacgttaattcagacaagtttaagtcccttcgttaatgatgtcactgcgccaatcgactctctcaatgaggaattgcatcgcaagaaatatgataatggaaagaaaataactacagcgtcttcttctttgatgcttaccaatgttgttaaggcccagattgaggatgtcctgccattcttcaaatttagggagattcgcgctaaaattaactctcatcgagatacaaaaagtcagattgaggtcctgtctctttcattaagtcgagagctaaagaagactgaaattaagctcaaggagagaatcgataatttcttctacactgatttaattacgtcaatttatcgaaagattgatccgcatccatttttcaagactgtaagttttgaatgtattttccctattgaggataagcctaggctagaggtgtatctttatgaagatgagatgagtcagcccatttctccagcgctttactttagctctgcacaattaaatatacttagcctcagtatatttcttgcaaaagcattgcatattgagcatgatggcgagcaagtaaggtcaatattgattgatgacccaatccattccatggattcaataaatatactttcagttatcgacttattaagaaatatatcaattaaattcaatcgtcaaataatcctgtctacacatgacgaaaatttttatgaacttctaaaacttaaggttccagaggagaagtttggttcaaaattcataagattcaaatcatttggtgttgtgcaagctgatggcaatagtgattaa

SEQ ID NO: 440061 - DNA, 543 bp, Serratia marcescens
atgcatatatctaactctaatcaagatattaatttcttgtcacgacagtttcctcaagcagcattctacctatatcgatcacagccagaaacttacataagttgttttgtctgttggattaaagatgaagcagacttgctttttctgtggaaaaaagtgtctagcattatcgcctacgaataccaagctgaattggaaaataaatttgacgcttggaatatataccttgcatttgtaacgccatctgcaattgcaaaaacaacaaaatatgaaattgagaacgataaattttctatgcggaaatttgttgtttcagatgttgattatacttttgaccctggaatctatctgaacaacgagatcttaggtgccgatctaaaactcagccccgtattctcatacaggcctcaaacagatgaagaggaactgagtgaactgcacaaacagttgaaccaactgttgccagaaaaaaaagcaaatccaacattatcttctgaaaaaattatttacttggcaaagtgggtttctgacaatgaaatttaa

SEQ ID NO: 440062 - DNA, 609 bp, Serratia marcescens
atgaatcagcttcatgagcgtggatctaagcttagttctgtggaaaatatgacccctttcgcgctctatgagaaatttaagaaaaagctattaatcagagactgcccagagcaaaatctctataatgagaatctttggattgcataccttgagttcttaataatcagtagcttaattgatgacatcactattgctgatttctcttacattgatgagaactccacccgacgcagattcttattctcaaccgatcaagataattggatttggaagttgatggatatttttcgatcagacttcaaggggctaaaactcggtggaaagattattgtcagcacaggggatagcgcaccaaagcatgaagctcgtaagtcgtctttagacagggtcgtaattgatatcggacgcggtcaaaaaagtgaaatgatggtcgactcaggaataacaaatccagctattgacttcaaagtttaccatttagctggcttacacaagctttgcgtagtagatgatgatgaaaattttgccggttactacgctggaagtaaggaacatggcgaagttgaattaatggcccgaataaaagacctttacaatgcatatatctaa

SEQ ID NO: 440063 - DNA, 639 bp, Serratia marcescens
  misc_feature (619)..(628): n is a, c, g, or t
atggttaatgacggcagtggtgtgtttatccaatcggcccgcggtaaccaaagctatatactcacggcaaaacacgtattggaaaccgaagagaactcgagtcaatattttgacattgataaaatcactgtcaaaaaaatgaatggagatgtaattgatttagtgagtcggatcgtcagcactgaccacgacctagccgttttgattacaagcagcgagctagcctccgacctacaaatagcggtatcaaaaccagaaagaaacaaaagagttttttattatggatacccctctattcgtagagaattagaatctcgcgaacagttaagagaatatccagggcgagtcaatgaaattgaagatgatagattttcagtaactcttgacgggaggccgggctggagtgaagtagtgggatcatctggcggcggaattttcgtcgaacttggaggcgatattttccttcaagggatagagtcgagagtagagggcgttgtcgaccgtgaatttcatggaaaggttatttgtacgcctgtagccatgattgaaaaactactctctgaatcaggacttgataaaatacatcctccctcaatgactagttttatagggctggtannnnnnnnnnctggtagataa

SEQ ID NO: 440064 - DNA, 1050 bp, Serratia marcescens
atgtcagttaacgttcgtgtattaaaagcgtttcacggagattgcatattcataaccgttgactcaggaacggttacggagaggattctgatcgatggggggccagaagctacgtttggtgtctctccacagggagaacttagatgcctacttaacgagctagaagctgaaggtaagcaaattgatctcgtcatgctcacacatgttgacgatgatcatatcggtggtttaataaaggcctttgaggtcaaagacggactgacgaagcttgcacgtaaagtgatatttaattctgggcaactcatccatgactacttcaaagttccaatagatcctaataaagatatattagggaactttactcaatcccaaaatacttcatttaaacaagggaatactcttgaacaattactaaaggatcttgggatatggcacaggaaggtgataaagcagggcgataaaatttccctgcaaggctgtgagttgatttatcttacaccaaacgaagctgagttaaaaaaacttctggtaaaatgggaaaaagaacaatctagcccatttacctctgcatcaaacaccgattggaaaaagagctacaaagagctgattgatcaagactcatttaaagaagataattcaaagccaaatggaagttcaatatcatttattttaaaagtaggcgagaaaaattttctatttttaggtgatgcacaccctactagtatcactaaaggtttagcaatgtttggatacaatgccgacactcctatcaacgcagaaatggttaaactctctcatcacgggagtaaaggtaacactagtttagaattactgtgtgcaataaattcttcgaattacatagtcagcactgatgctacccgacatggccttccaaataaaacaacgtttgcacgtatccacaacaaaaattcaaatgcagtaatattcttcaattataaatcggtgatctcaagtatctatacaaaagacgaacttgcacaattaaaagaacgtgtcatggcgctttctggagagctaagctttgcctga

SEQ ID NO: 440065 - DNA, 972 bp, Serratia marcescens
atgtctagatattctaaagcaaattgggacgaaatgttacaaaagtacgttaatagtggcgcaatggaacggagggggttgaaatacattcatgatccacgttcattgcaagaactttcatccgttcttgcgtgtcatttggagcattcaggtatagacgcctcagttaaagtgggaagtatttggattgatggaacaccacaagcaaaagcaaaagtattaggtaatgctgaaagcgaagtccaatgtgaacttgcagatcttcttattcttctaaatgtgggaataaatggcgctttggacaggcgttcagccgtattgatccaaggtaagatcggaactgatccaacaaaaataccgtcaggaaattcaactaataaagagcgagcattactggagagatttgatgattctcacccacttgaaatatataaagatacgcgaggaaagagcctgcttaactcatcttcaaaatataacattaaaactggattaagtggttttaaaaaatatgcaaggtatttagtaatgcccacaatgctcgacagtcctattgttcaaaagcttgggccatttgtaacaggctgggcaacaaggaagcgaagctatgacctgaaagatattgatttatttacacttataccaatagctttatgggaggataaagttggcactgccttattgaatcaagctagtgatgaatggacgcgtttagttgaagatatagctgggcattatgctacaaagaaaatgaagcgttttggtggatttgatcgatgtgttgactcgacaatgcatttatccttttggagagatggtgcattctctgttaccaaaagggttatgcatgatacatcgcatttagatatggatataaatttaggagataagtttgatgaaagtattccaccacgaatatctattatcagatttgatgtgaatgtaattattacagagcaagaatctcattaa

SEQ ID NO: 440066 - DNA, 978 bp, Serratia marcescens
atgaaagaaatatatttaaatgataatactacttgcgttggagttgttaagagtgtcgcagattttctcaacattgttaaaaaatccaatggggaatgggtttatggtaacttatttagagggcaagggaatactaaatggccaatattatcatccctcaccagaagcattaccccttcaatttctgaaataaaagaaaaatatggaaaaatagaattaaactcacaaaattttgaagatgtgtttagtagtagctcatttaaaacaagcatgaatgataaattaaattcaatatatcatggttatgtgaattttaaaaatcttttacctccttatcttgatgaggttgaaaacaaagaattcattctcaactcagatctatcactgctattgttagctcagcattatggattaccaacaaggtttattgattggagcctaaatcctttggtggcactttattttgcagttgaatcctcagcacctaacgcagaggaaaaagcagctgtattcagctatactggaggaaacactctaacaggagaagagttttatcaaggttttcaatttggcttcgatgttaactataaaaaaatgttagacgctttaacttctacagatcgcaataatttcaattttattcaggcagggaaagtatcatcctacaagtttaggaaactggcagtggaagaagttgaattcatccctagccatccgatatctataactcacttcagatttgatagacgaatggatggtcaagaatgtatgtttacatttcaaaataagttattagagccattctcgccagttgattccaacgaattaataaaaattgaagtagagaatccttattcaataaagactgaattaattcaattgggttttgttacatcaaaaatatatccctctatttcaggtttggctcaaacactcaaattcaatcatgcaaattctaattataaattccttaaataa

SEQ ID NO: 440067 - DNA, 1122 bp, Serratia marcescens
atgagtgatattttaacagatgtaaaggaagttattaaagaaagagtttcaggaccattctttggatatatatttatttcatttttgctctttaattgggactggttctatttttttatatttagcgaccttagtgcagaaaaaaaactaagcagcattagtatatcgtatcagtatttcagggggataatttcgcctattgcctcgggctttataatgtgcttagctgtgccatttatcaacgcatttataaaaaagctacattctattgcagttagaatcattaaagagattgattacgacaatgaaaactcttttgaaagaataaaagctgatagggaattaaggaacagtttaaaaaggcaaaaagcatccattatttctgatgaaatggataagctagaaagtaagtataagtcactgtctgactctacggaagcattacgcgaagaaacgagccaactaacagccaagggcttggagctgaggaagtatgaaaacttaattagtgaaaaaataggaaaattgaaaatagagttacaagaaaaaaatgccacagctgaaaattttgagagactgaacgaattaattaaagaaaagaacagtgaaaacactaagttatcatcatcacttgatgatctagaactcctaatggcagatattgcaaaatatattgagtttagagatggaaatcgacctgatagcattctattaacgcataaagttgaagaagcattagaaaaatatggctacaaaaagactaagaccgaaagtaaaaagttaacaggtttgggtgctgaatggggacagccaaccaataaaggattggggttaggttcgtggctttctaataatgaatcaataactaaagcttggaacactggcattttagggaaaatgggaggtctcagtgattctattattgagccaataccagcggttaaagaagccgagaaattgggcaatctcacagtttttgacaaactaattaatcagccaggaaattcgtcgatatttaaagcagccgaactagccgaaaaaatgacaacaccatcgtcacttatgcgaagaaaaatagataagaccgacggggatgttaacactcctcctaaggatgaatga

SEQ ID NO: 440068 - DNA, 855 bp, Serratia marcescens
atgaaggggttaattgactatttacagcttggaactaacggggtgattctgactgttttaggttggctttattttgcatatgtgaagaatataaaggcagaaataaagttaaaagacgaacagattaaagtttcagagaaaaacttggctttttggaaggataaagctgtcgaattagagaggaagtctccagagtttttcgaaggtgtattggaaaataggataaaaataagagagaaagaattgtcgaggctgagcgatgatacgttaaaaaataaaaacgaaattgaggagaaaaatagacagttagataagttaaattcagagcttgaaaaggcaaagtattttagtagggcgttaacctactatgatttagaaattggtgatgatgtcataattcctgagtcagaggttgaattggtagaattaggtgagatttttgttgactctgcttctattatgattactgatccatggtacatttctcagcagtggaaagatgttgagtacgttagggaagattcatatatggattcacagtcaggtgaggtgtttaaatataggcgtgatttcgacaggtttgatgaaattctcatgccatacaacaaagatgtaaatcaactgattaaagacgatgttcttgttttaatgaaagaaaaacgtcagttatcatattcttatgcaggttctgcatatgcgactagtacagatttaggtttcggtgttcttcctttcgataatggaaatttaggcgctgccttatgcataagaaccgtttatggtgatggtgtttacagggtaatgggggagaagtacaaggggagggttataagggtatacattgatctccaataa

SEQ ID NO: 440069 - DNA, 225 bp, Serratia marcescens
atgagcaagcgcaaccggggccgcaagcacgcccagccgacgacacaaaaacagactggcgcgcaacacgtcgaggcgttcaccttcggcgacccgatcccgatgctggatcggcgcgaaattctggattatctggagtgctgcgtcgtcgatcgctggtatgaaccgcctatctcgttcaacggcctggcgaagacgttccgcgcggcggttcatcacagttaa

SEQ ID NO: 440070 - DNA, 972 bp, Serratia marcescens
atgacgatcaccaaacaagataacgggcaatacctggtagacgttcgaccgcagggccggaaaggaaaacgtatccgtaagcgctttgacaccaagggcgaggcgcaaaagtatgagcgctgggtaatcgctacgcagaatagcaaagactggatcgagaagccgccagaccgccgcccactgaccgaactgattgagctatggtggaagcattacgggtgtacgcagaaatcgggcgagaataacctgaatgaattgctgaacattgccagtgacctaggttcaccgcgcgccgaccaggtcagcattgcgacgttctcaaactatcgagctgagcgcctggaagccggtttaaaaatcggctccatcaatcgacggcacatgatgctgagcggcgtgtttaccaggctgataaaactggggcactttcataacccccatccgctgaaaggcttggcaaagctgaaagacaacaccccggaaatggcctggttggacaagtccaggataggcatttttctggagcacctgaccggcgacaacctaaaggtagtcaaactgtgtctcgccaccggcgcgcgctggggtgaagcggccgaccttacacgcgatgccgtgattaaatttaaatgcacgttcacagacacaaagaacggcaaggacaggactgtcccaatctcagaagaaatccacgcgatgatcacagagggcgacggccgtcagctgttccccgatgtgaattacaacaccgtgcgcaacctgcttaaaacgcgcttccctgacctgccggacggccaggcaacacacgttatgcgccactcgttcgccagccactttatgatgaacggggggaacatcctcacgctgcagaaaattttaggacacgcgaccatcaaccagacgatggtttacgcccactttgcgccggactatctgaatgatgcggttcgactaaatccactgtgcgattaa

SEQ ID NO: 440071 - DNA, 300 bp, Serratia marcescens
atgaacttaggcgaaaaaataaaagcgatcagagttgctgaggggcttagtcaatctaagttctgcgaaatcatagagatgtcgataagcactctaaaaaagtatgagggggggcacgctgaacccggcggatctgttctggtcaagataaccaatcacccccggtttgaaaaatacaccatgtggctgatgagtaactccaacaaaacgtccgaagctgcggggcaaatctccccgactctctcccctgatgggcacgacgacacatccgaccaccaaaaaggccagaaggctggctaa

SEQ ID NO: 440072 - DNA, 261 bp, Serratia marcescens
atgacagtcaaaagacccaagcccgctatggtgaaaatgcctgattgcccggtagttttttgtttgccatacccgaaattgacgctttccgcctacgcagaggtcaccgggcaaaccgtccgcacggttcagcagcaggccaacgaaaacaagttgacgctgaccaagaagaagaagggcagggaacgcgaagtgaacatggtttacgagttcctggaagcctacgaagaggcgcaggaagcgctacggatgaaggtttaa

SEQ ID NO: 440073 - DNA, 213 bp, Serratia marcescens
atgaaccaagcggcctatgcgctggtgaaggtcagcgagcacaccaacctttaccgaggtttcagcatcacccggttgccccggaaggcgctgaacccggtcacccggtaccacgtcagccagggcgatcagtcttacggcaagttcgacgcgcaggctgaggctaccgggtacatcgacgggctatacgaacagagcgaggtgaaggtatga

SEQ ID NO: 440074 - DNA, 333 bp, Serratia marcescens
atgaattcgataggtgatattggtgtagcgccaacgccgagccaggttaaagccgggctggtgcattcatataagtgcatgcagatgatcgcagccgcgaagaatgccggtaatgaaacgcaagaatttatcaattctttgcactcacggcaccgggggctgatttatttcactgccgaaattccaagagcgaggcacaaattgaaatttgagcatctgaccgagagagaacggcttgccgttattgaggcgatgcgagagctgcgggagttggtaggctcattcccgcagcgattaagcaatgtcgatagtgtgttaagtgtaagcgagtaa

SEQ ID NO: 440075 - DNA, 915 bp, Serratia marcescens
gtgagagtcagcgatctgtttgccggtttgggtggctcctcaacaggggccagaatggcaggggcggaggttgtttgggctgcgaaccattggcccgaggctgtcgaggctcattcaaaaaatcaccccggtgcgatccacgtctgccaggacttaaatcaggctaattgggctctggtacctcagcatgatctcatgatggcctcgccatgttgccaggggcacagcaaggcaaggggtaagaaatacggcaacccgcagcatgatgccagcaggtctactgcgtgggctgttccctcagcggctgagtgtttgggcgttaatggcgtgatcgttgagaacgtgccggagtttctgaagtgggcattatatccggcatgggaggcggctatgcaggggctggggtattcactggccccgcatattgttgactgcgccgatctgggggtgccgcaaaaccgtgtacgtatgtttatcatttgcacgaaaagcaaatcgccgctctatttgaatctgcctaaatatgaccacgttccggctgagtcatttattgattttaacgctggtaaatggcaactgattaataagcccggtcgcgccgtggctacgttggagcgcattaaaaatggtcgcgccgtatttggcgatcggttcctgatctcatattacggtaattcgaaatcagggcgttctctcgcccggcccattggcaccatcaccacccgcgacagatgggcgattattgacggcgatcgcatgcgcatgattaacgctgacgaatgcatgagcgcaatgtcattccccggtgactacatccggccaccatcgcgcaagttaaccacttggatggccgggaatgcggtaccaccgaaggcgatgtgcgaaatcatcaaggcttatcgggcccaggcatga

SEQ ID NO: 440076 - DNA, 2262 bp, Serratia marcescens
atgagtttggacacccgcggccgctacgcaccgaccccgccaaaaccataccccggcagcgctgaaacgcccgccggggttttcgcttggaaccgcccccgcgaggccgtcatcaccgaagcggcgaacccgccgatcgaagagtgggcgtttcgccaggggctgcatgccgagccgatgccgcgcgctcgtcgggtgcgccgccgtctggcgtcgctgcctcacttcatccggcgttactacgcccagcgcgccgacagcatcgaagcgcagcacggcacaacgcgagccaataaatacttaatcaacacgtttgaaaagcacgtcctaccgcgcattgatggcgtcaacgatcggtatcgcctgggcgttgtacccggtgtgctgatcggcttccaggatgattttgcccgcctgccgtggtacggcaaacgcgagctcaagcggctggcgcaccggctggccgactgcatcaccgccgaattcatgaactattacgagagccaggttgaaaaacatggcgatgtgtcgtttgcgattatctatgcctacggccgcgccgcgtgggtggtatcgcacctgaacatgttcgcaccgggctggcgcagctactgcgagatggaattgaccgacgccgacgccctgcgcagcatggcgcgcctggagtcgccagcctggtggctgcgcaggctgaaacgcatgcatgaccagtggcgggaacacctgatgatcgccgccggatacgtcagcaagaaaacaaccccgtattgcagcgatccggcgctgaaagaatggaaggcacagaagaaagctaacgttgaatatctcaaggcgatggagctggaagaccaggacaccggcgagcgaatatccctgatagagaaggtggccggtagcgtcgccaatccggccaaccgccgccgcgagttgatgacccgcatgcgccactttgaaaacatcgccgacgatatgcagatggttggcgacttctacacgctgaccgcgccgtctaagtaccacgccatgcacagtaccggcaaacgtaacgacaaatggaacggggccagcccgcggcaaacgcagaaatacttatgccgcatctgggcgcgcgttcgtgccgcctggaagcgggcagggatccgcgcgttcggtttccgcgttgtagaaccgcaccacgacgaaaccccgcattggcacctgttgctattcatgcgccccgaggatatcgacgcggcgcgcgatattttttgcatgtacgccaggtgggaagattcggaagagctgcagggcatcaaagccctggaggctcgtttctttgtggagccgatcgacaaagagaagggctccgccaccggatacatcgccaaatatatcagcaagaacattgatggatttgccctggacggccagctggatgacgacaccggcttaccgctgcaggataccgcgcggcgcgtgagcgcatgggcatcacgctggcgcatccgccagtttcagcagatcggcggcgcacccgttacggtctatcgcgagttgcgccgcatgcacggccgcgagctgcgtttgcacccggagatcgccccggctcacgaagccgccaccgtcggcgactggagcgggtacacgatggcccagggcgggccattggtcgcccgcgactgcatccgggtacgcctgaactatgaagtcacgccggacggtaacgcctacggcgatgacgtcagccgcattaccggcgtctatgccccggcatcggggccggagtcggtcgtttttacccgcaccgcgacttacaaaatcgtgcctaaagccagggtggacgagggtttggccgttgacgttcagggcgcaccgcgcccccttggagttctgtcaataactgtacccgtcgccgacagtacggcccagggatcggggctggctggtgccctcatagatgaggataccagccggataccggttgattttgaccgtatgacacgccaggaacggcgggaattactcgaaagtcttcgggcaacgataccgaaacgaagccgaagcggtgatctgccggataaaccgcgcattgtcacgccggaaatggtggccgggatggacgatatcgcccgcgaattgctggcgttcttccattccatcgggctggagccagaacccagcgagttcagggcgctgttatctggggcggtggtgaattttggcgacggtcacgccttccgattggacggtgatcgactgctaccggtggggcgtgtgcattaa

SEQ ID NO: 440077 - DNA, 1773 bp, Serratia marcescens
atggcccaaagcattgtcacgcgggcatttgaagcctggatcgtgaataaaatcctgaataaagagcccgccaggcccgacaagatgatttttgccttgatacctgggcaggatgaaaatgcggagatcgaccggggcgaaggcatgccggaagccggacagatccagcataaggcggatattacgcaatatggcgcgctgaacgaaaacgccgtggtgtattccgtggtgctggataccacgatcggcaactgggaatacaactgggtgggcctggtcgacagtgccagcaatacggtgatgatgatcgtgcatacggccacccagtctaaaaccaagaccgagaacggccagcagggcaacagtctgatccgcaacctgtcgatgcagttcgacggggcggcagcggcgacgcagatcaccgtcacgccggaaacctggcaaattgatttcagcgcccgattgcagagcatggacgaatcacgccgcttggcgaacgtggattactacggcgacgcggcgttccgtggcgacggtttcaaagtcagcgtgaccggtaccacggccaccgtggcccctggtctggggtatgtggctggcctgcgcgccgtgctggaaaaagcccatgtgctcgatgtgacgtcgaaaacaggggtgtgggttgatatcagttggcaaggcacggtaaccggagcctgggccaatggtttcaccctgcgcgctgccgacacgctggaaaactatgttgacgcccaggggtaccagcactatgtcacccgcattgcgcggggtgacagcaccacggtgacagacgagcgtaagccgttcccgttggatgcgttggagaaagaaattgaagatctggacgtctacagcaaggacgaagccgacgccagattcctgcaggtggaaaataacctgtccgaaatcgcagcagcaggcgctaaggcgcaggatgctgcccgcaagaatctggccattcgcagtaacgaagagtcggatcagcatttcttgcaaaaaaagggtgacacggccaccggtcaacttattgccccatcgtttgccagtacgcccgaggcaatgccgaccggcgcgggctcgtatgctgaccagttaagcactcaggccccatttttccagcctaactggcaatggccggtcaccagtggcggcgtttttgtaccgattgctaagggaacgtcaacccgcaaggcgcaaggatatccgacggcggtcagttacggttacctgatgcccgcaaataacgaatttgctcaccccaccatccacgtgcgtggtgataacgattttgaatgtgtctgggactttaaccccaaaactggcgctatcagcagcaaagcgggtacgttcgcatcgcaagaatgggtaaaagtttactgcccgttcccggtgggttatgtgatgttgctgggcaataacgccgatccgcgcgcggtatacccgggtacggattggcaggatattaccggcacgtatgatgggcgtgtactggcgttggggtatgacccgctgggcaccggcggtaacaacgaggtgacgctgggggcacagcatatcccacctcacgatcatggcctgaaggcgtacccgtctaacaccgccctggatggtggcacatcgaaccgctacagcgttgacgccacccagggggttgtcagtcaaggattggtgacggggagagaaggcggtacccaggcgttttctgttcaaaacgcctatgtccatgtgcgtggctggatgcgggttgcctga

SEQ ID NO: 440078 - DNA, 3297 bp, Serratia marcescens
atgaataaagtctatgcattggtatggaacccggttcgggagtgctggaacgtggtcaacgaacactgtagccgctgcggcaaaggcggcagcaagcgccgtctggcagtggcactgtccctgctcagcctcctgccactggagcaagccctcgccctgccgagcgggcaaaacatcgtggccggccagggggacatcaccaccaacggccagaacatgactgtgaatcagcacagcgacaaattaatcacccaatgggatagtttcaacgtaggtggcaacgagagcgtgacgttccatcaaccgaacaataagtccatcgctctgaaccgcgtcacaggcgttaacggcagtgatattcaaggaaagatcgacgctaacggcaaaatctttatcgtcaatccgaacggcgtgattttcggcaaaaatgcacaggtgaacgtcggcggattggtcgcctctacccgagacatcagcaacgccgatttcctggcgggtaaaaaccgtttcgtcggtagttcgcaagctgaagtcatcaacgaaggccgtcttcaggctgctgaagccggcagcatcgccctcttgggcgctcgggtgaataaccaaggggtgattcaggcgaatatgggcaccgtcgcattgggtgccggcgatgacattacgcttaatttcgatggcaacaagctgcttaatctgcaaattgacggcgccgcgctcaatgcactggcgcaaaatggcggcatcctgcgcgccgatggcgggcaggtggtgatgaacgctaaagctgccggtaacgccctgagaaccgtagtgaataatcaggggaccatcgaggccacgaccttacataaccaggctggccgcatcatgctggacggtggcgacaatggcgttgttaacgtcgccgggacgctggatgcttccgccaacgccggtaacggcggcacgatagaaaccagaggcgcacgggttaccgtacaaccgtcaaccacgatcaccacgcgttcactcaacggcaaaaacggtaactggaagctggcttccgccaatgtcaacgtggcggatggcgccacgcttaatgctctgacgctggagagcgcgttgaaaaacagcaacgtcgagttagtcagcacccaaggcgacgtcgcagtatctcaacaagtacagtggcagagtgccaacaagctgtcgctgaccgcagaacgtgccggcatcaagatcaatgcgccgattaaagcgaccggcgctggcggtgcactggcgcttaaccataagacgggatattcgctgaacaacgatgcctccgtgaccctgtcgggtgccaatgcggcattcagcgtcaatggcgacgattacaaggtggtgcaaaatctggcacaactgctggacatcaacaatgaccttaacgcccgttatgttctgggcaacaccatcagcgacaacagcacaatcgaagccatcggcggcgactactctttcaatggcgctttcgaagggctgggcaataccattcaggggctgcacatcaccgacagcggaccattcctcggcttgttcaatacgtccaccgggactatcagcaacctgaagctggactcgctgaccttaacgggcaatggcaataccctgtataccggcgccctggcgggggtaaacgttggcaccgtatccaatgttcaggcaacgcgtatcaatatcagcggcggcggcgacatcggcggtttggtcggcatcaacttcagcaaaatcaccggctcttcggcctcgggtaaaataaccggcaacacggccagaagcgcgattggcggcctggtgggtgtcaatctcaatgaaatccacaatagccaagcgaacgtcaacgtttcaaccgccggtggcgcgtcttacagcgatgtcggcggtttggttggtcgcaatgacggtctgatcgccggttcatcaagtcagggcacagtcagcacctcagaagatcagatgaacgtcggcggtttggtcggcaccaacaacggcaccatcacgaactccaccgccaacgcaacggtcatcgccaaaagaaacagccgcatcggcggtctggcaggcgtcaacaccggtaaaatcagcaatgcaacggccaatggccgggtaaacggagaaaatgccgaagccatcggcggattagtcggccgtaacgcaggcgtattgaacgacgtacgagccactggcgacgtcgtcgatgtcttcacccgccgcatcggcggtcttatcggcgtgaacgagaaaaatgcgcaagtgcagaatgcgcatgcgaaaaataccgttaccggtggcgacaacgctaatatcggcggtctcatcggactcaactacggcaagctgaccaacgcgtctgccagtgggaaagtgagcggcggcaatagcagcctcatcggtgggttggtgggcgataactacggcaacctggtaaatgtcagtgcgcagagcgacgtttatgccggtaaggcaagcctggctggcggcctggttggccgcaataatggcgccaccattgccgacgccaaagcccaaggttccgtcaccggcgtttacagccgagccttaggtgggcttatcggcgagaataacaccggaacgctcaacaacgtcagcgccaacacgcgcgtaagcggcggcaacgatgcctatgtgggggggctgatcggctataaccgcaacgcacgtatcactcaggcgacggctttcggggaagttaaggcggcagacaacagccgcatcggcggcctggtcggccacaatgaacagggtactatcaacgcgtcggtcgcgaatgttagcgtctttggcggtgcgagcagccagatcggtggcctggtggggtataacaaaggttcgttggaacaggtcaaagcacaaggcaacgttaccggcgctgccggcagcgatgtggggggattggttggtcttcacgatgtgggcagcaagatcgaaaccgccagcgcaagcggcaatgtaaccggaggggttggcagcgttgtcggtggactggtcggccgcaatggcggcaccatcgacaaatcttctgcttccggtcgagtggacagtgccggcgtctctcaacgaggcggtttgattgggctcaacgtgggttatttatacaattctaccttcacgggccttatcgcgcctaaatcaaaagaaggccaatgggtcggcagcctgattggatcgaatttcggcggtgagtcgaaaaacaatacggtcaccggcgcctccactgaccaaccgctgtatggccgaggcttaccaagtacctggtaa

SEQ ID NO: 440079 - DNA, 1569 bp, Serratia marcescens
atgcgagatattgaagagacgcgtctaagtgtcccgcctccggtagaaatgaaatcgccctctccgccgactcgctctctttcagcaactctggataattcaccaagtttattggttagcggatttatccttaccgggaataagtccatccccaccacacagatattacctttactcgaggggttcaaaagaaaaaaactaacggtaacgcagttaaaaacagccgtgcaacaggtgacgctcttttatcgtgagcgaggttatgttttagccaatgcttatctacccaaacaggagatcgttaacggccaggtccgtattgatatagttgaaggttattatggaaatatcactgtagataatgactcacagatccgcgacggtgtactgcgttggcagttgtcgaatgtacgcagcggtatgccgatcactgacgcgcagttagaacgtaatcttttgctgctcaatgatatgcccggcgtcttgatcaatagcaccttgtcagcaggctcacgtcccggcaccacggattggcaaatcaaagcgacgcccggggcgcgggtggatggcgccctgcaagctgataactatggcgatgcctataccggcgaatatcgaggcagtgcatcgctcggcgtcaataatcccctgtggttgggtgaccgcctggaccttcgcttgctgagcagcgataaacatcaacgctattaccgcatgagctatcaactccccgtcagcccttgggggacacgggccggcgttgcgcattcgtatatgaactatcgattaggcaaagattttggcgaattgcaagcccacggtaatgccactatcagcagcgctttcgttgcccagcccctgttacgcagtcgtaccctgaacgtcaacgcacagctgcaattcgatgacaagacgcttcgcgacgatatcgatctcttcgaaagccgcagccgtaagcgcatcagtctgtggacggcaggcgttgacgtcaatgcccaagaccgcctgttcggcggagggcaaagcgtggcctcgctgtcttacggcatcggcagtctgcacattaaagatccctcggcacggcgctgggacggccgcaccgcaaaaaccgaggggcaattcagcaagctggcgctgaacgcattgcggctgcaaaacctgggcgacgctttccaactttatacccaattcaacgcgcaatgggcccccggcaacctggattcttcggaaaaatttagcgttggcggcccttatggcgtacgcgcctacgcgccgggcagcggcaacggcgatctgggctggcagaccagcatagagctgcgttacgccctcaggcccggctggcaactgagcacctttgtcgatcaggggcaggctcgcctcaaccggcggccctggacgacggagaaaaatcgcgtgcacatgtcagccgccggttcttcgctcatctggggaggaaaaaaccatcagatcggtctcacggcggcctggccgctggccggttccggtccaggcagcgatgcggataactccccacgaatttggctacaggcggccagatatttctaa

SEQ ID NO: 440080 - DNA, 573 bp, Serratia marcescens
atgtttagcgaacaaaaagtagctcagatggctgcttacctgctgcttaagcgtggcggtcgcatggcatatctgaaacttatgaaacttctctacctggcaaacaggcagtctatgttacgccatgggcgaatgatgggtgaagacaatctttactccatgcagcatggccctgttatgtcgacaactctcgatttgattcgagggaagcaggttgatgctggcggctactggtatagccttattcagacaaatcaacatgatgttgctctgtgtgcagatccaagagaaatggatgccgatgaggtgtttgacgagttgagtcgttcagacattcgcattcttgatgagatctatgctcagtacggccacatgaatcgatatgatttgcgcgacatgacgcacttggcagaagtttgcccagaatggcatgaccctggtcgctctagaactcctatcgatgtgcgtgagattttccttcatgagggaaaaactccagaagaagcggaaaccatcctcagaagcatgtgtgaatcccaacagcttaaggagttttcttctcaactgtcatga

SEQ ID NO: 440081 - DNA, 1884 bp, Serratia marcescens
atgcctatccaggtgttaccgccacagctcgccaaccagatcgccgccggagaggtggtcgaacgccccgcgtcggtcgtcaaagagctggtggaaaacagcctggacgccggtgcgacgcgcatcgatatcgatatcgaacgcggcggcgccaagttgatccgcattcgcgacaacggctgcggcatcggcaaggacgatctggcgctggcgctggcgcggcacgccaccagtaaaattagcacgctcgacgacctggaagcgatcgtcagcctcggttttcgcggcgaagcgctggccagcatcagctcggtttcccgtttgaccctgacgtcgcgcacagcagaccagagcgaagcgtggcaagcctatgccgaagggcgcgagcaggcggtgacggtcaaacccgccgcgcacccggtcggcagcacgctggaagtgctggatctgttttacaacaccccggcgcgccgcaaattcatgcgcaccgagaaaaccgaattcggccatatcgatgaagtggtgcggcgcatcgcgctggcgcgcttcgatgtggcgatcaacctcagccacaacggcaaactgatccgccaatatcgggcggcgaaggaagaaagccagcacgagcgccgtttgggcagcatctgcggcccggcgtttttgcagcatgcgctgaacatcgactggcagcacggcgatctgagcatccgcggttgggtggcggatccggacggggcgcgccagctgggtgaaatgcagtactgctacgtcaacagccgcatgatgcgcgatcgcttgatcaaccacgccattcgtcaggcctatcaggatcagctgaaagacgatcagcagcccgcttatgtgttgtatctggaggtggatccgcaccaggtggacgtcaacgttcatcccgccaagcacgaggtgcgtttccatcaggcgcggctggtgcacgattttatctaccaggcggtgaccacggtgctgcaacaggccggacagacgccgtcgctgccgttggcggaaacgcctgacgaggcgcctgcgccggtctggcagcaggaaaaccgcgtcgccgccggcggcaaccatttttcacagccggcgccgcgtcgcgaaacgccgccaccggccgacgccgcccgcgagcgcgcgccgcagcccggttggcaaacggcgggcggttaccagaaacgcgaaggcgagctgtacggcaaactgatgcggcctgccgccgagccgcaggccgaggccgcgccggaagccccgagtcggccgccgctgttcccaccggtgaaagccgccgtggaaacgccgttggcgagcgggcaacacagctttggccgggtgctgatgatccatccgccgtgctacgcactgattgaacagtgccagcagccggcgttgctcaacctgacggtggccgagcgctggctgcgccaggcgcagctcaatccgccgacggaagggctgcggccgcagccgctgctgatcccagtcaagctgacgttggacaagaacgaagcggcggccatcgcgcggcatcaggcgctgctgacgatgatggggctggacttgcagacggatcacggccgtgtgacgctgcgcgcagtgcctttaccattacgccaacaaaatttacaaaaactgatacccgaactgttaggctatctggccgagcatcaggagatgtcgcccgcggtgttggccacctggctcgctcgccgtctcggcagcgaacatgaacagtggaacacctcgcaagcgatacaattgctgaccgacgttgaacgactttgcccgcagctggtcaaatcgccaccgagcggacttttacaacccgttgatttacaggccgcactggcggccctcaagcatgactga

SEQ ID NO: 440082 - DNA, 2943 bp, Serratia marcescens
atggatgaagagtctcgtacgttggccctgcaagctgccgcacacgaacaggctctgaatcaacaacagcaagattacgaagctaaaatcaaggcccttcaggctcagttggctaatcaggatgaaaaagtacaggcttcacagcgtcaacagttaaaccacaacgctcagaaagcaacacagcacatagtgttagatgaaaccctgacccgcatcctgattgatcagcaattaacagaagcgggttggcaaaccgatagtgaaacccttaccttcaaaaaggggacaagaccggaaaaaggaaaaaacatcgcgattgccgaatggccaacagaacataaaggtgaaaaaggcagagcggattacgtcttatttgcgggtctcacacctatcgctgtcgttgaagcaaagagagaaaacaccaacgtcgcaggcaaaatcccgcaggcagagcgctacagtaaaggctttgacgtaacgcctccaatgcaaaatggctgggagctggccgcgatgaccatcgcctggccggatgacaacgacagtcactataaagtgcccttcgtttactcctgtaacggtcgcccttatgtaccgcaactggctgaacaatccggcacgtggtttcgtgatgtgcgcgacccagccaataccaagcgcgctttacctggtttccatacacctgacggtttactcgatctgctcaaacgcagtaaagaagatgcccaacaaaaactcagagccgagccattcggctatctgaagttgcgtgattaccagcagaaagccatcattgccgtggaaaacacattagccagagaaatacgcagtgcgcttctggctatggccactggcacaggtaaaacccgcaccattattggcctaatgtaccgatttcttaaagccgagcgatttaagcgcattttgtttctggttgacagaaccgcactgggccagcaagcgattgatgcttttggcgaaacgtcgctggaacaaaaccacaccttatctaaaatctacaatgtggcagaacttggcgatatggctgccgaggcagaaacccgtgttcaggtagcaacggtacaagccatggtgaagcgcatctttatgagcgataacccaccgcctgtagaccaattcgattgcatcattatcgacgaagctcaccggggctatactctggatcaggaaatgaccgaaggcgaactggccatccgtgatgccagccaatatctctccagttatcgacgagtactggagtattttgacgccgtaaaaattggcctaaccgcgacgccggcaaagcacaccagcgagattttcggcaaaccgatttacacctattcgtatcgggaggccgtcgctgacgactggttaatcgaccacgagccgcccattcgctacgaaaccctgctcactcagaacggtattacctttgccaaaggcgaaaaagtcagcacgatcaatacgcaaaccggcgaagtgcaaagtgcggaactggatgatgaactgaattttgaggtggaggccttcaaccgcagggtgattaacgaaaacttcaaccgcgtgatctgcgaacaactggttcaggaactcgacccctttagcgatgagaaaaccctcattttctgcgctaccgatttgcacgccgacatggttaaacgcttattggataacgccttcaaagcgctttataacggtgaatacaatcaggccgccgtagctaagattactggtcaaagcgacaaagtggcacagcttatccgccagtataaaaacgaacgctacccaaacattgccattactgtcgatctgctcaccaccggtatcgacgtgcctaaaatatgcaatctggtctttatgcgccgggtaaaatcgcggattttgtatgagcaaatgattggtcgcgccacacgccgttgtgatgaaatcggtaaaaccgtgttccgcatctacgaccccgtggatctttatgccgcactggctgacgtcaataccatgaagccgctggtgaaaaacccaaacatcacgctggcgcagttggttgcagaaatgaccaccccagagcaactggaacaagcactcaatgcccccggtgatataccgggacaaagccatgcagacgttgtcctcagccagctcagtcaaaaagttatgcgcgtgctgcgtaaagccgagaaaaaagccgaaaacaaaccggtgctgaagcaaaaacttaatgagttacaaagcttatggggagtagagcctaaaagcctgcacagacatctgcatgagcttgggcccaaacaagccgcagcctttatggtgcaacacagtggcctggttaaccaattagcagaggtgaatcatctcctgggcagtgaacgccaaccggtgatttctgagcacgttgataggctatgtgaacggacgcaaagctatggcgtacatcaaaaaccagaagattacctggacagcttcaaccagttcataaaagaacaaatcaaccaaagcgccgcgctgtcagtggtggtcaacaaaccccgcgatctgacccgcgggcagttaaaagagatcaaacttctgctggatagtgccggctactctgaagctaaattgcaaaccgccgtgcgcaatcaaaccaatcaggatatcgccgccagcatcatcggccatatccgccgggccgccctgggtgaaccactgattccttttgagcaacgggtcgcacaggccatgcagcgcatttatcaaagccacaactggctacccgcccagcgtaaatggctggagcggctggcaaaacaactgatacacgaagtcattatcgaccgtgatttcgtaaacaaccgctttgccgaacaaggtggtgctaaacaactgaacaaaatacttgtcaatcaactggataccatattagatgaactcagcgacgccatttggccagccaaaagtgcctga

SEQ ID NO: 440083 - DNA, 1641 bp, Serratia marcescens
atgaccaacaacgatatcgtacaaaaactctggaacctgtgtgacgtactgcgtgacgacggcattaactacagcgattacgtcaccgagttggtgctattgttgtttattaaaatggtgcacgaaaataccgaagctggcaccttaaaaacacacccgctgccggaaggctgccgctggacggacattaacgccaaatccggcattaacttactcaatgattacaaagccatcttattagccttatctacgggtaagcgcaccgaagccgatccgaacgaacccggtaaaactattgaagttcaggttcacgaagatccactgattagcgccatttatgctgatgcgcaaactcgactgcgtgaaccgcgtcatttagaacaaatgatcaaaaccctcgatcaaatcgactggtttagtgcgcagaaagatggccttggagatttatacgaaggtttgttggaaaagaatgcctctgaaactaaatctggtgcgggacaatacttcaccccgcgcgcgttaattaacagtatggtgcgctgcatcaagccacaaattggcgaagtaatacaagatcccgccgctggtactgctggctttttagtcgcagccgaccaatatatgcgcgaacaaaccgacgattatctggaactgtcagccaaggatgcggccttccagaagaataaagcgtttgtcggcatcgaactggtgcctaatacacgccgcttagccttaatgaactgcttattgcacggcatggaaggtgatgacgaaggcgtcgtgcatttaggcaatgcactgggcaaagcgggtaaagcgttaaaacaggccgacattattctggccaatccaccgtttgggaccagcaaaggcggcgaagcgtctaacacccgtgatgaccttacctataaaaccagcaacaaacaactggcatttttacaacacatctatcgcaatctcaaacccggtggccgtgccgccgtggtcttgccggataacgttttatttgaagctggcgtgggtactgacgtacgctgcgaccttatgaacaagtgcaacctgcacaccattttgcgcctgcctaccggtattttttacgcgcagggcgttaaaaccaacgtgctgtttttcaccaaaggaactgtcaaagacaaacaccagcaagagaactgtactgaaaacgtttgggtgtacgacctgcgtactaatatgcccagctttgggaaacgtaccccctttggtgattcaggtattggttttgccgccgaagactttggcacagatccgcacctcggcgcattcgagaaagtgtttggcgacacctctgacggcaccagaaagcgtaccgaaggggaatacagctttggcgcgcaagagatcgaagtcgatgaagacgcggtggaagaaaatcagggtgtcgatgaacgcctggcgcactcccgctggcgctgctttagccgtgaatggattgccaatactaaaggcgactcattggatattagctggctcaaagacaaagacagcatcgatgccgccgacttgccagatccggaagtattggcgcacgaagcgaaagacgagttaaccgctgcgttaagtgaaattaacgagctactggcggcattggaaggggcgaattga

SEQ ID NO: 440084 - DNA, 1383 bp, Serratia marcescens
atgaatatcaaagacctaccagaaggctggatagaaggaaaactcggtaagctcattagagtatccagcggtgttggatttccaaaaaaatttcaaggaaaatctacaggagattatccagtttataaagttagcgacgtctctaaggcggttacgacaaataccggatacctcgataccgctggccactatgttgatagagaagaggctgtcgaacttaaaggtgaagttttccctataggaactacgctgttcgcaaaaattggtgaagcagtcaaattaaaccgaagagcttttgttcttaagcccggattagctgataataatgtcatggcggctttaccagatataaaagaatcaaacagatttatatatagctttatgcggactgttgatctaagcgatatttctcgttcaactactgttccgtcggtaagaaaaggtgacattgaggaaatagtactttctattccccccctagccgaacaaaaagtcatcgccgataaactcgacaccctgctgacacaagtggaaactaccaaagcccacctcgagcgcattcccaagatcctaaaaacctttcggcaatctgtcctcgctgcggcggtgagtgggaagttggtaacagtttccgagcctaatgtgaccacagttggatgcgtgactactgatatacgatatggtacttctaaaaagtgtgactatgatgttggacaaactccagtaatacgaatcccaaatattggtgatagaaggataaatttatctgacctaaagtatgccgactttacagaaaaagagttggaagctctggctctaaaagctggtgacatattagtaattagatctaacggaagcctagatttagtagctaaacccgcattagttgatcagaaaagcgaaggctttctatacgccggttatctaattcgactcagatgcaacgaggaaaaagtgttacccagtttccttttgaatgttatgagttcgagagtagtccgggatattgtcgagattacatctagatctactagtggcgtgaataatataaactctaaggaacttgcgtcacttaagtttgtcctgccttctatagtggaacaaaccgagatcgtccgtcgcgtcgaagagctgttcacttttgctgacagtatcgagcaaaaagccaacgcagcactggagcgtgtcaacaatctgacccaatccattttagccaaagccttccggggtgagcttaccgctgactggcgtgctgctaacccagagctaatcactggtgaaaacagcgccgaagccttgctggaaagaattaaagctgagcgagaggcgcgctctaataaaaaaccagctgttaggaaaacacgagcaagaaaggaagcctaa

SEQ ID NO: 440085 - DNA, 1716 bp, Serratia marcescens
atgcgtttgttatcactgagactgaatgggcaatacaagagtttaaaagatcaaacgtttaattttgattctgctcagggcaatattattgcctttatcggcctgaatggctcaggtaaatctcagctactggaactgattgccgaaacctttagctatttggagcggtatctgcgtcgtgattttaagtgtcgcaactggttccctgcgttggcgcttgagctttgctacagtaatcaggcttacgatacagagacccaggaaagtacttactcaatcagtatcgaacaaaagggtgttgtgactctctatcgcgatggtgcattaatcgatatcgacgctcgtgaaaatttatctgttgaagatgaaattctacccagtcaaattattggctattcatctggtttaaacgaaaatctacagcgcgccttcatgaaaaatgcggttcaatacttggatgtgatgaatgtcaaacgcgcatgggagcagcggttagcatctattaatgaagtcaaaagtaaagaaggtaagcacctaaccgaagcaggtattgaattgcatgaccgtcaagttagggaagcctatcactattaccaggctcgacacccagctttgtttccagctttacctgaaggatcctcactatccgataacgcggatattggtttgagaccaacggcgctgccccgccttaagtattttgatcaggacacgacagcattaatgctggcaagtatgggaatgatgccggatctacagcagaaggctatatggcaagaaaaacagcgctttaataaaattcattcagtgacgcttcattatgacttacgcaagttcactcacgatgctggcgcattgctggatattgccagattagtcgagtgcttacatagcgtacagccgcatagttttcaaccgctaccgggagtgagaaaaacctctgaagagttttttaaccagtttgaacttgactatttggcgggtgaaatcaccatagattttagtgcccatgatgtgcaggacattcttgagagtagttttttcactccgcaaattttgttcgagaaactctaccgcttgcaactgcttggcaccgacttttggcagggtgagacaaaacgccaacttagacaagacgatttcaaaggtacggcaaaaagaccgcaaaattggaagtcgcccattcatgttcggtctctcaagttaacggatggccagcaatgtattgaatttgatgatttatccgacggtgaagctcagctcattcaaattttatccatggcttcgatttataaagacaatagagctttgtttttactggatgaaccagaaacacacctaaacccatcttggcgaacttactttcacgcgtttattgaaagcataataggtgtgaacaatcaaaaagcacaattatttatttcaacgcactcgccctttatggtctcttctctaaaaagaaataatgtttatcagttccgtcgaaatgataacgggttaatcgatatgagaatggcacaaaatgagacttatggtgcgtcatttgatgtgttgatcaaaggcttatttgaactgcgttctctgatatcacaaagcgttatcgacgaaattcgtaagcagttacagcaaggggatgaccatgccaaggtttggatcgaaaaaaaccttgggttatcggctgaaaaagcctatctgataaggaggctaagcaagtaa

SEQ ID NO: 440086 - DNA, 1119 bp, Serratia marcescens
atgttgtttcgactgacagataatacacctcgatttgagatatttagattgctgaatgcagagcttttacattttctagagcaatctgtaaatgcaaatacgtttaaccgagcgttatttactgacggtgccgttgggcaagcatgctggaacaacgccagagagaacgatgccagcgctaggaacgacttaaccagagataagtttgaaaaattattcaccgccttaaatgattcaggtgaagcaactaaacagaaattgtacgaagtaatgtatcatcagcaagatatgcgagtttttttcaacaacccaatccgagagctcttggcgtttttgcctgcacgatgcctaaataacctaaagcaagtagcaacccatctttactgcgcaacaaaaggccttgccccagttgtaggagcatccaacggtactgatatcactgcacactttaatgcattccgagcgcaggaagtaaacgggaatatttgtaaagcttgcggaatgaaagaactcgcagctttcagagctgaggtgtcagatggtgaccagtggcgtgcagactatgatcatcagttatgtaaatcaaaataccctatttttgctgtacatccagataatctaatcccgctatgtgatgtttgtaatcaggatgcgaaaaaagcaaaagatctgtttcaacattccgatggaacgaatcgattggcgttttatccatacaacgaagaagccaaaatttttattaacattgaaatcgaccacctgcgtgatccagaacctactattaaggttaaatggaacacacaagacgctacgttactggacaagttaaatacatgggatgaagtctacgaaattcgtagtcgagttgaaggtaaatttcgctctctggaagcaattatcgaagatgaaattaatccaatagattcagctcatcttgtaagcagaataagtgacaaagccagacctaataatgctaatactttaaagcgaaaagaatgggcattttggtatcagaaattattttctgcactggagcaaattgatatagagccttttgttgctaaatgggactttgtgcagcagcaagctgctgatggtggtgagttcattctcaattag

SEQ ID NO: 440087 - DNA, 1449 bp, Serratia marcescens
atgaatgatgaatcagactatcgattgaatggaacatttgataaggccggcgtatttagagggcaattcacaataataaggggcgataacgttccgcaagaaattagcatcgactctcctagctacgagtcaggagagttgagttgtggtccatttgaaatagatataaaaatttttgatcttgaaaaagaatcaattgagaaactattcagcagaatgggacttgtattttcagattttggtttaagaggggctcgcacgcttctttccgaaggtacgggagtggcgatataccgttctggatttagaatcagaccatatggagaaccagataatgattggttacatctagaatcaagacgagttcagaacccttcaaaaagactaggtcatagccaagtatctggttccatttatgttggctctgaacaagaatcaaatttaatagaacgaagtagccgggaaggtttagaaaccaacagtgcatttgatcgactgattaaactaattaccaatatacttgtaataatagaacaaaaaagattcgactttagagcaaaagccgggattagtcgaaaaccagaaaaaaatatagataaagcgcgtaatattgcgtccctagatacaatagttaaagctgtgagcagactttctcctgcggaacaaaagccaattttattacggattgaaaaagaatcacaagcacttacaaagactctagatgaaattgaggaataccaaaaacttttagaatcccgggcagcactcggtatggttgtagggcaagttattcatgatggaagaactttcttagaacctatcatttcctctgcaaaatccattattgataacgcaccttatattttggaaaaatcaaaaaaaggtgagctagttagaaagtattatccaacttatgggcaagcaattcaaaccggagcaaagggtcttagttcattatttaaatctttagaccccatttctggaagaaagataggtagaccaatagcatttgaattaaataaggtcattgaaagctctttgaatttggtatcagaagagttaattgaaaatgatataaccgtcaataattttgttgaagggaatgttatcctttatggttatcaaggagatttacaacacaccatcttaaacattttcaaaaatgctatattctggctttctacccacaaagaaaatataaaggaaatttgcctctcagttaataccaatgggaatatggcgcaattaacaatatccaataacggtccagttattgacgataaagatacggaaagtattttcgaagctgggttcacattaaaatctgaaggacacggtcttggcttagcgattgccagggaagcatgcaggcatagcaaaggagagctgtatctaagctcaaattacccagacacaaaattcaccattgaattcccaatagaaaagtag

SEQ ID NO: 440088 - DNA, 717 bp, Serratia marcescens
atgaagtcctgccaggccagcggcggtgactgcagcggcgttatcaagaagtatgaggagctgagtaccgcccagcagaagcagctcatcagcgactgcgccagcaatccggaaagctgtcagcagaaatacggtgacgtgctgaccgacagtctggcagtgaagcaggcaatagatcgtgccctgggtgaagatatcccgatcaagatggtttacgatctgacggcgacgtttgcgcagcagatgcaggctgaaggtgttgttgccactcagaaagtatcggaagcactccagaaagagtacggtctggatgaggttcaggcgggtattgtagcgagcgctgctgcatcagcgtttgggggaattagtaaggctaagggaagcactcagcctaaaatcgaacaaattcttaaaccagagaaaaactgggaaaatgctcgaaacaaggcactggatcttgtaggtaatttaggtgcaaattctaaaccagttattgggcgtttagaagtaagtgccgggaacggaaaggttattggacgacaatctagtgatggcaaagtgggttggcgtgttgattatgatcctgaaaaaggtacgcatatcaatatatgggattactctcagggtaaagggccaggaaaagcagtgaaacaagtcataccttttgaaggtaatgagaaatcttttgaaactatattgaagcagctaaacaggtag

SEQ ID NO: 440089 - DNA, 999 bp, Serratia marcescens
atgaagaaacacagttcaactatcaattatgatccctaccgttacaacggtggcatagcgcctgaagcgggtctggtctggagcggtgaaagttggggatggccgactaccggcatcagcattggtggtgcggaagaaactctggttgtctggccaacaggtgacacatcactttccgaagaaaccaaagagctgttggataacgacatttgcttggtctgtggtaagaaaaactgtccctatatcaaaacggaaaagtcataccaattgttgcgcgatgcgataagagccggtgatatgaagactgcaaaaaaaatccacatgaccaaattcgcgcaatttagcggtatgaatcgagcaaatttcgccgatgcgttgaaaaaaaagcgagaagcccaagagaaaagagacaaagagtttttgttatctgcatcggctatcgttgcagactcagccaaagaaatcgctcagcatctcggcaagcgctatcaagacttcgccaatgagatcgcgagcgatattaaaaacttccagggcaagagaatacgcacccttgatgacgcaataaaatcactagaaaaagtgctggctaatcccaacatgaaggttaaacctgcagataaagaagcgttgctcaatgcctggcgaaatattaatgccaatgacatggcaagcaagctgagtaacgttggcaagtttttcaaagtggcagatgcagcaatgaaagtagagaaaattcgggagaaaagcctggtaggttatgccaccggcgactggaagcccctgttgcttgaagttgaatccatggccattagtggactggcttctggtgtcgcgttagggatattggccacgacgctctctttattttctttgtcaggattagtgctgacagcactcacctttgccggcatcatcgcgattagcctgttaagttcgctcatcgacgataagttggtggataaacttaatcgcgagctcattccttcagcttattaa

SEQ ID NO: 440090 - DNA, 2106 bp, Serratia marcescens
atggctcgcactacccctatcgaacgttaccgcaatatcggcatctccgcgcatatcgatgccggcaagaccaccaccaccgagcggattctgttttacaccggggtcagccacaagctgggtgaagtgcatgacggcgcggcgaccatggactggatggcgcaggaacaggaacgcggcatcaccatcacttcggcggccaccacctgcttctggagcggcatgcagcataattatccgcagcaccgcatcaatatcatcgacacccccggccacgtcgatttcaccattgaagtggagcgttcgatgcgcgtgctggacggcgccgtgatggtctatgactcggtgggcggcgtgcagccgcagtcggaaaccgtctggcgccaggccaataaatacaaggtgccgcggctggcgttcgtcaacaagatggatcgcatcggcgcggactttttgcgcgtgcgcaaaatgatgatcgagcgcctgaaagccaacccggtgccgatcgttattccgatcggcgccgaagaccacttcagcggcgtggtggatctggtgcggatgaaagccattctgtgggacgaggcctcgcagggcatgaacttcagcttcgaagagatcccggccgagctgcgcgattcggcgcaggagtggcgcgaaaacatgattgaggccgccgccgaagcctcggaagagctgatggaaaaatacctcaaccaggtgccgctgagcgaagaggagatcgtccacgggctgcgggtgcgcaccgtcgccggcgaaatccaaccgatgctgtgcggctcggcgttccgcaacaaaggggtgcagcgcatgctggatgcggtgatcgagctgatgccctcgccgctcgacgtgccgccgatggaaggccacggcgaacatgatgaaatcatcacccgcaaagccgacgacaacgaaaaattctcggcgctggcgttcaagctgatgaccgacccgttcgtcggccagctgaccttcgtgcgcgtctactccggggtgctggccaaaggcagcagcgtttacaacccgatcaagggcaaaaaggagcgcattggccgcatcgtgcagatgcacgccaacgatcgtaaggacatcgacgaactgcacgccggcgacatcgccgcctgcgtcggcctgaaggacgtcaccaccggcgatacgctgtgcgaccccggcgccatcatcacgctggaacgcatgaccttccccgagccggtgatcgcccaggcgattgagccgaagaccaagggcgaccaagagaaaatgggcatcgcgctgcagcgcctctcttcggaagatccgtcgttccgcgtgcgcaccgatgaagaatccggccagacccttatctacggcatgggcgagctgcacctggagatcatcgtcgatcgcatgcgccgcgaattcggggtggagaccaccaccggcaagccgcaggtgtcgtaccgcgaaaccatccgcaaacgggtggccgacgtggaaggcaagttcgtgcgccaatccggcggtaaagggcaatacggccacgtggtgctgaccgtcgaaccgaacgaacccggcaaaggcttcgagttcttcgatgagatcaagggcggcgtcattccgggcgagtttatcccagcggtaaaaaaaggcgtgctcgaggcgctgaacaacggcgtgctggccggttaccaggtggtggacgtcaaggtgcacctgaccttcggttcttaccatgacgtcgactcgtcggaacaggcgttccgcatggcggcgattttcggcttcaaagacgcctgccgcctggcggatccggtgatccttgagccgatcatgtcggtggaggtggaaacgccggaagattacgccggcaacgtgatgggcgacctctcctcacgccgcggtctggtgcagggcatggaagagatcccgggcggcggcggcaaggaaatccgcgccaaggtgccgctatccgagatgttcggttactcgacgaccctgcgttcgatgtcgcagggccgcgccacctacaccatggaattcagccactacgctgaagcgccgcgcaacgtggccgaagagatcattcaccacagcaagcgttaa

SEQ ID NO: 440091 - DNA, 1272 bp, Serratia marcescens
atgtttttgaaggctgtcattttttcaattaaggatgtggcactgccacttaaaagcaatcctcactctcgtgaactcaagaaaactattgatatcgagctgcgtagattattcgctttccttgaatcaaaaaaaataagagtgatatttcttaccaacaccaataacaatgtaacaacaagggatggagacatattattaaatgattacctccgagaaaacttccctgagtctattcattattgtcgagaattaaatggggatattcctgcaaaacaaacaggaaaagcaattgactatataatgaatgatttgcagttaaaaagaaatgaaattatttatgtaggacgttccgatgacgatctgcaagctgcaacaaacggcaaggttctttttattaacgccacgtggtatgaacctgtaaacgaatatggattccaattctccgagccgaaagaaattgcacgcttcatcgatgtattttgtttgcgtgaaaatacctggggatggcacgggagcttaaatgatgcgcactattacgctctagcaccatttagcacttatcgtgccgactttagtttctactcagaaaatgcccgtgacttagcaaaattatctattggcagccctgatttctggataagataccttgctgcaagcatttatttttctggactgagtgaaggagcaagctttataactacatatgttggccacaatgctcaatctccgtataaactcgcagatataatggaacatgaccttaaggggttggctgtttgctttaaaggtaagtttctgaaggacttatttatcaggcacaccacggcccttaaatcacagcaggttagacgcgacggcggcgatgtatctataactgtgcagacgaatacagtgcatctaaacccttctccaataaaaaacctctcaactggtgagcgttatgttaacaaacccaacatcagaggaaagaaaatattggtcattgatgatttttgcactgaaggtaacgcacatgagacagctcggatgtatctaaagtcggcaggggcaaaagtaataaatatctcttggctaaaaactataaatcgcgatgttaaagtgtgtgaacctgtaggcagaataaacccttggagacctaacctactggaagcaaagagcattaggcacataggagacatcgattacgcagccaacctagcaagaggttcggctccccaagagctaactgaaaaaatacgtcagtacgactcttggaattggcctgcatag

SEQ ID NO: 440092 - DNA, 984 bp, Serratia marcescens
atgactgaatctgaacaagcccgatggaacactgaaagtgcagcactacttgcattatctgagatgcatggtgttagttactggtcattgtacaaggtggctcaaaagaggattaggtttagagacatcatcacctccccatccttgacacaatttgaatcacaactgggtgtcaaactacatcgcgcgccttattatttgaacgaaaataactggcctgaatttagagatggattgatttccgccgccaaaaacctattgatacactatcactccaaaggttacaagatattacattatggcgctccgaattacccacaaaaactaagcgagctcgaaaacccacctttttggatatttacccaaggaaacgcaagcttattaaacaacaaatgtgtcggcatagttggaactagggaaccatcacacataggtttatttttaactcaatatgtagccgcaaactttataaacactgactattctatcgttagtggtttagcctatggtatagatcaagcagcgcataatgcctcattgctttttaatatcccaaccatagcagtccttggaactggggttaactcaaactaccctaaaaacagtgatattataagagaaaaaatcatagaaggtaatggactaataattacagagtacttgccaaaccaaaaaccatcaaaagagaactttgtacgaaggaatagaatacaggccgcactaagtgacatcttagttcctgtggaatggaacttaaaaagcggtacagcacacacagtgagaaaggcatcggaattaaaaagaaaaatattatgcccactattaagagattcaaaaatcagtgaagaaataacatatgctttaaatgagtactcagccatattactgagcgcaccgttagccagcttcaaagaactagagagtttattaaacactcagacgaacaataaaacacagcaattatcactcctggagggggactaa

SEQ ID NO: 440093 - DNA, 948 bp, Serratia marcescens
atggccaataataacttcgaacaaaagttcgaactaaatactgcaaaggagtttttagatttctttactccttggggaggtggcacagaaaatatgattggttatgtttttcgagggcattctaacgcagagaaatacaagcttattccatcggtattgcgagaggacactaatgaagcctcatggagccttataggaaagcgccctgtatttgaccagtggaattttgaattatggcaaattcatttagagaagatgctgctaagcaaattctatcgactatcaaatcacaatggcctagccattcctgtcagccagaaattcaaaaacctgctatcgactgagtttgatttcgagataatggggagcctaaacactgactattggattgacgatgacctacttgaagtagctgcgttagcacagcattatggagttccaactagattattagattggacctatgacccattggttgctatatatttcgcttcgaaatcagcaaaaaatgaaggtggaaaaatagagatctgggccataaacaaagaatatctcagttttttacggcctacagaaaacagagtcaatgttaaattcatcacaccccattatgcaagcaaccctaatcttaatgcccagaaggggcttttctctcactggccagtattagatatatccatggctgaacgaatggctcaaggtcctgattacgggccaaacttcgagttaacagaccgaactccgctagatgaattaattagaaagaacataaaatccactgacaaaatgaatatattcaagagaatcaccgtgccatgcactgaggcaaaaaaaatatttaacatgatccaaatgatgggttatagctcagcaaaactattccccggatatgacggcatcgttaaaaccatgcaagacaatagaataaataatgatgatatggtttga

SEQ ID NO: 440094 - DNA, 1698 bp, Serratia marcescens
gtggagttggtaaatttttcagtaacaaattttagaagtataacaaaagctcataaagtttctgtttccgacacgacagtattaattggtagaaataatgaaggaaaatctaatttattaagagcgcttgacgtggcaatgagttctctacaacgccacgcgttcgaacataagtacgaaagatataatataagaagtatatctcgcagagatgagaaaacattttattgggagcgtgatttccctattaatttacaatctagaaaatccggaacccaaacaattattagattagagtttctattgaatgagagtgaggttggtgagttcaggaaagaaataaattcaaacttgaacggcacccttacaataatcattagaattggcaaggatagcattccaagcattcaggtttcaaagaaaggaaaaggctctaaaactctaaattcaaaatcaggacagatagcaaacttcattgctaataaaataatatttaattatatacccgccgttcgcactgatcaagaagctatagatgttgtgggtagaatgttatctcaaaaattgagagtgcttgaagatgatgaaacatatttaacagcactcaaaacaataaaagatctgcagcaaccaattcttgattcattgagtaagcgtatcaaagaacctttggaacaatttttgcctggaataaactctgtaagtatagagattcctgacgataccagacgaaattcgttacgccgggattttgagatcatagttgatgatgggactccaacaagtttggcattcaaaggtgatggagtaaaaagtttagccgcacttggattattaaaagatcgtgtaagaacagatggagcctcaattattgctattgaggagccagaatcacatctccatccagcagccatccaccagcttctaaaagtaataaaatctttaggagaggagaatcaagtgatcttatcaacacataatcctctatttgtcgatagacacgatgttaaatcaaacataatcatagataaaggtgccgctacacccgcaaaaaacattaagcaaattcgtgacctgcttggtataaaagcatctgataacctgattaatgctaattttgtcctagttgttgaaggtgaggatgatgcaattgctcttacagcattatttaaaatattaagtaataaacttaagcaaatgattgaaggtcatatgttgataatcgagccaataggtggcgcaggaaatctaacatataaacttagccttttaaaaagctccttgtgtgtctatcacacttttttagataatgatgatgcaggtaggaatgcttactcttccgctgagcaagaaaatctgcttgatataaagtcaaacactttcgtcaattgcaatggttctagaaactccgaatttgaagactgtttagagccagcatcttacaaagataaaataaaggaagattacggggtgaacttagattgctcagaatttagaggaaacaataaatggagtgatagagtacgccaagcattcttagctcaaggtaaaccatggaatggtaatgttgaagcaaaagttaaatatactgtcgctaattgtgtaaggaaaaaccctgagagtgcattaagtcaacacaaacgtaattctatagatgctttagtgaaaagtttagaggaaatgataggaggccagtaa

SEQ ID NO: 440095 - DNA, 687 bp, Serratia marcescens
atggacaaagaacctgaagtcatagccagcttcccgcagttaatagactggtttgatgacaaagccgaaaaactgttggataaaagtaaggaggtacgtatgctcagttacctattccggcgtttgtcgctttatttcggcagtgcactctgtttcttcattttatgcctggtgatgacgttcaccaaaagtgtgacgctcgttatggtcaatgattggttgagttctgtaccagaggctttgaggtggtgggaggggttggtacttctggttattactggcttcttcacttggtactttcgccagcgtgaccgaattgcgaccatcatattttccagtttaatattaatcgccttgatgacactattctttgtggttttaactacagaacaaccggtaatcgttgggatttcgcttgcaggaagtgtgacaatcatggctttgattgctaataaaacactgggtttcactcgccgtgatgagcgttatcaactgtttagccgtcgtgctaaatttttggctaccttttatagatcgcagcaagcaatgaattctgtctttacgcaggagaatttgcaggagttaaagcagtttaacgaagatctatggaggaccaagcaaagtgatactctgagcgattcattttacctcttgaagaaacttgaagataaacttagaaaagattga

SEQ ID NO: 440096 - DNA, 2751 bp, Serratia marcescens
gtgctgctaaggtcactttcagaacatgctgccggatgtttctacggcagtgaactgctagcctcacagctgtggatttttttgcagcaaaccgcaaacggggataagactctgcgtgtaaaggcgctacaggaaacctgctatcagcagttgattgaaagtgtggacagtcgccacccgcgccgttaccgcctaaacgatatcagccaactgatgaatcagctttgcgatggtgacctttttcatacgggcagactaccctggctaaccaagctttttgatcagttaatggtgcgcaacggcgatcttatctgctatcgcgaaacggaagttcaggcctatgccaggctgacggcagagttggacccgacgctgctagtggcttggaatctgagtcagtggctggaagagagcagtaatcccacggcaaaggatatacagcgaattgtggctgctcaggacaccttttttgcaccgcctggtaacccggtacagccctttgcggaggggcacgtgcatatcggaggcgtgaccgcagacagcgcaattcttgatgaatacctcttggcaaacccggcctcagagctacccgagaacaagcgttcaactccctggcatcttcagcagacttcgcaactcaataatctacttgaacgcttaagagcattattgtggctgctgctggatggcaaaagtgataatccggccacctgcattgatcagcaaccgcagctggataattgcgacgcccgatcacatccgtggcaagaagagtgggtaaatctcgttccacagctctcaatgcctctacaaaaagccagacttcccgactgggaaatgacggcaaaaatccatgccataaatgaagtgggttcccccggttggctgctcagtcagtttgccgtggcgatgaagtgcaacttacgcgggcgctggttgtggctgcagctctatctttgccgttgttatcgctctcctcaggctacaccacaggtgcgggtcgccattctctgttggtatcaatcgctgaatgagtttcgtcgacggctgattatggatggtcaggggttgacccggttctctaaacactattttaacggacctttgggcagggggagcaaggcactacgcaaagacaatataagacaattattatcagtggctggcgatgtggtggaaattaagtcacatccgggcgctttctgtgccgactttgccgcagattttgccaccacgctggcgcaggagacgggtttcacacttccggacgcgccttatatctttggcgagcatgaaatcgtgccggatgcgaaagtgcataactatatgcagcagcttgagcgctggcagttttgcggccatttttctcgctctgcaatgccccaacaacgcggtagagcaccagtcgccaatatgaaagcactgtggaaatcagccatcgaattgatggaaaaagtagacaacacaaccgcctggaaccggcccgaattcatgatgggctatcgtaatccgcattttcactttcagcccgcgcgctggtttcgcgggctggacgtggcgggggatgaaaacgatctgcgcatcgaatggtttgccccagtactacgctggttgcggcgggggttagtttcacgccctgagggtgagtacgcttcggctggtttccatttgagcatccacgccggggaggactattcccaccctctatctggcatgcggcatattgatgagacggtccgtttttgtgaaatgcgcgacggcgatcgtttggggcatgctttggcgctgggcattgaacctcagtggtggatggcgcgccagggcgaaatgattctgccagcagacgaacatctggataatctcgtctggctgtggcatcacgccgttacgctaagtggacgtttaccactggcgcaacaggtgcagtcccagttagcgcgtcggatagcccgcttctttcctgaatctggctggcaaaccgttcctgaccttgctggcagccgtcactctgctccgctcaagcaggaaagcgtcaatcccgaaatcctttttcgcgcctggttactgcgaaaaaactgtcattttcgattgatgcagttgcatggcggtattcctctcagcacacttgaattcagcgccttacccgactttacattcctgaagagccctgatcctgcggcggtgctgtatgctaatcggcaccagcacctgtccgccgcaagtgctcagccgttggtcattgtacgtatcggcgatgagcggcaagcgcaaagcgaccacttagctcagggcggaaaaagcacgatgggagatagcggaatgctggaggatatcgataccccggcagaggtggaatttatgcatgcagtgcaggattatctactggatcgatacgatcggatgggcttgattattgaaactaatcccacgtcaaatatctatatcgcccggctcgaaaagcacagcgaacatcctatttttcgctggagcccgcctgatgagacattgctagcggcgggggaagtctataatcgttttggcttacgtcgcggcccaatgagggtgttaatcaatactgacgatcctggcgtgatgcctactacattacgtaccgaatttttattactccgtgaagccgccatcgaatcgggtatcagtcgaacggtagctgagcgctggctggagcagatcagacagtatggcatcgagcaattccaccgaaatcacatgcctgtttttaccccacattaa

SEQ ID NO: 440097 - DNA, 2442 bp, Serratia marcescens
gtgctggttaacctgaaagagtatcttcagcaggatcataaagatttgttgcatgatatacacattcttaaaccggttgatcccacgctactggaagataacgaatcactctttctccatatcattgtcgccgcactgctgtctgataaggcaataaaattggcgcaaagccagtcgccagccaaaagccaggcgttaaataaaagccttgaatcactcgcacatgcattagcttctgtcgaaacacagagcgctgattacggcatggataagctacgcgctatgttcggcaatcagcatctggccgactgtgtgcagcacttttttaaaactactctcgaactgctggataaaaagctgctggtattgccgattgatgatgttgatacctctttaagtcgtgcttttgaaaaccttgaaattatccgccgttatctgacaaccccgtatgttttgccgattgtcagcggcgatcgcgatctttatcgtgaagtcacttggcgtgattttcacggacgtctgaccaaagattctcattatcgaccgcgggaggcctacgacagagccgtagatctggctatagaatatcagcgcaagctgttgccgttgccgcgccgtctggtgatgccggaagtgagcgaatacttgaaggaaaaatcggatagagcgatcaatctggaactgaaaggagagaaattaatctctctcaataatttctatatctggttacagatgtttatttccggtccggtgaatggcctcgaagacagccagctttctttgccaataccttcaattcgcgcgctgactcagctgataaaccactgtggctcattgattccagatttaccctctgcaattcgcaacgcgtctgatgaattacaggttaggcggctttggcagatgccggggataaatccacaagcattcgatactttttatcaggagtatcgccagcagagcatgtcatccaaacgtgactatgcacgtgcatatcagcgattttatgatgagcagcaacagtccataacaattgaagagtgcattctgggcgcggaggaaatagacagatgggaacaggcacttctcgattacttccgttatgaagtcaaggccggagcggtatatctggtgctgctcgctagtcgctactggcagtcacttaaagacaaccgttcagatatgattgggcgatcagtgctcgacactccactgtttaaaccgctaattcacggtactggcgatcttaaccattttgcaaaaacatacgatttttctgaatggatcaatcgcctgcaggggcgcctaccggatagctggcttggcagtctgcaatctcatcaaacgatcctgccttatccagtggcggaagtgggggtgaataccgcaactgactggaaatattggctgcaggtaccggatgaggtgaaagagcaggacgtgggcgacaaaattatttttcttgtctctttatcgatgcagtacaacttctataccaacgccaaacagtcactgatgataaatatcggccgtatttttgaaatcgtcgttgccagtctttgcagcgatgtacgcctgattgatttacaaagaatcattcagaacgcgcccttcttctcagccagagcgttggcaccgactaaaaatgtcacggtgacagaagaggatactaggaacaaattcaatgacgaaactgagacgggcgatttctaccaactgcagggggatgtcgtggatatccaggagaaccaccttgcggagttagtgcttaacatttcgcagtggcgcgagcgtcacgatcttaacaatgtgcgcttttcaccatggctggtctataaggtcttcaacaaggtctttagtcaggcggcaaatacggtacattttcccagcggttccaaagatattggtaaagtgattgaaagtatcggcaaagttttttattcaacgtggtcagcttttggcagtttcgaaaaggggcgcttgtttggcctgccggaagtggtggcaaccgtaaatttaaattctccctataactttgttagtaatgaccatttcaatgtcaatgtcgggcctttcgtagtcagagcagaacaggttgcgccagcaaaaagtaaatacgctgcgagtacgcggacggccagctattacttggccgatcatcctcttaaactttggatagaggaagcgctggcggtatttgctcccgcccccaaaaaacaaactccggacactgaggttagcgatcctcgtatctggcttcgtgaaaaattgggtttggagaaggatacgcgtttaacggataagagaattgcagcttcattggaaaattttaataatgatgaacgggcgagtttgctgaatgagatgttcgctttttaccctgatcatcatgtaaccaaccgccttcacgatatcatcgaccaaatgaagggggaaagatag

SEQ ID NO: 440098 - DNA, 786 bp, Serratia marcescens
atgaaatttatcattaataagagaatcaggtatcacgaggataactccagcatagacacgctggacgactcggcggagcctattattctgacggctacgctcaatcgcctactggcgctgtttgtgaaaaacaacaacctggttctttccagagaacacattttggaaaaagtctgggaagaacacgggcaggtcgcctccgacaataacctgaataactcgatgtcggtattgcgcaaaattctggccacgttcggtgaagaagatcttctggtcacgttgccccggcaaggattttcattaacggcaaaagaaatcaacaccatagacgatcaggcgatcatcaatgagcaaacaactgcctgtagccaaagtctcacgccgcctccccacactcgcgcgccactcaagaccgtgctgttgctactgacgctcttccttagcgggtggctggtatttctcctgtggagttataaaaacagcgccgctttttcccctgacgactcgttggagctgggtactttcgaccagtgccaaatctatatcatgtcaccccatcataaaatttcccgcgatcggttggatcttgaaaaaatcatcgctaaggcccggcagttcgggctggactgccgcatcacggccaaactctattattacgacattggcctgttaaccaagggggggggcggcaaggctcacacccatttcattgcctactgtccactcgcgccaaacaccaggaagatcttccgctgcgaaaactattatgaaaatgagaagctttaa

SEQ ID NO: 440099 - DNA, 489 bp, Serratia marcescens
atgaaaatgagaagctttaaatccatctcaatcaaaacctatgtcgtggctttagtgttactgtgcgccgcaattgctctcctgcacgttcagatgcgccatcaaggggtaccacaagcctgcgccaccgtgctacagacctttatcaccgtcgaccaacgaccgacgcacagtgtgattctggttaacacggtacccgcctcgttgggcacaatgaaagtgttattgagcggcagccttcaagaaggggagaagacatacactatcgcccgggaattgctcgttaaatacaccaacaagaaggagtatcatcccatggtggtagaaaaagccatccaaaaagacagagataccatatcccaggctcagttggataagatattcccgggagagggccaatacctacatatcaagatcagtcagctagacgaaaacacctacgcttattctgataactactcccccatattcgtttgcactatccagtga

SEQ ID NO: 440100 - DNA, 546 bp, Serratia marcescens
atgagtgactttcccgggaaaaacatactcctctgcatattggcactgttcttattcagccagataacccaggctgaagagcagccttggttaaaaggaagcgtcaatatgcagggggctatttttgatgccgcctgcgcgattgcaacggaaagtcgtgaacaaattatagatatgcgcacggtgccaaccgcagaaattattcaaaacgggcaagggatatctcgcccattcgccatcgaattaatcaactgcgtgctggaacgtcatgatagcgaatcgccggaggccaaacattttcgaatgacgttcgatggcgaggcagaaggcgcgttatttcgcgtacagggttcggcaaagggcgttgcgttgcagatagtagacacgaaaggaaatgcagccattcccggagcgccattgccttatggcgatatctcctcggatgccatgcgcctgcaatataacctgaagctggtgagtaatcgttcaccgttacatgccggggaatattcatctgccgtgcgttttaaattggattattactaa

SEQ ID NO: 440101 - DNA, 648 bp, Serratia marcescens
atgcaagacacaaacgacaggctgggtagcctggactggcggtattacctgacgctggcagcgctggcgctgatgattccgcttagcaccatagccgcgctgtggctgttgccggaagcgcgggggcaagcgcccagcggccaatacgccgacggtagcagcggcatgttgctggtgcgcggcgcgctgaccgaaagcgcctgccggctggaaatgcgcagcgcgcggcaggatatccggctgggcgaagtggctaccgggcaattaccgcaggccggcgatcggggcacgccggtcgggtttgaattgctactgcgggactgcctgcgcagcccggccggcagccgggataaccgcggcggtgccttaagctgggcgccgcaacagccggcggtaacggtaagcttcagcgcaccggcggatgccgataacccgcagttggttaaggtgcagggcgtttccgggctgggcctgcgcctgttggatcccgccgggcaagacgtgcgcctgggcagccgcgggcggccgctgctgctgacgccggggcaaaacagcctgcgctatacggtaatggcggaacgcaccacgggcatcctggtcgccggcagctataacgcctcgatcgactttcgattgaactacgactga

SEQ ID NO: 440102 - DNA, 516 bp, Serratia marcescens
atgcgcgcgttgactgctccctgcgacaccggcctgcggcttgtacttttgatcgcgctggcgttggcctgcaccgtgggtgcccacgccaataccacgctcacggtttccggcagcgtcgtcaacccggcatcctgcgtcattaacaacaatcaaatgattgacgtggcttttggcgacgatgtggtcacgacccgcgtcagcaccgatgtctatggcagtaactacctgaaacaggtggtgtataccctgcaatgcaagaacgccaacaaagtgaagatgaagatcgagggtaccgcggcggcgttcaatagccagatactgaaaacggagcagagcgatttgggcgtggcgttgcggatcggtaataacctgatggctatcaacagtaccgtctatcagttcgactatccgaacacaccgcaattggttgccctgccggttaaacgatccggcggaacgctaaccgcaggtaaattcaacgccggcgccacaatggtgttgagttttccgtaa

SEQ ID NO: 440103 - DNA, 489 bp, Serratia marcescens
atgaaaaaaacacagcttgttctatcggtgtttttattggccggcagcgttttttcagcgctacacgcggctggaaatatgcacttctctggcacgctgattgctccgcctccttgcaccatcaataacggtcaattggtggatgtcgactttgggcaacgggtcggagtgaataaggttgacgggaaaaactatttgcagaccgtcgattatcagatcgcctgcgagcctggaattagcggattggtattagggctgacggtgaccggtgttcctgtcgggtttgacgaggcggcgttaaaaacggatgtgcccgacctgggtattcgcctattgcaggctgggaagccttttatcttgaatcagcgcattgccatcaatgcgcaaaacccgcccatactgcaagccgtgccggtaaagaaaccgggggcagaactcagcgccggtgcctttgtcacctgggcaaccttgctggcagattatcagtag

SEQ ID NO: 440104 - DNA, 531 bp, Serratia marcescens
gtgcgccaaaacatgattcccgccgccgggctgctgatggcgctggcggcaatccccgccgccggtgccgcagagaattttaaactgcatggcgccctggtggctgagccctgctcactccagagcggagacgaaagcatagaattgaacttcggcaatatcgtcgataagtatctgtataccaaccaacgcactcacggcaaggctttctcgctgcgcctgatcgactgtgacatcagcctgggcaaaggggtgcaaatcagtttcagcggagcggaaagcctggcgctgcctggtttgctggcgctggccgccggcagccaggcacaaggggtagcgataggcttcgagacgtccgccggccaaccgctgccgctgcacgcctggggaatgcaggaggccttgagcaatggagacaacacgatcgccctgctggcctacattcaggcggaaccgaaagccgtggccgcaaaaagcatcgaacttggcgcatttagcgccgtcgccaccttttcactgagatacgaataa

SEQ ID NO: 440105 - DNA, 885 bp, Serratia marcescens
atgagcgaacgccctgcgcgccagattcgacaacacgctatcggggggagagtaaaacaactctgcgccgccgcgggcattttatgcgccataggctatttgccagccgggcagaccgacaccatgctaagccactcatacagctacgatggtttcaattggactatttatggtgcggtttacgattggtttggcccaaattctgtccctaacccctgctatcaaagaagttgcgatctgggtctgcaggcctatgaagttgatttgatcacgggcgagagaacaaagccgctcggcgcagcaaaatattttgccttctcacccagcgggctttccgcagccagagatgtcggagaggcgggaaaaagcgtcaggggctcgctaccggtgcactatttactttggcaatccgccaccggcctcaataccggcagccagtcgatgacctgcctggtctatcgcgccggcggcaccacgcagatttacgcagaagcctgcacaatggggctcactgctccgccgctaacgcccgtctggtgcaaaccaaaatcaggcgacattaacctgaatcacggaaccgtcaatggcgaagaggtggacggcaaaaccagaagcgccagctatgtcgcctggtgcaacagagacgtcaccgcgaaaatttatgcaaaaaacctgaccgacagccgactgtatttacgcagtgacaacagcctctatgccgatctgacgattaacgaccagccgttaaaccccggcatcacgcaagcctttaaagagggtattgattatcgatttaccatcaagtcggtattgggacatgccggcgatcggttagaggcgggagccttcaggggtagcaccgtgatatacatcgacattcagtaa

SEQ ID NO: 440106 - DNA, 783 bp, Serratia marcescens
atgaaattaacgccgtttatttttagcttctcactcatggggctaccttttatcgccgcggcgggagcagacattaactggagttgggatggctcggcgctgaaatatgatttacttaagctttatgctcagagtggcacattcgactgtggaagaacgggaaaagattgctacgttgagatgattaccggtgactaccctatggtttttcgttcgttatggaaagatgatatcccttatactcagccggggacgtcaaccgctgtggatcttgtacaatattacaatagctataagctgccaaagaatggactgattaccaattatcaggaaaaagactgcactcaggtatttttacgcgataaaacgagaatgttggatatcggcaatacctgttccggcaccatggcgccgccgccgccaccgccgggaagcgtctcttgcaatctgaattccgtggtgttgcaacacccgcctcttgaacccgatgcggtcaacggcaacacggtaagcaaaacgatgagcgtcacctgcacacgccaggcaacggtcaggataatagcgcaggctaacgatggcaccagccagataatgctgcgcgccgacggcagtttgaaatcggcgctgacagtcaacggtaagccgggaaccaccggcgatctggtgacgattcccggccccgcgggtaaatcggtgatcttcacctctacattaattgccagcggtaaagtcgccgccgggaactttagcggggccggtatagtaaacataacgatcatttga

SEQ ID NO: 440107 - DNA, 795 bp, Serratia marcescens
gtgagagaatccggagttattcctgttattaatgatttgccaggcgagctttatttccggcatgaccagctttcggcgatggaatggcagactcactctcattcatggggacagctaaactatgtctctttcggggtcatgaatctcgaaattaatggtatccggtttttgtcgccacctcagtatgccatctggatccccccaaacgtggagcacttctcctatacgcttcgggaggctatttaccgttcggtttacattggacttgagacctcggcaagactgcccatagcgccatgcacaatgagtgtcagcccggtgttaagagccatttttgacgactttgcgctaagggacatccgttcgccagaaacagaacaggatatccgcatggctcaggtcgcattggatcaaatcctgagagtagaaacacatgataactatctgccgtacgcctcttctgaagagctgaaccggttactgaggctccttcaggataatcccggggataagcgaagtgtaagggaactggcggcaacgcttcataccacgtcacgttctcttgaacgcagatgtcagcgtgagcttgggatgtccttcggagaatggcgcctgagactgaaatttatgtatgcactggaatgtcttgatgcggggcatactgtacaaagcattgcccttgatttgggttactcaaccacgtctgcgttcattgtcatgttcagacgatttaccggtacttcccccgatcagtacaggaccacacgacgcatgagtcaggtgaataaaatgtag

SEQ ID NO: 440108 - DNA, 933 bp, Serratia marcescens
atgagttacttattcccacttctggccgcttttctctggggcaccaacacaataattaccaaaatgacgtccggcgtcatttcaccaagtgagataagttttctccgctggctgattgctgtaattattctgacgccggttatctggcgtccaatgaaaaaacataagaaagaagttctgccaaatatacctaagttaatgatgttgggtttattaagcagcgccattttccagtgtatggcatataacgccgcggcgtatacctccgcaatgcatatgggaattattcaggctctgatgcccctgatggcgattatcctggcaagcctggtattcagaaataatccgggggcaggtactgttgtgggtgcattggtgtccctggccggtgttgtgctggtcatttcaggtggagaaccgtcaaagctgatcacacagggggtgaatatcggtgacgggctaatgcttgtggcgacctttgcaatggcgatttataacattctgctgaaacgctggcatgtcaacgtgccgctgattttgtccctgtatgttcaggcgacaaccgcagccgtcgtgttactgccattttacctgacaggtgaaaaacacaccctgaccctggtttccggcggaatggttctgtatgcggcgattggcgcgtcgattctggcgccactgacgtggatggtcggctcaaaacgtctcggcccttcacgtgtgtcgctgttctttaacctaatcccgatttttaccgcaatcatggcgatcctgttcctgaacgaagagttcacttggtcgctgcttgttggtggcgtgctgtccctgggcggcgtggtcattgttgaggtattcaaaggcaaccagtcagtgaccggtaacgatgtccatcaccataccggaaagaaaaccagaaaatcgctgcaccggacataa

SEQ ID NO: 440109 - DNA, 1002 bp, Serratia marcescens
atgtcgtttaccatttccccttggtctgagctagcaccacgatacgatggaaccattttactgggcaacggtgcaagcatcgccgtcagtcctcgctttgcgtatggatccctacttgaatacgtcacgcaaagagagagtctggaggaagatgtacgcaggctttttgacttttttaaaacgaaagattttgaacttattctgcgtatcgtttggcaggcatctaacgtcaataaatctttagaaattgaggatgcccgtacccatgatgcctatctccgaatccgcgaatgccttattcaggctgtacgagatgtgcatcctgagcatgatgaagttaatgagcaactgccatatatttacgaatttctgaaaagattcaacactgttatttcacttaactatgacctgatcgtttactgggcaatgacatatggcctggatatcaatgatcaacatcgatttaaggattgctttcttaaaagaggtctttttgaacaggattggcaacggttaagagggatgcttataaatgaaaaatctaatacgcttgttttttatccgcatggcagccttatattgtgtcgaaatcgtatcgaacaggagagtaaaatccatattcagaacacggggttgcttgaatctattttggaacgttggcaaagcgaggaagtcgttccgctgtttgtgagcgaaggaacgtatgaacagaaagttaattcgattcatagcagtttttatctttcaacgatttaccgtgaagttctcgctgaacagtgtgaaaatcttgtgattctaggttggggaatgggcgagcatgatatacatctactaaaacgaatggctagggcgggcataaagcgagtcgcggtatctgtttttagaggagatcaggcatattgcaatagagcaaaccaattgatcaaagacaatcttgggaaaaatattatgatagagttttttgacagtgaaagcccgggctgttggaatcagcggccataa

SEQ ID NO: 440110 - DNA, 1236 bp, Serratia marcescens
atgagcgttgaaactgtcacggataacaatcatttaacggaaccttgcgaggcggggttcagtttctatgagtttttcgcgggcggcggtatggccagagctgggctgggaaaacagtggcaatgtctgttcgccaacgacatggacccgataaaagcatcgacctacatcgacaactggggagatgaacatttcgacatgcgcgatatacgcgaaattgaccctgatgacctgccacaccatgctgatttaagctgggcctcgttcccttgccaggatttatcgttggccggtaatggactggggatcggcgaaagagactccagcggggatgaaaccacacggtccggcgcggtatggccgttcctcgatttgataagcaggctcggcgaggaaaaccgtaaaccgccgattcttgttcttgaaaatgttcttgggttgttgaccctggatcaggggagccatttcgctgcgatatgccatcagttaagtaaaacgggctaccgatatggcgcaataatcattgatgcaaagcactttcttccacagtccaggccccgtgtatttcttatggctattagtcgccatgtttctattcccgaaattttggtttcagaagaacctttgtcgcaatggcattcaccttcgcttcttcgcgcctgcgatgcactggcggatgatgttcgtaatgactggatctggtggtcgcctggcaatataccagacgccagaacgaaggagttggacgacttaatcgattttgaagacgaaaatgcgcaatggcattctgtcgatgaaacacaacggcttatcagtatgatggcaccggcgaacttggcgcgtctagcgagcgcgcaggcatccggtacgacaaaaactggcagcctttatttacgcatgcgcaaggagaaaggcgtcaacaggcaacggactgaaattacgttctcagccgttcttggttgtcttagaacgccaaaaggcggagcttctcgccctcgtattatcgttgtcaaaggcgaacaggtgaaaacgcgcttgttgtcggtcaaagaagcggcggctttaatggggttgccggacgattttattctcccagtggcgtatcattctgcgtttaaagtgatcggcgatggccttgccgttccttctgttagttttctggccgaacgcattctagagccactcgcgatggcagtccgaattaatacccaacagatggaggatattcgcgaatga

SEQ ID NO: 440111 - DNA, 2559 bp, Serratia marcescens
atgaactggacgtcgctcgttacgcccgatggttgggaaagtaaactgatcgattattttctccggttcggtgctgacggcgacgcgcaagatattcgctggtttgaagttacgccggtgacgcttgcggcagcgttcgctgacagaggcattaccgcggatgaaattgaagaagcatttcgaacctgtatgtctaaaatacgagatctgccgcagcgccttgaaggcggtatgatggaaaagtcgactcgtcgatcgcccggatattttacgtatcttgtcatgacgttgcttattagtagtcaattcgacgcacaggaagaacgtaatgattttcgtctgaagttacagaactggttgggaaccgggcatagctttcagaacttatctggcgtcaacgcgatgtgggaggcattagccgaatggctgaatcaacgtattcaggaaggcgaaccctacaggcgccttgtcttgccgccgcgggatggctgggttcagatcggtcacaccttgcggttggcattcccgaatagagccgatctgcgcctgatgagtgaatgtcttgaaagccatccgcaagccgccgctagcccacgccagttaatagaatactttcagattgttattcagagacaaagcgtttctcatgcgctgaaggaggctttcgccgaattcagagatgcgtggttgttggggcgtcgcgcactgtttgatatgcctttctggcgcctgcgtcaacgggcggtcgggatatcgtcctgtataacgacgcatcagtccatcattgatatgtatgtcgacttcgacggttcgcggtgttatttcagtagcgcggacgagagaggagaaagcgtttttcatcctacgttatccaaagcccttagcgcccactacgctgagaacagcgacaatctggggaaagcgacgcaggtcggattattatttttttatgagatcggaaatgggcgctggagagcgaaatcgtctcctgacgtatattcgcaacggtttcatatcgccttatccagtaaacattctgtacagatgagcaaacgcctcaacgggtatattgcagaggatgagtgggttttaacgacccagccgctgaaccaggtttcagcgatggatatattccgctcactaagatcctctttgggtattcaagatgatgacgttacgcgccctcagctatacggtggaatacgcgtacctggcggatggctgggattaccggcgtttttgccttctgttgagtcagatacgcgaagctacaaaatatatgcatctggaaatgatggagcgggaaccaatgtttctgtaatagatggtcgtttgatttctactgggtcgcttagtggtgagttctttatcgagccggtgcttgaagtgggggaaaaaatgccgccatggaggcgtcgcgcgcgatttttcactcgcgccgtaccgcacccgactttaggcgaaagcgcaagataccgatttgaaccgctttatgactggtcgacgtctgctctacaggcaccgacgtttaatttcgaagaactgttgcagtgggaagatgacgaagtttgttgcgatcatcttttagaggcgatttacgccagcggagctagcggctgggaagaagccgaattatttgctcttctcaggcatgtggcggacaacatcaacgtatggcatttgattcgttgtttacatcatgcgggtctgatccagccacgcctacgccctgggtggaaaggtcgggcatggacgctggttaaaccctcattgcttcatatttgcaacggagaaaattctctggttgttgcggaaggtgctgtctgcgtcagtctgatggatgattttcaaaaagcggtcgccgggctgggcggagaaagtttccgtcgtcgtggcataagcttatggtcgccccctgtatttggagctgtactcgctaatcctgttgcgttatctcagcgtctgggatggccgcttatcgaagccccatcgtcatccgatacaacaccactttcacttgtcacgacggaacgcaccgctgaactacacgagccagcggcggtctggaactggcgttcgggaatatttcagcaggatggttccctagagaaagaatcagtgtctctgtcacttcatattcatcctggcgggcgagatcatgatatctatcgggtgatttccgggcgaaaaacgatgcattttctttcgcgaactgccgctattatcaccgctggcgcgaaaaaccgggaaccagtgtttgaacgcgtcgccaaaaatcatctgatatgccttattaatgattgcggcctacccgatgcgctggccgcgggaatacggcgtcacacgctcagaaacggaggtccggtggactccggttatgcctatcctgtcgatgacgtctcattccgctggttagaatcgctgcttccgggatgcttcaattccctctttccacatggtgagggtgatataaaccgcttagtttccgccagccgtcattccggcggaaaaatacgtacgatttggcgaaacggtcggctaacgctgacgctgggatga

SEQ ID NO: 440112 - DNA, 2082 bp, Serratia marcescens
atgagcaaaatccctttgtatcttggtcaatttgatcgcagaaattatcagtcttatctcaaagttatcgtgcaggaaacgcctgttggttggcgcacgatcgaaaaccctaagaaattgttccctcgtacgggagaagttgagtttaacgagactgacgctttgcaacttcgtaaggacgaatgggctgcttttcatgttggacccggcatacgcaacagagctcaggcgaaacatgcccgccgtatttatccttattatgatttatcttccggccagtcgttattggaagtgcgtcgccaattgagtttcaatggcataacgacagatggcgaaccaggattatgggctatccgttttgggccggatggtctgattctggcgaatatggctgagtcgaaatcaggatatttgattctgtccaaaagccagaacgtttatgaatatgatttccatgaaggtagtgtgatttccgtatccggcatatctgaaagtggaaagtcgttttatatgcccgatgtcgatgcatcacctgctcggatccatgactggacgccggataagcagtacatcgaaaacgttattcaacacctttcctgcgctggtttgacagccgaaatcgcttcatggctccgagtgcacacaaatgagcaaaatggaaaattaacttccggcgtcgatgctctgctggctgccgctcaaacgctccgggcaggagagttggctaagaaactggaggaagaagattcgctggctcgtcagtttaccgaatcagtgttgaaggaccagcagattgcctaccttctcgagcatcagatacaaaacattgcggaagaagagcgagtcgcgttgcgcgccgaacagcataaggcgcttgataaagagttttcagctgaacgactgcgacgccgtgaagctattgaaacggaaatggccgttttgaagaagacaaggaaaagcgagatcgaagaagagatcgtacaattacggcagctcgaagaagaaaaattgcagattgatttcgcagaaaaacaagcggatatagaacgaacgctcaaacaggaaaaagtgcatctcgaaagcgaaattagccgtctgaaagacaccagcgctgatttatatgctcagaacgaaaatcagcatcagatactggcttctctgagctgtgagcgtgaagtatgtttggcgtctttaacagataccgaagaacgtactgcccaggcgaaaattgaacttgaaaaaatggatattgctattactgagaaggctcgtcgtatggcttactcagcgattcctgaagtacgcctcccggcgcaagcgagagccgtatcctgcgaagaattcggtcagaccgtcagagagaacaagttgctgacgcccgagggaaagatactcatgacgcaatttctggtgttgatgttggccggcgagtgcccgttgttatatggcccggaaacacaagacttccttgctattgccgaatcgctgatttcttcaggccgctccatccgactggttgctgatccgacgatgatttcctgcgaggatctttgggttcgcgcggggaatcatctggcgacaccgctttaccaggggttattactgagtggagcctcccgtccgcgaacgattctcgctgtcattgagtgtgtcgaatgttccggtgtgcgtttctggttaccggcgctgaaagatcaattacacagcggcgatttaccccgacgctttctgatttgcggcaccattgaaaatgaagattgcgatgaggtggagaaaataaagggaaaacatcttcgcttgcggatggaaaacgtcatcattcgggatgcgattgcgctttctcctttacatctttctttagaaaatcatagtgagctggatcccggtccggcatcagaagattcgctaacagacaaactcgctatcgcggatgaaatgtcggccgggcgtctggatctggtaaataccctacgggcgatgaaaactgcgcatgaattcgcgccgcttgatgataaaaacaaaaccatatatcagaagtacttaatcgatttatacgccgatttacagaataacgtgatgtaa

SEQ ID NO: 440113 - DNA, 5640 bp, Serratia marcescens
atggactgtgggccgctgaatagtttgtctcataaaggccgtaaggcgttcgctgaattagcgttatctggtctgttcgatgcgaaacctggtgatgagatctggccgcgtcgttcagtccatgcgccatatagccaccagattcaaatgctggagcgaggtctttctcctggttgccccggtattgttacatcgggaacaggttcgggaaaaacggaaagttttatgttgcctatactggcagcactatcgaatgaggctgtcagctgggccgcaccttacgacggttatctgcaaagtcgatggtggaacggcgaaaaaacaagctgggtttctcgtcgtgaaggagaaaaacgtcaggctgcagtcagggcgctggtgctttatccaatgaatgctttggttgaagatcaaatggcgcgtttacgtaaaacgttggattcagatgatgcacggcaggtgatggaacatcgcttcgcaggaaatcggatcttcttcgggcaatataccagcgcaacgccggttaccggctacgccagtcatcctcgtatttctggagtcaaatcggaaaaaagtcgccgtgcccgtaatcttgaaaaattacgtaaggcgttgaagcgaattgatagcgatcagcaggctgcgcgtgcattcgacgaagaaaaaggaaacgtttcggaaaagacccgatatatatttccttcgacagacggtggggaaatggtttctcgctgggatatgcaggcagccccgcctgacattctcgtcactaacgcctcaatgctaggggctatgctttcgcgagaagttgaagacgatatttttgatactacgcgtgaatggctgatgaataacaacgacgcgtacttctatctggtattcgatgagctgcatttaatgcgtggttctgctggaaccgaaaccgcaatgttaattaaatcgctgattatcagactcgggcttgatgacccgaaacatcgttacaaactgcgtttgctggcgtcgtctgcatcccttccgatggatggtgcggatggagaacaatcacggaaataccttcgggatctctttgccccctttggcacttgccgcgactctctggatcccggtagcgataagcccgacttctggcgtaattgcgttattcagggaaaaccatatatacctccaaaacctgaaggaaaaatcgccgtgttgcctttcgccgcattgatgcgggttgcccttgaggggcaggaaaacgtcgttcgtaagctgaacatgacggacgcgcttaatcaggctttgtctaatgccttcctggctctgggcttgaaagcgcaaaatggcatgcaaggcattaaacaagcagcggaaaaagcagctgcgctgctgaccaatgcttgcatagaagaaggttgtgagtcgccgcgagcgatgccgccgggggtaatcatcgataagatttttattaaggaagacacgggtagtcaagatgaattggaattagcattgcgcggattaatgctgttacgcgcgctgccggaatctgggatagatttcgagaaacctgccagcgtcactccagcttttcgcgtgcatacattcgtcagaaatattgagggtttctttgcctccgtatcgccgggagagcaaaaggcgaaattctccgatttttgtctggaacgaggcttgtcgcatgcgccatcaactccaggtgggaaacgtggtcgccgtttgttcgaaatgctgtattgtgaagcgtgcggcgagttactgatcggcggtcagaagggacagaatcacggtaaaaccatcgaattattaccttcggcaaccaatctggaaaatcttccagaacgccccggcgcagaatactacgatgatatgacgttggatgagtttgcggttttctggcctgtcgatatgtcagataaaagtccagcaggctgcgaaaaaggttgggatgtctgggataaggcggcacttaatcctgttactggtatagtgactgttgggcaggatatatcaccgacaaatactggcgtggttcgcgggtatctctatttccagaatccggttaagcctaaaaaaggcgagcctgcgaagagaccttctgcgcggcctttctgctgccctaactgcggcattgactattccaaccggcctgccagcaatcgttccagaacgcccattcgcgcatttcgtactggtgtgacgaaatcatcccaactggtagcaacggagctatttgaattactacatgcaattggcgcggaagcaaagagtattgttttctcagatagtcgacaggatgcggcatcaatggcgctggaaatcgaacggctgcacttgcgtgatctacgcagggaaatattggtctcatcttccagagcgatgattaacgaggctgaaagcaggtacatttcagacgcggatattgaagacaggaaagccaaagctaaacaatctggagattatgatgaatatatcagactgcatgatcttcaaaaaatccaagccggaattactgagctttgtaaatatagacgggtaaaaatcgacaaattactggagtctgaaggcgactcaataggaagaatcacatctgagctcgtcgggctgggaatatcaccctataaatatcgttctaattcagatgagaatgatagcactgtttggcatgctaatttcattaaagaaggggcggctattagatttagtgaaaggcttccttctcatgaacgaatgaaaataaaaacgaaaatatctttagatcagtctgaactgatagatgatgttatttttgccaatacatttttcgcgctggaagaaacaggattggcatatccatgcatctcagataaagatgaaatgccggaaattgatgcttggctaagggtgttttccggtgcctatcgtgttaaagagaacaaatattacgatgaaagtcgcactcgtgattggtattttgggaaagacgttgaaaaagaaaagattaagcgaattgccagggttttattcggtgataacaactatcaagatggtttgacacatgtattaaaacagtttgctgatttgaaacatccggcggggttaattagtatcggcaagttgtttcttaaggtcgccaaacctggcgataattactggcaatgcggtaactgtgggcgaattcacttgcatttagggtttaaatattgtacccgttgcgtgaatgcactcgattttgaacccagcgggtttgtcgaagagctatgggaagacaattttcttgggaaacgcattgtacgtggagagcgagacggagttaaacgtttccggctgaacgtcgaagaattgacggggcagacggatgatttctccgatcgtctgcgtaagttcaaggggatttttgttgataaagttagtgaacttgaaaagctagatacagaaattgatatgctagccgttactacgacaatggaagtcggaattgatatcggttcacttcagtcggtttatcaggccaacatgccccctcaacgttttaactaccagcaacgcgttggtcgagctgggcgacgtggtcaagctttttcttttgttatcacattttgtcgtgggcgtactcatgatgcatactattttgctcatcctcatgcaatcaccggcgattcgccgccgccgcctttcctggcggtagatcacgacgccattccattaagactcatgcggaaagtatggcttagagctgcatttaatattttacgcgaagaggattataaaaatggaataactttccctggagataaactcgttccgcctgatattcacggtgaatatatttctacgcatgattactatcatagcgatgaaaataattgggctgaacgattgctgggagcgttgaaaacaactcaggatatacatgatcgctttattgaggcagcaacgttcgatccagagcaaaaacggcgtctttattccgcagtaaatgcggagggcataattgatgaaatcgataaactgaacgcttacgtccctgaagacgatatagggcttgcacgttttctggccgagcacggtaaactgccgatgtatggcatgccgactcgggtgcgaaatctttatttgggattgcgtaaaacaaaaggtataaacgctcaagaagaatacgaatggtcgacgatggatcgcgatcttgatctagcagttttcgaatatgctcctggttcggtattgatcaaggataagaaaaagcatgaggtaataggcttcacaggaaattaccaggaaccacagatccaaaacaaccgaatatcggatctttcggtggtaggctcatggcaggagtcgtgtagccatgtagcaatttgccctgcatgcggttctgccaagctggagttacataaacctgacaacgacattaattgcgaggattgccgaacgccgatcagtcctgaagaattcaggctttatatcacgccagcagcttttcgcacggatttcaaacccaaagacgatatggatagttttatccgtatgtcgttaaaaaccacggcgacagtgttgcatgagggtgttccaacaaaatgtgactctttcactgtacgacgcggcgaagtgaccattcttcgcctcaatgatggccccattaatggagaaaaggaaggtgagcgatttactgttgacttggcaaatgatctaaaagcaccaatgcccttttctacttattgtccgtcagttaaaggtgagcaggctatcgattcaggttggttggagtctcacaataacccgcgctggcaatgtagcggcaagaaaaaaagttttgggcttgtatcaagcaaagagacagaatcgcttcatattgaattaactaaattcgatgcacgccttaatctggatatggtcgccagatacggcgagtacatgaatttgcctacgcgtgctgctgctattagcgcgacccagatattgacgcataaggcagcactctatctggatgtttcgccagatgaattcgaaatgcttgaaccccgagtgcatcttggtaaacccatcttgcaaatcgccgacgcgttgatcaatggttcaggattatgcagacgacttgccgagcctgccatcgctggcggtccacctttgatcgtcacattattgcatgagattctggaagataagttcgtctggccaatggttgactttctgaagaaggatcatcctgctcaatgtcaaacggcctgttacaagtgtatacagcgctacggtaaccgccggtatcacggtttactggattggcgtttaggaatggcctatttacgggctatggttatgcccgagttcgcatgtggcctgaacatcgccgattggaatcagccagagatggaaggatggctaaaaagagcgtttgagttagcggaagacgtcgaagctctacgaccagcaacgatcaaattgtcaaaagagtattcgttgcctgttcttatcgaaatacaggatgggaaagagctttggagagcggctgtaacgcatcctttatggcaatggggagatggcaaacgtgatgcactgattgactcttttggattggctgacggggagtcgtcgctactattcattgatacgtttgaactggaaagacgaccgctgcgtgcgctggcgaatcttaaacagagttag

SEQ ID NO: 440114 - DNA, 762 bp, Serratia marcescens
atggctgccgcaaaactttggactagggaagaattattactcgctttcactctgtatagtcagattccgttcggcaaacttcattcgaaaaatcccgaaataatccactatgcaaaattgatcggacgcacgccatcagcactcgcaatgaagctggttaacttagctagcttggatccgtacatcatcgaatctggtcgcagcggtttgaaaggggcctccaaggccgatcgcgagctgtggaaagaaatgagccaagatatggatttgttcaatcagcaatgccaaacggcaatggaacacctggaaaaaccaacaacaactgagtttgatgaagaaccaaaagatttcagtggcagagataagttctctacagtcaaaacacgtgtagaccaaaacctgttccgcaaaaatgtgttggaagcttacgaatatcgctgctgcatcactggcctagaagaaccgtcattgctcgtcgctagccatatcctgccttggagccactcaatcgaacaacgccttaaccctagtaacggattgtgcctgtccagcctgcatgacaaggcttttgatcgtgggctcattacgtttgatgataagttagggttggtattgtcaacgcagattaagaagttaaaaagtagcatttatgtaaataattttaaaaattatgaaggaaaaagaattcggttaccgttatattaccacccgaacaacaagcacctggcttatcacagagataatatatttttaggcaactaa

SEQ ID NO: 440115 - DNA, 204 bp, Serratia marcescens
gtgacgataatgggctgcggcggcggcctggttcacttacttcaaccagcctttgcgctgcgcatcccgcaggcggcactcatcaccgaaccgtttctgacccgggtacgttatgccgggccgtcgctggcctgcatgctgggggcgttactgagcgcgctgtgggcagtgattgccgcgaaggggagggtgcacaaaccgtag

SEQ ID NO: 440116 - DNA, 1662 bp, Serratia marcescens
atggagcataaatgggaagttaaatacgatccgtataattataataacggggtagcacctgaacccggattatattggcaaaacggatcttggaattgggaaaatggagaggaaaccctgacggtcactgcaattccgatccccgggttggatgaaaaagtcaaagaatgtctggccaataatatttgttttatctgcggaaagaaaaattgcccatatataaaaaacgacaagcattatcgtgaattgctggatgcctgtcgtcgaggcgatggtgcgaacgcaaaaagaatatacatgcagcggtttgcgccacttctccatgtattcagcgggcaacgtaacgaagggttgcaacgggaactggacgcgcaggcgagagcgaaagccgaagcagaagcccgaaaggccgaggaagcccgcaaggccgaggaagcccgaaaggctgaggaagcccgaaaggccgaggaagcccgcaaggccgaggaagcccgcaaggccgaggaagcccgcaaggccgaggaagcccgtaaggctttgttcgacaaagccggggtgaaacccgctcccgtgtatacaccggcgatggtagcagaagcgaataaggcgctcaaagcgccgggcgctatggtgctgaatcagacgccggggacggcgcagatggcgttggccggagccggagtgtggacagctgccggtgatgtggcaggcagtattaccaactggttcagtaatgcgctgtccaaactgtccgttccagcggtcagtccggggcttcttaaggcatcgatggcgactctttggttccattcaaaacctgctggtcagggtagtgatcaagttccagggcgcgacgttcctgcgctgtttgcgtttccggcgcgggctctggcggatgcgagggcgatagaggccgggatgaaaaccgtgaatatgccggcgcgtgggagtttagtgaagagcaatgggcaactggcgctgcagctgatgaaaaccggtaacggcggtattccggctgcggtgcaggtgctgacgggggtgcgtgatccgaaaacaggtctggaccgtattaccgttccggcaattgccggtgcaggcgtccctgcgcggaccatcctgattaacccggctcagccgccctcagcgccgtcaaataccggcacaccaccgcctccggtcccggtgagccctgtccatactggcacggaagtgaaaccgatggacaccatcacggtgaccacgacgccggtcgcagaccacaacggactacaggattttatctactggcgtccggatgcggccgggacaggtgtagagccggtgtatgtggtgctgagtgaaccgcttgattctggacgatttacacgtaagcaattggatagaaaatacctcaaacatgctggtgattttggggttagtgacacgaagaaaaatcgtgaaacgttgactaagttcagggatgctattgaggcgcatttggcggataaaggaactgtggagaaagggacttaccttcatgaaaaaggatcaaaagtattctttaatccaaaaacaaataacgtcgttattttgaagaaaaatggtgattttatatctgggtggcatttaactgtgggaacaccgcaatatgaggtttacatcaaaacggggagtttgaaatga

SEQ ID NO: 440117 - DNA, 1449 bp, Serratia marcescens
atgaagaatggaattaacaccccaaaggtattcatttcatactgctgggatggtcagtatcgacaagaacaaattgaagggttagttcaacgtttggctgctgatggtattgattctattgtagatctctatgatctgaaagaaggtgacgacaaatatcactttatggagaaaatggttactgatgatacagtaagccacgtgttagttatatgtgataaaaaatactccgacaaggcaaacgctaggagggccggagttggcactgagtcacaaataatctctcaagaaatatactctaaggtttcgcagtccaaattcattccgttaatttatgagctagatgataacaacgagccatgcactccaatttttttaaaaagtcgtatatacttagatttttcaagcccagaaaaagaaaactccaattgggaacgacttgttagattactatatggacagcctgaattggttaaacctgcattgggacaaaaacctgcttatctaaatatgaaggagacaaaaaacacttatggaatggaagcgaaattaagaacattaaaaagtgcattactatcagataaagcgggtattactctatatagagatgattttttaaattcatgcttcctgttcgtagatgcgttaagagtaagggtctccccaactaaagaagaagattttgcccaaaaaattattgatgatttcaaacaattagtaatggtaagaaacttgcttgtggattggtgtcttctcgaagcaagatacaataaaagtgatttttctgaaagcctactgtctacgcttgaaaagctcatggaactaagttctcgccctgcggaaatgaattcatggaatgatgtatattttcatgcccatcgggcatttacatatgaatctttcctttatatcgttgcagcgttgattcgatgtgataacttttcagttgctcatgatatctttacatctcactataaacttccagatacatcatcataccataatgtcgatttctgtgggtttgaagagttatactttcaatctgatttcctcaatgacaaactggccccacctggacggcgtttaaactctactatggcagaattaatgaaaataaatgctgatagagatgatttgaacttcagtgacataatgcaagccgatttaatatcaacaatgttcacctttattaaacctggggggttctggtacccgcaaacgctcaattatgcatcatacccagctaagtttccttttttcatcagagcagctcaacacaaaaactttaaaaaattacttacgctaacaggatttgaaagcaaagataaattaaaagaaagtataatgaaagggataacattgttagataatcgtggttttggtatcggatttaggaatacttcttaccctaatatgctgaatatagacaattgggatactataaaataa

SEQ ID NO: 440118 - DNA, 339 bp, Serratia marcescens
atgaactataaacatctgggtcgtaccggcctgcgggtgagccgcatcggtctcggtaccatgaatttcggcgagctgacggatgagccggccagcttcaggatcatggatgaagccgtggatgcgggtatcaactttttcgataccgctgacgtctatggcggaccgcagtcaccggatatggcaaaggggtacgggacatccgaagaaatcatcggtaactggttggcgcgcagtggcctgcgtgaccgaatcgtgctggccacgaaagtttaccagccgatggacacgggcccgaatgacaaatacctgtccgcttaccatattcgccgggcctga

SEQ ID NO: 440119 - DNA, 819 bp, Serratia marcescens
atgaaatgtgcgttaatttatgattttgatggaactctagcagaaggtgattgtgctcaacacggacttatgcccgctttaggaattaatgatattgcctctttttggcagtccgttaaacagcgggccaagagtgatgatggcgatgaaatattgtcttatcttggacttcttgctgagaaagcaagtgagcttggttcccaagagttaactgaagccaacttgaaaagacatgggaaatcaatcccgttattccccggtgtcgaaggctggtttgagcgaataaatgattatgctcaacaacacggtttggaattataccattacataatttccagtggtttagatgcgatgattagagggacatccataggctgtaaattccgtgatatctatgcatgtaaatatcattattctcctgatggtaaatccgttacatggccagcacaagcaatcaattacactacaaagactcagtttttatttagaataaataaaggcattcctaactcatgggataatgcagccatcaataaattcattgagcctgaggatcgcgagatccctttccaaaaaatgatatactttggagatggagacacagacattccagcaatgaaaatggttcgatatcaaggcggagtttctttggctgtgtttgacaataaaaaatggaataatcagactacgcaagaaaaagttgagaagttaatagctgaagaaagggctaattatgttgttcctgctttatataatgaggggagtcaattggatgttacagtaaaaggactgttacaattatttaagagaaagggatag

SEQ ID NO: 440120 - DNA, 699 bp, Serratia marcescens
atgatcgaaataaaaaactcgataaattggtatttagtgaagattaataagtctatagcggcgatagagacttttaagtcgccggtaaattatgatgagttaaggtttcaatatagtattcttattgaatccatgttctcacttatcgattacatagaagacaaaaaaacgatcttcaataatagcaagtttgaaatagaaagaaagataaaaaaggaaataggtttcgaagggaatataatcatggattatatgagagaactgagaaactctatcattcatagaggtgaagatgtggtctctgcggggaatgtgattaacggtagatttgcaatcttagctccagataatgtaacaaacaggagtgggaacctgatagaaaaacctaaggatatgtttttagataaattactttctattctcgataatgccacgaaaaatgtcactaaatctgaactgcatagattgaacgtcttagaagaaagcaatgttcagtcgattaatgatttggcaacaagaataaaaaacataccaattccacatcatgctccagatgaagtaaaaatgatgattaaagctcatcgagaaaaaactttggaagaagatattttctcgatggcgacagatctttataatgcttctctgattaatttgaagggaaatctagatattcggatgaatatccagcacttatcataa

SEQ ID NO: 440121 - DNA, 822 bp, Serratia marcescens
atgggtgttttttttgaaaaaataggtgtctttcttttcatgctattttatcccctccaggctttagcgtacactacttcggccgttggtgtccctttttctgattacccgtacaggtactatatatggagatatcttgaaatggaggactcatttcatgatgtgaacccttgttatggcatcagcaactgctatatcgtttatggtgagcaatttgccagtggttcatttacgacgtatgcacgagttccttattcgcccaccaatgcaccatatttgtacgatttctgggagtccgttggttcccgggtttttactttacaaggcaaggtctttaacgttgaacaacagacttttcccgatgttaaatatccctgcgtgaattttggctaccagattggtacggcggcgccaaaacctatgcaggaagtcagttgcggtggcgggggatccccaccaccgccgccggtatcttgctcaataaacacaccgtcaatcgtgctgcaacatctgacgctgaatgttgccgagatagccggcaacagaaaaacggtccctttcaccgtgacctgtagccggtctgcttctgtcagcctcactgttaccgggctgaatggcaatggtcagctgtcgttgtccaacaaggctactctctacagtacgataagactcaacgatactttggcgactaccggcatcaggctggatagcgtgagcacgggggggctccaggtaaatatctcatcaacgctgggagttaacggtgccgtcgccggaggagggtattccggttctgcggtcttggtattgtcgatactttaa

SEQ ID NO: 440122 - DNA, 822 bp, Serratia marcescens
ttgttaaaaatttttttaatcaccattctatgggttatttctgccggttcttatgcaacggtaactattgagtggacgttgtcagactcgggcaccttgtcatatgtagtgacggcggcagagccgcggccgctggaccccgatggcattttaaagtgcggctcttttttacaatcaccaaagtgtaatatcaggtcgcgttacggtttttcaaatattatttcaaaggattatgttcaaattaaaggggatcagaagttctccacggtggtttccacctggctggcgtcaggccccagaggatatatcaataactggccagagctagtggagaaaaacggcggcgtcgcgccttgcatcatgtttgatttgaactccgatttaacgggtggcgccggcgtaaggggaaccttcggcagcacttgcttcggcacggccactccaccgcccataaagccaccgccgccaccgctgtcctgctatctgatgaacaatattgttttacagcatggcaccttggcggcagatgaggtgaccggccatcgggcccagacgacggcccgcgtttattgtaccggcgccgccagagtgaggctgaaggtattatcctaccagggcggagaagattataacgtgaagctgcgttcagacggcagcctggtttccttattaagtataaatggaacctctggctcagcattgttggacgttccggccattgggggaaaagaagtgacgttttcatcgttattgcttgcctatgccccgttatcgtcaggaagtttttcgggctcggcggtggcggtagttgaagttatttaa

SEQ ID NO: 440123 - DNA, 234 bp, Serratia marcescens
atgcttgatttcacaattggggggcatcaacgtcactggatatctatcttttctaatctaaaaatagctatccctgagatagctgaacaacaaaagattgcttctgttctctcaactgctgattctgagatcaaaactctaaaacaacaactcaatcgcttggaacaagaaaaaaaagccctgatgcagcaactgctcaccggtaaacgccgggtgagaatggaggcggaatga

SEQ ID NO: 440124 - DNA, 654 bp, Serratia marcescens
gtgagtctattaggagacacaagaaatgatttgcatgagagaagagagttgcaaaaagccattttaagattctcaattgttgaaagattacttccctcatcaggcaggaagtctaatttaattaggtattatgaaaatttgaaaagagctctcccactactaaaggaagatccgcattattggttacaatacggtatggcaatgttgacatataccgattatggcaaggctgaacgttattttgaattgtcttataatttggcaaataataggctttcgtatcacacccaacacatagatgtgcagtcaagtagattaaatctaatgaaagcaagtgatcgaagtttagagttacaaactgtggatagattcaagctctttgaagatgctcattcgaaattatgtcgagttgataacgacatccacaggtacagacaattgcacttatacaaagatgtgtttgattttattttttcagaactatcaccgaaaaataaaacgtcatttgaatttgcgttaaaaagagttttaaaagatattgataaattagaagttgatgatccgcgcacatcaagacataaaacagtaaaaaatgtcaggattttagcatcggaatgtctaactaatataatgaacgctaggaaggctatgtga

SEQ ID NO: 440125 - DNA, 249 bp, Serratia marcescens
atggtcgacaatgcgtttatcgcgagaacgcgagccgtcaacggctgcttttccatgtttttgctgatgttcctgattacgtttattccgctgctccttgagaacagagccgccttgatgcgacaagggctattgctgccgctgctgtatggaatggaattcgtcgctatcttttcgttatacctgctctttttccgccgcagagaaggattgggcaaaggcgaggttaaacgcagcgattttgggtaa

SEQ ID NO: 440126 - DNA, 1056 bp, Serratia marcescens
atggacgcaatttctgcaatcattgacagagctggccgtgttcagaacggagaaactattgaacccagaaccaagaaattcaatacttatgccgtcagcaacttccgcggtggaattgggaaaagcactctgtcttttaacttggcatatgaaatttctgccaatcattctactcttttgatggatctatgcccacagagaaacatgacacaaagtctgttaggtgaggatttacatgcttttgaaacgacaatttacgatgccttgctcgcggaaataaccaacacagataaagttgatttagaagagctcattatgatggtttcttctggcaataccgcatttttgggctccaacagaaagagaagctatataatcccaggttcccaagagcttttcctcttcccttcacttttgtacagccaactcgcgcagttttcacagctgggagataccagaggaagggctccgagtgcaaaagtactaaatgcaatcaaaaccattattgattctgctattgaaaaaaagaaaaacaaaaaaacccttatagacacaagtccattctttggtggagctactcacctcgcctggtgtgccgccgaggcactaattattcctgtaagggttgaccaacattcggttgaagccttgaggctcaccctggatatgttatcaaatgagaatagcgaatttcataaattcaacaagcaggcagggatcaataacatccctcgcgttcatgcagtcacgatgacccactgcggatggagtcgtcagaacaaaaacaatcctgatagctcaacgaaatacttccttcaacgcgcagtagagattgcaaaagaatatgagcatttattctcagaagagaaagcagaggattgcttttacttgttggatgattttttatccagtggtcgaatctctggcaaacagagaattccactagctaagcttgaagcgggaaaaaaattcacagtcgatgggcagaggctggaagtaaatccttcggttgagcgctacaaaaaagagatgaagaacctagctaatagcctataa

SEQ ID NO: 440127 - DNA, 393 bp, Serratia marcescens
atgaagcaatcactggtaaaaatccgcgtacatacgccgttctcatttacccatgccgattaccggcaggagactttttctgctggtgttcactcggtggcaccggaggtggccgaaaactggttcacgcaggagcatgcggagatcgttgacggtagccaaccggaaaacaccggtgtgccagcggaggcgctggcgcagatcgccgacctgcagaagcaactggcggaggaaaaaagcaaagtagccgacctgacgacggaacgtgacgaacgcgaccagatcatcgccgagcacgtcgccacaatcggcaaatgcgatgacacgatcgccgacctgcagaagcagctggcggcggcgctgactgagggcgcgaaaggtggcaaaaaataa

SEQ ID NO: 440128 - DNA, 918 bp, Serratia marcescens
atggatgatatagcctcctacaataaagagatttcttttgtctggtggaacactagtttatcgccagtcactaaacgtgataggtcgagtgatttagaaaaaaacatagcctttacgatgattggattgttcttgacagaatttaaagctgactgcgtgtgtttaggtgagatttcgaataatgatattgcgctaattaaagagatttgtgacccacttggttatgaaatacacaatggtgttcgacctgttgggagaacgtctttcgatacatgcgtaatattcaataaattcaagttagaattattgcatggtaaagaaataagctctgtcaagggtgggcataatcttaaagttgcacaacagatggactttataaatttaacagacaacagtatcatccatgtttttttaagccattggcccagtaggttatggtgtgaagaaaatggagctgacaggcattatcttggagttcgattgcgagatgctatagaaaaactaagcgttgatcagtgcttggctaatgtaattgttcttggcgatttcaatgatgagccatttgataaatcaatatctgatcagcttatggcaacgagagaccgttttttggcggctaaaaagcggtaccttttttataatccgttttggcgacatatgtgtatgagcggagtctatagccatgattgcaacacccccggacacggagggacctattactataaaaatgatagtaaaaataggtggcgtacgtttgaccaaattttaatttcatctgcttttttaggtcacactaattggcatcttaaagaaagcgggattaaagtaattgatatgccaggttatattgagtgcattatgagtagtgatgtttcttttgaccatatgcctgtaatggctgttattgagagggtttaa

SEQ ID NO: 440129 - DNA, 147 bp, Serratia marcescens
atggtgctgtacattcactctgtagtgatggtgatatcagagaaagacttgaaaattcttatattttcaacatatcccacatcaattatcagaataacttaccagagcaattacatgaaaagttcaatgaacttgttttatcgttga

SEQ ID NO: 440130 - DNA, 258 bp, Serratia marcescens
atgcacttaaaggcagtaaatgtgggaatagtcctatgcctgccgctgttgttgagctcctgcagcagaacgccgccagcaccgcagcaaattgtcctgttgccccctgaatccgtgtttactccctgcgaacagccaagccttcagggggacacctggggcgacgcggtgagctacacgctgacgctgcaaacagcgttatcaatctgcgccggccaggtggacacgatgaatacttggcgcaacggcatatattga

SEQ ID NO: 440131 - DNA, 651 bp, Serratia marcescens
atgatggcggaagttttaaagttttttttggatgttttgaaagtaataatatggccgacaataatgctgattgtgtatttctcatccaaggatgattttaaaggattaattaggcgggttaataaagcgaacattttagggaatgaaatagcaatgactccagagcaaccaaaagaaatgaaggagaaaggtagccttaactcaccgtcatatgtaaatggtggtttttattatgacaactttggcgtgatacgcgaattggaaattgaagcctggcaaatttacaatgctcagccagaatcagaaaagattaaaaaaatcataaatgtagctgcgtttgaaaactatgttagaaaaatgcaatgggtgtatatttacatatttggtagccagattgagttattggaactaatttcaactaagtttcccgatgaaggtatttctagttcggaggttattgagttttttgaacaaaggaaaagctcaaataggttccttgggcaaaatattgagttttttccgtggattggatttttaacaagtaataagatgcttaacatgtccaatgggcgttattatttgagtaatattggccgtgcttttttaacgtacattattgaaagccaattgagcaaaagtaaaaacatgtaa

SEQ ID NO: 440132 - DNA, 996 bp, Serratia marcescens
atgcgctgcctgttgaaacctatcatcatcagcgagctcggccaggtgatattgaagccaggtgctgatctgatgtcgttgttcggtgatcgggtcatggtgacgagggttccgcctgaattccgcaagatgccatctggcgcgttgccgacagtagagcagcaattggcaactgatccacgtttccgatcgttcttcacgcatgagcgagtgctgggggctgctggtggccccgccgctatgcgcgattggttaggccgtggttttgaatgccaatgcgccagcactgacgggtatcacgacaagaacgtctgcgtgatggaatacggcgaccacagcatcaggatgtgctggcaccaccagaacaagtaccgtgagcagacgagcccgatgctgaataagctggcagaacagaacgtggctgattttgtcgtttaccgcgcccgcgcgcacttcatgtttgacgaatcccaccagctgacgttgccggagctttgctggtgggcatgggtcaaagaggttatcgatctgatccctgaagagatggccgctgcatcactgcgtgtggcgccgcatagcgtgcctgctggggttaagaaagaatcagatatcgagcatacgccggctgcacgccagattgttgccgagaaagccaaaaaagcggccaaaacgttagttatcgatccggccccgccaaaggcgttattcaagattccaaagcgtgagcgctggaccagtgagaagtttacccgttgggttaaggctcagccatgcgcatgctgcggagcaccctcggacgacccccatcacatcattggccacggacagggtggcatgggaaccaaggcacacgattttttaaccatcccactttgccgaaaacatcatgatgaattgcatcgtgacatgtcacggtgggaggaagagcacggcactcagatcgaactgtggttcaagtttattgattggtccctctcaataggtgcgatacaataa

SEQ ID NO: 440133 - DNA, 237 bp, Serratia marcescens
atgaagatgttgaccaattcggatgttaaaggaaccactcatggttttatccgcctcacgaccaagttcagcacatgtctcgaggtagtcagtaacggcctcttcaaaagcgatttgaagcgctggtatcgtttcagcttcataggtgaccacatcatttatgcattgaatctttccatgaagaacaccatcttcaatagaaaattcaacgctaccataataacccttaaaatttaa

SEQ ID NO: 440134 - DNA, 411 bp, Serratia marcescens
atgcttgacaaagtgaaattcaaggggttcgagattgcatcctcccaatttcaagagcatgaagatgctgaaggcgggaagtaccgagtatccttcgatggttatggcatcacctctgaaaagaacgaagaggatggcgagtgttggattcaaatcgaagttaagccaaaaattcaagggtttaacggcgcagtagatccggaaaagagcaccccggtttttgaggtcgatctgacaatagttttgatcttcgattatctgtcagatgatcctcttaaagaagaatatattactgaaaatatttggttttttgaaaacttcattgccatatctactaaattggctgttgaatcaacgctaaatcacacaactttgaatacaatcaaactcccctggtcaactccagcgtag

SEQ ID NO: 440135 - DNA, 2334 bp, Serratia marcescens
atgagcgcccagttcgtttcccagaccgtacgcaccgccaccggccactggccggtgatactcccggccctcggcatcgccttgcagccgaacggcaagccgcagccgtgtccaacctgcggcggcaaagaccgcttccgtttcgataaccaggacgggcgcggcacctggttctgcaatcagtgcggggccggtgacggcctcaacctggtggaaaaggccctgtcactgtctgcccgggctgccgccgaacaggtggccgccgtgatgggggataatgccaacgctttgccaccggccgctgaggccggtcattcaccacaagacaaagccgaggcccagcgcaaggccgcgcgacaggcacaggctctggtggctgccgcgcaacctcagaccggcaatgcctacctgagcgccaagggctggccggaggtggacaccctgaccttgcagggccagccgctgcgcgtcggcggtatcaccttccagcccggtgacctcttgctgccgctgcataatgccgggggagaggtggtcaacgtgcagctgattaacgccaacggggacaagcgcatgctggcaggcgggcaggtgaaagccgcctgccataccctctgcggcccggacaacgcggttatctggctcaccgaaggctacgccaccggcctcaccgtgcaccgtctgaccggtgagacggtgtgcgtggcgctcagcgccaacaacctggcggcggtggcggagcagctgcgcagccactacccggatgcgcggctgctgctggcggccgataatgaccgcagcggcaccggacagacccgcgccgccgaggcggccacactcatcggcggcactccggcgctgccgcccacggaaggcgactggaacgacgtctattgtcagcagggcgctgaggccacgcgcgcccagctccaggcgttcagccaaccgccgcagcccagcccgttcgacacgctgagcgatgccgatttgaaagccatgagcgccagcgagaaagccgagctactggccgagcattacggcaacaccctggcggtgccgccggtgggggaagagctgtgccgctatacgcgtggcgcctggcaggtgctgccgcaccggcaactgagccgggagattgccgcactgttccagaaggtgcgcgcaccgttctccgccgccggtatcaacagcattttggataccctcaagctgatggtgccgcagatgggcgacccggcccggcggttgataggttttcgtaacggggtatttgataccgtcagcgggcagtttagcgcccaccggcaagagcactggctgcgcaccgtcaacagcgtggactacacgccgccgcgcgccggggagaacctagccgaccatgcaccgcacttctggcagtggctgacgcgggccgccgggggcaatcgcgacaagcaggagcgtatcctcgcggcgctctttatggtgctggccaaccgctacgactggcagctgttccttgaagtgaccggccccggcggtagcggcaagagcataatggcagccatcgcccggctgctggccggggcggacaacaccacctccgcgactatcgacaacctggagtcggcgcgcgaacgtgccagcgtggtcggttactcgctgattatcctgcccgaccaggaaaagtggagcggcgacggggcgggtatcaaggccatcaccggcggcgatgcggtcgctatcgacccgaaataccgcgacgcctatgccgcctacatcccggcggtgatactggcggtcaacaataatccgatgcagttcagcgaccgcagcggcggcgtttcccgcaggcgtgtgatcattaccttcccggacgtgataccgctggccgaacgagatccgcagttgttggacaaaatcaccaaagagctggcggtgattgtgcgtcacctgatgcagcgcttcgccaatccgaacgaggcccgcaccttgctccaggcgcagcaaagctcggacgaggcgctgaccatcaaacgccaggccgacccgctggttgacttttgtggctacctgacggtgctcggcaccgcagaagggatgatgataggtaatgccaacatcaccccgccgaacccgcgccgctacctgtaccatgcctacctgtcgtttatggcggcacggggctatcagcatgtgatgaacctgacggcgtttgggctggcggtaccgcagacgctgagagaatatgagaaaaccctgctcaagcgtaaaacccggctggggatgcaaaccaatgtggtattgagcgaagagtgcgaagcggactggctgccgaagtgcggtgcggtgtga

SEQ ID NO: 440136 - DNA, 954 bp, Serratia marcescens; identical to SEQ ID NO: 181394

SEQ ID NO: 440137 - DNA, 825 bp, Serratia marcescens
atgtgcgaggctaagggtctgtcgcaacgtcgtgcctgcaggctggcaggtctgtccctgtcaacctgccgatattcggctcagcgtccggctgctgacgcgcagctgtctctacgcatcacagagctggcacttgaacgccgccgttttggttaccggcgtatctggcagcttctgcgacgtgaaggtctttgcgttaaccacaagcgggtttaccgcatctatcaacttaatggcctgagtgtaaaacgcagacgacgtcgtaaagggctggcaacagaacgtctgccgctgctccgcccgatggcgcccaatctgacctggtcaatggatttcgtcatggacgcactggccacaggtcgcaggatcaagtgcctgacctgcgtggatgatttcacaaaggaatgcctgacggtcactgttgccttcgggatttcaggcgtgcaggtcacgcgtattctggacagcattgcgctgtttcgcggctatccggctacgataagaactgacctggggccggagttcacttgccgtgcactggatcaatgggcctttgagcatggtgttgagttgcgcttaatccagccgggcaagccaacgcagaacggatttattgagagctttaacggacgatttcgcgatgaatgtttgaatgagcactggttcagcgatatcgttcatgccaggaaaattattaatgactggcggcaggattataacgaatgccgcccgcactccacgctgaattatcagacaccgtctgaatttgcagcgggctggagaaagggtcattctgagaatgaagattccgacgttactaactga

SEQ ID NO: 440138 - DNA, 264 bp, Serratia marcescens; identical to SEQ ID NO: 218364

SEQ ID NO: 440139 - DNA, 909 bp, Serratia marcescens
atgattgaaaaaatatgtgaagtaattgatggtgaatacgtctgtgatatagatattagcgttgaagaatggaagattttattaagggataaaaaagtttttgatgacaaaagtattgcagcgttaaaaaaatggttcattgagccagaccattcctgtacatgtttcgatatcggcaagaagtacgacctgcacagcatgagtgctaatggtgtaatcaatgggttgggtggaagagttcagaagcagcttggccgattcgaggttaaaggtgtcggaaagattgcttccgggacaaaattcattacagtcatgaaaagtagagaaattaaaggaagcccaaagcgaaatttatggactatccgtgaagaacttgttcaggcaataaaagaactagatttttttagtacgaacgaaagctcaagcattgatttttactcagataatgatttgatcactgctctagaagaaagtaatcactttgacgttactcagacatttgagtatagcgaaaaagcgaaacctaagaaagctgcaatagaagtcaaaaatggactctcatacccaagaagtaaatctgtttcaaaaaatgcgcttaacaaagctgattataaatgtgaaattaattgcgaccatccaacgttcagaaggcgaaactctcctctaaattacacagaacctcatcacattgtcccgatgtcaaagcaagactattttgagaattcactggatgtggaagagaatatcatatcactatgttgcaactgccataaacaaattcatcttggcaaggggtttgaagatatgttgaggaaaatatatgccgagcggaaagatgtattaaaaaaagcgggaatcgagatattattagaggatttgattcttttttacaagatggaaggtaattaa

SEQ ID NO: 440140 - DNA, 141 bp, Serratia marcescens; identical to SEQ ID NO: 36145

SEQ ID NO: 440141 - DNA, 540 bp, Serratia marcescens
atggacaataagctgagcgaactgagcaagccggtgcgcattcatcgcgactggaataacgcctcgatgtgccactgcgggaagtgcgatcggtgggaaatgactatcgccgattctgatggcgtgcagacctgcgcatcctgctacgacgcagagtggctttcagagtggcaggactatgcagaagcagccgaacaacgagctaccgccctgaaacacgaatccgctgttaactgggaggcggcggcatcgctgaacgttgaaaatcaggagctgaaaaagcgcatcgccgagctggaacaggagccgacaattaagcatatgcgcagtgttgaagaggcactaatactcgcaacggacatggtttcagagttggaaaagcggctggctacgccggtgccgttgccgacgaagtacagcctgaaactggccggggataaatcaactcgcgccatgttcagcggtcacaactctgcaatcaacgacagcgccaaggctatccgcgccgctggcttcaccgtagagggggatgaacagtga

SEQ ID NO: 440142 - DNA, 447 bp, Serratia marcescens
atgaaggcgctctcaatccgtcagccgtgggcatggctgattacccacggctacaaggatatcgaaaaccgcagttggcgcaccaactatcacggccccgtattgatccacgccagcgcacgcaagccgacaaaggcagaggtggaagtcgcccgtgaaatcctgcgtcaatcagctggatgggaagttgccctgcgcatgccaaaacctgagcattttgagctgggtggcatcgtcggcgtagtgacaatcaactgctgtgtagtcgggagcacatctccatggttcatcggccccgtaggattcacgctaacgaacgcaaggccgcttcctttccgtccgctgaaaggtcgcttgagctttttcgaaacgaatctaagggtgcacaaacggttttctctgctagtaccggaaagctatcaggatactaccgagggaggtgcgtga

SEQ ID NO: 440143 - DNA, 423 bp, Serratia marcescens
atgacaaccatcaagcgctttacccctgactacaaaatgcacgcagttcgctttgaggctttcgcacgtgaagctgagcatggcgagttagttcagtttaatgaccaccagcaggcagtgagcgatctggaagctgaacgcgatgccgcacggaacgctatagccgcgatttacaagtctgtaactggagagtgcccagagtggagtaactggcacgcataccttgacgacattgttgaagaggtaggcgctgctgttgcagatattcaggcgcagggagtggagaggctcatcaatctgaagatggagcagcttgccaacatgcatccagacacccacgcatttggcgctacagccgagtctctgcgcgctcagattaacgagctgcaagcattcgccaccgagctgcaggaggccaaatga

SEQ ID NO: 440144 - DNA, 882 bp, Serratia marcescens
atggaagataagctttatgtttttaactatacacagaatagagataagctttttgcaaacctaatcagcatcatagatgggattgttgcggacggggtggttaaagatgaagagatactttatctagatacgtggcttctggaagcggagcaaataataagaaatggtgtaatcaaaagtttatcagcacgcgtttcatcaattctctctgatggcaccatcacttcgcaggagagagaagatcttaaacagcatctgcatgcaattcagcaagatattcttgacattccagaagtagatttttactcagtagaatcagatctacatttattaaatgggttatgtaaaggtctagttagcgatagagatctaagtgaccatgaaattaggtacttagattggtggcttacgcagaatggcgccctgaagaaaaactatccaggcagccacctttatgcacttgttaaggaaattcttagcgatggagtaataacaccagaagaaagtgaatccttgcacaaagctctggtagattttacagggtgtgatctcgatagcggggttgttgatgggttagcgacacgcctacccatcgattccgacttctcaccggaagtaaagggccgggttttctgcttaactggtatgtttatggcagggaaaaggtcgatagttgaagataggattaaattggccggcggtaatgttatagataacattacgaaaaaacttgattatctcgttataggtacattgtcatcgcgtgactggaagttctccagccacggaagaaaaattgaaaaagcaataaattaccgcgatgaggaaggggcaaagctgaaaatcatttcagaagaaaatttgttcgagtttttaccatga

SEQ ID NO: 440145 - DNA, 687 bp, Serratia marcescens
gtgaaaacacttgcagaaagatttaaatttgcgcgggaaaaaactggtctcagccaggaagaactggccgcgaaggtaggggttactcagcaatccatagctaaaattgagaatggcataacattgcagccaagaaaaatcaaagagttggcagcttaccttggggtttcacaacaatggttgcagcttgggatagaggaaaatgctgagctttcaaattatatcgttaaagaatcagatgaagcagtccttgacccagagttatttgtaagcgtgcccatcctcgatattgaattatcagccggaaatggggctgaggccgaactgatcgaatcttgctccgatacattccctcttcgaagggacgacctccgcagagctggtgtgagtgccagtaacgcaaggatagtgaagatatggggaaatagtctactcccagtgctgactaatggtgactatgttgctgttgacacgaaacatacccaaagtattcgtgatggtgatctatatgctattcgtgacggtgttttattgcgggtaaagaccttagtttgccttccagacgggggaatcatattgagaagtttcaataaagaagagtacccagatgaggtactctcttataacgaacgtagggctagagttcacgtaataggaagagttttttggtcatcacgatcatggtaa

SEQ ID NO: 440146 - DNA, 210 bp, Serratia marcescens
atgttcacactgaaaatcattaccgcaaaccgaaacgaaattatcaacgctattgactccattgagtggaagtacgccgagaaagctatctacgccgacgcctgcacgggtgagttgctaacgctaactctcctgccaggtgataccgcctatctggttaacagcaataaccgcacggtggcaacttataccaatcctgctgagcagtaa

SEQ ID NO: 440147 - DNA, 489 bp, Serratia marcescens
atgttaacagcccagaagcgaaaatacgcgctggcgctgatgtccggtatgtcaaaaaaagatgcggcaataaaggctgggtattcggagaaatccgcgcgctccaaggggtcgcagcttgctaaagacccggaagtcatcgcttttattgctcgtaaaaagaaagaaaaaatcgaagttgatgatgtgccgacctttgggaaaaaagttaataccccagcagtaaaaccagagtccgaaccgcaggcagaaatcgaccgtgctgcagatgaatatgatgaccctcttgagttcctgaagtcggtcatgaatagccgaaatgaagacattgatacccgtaaggatgccgcaaaagccatgcttccttatatccacagcaaaaaaggtgagggtggtaagaaagacgccaagcaggctgcagccaaagcaatcgccagcaagttcaccggaatggctccacctcaactggttgtcagtaacgggagatag

SEQ ID NO: 440148 - DNA, 1662 bp, Serratia marcescens
atgccggaatggtctaccgcttgcgttgactgggccagcaggctcgttaaccgtcaatctatcatcccgccacccatttacagggattctggcgagcacgcgttgtccatttttaaagaactcagggttaccgacttgcccggcaagccaacgttcggtgaatgctctgaagattgggtgtttgattttgtgctggcgatatttggtggctatgaccaggcaaccggcaatcagaagatccgtgagtacggtcttctgataagtaaaaagaacacgaaatccacaattgctgccggaatcatgctaacggcgctgatcatttgctggcgctctgacgaggaacacctgatcctcgcaccaactaaagaggttgcagacaactgcttcaagcccgccgcaagcatggtgagggaagatgaagaactgtctgcgttatttcatgttcaggatcacattcgcaccatcacgcaccgcgtcaaccgtaacagcctgaaagtagtggccgcagacagcgatactgtgtccggtaaaaaggccgggcgcatcctggttgaagaactctggctgttcggcaaaaacgccaaagccgatgcgatgttcattgaggctctgggtggtcaggtatcgcgtaatgaaggctgggtaatttacctgaccacgcagagcgatgaaccacctgcaggcgtatttaagaaaaagctggactattggcgcaacgttcgtgatggcgtgatcaaggatggcaagactctcggtattctctacgaattccctcctgaaatggttgaaaacgaaggtttccgtaatcctgataatttttacatcaccaacccgaacatggggcgatcagtcagcaaagagtggctggatgatgagtatcgcaagcgctctcaggaagatgagggaagcctgagaaagtttctggcgaaacacctgaatgtcgaaatcggcatgaatcttcgcggtgatcgctgggcaggcgccgaatactgggaagcgcagtccgatccatccgtaacgttcaagcagatactgagccgcagcgaagtcattaccgtgggtatcgacggcggcggacttgatgaccttttaggcctctccatcgttggcagagacaagaaaacccgagaatggcttagctggtcgcacgcctggtgccatgaaaaggcgattgagcggcgaaaaagtgaagaaagcaaaatcatggactttgtaaaacagggtgatatgacagtcgttaaatcgttcggtgaagacgctgacgaagtggcgatgtatgtctcgcagatccacgaagcgggcttactggataaggtcggaatggaccaagccagcgttggtgccttgttggatagcctgattgatgccggaattcctcaggaattggtagtgggtgtcagtcagggctggagacttggtggcgcgtgtaaaacggcagagcgaaagctcacagaaggtgcccttaagcatgcccatcaacctatgatgaactggtgcgttggtaatgccaaggtggtgatcagcgccaatgcgcctctggtaacaaaaggagccagcgggatcggtaagatcgacccgctgatggcgctttttaacgccatccaccttatggcgctaaatccggcgtcacctaaaaaagaatacagcgtgtttttcatttag

SEQ ID NO: 440149 - DNA, 1938 bp, Serratia marcescens
atgaagaatcagcacgccgtaagccttttgaaggtgaaggctgtcaatgaagacactcgggaaattaccggcattgcaacaactccatcacctgatcgttatggcgacattgtgatgcccgagggggccaagtttcagttgcctatcccgctgctatggcagcacgaccatcagtccccaataggtcaggtgaccagcgcaaaggtcactgcagacggcattgaaatcaaagccacgctggctcaggccgatgcaccaagccaacttgccgcaaggcttgaagaggcatggcaaagcatccggctcgggcttgtaaaagggctgtctattggcttcaggcctatcgaatacgcctacatcgacgagggcggcgtcaggttcaccaagtgggaatggtatgagctctcagtcgtgaccgtgccggccaacgccgagggcactatccagaccgttaaatcaatcgatgaaaggctgcgtgccgcgtcaggcaatgagcagaaggattcgaaaaacaataaaaccgctggcgctacagcaccaacaaaatcgcagactaaaggaattaacatgaacatttctgaacaaatcaaaacgtttgaaaccaagcgcgccactctggatgcagagcgtcaggcggtcatgtcaaaatctttcgatgaaggccgcacgctggatgcggaagaagaagaaaaatatgacgatctgacctcggaaattaaatccgttgactcgcatcttgcgcgcctgcgtgatatggagtcggcaaaagctgcaacggcgcagcctgtgcagaaggcggccgccggcactgtcgttaaaaccactgataaccgtgctcctgcggtaatccatgtcgaaaaaccgctggagaaaggtatcgcgttcgcccgcttcgccaaatctctggcagccgctaacggcagccgtactgaggcgctggaaattgccaagcgtcagtatccgcgagatgcaaagctgcatcacgtgctgaaggctgctgttggtgcaggtaccaccactgatcctcagtgggctggcagcctggttgagtaccaggagtacgcgaacgacttcgttgaattcctgcgtcctcagacgattattggccgcttcggtcagggcaatattcctgcattgcgtcaggttccatttaatatccgcattccggcgcaaacctccggcggctcagcaagctgggttggtcagggtaaggcgaagccactgacccgattcgattttgaatcaatcacctttggattctctaaagtggcggcgattgcggtgctgactgatgagcttatccgcttctcgaatcctgctgctgatgcactggtgcgtaacagtcttgctgaggcggtgatcgctcgtcttgatgttgacttcgtgaaccctgcaaaagcagaagtagcgaacgtctcaccggcatctatcaccaacggcgcccagcaaattccaagcactggaaaccctgacacagacagctctaacgcattccaggtgtttattgatgctggccttcagccaaccggtggcgtatggctaatgtccagcacgactgcgctggcattgtctaagcgtaaaaatgcactgggtcagaaagagtatcctgagatgaccatgttcggcggtacttttgaaggcctgccggccatcgtttctcagtatgtcggcaatctccttgttctggtgaatgcgcctgatatttacctggcggacgacggcggcgttgcggttgatatgtcgcgtgaggcttcgcttgagatggagagcgagccagtgggcgacagtgtgacgccaacgccaaccgaaatggtttccatgttccagaccaacagcgtggctatccgcgccgaacgctggatcaactggaagcgccgccgcacggcagccgttgcggtaattactggcgtcaattacggcacctctgctggcagctaa

SEQ ID NO: 440150 - DNA, 1359 bp, Serratia marcescens
atgttcggtttccgcaaaaaacgtaaggaagaaaagtcgctgcaggctgctaaaagcggctggtggaacagaatttttgagtcgtttactggagcctggcagcgcaatattgagatagacagcacgaccgtgcttgcctatcacgcggtgtttgcgtgtatatcactcatatctgctgatatcgccaagatgccactcctgctgaaaaagcgggttagcagcggaatttgggttgattacagcgatgaaataatttcacccctgctgagaaagccgaacagctttcagacgcgtatgcagttttttgaatgttggatgaattcaaaactgtcagacggcaatacttacgtgctgaagctgcgcaatatggacggtgatgttaagcagcttcgcgtccttgacccgaataaagtcaccccttacgtgactgaagacggcgaaatattttatcaggtccgacccgataacgtgcatggccttgagcagcaggtgatggtgccggcgcgggaaatcattcacgaccggtttaactgttttttccatccgctatgcggactttcgccaatttatgcctgcggattaaccgctatgcagggcgatgcaatcctgaccaactccgcaaatcacttcagaaacggtggcaagccgggtggcgttattaaagttcctggtgcagtggatgaagagaaagcgcgggaaattaaacaaaaatgggatgaaggttattcgggcgccaatgctggtaaaacgggacttttggcagatggtgcggattttatcaacctcgccatgaccgccgttgacgctcagatggttgaacagctgaagctaactgctgagattatctgctcgaccttccatgtccccatttacaaagtaaacacgtcggccacaccgtcttacaacaacatcgaagcgctcgaccaggggtattactcgcaatgccttcagacgcacatcgaagggattgagcttcttctcgatgaatcgttcagcctggatgcacagaccggcgttgagtttgacctcgacacgctgatccgcatggacacggagggccgttataaaacctacagtgaaggcatcggcgccggttggctggcaccgaatcaggcgcgcaaaaaagaaaacatgctgccggttaccggtggtgatacaccttatcttcagcagcagaatttcgccctttcggcactcgccaagcgtgacgcggcagacaatccctttggtaacgcttctcagagcgaagcgcctgctgttacgtccccatcaaccgacgatgaaaccagcaaggctctttcagagcatgagcagttcatggtcaaagcaatgctgagaggactgctaaccgatgaatga

SEQ ID NO: 440151 - DNA, 864 bp, Serratia marcescens
atgaatgaacgtgacatgtcactgcttaaagcggtcagtgaagctgtaaaagagcaactggcggcagtacacaaaaagtacgaaaccgcctttcaggctcagtcgaataagatagccgaactggaggaaaaactgagggaattacaggctgatcctgtcgatgagcggtcaatcatcaaatctgtacttgagcagattgatgtgccgacggcaccagagttgcctgatattggcaagatggtgaaggatgccgtggcgcagatgcccgttccagatgcaccagaaccgccaacgatccccgatataggcaagatggttagcgatgccgttgctgatattgaattgccaaaacctgagccgctgccggatatcgtgcagatggtgaaggatgctgtggctcagattccaaaggccagggacggtgaggatggcgaagacggtaaagatgcgctgcagttggaaatcatgcctgagattttcactgagaagtcttatccgcgcggtagctacgccattcatgctggtggtctatggcgatcctatcagaagacggccggcatgaacggctgggaatgtctggtagacggcatcgactcaatcgacattagcaaggatgatgagcgccatttcactgtggtggcgacgaaatccagcggtgtaaaaactgaaaaaaccttctctgtcccggtaatgatctaccgggatattttcaaggaagggaataaatattatcccggcgacagcgtgacgtggggtggttcggtctggtactgccatcaggaaacaggagataagcctggagaagacggttcaaaaggctggaagctggctgttaagcgtggtcgtgatgcgagggctaagtga

SEQ ID NO: 440152 - DNA, 2523 bp, Serratia marcescens
atggccagtaagtcacttggaacactaactattgaccttatagccaaaactggcgggtttatttcaggaatggataaggcggaaagggcttctgaaaaatggaggaagcaggtacaaaaagatgtcgcagactcaagcaaggcattggctgggatggcaagtgcagcagccgcagcggcaactgctgtaggcgttgcaggttatcagttattaaaatcaacctcagaacaagtagcatcaactgataagtgggcaaagtctttaaacatgtcaactcaggagttgttggcatggcaatttgcagctgaaaaagctggtttgtcaggtgataacatggcagacatttttaaagacttaggggacaaaataggtgatgcggtacttaataaatcaggtgaagccgtagatgccttggatgcacttggtctatctgctgataaattatcaaaagtttctccagataagcaacttcttgccataggtgatgcattaggcaagataaacactaactcagcgaaaataaatatacttgaaagtattggtaatgacctatcaaaactccttcctctatttgataataataatgaaaaattaaagaatttcattcagcttgctaaagattatggtgtggcacctgatccatcatcaatagatgatttgataaaagttaatgatctatttcaagatatggaggcccaggttaaagggttaaaaattgaaatagctgcagggcttgcaaaggttgatttatcccctcttcaatcatcccttgataaactacaggctgtattaacagatccgcaagttttacaagggattgtatctcttgtaggtgaagtggctgaactggctgggtggatgataaaagcagctgctgccgcaggtgaccttgctgtaaaaactaccattaagcatcaaggattatttggatcatttaatgatgataatattcctgctatgcaggaaagaataaaattcttgcaattccaagcaacaggatcaaacgcgactgaagaagacctggctaacattagatctcaaatagagcagctagataataaaattttatcagcaaaacaaagttctataacacctataaaactaccaacagggtcagccaccgtaggtaataatcaatttaaattaggtgctggagaaactaatgggaagccaactccagatgcaggggcaaaaaaactagagtcagcatttaaggctacagagttaggttacatgcgccaaatagcgctgatagaaactacgggcaaaaaaactgcagaagtcacagaagctgaaaaattacgctttgacctagccagtggtaaattggttggtattaatgctgagcagcaaaagcgtcttattcagttagctgatgagttggataagcttcaggcgttaaaaaaagccaatgaagaaaatctaaaggtggcggcgttcgcagcaaacctgaaatcatcaaatgataatgatcgccagaccttgaatgccgatatcgttggcgcgggtatgggggataaaactcgcagccgaatgaaagaattgctggggattcagcaagaatttatcactcagcagcaagagttgcagaagcaataccagtcaggtgacataaccaaatcactgtacgataaagaaactcaggctttgcaggatgcactgaaggaaaggcttgaaattcaagaggactattacaagcaatcagatgagcaacgggatgattggtcgtctggtatttctgatgctctgatagattttgctgatcgttccagtgattactatcagcaggcagcagatgccatgacatcagtccttggggcagccaccgattctatatctgatcatatctatgatgtcatcagcggtacagagtcaatgggcgatgccattaaggggattttctcggatctcggtcagtcggttgtaaaagcattgattgatatggctgctcaatggttggtttatcagggtgttcagttattggtaggaaagacggcgcaggctgcagccatacctgcaatggttgccaatgcgcaggccacagctctacaagcccagcttgccgcttttgcctctacggctgcaatacccattgttggcccggcattggctccggcggctatggccacagcggcaactataactgagccgatggtagcagctatttctgcagctggtctttccggtatggcccatgatggtattgatgctgttcctgaaacgggtacctggttgcttcaaaagggcgagagggtaacgactgctgggacaagcgcaaaactggatgcaaccttggagcgtgttagtcgggatgcaaatacaggtggcgttgcaccaaatatcgaaattcatacgcaagtgaatggagatcctgatgcaaggacattgcagatgctgaaagaaacccaaagagcagcagttaaggaggcgttagagcaaagcgcttaccaaattgcaactggccgtggtgatgttggaaaggctgtcggcatgggttggcaaacaaaacggagaacaggttaa

SEQ ID NO: 440153 - DNA, 726 bp, Serratia marcescens
atggtcgcaggctcgctggaagtcttcaggaacgttctctttcatgaacaaccacaggtcgtcatcgcggtttgggcacatccagcagagcgatgcgggtggcgttgggaggccgtaatcctctacgcactggatgcacatctgctttgtcagcatcatgtcgatgagtggataacggcggcgccatttcccatcagtgactttcatgcggcgcgctgcctcttcgatgctaatccccatccacatgtctacaccgcgtgcagtcaggtatttctcgccgtacttgtcgttgaggaatctttgcactacctcctgcttccatttaatgctgcagaatgttggcttcttgccggtacaccacccgtccttatcgcgtccgtttcgcgtggagaagtatcccggcaatggctcatcttcatctggtccgacgatgtcgtatgttgcgtaaaggcttttcggaacgatgtgatactcgatacccatttcatcgcaaagcgtcttgatgtgtttggcttggtaagcaaacacattgctcgcttcacgctcggtatcagacatgactatcacgtctggctttgggagtgcaccagcatgaatcaggcagatcatcgcgttgctttgtgttccgccaccgctcgaaagcacattgaagcgatcggggttatgcttaaactggcgacgcgggataaaggacttcatgaacctacccacgctccacctccctag

SEQ ID NO: 440154 - DNA, 780 bp, Serratia marcescens
atgagctatcctaacccttacgattttcaacagtatgttacatggcatcagcagcatattgaaccaggtattgatttaattgaaaaaatcacctcgacgttagacacatttaaaaaagacagagatagactaagcaaacttgcagaattattaaacattctcaacacgcttttactacgcgcaaaacaaaccacaggcgaaaatatatcattatacaaatacgatatcctcttaagctctcaattgtctccagatagatatgatgaaatattcaaatcaataccatctatagttgacaaactgtggcgaaaaaacaaagacaccaccgagtacattacaactgataatttaaccagcaaaattaaagaccttgctagaagttcggttatagtaagcactcatagctatgcaaatgactttagtcggatattacaagactggagaaacaaactccaaataaatggcttggattcagataactatcaagatatagaagaaatattagtggagcaggaagcaaaaatggcaagtggctattttgcgtatcatgtggatgtaatttacatcgacggatttcatgttgagattcaaatttactcacagttaaatgaaatatggagaaatttatctcataagctatatgaaaagactcgattacagcagagcgtagaacatggacacggaacaagtgcttcgagactcgtctcactaggacatcttcttcatttggctgaatgtgaggccgagcgacttcaggcagacttaggtgggaacaattga

SEQ ID NO: 440155 - DNA, 219 bp, Serratia marcescens
atgcacgactgttcggttggtataaaactctgctgccgtatggccggaatcatcagcgaactttttaatcaggtattcgtaagcttcaccaagatcatcttgggcgacagatttaataccgagcggaattttactgaaatgctcaatcagatcagccagcaaatgatcgggcaggcgctctttattggtccactgcgcatcaccgaagacaccatgtaa

SEQ ID NO: 440156 - DNA, 231 bp, Serratia marcescens
atgattcatatcggtgaggaaggtgcccagaaaacggacacatccaatttgcagggcaatgcccagacggttgtgatcacctctgctttttccgataaattccttgtctgcttcatcaagatgaaaatatcgtgccagctgaagctcatccggttcaccggtgaatctgccatagctttcagtctgctcagtggtcagaaagtcaacgggcatatcggcctccctgcctga

SEQ ID NO: 440157 - DNA, 471 bp, Serratia marcescens
atgcgtgatatcgggctgtacgttagcctgttcgctatcgggcattcaacgacgctgctcatcggcaccttctttgatatcagcgtcagtgcttaccttattgacgccattatcgggctgtccgtggtctataaagcgcttgataacctcggggcattccagcgctggtttggcgttcagcccaacacgaagcttgcgacgctcatctttggattcttccacggttttggtctggcaaccaaaatccaggaattcgaaatctctcccgatggcctgtttgtcaacctgattgccttcaacattggcgttgagatcggccagctgctcgcgctgagcgccatcctgatcgttatgagctactggcggcaaacggcgagctttttccgacacgcttataccgccaatgtggtgatgatgagcgcgggatttctgttaatgagttaccagctttgtggctacattttagcctga

SEQ ID NO: 440158 - DNA, 690 bp, Serratia marcescens; identical to SEQ ID NO: 99301

SEQ ID NO: 440159 - DNA, 1380 bp, Serratia marcescens; identical to SEQ ID NO: 126316

SEQ ID NO: 440160 - DNA, 924 bp, Serratia marcescens
atgcgtgtctggcgggcattaaaaaataccggtgccgccatgctgcgcgacggcgtttatctgttgcctgaagcgcaacagagccatgagatttttaacgagatgagtcgtgaaatcagcggtgagggaggaacggcctttgtttttgacgcagagacttccgacgaagagaaaattcgcccgttattcgatcgctctcagcagtacctgatcctgatggagagccttcaggtttgtaaaaacgaccttaatgaggaaaccgcggtcagccaactgaagatggtaagaaaacttcgtcgcgagctggatcggattgtggcgattgatttctttcctggtgaagcgcaggcgcaggccatttttgccttgtcagaactggaagctggcattaacaggttcatctctcccggagagcctcatgccgtcagtggcttgctgacacggctgaagcctgaggattttcataacaggatctgggctacgcgtcgccggccatggattgacaggcttgccagcgcctggcttatacggcgttttatcgaccaggatgcgcagtttctctggcttaaggatggcaacgattgcccggaagaggcggtggggtttgattttgatggcgcgaccttcagccacatcgacaatcgtgtgacctttgaagtgctgatggtccgcttcgggctgacgggggatgccctgaatggtctggggatgcttgtgcattaccttgatgttggcggggttcagccccccgaagccgctggcgttgaaagtgtactggcaggattgcgtgaaagcattacggatgatgacacattactcacagcggcctgttcgctgtttgacggtctgttaacgacgtttgaaatgaggtccggccatgatgaacaaaacggagttgctgacgctggcagaggaaaacgttaa

SEQ ID NO: 440161 - DNA, 372 bp, Serratia marcescens; identical to SEQ ID NO: 99297

SEQ ID NO: 440162 - DNA, 921 bp, Serratia marcescens; identical to SEQ ID NO: 99296

SEQ ID NO: 440163 - DNA, 759 bp, Serratia marcescens; identical to SEQ ID NO: 99295

SEQ ID NO: 440164 - DNA, 1299 bp, Serratia marcescens; identical to SEQ ID NO: 99294

SEQ ID NO: 440165 - DNA, 270 bp, Serratia marcescens; identical to SEQ ID NO: 99293

SEQ ID NO: 440166 - DNA, 1131 bp, Serratia marcescens; identical to SEQ ID NO: 99292

SEQ ID NO: 440167 - DNA, 411 bp, Serratia marcescens; identical to SEQ ID NO: 99291

SEQ ID NO: 440168 - DNA, 369 bp, Serratia marcescens; identical to SEQ ID NO: 26722

SEQ ID NO: 440169 - DNA, 3066 bp, Serratia marcescens
atggctaatttaacccgtcgtcagtggcttaaagtcggccttgccgtaggtggcatggtgacttttggcctgagttatcgggatgtggcaaagcgcgcgatagacggtttgttggacggaacctcgggcaaaattacccgtgaccgcatttttgccaacgcgctcatccccgaagccaacgcccggcctcactggcagcaaaacccgcagcaggtgatctcgatgacgcagtgctttggttgctggacgcagtgtggtgtacgggttcgcgttgacactgagcaaggcaaagtgctgcgcattgcgggcaacccttatcatccgttgtcgcacgagcaccatatagacgcctctgtcccctttgccacggcaatggaacagttgaccggggagtcaggtcttgacgcacgttctaccgcctgcgcccgtggtgcaaccttactcgaaggtctgtacagcccgctacgtattctggagcctatgaagcgcgtcggtaaacgcggtgaaggaaaatggcagcgcatcagcttcgaacagctgatcaaagaggtggtggaaggtggggatttgtttggtgaaggccacgttgatggtctgagagctatccacgatcccactacaccgcttgatgcgaaacatcccggctttggcccaaaatccaatcaactgctggtcaccaataccagcgatgaaggacgtgatacctttttacgtcgcttcgcactgaacagtttcggcagtaaaaacttcggcgctcatggcgcttactgcggtctggcctatcgggccggttcaggtgcgttaatgggcgatctggataaaaatacccacgtaaaacccgactgggataacgtcgaattcgcgctgtttatgggcacctctccggcgcaatccggcaacccgtttaagcgccaggcccgccagctggccagcgcccgtttacgtgacgacttccgctatgttgtggtggcgccagccctgccattaaccacggtgctggctgacgatcgcggccactggcagcccgtacgaccgggaagcgactccgcgctggctatggggatgataagctggattatcgataaacaacgctataacgctgattatctcgccattcccggcgtgcaggccatgcagcaggcaggagaaaaaagctggactaatgcaacgcatctggtgattaccgatgaaattccaacgcttgccggacaacacctgaccctcgcccatctgagtgcaaacgcagcccaggagccggtggtcgtcaacgaggccggtgagattgtcgccgccagcagttgcccgcgcgctcagctgtttgttacccgtgaagtgacgctggccgacgggcagacagtaacggtaaaaagcagcttccagtgtctgcgtgagtccgcagagaaactgtcgctaacgcagtacagccagcagtgtggggtgtcagaagcagacattgccgttctggccgacgcattcacccgccacgggcgtaaagcggcggtgatcacgcacggcggaatgatggcaggcaatggattttataacgcctggtcggtgatgatgctcaatgcgcttattggtaacctcagccttgaaggcggcgtgttcgtcggcggcggcaaatttaatggtgccaccgacggtccgcgctacaacatggacagcttcgccgggaaggtaaaaccgaaagggttaagcatcgcgcgcagtaaaaccgcttatgagtcttcggaagagtaccgcaataaggtggctgccgggcaatcgcccttcccggctaaagcgccgtggtatccgtttgtcgccggtcagcttaccgaactcctcgtctcggcgcttgaaggttacccttatccgctgaaagcctggatctccaacatgaccaacccgttttacggcattgcggggttacgcggcgtggcggaagaaaagctcaaggatcctgctcgtctgccgctgtttattgccattgacgcctttatgaacgaaaccacggcgctggcagattacatcgtgccggatacccacaacttcgaaagctggggattcagcgctccgtgggcgggcgtggccagcaaagccaccaccgcgcgttggccggttgtcagatcggcgaccagcctcacggctgacggtcaaccggcctcgatggagtctttctgtatcgcagtggcaaagcgcatcgggctacctggattcggcgacaatgcaattaccgatccgcaaggtaatcactatccgttgaaccgtgcggaagattactacctgcgtctcgcggccaatattgcgtttatgggcaaagctccggttgctgaagcacagccggaagacatagcgctgaccggggtccagcggatcatgcctgtgatgacccaaacgttgaaaaccgatgaaatcagccgagtggcgtttatctactcccgcggcgggcgctttgcgccggacaacagcgggcgagttgataaccgcgtcggcaatgcctgggaaaaaccgctccaaatctggaatgcgaacgtcgccgcgcaccgccatgcgattactggcgagcgctacagcggctgcccggcctggtatccatcacgtctgtcagatggacgtgcggtcgaggagttgttcccggaacaagagtggccgttgaagctgatttccttcaaatccaataccatgtccagcgccacggcggtgatcccacgccttcatcatctgaagccggttaatctggtggcgctcaatccacaggatggtcagcggtatggtttagcacacggcgatatcgtgcgtatcaccacccctggtggtcaggcgcaagcgcagataagcctgctgcatggcgtcatgccgggtgtcatcgccattgaacatggttacggacataaagaaatgggcgcggcacagcataccctcgacggtgagccgatggcgtttgatgagcagattaagtcggggattaatctcaacgaattgggttttgcggacccaacccgacaggtagccaatacctggcttgactgggtgtcgggtgcgtcggtgcgtcaggggttgccagcgagaattgagcgagtgtag

SEQ ID NO: 440170 - DNA, 1023 bp, Serratia marcescens; identical to SEQ ID NO: 26724

SEQ ID NO: 440171 - DNA, 735 bp, Serratia marcescens; identical to SEQ ID NO: 26725

SEQ ID NO: 440172 - DNA, 1782 bp, Serratia marcescens
gtgggacgcaacgtagtaagatgtctgacggtactggcgtcgctgtggatgctaagtggcgcggtcagggcgcagacatggaacattggcgttttggcgatgcgcggggaggtttctacacgtaatcactggcagccgctggaaaccttgttgaatcagcaaatccccggtgagcagtttcatattcaaccgctggacctgcggcagatgcaggaggcggtgaatcgtggaacggtacactttgtggtcaccaatccggcgcagtttgtccagcttaacagccgctcagcgctacgctggctggcgtcgttacgatccacccgtggtgggaaagccaccagtaacgtgattggcagcgccattctcgtcaggcgcgacagtgggttaacctccgcacacgatctgatcggcaaaacggttggcgccattgatgctcaggcgtttggcggctatttgctgggatataaagcgctcagtgatgccggtctgcgccctgaacgtgatttacgtctgacgtttaccggatttcccgccgatgccttactctatttattacgtgaaaaagccgtgcaggcggtgatcgtgccggtgtgcctgctggaaaaaatggatgaagaaggcctcatccgtaaaaccgattttatgaccgtgttgaatcatccgacttcaattccctgtttaaccagtacgccgctctatccggactggtcatttgccgcactacctgtagtgagtgacgagctggccgatcgcgtcacgcgggtactgttcaatgcaccgcaaaacgcgacgtttcgctggggtgcgcccgcctcgacccgtgaagtagaagcgttgctgcgcgacgtccgacagcatccgcagcagcgtcagctgtggctggatgtcaaaagctggtttattcaacaccgactggcgatggggggcgtggtcatcgtattgctgttgcttacgctcaattacatctgggtgatgctgttggttcgccgacgtggcaggcagctggagcggaacaacgtgttgttgcacaaacaggaacaggcgctggagactgcccgccaaatgagcgtgctgggggagatgacctccggttttgcccatgaactcaatcagccgttgtctgctatccgtcattatgcccaaggctgtctaattcgcctgcgtggtcaggatgagcagcatccgttgctgcccgcgcttgagcacatagacgcccaggcacaacgaggagccgatacgctgcgcaatctccggcagtgggtcagccaggcacagggcaatccggtactcaccgatgactggcaagccatcaacgttcacgatgctatccatcacgtctggcaattactgcgtatgccccagcaattcccggcgataacgctgcacacgcaggttagtaaggcgttaacgttgatgctgccaagcgttcttcttgagcaggtgctggctaacctggtactcaatgccgcccaggcaggcgctacgacggtatggtttagcgccctgcataaggatggcggcgtgcgtattcaggtgcaggataatgccggaggtattgacgaggctcagttgtatcaggcgtttcagccgtttatgaccacccgcaaagaaggtatgggactaggactggccatttgtcagcgactggtgcgctacgcaaacggagatattgagatcaaaaatcagcaggccccggacggtaaagcgggggcgagagtgacattgtattttaagccaaatcaggaaggaggccgtagtggcgataattcatctgctggatga

SEQ ID NO: 440173 - DNA, 585 bp, Serratia marcescens
gtggcgataattcatctgctggatgacgacattgccgttacccaggcctgtgcgtttttattggaaagtctgggatatgaagtgtcttgctgggagcaaggcgagaaattcctcgccgaggcaaatttgcaccaggtgggcgtactactgctggatatgcgtatgccggtactggatgggcacgctgtgcatgaaatcatgcgtcagaaagcaagtacgctggcggtggtctttctcaccgggcacggcgatgtgccgatggcggttgagcaaatgaaacgtggcgcggtcgactttttgcaaaaaccggtgtcagccgtgccgcttcaggcagcattagaacatgccttgcaggtctcggcagcggcgttctcgcgacaagagatcatctcatgctaccaacaacttacgccaaaagaacgggaactggtgcatctggtagcaaaagggttaatgaatcgggaaattgctgatgccatgaatattgccgtgcgtacggttgaagtgcaccgggcgcgggtgatggaaaaaatgcaggcaggaagtcttgctgagctcgttaatcgacttcagagaattcagtag

SEQ ID NO: 440174 - DNA, 204 bp, Serratia marcescens; identical to SEQ ID NO: 26728

SEQ ID NO: 440175 - DNA, 639 bp, Serratia marcescens; identical to SEQ ID NO: 121762

SEQ ID NO: 440176 - DNA, 321 bp, Serratia marcescens
atgaagcagatgaccttcgccgacgccgagtacgctggcaagcgcaagcaaacccgcaaggagttgttcctgatcgagatggatcgggtggtgccgaggaagggcttgattgctttgatcgagccacattatccgaagggtgaaggtggccgtccggcctacccgttgatggcgatgctgcgtgtgcatctgctgcagaactggttcggctacagcgatccagcgatggaggaagcgctgtacgaaaccacgatcctgcgccagtttgccgggctgaacctggagcgcatccccgacgaaaccaccatttgttggcgctga

SEQ ID NO: 440177 - DNA, 312 bp, Serratia marcescens
atggtcaggttctccaaattattttccataccgcttgactccgtacatgagtacggaagtaaggttacgctatccaattcaaattcgaaaggacaagccgaggaaggtagcggacgactcattggggtacaggcagtggccccggaagcgggcgagctgatccagacggcggtgctcgcgatccgtaaccgcatgaccgtacaggaactggctgaccagttgttcccctacctgacgatggtcgaggggctgaagctcgcggcgcagaccttcaccaaggatgtcaaacaattgtcctgctgcgcaggatga

SEQ ID NO: 440178 - DNA, 1665 bp, Serratia marcescens
gtgattaacaaggaaaaacatatcacccgcaggggatacacgctctgctttctcagtaaactgcaggatagtctgaggcggagggatgtctacgttaccggcagtaaccggtggggagatccccgagcaagattactacagggtgctgactggcaggcaaaccggattaaggtttatcgttctctgggacacccgacagacccgcaggaagcaataaaatctctgggtcatcagcttgatagtcgttacagacaggttgctgcacgtcttggcgaaaatgaggctgtcgaactcgatgtttctggcccgaagccccggttgacaatttctcccctcgccagtcttgatgagccggacagtctgaaacgactgagcaaaatgatcagtgatctgctccctccggtggatttaacagagttgctgctcgaaattaacgcccataccggatttgctgatgagtttttccatgctagtgaagccagtgccagagttgatgatctgcccgtcagcatcagcgccgtgctgatggctgaagcctgcaatatcggtctggaaccactgatcagatcaaatgttcctgcactgacccgacaccggctgaactggacaaaagcgaactatctgcgggctgaaactatcaccagcgctaatgccagactggttgattttcaggcaacgctgccactggcacagatatggggtggcggagaagtggcatctgcagatggaatgcgctttgttacgccagtcagaacaatcaatgccggaccgaaccgcaaatactttggtaataacagagggatcacctggtacaactttgtgtccgatcagtattccggctttcatggcatcgttataccggggacgctgagggactctatctttgtgctggaaggccttctggaacaggagaccgggctgaatccaaccgaaattatgaccgatacagcaggtaccagcgaacttgtctttggccttttctggctgctgggataccagttttctccacgcctggctgatgccggtgcttcggttttctggcgaatgggccatgatgccaactatggcgtgctgaatgatattgccagagggcaatcagatccccgaaaaatagtccttcagtgggacgaaatgatccggaccgctggctccctgaaactgggcaaagtacaggcttcagtgctggtccgttcattgctgaaaagtgaacgtccttccggactgactcaggcaatcattgaagtggggcgcatcaacaaaacgctgtatctgcttaattatattgatgatgaagattaccgccggcgcattctgacccagcttaatcggggagaaagccgccatgccgttgccagagccatctgtcacggtcaaaaaggtgagataagaaaacgatataccgacggtcaggaagatcaactgggcgcactggggctggtcactaacgccgtcgtgttatggaacactatgtatatgcaggcagccctggatcatctccgggcgcaaggtgaaacactgaatgatgaagatatcgcacgcctctccccgctttgccacggacatatcaatatgctcggccattattccttcacgctggcagaactggtgaccaaaggacatctgagaccattaaaagaggcgtcagaggtagaaaacgttgcttaa

SEQ ID NO: 440179 - DNA, 240 bp, Serratia marcescens; identical to SEQ ID NO: 99304

SEQ ID NO: 440180 - DNA, 288 bp, Serratia marcescens; identical to SEQ ID NO: 84381

SEQ ID NO: 440181 - DNA, 159 bp, Serratia marcescens
atgaaactgccgcgaaacactctgctcgggtgcgtattaatagtgtgtctcacactgctgatattcacttatctgacccggaaatcactctgtgaaatccggtacagggacacgaacagggaggtggcggcttttatggcttacgaatccgctaagtag

SEQ ID NO: 440182 - DNA, 219 bp, Serratia marcescens; identical to SEQ ID NO: 194205

SEQ ID NO: 440183 - DNA, 324 bp, Serratia marcescens; identical to SEQ ID NO: 194204

SEQ ID NO: 440184 - DNA, 348 bp, Serratia marcescens; identical to SEQ ID NO: 194203

SEQ ID NO: 440185 - DNA, 147 bp, Serratia marcescens; identical to SEQ ID NO: 194202

SEQ ID NO: 440186 - DNA, 834 bp, Serratia marcescens; identical to SEQ ID NO: 194201

SEQ ID NO: 440187 - DNA, 1539 bp, Serratia marcescens
atgaacagcttacttcctgacgatatcgatgaactgaaacgtctccttgccgaacaggaggcgctgaaccgtgcccttctggaaaagctgaacgagcgtgaacgcgaaatagatcacctgcaggcgcaactggataagctgcgccggatgaacttcggcagccgctccgaaaaagtctcccgccgtatcgcgaagatggaagccgaccttaagcagttgcagaaagaaagcgatacccttaccggccgggtggatgacccggccgtgcagtgcccgctgcggcagacccgtacccgcaaaccgttccctgaatcacttccccgtgacgaaaaacggctgctgccggcagcgtcatgctgcccggaatgtggtggtgcgctgagttacctgggtgaagatgccgccgaacagctggagctgatgcgcagcgccttccgggttatccggacagtacgtgaaaagcatgcctgtactcagtgcgatgccatcgtgcaggcccccgcgccttcacggcccatcgagcggggtatcgcaggaccggggctgctggcccgcgtgctgagttcaaagtatgcagagcacaccccgctgtaccgccagtctgaaatatacggccgccagggtgtggagctgagccgctcactgctgtcgggctgggtggatgcgtgttgccggctactgtcaccgctggaaggggcgcttcaggactatgtgctgactgacggtaagctccatgctgatgacacgcctgtcccggtgctgttgccaggtaataagaaaacgaagaccgggcggttgtggacgtacgttcgtgacgaccgtaacgccgggtcagagctggcgccggcagtgtggttcgcttacagcccggacagaaaaggtatccacccgcagagccatctcgctggcttcagcggtgttctgcaggcggatgcgtacgccgggttcaacgaactgtaccgcaatggacagataacggaagctgcctgctgggctcatgcccgccgcaagatccacgatgtgcacgttcgcaccccgtcagcgctgacggaggaagccctgaaacggatcggtgagttatatgccatcgaggcggaaataagggggatgccggcgaagcgacgccttgcagaacgtcagcaaaaagctaaaccgcggctgaaatccctggaaagctggctgcgtgaaaaggtgaaaacgctgtcgcgacactcagaactggcgaaagcgttcacgtacgtactgaaccagtggccggcgctggcttactatactgacgacggctgggccgaggcagataacaacatagctgagaatgcgctacggatggtcagcctgggccgcaaaaactacctgttcttcggttcggatcatggaggagagcggggagcgctgctgtacagcctgatcgggacatgcaaactgaacggagtggagccagaaagctaccttcgccatgtgcttgatgttatagctgactggccgataaaccgggtcagcgaactgctcccctggcgcgtagcattgccaaatgaataa

SEQ ID NO: 440188 - DNA, 756 bp, Serratia marcescens; identical to SEQ ID NO: 166082

SEQ ID NO: 440189 - DNA, 1500 bp, Serratia marcescens
gtgacgctcaatacttctcaggtcagttactacatgactcaacgtaaaaaaggggcaacccagcatatctcggccatgaaggccggtatctctgtccgatctggtcgccggatcgagaaagatcagtggtcgaaagccggtgaacgccactggcgaacgcgtaaagatccacttgaagctgtgtgggacagcgagcttgtccctttactgaaagaaaggcctgctctgatgccaaccacgttgctggaaatgctacaggataaatatcctggtcagtaccccaacaacctccgcaggacaatgcagcggcgggtccgtgaatggaagttgcaatatggtgcggagcaggaggtcatgttccgccagcgtcatcaacccgggttgcgtggtctgtctgactttactgagctgaaaggcgtagttgtcaccatcgccggtaagttgttggcgcataagctgtatcacttccgccttgagtggagccactggagctggatgcgggttgtgctgggtggggagagcttctctgccctggctgaagggttgcaggaggcgctcggtcagttaggcggcgtgccgtcagagcacaaaactgacagcctgcgggccgcgtggaaacaccggggtgaagacggtcaacgggaactgacagagcgttatgccgagctctgccggcactacggtatgcagggcgtgcacaataatgccggacggggccatgaaaacggttcggtggagagcgctcacgggcatctgaaacggcggatccgccaggcgctgatactacgcggtagcaacgacttcagtacgcttgaagaataccaggccttcatcactcagcaggtcatgcggcataaccgcaataatcaggatctggttaaagaagagcagcctcatctgaagccgctgccgcttcgtcgcagcgccgactatgacgaactgacggtgagggtcagtagcagcagtaccatcaacgtcaggcacgtcatctacagcgtcccttcccggctggttggccagcttctgcgggtccggttatgggatgaccgtctgagttgttacgttggcagtaacgaagtcatgaactgtccccgggtcagacccgaaaaaggcaagacgcgggcacggcgaatcgacttccggcatgtgatcgacagcctggcaaaaaagcccggggcgttctgccatgcgacactgagaaacgacatcctgccggatgatgaatggcgaaaactatggcgccgtctgtgcaaccacctggagcccgaaatggctggcagactgatggtacacgcactgaaactggctgcggggtatgacgatatctcggtcgtggcacgcgggatggagcagatgctgaataccccaggcgaactggatctgaaccggttgatgcggttcctgggaataaaggaaaaagagctaccgcccgtcagtgtcgttcagcataacctgagcagttatgagcagttgctgcgtggaaaaggaggtctgcagtga

SEQ ID NO: 440190 - DNA, 1005 bp, Serratia marcescens
atggaaaacattgcgcttattggtatcgatctgggtaagaactctttccatattcattgtcaggatcatcgtgggaaggccgtttaccgtaaaaaattcacccgaccaaagctaatcgaatttctggcgacatgcccggcaacaaccatcgcgatggaagcctgtggcggttctcactttatggcacgcaagctggcagagttagggcattttccaaagctgatatcaccgcaatttgtccgcccattcgttaaaagcaacaaaaatgacttcgttgatgctgaagctatctgtgaagcagcatcacgtccatctatgcgtttcgtgcagcccagaaccgaatctcagcaggcaatgcgagctctgcatcgtgtccgtgaatccctggttcaggataaggtgaaaacaactaatcagatgcatgcttttctgctggaatttggtatcagcgttccgcgaggtgctgccgttattagtcgactgagtacccttcttgaggacagtagtttgcctctttatctcagccagttactgctgaaattacaacagcattatcactatcttgttgagcagattaaagatctggaatctcagttgaaacgaaagttggacgaagatgaggttggacagcgcttgctgagtattccctgcgttggaacgctgactgccagtactatttcaactgagattggcgacgggaagcagtacgccagcagccgtgactttgcggcggcaacagggctggtaccccgacagtacagcacgggaggtcggacgacattgttagggattagcaagcggggcaacaaaaagatccgaactttgttggttcagtgtgccagggtattcatacaaaaactggaacaccagtctggcaagttggccgactgggtcagggagttgttgtgtcggaaaagcaactttgtcgtcacctgtgctctggcaaacaagctggccagaatagcctgggccctaacggcacgacagcaaacttacgaagcataa

SEQ ID NO: 440191 - DNA, 570 bp, Serratia marcescens; identical to SEQ ID NO: 16861

SEQ ID NO: 440192 - DNA, 720 bp, Serratia marcescens
atgagccatcaactcaccttcgccgatagtgaattcagcactaagcgccgtcagacccgaaaagagattttcctctcccgcatggagcagattctgccatggcagaatatgaccgctgtcatcgagccgttttatcccaaggcgggcaatggccgacggccctatccgctggagaccatgctgcgtattcactgcatgcagcattggtacaacctgagcgacggtgccatggaagatgccctgtacgaaatcgcctccatgcgcctgtttgcccgattatccctggatagcgccctgccggatcgcaccaccatcatgaatttccgccacctgctcgagcagcatcaactggcccgtcaattgttcaagaccatcaatcgctggctggccgaagcaggcgtcatgatgacccaaggcactttggtggatgccaccatcattgaggcacccagctctaccaagaacaaagagcagcaacgcgatccggagatgcatcagaccaagaaaggcaatcagtggcactttggcatgaaggcccacattagtgtcgatgccaagagtggcctgacccacagcctagtcaccacccggccaacgagcatgacctcaatcagctgggtaatctgcttcatggagaggagcaatttgtctcagccgatgccggctaccaaggagcgccacagcgcgaggagctggccgaggtggatgtggactggctga

SEQ ID NO: 440193 - DNA, 279 bp, Serratia marcescens; identical to SEQ ID NO: 215034

SEQ ID NO: 440194 - DNA, 264 bp, Serratia marcescens
atgaacaccctggccgaccactactaccgcgatacccattaccctatcccgcatgccgattttctgcgtcttcagcatgcgcacgccaccggcgtgctgttcctcgacctgctggacactctcgacctcggcgggcagcgccccgatgccgtgcaacaggcatcgtttgcctcggtcattgccttgctgaccgaccagctcggccacgtcgtcaacacctgtgaaacccaaatccttgcccgcatggaggccaccgccacatga

SEQ ID NO: 440195 - DNA, 168 bp, Serratia marcescens
atgcacctgctgcgccaccacaaagtggttgttctctatattttcaaaatcaatcaaattgatggtgatatggtcgccattctcgccaaagggcaaggttttgtcggccatcaaccattcctggaagttctcattggcctttaccaaaccggtatggcgagcctctaa

SEQ ID NO: 440196 - DNA, 1524 bp, Serratia marcescens
ttggcgctgttagtcgatattgttcataaaggaatgaagttctctgatgttgtagcaaaaatgcaaagcgcaatccctggcgagttctcactagaaagtgtagaagagtatatcttatcgctgattgaatcagatatactgacctgtgacgcactaatagatattacgagtgacaatgtatttgggaatatgttatcgcagtttcccgttggtagtgagttcgtgacccagctgaagtgtattgagggaaagattaacgcatttaacagcaacccgtttgatgataacgcaagttatttaaagatcgtggaagatttaactcaggcaggaatacatcccccccgctcaggatcatttaaggtcgacttggttactgatgacattgctggttgcttggggaatgatgtcgtttctaaattgcatcagacgaataatttcaaacgcttatattttgaacgttacggtgaatcagaaatacccttactaacgataatcaatgaacttgaagcctatggttatactgatttattaacgcactcacctgcgttatcccgatatgtattcggcggggtaaataaagaaaatggaaaaagcaagggcggttggccagagagtgtattgagctatgtgcttcaacagcaagaacagctttatgtagatgtctcggtgttgcttcaagatttttcatcaaacatattacattcatccaaaccacgagatattgttacatggatatcattatgggaggaaaaggatgtcttggatggcgaacctataattgagattaaaagcataggagcgcaacacccagggagaattatggggcggtttgcatcgagtctgccggcagtgaaaaattttctttcagaatatgacgggaatgataacgctttaatcgttgagattgttcatttgcccgaggatagaatcggaaatatatgtggcagacctaaactaagtgaatatgaaatccgtatcagaagtggtgggagttcatcaagcaatagcatctctgtagacgacttaatggtaagtgtgattaataatcgcgttttacttcgctcacgaaagttgaatcgttatttgtcgataagaatgagcaatgcacatagctttgatagaccgcagagtctgcctttgtatagattcctgaatcatcttgttaaccaagatgattacattgaatctctttcacttcgtaccgcctatccagatgctcaattcatgccgggaattgtatgtgataacttaatcatttccagacctagctggctaatcaataatgaagatatttccttgttaaggagaggcgggaaaattgaacgtgttaatattttcaatagttggagggtgaagaggaattatccatcatgggtcactttcgttcaaggcgacaacgttattccttataacctagacaatgaatggatgttggatgaccttatcaaaaaaatcattaatatgccaagcgttgttttgagtgagacggcacctaaaaatatgagacctttcaggtggcattaa

SEQ ID NO: 440197 - DNA, 909 bp, Serratia marcescens
atgcgaaatgaacagggagataaccgtttaattcacagttcattcagcgatgttttaactccaatatggaaagattggttgtttctgcggttgtatatactaccagaacatcaaaatcaagtattgcttgagatgcaacctgttcttaatcagttaattgctgatagggttattcaaggctatttctacgttaggtattttgattcagaaggaagccatctccgactgcgtatgcgagcgtattccgataatgccttagagttgatttttcctttattgagagaaatcctggatgaccttacaacgcagcgttttatattaaacagcgtaatatcaccttatgtcagggaggtcaaaagatacggaggagatgcaagttgcaaactatgtgaggagatatttttcatagatagcaaagtggcgattgattcattgaccttgttttcattttcggaattaatttcgtggaaagtatgcgtaaaagctatagatgcgatgctgatttctttgggggtatcgacgattgaagaacgtcttgaattttccagaaaggcggcgggtgatttctctatagagactaaaatgactctggcacaaaagaagagaattggggaaatttatcgtgctacacctcctttgttttcgaaaagaaatgtgggggctgaagacagtgatggcagcgttgctttctactcatcaatagatgaaatcctcgccttgtgggaaaggttggttagcgaaaatgataacctggatgcaggtttattgtatggaattcgctggagtctgattcatatgcggcttaacagaatcattagcaaggaacagcgtttacacgaagctgtgttatgggagcttttgaaaaggagctatatctcgctaatgaaaaatgatggtgttgaaaaatag

SEQ ID NO: 440198 - DNA, 1392 bp, Serratia marcescens
atgctatttatctcaaaggttattattttcatttctttatttactttcgcagtgttgagtcaaacggccactgcaagtttgcctggaggtgcatggtctccgaactctacgaatgataattatttgatagaggagcaagagaataatattcaaggcgagagtaatatctcgatacgttcaaaagaagaccaatcaagcggttatggcggagctctgcgtagttttgatgcgttgagtttgcgtggaaagaagatcactttcagagttaaactcagtgttcgctatgctcaaaaaggggccgggatttggctgcgaacggatggcgttgatggccggctccagttcatcagtacatacgatgatcttattaaagggaatgagaatagtcagtggcgcgagatctcgttacatgttgcgaatcatgcgactaaggtggtctacggaatcgttttatccggctcgggaaatgttctggctaccgatattagattgattgtcaatgaagataaactggatttcggctacacgccgttgcaagtattttctcaggccgcggaaattattaaaagagatgcagtaggcaaaaggaatgtcgattgggatgccgttgagcgtaatgcgaaagagaagcttgatggtgaggatgatcctactctagcctattcatttattcataaaatattgaagcaactaaaagacaatcatagcagctttattgagcctcatcgggctaatattttttacaactcaggtcatgtcaccagtcagcctattgtaaagttaatcgaaggtgacattggttatgtaaagcttcccggctttattggaaataataaagacaaatcacaggtatttataaaagacataagcgcgcagatcaagcaggtcaatggctccgtaaggaaagggtgggttttagatttaagagagagcagtggcggtaatatgtggccgattcttctgtctgttaaatctttgctgggcgataaggatattggtggtttcaaggacgtatccacaggtgaaataactgaatggcatagtctgaagaaatataaagaaaatgatagctcttttacagacctttcattcagcaaggttgcgattttactgagctctaaaaccaacagcgccggtgaggctgtcgcagttgcgtttcacggaaggccaggatcacgctttttcggcggcctaaccgcaggtcgggcaagtatgaacagtcaatataaactcgtagacgggagcctgcttaacctaacaacatcctttgatatggacagaaagggaaatgtatttggtgggaagatatccccggatgtttttctggaaagtaatatagaaatgcaagataccgtactttctgctgctgtgaattggttgaatgagcggtaa

SEQ ID NO: 440199 - DNA, 777 bp, Serratia marcescens
ttgatcattcctcttcaaaaacaaaccgagggtggaaagctgtacacacgcattcctgagattgaagccaggttgacagaattagtaaccctcacggatgaaaatctgattcagttgtgtaagcagagcaatacacatccgcaatatgtgcccagtgaatgtcttctttacttcgtccggcgcagcgcattgactaaccaaactctttttgatcccctcttcaggatcctctcagaacgcattttcaggaagcttcctcgagccgctaatcctggtggaagttctgtatcaatgctgaacagcgacattcaggagagcgtttttgaccgttttgttgaaatgctcatgctcgataaagcgggttatgatgcacgactggacatgtttgaaatccgttttgacaaagccgttttaagtctaaaaaacgatgccctgcagaagtcttatcggtctgagaaaagaaatactgaactggagtacgatgattcagaggacattacttcagaggttgaaactgcttctgaaggttttaatccttttgaacaaacagatttcaatcattttcattaccgtcgtgagcttgatgcggcgattgagactttacccgatctacagaagcgaatcattgagatgatccgattagattttccaatagactccatcgaccctcaagagatgacaatttccaaggctcttaacaagtctgaaaaaaccatccataatcagaaaaacagggcgtttgcacgtctgaaaaaattgcttgaagggggcatatga

SEQ ID NO: 440200 - DNA, 579 bp, Serratia marcescens
atgatgaccggactttcacctcaggcatccctggaagaggtgctggagtcattttccatagagcatgatgtgggaaaagcgactctgcaaaagtacctcacagccttcccagaatttgccaatgacctcatagatttatctcgagagatagccagatcatcaattgagcatgatgcaccactctctgagccccagcgccgcttaatcaattcggctgtcactcgcatccagacgtcaccggggaaaacaacaggtgaccccttcgccaatatcccggctaaggaaatgcgtcatctcgctaaatcgcttaatctcccccggcaggttgttatggcatttaaagaacgaaacgtaattgccgagtctgttccccggaaggttatgatcagctttgctgaaaaacttcagacaagcgttcagcacctgtttacatccctcaaacagccacacatggaggttgcagggagctataagtccaacactaaaccgggtgatgcagaaaagattacttttgaacaactgctgcgggatgctgactggcctgaggacgatatcggtcacttaatggaagaggattga

SEQ ID NO: 440201 - DNA, 3393 bp, Serratia marcescens
gtgcaagccgtggaactggctcgcaaggccgctgctgctctacatgaccaagccgttgcttcaggacataatccatgggcaccctatgagtttgctgttgcagaagcaaaacggcgaggccttgatgtggagagaaccagtaaaggatcgcctaatctgaggggcgcacgggctcgctttattccagaggagatgtttatcctccacgaaaaatgtgcaactctttttgaacaggcattcctcgtcgctcatgaaattggtcatgctgaacttggagatgatgtcgaagaggataagacgagctatacgatagatcccaccaggacatcggaatcctcgcctctgggagttgaacgagtcgttgattacagccgcagacagcgaagagaggtccagatggatctatttgcgcgcgagtttttgctgccgaggcattttgtcagcacgctttatctggaaggccaaagtgcttcaagtattgccgaaaggcttggcgcgccgtttgacgtcgttgccctgcaactttttgacgcactactgttgcccccgacattgcctgaaaatcaaaagccagcaattgaatttcccctaaacgatgaacaggcagaagccgctgctcatcgtggcgctgcctttctgcttgaagccggacccggcacaggaaaaacacagacattggtaggccgtgttaaaggactgcttaatgaaggggttgatccccgtaaaattctcctgctgactttttcaaataaagccgctggagaaatggctgaaaggattgcgcgagttgatagcgctgctgcggctgcgatgtggatcggtaccttccactcattcggcctcgatttggttcgccggtttcacgataagctgaatctgccgcaagctccccgaatgctggaccgtacagaagcagtagaactgctggagcatgagttccctaaattaggcttggttcattaccgcaatctttatgatccaagccgaattatcgctgactttctcactggcatatcacgcgctaaagatgaggtagtcgatgcaagcacttaccttggactggcgcaggccatgcgcgatagcgctgttgagactgatgccatccttgaagcagagaaagcgattgaagtcgccagggtgtacgcagcttatgaaagtctcaagcaacagtctgaatgtatagactttggggacctggtttcactacctgtaaagctgcttgaagaaaatgaagctattcgctctcatattcggtctacctatgaacatgttttggtggacgaataccaggacgtcaaccacagcagcgtgcgactgctgaaagccatatgtggtgagggtgagaacctgtgggcagttggggatgctaagcagtcaatctatcgtttcagaggtgcctcttcatttaacatgacgcgctttggaaatgaagattttccaggcgggatgcgatatcggttaaaaacgaactatcgatcggtacctgaaatagtttcagcattttcgagatttgcggtgggcatggctgtgggggatgctgaaagcgggctacacccgaaccgggagagtaatgcctgcaaacccgagcttcgctttgtgggacaaggcgtccagcagtcacctgctattgcagacgcgatacaggaaatgctggatgccggatatccatatcgtgatcaggccgttctctgcacaggcaatgaaaaactctcagaaatcgggcaacagctcgagcgcttaggcatccctgttctgttcctaggcagtgttttcgagcgtcccgagattaaggattgcctgtcgctgctttcccttttggtggatcgccgcgcaatgggcctggtgcgaatggcttgcctgccagaatttacaatgtcgctggaagatgtcggcaatatacttgcctgcctgcgtgaacaagatgacagaggggactggagagaaaaaacagatcagttccaaatctctgagaatggccatgcggtcataaagcgactgattaaagcactggatggttataacggagcgacttcaccctggactgtgctggcaactgtgcttttagacaggacacgcatagtcgcccgcatggcaatgtctccagctagcagtgaccgctcccaatgtattgcaacctggcagttacttaatttcttgcgagtccagccctcaactggcgaaggattatttatcacccgcacattagatcgcatccgtcgtttagtccgactcggggacgatcgtgacctccggcaactcccggtagcagcacaaagcattgacgctgttcgcctcatgaccattcatggtgcgaaagggctggaatttcctgtagttcatataccaggcatgaatgcagataccttacctggttttacacaaaagcaaccctgcccgccacccgatggaatgatcgccggtagaaagtttaataacaaagagcagctcagtcaggagcacaaggcggagagagaatgcttattctacgttgcattgtcgagagcgaaggaacagctatttctctatgctgcactgcgaaacgctgcaggtagtgcacgaaggaaatccgagtatctggaccgtattgagcttgatctggttcaaatgaacacagaaccccatcatccggtcattgagccccccgaatcgttaccaatagactgggctgtggatggagacctcaagctcagtggcgatcaggtatcactctatgagtcatgtccgcgacgattcttctatactcacgtccttcagattgggggaaggcggacgcccactccattctcaaaaatgcacgatgctgtccgaaatgtgttcagagatatgatcgaggcggagtcgacaatatcaacaaatatggaaggcagcgttgagcaggccctcgaagctgaaggtctggctgagcacggatatgcccctgagtttaaatctctggcaatagacatggtgagctatttcagttcaattcgcgaaggccattcacctgaaacacccagtgtactcacgattaagcttgggaatattcctgtcaccgtacaacctgacgatgtgctgattcactcagatggccgacgtacgtttcgccgggtcagaaccggacataaaagagataaagaagaatcggaccttagcgctgccgcttttgtactcgcagcaaggagagcctttcctgacgcgatagttgagttagttcatgtttctgataagactgtaacgccggttgaactgaccactaaggtgctgcataaccggcaggaaaagcttcttgatgccctgaactctataggtcggggggtatttcccgccgaatcatcatcccgtgtttgtccctcctgcccggcatttttcgtctgcggattgacaccgccaggcgcgcttcaaaaaaaattctaa

SEQ ID NO: 440202 - DNA, 756 bp, Serratia marcescens
atgaacagccaaaatattaacaatatcgacgatgtcggagaagcgattcgcgaaggccgcgaactgcgtccggcaaatgcctaccgcatcctgtttgcgcaggaaaacctggattttcacgcaattgagatcaatgacccagttccactggggcgtcagattctgattgccgcaggcctgcgtgtaaatgatggttacagcctcttcgctattcttcagacgggcgactttgaagatctgcgacttgatgaacctttcgatttacgcggtcgtggcgctgaacggttcgtggccttccagaccgatcgtgatttcaaacttaccgtaaacgacagccaggtatcgtggggaaaacctgcaatttcgggagcagcactttatgagctggcaaaaccagccgatggcgatgctgtatttatggttgtccgtggcggtgatgatcgccagattgaaccgaatgaggcggtggatcttacgacgtcgggcattgaacactttgtaacggcgccaaagcgtaaaccaaagattgatatcgtcgttaacgggcgtgaagttcaggtcagcgatagtcatcaaactttcgagcaatttgtggctatcgcatatccaggcgaagccccaactgcagagatcgtttattcaatcacatatcgtggagcggactcaaaaccacacagtggtgagttagctgcgggtgcctatatcaacgtgaaaaacgggagcgtgatcaatgtcggccgcactattcaatcttaa

SEQ ID NO: 440203 - DNA, 1176 bp, Serratia marcescens
atgtcggccgcactattcaatcttaatagcgatctgaagcgcttgcgcgaagaaggttatcacgtacaaattgtgggtggctttctggtcatgcgtgacgttccgtacgttaacgcgcaacgggaagttaaaaccggcatgctcatatcgagtctttgcctgtctggagacgctactcaaaaaccggaaccacacactattcactttgatggagaatttccatgcacttcccagggggtgcgcatccaggctatttttcatcagagtgaagcggtaaatcttgggcatggactgtctgctcagcacttattctccagtaagcctgggcctgaaggttacagtgactatcatcagaagatgtccacctatgcgacgatcatctctggccacgccgcaaccctcaaacctggcgttagcccacgtgtttttaaaacccctgatgaggagcaagggggcgtctttaactatcttgaaactgcatctgatcgggtcgggatcggggcattaactgcacggcttgaaggtcagcacattgccatcatcggtgtcggtggtacaggttcctatatactggaccagatagctaaaacaccagtcagtgagatacgtctcatcgatggtgatgattttcttcagcacaacgcttttcgcgcccccggcgccccgtcgattaacactctcagggaagtgccgaagaaagtggattacctggcgggaatttacggtcagatgcaccgtcgtatcgtgacgtatgcagtacggataagccaggatagtcttactctcttggacggaattacctttgccttcctttgtatggacgcaggagagccaaaacgcttagcgatgcagaagctggaagacatgggcgtgtcattcatagacgtgggaatggggctcgagctggtgggcggatcgctgggtggcatcctgagggtgacgaccagtactccagagaaacgagatcacattcgcacacgtgtgtcttttaaggagagtggcgcagaaaacgtttacgcttcaaatattcaagtcgccgagttaaacatgttgaatgcggcacttgccgtcatcaaatggaagaaactactcgggttttatcgtgatcttgaaaatgaacataactgttcatatacgactgacgggaatatgttactgaatggtgacttactatga

SEQ ID NO: 440204 - DNA, 3240 bp, Serratia marcescens
atggctgaaagagaacaagaaaaaggggtgtcgccatcaaaattcatgcgcgaactgcgtcctgaattttactcggacaccagcgaccgcacagcttaccagctcgatgccccggcacttgagtaccacctcgatagtattacatcgcgcaaccagacccatgacttcgagatattttgtcgcaagttgtgcgaacgcacgatctgcccaaacttaaagcctgctaccggtccggagggaggaggagacagcaaagccgattcagaaactattccgattgccgacgagattgctactctcacgtatgtgggtgacgcaaatgccgcccaggaacgttgggcattcgctttcagtgccaagagaaagtgggcggaaaaagttcgcaatgacgtcgcaggtattgtggcgacgcagcgcggctatcagaaagtctattgtgtaacagcgcagttcgctcgtgcgaaggatcgagcccgcgtcgaggatgaacttacgaaacagtacggtgtgaccatcactattcttgaccggagttggattgttgatgaggtcgtcagtaacgatcgtaaggacctcgcctttaattaccttggtgtcgggcaggaggttgcagactcaaggcgtttggggccctcggactactcccgctcgcagcaacttgaagacatcgataaaacgctcggcaatccggaggcattttccgggatggaaatgcaacgagttacggaagctctggtggccgctaagttgtcgcgcaatctagagcgcccacgaatcgagacggatggtcggtttgctcgtgcaattcgactcgctgaacaggatggaactcatcgccagcagttggaagcgcactacgagtccatctggaccgccttttggtggttcgatgacatcgcgtatttgaacggaaggtacgacgagttcgcgaatctggtgatcgacacggatcacgccataaaccttgagtttctttgtaatttagtacaattgctattcaactcggtcattcatctgcatttgacggtcgacgaggctaagcttgaagagcgcgtatctagattgaccgagaggttaaagctaattgctgagaataaagaacgtccaaacaatgcattggaggcccagtcgtccttactcgtcgtagaagttaatcaggcgacactcaataaagacactcaaaaacttagttcgctatggccgcagttctcggatgtcgtcaagtgtgcgagaggtctcggtgagttttctgctgagcgtttgactaaaatgattgaggtgttcgggatcgtcgccggtaaggacagtggttatgtccaactggttgacgaggtggcggcgtttgtttctgagcgtaccggtgaggctcagggtgcgttagtgcttctcaagcgagcgcaacaactcgatttcgaagataacttcgaaatgattcgtttgctgggcaaagccgcgcggcaactcactaaaaaagaatatgccgactctctgatcgaagcgctgcaactgctcacgtttgcttatcgtagtgcaggattgctctgggctgcgcgggctacatgcatttttgcaatggcttcgatgttcatcgaagccgaggaggacagtgaccttccggtttcgatcgtacccatggtcatgaccctcgcttggattgctgtcgaacttcggcatcttccagacgctctcgaagccgttcggttagttcgaggttgtacggcgacacttccgctcgacgactcatcaaaagagcgtgtcgcgaagcgacttacggagttcgatcttattctggcgagccaaattttaaatttcacagcggaagaacttcaacacgttgtgcgattgcctgacgttcttcgtggactcggtctgcaacagagtcgaaactcgctgatttacgccctcggccatgaagccgaacttcgtcgggagggatcaataccgcaagaagagacgccagagagtgtggccgagctatttactttgcttgctagccaaccggcatctagcaacctgcatggtcctgtcatctttaacgaggcagactcgcagtgtcttgtctcaagagtgctaggcattcgtgtggctgtctttcacccgtgctccgatgccttagttcttgccgcagaagcagtaataggttccgtcgaagcattttttgcaaccgcaatcgaaagcggcgccgcagcgcatacagagaacttcactatctcacttcaagatagttctgaagtgctggcaccggactttacgatcaatactgatgaaatgacggcgatagttcgctggccgactggactgttacccgctacatttgcccgacaggccgaagtccagaagatgctgatcggattggctgctgagatttttgctgccacttgctacgtggaggatatgcggaaaacgctcgaacatctcttcggcaatgaggcggtgcttgaccgcatcagcatggtcgtagttgtcggcaatagtcggcaacgcgtatacaaggaaggactatcgaagctcagcgattggacgcagatggcgatatcggagttcactcttgagccgtcgcgtcccgtaatcacccgccgtttattagacacgtttgaggatcaagaaagtcgctcgacggtaggaaaacgaagtgccccgttcccaacaagcgaccatcgcgatcttggtgttcgctctgttatagatgttcatctttggagtcaagccggttggtccggaactgcttttactcattgggggccctcgtatcctccaggggttgcgctcatgtttaagcacgaggatgccgccaggaagatctttgcacgttggcgtgaacgtctaggaacggtcgataagcaggacgaaatttacatggcgattctgcgtggagtctctgttgaccatccggcgcattaccgtgttcttatcacttccaggctttctaatgatgagggcgaaacgtcaggcaagaccttcatgatggcatcacgtatgcaaaccatgcatgcagaaaccgatgtcaacctgagccgctttcttgatatttataggcagtcacgcgcgtatttgcttcttcccgcgatatttaatggaggggctgagccgaagtttattccagagcttgcaatcctaaagcgggagcttagtgtaaagaacgctatcgacgtgaccgagcatgacgttgaggtgatggcacttggggcggaagagtatcgccgtcggttcggaacgtctgggcccagcaacagaagttag

SEQ ID NO: 440205 - DNA, 3306 bp, Serratia marcescens
atggcactgcgtgctcaagctggtgtttcggaactcactagcaaggcctttgaacacgcagccaacgccttcgaagctctggtgcgcaatggtaatccagagtcgtctgaacgaggattccgccgcaccattgcagctgcagcctaccatctagctggcttctcggccgttgccttttcaatcttcaacgagacagaggaagaccttaacgtctcacccggcgaaatagcgatccaacacttgatactgcgcgatctcaaccaacttcgcggcttcgttcgcgactggctggatgacgggactcacagcgatgagcagatcgcgacggcgctgcagggcgaagacactgacgtcgacgaagtgctgtcgacaattctcaatacgacgatctgccgtgccctagcatttttcgatttcgcgcttgagaccggcgaggtcgagccgatcgaaaccgcacgagggctgcttaccaccgctgtcgagcttgccaacaacgctgagaacgtcccgctgtggtggatctcgaacctctgccgtcacctgatcgacgacctgtggcaacactcgctacatcagaatttgccgactgagccacccgagggtgcggaggaaaaatatcccgacctgcggcggttgtttatatcttcactttacgcccgcaagacctcggaggtggagctatggccatcacagcgcgaagccgcccagcgctccacagacgtcacggacgatctggtcgtcgccctgccgaccagcgcgggcaaaacacgggtggcagagattgccgcgttaatgaccctttcctccgaacgccgggtgctgatcgtcacaccgctgcgcgctctttcggcccagaccgaacgatccttcaggaagaccttcgcgccactggggtttggtgtctcttctctctacggcgccagcggcctttcggccggtgatgaagacgccctccgcacacgggagatcatcattgcgacgcccgaaaaactcgacttcgcgctgagaagcgaccagacgctgattgacgatgtcggcctaatcgtcctcgacgaaggccacatgatcggccctagtgagcgcgaaatccgctatgagacgctcgtgcagcgcctacttaggcgtacggatgcggcagagcgccgaatagtttgcctttccgcgatcctgccaagcggcgacgaactcgacgaccttaccgcatggattcgttccgacgaacccggagagcctgtgcgttccgactggcgcccaacgcgccagagattcggcgcgcttacctggcgaggtaaggacgcgttgctacgactcgatctagacgacgatggcaccttccttgacaaattcgtcgcggaaaaaccagcgctcgggaaggagaagaagccctatccacgcaagaactcgcacctcgctctgttcgcggcatgggagttcgcgagccaaggcaagcgcaccttgatcttctctacccaagcaaactgggtcggaagctacggtaaacaagtcgtggacctctgcaagcgcggctatgtggactcgttgctggaagacgaggctccgattgcccgcgccctagaagtcggcaaggaatggttgggcgaggatcacccagccgtggccagcctgaaggtgggcgttgccattcatcacggccgactgccgagcccgttcctacgcgaactggaactgctcctatccgaaggagcgctaaagattattgtcgcttcgccgacgctctcgcagggcctcaatctcaacgctgccgtgctgcttgtgcccgcgctatatcgcgcctcagagaagatcaaaggcgaggagttcgcgaacgtggccggccgcgccggacgtgcattcgtcgatgtcgaggggctgatcgtccatgtcatgttcgacaaaatcaaatggagaaagaaagaatggagggaaatggtcgcctctgccaaggccaggacgcttaaaagcggccttatccagatcgttgccgaaatccttgagcgtctatcgcgcgagggcgtcttggatcgagatgacgcctgggaatatctcgccaacgcccgcgaggcttggaggtcacctgacgaagaagcaggggtggcagaacgactggccgccgcagtggaatacgacgctaccaccgacgataaagacgagacggacgacgaggaggaaaccatcgacgaggagcccctgtctcagctcgtcgaacgcctcgacgccaccgtattcggtctgatcgaagccctagacgctgatcgcgccgatctacctaagcttctagacgaggcgctcagggggtcactctgggctcgccaaattactcgggaggacgaggatgtcgctcccctgcaccggaaggtattcgaagcacgcgctggtctcatctggaaagccaccaccaccccaacgcgacgcgggcatttcgctatgggagttgggctcgaagctggcctcctcatcgacgctatggcggacgagctggccgaactcatcgacaaggcagacagtgcagcgttgagcggcgacatcaacgaactcgccgatgctctcggcggactcggcgaacgcctgctgttcatgcggcccttcatccctgacaaggcgaacgcgctgccgccgaactggaaagctatcctacgtagttgggtgtccggggaagaagtctccaagatcggaccgcagaacatgcgggcggtcgaagatgccttcacctatcggctagtctgggcgttagaagccgtccgcactcggcgcatgtccttcggctggtcgccggatacggtggcgggcggtgctgcggctgcggtcgaaaccggtgtcccccagttcatgatggcgatgctgatccgcgcaggcctgccgtcacggcgcgcggcaatggcggccatcgaagatgctgagccagtcttcgtcacgcccgcagaaatgcgggcctggcttgaatccgacgagattacggccaaaaccgacgcaggcgactggccaacacccgacacctccgcgttatgggcccgcttccgaaccgaagctctcagcggaggcatccagaaatggtccgtcgaacgctacaagcgcctactcgataccgagtcctccccgcccgctggactctatcgaatcgtcaccgacgaaggggacgctcggacttggctggtaacccccgactaccagcggatcgccgtcttcaagaagccagcggttgatcccaagcccagcctattctctggacggttgccgggcaaaacccggctcgtggatgctctacgcgtcggccgcggaaagttgcgttggccggctgccgactcctaa

SEQ ID NO: 440206 - DNA, 777 bp, Serratia marcescens
gtggggctatatgagaagtggtgtgagtctattaaagaaaatgacgaacgcaagtattactggacgtatgtcgagaaggacggcggccgcgatgatatccgcgaggaccttgctgagaccattcgctcgcactacgaccgacttgaacgcatcgccgatgacgtagggcgactaggatacaaggttgctgccaagatcctcagcgaggcaatgcctaatacccccaagggccgctctggcgacctcggcgaaatccttgcgactgaactagtggaggaagaaatcggtctgcgggtacccgtgcgccggctccgttacaaggacggccgtaacatggccatgcgcggcgatgacttcatcggcgcgggctaccaaggcgataagctctgcctgctaaaaggtgaagctaaaagtaaccagaagcttggcaaaaccacggtcaccgccgcccgcaaggtcctcgaccgcgacaatggccgctgcacgcctgactcgctgctgttcgtcgccaatcgcctgctggagagcaacgacgctggcgataacgcactgggtcgcgatcttcgcgacgaagtgggtcttaagtccatgcgagccgatcgaatcgaccatatgctcttcaccgtgtcgggtaacggccctcacgcttccctgaaagagaaccttgaagccgctggagtcaacagggaccactacgtcgtgaacattcacgtcaaagaccatcaggatttcattgcagcaatgtacctagaggcggaagatcttggagacgactga

SEQ ID NO: 440207 - DNA, 1293 bp, Serratia marcescens
atgtcagagattaatccacacgatgccgcgcagactttgccccaggatcgggaaacgctgtaccacttggtctggagcgagcccgcggaacgtataactgtgttgtatgacatcagtactgagttactggcaaaacgatgcagcgaaatgcggatacccaggccgcttgccggttactggaaggcacttgcgaatgggactgcgcctgcaattccagctctgcccgctctgagaaagggtaaggtggaaaagggacgcgagaatggcaattcatcaatgcaatttcctgccattacggtatcaaaatcagcatcttcagtcgccccaaagcaagcttctgttacgagtaatggctatggattgataaatgatctcaaaacgtatctgccagtctcttcggttacagaagatggctattataaacctctgaaaaagaaattactggatctcaacgtttctgatacgggatttgagcacgcaattgagttcctgagccggttcattgaagctctggggaaaaagggttatcgggtaacgctggatgctccgggagaaaggctacatcgtacggatattgatattatggaagatctaaaagcgggaggatatcgcttggagaatttatggcggccttatacgccaagtattatttgtgtcggtaatatgtactttgcgtttaatcttgctgaaatgacggagtatgttccggcgaaaaaagtcaaaaaccgctatattcgtgacgaacagatgggacggtggattcgggggaaaaatagtgagtttttgatacacgtatcaaaacatactctacctaccggacgatttctgttgcagctttactcgccttattcttccgcagaatggttggtacagttccggcagacgaaacagtgcgggttaattagccagatccctaagatgatttcggcgatgcagaaggctgttccgctaatttcaaagcagctagaagaggccagaatcaaagctgaggagcggtgtgtccagcgtgagcgggaattagccatatatcttgaaaaggagcggataggtcgggaacaggaagcataccgtgccagccgtgccgagctcaaatctattatggttcagtgggctgaagataaacgactggaacagttttttcacgaagcagaatcagatacggcaacgcttgatgttgagcaaaaggtgcaggttatgaaacggctacaactggctcgccagttcctgtcagaggatacggcgattgaaaggttgctgaagtggaaaacgccgcaagagcgcttaataaaataa

SEQ ID NO: 440208 - DNA, 933 bp, Serratia marcescens
atggatcggattcaggctatgcaagttttcacgcgggttgctgaagccgggagttttgttcgcgcggcagaaacactttcactgccttcttccaccgtcaccagcacgattaaaaacctggagaaatacctgcaggtgcgtttgcttaaccggacgacaagacgggtcagccttactcctgaaggcctgcagtatctggcgcagtgccgggagatcctgtcgctgattgaacatagtgaatccagcctgactgattccctcagacgccctcaggggcggctgcgggttgatatgcctggagggatcgcccatttcatcgtcatgcccaacctgaaagacttttaccggctttatccggatatttacctgatgattggcgtgagcgaccggcaggtcgatcttgtgcaggaaggggtggattgcgtcatacgaaccggtgaattaacggactccacactggttgcccgtccgcttggccggtttcgctgggtgacctgcgcctcgccggactatctcaggaagttcggtgtccctgagacgcctgaagcgttgtcacaacatcgggcgattcattacttttccggttctggaagacgcactagtgaactgcgttttacacgaggcactgaggctttctctgttccggttgagggggatgcagccgttaacgaaacgggactctacatcagactgtgtcttgaaggttttgggctggcgcagctcgctgagaatgtgatttcggagaatttacagcaaggcaaactgatcgaggttctggcagactgccagcccccctccgtgccggtaacgatactctatccgcatcagcgttttctctctcccgccgtgcgtgcttttgctgactggatctccggacttttcaacgaaggcgcaggtgagaaaggtctttccggtaaaaggcggctccggtaa

SEQ ID NO: 440209 - DNA, 861 bp, Serratia marcescens
atgttttcaattgcagctgatgtcaggaatacgctgggagaatgcccgctgtggtgtgaaagaacccgcaggctctactggactgacattgaagccagtgaacttctcgccatagaagaaggtattgatgttgtgatgcgctggtcgctgcctgaacgtcttggctcctttgccctgactgaacaggatcacattctgctgatgggattcgcgacaaggctggctttctatgatctcaacagcggattaattaccccagtggctgcttcaccgggagacaccggcacccgcataggtgatggacggtgcgaccgtgccggtaattttgtcttcgggacgatggatgacgattatcccgttaaagtcatcggtaagtttcatcgactcaatgtggcaacgctgactgttgagacgcttgcattgcccgatgtcgctataccgaacagcatctgtttcagccccgatggtggcacgctctattactgtgactcgatgcagggtcggattatgtgctgcggctacccctcgctgcaaaaccagcgcgtgttcaccaaaatcgaaggcgacggcgcgcctgatggttcctgcattgatgcgcagggctatctgtggaacgcagaatggggcggcagtcgggttgtccgatacagtccggggggaggaatacacagcattctttctgctccagttctccagacaacctgcccggtgcttggtggttcgtcactccatacactttcttgtaccagtgcccgggtaggactcgcagagccaaccgcttatgacggtgcgcttttcagcattcggtcacctttttttgccggattaccagaaagccgatttgcagcgcacaaaatataa

SEQ ID NO: 440210 - DNA, 180 bp, Serratia marcescens
atgatctactcgcatctatatgttttagataataaaaaacaagatcgcgagcaagttaacgaattgagcattgatccacaaggctattttgcaaatgaagagctctattgtagactgcacaaatcgtgcctttgtgtaaactttgttaaatctttcgtcagttcctgtctctattcgtga

SEQ ID NO: 440211 - DNA, 441 bp, Serratia marcescens
atgagaaaagaaaaaataattatgctttatcccaccctggttaaaccagggttagttatttcacattacatgccgcctgacgtggtcatgtttaatgaaaaatatccatctcattgttcattttatctaacatcactgatgtatcttgaatctgggaaaagatatacaactgagttagatatattttttgatgggaagtctgtattaaataatgacaatgataatgaagatgataaccctatggagtccttcatatttagtcatgtagacgataattcgaccctggttggttcttcgcttttggtgaaggacgttacactggaaaaccccggcgtttatgacattattttcaaagtgtatgaagacttgaacggaacattaagtaatgtccttgatgagaagtcgtgttcgatcattgcagctacaccgatgaggatttga

SEQ ID NO: 440212 - DNA, 321 bp, Serratia marcescens
atgggttttctctttgattttcttcagaagaagcaactcaagagcatcggccttaacccgaaaatagagctttgctggtacaccacggcgatcctcttcaagcaccccagcggagataaggcgacggcgtgccgtttcctgttcctcacgcgtaaggcctgtttcatcgcggatctctttctgggttttgtagaaccagccggcatccattcggttatgccagtaaaccaactgcgacagcagaacagcgccggtcaccccaacccccaggccgacgaaagacggctggtaagctatgggccgatcaagaagctgcattaa

SEQ ID NO: 440213 - DNA, 381 bp, Serratia marcescens
atgaacacctcattcagcttccgcacgatggcgatcggcctgttgctggtggcgctgattgttgccggcaggctggcgttttacttccacagcaacgcagtaaaggccggtgagcaggttaagcagcaggaaaagacgctggcgcagcagtcaggactgatctcagccctgcaagcacaagaccggaagaaccgagccttgactgcggagcaacaacaaagagagcagctgctacgccagcgcgaagaaacctaccagaggaaattgcgtgatgcacttaaaggcagtaaatgtgggaatagtcctatgcctgccgctgttgttgagctcctgcagcaaaatgccaccgacacccgagcaagtcgtcctgttaccccctga

SEQ ID NO: 440214 - DNA, 522 bp, Serratia marcescens
atgtcaacgccatcctctatcgctagaagaatagagtcatcgcttatcgcctactttgataatgattttgaaggaagtcttgttcacctttttcctgccatggataaaaccgcaaaacttagatggccaacaaaaaaagtaggtgaaagaattagagatttcatctctgctcaacataatataattacatacctatcaatgggtgtatccatagggtatttagatgttaatggagtcacactccctgaggccatctataaatttgggagaacctcaatagctcatgaaggagagttagacaaaaggttggttattaccgccagtggtgatgtatcgataagtgaaacgtggtgcttaccatccaattttatcttggctttaatcgtcgcagtaataagtgcaaatgaaaactcaagagaatcaataaggggggatattttcatcaccattcataatgaaaaattttctgcaaatgaattatttggcagagaagattacttaagagacgatatacttccatag

SEQ ID NO: 440215 - DNA, 1416 bp, Serratia marcescens
atgtatttctcccgctacttcttcaagcagagaaccggcggcaagatgatcgtcgcaccacatcacaaggtaatccaggagactctggatcgtgtgatcgatggcgagattcagcgtctgataattaacgtccctcccggctatacaaaaacagaactggcgaccatcaatatgatggggagaggactggcgctaaataggcgtgccaggttcatgcatctgtcgtattcgcacaaccttgctcttcttaactcatctacagcgcgaggaataataaagtctcgtacttatcaatccatgtggcctatggagcttcgcgatgatgctgatagcaaagcgatgtggtggaatgagtttggcggcggcgtgtatgcgtcatcagcagcaggacaggtaaccggatttcgagccgggcacatggagccaggctggcaaggcgctctggttatagatgacccagtaaaacctgacgacgcttactctgagatcgtccgcgatggcgtaaataaccgttttaacgagacaatcaaatcacgactggcgatcgagacgacgccgatgattgtcattatgcaacgcatccactaccacgatctgagcggttatcttctgcgcggaggcagtggtgagaaatggcatcatctgaacttgccggtgattatcgacaacagtcagtcatacgctgcgcagtatccagaaaacacccacgctataccaattgaccacggattgcctgatggttggctgtggccattcaaacacaacgaatcgcatcgaacatcactgttttctcatcgccgcactgccgacgcgcagtatatgcagaatcctaagcgcttcaatgctgaaggggcgttatgggatgaggcgatgattaacggcgcccatgaaatgcggatcacgcaagaactgtcacgcacggtcgtcgcaatcgacccgcaagcaactaatagcgacgagagtgatgaaacagggatatcagtggccagcgtttacggcaccggtgatgaacggcaatacaccgttgatgctgactacagcgggaagttctcaccgaacggctgggctacccgagcgatagaggcatacacgcagcatgacgctgacgccatcgttatcgaaaccaaccagggcggagatatggccgaggatacgttggttaatgccggatttaccggcagaatcattcgtgtacatgccagcaaaggcaaatttgcgcgagcagagccgatatccgctctttatgcgcagggccgagttgctcaccacggcagcctctacatgctcgaaaatcaattgatggaatacgtgccatctaccgctaaaaaatctcctgaccgcctcgatgccgccgtgtacgcgttaaccgagctgtccgaaccacaatctattggcatgttggtgcgttcgcgctaa

SEQ ID NO: 440216 - DNA, 1419 bp, Serratia marcescens
gtgaacgaaaaccaaatgaaacagcagctcacctccaatgccagcatggaaaaggagcggggcaactatctgtcgtcactctttagcggaacaagtaacacgaagcgccagcggctctatcaggagttcggctatcccgtcgagttgacgtttgaggatttctaccgcgcatacacgcgtaacgcgattgccagcgcatctgtcaactgcatggttgatgggtgctgggaagatttccccgaagtatatgaaggagatgaaaccaaagacgccaccaaacaaacgccgtgggataagcggattaataagctgctaaggcgctgctggaagcagattaaaggtgcggatcgtcgcaatctggtggggcgatattcggcgctattgattcaggtgaaagacagcaagccttggcgcgagccggttgataagggcgctgttggtcgcctggctgataaagccctggttaagctgatccccgtatgggaagcgcaaattgagccgattgaatgggatggtaatccggatagcgagactttcggcgatgtgacgatgtattccttcactgagatatctgtgggcaacaataaagacgctcgcccggggcgcattatcagtgtgcaccccgatcgtgtgatcatccttgctgagggctctgacgatgggtcaatgacttcaggtaggtcgatgctggaagccggatttaacaagcttctggatatcgagaaagtgagcggaggggcgtcggaaggtttcctgaaaaacgccagccgccaactgaattattcgttcagcgagaaaacaaattttgccgctcttgcgaaagcgctgggggtgccggagggccaattagctgaggcgctcgacatgcaggttaggcgcttgaacgacagcaccgacagcgccagctttatgcaagccggtactgcagaagtgttatctgtgaccgcttcagatccagagccaacgtggcgaacagctctaagcgagtggtgtgctacagtgccaatcccgatgaaggtactagtaggcatgcagaccggcgagcgagcttcaaccgaggacggaaaaagctgggcaaaaacccgcatgtcccgccgcaatggaacgctcactgatcttattacggacatcgttactcggttctggacgctgggcattgtgccagcgccggcctcaggtgaagtatcagttggttggtctgatctattggcaccgagcgaggcagaaaaaatcgccaacatggacaaaaaggctgatgtggcggttaaaacacagaatgcgttcggtcgttcagctgtaacagagaacgaaataagggcagcaggcgagatgcaggctatccctgactttgactcgggtggagaagatggcaataaacaaaatagacctgaccctctcactgatggaaaaaaaacctaa

SEQ ID NO: 440217 - DNA, 930 bp, Serratia marcescens
atgtcctatcgttctgtcaacaagatggctcgggatattgaggaacgctattaccagattaagcttcggctaagagagttactcgatcagctgctggtggggcgagaaacgcaagggaacagccattcgtggcatttgttatttaataacgatgctgacgagcccgccacgctttaccagggcaacgcaggaacgtttatctatgacatgagtgctcagcagttagctgaccttctggaagtgatacagacgattctggatgactatctgttggccggtaatgggcaagatatatgggcacttcaatacattgcagcagagtatgagcgcggaactttgggggcatatacaaacctgtccgttcagtctccggtctatgcctcgcaaaccacgctgagcgctctcatgtcatcgccagcctatcagaatcagattgctgccacgtatgtatccacgtacagcgactggaaaggcattagtgatgcagcacgcgctgatttggcaaatattgttgctgatgcggtagggcgaggagttaaccctcgcgaaacgatgaaggtcatcagtaagcgtctggatgtttcaatgtccagggcaaagactattgcccagactgaacaagttggcgcactgcgtgaggctcagtggaacgaaacctcatgggcgcaggacaggttggggatacgcaccaaactactgcatctatcagcactgaagccaacaacgcggacatggcacgcatcacggcatggtacgctttacacggttgaagaagtgcgggagtggtactcgaaagacggtaaccgctttaactgctactgcagccagatccctgcggttgtggatgagaaagacaacgttattaatattgggctggcggaacgcttggcaaaagagctagaagcctggaaacaacaagaggccgcgtaa

SEQ ID NO: 440218 - DNA, 195 bp, Serratia marcescens
atggctaactataaagtcctgtacaagttgaatggaaaagaaagtgatctcattattcagagagccgctcagcccgccaacaacgatctatcagtcctcaaagaagtcattaagcatgttctcgaatatcaatcacaggaaattgactctgatgaattggttttgaggattctttacgtggcagctgacgtgtag

SEQ ID NO: 440219 - DNA, 1389 bp, Serratia marcescens
gtgaagctatccagcatccacgttaaatccttcgccatcaatgcctcaaacatttcaaccgaaactatcgacggtgaagaacactacgttattcgcggcgttgtgccgatcgttgatgacatcgtgatgaatggcggcttatacccggcgacggagattaacaaaagttatcagacgcttgaagggaagaaaatgcccgcagggcatccaaaaattggcagtgagtacgtctcagccgagaacccgcgagccgttaaccagtatcacatcggtgcatggcaagagaatgtccgtaaagacggcgaacgcgtcgtcatggatatgtacatcaataagcgttacgcgggcgcaaccgagaagggcaagcgactgattgatcggctggatgcaatggtcaatggcgaaggtgtagagcctatccatgtgtctacaggtctattactgcaacgggagcagaatagcgggaaatccaaagggaagcggcactcctggattgcgcgaaatctggcgtttgaccacacggccattttgctggatgagccaggtgcagggactcccagcgagggggtgggaattttcgtcaactcagcaggggacaagattggcatagaagaagtcaatttgtctgacgcgtcagacctgaccaaggaaggattaatgaatagaacaaaattcttcttaagcgccaattcccagctttcgttcgatgaaatttatcaacgcattaatgacgagctcaatgatgaccgtgacctaaatcagcgacgctggatcgactccatatacccgtcctacttcatctatgaagaccagggcaagaaatacaagcagtcctacctgatagacgaatcgcaaacagcccaactggttagcgagcccatcgaagtagtgaaaaaagtcgaatacgacgaagtaaaaaccaacggagaaagaaacccgatgaaagagaagatgatcgccgcgcttaattccgcaggcgttaaaaccgaagggctaaccgacgatcaggtctgggatgcctacaaccagcaggtgcagaaaaacgatggcaaaggtgacccagcaggctctcaggtcaactctgctgcaatcactgacgccgtgaatgctgcaatcactccgctgactgacaaactcgaaaagctggaaggtcaactgcaggctaatgcagaaaaagacctgacgacaaagcgtcaggcggtgaaaaccaagttcccattcatgactgaagcggctatcaactcactgactggcgacgcactaaatgacatgtttgcgcagtgccagaccagcacaggtctgaatccatcattccagcaggtcaatgctgaaaatgaccagtggaaagactacgacctcaacgctggcatcgataaggaggaaaaataa

SEQ ID NO: 440220 - DNA, 435 bp, Serratia marcescens
atggctaacgtcatctatcgcgggccggtcgaacgcgaaccggaaaccatcaatcttcctgttgcagccgcgcttaatccgggggttgccgtaaaaatctcttccggaaaattggcagtggcaaccgacactactggccgttggctgatcctcggcaatcgtcgcttcattggtcaggcaatcaccactgcatacgcagagaacgaaactggcgcggcttaccgcgtagaaggcgagcaggaatataacgttcgcctagctgcagctgcatacaccgtaggccaggagcttactgttggtgccggcggcgtgttcaaagcggccgcaactggtaatcaggtcgtcgcaacgttcgacgaaaaagcagggcgcactctggcggcggaaggttttgccgacgtggtgatcctctccactccgtacgccaaggcataa

SEQ ID NO: 440221 - DNA, 1032 bp, Serratia marcescens
atgttaaagttcaccaaacaacagcaggcgttgatcattaacgctcgccgccgctgggacatgatgcagcgcaacatggctacacagcatggctttgcggtcaacgacgcaaatggacagttcatcgccttcgatgagcttgttggtaacgcatcggtgctgccgaaagacgtctggggcgaatgggatcgttcggctatcaccgtacaacgcgatgtgctggcggtgtttaacgacctggcttccagcgtatcccgcccgatgccgcttggcaaaatcgtgcactacttcatgaccctttcagattctggtgacgtgaacatcagccttgatgggcgcggcaaagccaagactgaccagcctgtcatggactacgaaggtacgccactgcccatcatcgacagtgagttgtcatttggctggcgtcagatgctggcggcgcagaccgagggttattcgttggacagcgacgctattcctaaccatcagcgcaaagtggctgagaagctggaagatatggcactgaacggcgatgccaacatcaacgttggtggtgcgcgcatttacggcctgcgtactgctccaaaccgcgccactggcacaactgcattagatttgaatggcgcgtcaggtgctcagtgggtggaagcaattaaagagcttattggccttctgcaagacaataatttctacgccccagtcacgatttacctgaactacaaagactggttctacacgaccgtcactgattatgccgccaactaccccaaaaccattttcacccgcatcatggagattccgggcgtagcggcgttggttcctgcttctaaagttcctgctaacgaactgctcggtatcgtcaagcgcaccgacgttgtacagatcctcaatggcatgcctatgaccatgcgaccgaaagctcgtcaaaaccctgaagacgattacgtcttcactgtgctggctgcggcggctccacagttcaaacatgacgctaacggccaggctggttacgtccaactcaccaaagcataa

SEQ ID NO: 440222 - DNA, 330 bp, Serratia marcescens
atgacccagaaatggatcgttactcacgatagtcacaagctggcaaaaggtgagttttatgaaggcgagacgttaccactttggctggtgggaaaagcgacgccagtggccgctcagtcttttgaagtggcaacgccaaatatggaactggcaaagctgtctgctgagctggaagcggctaacggtgatgtaaaaaaactgactgacagcaatgcggcattgagcattgaacgtgatcaactggctgacaaaaatactcagctgtctgctgagctggaagcggctcaagtccagatcacagagcttttgaaaccggcaaaaggtaagtaa

SEQ ID NO: 440223 - DNA, 381 bp, Serratia marcescens
atggcggccccaatcaccaatgagcaggttaaagcatttctggctgagctggggtactccattccagacgccgtgctgacaccgattctgtgccgcgtgaacggcattgaggagtgcttggacggggcggcctatgacgactgcacaaaagagttaatcaagctctatgcagtagctcttatgtccgcctcgtccggggctcgtaaacttaaatctcagagtgccccttcaggagcgagccgatcattcgaatatggcgaagatgctatctcctggttgcgtacgtcgctatcacaactcgacaccagcggttgcacaggcagcctaccaatcagtgccggcaacagcgtggggttcttcttcgttacgggaggttgctga

SEQ ID NO: 440224 - DNA, 369 bp, Serratia marcescens
atgggcgtgaaggttaaaggtatccgggaggcgcaggccaatcttgataggttaattggcgatataaaagggaggagagttgtcagggctatgcagtcagcgctgctgattggtggggcacaggctgctttatacacccctatcgacacgtcgacgctactcaatagccagtatcgcgatatttccgtgaatggctcccggattacgggacgcgttggctattcggcaaattacgctgtctacgtgcatgatccgaacatcccccagaaattccggcgcgccaccgcccaaaaagagttccttaccaaagggtttgaggataccaaggcgcagattgacagagcgatcaagaaggagatgcagctatga

SEQ ID NO: 440225 - DNA, 276 bp, Serratia marcescens
atgaaattcacgagcatacgttctacagagctgccaggcattgatatctctgttaaagagtgcgtcaatgctggacagtggtttctctttaaagcgaattcaagtgatgcccaggtgtgcttttttcttaaagtagagaaagacatctttgctcttgaccaacagggggcgccgttgacgcatttcccagcaggaaaaatagagatgaatgagttcatctactttgaagatttaccgaaaccaatctcattaagcaatcaatttgctgttaagtga

SEQ ID NO: 440226 - DNA, 906 bp, Serratia marcescens
gtgggtttaatacaaagtagaacaaaatgggttttgttcctatcatcatctgagccagacccagaggataggcatattcatgatcttgtatttggactaatgtgtcttgaaaatgccggtatttctcctagtgatatattcatttatgttgatggtgcaaataggcagaatatagaaaacctattttcaattgccacaacaaatcaatatgtaatagccagcaccgatacattctttgtcgatctgcgtgataacagacatgaaaatctagtaatgtttattactggacatggtagtgaggcggggatcgatgctttagtgccaataactccttacatgttgatgaatgcattaaaggctgcgccggccttggataaggttgtggtttatcttggccagtgttacgcaggtgttttcaattatgttaatgcaggtcgtggaagagggcgagatcaacatggccctgatgtgattctaatcggtgcaactaacctacacgagagccttagctcttcaacgcaagaacaattccctaatggcaaccttcattgggtggctaatcttttccttctacatgtgtttcgttggatttcggcaccgcatgacatcgacggggatggcctgaataccattatggattcgtacaagtatgccggagttggttcgaataggcacaataagcaatcgaagactaatagcttcgggcaaatggttgacgctcatatcatgcataaacaggctgctcaggttgcaagtgtcagaactggtaatcagcaagtagattcacagaatcaacttcgtcttatggccgtcaggtctcaatattacaatttactaagtgtcaactatgtgcatcaagaatgctggattcttaactcatatcctgcgcaacaaatagaaatttaa

SEQ ID NO: 440227 - DNA, 888 bp, Serratia marcescens
atgaacagtatatcaattcttgaagctgttaacacttcatccgtccagttccatgggcaacctatcaccacagctatggccgctggcattgcctacgttgctatgaaacctatcgttgaaaaccttggtttagactggccaactcagcaccgtaaacttctgagtagcaatggcaaattcaaccaatgtcatatgaccatggttgctatggataagaaaattcgagatgttctctgcatcccactgaagaagctcaatggctggctgttcagcatcaatccatcgaaggtgcgcgccgacatccgcgacaagctgatcgcctatcaggaagaatgcttcaccgttctgcacgactactggactaaaggctccgccgttcggaagtcaggaacaaccgttgatgagagaacgccactgcgcgatgcagtgaacatgctcgtcagcaagaagcacctgatgtacccggaggcttactccatcatccaccagcgtttcgctgtagagagcatagaggacttaacaccagagcagatcccgcaggctatcgagtacgttcaccgcgtcgtgcttgatggcgaatatctgggaaaacaaatagagctacagatgccagccagacaattcgacgatagcgaactctaccaactggtttgtctctggagcgtggctctaatgataagacaggatacccagaagataactgaagccctggcacctcttggacttccaatagcagttaaggtgaatgcaaacgccaacgatctggatgggtttatacgcagcgccggcttactgcttctgcgtgagagcagtcatatagccaaacaagttagcccaccgttgaactggaaacttgagataacgcgtatgcagtcagcacttcactga

SEQ ID NO: 440228 - DNA, 372 bp, Serratia marcescens
atgactgagaaagagtggctggatggcctaagacatctttcgtatgaccagataattcaggttcacttcggattgcaggaacaaatcaaggctcactataagcttcgtgctgaaaacaaacatcttaagaaagctatagcgctgtgtgagcagcagatcgcccttgccccactggcaatgaaagcgctgaaggcaaagcatgaggcgaatttggaagagtaccgatcagttctgggagacgttgaccgcgaattctattatccggcccatcatggctatcgccagtacgcagttatactgcgcagacaaaaagactttgataagcttgcagaaatcgaagaaaagagaaaacgcgaggggtgggcgatatga

SEQ ID NO: 440229 - DNA, 444 bp, Serratia marcescens
atgacgggtgtgatggtttttaactatgagtgcaattctgatgatttatatattgtagaagaaagcgtcaatgggaaagcattcaagccgaacagaagcaccattcgaagccttgtagccaaagagaacctgttctacaaaaatgtgatctcctctggtggtaacaagcaccaggcagaacttgatgtgggcgatgcgttggtagaattgttgggcagtattgtcatcatggacagctcccttgccaagaacatttctgatgtttttgcagaggaaagagtcgcacacaccctcaatgccattgatatgaccaacgctgaaaaccggttgcaacagacaaaagaaacagaaaaaaaatcatcagttagcaataaagtcatcttggcaatcgtattgtcagtgtctgctctattcatttcaatggtgattgtgatgggtaggtaa

SEQ ID NO: 440230 - DNA, 1218 bp, Serratia marcescens
atgaaaaaaccatacaaatattatagcggcataactagccaaatttctttttgtgctactccattacgtttagattcatataacaattgtagctttggatgcacttattgttatgctcgaacccgacagggacatggaagggagcaacagcttcaaatatctaaccctcaagtctcagatggcattataaaatcttcattagatgagtttatacaaagaaaaataccttttcaattaggaggtatgtccgaccccttctccagatatgaacaaagagcagagataactttagagtatatgaaaattttgcgcgaatatgattatccttatataataagtacaaaaagcgctctaatttccacatctaaatataaagatgcacttttaaactcaaattcttacgtcaggttctctactaccgtaatcgatgcaaaaaaaagaaagttaattgacaaaggatgcgttggcatagataacttagcagaagctgctcaaatattatccacaataaacatccctacctcatttagattacaaccaataatccctgggtttgaatcttttgcggaggaaataattaacattgcagcggagtctggagtcaaacacctttccgctgaatatttaaaggtaccaatggatgcaaataagaaatttgggtcaaatctacttaaaatattcgataacaccccagtgagtaaatatatttcaatgggtgctcacaaagttggtagagaatatacactcccactggaataccgtactacatacttaattgaaatgtatcaatatacaaaagccaaaggaatgacattcggcttcgctgacaacgacttacttttacatgcagatggtgcctcttgttgtggagcctctgatttatatctaagagaagcaaatttcttccacgctaacatcccaagtatcatcaaaaaaaagaaaataaatgaagaaatttattttattgattttctaacagaatggatcccacaaagagttatctcaacatacttgaactccaaggcaagacttgcaataattgatactagtgaaccggaatggttacagtttctaaaaaaaatgtgggttggtgagcaaggggtttataaccctttatattttgatggcgtgagcttgagcggaaaattagattctaacggattaccgatatatataaggacactcagctcttttgagaaaaaattaagatcttattaa

SEQ ID NO: 440231 - DNA, 696 bp, Serratia marcescens
atgattatattacggtacttggtattatggttttctatcgtaccactcattgcatcatttttgagcagcataaatggccctgtacatttaagcattggaaatgaggaaattatattaaactttagccttccattcacatggcagttactctggttatcttcctttttctttgttcttgcatttgccatctataaggtcagatgccctagctttataataaaatatcataactacggtgattatcagaaatacaggcactctcatagatggttggtttgggaagcttccttcttattaaagaagaacatcggcatcaagaaattcacagaacggttaagtgaaaaaaaatatttgaaggaattagaaaaccgaaattccacatgcagttcgacacctattattgctgaagaattcacttattttgattataagcttgaggataaatcctaccgtttacaattgccattacaccctactgaattcgataaaaacaagctcgtcgatatagaaattttttatgaaatctatggtcgttactctgagtctaattgtattgcacgatggctgataaaaacattactgttcttaagcttagtttttttcttggcaacttttttagaacacatatattcaggaatgaaatttgttagattatggttgaatagttttccatttatccataatttattttcttag

SEQ ID NO: 440232 - DNA, 396 bp, Serratia marcescens
atgtcctctaatgttgttgtctctgcgcaaaatttgcgtaaagtttatcagatttattccagcccgatgcagcgtctgggggctttgctgggttatcggggggctaagggcagggagtttgtcgctctggattccgttaactttgagattaaaaaaggtgaaacagtcggtattattggtgtcaatggttccggtaaatcaactctgttgcaaatgatttgtgggactttggcgcctacaagcggcagtgtatttactaaagggcgtattgcacctttgttagagcttggtgctgggttcaatccagaatttacagggcgtgaaaacgtttacctgaacgcctctcttctgggcctaacgcgtaaagaaattacggagcgtttcggatattggtga

SEQ ID NO: 440233 - DNA, 264 bp, Serratia marcescens
gtgaagcaatccagaatgacgagtgtagtcggcgcgctgctcctagcgctgttcttggcctcctgcgcggaacggacacaacaaccgccggtgccactggtgctgctgccccctgagtcggtgttcaccccctgcgagcaaccaaaactgcagggtgaaacgtggggcgacattggcagccattcgctggcgctgcaaacggctttattaatctgcgccgggccaggtagagacgctcaacgcctggcggcgagctaccactag

SEQ ID NO: 440234 - DNA, 147 bp, Serratia marcescens
atgataaaaatcgcagcattgttaaccaatcaaaactacctagcttgtgttgtagcagcattactcttcatcgttacggacgatgccagtcatcttcacgatagcattaactatgggctgcaggccgtctttgatgccaaagggtaa

SEQ ID NO: 440235 - DNA, 201 bp, Serratia marcescens
atgcgtaagtcactgctggttgccctgggtgtgatagttctatcaggatgcgtaggccagagcgatgattatcaattgaatagcaaacaatcgtctgatcagaaagacagcaaagagtggaaagagtttgtcgctcctctgtctaccaaaactcaatcgccacaagacagactgatgaagcgtgctgagagaaactactaa

SEQ ID NO: 440236 - DNA, 846 bp, Serratia marcescens
atgactgataaatcagaagattcagccgccattattgagcgtcttgtttcatcctatggcgttacttcgcagcgagcgctggccagcagccttggtgttcctcccaataatgtgagctcatgggtccagcgcaacagcgttcccggaagtgcagtaattaagtgcgccctggatactggtgctgatttacgttggttaatgactggaaagtttgaaaattcgaattttgatgttggcaaatccaaaatgtctgggcgagccctttatgagcaaatccaagcatcaggtggcaagcctgttttgcggcgtatgttggatgcatatgggttccgcacgcagaaggaacttggagatttactagacatatcaacggcaacgatcagtacatgggttaggcgtgagtatttcccaggcgatgcggttgttgcgtgtacgttagatactggtgtttcgcttttgtggctggctaccgggcaaggctccccaggtaatccagatgcggcctctcacgaaccgacttttacaaccattccgcggatgtctatttcttccggtgcgctgatagatgccggctcttggatatgtgatccatcattcatacctgcgggcgccaaatctatccgattggttgagcggggcaatgactcatggctgatagactttgataaaaagcttatcggtaacgggtcttggcttttgaatattgatggagtacatgacatttattcggtgacacgtattcccggaaacaaaataaaagtctcaactttaaccacaaacttcgagtgttcagttgatgatgtagaatgtgtcggtgagattagaaaaaccataattaacagctaa

SEQ ID NO: 440237 - DNA, 777 bp, Serratia marcescens
atgctgactcaagaggtaattatcagcgcccgccggctgaacaagacgtttatcggcgaaaacaagcgccccacccccgtgctgcgcgacgtgtcgctgaccgtgcacgccggcgagttcgtcaccattctggggcaatccggttcgggtaagtccacgctgctgcgcatgctggccgggctgatcccgccggacagcggcacgctcaccctggcgggcaaaccgatcaatggcccgagcgcgaacgccggcatggtgtttcaatcctacgcgctctatccctggctaacggtgtacgacaacatcgccttcgggctgctggcgcaacggctgccgccgcagacgatcgccgagcggctgggggcgctgctgcgcctggtgggcctgaccggctatgagcacgcctggccgcgcgagctctcgggcggcatgcgccagcgcgtgggcttcgcccgggcgttggcggtagagcccgatgtcttgctgctggacgagcccttttccgcgctggacgtctataccggcgaacacctgcgcagcgatctgctgcgcatctggagcacgcgccagatcaaaacccgctccatcgtgctggtgacccacagcgtagaggaagcggtgatgatgtctgatcgcatcctcctgctgggcgccggcaccctcgacggctgctatcacatcgcgcagcgccgcgagacgcgcacccgcgaggggatgcagccgctgacggacaaaatcagcgagacgctcagccggcagatcgccgccgcgcactga

SEQ ID NO: 440238 - DNA, 216 bp, Serratia marcescens
atggaaaagagagagggggctttaaggctattaacctccggggagatcggccttgcgaagtcggtatttggtggttcaattatttatgggaaagtctgggttcatcacgatagctatttcccctttggcttacaaaatcgaaacactgcgatgtcacccaatggtgagctgtattttagagactggtacgtgcccgatttctcaaaggaagggtag

SEQ ID NO: 440239 - DNA, 663 bp, Serratia marcescens
atgaatacctctgaggacttcaaccggctttatgccgacgtgggacgtaacattgagcaaacattagctgatattgcaggacttcacgtcgagaacgaagctgctaaaaagcagcttaatgcgatgacggcgcaactgcagattctgcagaatactttcaaccagaagttatcctatctgcaggaacatgccgagtgggacaaatttacgctcgcgttttttggcgaaaccaacgcgggcaaaagtactattatcgaatctctgcggatagtgtttgatgaaacctcccgccgacaattgctgcaaaataatcaaaacgatctacaaaaagccgagcaagaactgcgcgagcacttgacgcaattacgcgatgatttagggcggatttacagcgatgttgtcgataaaattagtgctatgagtttttccgccatccgcttgcagcaaatcattaccaatgaaagtgccttacgattaaaaatggaagaagaggcgaataaagcacatcagttgctggaacaaaatgaaagtcagtcgcgtctacaaattttgcaacagcgaaccagtactaagtcgcgtatcaccctgcttgtcactgcctttgtgggggtggtagttggtgctggagcagttctgctaattaatctcctgacggggcattag

SEQ ID NO: 440240 - DNA, 1734 bp, Serratia marcescens
atgagtgatgcactttatcttgcagagaaaaaccctgaacggctggctgatgtcagcctcagcgaacgtaaatcggcgctcaacattcagaaattactggatcaaagtttgtcgtgtcttatccagtcagttatccggacggaaaagttaaaaaatacggcaaagcgcgtcgatggcttaattattggtactggcgagtcagattttaccaaaggaaatacccattacacgttacatatcgacgataaagactttcaactgattgacgtaccggggattgaaggtaatgagacccgctacgttcatcttgtgaaagaagccattgcgcaagcacatatggtggtttacgtcaacgggaccaacaagaaacccggaactgcgactgcagagaaaattaagtcatatctagaatatggcacgcaggtttatccgctggtcaacgttcgtggtttttccgaagcctatgagttcgaagaggatcgtctggagctcgctcagcagggcggtgctggcgacgcactacgccagaccgttgaagcgctggctccagtcttaggggcggtagtgctacagaagggccattgtgttcaggggttgcttgcattttcggcgctggcgtatgacgacagtacgcaaagtacgagcattcacccttcccgggagcataacctggtagtatcccaacaggagtttctggacgtgttccctagccgtcaggaaatgcggacatttagccagattgacgcggttgcacagaccatcagaaataaagttgctaccttccgtgaagatattgtcgaaagcaataaaggcaaagtccgtgagacgttggggcaatatttacaggtgctggaggagcagttaaccagccatcgacgctttctgaaaaagacggagccggagtttgaaaaatgtcgggttgcattcaggaatgcagttgcggagtttgaacgccgtattgtgaataaccgccgcaaccgctggaataccttttttaacgagctggcggatgccagtgacgctattgtcgaagacgatttcggcgatagcgacacgatatctcaacggattcagcgcgagtttaaaaaacgacgcatcagcgttgaggaagaaatgctgaaggatacagaacaagccgtggaggtactacagcaacagatgcttcaggcggtggagcgcctgctggaagatatcaagcatgtggaatttcaacaacgcattagttttgagcgtagcggcggcatcaattttggtagtgatatggtactgggctacgaccttggtttgggcgattttggctctatggttttcaaaattggcagctatgcgatgacaggtggcactatcggcagcgcattcccggtgattggaacagcaattggtgccatagctggggcgcttgtgggcgtggtcatgacggtgatcggcttttttaccagcaaatcgtcaaaaattcgcaaagcacagagaaaagtgcgtgacaagctggagggggcgagggagaaagccctggacggcgtgcccgcagaggcccagaaactggttgcagccatagataaagaactccaaagcggcctgttgaaaaaaataaatgatatgcagagtgccttgcagcagccaattacaatttttgaaacgcaaattatccgaataacacgattaaaaaatcaacttgagacgatgccttatggaacaattcaaacagttcagtatagagaagcaggcagccattga

SEQ ID NO: 440241 - DNA, 1731 bp, Serratia marcescens
atggaacaattcaaacagttcagtatagagaagcaggcagccattgattcgctattacaattgcgcagcatgttagagacgctgggtgaaatggagatagacattggtgatgacctacaaaaaatagcttccgctattaccgccgttgaatctgatgtactgcgcattgcgttgcttggcgcgttttccgacggcaagaccagcgttatcgccgcctggatgggcaaaatcatggaagatatgaatatctccatggatgaatcctccgatcggttgagtatttacaaaccagagggcttgccaggccaatgtgagattgtcgatacgccggggctatttggtgataaggagcgcgagatcgacggtaaacaagtgatatatgaagacctgaccaaacgctatatttctgaagcgcatctgattttttacgtggttgatgccaccaatccgcttaaagaaagccacaacgacatcgtaaaatgggttttgcgcgacctgaataagctgtcttcaaccatctttgtgattaataaaatggatgaagtagctaacctaacgaaccaagtgttgtttgacgagcaggcggtcataaaaaaagagaatttgaaaagcaaattgcagcgcgccgctaatctcaacgcggcagaatgcgaacggttgaagatcgtatgcatagcctcaaatccaaacggtcgcggtctgccattctggttcggcaaacctgaacattacgaaagccgctcgcgcattaacgatcttaaaaacaccgctgccgagattctgaaagccaatgtacctgaagtacttttggcgaaaaccggcatggacgttgtgaaggatattgttagtaagcgcgttacacaggcgagcttacagctcaacgaactaaatacctttgttgagaaaaatgaagaggatacgcgtcgctttcgtaacgatataacgcagagtcgtacagaggttaaaaggctggctggtgaactatttgaagagctgaaccagatggaaaaacagctgatgagtcagctgcgtccactcagcctggaagatatccgcccgtttatggacgatgaactgggatatacgcaagagggggttggctttaaacttcacctgcgcattaagctgtctgtcgatcgttttttcgatcagtcgacagcggtcacacaacgcttatctgatgacatcactcgtcagctaaactccagtgaaagctttttaagcggcctgagcgaaggtgcttttcgctcccttggcggggcctttcagggcgtgtcgaaaattagcccggcgacgctgaaaacgactatttttgctgcacgcgatacgattggcaaactcacgggatatgtctataaatttaaaccttggcaggccaccaaactggccggaggtattgccaaatgggcaggcccagcgggcgcagcgtttacgattggctccgatctatgggatgcctataaagcacatgagcgggagcgggaactggaagaagtaaaagcctcgctggtgaaaatcattaaagagccgtttaaagatatctatgacgtgctgatctcagatgaaaaaatgttcgccttttttgcgccgcagattcaaaacatggaactggtcatcactgaaatgatggggaaaagccacgctattcgtgagagccagcaaaaactgacccttatccagtcacaacttgcacatttaacgctgcccgcgccggtagccccatcagtctga

SEQ ID NO: 440242 - DNA, 1230 bp, Serratia marcescens
atggcatccgcgttaggttggcttgatcacgatgcaaacgcacaggccaaaacgttaaatattcttgcgctctttcaacaaaaagagagccgagatgagctgggtatcggcactatcagagatagttttgctgaacaactatttccaggaaccagcaccattcaaacccgtttacgctacatgctttttgttccatggatctatcagcgtctcgaaaataaacgcatatccgctgcaaactttggttcccaggccgaccgggacgaacgcgccttaattattcccctctcccggctcgaagaagattcggccggtacatttggtaaaaactcacgcgaaaagcttaaacgcctgcccagctccgtttactggtctgggctgcggcgctggggtattcgcgagatcctgtggtcgcaggaagaatatcatcgacgtgttgatgaactttatcgctcacgcactgaaatcagtgagcagaaatataaagaagaaaatcgtggtgatatgggcgacaccagcttgtacaaaccagcccagagctggcactccagcctgcctgcgccaccgcccaattttcctgatgatgcaacgtttgcactaacacgccaggaagccagctttcttcgcgaccgtattcaattgtcctgcaaaggcagtctgttggcttggctgacgctgcatagcgaaccagcagatgtgagttcaccatgggaacatccggattacgcgaaattcccggacgatctcaaggaactgttgactcacgcgcggcttttttcttatgcgatgcacggcgcagccctgctttataactatttacttgccaaagaacgagcagataacgaccttctgtctcaacaccatgacagcttcgtcgcttggtttacctcactcccccgcaaggacatctcgacctggtcgctcgagcgcatgtgggaactcaccgccgggccggactatagcattagtctcaagacccgccgctttgtgggacagtggattacccttatccgacaatcctctgggacattactcaccagtaaagaagcctgtgcacttatccgtgcccgcgaaatagcgcttaaaggcccgcgttcacgctttaaaaacagacgtgcactggagcaatggagtggatatgccggaaccttgcggctggtttatcgctggcataacgtccagatagtgcttaacgatctggcgcaaggtctcaggagagaagaatgttaa

SEQ ID NO: 440243 - DNA, 345 bp, Serratia marcescens
atggcacctagcgtattggattattttatccaacaagtttcccgttatccggaaaaacttgccgtcgtcgacgataataaacacctgacctaccgtcaattggatgaagccagcagcgcattgtgcgcgctgttgcgacggcggggcgtggcacccggcagctatgtgccgctcgtcacgctgcgcacgccggaaatgctgatcggtatgttggcgatcgtcaaagccggtgcaggctatattcccatcgacgcgcgttacccggaaaaaagaatacaggatatcgttacgcaaagcggttcccctttaatactcaccagcaacgcggcgattacgttatcgtaa

SEQ ID NO: 440244 - DNA, 567 bp, Serratia marcescens
atgggaacggcacaggaacatagggagaaaagagaactcgcactaagtctggcgtatgctgggtttgttgacgcgtttcttggcgtattgccgattgaagagattttactggacagaatttctccagatcattggtccatggttaatccctcctggcgagatcatccggaacgaaaacatctgaagattgatttaaattggttgcggcagcgtaacaaaagacgcgacaagttggatgcgagtatctggtgcggtgaacatctctgtggtctgtttctggccaagctatcccgtaaacgcgttaatgttgcactaagattcctagagtctaatccgaatgatacaccgctcagtggatatatgatcccgataggactcatcattgcagagagttttgcgcgcgcttatggtgcgaaagaagttatggtaagtcagccggacaagctgctcatccccctctaccgtgaacagggctttgagttaatcccggcagatctgtcgcgcgaaagacgttactgcaacatacgagctaaagtgctggtcaaaaagttggcggatgcagagtga

SEQ ID NO: 440245 - DNA, 3252 bp, Serratia marcescens
atgaagatcctcagcctgcggttaaaaaacctcaactcgctgcagggcgaatggaaaattgacttcaccgccgagccgttcgccagcaacggcctgttcgccattaccggcccgaccggcgcgggcaaaaccaccctgctggacgccatttgcctggcgctgtaccaccagacgccgcgcctcaacgtcacgccgagccagaatgaactgatgacccgccacaccgccgaatcgctggcggaggtcgaattcgaggtcaagggcgtcggctatcgcgccttctggagccagcgccgcgccaagaatgcgccggacggcaatctgcaggcgccgaaggtcgaattggcgcgccgcgaggacggcaagatcctggcggacaaggtgcgcgacaagctggagcttaccgcaaccatcaccgggctggactttggccgcttcaccaaatcgatgatgctgtctcaggggcagttcgccgccttcctcaatgccgatgccaacgatcgcgccgaactgctggaagagctgaccggcaccgaaatctatgggcgactgtccgaacaggtgttcgagtcgcacaagcaggccaaaaccgacctggatgggttacaccaacgcgccagcggcatcgaactgctgaacgacgagcagcgccagtctctgaccgaacagctgacggcgctgagcgcgcaggaaatcgccctcggcgagcaaacccagcgacagcaacaggcgctgagctggctgcagcaatggcaacgcctccggcaacagcaaggcgagggtcaacggcggctggaaaccgcccagcgcgagcaggcagaggccgccccgcagctgcagcagctggcgctcagcgaaccggccgagaaattgcggccgctgcgcggcgaacgcgatcgctgccgcgccgaactgcagacgatacaacagcaggcagcccagctgacgcagcaacaggaacagcactcggcgcagctggcgccgctgcagcaggcggtggaaaaagcccgcctggcgcagcaaacccatgccgagtatatgcagcagcagcaacagctgatcgatgagcaagtcgctccgctcgaccaccaaatagcccaactgcagtcgacacaggccgagcgacgacaggccgccgatgccaccacgcagcagtgcgcccagcagcaaactacgctggagcagctcaccgctcagcgcagccagctgacggcacagggcgcactacatcagcagcagttgaacgcgctgaacgaagcgctggccgttcaacaacagcagcaacaggcgctggaggcgcaaacgccgttggccccgctgcgccaacgcctgagcgccctggcggatctgcgcccaacacgccagcagctgtttactctggcgtcccttaaccgtcagacccgcgagcgtctggctaggcaacaggcggagcacgccgagcggcaaacgcagctcgccgggctgcaacagcagttggagagcgcgcgtcagcaattcaaacagcacaaggcgcagctgcaggaagtggagcagatccacgaactggaaaaacgcatcgtcagtctggaagcggagcgcgccctgctgcaaagcggtgccccctgcccactgtgcggttccaccagccatccagcagtagagcagtatcaggctgtacagccttcggccacggaacagcgtttggttgagatgcgtactctcgccgagaaactgcaaacccagggcaccgagttgcgtacccgctgcgaaggcctgcaggaacagcaacaacgccagcagcaaaccatcgcgcaggatgaacagcagttggctgcccaacagcagcagtggcagcagctcagcgcaccgctggcgttcgactttacgctggcggagagcgagcgactcagcgcctggctgagcggttgcgacgatgaagagcggcgcgggcagcacgcgctgcagcagcatgaacaggcggcgcaggcagtacaacaggcaaaagacgcgctcgccgctctgcaaacgcagcagcagcaggcgcagcaacagctggcgctgctcgaagagcgctttacgctgctgcagaaaacctatgccgacagcctgcaacagcagcaagacctgcaacaacgctggcaggaaggcgagaaaactctcgcagagcggcgcgcgcagcggctggcgctgttcggcgaacagcgggtcgccgaggtgcgggaacagctgcgcgccaaacaaaccgcctgtgaacaggccagcttacaggccgccgagcagtggcaaaaggcgcaggaactgcgcgagcgcctgaccggccagcaggccgggttacaacaacagcacacccagatgcaggagcggctgcagcaggcgcagcagcagtggcagcaggcgctggccgacagcgaattcgctgatgaaaccgccttcaccgccgcgctgctggacgacacactgcgccgcgaattgcagcagcgtagagagcaactgcaacagcggcaggtagaggccgccgccctgctgacgcaggcgacgcaaacgctggagcagcatcggctgaaccgccctgagggggtggatgaagccaacacggatctcgacgcgctcacccaatcgctggccgagttggcacagcagttgaaaacgttgcagctgcgccagggtgaactgcgcaaccagttggaaagcgacgccgcccgtcgccttaatcagcaggcgctgttcgagcagatcgcccgcagtcagcaagactacgacgactggagctacctcaaccagctgatcggctcgaaagaaggcgacaagttccgccgcttcgctcaggggttaacgctcgatcatctggtctatctggctaaccagcaactcggccggctgcatgggcgctacctgcttcagcgcaaaaccagcgatgcgctggagctgcaagtggtggacacctggcaggcggacgcgctgcgcgatacccgcaccctgtccggcggtgagagcttcctggtcagcctggcgctggcgctggcgttgtccgatctggtcagccacaaaaccagcatcgactcgctgttcctcgacgaaggcttcggcacgctagacgccgaaaccctcgataccgcgctggatgcgctggacagcctgaatgcctccggcaaaaccatcggcgtgatcagccacgtcgaggcgatgaaagaacgtattccggtgcagatcaaggtgaaaaaggtcaacgggctcggcgtcagccggctggaggcgcatttcaggctggaatga

SEQ ID NO: 440246 - DNA, 1308 bp, Serratia marcescens
atggatgaatttgcgttagagaagatgtcggatcgtattcattatggtaagaccaaaaattacttcaaagaggtcttgtcttcatatcataatggaaaccacaggtcggcagttgttatgctctggtcagtggctgtatgtgatcttgtgtacaagctgcagagtctgattgatttatatgatgatgcttcggctaaattaatattgacagagatgagtaaaatccagcaagaagaccaaaagtctgcggcgtgggaagttaaactgattgatgatgtgtatgataaaacacaccttctggacagttctgagtatgaaaatttaaggtaccttcaaaagcaaaggcacctctctgctcatcctgttcttaatagagaacgggacctgcattcgcctaacaaggaaaccgttaggtctctacttcgtaataccttgactgatgtattaacaaagcctccattttacactcagcatattatcaaggaactcctcatggatgttgctgagtctagtgaaatgttgagtgacagggcgaaggtaaagaagtacattgtcagtcgttaccttgaacgagcaactccatcagttgaattgagtatttttcgtcagctgtggaaatttgtattcaggcttgaggatgagaattgcattaagaaccggttaatcaacctgtacgttctagaggtagtggcagctcgtaataaagccgctcttgccgatacggtaaaaggtgatgctgattattatagcaatgtcgccagctcagaactcccactgcaatatctgacattctttatctctaataacccagaactatttcccgtcttaagtgaggcagctcgcctgaaggtagagcattgtatttctgaggatgatgtagggaaagttatagggtggtttattaaagaaagcgtcatgaagcatggtgatgacttagaggactggatcaaaaatgattcgccggtcattagcccatctcaattcgactacatttttcagatttctgatactgaagagtggcaagaaaaattttgcaatatagccgccacttattatggcgtaagtggaagctacgctcaagctgactcccgctttcaagtggcaatacctcagtatattaaattctttaacaaggcggcaattaagtacctcgcggaaaaaattgaaaataatagtcagtgccacgataggaacaaggctcgccacgattacgttatcatcaaagcgcgcatagatgaattgtttggtgctgagtttgattacactaaatactactggtttagtcgcaaactaggtcttgcagactag

SEQ ID NO: 440247 - DNA, 3840 bp, Serratia marcescens
ttgcgatttttagccgacggaccatcaatccctgatgatctccttcttgccagagatcagggccgagtgattttcttttgcggggcaggcgtatcccgagcgcgtgctcaattaccagatttctttggcttagcaagtcaagtagttgctaggcttggtgtcgacacaaatagtcctgcctatagactaatacaagaagctagagagattgaccagcgtgttggcatacccggcgtcatatctgctgaccgtgttttcgggcttctagagagagactttgactcacgcgatatcgaggaggcggtagcatctgcactaaaacctcctgcggattgcgatctgactgcgcacaggattttgctagacttagcaacgacgccaaaaggcactgttcaattagtcacgacgaacttcgacagattgtttgatgactgcgggcgaaatcttcgtgtatggcaaccaccgaggttaccgaacccttcacttccaaatgagatcaacggaatagtttatctccatggccgttcaacgccaacgtatacagctgctgagaatgatggctttgttctctcaagttcagaatttggtcgtgcatatctatcggacggatgggcaacaaccttcattcgtgaaatacttggaaaatatattgttgtatttgttgggtatacggccgacgatcctccagttcaatacctgcttgaagctttgcgtaaaacctcagggaatcgcgaaaaagcttatgctttccaatctggcgaccatgacgatgccatcgcacgatggcggcacaaaggtgttgaggccattccatatagtccagatgatgcacatgctgccttatggcaatctcttgatgcttgggcagagcgagcccgtaatcctgatgcctggttcacaaaagttatcgaaacatctaaaaaaggaccgacagcgcttcagcctcatgaacggggtcaggtgacacatgttatttcaacctatgagggtgtaaagaggttctgcgagggggaggttcttccccctgctgaatggctttgtgtgttcgacaaatgccgaagattcgcaaggccggttaattccatctcacttagtagcaaagaaccctatattgatccattcgatctatacggccttgattcagaccctctgccgactaaaccagatcctgaagataattatgccaagcgagaaacaccatctaatgcgtgggatgctttcgaacttaatcatcttgataaagcagcgatccgcgatgaaaatcttactgcgtttcgcggtcattgggctaatcattgcccacgtatagttccgcgcatagataaattaggcttatggctcgcaaaggtttgcgaccagcctgctgcagtatggtgggcatcccatcaatcgtcacttaatcagaacattcaacggctcatctcttgggagctagagcgaagcaatcacccaatacgtcagaacgttcgtaactcttggcggttgctttttgaaacctggagccacgtcgaagacttttatcaagagtggtataacctgcaagatgtcattaaggttgggggatggagtagcgctttagttaggcggtttggagaggtgctccggccccacctttatgcaaggccttcttccaagaatacatcgaagccgcccgaagtagagaccgctcaggcagatgaagagcacttgctgtggatggacgttaaatatcctgaaaagcacgaaaaaatcactgttcctgatgaatggtgttcagcaattgttaaagccctacgacagaatctcgaactggctcttgcacttgaacaagaaattggtggctacggccttagaaatattagcccattagtcaaggataatattgaagatgtcgacgactatcaccgaacgcatgggctttctgcattagttatacaatttgcggagctgttcacacaactggttcaaattaataaatctgcagctaaacgagagtttttatcatggcctacggaagatgacactatttttgctcggctacgaatatgggcatcaggaaaaaaaagtattttttcagataatgaatttggactattcatatcgtctttaagcaataccgcattctgggatagttaccatcaacgagacctattactggtcatctcagagcgatggaagaaactcagtagagcatcgcgtaagttaatcgaacaaaagctgttggtaggcccaaagcgatggcagcgcgagaagattgctgcattcgatagtagacgagcctggtcgattctaaatcgcattcagtggcttcaaaactcagaatgcaagctgtcagccagcacccgtaaacaagcgaaactgctccgtgctgctgtgcccgactggaaagaggattatggcggaagggctgctgaatcattggaaagtcggactggatgggtcaggactaacaccagtcatgaggaactagcagaaatccccctttcactagtacttctgcgagcgaaggaacgtagtggtcgatcagacgattttcttgtcgagaacgatcctttttccggcctggccgctcaacgccctacgcgcgcttttgctgcgttgacctatgccgccaaacgagggaattttccaaattgggcatggcaacggttccttactttagaggcacggaaaaatgacaaggcaagattagtttggttgattgcccaacgactatctcgttatacaaatgtgcagcttgcaacgattctccaccccgcgaccgattggctacaaaatgccagtacgaagctaagtaaagaccaccttcttattttcgaccgcattttgagtaagctggttggcgtcctccgtgaatacccgaacgaaagtcgttcggggattattcgaggttccaaggaaccagactgggctatggaagcaattaattctccgacaggtaagatcgcacaggtgctttttaacgatccccgcacggataatctcaatcacaatcaaggtattccttccgaatggcttgttcacgctgaagctctattggcgctcccaggcgacttgcgcagacatgcgattgtgatctttttccacaacctcacttggtttttcgctgtcgatacaaaatggacagagcattacttattacctgcgcttcagagtaacgacagtggcgatcgcgacgcagcatggtcaggcttcttgtggagggcgagaactccaaatcgagagctctttatgcggttgaagaatgacatgttgcagttcgccgttaaccctctcccatcgcgacgctcatatggtgaaatcatcgcaggtatgatccttgccgggtggagaactgtcgacgacatcaccggcgagcgttgtatctctaatgacgagatgcacagcttactattggcagtcgatgacgagtttcgatcacgagtactatggcaggctcaacgatggtctgacgagataaacgaaaactcacacgaacgatggaaaagacagcttcccgaactgctgcagatttggccgcgccaactttcagccagaacccccaacacgtcggctcgcttttgcgaattggctttctccagtggcgatgaatttcctaccatagctgcattggttttgccgttcttgggcagaatcgaaagtgaccatttgatgttaccagaacttcgtcgatcaggaggcaacatagtagaccggtacccagaacaggcgctggctttacttcatgccgttctaccagacaacgcgttagcatggccatatggaacagaagagatattgaaacaaatagaagaagcgaacaactcgctaaatagcgacaataggttaatttctctgaagcgacgatgggacgcaaggtga

SEQ ID NO: 440248 - DNA, 609 bp, Serratia marcescens
atgtataatgcttttttgaacttcaagaaaaacttggaagaatcaaaagctttagccgttttatataattatttggatgaggctgtcaaagggcctgtgtcttatgaggatttacttagagctcaagtcgtttatagtgttagtgcttttgataagttattgcatgatttaatattgattgggttggttgatatctatacgggaaggcgacaacctactgataaatatttaggggaggcattaacaattaatactgtaaataaaatgacagcggcgacattacccccggcagagtttcattttaaggaggcaatgctttctaaattaagaatagtgtcttatcaagatccaggtaagatttctgatggcttagcatatatatggaaagagagccataaatgggttaaagtcgccaatgaaatgaatatgagtgatagagatgtgaaagctcaattgcgattgattgctgatagaagaaattcaattgtgcatgaagctgatgttcacccagtaacacatactaaaaactctattgatgccgccatttcaaatgaagtaactggattcttagaaaggtgcggcgaagctatttattatttagttaaataa

SEQ ID NO: 440249 - DNA, 1035 bp, Serratia marcescens
atggcctcgaaaagaatagtcgttttcaatcataaaggtggtgtgagtaaaactacatcagtttataatattggttggatgttagcaggaagtaaacgagtattattggtagatggtgatcctcaatgcaatctatcgagtttaatactcggagatgcttttgaagaatattatttaaatgaggatactaaattacaaaatatcaaagatggtgttgagtcagcattcaaagccaaacctaagttgattgaaccggttacttgtatgtctccgccaagagcgccgaatttattcttgctagctggacatgctgacttatctgcaaatgatgcaccattaacttttgctcagacagcaggaaatgcaatatcaacactacaaaacttacctggtgcctttcataatctaattaaacttactgaagaaaaatataatatagattataccataattgacttgaacccaagtttaagtgcaattaaccagaacttgtttttaaattcagatgcatttatcgtcccgacgaatccagatccattctccattatggctttggaaactttaagagaaaccttaccaaggtggatgaagtggaaaacagaaaatttaaatattttttctgacagtgcatatccattaagtgattctgagcctaagttcttaggcactttaattcagcgattcaatatcagaaagggacgtgctgcgaggccttacagagataatattgatgaaataaaaagaaaggtaagtgaggatttaatacccgcgttcgatatggtcagtatgacacttgctgctgatgaatacccgcaacatttaattgaaagtggttattgtttatctgaaattccggatttccaaggtttacttccaaaatcgtttaatgcggaggttcctgtctttgctctgagggatgaggatattcaggaaacggggccggtgctagaacagatgtctgctaaacgggacctattccgaaaaactttcagtgaaattactcaggaattagaagggttattgagaaatgtataa

SEQ ID NO: 440250 - DNA, 267 bp, Serratia marcescens
atgaaaaaaaatgaaaaaccatcacgcatccgtttttttaatgctgatgatggcagcgaaatttttgtaaccaaacttaagatagttttgccaaatgacgaaagtttttttactgatacaacgcccggccgcgaaggctccatcgtattttttacccccgtcaaccagaccgatccagatgtcaaaacattcaccattgagcctggcgcgtctaatcttttctccgtaaatgtttcttcggtcataaaaggccagaaaccggaatga

SEQ ID NO: 440251 - DNA, 168 bp, Serratia marcescens
atgagtaacagcaaaaaagtgcaggtgggttatgccaagccgtcccgtacggacattgcgcgttccgtggcgacatcaacggcggttgaaacaggtcaaccctcagccagagttgaagcttctttagaagaagcgcgtaaaaaatttgctcatttgcgccttgcctaa

SEQ ID NO: 440252 - DNA, 1005 bp, Serratia marcescens
atgcaaaacattacgctcatcggtatcgacctcggcaaacatactttccatgtccacgcgcaggataaagacggccatgccttgctgcgcaagaagttttctcgtacccagctcaccgcttttctctccacctgcagcgcggccaccgtcgtcatggagtcctgcgccggcgctcactttatggcgcgccatatcagccagctcggccatcaggttaagctcatctcgccccagtttgtccggccattcgtcaagagcaacaaaaacgacttcatcgacgccgaagccatctgcgaagccgcctcacgcccttccatgcgcttcgtgacgccaagaaccgaagaccaacaggcaatggcggcgctgcatcgtgtccgagatgcgttcgtcaaagaacgggtaaaaaccaccaaccagatgcacggctttctgttggagtttggtatcagcatgccacgcggtagagccgttatccgacgcctgaccgccgtgctcgaagagcatccgttaccgccgtatttaacccggctgctgctgcaggtccgtcaacattacgtctatctcagcgaacagattgagggcgtcgaacaagagttaaaaacgcatatggcggatgacgaggccacgcagcgcctgctgagcattcccggcgtcggcatgataaccgccagcctgttggccacgaagttgggcgatgggaaaaattatgccggcagccgggacttcgccgcctcgacggggctggtgccgcggcaatacagcactggcgggaaaaacacgctgatgggcatcagcaagcggggagataaaaatttgcgtcgcctgctggtccaatgtgcccgggcctttatgcagcggctggagcataacccggggcgtctggctgagtgggtgaagattcagttgacgcggcatcactcgaacgtggtggcctgtggactggccaataaactggccaggatagcctgggctatcacggcgcatcgcaccgtttttagccaataa

SEQ ID NO: 440253 - DNA, 885 bp, Serratia marcescens
atgcctgataataccgaaaaaggcattcatgccctgaagcaacatttatcccttctgcctgagcatctctcgcatgccgtcttcgatcggatacaacagtgcatacactacgaacccataattggcattatgggaaagactggcgtaggtaagtctagcttgtgcaatacgctatttacgcgaccgcctgcccgagtcagtgcaatccaagggggcacccgtcaggtgcagtgctatccgttccgtctcgcttcgcaggctttgcacatcgtggattttccgggcattggcgaatccccggctctcgacctggtgtattcacgcctgtatcgacattggctgaacaaactggatctgatcatttgggtactcaaagccgacgaccgtgcctggaatgacgatattcgttgttataggcagctggtgtcgcacggtgccgacccgacccggtttatcttcgtccttaaccaggcggataaaattgagccttgtcgggaatgggatgccatcaatcaccaaccttcgttacatcaacaaaagaacctgcaggaaaaagtggctcaggtgaatgctgtgttttcgcctgttcatcctgttttagcggtatccgctccagaggggttcaatatcggcctgtgggctgaagccctgattaccgcattgcccgataaagccagtagtgcagttacccgtcagcttgagcctgtgtatcggacggagaaggtgaccatcacggcacaggagggctttgcccgtgttgtgggtgaaatctttgacaaaagcgtggaagcccttctggagtcgcacacattaagaaattggttaaaacagatccgctatcgactgctctcgctggccaaattgctctggcatcgtttcttttaa

SEQ ID NO: 440254 - DNA, 975 bp, Serratia marcescens
atggtagacagcagtcgtcttaacatcaggacaagtgacatccgagcctgtcgttttttcttcaggtacatccaaaagaatattccacaaagcagacatcttgtgtttgatgacaataacccggatacgtctctctcctgccgcatcataaatcataccctcgagctctgcttacctgacccgcaaacgcgtcagatgtttattagggatatggagctagccctcagcacgacaattctcgctgataaaaattttacctggctagaaagtgacacgcgggctacgttttggatgtggggaagcctctgcctggatgagaaatgcaatcagaacataaacaaagaattgggtaacaatgtatatactttctggtatagggattttaaacttcctgacaccccatccagtcaccatgaaagatttacatacatcgtcgcttttattgattacctttgtatgaatacaggtaacacaccagcaatacggcgctggctgactgcaaacctgaacctctggcgtaaatatgcgattaatctgaatagattcaaatggctcagccctgaagattcagataactgtgtatgggcatatcgttcattaaaaaaataccaacaagattatcaaactgaagaaaataacccactcagtccggtaactctcccttcgccggttaattcggaagaagctttttacacgttttacgccctgctcgacctgtgggaaatcggtaatgacattcaggcgaaggcaattgcgaaacttaacaaggcattttatcaaaaaacctttcgacaaaaacaggccgcacgcaaaggaagagaagagctcagtgatgaacacgtaaaacacctggcatttctggttaattattatcgctcagataaaacctccgttatagaaatgctgatagacgatcgtgttagagggataaacgctaaagtagaggcaaaacaaacacgacagcgttacctctga

SEQ ID NO: 440255 - DNA, 213 bp, Serratia marcescens
atgagcaccaacacaccatcccttctgaatgatcagcttgtcgatatggcgtttatcactggtttcacgcagcttacagacaagtggttctacaagctgattcagcttggcgaattcccgaaacctataaaactggggcgaagttcccgctggcttaagagtgaagtggaagcttggctacagaagcgtataagtgactcgcgtggtaactga

SEQ ID NO: 440256 - DNA, 4494 bp, Serratia marcescens
ttgttaaatttttcgaagataaatgcctttgaaatggggcaaagagagtcctttgaagagctaatttgcttgctggcaaagcgagaacatcatgaaggaatcatgaagtttcagcggattgagggaagcggtggggatggtggagtagaggctctctgggtagcaagcgacggctcgaagatcggctatcaagccaagtattttttgcaacttggtcataagcagtggtcgcagattgatgagtcagtgaagcgtgcgcttgaagtgcaccctgaactcacaaactacgtagtagctttaccgatcaatcttacaaataagcgaacgtttcttgggcttggcaaatccgcttgggaaaagtgggaggctagagttgaggcatggactggttgggctcaaaaaaaaggcctgagtgttaagtttgagccttggactgcaaccgacataaacgaaatgcttcttagagaagagaatctcggtcttatacatcattggttcggagagcaagttcttggtttaacttggttcaaaaagcactttctcatagctaaaggcttgctggatgacagatacagtccctctgaacacgttcatatatctatagaagctatgttcgatgccatggttcgtggggcgtccacgatgtcacaaattagggagtactatacggagttaaagaaacagcgtttttcattaatcgattttaataaacttcctctacagcctagtcaggctgacattgataatgcagaacaggctttgattagtctacttgatacagaaaaagtcttttcacctaatgtcagggacgagtggcacacaacggcggttctggatgcattggacaagtacagtgactctcttcacccactagaagcagtactcagtgctatcaggcagaactccaaaacggattcagagttccctactttccgcaacattgaagaaagtatgtcgaaggctcgtagtgcgatctacaaactacaatcatttacggatagtaagaacttgcgtgccgagcgcacgcggtatgcggttgttaccggtcctgcaggggcggggaagtcgcacttgctggcacatatagcagatctcaggctttcaatggaggaaccaactattcttcttcttgggcagagtttttcgaaccctgatgtctggggacaaatcggtgcattacttaatgtccctgaaaagaccgcagctgaaattctgggccttcttagtgctgcggcagagcgccaaggtaagcgtgcactagtaatgatagatgcaattaacgagggggttggatccgacttctggcatgatcgaattgtaggtttattgaagcaagctgaaacctacccagacctggcatttgtcttttcatgccgcgaagagtatctgtcttttgcatttccaagatcagttattgatgaggcctgtctctttcgaatagagggatttcaaactattcaggaaatggaagctgcagcagaaaaatatctagactcgaaaggcatagctaggccaaataccccatggttatctccggagttcagaaatccactttttttaaagagtactagcgaagccctacagataaaaggtgaggtggagtttccgaaaggattgcacggaatttcgcagcttatgtcgttttatttagactccctctcaatgcgtaccgggttggttagcgtcgattacgatcttctggcatctgccatcaagaaagcagttcaatctattgccggtaaaatggtcgaaactggcgaagatttcgtgcagcttatggaagccgataaaatcgtaaacgaggagttcactcatcttcccaaatcagccaataccacttggttaggggtgttgatccgctcgagcgtattaagacgtgaccctccccccttcaacggagaaaacgatccactgaatcctttgcaggatcgtatcaggttcgcttttcagcgttttcaagaccaccttatggcgcaagcgattgtttctaagcttattactggacggttgcatactgcttttgaacccggtggggaactactgttcttgttccacgacaatgatgtaagaaatggtttctcgtacaagcacgctgggcttttgggagcactttcaacgctctatccagagaagttttccgtcgagtttacaaataccattccagagggcctctccctctgggaagatagccacattctgcaagaagcctatgaaacaagctgcaagtggcgtcgcttggatgcatttacagctcgaagtattgaactgttcaacatgcttgatgaacgatggatcaataagttaggacttctaatcgaagtttcgatgactatcaatcatccttggaatgctatatttctgcataattggttattcgaccaagagatgccaaaacgcgacagctattggacaaattgggtcaactgggctagtagcgaagaaggcaaccaagttgaacgtctcatctcttgggcaaatggaacggcaaatgccgacaccagacatcttgaacttgcaggattagtgatagcttggttgcttacttcctcccgcaggacgacccgagatcaggcttcgaaggcattaacatcgattttcttacgtcaatcgtcaagcttccagtttgttttagagagactatcaaaatgcaatgatccataccttcttgaaagattgtattctgctgcattcggatcttgttgtattgatcaatccttagaccgtttaagctcctactcaagcgctgtatggaaggctgttttctcatatggcgagccaccggttgctctattaactagagactatgcgctaggtatcattgagcttgcaaaagccaagaactgcctaagtacggacgtagattttgagagatgtctaccgccttatagctcagttgttccagaatttgaactgacttctgaagcagttgaagagattgcgaacgcgagtggatcaaagacaatttttaattctgcgtcaagcgagtggggggattttggaaaatatattatcccgggtcgcgttaagacctttctcgcgacaccgctgacagatcctgctcctatttccgccgataaagttaaagagaaattcatcgaagaagttatctcgtccagtgtagaaagagttgaggcatttgatgccttcaatcaagttcgtgccaagccacgtgcatggctattaaggtatataacctctcaagaaacatcagaagatgaagtagataaatcagaaattgaagcaacagcagagctattggcttcacgtgtaaaaattgaagagctcttgtctgaatccgagaaattgcgatttatgaaagactatttgaatgaaggcggtgactattcacagtataagcacgtagatgttcagcagtgcaggctctgggtcaccaaacgagcttacgaacttggttggtccagcgaacttttcccgcgagatggttacggtacttatggttctaggcatgaaaatgactttgaaaggatcggaaaaaaatatcaatggatagcgctggacgaaattacagcacgattatctgacaatttctggtatttaaacgaatggcccgaggctccgctaatatatcaatattcttcccaagactttcgcagggatctcgaaccaacaatactgcccagtcatcctcttttttcagcacaagctaatgccaatgaggactggatgattgaaccaattatccgccttcctgaagtctcagaatctgaccttaaggcctggcccttcactgaagatccgactgaggactttcagaataatctgcaacgcattgacataaaagggaagaagtggcgtatcctctatgaatataattgtgaaaggcaaaattaccccgaacctcagcaaggtatgcataatgctcgttacgaagaattccgctttatctattgcgtatttttaaaatcaaatgatatagaaaattttgtcgcagatctaaaagaacatcggtcattggatgttacagaattacagcctcaagattatatagatggtcctttctttttggagacctattggagagatacttggaagtctgaacaatttacgagagaacttcgaaggtcctcaggagtaaagttttccaatgctgtcgcaaggtacaattgggaaagccatttagataaaacaatgcaagatggttttgaagtatatatgcctcaaagatggttagctgatggtttatctatcaagctttcaggaaatagctcgaggtcctggatcgatatcactggcaacgagataatcaaggttttagagccagttaaagatgcatctgcagttttaatatgtgaagaagcactgaaaaaatattgcgcgaaagaagcattaaccccattttggttattgattggagagcgaaacacatggccaggaggagataattaccaaagttgttggcgtagatctgaaggtgcctggtggcagcagaacgacgaatgggaacataccgcatggaatcatgatactaagtga

SEQ ID NO: 440257 - DNA, 1206 bp, Serratia marcescens
atggtgcctgaagggtggaaggtagttacattaggtgacgttatccatgagagtgcttttggaccaagattttccgctgaactttatagtgataatggaaatgttggaacgatacgcacgactgatttagataatgaaggtaatattaattataaaacaataccttatgcgaacctccctgactcttttgaggcacattacctgaagaataatgatctccttatcacgagatctggtacttgcggtattccttgtctttttgaaaagcaagataagcccataattgcaggggcattcttgattcgatttattttgaaggacaatgttcatcctaagtatatacattcacttctaaaatcagaacacctccagcgagatatacataatttatcttctggtggtgtgcagaaaaatctttccggtacaaacttaaagaagcttaagttctcactccccccatttttagaacaaaaaaaaatcgccagaatcctttgtacttgggataaggcgataaatactaccaaacaaatgctcgctaatagccagaggcaaaaaaaagggcttatgcaacagttgcttaccggcaagagacgtttcatgggttttaaagaggagtggagaaaaataaagttagcagaagttgctgatatgaacagcggcggaacgccaagctcttctattgacgagtattataacggaggcattccttgggtttctatcgcagatatgactagtagaggaaagtggatatcatctactgataaaacactttctcaaaaaggtttggaaaacagctcggcgaggctgtatccagaaaatacagttctttatgcaatgtatgcttctattggtgaatgtagcattgcgcgagtcccgctttgctcttcacaagcaattcttggtatacggcctaataaagaattgcactacgagtatttatattttttcctaagttttttgaaagataaagttaagcttcaagggcagcaaggtacacaatccaatctaaatgcaggaatggtacgtgatttcataatatttttgccatctattggagagcaaaaaataatatcatccttgcttaatcttgcagatcaggaaatagaaatcttaaagcaaaaactcaatcgcttagaacaagaaaaaaaagcccttatgcagcaactgctcaccggtaaacgccgagtaaagacggaggccgtatga

SEQ ID NO: 440258 - DNA, 579 bp, Serratia marcescens
atgccaacatctttaaaacagttaggccaaattgcaagcatccgttcaggccacactctaaggggagcaatcacgcctgaccctgaaggaaatgtgcgtctattacagattaaagacctcgatcaggactggcagttcgaccacaaagcactgcctactgttgtatgggaacagcgcattgctcccccatttcttgaacagggggagattgtcgttgcggccagagggaatcgtaatctggcagttgtctatcgtggtgaagttcctgtggttgctaccagccagttcctggttgttagcctcagaagacaagagcgtgaaattgtccctgaatacctgtgctggctgttaaaccatccgatgattcagcaagagtttcatcggagtggtaccaatattcagttaataactaaatcagcgctgctggatgtcgctatcccggttccgcctcttgaaactcaattacagcttatcgagctccaacgtgtatggcagaaagaagatgagcttatcaataagttacataaaaatcgtcatcagcttgagcttggtattttgcaaaaattacttaaggattaa

SEQ ID NO: 440259 - DNA, 141 bp, Serratia marcescens
atgtgggtcaacgaaaatcctaacaaattctacatcagaaaaatgatgcgattagatgccttaaagatagcactgtatatttttatacttttcaatttgttagtaggagttttccattttgatttagttgtctctaaatag

SEQ ID NO: 440260 - DNA, 900 bp, Serratia marcescens
  misc_feature (368)..(377): n is a, c, g, or t
  misc_feature (884)..(893): n is a, c, g, or t
atgtcaaatggactttttcgacgacaggtgaaaacatatcaacaaaaaggttggtatggtgatgttaatattgcgtcgccaatctcccatcaagtttgggcatttagtgcactattatgtttcgtgctaatcatttcctggttgtttatcggtaagtatactcggcgggaaaatgtacaaggagagcttgtgcctctgggggggatgattaggctagtagcaagagcgcctggcgacgtatcccggatttatgtcaaggagggaggttctgtcagtaaagggcagcctatcatagcgcttacaggtgaacggttctctgtctctgaaggaggcgttgtacaagcgacgcttgttgcattgcatgcagnnnnnnnnnntgcagagcgattgatacgtcttaaggatatagattcttttacgcaatcagcggaaggacaaataaatgatgtgaaaaaacaaataagcgcagtaaatgaacaaataaaacagaacgaagtggaattaagtatatatatcaatgaatctaaagagcaaagcgagctattaaaaaaagtagaatcactgcttagcaagggatatatatcaggtgttgagtaccaacaacgtcggacaattgcttcaaatgctcgagccacagtaacaaaacagctatctcaaaagaaaacattagagcaacaactttatgagttggaaggtaagctgagacagataccgcttacgatgaagaatcagataaatgatgcaaggagagaagtttcacgaattgagtctgaaattaatcgcagtgagcttgacaaagaaacaattattagggcgccagaaactggaacgatctcctctttattagtaagtaaagggcagtcggtaactaccgggcaatcaannnnnnnnnngcgatga

SEQ ID NO: 440261 - DNA, 1188 bp, Serratia marcescens
atgtctgaaaaaaaattagataaaaacattaaaactattagagctcgcggtcgtgatattatattgagatttattcatcagatcccgcgagcagataattgcaatgaaccgggggtaaacacgggtgcattattatatgcacttgtattgctacaatggggtagggttagccattgtcttgaaagtgtgagtaagtctgtcgagtacatagaaaagagtgcgcagctattcaatcagagaacgttggatttttcattataccgtggcatctctggttttggatggcttattcaacaatatggaaatgatgatattcttccgtggagaaacaaaacattagctgatatagacttggcactggtagatgatttaaatagtgaagtaaaatacaagatggaacttattaatggtttggcaggtgtcatggtgtatgccatcaccaggggaagttcgaacaactcatcaaaagatttgtggataaaaatagaagaggttgtcgatggatttttgtcagattggaatttaggtcttcaggatgaatttagctgtaatcttggtgtggctcatggtatcccgggactgttatccacgtgcagcatagcgatagggaaaggactgttatcgtcggagatagcaaagaaagtaggcatatcatacgacaatttatgggccatgcgcttacaacgcgacgggttaaatagtgcgaaattctcatattcaacgacatccacgactcaagctcgcttggcctggtgctatggcggattagggttggctgaaatgtttaaaaatgggatttgtttggatgaagtaaacataaaaagaatgaggtatttaattaacgatggaattgaacagtatttaaaaggggagcatggcataaatgatgcgtcactgtgtcatggctatgctggggttgcagtagtatttcaacgcatggctaaatatgatggaataaatcctgaggaacggagaaaactaattactatttcaagagagtcttatgctgcagcctttgattctgaagtgttttaccataatggtaagtcgacttttctacatgatgtgaagggaagtcttttcccgtccacttctttcctggaagggggggcggggatcgctcttgcagctactctactatggtccaatgaagataattactggttacaactattaagttattactag

SEQ ID NO: 440262 - DNA, 792 bp, Serratia marcescens
atgaaaaattcggtatataccagaagttttatgtcatatagaagcctgagcgatttaggaattaatggcaataccgtcactaggttagaatcggcggtgagcgatgctgctgaagctatgcataacatgagcaaaaaagactttgatctgtttttatcaagttatacttggtctgatatagaaaatagcttgaggcatcgactctcagaacattgggaactcagagtccggctgaggaaaaatgggctttctacagcattagctgagtacgctacttataaaaatatcagagattcgctgatcacatcactatctaattatgatttatttatcgaagcaataaaatctactaatgcggcctgtcgcgggcaaggttcatcgtgctttcgaaaacaaatggtcggattagaacccgataaaaatggtgcaaaagtggtttttggtccctgggagaaggtggctgagaggattagcgagttatatgttaatgtaattaaaaatgatggtttgatggcatcaaaagccatcattttttttgcaattattcttaatattcatccatttcgtgatggcaatggaagaacggcaaggatttggtttaatgcattattgagtgtttctttatggccaaaagataaatacctacctattcgaactatcatggatgcttctgctggagggttagaaatacgtttgcgtgaggctgaaatagtcggcaattggacacccttatttgattatttcacatctatttttgagcacttgccaagcgttgttaaatccagacagtaa

SEQ ID NO: 440263 - DNA, 291 bp, Serratia marcescens
atgattgattttgatgaaatggttaaaaatgaagatatggccgatgttattttatttctggtaagtcgtggagaaaacggtatagcgtatccatcaatggaccggttttttggccggcataaagctgctgagaagtatgaatcttataacatcaagctaatccatgagacaaaaaagcttgaggatagtggtcaggttttttcagctagaacttatggttctgggtgtaagaagggaccgaactggaaagaacccgcattcgtaaccgagaaaaaatacggtattgagtaa

SEQ ID NO: 440264 - DNA, 831 bp, Serratia marcescens
atgaatctaatccatcattataacaacaatataaacaatgaagacaaaaataaaaattttgtgtttgctgattttgttaatgagtacataattcaaatcgaaaagcttgtatatcctacatggtatactgcatgttttatgtctgaatgtacaaactcatctgtgtggggtaattatggtgataaccataccggggcatgtttaatattcaataccgagttaacagagaaaagcacgactctcagtttaaagggtattacggggtatagctttgggcaaaatgatcctgaaccaaagccatcatatggatttagaaaatatccattttatcaaataaactatatagatggattcggtgagatagattttttcagaatgatgggcagacttccaataccgaccttaaattcgacatggtatacgtttgataaaaatactagtatttgttctggaagaatgacggactcaatagatgaatggaggaataattattgggatgtgttttatcgcgacattacggtaaaaactaaggactgggaatatgaaaacgaatttagattaatactctccggctctcttatagatttgtccgatccaaaaaatagagttctaaactatgattttaaatctctaaaagggataatatttgggataaaaaccaaaaaagaagataaaataaaaataatgcgaatcattggtgcaaagtgtgcggagaatgacaggcatgattttaaatttcatcaagctttttattccccgataaaaaaatgcatagattactcagaaatgagccttatttcatttacacaaaaagttaatgaagctaattag

SEQ ID NO: 440265 - DNA, 798 bp, Serratia marcescens
gtgaacaagagaaaaaacattccagatagtatccaagcaaatgttatccataatagtgctgggcgttgtgtaatatgttatggcacccgtcaatttactgaccctcgatatccacatacgcaaatagcacacatagataaaaataacgaaaataatcaagaggataatttggcgttattatgtatcccatgccataatctctatgactcaactctccgacaaggcaaaaattacaagcaagaaaatattaagcgttggcgagacgaattatataatgatgtgattggtaaaaaattacctgcccctatgtataattccttgccttatgatgtagggagttctatttctcctcgcttctcagtcgatacaattgaaaagcttaaaaaatttattggtaaggctgcgctaataactactgcgctttgttcagacggaacttatctttctatttgcatcgagcattcgaaacttgattttattgaggataatttttcaaattggatagctaacgaattgcgttgtagaacaagggaggtggcaaatttacaggatgagtttgtttcaatactgtgggaactatcaaatagttatacttttttaggttccttaagggatgttcctcctcatataatacccgcaggatattataatgatattggacatgcaataaaagtttcagagtacgattgctgtggagatttatttaatgtaattgatgtcagagaccaatggatctctagtaagttgcaacgccttgctactttatttcatgagttagatgatatggctatggaatag

SEQ ID NO: 440266 - DNA, 1620 bp, Serratia marcescens
atggctcattttgcgcagtccccttatttcgttttacatcaactgacctgccaatttgctgacggcgaaacgctgttcggcccgctggatctcgctttcgatcggcagcgctgtggcctggtggggcgcaacggcgtcggcaaaacccagctgctgcgcctgatcgccgggttggatcggccgggtaacggtcacgtcgaatcccatgccgcattggcttacgttgcgcagcagccggagatcgccgcggacaccacgctggcccagctgttgggctatggcgaggtgtttgccgcgctggcgcgtctcgagcaggggcggccgctggcggacgatatcgatcgtctggaagggcgctgggatctcaacgatcgcctgcaaaacgccttcgccgccgccgggctgccggccttcgatccgttgcgatccgcaagttctctgagcggcggcgagcgaatgcgcgcggcgctgtgcggcgccttgatcggcgagggggattttctgctgctggacgaaccgaccaaccacctcgacagcgtcgggcgtgcctggctgtatcagcagctggatcagtggcgcggcgggctgctgatcgccagccatgaccggcagctgctggcgcgcatggagcgcattgtcgaactgacacccggtgcgctgcgcagctacggcggcaactacgatgactaccggcgccagcgcgacacggaacagcaggcggcgcgcgccgatctggagcatgcgcgcgaggagcgtcgccgcacccgcgctcgccagcagaaagagcacgacatgagccagcggcgctcggcgcaaacgctgcgcgtcgtcgatacgctgaatatcgcctcttttgagcgggtggcctacaagtcggcggcgaaggagagccttggcacgctgcgcaaacagcatcaggatcagcgcgacggcctcgatgcggcggtgcgcgaagcctatcagcgggtggaagaggagcagccggtgttgctggcgctgcccggcagcgaagtgagcgcgaacaagcaggtgctggtgctcgagcggctgcagctgccgttcgtcagcgcgccgccgctggatctgcgtatcgacggcccgatgcgcgtggcgttgaccggccccaacggctgtggcaagtccaccttgctgaagaccgttctcggtcagctgacggcgctttccggccattgtcattgcccgctgccgacggcctacctcgatcaaaccctgtcacagctcgacccgaatctgtcggtgatggagcatctggggctgcaggattcgccgctggcggaaggcgcgttgcgcacccggttggcgcagctgcagcttggcgcagatcgcatcgcgctgccgctgggctcgctgagcggcggtgaacggctcaaggcggcgttggcctgcgcgctgtggcgacagcaaccggcgcagctgctgttgctcgacgagccgaccaaccacctggatctggcgtcgtcgctggcgatcgaaactgcgctggcggatttccccggcgcgatgctggtggtgtcgcacgacgaagacttcctgcaggcgctgcggccgacgcaccgcctgcaccggcaggcggatggctggcggcttcaggcctggtaa

SEQ ID NO: 440267 - DNA, 801 bp, Serratia marcescens
atgaagaataaaaactaccataattcgctgctggaaggattaaatatatccgatgagtatattagcgtacttagcgcttctctaacggcaaacaccgaagtggtactgcataaacacgattggggtcagcttaatgtcatcaatattggcgttatggagatcaacattaacaatgaggaaaacctcatcgcgccctggcaatactcagtgtggatcccccctggcattctgcattccagctataacgagaaaaatacggactactgctcaatctcaattcccgctaaatattgccatcgtttatctgctacgccgtgcattattgaggtttcagaaataaaccgtgctatcattaacgacctcttagaccgtcatgtggacatcctggccaatgataaagatctcaatctttcgaatgttattatcgaccaactggaagagagctcgaaaaggctaacttacttgccgagcactacagataaatatataagcccgatcattgaacacctgcacaataacccaggtgataactgtactctgcagcagtggggtaaaaaagttttcgcctcagaaaaaacgctctccagaagatttaacgagaaattgcacatgccatttcgtgaatggcgttcgcgcctgcgttttattcactcactgtctttgttgaaaaccagcatgaccattcaagaaatcgcctggcaattgggatatggaaatccatcttcctttattatcatgtttgagaaaatatctggaaccacgcctgaccgatatcgtaaaaacctcttcattcaaccctag

SEQ ID NO: 440268 - DNA, 1764 bp, Serratia marcescens
atgaaaatatcactaagcgcgctgcgcatcatccatctcagtatcgccatatttattattcaactgtgctccttttactttagcatcgatggtgtcgccacctccatcatgagcgcaattgtcgtttcacagtcttttgtcggcaccctatatctcaaggccagaaaccgactgatcggcaccgggttggggatactgttctcttttattgctgcgttcctgtttccggaaaatccattcttttttattggcctctcgcttctgtgggtaacgaccatgaccgtgatatcgagctttgtcatgagcgaaaatgcctatatatatcagcttgccggatatacatacgcattcatatccatcccggtactggaagacccgcagagggcattccataacttaatttttcgcgctaccgatgtcacgatgggtatggggatactcgtgatcacttccctgcttatgtttatgcactacagcaacttcaatgtgaacgagaggatcctgtccatctatagaggcgcgctgctactgcacaaaaagatcgccagaaggcaagaggtatctctcgatgagcttaagtgtaatttcaataatgtctcggaactcatcgccaataaaaccattatcaaatatgagtccgcatttagcctgcgttccgcaaacctgtttgaccgcttttcctatgtggccctgatggcatttttctacgccaacacactgcgacactcgttgcgtattggcggtgaaatctccgtcaatattcagcgcgactacgacaacatcgtgacccaatcggtacgttataaaagagagtggggaaaatttcgcgataaggcaattgaccgacctcatcgctttccggagtacaagtcggtttcccaagcgttacagcgtggagtcagaaccttgttggtatccggattgctgtttacgttgtggtacctgtcagggtgggatggcgggagtgatatgaccattctgggcattgtctatatcgtcctgctctcatctttcccagcaccgttgagtgcagccaaagagatttttagcggtacgattcagggcgccattggcgcgtggttttatattcatttcatctatggttttagctatgcctatacgcagcctgccatttacttcttttctcaactgccatttatgatttacggcggcaagctgctggtcgagagtaagacattcttaatcggtatcaccttcctgacgcagttttacttctctgttcaaccttccaacggcgagccggtcagtttctccgtctttatgcagagttctctgggggggattgccggcgtcggcattgcaggtctggggctggtcatgctgtttccagagagcaaaaaaatcagaaatcgcgatctgataaaagatgcaataacgctcattctccaggactttaaaaaggaaagttttgacctccatgcccagctaaaaagcatgcacgataaactgcgcagaagtgcaatgttgatcgcgcacacccgtgatgactttagcgttttaaccgacctcatgtcgttgtacatcatcatgtgtcatgtaaaatttcacaggcttgaaaatacgccgcttgtaccgttaatccgtcagttgcagctgtgggccaaagacggcattcttcatgtggacccagactgtgcaggcgcgctacaggcacagatagcagaagagagtggtgagttaaaaagagtttccctgtgtattctctcaattatagatgagattggagccgtttatgaagaataa

SEQ ID NO: 440269 - DNA, 864 bp, Serratia marcescens
atgaaaaccaccagaaatatttacctgacattactgatatttgttctagggtgtatctctgtttacgctgtttattcgaaacaagtatacggtctatggacccgtgatggcagagtgaggagtgacgtcattgccttgtcgagcgaggtcaacggctatgtggaaaatgtctatgtgcatgataaccaacccgttaaaaaagggcagttgttatttgtcgttgatgaacgcgaatacaagatcatcgccgcagaaagttatcacgccatgcagtcaaaaaaggttgaagtcagtcgtctaaaaaataggtataaccgacgtaagggtctggccagagaggtcatcagccaagaagatgtagaaaacgccgcactgaactacgcaatggcactggcgaactattcatcagcggtagaggaaaaccgcaaagcggaacttgctctaagtaaaactagaatttatgcccccgccgatggttatattaccaacctgcttattcaccccggtgattatctgaatgcaggaaaaaacattgtctcaatcgtaaaaaaggactctttctatgtgtatgcctattttcaagaggatcagatccaaagaatcaagtctggtcagaaagcaaaaataatcctgctgaataaaaatagtcaatatgacgggagagtcgacagcatcgcccgcggcatcattgacagtagcgataaaagcagcaccggtgagttgcacgatatcaatccgacatttgagtgggttcgcctgccaatgaggatccccgtgcgcatcgttatcgatccccacgaaaaaggctacgaagcactgatctccggcatgacctgcacggtggaaatcgtcgaggaacaatga

SEQ ID NO: 440270 - DNA, 438 bp, Serratia marcescens
atgaaaatcacgcattcaggctttaaaaccggcgccgccacattattggcggcgatgctcgcgctggcattaacggggtgtgccaagagcaccgcccccagccaaaccgatccggtgaataaagaggttggcgatcttttcgccaaccttggcaacccaaaggcgccgggaaaagaggaattacattacctgtctcaggtgcaagcggagatccaacgccattttaaagacgccgccacttactcaggccaacgctgttcattgcgtatcacgctggcgccggacggcatgccagtcggtgttcgaactgaaggtggcgatccggatctttgccgtgccgccatgaaggcggttgccgatgcgcgtctgcctaagccgccaacgccagagatccataatgcgttccaaataatcacattggaatttcgcccgcagtga

SEQ ID NO: 440271 - DNA, 873 bp, Serratia marcescens; identical to SEQ ID NO: 312898

SEQ ID NO: 440272 - DNA, 432 bp, Serratia marcescens; identical to SEQ ID NO: 14471

SEQ ID NO: 440273 - DNA, 1353 bp, Serratia marcescens; identical to SEQ ID NO: 103805

SEQ ID NO: 440274 - DNA, 1650 bp, Serratia marcescens
atgaaaacagatttacagcataaactcagtcaggcgcttctcagaggaaatcctgtcagttccccgttatccgataatgcccacgtcaatccggtgtctgaaatgccgatgatattaacacttgagcaacttcagccaaatccggataacccacgtcagggcagaaacccgcgttatgaggaaatcaagagttccattcgggcacgcggactggacagtgtccctaaagtcaccaaagcaccggggagtgagttttatatcttcagtgacggcggaaatacgcgctatcagatcctctctgagttgtggcaggagacacaggatgagcgtttcttccgccttcatgtgttatttaaaccctggccggggcgtttgcagtgtttgattggccatctggcggagaatgaagtcagaggggagttaacgtttctggaaaaagcacaagggatttgtgtggcgcgttctctgtatgaggaaacgctggggaaaaaattatcactccgggcattcgctcagcgcatgacggcggacggattacctgtcagcatttcacacatcagtaagatggaagatactgtttctgttttattaccttatatgccccgtttactggaaaacgggctgggaagaccccaaattgagcaattattgtccgtgcgttcgacattaaaacgggtagcggattcgtttctttttcagtatgacgggcaggatccagcctgtgattttctgggatgttttgaaaggacatgcacagaaatagataaccatgatgtttttgattatgacgtgtttctggatgaactgattggccggctactgagggagtgttctgttgccggtgtggattatgaacgttgggtatttgaattgaaggtcaataaaggcagacgcagcacaaagccggaattgcctgcgccggtggagagtgagggtgatacaacaaccgcgcattcagaaaccgtacctaccggtatgacctccggtttttcggcagaggatttgttaacggagcccctatcttctggttcaggtcaggaggcttcagtatctcctgtcgttgaaaagaaaaaatcccgtccggttgtggagatccagacggatttatacggcggggcacctgtgctgagcggggataccgacgaggcggatattgagcctgtcgatggcggaagtctgtttgtcacgaataacccggagcatgtcacaccggtggaggcgcccgtctccggtcatgcggtgacggcactgacgtgtcaggatctctggccggtggcatcacatctggatgatattgaacatcttcagacgcaaatttaccgtactttgtttgaattagggaatgagctggatttatcttccgcctttatggcggcttccggggtgcattctccgggatttattacgttgtcagcacattcggtgctggggcgtgtgatgacggttttctcagaacctgatgagtcccatgatgatattccggatgccctcagagccctgctgacggggggatatcagcccggtatgtcgccggtattgaatgatacccagtttatgacatggatgaaactgatgtacttgttgcgttgtttgtatgccaaacaaagagatgttgatccggatgtgaatgatgaagaggaatgggaataa

SEQ ID NO: 440275 - DNA, 591 bp, Serratia marcescens; identical to SEQ ID NO: 14474

SEQ ID NO: 440276 - DNA, 1296 bp, Serratia marcescens; identical to SEQ ID NO: 103801

SEQ ID NO: 440277 - DNA, 561 bp, Serratia marcescens; identical to SEQ ID NO: 238140

SEQ ID NO: 440278 - DNA, 705 bp, Serratia marcescens; identical to SEQ ID NO: 14478

SEQ ID NO: 440279 - DNA, 537 bp, Serratia marcescens
atgaaaaaaagcggattgcttaccttatgcttttctttatggcttttgaccggatgctctgcacaggaaatcgcagaatggaatcagaaaatcagtgacctggggcatcaggtcagtcataccatgaatggtggtatgcagaaacgggaacaacgggagtatgacgtggttatccctgttgatattgatacagccgcagcccgtctgcgccgttattatggttttgaggatgtgaatgccaaaatccgtgctctgtgtcagtcaggtaaagaaagtgatcaatgggccgccacggctattgcagaagaaagccggggctgggaatgggaagtgacgccgggaagttattataaaatgggggcggatatgggaaaacataacccgccggcacatatcgtcatcgaactggaaaaaaatggttcgggaacacacatgtatatcacttacagcgcttcgtacagtgataccctgactccggagtttgttcaggaaatatttaaaaccgcgaatgacgttgcagccggaaaaaggaggtag

SEQ ID NO: 440280 - DNA, 2055 bp, Serratia marcescens; identical to SEQ ID NO: 238143

SEQ ID NO: 440281 - DNA, 468 bp, Serratia marcescens; identical to SEQ ID NO: 103796

SEQ ID NO: 440282 - DNA, 912 bp, Serratia marcescens
gtgactaaaaatacacaacaaccggtacatgatgcgttattcaagcagtttttaacgcatcctgagaatgcccgggattttttctcggtgcatttgccggccaacatcctgcctttgtgcgatttaagtacactgcgcctggagccggccagttttgtggagcgccgtttacgtcagctgcattcggatgtgctgtattccgtgcagatgacggaaggggaagggtatatctactgcctgatcgagcaccagtcaaaaccggatcggttaatgggttttcgtctgatgcattatgcgatgtcagcgatagcgcatcatctgaaaaaatcgccggcggataagaccctgccgttggtggtgccgtttctgttttatcagggcagtgtttgtccttatccgtacagcatgaactggctggacgggttcgccgatccggcgctggctcagcagctgtatacccggtcgtttccgttagtggatttgagtgtgctcagtgatgaggaaatcctgacacacaagggtattgccctgctggagctggttcagaaacatattcggacccgcgacggtttaatggcggtattgccgataatcgcgcagataattaactcgcaacacaatacggttgaccaggtgaggagtgtgatagaatatattgcctatcaggggtatattctggatgaatcccgctttttcagccaattgattgcactgtcaccggagtataaaacgatgctgacaacgattgcagaacaacttgagcaaaaaggtatcgaaaaaggtatcgaaaaaggtattggcctgggtgttgaaaaagtcgcccgctcattattacaacagggggttgatctgaacattattatgcaatgtaccggactgacccgggaaaagattgagtcattaaaacattaa

SEQ ID NO: 440283 - DNA, 201 bp, Serratia marcescens
atgaatattgcaacaatttgctctctctatgagttgcggcatgtcattactatggcaaaaaggatggaggaagatgatgtaacaagtaaaatcacactcaaagatgtggtgaaataccaggagcaatatcaaaacattctgaatacggctaatggacagtggcaaaatcatattcaaaattgcaaaagctctgaaaaatga

SEQ ID NO: 440284 - DNA, 633 bp, Serratia marcescens
atgatttttttctctaaggtactaacacttaataaaattcacattattgaaaatataattggtaatttagataatgggagctctaaatctgattattataatattggctatccggtaggcaatcctcctcttctacgcggatcaatagtgatagaactaaacgtagactttctcactgaaaatattgagttctttagcatgggaagcccagttgatactggtagtattaaatttggctttcttaagcctaactatgaccgtgagctttttcttaaaatggcgttctgcgattatgacaggttctattctctaacatcagacctatttaatcttcctgaagcgtcgctaaataatattaatgaccatgttgcctgccctacattaaagccaattctgactaagtattttccagaaacagtgatagattttatgtatgactcagaaagccctcatgcttggcttttcgaattttgtctagattcaggatatgcgatcaaagaaaagcatattaggaagctatttattcccaacacttaccaatctaaccctcagataagaaagttgagtaaattactcagaggtaagttggtgaaatacaatcctaaatatgggattgaagggaggatgtattga

SEQ ID NO: 440285 - DNA, 1359 bp, Serratia marcescens
atggctaagtataaggcgtatccggagtataaggattctggggttgagtggttgggggaggtccccagtcattgggaaatcttatctgcaaaacgtatgtttcaaagcgtgcgtacaccggcatataaaagtgacgagcagctcgcagcaagccaaaagtatggtgtaattccccagtccctaatgatgcaactaaacgattcaaaagtgatgcttgcattgaaagggacggaatcattcagacatgttgaaactaataattttgttataagtttacgtagctttgagggcggcattgaatacagccagtacactgggtgtgtatcgcctgcatatactgtactgaaaaattccaaacctatcagctatggttactatcgttatcttttgaaatgcacgccttttattgctgcattacagtcgtcgacagatagcttaagagatggaaaatcaattaactatgagcagttcagtgctctcagcctaccattacctctggttcgggaacaaaatgtaatcgctgctttcctcgatcacgaaaccgcaaaaatcgataacctgatcgagaagcaacagcaactgatcgaactgctgaaagaaaaaagtcaggcagtgattagccatgccgtcaccaaagggctaaaccctgatgtgccgatgaaagattctggtgttgaatggttgggggaggttcccgagcattggcgagtcagtcgagttaagaattttgcaaaaattgaaagtggacataccccaagtaaaactaaatcagagtattgggttaattgtatcatcccatgggtatcattgaatgactcaaagcagttaaaaaatgttgattatattgaggatactacctataaaataagtgagctagggatggctaattcatctgctcatttgttacctgctcgtgctgttgtttttacacgtgatgcatcaattggactcagtgctataacaacaaaacctatggcggtatcgcaacatctgattgcttggctttgtaatgagagatttgtcgtccctgagtttctgcttcttgtgttttatgcaatggaaaaagaatttgagcgttatactttcggcgctacgataaaaacaataggtatggataatgttagagggctgagatcagcatttccaccaattgatgaacagcataaattgatagaatgggcatttaagaaattagaaaaaattaaattttccattaataaagtagaagatataatttcccttctccaagaacgccgtaccgctcttatctccgctgccgtcaccggtaaaatcgacgtacgcgactgggttgcacctgatatgcaagatgctgaggagccgcaggagaccaccgcatga

SEQ ID NO: 440286 - DNA, 2085 bp, Serratia marcescens
atgataaaacagtctgaggctgaggttttttccgaattggaatcgttatgtacttcttgcgggtttattcatgctttagcatttttggcatgtgtaaataacgtaactttgtatgaggatgagttaagtcctaaggagatggagcatttatacggaaaagaacgactaataagaactgagatttctacaatttcaggtttgttattgaaggcgggcatagatactacttaccctggagaacttgagttaactagattggttaatgatgcaaatgcttatttaactaagctgcatagttcgatgtttaatgaaagcagtgagtctggaaatgtaattataaaagagagtgttttctattctgctgaatccgcatatgattttcaatacttggatatggcgagtgaaaagtatcaattggatgatgcatggtttagggagttcatggggttttcatgcgatgatttaatttcttttggtagatgtatagactctataataggtgagcaggttattgattttcttaatagtggcctgggggtgtattgcgaggatttattgaaggcttatgaagtttctattgaaaaaatatcgcatagaacagagttggatgagggtaaagtaaaagtaataatggatttgttttcatctgtggaaaacgccaataaaaattttatgggagttagtgacttcaacgagttcaatgcgagaccaataattttcaaggacgataaatattattgctttattccatattcattatctcagtcaatatatgaaacaccatttttttggatgaatgatgatagaaaatacaggcctcaagctgcagcgaatcgtggtcagtttgttgaggattacgtatacaataaaatggtcggtgtatttggtgataagaatgtatttaaaaatgttctcatagtgaataaacggaatgaaactcttggtgaggttgatgttttagtttctttctctgattcagccataatctatcaggccaaatcaaagaaactaacggtagaggcacgaaaagggaacagtagtgctattgaaaaagatttccaaggtgcggtacaagatgcgtatgatcaaggtttttcttgtgctcaattaattagatcagaagggaatttagttgatgtaaatttcaataaaattaaactaaaatcaccgatttctaaattttatataatccctattgtttctgaaaattaccctgcacttaactttcaagtcctccaatacctaaagtcaacaaaagatgatgttatataccctccatttataatggacgtttttttattggatgcactaactgaatttttgcgtaccccattgtattttctatcctatatagataggcgttcacgctatggtaataaagtgttttcttctcatgaactaacagtattatctttacatttgaaacaaagtttatggattgatgatgagtgcgatatgttaatgttacaagacgatatatgtgctgatctcgatatagctatgcttgtgcggagaaaaggtatcacaggaaaggacacgcctgatggaattttaacaatgcaccgagatggttttattaacaaactaattaaatcattggaaactgaaaatcataagctagcagtggatttagggttgcttattctttcattaagcagtgagggtattgaaagtataaaccaaatagctaaacaaactgtttccctttcctctatggataaaaaacaccatgacttttcgacagtaattggagatgttgggattaccgttcactctaattattatgataaaaatttcgcagaacgacaattacatacacattgtgagaagcgtaaatacatcacaaaatttaaaaaatggattggtatacatgtttcacctgagacatatagagtgaactatggtgttatgctggattttgattggaactattctgatgaaatggataagtcgataaagcccactaatattaaaaatacaagggtcaatgtaggaggtgttatgacctcaataaagaaacctgggcgtaataaacaatgcttttgcggaagcggaaagaaatttaaaaaatgttgtttgttataa

SEQ ID NO: 440287 - DNA, 696 bp, Serratia marcescens
atggaaacgaccaagaaaataattttggaaggtttagggcggcatgatttaagcgaactacccggccgtccttatgattgttccttcgaattgttagcagctaaaccagcaagaaagcgtttaatcatggtcggattcaacggctcatcagcagatggcggttttacaaatactgaagcagtgataaacggttttaattcaccttgtttctctaatgttcaggcaggtactgaaggtgaatggggtatcaaacatttggcaaaccgtctgcaatccgtccctgaacagctaggctttagatggcaagataccgtctacaccaatgcgctactcatgtgttctaaggatgccctgtcgctcaaaaaaagtgctcaagagagcgcaattggcagtttggagcggctgattgaaaaatcgatgggtttctttgaaaacattaccgtccccctatgcaaacctgaactaattattgcttatagtaacggaatgaactctcactcagcagctcgcttgcttttaaaagcattcggcgatggcgatgagcccgagtacataagccaagacctctactactccacgttctgctttacggcacggtttaagcaattcgatgtgcctgtggttggtatccgccacatgtcgcgcttcaaacctgatgtgcagctcatcaaaaaagcatgggataaaaggcgctaa

SEQ ID NO: 440288 - DNA, 849 bp, Serratia marcescens
gtggatagcgcacagaaaaaagaagagatagcattaaaaatcctacgtgaattattgcaatatcgacgtcgcctcatcgccgacgatgcttctctggctgaagaggagcggcaggtcactcaggtgcaattgccacgcattcgggcattcattgaaaacgaccagcgcattcaactctattacccgccgggcgcgcatatcgttatctgttccgacggccacgtgttcggcgatctgatccgcgtcagcgacgaagcgatcaaccattatcaacgtgagattgaaagcctgctgcatgaagtgggcgcaacccacctgagcgtgttcaaccttggcgatgtcaaaggcctggcggagcataccgatgactacgatctgctgcgtcggctgttggtggacggttatgccgaatcggaagaggcgatcaagcgtcagctgatgcaggacgagcagggattaatgctgtatcgcgccatcacgcgcttcttgtatgaagacagcctcctgccgggctacagcggttccaacgccgcgctgcaaaaagacgccaaacggcgcgcctgcggcgttatccagcgcagctgggcctggggcaacctgctggcccagcatttcccggcggcgatccgcctgtcgattcacccgcagccggccgacagcctgaagataggcatccacatgatgccgaccaaagacgactggctgacgccgtggcatggcgtggcggccaacgtgaacggccagttcgtgctgatgaagcgtaaagacgcgcagagcctggacggcgagttggttgagatccgcggcacgccgagccattacctgatcgaacaaccgcagatggcctga

SEQ ID NO: 440289 - DNA, 1731 bp, Serratia marcescens
atggagaggatctttcgagctaggcccttcaaaacgcgaaatgcagatgaatatgacattagcactcttttgaacttgtttgttaaccctttgaatgggttgtcaacaccctttgattatgaaaattctataataaaagggcgaatgggttctgggaaaacaatgtatttaagagcaaaccaagccttttacctttcatcactattacctaccttaatggatggagagggggaggttattttaccaatattgattaagttgaatgattttcagcacattacagaacctgatgagatttacaggcaagtaataattaaaatagttgaggaattgtcatcaatacatctacattttgagggggcgaaaaatctaacagatatacatggaaacctgaagaaaataccgaggaatttaattactagacataaaaactctcagatgatgctgaaaatagcagcattgagtagtgatgaatacctgcagcgggttagcactgaccgtgagaataaatcaagtgtaaagtttaaatttatagaagcatcgggcaattggaaaaagaaccatttcgaggaatttaagaaaaaggttagcccagggataaaggatattgaggagtgctatcgttatttattgaaggatagtgatggtaaaatactcctgcttatagatgaggccggagctttagataaatccttctttaagggggggcaggagaaatctgctttgtttgaaacccttatgaaccaattccgcacgtcttcatttatcagaaccaaagtggctgtttatcctgattcatattcagatatgcttacggaaacacgttatggtgatgttgttatgcttgaggaccatgtcatcgacgaagttggatactcaaggttgcgctcaaaatcgattaatataattaataattatatcaatcctacaaatgatgaaagtttgccatttagagcaagtgacgtttttgaaataaatgatgatgatgaatccatatatggtgatgccttggagttgattctgtatgcatcccatgggaacatgaggaggttaattcatcttttcgacttaagtatggacatggctttttcagaaaactcatatgctaagcgtgtagagaaaaaaaacgtaatagatgcattaaaaaaacatgctatcaataatgaaagtacattgagtgggcaggagagagagtttttagagaacctggtttctgtttgtcggagtcgttctgcttataaattttcgtttccaaatgtccctttgtataaatacacgagccgctcaaaggaatataacattataaatattgacgaagctggctccggtaggaaagctactgtttattcttttgatttttcattctgtgtattaaaggatatacctactcataggatgaataatgacgaaagggtctataaagaacgatcgggagacaaagggcgatggtcgtcaaggaaagcagaaattagtcaagggatgattgagcaagcatctttacccggaaaaattgaaggaaaaattatttattatctccaggacaaggggaatggatttgtcgttcctgatgatgagtataaatcaattgctggtgagcgaattttctttcaatgccaaagcattattgatgaagataaagataaaaccatacatgttgggaaaagactaagattctaccctgcggagatcgaagcagggactgtctttgcgtatttaattgaagttttgtga

SEQ ID NO: 440290 - DNA, 909 bp, Serratia marcescens; identical to SEQ ID NO: 103764

SEQ ID NO: 440291 - DNA, 612 bp, Serratia marcescens; identical to SEQ ID NO: 14549

SEQ ID NO: 440292 - DNA, 363 bp, Serratia marcescens; identical to SEQ ID NO: 14547

SEQ ID NO: 440293 - DNA, 318 bp, Serratia marcescens; identical to SEQ ID NO: 103760

SEQ ID NO: 440294 - DNA, 423 bp, Serratia marcescens
atgatttatggcattacccgcggactgttctttgtggccgatcacgtctgtcgctattcccggagttgggaatggctgatgtggctggttgaggaagcccggacactgcgaaatgttgaggctgatttgaaactggctgaaaggtatgccggtgagcaaaatcgccctcattccatttcgctgatgaagtgtacgctttatgatgccggatttgcttacggcagattattactgtggcgtgcggatggtctgatgagaccctggccggcatgtctgcttcgccgtttaccggatatcggtcagcggattgatgcagtgatctggcagaaaggctgtgaagccggcttggatgagaccgtcagtgaatggatggcaatggagatggctgatgaataccttgtcggtatcgaactgagcgactga

SEQ ID NO: 440295 - DNA, 357 bp, Serratia marcescens; identical to SEQ ID NO: 103758

SEQ ID NO: 440296 - DNA, 513 bp, Serratia marcescens; identical to SEQ ID NO: 103757

SEQ ID NO: 440297 - DNA, 648 bp, Serratia marcescens; identical to SEQ ID NO: 103756

SEQ ID NO: 440298 - DNA, 975 bp, Serratia marcescens; identical to SEQ ID NO: 298579

SEQ ID NO: 440299 - DNA, 300 bp, Serratia marcescens; identical to SEQ ID NO: 103754

SEQ ID NO: 440300 - DNA, 1002 bp, Serratia marcescens; identical to SEQ ID NO: 238083

SEQ ID NO: 440301 - DNA, 327 bp, Serratia marcescens; identical to SEQ ID NO: 103752

SEQ ID NO: 440302 - DNA, 1593 bp, Serratia marcescens; identical to SEQ ID NO: 279282

SEQ ID NO: 440303 - DNA, 1071 bp, Serratia marcescens; identical to SEQ ID NO: 14536

SEQ ID NO: 440304 - DNA, 351 bp, Serratia marcescens
atgaacagcgccaaatatatcggcatgaaccgaggctccggccgcacgctgacggacatcgagcatattcgccagtccgtggcggacatcctgatcacgccgcagggttcgcgcccgatgcgccgggcttatggctcgttgctctctgagctgctcgaccagccgcagaacgacgcgctgcgcctgcagatcatggccgcctgttacagcgcgattttggcgtgggagccgcgcgttaagctgaccggcatcgcctttaataccacttttgacggcaagatggtgatcgacatcaccggcacccgcaccgatgcccccggcgcgctgtcgctgtctgttcctgtgagctga

SEQ ID NO: 440305 - DNA, 630 bp, Serratia marcescens
atgaacaatcaacacgacattttgcgcctgctgcgcaacctgatccgcatcggcactgtgagcaccgttgaccttgataacggtctgtgccgcgttgaaaccggcggcaatcttaccgactggcttaattggctatctttccgcgccgggcgtacccgcagctggtcggcgccttccgtaggcgagcaggtgctgctctttgcgctaggcggcgaactcgataccgcttttgtgctgtgtggcgttttctccgatgacttcccggccccgtctgcgtcggcggatgcgctgcatatcgcgtttccggatggcgcagtcatcgagtatgaaccgaaaaccggcgcgctgagcgtgtccggtattaaaactgccgatgtgcaggcgtcggagtccatcaccgccagcaccaaagtggtgatcgttacggctgacaaaatcacgctcgatgcgccggaggtggtctgcaccaacaaactcaccaccggcacgctggaagtgaaaaaaggcggggcgatgcgcgggaacattgagcacagcggcggctcgttctcatccaacggcgttgttgttgatacgcacgcccacggcggcgtccagaccggcggcgggaaaacggggaaaccaacatga

SEQ ID NO: 440306 - DNA, 447 bp, Serratia marcescens
atgagcgagcttaacccctttgacacccggctggccgggctgattgccaagctgtcgccgcagtcgcgaaagtcgctggccgttgccgtgtcaaagcgcctgcgcgccggtcaacagcaacatatcaagcgccagcaggcgccggacggcacaccctacgcgccgcgcaaaacacggcttcgcagcaaaaagcgcctgcgcgatcgggcgatgttctccaggctgcgcacggcccgttatctgaaagcccagggcaacagcgatgcggccgtggtcgagtttgtcgggcgggttcagcgtatggtcaatgtgcatcattttggcctgcacgatcggcctacgccacacagcgaggcggtaaaatatgaggcccgcccgttgctgggattcagttcgggagatattaaaatgatagaggatgctattttagaacaagtggccccctaa

SEQ ID NO: 440307 - DNA, 429 bp, Serratia marcescens
atgagccgcgcgatcgtgtggtttctggtgctggcgctggtcgtcgccggttggatgaaatggcaggttgtcatgttgggtgaacggctggaaagcgcccggcaggagaacggccggatagcggcggcgctgaccgatacccgcgcggcgatcgacacgttgcagacggcggccggtcggctggcgcaggaagaggaaaagttaaggggcgacctaaacgcagcgcaccggctggcgctgaagcgcgagcagaaaatacagaggttactcaatgaaaatcagcaattacgggactggtttaacactgctttgcctgctgacgttgcccggctgcaccagcgccccggcttcaccgacgccgcggattatctacgttggatgtccgaaagtgagtccgtgccaaataccggccagccgcccggcaactaa

SEQ ID NO: 440308 - DNA, 513 bp, Serratia marcescens
atgaactcaatcgctaaacgctgcagcgtggccgccgtgctggcgttggcggtgctgttgccgcaattcagcgcgctgcagatctctgaggccgggttgcgcctgctggccgatttcgagggctgccgtttatccccttaccagtgtcaggcgggtgtctggacaagcggcatcggccacacggccggggtaaagcccgacgcggtgatcagcgagcgccaagctgccgttaacctcgtcgccgacgtgtatcgcgtggagcgcggcatagggcgctgtatgcctgtcacgatgccgcagccggtttatgacgcggtggtgtcctttgcctttaacgtcggtgtcacggccgcctgcggctctacgctggccggtttcatcaagcggcaggactggcgcagcgcctgcctgcagttgccgcgctgggtgttcgtcaacggcatcaaatcgccggggctggaacggcgccgggcggcggagctggcccactgcctgagcgggggcgcgccatga

SEQ ID NO: 440309 - DNA, 684 bp, Serratia marcescens
atgcacaagttgactagatgtgatgctccgttagtacttaatgaatttgatcataatatccataattgggatgatcatttcaaatcaaggcacaaggcattagtatgggaaaaaatttttgaaatgcagggacattactgtgcatactgcgagtgtaagttggattcatcagatcctgagaaaactcacttggaacacttcaggcaaaaaggtaaggcggaatataggcatctgacatttgaatggacgaatatatttggttcgtgttgcaatggagagcgttgcggtcgccacaaagataaaagcaatatatcatctgaaaatatagtaaagatggatgaggaagatccggaggattattttatctttttgtcaacgggggcggtcggtattagagatgggttgtctcctgtagaggcggagcgagctgagaatacattgcgagcattcaatttaaatccaaggcgaggtggtgtgaagaatgaaagagagcgtgttataaaaacgcacgattatatgattaaagaaatgatagggctaatgaacgaactgaaagatgatgggggtttagagtttttaattgaaattagggattcctacattgaaagggtcaccacagagaaagggccatttgttaccgcgattaagcacgtccttatatctaattgggaacgggcagtgtaa

SEQ ID NO: 440310 - DNA, 714 bp, Serratia marcescens
atgctcaacggcttattaatggagttgtcgattcttttcccaaatttagataagataaatttcaagtttgttaaggactcgttagtcgtaagctttatcaaaaatgggattgagttatcaccaagtcaactgtcgcaaggtgaaaaatcattattgaccctcattggtgatatcgctaagagattagtgcttttgaacccatctctagataaccctctatgtggaaaagggattgtactgattgatgagattgatttgcatcttcatccgggttggcaacaaataattatagaaaacttaattgaaactttccctaatatccagtttgttatatctacacatagtcctcaagtgctaagtacagttcctaaaaagtgcatcagaatattaaaggaggagtgcaacgagttctcagggatgaaagaactcgtagctgtctctccaaaattccaaactaaaggtgtaatgagtgctgatgtattatcgataattatgggaatagacccaaccccatcggttgatgaagctgactggctatatgagtacaaggagttaattgaacttggaaagtatcaaacactgcgtggacttgaactaaaaacaatgctgctaaatcactttggagaggatcacccgctaattatggaatgcaataatataattgctttgcaagaaataaaaaataagattgcagaaaggaaaggtaagatatag

SEQ ID NO: 440311 - DNA, 603 bp, Serratia marcescens
  misc_feature (576)..(585): n is a, c, g, or t
atgaacgataataagggcttgaatgcagtttcaagaaatgcatcaaaaggggatgttcagtctttgtatcagttgtatataaatgagtacaatgataacaaagaaaataaaacatacacataccctatactgaacgagatatcttcaaaagcaaatgatggtgagtttatcttaaaggaggttgtattcaataattttagaggtttgagtaatttgacgttaagattggatgatcaaattacggtaattattggtaataatggtgtaggtaagtcaagtattcttgatggtatctccataacgcttagttggttgaagtcaaatattttaagagaagataggccagggagggatataaaagagttagatataaataataatgcgaatttatcatccattacctccagaattagctttgctaatagtgccttcccttttatgattgctaactcaaagcaaggtagtaaagaaagaataactaatgaccttctacatgtaaaaacattggctgggatctataggcatagcaatgagtttaaccagcaaattaatttgcccttattatcatattattcnnnnnnnnnnatattattctatacatag

SEQ ID NO: 440312 - DNA, 930 bp, Serratia marcescens
atgacaattcgaaaggaattaagtaaaaaactagagttgccagaactacagattgtactattttgtattaatgctagcaaaaagtatagggtttactctattcccaaaagaaaagttggccgaagaattatagcccaacctacaaaagaattaaaaaaatatcaaagagtactagtcgagatattgcagccctatctaaaggttcacgagtgtgcatacgcatacaaaactgatattagtataaaagataatgcagaacagcatcgaagaaacacatatatcttaaaaatggattttcagaatttttttaataagataaaacctgagctttttttttctaaagttgatagtgtatctataaaattgagtcgcgaggaccgctctttgcttatggatattcttttttggaagccaggctcaaaaaggagtactgcattagtactaagcgttggtgcacccagctctccttttatatctaattttataatgtttgatttcgataaggcaatttttgagtactgtaaaaacatcggagttacttatacacgttacgctgatgatttgacattttcaacaaataaaaaagatgttttgtttggagttccagtggttgttaaagctgcactcagtgccttagcgccaggaatgataattaatgattccaaaacggttttttcctccaaagcgcataatagacatgttacaggggtaactatttctaatgaaggagagttgtcacttggaagatcaaaaaagagatatatatcatctctgattcataagtatagtttaggaacgctgccagatagtgaaatagattatctgagaggcttactgtcctacgcacaacacattgaaccaatgtttctaaccagacttaaaaacaagtacggtgagaagttaattaatcatataagaagcggggcctag

SEQ ID NO: 440313 - DNA, 744 bp, Serratia marcescens
atgaggcacagcgctcttatcattatcatgttgctgtcgatgctcatgatgcagggatgcgaacaaggtagggatctacagccacaagattattttgaagggacgcagctggacatcgccaaaactatctacgaaggcgagagacagaagctgaatgcgatgttaccgacggtgagcaaagaaacgttaaatcggccggctaaggcggatatgacgttgttattctgggcgataaataacgctatctttgacaagaacacgccagagcggctcaagatcattacggatttggtcaaggtgggggcagatccactgcagccaaggccggaagggagaagtagcccggctgagtatgtcatgaaagcggataaaggcgtctggatacaggctatgcttgaaggcggactatcgcctaatgcaagggatgaaataaacaatcagccaataattttcaaaagttttcaagcggttaatacagagacattgagtactctaatagcttacaaagctgatgttaatatcaaaggcgctatgaaccgaatgccattaattaatgcgctgtataacagttgcccagaacacattgaggttctgttggctcatggagctaatccattagccaaagatgattttaatgacagcttcctctcgctgatttctgcggaaatagctaaaggggataagagcaatgcgtatataaagaaactaattaaaattaaagaaaaaataaaacaggtgaattag

SEQ ID NO: 440314 - DNA, 1515 bp, Serratia marcescens; identical to SEQ ID NO: 279291

SEQ ID NO: 440315 - DNA, 339 bp, Serratia marcescens; identical to SEQ ID NO: 103768

SEQ ID NO: 440316 - DNA, 1443 bp, Serratia marcescens; identical to SEQ ID NO: 190869

SEQ ID NO: 440317 - DNA, 975 bp, Serratia marcescens; identical to SEQ ID NO: 279294

SEQ ID NO: 440318 - DNA, 441 bp, Serratia marcescens; identical to SEQ ID NO: 103771

SEQ ID NO: 440319 - DNA, 2076 bp, Serratia marcescens; identical to SEQ ID NO: 279296

SEQ ID NO: 440320 - DNA, 2868 bp, Serratia marcescens; identical to SEQ ID NO: 190873

SEQ ID NO: 440321 - DNA, 438 bp, Serratia marcescens; identical to SEQ ID NO: 14572

SEQ ID NO: 440322 - DNA, 486 bp, Serratia marcescens; identical to SEQ ID NO: 279299

SEQ ID NO: 440323 - DNA, 1530 bp, Serratia marcescens; identical to SEQ ID NO: 103776

SEQ ID NO: 440324 - DNA, 897 bp, Serratia marcescens; identical to SEQ ID NO: 190877

SEQ ID NO: 440325 - DNA, 645 bp, Serratia marcescens; identical to SEQ ID NO: 103778

SEQ ID NO: 440326 - DNA, 417 bp, Serratia marcescens; identical to SEQ ID NO: 14567

SEQ ID NO: 440327 - DNA, 369 bp, Serratia marcescens; identical to SEQ ID NO: 103780

SEQ ID NO: 440328 - DNA, 327 bp, Serratia marcescens; identical to SEQ ID NO: 14564

SEQ ID NO: 440329 - DNA, 609 bp, Serratia marcescens; identical to SEQ ID NO: 14563

SEQ ID NO: 440330 - DNA, 750 bp, Serratia marcescens; identical to SEQ ID NO: 14562

SEQ ID NO: 440331 - DNA, 2148 bp, Serratia marcescens; identical to SEQ ID NO: 103785

SEQ ID NO: 440332 - DNA, 555 bp, Serratia marcescens; identical to SEQ ID NO: 103787

SEQ ID NO: 440333 - DNA, 639 bp, Serratia marcescens; identical to SEQ ID NO: 14558

SEQ ID NO: 440334 - DNA, 735 bp, Serratia marcescens; identical to SEQ ID NO: 103789
